United States Patent Application Publication US 2007/0061916 A1 - sequence listing, part 7

SEQ ID NO: 24251 - DNA, 334 bp, Gossypium hirsutum
  unsure (1)..(334): unsure at all n locations
  Clone ID: uC-gsflnu33B062a11b1
gaaaaagttgcaggttacggtgggttaattacctgcaccctggcctcaaaacgggaaagatgactccccatgaagagcgcctcgtccttgaacttcatgccaaatggggaaacaggcggtcgagaattgctcgaaaattaccagggcgtactgacaacgagattaagaactattggagaacccatatgagaaaaacggctcaagaaaagaaacgggccatccccatctcaccatatctatgatcttcaaactgacagtcatcatcatcaactgttactgcagncgattccttgccctcctctggtactggaaatattgtaagctttttatgaca

SEQ ID NO: 24252 - DNA, 633 bp, Gossypium hirsutum
  Clone ID: GOSHI-09MAY01-C118366_1
tcgttcacgcgtccgcccacgcgtccgttttgcctcgctgtagcaccggtctatggccaatactactccaaaactatcaaggcaggtcctcgggtggaaaagatgacccgacttcgcttcttctaccacgatattcccgttggataagatcctactacattcctgatagctcaggccaacatcacccggaaattctttgccccatccccatacggaagcttgtattcaatggatgatcccctcactctagggcctaaccgaacatccaagatggttggaaatgcccaagggctctacttagcattaagtcgagaccctaccaagttctctgcggttttttacgctgattttgcgtttaccactggcaagttcaaggggagctcctttagcttgttctcacgatatcccctcacagattttgtgcctggccctaacataattcgtgaaatggcaatagtgggagggacaggtgcgtctaggatggccaaagggtttgcactatttcgggccagttcatctagcgccaagactggagatgctagtcttaaggttgatgttactttgtaccactactaaacccaattgtaaaatattgaaatttataataaaatcaataaagtggctcaagtgatt

SEQ ID NO: 24253 - DNA, 544 bp, Gossypium hirsutum
  Clone ID: uC-gsflnu33B026h10b1
ttgtgatggaaagtggtgatccggttcgaaccattgaaaggctgaaaacttccttaaaagctgaaagaaaggcattgagtgctttatatgcagagcttgaagaagagaggagtgcctctgcaattgctgcaaatcagacaatggccatgataacacggcttcaagaggagaaggcggcaatgcaaatggaagctttgcagtaccagaggatgatggaagaacagtctgaatatgaccaagaggcccttcaactactaaatgagcttatgatcaaacgagagaaggagaaggaagaactcgagaaagaattggaagtataccgaaagaaggttctctattatgaggccaaagaaaagacgaggataatgaggataagcaaagatggaagcttgtgaagcgggaaatcttcggctgcttgtagctatgcggaggatagcgacgagctatccatagacctgaatcgtgaagccaaggatgaagatagcagcttctctggcaaccaaaaaagcagcagtgatgcagttggtactgggaaaaatggcac

SEQ ID NO: 24254 - DNA, 277 bp, Gossypium hirsutum
  Clone ID: uC-gsflnu33B026h04b1
cgctgttatgggcttctaatccccaggacaaacgggagatttgcttaaaacttccttcaactccccccattgggcatgaggtgctttacatgcgaagcctgaagaatagaggagctgccctgatttgttgcaaatcaaacaatgggcatgacaacatcggctttaacgaggcgatggcggcaatgcaaatggaagctttgcagtaccagatgatgatggaaggacagtgtgtatacgaccaagaggccccttaactactaaatgagcttatgatcaa

SEQ ID NO: 24255 - DNA, 399 bp, Gossypium hirsutum
  Clone ID: uC-gsflnu33B085b12b1
ttccacgcgtccgtgtgtttaaggtattatttgttgtaacttgaaagcacctcgccaatcatatttgtatgtgattttttttatatcactaggaatttaagatttcttaagccaaaaaaaaaataaaaaaaaaaaaaaaaaaaaaaaaaaaaaaaaaaaaaaaaaaaaaaaaaaacaaaaaaaaaaaaaaaaaaaacaaaaatacaaaaaaaaaaaaaaaaaacaaaagaggggggggccgttttaaaggacccaagttaccatccgctggcctgcaacaattaactccttttatagggacccctaaattaaacgcatggcccgggatttaacacatctgtgatggggaaaccccgggtgctccccactttaatcgcgtttaagacaacccccttttgg

SEQ ID NO: 24256 - DNA, 403 bp, Gossypium hirsutum
  Clone ID: uC-gsflnu33B079b12b1
tccacgcgtccgtgtgtttaaggtattatttgttgtaacttgaaagcacctcgccaatcatatttgtatgtgattttttttatatcactaggaatttaagatttcttaagccaaaaaaaaaaaaaaaaaaaaaaaaaaaaaaaaaaaaaaaaaaaaaaaaaaaaaaaaaaaaaaaaaaaaaaaaaaaaaaaaaaaaaaaaaaaaaaaaaaaaaaaaaaaaaaaaaaaaggggggggcctttttagaggttccaagttaccttcccggggcttgaaacgcaataatttttttatggggcccccaaatttaatttcatggcccgcggtttaaaaacgtgggaaggggaaaaaccctggggtacccaaattaaatcgctttgaaaaaaatcccttttttgcaagtg

SEQ ID NO: 24257 - DNA, 207 bp, Gossypium hirsutum
  Clone ID: GOSHI-09MAY01-C119576_1
gtcatatttaggaagtacaagcaaggttatacgtgaggtgtaggtggtttgactgcagtttctggttctgtgactttgtataactaagcagatgttttacttgtttgcatgtggttgaaaatttgtgttggtactgaatgttttcattacagggtgtagacatttgtgtaagagcagtgatgagatgtgtccaatattttactgttt

SEQ ID NO: 24258 - DNA, 814 bp, Gossypium hirsutum
  Clone ID: GOSHI-09MAY01-C119646_1
ggaaaacagacttggaggacgaattacatagaatacgtgtgtcagagatggacgctgtttcaaaagttgcattattagagggtagagtcgaagagagggagaaagagatcgagtcctgttaaaaacaaacaatgagcagagggccagtacagttaaagtacttcaagaccttctggactctgaacgtgcagcacatgcagacgctaataacagagctgaagccctttctcttcagctacaagctgcacaggcgaaacttgatcaattgcagcaagagttgacttctgttcgtctaaacgaaactgcattggatagtaagctaaaagctgcttctcacggaaagcgattgaggacagatgatgaagtgggagtcggatctgtgcaagatatagacacgagtgaccgatttttaagagcaaataagaagtccaagagcacaactagccccctcaggtattcaccgtcagaagatggcgggtcagtattcaaagctgatgatgacaaccagaaccaacaaaacaatcaagaggattatacgaagttcactgtacaaaaacttaaacaggaactcacgaaacacaattttggcgcagagctgcttgcgctgaggaatccgaacaagaaagaaatccttgctctgtatgaaaaatgtgtactgcagaaatcatgatagttttggttttcagttgataatatgactttgtatatggaggtacacctgtaatctacctttagtttgatagagtcgagttgatgagccgagccgagctgagctaggtaaaattctaagctctctttctttataattgattaa

SEQ ID NO: 24259 - DNA, 573 bp, Gossypium hirsutum
  Clone ID: GOSHI-09MAY01-C114586_1
cccacgcttccggtgtcatagatcaccttttttggctgatgatgataggcacatgggctgctgcactgaaataccaagaaggaaaggaaatggagagtaataaacaaattggtacttcttcctcattcactgctcacctatttggttccaaggaatcatcaccatcgtcaaaagggattttcagttccattttcccacctccatcaatggtgggtgggaggaactcttcaagctctcaggtgttagaatcatggccaaaacagcctttagaaggatcagactggagacatggaatgcaagttgcagagagtgcaacatataccaaagccaacagagacagtaattctgtttttcaggaagaaaggatggaaccattccatttaagttcatctctttactatggaggccgagacatatatggtcattcttcaagtacacaagcttctacatcatatcctattttcaagaaagatggagaagatgaccctaatggaagcaattcacatgatgcttctacaggaaactgggtggagggttcggatattattagagctatatagccttctaatgcat

SEQ ID NO: 24260 - DNA, 359 bp, Gossypium hirsutum
  Clone ID: GOSHI-09MAY01-C114546_1
tttatatgaaactatgtatgaataaaatctcctgctttaggcggcatcaagaaatagaggccatcttagccgcattatctatggtccgtgaaaataggtttctctttagatccaattaggtaccgtaccaaaatatcattggtaaaatgaaagtagtaagtactgtcctggtgaggaacgatgtgtgcttttgtatgttgcatgaaagagttagcttgcaaataaataaacacaagtgtgatgctttctagctcattacgcaaaggcacttgcggaaggcatccttggtgattttaatcccggggggagacttccaatgacttggaatcccgaatcatttaccaagattgcaggggggg

SEQ ID NO: 24261 - DNA, 437 bp, Gossypium hirsutum
  Clone ID: GOSHI-09MAY01-C114496_1
atcctaatctgcaagcacgcgataccaacctaacgggttgttgtataggcaacaacaaacccgtcaggaatcctcattgctttctcttggattgagcttgtacggtaggcgaaccatggcaatcccaacatcatcatcaacaacaacaactagggctaatgacacctcaagcccatcaaaaacgtttgagatttatgatcatgttgatacttcacttcatctctagtagggtaaagaaaagaggttgtcaatactgggtttcgtttttcgaacccaaattcgatgttatttcctacatcaactaattaagttccattttctctttttttggggggggggaattgagaatgtaaaattaatagaattatatcaaaatcactaattcacttcaaaaaaaaaaaaaaaaaaaaataaaaaaaaaaaaataaaaaaataaa

SEQ ID NO: 24262 - DNA, 706 bp, Gossypium hirsutum
  Clone ID: GOSHI-09MAY01-C114736_1
cctcttaactccgccttatgatcttcaagtttgttctaagcatgtctgccagcaaagacgttcttgcactcgcttccctggaggttgacctttctagcatagagccagggagcactgttactgtcaagtggagagggaagcctgtttttatcagacgtagaactgaagaggacatcaagacggctaacagcgttgaccttgcatcacttcgcgacccccaggaagatgcagtcagggttaagaatccagaatggctcattgttgtcggtgtttgcacccatttgggttgcatccccctgccaaatgccggtgactatggtggctggttctgtccgtgccatggctcacattatgatgtgtctggtaggatccgcaagggaccagcaccgtacaatctagaggtacccacatacagcttcttggaggagaacaagctgctaatcgggtgagaatttatgcggaaattattattatctttttttttttgtgttgcgttagtcttgctgcaaattgtcataatagaattttctctgcacaagagggctgcattcaatttaatattcagtttactccggatttttgtatttgctgcctgttttaaggcattgccccaaggttctgaataatgaaaacaagatttgttgagcaaaaaaagttttaaaaaaaaaaaaaaaaaaaaaaaaattctgcggcgtcgacgcggccg

SEQ ID NO: 24263 - DNA, 584 bp, Gossypium hirsutum
  Clone ID: AI731387.1
aagagggaagcgtgtttttatcagacgtagtactgaagaggacatcaagacgggtaacagcattgactttgcatcaattcgcgacccccaggaagatgcagtcagggttaagaatccagaatggctcattgtcgtcggtgtttgtacccatctgggttgcatccccttgccaaatgccggagattatggtggatggttttgtccgtgccatggctcacattatgatgtgtctggtaggatccgcaagggaccagcaccgtacaatttagagttacccacatacagctttttggaggagaacaagttgctaatcgggtgagaatttatgcggaaattattagtatgtactttttttagtgttgcggtagtcttgatgcaaattgtcataatagaattttctctgcacaagagggatgcattcaatttaatattcagtttactccggatttttgtatttgctgcgtgttttaaggcattgccccaaggttttgaataatgaaaacaagatttgttgagcatgttcagttttaatggtgcttatggattattgatatacttcaaaataaaaaaacaaaaattttgcg

SEQ ID NO: 24264 - DNA, 448 bp, Gossypium hirsutum
  Clone ID: GOSHI-09MAY01-C114046_1
ccctttcttttggggatttcaactttccttctcctgagaaggtcctcagagaaaatctggtggaaaaagaaaaggttccagagaaaaaagcaatacacaaccttccacacgaccaaccagcactgatggatgggattatgatgatgaaggtgaagcaagtactgctgaagaatgaattccaattcggtgcagctgccacctccattgccacttgttcatcttaatttggtgctatcctacctgagcttctttttttattttaatttcttagtatttttttctttcttttttaaatataaaatattaatcttcttgaccttgtaagaccttttcttgaccttgtaagacccagtccagtatttccaactcttcttctccttccttgcctatccctcctgagctgtttgtaactttgaaatggtcaaatcatatgccaattccttttcta

SEQ ID NO: 24265 - DNA, 459 bp, Gossypium hirsutum
  Clone ID: uC-gsflnu33B073d09b1
tctttaagttaaatatgcagaattcatattctgtttttttatatgcatatatacatgcagatcaaccagcactgatggatgggattatgatgatgaaggttaagcaagtactgctgaagaatgaattccaattcggtgcagctgccacctccatagccacttgttcatcttaatttggcgctatcctacctgagctcctttttgtattacaatttcttagtattttttttctttttttaaatataaaacatccattttattgacctttgtaagacctttttttgactcttgtaagatccattccagtatttccaacacttcttttccttccattgctatcccttctgagctgattgaaactttgaaaatggtcaaatattatgccaatacctttactaggatattattgaataattttattagcatatctaagggaatggaaatggcgaaaatctttta

SEQ ID NO: 24266 - DNA, 867 bp, Gossypium hirsutum
  Clone ID: GOSHI-09MAY01-C114386_1
ggcgaagatggaatacgtgagccctgaaggtctccgcttggatggccgccgtccgatggaaatgagacagcttcgtgcagagatcggtaccgtcgccaaagctaatggttctgctgtttttgagatgggcaacaccaaagtcattgcagctgtgtatggccctagagaggtgcaaaataggagccaacaaattaatgaccaggcactggtgcgctgtgaatatagcatggctaatttcagtaccggagatcgcatgagaaaaccaaagggtgacagacggtcaacagagatatctcttgtcatccgtcaaaccatggaggcatgcattttgactcatctaatgcctcgttctcagatagatatatttgttcaagttcttcaggctgatggaggaactagatctgcatgcatcaacgctgcaactttagcccttgcagatgctgggatcccaatgcgagatatcgtcacttcttgcagtgctgggtatctaaatagcactcctttgctagatttgaactacattgaagatagtgctggaggtcctgatgtcactgtagggatcttgcctaagttggacaaagtgactcttcttcagatggatgcaaagttatctgtggatatctttgaaaatgtgatgggacttgcaatcgaaggctgcaaggccatagcaaactacattagagaagtattactagagaataccaagcaactggagtatcgccggggtctataactctatgtaagcggaagtatttgattgttgacttatcgtgttaaagattcaacaaaatatactatacagcattctgcttatgtttagatacccatcatttttgtatttggtattttgcttcttttatggttttt

SEQ ID NO: 24267 - DNA, 460 bp, Gossypium hirsutum
  Clone ID: uC-gsflnu33B082h12b1
atgagagaaaaagaatgaaaaagagctgaattctgaagggactgaaagcgctctaaactcagtttacaactcacctttcttccccactgtttgtttctttgttttttttttttttgtgtgtgtgtgtgtgttgggttggcgccaaaaaggaaaacacccagaaagaaagtttgggggggatctttggttcttgatcacatgatcaacggccattgaaatttaaaaaatgggttgcgtcagttcgaagcaggcggtgtcggtgacgcctgcgttagaccattccggcgctttacgtgacaatgccggtaccgttagctatggtagtaattcgtgtcggtctcggatcgggttctcggagctggagaagaagaccaccgtcggcggcggttagaagaagaaaaagaatcgtgatagtgcgggtgtgagtgatttccgcggtgttacgggagcatgttggaac

SEQ ID NO: 24268 - DNA, 336 bp, Gossypium hirsutum
  Clone ID: uC-gsflmaxxa045h09b1
gtttccacacgtgcgaccacgcgtacgaccacgcgtccgggaaagagggacaaagaatgaaaagcgagctgaatcctgaagggactgaaagcgctctaaactcagtttacaactgacctttcttacccactgtaggtaactctgatctttttttgtgagtgagtgctgggatggcgccaaaaaggaaaacacccagaaagaaagctcgggggggatctttgggtcttgagcacatgatcaacggccattgaaatttaaaaaatgggctgcgacagctcgaaacacggggagtcggagacgcctgcgttagaccattccagcgctttacgtgacaat

SEQ ID NO: 24269 - DNA, 553 bp, Gossypium hirsutum
  Clone ID: GOSHI-09MAY01-C116516_1
ctttactctcaacaaaaatagggccgtgaactaagtgctgcttggtgtacttatctgtttatgatggagttacttgcttccatccactgttacttttggagtccttcgagaactatttgcttatggatgtctctggtgcttttgctccaatatagtaaaacagtagtctccaaatccgattatttgatcggacttggaagctacgacattactggtcctgcagccgacgttaacatgatgggatatgctaacgcggaacaaattgcctcggggattcacttgaggctgcgagctcgctcattcattgtggctgagccacaggggaaaagagttgtatttgttaacctcgatgcttgcatggcttctcaattagtgacgatcaaagtgattgagagattgaaagcaagatatggggagttatatactgaacagaatgttgctatcagtggtattcatacccagtgccggtccaggaggttatctccaatatgtagtgtatcttgtaacatctttaggagttgtccgcagacatctgatgtcctggttgatggca

SEQ ID NO: 24270 - DNA, 477 bp, Gossypium hirsutum
  Clone ID: GOSHI-09MAY01-C116306_1
attagctttccacacagaaatgggtgtgagtgcgaatgccaataccggagccttcctcgtcttcttcatcgctgcaatcttgctggccttgtccactacctgtacagctttaaacatcactaagtcgcttgcgccgtactctgattacagcactctcagcgatcttttcagtaagaccaagctgactgatgctataaaccgtcgccagaccattaccatactagccctggacaataattccatccaatccatcacagacaggtccagcgatgaactgaggaagattctcatgaatcacatttatcctcgactattacgataggcaaaagatccaaaagctggggaagaagagcgccctcctcaccaccttgtatcaaaccactggttccgctataaatcaacaaggtttcgtcaacattaccaggatagcacggagtgaggttgtatttggctccgccgtgaagggtgcacacctag

SEQ ID NO: 24271 - DNA, 254 bp, Gossypium hirsutum
  Clone ID: GOSHI-09MAY01-C116256_1
cgcttgtctttgctttggttacatggagtccaagggggggttcatttttaccatcgacgatgactgctttgctgctaaggacccatctggcaaagcaatcaatgcacttgagcagcacatcaagaacctgctatcaccatcgactcccttctctttcaacacattgtgtgacccatttgcagatggtgcagattccgtccgcgggtatccattcagtctccgagagggtgttccaaattcataccacacatggg

SEQ ID NO: 24272 - DNA, 637 bp, Gossypium hirsutum
  Clone ID: GOSHI-09MAY01-C117486_1
tctcacgcgtccgcccacgcgtccgcccacgcgtccgtatccttataaatccttaatcaatcatctcattcctttgtcatctaattattaaagcaaagatagatggctaaacttgccacctttttcgtcttaacccttctcttcgtttccactctatcctttgccgcccgccctggtccagctttccctaaccagtctcctaccaaaactcaagctaagggtattactgtggtggagactgaggttgagcggtcgactgaagctgttgaagatagctgccaaggagttggagaagaagaatgtttgatgagaagaactcttgctgctcatgttgattatatctatactcagaatcacaagccatgagagctttttatgaatttatggacatggtcttttaaattttaaataacataatcactcaagttaatttgtgtccggctcctcttcattatatatttcttcaatcttcggctttttttttctttcccgaaattatgattgttggttctctttcttaggatttcgctgccccttcgttcttctttcatataatcaccaggtctctttgtttccatccattcaatttgtttattacattctattttatctcttttctccttttttctctttcttc

SEQ ID NO: 24273 - DNA, 353 bp, Gossypium hirsutum
  unsure (1)..(353): unsure at all n locations
  Clone ID: uC-gsflnu33B060h10b1
tnctcgcccacgcgtccgccaaaactcaagctatgggttttactgaggtggagactgaggttgagcggtcgactgaagctgttgaagatagctgccaaggagttggagaagaagaatgtttgatgagaagaactcttgctgctcatgttgattatatctatactcagaatcacaagccatgagagctttttatgaatttatggacatggtcttttaaattttaaataacataatcactcaagttaatttgtgtttgtttcttcttcattatatatttcttcaatcttctggttttttttttttttttgaaatatatggttggagtttctcaactcaaaaatctctctcaacat

SEQ ID NO: 24274 - DNA, 548 bp, Gossypium hirsutum
  Clone ID: GOSHI-09MAY01-C117786_1
tgaatctatcaatggaaggactcactttggtagtacagaaccattatggtattctcatcgttgcagtgctttcaatagcaataacatctcttctattgaaagcgtggggaagcactgtcgactccaccgatgaagatggcattcctggccgattgggattacctttcttcggcgaaaccttctccttcttttcggcttcttacagcacaaaaggatgctatgattttgttaaacagcggagaaaacagtatgggaagtggttcaaaacaagaatactcggaaagactcacgtgttcgttccgagtgttgagggggcaaaaacgattctagccaatgattttgttcatttcaacaagtcatatgtgaagtcaatggcagatgcaactggcgcaatgagtgtgttctccgtaccgcacatgatccacacatgaatcagacgtcttctctccgatcctttttccatgagttctttgtccaggttgcctgtaaaatttgacaagatggtatgtgaaaggctggataaactagaaaaaagtgggaaaagctta

SEQ ID NO: 24275 - DNA, 422 bp, Gossypium hirsutum
  Clone ID: uC-gsflnu33B013g12b1
gtcacgcgaccgattttgggattatcaacggggttgtattttttagcaaggaatggatgaccgccagagtaagcgtggggaagcacttggcgaattaacctaggaagatggatattaagtccttacgttgtaacttaacaagattcccaatttctccttcttttcggcttcttacagcacaaaaggatgctatgattttgttaaacagcggagaaaacagtatgggaagtgggtcaaaacaagaatactagtacagactcacgtgtacgttactagtgaagagggggcaaaaacgattctagccaatgattttgttcatttcaacaagtcatatgtgaagtcaatgacagatgcaactggcgcaatgagtgtgttctccgtaccgcacaagatccacacaagaatcagacgtcttctctccg

SEQ ID NO: 24276 - DNA, 183 bp, Gossypium hirsutum
  Clone ID: uC-gsflnu33B013g11b1
agaaccattatggtattctcatcggtgcagtgctttcaataacaataacatctcttctattgaaagcgtgaggaagcactgtcgactgaaccgatgaggatggcatgcctggtcacaaggaactatcttatcctggcgcaagtttctaggtaatagcctctgatgatcgcatttgatgaatct

SEQ ID NO: 24277 - DNA, 670 bp, Gossypium hirsutum
  Clone ID: GOSHI-09MAY01-C110446_1
gtttcatgtaatgttcgcccacaaaccgcaccatgtgcaccatacttgctatgacaagattcaaggatgcgatttacttgaaggtgaatggggaaaagcttggtaccattattcagtctggcgttatgtgcatgatggaaaggctaaagtctcaaagcagctagttgaagcgatagatcctagtaagaacttgatcactttcagagagatagaaggagatcaactgaaagagtataagagctttgtagccacgcttcaagcttcgcctaagaacaagggtagtggcagcatagtgcactggactgtggaatacgagaaactgcaccacgggattgcacatcccgagactctgttgcaattcttggtggatgcctccaaggacattgacgctcacctcacccaaccaaactaaaggatcgattaagaacatccgatgtccgtactgctcactactactacctgaagcagtacttatctaattaagaataaattgacagctaccttacttctttgtttcaattcgaatatgtatacacgtttggatcaatatgctgtcaaggagagggagctttattttcttagtatttggtggttaattatgtaccaggatgaatgtatgaaccatgtgccttgtgtgttataatttgcaatataaaagtatggtttgggt

SEQ ID NO: 24278 - DNA, 524 bp, Gossypium hirsutum
  Clone ID: GOSHI-09MAY01-C110146_1
cggacgcgtggggttttacagacttgtaatatctttatactccatttttatcttcattagctgtaatctcaggaagagaaattcatgtctgccatggtttccttgttattccacctacggggttgcctcacagttttctcgcttcttcctcttccttctcattcagctgaccctgatccattacaagacttttgtgtagcaaacctgagtgcctctatatctgttaacgggtttccttgcaaaccagcatccgaggtgacttcggatgactctttctttgatgggttcacccaggaaggtaacaccacaaacgccttttcgtcattcctcacacctggaaatgtcctctcattcccagggctgaatactcttgggatttcaatgaaccgggtggactttgccccgggtggaatcaaccctcctcattcgcatccacgtgcgagcgaaggtcggtgcagtcattgaagggaggctcctcgtaggttttgtgactactaacaatgagtattactcgaaagacttga

SEQ ID NO: 24279 - DNA, 612 bp, Gossypium hirsutum
  Clone ID: GOSHI-09MAY01-C111016_1
ttccacgcgtccgcccacgcgtccgcttttttacagtagaacaatgatgggttcgagaatcaaaatctcagctctgggtgttactatgcttctgctgttgattgccccaacttccaacgctgccatttcgtgcagtgttgtgataaaggacctgaggccttgcgtgaactatcttacgaaggggagcggaaaaccaccgtccgcttgttgtgcgggagcctccgctctggcatccgccgcctcgtcgtctgccgacaagaaggctgcttgtgaatgcatcaaatcagcgtctaagaatattaaacccaataaccaattagctcaggctcttccttctaattgtggaatcactttgcccgtcgccatttcaccaaatgtcgattgttccaaggttggttgagagcttggaagctgaaactgggagtgcttggatgggcatgaagtaattaaaaaactccatgatagaagctcaattgttttgcttatcaataaactggaatcctccggtcttggaatttggattccttgggtgaataaaagtttaatgctaccatctccttgttttcctcttttccagggttcatacatatgagatgatcatgttgtgtattc

SEQ ID NO: 24280 - DNA, 574 bp, Gossypium hirsutum
  Clone ID: GOSHI-09MAY01-C112946_1
acttctctccacgcgtacggaaaatgcatcattcaggcatgtttttgatatagctgccattatcactggaactgctaggcctaaattcaacatccctttaggcttgattgaagcttatggatggatttctgttctttttgcccgaattacaggaaagcttgctctcattagtcccccgactgtgcacgtcttaagacatcaatgggcatatacttgtgacaaggccaaactggagttggattatagacctagaagcttgaaagacgggcttgaagaaatgctcccctggttgaagagcttgggcgtgataaaatactaattactaatatgaattatgaagatgtacgaacttgatctcattctttaggccattgagaagtattccattaaatgctgagaggaatctatgttgctccttctgtttcatgcttgatgtagctttagccggtaatggcagtaataagaaactggctggctcgtttctttgtgttcaatgttgatgaataaggatcactgttgtacgatgattatgattcaggaattcttaatgaaatacttgaagctcatttgtatt

SEQ ID NO: 24281 - DNA, 494 bp, Gossypium hirsutum
  Clone ID: GOSHI-09MAY01-C112936_1
cgttcgctagcttttgatatcctctttgccattttggggtcttttagggttccaattggtacatgttggatgaaggtgagggagatgatgagcatggaattacctcgcggaattgagggacgatttcaaggccaagtcttcaacggttatatcattgcacagcccaagaatggttttgcatacgagccatgggcttaaataattggagcaaattatgtagtcgatgatcttggcttcgaggatctattaacctctaggcaagtctaatgcttggcttatcctcctctctctgggttttcttttggttttttttgttggctgttcttgatcgtgtttggttgctgagaatatggaggatatcatatgaataagatttggaatcttgacttcatctaagatttccacgacttctcttctttgaaacactattgtctttttagcaaccgaacaggtttttaaatatgtgaatgtctttgtttttttatctttacttt

SEQ ID NO: 24282 - DNA, 732 bp, Gossypium hirsutum
  Clone ID: GOSHI-09MAY01-C112176_1
cccacgcgtccgaaaaaattgtgtttagatcagaaatggggtcccaaactcctctaaagctcccagtcattgatttcagtaagccagacctaaaagcaggcagcaatgagtgggatttggtgaaagggcaagtccagcaagcacttcaagagtacggttgcttcgaggctttgttcgacaagatccctctccaccttcgagaggcaatattcggatccttgcaagagcttttcgatctccctttacaagccaaaattcggaatgtttccaataagccttatcatggttacgtcggccaataccctcaagtcccattatatgaaagcatgggcgttgatgatgcaaacattactgaaaaagttgaagccctgactactaccttatggcctcaagggaattcaagtttcagcaacactatacaatctttctcagaacaattgtcggagttagatcaaattgttagaagaatgatattggagagttttgatcttgaaaaatatatggatgaacacatgggttcaaccaactacctgctcagggtaatgaaatataaagggccaaaaaccactgaaacaaagcttggattacacagtcacaccgacaaaaacattgtgacaatattgtaccaaaatgaggttgatggattggaggttctgagcaaagaaagagaatggatcaatgtgaaacccttcaaacaatctttcactgttatgatccggggaatctttctat

SEQ ID NO: 24283 - DNA, 513 bp, Gossypium hirsutum
  Clone ID: GOSHI-09MAY01-C112156_1
cccacgcgttcgctcggtctcgctcacgctcacgctcaaagaggttttgtggactttgacgtggcccctccagctccagcaatgttagctgctggtgctgtggcagctgctgctgcagggcagattccggggacaactaacccaaccatacctggagtgtttcctaacatgtttcctattgcaactggacagccatttggtgctctcccagttatgccaggtcaggcaatgactcagcaggctactaggcatgctcgtcgggtgtatgttggagggctttctcctactgctaatgaacagtctgttgcacctttcttcagccatgtgatggctgcaattggtggaaatactgctggtccaggggatgctgttgttaatggctccctcttccatgaaaagaagtctgctttcgtagagatgagatctgtagaggaggctagtaatgcaatggccttagatgggattatctttgagggagcacctgtgaaggtgaggagacctagtgactattat

SEQ ID NO: 24284 - DNA, 956 bp, Gossypium hirsutum
  Clone ID: GOSHI-09MAY01-C112306_1
gatagcagaggaagtcggtggtgctgttgcagcagctccacttgatgcgcagattgagctcttcaatgcgctagttgaaggatgcagggaagctgttgaattaggaaatatagaacctaagggaccattattagatttctttggtgttcctgttaaggcaaatgatctgattaatcgtgtccaagaacttcagctcttagcaaaacgaataagtcgatacgaggatcccataaaacagttccgtgtgttgatgtaccttaaaccctctaattggtctaaagggtgtgggtggaatcagattgatgatgcaagattgcttctgggaatatactaccatggatttggtaattgggaaaagataagattagatgaaaggcttggcctcacaaagaagattgctcctgccgaaacttcagcaccatgaaacctttctgccacgtgcacctaatttgaaggagcgtgctaatgcactcttggaaatggaacttgcagctgctggtggcaagaatgctggtgtcaaagctggtcgtaaaccctcaaagaaggaaaagccgaattcttttaactgatctatatctcatgtcagagaccataaaagtgaaccgggttcttactaagggagttttaaaatgggttgggccaaaacgctagacccctaaagggtaaccttattttaaaaaaaagggaaattttttcactcggggaatttgtcccctttaggggttaatgtgttgaaggggtaaaattttatgtgtgtaaataaacccttcggggttagaaattgggactttgtggaaatttcccgggaaaggtcttcaaaattggaattttggtctttttgagggaggtaaatattgtttaaaaatgaacgtttttttcaaaaatcggtacacctctttagatattttctcattaaaattcttggggaggttcttattttttctttattcagagga

SEQ ID NO: 24285 - DNA, 543 bp, Gossypium hirsutum
  Clone ID: GOSHI-09MAY01-C113936_1
ccctctcgtccgccaaatctctctctttgtctgtcggataattccaatggagggtcttattccttttgtttatagagcaataatccgatacaaaaacggaagacggggccatcatgttttagcaacatggttcaatgactcaccttcagcttcttacatgagactcccaactggtgattctggtcggtttcaaacatctgatacacaacaactgtttcaatcagattgtgtcaatttttcaacctcttcgcctgtctcttctgccaccaccaccacttcctcttcacctctctgtcgtcgtttcatcacctctcgccgtgtcgtttcataatcattacatcgaatgcagtgacatgtctgaaggaagctgaagggtgtgccacttaccatacatacgggagttttctttttcttttttctcttttccgtcggggggcgggtccttaaacagtggagatattgtgtccggtgtgtccatgcttgattttatttcttgactctgaatccaatccaattcaatcgggttcacatggagtgtctatg

SEQ ID NO: 24286 - DNA, 628 bp, Gossypium hirsutum
  Clone ID: GOSHI-09MAY01-C113616_1
attatttcatttgggaaagatgtggctgaggcacattcctccaagattgaaagggtggatttgctggattctatgaaggctgatatgctagccaacttaaccaactgtgatatatggatcgagtatcatgacattggcgatcatcgtattaaagcagttgctgattacaaggtttacacagctggatcaattttggacctgcttcattttgtttcccccaggttgatggcacgaggaggcgcgcattcctcatatgggatagctgataattcggatgacccgaaatatcaacactacaaatattggtcaaatcctctagaaacgaagttaccagatgctccagacatggagatatactcaatgtacggagttggaatccccactgaaagagcttatgtttacaaagtaactactgccactgattgctctattccgcttcagatagacacctcagctgagggtggcagtgaagatctcatgtctaaaaggtggcgttttctctgctgatggagatgaaacagctcctgttctaagcgctggtcttatggctgcaaagggttggaggggtaaaacccgattcaatccttcaggcattcctgcttacataagggagtacagtcatgcccct

SEQ ID NO: 24287 - DNA, 565 bp, Gossypium hirsutum
  Clone ID: GOSHI-09MAY01-C113086_1
ctgctgctcctgctggtacccctcctccgttaccggctggacccacgcgtccgaatttatttcatgaactcaacccaatatgtaatgaatccttaatttttttcatttcttttttaccctttttcaaaagaaaaatggattgttgttctttttcatcgtcattaagcttaagtttaagcttaatgttgaaacctcgtccgccattaatgaccattaactataatggtaactctcactggagtaaaaggaagaagaaaaggcattgtttgcttcaagtctctgcaatttcttaccagaacttcattcatttttcttttaatgaaactaaacgacatacccttttgcttccttctcctctacaggaaaagtatggttctatgatcgcaatggatgaacaaacatggcttgaaatgttatcattcgaaactcccaaaatcagactacttagaagtatgagcattggaggtgaagctatgcaggtattagattttgctggctttccgaaaccagaatttgatctacccatattgtgtggcaacttcttcactactgctaacatgaacat

SEQ ID NO: 24288 - DNA, 905 bp, Gossypium hirsutum
  Clone ID: GOSHI-09MAY01-C113066_1
tcttagcttttcagacaaagcatcatcgccccaaatcctattcacctgtctcctgtctcaacacccaaatctgaaggcaaagtcatgtcggacgacgaaggcactggagaagactaccttttcaagattgtaataatcggggactcagccgttggcaaatccaacctcctttcccgctatgcccgaaacgaattcaacccacattccaaagccaccattggagtcgagttccagacccaaaccatggaaatcaatggaaaagaggttaaagctcagatttgggacactgctggtcaagaaaggttccgtgccgtcacttctgcttattacagaggcgctgctggtgctcttattgtttatgatattagccgccgcaccacctttgacagtgtcggccggtggctcgatgaactcaagactcattctgatgcgactgtagcaaggatattgggtcggcaataaatgtgacttggaaaactatcaggatgtgagtgttgaaagcaaaagccttgcttaagcaaaggggttgtttttcatggaaacatccgctttaaattcaacaaatgtcaacaaagctttcccattattattccaaaaatttaccaccatgtccgcacgaaggttctgaattccgatactcaaaaactgaattaacccttaaccgggttaccctttcccaaactgatgggttgaagaaaacccacaatttttcttgctgttccaggtgatcttgttctttgaaaggggttaagactccaggtcttcccctgttttgtttcatcaatttgggttgtgttacccaaaaatatccattgccctatttaattaatgtttttgttgtttaagaaaaataaaaacccttatttctggtttgggcttttgatacaaacatgtaatctcaaata

SEQ ID NO: 24289 - DNA, 420 bp, Gossypium hirsutum
  Clone ID: GOSHI-09MAY01-C113316_1
cccacgcgtccgggaaaaccagtatggatcggttccgcaagcttgagcgccaagaatctggttgtcttcatggatactgcaactggtgatggcatagaagcttggattaatctagaggaggaagacatggctaaatttggaagtgatgaagaattgcttgcaacattcaaaagcacttttgtttgggaatgatagctactacagctgtcagagttgtaggttgctttccatataatttgattaaggaataaagattatttggtcctacacctgctgtgaaatatctgtatttgacgacataataggtggattatatcaaagagattatacactttcaaattaagctagtctatggagataaggcctcttttgtatgcccaataacctctagttatgtgtgattgatctcgattttgtact

SEQ ID NO: 24290 - DNA, 520 bp, Gossypium hirsutum
  Clone ID: GOSHI-09MAY01-C108986_1
cttttctctctctatttctcaccacttcatctgcatattgaacagtatgggagaaagcttgatgctctctggttctagacagtgaactattgaaaggagagtttagctctgtctgattttacaatgccagttccccttgcgccatatcccacacctccagcaccctacactcctcctgctgccaatggtgctcaaagccaacttgtgtgttccggttgtcgaaatttattgctctatccagttggagcaacctctgtgtgttgtgctgtttgcaatgcagtaacagcagtgccgcctcccggcacagaaatggcacagttggtttgcggaggctgtcataccttattaatgtacatccgcggagcaacaagcgttcaatgttcgtgttgtcacactgtcaatctggccttggaagcaaatcaggtggcacatgtaaattgtgggaactgcaggatgttactaatgtaccagtatggagcgagatccgtaaaatgtgcagtttgcaattttgtgacatcag

SEQ ID NO: 24291 - DNA, 624 bp, Gossypium hirsutum
  unsure (1)..(624): unsure at all n locations
  Clone ID: AI730975.1
cttcatccaggcaaatctaccatgaatgcttccattagtacatcaagagatcacaaattcggagcgatggcggagatgttgagcaaggcgtcgacgatggtgttccggattgaaccgatgctcacccctacaacgatccaaatgatgtcagcatagctccgcttttagatagtaaattcgattcggagaagtgtgaggctctcaagcgactcctcgctctcatcgctcaaagcttcgacttctctaattacttccctcaggttgtttaaaacatggcatctcaatctttggaagtaaagaaacttgtttatttgtatctactgcattatgctgaaaagcgtcccaacgaagcattgttgtcaattaattgtttccagaaggatttgggggaccctaatcccttggtgagagcatgggcacttcgcaccatggctggaattcgtcttcatgttattgcacctcttgttctggtggctatgggcaagtgtgctaaagatccatctgtttatgttaganaatgtgcagctgtgctcttccaaaagtacatgatttgcgcctagaggaacatacctcggcaattgaagatgtncacttgataaatttatttcttcatggttatntttc

SEQ ID NO: 24292 - DNA, 443 bp, Gossypium hirsutum
  Clone ID: LIB3083-017-Q1-L1-G10
cttaatttgtgtaaagaagaaaaaaggaaatacgaatcggaaatgtttccacagttcggagcgactgcggagacgttgagcaaggcgtcgacgatggtgttccggatcggaaccgatgctcacctctacgacgatccggatgacgtcagcatagctccgcttttagatagtaaattcgattcggagaagtgtgaggctctcaagcgactcctcgctctcatcgctcaaggcttcgacgtctccaattacttccctcaggttgttaaaaacgtggcatctcaatctttggaagtaaagaaacttgtttatttgtatctactgcattatgctgaaaagcgtcccaacgaagcattgttgtcaattaattgtttccagaaggatttgggggaccctaatcccttggtgagagcatgggcacttcgcaccatggctggaaatcgtct

SEQ ID NO: 24293 - DNA, 1031 bp, Gossypium hirsutum
  Clone ID: GOSHI-09MAY01-C109666_1
tttcacgcgtccgaaaattttaaacaaactaaaacaaaatttgcagagaaacacagcagcagccatggcagctcgcaagagagcttcagcggcagatacaaagccaagccctcctcctcaaacccaggaaacaaccacccaaattgacccgcctatcgctccacctaagaaagccttaatcttcaaattctgtcttttcttttcaatcccatacttttaccttctttaccaacactacacgatcgagcaagaactcaggagatccatccttatcaatgcttccctttgtgttaccggcttcttccttactcagagaatgatccctgttgcttctagatatgttttgaaacgcggtttatttggatttgatattaacaagaagggtacccctcaaggcactgttaaagtgcccgaatcattgggaattgttgtaggctttgttttcttggtattggctattctattccagtattttaacttcacagctgattcaaattggctcgttgagtataatgcagccttagcatccatctgcttcatgattttacttggatttgtagatgatgtcctggatgtcccttggagagtgaaactactactgccgtcaattgctgcacttccattgttgatggcctatgctggacatacaactatcatcattccaaagcctcttatttcatatgttgggcaagaggtgttggatctagatgggtgtacaaattgtatatggggcttttggcagtattctgcacaaattctattaacattcatgctggtttgaatggccttgaagttgggcaaacagttgtgattgcatcagctattttgatacataatttaatgcaaattggagcatcttcagatcctgagtataaacaagctcatgctttctctatttatcttgtgcaacccttactagccacttccttgggcttactttcctacaagctgtatccttcttccgtttttgttggggatactacacatattttgctggaatgaccacgctgtagttggaattctgggacccc

SEQ ID NO: 24294 - DNA, 548 bp, Gossypium hirsutum
  Clone ID: LIB3829-024-Q6-N6-G7
aaacgtggagaagcatgtttggatttcctttcagttcaattattttgagttcaggccagattcaaatccgggctaagtcggatataagttctaaaacctattgtttgtttttcatgcgatatagaaactatgtcaacgtattaattcccaagacatacggccactgctcatcttatgtacgcaatattttataggcatgggaaggggaaaagggaaaagttagtaatactaatcagcaaaccttgcctgtgttatcttaaactatcagaatatctgtcttcagatgtgaaatcgtaactcgaactatcttttcctccccaatcagaaacggttcgccgcacaaattgccccttcacacgaggtcgttgttctgccaacttcttcctgctctgataccgtaccttcttttcaaaacatctttctttccttttctggcgaaatttggtcaaggcagccgctctctgtgcaacccggtcttcatctgcgccactaccaccacgtctcccactcgctgtcccattgccatcttccgtgactgcatgttcagc

SEQ ID NO: 24295 - DNA, 472 bp, Gossypium hirsutum
  Clone ID: uC-gsronu33B117e03b1
ggcgcttttgaagaccgggttgcacagagagcggctggcttgaccaaatttcgcctgatatggaaagaaagatgttttgaaaagaaggtacggtatcagagcaggaagaagttggcagagcaacgacctcgtgtgaaggggcaatttgtgcggcgaaccatttctgattgggaaggaggaaaagataattcgagttacgatttcacatctgaagacagatattctgatagtttaagataacacaggcaaggtttgctgattactaactttacccttttccccttcccatgcctataaaatattgcgtacataagatgagcagtggctgtatgtcttgggaattaatacgttgacgtagtttctatatcgcatgaaaaacaaacaatagattttagaacttatatccgacttgcccggaactcaaaataattgaactgaaaggaaattcaaacatgctttcccacgtttagat

SEQ ID NO: 24296 - DNA, 793 bp, Gossypium hirsutum
  Clone ID: GOSHI-09MAY01-C106666_1
cccactcgtcttcggacgcgtgggcaaaacccgagtttcttatttcttaacctgaaacccctcctctttcctcctactctgtttcctttttcttcttagactcgtgtcggatttttttctcgtgctctgcaggtgatattagcatgacttaaacaccgccccgcggccgaattagcatcgtcttcttcctttttcatttattgaaatcaatccaagtccgtgaaccagtcattggattctccatagccaaaaaaacttcgcattcaactcatccctcaagctattcgtggtcataaactaaagctcagaatcttcaattcaacctccaaatcccaaataaatgtgatgagttgttgattatcaaagccaacttttctttgcagattctgggaatttggattcagggaggactaaggtagctcagttttgacaattgaacttaggggatgaaatcgtcggcgacgaagagctttcggttcttccaagacacaccaaagttattgtcaccgggaacaatagaacaaagtctgtattggtcggtttgcaaggcgtcgtcaagaaggcggtcggcctcggtggttggcattggctggttttgaagaatggggttgaagttaagttgcaaaggaatgcattgagtgtgctggaacaccctacggggaacgaagtagatgatgatcatgatttcgataactcaagcagtggctcggacattgctagtagcattgagttccaaaggcctgcaaaaccgagagttcgacatatgaaaccatgggttccatctgcatccatg

SEQ ID NO: 24297 - DNA, 642 bp, Gossypium hirsutum
  Clone ID: GOSHI-09MAY01-C106006_1
gaaaaaacttaaaaaaaagggtagctattagttagttaagcacccaatggagccattgttgaagaagaaaggtgattggtctgaatcagtgagtggttccaatggtgctgagtctaaagagagtagtagtaatagtaacagtagttcaactggatcaagttctcttaaggttagaggttcaggttcacctcctcttttgggttggcctataaggagagctattactactcctccttcaaagaactcagatgtttgtaatggggatgatgataaagttggtgatcaagttgataagtttaaaaaaatgggttctaggattaatgagatggatatgatgaaggagagatttgcaaagttgttgcttggtgaagatatgtcaggttctggaaaaggagtttgcacagctttggctatttcaaatgccattaccaatctctgtgctactatttttgggcaattatggagattggagcctatagctgaagagaaaaaatccatgtggaaaagagagatggaatggcttgtttgtgttagtgaccatattgttgagcttataccatcttggcaaaattttccagatggaagcaagcttgaggtgatgacttgcaggcctcgatcggatattttcattaatcttgccgc

SEQ ID NO: 24298 - DNA, 579 bp, Gossypium hirsutum
  Clone ID: GOSHI-09MAY01-C106356_1
catatatacactaacggataagattttctttttttttgtcactgttttttttttttatctccggacaaatccaccgatgttgttgtgtcggaccggccacaatcggcggctacccttttcttcgctttcctccgccaaacctaagcaatactccatcaggtccgccgtgtcaccaccggaatggcgggagagccggcggtcggttgctatatctctgtttctatctcacttgctccttgcacctaaacatgcgattgcaggtaacttcttggataaatacgtgaaaaagaaaaagctggatccgcttgaggtttatgtgcctgctgttatattgactcaaatacaaattaaagacctggagaaaactttagaagttgatgataaaccggaatatgcaacctgcagatccctgctacgttctggtccggctgcatctcttcgtgtaaatatacgagctggggcacaatatgcttctgatgctggaaatggtgaaaacgctttcaaagacgtggatcaatgtctcagggcattggaggaactagattccttgtttctacatgcatcaagaaatgaaccaga

SEQ ID NO: 24299 - DNA, 350 bp, Gossypium hirsutum
  unsure (1)..(350): unsure at all n locations
  Clone ID: LIB3543-042-Q1-K6-F7
tcggggnaggaaagtgtagcgatcaactgcacaacacgagnagatgaacggatgcttgccgatatccaaaggttctacaatgtagtgatagaggaactgcctgcaaatgttgcggatttgatctgattgagtcagcattttcatacacaagagcaaaggttgctttagtaaaaaaaagaaagaaagattgtctgtttgttttgtgagtgaaaaggttaaagtggatttggcattcttgacttcattgtattcattgttctctttatttacattacttagatattttaattttttttaaagaatggtatttaattcatattttgatatatagacacaaagtttggttgctt

SEQ ID NO: 24300 - DNA, 213 bp, Gossypium hirsutum
  Clone ID: uC-gsronu33B126e09b1
tttactgcctgcaaatgttgcggatttgatctgattgagtcagcattttcatacacaagagcaaaggttgctttagtaaaaaaaagaaagaaagattgtctgtttgttttgtgagtgaaaaggttaaagtgttcatcgccctaggtatggtctgggtttgagtcatgttaatctcattgttattaggactttatcctattcttgtaactcagc

SEQ ID NO: 24301 - DNA, 798 bp, Gossypium hirsutum
  Clone ID: GOSHI-09MAY01-C107476_1
gggataatcaattcactgaaatatgagatcatgtagtttccaaatatctcgaaattcgcaatgaagaaaggaacatgagcatgagaactgcagaagcagctaacaagcagcactatggaggggtgtaataaaatatagcaaagctagaagcagagtgccaaagactgcgtggtcttgtgaggaaaaattgcctggtcctgctgcacttgcccaaatgaagctagaggttgagagtttaggccgggattatggagatactcgattaaaaaggtctcccgtccggccttctactccacacacacctgctgtcactgacttttcccttgacaatgcacagaaattccataaagagaatgagtttctcactgaacgattattagcaatggaagaagaaacaaagatgctgaaagaagctttggcaaagcgtaacagtgaactactggcttctaggaatctgtgtgctaagacatctagcaagcttcaaactttagaagcacaacttgccatcagcaaccagcaaagaagcccctcaaaagctagcaattcaccaagtgtgacttctgtgtctgaagatggaattgatgatgaaaaaagttgtgccgactcatgggcaactggtatgatctccgagctctctcaattcaaaaaggaaaagagcattgaaaagttgaataaaactgaaaatgtgaagcacctgcatcttatggacgactttcttgagggcgagaagttggcgtgttctttaaatgattcaactgcaaatggtgcaatcactaatgcaggttgttcaaacaataa

SEQ ID NO: 24302 - DNA, 533 bp, Gossypium hirsutum
  Clone ID: GOSHI-09MAY01-C107636_1
gcgttcgcccagcgtccgaaaaaggaagagctttcttttaggataatttctcattcattcataagcatttccatgtcctgttccccctcccccaggcaactgttactttcctgatgtaaaggtttcttttatttttcttgcttgccttgtctaagagggctctaaagctgaatttgactctctttcgtttgttgggttataacaagagttctcatttgtggaattgtcctccctttcaagattcttcttttacaatatattcacctatggctgttaacatggttctttgagtgttgggagatttttttttctttgaattattgtttccttttcaccttgctcatctgtggtttgacaaaattaagaggtggttctgactgtttttcaagcgtgagtcactgtttctgtggtggctgcaatgatttcttctctgaagtgcttacctctttaattttaagtggtttttttgctaaataaagtgtatttgcctcttgttgtggttcaacttctgtatatttggtgtggctacatac

SEQ ID NO: 24303 - DNA, 568 bp, Gossypium hirsutum
  Clone ID: GOSHI-09MAY01-C107256_1
cggccgcgtcgacgtctaatggactccctttaatattcaccctccctcttttctccttccttttcttagtgtagatttttaattttcatttttcctttttttcttttttttcctctgcccccgttcctttttcccctttccccattgtctttttatttgtcgttgatctattggttttggttatttaatagtatttggttgtttgatggcgaaaggccggcggttgaccaccagcagaagcgaacggttgcttggaaattatggttacgggcacagccaaggggacagtgtcatcaatgaagaagccgagcttggtgaggaagatgtttggtcgatggttgataacgtcgcagaccgaggagacggcgggagtgtcgacaattctcggagccagtggagtccacacgctgatgcggagagtaacgggaatgggaacttcgacatgaggggggatcgtcgtctaattcctcggggcgaacgccacgttggtgggctgtccttggctttcgaggattctgcttcgacgaagcctaggatcgtgcatcagtttcgtggccatgacggcgtg

SEQ ID NO: 24304 - DNA, 897 bp, Gossypium hirsutum
  Clone ID: GOSHI-09MAY01-C100946_1
caatgcaaactaacaaaagaaaaaaagacacatttgcctatgattgatttttaggagtcataaactaacaaatgttttaatttcaggtcaacatcaattgataaataataaaagggtaaactacacttgtagtcacccaactattcatttttttttcttggtcatcggttgttaaatggctgatggaaagatgacgtggcagcttttaaaattagcataatagcaaatttaaccctcaacatttatatattatgtcaatttagtcttgattctaaaaaatttaatccttaatgtttacctattgtgtaatttgtctttttcttaaatttgcttttctttggaaccctttcacctaaaaagctaaaataaaaaataaaaaaaaatctatcaactaaatttggtcgaaaatatacaaaaattggaaagagttgaaaatccaagataataattttcatcttttctcattcttttaaaattaaccctcaatatcacaaataaaagtaaaattgaaaaaaaaacaaattacacaatatgtaaatgttaagggttaatttttttaaaatcaagactaaattgacacaatgtataaatgctgaggttaaaattattattatgccaattttataagctgccaagttatctttctattagcaatttaatggctagtgactaaaacagaaaaattcaaatagttgggtgacaaagaaaaagtttaatagttgggtgactattttgtaactcttcataattgggtgaccataaaagaaattactaatagtaaggtgactaccaataaagtttacccataataaaaatactaaccaatgctgttaatggaaaataatcaaatagatcagtgaaagtcttccaaacatttgcagtcccatatctgcaatc

SEQ ID NO: 24305 - DNA, 540 bp, Gossypium hirsutum
  Clone ID: GOSHI-09MAY01-C100536_1
gtaacgataacgactaatttaaaaacaaatatgctaccgcaatacatgcttttctaactagaactagaaggatacaaatagctgccaatgacatagctggacagcgttaaagaactaggatatgcttaacaatcatctaccagtagattggcatgctgctaatcaaagttcaaacatatcaatttgggttaaagctttaaccaatcacctagtaaccaaaaatcaactgtgaatccgatggcagttcatcaccatactagtcaataactcaccatcgatactggtcccaatcttggttcaaaattccaccaaaatttggaatagagataacagatagttccttttgcggcgcaatgtgagatgatgttttacaatcacgtggaagagatacgtgaactcatacccaccccatcatggaacatgaagcataataccatggtcgtccgtaatgacagaaacatcatcgcagtgacagaaacatcaataagcttaccagattttgagcttgaacaaaatggtcctacaatctttttatggcat

SEQ ID NO: 24306 - DNA, 457 bp, Gossypium hirsutum
  Clone ID: GOSHI-09MAY01-C100506_1
gggagggccggggcaattgtagatttaattgctgtcgctactgccaattgataattcaagttcaatcatactacaatcctcgggtaagatatggtctagttcgtaaaattgtacatccatagtagtttgttttctatattaaacctcatggagtttgggatgctgaaaatctggtttcaagtataagtgtgggggttttccaagtattctttttcctttttttcccctttacgaacatgatatacccatgtggttgagttattttttttattgaaaaccacgtggattagaattagataattttaataaagtttactaaaatgcaactcttgttttaccccctttgaatctgtttgtcttcttgtagccatcctcctataaaacaatggaatagctaatgtacaaataaattgatcttttggtgaaactatgcatgtatccgttttattggatgcat

SEQ ID NO: 24307 - DNA, 548 bp, Gossypium hirsutum
  Clone ID: GOSHI-09MAY01-C100426_1
ttgaacatgaacatatataatttatgtaagcccatccattacaattgatcaatgtgatcagagtacatcagccaacatccaagataacaacaacttatttcctccacttaaacacaattcccaacaaaattaaggatacaactacttgtctgtttcttaggaaaagcttcaacttactctaatgccaacctaccactgtgtttgctacttcaaattattaaaacctattcttgtgtgtgttacatgctgcgatttctcgcaacaaatggaatggaagacactttgagtcatgtttgtaaaatgaaataagacaatcctagcagtaaaatattcttttgaatctttgagtaaatttgaaactcctcccccctctatcatctccctatccaaatggggaaggatataaaatggaactaggggatattaccattagcaagagtcgttgaaccccagcggcagagtgggggcaccattccactgcacatgatgccagcaacatccatctcctagcaccccatcaccgcgcaattatacacaaagttacccga

SEQ ID NO: 24308 - DNA, 424 bp, Gossypium hirsutum
  Clone ID: GOSHI-09MAY01-C100186_1
atttgtgaattccaacccctatttcattcattcattatcaaccaaacagtttatatgatttcaatttcagacttctacatacatatactaattatatgaaatgcacgtcttgatttttcatgatttactatgaaaaatactccttcgtaaaaaaagactatacatgttagaattttatctattatgcttcttcggataccccaattcttttaactctgcttttaaagcagcatgctcatgccacatcctctctagccgagcttcaaccatcgtcgtctcttctttaaggggatgcatccgcctctccaaccaagccactgctcccgctctgctttctccgcctccgcctccaccaccttttataatgctacccatgtactcaactgggtaattcacatgcaccttgtgggggctgtttaatagc

SEQ ID NO: 24309 - DNA, 706 bp, Gossypium hirsutum
  Clone ID: GOSHI-09MAY01-C100086_1
cgatttcgagcttatttaaactttagaaaaaaactcaaggggaaaatccgtgtgatagctctggaaaatttatacagattacgaagtcagagctgagtttaactcgatctcgagttgtttcctggactctgctggttttgggagatcgagtttcttttgtttcttcgagaggagaaaagtgtcttcgttgagcagggaattggtgtttctcatacttcagtttctggaggaagagaaattcaaggagtcagttcataggcttgagaaagaatcagggtttttcttcaacatgaaatactttgaagagaaagttcaggcaggtgaatgggaagaagttgagcggtatttatcaggttttacaaaagttgatgataatcgatattccatgaagatattctttgagataaggaagcagaagtatctggaagcacttgatcggcatgacaaggcaaaggctgttgaaatattggtcggtgatttgaaggtgttttctacatttaatgaggaactctacaaagaaatcactcaacttttgaccctcaacaatttcaggggaaaatgagcagctggtccaaatatggggatacaaaaactgctcgcagtataatgttggcagaactaaagaaactcatagaagcaaatccacttttccgtgataagcttgctttccctactttgaagtcctcaagactaaggactttgatca

SEQ ID NO: 24310 - DNA, 499 bp, Gossypium hirsutum
  Clone ID: LIB3829-033-Q1-N6-F4
aaaaagaatacaattattattattattattgggatggtgattattgttttcagagtagaattgtacattggtctacaagtaccacctagctcgcatcgcatcacatgatatataaacccgcactatggtttaaagtacaacaacctccaaagacaaacatagaggaaccctaggatgagaaatacattagtaatgacaacaaaatgaataataatagttcatcaatcaaactagaagtagaaggaaagcacaaacaacagtgttcaactctgacccacttctgctacacttgtaattgtttcagctatccgcaagtgcaataagctgatcaactacacccggttctgcaagcgtgcttatgtctccaagttcatctaactgtctggatgcgattttcctcaaaatcctgcgcatgatctttccactcctcgtttttgggaggccaggtgcccagtgtatcttgtcaggtgctgcaaatgctcctatctgatttcgcact

SEQ ID NO: 24311 - DNA, 419 bp, Gossypium hirsutum
  Clone ID: uC-gsronu33B124e10b1
tgttcatgcgcaggattctgaggaaaatggcatccagacagttagatgaacttggagacataagcacgcttgcagaaccaggtgtagttgatcagcttattgcacttgcggatagctgaaacaattacaagtgtagcagaagtggggttcctctatgtttgtctttggaggttgttgtactttaaaccatagtgcgggtttatacatcatgtgatgcaatgcgatgcgaggtaggtagtacttgtagaccaatgtacaattctacactgaaaacaataatcactatcacaataggcataataattgtacttctttttcttcccatctttgttaagtatccttctatcctatggggtaaaagtatgatggtagttattgtattatgggttttttatcgaagaaatagataaattggtatc

SEQ ID NO: 24312 - DNA, 619 bp, Gossypium hirsutum
  Clone ID: GOSHI-09MAY01-C100266_1
gggactagggagccgctgccgccaccgacccgcctaagcaaaacacaaaagcaaagcccccgtgatcactgctcttttctcgtcgaattccagttatttcagagctaaaatacgaaacagaaagggaatgggtcacaacaagccccggcgtttcaaaacccataactctcatcggggacagtctagcagaaaccatcaattccaaagggaagatgaatctctcccacatgatcaacctcccgaagaggaacccaatgttcctaaagttcaacttgctatgtgggattttggacagtgtgatgcaaaaaggtgcactgggcgcaaacttgcaagatttgggttgttgaaagatttgcgtgtaaatagtggttttggcggcattgttttaagtcctgttggtagtcaatgtgtctcaaaagaagattacaacttaataaagaggaaagggttagctgttgtggattgctcatgggctcgtcttagtgatgtaccctttgtgaagctgcggtgtggtgctcctcgcttgttgccatggctagtggctgcaaacccagtaaattatggtcgcccatgtgagctatcatgcgtagaagcattatctgctgctttactaatatgt

SEQ ID NO: 24313 - DNA, 831 bp, Gossypium hirsutum
  Clone ID: GOSHI-09MAY01-C100246_1
gttaacaaacaaagttcttttcatgcacctgaaatatacaagggaaagctatttccatcttcatccagtgaacatgattcccgtgcgagggatcttggaagcacagatttattcggtcattctattggttctgttcaacttggttttgctccacctctagcagctcaaccagtattcaggactagtcaagaattagattcctcctgtaaaagtagctgcagacttttcggtttctccttgactgagggaagacatgatgctagcaaggaagaagacgtggtacaagcaacctcatcattggcgcctggagcgattttaccttgtgttagggaagagtttcacccaaagccttcgtcggtgacggacacagttggaagcaatttttctgaagtaagcaatctctatgctgtcagagatatggttttagatattgcattgtagcctagtcgtgaaaggcagatccccaaatgagttccatagacagggaaatagagcgttttccaatcaagttgaaaacctggaagcattagattccccggtgcctttgctgtggataaaaaggtttcatacaacttgaagagtggttggttggaaaaatgtttcatttttgtggtaagctttcaagctgttgggggccttttcaagggggtggtgtttttaaaatcgagactatgttttgagtctcgacttctatactgatgaatatgctgctgcaaaaaaatgcccccagttggtgaagtgattgtttattttgattctatgaatccagcgttatgccctaaaattgaaaatttttgtaaatattttattaacccccttggggtttatttt

SEQ ID NO: 24314 - DNA, 485 bp, Gossypium hirsutum
  Clone ID: GOSHI-09MAY01-C100226_1
gcaaaaatttggcaagggtgattggcggagtatatcaagaaacgtggtggtgacacggacaccgactcaagtggctagccatgctcaaaagtattttctccggcagagtgcagtgaaaaaggagagaaaacggtcgagtatccatgacattaccacagtcgatagcaaaacgatggatgtgcccgtcgaacaaaaccggggttctgaaccacatggtatggttcaacaggcacctcaactgcaacagatgccgcatacaggccattttgtgggaaaatacggctatccaatgtagagatgagatcagagctccaaaactctgtatataagccaattttatttttagagtatcaaaacttagacgtaatttaatttgtcaaacctgatgttcattttaaagctatgacattctgatgtaaaaccatgtatagaaaactaattcctttgaatttaatttgggatacatgaattttgatttaatatgt

SEQ ID NO: 24315 - DNA, 480 bp, Gossypium hirsutum
  Clone ID: GOSHI-09MAY01-C101996_1
atttcatccgccgtttctttcctattttccattttctgccctcagcttcatcttctcctacgttttcttcttttccaaattgcagagattgaatgcaaaacaaccgatgggagaagaaaccaagaagattaggaaagaagaggtaattgcaaagctcaaggacaatggtgacttcgacaagctccgtctcaaaatcatccgcaagctcaaggacaacttacgttttttcttcttctttttttaatcaccaatattatccactttttttatcttttatatattttttctaggatttaggtaaaagttttagaatgctgaacttttgggtaacctggaaatcatggatgcttgttgtctgtgattgtttgcttgaatgggttttgtcttgattttgagttttgggtatcttcatggaatttaatttgattattatatctgggtataatttattaatttcaaattcaaggccatgtttgatta

SEQ ID NO: 24316 - DNA, 1032 bp, Gossypium hirsutum
  Clone ID: GOSHI-09MAY01-C101526_1
gactatcctgtgacttgtggagtgtgggttgcatactggttgaactttgctctgtaagtgaatatgtgcagtacaagctattaccttattggtcttactgaatgctggagcaaattacagttgtgtctagaaagaggaaatgagagtcttttttagttattagttgatgagattaaaaatgatgcaagagatgtatcaagtggataaatctcattaggtatcatctaccctctagaagataaatctcattataaggtaactagaacgtggtctgttccgcaatgttcattgtaaaataggaagcccacttaaaagtttcatgattgacgtgttagaatccagagcatgttgtaatttactttcaagagtggttatgaccttaagtgttgtatattgttcatgagcagggtgaggcactttttcaaactcatgagaacctagagcatcttgccatgatggagagggttttagggccattaccccaacatatggtgcttagagccgagtaagagtgattatgctgcttattctagttgtgaatctgttgctgaggaaggtcttacattgtgcctgatattgttgcagtcgtgctgagaaatattttcggaggggcacacggttggattggcctgatggtgctacttcaagagaaagcctgaaggcagttgggaaactgcctcgcctgccgaacttaataatgcagcatgtcgatcattctgctggtgatttgattgatctcttgcaagggctactacagtacgatccaattgacagacttaaagctagagaagcactaagacatccattttttacaagagatcatagaaggttcagctaccccttataattggagattgggatctttgtcaaatatttgattttgagcaaacctagcatatcgaggcatatgttgaatggcatttttgtctcttaaagtatatttgcatgattacataatatatatttacttttacctatgtatagtgtatactcattactttcttgaaggtgagatttgcgttcttttttgtc

SEQ ID NO: 24317 - DNA, 861 bp, Gossypium hirsutum
  Clone ID: GOSHI-09MAY01-C101446_1
ttggagcaaacatgggggatccagttactgccaaccaggatgaaaacaggatgtgtggccctagttttatgtctaactatcagtgttgatccacccgatgtaataaaaattctccttgcgcaagaatggagtgctggactggtttggcttactcaatgtcatcgattccatgctctagttgttgttggaagattccttgatatgggaccatgggctgtagatctggccccttctgttggaatatttccttatgttctgaagctgttgcaaacaaccactccagaactgcgtcaaatccttgtcttcatttggacaaaaattttgccactccatctgaacgagcaattaatctaggctttgtgtacccacagacactctactgtgggaagatagttttcgtgagagggagaaacccataagtttttctctgccggttctgtttgttgtgatgttgaaatcgcctgcttcatgggtgaatcatttcagaacgaacgtttcaatcagatcgagtttcgggtttggtgagcgtcaaacgcgccgtcgcttcggctcccaaagtgtagaaaatggtcatcaatcgtgatattgaaatcccgttcttcatcggattgtgatttcaggtatgagtttcacctctgattttactgtttggtttctgattgaagaaaatcgacagaaatttgtttccaacttgaaattaatctctgtttttgtaaataataactgatccacctttgagttggcaaattttgtttatccctgcattttcccggaagccaaacaggagagttcaatgttctttatttcgaaaattttgtactcttgctgtaataatgaacaaattttagttgatcccttgat

SEQ ID NO: 24318 - DNA, 270 bp, Gossypium hirsutum
  Clone ID: GOSHI-09MAY01-C101746_1
gtcgtcctcggtttcaacgtccctgcggtgcgtatcatttatcgtgtggcacactagataggaaatttaaaactgagaaaaaagaaaaaagaaaaaagaaaaaaaaaattaaatttttttttaaaaaaagataccccttacattgcattatccctttgcgaatttcatcggatatatatattatttttcttttcacaatttaatttgcctttggtttcggtgtagtaaatgaataaaaataatatatatatccgatgaaattcgccgcga

SEQ ID NO: 24319 - DNA, 593 bp, Gossypium hirsutum
  Clone ID: GOSHI-09MAY01-C101656_1
ccgggttcacccacgcgtttttctccttttagtttgtagatctagtgggggggcgctgtgttcactccaaatgctttatattttttttcaatttgcagatctattttatgagtatcttcaatatcttcccaagttgtgatggacaaatgatgatgtcgtctttgaaccttccccgatcatcaatggtttcttttggaaggggggtgggttgtataaactcaaacagtggctcttcatcgacttcctaatatgtttatgttttgaaataataaatgaatttgagattttctgatcggcctctctagtttgatggatgctcaattattttgtcgattcccccccccgctctgaatcatctgaggttgattttctgatcgtgatagttgcttgcaatcgccccaaatatgttgtgtgtgagttgtgacgaagtcaaatatcaacgggttgtaatgttctattgatgttaaagttgaagcctttgtcgtgtttatggagcttgtccttcccccccaacaacgagggtttgttgtttttttttctttcccccgaattgttagatcccattcatggaatgacttaatgattttcccctt

SEQ ID NO: 24320 - DNA, 588 bp, Gossypium hirsutum
  Clone ID: GOSHI-09MAY01-C101096_1
cgccagtcctgttggtgttcttgttcttgcgaaggttaaggaaattgttaaagaggtaaatgctggtttggagtgtggtatgggagtggaagattatgatcaatggcaggaaggagatatccttgaggccttcaacacggttcaaaagaagcgaacacttgaagaggcatctgcttcaatggcagccgcactggaaggagtaggagtcgagttgtagaatgacacaagcttcaaatggttttcttgatggaatcaaaattttcatgaaagaggcaaacccccatgtagtgtgtctactgctgctctggccattgctcaatgtgcattgatataagagattttgcctcgtgcaacttattttggaatgcagcatgttgaggtttgtggacatgcagatttttgccattgttgttttatttttatttaatgtatgctggatatattaacatctcattccagctttgcatttggaaagactggatagttggttacatattccacaggattcgttgtagaaaataccttggaacacttaacccaaaatggggaaaaggaatatagttggataagtgtgggataatgttcttg

SEQ ID NO: 24321 - DNA, 727 bp, Gossypium hirsutum
  Clone ID: GOSHI-09MAY01-C101376_1
cccagcgtccgcttctccccctgtctacattagtcctcttgacctgagccccaagtactctgacaagttcacaggtcttcaggaatattgcaagacgtatggtgaaaattattgtttggggcagctagttttttggtataaccagaccagtgttgatccagattccagcctgtttagagcaagtaggggttgcttatcattacctgacattggttgcttctacgccaaggttcagaagccatcaaggcatcgtgtttatggcccaaagactgtcaaatttatgctgtcatggatggagaagcaagctcagagaccatggccgaaggaccgaatatggacattcaaaggtagtccgagaatctttgggagtccaatgctagatgcagttttgaacaatagttcactggacagagagatggtgcaatggttgaagcatagacctgcgaaattccaggcaatgtgggatagatgaggacattgttgtaggggttgagtttagtggggagcagtaggatattattagccaaatgcggttgtaaatgtttttggaatgatttgtcaattttagtttggcagctacccttgggttaagaggggtagttggtgaaaaatcattccaaaacatcattttcttgtgcccctttcttctcattcttatgtacagttttcatctttgtattctgtaattcatttcgtttagtaggccttttgtcaaaagaattttcct

SEQ ID NO: 24322 - DNA, 681 bp, Gossypium hirsutum
  Clone ID: GOSHI-09MAY01-C101226_1
tccggccagcttggcaagctgcaactggtggttttgatgccaaggcagcggaaggattcaacaatcgtatcataactggcaccatttttatgcgattatgtggattaaattaacaatatgatctgaaattacctgctggaacgacccttggttggctactttcgatgctggagaacctgttgctttaatggctggaatcacgtgtattcatgcagctagttatatcagtctggtatcggtgagacaaactcaagacccctgctatgaaataatccggccaagctgagttgttacaccaaggtacatttttgtttgctgagtaggatttttcaagagaatatggtatctgaagtttataaatacaccatttccagaatctgtaacatgataatttatacgatagtttcatgtactttctaaggttgtaccataaaaaaaatttaagtggtgtatacgtgagctttacattcatggaatagaaattcttttattgtaaacctattctctcatatagtttcctataagatgtatatagactttaaccttaaactcggatgtgagtgtgagataagatatctgtttatctcgaatatatttaattttcttaaaagccttttcatgtatttggagtctttaaagcgttacgttcttggatcttgaatataagtactttagatgctc

SEQ ID NO: 24323 - DNA, 503 bp, Gossypium hirsutum
  Clone ID: GOSHI-09MAY01-C102986_2
gtgggagtgccaatcatgcactttattgaatccaccattagccccaatatgcaagctttgctgcacggaaaggcccagagacattggcaccaagtacaaattttggtcctgtaagttttgcaccttggaaaacagtgtgaaactggataaatgctcagcatgtgaccaatggagatattcacatggtgctcctatatcaactccagctcccaacgttggcacatgagaagtaatccaagtcggttgatttttccttgttactgcacgtgttacaagagatagggagcattttcaacagttgttttggttgcttattacaatgccttgttttgtcttggcagccctgtttttattcatcttttggatgctattaaaatgttctattgattagagtgatgaggggcggatctgggtagaatcacattttggggcgaactgatgatgttatttcataatcttttcaatgtaaataccagctcctaccatacactcatttgttgtct

SEQ ID NO: 24324 - DNA, 556 bp, Gossypium hirsutum
  Clone ID: LIB3829-017-Q6-N6-D6
gaaaaaaaaagagaactgtatataaataagacaacaaatgagtgtacgataggagctggtatttacattgaaaaaattacaaaataacatcatcagtttgccccaaaatgtgattctacccagattcgcccctcatcactctaatcaatagaacattttaatagcatccaaaagatgaataaaaaaaaggctgccaagacaaaaaaggcattgtaataagcaaccaaaacaactgttgaaaatgcttcttgtcatttgtaacacgagcagtaacaaggaaaaatcaaccgacttgaataagatgaagcaaattggcattgatgagatattacttctcatgtgccaacattgggagttggagttgatataggagcaccaagtgaattctccattggtcacatgctgagcatttatccaatttcacactgttttccaaggtgcaaaacttgcaggaccaaaatttgtacttggtaccaatgtctctgggcctttccatgcagcaaagcttgcatattggggctaatggtggattcaataaagtgcatgattggcactc

SEQ ID NO: 24325 - DNA, 821 bp, Gossypium hirsutum
  Clone ID: GOSHI-09MAY01-C102966_1
gtcgacccagcgtccgtagtgataacgatgagtggcaagggaccgatgattctggcaacaacgaagctgagttctcagatgaagatgaggactctgttgttgaatcacctgtatgtgacgaggattttgctcatcatcatagcaaggaaaacggcttgtgtgttcttgatgaggatattgcagacgaaatttgtgataaccaaagttcagattttgctatcaaagattcagaaacatatggtggaaagttgtttagaaactgtggttctgatctcatggatcaggtgcatgggaacaccttgaacgatgtctcccgaggagaaagagaagtccaagatgactcatgcacatcatctgatacagggggtgcttcacaagaaacccatgtccctgctgacaacttcaatggtggtaaccgtggatatgtcttggaaccatgttatcccaaaggatgggataccagatatccaacttgccaaacgaatttcagagatgattcatgatattagagatgaaaaaaataaataaaagagcagttttggattaaatcataggagtttttcccttggctgattgaattctcatcaatcaatcattcacgtataatacaaacatgccttcattgtaacatagagaattgtaggtggtgattgggtttgattctttttggtttggggggggtacttttaaggtaaagctatctattatcttttataagacttccactgattttatcccattatacttgggaaaatatagatgtggtggctcgtaatttaattaatttttttaaaacttaaaaataataaaaatatttttat

SEQ ID NO: 24326 - DNA, 585 bp, Gossypium hirsutum
  Clone ID: GOSHI-09MAY01-C102576_1
tagcgttgaactgattgcaagtgcaataggagttgtgtcagcaattatagacaatgtcccacttgtcgcagcaacaatgggaatgtatgatctcacttcatttccccaggactccgagttctggcaacttgttgcatattgtgccggtactggtggatccatgctagttatcgggtctgcagccggagttgcatacatgggaatggaaaaaatcgacttcttttggtatttccgaaaggtgagtggttttgcttttgccggttacgctgccggtattgctgcttatttagcggttaataaccttcacatttccttaccctcgactttagctcaagttcctttcctttccggttcgtaaattacaaagatatacaactatttttcataccatttggataagtttggtgaagacatgatcttcccttgcttacaattcacgaaattttgagggaataaaaggttcaaatagttatgaaatctcatgtattgtccacaaacattatgtaaagaccatgaattaagtcatagtgacgtgcatgtgaagagtgaatgtgtatcaatggctatgccgagcttgagaacgtg

SEQ ID NO: 24327 - DNA, 517 bp, Gossypium hirsutum
  Clone ID: LIB3829-023-Q6-N6-C5
agcttgaagctaaagtttggatccttaaaaggtaaactgttgaaactgcagtcaatgcacctgccctgcttgagtacaacagggttctatagagagaaaaatgctcttaaccgcactcaaattcacgacctcaagctcggcatagccattgatacacattcactcttcaatgcacgtcactatgacttaattcatggtctgtacataatgtttgtggacaatacatgagatttcataactatttgaaccttttattcccggaaaggaaaggaacttgagctaaacttgagggtaaggaaatgtgaaggttattaatcgctaaataagcagcaataccggcagcgtaaccggcaaaagcaaaaccactcaccttttggaaataccaaaagaagtcgactttttccattcccatgtatgcaactccggccgcagacccgataactagcatggatccaccagtaccggcacaatatgcaacaagttgccagaactcggagtcctggggaaatgaagtgag

SEQ ID NO: 24328 - DNA, 1057 bp, Gossypium hirsutum
  Clone ID: GOSHI-09MAY01-C102696_1
acatcatcacgcctatcacagctttgttgctgacggtcgtcacagtgtatatgaatgagtaaagaagaagctcgagaaacacgagcatggaagctcactgctttccaaaagctaaatttcaaagccgaggacgtgctggattgcttgcaggaagagaacattatagggaaaggtggagctgggatcgtgtatcgcggttccatgccagatggtctccttgttgcaattaaaaggttggtgggtcgtggaactggaagacgcgactacgggttctcggcggagattcaaactctgggccgaatcaagcaccggaacattgtgagactgttgggttacgtatcgaacaaggacacgaatctgttgctgtacgagtatatgcccaatgggagcttgggagaaatgttgcatgggtcaaagggtgctcatttgcaatgggagaggaggtattcaattgccgtggaggctgccaagggactgtgttatcttcaccatgattgctcgcccctgattatacatagggatgtgaagtccaacaatatactgctcgatgaatattacgaagctcatgttgctgatttcggcctggctaagtttttgcaggatgctgatgcctccgagtgcatgtcctccattgctggttcctacggctacatcgcaccagagtacgcttacacactgaaggtggatgagaaaagcgatgtgtacagttttggtgtggtgctgctggagctgatagcaggaaggaaacccgtgggggaatttggagacggggtggacattgtgtggtgggtcaggaagaccataccacaacacgctgatcctgcttcagtgttgacaattgtagaccccaggttgagtgagtacccattgacgggtgtcatccatctgttcaaggtagccatgaaatgcgtcgaagagcagagctctgctaggcccaccatgagagaagttgtgcacttgctcaccaatactccacagtctaccccaaggccatgcctactttccgcattgatgctcattgcatttggtcagtcttcagctcactggccgttgtagt

SEQ ID NO: 24329 - DNA, 506 bp, Gossypium hirsutum
  Clone ID: GOSHI-09MAY01-C102636_1
ccgggtttcgacccacgcgttcgctttttattatgttcttttagggcttctcgcaaacccttgagcgccgtcggtcagccttatacgcacggcctccgtcgatgcccggtctccaatcgcgacggagagggcaccaactcggcgatttcagcgaaaaggtatgaaggttgctgaggggtgccgcgcatgtggaggcgcaactctcgcggaggaggcctctagctccgagttgtgcgccgatcgggactgctggaggcggcggctactgctagggtttctcaacccttccattttccattagtttcgggcctggattgggaattagctattgggcccgtttattgggcttgtattttttctttgggtttattcgttaataggccaggccaaaattggtattacacataatatgtttgtattatattgttttacttgtagtttgaattgttatgtaattattgttttttggcatcaaaaataaaaacaaacaaatcgttgagctagct

SEQ ID NO: 24330 - DNA, 1007 bp, Gossypium hirsutum
  Clone ID: GOSHI-09MAY01-C102396_1
cggcgcgtgggcggacgcgtgggcggacgcgtgggttttttttagcttgaaagagaccatttttttctttactatgaacatacagtgattaaactgaaaattacataaacattcagcaacttatcaagaaaatacatgagaagaatgaagtgaaaaggaaaagcggaaaaaagggaaaatgtgtttaagaaaatatgaagaaaattgtacatcactgtagtataaaacaaatatatgtatgtatgtatgtatgtatgtatgtatatcagcttcactttggtttcacgtttgaattaagatctccaaggctcttcttcattcttcgcataatcaaaggaacaggcttttccaaaacagacacgttaatgttgttccagacatctgatttggttggcagttgcgcgattttctcggcaacctccaggtcttcgggaagaactgaaccgaacacggtgtatgagttcttccattctccgtggttcgccaggcttataaagaactccggaccagagccaatccaggcaactgatccccttcttatggtagggcaagcctccgtcggcatcttgttgaatggggttccttgggcttcaagaattccttggatcagcgcgaatggtggaccataagaagcatcttttatgtgatttccttgtggatcccaagattgtcctcggctttttgcacgatatatttggcaacccgcacaatggcgcaatgtcaacaactcgagaatgtaggtcacagaatatggagcacagtctgggaaaagctttatatgaagagtaccatattctgtttccatctcaacaataccctctcctttcccgaatacgatcccggatgtccaactaaccgtttgacctgcctcttgcctatcgggggacaaagtatctttttgtttcttcaaccaacactctccaaatctcgacccacaggcatccttgttcccacagaagacccaagtatcgcacaagcaaggcccgtcattgccactacacatggcc

SEQ ID NO: 24331 - DNA, 827 bp, Gossypium hirsutum
  Clone ID: GOSHI-09MAY01-C102336_1
tcggaggaactgttaaggctaattccagaagagaatacaggccttggttacatgtgttgttgattagactttatgctcaggagaataatttagagaatatggagaagtttattgacgaggcttttgagctcaaggcctctgtatttactgttcctgtaatgcgttgcattatcagtacttatttccgttacaattcagtggacaaactggcaagttttataaagcgcgcagaatgtgctggatggagaatctgcaggtctttgtatcattgcaaaatggtcatgtatggcttacagatgcgcttggaagaaatggagaatgtccttaatgagatgaataatgtccgcatcaatcccactaaaaagacatttctcatattgtccaaggcatacttaatgtgtggtaaaagacataaggttgagcctgtagtgggattgatgtgcaaacgtggctatcaaattccgttggaaacatttctttcataataaatcttttgtgaaccaatgtcccgccagaagttgcaggaaacgtttacccgattagcatttctggttcatcatgatcccagccctgaatggagatttgaaattacccgtaggtacacatcttgtcttggtttgacttacccccccaagtgttggtgttctatgaaatgttgtccctaggaaatgatacatcatgtccttgcccccccccccccaaaaaaaaagcgtcacttgagctctttcctccaatttttattgtatgattcaccacccatcatagttttttctggcattgtgaagttatttttcatcttaataacaatcatcatttgatcctagcct

SEQ ID NO: 24332 - DNA, 511 bp, Gossypium hirsutum
  Clone ID: GOSHI-09MAY01-C102306_1
atcagattaaagctatactggttgtcggcatatgtacagacatatgtgtactggattttgtatgttccactctgtcggctcgaaatcgtaggatgcttacccctcttaaggatgtgattgtctactctggtgcttgtgcaactttcgatcttccagttcatgttgccaaagatatcaatggtgctttggctcatccacaggatcttatgcatcacataggtctatacatcgccaagggaaggggggccaggcttgtatcagaggtctcatttgctgctctataaacgacttgttaataagagatctaagactgctgcaaatgtgtattgtatgtgaagactatagagtacaattaaaagtaattatccccctccaaaaaataaaaataaagttataaattgctgtttttccaggttttattttctaaaattgaaatacttgtcattttttctttttgtgctctgaagtgccatttgcaatatcttcaatgaaacaagaaagttcatattgg

SEQ ID NO: 24333 - DNA, 548 bp, Gossypium hirsutum
  Clone ID: GOSHI-09MAY01-C103916_1
aaacgatggaaaagatggaaaaaaatatattaaaaaaagcactagatgacaatgaaaatcattggtgctgtctgtcatttgggttaacatacgataaaagagtcgagtttgggacctagctggcatcaaaattgcggaaatctatctgctaaaaaattagcagcagttcatgcccatgttagaaaactgactgggcaaggcagagccgccaccacccaattccctattctgggtcttaggctttaccattgggggcgtccatttgctaaaaccaagcgctccacctcttggtttaggttccccatttactttgccaaaaccaccgttaacattaggagtggcagagagccacttggagtgcatgtaggaagcggccctccatggtggaacatgcaaccctgcctatctaaacgactgtttgggagccgagcaaaccacggatataatctccctcactttttcttcacttcctataaagatggatggccgatcatctgccaactccttgtaggttggtgaacgccttgcaagttcaaattggcacttga

SEQ ID NO: 24334 - DNA, 593 bp, Gossypium hirsutum
  Clone ID: LIB3829-029-Q6-K6-D8
attcctcttccgaacacaaccactcgtttagcccccccttttcaaaacaaaacaaaacccttaacccttttcattagggtttggttcagcatgcagccgccagaccaccatcagtccgatggccgacggcgcgaaccacagactctgtcgacggaggtcgtaaccatggagatctggtaagtcacttctttccctttctttttttttttttttaaaaaatcttcaaatcgtatttcactctttcaaaaaaccaggcgaaaattcaaagaaaaacgttcgaccctcgctcgaatctccttattttcgagatacttgggtgttcatcggtgtcgttacaaatatttctttctttttatgctacaatcgcaagaaaatgaggagagaaacaaaagaataaacagacttgaaaatcacttcttgatttgtgatctctacttttttctatttctttgctgtatgtgcatgtgtcaaaaaaaaaggaaaatacatttcttttggctttatagccgaaatctcgaaaaatcaaaataaaaaatacaatttctctttttcgtatttgctgttgtggtttgtctgtttcttcgctggtacgg

SEQ ID NO: 24335 - DNA, 359 bp, Gossypium hirsutum
  unsure (1)..(359): unsure at all n locations
  Clone ID: uC-gsflmaxxa055h01b1
tcccattagggtttggttcagcatgcagccgccagaccaccatcagtccgatggccgacggcgcgaaccacagactctgtcgacggaggtcgtaaccatggagatctgggaagtcacttctttccctttcttttattttttaaaaaaaatccttcaaaatcgtattttcacttcttttcaaaaacaaccaaggccgaataaatttcacaaggaataaaaccgttncggacccctttgcttcggaaattcttcctttaatctttcggaggataacctttggtggttgtcttcaattcgggttgtccggataaccaaaatattttccttttctttttatattgccttacaaattcgccaag

SEQ ID NO: 24336 - DNA, 693 bp, Gossypium hirsutum
  Clone ID: GOSHI-09MAY01-C134736_1
cattttgttcgattcttcctttattaatcaatcttttagctccctaacttcaattttcttcttaggataaccccttgtttttcaggatggagcaccactcgggtggaagtgggaccaacaagaacaaacaaatggtggagcagttgcagcgatatggagtgatttcatcaaagaaggttgttgaagtaatggagactattgatagagcattatttgtacctgatgggaccccagcttatgtcgatagtccaatggcaataggttacaatgccaccatttctgcacctcatatgcatgctacctgccttcagttattggaggaaaatttgcagcccggcatgcatgctttagacattggttcaggaacggggtacttgactgcttgttttgcaacaatggttggaccacagggtcgtgctattggtgtggaacatattcctgaattggttgcttcttctataaaaaatattgaaaaaagtgctgcggcttcgccattgaaaggaggttctctttcatgcatgctggcgatggccgaaaaggttggccggaacatgcaccctatgatgctatacatgttggagcagcagcacctgaaataccttcaccccttattgatcaattgaaacccggcggtaaaatggtgaatcctgtagaaaaatattccaagatttgcaagtggtggacaagaatttg

SEQ ID NO: 24337 - DNA, 741 bp, Gossypium hirsutum
  Clone ID: GOSHI-09MAY01-C134696_1
gatcgcaacaactgccgtagacatcatagacaatgctagaatatttcaagtgcttgtacactcccaactgaatctgtaggttccaatgataggactcgttatgggagagaggggtttgatgtcaggatccttgctgctaaatttgggggatttctcacttttggttcactcgaggcaggactagtatcggcccctgggcaaccaactgtgaaggaattattaaatttatacaatatgaggcttataggacctgataccaaagtctatggtgttatcggaaatcctatcggtcacagcaaaagtcctcacatctacaatgcatcatttaaatcctccagttttaatggaatatatctacctttattggttgacgatgtctcaacttttattaccacttattcagcccccgattttgctggatacagttataccattcctcacaaggaggctggacttaaatgctgtgatgaggttgatcccattgccaacgcaataggagcgattacttgtatgatcaaaacatcaactgaaggaaaactgattggttataatatcgactaccttggtggcattgcacctattgaagaagatctaagagtatccaatggtgccccccttgcatccggttcaccattggctggtaaaacatttgtcctaattggagcccgtcgtgctggaaaagcactggcttatggagcatatgaaaaaggagctcgaatcgttgttgccattcgcacatac

SEQ ID NO: 24338 - DNA, 724 bp, Gossypium hirsutum
  Clone ID: GOSHI-09MAY01-C136056_1
attcaaatttccacattgtttcattttcacccctaaattcccgttccactatatctaccccgttttcgtcccatttttttccttaaattctccccatcttcaaattctctctaattttcaactgctttttttttccttcttcaaattggtgaaatggctaaagtcggattttgtcttacctttgttttgttcattgttgctgaactcacttctgctgctgaaccgccggcgcctgcgcctgcgctgtcactcggtgcagacttaccgcaactcgctcctactccggtaactggatctcccgactccgcgccatatatctcaccggtaatggatgcttcgccaccggcaccaatggggccatctccatcagatctggcgccaggaaactcgcccgcgagttctcccgctccttcaccggtcgatgccagcgatatcaaccacagcgacatcaacgcagaaggaagcgaagagaagagcggcggcgatggaggaatgagcggcggaaaaaaggcgggaatcgtgtttggcgtatggcggcagcgtgtttggttggcttcggtggattggtttacaaaagagacaagagaatatcggagatctcagtacgggtacgccgccaggagcgaatttctgtgaagaagatgaacagtacaaaggtttatcattcaaatgtattactacatttgattttgatttgatatttattttttattctttataaaga

SEQ ID NO: 24339 - DNA, 672 bp, Gossypium hirsutum
  Clone ID: GOSHI-09MAY01-C136216_1
aagtaattcaattagagttccaaggaattccgaatctcatttctcaaaagggaaaaagaagagagaaaaatgagcacatcggagctgccaaggaaagaagccaatgtcctaaaaggccacgaaggtgcggttttagcagccagattcaacagcgatggcaattattgcctcagctgcggcaaagaccgcaccatccgtctttggaacccccaccgtggcatccacatcaaaacctacaaatctcacggccgcgaagtacgcgacgtccatgtcaccctggataactctaagctgtgttcttgtggtggagaccgacagattttctattgggatgtttccaccggtcgtgttattcgcaagtttcgtggccatgacggcgaggtaaacgcggtgaagtttaatgagtatgcatctgtggtagtatctaccggttatgatagatcgttgcgtgcttgggactgtaggtctcacacactgaacccatacagataattgactcattttcggacactgttatgtctgtttgtttaaccaaaaccgaattattggtgggagtgttgatggaactgttcgaacatttgatattcgtatcggtcgagaaatatcagatgacttagggcaacctgtccactgtatctcattgtcaattgacaataactgcatattaactac

SEQ ID NO: 24340 - DNA, 698 bp, Gossypium hirsutum
  Clone ID: GOSHI-09MAY01-C130336_1
gggtgtgcctgcctttccaggatcaccacagattcaacagtcatgcaccacattctcttcaaaggcatgcacaaacaagccagggtgaatagttaaattttggttcttggcatgcatgctcagggttttggataaattttcacttgttttggcataagctttggctaatgctaggtatataagtaggccgttggagaggaaggagcccatgcatctctcatttatgatcatattaagtggtagttccagacaattcgatatgacgagaccatggtagaattaatatacagagcaaggtttgacgtgcgggttgaatcttgttacacctcagggctatatatagaagaaatttcatagaagctcttttgatcaacaacagtctatttgatggttggtgagtggttcaatcggccttgcactagtttcagtcaatttcccaatgtttatagtcttaagaaagggtttcaggatctcatacttaatctaaagatggctatatatatatactttttttttactgtggagaatattatatatgttaccacatgcagtttaagcatagtgaaaggttagagtggggtgtaagaatgaattggtggacaaacaatttttttttttttggtgttggagatgattttgttttttcgtacatataaattaaataagttattaagagattcaccagtaaaaaaaaaaaa

SEQ ID NO: 24341 - DNA, 591 bp, Gossypium hirsutum
  Clone ID: AW187044.2
aaggtaggtaaataagtaggccgttggagaggaaggagcccaagcatttatcatttatgatcatattaaggggtagttccagacaatttaatatgaggagaccatggtagaattaatatacagagcaaggtttgaagtgggggttgaattttgttaaacctcagggatatatatagaagaaattttatagaagtttttttgattaaaaacagtttatttgatggttggggagtggtttaattggccttgcaatagtttcaattaattccccaagtttatagccttaagaaagggtttcaggattttaaaattaatttaaagaggggtaaaaaaaaatcctttttttaaaagggggagaatattatatatgttaccaaatgcagtttaagcatagtgaaaggatagagtggggtgtaagaatgaattggtggaaaaacaattttttttttttttggtgttggagaagattttgtttttttgaaaaaataaattaaataagttattaagagattcacccaaaaaaaaaaaaaaaaaaaaaaaaaaaaaaaaaaaaaaaaaaaaaaaaaaaaaaaaaaaaaaaaaaaaaaaaaa

SEQ ID NO: 24342 - DNA, 644 bp, Gossypium hirsutum
  Clone ID: GOSHI-09MAY01-C132846_1
ctcaaaactcattatccagttattttgtcccttcaaaaaaacacaacaatggagttttccaagtcatgttcttctcaccatgttccagttatggtcgtcttagctttgatgtcattgatgatgttgttgttgcctgttaatggacagaccatcaacaatccatgcactccggctatgcttaccactttcactccttgcttcaatttcctcaccaatagcagtgccaacgccacgtcgcccagcgccgcttgttgtaacgctcttaaaaacctcacgagcagtagcatgggttgcacgtgcctcatcgtcacaggaagtgtacctttccggcttccgattaaccggacccttgccgtctcccttcctcgagcttgtaacatgcctagtgttcccctccaatgcaatgcgccccgtggtgcacctattcctgctccaggtccagtctctctagcacccaaactctcccctggagcttcaccatctttaagcccccaaagtcccattgtgccggaaccgacaccatctgccgaggtgcctgtttccggcaccacaccggctctaactccaccatcgtccacagcaggttcgggggccccgacggccgcaacggggagccgccctgttctcacccatcactgccaact

SEQ ID NO: 24343 - DNA, 744 bp, Gossypium hirsutum
  Clone ID: GOSHI-09MAY01-C132546_1
gtcgaggaaggcactcggtttcgtgaaataatgagggaatcctttcttttggctggtgcaacgaacatgggtgattttctaccgatggtgaagtggttcgagaaaactgagaaaaggatgatcaatttgttcaaaagaagagaagcatttacacaagaattgattgatgaatgtcgacataatatgaaaattaggaaaaaagtagtttatccacagacgaaaaaaagaacatgattgaagtcatgttgtctttgcaagaacaagagcctgaaaattacaaggatgaaactattagaagtctcatgatggttttacttttggctggaactgatacgtcatcagggacagtaaagtgggcaatgtctttccttttgaaccatccccaagtctttaacaaagcccgaattgaaatcgatacagtggtcggacaaaatcggttaatcgaagaatcagattttcccaatcttccttatcttcattgcataattaacgagactttccgaatcaagcccaccgctccattgttagtacctcacgagtcatcaaaagaatgtttagtgggaaggtaccgtataccgcatggaaccatgttgttggtgaatgcatgggctatacaaaacgatcccaacaattgggaggaacctgatgtgttctagccacagagattcgaggtgtggatccgtcgaacatcgcgtttaatttaatgccgttcgggaacaggaggcggcggtgttccgagaaagg

SEQ ID NO: 24344 - DNA, 729 bp, Gossypium hirsutum
  Clone ID: GOSHI-09MAY01-C132076_1
gaagaaaacatacaaaaatttcccctattttccccgaagttagtttcctcctatttaagtcgctctttgtccctaaaccagaaaggttaaggcagaagaaaaagaggaatagaaaaggagaatctaagaagcagtcgtgttggattctttcgcttttacaatcaaacccagctacagtttacagtgttatctaagtttcaatggaggacgatacttggagctttgccttctcagcttcatccaggagctatcaatccactgttaaatcccaaagtgatctttgtattgattttgaagagattgaagaagatgatgaattgatgacggaatacccctgcccgtattgttcggaggatttcgatttactgggcttgtgctgccatattgacgaggagcatcatcttgaagctggatatggggtatgtcccgtttgtgctcacagagtagggatgaacatggttgaccacataacagcacaacatgggaatattttcaggagtaaccacaaattaaattttggtaaaggcgactcttattcaactctttcttccttgaggaaggagttgcatgatgcacattatcagtctcttctttccaggtcatggtcttcactctcttcgtccaatacagcccccgatccattgctttcatttctttacagtgcgactccagctgattcatccgaaagtgtacagcccgtcactcctactgaagtgaccatggaaaaaa

SEQ ID NO: 24345 - DNA, 638 bp, Gossypium hirsutum
  Clone ID: GOSHI-09MAY01-C133506_1
gttgtatcgggtagaaaacggtatttggatgtgctttctacgttttccgaaatgaggtcattggcggtaaatttgaacgagtacactttctctactgttcttaagagcttcgccggtgcatcagcatttagacaaggtttaaaggctcatgcccttttgattaaatacggtttcattaatagttctatgcttaggactggtttgatcgacttatattttaaatgcggaaagattaagctcgctcaccgcgtgtttgaggaaatccctgagagagatattattttgtggggggcggtgattgctggttttgcacataataggatgcaaagggaagctttgaattatgctagatggatgataagtgaaggtatatatcccaattctgttatactcaccacgatacttccagtgattggggaagtttgggctcggaaagtaggccaggaagtccatgcttatgtggttaagacgaaaagttactcgaagcagttgtctattcagtctggcttaattgatatgtactgcaagtgtggtgatatggaatcgggcaggcaagttttctattgttctggagaaaggaatgcgatttcttggaccgctttgatgtcccgatacatatcgaatgggaggcttgacct

SEQ ID NO: 24346 - DNA, 570 bp, Gossypium hirsutum
  Clone ID: GOSHI-09MAY01-C129806_1
ggtggttacaattttgggtcattgtttgtttggtccttccaattcacaagatgaaaaggacgctgcgtccatcgccattaggtgtctatacgcgagggcctctcatgatttggcaccacaagcgatattggcattgcaaagtctgattaggctggataagagtgcaagagcagcagcaaaggcggctgctacggttgtggcaaacgcgccttcaaatgctaacacacctagcaaggctaagaagccagaaatccttttggtttccaagtgatttcaaggtttgcatgtgctggtaatgaatatgtatagttgactctagtaatgtatactacgtggaaaatcagttttactactaatagttttccttagaattgaattgattatgcctttttcctttaattatgttctgtaagctgtgtatcattgttctgggtttgtgattggttgaaagaatatgtgggttcaacctgtagtatcaggctttctgctttattgatttgataaggttgaagcaaatgttggggtttgttgtgaggttgctatcatcttataattccacttccttatctc

SEQ ID NO: 24347 - DNA, 674 bp, Gossypium hirsutum
  Clone ID: GOSHI-09MAY01-C129576_1
gggataggttgtttgctgctcattccattttagctgtcttctacttgcatgatctacaatctgtaaatgtcgattgcacattctagtttctacaacatgcttaaggtcccaaagcatcaggttgcaggtcacctaccattgatggaaaacttggccccctcgtaaatgattcaggacgtttctacaagcctctccagggtgatggacgtggtaacaaggagttggctttctatgaatctttttcttctgatacacgggttccagaccacatccgcaaatattttcctgtttgctatggcagtcaacttttggaagcatcaaacggatctggcttgctccatcaccttgttttgcaagatatagtttcaagtcatcgcaatccatccatcatggatgttaagattggttccacaacatggtaccctgaaccatctgacaactacatccagaagtgccttgagaaggatagaagaaccaccactgtgtccctacgctttagaatagctggtttgcacctatatgggggaaacgaatcacgatactggaaaccaccaaggaaggaagtccccagttttacagttcataatgtcagatccattctgaaaaaaattgtttcatcaaattctcccatcggttaatgacaactctcaattttcttttgctcccagcatacc

SEQ ID NO: 24348 - DNA, 632 bp, Gossypium hirsutum
  Clone ID: GOSHI-09MAY01-C129656_1
cagggtcaattctattttaccccttgctgcatctcatggttttcgactaggaacaccttttcccaagtggcaccgtcgtggtcttccggttctagaaggctgtaagttgatgatttatccccacaatatccatgtctgtgattagcagctttttggatattggtatctggtgtgtattaattagttaaaatccatgctgcgttattgctttgtagttgaacatttggtccggactgaccctgttgaggacaaagaaggctttttcattgctctgtttgtcagggaagaagggtccgtaatccacccatcgctgagccctgattcatctcatctgtctcttgtaaagcgtactaaaaggaaaaatcttagcaagaaagaggcgagaattagaatgccaaccctgtatggcggaatgtttaaaatgtttttatattctaaacctagttttagggttaacctgaaataacaacatgctatttgatttaaatttttttaatcaactctgttttgtcatgttacctcccaagttttaatacaatttgctgcgagtctttccctttaaaaaaaagccgaccaccttcttgttctctgcgtgcggcgctgtcctcccttgtcttattataaataatttt

SEQ ID NO: 24349 - DNA, 662 bp, Gossypium hirsutum
  unsure (1)..(662): unsure at all n locations
  Clone ID: AI054979.1
attgaatctgacacacttcaaacatcggcgtcagtgtctaatcgcgttggcaccggtgtgctgtcgaaaaagacgagtccaatcaacggagcttttaacttttaaggtgcaatcatctctccccgctgggaagaagagttttttgcataagttgatgtaagtcatatgctacccactactccccaagatcttaacagtacttgtaccttattgatttggggaaaaaaggaggattgtcggagacaagaaaatctttgttttgccaatggctgcttctacaaaagttctcgcccttnagagtccaactcaaactggagagtggacaggttgttctaccccgtaagggtagacatagaaggaattcccgaaaaataacaattgcaaaaggacaacaacaagaacacagccgttgggttcaactcgatcttaagattgaccctgagagacaatcnanacttatgcataagatcnagcatgtatgaagaaanttgaaactctcaatnttcttggctttttggatcagatgcaaattcgaaagtcttgatcactttacagggttttggatctgagtcgcaactgcaatggtgatatatgtattggcagcatgagtctcatgaacttctgacttcacttagcctgactctgatgaaagaagtcactgn

SEQ ID NO: 24350 - DNA, 508 bp, Gossypium hirsutum
  unsure (1)..(508): unsure at all n locations
  Clone ID: uC-gsflnu33B016f04b1
ttcacgcgtccgcacacttcaaacatcggcgtcagtgtctaatcgcgttggcaccggtgtgctgtcgaaaaagacgagtccaatcaacggagcttttaacttttaaggtactccacacaaggaaatcatccaggagaccaattttacatttttacccctctgcacaatcaattttagggtataggttaaattgttagaagaaaaacacatgcctggtttcatattaccaaacttgaatctctaaactcgactttagttgttcttttgaatgtgttgatttgagaattggggatgggatagtaacagttcagttatttttttccttcctctctgttagtgttaaggtagggtccggttggcaaaagattggttcttgttcaaccttgtattttattacattttaggcgttcctgtctgctatcatcatagattntgttctccaccttaaagcgaagatgacatcagatcatgttgctgtatttcttggttatgttcctcatcttcatgt

SEQ ID NO: 24351 - DNA, 603 bp, Gossypium hirsutum
  unsure (1)..(603): unsure at all n locations
  Clone ID: AI726620.1
acgaaaacagccatcgccccatggccatgggagattccgtccctactcctcgcatatcagttcatcaagcttttggcggcggcttagttgctgatgtgctgttatggagaaaatggtgtggcggagttgtcatgctagcctcggcaaccacgttttggtgcctctttgaattagctggttatagtatcttgtctttcgtggccaatgtattgttactccttgttgttattctcttcttctgggccaaatctgcttcacttctcaacagacccttgccaccacttcctaatttggagatctctgaaaggactgctgggaagattgctgatgagttacaagtgtgggtcaatattgcattgtcgattgcgcatgacattacccttggcagaaatttgaaacttctttttaaggttggtgttgccttgtggtttgtttcttttattggtagtttccttancttcctcactgtggtctatatcggagttattcttantctatcagttcccgtgttatatgataagtatcaacaccacattgatgaaaagctttctgtaacaaacaaaatcatacagacgcagtacaggaaaatcgatgaaacagtaa

SEQ ID NO: 24352 - DNA, 515 bp, Gossypium hirsutum
  Clone ID: uC-gsronu33B031b01b1
cgaaaacagttcatcgccccatggccatgggagattccgtccctactcctcgcatatcagttcatcaagcttttggcggcggcttagttgctgatgtgctgttatggagaaaatggtgtgggggagttgtgatgctagcctcagcaaccacgttttggtgcctctttgaattagctggttatagtatcttgtctttcgtggccaacgtatttaaactcctggttgttattctatcttacagggccaaatttgcttcactgctcaacagacctgtgccgcccctagtacttgtgtggttgtttgattgggcagctggtactgaacttacttatgggacaagtgtgtgctattatggcattggcgtgggtgcatgacattacccctggcagaaatttggaaccttttttgaagggtggtgttgccttgtggtttgtttctttattggtagtttctttggcttcctcactgtggtctatttggggtttttcttagctatcagttcccgtgtttttgat

SEQ ID NO: 24353 - DNA, 812 bp, Gossypium hirsutum
  Clone ID: GOSHI-09MAY01-C124076_1
tcttcgatttcgcagacaagtaccgagggtcttacagtgactctctgaattctgtggtctgcccattttactgctcttactctggataccaagatgagcttctttggggagcgtcatggatgcatcgagcgacgcaggacagttcgtacttatcatacatccaatccaatggccataccatgggatcagataatgatgatttctccttcagttgggatgataagagagctgggacaaaggtccttctttccaaggacttcttggagaaaagcacatcagagtttcaattatacaaatcacattcagacaactacatatgctccctaattccaggatcatcagggttccaagcccaatatacaccagggggccttctctacaaagccagtgaaagcaatctacaatatgtgacaaccacaactttcctcctcttgacatacgccaaatatctcagtacaaatggtggagtcgtcacatgtgggacttcaactgttacagctgagagcctcatagcacaagcaaaaaagcaggtggactacatcttaggcgataatccacccaaaatgtcatacatggttgggtttggagagagatttccacaacatgtgcaccataggggttcatcggttccatccattagggcgcaccctgaccgtataaactgcaacaatgggttccaatacctttacgctaactcacctaatcccaacgtccttgctggagccgtcataggtggacctgatagtaaagacaactttgctgatggatcgtaacaattatcaacaatctgagccagctacttatattaatgc

SEQ ID NO: 24354 - DNA, 524 bp, Gossypium hirsutum
  Clone ID: GOSHI-09MAY01-C120646_1
ctttttctggtttttgcgccttttgttgtcggagaaagtgggtgaaaagggattgggctatcgcaaccgtcgcaatcaccgtcatcatcgccgccgtcatcaccgtcatcctcttttacactgtcttctccgattctcgtaaccgcaaaacttcctcgcctacttttgctcctccttccgccggcgatttcgttccgttgactttgcttcaaagtgccaaagctacaggcgccttttgcttagatggaagtttacctggatatcatttccagaaaggctttggatctggttctagcaattggcttctccacattgagggtggaggttggtgtaattcaatagaatcatgtaatagtcgaaaaggaacatctttaggttcatcaaattacatgggacatcaagttcaattttctgggattttaagccaagacccttctcaaaatccagatttttataattggaacaaagttaagctacgttattgtgatggtgcatcttttgccggccaccctgaaagtgagttc

SEQ ID NO: 24355 - DNA, 499 bp, Gossypium hirsutum
  Clone ID: uC-gsflmaxxa002d04b1
taaaaacattatctttttaaagttcctttgttccccttcggttttcataaaaattaacgccggagaattatgctctgccggagaattttactaataaaagtctggaacaacggtcgccgatggcttcttccttcttcatctctgtcgccggttccaacgacggcggactacaaacgtcacttctccactcacattatggcggcgttttcgttgccccaaaataaccaattcactctgaaaattccatatatggaaaatagatgtaagttttcaagtaatgctgtggctgatcttcatactaatggaatagttgatgtcccattggctcaaactggtgaaggtattgctgaatgtgagcttcttaaatggttcattcaagagggtgatgaagttgaagagtttcaacctctttgtgaagttcaaagcgacaaagcgacgatcgaaatcacaagtcgttacaaagggagagttgctcaagttcttcatgttccccgaaata

SEQ ID NO: 24356 - DNA, 352 bp, Gossypium hirsutum
  Clone ID: uC-gsflmaxxa040c03b1
tttgtatgttcctttgttccccttcttttttcataaaaattaacgccggagaattatgctctgccggagaattttactaataaaagtctggaacaacggtcgccgatggcttcttccttcttcatctctgtcgccgggttcaacgacggcggactactaacgtaagttttgcactcacagtatggcggcgaggccgttgaccctcaagaacccctataatctacaaggtgttcaggtggtttatcattatcagatcctgggtagtgctgtttctgtgcccttacttttttcgaatttctgatattccttatttgttacttgatttaatctcttcttgttcatacattctttc

SEQ ID NO: 24357 - DNA, 602 bp, Gossypium hirsutum
  Clone ID: GOSHI-09MAY01-C123426_1
cgatctactcacggctcaggcatggctctcggaaaataaacagctcgagcaaaaggttgcacaattgagcaaagtgacttgcaatatctccgagtatacccgaatggtcctgctcgagaaaaataaaatagacaaggccatagaatcttccggagctcaaaaggtaaagaaaactgatccccacaaaatcgaagatcctttagcgcctcgaaagacactgcttcaaagcctttcagttggcttcggtgacctaactgcaaccgctgaaaacatccgtccaggattcgaagaaccgaaattacctgacgcagccgagattttcttgaaggcaacatcgaattgttgtggtcggatgtgtaatcgatgctgttgcatgtgctgcatacaatgttgttcaaagatgaatgatcaatgtgccattgtattaacacagattttcactgcattggcattcattggttgcattgaatgttgcacattgtgttgtggacaaaatgggcaataaaatgcaagtccctgccgtgttataaatttgttgttgttgtatattggtgtttatagtgtatacaaatatatttatatttattttgttgtacctatac

SEQ ID NO: 24358 - DNA, 353 bp, Gossypium hirsutum
  unsure (1)..(353): unsure at all n locations
  Clone ID: AI732009.1
agctganatgctgganagggatgtcttanaaaccactcctggagtgcggtgggatgctgttgcatgtgctgcatacaatgttgttcaaagatgaatgatcaatgtgccattgtattaacacagattttcactgcattggcattcattggttgcattgaatgttgcacattgtgttgtggacaaaatgggcaataaaatgcaagtccctgccgcgttataaatttgttgttgttgtatattggtgtttatagtgtatacaaatatatttatatttattttgttgtacctatacgaacttatgtgatagtacgatagtaaaggtgttcaccactccaaaaaaaaaaaaaaaaaaa

SEQ ID NO: 24359 - DNA, 495 bp, Gossypium hirsutum
  Clone ID: uC-gsronu33B145e08b1
ttgttttggggcaagatagatagcgtagatcaatccatatgcgggaatatatcccgaaagacaccaataaataggcaattaaacaactccatgtccacatacaagaaagcaataaaagcatcaagaaactgaaacatagacacacaaaagggtaatagggggttttagtatataaaggaacacacaagacgatgatatccatatgctctatcaagcaacatgtaagaaaaggaatgtttcaagggctagctttagaaggtggtggagagaagaatgggatagatgggatcatagctggaattgaaggcatgttccgcaatggcggtattgtaataggcaaagttggaagggtagtgggaaacggcatgctaggaaatggcaaacatggctgcgttgtgggcaatgtggggatcgttggctgggcagattgggcagctgaagaggtgacgagccgctaggccaacgttgatgcttgaaaatgacaatgccatgaag

SEQ ID NO: 24360 - DNA, 477 bp, Gossypium hirsutum
  Clone ID: uC-gsflnu33B061b03b1
aacgcaacacaaaaacagtcttcatggtcaataactggcctattttaattgctatacactagcttacttcatggaattgtcattatgaagcatcaacgttggactagcgggtcggcaccttcttcagctgcccaatctgccacagccaacgatcccaacattgcccacaacgcaaccatgtttgccatatcctagcatgccgtatcccactaccctaacaactttgcctattacaataccgccattgccgaacatgccttaaattccagctatgatcccatctatgccattacttctatccaccacctgctaaaactagcccttgagacattgctttgcttacatgttgcttgatagagcatatggagatcatcagctggtgtgtgactctatatactaagaaccgtactacctgacgtgtgtatatgagtgagcatcttgatgctcagattgatttcatgtatgtggacatggcag

SEQ ID NO: 24361 - DNA, 576 bp, Gossypium hirsutum
  Clone ID: GOSHI-09MAY01-C118585_1
aaagttcacggcaaaaccctcgagatattccacgatgatcattcaagtcaagctacatcaatcaaacagagagcagaagaaacattccagcagacatatatggattatgagccgagtgggacgactccaatacgaagcgaacaagatgtaccgaccaaggggactattgaatcattacgagccatgccaatggaagccttggtcgaagaatttcgagaaaacaactcgtacgagtcatttgaaccaaagttgttaaagtcatcagttgtaccaacacgctctccccttaccgaaatcaactaaaatccagtgtgctctctcttacattcataatattctttgcaaaaattatatttgtattttgtatgattaaggccacacctgttagtcatcattcatcatcatcattggatgattgtaaggttgcagccagtaaatggaggtgaaagggggtatactaccagttaccagaggccatcacttggtaagaataatggaaaaaaaaagggtaataagtcttttttctttcggtttattgattttttaccttctttatcaagtaaaaaggctcgtatg

SEQ ID NO: 24362 - DNA, 832 bp, Gossypium hirsutum
  Clone ID: GOSHI-09MAY01-C118215_1
ttattatttgagcccatagtcaccctctgtagtcacgtagattgctggccttgcatttacaaatggcttaatgtccaaacttcttccctcgatacagacccgcgacagaagaactgccccgtgtgcaaggcaagcatctcttcctgttcattggttcccctgtacggtcacggcacatcttcacattctcaacccaagactccacattcagatctgatcattccccaaagaccacctccttctacatcgaacatgaccgccccttcttcacatctaaatcaacagcttcacgaaaactttttccattctcagtcccaagcatttcataaccaacaatacttcccaccttatggaggatatgcaaccttggcatcatccgaccttagtggtataccgatgacgaatttcttccatccgatgatcggaactttgggagaaatggtgtatgctagaatatctgggagctcaaacacaagtatgtttgcttaccctaaccaagcttcttacccattaatcaggaataacaatcttaggatgagaaggctggaaattcaggctgacaaatctcttagtagagtatccatgtttctttcctgctgcatcattctttgtcttctcttgttttgagaagtactgaatttgagcttgtatagttgcaaacaaaatttgtgaggaaaccaaatgtctaggtttctcttaacgatatttgtatgtatatagtactctcattttttaagaactgggactctaaatcctccatagaaacctgcttagcagcaaatcaagtctcaaactcttattaaggggttttgccttgggaatgttatgcttt

SEQ ID NO: 24363 - DNA, 226 bp, Gossypium hirsutum
  Clone ID: GOSHI-09MAY01-C119485_1
tttattttcaacttcctaagaattttcttcccctttttttatgttatgtttttttttctcttagggacataatctttgttagatttaggtttttagaacccagtgatcagtatatatcataggatttgtgtagctgtatattgtagtataatcatgaaacagtattatgagtggtttgtactataatcatgacatatcgctctcttttactagtacccttttgctg

SEQ ID NO: 24364 - DNA, 302 bp, Gossypium hirsutum
  Clone ID: GOSHI-09MAY01-C114475_1
ttcacgcgtccggatttaatagctttgtttgcataaagtgttgtatgtcttgagttgaagtattgctagggaacttatttggcattatcaatatagtggttgtaagaacaaagacgaggacttcaggttatgtctgtaatagcccaaattttaactttttctattgttagtgttacagaatttactatttattaaaataagagatgataaattctcaaaataaaactcaaatatttaatacttttttgtttgattatatttattgaatgttacttttgggtaacgcatttctatgttttatt

SEQ ID NO: 24365 - DNA, 699 bp, Gossypium hirsutum
  Clone ID: GOSHI-09MAY01-C114185_1
gctgatcatcgggcaaaaaccaattaaacccgcacttaggaaataaaaaccataaaggaaaagagagtaaaaccaccttaagccaaattaagcaaggcagaaaccaacaaaatagtcagccaagtagcttccatatccgatgaaaggatgaccaaaatgtgaaccagaggaaacccaaaagctttgagtccagccatggagattccaagaaccttctccattttcaaagccttctacgacaagctgtgatgacttcgttagcaaattctttgatcccttgctatcaacatcttgacagaaaccgaaacctcatcgacccaaaatccagaccgctgtcttctccttccttccatcgccagggtatgggccactccattaactaaacgggaagaaacaggtaacatatttcgtcaaaacacttttccaagttacacatttggtgaatattggtcagataaccctctcttctcctgctccttctaaatcttcttctttgtcaccatctttgccatcatctctagtctcatcctcctcttactctccaccacttccaccaccatcatcattgtaatcatcatcatcatcatcatcatcatcatcatcatcatcatcatcatcatcatcatcatcctcatcatcatcatctcaccatcaccatacatttttgttcaatgaaaaattagatttatattctataaa

SEQ ID NO: 24366 - DNA, 578 bp, Gossypium hirsutum
  Clone ID: GOSHI-09MAY01-C114105_1
aaatttgataatcaaaatgtcactgttgagtgttgaaatttagttaaaacaacaccccccttaattgttccatctatcaaatgctttcttctttcaaatcctgggttttcagcagctactagtctgccactgctccctcatgggattgagatgtgtgctaatttacttgcagcattttgttttacttacaacagggttaactaaaggagctttgtgcggtaaagcacatggtctaattaacaagtaactatcatttgaaggaagggagcttttacctatgttggtgcttcatctgtacattttagggaattagtgatcaaaacgaggtgtaaagttttactattgcttacatttcccatcatactttttccattttttgctctggcttctttattcatggtccgtggaagctgagcaacagaacacagcaaagaaacagttgattagaagtttggcagagatgagatgagtttatctaggcctatatcagggccttagggtacacgtatccagtagcttgtcacccagcattcatcgtccactacattcagtattaatcacatgactgttcacaagct

SEQ ID NO: 24367 - DNA, 809 bp, Gossypium hirsutum
  Clone ID: GOSHI-09MAY01-C114355_1
gcggtttaatcccaattcagcatctgctcttacaacttctgccggttcatatggatggtggcgaggagaagcctagcagtaggaaaaagatgagtgtggtggtaggaccatggggaggcaatggtggagctgcttgggatgatggaatttataatggggtaagagaaatcactcttgtttatgatcgttgcatcgactccatcagagtggtttacgataagaacggtaagcctgtaacggcggagaaacacggcggtgtaggaggaaacaagacagctgagattaagctaaaattcccagaagaattcttgatcagcgtaactggttattactgtcctgtggtttatggcggtagccctgtgattcgatcactgacgtttaagagtaaccgaaggacgtttggtccgtatggagttgaagaaggaacacccttcgctttctccgtagagggagcgcgagtcgccgggttcaacgggagaagtggatggtatgttgattcaatcggatttcgattgtgtcgtgttcaatctcccaaactctttcagaaggtgcagaaaggatttcaaaggcttactagtagtgtctcaaaagcctctgtctagcctagagaggattgtcactcaaaaggccccttccattaatacctggaggtgctaaagttcatcatcaaaattatagcagcaaccaccttagagtttaaaatcaaacaatcttgaatgtatacagatatatatatatatatatagaccacgtcgggtttgttggctttcggattttatttgaggttataaagattggattaggggttt

SEQ ID NO: 24368 - DNA, 424 bp, Gossypium hirsutum
  Clone ID: GOSHI-09MAY01-C115655_1
tgttgaactaatcgtcgtttcctttttatcatcttctctagatccctttacctctccaataaatactttcaaacaccaaagacaaaaataaaggcttcagttttctaaagactaaagaagatttttttttctttttttttaaattttcagtttggctttttgcagattcaaatggttgtgggagagatttaaaatcctacactgtttgggggaaagagacagagagataggcttgctctgctatgggtctttgcacttccaaaccatccccaaacccttcttttcctcctgattcaaggaatactcctatccatccccccgataaagatatccaccataagtctaactcggttccagcttcgcctttgcctgatgtagtaaatggtaaccacaaccacaacttagatcaagctaaaggaacaga

SEQ ID NO: 24369 - DNA, 566 bp, Gossypium hirsutum
  Clone ID: GOSHI-09MAY01-C115615_1
ttttctacgcgtcttgtaagaatcaacaatggcgacggctcttcttacaacaatcctcttgtcttctttccttgttgtttcatcagctgaaatctcgagcaagattggtataaactacggtcgaataggaaacaatttgccatcaccatatcgaaccatcgagaccatgaaatcgatgaatgccgggcgtattaagctctatgattccgaccctgaaatactgaaacttttatcaggtaccaacattcatgtatctgttatggtacaaaacaatgacataatccgtatcgcttcgagccaagctgttgccgaacaatgggtacaagacaatgtcttggcttattaccccgacacgatgattcggttcgtgttggttggtaacgaagtccttagccaccaagatcgaagaatttggattagtcttgtccctgccatgcgtaggatcaagaacttcgttgaacacgcacgatatcaagaacattaaggtcagtacgccattggctatggacgtaatgcaatcaacttttccaccgtcgagcggtaggtttaggcccgatattactgat

SEQ ID NO: 24370 - DNA, 749 bp, Gossypium hirsutum
  Clone ID: GOSHI-09MAY01-C117935_1
ttgtattccataaggtcaatcataagatcattgtatctgatgcagttttgcaaaaccggtggagcagtgtaagttcatccgacctgatgttcttgagctcagagatgcttaacgacttgtcgagcaacagatttgtgtccctggacataaacaaggagcagtgtacgaaaacaaggacaattgaaaacgaaggaattacaaagatcaaaagggaattggagataaagagactgttaaacaagccagtttcaactcctgatgtggctttcacatcggattcagcagctagtacgagtcatgctgcatcaaggattactaaccaagttgagaaaagatcaatgtcggatatcactgctttatcgaggtttcgagacgatggtaggaggaacagaacaagtgagtgttcattgcctgaaaggtacacagaggaggaaaggagaaggctgctttggttgccaatagctagaagaacagtgcaatggtttgccaatagagaaacgtgtgaacaacatattcaggggccaacacaccatttagatgtttgattaatggactaatagttgcattttgtacataaattcactaggcaggcacagctacacatttccaaaaaaacattttccttcttaattcagtattttactaagattgttgtttgcttgttggcttttacttctagaaaaaaaaaaaagataaagagcctgcttgctaacctggttttctgaattaaacatgtaatttattaaaga

SEQ ID NO: 24371 - DNA, 498 bp, Gossypium hirsutum
  Clone ID: GOSHI-09MAY01-C117465_1
tctcacgcgtccgcccacgcgtccgcaaaagcaaaaggctaaagagtaaggcccccttccctttgttgacatcctcaccaaatctcttgcttttcttctctcttgctactctcctctaatttttcaccttctgatttgtttaaagaggcaaacaacacaactcgtttttatccttatatatcagtttgggaaaaaaggtagaagaaatgaacggtgatgatgctcagagtatgatggaatcccagtacatacagagacatcacaggcacaacatcagagacgaccagtgcacctctgctctttgttaaacacatcaaagctcctgttcaatctcgtatggtcattggtaaggagatttgaccagccgcaaaagtacaagcccttcgtcagcaggtgtataatgaaaggggacctcgggatcggcagtgttagagaggtcaacgtcaagtccggacttccggcaaccaccagcaccgaacggttggaacttctcgatga

SEQ ID NO: 24372 - DNA, 418 bp, Gossypium hirsutum
  Clone ID: GOSHI-09MAY01-C117715_1
tccacgcgtccgctgtaaaactccaccgtttctttctatcttcgtcaattgggttttggctcagatcgactcccggattccatttcaaatgatgagacaagtgctagggctagtctatccagaatcgttatgttagttgaagctttatttgaggttctggatgaaatcccccagcagtctgtggttttatcttctcgaccttctgtatcttcaattggatctgttcccgctcctaatgaagttgtggaattgcttcctgtcaaaatttataacaagtcacacaaacttcataatgatgaggctggacagtaagtatttattcttctctgctgtttgagaaatgtgaagcacacttgaatccttttttatttgttgacgaatagttgaagatgagatttaactgtgtgtgccttgactt

SEQ ID NO: 24373 - DNA, 577 bp, Gossypium hirsutum
  unsure (1)..(577): unsure at all n locations
  Clone ID: AI054911.1
ggtgtttttcctttttccttctaccagtggttgactgaaggggaagtgctggattggttaatgtcaaatctttataaccgggattccattctagaagttctaggtgtgggtataaattcttttgagatttggccattacatgcagcatgcacatgcttcaacttatttaaacatcttaaatttcaaattttaatcgcattacgtacatcatatcattttgcgacttccatttccttaagtcagtttgctgagacaaaagaaaaacctgggtcttttttgctataccatgtatggtctttcagcataaattaagtgagaacttattaattgttgcatttactttaaaaaactttgaggtagcctttcttttgttttcttaatgcaattcctgcagttttatgcgtttaaaaagaaccttggttgtctatgaagactttactgatagagaagaatgcttatctgtgggggaacagtgatntanatgagcagcttcattagggagtattgntcagtacatgatatgntatagacacaatatcatcttgaaccaatgaacaatgaccttgctcgaagatag

SEQ ID NO: 24374 - DNA, 430 bp, Gossypium hirsutum
  Clone ID: uC-gsflnu33B012a09b1
tgtctattgcctgcttctccttgagattattagcgaaaaccgagattaagcagggacattaaaaacttgggctgaacttattggcttacagtttttactctctaacagtggttttgtttcattcattaattgcttcagtggttgactgaaggggaagtgctggattggttaatgtcaaatctttataaccgggattccattctagaagttctagtttttatgcgtttaataaagaagctttggttgtctatgaagacatttactgataagagaagaaatgcttcatctgatggggggaacagtggatttaaaatgaagcagctttcatttatgggagttatttgttcagttacattggatattgtttatagaacaacaaattattcaatactatgagacacagatggaaaccaaattgcacccttttgac

SEQ ID NO: 24375 - DNA, 839 bp, Gossypium hirsutum
  Clone ID: GOSHI-09MAY01-C110455_1
tcgcccacgcgtccgctttcccttgagctctgtccaagaatgtcaaactacacagtggaacgcatcaaagttgcaactcctgataaagtggagctgatgccaaaagtttttaaacctaatgaagagatcaaagacaacttagtggtagtccttgtccatccctactcgatcctgggtgggcgtcaggctcttttgaaggggattgcttctgggttagctcaaaatggtcacagggctgttacttttgatatgaggggagttggagagtccactggaagagcttctcttacaggttttgctgaagtcaaggatgttattgctgtctgcaattgggtttctgaacatcttgattctcacagaatcctgttggtgggttcttctgcaggggcgccaattgcggggtctgcagttgatcaaatcgggcaagttgtggggtacgtaagtttggggtacccttttggcatgatggcccccaccctttttggaagacaccacaaagccatcctccaatcctcaaaacccaaactcttcgtcatgggaactcgggatggatttaccagagtcaagcaactaaacaagagatttagttccgcagccgggcgcaatgaaatatatttaatggaaggagttagccactttgaaacggaaggccctgcttatgatgctgagatggtgaagcttattcttaagttcatttcctcattgtaagacatgtagccacttctttaaaaagattagtgctcgatgaattgctattaaaattacttccttaagctctgctgttgtttggggaaaaagatgccaattttatgtgataatatacaatgttatcatgtgcc

SEQ ID NO: 24376 - DNA, 599 bp, Gossypium hirsutum
  Clone ID: GOSHI-09MAY01-C110605_1
caattgttggacctaacaggctaatcaaagagtctgagatcccaaatcttccatatcttagagctgtcataagagaaactctaaggcttcatccttcagctcccttgatcatcagggaatgtggtgaagattgtactgtgaatgggttcatggtgaaagctaagacccgagtactggtcaactgctatgctgtcatgagagaccctgattcgtggaaaatccctgatgaattcgatcctgaaaggttcttagacagctctgatgagaaaatcggagagcatcaaaatggaattcaagggtcaaaactttaggttccttccattcgggagtggtcgaagaggatgcccaggagcttcacttgccatgttggtgatgcatgcagcagtagggtcgttggttcagtgctttgattgggaagtgacgggtggggagaaaagttgatttaaacccagggccagggttcgcttcagaaatggctcagccacttgtgtgctaccctattctacgttttaatcccttctaagcaacaccatatttgtgcttgaaatctgtagctgctgagcaaataaaataaatgtaaagcctgtagcttacatctt

SEQ ID NO: 24377 - DNA, 541 bp, Gossypium hirsutum
  Clone ID: uC-gsflnu33B143d02b1
gttactatcccagacagggtcttacttgtaaacacatatcgaaatcacaaattgatgccatggacttactcgcactcatatatcagaatcctatgtcatgacatatgtatcctagctattcctaaggttcatacggggctttgcacgttgtgactcggtcgaatcgaactcgaaagtgtaataaccatattcaatcacattcggccataatatatttagtttctaacatttcaaaacctcaagtaaatataacattaagttaccaataaacatgtccatttgcttctaaacttacctcggacgtcgtaaaacgagacggggctgctagtcgacaacttttattttttctcgatccaaatctgattttctttggttcttgatctaaacatattcaaattaagctcattcaaacatattttcattcaatttaatccaaaaaaacataaatgggaaaattaccattttacccctaacatttacaatttttacaattagtccctattgccaaaacacaaaaacatcaaaattcccacaccaagct

SEQ ID NO: 24378 - DNA, 432 bp, Gossypium hirsutum
  Clone ID: uC-gsronu33B011g09b1
acggcctctcgtgcggttcatacggtgctttcggatgtcgtaacttaatcaaaacgaatgctcgaacatggttaccaagcttatacacattcggcaacagcatatataaattcatattttgcctactagcatttatatttagcatttaactacaattagatacatctatttgcttataaacttacctcagacattataaaacggaacaaggtaactagtcaataactttcgatttgcctcgatccaaatccgatttctttggttcttgatctaaacatattcaaattaagctcattcaaacatatgttcattcaatttagtccaaaaacacgtaaatgggaaaattatcattttacccctgacatgtacattttttacaatttagtgcctattgaacaaaacacaaaatatacaagatttcaatatacccat

SEQ ID NO: 24379 - DNA, 479 bp, Gossypium hirsutum
  Clone ID: GOSHI-09MAY01-C110245_1
gcgggaaaacttcatggttcccaaccttgaccggggcttatggcagtactcccgtcatccaaactactttggagagcagttatggtggtgggggctggttgtatttgcatggaacttgggtcatggatggacctttgttgggtctttgatcaacagtatgtgcttagcttatgttactgtgctcgcggagcaacggatgttgaagcacgagtatagagctgaagcataacaggttataccaaaagacaacctcagtgtgggtacctatggttcagatcttctgctatggcagtgaaggatatggttacttgatctgactatgtttgtttcatttgaatcaaacatcttgtgttggttgttatcctttttagctatctatttgagagggggaaaaaatgggtcttaatctgtggtagtaaagagagatccctctatcgctatgaactcaagtaaattatttcttcatttgtaataaaaac

SEQ ID NO: 24380 - DNA, 302 bp, Gossypium hirsutum
  Clone ID: uC-gsronu33B055a11b1
tcccactcgtccggggatatctggcaagtcccaagcttctatttgagcctgggatcagagctcattcatcatattagaccgttgctctatatcataaaggaccttcttcttagacgtcactttatatattgagaccgttttgacagtagagatgatagatatggaagccgtgatcgttatattagtgacaggtatccacctactggagatcgatttggtgatcgctatgctggatctgatccgtttcctcacaatggttttggcaaagagagagggtatcgtgatgctgctccaagaggtaa

SEQ ID NO: 24381 - DNA, 301 bp, Gossypium hirsutum
  Clone ID: uC-gsronu33B055a05b1
acgcgactcggtcattcgaccggtgcggttctgttagaggcaaggatatggtggggctgatgatcgtggtgatcgcttcagagatcgtgatcgatacatagatgaccgttatgatggtggacgctatggagatagagaccgttttgacagtagagatgatagatatggaagccgtgatcgttatattagtgacaggtatccacctactggagatcgatttggtgatcgatatgctggatatgatcgtttttcataaaatggttttggcaaagagagagggtatagtgatgctgctccaaga

SEQ ID NO: 24382 - DNA, 671 bp, Gossypium hirsutum
  Clone ID: GOSHI-09MAY01-C112845_1
gaagcgctcgttgttttggagaaaatagcgagaataaatggagcaaaattgcctactggagttcttgtttccgagaatgaaatcgagttagtgggaaaaagtaccccaacagaagatacattgttgcttcaagcagaagataacggatacgaagctcctaaggaaatgaatcctaaagccggaggcatctcgacgctgttacaacttctttctccagaattggttcggtcaaccacactcttatggatggtattcttcggaaatgcattttcggattatggccttgtattactcacaacggaattgcacaatggacgtaatacatgtcgtccggaagaattgcaaacagtaaaatacgagggcgttagctacaaagatgttttcattactacttttgctgagttccccggcctcctgatatccgctttcactgtcgatcgatttggtcgtaagttctcaatgtcagctatgttcttcctgtgttgcattttcctgtttcctttggtagtccatcagcctcagggtcttacaaccggcctcctctttggtgctcgaatatgcatcactgccagcttcacggttatgtatatatacgcgccagagatatatccaacgtctgttagatcaactggtgttggaattgcgagctcaatgggaagacttggtgggat

SEQ ID NO: 24383 - DNA, 536 bp, Gossypium hirsutum
  Clone ID: GOSHI-09MAY01-C112045_1
cccacgcgtccgagaaagcgagagagtgataaatggatttattggcgactgtcctgctgggtttgcccgattgactaggctcctgctgcaagctttcctctccattaaaaatggaaataaatcaagccaacgcaagctcccgcctggtccacgccggattccaatcttcggcaacctcttcgatcttggggataaaccccacaggtctttggcaaagtttgctcggattcatggccctgctatgagtctcaaactcggcagcttaatcaccgtcgtcgtctcctcggaaacaacggccaaagagatccttcaaaaactaggatcttatattctgcaaccgaaccattgtggatgcagctcgagccagccaacactatgaatttgggctgccatggttgcctgtgtcgccgctttggagaactcttcgcagagtcagtaatacccatattttctctagtctgaaactcgattccaatgaatacctgcgtcggcacaagattcaacaactgattgctaaagttggcgaaagtcgcctt

SEQ ID NO: 24384 - DNA, 785 bp, Gossypium hirsutum
  Clone ID: GOSHI-09MAY01-C113525_1
gtcgtcacactggaagcccttccttctctctttgattatcgattaaaaagaaaacacagatggaagatattaaaccattaattgaagctttgaagactaaattaaagcaagctttgattctatgggcagagggtttcagagaagcttgttgtcttcacagagttatcgttctttgtcgcaggtcgaagaagcttatgattagaacgggacagtgttttcttttaaatggcttcatattcttaggaagtttgtttgtcctaaattcagtagttatcccaacactacaatggatattgcctgatcattactcacaaaccagttgtgaagcgatgtctgaattccatggtgtcttcaaattttattccttcttacgtggcttcctcatacaactattctatgtattttggttctatcccttatacgtattcagctttattctgagcaatctatggtacaatgacattgctacacatggttttgctgcaatggggagatccgggccttctacggtggaatcctcgaaacaaaacgatacgttgacctcagacagcaaagtgcatgcagctaggcctgctggcctcggagggatcatgatcggaataggggagcaggtgttttccttgcttctttgaactttctttttcctccaggtttatgccgcgagatttattccttacgttgggaggcactcatttcgtcctttttcttggagtcgctattactgtttgagtcaatgaacttaccgatggggccggaaaagattgatttttgaaactatggctttt

SEQ ID NO: 24385 - DNA, 460 bp, Gossypium hirsutum
  Clone ID: GOSHI-09MAY01-C113495_1
gtataactagaacatacatcgacatcgctatttcgatttgcaaccatgagaagagtcaacggactcgctatcgtcggcagaaccttaacctgtggcggcgccgttgagaaacggctggctcaagcggcgttgatgagtacatgctcttcttcatcgctaaattctcatattttctcgcagaaactcgctgatcgattagggctgtcgcgtccttccctcgtgcgcagggttgcggggaccatgctgttttctgtggcagcatcgtctctggctcatgatgctcttgctgaggagaagcctcgctctgaaaagttcctccccaaggaagatcgttctctaccagtatgaagcttgccctttctgtaccaaggctaaagcatttgtggattattataacattccatataaaaatggggaagtcaatcccatcaagcaaaaggagataaagtggtctgattat

SEQ ID NO: 24386 - DNA, 534 bp, Gossypium hirsutum
  unsure (1)..(534): unsure at all n locations
  Clone ID: uC-gsronu33B147d01b1
gggtttacgtgtgattgataatgaagaagaagtgataaaggagctggcgcaaattagagggagaagacttaatatagattgttaagctgcatcactaggcccactgccataggctattgcatcaccaccctcggcgataccaaagaagtcggtttctctttctggtttggccatacagggcgagaggagtgagggttcacccgtgtcagtacccttggtaatgcccaagcacttcatttcgtcagtcataatggcaccaaatatcttaacagacggtttggcaataacatgaccatcaaccaaagtgtctgttgcaacatctggaagctccatgatggggatacctccctccagtttgattgctccatcatcaagcgcctgattaggtatccggtctgcctcgtttccggagttggttccatcgacttcatgatcattgaaagtgagaaaagaagaagaagaagaaggaagggtcctnctgtcttggttgctgcagcttctggcttctccacttcaaccctaaagtgggaacca

SEQ ID NO: 24387 - DNA, 334 bp, Gossypium hirsutum
  Clone ID: uC-gsflnu33B051f01b1
ctcactcgtgcgaaaatataatatataaggtatgttaagctgaaacatattatgtaatcgaggaataatgtgacagaacctagtccaggctaacttcactagcctgcatatggatagggttgtgacagaaccaagtccaagctaacactttgatgatgagtaatcatgttgcagcatgcttctccagctgcatcactaggcccactgccataggctattgcatcaccaccctcggcgataccaaagaagtcggcttctctgtctggtttggccatacagggcgagaggagtgagggttcacccgtgtcagtacccttgggaatgcccaagcact

SEQ ID NO: 24388 - DNA, 652 bp, Gossypium hirsutum
  Clone ID: GOSHI-09MAY01-C113385_1
aaaagatcgaaaaagactgcaccgatgtttcgaattctatgttatccattcccctcatgattcctggcaccagatactacaaaggcatgaagggacgtgaaaagctgaatgaaacctttggaaatatgattgccagaagacgtagtggagaggaatattttgatgattttctgcagaccatggtcaatagagattcgtatccagaagatgaaaagcttgatgatcaagagatcatagataacctaataacactgatacttgcagggcaaaccaccactgcatctgctatgatgtggtgtgtcaagttcctatctgaaaataaagatgcactcgacaagcttagggaagaacaattgccaatagtcagaaataaggctgaaggagcctcactcacccttgaagatcttactgaaaagtcatatggcttcaaggttgtaaaagaaacactgcgaatggcaaatgtcttgatttggctttcccgcgttgcgatggacgactgcatacttgatgggtttgaggtaaagaaagggtggcttgtaaatgttgatgcaacctgtatacactacgaccttaatgtgtacaaggaccctacacgttaacccttcaagattcgacgatttccagaagccctacagtttcctccttttggagc

SEQ ID NO: 24389 - DNA, 482 bp, Gossypium hirsutum
  Clone ID: GOSHI-09MAY01-C108655_1
ggaattcccgggtcgacccacgcgtccgcggacgcgtgcgtaaattctgattctgagggtgctggctctcgatcatacagctaccgcgtatgttgggctagttattgctagggtaaaattattttattgaattttaatttcttagccctgcgcaatctttaggttgttatgcaaactggtgatgctgagctggaaatgcgagggcgctgcagtgctggtcagaagtttcttgcttctcttataatcagactagcacttgcggaaactttctgcctgaactgcggtatattggctttggatgagccaactacgaatctagatgggccaaatgcagagagtcttgctgctgcgctgttgagaataatggaagccaggaaagggctggagaacttccagttgattgtaatcactcatgatgagagatttgcccatcttatcgtcaaaggcagcttgctgagaagtactatcgagtcttcaaggat

SEQ ID NO: 24390 - DNA, 648 bp, Gossypium hirsutum
  Clone ID: GOSHI-09MAY01-C108045_1
ataagtaaattaagggtgaattaaagcaacaaaatgcaatcaatacatacatcaagaattcacctcaactatctataattcatgaaacaatctctcaacttatacaatgtaagtgagattccacagacctgatattcaaaatcaaaagcaataaaaggcgtcatcaaaaccctggcaagtgaagacgacgttcttttcaagcaaggtagcgatacaacttcctgtcacctttatccctctccaggaactcccgctcgataagggactcgatccgtttcttaattacaacagggttgggcagaaaccgtgactgtagctgttttgtgacctcagcaacaatgttgttatgatccagcacacgcctagctttcatgatcctcacgattgctgcctcaatttgcggttttcgatcttcctccactctctgcctagtttcttgattttcaggttccgactccctttgcgcagccacagtgcctatcttgaccttgaagaacttgcttgtatacttgtcattgaaaagaaaggtatcagtgtctgtatgtccttgctcataggttccctgcgaagcacattttttcccttaacacaggcaagagactgcaagcaccttttcaagtccgaggttggtatctcggtcacctgctc

SEQ ID NO: 24391 - DNA, 610 bp, Gossypium hirsutum
  Clone ID: GOSHI-09MAY01-C109415_1
agagaaatggcgaggaggcgggagcgccggggggaaccgagtcaggaccggcgcaaagagcgaattggaccagaaactcgagaagaaaaactcaacgactcagatgcttcggagcgtaagcttatcggtatattcatactcttcttcatcataattccggcagtgtctgttctcgtatacgtatacaaatacgggtcaggaacgaaacgtttggaaccggtcataacggagcgaggacccatcaaaactgatattaatttccaggagatcctcactgagaatacgaacgtagctggaaatgaatcgcaaagaaattatgattatccagtattggcttacattactccatggaattcgaagggatatgaaatggcaaagaggtttaattctaagtttactcacttatcacctgtttggtatgatttgaaaagccatggaaacagcttgattctggaagggagacataatgctgataaaggatggatatcagagcttaaaatgaggggaaatgctttgatattacctaaaatagttttggaagcatttcctacagagctgcttaaaaagaagaaacaaatggataaagctattgatctcatggtaactgagt

SEQ ID NO: 24392 - DNA, 630 bp, Gossypium hirsutum
  Clone ID: GOSHI-09MAY01-C109755_1
tctttcaacgataggttcaaagaacaaagaacattttcttcttcatcgcctgccctccgtctcctcggttccctcatgctctctgtccttcgatcctcagccaccatctccgccgcgccagaatgtacctgattcgccagataagttgattcccttctttttattccttccgatgcaatgatgtgctcaaccttattagcttctctgtttgtaaaaaggaaaatacaagtctgaaaatcaagacataaattttttgagtcatgaataaacacagcaatatcagatctatcctctttctcttctagcttgcgaatcaccgaccgagaatcaccctcaatctccacctccctcaagccaagatttaaagaactttttatcttcttttgaaaaaaaaacatattgagggaataaggtattaataaattgttgatttttagaggccaacgggccaacagaacttttctcagcccagttaaaaggggtatatatttgttttggaattaggggaggtttcaattgtgggggtatcaaataaatgttcatactttgggaaaaagcgaaacatggcggtggctattgagaagacagggattcaacgttctttcttggctttgcacctctgcggcgttt

SEQ ID NO: 24393 - DNA, 677 bp, Gossypium hirsutum
  Clone ID: GOSHI-09MAY01-C109635_1
aaagaaacctgcaaaggggagtaccaagaaggctgaacaaagggaaaaagattccacaacctcagttctcccaccagcaaaacagaaggcaacactacccagcaagattccactggttcaggatacagttacatcacaagcaggaaagacgttggcaactagaaatggcagcacaagggttgatgttcatgacaagttaccacctcgaaaggacttggaagatgtaaaaccagtgataagcctgagaaaaggcatgattaaggtagacaaacgacaaagtgactctgcccaactaaatcataattctggaagtagaaaagaaattcaggagagaaaccatgatagcataaagcacagggagcagaagtacactgaaagaagtgaaatcaagggaccagttttcaaggatgagatgcaacagatgataccatatatgcataaaagatcagaatctacacttacattgctagaaaagccagagtacggtgaaagcatgcttcatggggaaaatagttctgctaacaagcttcgtctaggcaatcaacaaaagctgcaaaataatcatggatttcaacaggtgcacatgcttcagaaatctgagcctcaaaagaaaaagcgtctaccccaagaaagagaacacgaaaaacatagattgcgggagaagaaacaaaagagac

SEQ ID NO: 24394 - DNA, 698 bp, Gossypium hirsutum
  Clone ID: GOSHI-09MAY01-C104505_1
gcgttcgcggccgcgtgggcggcgcgtgggcgggggcgggggtgcataacgatcaagatacgccaaagcacctggaagagctgttgttgatgttctcaaggccggcatggatctcaactgtggatcctatttgcagaattataccaaatctgcagtactgcagaaaaaactaccataatctggggggaccgagctctccataatctgtttgctgttagaatgagattaggccttttcaatggaaatccagtgccaaatccttttggaaatattggagcggaccatttctgctcccccgagcaccagattctagcacttgaagctgctcgtaatggcattgtccttttaaagaacgatgctaaactccttccacttccaaaatctaccatgtcgcttgctgtaataggtccaaatgccaattcgccacaaacacttatcggaaactatgcaggccctccatgcaagtctgttactcctttgcaagctttggggagctacgttaagaacaccgtgtaccaccccggttgtgatacggtttcttgttctactggtgcaattgacaaagcagtcgacattgcaaaacgggcagattatgcagtgttgataatgggattagatcaaactgaagaaagagaggcgctcgatcgggttgatttgtttcttcctgggaggcagcaagaactcatcgtcagcgttgc

SEQ ID NO: 24395 - DNA, 1425 bp, Gossypium hirsutum
  Clone ID: GOSHI-09MAY01-C104645_1
aaaccaattgattgaaattcattgataaaactagagaaaaacagggattaaaaagttcataatcgaaggaaaagatagctatagaacacatagttataagagttttaaggcaaacataatatataagagaaatgtcatgtaaaatgagatgaaagagattttaagggtaagacaaagtagcaatgtgattatgagccacagttccaatccacagtttcccttcaacttctctaacttcactcaccaacctcatcaccacacctttttctatcttcaaaggacttcggcggtttctccaattttcgtcgaaaagcgagattacagtgtacatcttcatccccataattccttgctaaaatcttcattctaatgggtaatctgaagtataaactcctcatccatgggttatgaaccaggatctcttgtgcttgtgttctacaacaatctatggctacccagaattgacctttgtcgtttattcttacgttgtctggaaaaccaggcaaatgtgcaaccagttccgttgtccctgctcttggaccttcaacccagtatttcattagcctgcaattgctagtctcagtgaataaaaggaaactctggcccttagataactgaattccatttggaaaagctaaaccatccaaaaatacatgagttgtctttgttggaggatcatatctgagaatccttccggtcgtttcgccttccaacaatatgaagaaatgatacactctattgtactttctactagtgtcagtaaaaaagattgaaccatttttatggatatccagatcattagcaaacagtattggcttcccttgacatgagtcgctaatggtgtggcgagtccccctcccggttccaaccacgagcaatccgtaataggcatcagcaatgtacaaatctccactgtctttgttgaaccttaggcctaatggtctaccacaccatttctcatgtttccattgctttgatgttgttgagtccacacatctagcacatagcttctctgaccagtttgatgtaacaatggcaaatgtctcccacccgaaatcctcacccatccatcgaacaatacgcccatcggctaatccagtgtaaggtccacgaccgaatccatcaatctccagcgattcgggtccgagaccccccccgacaaactcgagtttcccatttcccaaccggcttttattgtctctaggccaacttgccatgacttccgtgtatggtgcaatgtcatgtttcacagggcctaaactcgatcccaccggccggaccgatttcaaaaggatccatcaaatcgaacccgagaaccaacacaccgatgatcaaaactgggtgctcccaaaatgtctcttctttatgttggcctttttgctgccggacgtgtgggtcgcccgagaaatctccgccccggccccc

SEQ ID NO: 24396 - DNA, 583 bp, Gossypium hirsutum
  Clone ID: GOSHI-09MAY01-C104655_1
aaacaccaaacaaaacgagagaataaaattataatccgtacatatacataccatccgtccagtccacgacaataccgaccgtccaaacaaagaataacaaaatgttaaatatagcagcaaaagtagacgtaaaaaaacgcatcattgactcaatgcaacctcgtcagttcctccactctcttggacagctcctccacagaaactcccagtcctttagaaacttcctccattttcccacggctcagatcaaggaatgattcgatcaagtctccgtccaaaaagtttttggcttctgcagttctcttctcgttgttgaatgacctccattgttcatggctcaaccctcccacgccctttatcaccttccttaagttcgattgcagcttctccagaaacacatactgatcatgcggaagtgaagcaatcacgccaattgcaccattgacggtgccaaaaataacggtttgaatctggcccacttccgaatctggcaaccgcatcacaagggaaccatgacggaacccgttcgcgtgggcccccgcgtaggcgcacgcgtggacggacgcgtgggcgaacgcgtgga

SEQ ID NO: 24397 - DNA, 415 bp, Gossypium hirsutum
  Clone ID: GOSHI-09MAY01-C105205_1
ggtgttaaatttttgtttattttattttttttttttttttttgaactacatttaacacatatttttccagcattcagctcatcaatagtggtacactgtatttaaaaaaaagacttgaaagaaaggaggtaatatctcatgatggacgtaactgaatccccctttacttcaaaatctcacgagattcggaaaatgagtttgatggaattttagggaattaccacaacatctttctggcactattattacatatgcgtggaagtgttccacaacatcaacctattttataggtgaaaaaacttttggtaagcacaaagatttaataatgatgagtatcgtatctgggctatgaaatggcttcaagggtatctccattcaccaaccaaacttcttaaagaaattcttcgttctcttc

SEQ ID NO: 24398 - DNA, 663 bp, Gossypium hirsutum
  Clone ID: GOSHI-09MAY01-C106815_1
ttcacgcgtccgatttacaattaccttctaaagatgcaaaccctttaggattgcctcaagaacttgcttcaacaaatcctaccattcaacaaccagatcgccattgtgaagacatctccaaagattctggcctggaacagcatgaaacaacacctaaaaatttggttaagaattctggccaacgcaagggtggaaaaacttccaaacaagtacagaaaaaaaaatctaagagctttgagaagcagtgacagggttttgcgctcaaaatcagaagagaaatctaaagctaccgagtccaccaagaaatctactgctactgagtcgagcaagaaatctactgctactgagttgagcaagaaatctactgctactgagtcgagcaagaaatctactgctactgagtcgagcaagaaatctactgctactgagtcgagcaagaaatctactgctactgagtcgagaaagaaatctagtgctactgagtcgagcaagaaatctactgctactgagtcgagcaagaaacctactgctactgagtcaagcaagaaatctactgctactgagtcaagcaagaaatctactggtactgagtcgagcaataatttgaccaatgttgatcctagcaagcagcaaaaaaggaagaagaggaagagggagaaggag

SEQ ID NO: 24399 - DNA, 886 bp, Gossypium hirsutum
  Clone ID: GOSHI-09MAY01-C106525_1
gaaaaagcagaaccattgaggttgatattactggattcagattgcatctgtgcacactatttcatgctcaagtaaatggaaaatggtgttcaactaccgtggaatcatttccttcagcaccagtttactcatctgggaatggggaaccaccagaattacaaaaaataagagtcttagtaggggctcccttgaggcaacctcctaagcatcagatagtagcagacactgttaatttcagtcgagaacataatattgtatcatctcattcaagaaaaatacataaggccagaaggtttgaatgactttttcatattctgtactagtgattttactactgcatcgaaggaggttcatgttagaactcgtagggtacgacttcttggtctagagggtgctggtaagacctctcttttcaaggcaatacttggtcaaggcaaattgtccgctattaccaatatagaaaatttacaagaagctgattttcgggatggcattgctggcggtttatgctacagtgattcgcttggggtaaatttacaggagctagccatggaggcttctcggtttaaagatgaactatggaggggaatccgtgaccttagtaagaagactgatttaattgttcttgtgcataacttatcccataagatacctcgatacaatcatccagatgcattacaacaatatccagccctttcactactattagatgaggcaaaagctcttggaataccttgggtccttgcaataacaaacaaattttctgttatgcacatcagcagagagctgcaattaatacagttgttcaggcatatcaagcatctccaagcacgactgaagttatcaattcatgtccatatgttatgcctggtgctgttagtgcttc

SEQ ID NO: 24400 - DNA, 646 bp, Gossypium hirsutum
  Clone ID: GOSHI-09MAY01-C106665_1
ccccgcgtccgattgctttctttctccgtcatcgcttcatcctcggcgttcgcctccgaatcgtcgccggctctcttctactgacgagatacgaaagctagactctccattttaccccttctttttattcttttattggcaaaacccctacaaaaaaaaaaaaaaacttagggttttttttttttattttgtggaaggataaaaatggcggctgctgcggcgacgattgttagttcagctggagggttgctggcgatgcttaacgagagccaccctcagttaaaatatcatgccctttctaatttgattagcttcgttgaccaattttggcctgagatctccaccagcgttcctatcatagaaagcttgtatgaagatgaggaatttggccagcatcagagacaacttgctgctttgcttgtctcgaaggtcttttattacttgggtgaactcaatgattcattgtcttatgctcttggagccggtcccctttttgatgtttccgaggattctgattatgttcatactcttctttccaaggcaatagatcagtatgtcagccttcggtcaaaggcagcagaatcaagtaatgaagcagcaatggttgaccctaggttggaggcaattgtagagagaatgctggaaa

SEQ ID NO: 24401 - DNA, 586 bp, Gossypium hirsutum
  Clone ID: AI725867.1
gagaaagtaaatataaggagcgtgttcgtgctgctattcatcaaaagcgtgtggcggctgagaaaaagcgattgggactgctggaagcagagaagaagaaagcctgtgctaggattttgcaagttcgacgagtggctaattctatctctcatcaacgtgaggttgagaggaggaaaatgagagaccagttggaagacagactgcaaagggcaaggagacaaagagcagagtacttgaggcagagaggaaggccacagaaatctattcgagtgaattgtaccaggatgcacaaacaagctgatctgctttctcgaaaattagcaagatgctggaggcggttccttaggcagagaaaaactactttagacttggcaaaagcctttgacttgatttgtggaatcagttttagttaagcctgtcaattctgacttaatttgtggaatcagttttagtttagctgacaattctgccattactttggcccattgatgaagtaaatgttcttccaaaaatctgtattgaaattcctttagttaagtttaccatcatatggtaaacattacattcaaaaaaaaaaaaaaaaaaa

SEQ ID NO: 24402 - DNA, 553 bp, Gossypium hirsutum
  unsure (1)..(553): unsure at all n locations
  Clone ID: LIB3543-028-Q1-K6-G1
gtcgaccccgcgtccggctgctganaaaaacgattgggactgctggaagcagagaagaagaaagcctgtgctaggattttgcaagttcgacgagtggctaattctatctctcatcaacgtgaggttgagaggaggaaaatgagagaccagttggaagacagactgcaaagggcaaggagacaaagagcagagtacttgaggcagagaggaaggacacagaaatctattcgagtgaattgtaccaggatgcacaaacaagctgatctgctttctcaaaaattagcaaggtgctggaggcagttccttaggcagagaaaaactactttagacttggcaaaagcctttgattccttgaaaatcaatgggaaatcggtcaagtcgatgccatttgagcaacttgcccttctaattgaatcaatagctaccattcaaacggtgaaagctttgcttgatcgtattgagagccgcattaaggcctctagagttggtggtgcttctgatctcctatccagtttggataacattgatcatcttctcaaaagagttgctactc

SEQ ID NO: 24403 - DNA, 595 bp, Gossypium hirsutum
  Clone ID: LIB3543-028-Q1-K6-G9
gcgttcgcccagcgtccgcccagcgtccggccagcgtgcgcggacgcgtggggttcgaagcaatctccggttacatcggagctccgatctccggcatcggaacttttcacgcctactggtaatcagagcaagtcacctctcccccttcccgtttttgagtacaaagaagttagcgcgagggggcgcatggaaattctccaaggaagctccgaggctttctctggatagcagagccgtcgttgacgccaaaggaagccttaagccccgagagatccgtacgaatgccttgatattatctgcgaaccaatgcgaagatgaggtggatgatagcgataaacaacggcggtcaccaagcgtaattgcaaggctcatgggactggaaccgataccggattcgaatcccgaaccgaacggaaaagctcagctccgaagatccgcgtcggaagctagaggtcgagatctgtttcagtatcgtttcattgacggagttaatttccacttaaaacaaagccaacaaccaaatttccaaaacggaggagtttcgagcaatgtcgtaagggaaaatggagccaaacaagatcgtgtaattatcaac

SEQ ID NO: 24404 - DNA, 533 bp, Gossypium hirsutum
  Clone ID: uC-gsflmaxxa048a06b1
ctcctacagacaaggggagaaagaaacaggcaatcaatcatgctgagatattcgacgatgaaagtctaaacagaagattaacttgtaagaaagaagaggattatcgagttaaatactagggtgaatagtttttttttcttaaaaagaaaaagaaaggaaagatgatgacgggtgtagtgccagagcagaatcttgagaagcaaatagggaaacaaatgggatgcatggctggtttccttcagatctttgatcgtcaccagcttctttctggcaaacgcctttactcccctaagcgcctccctcccgtggaaacgccggcgagtgaaaagaaaacggagcaagtgaagaccgttgagacaccagcaatgtcgagagaattagggaagcagccacaaggtcgagcagcagcgtcaccggaccgttcgaagcaatctccagttacatcggagctccgatctccggcatcggaacttttcacgcctactggtaatcagagcaagtcacctctccccctttccgtttttgagtacaaa

SEQ ID NO: 24405 - DNA, 203 bp, Gossypium hirsutum
  Clone ID: GOSHI-09MAY01-C100825_1
gcgttcgtctatgtctacctctgccttcttctttgtactttgtgttctatgttattcgggtttaagataaatattaaatacgggtatgtgtatgacatgtataagctcaattgtttttttttctttaatttccatatttgaatatttggaaggttgtcaaagaatcatatttttataccatatttgaatatatgtggatatcg

SEQ ID NO: 24406 - DNA, 470 bp, Gossypium hirsutum
  Clone ID: GOSHI-09MAY01-C100145_1
gtgaggaagctacaagatgtgagttagggaacatctacattcccgctgatttaaagagtctcggaagcatttggcatcgtttattccataggggttgggccctagatttggtgtgggacagactttagccaccattgagatgaaacccatcctggctatgattatccggcaatattctctagcggtgtcgcccacatacgttcatgcccccaagctactcatctccctggagcctcagtatggcgtacagttactcttaacaagaacaactttatgatgcttttcaagcccacttcatggatgcttagtaaaataagtgaattttctctctttatattattataactcaatatcccttctacctattgttgttgtccagaggatgatgaatcaacatatggattgaaattatgcctacgaatgtatccccagattactggtataataatgacttatttggttagcccttc

SEQ ID NO: 24407 - DNA, 721 bp, Gossypium hirsutum
  Clone ID: GOSHI-09MAY01-C100015_1
tatgcggatattttgggtgaataacactggcattcaaaagctccagctaaaacagtgtttgacttaaaggggaatgagggtgcaaaggcaattggctgagttgttgaagaaaaaattcaacccttacgtgcccttgaactcaataacaatatgatagactattctggatttacaagtttagcgggagcactttcttgagaataagaactatccgcaattttcaacctaaatggtaattatggtgggtgctctgggggctaatggcattgggccaaagggactcgagggggaacaagtctttacgggaacttcatgtacatggaaattcaattggtgatgaaggaattcgctccttgatttcaagcttatcttcacataaaggaagaattaccctactggactttgggaacaactcaataacggcaaaaggtgcttttcatgttgcggaatatatcaaaaggagcaagaacttgctatgggtgaacctttacatgaacgacattggtgatgagggcgcacaaaaaattgctgatgctttgaaagagaaccagacagtaacaaccatagacctgggtggaaataatattcgaccgaaaggggttggtgcaatactgaaaccttaaaaaataacacagtcattaaaaatttggaacttggttataatcccattggagcaaatggagcaaggctttgtctgaacttcttaattcatggaaatgtc

SEQ ID NO: 24408 - DNA, 186 bp, Gossypium hirsutum
  Clone ID: GOSHI-09MAY01-C100215_1
gttaaatgaaaactttgttgttctaactttcatatggatccgatatttacacctatgtgtcggacataaatatgaattcaatgctcgcatccacattgaggatgaaaatcgtgtatcacaaaatgcttaggaaatttgaaggcatccaaggctagggatgaatggtaaagaaaagatttttttttt

SEQ ID NO: 24409 - DNA, 709 bp, Gossypium hirsutum
  Clone ID: GOSHI-09MAY01-C101945_1
aaatttcaaaatccgataaaaaacccgaaggaaaaagaggcaaaaacttaaggagacaacaacaatgaggcttgtcataaataatgttgtattgtttgtaggtattttctgtctttacctctccttttcaccgccgataaatgctgccggtgggaacaacccgttagttgcgcacgcttgcgagaaggtgaaggcgaaagacctttgcgtctcaagcctcatggcagaacatgccagcaaaagtgctgacttagccacgctcgccttgatatcgatcaaggtggcgtcgaataatggcacgaacacatctttctatatcaagaagtcactcgacacacagaaactggagccggcagtggagcagaacttccaggattgtgaagataattacatatcggcaacacagcagctcgatggcgcggtatcgtcgctggtgtcgaagaactacaaggatacaaaaatgtttttggaatcggccattgatgacgcgatcacttgcgacaacgggttgaggaaaatgcctgggaatcaattggagttgcctcatagaaatatcatgtttcgacaactatgtatcaatgcgttggacgtcgttctattcttgacgacttcttaaatctagctacttaaatgcaataattgattaaattaaaatttaaggtggtatctattctgttagaataagatctcatttatgaatttattcacc

SEQ ID NO: 24410 - DNA, 495 bp, Gossypium hirsutum
  Clone ID: GOSHI-09MAY01-C101625_1
ccgggtcgacccagcgttcggaaaaactcctcgagaacaatggcattggggaggctaagatactcaaatacggagatcggttgttggaaaccattgaagctaccatcaaggaacactacaaaacagacaaaatcaatagtggcagcagcaatgacagtaatgattctgcaaagaggagaagaaacacaaacgcaaacatagacaacaatgacgacttcagtagaagcactggtcggtccaagagaaggacagtggaaaggcaggacaaagatggtaccagtgataataatcatcaataccctgctgatgagaatgacctggattttgatgaccttgattatgtatatgacgttgaatcgaaagagaaccgcccgcaggtagaggtcaatataaatggaaggatgctaccttcttggcctagaacatgaaacatgtgtaacatctcaaccaactttggtttaattttgctaatagaatgtaaatttttaccactaa

SEQ ID NO: 24411 - DNA, 618 bp, Gossypium hirsutum
  Clone ID: GOSHI-09MAY01-C101395_1
gctttctcgcccccaacgactccccgatctcctgcagacttttcctttccaggttcaatggaagttgatgatgacaacggtccatcaacttcagctgcagttccggatggcgaaaccccggtgcctacagctaatagcacaccggttcagcctccagcggtcccacctgcagttgtacctccaactattgctccactaccggcagttgtgccacctattgctccaatacctgcagttcgccctcccgtctttaaaccacctgtgcctcaaaatggtgaggtgaaagctgttgattcagactctgaccatgaggttgatgggcgagctacagctggtgaatatgagatctcagaagagagcagactggttcgagagcggcaggaaaaggcaatgcaagaacttttgatgaaacgccgtgctgctgcactggcagttcctactaatgacatggctgtccggactcgacttcgccgacttggtgaacccataacactttttggagaaagagagatggaaagacgggaaaggctgcgaatgattatggcaaagctggattctgaggggcaactggagaaattgatgaaagctcacgaggaggaagaggctgcaatttctgct

SEQ ID NO: 24412 - DNA, 542 bp, Gossypium hirsutum
  Clone ID: GOSHI-09MAY01-C101235_1
ctgcacacttcttgctcaaagtgctgttcatggagcaatggcagggtacaccggcttcacaagcggccttgtcaatggcaggcagacatacataccattctatagaattatagagaaacgaaacagcgttgtgattacggataggatgtgggcaagactgctgtcttcaacgaatcaaccaagctttttgtgcctcaaagactccattgaagacacaggcgatgaagaacaatcaaatcaattgttggcgaatggacattgtggcgaagaggaagaacaatcaaatcaattgttggcgaatggacattgtggcgaagaggattctctcatttcaaagatatgatcaactgaggtgataatgtggcggtgaatgctttctgcaggcaggcgaggctttaggttaacacagtattgtagtattaggattggtccaagggaacttttgcttggacttttgttatttaggaggaaagaattggacttttatatgtatcagatttattaattattaaataatagtattgtgaaaaaaaaaaaaaaaa

SEQ ID NO: 24413 - DNA, 577 bp, Gossypium hirsutum
  Clone ID: GOSHI-09MAY01-C102965_1
gcgttcgctccctctcctccccttttcttccgccgaagggccaccatccataccctcaactgccgtcgtggccagtggccgctgttgtggaaaatgagcttttcagccctccttttgaagcccttttgaaggctagaccttcggcaactataagaaacagaggaagaaggctctccgtccttttgtcaaatccgattgcagcgacggagaaggccctccgacgacgcgattgagaggattcaggttctatcgcggagatggtcgtacggaggaagccaggcgtgggcactgcagcacgagggaaccctgagtttccagaaacatcacctgcccaggctacctgggccaatctgcctttgggcctctggaattgggtctgttttaggttctcagtaactgggtcgggtttcaattgggttaggaatttgtatttagggctaggatcaggccttagtcttatttgtgatgtgggttttataatttgggcttcaatttatatttaggtttgtatttatggactgtgaacaattttaatttttatttctggtttataatttatattttggtttttattttt

SEQ ID NO: 24414 - DNA, 870 bp, Gossypium hirsutum
  Clone ID: GOSHI-09MAY01-C102905_1
tcggatttggttccctgagagcttctatcagggaaaagagggagaagcttctaatttatgactatcttccaaatagaagcctacatgactttttacatgaatcaagatcaggaaagccagttctaaattgggctcgacggcacaaaatcgcattggggatagccaaaggattagcacatcttcatacaggtctcgagatgccgatcacccatgggaatgttaggtccaaaaatgtgcttgtagatgacttctttgtagccaggctcaccgaatatggactcgacaagctaatgattccggctgtggccgatgaaatggttgccctcgcaaagaccgaaggttacaaggcaccggaacttcaaagcatgaagaaatgcaacaccagaactgacgtttatgcatttgggatactgttattggagattttgatcggcaagaagcctgggaaaaatgcaagaagcaacgatgttggggatttgccttcgattgtgaaagcagcagttttggaagagacaacaatggaggttttcgacgtagaagtgttgaaaggtatccgaagtccgatggaagacgggttagttcaagcactaaagcttgcaatgggatgttgtgctccggtagcttctgtgagacccaccatggatgaagttgtgaagcagctggaagacaatagaccaaggaacagatccgctttatatagcccttcagaaacaaggagtgaagttggcaccccattttgagcttttgtttgtcaaagttttttatttttcatcaaattatcacctttcatttgccttactgctattaatatctgcttgtcaagtaggaaagaagtggtagtgcttgatttatgacttaatgttttttgag

SEQ ID NO: 24415 - DNA, 1525 bp, Gossypium hirsutum
  Clone ID: GOSHI-09MAY01-C102875_1
ccctcgcgtccgcgacaaatatgctgcggaagctggtttttcgacaggcttccagagcttaccgatccctgtctactcagtcaacgcttgctttactcagcaaatgctctgttttctcttattgttcatcatcacgacctgaaatccctcctagtaattccatcgaacaccttgaagatcaacccaccaacaccatttccattgatcgttctggactatgtagtccccctgagcattctcatgaaccttcctcagactctgaactggttaagcatctcaaaggcattattaagtttcgtggtgggccgatatctgtggcagaatatatggaagaagtcttaacaaatcccaaggctgggttctatattaaccgggatgtctttggagctgaaggtgatttcataacatctcctgacgtaagccagatgtttggagagatggttggtgtttgggctatgtgtttatgggaacagatgggacatccaaagagggtgaacttggttgagcttggccctggcagaggaactctaatggccgatcttcttcgtggtgcatcaaaatttaaaaattttacggagtcattgcatatacacatggtagaatgtagccctgcattgcaaaaacttcagcaccaaagcttgaaatgcatggatgatagaaaataccagtgaaggtgttgataaaagtgccgaccataattatagcccatgagttctatgatgcactgccagttcatcaatttcagaggggttctcgtggctggtgtgagaaaatgatagatgtcacggaagattcatcgttccgctttgttctatctccacagcctacacctgcaactctttacctaatgaagcgcttcaagtgggctgtgcccaaagaagttgagaaacttaatcaaattgaggtttgccccaaagcaatggacttaactagtacacttgcgaagagaataggtgttgatagaggtggagcacttattatcgattatggcctgaacggagtagtgtcagatagtctgcaggcaattcggaagcacaagtttgttaacatacttgacaaccctgggagtgctgatcttagtgcatatgtcgattttgcatcaatcaagcactctgctgaggaagcttcagatgatgtatctgttcatggccctattactcagtctcagttccttggttcccttggaataaacttccgagttgaagctctgctacaaaactgccctgatgaacaagctgaagctctaaggactggatactggcgtttagtcggtgacggtgaagccccctttgggagggcccagaggaacaagtccctatcgggatgggaatccgttacatggcaatggccattgttaacaagaagcaaggcatcccaatcccatttcagtgaagttttaaacaatattgctaaattatcttttccctgttccaattgaataaaagcaggattttgttctgtctaaatcttcgttcaagttccagctatgatgatggaatgcacttataaattctttttgttcttc

SEQ ID NO: 24416 - DNA, 605 bp, Gossypium hirsutum
  unsure (1)..(605): unsure at all n locations
  Clone ID: LIB3829-027-Q6-K6-C1
catcaacttagcattcaactgcagtatcattaggacactgtttcgtggtgggnccgatnnatctgtggcagnnaataatatggaagaagtcttaacaaatcccaggctgggttctatattaaccgggatatctttggagctgaaggtgatttcataacatctcctgaagtaagccagatgtttggagagatggttggtgtttgggctatgtgtttatgggaacaaatgggacaaccaaagagggtgaacttggttgagcttggccctggcagaggaactctaatggccgatcttcttcgtggtgcatcaaaatttaaaaattttacggagtcattgcatatacacatggtagaatgtagccctgcattgcaaaaacttcagcaccaaagcttgaaatgcatggatgaagaaaataccagtgaaggtgttgataaaaggtctctaagcacattggctggaacacctgtatcgtggcatgcaacactggaacagtgccgaccataattatagcccatgagttctatgatgcactgccagttcatcaatttcagaggggttctcgtggctggtgtgagaaaatgatagatgtcacggaagattcatcg

SEQ ID NO: 24417 - DNA, 1151 bp, Gossypium hirsutum
  Clone ID: GOSHI-09MAY01-C102715_1
gaacgccaaaaattatttgagcactcagccactgaaagcttgtgattttctttgcttttctcgctaaacagtttgtttccaatgaggggtagaagttacagtccctcactgccaagggattatggtagaaggtatcgcagccctagccccaggggttgctatggagatcgtataaagatcttcccaccagtcttcttgttcgcaaccttcgccatgactgcagatttgaattttgtctctcttcattgaaatcggttgttttgatacctttatttgtttttagttttcatgctagtgattatatgcaaagctatttggaaaacaccctaaacattttgcatctttgttatcatttgtttttatctatctattgtaagaacaaaaaatgattgcccgaatacaagttaaaaatttagtcccgtcaaagtgttttccttggagctgataaatttctaattgggcttcatgtgcagggtggaagatctccgtggacctttagggcaatttggtcgcctcaagcacatctacctgccttgagataagtatactggggaaccacgtggttttggattgtccagtatctagatcccgctgatgctgctgatgcaaaatatcatacggatggttatgttcttggcccagaacttactgttgcatttgctgaggaaaacaggaagaagccttcaaaaatgagggaaagagaacgcagaaggagtcggacagataggcactccccgcttcattattctcaatcaccgtgataggactgaagtttctcctgcagtccagattattattgtccttctaggaaaaggcattactcaaggttaatttcacccagagatgggagatatagagggtgatcctactcaaggtcgccttatagtaggagcaggtgtcaaagtctggactattctaggtgactaatttggtggtggatggattaatatgtgtatttctcaggagatatgtttctacgtaggtgcctggatgattagtttagccttgcttcttatataactcagaacaaagttggttgtttagttcctagtgctggttgtgggtaataataattttaaacatacataccggtcttaatattctatataaaatgtcttaatattctatgtaaaaaatgattttatatcctt

SEQ ID NO: 24418 - DNA, 614 bp, Gossypium hirsutum
  Clone ID: GOSHI-09MAY01-C102055_1
gttctgatggagtctttaacaagggggtctgcaacttggcccgaagagacactccccaacacgagtccggccgcaattgcctccgacttgtggaaatttgagttaaaagttctgaagagtgcatatcaaagtatgttaagttctcacaaatggggtcttgtgattgtcactgcaagctttgatggacgcattcgaacctacctcaattacgggttgccaattcgagtataagaacctctccatccctaaagatacagcaacacaacacatatacgaatataggtataactgtgcggtctggttttaaacacatacatgtctttgaacactcatgcaagctttgatggacgcattcgaacctacctcaattatgggttaccaattcgagtataagaacctctccgtccctaaagatacagcaacacaacacatatacgaatataggtataactgtgccgtctggttttaagcacatgcatgtctttgaacactcattttcgaattccagtaacatataataggttaaaatgggtcttcaaccgcatgtaggccttgagcccttgacccgtaatagatttttgtttatggatcacactatatagatgtcaatttat

SEQ ID NO: 24419 - DNA, 1036 bp, Gossypium hirsutum
  Clone ID: GOSHI-09MAY01-C102335_1
aatctctgctagggtctaaggaagatgacagtgcaggtccttcacaagccaatgttccaatggatccacaaggttatccaatttcaatcaaccagcaacacactctaccaaccctgtcagtcccagttccttcagagcagcctcctatagattctagtctaaatgttggaggttatgatgatagtatggcggcaagaatgtcaatgcaatcacaaaatgtgcatcttcatgctcagaatcagttcagtggctcttcattcgctctacaaaatcctttggtcagtggttcacaccaggtccaggttccaggacatgacaatgacccagctcttggtccatgtcaatcgtccatgccaggtttccatgagggcgggacatcacacattcctacttacaagggaatcgatgatttcttctcagaggaggagattaaaatgagaagcaatgaaatgcttgataatgaagacatgcagcatttgcttcgtatctttaacatgggaagccattgccatgctactcctcctcctcctccctttaacgctattgaagatactcatccgtatccctcaacatatatgcccaccccatccctggcttacggtttcgataatgatgcttcacgttcatcaggcaaagccgtagtgggatggctcaagcttaaggcagctctgagatggggcatcttcattaggaaaaaggctgctgaaagacgagcacacctcatcgagttagatgattcgtagattatatctatagcctcccaagtccaaccagagcaagaaggacacaaaagacatttaggtttgttggcaggatctggctgccatctatgaactattcctgtttgtacatttcttgtctgtacagtatgcttccatcctaaactaggaaggtcacaatccgggtggaggctagaaatgttagcggatgtaacagatgcatgttactagtctaagacatatagatgaccaacatctattgtattatgttgaggtctaacgaaataaaaacaaaggcaacgtttatttgtggtagt

SEQ ID NO: 24420 - DNA, 581 bp, Gossypium hirsutum
  Clone ID: GOSHI-09MAY01-C103935_1
ggatgctaagctaataatgcattttattgatttggaatttagttcaaacacatctaatcgttcgatgttttgttctcagtagataagaattgttctatctattttcaccaaggctacaacgagggagaaagaggccaatattatgttcaattataccacgctctgcacagccagcctgctactactgtttgttcttttaaaagtttttggggactagtctatgattaaatctgttgccttgcctttgcttctgctgctactgccggtttctatgagataacagaccatggaatctacgtcatccccaaatatgctataagcttcatttgcctgcaaataactgaatcccattgacagtagtaattgcatgccactgctgagaacactatcctgcaaaccatgctcttttgagccctccagtttggtttcactgcctgcaggccctgtccctgttctagctccagacgatgatggttcagcagttgaagtagacgattctttatggcccacttgtggcttaaacttgtcactggcaaggtattcagctcgagatgcttccataaccattcgctcaatttcct

SEQ ID NO: 24421 - DNA, 834 bp, Gossypium hirsutum
  Clone ID: GOSHI-09MAY01-C103165_1
ctggttcagaacctcagcgccaacatctgcaacacaatcttgaacttcaacttctaccttcatcaaccgctaactcgagggattcagatgaggagtacgctactcatttgaagctatcgatagggtccaacgacggtggcgaaaagaagcaagtaaaacgacattggaagctagtaggttgaaagagttcgcaagtgggcagctaaagttggccatggccgagaaggcctacgccgaaaaggctagacaagaagctaagagacagatcgagatggctgagcttgagttcgctagtgcaaagaggataaggcaacaagcgcaaggtgaacgggagaaaggcccaacccctgaaagatcaagcccacaaagaagataagtgctccaatcatgcagatcccctgtcaaacttgcaagcatcagttccaaacatcaacagctgctggtccagatgatgagacctcacttgctatgagttacatgtcttcagccacaacagaaggggaaggagagtgacggcaagttgatcatgcaatgatgaatgatcaacccccattagcccttaaatctctttgttctttgatctgcacgttgagtttttctttgctttgtcaactagtttttcttcacttattctaaccactatcgtggatttgatataagaaaaagaagaagaaaatggtcgttttaagcagttcttgaattgatttactatatcttcatttgtttaatagaaaaaaggggggggcgggggtagacattgcaatttaattaaatgcagtgtgaagtacagtatctatatgagatatatgaacaaatggtcatgccttgagattt

SEQ ID NO: 24422 - DNA, 436 bp, Gossypium hirsutum
  Clone ID: GOSHI-09MAY01-C103115_1
ggcccaccacaaaaaaagttggaacaccagaggtaatgaagcgtcaactacagtgcagtagatgcaagggtttagggcacaacaagtccacttgcaaagagctcttgtagagtgttggccactggatcgagttaaggatgacacagtttggctgatggatctaatggtacttcttcaatgtcaaatagttttattaggtgtaatgctagttctacttggtctctagttaaaaactttatgattaatgaacatggcagtgactcgtagggaaggattggttatttaaagtagctatttgtatccatgttgatggaaagctaaatgttaccatcgacttggatcaaattttgttactgtattatcagaaagagattggttaggttttctacctcagtttttaacttttttaatttggaaaaggaacacgttcattcac

SEQ ID NO: 24423 - DNA, 643 bp, Gossypium hirsutum
  Clone ID: GOSHI-09MAY01-C103035_1
ggaaattctagttccccctcaactcaatctcatatgagaaccatttctgttgtgccaagaaatgcgcaccctttcccttgggctagcatttccagttcaagaactagccacccatcaggttccattaatcctttagagagagctgctgcatcacgggaggaaccaaacgtaagaaatatcccgagaaacaatgcagagcatccaatgtttgtaccagcaacgcaagatccgacagggtggagtttggcatctgaaaatatcagcacgtctggaggcgttccgtcttctaatcgacctgggcctaggtcaaccatccagttgccgtctcctgcctggattcctccttgcaacccgccagtacattaccaacaaagagtatcagaagttgcaccttggtctttatttcctccatttgattctgaacctggtggcagtagtgggcgtttcccgtcattatcttcagccccttctgcttcttcatgggaaacagcagtgtcatctcgatctaacagtcaaggtaataatcaaacataccgaaggtcagctttcatagcagagagacaaggtgatgatgctcttgggaggccccactcattgcgatctttggctgctgatatcgaagggagacaccggctaatttctg

SEQ ID NO: 24424 - DNA, 577 bp, Gossypium hirsutum
  Clone ID: GOSHI-09MAY01-C135725_1
cttcttcagatataacgctgaaataaaacaaacccagcttttgaaacaaagaattgtttttttttttcatttggtttcaagcttagtaggtgggtgaggctgaaagaggggggaaaaaggggttaaaatattgaaaaggaaatggcaagtacaaaagagtcaagttcagagggaagtaacatcaagggcgtgcacactcatggaggtcaatatgttcagtacaatgtatacggtaacttatttgaggtttccagtaagtacgttcctcctcttcgtccaatcggtagaggtgcttatggcattgtttgtgctgctgttaattcacagacccgcgaggaggttgctattaagaagattggcaatgcattcgataataggatagatgccaaaaggacgttgagagaaattaagcttctttgtcacatggaccacgaaaatgttattgccatcaaggacatcattcgaccaccaaaaaaggatgccttcaatgatgtttacattgtttatgaattgatggacactgatcttcaccagataattcgctctgatcaaccattgacagacgatcattgtcatt

SEQ ID NO: 24425 - DNA, 722 bp, Gossypium hirsutum
  Clone ID: GOSHI-09MAY01-C130345_1
ctcgattttctttcttttttccggcgaattgatgatggaagcaagcttgaaatcgaaaccgatctgtttcaaaaatctccgattctttttctttcggggtggatctctcttcagattcatcttcttgttgcggttcctcaggattcagttgttgtttcaggtgacgaaaacaacattagtagtgaaccaaaaatgtcgaggaaattgtcattctcagttaatctagtaggcaaacatgaaaccaaagctaatgaaagaactgctgccaacgatggcgaaaaaggaggacaacatggtgtcacagccgatgctggtggtcgaaagacaaaattatccaataagcgtggcggagcgctaatccccgtgtatacagccggtgctgtgaacagtaaccgtcgtcttcgtcaacaaactcaacaccacagtgggtctagtagtgataccattaatcgcattgcctcgagtcgtttggttttagtcatcttcacgtctttctgctttgtgtatacgtaaaggtgggcgatatgttgtaagcttggtgcttaatttagttggtttaaatacgtaatatgttcaagtgaatcatagtatcttgtaatctcttaccatattgagcttttgactttctttgtttaaaactttgtagggtgtagagggtaatataattgatatatgaaatgcttgcggtatttataaaaaaaaaaaaaaaaaaaaaaaaaaaa

SEQ ID NO: 24426 - DNA, 627 bp, Gossypium hirsutum
  Clone ID: AI727192.1
catcatatacgcccgttccccttcaaaagcctcctctctcctttcccaaggagcccatctcgcccactccccacaccaactcgcccgtcaatccgacgtcgtcttcactatggtcggtaacccacaagacgtcaatcaaatcgtcttacaacccaacggtatcctttcgacactaaatccaggcgccgtcattgtagatcacaccagcagcagtccatcccttgcacgccagatctacgcttcggcccgcgaaaagggttgctggtcggtcgacgctccggtatccggcggtgatatcggagctagagaaggaaaactggctattttcgccggaggggaaagacccgtggtggagtggctaacacccttgttggatgtgatgggtacagttacttacatgggggaaacatggtgtgggcacactcgtaatattgggaaccaaataatggtgggtgccaatctgatagggttcactgaatggttccccttccccggagaaagctcgggttcggagctgattcattttatggaagcccctacgggaagaagttcctggtctaacggaattgcaatttatttgggagggaaatcatcgcagataaactttctgctaggttcgtctcggtc

SEQ ID NO: 24427 - DNA, 593 bp, Gossypium hirsutum
  unsure (1)..(593): unsure at all n locations
  Clone ID: AI731221.1
catcatatacgcccgttccccttcaaaagcctcctctctcctttcccaaggagcccatctcgcccactccccacaccaactcgcccgtcaatccgacgtcgtcttcactatggtcggtaacccacaagacgtcaatcaaatcgtcttacaacccaacggtatcctttcgacactaaatccaggcgccgtcattgtagatcacaccagcagcagtccatcccttgcacgccagatctacgcttcggcccgcgaaaagggttgctggtcggtcgacgctccggtatccggcggtgatatcggagctagagaaggaaaactggctattttcgccggaggggaaagacccgtggtggagtggctaacacccttgttggatttgatgggtaaagttacttacatgggggaagcagggtgtgggcaaagttgtaagattgggaaccaaataatggtgggtgctaatttgatagggttaagtgaagggttcgtcttcgctgaaaaagcagggctggagctgagcaagtatatggaagccattangggaagatgtgcanggtcaatggcaatggagttattcgggaagagaatgattgaat

SEQ ID NO: 24428 - DNA, 1033 bp, Gossypium hirsutum
  Clone ID: GOSHI-09MAY01-C132485_1
atggcataccttgaaaattgaaagcctaaagaaccctttttcttctccaacagtcaaccgccatggcaccctcctttctcagctttgtctccttatacggcatctacctccgccgttgctttgccacctccggcctcacttcacaattcatcgacatcgacgaccacaccaccatccacttttgggctccaaatcccgaccaccaaactccacagcaacaaaaacccgccttgcttttgctccacgggttcggtcccagcgctatgtggcaatggcgtcgacaggcccagttcttctcccctcacttccacgtctacgttcccgacctggttttcttcggcgattccaccacaaagtccaaggaaaggtcggaggtattccaagcagtttcgatggggaagctgatggagaagcttcaagtgaagaagtaccacgttatggggaccagctatggagggttcgtggcgtaccacatggccaaactgtggccggagaaggtggagaaagtggtgattgcgagttctggagtaaacatgcggaaagcagataacatggagttgttgcaaagagctaatgtggagaacgttgaagatattatgcttcccgagacggcgactcagttaaggacattgactcgtttggccatatcaaggcgtgtcaccatggttcctgattttttctggaaggacgtggttaaccaattatactcccaaaacagaaacgagaaactgccacttttaaagggaattaccctactggctggtgatgattcatgcaagctacctccacttccacaggatgtgctgaatatttggggagataaagacaaaatatccctttgaaaattgctcatgaactcgaagagctaattgggaagaaaacaggctggaattaattcaaaacttctcctgtgcccccaatgagaactcaacccgttccacaaccttgtcgaaaactcccaagtgggtcctcctaattccccaatataatatgtaatgtgatggaatataattccggaaaattttcctctcca

SEQ ID NO: 24429 - DNA, 626 bp, Gossypium hirsutum
  Clone ID: GOSHI-09MAY01-C132415_1
gtcgaactcaaagaattacccgacccggatgaccgttccaagatccgaaccttccctctcctccgaccctcgggtcgtccccagggcaagattcgggtgaaactcgggattcgcgaacgtccccttcctccaccgcctgattaccattttgcccctcctaactattattacacaaatgtccctccccatccgccaagatactccggtttgccctacgtttctcaccctccgccgcctcaatcgcctacgtactccgtccccgattcgtattctccccatttctccaatcactactatcctactcctccgccgcccatgcctcctcgtcctttcttggagcggccttacagctacactggtccatcagcaccgttagattactctccctacgatcagagacctagaggaggccctaaatttgggaccggattaactgttggagcggctgcgggggctttaggtggattatcattaaagaaggattgagatacgaataaaaaaggaatcgtggaatagtggaggacgacctcgcatccagggacagggatgattatagtgattaccgtcctccggattatggattggttttagctacaacgatgaatgtggggtatatttttataaac

SEQ ID NO: 24430 - DNA, 571 bp, Gossypium hirsutum
  Clone ID: GOSHI-09MAY01-C132105_1
ggaatctagaaggcagagagctggtgggaaagtacatgcagttgatcctgttagaaagttttccagagaacctatagctgttcctgccccagatttcaatgttgagttacaggcatccatacagaaacggcgaggacagtttgatgctaaaagtatcagtgaagtatgctaccctgaagaagacagaggtgctggcgtctctattgagccttcaaaaagaacagaaagagttgtatacaactctcattctggccggtcaatgcaccctggtaagtttgaatcttcacggaataagaagactgagattgagtctatgaagacttctgctcgaccatttggttttccaaggaagcctgaagagttgaaaactcagacaacatgtgttcatcgtggagctgtggaattgtcccgattttctaattcaattgcagttagaggcagttcacggttcgatatgaccaaagagaataatataaatcctcaatggcctgaggagcattttaattccggatataaccatctggataatgctgagtcctctgaaaagcatgatttgtcccatggtttactt

SEQ ID NO: 24431 - DNA, 688 bp, Gossypium hirsutum
  Clone ID: GOSHI-09MAY01-C132085_1
aatcatttggattctctctttcgatactctagacttgttaattttcgatttaagcggaaaaaagaagaagaaacaaaggtcaattagagtggatcgatgaaattagggtaagaaattggggatttttggggggattatgcagatggaaagggagaggcggaatacattgcgaatggagactacagttgttatacgaatgataaatacagtagattttccaatgattacagtgtttcagagaatgaaaagaatcaaagcttgccctcctcttcgttacccagtgccggttttatcgaacatccggtttcccggttcgatactcttgccggtgttgcaatcaagtatggtgttgaggtacaaacataaaaaagatgaatggtctggttactgatcttcaaatgtttgctcttaagacgcttcagatccctttaccagggcggcatccgccatcaccttgcttgtcgaacggttctgaaaccccaggacaaagcagtgccaaccagtccccaggtccaaatttgccttctgatttgcgtggctcattccagtcattgagactgaagactcctcctcgaagggtctctcccgcaatgagctcattaccaggttattatggccttaaaccctcagaaaaaaattgtggcgtcttaaggttttgaaatggccgttttcccgaaaagaaaaagtc

SEQ ID NO: 24432 - DNA, 691 bp, Gossypium hirsutum
  unsure (1)..(691): unsure at all n locations
  Clone ID: AI729452.1
aatcatttggattctctctttcgatactctagacttgttaattttcgatttaagcggaaaaaagaagaagaaacaaaggtcaattagagtggatcgatgaaattagggtaagaaattggggatttttggggggattatgcagatggaaagggagaggcggaatancattgcgaatggagactacagttgttatacgaatgataaatacagtagattttccaatgattacagtgtttcagagaatgaaaagaatcaaagcttgccctcctcttcgttacccagtgccggttttatcgaacatccggtttcccggttcgatactcttgccggtgttgcaatcaattatggtgttgaggtancacacataaaaaaaatgaatggtctggttactgatcttcaaatgtttgctcttaagacgcttcagatccctttaccagggcggcatccgccatcaccttgcttgttcaacggttctgaaaccccacgatcaagcattgccaaccagtccccaagttccaattttgccttccgaatttgcttggctccattcagttccttgaaaatgaagaacccccctccaaaaggtccccccgccattgaactcctttcccacggtttttatggcccttacaccctcagaagaaatttttggcttctaaacggttttaagaaggctctttccctcgaaagc

SEQ ID NO: 24433 - DNA, 670 bp, Gossypium hirsutum
  Clone ID: AW587515.1
tccttcgttgctgcgagagagatagagaagacgacaaaaggataaaacctaaaactgtgaacgacgtcgtttccttctcagatctgacacacacagagacagataaaagagaagagaagagggggggttatcccggtgagagagagtgaggatgagcgggaaaggaggcggaggtggaaataatgggatagggaagggtaataatagtggactttcaggtattccgcctgggtctcgcaagatggtccagagcttgaaggagattgttaactgccctgaacctgagatctatgctatgcttaaagactgtaatatggaccctaacgaggctgtcaatcgcctcctctctcaagatccttttcacgaggtgaagagcaaacgagacaagaaaaaagagagcaaggactcagttgatgcgaggtctcgtggtgccaataaccttgggagtcgtggtggtaggagtggttcagaccgatatactgggcgtggtggttcatcccattacagttcaaatgagtctggcccttcgcatggtaaacctgcacaaaagagagaaaatggaggcttcctgttgcagggtcttcatcttctgcatctggtatgcaaggaaataacatgaatcgtcgacctcaatcccacagtgaagttgcagtttcagaacataaaattt

SEQ ID NO: 24434 - DNA, 373 bp, Gossypium hirsutum
  Clone ID: uC-gsflmaxxa029g03b1
cccacgctttcggtttggctctcgcaagatggtccagagcttgaaggagattgttaactgccctgaacctgagatctatgctatgcttaaagactgtaatgtggaccctaacaaggctgtcgatcgcactcctctctcaagatccttttcacgaggtgaagagcaaacgagacatgaaaaaagagagcagggactaaacagaagcgtggttttgtggtgccaataaccatgggagtcatggtggtgggagtggatcaaaccgatatgctgggcgtggaggttcattccattacagttcaaatgagtctggcccttcacatggttagcaagagaatcccaatgaatggggatgccattctgcttcactggactc

SEQ ID NO: 24435 - DNA, 631 bp, Gossypium hirsutum
  unsure (1)..(631): unsure at all n locations
  Clone ID: AI055530.1
ctcgagttcattttatttccttgttctattgatgggtgctagtttctctgctttgttcatcgtccaagatggcgcatcatcatcttcaccctgtttgggcgacttaccggagagttgtgtggcatcaattattcagcatttggatcctccggagatatgtaaacttgcaaagttgaaccgagcatttagtgctgcttcttgggctgattttgtttgggaatccaaattgccacctaattatcatattcttgttcataaaattctgggttttgtgcctcaaaacttgggtaaacgagacatttatagaaggctatgtcgacctaatacttttgatggtggcgccaagaaagtatggctgcataagacacaggtggtgtttgtatgtcaatttcttcaaagggattacaaataacggggattgatgatcngagatctngaatcatattcctactaatgatccaggtaatgatttaataacttgtcacgaccagactgtccgactcagccggaggcattggctgtttgcaaagtgtttctggagctcatgaggtactctagtgcttagtaattatcatcatcatgctagcctgacttcgtttgaatcgtcaatttgataattctcttcaagaan

SEQ ID NO: 24436 - DNA, 506 bp, Gossypium hirsutum
  Clone ID: uC-gsflnu33B141c12b1
cttgctttgttcatcgaccaagatggcgtatgatcattttcaccctgtttgggctacttaccagagagttgtgtggcatcaattattcagcatttggatcctccggagatatgtaaacttgcaaagttgaaccgagcatttagtgctgcttcttgggctgattttgtttgggaatccaaattgccacctaattatcatattcttgttcataaaattctgggttttgtgcctcaaaacttgggtaaacgagacatttatacaaggctatgtcgacctaatacttttgatggtggcaccaagaaagtatggctgcataagagcacaggtggtgtttgtatgtcaatttcttcaaagggattacaaataacggggattgatgatcgaagatactggaatcatattcctactaatgaatccaggttccactcaattgcgtatcttcggcaaatctggtggttcgaagtcaacggggaggtagaattcccgtttccgtgggaacttatagt

SEQ ID NO: 24437 - DNA, 492 bp, Gossypium hirsutum
  Clone ID: GOSHI-09MAY01-C129865_1
cgccgcggttgatcggcgccggagattctcgtcgtcgtcctcgtcgaattcgtcgcctgacaggtacttggatatgccgagaaccaaaatcccgaaatgggtcgacgattacattgatcaaatcgggtgtgttcttagagaaggcgggtgggcggaatgtgatgtacggaaatcagacacgtgtcagcatctgggttcttcgaagaagagatggttttattggataatcaagctgttcttgatgcgcttcttttaaaagtggatcggttctcagattcgctccgaaaagccggatggagctccgaagaagtttcggatgcactggggtttgattaccgactggagaaggaaaagaaacctgcaaagaaattatcccctcagctagtagaaaaaattgggaaacttgctgaatcggttacccggtcatgacacagcttctagtttgtgttataaaaatttcctgggggtttggattagataaaaaaaaaaaaa

SEQ ID NO: 24438 - DNA, 673 bp, Gossypium hirsutum
  Clone ID: GOSHI-09MAY01-C129845_1
cgtaatcttaattatttggaagttaaagaaaataaatcaatgttacatagtgaagcagttcgctcaactcattctgatggcaaatttggtggttatgaattgcagtcgtcgccatcagcgctggcagaagcatctgagcgacccaagttgaagttatttcctcggagcaagcgattagatggccccaaatcacctgttgttgatcctaagcaggtattcttctgatgccatacaattgaagtttgaattcacatggtccacccctaattgttataaatgcttgaaataggggcaccagcagccaagtgaattaatgcttactcatactgaaattggtaaccattcacatgaacatttgcatacttcaaaacctggtttagctggtagtgagagtcggaatcagacagtggatcgtcctaagctcaatttaaagcgacgttcacagcccatcgaacaattggaagggaacattgagaaggaaaggtagtatgtttctaaactctgagttaatgttactctgtatgtatgtatagcgttcttgtgaaacaactaaagcattatggaacaatgaatgcaattttagagtccttaattttgtttgtcacctgtttgccagagtaaaacttatctgtcattacttaattcaactgttagaccttatacttcttagctt

SEQ ID NO: 24439 - DNA, 830 bp, Gossypium hirsutum
  Clone ID: GOSHI-09MAY01-C129565_1
agcaagttaaaaaatgtaacttgcccaagtcatttttttctgcctacctctgctgaaaagcataccgctcttcttcccaatcacctctatctttcctgaccggagtttaagaaggcaaagtagcaaagatgcagcagagattgtcggcatcagggaggccttctggtacagatggctacgatttctcatatcggatggttgttgattcccgatatcaaaaagtagctcgtacaaagtctattctgcgttcgtttttcttagttcaggctatcacacttttgttggggctagttttgctaatatttcaatctgcatcaaagggtttggcttcccgggttcttgaaatttcaactactgcttgtggtctcatttcattgataataggagaattaggtcggaaacgcagccgagtgaacatgttgagattttttatggttgcatcttctatcgctgtctcattattaatgttttgtgccattcggaagggttcaggattcatggctgccaaaagcccaagtttctgggaaacaatttgggcgcttcctgaggtggcccctgctgttgtgggaccggtgtttcctccttttatccatgggctacacagtccacctcattgctaacatgtctgtccctaagagagcttcatagcttgtataagtatagctgtcacaaatacctacatcagtggtaaaggcaaaaattgctgctttgttcattgccttaaaattcatttcccacacccagaaagcacttataacagttgaaattgtagggggttatttgatttcccattgattatgaattaaccaaactaaccataatcttttgac

SEQ ID NO: 24440 - DNA, 652 bp, Gossypium hirsutum
  Clone ID: GOSHI-09MAY01-C129725_1
aatcatgtacgtaggtagggccctccattctgattggtatatcatgaaaaaagaaagccatttgcaccaggcgcactgcgctttcccttgcccagatgttcgcctttctaagtcaagtaatggtgacccgccgaagactggagcctcgtaacatgttgacgaagaccttcgaactgagggttcgatcagtagaggggacgactttgccccccggaagaagaatagccccgctctctagccgactgatcccgttgatcatataactgggagggaacgtgtcacattagaggtgaacgatcagagatgtcctctaatcaccacgatgaggctggtctctcttttagtagactcagctatgaatatgaatgaagaaatgaatgccgggctctttctttcactgctaaccccaagaagtttctgaatgctgatactttctgtttcgtcgagccccgagcttgtggtcctcctttgagtgtgagttcaattggatgaatccgtcaagtcaaggtcaacgtacgtagcagcaaagcaaggatggcgcatcgcctatttatttatcgttctcgttcgggagccaaaacgaacacacctgctacctactgtactggaccttcgaccaggcattctacccttgtcgaatcggaaccaaccc

SEQ ID NO: 24441 - DNA, 642 bp, Gossypium hirsutum
  Clone ID: GOSHI-09MAY01-C129695_1
ggttcctaaagtttctccacatgagaggattgtggtgaaaaagttgggccttagaggagtttatgcatgtgtgattcaatatggttatgctgattccctaaaccttgaaggagacaactttgttagtcaagttttggatagcttgcaagagcatatagaaaactgctccagtttaccgtctgatcatatgccagttcaagaggagatttcagaactgagcgaggcaaaaacagcaggtgtaattcatgttcgaggaaaagcaaggtttcacataggcaagagcaccagcttctttgacagattcatgcttgccttctacgaagtgttgcacaaaaactgtaggcctgcactgcctgttcttggggtgccgctgccgcagtgtctggaggttgggatgttttatgaagcttgaataaatgattgtaacaggcacatcaagtaccaagttcacttccacgggaaaagaagaaaaaaaattaaagtatatgttgaagctttacaaccaagccatatcagattgtgagttgattcatcccatttttagcgacttgttccatggttaaattttgttgttagtccttggactatgcatatatagtcattgtgctttaatttagttgattttacctcctatttcaaatt

SEQ ID NO: 24442 - DNA, 636 bp, Gossypium hirsutum
  Clone ID: GOSHI-09MAY01-C124585_1
gacccttttattagtttcacaactaaaagaacccaagttttgatattgtttaaccgccatggatgagacccagaaaagcctacttttgatggggtcaatagcaagtgcaaatgaatcattaggtgaaatgcggaccactccattgatacgtaacccatcccaaccatctttttactatctttcactccaaggaatcactgtgggaagcactcgcttgcctatcaaggaatcaacttttgcactcgaagacaacggcagcggcggtgtaatcatcgactccggcaccactatcacgtatctcgaacaagctgctttcggcgtgctgaaaaaggcattcatcttggaaatgaagcttcccgtcgacactttgagttcaacggggcttgacctttgcttcaccttgccatcaggttcaacccaagttgaagtacctaaacttgtattccatttcgacggggcggatttggatctaccggcagagaattatatgatcgcggactcgagctcgcgggtaatttgtttggcgatgggaggctcgagtgggatgtcgatctttggcaacgttcaacagcagaatatgttggttgttcacgatctggagaagggaactgtgttccttattcaaacacaatgcca

SEQ ID NO: 24443 - DNA, 462 bp, Gossypium hirsutum
  Clone ID: GOSHI-09MAY01-C124185_1
tttacgttttcgcgtccgatcggctttggtttcatttggacaaatttgtttttaggtgcagcttcttagctcaccaagtgttcgacgatattccccaactagcaaaagtagaagctgatcatcttttttctctggtttaaagcaaacccgtcgtcactctctttcaaatcagagccttggactgcgtacaatattccatctatttactttcagcaagtgttggaacaatatttctccataagcgaaagtagagataatcttttctcttgttgaaagtagccgtcaatctctctcaagataaatgatgcctagatggaaaggaaaaggcttacaagccaaagctaatgctgatcccatggctaaaattggctcacaactccaacccctcttttgatccaattggagactcggggtttgctctcgagctgcagtgtacttgttgaagtggatgctgaattagct

SEQ ID NO: 24444 - DNA, 452 bp, Gossypium hirsutum
  Clone ID: uC-gsronu33B132g11b1
aatcccactccaacataaagcatctctagtttccctctccaattctctaagcttagccgaaacaatgaagctaaaacatcactcgtccatcactctcctccccttgctctctttgatctttcttccctccttggtctcatctcaggcctgccagagaacctgtggcaatctccccatcaagttcccctttggaaccggccctggctgcggtgatccgcgctttcaacagtatgtaacttgcgaccaacaaaaactcaccttgacaacacacaccggaaactatcccataaccaacatagactacagcaaccaagtcatatacatctcggatccttcgatgtcgacttgcggttgctctcaaccgagcaaaggcttcggcctagattgggacgcacccttttctttcacggacgacaacgtattcactctccttgactgctccaccacttcgg

SEQ ID NO: 24445 - DNA, 280 bp, Gossypium hirsutum
  Clone ID: uC-gsronu33B132g05b1
ctcacgcgtccgaaatatttatacccaaaacatcaatggttcattacctgatgttgaagttcacaatggtggcaattttactactttaaaacccattaaatttccctttcttgaacaagtggggcttaatgttagtcgctaggtactggcaactaatgccactagggcaccatggtatgcatcggatccacaggagccgtatgtggctgcggggatccgcgctttcaacagtatgtaacttgcgaccaacaaaaactcaccttgacaacacacaccggaa

SEQ ID NO: 24446 - DNA, 771 bp, Gossypium hirsutum
  Clone ID: GOSHI-09MAY01-C125265_1
gtcaatacgtcggcactgaagtcctttccctcgatgctttccttcattctcttggctcttctggctcacgcctcaccaatccaatgtaaacacccacatccaaaaataaacataatcatcttagccgggcaaagcaacatggccggtcgtggaggagtgttcaacgacaccataaccgagacactaacttgggacggcatagttccgcctgaatgccagccaaacccttcgatcctcaggctaaccgcaaacctaacatgggttgaagcccatgaaccactccatgcagacattgattacaacaagacaaatggggctggacctggaatgccatttgccagcactgtgttgaacaaggaccctaactttggggtgatagggttggtgccttgtgccatcggagggactaatataagccaatggcagaaaggagagtttttgtatgagcaattggtgaaaaggtctcaatttgcaatgcaaagtggcgtgtatagagctatgctttggtatcaaggggaaagtgatacagaaaatcaacaggatgcagaattgtataaagataatttgaagaggtttttcaatgatttacgttttgatctgaaaacacctaagctaccaataatccagtacgttagcttcagggccaggggcttatataaaggaaatgagagaagctcagttaaagacagacatgccgtatgtgaaatgtgtggacggcaagggtctcccactcggaccaaatgggttgcacctcaccactccagcccaatt

SEQ ID NO: 24447 - DNA, 684 bp, Gossypium hirsutum
  Clone ID: GOSHI-09MAY01-C126845_1
cccactcgtccgcggacgcgtgggtttctttctcattaggctactctcgtcactaagaactttaggcttggaccatggaagactctgctggaggcgcatcattacggtcgggtcccgacgggaagaagcggcgtgtgacatacttctgcgagccggcgatcggcgactactattacggtcagggtcacccgatgaaaccccaccggattcgtatggcacacaatctcatcgtccattattctctccaccgtcggatggagattaaccgtcctttccccgccggtcccgacgacatccgtcgctttcacaccgaagagtatgtggacttcctcaacgccgtcacccccgattccatctccgaccccgcttatttctcgccatttgaagcgttccaatgtcggagaggattgccccgtgttcgatgggctttttggtttctgccagcctccgctggtggctccattggtgccgccgttaagttgaataaaggggatgccgacatcgccatcaattgggctggtggattgcatcatgctaagaaaagcgaggcttctgggttttgctatgttaatgatatcgtgcttgggattcttgagctcctgaaatatcacaggcgtgtgctgtatgtagatattgatgttcatcacggtgatggtgtaaagatgcattttacaccactgacag

SEQ ID NO: 24448 - DNA, 578 bp, Gossypium hirsutum
  Clone ID: GOSHI-09MAY01-C120935_1
tctctttctagcgcgtggtacactgaaaccaagttatgccaagggtcaatgccaaaattctaccaaggtcaccgaaacaccacggtgctggttttgcctttgtcaggacaaatccaaaacggtacaggtttgatcatggcggtgcaagagcagcaacagcggacgggaaacatcccattgagactgcgggtgagtcagcctgtgagggttaagcttgggaagttaaagctcatgaaagtgaagttctcggttaggtgcgggttagtggtagatgctttatctgctaacaacaccgtcacaattcaaagtagtagctgcaaatttaggcttagcttgtagagttcctaatttctaacacccgccatattttttacatttatgttcgagaaataaggagggttttaatatatgcggttttgttctcctccatgctatatacttcagtttggtgttatatatttgtaatggtgattttattctataatattctttttcttcttttgggaaagattatggtcgatacccatttttgatcttcttgatttggggatcattacagggatattctcatttgtttt

SEQ ID NO: 24449 - DNA, 774 bp, Gossypium hirsutum
  Clone ID: GOSHI-09MAY01-C120675_1
ctctctcacaacgagatccttcgtttagctaacctttttgttacttccggtgtcgataagatccgtctcactggcggtgaacccaccgtccggaaagatattcacgatatttgttccgatttatcgagcttgaaagggcttaaaacattggctatcactacaaatggaattacccttgctaaaaagcttccaatgcttaaacaatgtgggattactaatttgaatatcagtttagatacccttgttccttcgaaatttgagtttatgactaggcgtaaaggtcatcataaggttattgaatccattaatgcggccattgatgttggatacaaccctgtaaaagttaactgtgttgttatgcgtggattcaatgatgatgaaatttgtgatcttgtcaatctcactgttgataaaccaattaatgttcgattcattgagttcaatgccctttgatgggaatgtatggaatgtgaagaaactcattccgtattccgagatgttgcatacagtggtaaggcaaagaaatttccgaccttaaagaggttgtgtgatcatccgacagagactgcaaagaatttccagattgatggccatgtgggtactgtatctttcgttacttcgatgacaaaacatttttgtgctggttgtaatagattgagacttttggctgatggcaacttaaaagtatgtctctttggtccttctgaggttagcttaagagatcctcttcgttccggtgctggtgacgaggaacttagagaaataattggaaca

SEQ ID NO: 24450 - DNA, 759 bp, Gossypium hirsutum
  Clone ID: GOSHI-09MAY01-C121725_1
tgctcacgcaatcgaggacgactccgtcaacgggtattaccacgcgaccgtgtttatagaaggaagggcttgaaaatgggttcccaacaagccggggaaccattcaaagtatatcgtgtccttctcaaagcagtgaaaaaccacattggaaaagaagagtataaaaagcgtggtagccagtatatagcagagcaatttaggaaaaacagtcaactttcagacccttctttagttgctcaaagaattaagcttgccaatgattatacttatttgcttaacagtgggcatcatcacaaggacttattggtctcatacaacataacgggtgataggtcagatgaaatgaaaagaatacctggaaaatcagctgcaagtgttggtctcaagcttcctgaggtttatcaccttgatgtcggtggataataattttcatcttcttctttgtctaggggagaataaaattcttcatcagaaatcaattgctagcatttagggtctatttgttcagtggaagattttttcgtattgaatgtgtgtttcacggaagatagtttatcaacaacaaatcccctgaatgaaccaagtccttaaagcttggggcacattgggtgctgccattgatgcggtctttgcgtgtaacttgttcttactgatgatgatgattaagaaccgtcgaagtcggtgctgaataagcggagaaatgccgtatgggtgggtctggttgggttgggtcccatcattttgagttttaaaaatatg

SEQ ID NO: 24451 - DNA, 189 bp, Gossypium hirsutum
  Clone ID: GOSHI-09MAY01-C121305_1
cccatgcttccgcccacgcatgcggtattctgtgcggaaatgaaacttaaaactgccagcgatctcccaacttcactatgccggtcgaggaaggagatatggcccggacatgcgccgcaacgagcatgcttgtgcacgagccgatcatcgacgagttggcgccatggctgagtcagagcaacggtaatc

SEQ ID NO: 24452 - DNA, 541 bp, Gossypium hirsutum
  Clone ID: GOSHI-09MAY01-C122895_1
gtcatgacaaggtgcagcaggtgttgcttgcactactccatgaaaatagtgaatctcatcatgaattttcttgggattgcaatcattgtttactccctttggctccaaaagaagtggaatattggtgttgctcaattgctttcttttccttcaattcccaacccttggtttatatatacgtgttttggtgtgggaattgcagtgtgcttgagctcactattcagtttcattgtctctaattgtatcagcacatctgtactttgtatttatattttcagcgtttgctcccttcttcttctggaaattgccgtgattgtcaccattctcttcaagaacgactggagttcgctaatttcaaaatacattgatgagaatcatgaatttttcaagaactttgttgtcttccatgaaaagatgtgtcgcttgattactcttttgattctagtcccacaggttggtgtaatagcatttgcaataattttatgggggggtgggattgaaagttatccgcgagggtgccatcctgattaggggtttttcc

SEQ ID NO: 24453 - DNA, 541 bp, Gossypium hirsutum
  Clone ID: GOSHI-09MAY01-C122545_1
tcatgacctcagcatgatctctcatttttatccgggggggttttctcttttcaaccgtttcttcccatcctctttatcctctctctctgcaaccttacctctcctcccatttccctcaccatgccaggcaaccaagaagttatgtggcccagattagtggctaacaagatcctcagaaagagattaggaagcaacaatttcgtcgctgatttcccatgcaacaaagaaattccaagcttagatcgtccatcgttgagtcccaacagtatattcagtcaccacaaggatacccataactacaggattttcgttagtacatggaatgttggaggggttgccccacctgaagatttggatatagaggatttgttagatactggcaacacctcctgcgaaatctacgttcttggttttcaagacattgtaccccttagcgcctccaacgtgttaggatctgaaaatagcatggttgccatgaaatggaattccctaattagacgagccttgcacaacaagaagaaaccacactgctagacaaaat

SEQ ID NO: 24454 - DNA, 468 bp, Gossypium hirsutum
  Clone ID: GOSHI-09MAY01-C123855_1
gttacgcttacgcgattacatagacattacaccacttgcagtgctagatacagatctggaggttgacggcgcggttgccgctgccggggaggctatcaggcagaagaatatggtgcctgatggcatccttgtggccacccctgattacaccgctcctctgacggcgcctctgaagagtgcacttggctggccttcaggaccaccaaatgtatgggctgatatagcgggtgccatcggaagcgccggaggaggcttagcacgtgcgcgatcacattatcatgttggccaagttgggctacatcttgatctacattccatgaataaacccgaggtgtactagaatgcgtctcagcctgcgggcaattgcgatagcgatggccaccttattgatgagggtatcaaggagagaatgaatcacgttcttgtattcttgctagcatttacccttcgactccgacctaaccactg

SEQ ID NO: 24455 - DNA, 370 bp, Gossypium hirsutum
  Clone ID: GOSHI-09MAY01-C118824_1
ccttcgcgtccgcccacgcgtccgctcagtgcaccagggacctttccagctctgagtgttagaagtgtcttgacggcctaatcgtggagcttccgacctgctgtgatggaaaagaaggtggaagagtcgtctggtggcagttgtaactttagatatgaaatccacccttttgttaatgcataattaaacctttgggatcgttcaaaagctaaagactatttctgccctgcaattaattacgttaatctaatcatatatattagtctgggaatgtatttatagtaaataaaagaaagtatgattctgccatccagcacaaagtgagtttcctggaacagaattgcatggcaaacagagttaatttgaattg

SEQ ID NO: 24456 - DNA, 510 bp, Gossypium hirsutum
  Clone ID: GOSHI-09MAY01-C118644_1
ccttcgcttccgcccacgcgtccgatcccttggtacaaaaaatcaccgacttatatgaccaaatctcaaccctcgacagtctcaaaccctccaaagatgtcaacatgctcttcacccaactcgtcctcacatgcatgccacccacccatatcgatgtcaccaagctttgcaaaaaggttcaacagatgaggtcccaaattgattcggctatgggggggaagccgagggactattagaaacccatttctccaccatcttagcatcctatgataacccacttcaccatctcaatattttcccttactacacaaactaccttaaactcagccaactcgaattcaatatcctcaccaaacactgctcaaatgtgcctaaccaagttgccttccttggctctgggccccttcccctcacttcgatccggttagcttcttttctaccttaaaaccacctcgttccacaactacgatatcgacccttcgctaattcgaaagctcttcgattagtctc

SEQ ID NO: 24457 - DNA, 506 bp, Gossypium hirsutum
  Clone ID: GOSHI-09MAY01-C119854_1
acgcgcgtcctctcgtccgaaacgccccatctccgatgatgaggttgcatggcttgcaaagttgcttatttggttatccagttggttgaatgaaagccttggcctaaaccgcccagaagataatgatgtgggttctaagtggttctatgtgaacatcccaggtgatgcagtaaacctgaacggatcaggtgagatcgtgaaaactctggtttgcttaattggttcttggcttttaatgatgggaacaacaacaacgagattaatgagaaaacacggtttaaggataaatcttagggtgttggcttccaagaaggtggtgatggtgctgctcatatttgttgtatttagtgtattgaagaaagcttgtggattgttccattgatagtgtaaataaatcaaacatacgaatagggaggaaatggttctcagtttttttggatttgatctcctaaagcaacagcaacgtgtgaagcaagaaagaaatttcgcataaaaaaataaagggc

SEQ ID NO: 24458 - DNA, 691 bp, Gossypium hirsutum
  Clone ID: GOSHI-09MAY01-C119464_1
gcttgtcgttttaattaacatccgcgggaaacagtttatttataagtggtgatcaagtaatctttttcggtggaaaattcacttgaagttgatgactatgtatcagcaagattcagattttgtgcattgggttctgggtggcgaccctttttaccattctgtatataataatgacatggtccggcaagatgctggtgacatctatcatcatacacactattttagaggtcatagtcatactgatacacaaagcagccagatagagaatgatgaggtcattgctcgtacccttcaggaagaattctcgcatcttgctgtggcagaagcttccgaattttctcatgctggggaagagcagtcgcaagcatcctgtgaacctcatgattggcttactccttcaacaacagactactgttattcaggctatgaatatggccgggatgaatccgatgatttggtgccacatagttcatgctctagttctagccccagtgattcagaggatttttctggctctttggagctgactgagggttatttacttgatgatgaagtaggcatgaggttgaatcaaatggttcctattcctcatggtcctcgaatcaatggcgaaataccatcaatttgatgaagcaatgtctgatcatgagaggttgttaagcagattgcaggtatatggtttcatggagct

SEQ ID NO: 24459 - DNA, 420 bp, Gossypium hirsutum
  Clone ID: uC-gsflnu33B076e05b1
gcgggggccgcgccggagaatctgggggaccacacgccgtcttgacgccggcaccaagaaggaggcgagggcgaacatcagacagacgcaccagaggggacacaaggcatacaggaggcagaaagcgaaacagacagagagtgagagaggacatggctcggaccctgcaggaagaattctcgcagctagctgcggcagaagctgacgaaatgtctcatgctggggaagagcaggcgcaagcatcctgtgaacctcatgattggcttactccttcaacaacagactactgttattcaggctatgaatatggccgggatgaatccgatgattcggtgccacatagatcatgctctagccctagccccagtgattcagaggaatatcctggccctttggagcagaccgaaggaaaaataactc

SEQ ID NO: 24460 - DNA, 611 bp, Gossypium hirsutum
  Clone ID: GOSHI-09MAY01-C114414_1
ggcatgttgttggatgaaggagatagtggctttcctagggaagaagacaccaataatgcagattttgaggaagatcaagcttccttgcacttaagggactctgatgaagaaactgaaaatgattcagtgatgatggaaggggacaatatgacaagggaacagatagaggatgagattaaaaaaataaaagaggcacatgccgaagatgaggaatttccagatgaagtggatactccactagatgttcctgctagaaagcggtttgcaaaatatagaggcctcaagtcttttaggacatcctcgtgggaccccaaagaatctctacctccagaatatgccagaatttttgcttttgatagttttgccagaacacaaaagcatgttgttgcacaagctttaaaagtggagcaagagggcagggatgactgtgcaccagttggttcatttgctaggttttatatcaaggaggttccttttcatgttgcttccaacttgtgtgtggcctcaagaactgcacccattgttttatgtggtctcctgcaacatgagtctaagatgtctgttcttcattttagtataaaaaagcatgataggtatgatgctccaattaa

SEQ ID NO: 24461 - DNA, 649 bp, Gossypium hirsutum
  Clone ID: GOSHI-09MAY01-C114764_1
gtcatttgctggagtcacctgggaaaaaagtgggaatagttggcctggggggtctgggtcacgttgctgttaaaatggcaaaggcatttggtcatcaagtaaccgtcatcagcacttctccgtcaaaagaaaatgaggctaaacagcgtttgggcgctgattatttcctagttagcacagatgctaagcaaatgcagggaggtaagaggtcgctagatgttattttggacactgtctcagctaaacactcactcggaccaatcttggaactactcaaagtaaatgggactttggtagttgtgggggcacccgacaggccaattgagctgcccgcttttccattaatatttggaaagagagcagtaaagggaagcatgacagggggtatgaaagagacgcaagaaatgatggatgtgtgtgggaagcacaacatcacgtgcgatgtagagcttatcaagccagataaaatcaaccaagctttggaccgccttgccagaaacgatgtcagatacccgttttgttatcgacattgcccggaacctctaagctttgaagatcgaatcagtgttcccttgcatgttccttggcaatcgattcatctatatccaatatggttacactctacactacaacgagttttattggtcgt

SEQ ID NO: 24462 - DNA, 470 bp, Gossypium hirsutum
  Clone ID: GOSHI-09MAY01-C115854_1
ttctatggaaaatccaacccaagtgcaacatgctgaagatgaagatgaacatattttccgtagcaaatacccaccggtttcagtgccggataacttgacgttgccggaatttgttctccaggatgctgagttatatgctgacaaggtagcattcgttgaagcagtgtccgggaaatcatacacgtaccgtgatgtggttagggacacgaggaggtttgccaaggccttgaggtcgcttggccttaggaaaggccatgtagttctggtattactcccaaatattgctgagtatggcattgttgctcttggaatcatggctgccggcggtgttttctcaggtgcaaaccccgcatcgcacccatcggaaataaagaaacaagctgatgctgcaaatgctaagctgatagtaacaaatggcccaaactatgaaaaggtgaagaatctggagcaacccgtccgtgtgataggcg

SEQ ID NO: 24463 - DNA, 542 bp, Gossypium hirsutum
  Clone ID: GOSHI-09MAY01-C115764_1
ctcacgcgtccgaaaagaggttatagaatctttgttacttaaacggtgccctcatctttcagaaatccaaagtattgtacttactgaaatagaaagcactggttacttagtattggcaagtgtggatgcttatggtcatcttattgtctctaaactggatgccagtggtaaagatgctgacaagattacttattcagtgttacctcgggattttggtgttggagaaggtagttggtctgggatgtgcttcagtccaactcaatggtccatggcagctgtggcacgaagcttctgcaaaagtgttgatgtttatgaccaggatatccatcttcggactttgcgtacactttggtatccatcttcgctaagcttcatgcggaatttaggtcatgggaatgagagttctatattagccgtaactgaaggctgccagttgtctgtatgggacttgagaataaaagaaaatggtggctgtctaaatcgtatttgtggttctgctggagatatcttttatgctgtctgcagtcttcaactggtaatat

SEQ ID NO: 24464 - DNA, 473 bp, Gossypium hirsutum
  Clone ID: GOSHI-09MAY01-C115724_1
tttgaagctgaggcagccatgcttggtcagccgatgagcatggttttgcctggtgttgttggattccagttatctgggatactaagtaatggtgtgacagctactgacttggttctgactgtgacacaaatgctgaggaaacatggtgttgttggcaaatttgttgtgttttatggggatgggatgggtgaactatcattggctgacagagctaccattgctaatatgtctcctgagtacggtgcaaccatgggattcttccctgttgatcacgtcactctgcaatatctcaaattgactggcagaagtgatgaaacggtggcaatgatagaatcatatctccgtgcaaataatatgtttgttgactatgacgagccccaacaaaaaagagtttactcttcatatcttgaactaaaccttgcggaagttgaaccctgtatttcgggacctaagagacctcatgatcgagtttc

SEQ ID NO: 24465 - DNA, 563 bp, Gossypium hirsutum
  Clone ID: GOSHI-09MAY01-C115604_1
cctactcgtccgccccacctcaccttctcatacgacgccgtctcccttcctttactcgcctcctcactctctctctccaccctcacgacaacccccacgatgctcgccgccgctcctccgcagtctctcggcgcgccgttctcctcactccgtttctcgccgccgctggctctctcctcctacaacaatcccagtccttggccgaggagataacgccgccttcccctccggtgacttcgcctccgcctaaggtggtcgtagaggaggcccttgtgtcggcgaggatatacgacgctacagctatcggggagccgttggcggtggggaaagataagagcagagtgtgggagaagttgatgaatgccaggattgtttatttaggagaagctgagcaagttccaattagagacgattaagaattggagcttgagattgttaagaatttggaaaaccgctgcgttgagaaccagaggcccgtgggctctggctctcgaagctttccttccgatttccaaacccactcgatcagttatgcctaaaggttgctggagaagactgaaatt

SEQ ID NO: 24466 - DNA, 614 bp, Gossypium hirsutum
  Clone ID: GOSHI-09MAY01-C115344_1
gcggttggtttcggcccgatattactgatacggtcatggcaccgttgttaagattcttgaatggaaccaaatcgttctttttcattgatgtttatccttatttagcatggtcagctaatccgaaaaacatcagtttagattttgctctctttagaagcagggtgaaccaaactgaccatggaagtcacttggtttacaccaatctattagaccaaatgctcgattcggtcattttcgcaatgagaaaactcggataccccgatatccgacttgctatagccgaaaccgggtggccaaccataggtgatatcgatcaagtaggtgctaatatcaacaatgcagccacttataaccgaaaactagtccaaaaaatgactgctaaaccaccattagggacaccagctagacctgggtcagtcacaccaacatttattttctccttatatgatgaaaaccaaaagacaggtccaacaaccgaaagacattggggcttgttacgttccaatggaacaccgatttacgaaatcgatctcaccggtaaacgacctctctcgagttacaaaccattacctgcagttagaaacaacgtaccatataaaggtaaggtatggcgc

SEQ ID NO: 24467 - DNA, 618 bp, Gossypium hirsutum
  Clone ID: GOSHI-09MAY01-C116574_1
ctggctgaaaaagcataagacacacactgtcataacatttcacaaaacatgatccaactacacaatgctagattgttaatcacagagtagcatcattttttcaccaaaaattcaagctttcttttttttttcttcaaaattgaagtgaaaatggaaactatctcagttcccaaattcatatttttcttcatcacagccatgtttatgagcatcaatctgatccactgcaccattacctatgacaagaaatctattgtcatcaatggacaaagaagaatcctcatctctggttccattcattatccaagaagcacccctgatatgtgggaaagtcttatcaaaaaggctaaaaatggtggcttggatgttatagacacatatgttttttggaatggccatgaaccttcaccgggcaattataatttcgagggcagatatgatttagtacggttcatcaagacagtgcaaaaaatgggtttatatgttcatcttcgaattggtccttatgtttgtgcagagtggaatttcggaggatttccagtttggttaaagtatgttccgggtattagctttagaacagacaatgagcccttcaagagagcaatgcaaggatttacc

SEQ ID NO: 24468 - DNA, 657 bp, Gossypium hirsutum
  Clone ID: GOSHI-09MAY01-C116414_1
ctttcacttgctatacaaataaaaccttccacttgtttgtttttttttcttctcaagtcctaattgaacccatactatgccctccttcttttagttcatttccattccatctcttaccttaaattaattctctctttcagagcaaagatatcaaggaaataagaaatataaagtctcttatttttcttttctactttttttccccacacccaccacctttctttttgatttttgtgggttcttagcaacataaatatggggctaagggacattggagctacactgcctcctgggtttaggttttaccccagtgatgaggaattggtctgccattatctctacaaaaagattgccaatgaggaggtcttgaagggtacgttggtggaaattgatttgcatacatgtgagccatggcagcttcctgaggtggcaaagctggacgcaaacgagtggtatttcttcagcttccgtgacagaaagtacgcgacggggttccggacgaaccgagcgacaacatccgggtactggaaggcgacggggaaggatcgaatggtgatggactcaagaacacaagaggtggtagggatgagaaagacattggtattttacatgaaccgagctcccaatggaatcaaaacaggtttggatcatgcatga

SEQ ID NO: 24469 - DNA, 624 bp, Gossypium hirsutum
  Clone ID: GOSHI-09MAY01-C116114_1
cactctctctcttgattttttttgggctttcttttctctctcctctctctctctctctctctctctctctctctctttctctttctctttctctttcgtagtttattttttgccttcgcaggtttctctctcctctctctttctctctccataaagggcaaaccctaaagagtcgtttacaccccctctaacttcatggatgacgatgcgttgaacatgcgtaattggggttactatgagccatcctttaaaggacatcttggtctgcagcttatgtcaagcatggctgagcgggacacaaagtcttttattccaatgcgcaatccgaatctcatggttactcccaatgctgcctttcacccacgcgactgcattgtttcggaggctcctaaccccatgaattatgttagggatagttggattagccagagagaaaagttttttaacatgttaccgggcatttctcctaactacggcattctgcctgaaacttcagctgctcattcactgccaattttgcagccatcacccaattcttcaacaagagatgagagggtggttggcagagttgtagagccaccagctaccaaggaaagtgtggagttgaagaaaaggcagagcgag

SEQ ID NO: 24470 - DNA, 335 bp, Gossypium hirsutum
  Clone ID: GOSHI-09MAY01-C116204_1
gtcttgggcctcaacgatcactgccacgtgttggatttatgatagtccgtcgtatcggagcgttaatcctccggcgtatttcccaacttccccttccagatcgtaccttattccattcatccgcagcttcaaatcgcaggttctcaaaccatttcgtcgacgatgacgaaggaggtagcgcgatttaccggcttgcgcttaaattccagcggccgacgactgtggaagtggagccttcatcgcggaaccgcatcagcttaataggaacagtggacgagcctctcaaagttatgaataccaggagcgataactttggggttcagactcgcctcaat

SEQ ID NO: 24471 - DNA, 613 bp, Gossypium hirsutum
  Clone ID: GOSHI-09MAY01-C110734_2
acgttgcgcccctattattttgcaaccgatttggtcaattcgatcgcttcctgtctagccttcaatacttcattattaacgcaagctttaagcttctatttatcatcctaatagctagatttcacggttaattcatcagctagatgaactagctaacggaaagctcagactccagccaacgacgaaactgggaaccatgacttcagccttcgtgctcaaggcaaagtgtattctccacactggtagccaacaggacgatcagcaatgttgcagcgttttgggatagtgatagctcttttcggcttggccctggccttggctccaccagaaatggtagatttgccatttaaccccttaaatttttatgaaattgcatgctagtataacggtaaaattgcactttggccctcccaataatttatgatttatctctagtccccctaaagcaattttctggcttggttccctgctattcatgttcaattgggaaaagcagagtagctgcttagtgttcagcttgatactgactccgaagcagtgcctatacgagacggtgaaaagcttgcaagaagaaggtcacctgcctataccagcgcaacaccaggaagattct

SEQ ID NO: 24472 - DNA, 534 bp, Gossypium hirsutum
  Clone ID: GOSHI-09MAY01-C110734_1
agctcaagcaatcccttgaatcacagaataagtgaagttgtaaacttttatttatcattcaaatagctagatttcacggttcattcatcagctagatgaactagctaacggaaagcacagaatccagcaaacgacgaattctgggaaccatgacttcagccttcgtgctcaaggcagagtgtattctccacactggtaaccaacaggacgatcagcaatgttgcagcgttttggaatagtgatagcaatttccggcttgatcccagaactcttagccgtgttggaaagcatgacggcgcacaggcatcgcggattctggcctattttcttcacctgttggcagcaactgctggaaactggagcgttagaatcttgtgcaaccattgcacaaggagctaacttccaggcttccctatcaggggatgatctcccacattcaccagctccttctgcaacattaagcaaggcaatgcctaaaatagcaagaaacaccagaaaacagccaatgaacttcatattctccggacgagtggg

SEQ ID NO: 24473 - DNA, 814 bp, Gossypium hirsutum
  Clone ID: GOSHI-09MAY01-C111804_1
atccggctgaacatatatattcattgacagcaagtgggaatatttttctgtttgcttccaattctcaaaaggcagttattgctgttaatttggttagtaaggcagttaaaaagatccgcgccatgtccattaggtccacgtggtacctcttcctggaggagatccgggatgaagctagtacccgaatcatcggattccggccatttccggtttttgttcgtggaactagtggggaacagtccggctgtgttcgaatacaattcagagaccgaaaaatggcagtgcagagaagcaagagaggggaaggggaacttcgcagggaatgattgtatgtttctcaatgcacataatgcacctcaggagagtttggtggttgcgattggatctgaatacatcccaccaaagatcctacgaccaagattcggaaacagagagcagcaggcaagctgggtgaacgtaaatgaccgaagacacgtgtatggtgacggacacgtgatgataatgagatcgcgggatcaaaggagggcaaaggtgttgtgcagcatagaagtgtgggggataagcctaagaagtgggaattgggagtatgtgtcaaatgtcccgagtgagataatggagcaaatagggaaaccttacggggtgatgatagggtgtttagaggcgagaaatgggagaattcgggtggtgttgatgtcgaattacgagggctcatgggacattatttggctgacttaccatcaacagagcggcgtatggaattgggtgttgttgcctgattgcaagaagaaaggggctaacttggctggaatcacat

SEQ ID NO: 24474 - DNA, 459 bp, Gossypium hirsutum
  Clone ID: GOSHI-09MAY01-C111164_1
gtgatctccgagaggtgacgcggggcccccccaaactggaacgttggacaagccatgagaagagggattacaatatcaacagcaagtcatcaacttcctcgaagttaaaggagattgaaaatattaataatgtgggatcttcaggatcgtacaaaatctcggatgaatccagtaagtctattgaacctgctgagaatcatcattctgtgtcggacgataatggtgtttgtgagctagaaattagggatgctgatacaagaccatctgacactgttgagaagctgaagaaacgaagtgagagggttaaacttccaatgcccatgaaaaagataccgttgcaataaaaaggatggagagcgaggcgatgccttcggccaagactgaaagaactcccttcgattcagatattaaacaggagaggccagcccgaataacgaaggtgggtcagcaactaatact

SEQ ID NO: 24475 - DNA, 340 bp, Gossypium hirsutum
  Clone ID: GOSHI-09MAY01-C111254_2
atatatcataatgaaaggttttcgctccacgcgtacggcttctaggcctctttgctttcgcttgctcatcggcctcagcatatgaccccagtcctctccaggacttttgtgtagctatcaaggacatcaagaatggcgtgtttgtaaatggtaaattttgcaaagacccaaagcttgcagttgcagaagatttcttcttttcaggcctaaacaggccggggaacacatcaaatccagttggatcaaatgtcactatgatcaatgtagatataataccaggacttaacactctaagtatatctctggttcgaatcgactattcaccttatgggtgtaaccc

SEQ ID NO: 24476 - DNA, 1041 bp, Gossypium hirsutum
  Clone ID: GOSHI-09MAY01-C111254_1
ttgttaacaaccagctaagtcagcatatatcatagtgaaagggattcgctccattcttattgctttaggcctctttgcttttgcttgctcatcggcctcagcatatgaccccagtcccccccgcgtccgccctcgcgcccgcaaggacatcacgaatggcgtgtttgtaaatggtaaattttgcaaagacccaaagcttgcagttgcagaagatttcttcttttcaggcctaaacaggccggggaacacatcaaatccagttggatcaaatgtcactatgatcaatgtagatataataccaggacttaacactctaggtatatctctggttcgaatcgactatgcaccttatggtgtcaaccctcctcacactcaccctcggggatccgagatcctgcttgttgtcgaaggcacactttatgtcggcttcgttacggcgaacccagacaaccgtctcttcactaaaatcctaaaccctggagatgtttttgttttcccctttggtatggttcatttccagttcaacataggaaaaactgcggcggttgcctttgctggtctcagcagccaaaatgctggggttatcaccatagctaacgcagtgtttggctcaaacccaccgatcaacccagatgttttggccaaggcgttccagttgaacaagaatgtggttaagtatcttcagtctcggttctaatgggattaacaactactttaagagtcaaatcaaaaccccaaaagtttgtttgcttgtttgaaacaatgtttgcatgcattttctaaatcaagtcatactattctgctaagtatcatgtaataaacagagaggtttaaatttacttctccagtctcctctcttgacattatcctttcagatataagaccattatttgtagtgctctcggatttaaattacgaccacaatcaagggcaccaatgcatatgtagttcatgttgttattgttgtatttatgtcatgctagccctacttgcttgtattccttgttagttggacttgaatgcaaatgttggaattccttc

SEQ ID NO: 24477 - DNA, 543 bp, Gossypium hirsutum
  Clone ID: GOSHI-09MAY01-C112884_1
cccacgcgttcgcccacccgtcgcgtccgtgtgtgtgcaaaaatggggttaattcccatgagaaacatacacattcttcttgtttttacggtgacaatagtactccttgaaacaaatggttgcaaagctgcttttctagtgaagagcaacttcagctacaagtgcaaaggccgtctcaacgaatgcaggatcgctgaggctttggactcggagctagagttggagttggacatggtgatgaattctaacgttgttagaatccttcagagcagtaacacgccggtaaccagtaacacgggaaaccggaatacgccggtgcaacagacttgcccgagtcctcagtatgctagttgtcttgccacaggaggtagagctaattgtaggggaacttactgccgcggctaatccatcttttgtatcattcctcttgttattatatgggcaaatgctaaatgagccaagaatgatccaaaatcatgcgtagttgtattactttatatgggaatataatggttttgagtaagtatgataatcatgtgggtg

SEQ ID NO: 24478 - DNA, 376 bp, Gossypium hirsutum
  Clone ID: GOSHI-09MAY01-C112814_1
tccctcgcgtccgcccacgcgtccgagagaaagaaggtttgtactgaaacaaaagttgcagtgggggaatgccaattttagcgaaagcatgcattcatttatatgtttaatcaaagcgaaggacaagcagtggaaatcaaagtcatgcgactgattaggcctttgttacagtgaatctttgtatctcattagaatcacaaaaattgttctttgtagatatagagggttaagcatcataggattcatttcatgctcggttgcatgtatcagaggtattttttgttttaatccactattcttcacactatttatttacgtatttttggctggataaatgttgaatataaataaatcaaatagaccacttattattctc

SEQ ID NO: 24479 - DNA, 481 bp, Gossypium hirsutum
  unsure (1)..(481): unsure at all n locations
  Clone ID: uC-gsflnu33B051c03b1
ctggtatgacgagacagcttcaaagttccttaagaagacttataatttacctaagaaactttaataacctggagtcgggagtaaagcaaaccaaggcaggctgcatcctatataacattgtttgctagcaatgttattataatttctacgtacttcgtatttggcctgcacaagttcctaaagatgtggcactaattgtgttactcttgtatagcatatcggccatgttcaggtgaaatccagctgatgatattcaccaagatatggagtggtgagaagagggaactagagagaggcagaggaccttcaagggcttacttgtgaggaaaggtgggttggatacactcattgtaagattcaattattatatgattatgagatttcgtcatatctaatttgtgtattctctacagcatgtangaagaatttttttgctttctgaggttcttttgttcataatttgttttaactatcattgctt

SEQ ID NO: 24480 - DNA, 321 bp, Gossypium hirsutum
  Clone ID: uC-gsronu33B138c06b1
ttgcccacgcgtccggttctagatcgcgagcggccgctcgcgatctagcagaggaccttcaaggtcttacttgtgaggaaaggtgggtggatacactcattgtaagattcaattattatatgattatgagatttcgtcatatctaatttgtgtattctctgcagcatgtaggagagtttgtttgctttctgaggttcttttgttcattatgtatttttaactatcattgcttgttcattttgccttatgtatcataaatcagtcttcattcattgaggaaattattattattttcttttacagatttcaaatattctgttc

SEQ ID NO: 24481 - DNA, 601 bp, Gossypium hirsutum
  Clone ID: GOSHI-09MAY01-C113414_1
gtcatgtgattttccctctcatctttccgtcccttgagcggaattcccagaatcatgggaatcaagcagtgcttaacctgacccagaacataagaaagatgttctgcgagatggatgaagagcttctgctcgcctgtcagcacaagttggaggaagaaaactcccaattgattgaagcagctgagaagcggaaactagcatgggaacgcctggaaaccactgccgctgctttcaaacctgcagctactaacaatgtccctcctgtaaaaccagccacaccgcctgtcgcctgttgattggcaaaagatagatatatgcatatagtatatatatataaatagcctgctctgattgcagtgttggatgttggtttcttgaatacgatggccgaagttgtgattcaatagggtctgtatgtcatcgcccgcgtggggagggggtttgtattttgtatctaaaagctgaaattgctgtactgaaaattactagtggtactacattacagttgcctggaaaggtcgagaggcattgatgaatgatgagttgttgggttgcaagttaaaaaaaaaaaaaaaaccctaaaaaaaaaaataaaaagggc

SEQ ID NO: 24482 - DNA, 534 bp, Gossypium hirsutum
  Clone ID: GOSHI-09MAY01-C113764_1
cccattcgttcgtttgtttttcctttatcaaaatgggggcctttttagagatcatattagcactcccaagaagaaaaagctggtatggcgatgatttttttttgtatcaaggcttttggtgttactcattttttattgaaggagtgatgtcggctcaacaaaattttcaatctcaaccttccgatatcgtcatatgcagtgcaccgaaaactggaacaacatggttaaagtccctcacttttgccattgtcacaagaaccaccttcgatgattccactaaccctttacttgccaatctatcacatgattgtgtaccccttttagaggttgatttagcccaatcttccaccaatcgagaccctaaaaatcctttgttagccacacatgccccttactcttctttaccaagatcaataattgattccagttgtaaaattgtttacatttggcgggacccttaggattcattcgtttcgctttacccccttcttgcgcggggcccggcatccaaagacatgaagcctctgctttaga

SEQ ID NO: 24483 - DNA, 568 bp, Gossypium hirsutum
  Clone ID: uC-gsronu33B129c02b1
cggatagaaaatggaataggtttgagtctttggtgcggtttaatccgaagagagaattccggaatgggacggatttgatatggcaaatacccgattcgcctaaggctgttctttttctagctcatggatgtagttgtagagctgttaatttctgggataagtcacataaatgtcctgaatgcgttggtttgcctgaggataggctgcttgtgcttcatgctcttgctcgtaaatttgccgtgttgactatatcaagcgtaggggaatgctggacatttgggaaggaaaggttgattgttgaagatattataacatggtgggttaacagacagaaacttggaaagcttcctcttgtggctttgggggcttcttctggtgggtattttgtatctgcaattgctaatgatttgaagtttagtagtattacacttatgatcgctgaaggcttatttgatcgcatggacatcaaagaggactatccacgcttaataaacattcaacaccagtctggattggttgttatagatggatggctgaagctgacagcgcctgctcaaactgcagtatt

SEQ ID NO: 24484 - DNA, 511 bp, Gossypium hirsutum
  unsure (1)..(511): unsure at all n locations
  Clone ID: uC-gsronu33B164a01b2
gctgttcattactggagtagctctcagcaggcttaaactcaatcctgcaacaaagggtcatccagtctggtatgatggaagacgagaggttcatatacacccttcttctatcaacagtagcttgaaatcctttcaacatctctttcttgtcttccttgaaaaggttgaaaccaacaaagtatttctgcgagatactaccatcatatctcccttctctattttgctgtttggtggcttaataaacattcaacaccagtctggattggttgttatagatggatggctgaagctgacagcgcctgctcaaactgcagtattgtgcaaggaacttagatctgctcttcattcaattttgaaggagctaattagaaagccagagaatgctacgatcgtagataatgaggtagtcaagtctatgatacatttgttgctagaagaagacanaccctcaaatagttcagcactgtagtgactcagctcccagtttgtatcatttggaagtgatcagtgg

SEQ ID NO: 24485 - DNA, 569 bp, Gossypium hirsutum
  Clone ID: GOSHI-09MAY01-C108994_1
aagaagacactctcaaaaactgccaaagaaatgggtgtatacctaagtaccgccggattccgaaaagttctcggacgatggtgaaaatgacaggcttcgatttgggttgtcatccatgcaaggatggcgtgcaactatggaagatgctcatgcagcctatccagatctggacagcatgacgtcattttttggtgtttatgatggtcatggaggtcaagcagtgtctaagttttgtgccaagtatcttcatcaacaggtgctccagcatgaggcatattcagctggagatatagggacttcactgcagaaatcttttctgagaatggatgagatgatgcgtggacaaaggggatggagagattaacggtcctgggagataagatgaccaggtttctggcctattgaagggctatatggttcttaaaagtggtgaagccccaaccatttgatgattggtctctgaagagggccctcatctgattttgaggacctactcaagaaccggcgttgtttgaatattcgaacaacactaatgttgtatgctgtgatctcgtgtgaatattagaggg

SEQ ID NO: 24486 - DNA, 654 bp, Gossypium hirsutum
  unsure (1)..(654): unsure at all n locations
  Clone ID: AI729507.1
gttcgggtggttctgattttcaggcttccggtgcatacatattccggcctgacggagaatctccaactgttgtttcacgatcggtgccattgaatgtcactcgtggacctctagtggacgaggtttaccaacaatttaatgaatggatctaccaggtcaccaggctttacaaagacaaagagcatgctgaaatcgaattcaccattggtccgatccccttagatgatggtgtcggaaaagagattattactcagctgacagcaaatatggttacgaacaaagagttttatactgattcgaatggcagagactttctaaaaagggttcgagatttcagagaagattggaacttaacggttactcaacctgtagcagggaactattatccgattaacctcggaatttacactgtggataagaaatcggaactatccgtgttggttgatcgtgccacaggaggatcgagtattanagacggagaaatagaactaatgcttcacaggcggatgctctacgacgattcccgangggtaggcgaancccttgacgaaagcgtatgtgtangcaacacatgcgagggacttaccattcccaggaattactacgttagtatcnaccggaaaggggaaggcncccgttggcgtcgtacaactt

SEQ ID NO: 24487 - DNA, 341 bp, Gossypium hirsutum
  Clone ID: LIB3083-061-Q1-L1-H1
tattctggtttcaaagggcaaaaacttttttaaaaaggggggaaaagttcaaaaaaaatggaacttaaccggtacttcacctggtacaaggaactattatccgaataacctcggaatttacactgtggataagaaaatcgaactatacgcgttggttgatcgtgccacaggaagatcgagtattaaagacggagaaatagaactaatgcttgacaggcggatgctctacgacgattcccgaggggtaggcgaagcccttgacgaaagcgtatgtgtaggcaacacatgcgaaggacttacgattcgagggaattactacgttagtatcgaccggaaagggg

SEQ ID NO: 24488 - DNA, 660 bp, Gossypium hirsutum
  Clone ID: GOSHI-09MAY01-C108634_1
agagcaacgaaaataactgcagtttttttttttcattcaggaaaaaattgaagcattgcagggaaaaaaccaagacagagagaacccctcatgttttaatttacaatggagcactctcacccttctcacagttcttaatctaaaacaccgattttaaagacaagacatattcgtttgttttttatgccctacgtgacactgaacaaatcctcattataactccagaaccatacatctggagataatcggataatgtacgagaaaaaatttttaacatgccatcccccatacagacaagacagctccgagttccagcatttatctttacggtccatcttcttgtgtgcttaaaatgaagccttgaagcaggctttgggctctctcagactgttccagagtacctgatatttgaatgatcttttgtgtctcgtttggtctgtcttcgaccagagtcacattggcaccagacaactcactgatctgggccagtttggttttcgattttgctatgagcttgggaacagcgtagtcaggtatgacaacttcgagtgtactcctagtaacaagtggtacggcgattctgctaattgcaattgcacttggtacatcttctcggcgttcagattcagtcttcttcactgtttcagcaccagatttcac

SEQ ID NO: 24489 - DNA, 363 bp, Gossypium hirsutum
  Clone ID: GOSHI-09MAY01-C108304_1
ctattcgaatccagtgcctctttaatctctttcttttagcggcacggattgaatctccttcctttcacatttcacccctaaaaaatagaaaaccttatcattttgctgggcactgcaaggggttccattgccaaaacccttctgggctacttcagatttctcagtgctcaaatttgtcacagaaacaggaaatttcgcaaatagttgacagccgtcgccttgatgtcgatgcatgggaaattgctgtgcgacccctggttctcctgttgcgatgaacaagagagggcatgatcagaacacagcgaacccattttatggagatgaatatgctgtctccaatggatctgctactacattcaaact

SEQ ID NO: 24490 - DNA, 307 bp, Gossypium hirsutum
  Clone ID: GOSHI-09MAY01-C109904_1
gactagttctaaatcgcattgcacagctccaacaggtatgatgggctgtggggctgctgcggggacacaagatagtaggagaggggaggaagggatagaaggacaggcggaggacgccgagtcggcttacgtggaccctgaacggatggtttcttcgggaccatcttgcaaggcgtgtcggacacgcgtcgcctcggtggtgctgcttccgtgtcggcatctttgcctttgtacagagtgtgaccgagtggcgcaagcctgcccgctttgcctcgccgttcggaattctagcgttgaggttttcctt

SEQ ID NO: 24491 - DNA, 538 bp, Gossypium hirsutum
  Clone ID: GOSHI-09MAY01-C109574_1
tagtaaagacattcaagcattgttagatttcattcaacatatggatcattcaagggctctcaaatggagcaaacaagactctgtttgcaacgcttgggttggtgtggcatgtaacaatgatcattccagggttataggtctgcatttaccaggaatggggtttcatggtcctatcccacgtaacactttgagtaggttatcagctcttgaggtgttgagccttagatccaatgctatttcaggttcattcccttctgattttgcccaactcaagaacttaaccacactttaccttcaattcaacaatttttctggtccattacctgatttttccatttggaataatcttacaattctaaacctttcaaacaatggcttcaatggaagcattaatccttcagtgtcaaaatccagtcaccttacagctttgaatctttcttataactcactttcaggtgatattccggatatcaatatccctagcttacaacagcttgatttatccaataataatctcactgggtcatcccaaactccc

SEQ ID NO: 24492 - DNA, 990 bp, Gossypium hirsutum
  Clone ID: GOSHI-09MAY01-C109624_2
caagaacgctaacaccaccattattaatctcaaaggaatcctaattgggaatgctgtccctcgcgtccgcccacgcgtccgaggaatgtatgattacctagcaagccatgctctcatttcagatgaaactgcaaatgggattgaaaaacactgtaatttcgcacccaaggatgactcggagtctagtagcgagtgtgatgcagccactgatgaggcaggccagaatatttactatgttgatatatataatatctatgcccctttatgccataattccagtctcacgatccgtcccaaggagccttccgtggcaaatttcgatccatgcagtgactactatgtatatgcttatctaaacagggttgatgttcaagaggccatgcatgccaatgtaacaaaacttgaccatgattgggaaccctgcagcgacatcatcagaagatggggagatagcccttcaacaatcattccccttctacaagagttaatggctaacggactaagagtgtggattttcagtggggatgcagatggaagaataccagttacttcaacaaagtactccattaagaagatgaagcttgcagttaaaaccaagtggcatccatggtaccttgatggggaggtgggaggttatactcaggtatataagggagatttaacatttgctactgtaagagccgccgggcaccaagtgccaagcttccaaccaaagagggcactttcattgatcaagcactttcttgacggctcacctcttcccgataccttaaattataactgatttcctctccacgttttagatatctttcatcgtttcatcaagtgccttgattaggtttcagtttcggtttcaggaaagttgtgtatcatatcacattatatccccatattcttcccccattaaagggtattaaactttagagatatatatacacacaaatagtaattctaaattattcaatggaatacacaactttttgcatctgg

SEQ ID NO: 24493 - DNA, 752 bp, Gossypium hirsutum
  unsure (1)..(752): unsure at all n locations
  Clone ID: AI055151.1
actatgctgcaaatgtgttgtttctcgagtcacctgctggggtgggattttcgtacgccaacacaacatcagattatgatgatagtggtgatagtaaaacagctgtcgacaattatgtttttctgttaaactggttggagaggttccctgaatacagcatcaggaaattttacatcgctggagaaagctatgcggggcattatgtccctcaacttgctcacaccattctccaacacaacaagaacgctaacaccaccattattaatctcaaaggaatcctaattgggaatggctgtgatcaatgatgaaactgatgttaaaggaatgtatgattacctagcaagccatgctctcatttcagatgaaactgcaaatgggattgaaaaacactgtaatttcgcacccgaggatgactcngagtccagtcgcgagtgtgacgcagccactgatgaggcaggccaggatatttactatgttgatatatataatatctatgcccctttatgccataattccagtctcacgatccgtcccaaggagccctttcgtgganaantcgatcccatgagtgactactaggatatgcctatctaaaccgggatgtgtcaagagccatgcntgcatgtaacaaacttgacatgatgggaccctgcacgcntcatcaaagatggagatgccttnacaatattccttttcagatatggtacggnctagaatggatcangggtcnatganaatcagtcttacagccc

SEQ ID NO: 24494 - DNA, 343 bp, Gossypium hirsutum
  Clone ID: GOSHI-09MAY01-C109124_1
gccgtttgcatggagaggctggtttctttgagttccagtactaggagttcgcatgtccacgatgatgaaggggtagacttactagagccgcggtttgaatcgttccgtatggcaaaccttaagtcccaatgaaaagaacaatccaagctgacaaaggttaatatattttacacccaagtttgcatttttggtttcttcatggtgtggtacatttgtagaggaaatgatccatttgaaaaataggccaaatgaagattgtgatagaatgaggtggatatagttttacattgattgcatttcatgccttttttgtacagaacagctatatacaaaattgaaaatt

SEQ ID NO: 24495 - DNA, 552 bp, Gossypium hirsutum
  Clone ID: GOSHI-09MAY01-C104554_1
ggaaagaaagaaagcctttaattagcatctctgaatattatacagtcttagctgcatttctctgctttaacaaatctcctgtatggactgagccctaaacgtttaacattatttgaaaaggataattacatgttgaacgccatttttaaagatggctcaactctgaggattggcctcttttgaccgcaatgctttggtttttttagggaagataaaagccaagcaaccgcttctcctatgcctgcggcgagtagtgctgatgctccggtaggcttctgccgctgccactgctgctgctacggatgcttttggtgctgccactcctcacagtcgatccgctgctctcgctctcgctcgaccccgatctcttcttccaccaatctttatctacagtcttaccagatgcatctgctacagtcggctttggagaaacttttgaattactattcgtgttaggatcattcttcttactcttattcttcttcatcttcttctttttcttagaccctaacgaaactggaaacaccatttttagaagaaaccctccattat

SEQ ID NO: 24496 - DNA, 617 bp, Gossypium hirsutum
  Clone ID: GOSHI-09MAY01-C104034_1
gaaagaagaagaagtggacttggatattcaaaagcgtgacaaaatgacaaggttaaaatgtgtgcgatgtacaacgagaaaatggtaaaactttaacctatcctaattctcacaaatgattccgccattgagaaacagtcattcaggcatttcttctaatggcaaacctaaataaaaaccaagaacaatcatacaagtataacggttctttccttttgggaaaattaagatctaaatagagaagggccgccgatcacgaggctatgaaactacctcggtgccttcagtacaaactcgatatattatatatctaattcagagttaaattttcaaaaattaatgaaaactaaaacaagagcgagtaaaggctcagactcgggctcacctcgatcccttttgttcccttctttttccggagagcataaatatgggatcgaagttcacactacgcgggcagtgattttttttctcccccggacttttatctagtcttgcccctgccaccggtgagttctagatcatctgatccacattcttcatgaatcctctctccttcccatggctttactagccctgttgcattgcttccgaatgcaaactcatcggaaataacttcc

SEQ ID NO: 24497 - DNA, 555 bp, Gossypium hirsutum
  Clone ID: GOSHI-09MAY01-C104384_1
gaaagaattaagtttttttattaaaaaatacagaaagtttacactactataaataaccaaaaatatatgtcttgataaagagagagagagagagattttcacactgttttagtttcggctgagagagttgttgtgaccattcatcatcaacaccatcatccatcataattagttcacagtcacacctctcttcaccacttaaaccatcccttttttcaccactttcggaccaaacaaagccaaattctctaagcttggcaaaaaaaccctaaccccactaaaaggtcccccccccccttttcatttttttttgtgaaaatggaggtagccaacactaaaaccaccccatacccacaatctgagtcttcatcagagacacacaaccccaacgaggccacgaccaagtctttaaccctcctcaagagctgcacaatccaccatcatatggtggtttcttacaaagagtgcctcaaaaaccatgctgccagcttgggtggacatgccttggatggttgtggtgagttcatgcctagccctacttctaccccgactgac

SEQ ID NO: 24498 - DNA, 694 bp, Gossypium hirsutum
  Clone ID: GOSHI-09MAY01-C105954_1
ttcttcgcgtccgaccacgcgtccgaaagagtagcggggtttttagataaacccttgctaattctcttacactctctctcttctcttctccatctttactctcttctattatactttcgtttcgcttctcttcgatctctcgccgttggattcgatcaatcggtttaagttgatcctggtgattgcttgtttcgattttctgttcgcaggttcaaaaaatgattgctgcagaaagtgtagtgccaaagcataagttgaagattaagttccccattctaaggattgaatcggtttctgcgccacaatcacttgagtttgggcagcaactgagcagctcttttgatgggaaaaggaagtcatatcctggcaattcaaaagagacttatggtgcttctaagcgtcgaccagaaggggtcataatgggtggtccacaagagaagaggcgaaagatggaccgcagcatgactcagcagtgtactaccctactgaatgctttgatgaagcatccagctggttgggttttcaatcaaccagtggatcctatagctttaaagattcctgattatttttcaataataaaaaaccccatggatttgggtacaattaagtccaagctagggaaggatgcttatcttggcattggagcattggcggctggatattagactggacgttttctaatgccatgctgtat

SEQ ID NO: 24499 - DNA, 1244 bp, Gossypium hirsutum
  Clone ID: GOSHI-09MAY01-C106994_1
cccaaaaacctcccctgcttcagatcaaatcatggaaaggttcagtctttgaacagatatagcaaaaccaagacaacccatttgagtattaattcaagtcttctaatgtgttccattgctgcttctgattcgccactgtgtacggcaattttttttttatcatccaagaaggtatggatttggactgaaaacagtcaagtaatgactgctgcagtggaaagaggatgggataccttcatcttttcttcactgaatcaagggcttgccaatgaatggtcaaaaattgcattgattgatcctcttttcattaaagaaagagagattttctataatgccggcgaaagagttgctacaatttttcaggtttcaactccctcagagttaaagaagctccaccctgaggctcatcatgtagagaatgttgttattgatttactagattggcaggtgattcctgcagaaaatattgtggcagagttccaaggcagtaaaacgactgtgtttgctgtctcgaaatcacctgctgaagcacaactatttctcgaggccttggagcatggacttggtggggttgttttaaaagttgaggttgtcaaagctgttcttgatttgaaggagtacttcaatagaaggaatgaagttcacaacagattgagcttgacaaaagctactataactcaggttcatgcagtcggaatgggtgatcgggtttgtgtggacctttgtatctcatgaggcccggtgagggacttttggttgggtcatttgctagaggactttttcttgttcactcggaatgtttggagtcgagttacattgcaagtagacctttccgagtcaatgctgggcctgtccatgcctatgtagctacccctggaggtctaacaagctctcttgccgagttacaagcgggcaaagaggtgatggtggtccatctctcaggcaaaatgcgaacagcaattgttggccgtgttaagattgagacccgaccacttatcctcgttgaagcaaagatagatgcaaatgatcaaaccgtatacagcattcttctgcagactgccgaaacagttgcgttggtttgtccgcatgaaggtaatagaacgcaaaagactgtgattcctgtgacctccctgaaagctggggacgaagtcttgctaaggctacaaggtggggctcgacataccggaatagagataaaagaattcattgtcgaaaattgaatgaatgaacaagatgatgttgat

SEQ ID NO: 24500 - DNA, 572 bp, Gossypium hirsutum
  unsure (1)..(572): unsure at all n locations
  Clone ID: AI728412.1
caacaacaaaaaagaaagaaaaaacaacaccgagaaaacaaaaaaacatgatacacgattgcacgagtgcttgaagaaggccaaagggattttttttttttaaaaaaaggcttttgggtttgattaatcactgatgtgatcttccatagaaacgactctccaatatcaaagttcactttttttttttgaaaaaaagaattctccattttttaaccactctatatttggcttctggggtagttgtttgttttgttttttttttttttgtgggattcttagccattttctttcatctctgtttctcttttttatttgggagattattctgtgtttttttacatgtctcaacaaaggcaatttcagatggtgggtggtagcaacaatccangagcagggcagtacaatgacacaacttttacgaaaatctttgttggtggattggcttgggaaactcaaagagataccatgaagcgttattttgagcaatttggagagattattgaagctgttgttattacagataaaaatactgggagatccaagggctatggctttgtttcatttaaggatcc

SEQ ID NO: 24501 - DNA, 504 bp, Gossypium hirsutum
  Clone ID: LIB3543-021-Q1-K1-F1
ctcatactcaaggttgtatgaatgaaggactgcttgaaacagaacatgcaatacagggaaacccttcgccttcaacacgctaaaatgtattaataatggctatcattattgaggaatctgaggagttttggttgtgaaaaagtggcagttattatagcattagaaaaacaacgggtagaagaagaagaagaagaaacaaaaaagaggatgcataagtgctgcacgagtgtttgaggaagctttggcatttgattgatttgatcatccaaacctattttttatttcctttcgccattttgttatatttggcttctgtggtggttgatttttgtattggtcttccatttatcctttttcttcaatctttatctccctggtttacttggtctatgtctcaacaaagagaatttcaaatggtgggtgggaacaatccagagcagttcaatgacacaacttttacgaaaatctttattggtggattggcgtgggaaactcaaagagata

SEQ ID NO: 24502 - DNA, 635 bp, Gossypium hirsutum
  unsure (1)..(635): unsure at all n locations
  Clone ID: LIB3543-011-Q1-K6-D6
ccccgcgtccgccccgcgtccgcccacgcgtccgcccacgcgtccgtttttgtttcagatttagtttctctaatccctactccatggttataaatagctctcatctcatccctggccaatcctttttacgttgctatatgcataaaagtatgaatctataggacaagtgggtaaaagtttttagtctgtgagaaccgaaatttctttcctactcacttcttcattgtcttggtaaaagacttgttatgaagcatggtgatacttacattaccatctgagccaggttttattgccgatgaattgcataaaggggagtaaataccgtacaagtcaatgtctcccatctctgttagtgcccgactttgatactgatcacactggtctgtagcgttttttgcaactgccttgttggtaactaaatcttgactagcaaagttgcagtacttgttaaccccttcattggtttcatcagagttgagagcgtgtgtccataaataatcaaaccgtccctttgtacaaatgttatcatctatccaagcatttccaatctgcagtatatatccattacaaatctcagctntaggcctttatgttcgcccatttagcatacatatagaccaggttcattagtggta

SEQ ID NO: 24503 - DNA, 505 bp, Gossypium hirsutum
  unsure (1)..(505): unsure at all n locations
  Clone ID: uC-gsflnu33B018h06b1
ttgaattgcaattggaaatgcttggatagatgataacatttgtacaaagggactgtttgattatttatggacacacgctctcaactctgatgaaaccaatgaaggggttaacaagtactgcgactttgctagtcaagatttagttaccaacaaggcagttgcaaaaaacgctacagaccagtgtgatcagtatcaaagtcgggcactaacagagatgggagacattgacttgtacggcatttactcccctttatgcaattcatcggcaataaaacctggctcagatggtaatgtgttgaattttgatccctgctctgacgtccacgttaagtcctacctaaatcttgccaaggtacaagcagcccttcatgccaaagctacaaaatggtcagcttgcagtggtgttggatggacagacagcccaacgtctactctccctgaaatacgggacttggcaaaagtgattagggtgtggatatacagcggngacacagatggttgagtt

SEQ ID NO: 24504 - DNA, 947 bp, Gossypium hirsutum
  Clone ID: GOSHI-09MAY01-C107554_1
tgtttttccctttcaactctttgaaacccactctgcaactctgttgttgtctcatgcaatcttcaacagctttagaaccccttttgtttaccgctcacttatccaccatgctcaaactccttaacaagagaatcaagcgcctctgttctcgcctccggtggccgattcgccgccggtctaggtctgtggttgtcatcagaaggcttggaaaattaaactccaaggctcgtactgatagtatcaccaaggatcgtgctattgtcgtcaatggatcttcaaaagttcaccaagatggccattcccggcgtccggtaaactcgtcgaggcctatacgtgtagcgactttcaatgcttccctgttttctatggctcctgcaatgcctaaagcagataagtcttcaagttttgactatgacaatggtggttttggtgatggtgggcgctccatggatcttggtttacccgcaaagtctacaaatggtcgcccgaaaagttactaaagcagtctcccctgcatccgagttccatgaacgacaaagagaatctctcccagcagcaaaaattcgtgaaatccaagttaagggtgtctatcaacttgccagataatgagatttctttattgcgaaatcgacaactgagctttgcggagcagggaaaggatggctcttcgagtgctgctgcgggtaaagcttggagaggtaaagccccgttgagatcagcagtgacttttccgacgaatatgggaaacggaatagaaggttgcgagagttatagaagcagaaagacagtgcttgaagtcctgagggagttagatgctgatatattagctctgcaagatgtgaaagctgaggaagaaaaagcaatgaagccattgtctgatttagctgctgctttggggatgaactacgtatttgctgagagttgggcacctgatatggcaacgccgt

SEQ ID NO: 24505 - DNA, 648 bp, Gossypium hirsutum
  Clone ID: GOSHI-09MAY01-C107494_1
cccttgtttccggccgaagttctgtcaagatataccacgccaataccgaaggttatgttgctcaggtcggcaatatgctagtgatcaaactagggcatttcgattggaatccttcaaaggaaaatcagttggatgggagatggcaaaagttcattgataaaggagcagattatcaaatttggttaagacagtaattcaatgaaatcagcaaaagggtgagaagttatcctctgccacattatctctacttatagtaatagaagaatatctgcaatcgtacacacacaaaaataaaataaaataacacacccccatctgcgtcgactacaatatcagcttcagcaatggcaacataaaaccttgaacaagggtcgggaacggccgcatctctatcaagcagcatgggaattaacgttatggtttacagacgttatggtttaagtcaatgaatctgatatgctgatttcagccattcttatgtacctttttcatgtttagtgcctatgcttaatttttggtgctttcttgcttaagatcatgtttaatatttgggactgtagtcatactaagcaaattccctgtcaatgttgtggaatctgaaaccagagcttgatgcatttggttaatgaaaatatttatttttctttt

SEQ ID NO: 24506 - DNA, 727 bp, Gossypium hirsutum
  Clone ID: GOSHI-09MAY01-C107294_1
gcgttcgccccgcgtccgcccacgcgggggggggggggggggggcactccgaggcattttagagccgccattgactgacctcactgctgctcacatttcccccctatcagagaatattgctttccgttacctggtgaaagttgaagttggcatcaagcataacactaggccaaaattccaacatattgctgcctttgtattagacgtattaatctaataatggctgtctctttgtctcatgtttcatactcatccaccttcacctcttcagcatcaaaaaccagagtctccggaccttctctctcccctcattccatcaaagttcccaccttctcgtctttgactgtcaaacccctaaattctagcttcaccccacatggcgcacgtgcgatcaccattgcgccacatgccacctccaccccctcttccattccttctgacacctcaactacaacctttcatggcctttgttacgttgttggtgataatattgacacagaccaaataattcctgctgaataccttacgttggttccttcaaacccagatgagtatgagaaattgggctcatatgctcttattggcctcccttcatcatatgctacacgttttattgaaccaaatgagactaagaccaaatactccatcgcgataggtggtgctagctttggctgtgggttctcgcgtgagcatgcacctggtgcacttggagcttgaggggccaagg

SEQ ID NO: 24507 - DNA, 520 bp, Gossypium hirsutum
  Clone ID: GOSHI-09MAY01-C100954_1
gcgttctgggaattagcatctttagaggttgaggatgctgttgtacaggcattaggcaggcataagagacttggtttgcttcatcaatccgtctcagattcaaagtccccaggtgatcccaagttgattgatgcatttgaactaagtgaagaggagagagaagatgttcttttcaaagaggcttggttaacgtatttctggagaagagccaaagtgtatggcgtggaagatgatattgcagaagagcgacttgagttttggattagccatattggacagacccctccttcccatgatgctgtggatgttgatcgaggtttatatgagctgcagaagttaggaatagaccaccagctttgggaagcatctcgtaaaggaattgaccatccagctcttgcttctttgtctaatcccaaagatctcgccaacacttagtgatatttatttattgctttttgttttgagaagttatatttattgttcaaaatttttcttattaattttttactttagcctgctt

SEQ ID NO: 24508 - DNA, 597 bp, Gossypium hirsutum
  Clone ID: LIB3825-026-Q6-K6-F8
agagataaggaagggaaaaaatggtgggtaaggttggggatgatgatgatttagtggagctgagcattataatcgttcatgaaggtccttcttcatctcgattcctcgatgcttatcccataaggtaacctttaaagatcccttcatttctcttctagaaaatttgaaatttctctctctttttttaattttgctttgtcaaagttgggtcttctttttttttttttaattcttaacatgtaattttttttatgtaaagcaaaaataagaattgggttttttgtttttttatggaatttatgcttttgattcagtttctgtagattttagggttctttctttagcagctttttagggaaatttattgtgttagaatttagggtaaaattatttatgttttacaatttgtttgttatattgttaataagttgggttttattgaatttgatttaaaaaaaaataagttgttgatttctgtgggtttttctggggattgttgttttatgttttcttttataaaattctagggttttgattgagggaaaaatcatgtggtgattgataatttattgaattttttggggggttttttgggga

SEQ ID NO: 24509 - DNA, 434 bp, Gossypium hirsutum
  unsure (1)..(434): unsure at all n locations
  Clone ID: uC-gsflmaxxa090e12b1
tttattggcatattactctgggttggggattttataagcgggtctggtttttctcagctggccacaaaacaaagcaagtaaatggaaggaacagaaggggggaaaagcatatcagcgtatcataatatgcaaaagaagctgaatgttaaggaaaatagttgcagagataaaggaaagggaaaaaaaaatggtgggtaaggatgtggatgatgatgatttaaaggagctgagcattataatcgttcatgaagggccttctttatctcgattcctcgatgcttatcccataagggaacctttaaggatcccttcatttctcttctaggaaatttgaaatgtctctggttcttttattataatttagactttgggaaagatcggattttcttttttttgtaaggcataagagngtaatttttttttaatgtaaagaa

SEQ ID NO: 24510 - DNA, 1061 bp, Gossypium hirsutum
  Clone ID: GOSHI-09MAY01-C100724_1
aacccttccaccattctctctctctcttttctttcttttctttgtttaataacgtgagtatttgattcgacaatgttaatgatttctgcagtcaaattctccatttttcatgttccgatttcgaaacacttaattagatcttgctttgcaggattttgattttaaaaaaggttggtttttgttaaatttgttaaaagattttgatgatttttaggatttgaattacattgtgaaggggataaaagaacaatgggggtggattattataatgtattgaaggtggagaagaatgcaacagatgatgatcttaagaaatcatacaggaaattggcaatgaaatggcatcctgacaagaaccctaatgataaaaaagaagcagaaaccaaattcaagcagatctctgaagcctatgaggtcttgagtgaccctcaaaagcgagcagtttatgatcagtatggtgaagaaggattgaaagacatgccaccaccaggcagcagcaggccgcctttcggaaaggggcaccggtgggccaaatgggtttaatcctaggaatgcagaggacatcttcgcacagttctttggaagtagcccccgcccgcgcggcccatcaggacctactaggtctgctagattccactctgatggagcaaagtttggaggatttaattcgactgacaacatttttcgaagtcacaatgaagcaactgcacccaggaaacctcccccagttgagagtaaattgccttgcagccttgaggagctgtacactggatcaactaggaagatgaagatttctagaactgttgtcaatgctgcagggcgacaagtacaggaatcagagatattaaccgttgatgtgaagccggggtggaaaaaaggaacaaagataacattcccggataaaggaaatgagcagccaaatcagcttccagcagatcttgtattcgtaattgatgagaaaccccatgatttatacaaaagagatggcaacgaccctgtcgttaaccaaagggtgttactagcataggcacttggggtacaacagtaaatctggttactct

SEQ ID NO: 24511 - DNA, 619 bp, Gossypium hirsutum
  Clone ID: GOSHI-09MAY01-C100674_1
tttgtggatcatggactttgacaaattggggcgtgcggggtatgatggttaaggttgcaggccttggaaagattctaggaccacgagggctcatgccaaatcctaaagctggtaccgtcacacccaatatacctcaggctattgaagaattcaaaaggggtaaagttgaatacagagcgtggggagactgggattgttcacatacctttcgggaaagtagacttcttggaagatgaccttcttgtgaacttacttgctgcagtaaaatcaatcgaaacaaacaagccgaaaggtgcaaaaggagtgtactggaaaagtgcacatatatgcacatcaatgggtccttcgatcaagttaaacataagggagatgcttgattacaagcctccatcaaacgtttgaagaataatgaccactaacagttgaaaattatcttggacccttcaatcagctatgtggccattctatgtcagaacatgcagtgcccaaatggaattggccattgggatcgaatccaagtgaaactctgcatatacattgccttgccagattatcattctgtatacagatttggacttgtatcatcatgactaatagcatcaatttattcttatttctt

SEQ ID NO: 24512 - DNA, 822 bp, Gossypium hirsutum
  Clone ID: GOSHI-09MAY01-C100104_1
cttccttttaatctttatgggtactctccatgctcacctgattactctaattatgccacgaactactatagtctgtatggaggggccactggccagtatccagtgtatggtggtggcttgatgactggtgcaggaacagcattctatccctatcttcaattcggagaaggaatggccggacccgtctactcttccggccaaggatacggtgtccagtttccacaccacctgtttccttactcaactgggagctatccacagcactatggtgcacctatggctcttgcacctactccacccttgcaataaggtgtgacattggctcttcatgctaggagacttcattccaagcttatgatatcacatttcttcagctgctctaaagtctgcaaccttgggcctaaccatggttcttttttctccctctatctctatctaacttgaagccccccgtaggggctataaatcacctccaaaaaatggagaatcatgcatgttttttttccattgcatcttgtcaacaagggttccttataagagaaccaaagcatttttttatctaaatgctcaactttagctattggatcagctaagttggggtaactatcttttttgtactgtcagcccttgaaaaggccaagtaaaaacagacttttttttcttacttttagcctaggcaaggctaataaatagaaaaatggtttgcaaaatttgtaaatttagcaacactaaaaagcaagccactcatctttttcaaatggctaatcacctatttgtcaatgaggaatgccccctagtttctttttttgtgcattgacatct

SEQ ID NO: 24513 - DNA, 618 bp, Gossypium hirsutum
  Clone ID: AW187399.1
atttttaagctacactctccttctatttattgatttatttagctgtttttatgatataaatgtgtttcaaaggctcagaaactcttatcttttatctgcagattctcttcttctaagtaattctgaagcagaatttatatctgctgtagctttcttcagaatccctatatcttttatttacctttttgcactcttcattctcttttaaacaacacaaccctttcaagcttcactcttcgtcattagccaactgtcactcataacccccaacaatggatgaatattgcaagagaagcgggcagataccagcatttggagactgggacaatgcaaatgagctgcctataactcagtacttcgaatgcgctagaaaagcgggtttgattcgtttcagctcttcatctggagaatctaacccttatgttgctgctcatgacttgtatgaaacagctaattcaaggaaacattctcgtaatcttgctcctcctaaaaagcaggcgagtagggtaagggaaaagggaggagcgcatgttaaggagcaaaaaaaggcggggagagtatgtgacgtgactgaaccgccaaggaaatactaccaaaatccccaccaccatctgtcta

SEQ ID NO: 24514 - DNA, 370 bp, Gossypium hirsutum
  unsure (1)..(370): unsure at all n locations
  Clone ID: LIB3829-030-Q6-K6-D1
ccccgcgtccgcggncgcgtgggcggacgcgtgggctaactaagtaattctgaaccggaattatatgtgctgtagctttcttcataatccctatatcttttatttacctttttgcactcttcattctcttttaaacaacacaaccctttcaagcttcactcttngtnattagcgcggtgtgggtgctaacccccagcagtggatgaatattgcatgagaagggggcagataccagtatttggagactgggacattgcagatgagctggctataactcagtactttgaatgcgctagacatgcgggtttgattggtttgagctgttggtgtggggaatgtaagggttatgttggtgntnatgacttgtatg

SEQ ID NO: 24515 - DNA, 633 bp, Gossypium hirsutum
  Clone ID: GOSHI-09MAY01-C100394_1
ggaagatggtgatgaaaatgaagaggataaaaatgattccggatctgagaaaagacctggttttgatcattttaatagcgaggagagcaatcctataaaatctaatgccatgagaagttctctttgggaaatagacacccttcgacaccattactgcccacctgtatcaagtttgttttgtcattggagaatgatttgacagttcgatccaaaaccactgaaatggacatcaaagattttagttctggttcatatgcaacaatatttggggacgagatacgacgtcgggtaaagcaggttcctttggctttttataaagcaacgccaacatctttgtttcccgagtctgacttttgtggttggcccttgaaatacgaaggaagcaatgaaattaaggagcagaacacagttgaagaagatgatgcctctacaaaacgacagcggatcgaatgctgatgttcttgacttgtttcttagggaggatcgtaattcatatatagttttgcccaacttggacactttttttttttgagtttttaacccatctttaaatgtttttttgattgaaatttatatgtctaatcttatatctgaatttgtgtgatttaattgtgaaatttctaaagtttattt

SEQ ID NO: 24516 - DNA, 630 bp, Gossypium hirsutum
  Clone ID: GOSHI-09MAY01-C100344_1
agcgaggcaagaagtgatcaagatcttcggtaatcaaaatccgaatcctgaaggcattggcaaactcaagattatgactatgatcattaatgaaacactaagattatatcctccagtaagttccatggtaaggaaggtagtaactgacgttcaattgggaaagctgattctaccagctgatttggagttgcttgtcccaaatcttgtacttccccatgaccctcacttatggggagatgatgtaaatgttttcaaacccgagaggtttgcagaagggattgccaatgctacgaaacataattcagctgcatttattccgttcgggttgggccctcgatcttgtgtgggaatgagctttgcgttgatggaaatgaagatggctctttcgatgattctacaacgcttccccatttttctttctcctacctacagccactccccatttacccttcttttgcttcaaccccaacatggaattcaggtaatgcttcattctctgtgaatgaaagcctagacatgtgaaaagaatagtgcttaaaaaataaatgaaaatgatatgtagtttctatttaatagttatgttcattaaaaactcaatggaacaatgccctatcactaatatgtcctggc

SEQ ID NO: 24517 - DNA, 556 bp, Gossypium hirsutum
  Clone ID: GOSHI-09MAY01-C100234_1
ctgatcaagtaaagccgtcagctgagttcgaggacaatgaaggaggcaatatcaatggtggcatggtggagcacaggaatggaggatgggatggtgggcgaggctatggaggaagaggtcgaggtcgtggtcgtggtaggggacgtggtttccgagggcatggaagagggtatggtggtggaaatatgcaacgggactcgggatattacaatggtaatggtccatcaggaccattgcctgcccagggtcgtggtcgtggacgaggtcgaggaaggggacgtggaggcggtcgtggtcagggtttcacacccgatggtccattccagaaaggtgcttgaaacaactagagcattaatccttagattcttctgcagaactttggctttagtaaacaaaaaatcatgtcctttttcgacattaattaaggctttgttttttacttggagaatttgtgttgtaagggacctttaatatattggtttttcattctaggccacaatttttgtaggaaagttggtagggataaatttattttttatataatattattgaacac

SEQ ID NO: 24518 - DNA, 486 bp, Gossypium hirsutum
  Clone ID: GOSHI-09MAY01-C101834_1
gcctaaccgaactcgcagaaaacctaaataaacaaaacaaacggaaaacaagggaagacgttatactgagccgacatggcaagggacagctgcttggctcgcgtcaccgctggggtcgccgtcggaggcgctgttggtggcgccgttggtgctgtttatgggacttatgaggcaattaggtacaaggttccaggactgctgaagattcgatatattgggcaaaccacattgggtagtgcagcaatattcggacttttcttgggcgcagggagcctaatccattgtgggaagtcctactaaaccaattcattgtttgtgttgaagaccttgagaatgtatttctcagaatggtgcttagctttagatataaaaagaaatggtgtttaacgtttgcaagtctcggttttgttctttgagcttcctctattgcctttctgtgggaggatgcatacttgggaatacatttgacttcaatcaatgttgcat

SEQ ID NO: 24519 - DNA, 448 bp, Gossypium hirsutum
  Clone ID: GOSHI-09MAY01-C101804_1
cccaggggtccggggatggattccagtcagtctgactgtgtacgcccatgacccgttcagcaaggatgccaaaatgggagattcagagttcgaggtgaggtcattcatagaaagctttgaaaacgtatacgaatttggaagaaatcccaagtggaccagttttatcaaggttgaaaccggaccccgacaactgcctggtggatgagagtcccatatacgtgaataatgaagggaagttcatccaagccctcttccttagattgagaaatgtggagtgtggggaagtggagatccaactgcagtggattcattcccctggctctaaacccttttgatttttatatatgtttatttgtttgatttccccgccccctttctacacaactcaatttgttgcccccttatttatccctttccattatattcgtaatccaataattttctttcc

SEQ ID NO: 24520 - DNA, 493 bp, Gossypium hirsutum
  Clone ID: GOSHI-09MAY01-C101484_1
cggacgccgtggggtgtgcatgtgaaccatgcacactcatgttgtgtcctcttggcaaaaacctgaaaagttcaaggtcaatggtcaatggcatacatggattgactatgaaaagtttcatgacctggtggctttaggaagaccttttgacagtgaggattatatggctctcactccgtcatgggccgtctatggagctgaggaaggtggatttgatcctgatcagtctcggtacaagaaggagcgacatcacaagtcaaagcgctgagcagtttgtattgatatgagcaaatatatccattttacttgggaaagatggttaatcatttaaacagttttggtttagttggctataatatctgatttaaatgatagtgggcttttttttggtcgggcgaggagttgggggggtggggggataaaatagttaaatgatagtgtactgcctttatctttgttgtattcatattatcttaaaaacaattttgatttc

SEQ ID NO: 24521 - DNA, 550 bp, Gossypium hirsutum
  Clone ID: GOSHI-09MAY01-C101034_1
cccacaggcataaaaatgaatgaatagatgatgtttttacttgtcatgaataatattttcgccaattagacggcccaaggacaaaaattcactttctctgtgatctacaactaagccgatttagctttatggaagatcggtttactcttataccgaaacggtgaacaaatagagtttgagcacaacagcaagacccagctgcaatagaaagatgccagcaacgattaagacccatctttctccagctgaagtaatgtgagctttgagattaagtgccacaaaagttgctgacatgaacccagctacagctgcaattatccatctgaaaatttccaaggggacaacagatagacactgcatccaaggacaaataaaatttttagctacaaatgaagttatagaactgttatatcacacatatatgtcatattaaatgttatgttgttaaggacaagaacgtccagataatatgcctcactcgagcaaaatctctgaaacccgacgcgtgggcggtcccgtgggcgtttgcctcaggaacgtttcaagcatg

SEQ ID NO: 24522 - DNA, 548 bp, Gossypium hirsutum
  Clone ID: GOSHI-09MAY01-C102974_1
ttttctttgtattcaatttgcattcgtaatcccatttacagtatataatcggcctttttatagccgaaccaagagaaaagggaaaagggaaaaaaataataaaaatgtaaatacaaattttctttttctattattgctttgctgtgttattttgttcttctcgcaggttctatggatgcaggaggtgctgtacggaggaagaggccctggtgacgtggaggtcgtgcgtgggaaaccactcgtgggagcccgatcccctggctggctgcgacgctagcatgttccaaaaacctttggggtttctggtactttcaaactgttgggccccttttggccatttgggattgttttagcagtgggctgttgtaaactgggttaaggattaagttggagggctttgggtgtaatgggattttgagttagggtctaggccaataattttaggctttattttggggtttcaattgggtctcgattaatattttgtattttcggacctgtgaacattttattgtttttgggttttttttaaaaaaaaaaaaaaaaaa

SEQ ID NO: 24523 - DNA, 1055 bp, Gossypium hirsutum
  Clone ID: GOSHI-09MAY01-C102874_1
ttcttgtaaaaatcaaaacccaaattccaaaatggaacaagctttcaaaagaacccaaattctcaccaatcatctgctccaatcgtccccatcatcccaaaccctttcttcaaacgcttgtttaagctactcaccgcctgaactttccgagaactatgcgtttgacattaaggatatgaggaagttgattgaccggcacaacctggaggaacgggattggttgttcgggttgatgaaacaaagcaagttgttcaacccgaaggttaggggagggaaggtgttcgtttcgccggactataaccagtcgatggagcagcaacgggagatgacgttgaaacgaattgagtatttgcttgaaaagggggcgtttaaaggatggttaacggagaaaggggaagatattgagatgaggaaatttgctggctttgaggtttgcagtatctatgatcattccctcttcactaagctcggggttcacttcttcttgtggggaggtgccatccaattttttggtacaaaacatcatcatgacaagtggctgagggacaccgagaattactcgatcaagggttgctttgcaatgacagagttggggcacggaagtaatgttcgtggtcttgaaacagtaacgacttatgattcgaatacaggggagtttgtcattaatacgccttgcgaatcggctcagaagtattggattggtggggcagccaatcatgcgacgcatacggttgtgttttcacagctacatatcaatggaacaaatcaaggggttcatgcggttataagcccaattcagggttgcttgatggttccttatgtccaaacattcgtatggttgattgtggtcacaaaattggtttaaacggtgttgataatggtcgaatctggtttgacaatgttcgagttcccagagagaacctgttgaattcggttgctgatgtttcacctgatgggaaatatctaagttcattagaaaacccggatcagagatttgctgcattcatggcccctttgacagtaggtcgtgttaatatgctattcttcggttatag

SEQ ID NO: 24524 - DNA, 237 bp, Gossypium hirsutum
  Clone ID: GOSHI-09MAY01-C102494_1
attaaatagatgctgctgggttgtcgggagcttactgaatggcctgaatttacaaaggggccctgaatctgtagattcatgtggtgtaagattaggttctaaaattttccaacctctgctatcataacctcgctgtattttatattcatttcaaatttcattatgtatattcctccattgacaagaattctttgtcgctcgttcttatcatctatgagaattgaactgcaatgcaat

SEQ ID NO: 24525 - DNA, 578 bp, Gossypium hirsutum
  Clone ID: GOSHI-09MAY01-C102024_1
ctaaaggacaagaagttgaaggggcgtgtctctggggttagttgcattgctctagatgcaagtgagagctggttggcatgtggcagtggccgaagtttgtcagtttggaatctcactgcttctgaatgcatttcaagtatttccaacagtgcatccatacaggacgtggtgtttgataacgggcaaatattagctgttggtgcagaccctgtgttgaaccgtttcgatatgaatggaatgatactttcccagatacaatgtgctcctcaatcagcgttttcggtctctttgcacccgtctggtgtcactgcaatcgggggttacgggggtcttgtagatgtgatatcacagtttggaagtcatttgtgcactttccgtagccattgtgtttgaactataatgaaaatggagatggagatgtaaaagagcatacatattattgttaaatttgagatgtagggcttcactataatcatttttaattctcttatttgtatgataaatttacatagaaatggatggaaatggttttggtttttgggtccaaaaaaaaaaaaaaaaaaaaaaaaaaaaaaaat

SEQ ID NO: 24526 - DNA, 595 bp, Gossypium hirsutum
  Clone ID: GOSHI-09MAY01-C102014_1
caaaattttgacaagtctaagcgacatgtggacgactcgaatcctgaatggacaacctctacgatcaaatgaaccaattagtggcaatgttacaaaagcaaaatggatagtctccctagaaacacaaagaacaacccttggaaagatgggaaggagcaagtaaaatcactttctttgcgatggggaaaagaattgaactcgccaagtaagcccatccttgaagaggatgagattccaaaagagtttgatgaacccacggaagaggagaaagccaatcaccatcaaccgatcaaggggatagctgaatcagtatctggtctggttatcacaagaccgagcacaacgaaggtactcataatgcaagagaaatggataaatggcgagatcctggaataaatagaattaactggaaggccaacaatggtcgagagtgatgaatgaagtcaatggtgaagttcaagaaattgtcagacaagtctggtagcacaacatagattttaacccatcaaaattcaattaatttgtacatatcgtatatgatgttattttgatttgttagaattagaaattgcacttgttattgcatgttagaatt

SEQ ID NO: 24527 - DNA, 653 bp, Gossypium hirsutum
  Clone ID: GOSHI-09MAY01-C102334_1
gcgttctgcactccttgcaccttcaaagtaattgcaactaatgcaggtgttgacggagaagttgtagtggagaagactagaaagctcgattggaaaattggctacaatgcaatgtctggaagatatgaagatctaatcaacgcgggagttatagatccttgtcgagtttcaaggtgtgccttacaagagtgctgtctctgttgctggggtagttctaaccactcaagctataatggtagacaaaataaagacacccaagccagttgtccctcttgtcccaggaattcgtccttgaataaaagggaataaaagggagtaaaagaagatagtggtaggttaaagctgaagaagaagccagcaaaagctgtatttgcaatggttgaaaccaagctgtaaactggttggcttggttctcgagaaccaaaatggattttatcatgtgagcctcaaataccatggtatacgagtgcctactgaattgcttccttgtagctgcagtacgttgtatttttcctgcatcccccgcagccagcagctcaatttatttagctgtttgtaaattttatcataaagtaatgtaatagaaacgtcctgaaacgagatgaatgtgaatgttcattccattggcgttgtgaatggcattgttgttattg

SEQ ID NO: 24528 - DNA, 932 bp, Gossypium hirsutum
  Clone ID: GOSHI-09MAY01-C102254_1
cccacgcgtccgcccacgcgtccggttaggatgcacaagtaaagctgaagctcctcttcaatggcgaactctaagcttaccacttatcttattctcatcatttgctcttgctttacagttccttcaacagcaaagacatcaactttagtacaagaaatcaagcagcaaagtcaggttcaagataaagaaccgtttgtgggtgttaacttaggcacggatgtctcagatctgctatcagcaacggacttggtttcattcttgcaagtgcaaaaaatttcgcacattcgactttatgacgcaaatcaagacatactcaaagcattggcgaagacaaagatccgggtcattatcagtgtaccaaataaccagcttttggcaataggatcatccaacaccactgctgcttcttggatcgatcgatacgtcgtcgcttactacccggaaacgctcatcaccggtattgctggtggagatgagcgttttaacaacccgtcccgccctcagctcctttgctgcttcctgcaattcagtctctttacggtgccttagtggctgcaaatttgcatacgcaaatcaaggtttcaaccccacatgcagcttctatcattcttgatacctttcctccttctcaggcttactttaaccaaagcttgacttcagttatggtacctttgcttcagtttttgtcaagaactggctcgcctttaatgatgaatctttatccttattatgtgtttatggagaataagggtgtggttcccttggataattccttgtttaagccattgacaccatctaaagaaatggtcgatcctaatactttgttgcattacactaatgtgctggatgctatgattgatgctgcatatgtttctatgaagaatttaaatgttaccgatgttgtggtgcttgttactgagagtgggtgggct

SEQ ID NO: 24529 - DNA, 552 bp, Gossypium hirsutum
  Clone ID: GOSHI-09MAY01-C103814_1
aatagtaagtagccatatattatatatattcaactgcataaaacagaaccaagcaaaaagtacacgagcaatgccaaaatacaaatgaaccgggttcggcgatggttaccgggatgtggaagtttgggagatgatcatccgacattgaaccttttatccctgtggatcatcccttgtaaagtagtattaaatatcaatttcttccacagatttgtataaaagcttcatgctatgaacataatggactcaatggaccatgacaatttcagaccagtattgcgcaactctaccataaattctttgcagctatatgtcttcacacttttgattgcctggaacaactgcaccattgcagagaagctctcttccctcatatcacattgcatagactatctccccactactatcaacatcaagctccgattcagaatcaaggtcatccatgtcttcatcatcaaggttgtcgactatgtaatggtttaagccaggggctccagcagctggaatggtggcctcagctattatctgcatgattgtatctgtgctctgcat

SEQ ID NO: 24530 - DNA, 479 bp, Gossypium hirsutum
  Clone ID: GOSHI-09MAY01-C103674_1
aagggaaaaaggcaaagggttattctagttttggttcagataaaacaagccaaagtggaacttttctaaatgagggtttcataacaatggataaaatatatattccttacaaatatactaaaaactgtaaatttaaccttaaaaaagggggaaaaataggacaagttatttgggaaaaatgaaaaggaaaaagcaaacagcagtagatcatgtatctaaatcctttcaacatcaaaagaagcctcgccttggtctttcctctgcaacgtttactcttattgctcttccatccaaactctgtccgtcaagagcagcaatggcatcattcaattcagtttccgaagacatagtcacgaaaccgaaaccacgggatcggcctgtctccctatcatagactacacgagcctcgactaccttaccatgttcactgaacacttgctccagtcgagcattatcaacatcccatgaaacataaccgt

SEQ ID NO: 24531 - DNA, 778 bp, Gossypium hirsutum
  Clone ID: GOSHI-09MAY01-C103114_1
gcaagatttcacttgaggaagccagtaagcaactggaagctgatttggaagaagctgaagttgctaaagaagctgagataagagcacttgatcagatgaagatgctttccgaaaaactagtgctgctcgtacctcgacctcggaatctggagccaatgtcaccatctccagggaagaatttgaggccttgagccataaagtggaagaatccgataatttagctgaaatgaaagtgatagctgccattgctcaagtggaagctataaaggctagtgaaagcgaggtcctcaaaaggttagaggcgactcaaaaagagattgaagacatgaaggttgcaactgccgatgctttgaagagggctgagatggctgaagcagcaaagagagcggtggaaggggagctccgtaggtggcgtgaaagggaacagaaaaaagcagctgaagctgcatccaggatcctagcagaagcacaaatgtcaactgaatcatccccacaacactatagacttcaaaagccgaacccaccagagaaaattcaggtacataagttggaaaaagagaggtcttccatctcgaaaaaagtccttttacctaatatcagcggtatattcaatcgtaaaaagaaccaaatcgagggtggatctccttcttatctacctggtgagaatcctttctaatatttttgtacatttatcaatgtttttgtttgtgtgcatgtgttttgaggaatttaaagtggaatatatccaaggattagtttgctagtaaaaaataaacaa

SEQ ID NO: 24532 - DNA, 124 bp, Gossypium hirsutum
  Clone ID: GOSHI-09MAY01-C103004_1
gtactgtctctaatatgtcaggtacattactttttcttatgggctttaatgtgtgtacaagaaacagaaattaatatgtactatagtaagtgtttttttactgccatattacctatgttttggt

SEQ ID NO: 24533 - DNA, 520 bp, Gossypium hirsutum
  Clone ID: GOSHI-09MAY01-C103354_1
ttttttttttttttttttgatcagtgatccctaataaaagccatagatagaggcacgggttataaagctgttcatatacatatacatatatatatcatcacagtggcatccataagttacctaaatgaaaaggggggtacctgcaaagtatgacctaaattatgggtggggaactccgcagacatggcacattgcaaacattcatgtcgagctgtttccgccacaacacaaggtagactggggccaagctcgtttaaagtagggtactactttggaaaaatccgataagatagaagatccgcgaccttggtactggatcacttccatccttccactcccgatgtgatagagatatatgcttgatccagatctaatgaagactgatttggaatcttgtggagaaaatgccagtatttcggtttctttccgtgtaacacattttgtggcaagtgttggatcctttctcctcatgattttgaaattcaacttatatctcaagctccaaaaaaaattgactgtt

SEQ ID NO: 24534 - DNA, 658 bp, Gossypium hirsutum
  Clone ID: GOSHI-09MAY01-C134324_1
ctcgaaatttgtattggtgcagccaagggtcttcattatctccatactggttcggatggaggaatcattcaccgcgatgttaagtccacaaatatcctgcttgatgagcaatatgtagcaaaagttgcagatttcggcctttcaaagtccggccttctgaatccagatgagttcagtaccggcatcaaaggcagcttcgggtatctggatcctgagtattttagatgccttcagttcaccgaaaaatctgatgtttattctttcggtgttgtactccttgaagtgctttgcgctagaccagctatcattaactcacataggaaggaggagataaacttagcagagtggggactgatttggttaaacaaaggggaactggaaaagatcattgatccttcaatggcttcccagattaatccaaattcactgagaaagttcagtgaaatagttgagaaatgcctgaagccaactggagccagcagaccaaaccatgcttgacatatgctggggacttggaatacacattgcagctacagcaaaacagcggtgcgcccagtacccgcccgaggacagtgccatagatgcttctttcaacatgtcgtcgagacctttccaacggttgccttcaaacaattgcccgattgagaaagtggacgtc

SEQ ID NO: 24535 - DNA, 613 bp, Gossypium hirsutum
  Clone ID: GOSHI-09MAY01-C135264_1
ctcaagtatatgatgatatagctcgtgggactcgccaaaaatttgagtcaaatagaccgagagccgtgctctttgaaggacctcccggtacagggaagacatcttgtgctcgtgttattgctaatcaggcgggtgtcccattgctctatgtaccacttgagattgttgtgtcaaagtactacggtgaaagtgaaaggttactggggcaagttttctctcttgccaatcagcttcccgatggtgctatcatatttttggatgaggttgattcttttgccactgctcgtggtggtgaaattcatgaagctacacgtcgaattttgtcagtgctattgcgacagattgatggatttgaacaggacaaaaaagtagttgtcattgctgctacaaatagaaaacaagatcttgatcctgcattgattagtcgttttgattcaatgattgtctttggtctacccgatgagcacaaccgtcggcaaatagcagctcagtatgcaaagcatcttacagaatccgagttggctgaacttgctccaatcaccgatgaaatgtctggtaggacatccgggatgcatgccaacaagcagagcggtcatgggcgtcaaagcttatt

SEQ ID NO: 24536 - DNA, 655 bp, Gossypium hirsutum
  Clone ID: GOSHI-09MAY01-C135254_1
ggcagacatgcatttggtgaccagtatcgtgccactgatacaataattactggaccaggaaagcttaagatggtttttgtcccagaaggtggagacaagccggtggagcttgatgtctacaattttaaaggccctggcatagcactttctatgtataatgttgatgagtcaattcgtgtatttgctgaatcctctatgtcattggctttttcaaagaagtggcctctttacctgagcacaaagaatactattctcaagaagtatgatggcaggtttaaggacatattccaggatgcgtatgagaaaaattggaaggacaagtttgaagcacattctatatggtatgaacatcgactaattgatgacatggtggcatatgccctaaaaagtgaagggggatatgtttgggcatgcaaaaattatgatggagatgtccaaagtgatctacttgctcaaggatttggctctttgggcttgatgacttcagtgttgttgtcatctgatgggaagacactaaaaccgaggcagctcatgggactgtaactcgacatttcaggctttatcaaaagggacaagaaaacagtacaaacagtattgcctctatatttgcatggaccaaatgactggagcatatggcccaactatattaaaacca

SEQ ID NO: 24537 - DNA, 720 bp, Gossypium hirsutum
  Clone ID: GOSHI-09MAY01-C130624_1
ccattttgaattcttttgctcttcttcctgcatctccaccctcaaaatcaacccctttgtctttgtttactcttggtgttgttatgtctttatctactggtcttgctaacgttagcttgaaatacaacagtgtgggattttatcagatggcgaaaattgctgtcacgccatctattgtccttgcagagtttatatggtacaagaagaaagtcactttctccaaggtggttgcactaacagttgtatctattggtgttgcaattgctactgttactgatttgcaattcagcctcttcggagcctgtgtggcggtggcgtggataatccctagtgctgtcaataaaatcctttggtccaacatgcagcaacaagaaaactggacagcattgtcgttaatgtggaaaacaacgccaatcactttgctttttctggtttctatgattcctttccttgatccccctggtgtgctggcgtttcactggagcttcaacaatacatcagcaatcctcgtatcagctttccttggattcttacttcagtggtcgggagccttggcgcttggggccacttctgcaatttcccacgtggttctcggacaattcaaaacttgtgttattcttcttggcagtttttacctgtgtgggtcaaatccgggcacaactagtattattggagcatttataacaattggtggtatgtcctttttcacatacctcaatt

SEQ ID NO: 24538 - DNA, 578 bp, Gossypium hirsutum
  Clone ID: GOSHI-09MAY01-C130194_1
gatttccgcaagggtgattaagtttttgattaattgtaaattttcatcgaatttggtccttatgttctggaaatcgcgaatgtggtgctttgattgatcatattttactttatgggagatgataaatttagcttcccttctcttgctagttatggctgagtacctaagtcaacccaaattttgagccgttgaatatgcgacacaaattagactcgttccatttttgtgtcacttcactgcttgtgccaattcagcattgcaagcaagtttcaggatatttgaaatgattggtttaatactttaggagatattgttttgttctattagggccagtttggcattgctgtgttgctgtttgagaatgttttcgaaaagcttggtttaacaaaaaagtgctttcgaaaactatggtgaaaaagtttggttccttaatttccagggtttggccttgctgttaataatttgcggtgaaaaattaaaatgttcttttttaggcatgaatatgggttaagaaaaagatttaattatggttgttttgccatatttcactccacttgcctcaccagcctaaaattacc

SEQ ID NO: 24539 - DNA, 1203 bp, Gossypium hirsutum
  Clone ID: GOSHI-09MAY01-C130084_1
agcaaaaagctgaagctctctcactttcaccatttttcgattcaatccttcgtttcagttttatatgaaagtttagttcatggtacaaacaacgaaaaaatgtccggtgtatctctcgccgtggctccaagaagtgagccagatcacaccatagcacctggggaaaaacccgagcacaaaccacctcgccagcagcagcaacagcaacagcaacagtccggggtaggcagtataatgggatcattacgtgtgatcgagctccaactagtagttttcattatggttttttcgattagtggccttgtcccgctccttgatttagtcttcccagctattgcctccgcttatattattgccctttcgcgtttcgccttccatccaacggtcatgtatcgactgcctcgcaagagattttccaaggcagcaaactgtttaggctctatgtgatccttggaactgcagtaggactttttttgccgctcgcgtatgtcttgggcggcttcgcaaggggcgacaaccatgacgttcgatcggctaccccgcacttgttcttgctttcattccaaatactaacagaaaacgtgataggcgggctgtctttattttcgccaccggtgagggcactcgtcccgttactatacacggttcggagaaatcttcgttcttgttgactggatacatgatgtttggctcaacaaaacactgcctgttaatgccacaactgaaggatatcgtatggcattggttgggggaaagggcttggcggctgccaaccctattgtacttcttctatcaacctcttttttcttttttgattccgccaattccttcctccgagcaattcgagaaggtatttttaaggagagggggtgaaatacactgccagatgtcggaagataagcgtcctataatggcgaacaagtctctagcaaccaataagaaagatgaatgatttcacattttcgtcggtcctcgtatcatgttgttcaatgttgtccacccacactttaaaaagaattgccatgtgttaaaacaattagtgatttctccttttggctgatgatgccatttgacattggttctctttttatacattttggacatgacatgttggaatcatttctaccttatttgtttgcaactttgagtttaaacaaatattcatttctctttgtttggtaaaaaaaaaaaaaaaaattctct

SEQ ID NO: 24540 - DNA, 591 bp, Gossypium hirsutum
  Clone ID: GOSHI-09MAY01-C131514_1
catttgactactatatggttggtcaaaattatatctgtcctttgattgatttcagaagagtggacagctcccatactgttgtatccggtttctctgctgatatcaatttcatttgtaaaagcttcctgaaaattaagcatgtgctttgctgaaggaatttgtatttttaaaatttcataattctattttgtaaaccatggtaataaactttaaggttcatggatatagatatatataaagagagagagagaggaagtgcaatagggactgtaattctttcttaattattagctactatttgagagcatcccaggttaagcttattccatgtttcttatcttgtgcatcttttttgtgtgtttttattgagggtttattgggtcttagtaagtttttctctcttcatgttggattggttatcatcacccgattgacaaaatgcatagaaaagaacatgtattttgtatatttaacatctcaccttcttatgtgcttcatatcattatggtattcatattaaatactgaggacatattcggctctttttaaataaaaatccttctctacatcggttatgtcttgagaatatat

SEQ ID NO: 24541 - DNA, 685 bp, Gossypium hirsutum
  Clone ID: GOSHI-09MAY01-C131374_1
ggtcctgcaaaagctcctccaaccatgtgctctgaagaaacacctcttttattatcatatgacgccgccccacaaaatttaacaagctctctggccactccagctgtaaatactggcattccgaattgcacatccaacctagctttactgaccaattcagaaaatcctgcgactgaccatgaacccgtttcctccaaaactgacatggcaactgatcaaagtctgttggagccaagggctctggttccggttccagttccagcaacaaatgttgaggcactaactgctgtcgcagtcaaccagaatttccaaaaatctgagcttgcacagcatcgaatctggaggccattttccatatcagaagtcgaagcattggtacaggcacttgaggagattggtactggaaggtggcgcgatgttaaattgcgagcttttgagagtgctgaccatcggacttatgtgaatttgaaggataaatggaaaacactggttcacacagcgaagatttccccacaacaacggcgaggagatccagtacctcaggaactcctggaccgagttttggttgcccatgcttactgggctcagcatcaactaaaaagcagcaaagtaagcatcaccatcatcgtcccggaactccgagcatcacagaacaccactgaagctgaaaaaaaaggtgtttcct

SEQ ID NO: 24542 - DNA, 715 bp, Gossypium hirsutum
  unsure (1)..(715): unsure at all n locations
  Clone ID: AI055036.1
cagatgtcagtatgacatgctttataaacagaggaagatctttgaccgtaaaagcgttactagttatcctgagaaggatatgattggtgataagtgtagcacagctgcaatgtcagatagagtgaaatttagcatcaagtcctttaggattccagaactttacatcgaggtgcctgaaactgcaactgttggttcactgaagaggaccgtaatggaggcagtgacagccttaatggaggtggaatacgtgttgggctactccttaagggaaaaaggtgagagatgacagcagagctctatcacagctggtatttcctgtgatgataatctggatgctctcggtttcactttggagcctggtcctgcaaaagctccttcaccatgtgctctgaagaaccacctcttttattatcatatgacgccaccctgcaaaatttaacgagctctctggccgctcagctgtaaatactggcattccgaatgcacacccaacctaccttttctgaccaattcagaaaatcctgcgactgaccatgaacctgtttccttcaaactgacatgccaccgatcaaagctgttgagtcagggctctggtccggttcagtncagcaacaatgtgagcactaactctntcagnaaacagaattcaaaatttgactgacaggtcatattgagcgttcttatagagtcaacatgttcagcgttaggaatgtcn

SEQ ID NO: 24543 - DNA, 627 bp, Gossypium hirsutum
  Clone ID: GOSHI-09MAY01-C132094_1
ggccattgttcatgtaacattctgtgttctcacagtttcttttggagggctaaagatacgtgaatggaagaggtgggaagattcaattgcagagaagaattatgattcagagcaagtgctgaagaaaaaagtcactcatgtgcagcagcatgcttttatccaagagcattttcagggtcttggtaaaaattcaattctgctaggatgggtgcattctttttttaagcaattctatgcatcagtgaccaaatcagattatgtgacactaaggctaggtttcatcatgacacattgcagggggaatcccaagtttaattttcacagatacatgatccgtgccttggaagatgattttaagcaagttgttggaataagttggtatctctgggtttttgtggtcatcttcttgttgctgaatgttaatggctggcatacttatttctggattgctttcattcctttcattcttctacttgctgtgggcaccaagctcgagcatgtgattactcaattggctcatgaggttgctgagaaacatgtaccattgagggggaattagtggttcaaccatcggatgatcacttttggttcaacaggcctcgtattgtcctcttcttgatccatttg

SEQ ID NO: 24544 - DNA, 691 bp, Gossypium hirsutum
  Clone ID: GOSHI-09MAY01-C129414_1
cttttataaaagagagctaaatctgctcctacttttcctttttattatcattgtctcctattgctttgtttttatttttatttttatggctctcctcactttcttaccggaaccggcggccgaacccatgaaagtggaacagccgtccaagcgtggaagaaacccggtgaaaaagcaaaaggaaaagcaaccatcttcatgggaccaaatcaagaatctgctcagttgcaaacaaatcgaagggtcgaaagttcatgacccttcgaagaataaccagctgcctcatcatcacggctactcgaagctgggttcctcttgcaaatccatctgtagcttcaacgacgtcgttcacggcaacaccagggttgttcacagagccgacaactcgcctgagagtagcacagtgggtcaagaaaccgggctgctgagacgcaaagccgggaatagctcgtcaacgcggtcgttgtcagggtcaacaaaatccaacaacagcagcacgacttacacgacgtcatcttcatcaagagctatgcaattcaggaaactttctgggtgttacgagtgtcctatgatcgttgaccccagcaggtatccatcctcaaaaacaactatatctgcctgctcacagtgcggagatgtattccaaaattgaatttggagctccatcaactgtcgccatgcatttccgact

SEQ ID NO: 24545 - DNA, 861 bp, Gossypium hirsutum
  Clone ID: GOSHI-09MAY01-C129304_1
ccaaaagctaaaaataaaatttctttttaacaaaaacgttgtattttctcttctttttcttcctttttatttttttttaagaaaaccagcattattttccgttttatattcattttatttttgtccaaaaaattttaaaaggaaattaaaaaacttgttcaggttttttcgtgttattgttttatcgtcgtccttcacagtcagtttttgaagaaaaacctcggaagaaaaaaaaaacccaaaaaagagcgaaaggaaacggacggaggtaatggcggaggttcaagtgcaagctgaggtggctccggtggcggcggcgtcgtcgccgccgccacagcagcagcaggttgtgaacggggtggcgagtaataatggtggtagtgtgactacgtcgttgtatgtcggggatcttgatctgagtgtaaccgaatctcatctttacgatttgtttagcccactgggagcggtggtttcgcttagggtttgcaaagactcgaggacccgccgctctcttggttatgggtacgttaattacagcaacacacatgaagctgcacgggcgttggaggtactgaattccactcttctcaatggcaagccaattaggataatgtattctaacagggatcctactgtccgaaaaactggggcaggaaatatttttatcaagaatttggacaagacaattgacaataaagctctgcatgacacgttctctacgtttgggaatattctatcttgcaagatagccactgataatactggccagtcaaaaggatatggctttgtgcaatttgataatgaggagtccgccaaaaatgcaattgataagctcaatggtatgctacttaatgacaaacg

SEQ ID NO: 24546 - DNA, 456 bp, Gossypium hirsutum
  Clone ID: GOSHI-09MAY01-C126214_1
ggctttcgtagggtacggaacaactgaggcgtcggattacgctgtagtgaagaactcgtggggagccaaatggggagaaaaagggttcatacggatgaagaggaacaccggcaaagctgaaggcctttgtggtatcaacaaaatggcttcttatcccaccaagaaaaactgatcaacacctttgatttcttcctctttttaagctttttttttatttttatttttatttttctatgttcacaaaatttgctgcccaatgtccctttggttataataaaaattcctcataatttcgtttttaaaataaacttctaatttgatagttctctgactcttaagttttgtataaaatttctaaaattttttctcctttttaaaatatggggcgtttgttctagaggaaccatttttactttactgcgggcattagaacttcattgttctttttaatggtcc

SEQ ID NO: 24547 - DNA, 963 bp, Gossypium hirsutum
  Clone ID: GOSHI-09MAY01-C127574_1
cggccgcgtcgaccgacgttatagtaacgggtgctatggcacagtatattccgaccttggattattacagtggtgggttacctaaggcatgtacaatgtacgcttcatcggaatgttattttgggttaaaccttaaccccatgtgcaaaccatcggaagtttcgtatactatcatgccgaacatggcgtatttcgagttcttacctcatgatcctaactcagctgggttcactcgtgactcacctcctaaactcgttgaccttgttgacgtggaaatcgggaaagaatacgagctcgtaatcacgacctatgccggattatgcaggtaccgagtcggcgacattttacgagtcacggggttccataactcagccccacagttccatttcgtgaggaggaagaacgtgttgctcagcatcgactcggacaaaaccgacgaaaccgtgttacaaaaagccgtcgagaacgcttcgcggctcctccgagaattcaacgccagcgtcgtcgagtacacgagttacgccgacaccaaaaccatccccggccactacgttatatactgggaattgttggtgaaagacgccgccaactcccccaccgacgacgttttgaaacagtgctgtttagcaatggaagaatcgatgaactccgtgttccgacaaggccgagttgccgacaactcaatcggcccactcgaaatccgggtggtgagaaacggcacgtttgaagaactcatggattacgccatatcaagaggagcttccattaatcaatacaaggttccaaggtgtgttaacttcacacccatcatggagttactagactctagagtggtatctacacattttagcccagctttaccacattggacccctgaaaggcgaagatgatgatgatgatgattcagtgactcagttattcatttaggcacccaccaccgaccaggaattagtttataaatct

SEQ ID NO: 24548 - DNA, 549 bp, Gossypium hirsutum
  Clone ID: GOSHI-09MAY01-C120754_1
gtcttttccacttctaaaacctttagcttttctcagagatggcgcggggaaggggcagtgcaagtcaggcgaccatgtccgcaattgcattgctattgtgcttaatggtttgcctggaaaccattgatgcagctacttacactgtcggtggctctaatggttggacttttaacacggctacttggccaaaagggaagcggttcagggccggcgacgtgctagtgttcaactacgatgcgactatccacaatgtagtagcagtgaacagacgagggtacactaattgtaccacacctgcaggtgccaaagtgtacaactcacggaaagataagataaaactggccaagggactcaacttctttatgtgcagcactgctggtcactgtgagtctggaatgaagattgcaataaatgcagtgtgacacaaattattgccttctcttctaaataattggttgaatgggctactactttgtcgtctttgggtttaagttttaataaggggaatgggattccaactttttattttatttaaaattattgttaaca

SEQ ID NO: 24549 - DNA, 516 bp, Gossypium hirsutum
  unsure (1)..(516): unsure at all n locations
  Clone ID: uC-gsronu33B134e05b1
ttttgcacttctaaaacctttagcttttctcagagatggctcagggaaggggcagtgcaagtcaagcgaccatgtccgcaattgcattgctattgtgcttaatggtttgcctggaaaccattgatgcagctacttacactgtcggtggctctaatggttggacttttaacacggctacttggccaaaagggaagcggttcagggccggcgacgtgctaggtaactccaaataactaaacaaaatgattaaaatatttcctagtttgtgtctgaagtaaaaaaaactttgtactgtgatgttgcagtgttcaactacaatgggactatccacaatgtggtagcagtgaacagaggagggtacactagttgtaccgcacctgcaggtgcaaaagtgtacaactcagggaaagataagataaaactggccaagggactcaacttctttatgtgccacactgctggtcactgtgagtcctgaatgaagatngcaataatgcagtgtgatacagattattg

SEQ ID NO: 24550 - DNA, 426 bp, Gossypium hirsutum
  Clone ID: uC-gsflnu33B113a04b1
cccactcgtacgcccacgcgtccgcccacgcgtgcgcccacgcgtacgctcagggaaggggcagtgcaagtcaagcgaccatgtgcgcaattgcattgctattgtgcttaatggttagcctggaaaccattgatgcagctacttacactgtcggtggctctaatggttggacttttaacacggctacttggccaaaagggaagcggttcagggccggcgacgtgctagtgttcaactacaatgggactatccacaatgtggtagcagtgaacagaggagggtacactagttgtaccgcacctgcaggtgcaaaagtgtacaactcagggaaagataagataaaactggccaagggactcaacttctttatgtgcaacactgctggtcactgtgagtctggaatgaagattgcaataatgcagtgtg

SEQ ID NO: 24551 - DNA, 1446 bp, Gossypium hirsutum
  Clone ID: GOSHI-09MAY01-C122834_1
ctaattttctctctactcgaattttatttttctcgagaaacaatcactcccttctgatctccaattcccttcaaatttcaaccaaccctaatcaatcattccttattctttcaacattttaaatcaaatctcgttattaacatctcgatctcagtgttctttaaaaaattcgtatattcgtcgattcaactttttcgatttcgattttggtggtgaaatggtgggtggaggttgctggagagacgaaggatcattagtgatcaccaacacgaacgtgttcgctgctctcgaaactctccggaagaagaagaaatccgacaaggaccggcggtcgaagaaatcttcttccaagtctgaaaaacaacaacagaagtcgcaacaagaagccgagtctcaggtgttttgggctccggcacctctcaccgtcaagtcgtgggccgatgttgatgatgaagacgatgaccattattatgctaccactgctccacctcagtccgtttggggatcctcggagccttctcagagtcacgaagagaagacagctaatgtagaggacagtgagagtgaagaagatattttagatgaaggagatgatgatatagaggaagatcatgaacatgaaccggaaattcaagtacatccagagcctgtgctaaaaagggatcctgaaattcctgcaccgcccaaagaggcagaaaggcaactttccaagaaagagaggaagaaaaaggaactcgaagagttggaggctcttcttgctgattttggagtcacacagaaggaaaacaacagcaatgacgagtcacgtgatgttgcacaagaaaagaaaggaggagaaagagaaaagaaagataatccacccggagagtctaaaagtgccgaagaagaaaaagaaggataaatcaaggaaggaaaagaatcacaagatcaacctactagtacagacactaccaacgggctagatgactttgctgggaccgaacaaactgaggaggatgtactgctgttgatgtgaaagagcggctaaagaaggtggcatctatgaagaaaaagaaatctagtagagatggacgctgctgcaaaagctgctgcacaaaaagctgctgcaaggaattgcgaacttgctgctgcaaaaaaaagagaagaaccgttcaccacagcctgtacggtaaaacatcttttttgtgcgacatacatacgtatatgaacatgtctttcttgttgttcatataacaatgccaaaattaacagtccgggtttgcttccttaaaaaatgaacactttattttattttgaattgcttgttggaactaaccaaaattttaagttttattaccttttgggttcgtattggttgcccctttttaccttgaacccttttttattggcatttttttttctcaaaattcttcttccgaacaaacctgaactttaaaaaaaaaaatt

SEQ ID NO: 24552 - DNA, 696 bp, Gossypium hirsutum
  Clone ID: AI725912.1
gccgatgttgatgatgaagacgatgacgattattatgctaccactgctccacctcagtccgtttggggatcctcggaaccttctcagagtcacgaagagaagacagctaatgtagaggacagtgagagtgaacaagatattttagatgaaggagatgatgatatacaggaagatcatgaacatgaaccggaaattcaagtacatccagagcctgtgctaaaaagggatcctgaaattcctgcaccgcccaaagaggcagaaaggcaactttcacagaaagagaggaagaaaaaggaactccaaaagttggaggctcttcttgctgattttggagtcacacagaaggaaaacaacagcaatgacgagtcacgtgatgtcgcaccacaaaagaaaggaggagaaggagaaaagaaagatcatccccccgggaaaatcctaaagttgcctgaagaatgaacccgaaggatctttctccggagggagcagagtctcctgatctacctactagtacagacactaccacccggccagatgactttgctgggaccgagcaaactgaggaggatgtacctgctgtcgatgtgaaagaacggcttaagaacgtggcctctatgatgaagaagatatctactacacagatggacgctgctgcaaaagctgctgcactacatgctgctgccatgagtgccgatctga

SEQ ID NO: 24553 - DNA, 744 bp, Gossypium hirsutum
  Clone ID: GOSHI-09MAY01-C122114_1
gacatggcgaggcaccgagatttgcaaatacaaaggcttcacgtgcgatatccgtcccgacgtgaacgaaacagccgttgcttccgtcgatttcaacggcgctaaatttgcggggccgaacggttatcttcccctcgatggcttcatcgacaagttagacgacttagctattttccatgccaattcaaacaacttcaccggcaccatcccatacgaggtctccaaaatcaaatacttatacgagctcgatttaagcaacaatcagttgtccggtgatttcccgatgaacgtccttaaagccaccaacttaacctttctggacttacggttcaactccattaaaggtctggttccacaacaagttttcaacttagaccttgatgttctcttcatcaacaacaataatttcgaacaaagactccccgagaatctcggtgacacaccggttttatacctcacttttgcaaacaacaagttcaccggtccgattccgacaagcatcggcaaagcacccaacttgctcgaagtgctttttcttaacaacaagcttactgggtgtttaccatatgagatcggcaacttgagtcaagccaccgtgttcgacgtcgggtcgaataagttgactggtcccataccatactcgtttgggtgtttaaaaaagatcgagcttctcaacttggccggcaatgaattctatggcgaagtaccggaaaccgtttgtcaactcaaaaatctacaaaattt

SEQ ID NO: 24554 - DNA, 272 bp, Gossypium hirsutum
  Clone ID: GOSHI-09MAY01-C123884_1
ttcattcgtccgccttttgtcggcctcagtcctctgcgatcgggctttgatacttttggagttcatttattcattaaaaaacctatggaatgacaaatgattaggaatccaggttccatcgttgccaatgacttccttattcagttgctcagaaatttggctttgcatattgaggtctctctctctcttataagcctaaattttttatttttgaacttttttgaattatttatatatcttttactgtttttaatcaaaaaaaaaaaaacaat

SEQ ID NO: 24555 - DNA, 1278 bp, Gossypium hirsutum
  Clone ID: Z68154
actagttctagatcacagcacttccacaatagtaaaatcttttattagccaatgcgcaatgccatcatgcattcaactatgcttcttctgctttcggggttgctattggctatcttcaaaaccacaggtgctgaagttggtgtttgttatggaatgaaggcaaatgacttgccaccagcagcagaagttatcgaccttttcaaacaaaagggcatcaaacgaatgcggctctatgatccgaacccagatgctctgcaagccctcggtggtaccaacattgagctgctgttagatcttccgagtgcaaaccttgaatccgttgctgcgagtcaagccaatgctgatcaatgggttgaagacaacataaagaaatacaacactgttaatttccgatacatcgctgtcgggaatgaagtaaagcctacagattcatttgctcaatccctttttccggcaatgcagaacattcgtaccgcaatagttaatgcaggcctaggggatcagatcaaagtttccaccgctacgtttttcgctgctattgataaatcatctttccctccatcgaagggcagtttagatcctgaatatcagaaacttcttggccaagtcataactttcttgagggacaatcaagctccattgcttgttaacacgtatccctactttagccacatcggagaccccgaacatgttcctcttgactatgctctctttacggcaccgtctgctgttgtgcaggatggttcgttgcagtaccagtaccttttcgacgcgatgctggataccttttactctgccctggagaaagccggtggggtatcagtggacattgttgtttcggaaactggttggccatcagacggtggacaggccacgagtgtcgataacgcaatgacttacaacacgaaattggttcaacatgtgaaccagggtaaggggactccgaagaaacccgaaaaagctatagtagcttacctgtttgcgatgtttgatgagaatgaaaaagaaccggcatatgagaaacattgggggttgtttttcccaaaaaaacaggagaaatactccattagtttcaattaaaaccggtaaagccatttctctcagtctcgggtatactaaagtttaccattgtcatcgcctctaaagaaggcagcataggccatatatagaggcaaataagcgtggatgtctactgtaattttatataattgggtgcgttctgctcacttctaagttaaataaaatggtttcggctattatccgactactttctgaatt

SEQ ID NO: 24556 - DNA, 840 bp, Gossypium hirsutum
  Clone ID: S79309
gagagatgatgaatacgtcgaggtttatcaagtgtgtcacagtaggtgatggagcagtggggaagacttgcatgcttatttcgtatactagcaatacgttcccaacggactatgttcccacagtgtttgacaactttagtgctaatgtggtggtggatggcagcacagtgaaccttggcctatgggatactgccggccaagaagattacaataggttaagacctttgagttataggggagctgatgtgtttttgttggccttttctcttattagcagggccagttatgaaaatgttcacaaaaagtggatccccgagcttagacattatgctcctaatgtgccaattgtgcttgttggaaccaaactagatttaagagatgacaagcaattcttgagtgataaccccggagcaatatcaataacaacatctcagggtgaggagttgaagaagatgataggtgcagttacttacattgagtgcagctccaaaacccaacagaatgtgaaggctgtttttgatgttgcaataaagatagcattgaggccaccaaaaccaaagagaaaacctataaaaagaagatcatgtgctttcctttgaacctcaattctacattacaatcaaattattatttgctatatactttttgttttttatttttatttttttcacataaaatttcatatgtaaccatgaaggatctctaaaaggggattagattgaaattgcaatggtatttgtaatgtataaaaagaaaaaaaatatatatttttgtaatagtttaaactcattcattgttattaccttatttctttccatttaaaaaaaaaaaaaaaaaaaa

SEQ ID NO: 24557 - DNA, 1606 bp, Gossypium hirsutum
  Clone ID: AF034132
tttttattcggtacacacttgcttacgaaaatcaagttttaatgctatcgtcccttttgttgctactatccgcaagtcaaactgctaaatttgtttgtttccttctattattttagccaaggatagaccaagttatccgcattttggccctgatttcccatcttgactagctggtggtggcagttacacatagggagatggggagggcgccttgttgcgaaaaagtggggttgaagaaggggagatggacggcggaagaggatgtgttattgaccaagtatattcaagctaacggtgaaggctcctggagatcattacccaagaatgcaggattactgaggtgtgggaagagttgcagactaaggtggattaattacttgagagctgacttgaaaaggggaaactttacttcccaagaggaagaagtcatcattaacttgcatgctactttgggaaataggtggtctttaattgccagttacttaccaggaagaacagacaacgagattaagaactattggaactctcatttgagtagaaaaatccatagctttagaaggccattaactcaaagcatgccagtcatcatggacctcaccaagacggccgtgattgctaagcggaaaggaggtagaactagcgaagggtcgatgaaggaaaacaaaagctgcagtacccagaaagatactggaagttgttcaaataaacctactgaaaacgtttgtgttaatgaagttgagccattcccatccactccattgttagaaaaagaaaccttgtccactacagccattgaagatcgcatggtactggatcaacatggagaagataaggagagaacaacccatgttgtacccagtccttgtcacgacaccgttgttgaaggaatgttgggttcaagcgaggagagagagagcctggtgactgaggaaggaaccatagagaattcaatgcagtgccctagtggcaacgctgagaaagggactggtattttagcaccacatgagagtattgatagcagtgagatagagtggtttaatgatatcctggatagtgaattgctacagccaagtgggcatttgacgtttactgaactaggagaggacaggtggaatgtgaaaacacacacaactgcagctaataacgaggaaatagtgagtaggaactgtagtgcagatagtggtggggtcttgagctcatgtacttcaacaacattttactttgttgatgattgggaaaatgttgttccaagaagtgagctttgggatgagaaggaatacatgtgttcttggctgtgggagccaagcgactatcatgggaaaggagagagacataaagtggatgataatggctttgaggggcacaatcccatgattgctgctaacgtcgcttttctcctaatgctcctccttgttcctcctgctttagtgtctagctacacttccatgtcaatattttatctaggtagacagtgtgaacatgtcctgccgttttttctttttgttttacttttagattttgcttctcttttcaattctgatgctttgttttctttgtaaactgatttgtgatggaaaaaagattgaagaaaacattttcaccgaat

SEQ ID NO: 24558 - DNA, 1033 bp, Gossypium hirsutum
  Clone ID: AF034133
gtatactcgtaagctatcttcatcacaaattcaattctcaaatcagcttagaggtttatccttgcctctccgactgtaattaacctgttttaagttgagaaatggatgtttacaagagaggtttcatatctgaaacttcaagaagtgaagaagagatggaggctaaggaaaggtccatggactgaagaagaggactccatgcttagggcgtatgtcaatatccacggcgaaggtcgctggaacgctgttgctcgcttatcaggattgagaagaaccggtaaaagctgcagattgagatggctgaactatatgcgaccagaaatcaaacgaggaaacatcagcctcgaagagcagctattgattcttgaactccattctcgctgggggaacaggtggtcgaaaattgcacaacacttgcctggaagaacagacaatgaaataaagaattattggagaacaagagtccagaagcaggccaagcagcttaactgtgacgttaacagcaaacaattcaaggacgccatgcgttacgtttggatcccccgtttagttgaacggatccgtgcttcatccgagtctccctcgagtcaaccttctaccaccaccaacaccacctacaatgatcgtatcagcaacataagcagcagtcaaatgagctacgcaaatgcgagtgggtcggtccaggttgacccaagtcttctgcccgaattatcaggcacgtcatcagactcccttgacacccaagtctcttccgtttcggacctgaccgattgttacaatccacaaagcctttcaaactacttacacaaggggttaggtttggaaaaggagggagcggccacatggggcagagatgaagaattccaggcgacagaggagcatagcaatggttggttggttggtggtggggagtcatcgatggacactgtgtggaatgaagagaatgtttggtttttacagcagcagcttcatgatgatgggatctaaccacatgaattcgtaatcgtaatcatgtcatgtcatagctgtttcc

SEQ ID NO: 24559 - DNA, 513 bp, Gossypium hirsutum
  unsure (1)..(513): unsure at all n locations
  Clone ID: AF037051
atggccagtcaatccagcaagcctcaatctatttatgacttcactgtcaaggatgctaagggtaatgatgttgatctcagcatttacaagggaaaggtccttattattgtcaatgttgcatcacagtgtggtctgacaaattcgaactatactgacttgaccgagatatacaagaagtacaaggatcaaggtttggagattcttgcattcccttgcaaccagttcggtgggcaggagcctggaagcattgaagagtcaatccagaacatggtttgcactcgcttcaaggccgagtacccaatattcgataaggttgatgtgaatggtgataatgctgctccactgtataagttcttgaaatcaagcaaaggtgggttctttggagatagtatcaagtggaacttctccaaattccttgttgacaaagaaggaaacgtcgtcgatcgctactctccaaccactactccagctagcatggagaaggatatcaagaaacttttgggngttgcttaa

SEQ ID NO: 24560 - DNA, 287 bp, Gossypium hirsutum
  Clone ID: AF084206
gctattaacttccatcgtgcttggttacctacattctacgcactttatagaagagaaccagtagtcatttaccctcttttccttaatgactcctttaagtgcttaacatacacgataactgcagagcacgttgctctgttcccaggagttaggaagtcctcagtgcccgatgatagttcctacaatgccctgtctgcttgtcgaatgagtaatgcctgcagtactcagctgtaatctcaatagaaagcttaataaagcaacctagcatgaaaaaaaaaaaaaaaaaa

SEQ ID NO: 24561 - DNA, 325 bp, Gossypium hirsutum
  Clone ID: LIB3146-050-Q1-K1-F10
aagagatcccacgtatcaagatctaatgaagaggctttttttgtcgaggcaaagaaaattgttcaagaagaataaatttgacgttgacaggttgaaggagttacaaaacaagtgcaaaacatctctggatgcctctgcatctatccggaatcgtgtaggattggaagtagaactagatgatgccttacacaaggagtaggctttatccccaccttcactttggttgctttcttgttcttattattaattgtcttgataaccatttctaacctaaatcaaagcttaaaacttttcctcatttatccatttctttatttctttcttc

SEQ ID NO: 24562 - DNA, 390 bp, Gossypium hirsutum
  Clone ID: LIB3582-018-P1-K1-A6
cccacgcgtccgcaacgaaggccacacccatggagagctggttctatggaagtgtgggactgctgtacggaggaggaggtcgtggaggctgtgcgtggaaaccattcgtgggagcccgatctagtgctattctagtgtattccagaaacctctagggtttctggagttttctgttgttgggcctttttaggtcattttgggtttgggccattgtaattaggtctgggatttgggctgggatttgggctgtttgttaattgggtaagtcttagtaactgggctaagtggtttgggtttaatggttaagttgggttttaatgtttgggctgttattttttggggtgtaaatggactttggacccataaataatttggtttattgtttatttc

SEQ ID NO: 24563 - DNA, 362 bp, Gossypium hirsutum
  Clone ID: LIB3582-018-P1-K1-A8
aactttctgctccataatgaacaaacattacctttctgaccctgaaccatcacagtgtcgttttaaaaccgggcgtatttccaccctcaacacatttaaaacctccatattctacaacaactagatctaagcctagagaggtgttctctacaacagacctcattttattccacaatgtttcattaaacctcacaaaatactctacatcttaaaagacccaaccccattccatccattgaaccacaacttcaactcaaatttcgactataacttttagcaagttcacatacttacaatctcccacaaaactttgcttatataacacacaccaaacacaaaagcgcaatatattttttttttta

SEQ ID NO: 24564 - DNA, 528 bp, Gossypium hirsutum
  Clone ID: LIB3582-018-P1-K1-B1
cacgcaccggaacggaaggcccgacgcacgcgtccgcggacgcgtgcgtggatctctgaatatgataagagaactgtaccttcactatctatggctactatggggctgctgatagacagagattaccatcatatgctgcctagaagtttatcttctcgaactgaccagatctgctcactttctcatgtatactctagtgtctctctccccaaattgaccatagagctcaccaaagaatactacactgggatggaacacactgttccaaaacccaatacactcacggaataggtggttcatggttaatgcttctttaacacactgagggcagattcgatcgtacgatagctatgtataatgtatattaaccgctataagtagatgatttcacgatgttcaccaagctgtaatcttgatctttgaacgtgaactaaataagccatacttactagtaataatcctataaattgatgaggaagcataagctctacgatctagcagctagacgagctgtttggtgggaggcaa

SEQ ID NO: 24565 - DNA, 522 bp, Gossypium hirsutum
  Clone ID: LIB3582-018-P1-K1-B4
tctttatcatgctattcttaattttctattgttgtatgattatcattctattcttaaagcatatgcgcatgaaatattggttttgatagttaaaattgttaataacagatattaaaaaaggaaaaaaacactgatataaagtccaagaaaattaaatattctttgactatcagttggagtggcatttaaatttaagttcaaacaaatactatttatgacatttttggtttgagaaatatacaaaaaatattaattaattttatttgaaaaacacatttaagttgcttttgggcactaaattttaaatatggatttagatttgtgaaatagtataaattgtataagaaaacatatgctatgtagtattaatgattattttaaaaattcattggtttcttggacagttattttctggtgactttgaaattggtggatatatttttgaatttgaagttcatgttttttgtctttcaaatatataatcatattgaatctttaactaaattatacatgatgcatgga

SEQ ID NO: 24566 - DNA, 526 bp, Gossypium hirsutum
  Clone ID: LIB3582-018-P1-K1-B9
cccacgcgtccgaaacgaccaaaagtttgttttaatgtggtttttgagttataagcaatcacgagagctttttggctcaggctgtgtaacttgtggttgttttataatattatgttgattgctagttgaggtcttttggtggcaatagtatgttttttagcatttcgatcctattttcatgttgaatgaaaacgaccagaagtgttggatgtgtttttcgagttatatgcccttatcaaatctttttggctcaagctgtgtaatttctggttgttttgtaatattatgttggttgtttgttgagatcttttggtgccaatagcctggtagcatgcatgcctctatgttcttattttttgttcctaagttgttttctagcattttgatcctatttccatgttgaatgaattggccaaaagtggattttaatgacatgacaaattgccgttgttggatgtggttttcgagctatatgcaaccatcaaagctttttgtctcaagctatctaacttgtgttatatattta

SEQ ID NO: 24567 - DNA, 519 bp, Gossypium hirsutum
  Clone ID: LIB3582-018-P1-K1-C7
tttaagttgttgtaaagtgtcccttatatctttgattgcattgaagagatggaaactccagggaggtgcatgtgcattcgcgtgtttgttgtaagtatgaccattgcagggttcaatggagtgtatggaactagtaattattatggtccctgtgggaaacatgacatcgagaaggaggctcagaagctggctccatgtacatacgcagcgaaatatttcagagctcctgtttccgagcgttgctgcacgataatggagaaaaagctcaacaatccaagctgcctttgcgcaattttgcaatctcatacggtatacaatgccggagtgaggccagaagttgctgtcaccattccaaaacgctgcaacattgctgttcgtcctgttggtcacaagtgtggagctttcccgtttgtttaagactggttcacatagttcatcttcctgcactacactactcaattttagcagtaaaagtatgccgggttttgtcaaagttgctagtcgatatagtcgataagc

SEQ ID NO: 24568 - DNA, 458 bp, Gossypium hirsutum
  Clone ID: LIB3582-018-P1-K1-D9
atacgaaaaaaaaaaaaaaaaaaaaacaaccaatataaaaaaatccaaacttacatacacaaaaaacgccgcggcatattaaaaaatagtggtcccacctaacatacacttcactgcccctcattatacatcatctacactcacctaaccctaacttaacccaccttaatcacatccatcacattcccataaccccaccttacccaaactcaaacacctccccacaaatcccccttaccaacacttgcgcaatctcaataaccactgcaacgctccctttaccaaaacattaaccacctttaatttcaaatttacccccccctttacctctacactaaccaccaccctagctccctttcctttcactttatacccttcctttttccacacccttaccaccttttcctttcaatctctaaatctctttctcctttaatatttcgatttaccctttacct

SEQ ID NO: 24569 - DNA, 429 bp, Gossypium hirsutum
  Clone ID: LIB3582-018-P1-K1-E6
gataacacaacactaaccaagcagcatcttacataaacaaaacttcttataataaacatgctaagcggatgcttaataatcatgtgagccaatctaaagcgagggaagacaaggcttctgtggcaccgaaggagaaacaccaagaccatctccaacactgtcaaacgtacacctatataaaggtggatgtgcaactcatgcctaatatatcttatcttcccaatgactcatgctatctttatctagcaaataattataccctttaaactcttcaacctcattcacaacaccgatgcactagatctctcagatgcgatacaaattcatccgcaaaccacccctacacataatctaatagcatacgcaataatgtaacttatcatttatacaaaaagaactagatgataaacacaccctatctacgatgga

SEQ ID NO: 24570 - DNA, 496 bp, Gossypium hirsutum
  Clone ID: LIB3582-018-P1-K1-E7
gtgacagtaaaaagtcgtgtactgtatcctgaatttcgcggtcgcatggtctcaacatttcgctcggaccatttttctgaggtgactgattacagttttacagctgatatggagacagaacttgacaatgtttctgtaggcttaactgaatggaaagggctccttagggactactggacacgtttcagctcatattgtagtcgtgctgaaagtgttcacattcatcaggtggagaagatgttggaaaagacatttggggatttcttgttcgcttctctccctaataaaagcaggacatgtccaagttgcatggagggaacgttaattttcaaagtaagtaggtttggcgcaggctattttatagggtgtaaccaacatccaaagtgcaaatatattgctaagacattatatggtgatgaggaggaagaagagagccctcaaaagagcaacactgtcgaggagccaaaactgttaggtcttaatccaaggtccaatg

SEQ ID NO: 24571 - DNA, 517 bp, Gossypium hirsutum
  Clone ID: LIB3582-018-P1-K1-F10
gccgtcgacctcatggtcgaacattctaaagcccaactcagctgtcattgacctccaaagccggggcgcctgactcaaagccgtcatcgcaaaatcctatgacgacagaacacagtaaccgttcctattgccactgcttggtcctggtgataaaaaacataccttatctacagtcatgcagaaggactacatcgagaaaaccatcaagaaattgcgcgtcaattgcttcaccaagctcttcaactacctgcacttgattcccacacaatacaccctccacgacaacatgaaagacaccgtcacacactactctcttcagaccaaagacactaaattacccacttgtaagactataaaacaaacgatggaatagaggttcaaatcaggaaaaaacaagtggttatttaccaagctgaggttttaactcttcctttactttaacattacacatagaacctcttatgtcctatgcactcttcttggagctccacttaaattcaaccttatattgatacgg

SEQ ID NO: 24572 - DNA, 526 bp, Gossypium hirsutum
  Clone ID: LIB3582-018-P1-K1-F6
cggacgcaacctgacgatggcagagacattgtggttcaattactcggctaaaaaatcggattactggctttactgccacaacattctgtttttgtttctgatattctctttggtgcctttgccgctggtttttgtggagatgatgaaatctttgggattccataagtacaagattcagcccaaagttagcttgtcgttctctgagatgttcaagtgttataaagatgtaatgcggatgttcgttcttgtcgtgggtcctttacagttagtgtcttatccttcagtcaagatgattgggattcaaacagggttgccattgccgtcagtgtgggagattttgtcacagttgacggtatatttcatgatagaagattataccaattattggattcacaggttcctacattgtaaatggggctatgagaacattcaccgggttcaccatgaatacgctgctccaattgggtttgctgcaccatatgctcattggctggaaattttgatccttgggattccatcttttctt

SEQ ID NO: 24573 - DNA, 524 bp, Gossypium hirsutum
  Clone ID: LIB3582-018-P1-K1-G2
cccacgcgtccgggatctcctcccctaatcttaaatcccgatccgatcttgggttccgtctgaggtgggggtggggatcgtgagcgaaaccttcatttgggaaccaagttcttccgtgttcattttcattttcttttcatcttttctcttactttctctcttccctttctatctctccaaacacgctcccaccaccaaatcttcttctttgtccgaccaccctttctcgtcctcttcaccccgcttccaactttactttctccttctctattccctcgcatcagatagaaggatatggctactagcgtgtgcacaagcttgccttcatttctccattgcagttttctggattctttgggccccaacactggtggtaacatcatatctattgttgacgacatgtgattagtttttttcagtttttctgtttattccctttaggtttccaaattatcatcttggaagcttgatttctttgaagtattccatttgaaggtgatttttatatgttaggctgatggtcg

SEQ ID NO: 24574 - DNA, 525 bp, Gossypium hirsutum
  Clone ID: LIB3582-018-P1-K1-G5
cggacgcgtgggcgatcctctcactactattctttttatttttatctctttaaccccctcaaagcggcctcttacgatcgtgggggattcctatgccatgaaacccgattttttcccacactctcttgcaggcatccctatcctctcacgcgccaccgcgttccaccaattccttcgccgcatccgtcttttctcgatgcttgcaaacacctggagttagggtttctggaatagcggattatccatttttttgttttgcttttggttttctttatacctgttagaggttaggttagggttttgaaaggaaaatcgcatgaagatgggcagcgtggatcgagttaatgatttgacatttaaagttaattttagcggagatggagcagccaagttgaaagatagagtcaaggagaaactcaaggagtttatgggtgactacactgatgatactcttgtggaatacgtgattgtcttattgagaaatggaagacgtaaagacgaagcaatgaatgagttgaatgtttt

SEQ ID NO: 24575 - DNA, 526 bp, Gossypium hirsutum
  Clone ID: LIB3582-018-P1-K1-H4
attcagaaaccttttaaagctaaaaaagtaaagtctctttgtctccctatcctatcttaagctaagtggtgtgttttgaacttcctcaagctatgtcttcaatcttcataactcagcatttttataactcaaaaataacttcaatcaatcccaaacacctttatgactcaaaaatggcttccactgtccatttgttgccatctaaatccccttcgtcttccatggaagacccatctacgaaagccaccaagggtaagcgagcgtcgtactaggcccatctcaaaccgatccttgctcggaatctagagagcaatcatattccttgtgcaatgcagtcttcatcgcctcaaatcttccataatcgctgctgagcacttaaaagaacaactgctgctccaattctttgctctgtagggattttgctttgattttgaaatatagggttctaagatttttagttttttttttcaagttttaaggtttaggaaatttgatctagaattaggacttgggtttcaaatcatgt

SEQ ID NO: 24576 - DNA, 252 bp, Gossypium hirsutum
  unsure (1)..(252): unsure at all n locations
  Clone ID: LIB3582-023-P1-K1-A9
ttacttgtattttcttgtccaagtgtgaagcattctactgactattctcaaggaatatattgtcgagctattnnacataattaaaatgtacaggaagtgacgtcagaattcaataatgaatgaaaaagaaagctcctcatttcgctttaaaaagaaaataagaagccaagaaaaaattactttacacaaagggaagaaaaagtgtgcggaaaagaattcgcctttcaacatttattgagaccaaaaccccat

SEQ ID NO: 24577 - DNA, 559 bp, Gossypium hirsutum
  Clone ID: LIB3582-023-P1-K1-B12
cacacgcacacacaaataactagccatgaccactaatttagagactaggtcattgctcgatgagctacgcagcttcgacaaaggaggcttcttcgatctcggtcaccctctccttaatcgcattgctgagagctttgtcaaagctgctggcattggagccattaaaggtgttgccagagagggttgttatctagctcttgaaggaactaaatcaagaagtagttccactgatatcagtgctaagaacaataagaagaatccatttccttatctcagaggagaaaccaatcgaaaatcgctcgaagcaatggtgaagagcactggaaaggaatctctacaatggggcctggctgccggcttatattcgggtatcacatacggcttacaagaggctcgtggcgctcatgattggaaaaacagtgcggttgcgggagcacttacagggatgacagtggcactcacatgtgagaaaccttgccaagaacacgtgttgcaatgcgccatcaccggagccgccctttcaacggcggccaatcttctgacaggagtgttttaaaac

SEQ ID NO: 24578 - DNA, 361 bp, Gossypium hirsutum
  Clone ID: LIB3582-023-P1-K1-B2
accggacgattccgatggataacatcgacgaggtcaatgagaagtccgaagacatacatgctctagtcagtacgatgggatatggcgaaagttgacagacatgctagtgatgagggtgaaactgacaatgattgataggacaactgatgtgctgcctctgtcagtgggactagatgatgcatgggatctgaacaaatgccgtaatgttcaaacaacacgcaaaggatacgatgaagaatctatctataggccataatgaatgcttaatgatgtctgtctatactggtgcttatatattccactatatcattgaaggtcatggcagatacttgacaatgggccacgctgctaatactaagaa

SEQ ID NO: 24579 - DNA, 425 bp, Gossypium hirsutum
  Clone ID: LIB3582-023-P1-K1-B3
ctcctaaagatcccgaggctctcaaaacaatggagaaagtatattagaaaatatcatcaatctgtttttggggtctatatggatgatttacttctatgtttcagatgcttgaataattttctcagacttagttttgtttcatctatatcacccttaagataggcagctgagatacttaattgaagcaacctaggtttttgacactagatacgaattgttactttgtatcttttattccactaaagaattggttcatctaagaatattttccttgtcagaaagtatttcaaatggagcaggaagggaaactagacgaaggtttccttgcagaagtcagcgcacaattacggcaataatttgcaggcgaaagaagatgcggataagccaggccttcaggctatgttgcaaaaaggtctgcagctcta

SEQ ID NO: 24580 - DNA, 334 bp, Gossypium hirsutum
  Clone ID: LIB3582-023-P1-K1-B9
ctctgctttcattctgcttctttcccgacttcatttctgtatttttatcgggtttccatttccaggtgactcatctccatccccgatctatttccgcttccgtaatatcattaccatcgtacccaggagcaaggtatgtattttttttcccattttaagaccttctgatgccagattattccctggtattgtccgggattctgttattgggtggaaccgacactcatgaaaacctgctttctgattttttatatcgaaaataaaagggcctatttccgatctggctctttttgggttttgaactttctttattactggtaaagagaccccctta

SEQ ID NO: 24581 - DNA, 578 bp, Gossypium hirsutum
  Clone ID: LIB3582-023-P1-K1-C10
tccacgatacccttctcctgacgaatctgtaccacccatgtacccaagtttccccacaacatatgaaccaaatttaactggaaggtgccctgtaaatttttctgctatctcgaatatcatggggaaaacagcatctgattgttctctacctttggcagcacttgtaggaaatgttatatgttgtccacagcttggtagtttactccacatcttccagggttatggcatcgattctgataagttggtcttgggaaatgctgttgctaatgattgtttttcagatgtcattagtatcttagctagcagaggggccaacaagacaatacccacggtatgttctgtaaaatcatcaaatctcacaggtggttcttgtccggtgaagaatgttaatacctttgagaaaacagtgaatacgagcaagttattagaggcttgcagcactgttgatcctctaaaggagtgctgcaggccggtttgccaacctgcaattatggaagctgctctacagatttctggaacacaaatgatgctcaatgatgataaaactgtattaggggagactagtcatatggatgcca

SEQ ID NO: 24582 - DNA, 571 bp, Gossypium hirsutum
  Clone ID: LIB3582-023-P1-K1-C9
tgttgatgtttggacctccaggttgtagcaaaaccctcatggctcgtgctgtggcttctgaggctggattgaattttctagcggtgaagggtccagaacttttcagcaaatggattggtgagtctgagaaggcagtaagatccctttttgcaaaggcaagggctaatgctccgtcaatcatattttttgatgaaattgatagccttgctgtaactcgtgggaaggataatgatggggtttcggtttctgacagggtcatgagtcaacttcttgttgagttggatggtttgcatcaaagagttgatgttactgttattgcagccactaatcgaccagacaagattgaccctgcccttctaagaccaggacgtttcgatcgactgttatatgtgggaccaccagatgagaatgaccgtgaagagatatttcgcatccatttgagcaaaagtccttgcagctctgatgttagcttaaaagaacttgctcatctcacggagggctgtactggtgccgatatatcattgatttgccgggaggcagctgtcatagctcttgaggagagccttgatgc

SEQ ID NO: 24583 - DNA, 569 bp, Gossypium hirsutum
  unsure (1)..(569): unsure at all n locations
  Clone ID: LIB3582-023-P1-K1-E3
gataaaatagaacggctgcggtgcgggtcaggcgctgacggttgaccgctgccgttgaggattggatgcggagcgaacgaactcgtctaaaaaggacgcgactcactcttcttcatctgcccacattgcttgctttggtcccttcccaaacagcgcctaaacctttctcctcgctccctttgttgtttcatttgctaaccctttccctaattcagcccccccgctctctttgttgttttccctttctggagatctcatccgtttctttttgcttgtttcatttgttcttctttgacggatggaagaagactcggaaagaaattctcaagatgtccctttgcccggtactcccggccacatggagggtggtggtttggtcggagatcattctggcctgcctgctttgtgtactctatgtcgaagaagtcttgcacctgaatatgaggcaatgcctgatcttgaaaccgttggtctatgtggngactgcaaatttttattgcttgaggatcttcatacacctnctcaagtctataatagaagacgacaggctcgaagaagcangaatcggc

SEQ ID NO: 24584 - DNA, 528 bp, Gossypium hirsutum
  Clone ID: LIB3582-023-P1-K1-E9
gaccttggggaccaccgtgcgctcgagcagcttcggcggatactacgcctcctaaccactcttaaggtggtatctgccttgctccctcctgtgcgtgatcccacgccgctctcgttgctcccgtttggaagactgaaggttctggaactcagagggtgtgatttgtcgacctcagcagccaagggattgcttgagttgagacatactttggagaaaattatttgtcataattcaaccgatgctttgcgacatgtgtttgccagcagaattgctgaggtaaagggctgtccacagtggaaccgcttgtcctttgtatcgtgtgcatgcaatcgcctgctactaatggacgagtcgttgcaacttcttccctctgttgaaacccttgatttgagtcaaaacaattttgccaaagtttagtgaggtctgctgtcatgttgttaaactagttttgaggaacaatgctctaactacattgcgtgggattgagaatttgaagtcactttaagggctcgatgtctcctacaatat

SEQ ID NO: 24585 - DNA, 549 bp, Gossypium hirsutum
  Clone ID: LIB3582-023-P1-K1-G11
gataaagggtaaaactaagcataggttgtggttagagttgtgtgatttgctcacaacacatgcgacagaggtttcagggcttaatgtggatgcgataatcagaggtggaattagaaaattcacggatgaagttgggagactttggacttcacttgctgattattatattaaaaaaaaatttgttcaaaaaggcaagggttttttttgaggagggattgacaacgtgggtactgtgagggatttcagtgtcatatttgacgcttattcacaatttgaagagagtatggttgccctttaaatggagaacatgtgtttgagtgatgaggaagaagaagaggaagaggaggacgaagaagacatccgtttggacattgctctgtgcaaatcaaaatccaagtttgagaagaagatatttaaggggttttggttgcatgatgataaggatgttgatttgaggttggctcggttagagcatttaatgaatagaaggccggaatttggcttacagtgtccttttacggcagaatccacataatgtggagcaatggc

SEQ ID NO: 24586 - DNA, 324 bp, Gossypium hirsutum
  unsure (1)..(324): unsure at all n locations
  Clone ID: LIB3582-023-P1-K1-H11
cggacgcgtgggaaaaaaaaaatataaatatataaaaaaaaaaataaaagcaagatataaaatacaaggaggggttttactagatgctggtggtaacaagagaagaattacatataatgctataaccaagaacccaattcagtctttaacataaggtgatttggggtgtaccttttaaaggatcaaatttattcttctttgataatcaaatgnntttgttttttttaagataggccaaaatctgatcaatgggctcatggtttcaaagacatagacttgaaaaacccccgccttaacctaattaatgatctggtgtgacaacac

SEQ ID NO: 24587 - DNA, 555 bp, Gossypium hirsutum
  Clone ID: LIB3582-023-P1-K1-H3
gatgtgttatttaaaaaggctgaaccaattccagctaatcctccatccatgaggtggaaatggtttaggggatcggactgagtttaatatatatcttggccataattaagttgattaagatttaaatttagtatcctaaatcaaggttttataacatgtgatatagaactgcttaggtgcttttgatggaacccacatcaagattagggttccaacagtggataaagctagatatcgaacacgaaaaggtgacataacaacacatatgctatgagtttgtaaatataatatgtaatttgtttatgttattcctggttgagaaggttctgttgctgatggacggattctctgaaacgccattagtatgagacatggactaaaagttcttcatggtaaagtggaaagctagaggacttcgagttaatgtgtcaaagttcaaactctcattggtgaattaatcatttaaaaaaaagtgatgatataggttgccattatctagttgatgctggatacacaaattgtgagggatgtcttgtaccttatagaggacaacga

SEQ ID NO: 24588 - DNA, 591 bp, Gossypium hirsutum
  unsure (1)..(591): unsure at all n locations
  Clone ID: LIB3582-023-P1-K1-H5
gtacgcctntgtccaccccttgtcccctccacattttcactaaagaaacataagcattcaacaaccaccaccctgatctgtcttcattaaaacctcactgcaactccaagtactgaagctcttgcaatggctttcagtttcacccttctctctccccccacccttctttctcctcactacaaccaatcctctctaaaaacgcgtcacccccaccaccaccgccgccatcttcttggtgaaccttttcgccggcttccggcgatcggcgtggaaaagttccagcaaattcactgccaagccgcccgtgatagcaaagtccaagaagaagattttagaaagaacgagtcagatttagaagagagtaatggtacccatcgaagaatatggctgttattgggatcactgggaccaatggtaaaacaacgacgtcttatttgataaaaggcatgtatgaagctatgggtcttcgaattgggttgctaggcacggttgcttattatgtatatggngacaataagttggaatcatcatatacgaccccagatgctgttntagttcagaaattgatggctaagatgttgcataatgggt

SEQ ID NO: 24589 - DNA, 406 bp, Gossypium hirsutum
  Clone ID: LIB3582-024-P1-K1-A10
cactttaaaggatacccctctctttcgtcaccaacctcacaccttcccataactgagcatcccccaaagaccaagagaggtgcttttgagagttgaaaaatgatggccataagccaagcttcaagtaaccatgcagatgaagattatatagatatggaggtaagctcatcctccaactatttgtgttattccataagctctccacctcaaagtagagagtttgagttccaaatgtgttcagtttctccagatggagatatttcctctacttatccagctgatgaactcttctacaagggcaagctccttcccctctaactccctcctcgccttcaaatggttcaaaaactacgccaaagttccaacaatgctgccttggactccaaaactcaaccacccattgaac

SEQ ID NO: 24590 - DNA, 394 bp, Gossypium hirsutum
  unsure (1)..(394): unsure at all n locations
  Clone ID: LIB3582-024-P1-K1-A2
gccacgcttcaggcgcactgtgaccacgagcaagagaaaggttgtaaaagtgacagacaaacaagccatagggcagagaggtctagctcagcaagattaatgcacttgatgcatctaggaatgtgaatgtgngtgaacttacttatcgatcatatactgccttcgtagcaaatgcagagattcaagcaaactgatatgaatcttaagtactcacacacacaaatgctaaaagcaagagtgagaaataaccacctcctcatcaagactgagctcttgggcattcatgagatgcttcacataaagggcctctatctttttccgcaactggcgctacttttggctcatcaatgtttaactcttagtcatccgaatctgttaaaaatcctggacctgt

SEQ ID NO: 24591 - DNA, 370 bp, Gossypium hirsutum
  Clone ID: LIB3582-024-P1-K1-A4
gcttactacattcacgaagtgcatctcagttctattgattgagctgtcactcaacttactcttgtctggttagtaagcgctttcagtccggttatatttcagcttaccattatagccttcatttcagttttacataatgacattggtgatttgttatgtgctttctccttttgccttttacttttcatcttgatgttattgcttaggcctgctgctcctgatgtctatttctggtcattgtccctagagttttaggtcatggatcttcaagattccagtcaagtgagagctcaaagtgcgtgctgtatctccgtcaaaagcacgaatatcaatatttattttacttttgatgtgtgcgcttgctcggcac

SEQ ID NO: 24592 - DNA, 461 bp, Gossypium hirsutum
  unsure (1)..(461): unsure at all n locations
  Clone ID: LIB3582-024-P1-K1-A5
cccacgcgtacgcctctctctgcatttctgtacattgcattttagtttttttgaggaaaaaataacacccccatgatccttcaaaccagctttctctttctacggtactaagttggaaaaaaataaaagttagatatgaagggtcgatgttccaagcaagaagcaaaagaaggaatggaaattgatagaattagaaacagtcacaaagatgagcctcctcagctctctggtgcttacattcggagcctggttaaacaactcaccacttccagaagtgccaaagaccctgattacgttaatggccaaaatttgagcaaatttggtgagggttttagtgctacaccacagacacagagccaggtgcaaccacacgcaccacctaaacaacttaagaaacaggttcggaggagatttcatacccgcaggccttaccaacaaaggctgcttaacatggnctgagc

SEQ ID NO: 24593 - DNA, 341 bp, Gossypium hirsutum
  Clone ID: LIB3582-024-P1-K1-A9
cacacgcgttcgccgacgcgtacggatcaattctgcgtactctaggggataacggcaccatcatgagatgcacgcacagactacaagatttactcaccacccacactggatggagatgaccgtggggaccgccatcctgagctgcgataccgccatacttgacgagggtctcacagatcatggccgttctggaaactttctgcttcatgaggatcaaacgataaccttgcttacgctctacgtgccgacattttactgccaactgccctacgaatgctcaccatgaactagcataacactcccatgctacagcgacttgagctcatcgccccaagggggga

SEQ ID NO: 24594 - DNA, 509 bp, Gossypium hirsutum
  Clone ID: LIB3582-024-P1-K1-B12
cccaaagtcaaaacttagaagccgtattcttggtcaagatcacaagttcattggacagaaaaaatgtcccaaagtacagactctattactccatttatccttcgtctccatcacttctcttagcacaacatcagcagcccttacaccgcgtaaaggaccttctctatctagtattgctggtgggcatgcccacattcttctattgccatcccgaaagccgcttcgtcagtttccctctagcacacaattgtgtaccatggttaacgtatcttcttcatcacagatatcctgcaaacccatttgctatgccatagtaatgagctgcatacactccatcgcctggaccataaccgagtctgccatattctagcactgaaaggtacatgctgccatcaccaaaccttatgtattccatgctatgactcctgaacatgatattctcaaatgacgattgcacgaagcgttacaatctatacatatagaatcattctccggtggactacattcat

SEQ ID NO: 24595 - DNA, 549 bp, Gossypium hirsutum
  Clone ID: LIB3582-024-P1-K1-B2
actgtttctatgtaaatgacatccgggtagccaatgatgaattacacacaaagtccttatacacaaaaccggttttctgctattatgacttgatatctgttaccgattttctggcttgatgggagttgtctatgatgtgatccctagtgctctactctgggtttatcaagttttttttcctttaatgattctcaggtactataccagctaaacttcttctgcagctcacgtcagcatttcgagaacggggattatgtgataggagtggtaaatttttcttcaaggatcatctacataaaagcaatgtacctgtcctggctattgcaggagatcaagatctaatttgcccacctgaagctgtagaagaaaccgtgaagcttctttcgcggaacttggtcacctataaaatattcggagaacatcaaggtccacattatgctcattacgatcttgtgggaggacgactggtaagcattgctaacagggaaatgtacactgaaacgccctttgatcattattcttcttctgtttctaaaaatggtcaaacac

SEQ ID NO: 24596 - DNA, 553 bp, Gossypium hirsutum
  Clone ID: LIB3582-024-P1-K1-C11
ctttctttttcgtttgaatttctctgtttctgatttccattggtaaaactagcaattgcaggttgttgatttttttcttaatcgtaaaatcgaaaaaaaagaaatcgcagaagatttgagatagtgttttgaaaagaaatccctaaatgtacaacggaatcggactgaccacccctagggggtcaggcaccaatggttacattcagagcaacaaattctttgtaaagccgaagacgaattgggtaacccattccaccaagcctttcgaggcagatcaaggcaccgcaggtctcaccaccaggaaacctgacaaggaaatcctcgagcatgatcgcaagcgtcagattgagctcaagctcgtgattttggaggataaactcgccgaacaaggttacactgaatctgagatcgctgataagcttgtcgaagctagggaggctctcgaagatgctcaacatgagaaagacgaacaagaaggagaagttataccaatccctactcgccagcaaaaggttttggatacacagacccaccaaattgctgcaaggaagga

SEQ ID NO: 24597 - DNA, 504 bp, Gossypium hirsutum
  Clone ID: LIB3582-024-P1-K1-C2
gctgcttaggctttgctgtgtttgcttgaatttcagtggtctgcgaggatgctgctttggcattgcaaatatgatcctggttaagcgaatgagagaaacactgtattcgtctcttcttcttcaggaaatatccttttttgatggtgaaacagttggtgatttaacaagtaggcttggttcagattgtcaacaagtgtcccgtgtgattgggaatgatcttaatcttattatgcggaatgttcttcaagggacaggtgccttgatctacttgctgattttgtcatggccacttggtgtatgtacgttggtgatatgctctagtctagcagcaattatgaccgtctatggcatgtaccagaaaaagacggcaaaattgatccaagaatatgctgcttctgccaatgaggtagctcaagagacattttccttaatgagaactgttcgcgtttatggaacaaagaagcaagatctgaaaggtgcaaccattggctggataaactggct

SEQ ID NO: 24598 - DNA, 240 bp, Gossypium hirsutum
  Clone ID: LIB3582-024-P1-K1-C3
ggcgcacacgctttggcgtgcttgcagcgattgcaggcttgtgctatgacacggctgctgcgctgagaatgagctcgtgactaaccatcaccaggaaacaccgtgttggcatcctcagcaacacgaaacacgccaccaagacggaggcccactccagaacttgactgctctgcaggctacacaccggtatcagtcagtacgcgtgtgaaactgagtgatgggaccaatatgaggatcaat

SEQ ID NO: 24599 - DNA, 410 bp, Gossypium hirsutum
  Clone ID: LIB3582-024-P1-K1-C5
cccacgcgtacgtccacgcgttcgtccacgcgtccgcccacgcgtgcgtccacgcgttcgcccacgcgtgcgatcacttccagtatgcaaggaaaagggtcttatggtctctgctggaactataaatagggatggccctttaagaataggagcaacttccacaggctccaactgaactattgctaagatcgtacgcatggttgaagatgctcaaggacaagaagcacctgtacagaggcttgcagatgctatagccgggccatttgtatacagtataatgactctgtcagctgcaacgtttgctttctggtattatgctgagtcgcacatatctccagatgttttgctcaatgatattgctcgccctgatggagatccattgcttttgagtttgaaacttgcaatggatg

SEQ ID NO: 24600 - DNA, 513 bp, Gossypium hirsutum
  Clone ID: LIB3582-024-P1-K1-C7
cccacgcgtccgcccacgcgtccgcccacgcgtccgcccacgcgtccgcccacgcgtccgaacgacaataaaacagcaacccagccatatgagttgtcttcttctagattattctgtagaaaatatctgcatcccaaacgaccagctcttagagaagacaaacagacagagaaatggattcaacatcttctcatactccacataaccacttgatgattctgtttcggtgtaggcttcatcttcatccccgatcgactcccgattcagttagatcttgaccaacattttcatgaacaagggagtcgccctcaatttcaacatatttcatccccaaatctctacccacagtaaccgcctgcagacatgtaatggcttcagctgcgaatccggaaggaatgttgtcgtggaccatttttttaggccaaaacatctcttttaaaattcctaactatgattcccgagcatgatctgtttttactgttatcaaaagcagcatcaaagttcattttaaag

SEQ ID NO: 24601 - DNA, 496 bp, Gossypium hirsutum
  Clone ID: LIB3582-024-P1-K1-C9
cccacgcgtccggtttctgcatgtcatccagatataagaaaaaatgactttgctacttgaaatttaagctatttaggacactgaactttttgccttgtctctcgtagcttaagtaagtttgattttctagtactgcccttaaaatggcgactgctacatttccttattttacaccttcggatagtagatcaatgggggtacttaatgttctaggagggagagtgttaatggagaatcctttagggagatttagctgccttaaaatatacgagggaaaaagtgggttttctagtgccagccaaaagtctaccatgccaagttttagatgttctgccaaccctcgcagtgtcagtcactaccaaaataaagatccttttctgaatctgcatgctgaagtttcaatgcttagaggtgaagggaacaatacagtaaccaacccaagaaaggatagcactagtggaagtgttattgaaagcgcaggaaacatgtctggttc

SEQ ID NO: 24602 - DNA, 342 bp, Gossypium hirsutum
  unsure (1)..(342): unsure at all n locations
  Clone ID: LIB3582-024-P1-K1-D3
ttctttgcttacctaaaccctaaatcaccttactgatccaatgacaatcccaagcacattgattctaatcggacagggaacccatcactcttncttacgaaaactaaatcaaaaaaatggggcgccctttcctggggtcccaagcttacccccccttgattgccacgaataccctatgctataatgcccataactcaaattaatggccctttactttacagccaaccgacggggaaaactctgacttaaccaaactaattttcttctaaggctatccccttttgacaagatggcgtaaaagaaaaaaggcccacaccgaccacccttcaccaaaacattccc

SEQ ID NO: 24603 - DNA, 535 bp, Gossypium hirsutum
  Clone ID: LIB3582-024-P1-K1-D8
gctcgatttacagcctctgagattgatggcgttttggattttgaagagaaggggaagtctttgtctattgatgaagcttcttattttaaggaagctattgtggcgttgagattggcaaaggaggtgatcaagatgcagcaaaagcggagagctaatgccattgctgatttgaataggagtggacggttttcaaggtcgctagcaaattcatgtactgattggccttgtctgatgcttgagttgctgactcaagctgctgagattggccattttcagccaaagttggtcataaataatgtcgaaattcttcgtaatgcaatgttgatggatgactcgaaggtgtgtggatcaatgtatcatgacagtttgatctggagaataattgctttaggagcaaacgagcgatgcctgcctgttatacttgtgacatcagatagctactattcatatcaagctctcatggattttgggtttccagatatatgttgctctcgtgagacctttggtttgactcctcaagaagctaaaatgcaca

SEQ ID NO: 24604 - DNA, 525 bp, Gossypium hirsutum
  unsure (1)..(525): unsure at all n locations
  Clone ID: LIB3582-024-P1-K1-D9
aattctgggaaatcgagtgaatgtgctgagtaagtcctaattttgagtctctaatatcaaacaaatttggcttttcggttcgtttttgtttccttggcttgcaatatctgatactcaatgtggtgttatagcttatactgctaagttcctgaatttcttctcttcttgcaagaggttccccaaataagtgttattcgataattatgaaggccagctaaagtatctattaatatcaaaacatggtatataagtcgaagtgtcatttactacgaaaatgatcatagatcttaatctttggctcatgcttactgctagatcactattctgcacgcgtttactagtttacaaattangtgttctttctatatctctccgnatggttattaagttaattgttactccatatgagggtttgccaaaacttaacattcatttattttccgatgaggttatcatatatggctgattaaaaacatttgttgacatctgggaacctacagtctgactggggtggatcatggatat

SEQ ID NO: 24605 - DNA, 503 bp, Gossypium hirsutum
  Clone ID: LIB3582-024-P1-K1-E10
cccacgcgtgcgcccacgcgtccgctcacgcgtccgaacaatgagctcgttcgccgtgaaatgattgctgatactctttaaattcactctcctttatctgcagatccaaaattttgcccctcttttacgaatccgccaacagcaaagccttccttctcatggacggttgcagtggattaaactgctccgcgccgcgccggatcgctgctcgcctgttctctgcacttaagcgtcggaaggtgaaagggagggtgaatgttggccataggaaggaagatgatgatgacgtggcaccacctaatcacgtaacccgtcgtcctgattcgtcatcagaatgaagcggaagggaagctaattacaacgtggttatagggtgtcttttgcttggactggttgctgtgactgaaaaagaactttaaatgatggcagaactgagaatgcaaatggcggctgttcttgaaaatgttaaagatgagctccgaaacaaagatttattcataaca

SEQ ID NO: 24606 - DNA, 248 bp, Gossypium hirsutum
  Clone ID: LIB3582-024-P1-K1-E12
cttgaatcccacccaaagtgacttagttacttcaatttcgtactttttcaataaatctattgtgggaaacattaaatacaacacagtctgtcttctttcgttttggaaggattttattatgtcctaaggattagtgttcaaacatcatatcagttggatctagggctgttatatttgaggtagagaagagctattggatgtatgtcagtactgcaatattatattttattcaggttaataccttacct

SEQ ID NO: 24607 - DNA, 159 bp, Gossypium hirsutum
  Clone ID: LIB3582-024-P1-K1-E2
cgtcaataggactcactgcgtggatgcgatggaagcagcagatccaatgcactgcacaagagaaaacttcgagtgtggacgctaaggacgcttcacgaggcttgctttaggaacacaacgacatgcacaccaatcccgcgactataaacagtgggattg

SEQ ID NO: 24608 - DNA, 450 bp, Gossypium hirsutum
  Clone ID: LIB3582-024-P1-K1-E4
atggcgctcatggtgaggcacaaggcagttagcgtagctctgctctagagtctatgtctttcctccgggttgttatgctctgccacaaacttccctgtcactagaagcgcgagatgagtcctcgacagatggactactactgccagaggcgatgccagtcgttgacacatgggcaaacggagcaagcacaagtgggaagacaggcgtgaaaggatgctgatggaggagcaggagcgtgacagcgacgatcctcaggaggagataccaggatggccgtcaacactgtcaacaggaagaaagatggctgcgtacacagtgcgaacagagctggcaggaacaatacgagagacaacaccaggagcctccttgcaagcgattcagggagtgtcaacaccgttgtcaacggcacgagcaagggcccgaacggaagcaacaatgtgtgaaggaatg

SEQ ID NO: 24609 - DNA, 386 bp, Gossypium hirsutum
  Clone ID: LIB3582-024-P1-K1-E6
ccaggctcctcttttgaaaaaaaaaacaattcccaagaaaggcttctctgcttgaaaagccaggaaagattagaattagaaggaacggccgattgcgagattttcccaattcgattcctaaagggctaaactctcttttattagcatgtgttacttgtacgtatgtaatgcatcacaagaaatctgaactccatatcggtaaagaaagcagcggcgtctcttgcgatttcaatcctaaacctccaccgttcatcatcaactcccacttcatcacattcagaagcattctaattaccatcatcgtttacaacagcaatccgatgcaacagcggcggaaactgtcaccggcaccacaccgatttccgctttccctcatataattaccc

SEQ ID NO: 24610 - DNA, 331 bp, Gossypium hirsutum
  Clone ID: LIB3582-024-P1-K1-E7
cctaggcttgcgtgtggagatgaggaaaatcatgggggccagtgttctcgctcttatttgctttgctgtccgtttcagctgggtcggcatttgcgcaggatgttgcacaccaaggtcttgatcggaacttctacatggattcttgcagctcatgctggacacattgtcaaggaccaagtgaagctactggacaagctactcaaaaacactcgcttttactgtgtgagaaacattttgcatgactgtgctgaccactcatgtgatgcttcactgcatgtggactccacagtgaggtgctcgtctgagaaggcgacagacaggggctctggcc

SEQ ID NO: 24611 - DNA, 524 bp, Gossypium hirsutum
  Clone ID: LIB3582-024-P1-K1-F8
cccacgcgtccgaaaagagtcgggatggcttattgcttttatatgcgtaaaatccttcaccagtccatgtattatcttcagtagaatgaatggcttataactctgtgatgtcagattggtatttacaaacagaacatatatcgatcatagtctaattagaaaatcaatatgaatagtaggttctgaattgcatgggatgtgcaatctttgctactcccttgtacaaatactagaatcttgtatagagtgtgcagattaatgtccatcttctattcttttcctctctttatttcttcttttaccccagaaccaaatagcaaagagcatactttcaacctataactctccttgtgaggagatggctgcctttaattttatattgatttggcaatttcatgcggagaaacaaaatatcagattattgctgcttagttagttctaatggcaatctcaacttttccatgaatatggctgagtttaaaatttaggtttggggcttacatgttaatggcgtattttcattt

SEQ ID NO: 24612 - DNA, 547 bp, Gossypium hirsutum
  Clone ID: LIB3582-024-P1-K1-F9
cccacgcgtccgcccacgcgtccgattttcgcaagctacaaaccaaatacccatttgctagggtttcggcgcagcctaaactctccatccgcctctgccattcaaccaccatttcaccattataatcggcgaatgatgcggaggcactctttatttccaccaaagcagagactcaaggcttattttcacccgaaaatccccatcccaaactttgattttgacggaggagacaaggatctcaacggtgcatccacgaaagttctgctgatgtgggagtgtacggagaagaaggctgtgacgtggagaggccgtgcgtgggaaaccactcgtgaaagcccgattccctggctagccgcggtgctagcatgttccagaaacctctagagtttctggtactcttaaattgttgggcccatttgggccttttagcagtggcctgttgtaacttgggctagggattaagttggggtgttttgggatctaagccaataagtttatgttttaatttgggttttaatttgggtctccggtaatgttttggattttg

SEQ ID NO: 24613 - DNA, 382 bp, Gossypium hirsutum
  Clone ID: LIB3582-024-P1-K1-G2
gtgaagccaaaagggactcttttgacctatgtaattctccttgccacagatgtctatgggcggaattccatcattatgaaaaaggatcggtacgctgtatgacggtctgatcatcttctcttcaatacctccagatctaccactcgttgcttttacgtcaatgcaaactttcggtacatttcgactgttggggggatgcttaattgattgctatttctcgctcacacgcgcgggcggtggacttgtaggatcaaagatcgtaatcttgaaagacaatgtaaggatagagaatggactgaatatggctgcaagaccattactatgacagagttggtagggataacaggttgtttggcagaaacagcagcaagaggctgcatga

SEQ ID NO: 24614 - DNA, 355 bp, Gossypium hirsutum
  Clone ID: LIB3582-024-P1-K1-G6
tttattcgtagcagcccgtaagcctgtttattacaataccaagccacacccatgttgatggccgtcattctcaggctacatgcgaacactatgtggccttgaggtataccctttagtctgcgatttctgcgacacaaatgagaaccgactgcctattatccaggtaaggattcggctcattattcttttattcatatgtgaagaacgaaatataaaatcacataggtatatcgagagagaaaagagcgtaatgaacctgggagatgcaaaagcagcagatcacctggatctatacagttgctccctatttcttctgaatgtatgtgtattctatgtgaacatagatgtgcgtaaa

SEQ ID NO: 24615 - DNA, 558 bp, Gossypium hirsutum
  Clone ID: LIB3582-024-P1-K1-G9
cccacgcgtccgcccacgcgtccgatttaaagcatcttaaaaaaacccttcttccaaaatccctttgaccctctcccttctctcgaccaacttacaagcaacagtggagtcaagtgcaccccgtctccgtcacggcttcaaacggatccccagggatccgtacgcctctgaactggagaagtagccaccgactaggtcgacgccggtcaacaggtgagaaagcctttcttttgtatttgttatattcgtataacggatcaaaaaaaaaaagaaatgaaagaggaaaatcagagagaaaaaaagatgaaccaccttgaaaaaatcagagagaaaaaaagaatgaaccaccttgaaatctttctttctttttctattcgattgctttgtatgcgtttgtgtgcgtaacaagcctctgtccaaacttacgaacgatgaaatcccttgggtttatagccgaagggattaaaatggaaaaaataaataaaaatacaatattctttggtttttggttttttggtttggtgggcgttcgtcctttttgcaagtacaggtgtgcgt

SEQ ID NO: 24616 - DNA, 409 bp, Gossypium hirsutum
  Clone ID: LIB3582-024-P1-K1-H11
cgtccatccacccgtcagggaggcatatttccaccttattgcctataaattgtgagggcttgtcaaaggcagtgaaaaagggagacactctttttataggtcactccctatttactgggagtgaaaccccacctgtttggctgtaggttatagaggaacacggaaaaaatgtgtttagtgtgttaaaaaccacagagccattaactgtggcgtggtaaacttggcatgctgctaaaataattttggagtggcctcccctctttgttaaaaacaaggaggttataatctcttagggagtaaaaaacaaaatcaacttcttttttttttcatccacccaacagccaaaaaatgttcgtcatgctcctgagaaccttcttaagcagggtgacctctacaagacacaaatttt

SEQ ID NO: 24617 - DNA, 427 bp, Gossypium hirsutum
  Clone ID: LIB3582-024-P1-K1-H2
cggacgcgtgggcggcgcgtgggtacttctctctgtattactagatgaagaacttggttcctagctctttctttgtcactttgctaacaatattttccatgtcgtttgaattccattgatcttgaactccatttcttttgttttcttccttgttccctctattctttatgtaaaatatgaaccccgcgatatttctgccatatctcctgtagtagtgcttgtatctccaattacaaggcgtcttttttagcagacatgaccctatttcttttctttttttctttacctgttgtactgacaacacaaggtttctttttgtgatattgttggacgattccctcatatatctttctggacggatgtgaactactattgcccgctgatattagtgtattgcctctgggtatcatctgacccagagcactat

SEQ ID NO: 24618 - DNA, 177 bp, Gossypium hirsutum
  unsure (1)..(177): unsure at all n locations
  Clone ID: LIB3582-024-P1-K1-H6
cccacgcgtccgtccacgcgtccgaccacgcgtccgagtttagatcgtgagcgtagaatttttcttttattggataaattttntatatgcgtatttgtattcatttgaagaaaaacgacccttttcaatacatacggtataggcttatatagccaaaatgtaaaaccatgttcacct

SEQ ID NO: 24619 - DNA, 529 bp, Gossypium hirsutum
  Clone ID: LIB3582-024-P1-K1-H9
cccacgcgtccgctttgaagcaatggcaaatcctaggcttcgtgggtggagaaagtgggcgaagaaggattgggcgatcgcagccgtgggattcactatcatcctcttcgctctcactctcctctttgattctcgaaaccccacgtcctcctcctcctcctctaccttcaatctcccctccaaccaccatctcattcctttgactttgcttcacagagccaaagctacaggcttcgtttagatggaagtttacctggataccattttcagaagggctttggttctggctctaacaatcggcttctccacattgagggtggaggttggcgtaattcaatagaaacatgcgagattcgaaaaagaacagctttgggttcctctaagtacatggatcccctaattccattcgatgggattttaagccatcaatcttcgcataatcctgatttttacaattggaacattgttacgatgcgttactcggatggtgcatctttagctggccaccctgaaagtgagttcaagaatg

SEQ ID NO: 24620 - DNA, 428 bp, Gossypium hirsutum
  Clone ID: LIB3582-026-P1-K1-B10
gatgatagacgtgcatgtcacgctagtaggacgagctgcgtgcgcgtttgagatcgtatgaacggcatcgacagtgactggtgatggaatagctataaaactacgatagtttcacacctgatcacttcattagactgaatacacatgatgtgcttgatcaacttggaagagaaactctcttcattgaaacgcataaagaaatatgtttgtactgaaaccaaggcgagcgtgggagcgctaagcatagcgaaagcatgcattcatttatatgataaaccactgcgtatgacaagcaggggaaatgaaagtcatgctactgattatgcctatagacaacggagaatggtgatatcattcgaatcacaaaaattgatatctgtagacatagaaggttaagcaacataggattgatcacatgctcggatgca

SEQ ID NO: 24621 - DNA, 379 bp, Gossypium hirsutum
  Clone ID: LIB3582-026-P1-K1-B11
cccctcatgagtgattaaagtgtagagaattcggattaaatctcgaaatcgaagaattcaatttcaaattcgagatctcgtccatggcttgccctttttttttccactccttttcaaccctacgtgtatcagagtccgcaagatgctgtgaccccatttcaaatattggggggtgaagctcaaatagttcagataatgttgaaaccacaagaaaaggttattgcaaaacctggttccatgtgcttcatgtctgggtccattgagatggaaaatacttatgtccctgaaaatgaagtaggcatgtggcaatggctctttggcaagagcataactagtattgctcttcgcaataatggtccaaatgatggatttcttggca

SEQ ID NO: 24622 - DNA, 329 bp, Gossypium hirsutum
  Clone ID: LIB3582-026-P1-K1-B3
cgcgacccacgcgtgcgaccgcgcatggatgcgttgtgcatgggaagccgtgcggtagtactgcatgagtagggtaaatactgctggaaaaggaagtagagggaattatatgtatagggctggaaagcctttggacgattgagactcatgtcccacatgcatggctgatatatttaggcgcatggggaaggcaggtcgtgttgctttatgtgcaataccaaggcaccttcctttacaaagcgaggtgagcaagcatggactagatgacaccccatgacctgctaatgaagtgtcctcatcggtgctggttgcatcctactctcacatga

SEQ ID NO: 24623 - DNA, 364 bp, Gossypium hirsutum
  unsure (1)..(364): unsure at all n locations
  Clone ID: LIB3582-026-P1-K1-B5
cccacgcgtncgttttctgaatgccgattcagtttcaataggggtaaggcctgagagagaatgaacaagggtctactgaagaggctctctacacccttcatctttacaccttggcgcgcatttcaatctggctctcttggtctttctagttccgattggtgtgaagcatactcaagaaccgcaccaatcaggtaaatctcttccttcttcctaaaacttatggtggctatgatatgggctagctgggtagcccatctcggagtaaagaggaacgaaatattctgaaaaccggcttttttgctttggatgttactgatataagcattaacctgtgatctatctctggattgtgtcatgcatttgt

SEQ ID NO: 24624 - DNA, 399 bp, Gossypium hirsutum
  Clone ID: LIB3582-026-P1-K1-B6
ctcactcgttcgttttccgaatgcaaggggagaaggcagaagaaaaaagacagagggagaaagagcgaagccatactggagcagctctatgcacagaacatatatacgcatccacacccattttagcttggacctcttggagctcccagtggctataacgatgaagcatactaacgaaccggaccaagcaggcaaatatctaaccacgccctaaaacttatacaggctatcaaaaggactcactaacctgcgcaaaccttgagaaactaggaacaaaccatgcagactactcacgtgactgcactgtacaagactgatataagcattaaccagtgaacaatctcaggcaagcgtcaagcattccaggaacagtgttcatgacactgcttgctggagcat

SEQ ID NO: 24625 - DNA, 487 bp, Gossypium hirsutum
  Clone ID: LIB3582-026-P1-K1-B9
cattctttacgtggatctaccttcagttgagttagttgcatcgagtagaagtgaaagaagtttacccggaatggttttaaatacgaaaaagtcgattgtatacacggattattttggaaaccggcacaggtactcggcttctatcctttcgcagggataggtctttctttggtaacttttaaaccgccctttttttgcagagttcccggtgggcaggatatactgcactttgcaaacgatccgggttagtctcttagtacatatccatctaggtggatcaaggggtgtgcgaagataatttggatacttttcttggatataacgaacgaagaagggtcacatcatccgctaagaagaaaagaaaacctttggacacctcacttcaccagactcctgaaggttcactggtggatatcatgcggaatgctgatgatcttctttcatggtgcgatattgatcttcccgaggttgaaaggaacgataaata

SEQ ID NO: 24626 - DNA, 370 bp, Gossypium hirsutum
  unsure (1)..(370): unsure at all n locations
  Clone ID: LIB3582-026-P1-K1-C1
ccaccggggcaccagaagcaccagacacggagcaccaacccgcggcagcaaacgagccaaagccggcggaaaagccggcgaaggacaagagacccagagcnccaaaggagaaaaagccnaagcaacccaaacccgcagcacagccgccacaaaggcagacgaccaaggaggcgccccnggctacgaaagagaagaggggaccaaaggccgacgcaaaagcgaagaacacggaagagaagcacaacgcgcggcgaacagcgacaaccaggaaaaacaaaagacgacaaccnaaaaacacagcagccaaacgcacgccgagaaagaccaaggccgataacaagcgcaacgaagccgacaaaaaagagagagc

SEQ ID NO: 24627 - DNA, 318 bp, Gossypium hirsutum
  Clone ID: LIB3582-026-P1-K1-C10
cccacgcgtccgcccacgcgtgcgctcacacattcctccagagtacagacgggaggacaaagagtcgcagcctgttaatctctatattttaaaatgtaaaaagtatggaggaatttattggcaatatcttcaagaggcaattatgacttggcttgcgactgggcatctacataatctgttgtaaaaatgctgtagcggcacattctgatgtatcccttatcgttgccctataatggcattcatctattacaaccattcatcaaataccagctcattttttataccccatccagttgatattatcattctattacctct

SEQ ID NO: 24628 - DNA, 427 bp, Gossypium hirsutum
  Clone ID: LIB3582-026-P1-K1-C4
cccacgcgtccgcccacgcgtccgcccacgcgtccgcccacgcgtgcgtctacgcgtacgccaagttgcaaaagcaatcaagtttaccctgagagttcatatggccatgtggggacttggttcacacccaagaagagcttaacgagccattgatagactagggtgggttcatcaaaggagactaagaagctactgcacatgctgtcgaccttgttaagactgcctgttctaaacatggattcttgcaagttacagaccatggtgttgattcaaatattatgcaagctgcttaccaagagattgaggctgagcttaagttacccctataacaagaggctcggactccaaagaaagcgtggcgggatatcaggctatactgctgaccatgctgaccggttgttcgctaagatggcatggaaggaaacat

SEQ ID NO: 24629 - DNA, 444 bp, Gossypium hirsutum
  Clone ID: LIB3582-026-P1-K1-C5
gcgaaaaagccttaaaacacgcgttcaaaactctgttaacctatgcctctttgcacgactcttgggcttcactggcgcataatgtgcctccaccaccgccataacccaaagccctgacttggttccgactccatgccagagagactccgacgacagaaccgcaggcgtatttagataaactctcctctatttctcatttcatgatgctaaaaaaaaccacacgcaaacttcaaagaagaaaacccattcaaaaaagaaaagaaaaatgggactagaaatcacctttcaaaaataatttcagcttgattcttgtgtataaggtatttcagagcgcgtaatatgcgtgtcaccttacaaacgatgaaatctcttggctttatagctgaagagatagaaatgattaaaaagaaatgacatagatgcaatatttgttctttggtttgc

SEQ ID NO: 24630 - DNA, 355 bp, Gossypium hirsutum
  Clone ID: LIB3582-026-P1-K1-D12
cactgtgtacaccgctactgccggcgctctttcatgtcatatcctatcgaaagttgcctgtcgcggcctcgcgttttttttttggcctgataagctaatcttcttccaagcacaggtagctcaaagaagagagagtttactgacttatatgctctttctaaggtttacaccgactctactaaatacattcatcaacgttgcttagactatcgtcgacatcgcttaccgcattttcttccttgcaactatgatcaaacttacccctgctgcttacattactgacaaggctggaatagctctcaacgagtcacaatccctatgggacctttatgactacaagtcaatcgctactctc

SEQ ID NO: 24631 - DNA, 482 bp, Gossypium hirsutum
  Clone ID: LIB3582-026-P1-K1-E10
ctctgaggggacataaactgagagcgataaaaacggctgataacaatttaacaaatcaaacatctgcggctgaaatggtagaatctaaccaagatcttttaacacagatgctgtcgcattaccctgataaatctcttctcaagtacagatgtgtctacaaaagatggctttctctcatttatgatcctcaatttgctgctgaaatcagccatttgaacgtcaaccttggtccctctggtctctacttctatggcagcccttttggcttccttaactttgacacaaatcacaacatgcttaaggaaccatctctgccattactcaatgttacaggcatcgaaattttgcagtcatgcaatggcttgctgttgcttctttgcagacatagttcagacaatgattctggatttacttactgtgttcgtaataccaccaccaaaaactctgacactgttcctttacctaatgcaactgcacacagg

SEQ ID NO: 24632 - DNA, 439 bp, Gossypium hirsutum
  Clone ID: LIB3582-026-P1-K1-E11
atctgatattgcacaatttattgtggatgagtttgagaatcacaagttgcgactattcaagatggaggatgtgagcatgggaatgtgggtggaaaaattcaatagttcaaaagcagtggagtaccaacacagcttgaagttttgccagttcggatgcatcgaggattattacactgcgcattaccaatctccgagacaaatgttatgcatgtgggataaattacaaaaacaaggaaagccccaatgctgcaacatgagatgacccattaaacagaagaaaatcaatagacaattttcacttacaatgtgggtaaatttgagaaaggaaaacagagacacaaattttgcggtcatggtaaaaatatctgtatatatatggggagaattgcttaccccacttttaaaaagaaatcaattaatcagtttggccgctttgact

SEQ ID NO: 24633 - DNA, 483 bp, Gossypium hirsutum
  Clone ID: LIB3582-026-P1-K1-E4
cagagaagacgaagaaggaggtcggcggattctgtttactggagaatcaatatttaagggtttgctcgtggcttgtctttgtctacatcagtgtgaaggcactgtaatgctttcatatcttttatatgaggaatgcgcacattgctttcttgacggcgatggacgaattttagggttttccgaactgaaatagtcttctctgtgcatagggatgtctgattgtagctttctaaaaagacatcattcataatctggtgcggcacattaggcaagcatatgagtctcttcaggtgcgagattgacgaatttcacatttaagcataatctggtttggcacatcattagcacttttaagcataatctgattttggtggcccgtcaactgctttccctgacatacaacattaagatgctatgatacatacactgtgaaactctctgcatgcaggatcgactcgaaaactgcgaatctaagctcagaaa

SEQ ID NO: 24634 - DNA, 458 bp, Gossypium hirsutum
  Clone ID: LIB3582-026-P1-K1-E6
ggaatccctccctgccaagactcgtaaagtctgatcaccatcgaagacaatccaaccatctctcatctatgggggaccactgcagacagatctccggcggaccctatcaggaatactccctctggcactttagcattcaccacctgtgctagtacagtcctatatccaggactagttctccatcaccgctcgaggtacactacgaggaacggagcacaacacgtgggtgactgtgctagctcaacctctgggagcactcatcaggacactgaggatgaccagacgatcgacgccgtggtatcagaagaatagcccaagtcagatggcgctggtgctagacaccgtcctggacttgcaccagttcctgatgtcccacacataaactcctacatgcccagcctacatgatgcacgtgcggatcaccaacgtgttctaaagaggtgcagatgaactcactc

SEQ ID NO: 24635 - DNA, 136 bp, Gossypium hirsutum
  unsure (1)..(136): unsure at all n locations
  Clone ID: LIB3582-026-P1-K1-F11
gcaagtganaatacgggcacggggggatcaaacgcaagtaaacacagccgaactctaacgacggaggggttctctggaggcggcagcgtgtcgtcatgacctggaactcaaggagctacggattctatagaaccac

SEQ ID NO: 24636 - DNA, 148 bp, Gossypium hirsutum
  Clone ID: LIB3582-026-P1-K1-F12
ggcttttaaggtttcatcttttgttgctttcaataaatagtcgaaagaacacctatctaatgcttgtagtcaagttttttcatgatttcccagtgaagacataaggtggctgaatgatttaatgaaggtttgccttctctggcaattc

SEQ ID NO: 24637 - DNA, 194 bp, Gossypium hirsutum
  unsure (1)..(194): unsure at all n locations
  Clone ID: LIB3582-026-P1-K1-F2
gacccacgcgggcgcggcngcagcnncnaagaaggcaaagagacaannangggaacagnangaggacgacaagggggagagngaagagaaaagaggaaaaagacagaaagggcaacaccagaggggcaccccacaacccngnggcacgggganangggancngggacncggacagcncagaggaanaaacaagc

SEQ ID NO: 24638 - DNA, 491 bp, Gossypium hirsutum
  Clone ID: LIB3582-026-P1-K1-F7
caattaagaggctaagattagatgcttctctgtattttttttaaggcactttagaacgtgcagtaaaatagttatatgatttaatgcatgcattttgtgtgtagcttcaaattcatgggtaaaatttattattctctgatcctccttgtaatgatcaaagtattagaaatcttgaatgaacatttacttggcacagctaagattattattctgccatcctagcaaactgttaaacctttagctgaggctaaaattttcttaagaatattttgaatggcaaagctatttatctaattagcttataaatggttttttatatttcccttcattcttcaaccccttttgctgttctaatcacagctttgtgggtatactcttcttttggcaagtattggatattggtttttaaatggatttgagaattcaatgtgtttacttcctcgatttcagtgagttcagatggccttctgctgcaaagttcaactgtagcg

SEQ ID NO: 24639 - DNA, 477 bp, Gossypium hirsutum
  unsure (1)..(477): unsure at all n locations
  Clone ID: LIB3582-026-P1-K1-G2
cccacgcgnccgagccgggggacgncccggaaaggaaccacacatcngangancagccananccncgcggagaaancngngnnaggggnccaacggggncccaagganancacaaggacgaagngcagacgagagaggnacnngangaagacggacggcnncanaccggagacacagggctanggcnatcnggagggcggctaaagaaaatcgataggaagaaaaacatttttaagctggctcagggagagtacatagctccagaaaaaatcgaaaatgtatatgctaaatgcaaatttattgcacagtgttttatttacggtgacagcctgaattcttcattagtagctattgtctcagtggaccacgatgttttgaaagcatgggctgcgtctgaaggcattaagtacaaagatttangacaactatgcaatgacccaagagcaagggctgctgtcctggctgatatggatgctc

SEQ ID NO: 24640 - DNA, 478 bp, Gossypium hirsutum
  Clone ID: LIB3582-026-P1-K1-G3
ggtttgcctgcgagtctttctttgaatttatgatggagagacggggaagatgaaaacaatagatgtgatataccgaaaaaaaaaaaggtagaggaggcctgttgccgagaccccgtcctcttgcagaggaggcaaagcaccgtaaccataatgaaagttcagatcaagtgccagaagaaatggtcgactctgaatccggattggtttgaatcgagaatgaaagattttctctaaactagaaaaccgtcaagaaaggatccatcaacatgatggacactcgaaaccttatctatctggtttgtgtaaggagggaaccgatttgaccttttcagtaaagggggaaacaaataaagtaggagacgaaagactaacatagcgcttcacgcccagaggaagatgctttcttttagcctacgcctacgcctttccccttttaataataataaggtaagcatccagctctcgatccagagctact

SEQ ID NO: 24641 - DNA, 293 bp, Gossypium hirsutum
  Clone ID: LIB3582-026-P1-K1-H11
cgaatcaatcagattactcgttgagtgcactgccaaatgaattagttctgaagatagctggttcgttgacactgctccatctcatggatcacctatggaggcatactaccctggctattgagttgaacgataatgataccttcttgagtactcggatgtctaggagccagatatttcatcatggcataggctgtctaaactgagtccagagacatgcatgagcgagaatgtccatggaagtcacttgtgcaaagatagatggtctgattcatatgaagcgactaaagacgcta

SEQ ID NO: 24642 - DNA, 442 bp, Gossypium hirsutum
  Clone ID: LIB3582-026-P1-K1-H3
gagacacatggttcgtcttcacatcgtcaaagagataatatctgcgaaggacgccatggatttgaccgatgagttgatgaatgctacacgtatgactatatcccttctagcaccatgctcccttccccaagatcgcaatatgaactcccttatgtacactgccagaaccttattcaaagaaaagccgaccggaatagtagagcttatgaccggaacaattacctaatcaggcgagcatccggaatatgaatatgcaaggtgaggagctcgataaggactatgagcaaggagaaagcgacgtctgcaagaagttgcctatgtgtgtgagataaatgggacacctgaatgggattacatacttggagatgcctctaacatcgatgactgacagcagaaatggatgccactgtgcaccactcacggacaataggagcagttggtc

SEQ ID NO: 24643 - DNA, 352 bp, Gossypium hirsutum
  Clone ID: LIB3582-026-P1-K1-H8
acgataacgcttaagcacacgcagccggacaaaggccgaatacaactgagcgaaccatgctgaatcgatagaatactatatatacaaatagtacgacacgggtactaacacatgcaagcgagattgtaatagactgtagagaggcgggaagaaagaagaacgaagagggcaccgcgttgttttaatgggtctaatggatgctaagaagtgacgacagcatgatagagataaaaggcagcggcgaaaggtgaaacatcagaatcatcaacatgtgtgaacagtgatgatcggtcagggacaacccaagctgagcggggtagaaagcatcataacacatgagaatactgctgag

SEQ ID NO: 24644 - DNA, 340 bp, Gossypium hirsutum
  Clone ID: LIB3582-043-P1-K1-A11
gaccacgtgaaggtggctaagcacccccttaagatcttttttaacgttagctgtatcaccaacggctgtgttccattgccgaccgtgatcaaccatcaatcccacattgatgagggaattaagaccactgttcattctattactgatacacaaaatacttccgatggtcctaccatcaaggactggaaccgcaactgagcacatctcatgagtattattgctagtatcactgggcctactatggaccctaatggacttgtgccagctctctataccaatgctactgagaatggtctacattgttcaacactagaggtgttcaatgtggttgacctgcact

SEQ ID NO: 24645 - DNA, 601 bp, Gossypium hirsutum
  Clone ID: LIB3582-043-P1-K1-B2
ctcacactgtagatacccggaaacctgcgtttaggtggttggggctaagaggaaaatcagagaaaggatctgctgatgccttggttcttaatgagtctaggaaaagggcgttcggaactgatgtcaccaacgtcagtttcaagaagaataaggttgattcttcaaatgatcagaatttcaacaagtcgcagcaaaagcataaaaaagtggaaaatttggtgcctgcggatgatagaagccgtttggaggattcgaaacaagcttcaaagagctacgagtttggtccttttgctcctgtaaacttgactaagatcagtaactccgagaatgatgctaagccagtctatgattgggagagtcttgcttccacttaccgccctcaatatcacaatcaaggtatagtatagtttaattgtccatcataaaaattaaaatgagtgggctgcattaatagtactattattaatgccaagaaatattagtactcatactaatatttaaatttacatttgagttgaggggaattctattcaaaagctatatcagttcacatggtgctttgataataatatgatggtatggattgagtatttgatggtat

SEQ ID NO: 24646 - DNA, 642 bp, Gossypium hirsutum
  Clone ID: LIB3582-043-P1-K1-B9
tccagaacccgaatcaccataaacaccaccctgtagctttcgaccaccatatgcagaggaggaagctcgcaccgtattggaagcatttggaccaccataagtacggttaaagcgatagaaacaacactgagccaaatgaccgaacctactgcagatctgacactgcactctcaatcggaaaccaaggccatgtgaacgcccttcatgcacatcgcgcgacgaacctgagtcaaccaccgcggcaaccaaaggttgttcaacaaggtgggcttgcatcggaacctcacgcgccacctgcaactgtcgactctcaaactccaagagaacgtcgactagacgctgaaaaggaagcgtctccatcaagaatgaggctagggtcaacacgatatcaaagtctaccgaaagaccggccaaaacaacttctaccttttcggcttctgacattgtcgatccagaagctgcaagtaacgcacaaacattttctatctttgcaacatattctctgacagttaattcgcccttttttatagaatgcagatcatgcttaacacgagagattttcgcaccagtagaaacttcaaatagccgatttacggtgctccaaatttcacacgcagattagcaagagatgcgtctggattt

SEQ ID NO: 24647 - DNA, 672 bp, Gossypium hirsutum
  Clone ID: LIB3582-043-P1-K1-C11
caacatacaacttctttatctgttttaatttttcactttctcttctgcatttcaattttcttcgcccctgggcaagataaagttcttcatatgcggtcagatgggccatatagcggcaaattgtgaaggaaaggcaaagaggaaggaaggagaatttgatgagaaagctgatggaaaaactgtggccagaaagccatatcaggttactttgcaattgaatttacagttggaattattataatgaattctttggaaaaattagaacttgttatttgcttcatctttgaagttcttgaacatatgaacccttagtatctggaatatgagatgagaatccccaatcctccttttgaaattgacttggaacgcgtttaattctctgttttttctttcattttttaatgttaaattttttctttcacccccgtcgattttggatctcataatttatttttggttcttgggttcagtgagctattttgggtgcttttcgggagattttctttcattttcctttctcctatttcagtggattttagggaggtcttttatttcatctttagtgctgatatattttctctttagtctggagtatgtcttcttggctggtatacctattgaacacttctattttgaagtaaaattggtataaacaacaatggaggttttatt

SEQ ID NO: 24648 - DNA, 706 bp, Gossypium hirsutum
  Clone ID: LIB3582-043-P1-K1-C5
cccacgcgtccgcatgttgaagctaagaagattgaaacttcaaataatgaggttcacaactcgttgaggcaagagattctgcggcttgaagaacgattgcaggaccagtttgtggttcggagtacattggagaaggcattaagccataagccttttacctatgatgcagcagtagaaaatttaatccccaaagtaaattgcattagttcgcttaattattttcatttataagtaacttctttttttcctttagttagttagattcaattagtacttcattcatgatatgataatataccaggctgccaaggaacttatcaaggatattgcagttttagaactggaagttgcctacttggagaaatatcttctctcattgtaccgtcaaaaatttgataaaacattcttgtctttaaagtccatagatgaaaatttgaaaccgacctcaatggcacataaagaaatgtttcaagaggttcagacacatgacttcatgtctggtgatctggtctccactcgaaattcaatcggaaatcctccaaaggaatgcgacgatgtttggggagctgagaaactgttagattcaagcatttatcggagtcattcttcgctctccaacgatcggcataatcagttaattctccacaacgagctgtggctagagctgaagaactataccattctctgccttttgccatgttggagc

SEQ ID NO: 24649 - DNA, 598 bp, Gossypium hirsutum
  Clone ID: LIB3582-043-P1-K1-D1
cccacgcgtccgcccacgcgtccgtatggatcaagatgctcggaaaattaatatttcaaaattcagatcagagaaaaactatgttgcttattgtgacagacgttgctgctaggggtattgacatacctttactagataatgttattaactgggacttccctccgaagcccaaaatttttgttcatcgtgttggacgagcagcaagggcaggtaggactggtactgcattttcctttgtgacatctgaggatatgccgtaccttttagatcttcatctatttctgtcaagaccaatcagggcggcacctactgaagaggaggtttttcaagatatggatggggcaatgaataaaattgatctagcaattgcaaatggagaatctgtttatggacgtttcccccaaaacattattgatcttatttcagatagggttagggacatgattgattcatctgcagagcttaataatttgcagaggacatgtgcaaatgcttttcgtctgtattccaagactaaaccattgcctgcaagggagtccatcaaaagggcaaaggatttgccccgtgaaggtttgcatcctatctttagaaatgtact

SEQ ID NO: 24650 - DNA, 616 bp, Gossypium hirsutum
  unsure (1)..(616): unsure at all n locations
  Clone ID: LIB3582-043-P1-K1-D5
cgctgttcttgtatgggcatagagctaaaacacagccatcaattttacgttttgatgctgtgctacgtgaccgttcagtgccttgtgcgatatgtttcgagccaggaagttaactagagctgtgaatatatttaagcatatgaggaacaatcggaaattcgattgtaggccgtctattaggacgtataacattcttttcacgacgatgttgagtaggggaaaggattcttatataaaccatatgtatatggaggctattaggtgtttgttcaggcaaatggttgatgaccggatcgaacctgatgttttcatgttgaattctatgataaaaggatacgtgctttcacttcatgtcaatgatgctcttcgtgtgtttcaccagatgggtgtggtttacaagtgcttgcctaatgctttttcctatgattatttgatttacgggttatgtgcgcaaggtagaacgaataatgctagggagttgtgtgatgaaatgaagagaaacgggtttattcctagtgctaaatcgtataactcccttgtgaatgctntggcaattgctggagaggtatgaagaagcggtgctataatctgagagagatgattgaaatgcggaagt

SEQ ID NO: 24651 - DNA, 548 bp, Gossypium hirsutum
  Clone ID: LIB3582-043-P1-K1-D6
cacgcgtccgcccacgcgtccgcccacgcgtccgagggaatgtctgctatgttggagaaatacaggagctatgactttgggagatgcccaagagtttattgttgtggacaaccttgtctcccagttggtcggtcagatattcctcgttcaagtacggtgaaaatctactgtcctaaatgcgaagatatatattatcctccatccaagtatcaaggaaatatggatggagcttatttcggaacgacatttccacatctatttctgatgacgtatgggcacctaaaaccacaaaagccaacacaaaactataccccaagagtttttgggttcaagatccacaagccctgagatcatgtaatattttctgtaagttgttttgagcgggatgacgattttaacttgagcctatcatggcctaacatgcaagctgaagtgggattccataaaaaaaaacaggtatgggaatgaagaaatagcagaaggaatctgtctacaattaaactcacagagcgtttgaaaacataatttacttttttgcttttcatgcg

SEQ ID NO: 24652 - DNA, 460 bp, Gossypium hirsutum
  Clone ID: LIB3582-043-P1-K1-F2
cccacgcgtccggcgaaacaagaaaaaatgtacattttttttatcttaaagagacaagcacgaagccaggaagatacatagagtgattatcaatctccattataagggtgggcaacaatgattgctggaggccgattgtcagttccaacatagtccaaaaaaacgcgaattcaactcacttgaagtgagttacatacatagagccacgcataaaatctacgtgaaatcaagaaagccgatgaaccacactgtttgtggcgcatggatacacgctgatattcatatctgctttacgactttatattggactttcttttctacgatgtgggcactaagtacttccataaaccttgtaaaggtttactctacgaggcttgcactgtctattgagtcatgcaaggctgcatagagaccgttgtttggttgataggccatgaatgaggcctacatgctaatagtg

SEQ ID NO: 24653 - DNA, 614 bp, Gossypium hirsutum
  Clone ID: LIB3582-043-P1-K1-G1
gcagcttcaaacgccaccaggtcctcaatgctccacctccgtttgatttccaaaaattccaactaaaaactggatcttttttgaagcaactacaaactgttttctctcttttttttaatatattaacagtttattttgaactaacaaggggtgagtgaatgcaggtaaggactgactctagagtgagtaacaatggttgagaaaacaagaggaagaaaggaagaggtggtaaccagagagtacaccattaaccttcacaagcgccttcatggctggtaacttatcttttcattctcattcattcactctcctttttcctccttttcttagtattgtactccatgtttattgggtttctgtttggttgtaaagctggttgcttgagttatttactctttccaatgttcccatattgtgtatcaatcgtattgttaatttaacctctaagtgtacatggaatccaagttcgcataagtggattagctattacagtcataacggttttcattgtgacaaggaatcatttagagttggatgtaagtgattgtgagattcatgatgatttgaatgaaatgtttttgcactgtccattaatggatattcgtgagattcat

SEQ ID NO: 24654 - DNA, 549 bp, Gossypium hirsutum
  Clone ID: LIB3582-043-P1-K1-G7
gtgagattagtttctattaattaaaattttgaatctgagggtttttgtatttgtattttttttttgtgttcgtgggatttgaatggcattgggcgatctgatgacgtcacgatttccgcaattgtcgttggcggtatcagaataatgtcatcgacggtaacgtcagcagtggcggctatcatgacgacgatgttgattctgctgacttgatgtctcagaggagggatttagatgctgcatcaactagcagttacgccaatgccgttactttcacggccactgtgcctacgaccatggcttacttgccgcaaactgttgttttatgcgagcttcggcatgctgcctttgaagcttgcacgccaactggaccctctgaaagtggccttgcttccaaatggcgccccaaggacaaagtcctttcctttctaggatggtttcttctattttttgcttaccattcggttgactgattatatctaataatgggtttaagaaaaaaaaatatttacattgcagtacgaaaagatgggattgtgcaaataattagaa

SEQ ID NO: 24655 - DNA, 567 bp, Gossypium hirsutum
  Clone ID: LIB3582-045-P1-K1-A9
cttctcttaaacacaacagaacccttaaccctttccattagggtttggttcagcacacagccgccgaaccactacctatacgatggccgacaatgagcaaatggcatctagatctcgcccacagaagccacgcccatggagattaggtaggcctattcctttccgtcttctcttttctaaaaaaggggttaaaatcctatgttattttgtttttaaaaaaagggagcaaaatgaaattcaaaagaggaagaaacgaaaacacaacaccatttgatcctagcccaaatcattgtacttttgagatatatgggctctcatcggcgcagttccaggtattctcctcttttttatgctaaagttgcaagcaaataaataaataaataaataaataataaaatagaatctggaatcaccttaaaaaaattgattttggattgctcttttcttttttacaatatgcgtgtatattcccttgctattttattcattaaaagaaacaagaaaagaccccccgttataatccaagtcccaatggctttatacaaaaaactttgttcctattctttt

SEQ ID NO: 24656 - DNA, 236 bp, Gossypium hirsutum
  Clone ID: LIB3582-045-P1-K1-B6
ccactcccgcggcctctcgaaccactgctcctccaccaatattctaccagatgccctacctttcccatcccaaactcctcccttacgtgacctattccatctacgacgtccaccaaaccccctctatcctccaaaccctctaacctcaaccctaccactattccttctatcatcctcaccacaagctctcctaaatctattccaacctctacaaactccttaaacaactcatcctc

SEQ ID NO: 24657 - DNA, 496 bp, Gossypium hirsutum
  Clone ID: LIB3582-045-P1-K1-C6
ccaattccaccacgccccacgcctcccgtccgctcactcatacgctagctacaaccaccacatcttcttctgccacaactgaaactttcaagcccgacactttttcccaaaccctatccctccataaaaactccctctcatccttcaaattctactccaactacagccttctcatctcctccttcgtctacaaaaccctccgtacctattctacttccaccaccttttccactctcactcctatccattaatactccgtccactaccaactcttcttcaacttatccttctcctccaacttcttattcctcgactctactttctaccacaaaactcttcttctctagtacgttcccactacttctttaatcaaaaccctccatccccacactaactatatcttcttcgtcaactttaatccttaatttaacattataacctctttttctttcaataaaacattactttttttgtacgtcaaaaactttatatattc

SEQ ID NO: 24658 - DNA, 579 bp, Gossypium hirsutum
  Clone ID: LIB3582-045-P1-K1-C9
ctttcatcgttttgacaagtatctgaacttctcaaatcctcatatttcacagaactttgatcctaatgcttgtgggtgggcatatggaatgaacatgtttgatctcaaggtttggagaaagaaggatattactggcatataccacaagtggcaaaatatggtgagttaatggaaagacggaagttttgatttcatgctagttattttctccttcacatatacacacaccacctttcatgctttcatggagataaatcacttagttgttgacggattaaacccacaagttttccaattatcaaataactttctagcgaacatgttgctcaagttatatatgcaaagctgatggtattataggttttgaggggcaggttgactcctttgggagacagacgacatttgaagacttctcacgacttcaaaggataatttgttgtatgttctgatcttttttttttttttcttgatttgtttgaatatttatcagaatgaagatagagcattgtggaagctggggacacttcctccggggctgatcacattttatggtctaacacatccacttcagaaatcatg

SEQ ID NO: 24659 - DNA, 384 bp, Gossypium hirsutum
  Clone ID: LIB3582-045-P1-K1-D10
gaagagtactaccctcaagaagagcttcgttcatgcaaacgagcagacctccgttaaaaacgagggaacatcgaatgcaacagaagatatggatgaagagtttagtccagtggatgtggatgtcaaccttgttaaaaaccttcttgactccttttcttgtcaacaaggacttcctggtccaacttccaatttgcttgggctgatgggtgttaatcttcctaaggatgacaataagggcaaatgagtttgtaccagggaaataataggaattcactgtaatttacgtgtagctgctgcattcttcttgtaacttaaggtagcaaattgctttgaaaatcaatctaataccatctagaatcaatagaaaactacaagttgtatttc

SEQ ID NO: 24660 - DNA, 335 bp, Gossypium hirsutum
  Clone ID: LIB3582-045-P1-K1-D2
caacaatgggaattcgggcaagaataagaacaataatgcttcacagatatacaacgaaaacaatggaactgcaaagtttaggactttgccaggtaccagaaatgatgggaataatggtgataatggcgagaatgtagctgctgagtgaaaatgatgctctgttgttcgctatatgaccattactgtcatcgaatttttgtttccttttccccagatgatcaggcaattgtaagttgctggcttcttgttgtgctttattgtgaatttagtactgaaaaagtttgtttgtacttatagttctacttttaatgatcaacactacaagtttccatttt

SEQ ID NO: 24661 - DNA, 601 bp, Gossypium hirsutum
  Clone ID: LIB3582-045-P1-K1-D4
gttgacatagcagtaaaagttttcaatccttaaatttaactctttaaaagattcttattgaaaaaatatgaaaacttttaaagactgagtttttcagcatctctaatggttaaaacaaagaataagacaaaaaataactttttaaaagaattcttacatttagaagtgaaagcacaagggcttgtttatatatgaagtactatgttgtttctgtaccatggtccagtggtaatattcaaaagattgaactatcacatgttatcttataaggtcgagtgcatagttgatgcatactattatacaatcaagcatcttattttgcccttttaggtgatttgttgcttatgattgatttcatagctatataattgttgttcaaaagatcttatcaattatcagttctttgcttccaaatctggcctctagttttttgttatctaatgacacttatatttgttaacttttaaagtttatacaaaaatgatgtgatgttttactggttaagggcaaggactaaacatatgattaggaatcttaggtgagctattaatctgtcacggtcgttgggtgagttgtgattttatttccaatcgattatttg

SEQ ID NO: 24662 - DNA, 429 bp, Gossypium hirsutum
  Clone ID: LIB3582-045-P1-K1-D6
ctccactactttcctctttaactttaacccattttagtactctactttaatcttctgctctggttattttttaagaagctaaaaaaccaacaatttccaatccctctacttctcctaatcatcaacaagatgagtacttcacctttagaagttaaagctcaaaaacttaaaacaatatgagataatatattgacagaaatatattgccatatttgtattaaagagtttttgaaactcaatatgccttctactcatttcacaaaagatggatgattcaaactaatataccaactttcaaaaataagcggccaaggtggtgttacaaaaacaacttaaaaataatatagatactctaaaaaaagaatagaaagctttaaagaaacttaaatgctaacatactgatctaggctgtaattctataaaaagaac

SEQ ID NO: 24663 - DNA, 558 bp, Gossypium hirsutum
  unsure (1)..(558): unsure at all n locations
  Clone ID: LIB3582-045-P1-K1-E2
cccacgcgtccgaagactttcaagtagattttcaagattggtagtaaattgaaaatgaaggcatccatgtacggacaaagatatgatgagacaactgacaatatacgtggaagcaacaataaattcatccttatcagaaacactgttcgggattgaagaaaaattaaatagaactttgaaattttgttataaataggaatgtaagaagcctaaacaaggcatcgaaaaatagcttagaaatcttttcttttaacttttagtattttctctttgtaaacccttccttttacttttaataaaataactatcttctgtactggtataagtctgaaattggtatcagaggcccccggagtaacgattcttagaagaattgatatcataatatccattctcaacatgtacttcatcaacaaacatacaaattatccaccgatggaaaaagaatagtagctgatgacactggagtagtccagaaaacaagagatgaagaatccatataactgctaaagaaaataatagtggatgtacttccggngtatattttggttgggttgg

SEQ ID NO: 24664 - DNA, 339 bp, Gossypium hirsutum
  Clone ID: LIB3582-045-P1-K1-E6
acgcgtactcccacacgtacgcccacgcgtccccccacacttccgccaaattcccatttcaaatttgcgtccgtcatttatttaaatggggatatccattctaaacctctctgcaacatatatcatttaaagcttcaaccttcatacccaaatacaatattttgaatttaaaaaaccatcaatctttgttcttttgtgtataaatcaccatatctgtttctcttctaacaaaatattttatacgtggtcagaatattatcttcaccattttagagcctgtctctgtacttccatctatcattttatctacaatcaagtgtgtttggaatgtttatttaa

SEQ ID NO: 24665 - DNA, 474 bp, Gossypium hirsutum
  unsure (1)..(474): unsure at all n locations
  Clone ID: LIB3582-045-P1-K1-F9
cggacgcgtgggtttacagattcctggcatagaagttagaagaaccagggggaatgttactgatcaggggcttgatgcgccttggtttagagctacaagcagtgttactgagactattcccagccagaggaatggtttcaacgttaagcgtggatctcaaaattcctccgtatccaaatctgtgaatgctgatcctcgtttacaccaaactctcaatatttctggtagaaacagcggtgggttgtctagcagctggaaaaactctgaggaggaggagtntatgtggcagatgcactctaggttgtctgaacatgatgcagccaacttctctaataactngagtaaagattgttggactccttgtgtttcagaaaaaatggattttgaaagtcagctccacagacctcaaagcattcatgatgcanggtcaaggggttgtagagagacttctgctgatgcatnatccactgagca

SEQ ID NO: 24666 - DNA, 568 bp, Gossypium hirsutum
  unsure (1)..(568): unsure at all n locations
  Clone ID: LIB3582-045-P1-K1-G10
agaaaattgaagagtaaaattagttatttttagttattatgtagcactatatcacttgatacaaaaagagaaataagaaaaaagttatctacatttacaggctgtttgtcggagacgaactgaagatatcaattaatgccttagggcattatgggttgattgtgttaatgttctttgtttaggccttggtgaataattgttcaggtgcttaaggtggaggttttgacaatggtgttgttgactcatcaattgcaggattcacagatagcatttccatcaaggcctttaacaagggggaaaggtttgacattaaagcgacatgtagttacagttcatatgcttgggagaagagagaggggcatatcaaggcactctgcttgttcaaggtaaccaacttctaccctatgattatgcaatgttcaatgttggcagcttgtcactttgtatgatacttagctcgataactntgaggctatatttagaagtgctgatcctgaaaagactatgcttttaaattagcatactgaattcattttgggaaagaaaaccaataacgcttactcttaaa

SEQ ID NO: 24667 - DNA, 148 bp, Gossypium hirsutum
  Clone ID: LIB3582-045-P1-K1-G7
cccacagcgttctacaacttctccagcaaaaacactgatatctttaaccatctacacagtgccaacaggagggcgggctgtttataactatagccgagtcccacttacacccaactaacatggcctagctttttacatacgtgacgac

SEQ ID NO: 24668 - DNA, 529 bp, Gossypium hirsutum
  Clone ID: LIB3582-045-P1-K1-H3
caaaaacagaaaaaaagagttaatgatacaacaaaaatggaagcaaagaaagctttgttcaacatttcaaagttggtgccacagtgcccttttccatttaccagcagggcttgcttatccacatcttaccaacatccacaaggaagtaatgcaggagtaggaggcatgtaccaagtcaaaaccagagaagggcagccacagtcgccgccacagcaagacagcagaacggcggaggatagtgccaaagaaggcataaaaaagggggtggagatggcagaaaacgtgggggatagtgctaagaagaccctggatggagcttggaaagcagccaaagatactgcaaaagtcgtgaaagaaagtttgagtgaaaataataaagatgatgaagcagttgatgaggttaagagtattgaggaattgagagtcagagctagagggtattataacgcaccttgaaaaaactatggttaaaatcaattataattaaatgatgttgtttcatgtattaatttcttttttgcaatcaaat

SEQ ID NO: 24669 - DNA, 565 bp, Gossypium hirsutum
  Clone ID: LIB3582-045-P1-K1-H4
tcgccacgcgtgcgacgtatctgatgctggcattgaacagcaaatatctggtctgcattcagacttgatggctcttcaatctgaccttgagaattctctaccagaggacagaaatagatgtatcaatgagctgtgcactctgattcaaagtctgcagcaattattatttgcatcttcaacaaccgctcaaccaatattgacacctcggcctctaatgaaagagctggatgaaatggaaaagataaatgcaaaactctctgctgcagtagaggaagttacacttgagcattgcaagaagaatgagattgtaaaacatcattcccaagaggttggacttcaaaggagggtgtttgtggacttcttttgcaatccggagcgattgaggagccaagtaagagaattgactgctcgggttcgagcttttcaagattcctaatccttttctcttataaggtgcatttgagatgaagaataatatttggtttttatgagaatttgagtagtaaaaatttgattgctatgtttagtttaccaccttttggtttgaattttatgatcactgagt

SEQ ID NO: 24670 - DNA, 250 bp, Gossypium hirsutum
  unsure (1)..(250): unsure at all n locations
  Clone ID: LIB3582-046-P1-K1-A11
ccccacaccttcggtttntatcacattatttatttttcacaaatacctaccctcaaaacactactaccgcggcttctttaaatacggctgatccatccctatttttaccttcacaatccaccatctaatcccatactcctttaccttttttactaatactttctttacccctaaaacttaaaaatactagacatacttttactcttaacaaattacctaataatactacaagaaaaagtattattactat

SEQ ID NO: 24671 - DNA, 634 bp, Gossypium hirsutum
  Clone ID: LIB3582-046-P1-K1-B11
cataattgcttctgtgaagaaaactgggagtgagggtacctcacagcaaagcaagattatgggagaagaaggttcagaagccggaaaagttgtcgatttcgagcattgatttcgtagggctcgagtttgctgataaaaaaaagagcagagggttaccacctggattggttccaatttcagatccttttacagaaggcgatttgcctgatgttgagattcttgttggggacacaagccaatttggggaggctacaatgcctgagacgaagccaagcacggaagaagaagattcggagttttacaagccgaaggtatcaacatggggagtctttcctaggcccggcgacatctcgaagacggtaagaaacgaataatacgtgtgtcattcttgaataacttattgcaatggaacatgttaaaaaacatacaggctcctactagttcctagagaataaacaaattgatgcgatacagtttgtttggtgagaattggagcaagtgatacaaataagaattatatggatatgttccacttcaacaacttgtttgagacctgaccgtagctgctcgaactgtaaaatgaccgatcgaacttcaattcttatgattatagaattacaaggtgcctttttta

SEQ ID NO: 24672 - DNA, 645 bp, Gossypium hirsutum
  Clone ID: LIB3582-046-P1-K1-C6
gtttattgtatggtatgaagaaaaaaaaaaaaaacaagccagaatcagctcattcatcatagtactagcgtaaaattttgaactaggggacatgggaaccaaaagtcccattcttgatttcttttcctttcaaggcatcacttgagtctcttccttccctttacctccactcatctctatttccatcttataattacaattgcctctaaataaagtcagctcattcattataatactaaagacatctagttgggagaacttcagttatggagattaaggtagaagaagaagaagaatcccaccgcgaacatggtgaagaaaagcaaccactcctacaacatttgtctccactatcccaaactgaaaacaaaacccttattcagactgcaatcagtcaaacgtgtcaaagcactgcgcatttggctaacctcttgcccaccggtaccgtccttgctttccaacttctctcccccattttcaccaaccaaggcaactgtgactcaacctgtcggtcaatgaaggctaccctcctactgctttgtggattgtcatgtttattgtcgagcttcacagacagtttcagagacaaggatgggaatgtctgttatgggtttgctacattgaatggattgtgggtcatcgatg

SEQ ID NO: 24673 - DNA, 518 bp, Gossypium hirsutum
  Clone ID: LIB3582-046-P1-K1-D1
cagacccagatcccgacccgtcggaaaaaatacagagcttatagtaaaaagagaaaggaacaagtcaggtgtgcatagtattgctgaaaactaaaggactttaatacacatagcatagctcggctatagacttttacataagacaaagttatgatatatcctcatcacatgcacttacaactgtactacgcaaaacaaactggaaacacgtagacacaccgatcaagacaagtgactagacatgtgttaatcaaattcaaacgaagtgtatccacacaccaaataagattctcacaggatataccagaatagctgacaacactacctagactaagaaagaaagctgagttcacattgctaacaaacctattggatcacatcgagaaacatcaacacacgaagatgccaagcaagtcaaggactgtgaacagcgctaacaatggcaagagcaaatgctcgaacggaagacgcactgtatgaaagaatacaggcaacagggactacaagatccatacaag

SEQ ID NO: 24674 - DNA, 663 bp, Gossypium hirsutum
  unsure (1)..(663): unsure at all n locations
  Clone ID: LIB3582-046-P1-K1-D2
cccacgcgtccgggggctctcaactctctcccctccccaaagctccggccatcaaatccggcgagatgcacggtggccaccggtcaccggcaatgagctccgccgtgcctggtggccagaaatcgcaaaagaggcctccttttaaccctttcggctctccaaagctcaaagccaagcctaaaatttcctaaaccctcgcgaaaaagtctcaaaagtcagaaaacctttcgagtttcagcctcctccgccgtggctttaaccggatccccaaggatctgtctgcttttgggccagaagcaaacgccgactcagtcgacaccaaacaacaggtaaataaaaaccttcccccttttctcgtatttgtgcaataaattcaaaataaaataaaaaataacaaagaatgaacaaatgaatcaccttcaagtatttttgatttctttgtattcgtttgctatattttttttttgcgtaaaaaaggttacatcgaaattcttatggctatatagccgaatacatgtgattntatcttttcttgttatttggcttatctctcttttgctggttcttgctttgtttctgctctattttcgcctttttgctctggtgtcttgctttgtttctttttttggtttcttttgcaggtgcacaatgggtcaacggggt

SEQ ID NO: 24675 - DNA, 722 bp, Gossypium hirsutum
  Clone ID: LIB3582-046-P1-K1-D3
gtctcatgttccggcttcacctatgcagtctgttgcaccttcaatgccattgcagcaacaggcagaaggtgtgctacattctcagttcagccatgggcctcctgttgaccagtcattgagtagcaataggttctcagactcccgaacatcagcatcctctgacagctctaggaaatttcctgtggcaacagatgcaaccataacccagttgcccgatgaactagggttggtggaaccatctagctccaccatccctgctgcttctgcacaacatgatactaaaagcccgtcccttactaaagttgctgatgctggcaagaatgatggcattagaagtagtaggcagagcacaaatactgctcttaaggctgttcagtcttcttcccagcagaagaatatagcttctcctcagcattatggtaactcttcctggtataatcatcagagaggaaatgcggtctcacaaaagaatggagcgggtgaatggacccaacgtagaacaggtttccaaggaaggaaccaatccatgggtggagacaagaacttccccacttcaaagatgaagcagatttatgtggctaaacaaaccaataatggttcgtcatcttcgtgatgataggaaaataaagcttctcagacccgatagccaagcaatttcttaaccatacagtatttttttgtggtagcatcgctgggattagtatggggaatggaactttata

SEQ ID NO: 24676 - DNA, 525 bp, Gossypium hirsutum
  Clone ID: LIB3582-046-P1-K1-D7
aagaaaactaaaaaaatacaagaaatacaatcgttttctttttagacgtccgattttagcttttggggagaaaataatgttgggaggatttagccatgcgatagagtctactccggacgagctggtggcattctattgacctactccatcacctaagataacggtggatgctctggtgaaacaggtactcgtgactaactactcccgcttgctcatgctaatccaagaccatgtcacaatttcttatgctcactatacactgtatactgaactgcccatatcatttgctgtgaatgatgaagtcttatgcttgagtgaagaagctcttgatcactagagaagtgtaaagctgtaatttggactggcagagtcagcggatgatgtgacttagttcattgaatcttacaaggcccttcgcgaccgagcaccttatgctactaaccatgtgggtgtccatctaattgggagcttcgctttcattgtgtttgacaaatgcacctccactctgtttgtggctgatgatca

SEQ ID NO: 24677 - DNA, 559 bp, Gossypium hirsutum
  Clone ID: LIB3582-046-P1-K1-E7
gcagtgagggactttctgctcttatgatactagcaatgaaggatggtttattaagagaggctggaacaagcagaaatagcccacaagtttctcatttattattggttgataattgtgtcctctttgtaaaggttactgctagactaccagaggggcccacactttgggaacgattctaaggaagtatgagaattgttcaggtcagtgtgttaattatgataaattaatcgtctattttagctttaatacattaaaaggggagagacaggtggtttctgatattccaggtgtacaaagctctagtgatcccaaaaggtactttggtcttccaaacatggtggggagaaataaaagagcatcttttcatgttttgaaggatagatttaagaggcacatcgacaattggagtgttaggcttttatcttaatgaggaaatgaaatttttattaaggttattctttaagccatctcgatttacacaatggcatgttttttactccttaagtctttttgcgatgaattagaaagcaaaattgctaattcctggtggcaaatggga

SEQ ID NO: 24678 - DNA, 590 bp, Gossypium hirsutum
  Clone ID: LIB3582-046-P1-K1-F8
ggaaagtgctgattttgtgttaaaaaaaaaaacgaagtccttttttttcattttccggctgtgaccggagacattgatggctgccaggtccggtggttcttcttcttcgtcggtcccgactctgcctccaccatgtccgagatccccaccggagtatcctgatttgtatgggaaacgaagggaagcagctaagactcagatgcttgaaagagaaattagtttccttgaggtttgtttttaatcttagttctaaattgattactaatagaccattcatgcataaattgcttaaaggttacgtttttctttaatggattaggataaaaagttcatcttgaaatgttcttgttagtgtaaattgaaacatcaatcagacacatattcggatatggatatgtgagcatgatcgagaaaaacttaaaaaattttgaacatgcccgtattgaaaagaacatgtttttgctcattaaacacttaacaatatttatgcatttggggtaaatctttgggatcacctaaacatgttattttctattaatcaacctatgaatttagaggtttatgttctgaaaagaaaagggtttaaacat

SEQ ID NO: 24679 - DNA, 553 bp, Gossypium hirsutum
  Clone ID: LIB3582-046-P1-K1-G1
cgtgaagggacatgcattgcatggtgagttgaaattattagagcttagaaatctacatgaacaaagcgatgagacttgatacatgttgcagtaatggaaatatttagtgaatttgtatggctgctatgttgctaccaagattcatctattttgaaatttccaagtccgatggaacttttaaaattttgaattagtcatgcagcattttgttaaattcatgataatgccgagtataagcgttagatgatagcattttttgtggattgcattgaattccttggtttagctatggagtatgccttgacaatggagaaaatagcaaatgcgaggctcttgcacgtgcacagagtaagactttcttgtctatagattatatgaaatcaccatgataaaataatcatgttaaacagccattttactatttacaatctagcaaacagctgtttttaaaactaaacctttaagctttggctaacagatagcttagcggaaccatgatgcgcagctggcagatttcgttgaaagcgaattcttatctatgcaggtggaggcc

SEQ ID NO: 24680 - DNA, 649 bp, Gossypium hirsutum
  Clone ID: LIB3582-046-P1-K1-G10
caaattcaaactcatttgagaacaagcccaaaagatcgaattttttgttcaaattgtggggaaaaaaggaagtgaaatcaatgacttcttcaccgccttcaaagcgaaggcgaaaagggcaaaccgttgacacagaatcaccgtcaaaatctacgttgacccaagacaattcatcccctttgatagtcttcgctcatggcgctggtgctccttcctcttctgattggatgatcagatggaaagaaatgctaaagaaggctttgaatgctgttgaagtagtgacatttgattacccttatatgtctgagggaaaaagaagatctccacccaaggcagaaaaattggtagattttcacacaaatgttgttaaaaatgcagttgctaaatatcctgggcattctttgattttggctggcaaatcaatgggttcaagaatcagctgcatggtggctggaagggaagacatttctccattgttaattgtttgcctaggatacccgcttaagggtatgaatggagcagtgagagatgaaactctacttcaacttaaagttcctgtgatgtttgtgcaaggtaccaaagatggtctctgccccttggaaaaactagaagctgttaggaagaaaatgaagaacatgagtgggttgca

SEQ ID NO: 24681 - DNA, 269 bp, Gossypium hirsutum
  Clone ID: LIB3582-046-P1-K1-G12
tcacgaaataattcattgttggtagagcacgacggggtgtcatcagagtgggttgaatcagtgacggaaacgacttgcaatgtcaatgctcacgcgtttaacggatcgagtgtgattgactatagagccacggacacaatgcgctcaaagccttatttatctaaatgctgtcacactcttctccgaatagataccatgctaacgagcgggctccaaaccgaaagatataaccagttaatcattgatatacagatatattgtttttatgt

SEQ ID NO: 24682 - DNA, 526 bp, Gossypium hirsutum
  Clone ID: LIB3582-047-P1-K1-A6
atcgctgtagagtctttccccgaggaactcttctcaattcttcgtacagtacatcttctgagaggacttagtgttggtcttggaattaacttctcgtgtgcagagcaatggaggcctattgcagaagaggctttgtataatgctggaaggttaaaaggtgccaatagaaagagtagagtacgaaagccgagttctttcaggagatttttctggagaaattgatcggaagttgtacaaaaaggaatcaaagcattaagaccgatatacgaaatccgggttcttttgggagattttttccagagagcttgattggcaacctgaagaaaaggtagggcttaaaccagtctatatgaataccaggttgctgtatatatagagagagagagattacaagcttgtttatggactgatttaactgtttcttattttctttttcgatttcaatttttgaaattcaattcatttgtaacaaatacattcatctttatgtttttggtcagagaatatacattcatttggcatcttc

SEQ ID NO: 24683 - DNA, 345 bp, Gossypium hirsutum
  Clone ID: LIB3582-047-P1-K1-B7
ccgacgcgtgggcggacgcgtgggcagatagtacatagctgccttaagttatcggacgagcctgctgtttcttatgactttgattctgctgcatggattcgactttcacctgcaaaagatgatgactctcctcgcaaatgggaggatgcccttgagatgaacactgatctcattaatagctagatgagtgcgaaggattgcttttgacattcgaaaacaatggaggcgatgaacgatggtccgtcttagattatgcatgtgttaccagataacagactaggccatcatggttactggccctatcactgccttgatccaaggattctatgaaagacatcgggacac

SEQ ID NO: 24684 - DNA, 470 bp, Gossypium hirsutum
  Clone ID: LIB3582-047-P1-K1-C10
aaaacaaacaactaaacaaaaaaaaaaaaacaaaaaaaaaaaaaaacaataacaaataaataaaaggagggcaccaaaaaaaaaaaatatattaaccaataacaccttataatcaacaacattgccaattgctgtaaatgcgggagtgctaaactcattcctacaagatccatctactgcattaagctcataccatgtgagtttgttgcaatctgcaactacaaacaacacccttataattccaaaaaacttcacttttaattcactagctgccccgttatacttacttgtccaccattagattttaacgacctattaacatttgttactgcagtacaaaagaagattcacaccagcttttatcacttttaatgtctcttgcacttattcacaatcactagctcataaaacacctacttgttgcgtctctctctcattattctataattaaaccatatttccttgccccc

SEQ ID NO: 24685 - DNA, 659 bp, Gossypium hirsutum
  Clone ID: LIB3582-047-P1-K1-C3
ctttgtttcggtcttggctgtttttgttctattatgttgtacttttcttgtggtcataaagaaaacgtagttccaatgaatttacatagcgactaaatcattttgtctaagtcttggtgctatgttcctgcaacttgcattctggatgtacttctaaattttgagacttataacccttttgttgtatagcatgttaggtctccatcattaactatttacatgcctcaatgctgaagaaattgctatttctcataccatcatattgtttgtatatttatagaacagattagcatgctatgaatgcatgttcatataattatttgtatttgtatgtatggatatcctcctgctgatttacacacactccccaatcccaatggtatctggttgaagtagtttatccctttttagagatatttaacttatatgcatctgcatgtattacttatggtgaggtgcattgtagttcttccatttgcttgttcttcaagtggtatggtataagttcctttttttcactctttaattattattggtattgaagaactggggataatactaagctctctactttcaatatttatgtactctacaacagacataggacaaggagaaaatcatgcatgaccaacttaattaaaagaagattttgcattttt

SEQ ID NO: 24686 - DNA, 693 bp, Gossypium hirsutum
  Clone ID: LIB3582-047-P1-K1-D8
ggaacactgttagttggatattaagcaacgtagattccaagtagctgtacaaggcatttcatagaaagcaactatggtgctccctgatgaggcttctaaaaggcttgaggggaagtacatagcaatggttgtgtgttggtttcttggaaatggctgcctcttttcttggaacagtatgctaacaatagaagattactatgtttatttgtttccgaattatcacccatcaagagtccttactcttgtttatcagccatttgcactcggaacacttgcaatactggcttaccacgaggcaaaaataaatactagaagaaggaacttatttggatatacactgtttttcttaagttcccttgcaattttagttgtaagttcccttgcaatttatttggtacatgatgggtttacattgagaatggcaactgaagcctgctctctcatcctctgaaactttcgtatgtttttgtttcattaactcaaagttatatcatttgagaggattatgatttctctcctctacgttttatgtatagatggattttagctacgtctggtaaaggaggacttggaactttcataggaatttgtatcatcagtggtgtttttggggttgcagatgcctaacgtgcagggtggaatggttggagatctctcttacatgagacctgaatttattcaatcatatgttgc

SEQ ID NO: 24687 - DNA, 669 bp, Gossypium hirsutum
  Clone ID: LIB3582-047-P1-K1-E10
gatgaatatcacaagaccccatctccctccctccttctatctgtctgtatccattccatgcatgaacggcatcaattgaccatctttgcctttgcgcaaagaaactgaataataaacaccaccaccaccacaacaaaccaaccccactctttccattatgtctcctgataatcccagtgtaaaaccagctgctaaagacgaaaaccaaagcagtggcaaccggaaaacgggttcaactagggcggcgcaggatcaacaagcagccctcaagtgtccacgatgcgactcccccaacaccaaattctgctactacaacaactacagcctcactcaacctaggcatttttgcaagacctgtaggaggtactggactaaaggtggggctttgcgtaacgtaccaatcggtggaggttgccgtaagaacaagaagttaaaaccctcttccaggctctctagtgactcaaaggattccatctcatcttcagagatgggtggtgggttgaagttcttccatggcctttctcctgccatggattttcagctcggtgggttgtcgcttcctaggcttaaaccttcaccacctgctatttataaccagtttgcttcatttggagatactgatactccctctcctgctagtttcactcttgatccatctggtagctctac

SEQ ID NO: 24688 - DNA, 272 bp, Gossypium hirsutum
  Clone ID: LIB3582-047-P1-K1-E11
cccacgcgtccgaaatatttttaggagttggtgggaacaaacaaaccagagagggactttgacggaggtcctagatgttcaagaactaaacgtggaccgtttggagcaactgattaaaaattttggaggattcgaccttgaggtgggagggagtgcttgcaataaccttactggcagcaatagatataatcgagacggactcgaaggtaaagattctgccctcttctttgatttgagtcgaatactggattgggtgtgatgtgttatgaatg

SEQ ID NO: 24689 - DNA, 572 bp, Gossypium hirsutum
  Clone ID: LIB3582-047-P1-K1-E12
cacacgcgtccaatctaaatccaaaccctacagatctatgatgtatcctatctttacttacctcttgcttgcgacgcaatggttaacttgtggcgtgcaaataagaaaaagatgatcaacgaacaagctacatgagccactactagttaataacatttggactgaccgaaagatgaatgggatgtgcagtggaaaagataaatcttcggtctctatcagatagattttacagagagaaccgagcgaacggggaataactagaacgcatgtatatgttaacgactgaacagatgcttcggctcataaaacgatgccatatgaaatggggcgacctgatcaatctatgcactggactgagacctatcaaactgtcttgtctaaaggtagagtaaaaagttcgcaagccgtggtgggtaccttcatgcgttctaaagtctttctaaggtgacagaaccgaacaaacaatctaccgtatgttcacttgagctaacaccgttatgctattgatgtatgatgtaggtcaatttcctgatctactgttcagggagcaaagactcatgggaaaaaaatac

SEQ ID NO: 24690 - DNA, 538 bp, Gossypium hirsutum
  Clone ID: LIB3582-047-P1-K1-E3
cccacgcgtccgcccacgcgtccggcataattaggttcattatacaggtcatgttccccagagaatagatcagtgaaaatagcagatcttgccttcctgcatcgacagcgaagcagatcgaaaacaaagccttaccttcctcggttgtagtggagcaggttaaggatagcagatcttgcattcctgcattgacagcgaagcagatcgaagatggcagattttacctcaatgtggttacagtggagtacattaaagccagtaattctacttccttggacaacagtggaatagattgaagatttcagatcttatttccctaagcagtagtggagcagatcgaagatggcggattttacctccctgtggttatagtggagtacattgaagccagtaattctatttccctgggcaatagtggaatagattaaagatttcagatcttatctccctaagcagtagtggagcagatcgaaaatggccgattttacctccctgtggttacagtggagtacattgaagccaataattctactttcct

SEQ ID NO: 24691 - DNA, 612 bp, Gossypium hirsutum
  Clone ID: LIB3582-047-P1-K1-E6
ctcagattcttttaaaaatttttccattttgacccaccatctctacttctctaatctctatccctctgtttgtctctggtaagttaagtttctctttgttttttgatctctgtttgtgtgtgtgttgcttttcatttaaggcgatgtttggagagaaagatctctcaagtaatctcccttgtgtaggagatgaaagctctcaaagcaagctttcacgtttgtttcaaaacaaggagagttcagttgagaaagtgagttttgtagagaagggtattgattttcttagagaatcaaaggtgggtcttgatggaggttaccctttaccaagatcttccaagcctgggatttctggctcccaagaactcactcttagctacctctgtgagaaccctaaactgggtttttgttctgagaagacccaaaccctgttggaaaaagttactagctacaaagggaaagaagttgttgattctgagaacacacatcaagatgagaaatgggttgaaagagatttcctgaatttgagtgaaagtaaagggatttctgccaaaagagatggtagggatgatttcaagaaagagggactagtcatagggagaaaaagcccaagct

SEQ ID NO: 24692 - DNA, 363 bp, Gossypium hirsutum
  Clone ID: LIB3582-047-P1-K1-E7
cccacgcgtccgtatcttttctattatctgagaatctgctgagcagttgtgtatttcaactgattttcaaaccctatcgttttggatccacttcaaggtttagatgtgaagagaactactctgcgtggaaagagttacttttcttcttcttctttttttttttttgtatttgaagtggtgagaggaagtgtttggatcagagatggcggagattgccggcgaagcgcctgaggtaccaggcaatgcgagaagggagtcgccggcgaggatgacttcaaccacgattgaagcacctccgcctttggcggtgtcggcgtcagtcaaggagagagtggggaaaggaacaggaaagagggagaactg

SEQ ID NO: 24693 - DNA, 689 bp, Gossypium hirsutum
  Clone ID: LIB3582-047-P1-K1-F7
cccacgcgtccgcccacgcgtccggcaaacggaactacttgtcactttcaaaatcaaacttgacaaaacacccaatcacgaaatactcaaattattcaagtttaacaatgacgaccatcaccgaatccgatgtgggaatcctatgtttcatctcaaaccttcctggttttcatggcatcctcaaacaaagatattctgatttcattgtgaatgaagtagacactgagggaaatgttgttcatttgacctctttagatgcccctccagaggcttttcaggaagttgaaacaaaaatatctgatcaacttaacaaaaattatgcatctgaaattgaaaaattcagatcacttgcctgcgaaattgatgtcgatcggttagaagctttcattaaccaaattacttcaggcagtgaagaagatatctctcccattgttctgtctccagattctgataaatctcatcgaacggcaatgcataatttctttaaggaaaatcttagatttctagtcaccgacactgttgatggacctgattcttcctcaaaatgcatgcgcgtgaggttaaattctgggaataagaacaagggaagaaatttgaataaaaggaagagaggtgataggccctatgataggagaggttcaagccactggccagcacatgttggcaattttcttaagtttcatcttttc

SEQ ID NO: 24694 - DNA, 495 bp, Gossypium hirsutum
  Clone ID: LIB3582-047-P1-K1-H5
ggattggcagggccgtacccgcgcgtccggccacgcgtgcattaacatatggctcttatggccttggggttcatggttcacagtcagacattgatgggttgtgtgtcagtccttactttgccaccatggtactaagtagatttaattgctttataaattttcctttttatttcatcaaagcatcctattcttaggggcatcaaagagttccgattatctacaatacaagctgacctcttcattgttctatataacatccttaatagcacacctgaagtatctcatatttattgcgtaaaagatgtaaaagttccactaatgcgttttgcgttcgatggaatcttgatagatcttccgtttgtgcaccttaaagatttagatgctccagaggctatggttaaccattactatttggcattgctatattatagtacgcaaaaccgacctgttaataactttggacagtacaaggaatactttctaaatggaagccaa

SEQ ID NO: 24695 - DNA, 507 bp, Gossypium hirsutum
  Clone ID: LIB3582-047-P1-K1-H7
cccacgcgtccgcgttggacttcaagttctagccagcacaataccatcggcaaagatcaacctgtccagcattgcagccattaacaatcatttatgcaccaccgttcaacaaatcagcagtgctttgagtagcaactgcatcgggtcttgcaatgaaggtgacaatggtaaagaaaaatagggtgttggtgattggtgaattacccataacatccttaattttgttaactaattgaggaagttattggtaattttactgaaaatcatgcactgggatttgtagtaattttaatgtggtaaataaagagtgtaatgatgatggagggttaaatttgaaaactttggtttttttttttggggggggggtataggtgacgtcaagagcgcaccaattgtgaccctttgattttaatggctaaggccaccaattagcaagggtgggtggtttggctattgactttaacatccttgccctggtgagtgaatacttttagctataatgaactt

SEQ ID NO: 24696 - DNA, 628 bp, Gossypium hirsutum
  Clone ID: LIB3582-049-P1-K1-A10
cccacgcgtccgtagaaaatgtggttgatgagagcttagttgttcgagatattgtcaaagggggtccatttatagaggctttgattgaagaaagccatactattggagaaaatgccattgtagggaacctggtagttgaggcaattggaatagatggtaagcctgttgttcaaacttgtcagtctatggatgagcttgagactcgtccagtagagaaaggaggctttgacagtagtgacggtaatgatgatgatctactcttgaagaccctgaggtggcccaagaaatcactattgagaccaaaggttgaagcagaggaaagtttggggtgcgaacagcagaatgttgagaatgtgttagtttcaaattttggtggagaagaagcagctgaagaaagtggattgacgactcctaggaagaatttggagttgaaaatgtcaaaaaagatctcacttaataagtgcccaatgactgttaaagagctctttgacactggcttacttgacggggttccggtagtttacatgggtacaattagtagtaagacagctggtcttcggggcatcataacagatggaggaattttgtgttcatgttccttgtgtaaagggcgcaaagttgttccacc

SEQ ID NO: 24697 - DNA, 297 bp, Gossypium hirsutum
  Clone ID: LIB3582-049-P1-K1-A4
cccacgcgtccgctagatctagagcgggagctgtagatgaaccaggctcacgctcacgtgcatgcgaatgcatagctatagtatagcgataccgaaacctaaatcaatggcagtggccgtacaacgacaacactgggactgcgataaccttgcccaactcaatcttattggagtagatgcacatttcgctagctggagttgtagcgataaggcccaggccgatagcgattgccaacaccagcacatgctcaatgggaatggggactggcactgtagctgtaccttaacatcaaccgc

SEQ ID NO: 24698 - DNA, 335 bp, Gossypium hirsutum
  unsure (1)..(335): unsure at all n locations
  Clone ID: LIB3582-049-P1-K1-A6
attttgagactgacctattcatcagcctgcaaaattacccactttcttgggtgggtactatcatgaagtcagatttcatttttcaaatacggatatttttggtctttatataagcacactaagcataacaaaaccactatttaaaacctctatcacctttattgcctatccacattttttttcgcaatcttcaactctgatttatgctgttgttgtgtcccnttgtttggtcggacaaccccagcatggataactcgaagtatanctacccaatctaaccatcctaaaggtctaactttctactatatataccactcacaaaggacacactttta

SEQ ID NO: 24699 - DNA, 705 bp, Gossypium hirsutum
  unsure (1)..(705): unsure at all n locations
  Clone ID: LIB3582-049-P1-K1-B10
gctccctcctcatctaacacgagcctattttcacttcggccaccgtttgttccacgaagtgaatcccagccaccgcctttaaatactcctgccgccgtcaagcatcctattaaaactccaattcattcgttaaatcctcactccaaaacccctaaaaacccctctctgcccctttttatatatctagtccatcctaatcctttagaaaccgctgttatttgtctctctccgaacatcaatggcttcatctcctgcccaagacgatgcgctgaagaaacttgaatatctctccctcgtctccaaggtcagctccgaactcgagagccatgtagggttttccgataaggttttggccgaattcatcaccgacatgggtcgccactccgagaccgttgacgaattcgatgtcaagctgaaagaaaacggtgccgagttacctgattacttcgtccgtacacttcttactatcatccacgctattctgcctccaaaacccaaggctgagaaggaatccaagaaggcaatcgccggtgacggtaagaaatctaaatntaaagctttagcgattgcagatgataaagatagagcaaaagaacttgagaaggaaattgaaatggagacacgagacctaaaaaaagtagagggtagggataggggcagaggcgaccaggacgtgaagaggagggagaagaagaaagagaaccg

SEQ ID NO: 24700 - DNA, 551 bp, Gossypium hirsutum
  Clone ID: LIB3582-049-P1-K1-C1
aaccaaacaggggaaaaagttaaaaagaatgaaaagtcaacaaataaacagacctaactcacctaaaactactgcttttgaagcaattccgcctaaaatcaagtgatttaagtcaatcttcttttatacaagttttgaaaacaaacgtctctattgtttaactactgattatagcccaccaacagattctttaatgattatactttttgactctaggttaattaatcaagttcatatagatatatatacccttttttacagagaatcttttggtttgaattattgggattttgaagcagctgggaaaaatgggcaagaaaatgaaaatgaacccattgttcatattcttattggggacaattttcacatccatagttgctgaaccagttaaagacaaacaagcattgttagatttcattcaacatattcatcattcaaggcctctcaaatggagcaaacaagactctgtttgcaacacttgggttggtgtggcatgtaacaatgatcattccagggttataggtctgcatttaccaggaatggggtttcat

SEQ ID NO: 24701 - DNA, 601 bp, Gossypium hirsutum
  Clone ID: LIB3582-049-P1-K1-C10
cccacgcgtccgttcatctttctaaacaagctttcctctctttcaagtgtcgaccatcaaccaacatgtccgccgccgccaacgccaccgccaccgccaccgccagtcaccctcacatcttagtgttcccatacccagcacaaggccacatgcttcccctcctagacctcacccaccaacttgcccttagaggcctaaccatcaccatcttagtcacccctaaaaacctccctttcctttcacctctcctctcttctcacccttcttccattacacccctcgtcttccctttcccttctcaccctctcatcccacaaggcgttgaacatgttaaagaccttggcaacagtgggaacctccctgtaatggccgctttaggcaagcttcatgaccctttactcaactggttcaactctcagagtaatccaccagttgccatcatttccgatttcttcctcggttggactcaacgactcgcgactcagttacaaatacccagactcactttcttcgcttcaggtgcttttgtggtctctctatctgattatatgtggtccaacattgaaaaactgaagtctttgagtgaaataaagcttaacca

SEQ ID NO: 24702 - DNA, 608 bp, Gossypium hirsutum
  Clone ID: LIB3582-049-P1-K1-C11
ccttgattttcataatcccatttctctctctctcacacactatatatatacacctatgtgtgtatatatttctatccttttcaacatactttactatcttttctctgtttttttatatgtgtcatcttccttttgtttttataggaggtttgagtttctgataatgaagttatgttatgtttgctagtaccactgttgctttgagttgtcttcttccctactttctttcggcttttaatttaattttctctgcgctccctcgttttctttttataaatatatatgttttgctacagtactctctatatatacatatccatcatcatttcgttttgaattttaatttaatggcttgtcatttcttttcttgctccttttcctcttttgcaaacttgatacttaccacttgaggttccctgccactccctccttggtgtaaatcccttctttttttttcatttttttatttataacaataaatattgtttaatatgtgcaggtgcaacatttctggtttggtttggcccgacggttcggctcacggtggccgaccctgatctgataagggaaatcttcacttccaaatccgaattctatgaaaagaatga

SEQ ID NO: 24703 - DNA, 471 bp, Gossypium hirsutum
  unsure (1)..(471): unsure at all n locations
  Clone ID: LIB3582-049-P1-K1-C2
ctttcaggtgtcggaggtgagcttagagtttatttggaaagattagctttagcagagaatgtacagaaatttttagagctaaacccatttggccagatagctatcactgaaagaagccatgactggggcttctacagccgggttatcgatacttgtgttcattagcaactactacaggttaacatctagttttgatgatattaatcgaaacaagacttagcctaaccaaattacaggagacaacattttagtaaaggtctaaggatgatttatttttattattattttgatagtggaagaaggatagttgatgctaggctcgagctcctaatttgattatatgaaccaactaaactaagcttcgggtttaataaatttttgtagagcaatcctttcttattagggaattgctttttcgaaaatgttccatgtagtttgaccataatttattcatatactccttagcctnaa

SEQ ID NO: 24704 - DNA, 484 bp, Gossypium hirsutum
  unsure (1)..(484): unsure at all n locations
  Clone ID: LIB3582-049-P1-K1-D12
attgtattgtctctgtcaggactgaaccaaactcgtcggtcgaattgccttcaagctaccggggtgaaaattatgatgctgaagtgcaaaaatcacatatagatgcttatcctttagaaagccaaaaaggaggaagaacacgttcagttatcctaaatctgcagaaaaggaggagatctaattttgatcggacctactttgttcgcctctccacttattgtatctgtgtcaaacatnccttctttcgatgcgtataaacacagaagactatgctcttcttctggggaaaaagaaatgccttcagccactgatgaggatgctgatgcagatgtaatggagcagcatgatcaattcattggttccatgcagtctcgtttagtctagttacaggttgttcatcgactttgggaaaggaatgacataaagggggcaatcggtgcaatggaaaaaatgtctgatcatggtacgcttgctgacttgatta

SEQ ID NO: 24705 - DNA, 529 bp, Gossypium hirsutum
  Clone ID: LIB3582-049-P1-K1-E6
accacgcgtacgcacacacgtccggcaccaattgtcgcgctcatttatgattatacatggacataaggatactgaatacaaattgatacaatcgaatacaatgatcatttgaaagggaaaggggtatttatctatttatcgaagaattacagaacttacagctgattaaaaaagaaaacagatcatatgacgctgtagaggactcacacatactaaacaaggcgagcgaaaagcatgaaaccttataaaataacctaaaaggaacatattggacgctcttttacatcgctctgacagcaaaaacatatgcatctcccagcatgatgatcatgagatacagcatgataaaatctaatcttgtaagatcgactaggatcgttcctgacaaactatctaacagagattcaggctctgtagaggaactaactcgccatatagccgagcattaagatcaaccacagatgtaccgactcgcacactatccgctacaggtatcagtgcagtacctgctggttcttcggtttgcaaa

SEQ ID NO: 24706 - DNA, 670 bp, Gossypium hirsutum
  Clone ID: LIB3582-049-P1-K1-F6
cccacgcgtccggttttatcgagttagttttttgttggtgcatagctttaatgacttaaaccaagttgagaattgtttttgttgatgaccttccagattttctattcctttttcggctttaagacaatcttatgtttctgtcttcaatttttttctgggttaaagttgtggatcttatgtttcttgtttcagtttccaggccttaattcatttgtttacaactatagtataagcagatcttgaaattcaaatctgattattgttaatgcagcactacaactaagtgttgcataaccaattcagctttgttttaactatttcattgagcgcacactataatttatgagagatgactcttttgatgacattctagacccatgactgtattgatgattaatattatttgctttagcagtttcatccagctctctgacatattatctgctcttggtccatggaaggtgattgaacacaaaccttatgatcacaaggctgatgtttttagttttggagtcgtgctatgggaaatgcttactggaaagctaccatacgagaatttaacacccttacaagcagcggtgggcgtagtccagaaggatctaaggcctgttattcctcagtatactcgaccaaaattgtagagctgctggagagatgctggcaacaggat

SEQ ID NO: 24707 - DNA, 609 bp, Gossypium hirsutum
  Clone ID: LIB3582-049-P1-K1-G4
cccacgcgtccggcgactccattgcccgcctaagctttggagggaaaaacaccagaacctttgaaagagggaaaacatgagtttgatatctcaaaacccagtgtctagaaacaaggtgaaggttaaaagggatgatgaagtggtttcgattaatgaagatacaaatgacactgagaatgggttagaatctgattctgaaatctctaagttgaaaaagagaaagaaagaaaaagaaaaacagattgaggttgagcaggagacagaaatgaaaaagcttgaaagttttcttttcgggtcgatttattccccccttgaatttggtaaacaagtggaggaaaaagctcacgatgttgttgctgaagacggttctgctttgttcttcttggacagttccacgaacgatgtggaattgtccgaggaaagtgattatgaacagaagacttgtaaggaaaggaaagccgtttgggtggatgaggaggaggaaagaaccgtgataaacatagctaaggtcaataggttgaggaagttgaggaaagaagaggatgagagtgtggtttctggttcagagtatgtctcgagattgagggctcaacatgctaagctgaaccc

SEQ ID NO: 24708 - DNA, 144 bp, Gossypium hirsutum
  Clone ID: LIB3582-049-P1-K1-G7
aatacccttcccgaccgcacgcgtccactatttctaaatcctcaccattctttataaaacatccaaccttacttactctctcattcaacggcggatttcttttatagtatcacctacatccacttcactctccataatcacaca

SEQ ID NO: 24709 - DNA, 524 bp, Gossypium hirsutum
  Clone ID: LIB3582-049-P1-K1-G9
gaaaaatttgtcattttattctataatcttctcaactcagtggatctttttatttttttgcatggagggttttagaagagttgagtctcagacgagttcagaagcttcggcccctgagttgactcttcaaagttcacccgagttagctcgcgatgagcaaaattcaaccttggattcaatgatgtcagaatcaacctctactgaatggacggatgagaaacatagtttataccttaaatccatggaagcatcatttgttaaccagttatatgattccatgagtttccttggctgtaactcgaaggagaaatcgcccggatcgaaatcgtcaaggaaaacacattgtatctcttcaggccagtttaaggtccttcgaggcggtagctggaagaagatcaattttgaaagacctggagttcaactgaataaaagagaccaactgaataaaagagactgttctcattctttcgtggcaagtccttggatccagcatttcagatccgggtctaagtctcgtgttttag

SEQ ID NO: 24710 - DNA, 651 bp, Gossypium hirsutum
  unsure (1)..(651): unsure at all n locations
  Clone ID: LIB3582-049-P1-K1-H9
ttcctattttcacaacatatctctaggggtagctcaccagccgctgaccgtgaacagccgtctccactccggcggctactctgtctccggctcgttcttccatcaagacattgtcgtcgttccggtcaagctgctgcttcctctgtcgccaacgttcaccattgccgtcgccttctccactccagccttcagccgtcgccgtcccaccgtgccgccggtcaatcttatccaattccagattttcttaaaatacagcattgctgtttgaaacaaacatggctgaggaagagaatgaagagataaagtcgttcaaagatttaggtttatgcgacgaattagtggaagcctgcgacagtttaggttggaaaactcctaccaaaatccaagtagaagccattccacacgctctcgaagggaaggatttgattgggcttgcccaaacgggttctggtaaaacgggggcgtttgctcttcccatactgcatgcacttttggaaagccattcgaaacaaggatataaatccgcacctgtgttttttgctttggtgctttccccaacacgggagcttgcaatccaaattgctgaacagtttgaagctntaggatctgggattagcctaaaatgtgctgtgctttgtggaggggtggaca

SEQ ID NO: 24711 - DNA, 499 bp, Gossypium hirsutum
  Clone ID: LIB3583-054-P1-K1-A10
tggtaagggtgggcctagcacaagtaatggtttgcctagcacatcagtaggaaaggatcagcctagacacagtcaactttttgcttataaggattcaaagtctgataaggataggcagcaggtctctggtaaaagagtaaaggataaagttctggtttccttaactgatggaccaatggaccagatgaacgatggtgtggaagtttctagaaagaggaaagctgatgcttgtgttggcagtcagttatgtacaggttctctccaaagtgcgagtgatctcctccaggatagcaaagtgtttgtgaaggaagagttcaatgagaatgacaacaatagggaaaagaaggctagggtatccgagtctagaaggaaggattcttctgcaagtaaaagcagtgggaaactagagaaaaaaggtatacatgaacagaatcaacaaagtggacaatatctaggtagcttagatggtacggattcgttgaaaagggattttggatct

SEQ ID NO: 24712 - DNA, 559 bp, Gossypium hirsutum
  Clone ID: LIB3583-054-P1-K1-A6
cccacgcgtccgcagggacgcttcctaccaggtaaaattccttcttattcttcaatgtttcagttgctaaaatatgtgctagactgttttccattggagggatgtattcaaacctgcatttcttgtattttaccagtagctgttgaatatcatgaatgtaagcacctatcagagacttatctgggtttttcaccttgcactttttaattattgataaggaatctttttttatgattatttattgccattgcatgtctatgcctatttggattgctttgcggaacatgagtgccaccgtagcgaaggctgatacaactcgttgatggatctccaaacacgataaaagaacagtgccttcactatttctagccactattctcacagccgattgccatcatctcccatcatatgctgcatcaaaattattcttcacgaactggtcagatttgttgaccttcttatgcattctcgcgttcttgtctccccaaattgcccataatacacagtaaaaaaatcctttaatgggatggagtactctgcgcaaaaacccaagacattc

SEQ ID NO: 24713 - DNA, 541 bp, Gossypium hirsutum
  Clone ID: LIB3583-054-P1-K1-A7
cggaagaaattagcattgaattaaagtttcttccatacctaatttattatgtgcgctaggcgccgtgtctgtcaatattaggttttccaatacgacatgctatttcttgtttgacttcttatacttcagtaactgtttacttactgtttaatctaaggttgtgatacgacagtgtaatcaaagctgaattgagttcaagttgtaagaagttcgagctcaaacttgattcaaaatttgaggctcaaagttatgctcgagtttcatttttaaagctcgttcttgattcaaaataaagattctacttatcgagcctgcttggttacatgcacaataaaagataagcttgatttcccatgcttaaattcaagcttgattatttgtacaagagctcgaattcaaattgaaaactttttaacactaactaaaaatagaatatatattaaaataaacaaaaaacttgactagtctcatgaactactccatcaagcactagaatagttgaatttgactcattcgatagctcaagctgctcgagctctac

SEQ ID NO: 24714 - DNA, 455 bp, Gossypium hirsutum
  Clone ID: LIB3583-054-P1-K1-B1
gctgtgtccttagaaatctgttcccaaaacgctccttccacaaacagtaaatccaaggaaagtagcaatggtaatttagtcctgtctcaatctcctacagcttctcaggttgggaatagtaaagtggagaaacaaagaggatcagatcccataattaggaacgaagatgtgatgtttgtgatagagaatttgatgaaggaaaagagaagaaattttgtggtggtaggagagtgtatttcaagcgtacaaggtgtagttagagctgtgattgacaaagttgacaaaggagatgctcctcagtctttaagagataccaagtttgtaaacctacccttctcatgttttgggcatctaaacaaagtggaggttgagcaaaaacttgaagagttaaagagccaggttaggagctgtttaggcacagggattgttttgaatttaggagatctcaaatgggc

SEQ ID NO: 24715 - DNA, 545 bp, Gossypium hirsutum
  unsure (1)..(545): unsure at all n locations
  Clone ID: LIB3583-054-P1-K1-C2
agcccattgattttcttctctttctgatcaaaccttccacctcttcaaatggcagctgcttcatctgctactgcaataccatctctggacaaagttgattttctgaagcttcagaatggcagtgatattcgaggtgtggctgtttctggtgttgagggagagcctgtgagccttaccgagccagttacagaagcaatagctgctggttttgctgcatggttgctagataagaaaaaggttgatgcatctcgaaagttgagagtttccattggtcatgattctcgtatatctgcacagaaattacaggatgctgtttctcgaggcattgctagtgcaggacttgatgttgttcaatatggtttagcatctacaccggcaatgtttaatagtacacttacagaagatgaggcaatcttatgtccagctgatggggccattatgataacagctagtcaccttccttataacaggaatgggttcaagttcttcactaatgacggaggtcttgggaaaaatgacatanaagacatcttggaacgtgctgc

SEQ ID NO: 24716 - DNA, 548 bp, Gossypium hirsutum
  unsure (1)..(548): unsure at all n locations
  Clone ID: LIB3583-054-P1-K1-D6
tgagattttcacggtattgccatatcgccatattttcattagctaacggtgctttaggcttgtttcaagtgatcctcatcctgattacttaatcacatcactgtgagctgtgtgatagtcttttgtgctttacattctgtcattttatagttctcatatggttttctatctgtcatctttttttctttttcttttttttttcaaaaatttcatgcattacctactatctgcgaaattttttacccatttttaacgggtgtttgagggcagtaaattggggcttgaattttgtatgggaaataaggttaatctaggatgagattaagtgttctgatctataccttttatcttttttcccccttcttttgacatggaattaaaaatgttccttctaacttacttgttgcatttatgggtctccctctttcatggttctgtttggtgttgcaaattttaatgcattacctgtgctctgtgaatntttgttttccattttggtatttatgtaatgggaaatttgaggaaagtgaattggggctttccatact

SEQ ID NO: 24717 - DNA, 503 bp, Gossypium hirsutum
  Clone ID: LIB3583-054-P1-K1-D8
accacgcgttcgaccacgcgtacgcccacgcgtgcgattaagcctggtatggctatcaacccttctacagttgccatcgacggcctctctgaccagatttatactttggtgatgactgaccctgatgcgccaagggccagcgagccaaccatgcgggaatgggtacactggatcgtgtatgacattcctggatgaaccaaccccactcgtgggaaggaaatactggcatacatgggtccacggcctccactaagcatacatcggtacatactgcagctgctccaacaaaaaggcccgttgggtgctgtgcagcaaccggcgacacgagctaacttaaggactggattttctgctgaccacctcaactagagactgcctgtggctactgtgtatttcaacgcccaaaaagagtccgtaagccgcatgcgtttgatctaccacgcacacttatcactctacatatatataacaaatatataaatcttagactgggtcgactcttt

SEQ ID NO: 24718 - DNA, 565 bp, Gossypium hirsutum
  Clone ID: LIB3583-054-P1-K1-E10
gtgatttgctgaatttgtgtgaaatcactaaagggaaagacaataaagctgttattgctagtaacataatgtatgttgttggacagtatccaaggtttttaagggctcactggaagttcctgaaaactgttgtgaataagttgtttgagttcatgcatgaaacacatcctggagttcaggtaaactaaaaacaaatcatttttatcttctgaaatgtttgatcaaataattctatggcgaaaagaagttcctgaaaactgttgtcaataagctgtttgagttcatgcatgagacacatcctggattacaggtaaactaattgtaaaacggagcaacttatatcttttgaaatttttgatccaatggttcatggtgaaaacatttgtatgcttaacatcatcgatgtgcttgtcattgtagtatatatttttttgtttattatggtgctttgcaaagtgtaattgaaagtataccaacaagttcagaattgccttttatctaatttcgttaatgatcatctcattatgttatgactttgcttttgatgatgataagacaatattat

SEQ ID NO: 24719 - DNA, 226 bp, Gossypium hirsutum
  Clone ID: LIB3583-054-P1-K1-E4
cccacgcgtccgatgacactgagcgtgtagtgactattaatctactggacactgacagcagggctggacaggtggtcatcatccatagaagattcgatcatgctgttgacccagaagaggatcagaggcaactgatgaggctagcacaccatatgcatggaagaagtcagaggggggaggtgcttgagggagaagcaggaggtcgagaagatgcagattaagaagt

SEQ ID NO: 24720 - DNA, 553 bp, Gossypium hirsutum
  Clone ID: LIB3583-054-P1-K1-E5
atttatactttgcagtggattgcatccagagaggacatcgaaatcgagaaagatgccgttaaactgatcgcatcacgatcagatggatcgttgagggatgccgaaatgacactcgagcagctcagtttgcttgggcagaaaatctctgttcttctggttcaagaactggtcgggcttatctctgatgaaaagctggtggatcttctcgatcttgcattatctgcagacacagtaaacaccgtaaagagcttgagggtgataatggaaaccggtgtggagcctttagctttgatgtcacagcttgctacggtgataactgatattcttgctggcagttatgatttcactaaagaaaggcatagacggaagttctttcgccgacaaccattgtccaaagaagatatggagaagctacgccaagctttgaaaacattatccgaggcagaaaaacaactgaggatgtcgaatgacaaactaacatggctaaccgctgctttgcttcagcttgctccagatcagcagtatatattgcctatatcttccgctggcacta

SEQ ID NO: 24721 - DNA, 530 bp, Gossypium hirsutum
  Clone ID: LIB3583-054-P1-K1-F8
ggtttcttgatgggaatgtttctttttatcttgtgagtggtcaccctgatgacttctctagatctatgtttaccctaacataggtgaatgccaaatacgagtatgcatattgtatatgatgaatcttcttccttaaagtagcaaatcatactaagccccataaagtttacactcatttatctagaattttaagctttggacaatgaagtgggcaatgaattctatgttttatgatcactagcaatgtttctaagttgtaagagctatttgttgcaactaaaaagtaaggagtatatcgtttctaaattttatcaatatgaatatgtcaattatagatcctttgagttggcattgtgagctgtttcaaaaaatcactgcttgaaatcctaaattccggggtttatttcaacaaaactttggaaggttcatactaaacatgaaggaggaacattttagtagggtagagctatctctcgtttaggggagctttgtttctttgtcatcaggaaggaaggaaaatgtaacaaatt

SEQ ID NO: 24722 - DNA, 537 bp, Gossypium hirsutum
  Clone ID: LIB3583-054-P1-K1-F9
caattttgagtatgtttggtgggaaagaaaagtgaagggaatgaaaataggaaagacaatcattttccttccctggaaaaagaacaaaccattccattggaatgataatagaagagaaaatgtgagagatgcacattaagtgtataaaattatgcatttttaaaaaaaatcattttcttttctctaatttttctactctaccaagcattgaatggaaagaaagttactttttctcttcattttttcatctttcctaacaagcaaactaatggaaagaacaaatatatttcctatcttttgaattttcatttttttcaattttctgtcctcttaccaagcaaagtcataatgaataaaactaatatgttgaccatacatccaatatccaatattttggcaattctcatgaataaaaataagggaaaataagttgccgctgaaatgaacagcctcatataactattggtcattgtagattgttgagtttagagcacagtgtttaactaggctcttaaaataccctctagttgtgtttct

SEQ ID NO: 24723 - DNA, 459 bp, Gossypium hirsutum
  Clone ID: LIB3583-054-P1-K1-G11
agagaggggcataataatggccctggttcagaggagaaagcatcaaaatcagcaaagaaacagtggggctttgatggtttcaagaaatggaggagaaatgattcagaggatgagacagctcctttgcctctcaacgaaagatcagacagtgaagcattcatggggtcatgccaacttgttgcaactcccatcggagagggaccagacacgaaacagattaagaggaagctgcttgcaaatggagctccatcggatttcttcatcgataaggtagtaggagacaaaataaagaaggagctatcacgaattcaatcagagctctccaccacaaaccccaatcttaaattttcggatgatcaaattgaagcaatttccacaacccttcctgtggacaaggctgacctcaaaaaattctttcccaagtcgtggtgtgatagatatggagaggtagttctagat

SEQ ID NO: 24724 - DNA, 566 bp, Gossypium hirsutum
  Clone ID: LIB3583-054-P1-K1-G3
aaaacaaattgggatttgtggacggcacctattctaaagattcattgccagatgaaatgggttatcagtgggagccgtgtaatgttattgtactatcttggattttgaatactgtcagcaaagaactttcggcaaggattatttttgcatctagtgtagcagtggtctggaatgatcttagtgaacggctccacaaaattgatggctcaagaatttattttttgcatcgtgaaatcatctcgcattttcaaggtactacttccatctctgtatattttactaagttgcgattgctctaggatgaatatgatgctcttttgccgtcttcttcatgtgggtgtgctcaatccagactgaatgttgagcatcttttgcaacaacgtctatttcaatttttaatgggtttgaatgaaacatataatgcggtgcgaagccaaattttgttaataaacccgttactgtctgttaatcacacatactcaatgcttgtgcaagaggagtcacagaggcaacataactatggaagatgtgggtctgatctagtctctttttactcagcacacatg

SEQ ID NO: 24725 - DNA, 232 bp, Gossypium hirsutum
  Clone ID: LIB3583-054-P1-K1-G6
cccacgcgtccgcccacgcgtacggttacaacttcaatatatgtaactttctattaaaaaaaaaagagggggagcaaaaaaaaaaaaaaaaaaaaaacaaaaaaaaaaaaaaacgggcagtcgggcggcaggaataaaggatgcaaacccatgcaagcgagcacgaaaactcttcaatagtgttaccgaaaccaaaaacatgggccggggctcacaacgaacaacagacaaa

SEQ ID NO: 24726 - DNA, 564 bp, Gossypium hirsutum
  unsure (1)..(564): unsure at all n locations
  Clone ID: LIB3583-054-P1-K1-G9
aatgatacagaggagcctttagaggagaatcagatagcatatatctgtcgcgaagctttaaaggttttactcattccatttagtttggaatatataaactggttactaggaaccttagtatcctatgcttgtagagtttccttttacagcatctagataacctaagttacattcgtccttgtaatcattctgccatgcttgatcttcaatggtcatgggatattaacagcacttacatgtgaatcagtacatgctcgcttgccatatttatgtgcttatttgttttcaaacttgccttttaggtatgggaccctagacaataacaattaacgtctcccataaggatgttcatgcattgtataatttgtattcactttctaattaacatgttgtttcttttgatttcttattatggagggccttgattatttgcactcaattttcaaagttcatagagatattaagggtggtaacatcctcttaacagaacaaggagaagtgaagttgggtgagtacattnttcctatatttatttaatcatactccaatactcaggactctact

SEQ ID NO: 24727 - DNA, 414 bp, Gossypium hirsutum
  unsure (1)..(414): unsure at all n locations
  Clone ID: LIB3583-054-P1-K1-H4
acgaccacgcgtcatgttctatagcgaacacggctctagcataggaacttagtgtgaaaggacgagtgcgcaatatgcatatgaaggcggctcatggaaaaactcaggaatctatatatcaccagaggtttgtcatttctttcctgtcgtacttggtccctagacaggtcggcttgaaggcttctagcccttcttctcttgctatgaattattattgcttttattatctgcctgatcaatggatatttttgtgtggagactgaagagtaaaaacattggttcctgagatctatgagggggtggtattaattatctgtgctggttcaacatttaagtataattggctagtatacctcacttntactagcctgaccccccgtttcttttttaactatccatacatctgttcatctt

SEQ ID NO: 24728 - DNA, 544 bp, Gossypium hirsutum
  unsure (1)..(544): unsure at all n locations
  Clone ID: LIB3583-054-P1-K1-H8
ctagttctagatcgcgagggccgccctttttttttttttttttcaagaaaaacccagaataatgcttgaaacaattacagtggtttccatataaacacatacaatcatcaaattcaatccctaaattccccaaccccgaaaacaacaaaaaaaactcaaatcatcaatcaatttccttcaagcacaagcacaagtgctattaacaccagcaatttcatcttcatcctcactcctcaaccacaaaaacccaatcgttaaccccaacacgatcgccaaaaacacgcctccgttgaacgacataaccgccagcatcaacaaataacccaaacccgaactcaacccaaatagtaacccaccggcgatcttcttcgccgaccacttacctgcggctcgattcggctgcgacaacaacggttctcccgccggcttcctagatcgccttacacggtaccttacgtgctccaaatactggtaaaaaacggaagccaaaacacaagcgagaagagtcaacgcgtaaactcgccatgaatncgtccgccatgag

SEQ ID NO: 24729 - DNA, 416 bp, Gossypium hirsutum
  Clone ID: LIB3583-055-P1-K1-A12
cagattcttgagtatgccttaaatatatgaagtgagcagcttgacgagctgaaagtgggaaggcgcagtcgactaaagatggatgaacagggaatgtaaggtgaagacagctgggaacagataatagtgattgagccatgaagttacatcatgaaggacgaaaggtggctagcgaaacaccttcaggtgattgagatagactcaacactactttaaccaaaaccggcgcttgtaaacgcttgcctacggcaattttggcggctcatggacatcaaggacaccgtgaaagtcgagcaattaaaccaaggatcaatttttgcgctgcactacaaattagaggctacatacatgatccttgttactgaaggagatggctatacacaaatgggaagtacatatcttactaggcacagctt

SEQ ID NO: 24730 - DNA, 463 bp, Gossypium hirsutum
  Clone ID: LIB3583-055-P1-K1-A2
ccggaccggtgggccgacccagcctacgcgtacgcgtagcctgacgcgaggccttgaagttagagcaccgaaacagtaaaggttgcaattatggtccaccttatgagtggcaagtctacaataccctaaatggatgctatgggattcctggggtgcactacaagggtcgccagggagacttctacattctggtaatggatatgcttggtcctagtctctgggatgtttggaattctctaggacaatcgatgtcaccaaatatggttgcctgcattgcagtggaggcaatatcaattcttgaaaagcttcatttaaaggggtttgtgcatggcgacgtgaaacctgagaatttctattaggtcaaccaggatcagtcgatgagaagaagctatatcttattgatcttggttagcctctaaatggaaaggatcacactctgataaacacattgattatgatcaga

SEQ ID NO: 24731 - DNA, 527 bp, Gossypium hirsutum
  unsure (1)..(527): unsure at all n locations
  Clone ID: LIB3583-055-P1-K1-A3
ccggtaatgcccggggtcgactccacgccgtaccgcgtttcaggctgtctcttgtcaactaacctaagttnngttttttaaattttctttccttaatttttnnnttttttttnnnttttttnnttttttgggcttaaaacctaaggtntanactaanngagatgtgctggattgagggatatttctaaccttctttnngtgtgtgactaattnggaacttgtgaatggtctaaggctttggttttgcttgnngtgatgatgcctctctagggctagtctttcctcttagtattttgtcggtctgtcctacgccactactaggtgtctatgtgttgggatgtggtctaaaagggatgcttttatgtaggtgattgaagcctcagtctaaagagaggtatctctcactttttaaagtactcctatctgaactatggcatttgtctagctaatttgggatgactatggaagaagattttggcactcatacttttcttacaatgaagctttcgtgttgcctcctgaagagc

SEQ ID NO: 24732 - DNA, 423 bp, Gossypium hirsutum
  unsure (1)..(423): unsure at all n locations
  Clone ID: LIB3583-055-P1-K1-B9
cccacgcgtccgcccacgcgtccgtgcttttctattggaaaacagaaatgaaaaatactgtgttgccaaatccaccgcctagttcagatcccaattttcatttagtttataagctaagatacaagtcctagaatcctgcttttgaccatctttgttctaaatggattgctgtggcttgacgggtccttgtgtattagcaagggtttgagaagtatttttgccagagaatgtgtgagtttttgcttcaaaagaaattgtaaccctccctttgtggggtgggtgaagggggacatttctgtcattggaatcacctatacttcactagcggcattagagtttagactaataatggggaatgtatagttttttcaaataacgagggtaaaaccgngatgatgtgtggcccgttttggaccttacctt

SEQ ID NO: 24733 - DNA, 555 bp, Gossypium hirsutum
  Clone ID: LIB3583-055-P1-K1-C3
aacatcagctatgtaagaaccctaggcctaatcctgatatcaaaaccttattcactgatcacagttgttcgcctcctaatggggctcgtgcacctactccagtaactcttccagttgcagcagttgctaagccttcaacttatgctccacttggagcgcatggtgggccttttcctccagcagcagccgctgctgccaatgctaatgctttagctggctggatggcaaatgccaatcattcttcacctgtccaacctgctgtcattgctgcttctgcttcatcactgcctgttcctcaaaatcaagtttcagttttgaaacatccaagaacaccaccggatacactcggaatgactgagtatggaagcactgatcatgagcaactaatgaaacggctacggtctgcacaatctgttgatgaggtcacatatcccgctcctcctcaacaagcttcattgtcacttgatgatctacccagatcttgtgcttgtaccattcaccagggatctaatgtgacaagcatggatttccatcctactcatcatacactactta

SEQ ID NO: 24734 - DNA, 539 bp, Gossypium hirsutum
  Clone ID: LIB3583-055-P1-K1-C5
cccacgcgtccgtgattatgacttgctagcattggactccatatctggtaaattaaggatatctgatgaattttactgtggcttttatatttcttttagttgtgattccgttatgtacagttttcctataagcaaaccctttccttttgatccttatttttgtttttcttttaataaatctttatattggcaataactgcagtttagtttgcgccttgaatttttatcgcttccccttctagtggttttagtgtggaccagtttgtattaacctgggatgctagtttctttatggctgctattataggctaatagaaagcagagaaggcatttttattgctgtcaaaaaagtttctttaatcttttcctttgtggaaatctatctgaatctgggatatcttcacgtgatgatagtaatttcttatgtactggtttttcaattagggcgacggactgagaatgacctgtttccttgagttgatagcacttggaaagtaagcaagaattgtctctcttcttgatgtagatgcatctttctt

SEQ ID NO: 24735 - DNA, 513 bp, Gossypium hirsutum
  Clone ID: LIB3583-055-P1-K1-C6
cccacgcgtccgcccacgcgtccggctgaccatcttcttcaacctctgagagagaaaaaagattattaaagaagaagaacgggagctttgaatccgatctggagattcatcgaaccttctctattattcaaagcgcatcaagggagactatggtaactctggttccagtccaaaatatccttcatcgccctcacctccaccgcatcaagcactccatcaacccagtaaccaaaaaacttactttttcgaccttctagtgccaacaagtgagctacttcattagccatacagggcacaaaatgagaatcaccctccacagctattctccagaagcccatcgagcttgcaaaaattaatgtcctttcgcatgccctcgcttcagccacaaaggcatcaacaacattttcgaaaagataagtttccgcctctctaatttctcctgttgaatctctggctacaactgctgtaatagcgagtcgaactgggctatgaaaagccgcatcaaaattaatc

SEQ ID NO: 24736 - DNA, 504 bp, Gossypium hirsutum
  unsure (1)..(504): unsure at all n locations
  Clone ID: LIB3583-055-P1-K1-C8
cggacgcgtgggcgtgtatttcattttgaactaattcttcttccttgtttcagatggtttgctccaatacaacacgattttcttgtgataatttatgtggaaatcttcttccttgtggcaatcattattgtacaaaaacttgccatcccctggagacccagccttcttcatcaggacatcagaaaagaagtgaatcttgtgaagtgtgtaatctcccttgccagaaggtgaggatgcctaaatgttcgcacccctgctccctaccttgtcatcccggagaatgccttccttgcaaagtgctcgtgaaacggtcgtgtcactgtggtgcaatggtccatgcatttgagtgcatccattataacaatttatctgaaaaggatcaagtggctgctcgctcatgtgggggcccttgccatagaaagctgcctaactgtacgcatntatgtcctgaaatatgccatgttgataaatgccagcccctgatagtgcagcaaaaaggtactg

SEQ ID NO: 24737 - DNA, 546 bp, Gossypium hirsutum
  Clone ID: LIB3583-055-P1-K1-E11
ttcatgttaattctctctttttctctttgattttccttccctccaaacgccattgctattgttgccaattctacttttggatttgtgatttttttcaccgctttgcttggtgaccgggcgatcggcgttatttgtcaaaggagaagtttaattgatattgaaaaaagaatgagtagggattgattttttttccgcctcgggaggttaattttcccgggacaatttgcctccttttttccagctctatctctcaacttttgcggaacttttctttgtgattgaatgatccaggaggaaatttacatatagctggtgtatggattcagaaatgaaaggagggaaaatttgggaggatatagtattcaagagagaatgagaggactttaatatatatttatataaaaaaaatcatttttagtgtagatattttattttaaactcttagtaaataattagattgcttgagtttgaatgcatatatattgatacatggagtcagaaatattttcacctcctagaggtttgttaaaatgttgtaattgcagt

SEQ ID NO: 24738 - DNA, 550 bp, Gossypium hirsutum
  Clone ID: LIB3583-055-P1-K1-E3
aaaagatttaatgatggttcatctacttcgtcttgcttgtgcttctaaaggaccattaactgatgcactaccacagattataacagagctgtataatttaggtatgttttcagaatgggtgcgggatttagctcttaaatcttctctgacattcaagaaaacctttgatcatgctttccatcagcatatggtttcatccaaagtttctgaattttggaaacctacttttgatttgggcgggcctagtgcatctctcccaaattctcgatatttgagtgactttgaggagctacaaccacttggccatggtggttttggccatgtcgtattgtgcaaaaacaagctagatggaagacaatatgcagtcaagaaaattcgcctaaaggacaaaaacctgcccgttaatgatcgaatattgagggaggtagctacactttcacgtttacagcatcagcatgtcgtccgttactatcaggcatggttcgaaacaggagttgctaattcttttggtgataatgcatgcggttcagagactgcaacaggctccaca

SEQ ID NO: 24739 - DNA, 468 bp, Gossypium hirsutum
  Clone ID: LIB3583-055-P1-K1-F12
cattccttgtctatcccaatttgcattgcccggagacatgcgagcgctttccggcaaaacttgacggaacccagttgtgaataattgaacaagaaattagcacctgtcctgccatattcctcgctctaatccctgatgtcgatcttgaactgtaaatatcaaaagcaatgtcgaagttgattttgataactgacctaaatggattcccccactttgccactggttgaaaatagcccacaacacaacttccaccgaacgcctttgcttgatcgaacagactttaaaaattcagaacaaccttgaaatatatgaaccatggacttcgctacttgattacattgtgcacaagatacattagccatcaatttcatttgatgcaaattaactagattagggatgtaatgccatgaaattattcatattataaccaatagcttaaaaggtgagttgatgtttcccaaagaaaaa

SEQ ID NO: 24740 - DNA, 532 bp, Gossypium hirsutum
  unsure (1)..(532): unsure at all n locations
  Clone ID: LIB3583-055-P1-K1-G12
acctcgtggaacctgggaggacgtatatcgaaatgccaagaaggcggaccgtatgagaaatgacttgcatgaaagggatgaaagggaactcgaaaggattggtcaaccattgtgtatttatgaaccttattttggtgaaggaacatggcctttcctgcaccaaaattctctttaccgtggaattggattgtccacaaaaggtcgaagacctgggatggatgatgttgatggaccgtctcgtctgcaacttcttaacaacccatactaccgagacactcttgatgaatatggggccttctttgctattgctaaccggattgaccgtctacacaggaatgcctggatagggtttcagtcatggcgagcaacagctcggaaggcatccttgtccggaattgctgaaacttcattgttagacgccatcgaaaagcgaaagtatggtgacgcactatacttttgggttcggatggacactgatccaagaaacaacatgcagagggactnttggtcattttgtgacgctataaatgct

SEQ ID NO: 24741 - DNA, 499 bp, Gossypium hirsutum
  Clone ID: LIB3583-055-P1-K1-G2
atttcaacaaaccaccatggctgctgagcttgaccttctctcattgacccaacttcaaaagttagcccaatctcaacaaaaccacaaccatcatcagctcgatactaacttagctaccgttggttccttgatgtggtacccaaagggacagtctcatgaagtagacgatgattcatgggaggttagggcctttgccgaggacacaggtaatgtaatgggcacaacttggccaccgaggtcttattcttgcagcttttgtagaagggaattccgttcagctcaagccctcgggggtcatatgaatgtgcaccaccgtgacagggctcggcttcaccaagcacaccctgctgctgctgctggtggtaatggtgcattaaacaacccaacctcaccatcttctccatccacaacttcctcatccactctcttaatacccacacaagaattcgtcacaaatggtggtttgtgccttctctaccaattacacaaccctagtgat

SEQ ID NO: 24742 - DNA, 533 bp, Gossypium hirsutum
  Clone ID: LIB3583-055-P1-K1-G6
cccacgcgtccgcccacgcgtccgatcaaaagctaggtttttataagaaaaaagttttgtggaagaagattgcttcatttcactaagaaaaacatgggaggcgccgtcaactgtccttcagtcatgaatatactctttgggtacataattcttacagtcttcttggtgctggtttgcatggaaccaaaccaagttgaagcccgagtagagccaccctatcctccagattatgaactaaaagctcttcatgagatagcggcagaacttggaaagaaggattggaatttcagtgagaatccttgcaacaataagtcaagctggtttactccaccgccgacacatgggtctcaggctatcaacaacagtactgttacctgcaattgctccttcaccaacggtgaatgtcatattgtagtcatgtatgtcttactggtcttaagaatttgatgctttttctaatttcttagtcatagacccactcctctttctttttttattttcatcatgttagctttgatttctataccagtgat

SEQ ID NO: 24743 - DNA, 498 bp, Gossypium hirsutum
  Clone ID: LIB3583-055-P1-K1-G8
aagagtctcacccatcagctgcaaggaggtctgtagtcgtacccatgctgtccattctcttattggtcttgtttgttgccaacagtggcgaggcaggtggtacatgtactaccgtggatgccaatgcagatgcatgcttgggatttgctacaggcatggctgccaaaccctgtgatgcatgttgcaatggactttggcagattgctcagaccggacagtgcgggaacgataaaaaggtcatttgccgatgcttgaaggacggtgctaagtttcttgtaatgcaggaccggttgttgtgcatgagctctcaagcttgcaacatcaaagttgacttccctgtctccgtcaacaccaatcgcgagacgattcactaaaatatggcggagttggaacatgcaatgatctgttaagaagctcatgcggtagaaatagagtatagtggggcctgaaataaaactggctaagagtgttggtacttttgtcgaccggagctttggc

SEQ ID NO: 24744 - DNA, 539 bp, Gossypium hirsutum
  unsure (1)..(539): unsure at all n locations
  Clone ID: LIB3583-055-P1-K1-H6
gtcgcccaccgtcgctgcggcgcctgtactgctcccctcagcttgtattcgtctcacctccgaatctctatctcgcatctctgttggtcgactgcgttcttaccaaatctacaagaaaccctaaaatttggctttccagtcctatcaaggtatatcactatcttctattttgtttttttttggttaattggtctttgcagtgttttattttggttaccctgtaaatgaccacttgactacacattccattcacccacacattttcttattcttgtttttctctttggtaattccctaagtattttattcttcaaagtntcttgtatttggtcccttggaaacgatagagaaattcgtgctatctccatagcccatgtgagcttctttctttctttttttctttctatgtgatttttcagtttaagctgactaagattttaattggggtttttggttgtttttcaagtttggatgagtaaagaatttttttttaagttctgctcttctgtttcttgggtcttggaatagctttttttttt

SEQ ID NO: 24745 - DNA, 425 bp, Gossypium hirsutum
  unsure (1)..(425): unsure at all n locations
  Clone ID: LIB3585-019-P1-K1-A1
cccacgcgtccgcccacgcgtccgaaaaaaacagcagacacggtgaagcaacgccaagttactcgcaacaaattcgtataatcagacgcttttctcgttggcttgatctgagtgtaatatttcagagtatttggtgaattatggaacttgtaggaccaatttgtgaagtgctaaagtgcttgggagatcctacgtgtacgtacatagagcatcacannaaaacttgaagaaagaaagaatgatcttcttgcaaaacaacgccaactaaatgctatgaagagtgatgtggagctgagaataaaggcagagtttcgatggggaagacgtgtaaggcaagaagtagagaactggcttctagatgtgcaagccatcaatgacaaaatacaggatattgatgaaagaatgcgaaatgtgtcttgttttta

SEQ ID NO: 24746 - DNA, 308 bp, Gossypium hirsutum
  Clone ID: LIB3585-019-P1-K1-A4
gacacatactagtgttgccagttctattcaaacacactctttatctcagatttctttgatcttcctaggcatgctgaatgtgtacagaatgtacagcaagcttatatcaagtattattgcagaaagtgcaccgtgtgcaccaaacacattctatcataaacttctaccagctgttcagaggccgactctaaagctcattgaaacattattcgacactgcagacaatcaaccacacattgctaaacactgtgagcctgcaatgatggacccagttcttgatgactatgctacgaatatgcctgatgcta

SEQ ID NO: 24747 - DNA, 299 bp, Gossypium hirsutum
  Clone ID: LIB3585-019-P1-K1-A7
ccacgcgtgcggcctcctttcttgctcttccgtttcatccttctccccccaaaccggaatcccagcaataaccaactcgaatacaaaaaaaatggcgacgctatcaatggacatcgccacaacgttcatcaactttaccactcgttgtcgccgccgctccggaataaaaaccacggttctccctcttttcttcaaatcctccaccatcaatacccgctccctttcttccaaaccgttgccttcttcatctctcaccgttttatccacctccaatttctccaaatttaacctctgccgcc

SEQ ID NO: 24748 - DNA, 419 bp, Gossypium hirsutum
  unsure (1)..(419): unsure at all n locations
  Clone ID: LIB3585-019-P1-K1-A9
cccacgcgtccgcttttctccaatcgccaaaatcgcgaaatagcaattaagcgaaggggttcggggttgcaagctaaaaactattagttaaagagttgcagagaaacatatgggggatccttattatagatacccttcagctgcagcagatagaggtagtattccgaggtctgcatttcccggctacttttcttccgaagcaccctcactaccgtctcatcatgctgatatgcagataaatcaaatgcagcctgngaagtatggggtgaatgatatttctaatcctggagtttatcctgagtccaatcttggtggtttatcagctggagcaaatgcaagggcttatccatcttctttcggagatccaagtttaggtactcaaagatggaatgctcctgtaggtatcaattcaaacactg

SEQ ID NO: 24749 - DNA, 411 bp, Gossypium hirsutum
  Clone ID: LIB3585-019-P1-K1-B10
accactcgtacgcccacgcgtctgtccacgcgtgcctgaataagggaggactgctccttctcggccgacgttccaccccgatcaactcaccaataacacccatgataccatcaacaacagatctcgtgtccatattacaagtggcaaatacactgttgatctctgatctgatcgtatacgtatactaaactacaactgtactgtgctcctaagctccatcaactgcactgctgttaggaaggcaactattgaatattatgccatctcttgcatggcagcagctcactactatctatgaaacgatgtcgactcgtgcactgactgcgtatactataccagagggtgctacatcagcattatagactcacaccactgtgatattaactagattattccctgagcacactgatc

SEQ ID NO: 24750 - DNA, 529 bp, Gossypium hirsutum
  Clone ID: LIB3585-019-P1-K1-C6
cccacgcgtccgcggacgcgtggggttgactccagaaggagataatactgctcttactcatgatatgaaggctattcaaagacaggttgtggaagatcaaaaacttctaagggagaaagttcaacatttgagtggagatgctgggattgaaaggatggaatgtgcactatccgagacacggactaaattttttcaagcaaaggaaaggggaagtccaatggggtcaccacttacctcctttctttctccaaatatccacggttctcctagttctcgtaatgctcgaacgcataatagaagcactccgactcagaagccaaaccgggttgtccgttctctgttcaaggaagatggcacaaccccttctaaaagtcatggttcttctgtggctagcagcagccattcagatgctcagttgggttcttcaattgaaaagcatatggtcactgagaatgcattgatcattaatgaattccttcatgggcaacgtgtgtttgttgataattcagtgccattgatgaagataaaa

SEQ ID NO: 24751 - DNA, 255 bp, Gossypium hirsutum
  Clone ID: LIB3585-019-P1-K1-C8
ccagcgtccggtcctggcagaagccgagcgtccatctacacgaccaagtcccgcggtgggagagacatcaagctatagtataccgtaactaaatcaatgactggccgacaaacacaacgacaggactaacaaaaccgtggcgcaactcaactgactagcattacagcacattctcgtttggtcagctgacagcatagcgagcaggaccgctccgatcgcccatcagaacagcagcccaaactgaatatggaacgc

SEQ ID NO: 24752 - DNA, 489 bp, Gossypium hirsutum
  Clone ID: LIB3585-019-P1-K1-D2
gcgcaagatcttaacctaactttaccacctatgcaagagcctggtttatatgatcattaacataactactactactactacaacaacaccgggatggtttcaagaagggtgaattctttcggtccggcaccagcagcaccggtgacaacaacacccgcttccctttttttcatgccagaatattagcccacccttaatagtacttcttttccaattcataaggggggtcaaaggttcccttttggagaaatgaaaccaggttcttacacttattatggaagttgttattatcaaaacaagggacaaagcaattcaaccggattttggaataattatggtgtattaaggggtggaagatcattgttaaaaaaagaaggagaaggaatggagattgtccaaaaagggaccggcttttctaagttttaaatttttttcacaatttttcaccagggtgatattattattacactggcaaaaagttcttttttt

SEQ ID NO: 24753 - DNA, 529 bp, Gossypium hirsutum
  Clone ID: LIB3585-019-P1-K1-E10
cttgtgttacatgggtcagggaggaaatgttatgcagaaaggcaagcaaccagaggaccaaaagcttgaaagaggaaaccttgctttggcaaatagcagatttgtcaagaatccagtgagggtgattcgtggtgaaacaaagtcttcgtctactttgttggaagctagaggtaagacatatgtttatgatggactttattcggtggaggagtttaagcaagaaccaggaccacatgggaagctggtctacaaatataagttggtcagaattccgggtcaaccggagcttacatggaaagttgtcaagaaatctaaggtgcgggaggggctctgcgtacatgatatttcactagggaaggaggtaatcccaatttctgctataaacaccatagatagtgaaaaacctcctccatttgagtatgtatgccacatgatctaccctgactggtgctgccctattcctcccaaaggttgtggttgcactaaaggatgttcagaattagggaaatgttcttgtgtgatgaagaat

SEQ ID NO: 24754 - DNA, 189 bp, Gossypium hirsutum
  unsure (1)..(189): unsure at all n locations
  Clone ID: LIB3585-019-P1-K1-E6
ccaaagtgcaatttgtgcaatggataagtctcttccaatttattgttgtttgtaaggcatctccagtgataaaaggttttggcatttgttctaatcacagttgcaataatatttgtgtgcagattttaccttnntaaaaaaaatatnanaaaaaaaaaataatattaaatttaaaaattttaaaaatat

SEQ ID NO: 24755 - DNA, 553 bp, Gossypium hirsutum
  Clone ID: LIB3585-019-P1-K1-E9
ctgaagccgattggaagtgtctcgcatcatatgctccatcaaaggttattttcactccctgtccgggggcaagtgtttctgtcaccccagatggctcataacacacaaccaattagtctgcattgagagggagagtactgggcaaagatctagggcattcgcaaaaaagatgatccatagtttcggctcctacaccacaacagggacaatttgagttattgactagcttcctgtgctgcatgttgactcgtgtggcacgcaattccatgagagtttccagattgtaatttttatttttgtaggcagatttagaagccatatttttttgtaaagatccctgtagatggattgtaaagtgtaagctctaggatttgaaatctgtaatagtttgtaggcactctgaactgaaaactctctcgaaggctcaccgctccacaccatgaaatcatcgtgaggccctctcgtcagagggatacggaggatccttccagcttcttctttcagaaatgtattacaattagctcacttttccatttccgttcatcgtactgat

SEQ ID NO: 24756 - DNA, 516 bp, Gossypium hirsutum
  Clone ID: LIB3585-019-P1-K1-F10
cggacgcgtgggccggatcaggtcgatcctgtgggcagccgactacgagctgcccaagaccgtgaacaggcttgcgaggagctgttcttaacgaatcaggggtgatactagattgtggggcttcaatgcactgggaggatggcaaaaaagcaaccttccattgctctttcttaactagtttgacaatgaatatcactgctataggaacacatggaaccttgcacctcacggatttcgtcattccttaccaagagcaggaggcctcttatactgcatccgcgaaacccggattcaacgaactcgtaacaggatgggagccgcttccgagcgagcatacggttaccgtcgatctgccccaggaagtatgcatggtgagggagtttgctaccttggttcaaaacattaaaaagaagggcgcgaagccggatatgaagtggcctacgatcagcaggaagacacaattggttttggatgctgtcaaggcatccattgagaaaggttttgaacctgttgaaa

SEQ ID NO: 24757 - DNA, 544 bp, Gossypium hirsutum
  Clone ID: LIB3585-019-P1-K1-F2
atgggcagcaggagcatggcaaatatattgaagagcccattgttagagaaatcgggtacattcaatgtcaatccaagtttgaatgatgttaaaagattggtaagttatgacttaatgagctctacgagtggtttcagtagttattcctcatataagctagatagtgaaacatacatattggatgactgtaaatatggatccaagaccatgcataaaaggcctgtttccatgtcaagtacaaactctacatgctcggatcagtccttttctttaacttctacaacattttctcaaggaatgcttcagtgcacgtggaatggtgggattccgtactttgttttcttgctggataatcaaagggaggtgtatgtagccaatttggcaaaggacggagctgctcaaaataagggtctggactatatgtacttgttccattccagcaagagtagccataaggaacatgggattagtgatcacgaatttgttggtaagatgacagtgtcaacttctttctcaatctgtccccaagattctaaaatcatgg

SEQ ID NO: 24758 - DNA, 567 bp, Gossypium hirsutum
  Clone ID: LIB3585-019-P1-K1-G1
atgagcatttcagggaatggcctggttttgagcttggagaaaccagaattactttcaagctcagaaaagacaagtaacaaattcatagcatgttcttccctttaataattacggtgcttaaataatggatttctttaaaaaacctacaatttcaagtgaaaatttgaaaacttatttttcttattcccgaaatgctattgtaagaaatatgccttctattcctgtcaatctggagtttgattcaattatggacaaaacttagtagttagttttcttgaatttattttgactctattgattgactcgctcaactataattttccattttaagaattatgtttccatagcaagttaaagataacttccagttattgtttaaggccgatgaagccactaatcctagataggttatgaaatggattgaagtgctgtatgggacctcaatttgattcaaatataagtagaatcttttagtcatcgatgtatggtttgtaagtgaaagaattttgactaactaaaaattggttgattgtatggacttctgaagttatcacagggttcaataca

SEQ ID NO: 24759 - DNA, 458 bp, Gossypium hirsutum
  unsure (1)..(458): unsure at all n locations
  Clone ID: LIB3585-019-P1-K1-G12
tagtagatacccaactcctagagtttcgagcaccttttagatgagtgtatgcttttcacaaaaagatataccattcgcaatagaaggcatactcatatccatttgtttatcctcaatcctaagaaaagagannaccttgaatttcttagttannagttggtgaaaaagaagagaaatagcttatgccaagtaattgtgattcaaataccatgcctcctaantaatgagctgacataaagctggggccgaaacagcacttgactgccaattgccactggcaaagattctttgtaggaagccatatgagttatgaaagggttacctcgataaaattgcactttagtttttcaatgtttctcaattgaagtggtgtaagctcaaccagtttctaaagttcacaaaggtacttcaagtatcttgaacaaaattccatgtttgggtgtgtgaagtttccctaa

SEQ ID NO: 24760 - DNA, 125 bp, Gossypium hirsutum
  unsure (1)..(125): unsure at all n locations
  Clone ID: LIB3585-019-P1-K1-G3
gcgctcataccatgttcggntacttcaagcaaaatgaagaggtggagtagcatgattaaaatggatttatgttcagacttgatagcttaggccttcagccttgttcttctctttggaatattggt

SEQ ID NO: 24761 - DNA, 502 bp, Gossypium hirsutum
  unsure (1)..(502): unsure at all n locations
  Clone ID: LIB3585-019-P1-K1-G4
gttgctgttattggcaggggagattgcgcattttggtgccggagtctttctcctagttcagctcgtaagcgtaatcagtttcattacatggctgaatgattggtggccatctgaaaaaaactgcaaaaagatcccacatccatgtgatgttacttgctactgctgcatatattatatgcatatttgggattatcatgatgtacatttggtatgcaccagaaccatcctgccttcttaacattttcttcatcacatggacgctggtacttctgcaactaatgactagtgcttccctccacccaaaaatcaattctggcttcttaactccagggctcatggagctttatgtggtatttatctgttggtgtgccattagaaggtacgaatttaagcttttcagatttaaattaatatgttttagagtgcattcattaacatttcacggttacaaactgcaaccgctaaaaccgaccatnccttcgtatccagtcaccatcttaag

SEQ ID NO: 24762 - DNA, 546 bp, Gossypium hirsutum
  Clone ID: LIB3585-019-P1-K1-G8
accagtgtatcagcaggagaaaccaactgcaacctcacaagcttaccgtcttgggaggaggactgcgcatggttgctggattgtcaggattttggtgctaacgactttgggttcgattacctaaacgacattgaattgaacacgttagagatgggcgataaatcggtagcctgatgcaccgtagttgaaggtttgagtaaaaaattatcaaaactaattactcaaagcttcaagttaggtgcatgtgttaacaaaaatattagttgattttgggtctcgttcctgttttttcataatactaatgctggaaggtccaaggtgataccattacctattccaaagtgataccattaccaaccctcataaatttcttgatgccttgcaaatatggtaatctttcttctgtaaaatgacagggaaacgattattaaatgaaaaaagaagaagaagaagatagagacacattaggcatgataaaaagtgttggtgggttttgtgaacgtgaaaccctctggatatatttatttattatatatgaaataaggt

SEQ ID NO: 24763 - DNA, 467 bp, Gossypium hirsutum
  Clone ID: LIB3585-019-P1-K1-H7
ctcgagatcaacaggaagacgagttccctagaatcagaaacagtagaactaagcatcttttggttgcttcctcaatatgttcttctaggaatttcagacattttcacagttgtagggatgcaagagttcttctacaatgaagtacctgttaggatgcgaacgatggggtttgcactgtacacgagtgttttcgggctcggaagtttcctgagtgccttgatgatttcagtcatcgaagccttcacaagttcaggaggaagacaaagctggttctctgatgacatgagggaagacggactcgacaaatactactggcttttagccttagcaagtactttgagtttactgttctatgcaattttctgcaagttctatacaacgagaattgaactcgaaaatggaaaccgtaaataagctcttttctagtttgatctgtttaataaagttttgtgcaatgctttctgttg

SEQ ID NO: 24764 - DNA, 319 bp, Gossypium hirsutum
  Clone ID: LIB3585-020-P1-K1-A9
ccgagatctaggcttatacttcttggagctagctcggctacgctcctctgcggctccgacggagatggaggaggatgaggaggaggctccggaagagctcaacacgatcaatagctcgggagggttcctggtggtggcgcctgataagttgtcggtgaggtatacgactgttaacctccatggtcacgacgtcggtgtggttcaagctaataagccggctccagtgaagtgtctgctttattacttcgagatttatgtgaaggacgctggggctaagggacaaattgccattggattcaccaatgaaagcttcaagatg

SEQ ID NO: 24765 - DNA, 135 bp, Gossypium hirsutum
  unsure (1)..(135): unsure at all n locations
  Clone ID: LIB3585-020-P1-K1-B7
gcgacccacgcgccgccaccgccgaaagagcaangcccagcacaacagcacccngccagcacaggnaggcagncacgagcaggacgggcagaacagcgccgcncagaccccaggcagancagcaaagncagcgga

SEQ ID NO: 24766 - DNA, 456 bp, Gossypium hirsutum
  Clone ID: LIB3585-020-P1-K1-C4
ggccgccctttttttttttttttttattgaactatgatctgcaatcgaattaccatctctagaaagctatgttatgttctatcatatacaataagagcggaagaaagaaaatgatggaatgcaaagatccaagtgtaaacatccgcacccaatctgaaaggtattgtcccctttttcacggcatcaattgtgaagctttggagtcaaaatggacaatatcctgcaagttgagtgcgggcttcggttcaagtacttaatagaattattctatacctggtagaccatcccaacctctagtgtagatgcatgagcaatgcttagggcgtaagttggtcctctagagtttcttcttaagaaatcatatcccaaaatttatcacaaattttctttatcaaacttgatcttttctttggtcttacatatgaatggccaagtatgaatgccattcctgcctcc

SEQ ID NO: 24767 - DNA, 440 bp, Gossypium hirsutum
  Clone ID: LIB3585-020-P1-K1-C5
cccacgcgtccgcccacgcgtccggcccaatcagtcgacgatcttttttctctatggataaccgcaacgtcgttgtttgcgacaacggcaccggctacgtaaaatgtgggttcgccggagaaaactttcccacatcggtgtttccgtgcgtggtcgggagacctatgttaagatacgaggaatctctcgtggaacaggagttgaaggatattgttgttggagaagcatgtgctgatttgagacatcaattggatatatcatatccggttaacaatggaattgtgcagaattgggatgatatgtacaatatttgggatcatgccttttacaatgaactaaagattaatccaagtgaatgcaagatattacttactgacccacctcttaatccatcaaaaaaccgtgaaaaatggttgagaccatgtttgaaaaatacaact

SEQ ID NO: 24768 - DNA, 431 bp, Gossypium hirsutum
  unsure (1)..(431): unsure at all n locations
  Clone ID: LIB3585-020-P1-K1-D10
taactccccccttactcctaattcattgaccatccacgcacacacacaccagaaaaggaatctgtagatcaagcaaaaaagtaataatggatcctgagaggccccatcgaagtactagcatcaacaacagtagcactagtggcaacaacacaacaagtgagctcttcatttgtttcacttcacgcctttctttttcttcatccatgaaaatctcttccaagtccatccttagtcctggtcgctctagggaatcttcttacatatctctctctcttcatcactcagtaggaggttgagaaataatggtagcatgaaaggtggtcaagctttaccaatgttccctacacatagtggcanaaagagaggctccggttttgacaaccctgagccttcttcacctaagggtactngcataggtcaagttagagtga

SEQ ID NO: 24769 - DNA, 450 bp, Gossypium hirsutum
  Clone ID: LIB3585-020-P1-K1-F10
ctgggacagatgtccgattggcaggttgggaaacgagaagagatggagcaatttcagagaattccaagagttgttgttgaaggtgtgcgattttctacctcaaaacacccagatgaaggcccatcaaaccttaatttggattcttcttatggttatcgcgaatcgttgcagaatcaaactgacctggatggttctagtagaattcaccttgaccaagatcgagctgtgcttctgaggaagctagatgagctaaaggagcaacttagtcagtcttgtgatgtggctgataaaccaaaagaaaaggctccggttgataggggggtagttcctccagagtcttatggttgtactgatagctggtttccaaatagttcttctggattgcagaagccctcaatgcctttctatggacctgataagcatgctgcggaagcaggaccttcttacttt

SEQ ID NO: 24770 - DNA, 480 bp, Gossypium hirsutum
  unsure (1)..(480): unsure at all n locations
  Clone ID: LIB3585-020-P1-K1-F4
caattattcaagcttgtcgtcgccaaaggcgaaagggccagcaccatttttggcgaagacatatgctttgttagaggaaggtgaagaagaagaaagtggagaggaagggtgtagcaagaggaggaagaagatagtatcgtggaacgatgaaggaacgggtttcgtggtttggtcgccggcggagttttctgatcttactttgcctagatatttcaagcacaataatttttccagcttcattcgccaacttaatacatatgggtttaagaagacatcatcaagaagatgggaattcaagcacgagaagtttcagagaggttacaagcaaatgttaatggagataacacgcaagaaaagcgagccaagtgtgttccctgctttcttgaaggcatcttcttcaagtgatgatcatcaagatcatcatcatcatcatcatcatcagatcatgaatgacngcagcagtgctgttgatgaagaaag

SEQ ID NO: 24771 - DNA, 251 bp, Gossypium hirsutum
  Clone ID: LIB3585-020-P1-K1-G12
gccctctgatgctcttcgctattgttttgttcttgggggggacaaaagtttacatatacataaagcccgaaagaagcgtctttgctgctgtagcacacgtgtttgttgccgcttacaaaaaacgacagctgaatcttccatctgatgatgggcaattctatattgcttcattcagcagaagcttgcttccataactccatctcaccagacaggccagtttgcttaaattaacgcggctttaatcgtgggtg

SEQ ID NO: 24772 - DNA, 346 bp, Gossypium hirsutum
  unsure (1)..(346): unsure at all n locations
  Clone ID: LIB3585-020-P1-K1-G9
gttgtaatctcaacaaaccccttccaaatccctcgtaacattttcgtgaaccgtctaatcacttcgctgcctccactaatggcgacccaagccctctctcgcgctctcctctcgaaacccaaagccgtatcttccttcctcttcccctcctcccgctctntctcttccttttcctcctcctcctccgccgcttcctccaccaaaactcttatcaccccatcgccaaccccttctctctccttaactcgtcgccttcgtgccccgcctgctactcactcnttcgtgatcactttcccagctgtaaatcgtctcactcagcagcaggtctcctcatgacccatctact

SEQ ID NO: 24773 - DNA, 251 bp, Gossypium hirsutum
  Clone ID: LIB3585-020-P1-K1-H2
gaagtagatacacgcccaagaatcttggctgcgatttggcattatgtgaagtcaaagaagttgcagaattatgaagacaattccttcttttcatgcgatccacctctgcagaaggtattcggggaagaaaaaatgaaattcattatggtttcacaaaagatatcacagcatttaactcctctaccacctatacatttggaacataggatcaagctttcagggaactgtgctgttggatccacttgctacga

SEQ ID NO: 24774 - DNA, 410 bp, Gossypium hirsutum
  unsure (1)..(410): unsure at all n locations
  Clone ID: LIB3585-020-P1-K1-H9
cttgttagtgctttgacacctattgatcatgcaaaagggcctacaaatgaggttcagccagctttaatgaatactgatttgctttcccgagaatcagagagcatttctcttctactaagtttgctgtctgaggaggatttctatgtgcgatattacactcttcaaattttaacagcccttctcactaattctccaaataggttacaggaagccattctgtctattcctcgtggtattactcgactcatggatatgctgatggaccgtgaggttatacggaatgaagccttactgcttcttacatactngactcgtgaagctgaggagattcanaagattgtagtcttcgaaggtgcatttgaaaaaatttttagtatcatgaaggangaaggaggttctgatgggggtgt

SEQ ID NO: 24775 - DNA, 148 bp, Gossypium hirsutum
  Clone ID: LIB3585-021-P1-K1-A4
ctgacgcctgggactgtaaaacaagaaatgctcggagcttacgaacaagagcttgctcgagcgatccatgcgtgcgcgctcaagtctccagaagttgcaagcacacaggggcatctggagacggatcaaagaggggacagcacatggg

SEQ ID NO: 24776 - DNA, 245 bp, Gossypium hirsutum
  unsure (1)..(245): unsure at all n locations
  Clone ID: LIB3585-021-P1-K1-A6
accacgcgnncgcgcaggcagctctaaacaaggacgaaacccaccgancaaagaagaacaganacggggagaaaggcgagagaaactaaaacggcgcccacagtcaccggcgaggaaaccgctccgttctttggcaaccgcggggccgacagcagcacacgttttcacctgtatggcagcggcagacggaacggccaagagcggtgacggagtggcgaccatgggagagaagaggccagagctgg

SEQ ID NO: 24777 - DNA, 145 bp, Gossypium hirsutum
  unsure (1)..(145): unsure at all n locations
  Clone ID: LIB3585-021-P1-K1-B10
cagaaagcannncnnaccnngangaggnngccagcncnccagcaagccnggannnggcaaagncngncgcannagagggccangagnngcngaagacaggacnnagnaaaaancccaagcatcncagngctagnncnagaagaac

SEQ ID NO: 24778 - DNA, 433 bp, Gossypium hirsutum
  Clone ID: LIB3585-021-P1-K1-B2
gctctctgtttgccaattcctctatgtccgtgttcggtctccttttatgagggacttttcactgttaacgcatctttcacacatcagttctttggttgacaaaaaaaagctctcattctctattcctttcagttcctcttttaagaatctgatatggaaaacaaaagtcaagtgaatggcccttcttcttcttcatcacctatacatcatctcttttctcctaaggactctccttcattatcctgcactagtgagagtctgggtcgtatggtcccacctccaccaccgggtcaagggaaggactctattcactcagatcataccacagatggaaagggacatagcagtggcacaaccaacaatgacaagagttcatccatttatcacactgaaacaatggaaccttgctatctcagctcatctatctactatg

SEQ ID NO: 24779 - DNA, 421 bp, Gossypium hirsutum
  unsure (1)..(421): unsure at all n locations
  Clone ID: LIB3585-021-P1-K1-B3
cccacgcgnncgcccacgcgnncgaccacgcgnncggnctcnncaganngcacaggngaancngangaggancgggnacgaacatcagccgctgccactacagctcgaaaagctaacagncttgcttgtactggtcctttttggaagaaaatgggaccaatgcttaattctgtcagctcagaggatacatcattccttagacaacagctaaatttggcagaagggctcgatgagagtatgtctcagatgtttggagatggatatactgttttgggtggtgtggtgccaaaagatgcgtctactgtttgtgaagaaacggctaaaactcacacttcaactggaggatttgatctaaaacagcttgacaaggttactcctttatgccaaaggggtctctctgcttcgatagaacaagatgaaa

SEQ ID NO: 24780 - DNA, 390 bp, Gossypium hirsutum
  unsure (1)..(390): unsure at all n locations
  Clone ID: LIB3585-021-P1-K1-C11
agcttnccaaatccaaagcagtcgctgctgatgcatcagctgcagcagctctggctttcagcgattcaaccatagcctgggcaggccccttgagatcacggccggaccgagggtgcgagctatgatcatgagagcacaaggccgactgactacatgatcggagtgtacaatgcactaggccaaacagcattcgcatttgctggtcaggcagttgccctcgaaattcaggccacaagtccatcaaccacagaaaggcctacgcaaataccgacgtggaaaggagcactcggagcctattggatacacgccatatgctactttccagtggccatgataggatactgggcattcgggcaagatgtcgatgataatgtactcatggcactcaag

SEQ ID NO: 24781 - DNA, 348 bp, Gossypium hirsutum
  unsure (1)..(348): unsure at all n locations
  Clone ID: LIB3585-021-P1-K1-C4
gacagttatggtgcttacccgactacaacatatccaatgcagagctttactcagtaaagttatgctcaaccaactgctgccacgactttaaccccagcgcagcaacctcctactgctgctgctgctgcagctactcaagcttattatggtggaccttactattgagtatccagtttctttggtgtccgtaattgttccttatctgggtcttatgcttatcgcggactgtttgtaacatggaacagttaagcggaggtggacatttttgggtcttcgagcggnggttagatcttgagaatactaatatgttttagttgacagtagtatagtggtgtcctttttggcact

SEQ ID NO: 24782 - DNA, 284 bp, Gossypium hirsutum
  unsure (1)..(284): unsure at all n locations
  Clone ID: LIB3585-021-P1-K1-C7
cccggccaacncaacnccgaccnccgaaagcnngccgngaacanganncccnncccncgncnncacttttncaagggcggannngcnccacngaccncccgcggnncccagcagnaccgagcncnnaaccgcccngagnngacacaacaaangngggangcaaagaacaagangngngcngcngacccgaggcacggncgnnaccncacagcancagccaaaggccgaggcaagaagagcaccaaagaagnggangaacaaangaacaanngccaaaacaagaa

SEQ ID NO: 24783 - DNA, 456 bp, Gossypium hirsutum
  Clone ID: LIB3585-021-P1-K1-D1
cccacgcgtccgcccacgcgtccgtgcagtttacgaatcaccgtcctagagtctccctcaacttccacttcactcagccttagatgaatgcccagttcaagagcctggaggcacgccatcgcttcagccgacgtttctgttgaaagcagcatcaaagtttattttgactcgtgatccaaccggagcttcccatctgaccaagtggagccttcttttagggcagtctctgaacaagtgctctctcgtttccgctcccgtatggcatcttctgcaagtggcaaaccctatcaaccgtctatagtgtagattactatagttaggcagatagttacgagagcatcgccaaattgtaattttaattttagagggcagctctagattccataggcgcttgtaaagttgtttgtaattaatctgtaattgattctgaccttcatgtaaaagatacttgtatcc

SEQ ID NO: 24784 - DNA, 491 bp, Gossypium hirsutum
  Clone ID: LIB3585-021-P1-K1-D11
gtggtttgtaaacccacgacaagatgggaattgttgaagaaaagactagttgaggcttgcccttgttgttcttcagcttctgagattttttattaccgttctgaattgcagccacctaagcctcctgatgtctttctgcttaaactttgttgttatgataggaaaggccttttacatgatgtgacagaagttctgtgtaatctggaactcaatattaagaaagtgaaagtatcaaccattccagatggcacagtgatagacctcttctttgtcactgataccagggagctattacatacgaaaataaggcaggaggagacttataaagcattggaagatattatgcagcgcattgtgattaactgtaatattgaaaaggttggacctgaaattgctgcatgttctcaggcatcgccgtttctcccatctggaataacagaagatatttttcacttagaggtcttcaatgaactcccaagtgtatcacttac

SEQ ID NO: 24785 - DNA, 351 bp, Gossypium hirsutum
  unsure (1)..(351): unsure at all n locations
  Clone ID: LIB3585-021-P1-K1-D12
gggtnnggaaacccacgacaagatgagaaaacgacaagaaaagacaacaggaggccagcccacacggancctaagggacggaaannnanaaaacccgnncggaaaagcaggacccacagccacctgatggctaactgatcaaactctggagataagatccgaaaggactatgcatgacgtgacagatgttctgagagaactgtaactcactattaagaaagcgataggatgaaccatcccagatggcacaacagatagacctgatgtttgacactgatgccagtgagctatgacatacgaagagtaggcgaggggagactgataaagcattgcaagatattatacagcgca

SEQ ID NO: 24786 - DNA, 336 bp, Gossypium hirsutum
  unsure (1)..(336): unsure at all n locations
  Clone ID: LIB3585-021-P1-K1-D5
gcgacgcgggcggaagcggcgcgaancggncaagagaccgccagagacccaccgcanaacgacgcggggaccagacaaccagacacagcaacagcaggacacgggggaacaaaaccacgaagaaacatccggcggacaggacgatcgcaaagacaggccggagaaggcaatacattaaaaaacaaaccaaccgcaaccgaaaacccacgagtgctaacacaggaaagaccaacaaacggaaatcaaaaaacgcgacagagcacatgcgggccgcaaagacacgcagcagaacgcccgccaaccgcactgccagcaatgagaatccgacagagtcaa

SEQ ID NO: 24787 - DNA, 325 bp, Gossypium hirsutum
  unsure (1)..(325): unsure at all n locations
  Clone ID: LIB3585-021-P1-K1-D7
cccacgcgaacgcggacgcgagggaaaaccccgagccaagcaancacccaagaaacccacgcggcaggcagccaacaccanggangcggcgaaaccgaacgagcagaagaagnccagacaacccagcaaancgaggccccccaagccggaagagcccncccccaccngcnnccgcgacgaacngcaaagacacggagccaagaacccanccncggcggacaccgccgccgcgccaaaccgagagcaggcggnggaggaaagcgacgaggagcncgcggangcaggagngaaaangganacacaagaagaggaagaggaagacgag

SEQ ID NO: 24788 - DNA, 159 bp, Gossypium hirsutum
  unsure (1)..(159): unsure at all n locations
  Clone ID: LIB3585-021-P1-K1-D8
agaaaaaaagaagaaaaaaagcnngaaggnncagagncancacnaaaacgnnaacaacggcaaccaagaacccnngcgaacncngggaggaggagacngaagacccaagcnggcngaaagcngcngnngagcagcaaaagcnngaaaagccnaagaaag

SEQ ID NO: 24789 - DNA, 341 bp, Gossypium hirsutum
  unsure (1)..(341): unsure at all n locations
  Clone ID: LIB3585-021-P1-K1-E10
aaaagggccacgaaancncgaaaaggaacccagnccaaaggaagagacggcggagnncccgaagacaaaggaagaaaaagcgcgcacnaagaaaactctnnaggcgggcatactgctgccatgtctcgcgtgacattgtcgacgataggagagaaggggaagctccttgtatcgggtggaaacgacaagttagtcaaagtctgggatcgctctaggtgtctcgatgcatggcagacaggagataccaacgagctgctacatctgaatatcaagctaaccaaaaaggtaaatcggctctggacaactccagctgaatcggacaacctcgttgtctgtgacac

SEQ ID NO: 24790 - DNA, 361 bp, Gossypium hirsutum
  unsure (1)..(361): unsure at all n locations
  Clone ID: LIB3585-021-P1-K1-E12
gcaagganagagaagaaannncgaaggancncaaggangagcgngcaagaccgagaagngagcgagacgngacgcgagagcagcanaacaaggacgnngaancagcgaaacgngagagagaggacnccaagaaaaagaaggngacngagcaggcngaacgggcaacacgagncaacaagagcgggcngangcnnngnaggaanagaaacccaaaagagggaggnggagaangnacngagaaaaggcgngaagaancggaaagggcnnggaaggaaagagaggaagcncnngagcgagaaaagaaaaancaacnngagcagannaangcnccaaaggaaaaagcggagaaagagnnggaaca

SEQ ID NO: 24791 - DNA, 172 bp, Gossypium hirsutum
  unsure (1)..(172): unsure at all n locations
  Clone ID: LIB3585-021-P1-K1-E3
acgacgcggacgaccacgcacccggaggcgagactcaancaaaccatggaaggcgctccacactgcgacacgaagtcaaggcaatcttctgaggcgtcctatagagtgagtatgcagaggcagcggcaacacagggagggactggaacccccaaattcaagacaacggatgt

SEQ ID NO: 24792 - DNA, 334 bp, Gossypium hirsutum
  Clone ID: LIB3585-021-P1-K1-E4
gactagcatgggcagaatcctctcgcagcggagacaaaacaaagagaaatggaggtataacgaagattttgagccagagccagagtctgacattaagggtatagaggaggatgacttgtcagaggatgacacgctcgatgattatgggtcctcactgcagatacgacggatattatgggttagatgcatctggaaaaaggtggtatgaagcaagctaggtagacgagaaaaaccagcattatcataaagctttgctgctagatgtgcttaaatgggatccgtgtagaagcatctatcgctgaaaggctaatcatctgtatcaagcccgcatgat

SEQ ID NO: 24793 - DNA, 407 bp, Gossypium hirsutum
  unsure (1)..(407): unsure at all n locations
  Clone ID: LIB3585-021-P1-K1-E6
cccacgcgnccgnnncgnnncaannctcncngctnnncctgantnccgataannnccaancgnatctattttgtttcctctttttttttccagagctcagagatcgaaaaagattctcacattttcctttttgcgtttgaagattggtaaatggaaatttggagaaaataagaataattcgttgtgaaaattctaataaacaaaagcaattttttattaaaagaaaacaagtaagaaaataaaataaaaatgacagaaatggaaccgtcgaagaaagtggcggataggtatttgaaacgcgaggttctcggtgaaggcacttatggtgttgtctacaaagccatcgatacgaagataggacagattgttgcaattaagaaaattcgtcttggaaagcaaaaggaagg

SEQ ID NO: 24794 - DNA, 418 bp, Gossypium hirsutum
  Clone ID: LIB3585-021-P1-K1-F12
tgttgatctgattgattaggttatttgtatgcatagtgtcatgatcctagggaacaatggttgtatactagaattggtcttgcgatttaagggggtacaccagttcaacttgtgagtcaccttttgtggataaaattgaagcccgctgagtcgaagtggacaatactaagaacgttactgtggaccacaacacacaaataaccctctaaaacacttgtaaacatctgatctataaatacttaaaagggttatatatgactgatttacattggagaatgcatgttctataaagagagaactttgagctggagataaacaatcggtaaattaaatgaaactcatcgagatgcgatattgggatgattaattaagtggcagcatgttatatgaaggtgagaacttgatgagcaaaggtaaa

SEQ ID NO: 24795 - DNA, 344 bp, Gossypium hirsutum
  unsure (1)..(344): unsure at all n locations
  Clone ID: LIB3585-021-P1-K1-F7
cccacgcgnccgaccacgcgnncgaccacgcgaccgcccacgcgancgacccaacaagggancagagaacagcacgaaaggggngcacnncancgcgngagggcacccagaacancaagagcaaaggagcgagagaaggcaagcaagganacgagggcnaggaacacgccannaagcncaagaagcnacaggggagaaaagaccnngaagcccaaaccaaacccacaaaagaaancaaggcaacaagaaccncanggnannnacaananggaaggcgcaancccaagggacaaaaggccacacaagaaccnngccaagaacacaccaagcgcaagggacccgaa

SEQ ID NO: 24796 - DNA, 465 bp, Gossypium hirsutum
  Clone ID: LIB3585-021-P1-K1-G11
cccacgcgtccgcggacgcgtgggttggataacaagatttatctttattgtggggagaggaccggaaagttcgtacgcgcatgtgaactaaaagggcatacggattggatcaggagtttagacttctcgttacctatattcagtggtgaagtcgatagtgttctacttgtaagttcatctcaggacaaaggtatacgcatatggaagttgactctccgaggttctctagccaatatagagggtacatataaaagaggtgaaataggtctggcatcttacattgaaggtcctgtttttgtcgctggctcattctcttaccaaatatctttggaatctcttctgattggacatgaggattgggtatattcggtacagtggcaaccaccttcactggcagctgaggaagatattggcttctatcaaccccaaagcattttgtctgcatcaatggataagactatgatg

SEQ ID NO: 24797 - DNA, 217 bp, Gossypium hirsutum
  Clone ID: LIB3585-021-P1-K1-G6
agctgatcaaggaaataaggctccgaaacagcttgctgcggaatcatatgcggggaaagctatcgtaagtgtcaagtcagatgctaacgagtcaaaaatgtctacaaatcgcgactgatggacttgattcatcgactgggtattgcatcttaaacgcacctgcctacatcgctcgctgctactaccttgcacgtactgctctgcctggctggcgtta

SEQ ID NO: 24798 - DNA, 231 bp, Gossypium hirsutum
  Clone ID: LIB3585-021-P1-K1-G9
cgcatcttcaagctacaactagagtgacatgcatgcactgcatgagaaggattcatatgggtgcgtcgatgatgctgacgctgcgcatggccattgacgacactcatggggatcagagcacgcactgctaactgtcatataccttgccatcaatgcttacactagcgtgtacgatgactaggaagaatgagaggtaatagcgatagtgctcaagcccaagaaagatgaggc

SEQ ID NO: 24799 - DNA, 136 bp, Gossypium hirsutum
  Clone ID: LIB3585-021-P1-K1-H12
atgcattatctaatagcacttaccaaactgattaaacatgggacaaagcacctacttgggtttcagaatggagtcaaccatcttagaagagctcttcacatgtacccttacagcattttaatcagggacctacttg

SEQ ID NO: 24800 - DNA, 211 bp, Gossypium hirsutum
  unsure (1)..(211): unsure at all n locations
  Clone ID: LIB3585-021-P1-K1-H5
gcaaagcaaagacggggaagcagggccgncgggaagaacacgaggannnccaagggaaagaagggaggaaagaagaaggcagcggancctgcngctaagaaggaccggcacganagcaaggccccnncagcnancactaccagaaangnggggaaaacccncgacngcccgacccagggnaccaagagcgcnnccgaaggacccaaacacc

SEQ ID NO: 24801 - DNA, 261 bp, Gossypium hirsutum
  unsure (1)..(261): unsure at all n locations
  Clone ID: LIB3585-021-P1-K1-H6
cgacgaacggaaagaaaagaaaaacggcnccgcnagagaaaccgcgggangaggnaggggccggaccncaaccggaacgnggccnnggccggcggaggaagagcacaaccaccccacccgngnccaccaaagangaggcggcancaagggcgacgccgacgagnccgacgacaccagggacaccgncgacgccggngncggcncgcagggacaacgngcggaggagcgngnncaanccagngagcaaccgngcaaccaaag

SEQ ID NO: 24802 - DNA, 387 bp, Gossypium hirsutum
  Clone ID: LIB3585-022-P1-K1-A11
tgtatgtggggcctgtgttgatgaaatgatccatcgctaatgggcggatgtcatagcgactgcagaagagtgtgtgatgagaacctggagacaaatgctcctcgttggaatgctaacgtttcaggctatatggacactggctatactaagcaagctcgtatggcatacgataagatgccagagagggatattgtatctaggacttctttgattgatggctacattaggaataactcggttaataaagctagggctacgtgtaatgagacgaaccataagactctggttgcttggactgcaatcatcaacggatctgtgcacaacgagaggttttaggagcgcattgaagctgcttgtttcgatgttaagatctgatacgaggcctaa

SEQ ID NO: 24803 - DNA, 392 bp, Gossypium hirsutum
  Clone ID: LIB3585-022-P1-K1-A12
aagacattgagattaaagggtatctaataccaaaaggatggtgcttttttgcatattttagatcagtccatcttgatgaaaatcattatgattggccttatcagtttaatccatggagatggcaagaaaaagacatacttagcagctataacttcactccatttggtggtggacaaaggttgtgccctggacttgacttagccaggcttgaaacttccattttcctacaccagtttgtcaccaatttcaggtatagtaatgatataagataccataatttccagccatatgattgaaaacccagattccgtatttctctggtaaaaaagacattgagcacataaaaattgattatattaatgaaacaccagctcataatacaagaaagatgc

SEQ ID NO: 24804 - DNA, 417 bp, Gossypium hirsutum
  Clone ID: LIB3585-022-P1-K1-A4
cctcacttcctttcaaatattcgcaacaattgattcaatcacacgatatcagaagctgcaattcagcctcaactcaacagccataatggcttaacttcccaagtctgaacatgtcaagggaccccctgctctatcatatgcataaccttctctcaccaagagcaagagtgggctctgatagctgacattgacaccttgttaagagaggagcataaagcatgttaggagggcccttgatgaggctgctcaaagcggtgctcagctaggtattttgcctgatacttggaacagatcatatataaatgacagctatgcaggctatgctgtatatattgatgcacgaggtcaggctactgcttccacaggtttgctgcttggaggggctcgtatccttaaacatacaatagtccgtgggtc

SEQ ID NO: 24805 - DNA, 497 bp, Gossypium hirsutum
  Clone ID: LIB3585-022-P1-K1-B1
tctcattaaccttccactttaaacacatttcagtttcactaatcacttcaaggaaagaaagtgatcagtgggttcttagctgaattcaatggctatcgccgtcaggagcagtcgaggcggcggatcgggcggagttggggccggtttccgtagtttgttttcttacaggatcttcatctctgccttgttttcccttctcttcattgccactgtctccgttctcctcacttctcgtcctcctccaacgcatcaccactctaggcttccaactggcgcaaatgcttacatgcatagaacatttctggctttgaattcagatcctctcaaaacaaggttagatttgatatacaagcaagccaacgatcatatcacattagtgaaaacatatgcagcttatgcaagaaagttaaagcttgaaaattcaaagcaattgaaaatgtttgatgatttaactaagaacttctcagatcttacttcaaaaccgagtttggttgaaa

SEQ ID NO: 24806 - DNA, 304 bp, Gossypium hirsutum
  Clone ID: LIB3585-022-P1-K1-B3
aagcaaccatataccttacatgttagatgttgttgagattcatccatatggctcgctcaatgcccctgaagcttgcatgtctgctgtcgttgagcatggcgattgatgcaccactgactgatggagccataactcgtgctgatggcttagtggggctctcacgctgacatactttatagacaaggaatgacgatggcgctgctaccacatgacgttgtgccatcgatatgaaagcctaggcatctgtctgagacgatacatacgaacctatctaactagaaatctgtaaatgatttgggtggaa

SEQ ID NO: 24807 - DNA, 488 bp, Gossypium hirsutum
  Clone ID: LIB3585-022-P1-K1-B4
ggggaacagcaaggaatcgccttccacaatcaatcgtcaacaacacatactgcttgcaaaaatcaatgcccgttcacaagcccttgcttcagccacaaacgcatcagcgatgtcagcaaacagataagtttctgctcctacaatttcgcctgtatcatttctggcaagaacagctgttgtagcggtcttcttcttttttacaaaagctgcgtcaaaatttaatttgataacacccagatctgggggtctccagatccctttaaccttagttctaagagtaggacagagtagcattcgacaccggccaatatcttgttcgtaaccccgaataaaccctaacaccgcctgcatcgaaaagttaataccctcatgaacaatcttatttctatggaaccaaaggctccacatggcaattacaatgatccgtttttgttggacatctgcttgcagaaaacatattaacaaagcggatcttgtggctcatcgac

SEQ ID NO: 24808 - DNA, 347 bp, Gossypium hirsutum
  Clone ID: LIB3585-022-P1-K1-B5
cccacgcgtccgggaggaataaatcataagccatcagatacgcctgatccagatgcaactatacaagtcactggtgcatgtggctgtcgaagagagggactagtatataaaaagaatgacgtgtatctggacattgctgcaagtgtaaatctactaatgttttcaaaaggcagtgttgtgcgttgcgatgttactggaacgattcttatgaagtgctttctttctggaatgcctgatctgaaattgctctagaatgataaaattgtacttgtgagagtatcacaacttaaattccgtcctcctaaaagttgcaagacaattgagctggacgatgttactatccatta

SEQ ID NO: 24809 - DNA, 460 bp, Gossypium hirsutum
  Clone ID: LIB3585-022-P1-K1-B6
cttttctctctactttcatggtagatccaacatttctctcacaaacaaaagctcctctgtttattatctctctacagtgtttagtaagtgaatgagagaagagaaagttggttccttttttgctccacttctaaagcaatggccttccagcgttcttctgatctaatctttgaaactctctctggtgttagttttctgttcttttaattgtgcaaatcagttttagatgatggtgaagaagatggaagtaactaggatcgcctgtggagggaactttttgttgatgatcgggggagcgtaatgggtttctgtggtccaatctatgtaacaagtttgctttattttgacgggctcgaaatctggtgttggagcttccccgggaaagcagaggaaaccatctggtagccaaatggccaccaaaggtgattctattcggccttcaactatacaaatctcaaag

SEQ ID NO: 24810 - DNA, 288 bp, Gossypium hirsutum
  Clone ID: LIB3585-022-P1-K1-C12
gtcacctctgcttgtagtatacctcactgctcttactcaccattcccaattatcaacaagcaaatttgcgcacaattctggggaaatggaaacccatcattatccctgaaacaagcaacgaaacccagttcttgtacattcagtaatgagccacagattgccttcatagatgcagaagaaaaaagaaggtttaagtgggtcgagattggtccacgcattacagaagaacagagacaagccattgataagcttccattgaaaatgacaaagcgatgcaaggctttgatg

SEQ ID NO: 24811 - DNA, 349 bp, Gossypium hirsutum
  Clone ID: LIB3585-022-P1-K1-C3
gagctctgacgtaccttgtaggggacgatggctgcaatgttccccagacgcacaactacatcaaccggagaagcagggacgctatagttagtgggccatccacctctgaaattaatggtcaacacagtcaaaacgatcggcaatgccatgggttttggtccgactccggaatcgtggcggctgcttatatgtgcggggcgtaccatgctgacagctgctgtaagaacattgagaagctgagaaacgcaaagtggtgtggtgagatttcatattatgcccttcgctggcttgctagaggacttaacctactttggtgatctcttcagacatggaaatgtgctcattgaaa

SEQ ID NO: 24812 - DNA, 444 bp, Gossypium hirsutum
  Clone ID: LIB3585-022-P1-K1-C4
aatcgaaatcctttcctgtaccattaaaaattcctgcctccttcaagcaaatcaaaacgctgtggccaatgcgtcctgatctccaaagcattctccaaaagatccaggatatcaaggccaaattaaaagatcatcttttaacagaagatacggtgaatgaggaattggatacggtagaagctaagttaaaagaattatatcaaaaacgatcagaggaacaaacaagggaccctgatgcagtcttctctaacactaaggtatgcacatttcttatcattgatattaactagcatagtgttattatttcttaaataagataaacttttctcgtttgtaaatcactcatgcacagacctgttttttcaaaagttttttaacgtgtttagaggaatcttggatggttatattaaatacatgtatctgaatgtgtcgggacatggacac

SEQ ID NO: 24813 - DNA, 364 bp, Gossypium hirsutum
  Clone ID: LIB3585-022-P1-K1-C5
cccacgcgcccgcatacaaatcctttcctataccaacaaaaatcatagcctacttcaatcgaatcaacacactacggccgatgcggagaccacttcaaagcattctccacaaagatccaaatatcaaagccgaaaacaacgatcatatagaaacacaggataccgggaatgaggaattgcataccgtagaagctcagttaaaataatctatcaaaaacaactatacaacaaacactgaaccttgatgcaggatgcactaacactaaggaatgcacattactaatcatagataaacactagcatactgaaattattacataaataagataaacacatctcgtgtgtaaatcactcatgcacagac

SEQ ID NO: 24814 - DNA, 433 bp, Gossypium hirsutum
  Clone ID: LIB3585-022-P1-K1-C7
ctaagagatgcaacagggataaatacacaataatttttgcatatgaagatgcaaacatgagagcgtgtgccggtgcggattaattcataatattgccgtacatcacgtatggcgagcagcctataagtgcatgagagcgcataactgcaagcggatagtcactgttaggacaagtcttgatggctgcaaacagattaagggatcagaacatattgaaaggatacagcttactcactggactcaccgctaccaccgcggtatgagtttgtgttatacgactggattgatgaggttaagcgatgctgcactattcttcatatgcttctaagcagactgcacgatctaagtccaatacatgtgctcacagatgagctcacaatgtacataggtccttagctgctataacaagtcgaaccgtataactgaaagtata

SEQ ID NO: 24815 - DNA, 377 bp, Gossypium hirsutum
  Clone ID: LIB3585-022-P1-K1-D1
cgcgtccgcgacgcgtccggccacgcgaacggccacgcgtacgctcacgcgtgcgcccacgcgttcgggggaaaaggagagcggcagataatatggaaaagtcgttcactcttattcacatggttgccaccgccggtgtcttctacgacgaaaggtgctggtacggattcatggtgggcagagaatcagctcgtcaagaacttggagactagatctaaaatcttcgacgctatcattcaagctcttgttcttcgctacctccctcgcactattgatcgcactatgggagcatagaggacaaggagctgtgaccgaacaacttaccttctgaaggcttgaaactatgcaagactttacggaggcatattgtggacatg

SEQ ID NO: 24816 - DNA, 325 bp, Gossypium hirsutum
  Clone ID: LIB3585-022-P1-K1-D3
cccacgcgtgcgcccacgcgtgcggatacgcgttcggaggcgcgaggataataatgcagccaccagcaattcattagatgctgagaccctatctactttataaaagcatgaatgtgagtgtctgtgctcctggctaacaaggaggcttacaaggaatgagggccggatcatataggagcacacacattcactcaacgtgacttgtgatgagcgacgcataattatcggacggattactctatgctggaatgaagatgggaccgaatgtataaagggtgagtgtaaagcactcttcaagttggggcaatgaaacatctagaacgcc

SEQ ID NO: 24817 - DNA, 315 bp, Gossypium hirsutum
  Clone ID: LIB3585-022-P1-K1-D9
gcaatggtcaagagtaatgcacgcactagcattaagacttgtctgtccatctacgactcaaatgagcgggatagtaccgtcacaactggataaaactgataccttgctatacacatggtggtaactaaatgaggtggaccaacacaagctcatcgaccagatgtctgatgcattcctggatgctagccttgcccagcaccaacacagaatggttgatatgtgaaacatgcacgattaccaacatggtcatgaactctggagagaagatcaatacatcgaatgctcactactgagaagatcgaacgagacgcatgc

SEQ ID NO: 24818 - DNA, 269 bp, Gossypium hirsutum
  Clone ID: LIB3585-022-P1-K1-E11
ctcacgcgttcgtccacgcgtgcgatagaaagtgtcgggctacgactgaggctgtgaataggagtggtggatgatggagtgaatctgattcaatttaagatgatgaaagacttgaagtggctagcacgaagatcagagaatataatttcgagagacttctgaaacaacactctaaaacacgtcgctaatatagaactgcaaatctggtatggtcaggtgactcaatgtactgattagagcgaattaactaacgaacaaacatggctttt

SEQ ID NO: 24819 - DNA, 480 bp, Gossypium hirsutum
  Clone ID: LIB3585-022-P1-K1-E2
caacttacagacagacatccacatctagagaggagatctgaaaagtccaaatcagttgaggtgattgggtttgctacttctgcaatctctgtccttagtaatgctgaattatccatttctgatgatgggtacccccttgtacgtatggatgtggatcagtggttccttccggttccttctccggttaaggctgctatctttgaaagtttttcccggcaaaatatgactgagtctgaaattgatgttactccttgtataaagcagtttgttcagaccgaatatgggttcccaactgatagtggcacagaatttatattttcagactgctcacaagctcttttgagtaaactggtcctttgctgcatccaagaagggggaactatgtgctttcctgctggctcaaatggaaattatttttctgttgccaaatttttgaaagcgaacactgtacatattccccacaactttgagccaggcttt

SEQ ID NO: 24820 - DNA, 276 bp, Gossypium hirsutum
  Clone ID: LIB3585-022-P1-K1-E3
cgtgatagctcttgtatagtgtcacatacaatgaacttactggcgcgtcaattatcaatgtctggacagggaaacaccctgtgcgcgcctagatgaagctcattgcagcatatccgcttcttgtcagctggcggattatctaataggacggtaccgatcgcactatctaacatgagcgcagacttgatgtgccaatgggactcacgctgtagcggcacattaagcgctgggtttgtaagtgatacgcgcacagagaccgtttcactagacagctca

SEQ ID NO: 24821 - DNA, 214 bp, Gossypium hirsutum
  Clone ID: LIB3585-022-P1-K1-E5
gcgcgtacttaaacaatatctatcgtgaaaccctaagcacgtggtgtggtgagagagggtgatcagaactagggggcgacttttatggagaacgtaccgccatacgttgtgttgtacctgttcaacgtgtgcttcaaataagagaacttctactggttgtaattctagatcccatgctctttctattactgcctagcaactctacctgagacca

SEQ ID NO: 24822 - DNA, 435 bp, Gossypium hirsutum
  unsure (1)..(435): unsure at all n locations
  Clone ID: LIB3585-022-P1-K1-E7
cgcactcatcctcgtaaccgccactttcttcttgactcgtctgttcgaccaatccttccatccgtctctatgctgcctcgatcgccacctcaaacagcacgtagacaaaaccaaggacgcccgtcacctattgtggcccgacacgaggtacgagctgcccactctcgtgatcatcaagtatcatatagatctacggacggaggaaactgagtatctgacaggantataacaagtactctttatgtaacgggaagagcacggtctccatattactacaatgcctgtctcaaaggccaccggggtactaaggttaaaatccacaggtgatcgctagaatctcgattacggaccatatagaaagaggtagctgattcattctacgaaccagctaatgataaatgcgatcggatgaagggtggtcttaatgacaaagga

SEQ ID NO: 24823 - DNA, 257 bp, Gossypium hirsutum
  Clone ID: LIB3585-022-P1-K1-F1
ctaaaaggttgcacaatctgattggaacaaacgatcgactatctcatttaccaactaggggaagatgttcaggcgtgactgaacataagtggcgacccagacctcagtgcggatgattacagatagcgctcgagtgtcaaacaggacgaaggacagagccgaagtgtaccacacgcagaatgagtcatatgctgtctgatagtgtcatccaacagaaacaacatgggctgacaaggaaacattaaagggtgctgacg

SEQ ID NO: 24824 - DNA, 261 bp, Gossypium hirsutum
  Clone ID: LIB3585-022-P1-K1-F5
cttggagtccgttcagccggctggatcggctaagcaggcgtgctatctggcctagcgaagtctattgtcaggatcaagattccggagacgaatcgcacacttcctacgcctactatcacaatggaggtggctgagaacgctcataaaattttcttgtatctgaacttaattccgctagataagaagaacatgcctgagccaactggtaaacagtctccacagaatccacatactatcaccgattagtctcatgctccaatg

SEQ ID NO: 24825 - DNA, 115 bp, Gossypium hirsutum
  Clone ID: LIB3585-022-P1-K1-F9
aacacacgtacggatgtagagtgatctctttggctatgttaccacaaggtggttaggagagcggaactgatgctactcagacactgacaaatatcaccataaatggttgtctgag

SEQ ID NO: 24826 - DNA, 358 bp, Gossypium hirsutum
  unsure (1)..(358): unsure at all n locations
  Clone ID: LIB3585-022-P1-K1-G10
ccagcgtcgggggagaatgtagagaacaactaatgaggagaataccagatggaatgattgcatgcttgcaggtcttataaaggcttgtttanggaacttatagtggatgctggactctcttcctccagaactggaataaaatcacagtccgaggaagagtgtgctcagcttgaaggcttcttcctccaacagaagctgctctactcgattggacaataaatttgatggccgatgtcgtagaactggaacatctaaacaagatgaatgcacgtaatgtcgccatggtgttcgctccaaacatgacacaattgtcggatcctttaactgcattgatgcacgctgtccaagtgatgaattt

SEQ ID NO: 24827 - DNA, 323 bp, Gossypium hirsutum
  unsure (1)..(323): unsure at all n locations
  Clone ID: LIB3585-022-P1-K1-G5
ggcgcgacaaccctaacaaagcacnaagaaggaggcgccaaaacggcaccaaccaacacaacccacaangaggcagcaggaggacnncactacgcacgacgagcacancccgnaaacccncaagaggacaacaacancagcccaaacaacgacaccggccccggcacccncgggcccgacaaacggcaccaagaaccacgaaaaagccggacaaaacacccgcgacaaacgacancgaaagaccacncaagcggccaaccagcggcacgggcagcacaacaacnccaacaaaggaacgaccgcnngcgcaccaacggacaaag

SEQ ID NO: 24828 - DNA, 497 bp, Gossypium hirsutum
  Clone ID: LIB3585-022-P1-K1-G7
cctaccatggggatgtaagcatctttgctcatggtggattttgaactcttaccccttgtctagcatacgcatcattgggtcatgcctgggtgtaaggccacccaccatgaggacatgagcactatgaccaaagatgggtggccgcatgtccatgtattgtatgatgcctgttgatctctttccatgaaaaccttccaaggttttcggagaaggcaagagacaaaactctagcagaacttggagacaatatcaacttattaagtgatctatcaattttggacaaatgacactttcaatacatctcctataaccatttgctttcttttttgctttgctcatgttacttttctactgaatttgcagtaaaaggtcgaaggggttcattggagcaacaaggttgttctgggatgaaatgagaggtttttaccatgatgatgactactttcgctgacatgcaccatcgaaacactcgctacaaggagaggcctaactaacac

SEQ ID NO: 24829 - DNA, 443 bp, Gossypium hirsutum
  Clone ID: LIB3585-022-P1-K1-H11
cccacgcgtccgcccacgcgtccggcacaggcttgaagaaaaaattttcgacatggaatctgaaaaccaagttctgaggcagcaaactctgttaagtacacctgttaagaagatttcagagcatctacagattccagtcactccgaatctggaaaatggtcaccatatagatgaagcaaacaaatcaaatgaaccacagagtgtgactccagtgaagaaggtcggcatagaatctaatggcaagttgcaaaaatccaatcttgaacgccaacatgagaacatcgatgcactgatcaattgcgttacaaaggacattgcgttcagtcatggaaagcctgttgctgcgcttaccatttataaatgtcttcttcactggacatcttttgaagcagaaaggaccaatgtgtttgaccgtctcattcagatgattggcactgcaattg

SEQ ID NO: 24830 - DNA, 222 bp, Gossypium hirsutum
  unsure (1)..(222): unsure at all n locations
  Clone ID: LIB3585-022-P1-K1-H4
caanccccgggnccacccacgcgtcgcgcaagatcctaaactactgnttctctactatatcccatattttcttattcttcacccaaatcgtcgcccgtgtcgcgtggctctaacaacaacaacaccctacacacgatatcaataacttgctgaatatctcataacatcggtatctggatatgaacgcttggctcgacaatgcgctgacatatcataggcttt

SEQ ID NO: 24831 - DNA, 442 bp, Gossypium hirsutum
  unsure (1)..(442): unsure at all n locations
  Clone ID: LIB3585-023-P1-K1-A7
tcggatttacagatagagaaagagattgaaaaagaagacgaagaagaaaagtacccaaagttagaaatttcattggttttctttttttgtgatttttttgggttcttcttcagatgctctttcaatggngaaaaatgaggaccccaatctacagcaacanagagaacagagccttgaatcagggaacaatgaaaggcattcgagattcttgtgtgggatggttntgtcgaggatttccaatgagtttagtttcagatgtgtttttgttttgttccttagcttgtcggttttgttgcccgggatcttttggatccttccttttcgttcttcaaactctgggtttgaagctaagctagctattaagctcagcgccccagttcatgcatgttttacactttaaaaaccaatttctgaagcttgtgatcatattcaaaaggtggag

SEQ ID NO: 24832 - DNA, 357 bp, Gossypium hirsutum
  Clone ID: LIB3585-023-P1-K1-B10
gtgccgagcaagtggggtaatatcaagtcgttttatttgaagttgctcgatcgctagactttacctctttatcaagctatgcctgaattgcagacgaagattctcgctgatgctgatcaccatacttcttctaaggaggaaaaacaggaagttgaagaagaggaagatgatacttcccatcagcagacgcagaagaagatgaaaaacaaggggaggatacacgatgttcagtacatggatgatcaagaacatattaatgactataactctgaggctgcaagaaaacatgaaatcaatgcgaatatctcaaccaagaaaaagaagactgcactaaagaagttatgctctattgacatc

SEQ ID NO: 24833 - DNA, 536 bp, Gossypium hirsutum
  Clone ID: LIB3585-023-P1-K1-B11
gcacatacaatcctatggtagagagaaaaggctgagtagaaataaaaatgctactggccggctagaaaaagaatatgtaaagaagcataatcctgaaagctaatggtttggaaaattttgaacagttagctaaagtgatgtatcctataatattttaccacagatggtgcatgaaactaatacatctgactgaactagaatatatgaatcgtttaaaatggatgttatactaagtttatttggttgtgggatttatgatttgtttgaaactcgtctaatatttatgttgctgtccatatttgcttgactttgaattactttaatcttttgttttgaagttttccaatattaatgggattccgttatacttaggaagaagaaaaaatttttattgtaatttcagttgatttatccgtcactgttttacaacaattgcagcatggataatgtatggtgaagcagaaatctaaatctttgtcttctttaaatgcattttactactgttgaaaatatgtactaaaaatactgaaaatttt

SEQ ID NO: 24834 - DNA, 306 bp, Gossypium hirsutum
  Clone ID: LIB3585-023-P1-K1-B3
cccggcccaactgagacgaaacgcttcaatcgaatcatctaaagaactggatggtggatcttccaaaagaaacaagagattggattttaatagtactcgagtttcaccattcccaaatggagtttctcaatgtgctcctctaaacaaccccaaaacgtcaaatgctctatttgggtcatccaagaaatttttttccacttctcttcctgcatcacgaattgtatcccgagcaacatcacctacatctagacgagctagtccacatcgtgctactacacctacaccaactctgtcaagcttttcatc

SEQ ID NO: 24835 - DNA, 275 bp, Gossypium hirsutum
  Clone ID: LIB3585-023-P1-K1-C1
gacaaactaataagatcaagctcagacacagggactactgccgactcaggactgatagaatcataaagtgccgcacaaacgctcggactaccactgtctaataactaagtgtaaactaacacgcccataagatacaaacaccgacaaatgatcgtgccaacaatgggaatcacacggacgtgcacatcgcagaggcctaacgcaccgcatacgactttcctcagatgcacaaacacaagctcacatgaagatctcctacccactccagcatcatg

SEQ ID NO: 24836 - DNA, 479 bp, Gossypium hirsutum
  Clone ID: LIB3585-023-P1-K1-C2
gtgctattgtcatgcttccggacaagtttgggaacacagcattgcatgtagccactcggaaaaagagagctgagatagtaagcgagttgttgcgcctacccgatacaaatgtcaatgcacccaaccgagaccataaaacagccctagacatagctgaggagcttcccctctctgcagaatcctcagatataaagagctgcctttttcgttgtggtgctctccgagctaacgaactgaatcaaccgagagatgagttgaggctgacggtgacacaaattaagaaagatgtccacacacagctcgaacaaaccagaaaaaccaacaaaaatgttcataatatctcgaaggaactcagaaaactccaccgagaaggaatcaacaatgccacgaattcagtgactgtggtggctgttctattcgcaacagttgcttttgctgctatatttactgtgccaggaggggatcaagatagcggagtc

SEQ ID NO: 24837 - DNA, 506 bp, Gossypium hirsutum
  Clone ID: LIB3585-023-P1-K1-C7
cccacgcgtccgaaaggaactcgaagcctacagagaggtccattttcctctgctcattgagcgcttaaagaactcgaagcctgtttctccggcagagttgcggaagttgggaaaatgtccattgacacccgaagaagcagcgcttgttcttgcagctcttggcttcaagcgtggaacttacatttatcttgcagggtctcgtatatacggaggaagttcaaggatgcacccctttaccaatttgtacccaaatttggtcaccaaggaaacactgcttacatacaatgaacttgctcctttcagaaatttctcttctcagctcgcagcattggacttcattgcttgtgcaacttcagatgtcttcgccatgacagactctggaagccaactatcatcactggtatctggattccgaacttactatggtgatggacatgctccaaccttgcggcctaacaagaagagattagctgccattttttcaagagatagcaccataggatgga

SEQ ID NO: 24838 - DNA, 482 bp, Gossypium hirsutum
  Clone ID: LIB3585-023-P1-K1-D1
aaaaaagcgatccaacgtggcgtggaggaatctttcttcaaggtcttctcaacgatattcttacgattccgaaaagaataaattaagaaaaaaaagaaacaaagaagaaagtttgaaaaaaagggaaaaatcttaaatcgcaggcatattgagtggaatagaaaacgggaaaggaaaagcatggcaaaacaaggaagcggatccatacttcaatttgcgccacttcagagttctgttgacgaaggattttggcaccgattatcttctttgaagctcaacaagtttggcatcgacgattctcctattcctatctccggtttctatgcaccgtgctcgcatcctcaagtatcgaatcatttaactcttttagccgaatccctgccttctgactcaaatgatgaatcaacaatgccgcctgttattcggggtaatcgaaataggtgctccgttcctggcattctttacaatactaatacaatgga

SEQ ID NO: 24839 - DNA, 305 bp, Gossypium hirsutum
  unsure (1)..(305): unsure at all n locations
  Clone ID: LIB3585-023-P1-K1-E10
gnncaanatcaagganccaaagaanccagannnaaggaggaaggnnctncngggcgangngaaaccggaaaggcnnanaacnangaccccagaggaaanggccagngangagaggcaacgngaaanaaaagaaannaaagacaaagcncngnnnganngngaacgnggnggngcaccaaaggccacgacagancaannnaagngngggcgnngnggncaacgcaagaccacnnacnancaaangcaaacaaggagngcagangaaccnangacaaccnangnaacanngcgaaacngcaacaacc

SEQ ID NO: 24840 - DNA, 370 bp, Gossypium hirsutum
  unsure (1)..(370): unsure at all n locations
  Clone ID: LIB3585-023-P1-K1-E11
gnggnncaagggnngcgaganncnccgangaaggnncaaanccccgnaacgaaannganagcgagaagggcggagnaggaaccggnggcncaagaggannncgccagagagaangngannaggccgnnggncacnnnngnngncgnnngagacanncgnggacganncngggacccgnnngggnaagcaaagcanncancnanagnncaaannaanaaagaaagggagaaaaanncngggaccccaacgaanncaaggaannanagnnangggcccnangcnaanncanacccaaannnacacnnnggannggagnaccaggggaggaaaccacaggaaagaaagggaaaangagaacccngaagngaaa

SEQ ID NO: 24841 - DNA, 300 bp, Gossypium hirsutum
  unsure (1)..(300): unsure at all n locations
  Clone ID: LIB3585-023-P1-K1-F8
gctcactcngagctggaactncgctgccgggactgcctacgagctatcataccgccagggtgttcaaggcaccgtctaaagatgtcttcaaggtcaaggatccagggacacacatgtaacgtctgcattatcaccgattcagtgcaccacagctgaatcttgctgactctaaatttcacgtactggttcatgggttggcagctacgaccaattttagtggcgggggttcggagggaactaaggtgatcgaacattcgcttggggataactctggagacgatgaaaatactaatgcttctg

SEQ ID NO: 24842 - DNA, 399 bp, Gossypium hirsutum
  unsure (1)..(399): unsure at all n locations
  Clone ID: LIB3585-023-P1-K1-G2
cccacgcgtccgcccacgcgtccgcaccaagctaatacgtatcctcacgaaaatggaaatcccaatggatagttatgctaagcttgtttttaatcaggttgagaacccaaacccatttctttgtactgctcttattcgtgggtattgtttacaaggtcatgttaaggaatctgtttttgtgtactgtgaaatgaggaaaaaaaatgttttgcctatntcgtttacgttttcggctctttttaaagcttngtggtgttgtaatgatgtggatttgggtaggcaaattcatggccagacgattttgattggtgggtttgggtttgatttgtttggtaagaacagtttgattgaaatgtatgttaagttagggtttttaggatgtgggaggaaggtgtttga

SEQ ID NO: 24843 - DNA, 477 bp, Gossypium hirsutum
  Clone ID: LIB3585-023-P1-K1-G4
cccacgcgtccgtcaaaaaaaaaaaaaaactcccaactcggaaaccagtgttttctattttttaatattaaagtcttcttttttcttgaaataactcttctttgaatttttgtttacggccccaatgactccttacgaccgaagatatggcgacccccaatcttaccgtcagcgtagaagtgattttatgggccaaccgcctccggtaggtccaactactatgggtccaggaatggccatgccttcctcttacccccgcggcggacaaattccttacggtggccctcctacagcgcaccctccgtcttttcatggaagagttcacgggcccgtccgaggtcaaggggatttcgattcgtactcgagcttccggccacccgtgggaagattcgagatgggccgcggtggggacataggtcattctcatgcagacaggagaagtgatgggataagaggtcgtgaagcccgccgtggtgg

SEQ ID NO: 24844 - DNA, 402 bp, Gossypium hirsutum
  unsure (1)..(402): unsure at all n locations
  Clone ID: LIB3585-023-P1-K1-H10
cggaatcgaccgagcgacccacgcgnccggaancaacaacgnccncngaancaagngacagcgaagggggggaggnagnngacangaaagcccngagaaacaangcnnngaaaccnnccctagagncagaaacaccaannggcaangcnnnggaacgacccgaagagaaagnnatagaagcnccaacggnggcagaggaagcaacannagcnaacncgcncaaggaacnagaaaacncagaaacaagcccccaaanncggaaacgagnnccncnaacngganngganggngaangnngcagnncaaanggcnncaaggangggcagagcaacacccnngnggaagggacancaaccaagaagaaagaagnnngcangggnggcaagngcaagaagaagggag

SEQ ID NO: 24845 - DNA, 305 bp, Gossypium hirsutum
  unsure (1)..(305): unsure at all n locations
  Clone ID: LIB3585-023-P1-K1-H2
cggacgcgngggcggacgcgngggcggacgcgnggggcaaacnccancgccggcaccaccancngcaccgccgccgaaaccancgncaccaccaccnacagnnccnaaccccaaccacggcccacccccnccgncnccacccaccgccagcggnggnggaaacnacnacnacncnccaccaccaccnncncaagccagcggcgggaaaaaccaccacgcnccaccaccacccggnggaggcagnggnggcangnaccacccnccaccaacgnacaaaaaccacccaacgccaccaccacccaacc

SEQ ID NO: 24846 - DNA, 511 bp, Gossypium hirsutum
  Clone ID: LIB3585-023-P1-K1-H5
cccacgcgtccgagagtatcatagtttccactaggactggaactacctataaggcaatgcttcctgatggatcagcccttgcaatcaagaggctgacgacttgcaagctcggtgagaggcagtttcagtgggagatgaatagattaggccaacttaggcatccaaatttgacaccccttttgggattttgtgttgtggaggaggagaaattactcgtttataagcacatgtcaaatgggacgctatattccttgctacatgagaacactgccactatagattggtcgattaggtttcagatagctttgggtggagccagaggtctagcttggctgcaccatgggtgccagcctccaattctgcagcagaacatatgttccaatgtgattctcatggatgaggactttgatgctaggataatggactttggattggcaaaccttatgacttcttctgatgtttatgaaactagttttgccaagagggatataggtgaattcggttacatagc

SEQ ID NO: 24847 - DNA, 244 bp, Gossypium hirsutum
  unsure (1)..(244): unsure at all n locations
  Clone ID: LIB3585-023-P1-K1-H7
agaaaaagaacggcgacaacgggggannccggaaaccagnacganagagccgaagaagnaaaaagaggcgaagactcaaaaancggagaaaaagggcnagncganncnggncncaccactancccncgcatcnacagncacccacccgaaacnnnanccgaccncaaacccaaacccaagncggnggccaaacccaccaacgaccncncggggacccgnncgacggncgnggagcaaggagccg

SEQ ID NO: 24848 - DNA, 637 bp, Gossypium hirsutum
  Clone ID: LIB3585-024-P1-K1-A6
accacgcgtacgaaaatcatcatcgttttctgaagatagattgggaatcacagaatttggtacaggctctatttactgacatgaactagattagtgggatggaacagacaagtttcttgtttcagcaagcttcaaaggttggattttctcattcgaacattctgcgaagcattatcagtcgagcttgcttgaggtttcctgagctggcaacatatagtagtaaatcaagtcagtttcagaaaaatttaaactcctctaagcttaatggaacatccaaagggcgtgaaggctttcgtaaagtctttgtactttttggaggagatacttcagagcggcaagtatcccttatgagtggaaccaatgtttggctcaatttgcaaggatttgatgatcttgatgtaactccctgtttgcttgctcgctcgattgaccattcatctaatacagattcagataaaaaggacgccggtttgaactccattgaagtttggtcattaccgtactctcttgtgttgagacatacaacagaggaagtccttgatgcatgcatggaggcaattgagccagctcgagctgccttgacgtctcgcttaagaaaccagtgatgaatgaactcgctgagggttgacgaaacatg

SEQ ID NO: 24849 - DNA, 620 bp, Gossypium hirsutum
  Clone ID: LIB3585-024-P1-K1-B4
ctccttccgaattttcttctttgactgccactctctcttttattttttctacccaacccccaaatttgctccagttctttttttaatataatatatatttttctctaattctaaatcatgtgaaataaagtttgttttgtgatcaatttttgctttcttgttgagaaagcttttttttttcaatcataaagaaaaaaaaaagagaatttttttatcatcaagagagatgacagtggcggcgaaagctgcgacgactgattcatgttttggcgaggatcaagtgtggccaccggggtttaggtttcacccaactgacgaggagctggttctttattatttaaagagaaagatctgtagaagaaagctcaaacttgatatcataagggaaactgatgtttacaagtgggatcctgaggagttgcctgcacaatcaatactgaagtctggagatagacaatggttcttcttcagtccaagagacaggaaatatcctaatgcagcaaggtcaaacagggcaactggacacgggtattggaaggcaacaggaaaggatcgtactgttacctgtaattctcggacttgttgagtcaagaaaacgttggttttctacagagggcgtg

SEQ ID NO: 24850 - DNA, 523 bp, Gossypium hirsutum
  Clone ID: LIB3585-024-P1-K1-C2
caacaatcgcattggaaaactgcaaaaaagcccctcttcatttcaatctttcagtcttttcatctggaaaatcgattcatttcttcttcagccactcttgaagatgggtcttttttaacatcagtttgaaacttctacccatcatcggtttgtttccacctattccgccgcatatggaggaaccctattcgattctttgtgggtaaatcgaaagacaaatgaacagaacctagtacataaacgctttgaatcttcaatatatgcttcaatctcagatctattttcctcctctgttagcagtttccttatcaccgattgtgcatctccttcaattttgaccatcgacaaccggagatttatccccaaccggatcgcctgaagacacgccattgcctccgctgtgaacactgacgatatgttctcatgcacatcaaattttatctttaacagtagtcctacttggtgctttgcatcttctcgggctctttatctgaactacttcattctgggcatctgggcaatt

SEQ ID NO: 24851 - DNA, 496 bp, Gossypium hirsutum
  unsure (1)..(496): unsure at all n locations
  Clone ID: LIB3585-024-P1-K1-C9
tgcagttggtttgaacattccattgttgtgcacgtccatgcatgtgggagtttaggcatttgtggtatcgaaaatatctttgctttcatgattagtttagatttgggaattgacatttaataaaatggtttagagttacaaaatgcctagcattcatttcttgggtaatgtttgatatgggtaatgtttgtcagaagttcactttttcatttgagaatatgtgcctaagtagaagggtttaagcagcttggtttgtggtgcggttcaaggagaaaacataagcaaatcaataaaactaaggctcaaaagcaagtaagatagaagcagatctgttagaaaacacagagttcaatcaaccttgagtttctgaagtctactaattaaaaagaaaattagtaagttgggcgttaatctgctttacagtttatttatattagggttacaagtacagctntaatgctagcactagatttaaactcttaactttatacattag

SEQ ID NO: 24852 - DNA, 321 bp, Gossypium hirsutum
  unsure (1)..(321): unsure at all n locations
  Clone ID: LIB3585-024-P1-K1-D3
cccacgcgtccgtctcatttttctcacttaccgagcacagagtttttttccatgaaattcgggaagagccttagtagccagatcgaggagacgttgcctgaatggcggnacaagtttctttcatataaggagctaaaaaaaaaagtaaagctaatcaaccgtacctccgtggggagaccgattaaccggttaaggctgaatcaaaattttggagacgttgtttatgttggagataatgtcggcgacggaaatggtttgtcaagagaggagaccgattttcttaatctgttggaagatgagctcgagaaattcaacacgttt

SEQ ID NO: 24853 - DNA, 238 bp, Gossypium hirsutum
  Clone ID: LIB3585-024-P1-K1-D8
gtccaacacacccttatatcttgggacatactacgtcatgtcaaggatagtatattcctcatatatggaccggagcgtcccttatctgtgggggcgaggaagaataatgaccaaatgattgttgacaacagattgcacactataagagctaatacatctacatagtctaaaagaaagtgatcagaattatcagtggcggactcattggataagcaggaatatgcagcttcaagggtgc

SEQ ID NO: 24854 - DNA, 562 bp, Gossypium hirsutum
  Clone ID: LIB3585-024-P1-K1-E1
gaggaggattgaagtgttgaactggttagcaaagcaagcaaatttatccgagtgtagtaagtcgatggggagtggagcgcgtggggttggatcagagttcaccaaggctgaagttcagagacatattgtggatactttaaaagcttcagtagttgagccatggttggctgctcatggagatccatcaagatgtgttctacttggggtgagttgtggagcgaacattgtggattatgtggctcgcaaggctgtcgaggcaggcaagcgattggatcctgtcaaggttgtagcacaggtcctaatgtacccattcttcattggaaatgtcccgacacaatcggaaataaagttggcaaactcttacttctatgataaggcaatgtgcctacttgcatggaaactctttcttccgaaggaagagttcagccttgaccatccagccgccaatccacttatttcagacaggggaccttctcttaaattaatgccaccaacactgaccgtcgtagcagaacatgactggatgagagaccgagcaattgcttactcagaaacacttaag

SEQ ID NO: 24855 - DNA, 351 bp, Gossypium hirsutum
  Clone ID: LIB3585-024-P1-K1-E10
gccgctcgaacctctgaagaaaggtcgagttaaaaaatgggatctaaaacggtatgatattctaaatggtatattcaaggcattacacccgtcacataagactttcaaaatcacgaagaaactgaccaagaagatgaggcagaacatgcctatccctaatcggatccgtatgcgcacccataacaccaccaggaacaccgcgaagcgcaagcactggcgccggaccaagctcgggacctaacctggatgcgcctctttaggagccttgtactcacgcaaagccctacgcaaaggtttatttcatgaaatattgaaggggacttgaacgtgtccataaaatggttaatgaca

SEQ ID NO: 24856 - DNA, 367 bp, Gossypium hirsutum
  Clone ID: LIB3585-024-P1-K1-E6
cccacgcgtccggccttagaccgcgggcgggcgaacgaaacgatccaagctgacgcactcatacatgcgacaaagcagctataagagacggtcaactgaacacaacacactgggcggcggagtacaacgcggacaacagtgaaaccatgtctggccccaacgacagggccgcccacaagattctcgacaccccaggaggcgtagtaccgataagagctcacacggtcggccgaactaacagtgggacactctggctggcgaaggacacacacgctgaacctgcccataaagcgcagcatgtgtgacacatactcgcaaaatgaccggatcacatgccagacccctagggcccgcaccttgcgagaaa

SEQ ID NO: 24857 - DNA, 562 bp, Gossypium hirsutum
  Clone ID: LIB3585-024-P1-K1-E8
caaaattcttctccaagtcttggtttcgtgttagaatgttgtcatccatcgccatcttccatctcttactttgatactctctctcgttttcttcaccaaaaatgtctttggctgcccagaagcaacctaaggacttgccaagtcttctcttttctgactttatgctcttttgttctttccttctctctcaccctctgtatttctcttacttcatcttcttctccccttacctcttcaaggttttctctttcctttcccctctcttcgtcaccactgcccttttacttcttgcctttcttactctcactcccacatttttcaaccatggtggggctttccacctcgacagctcaccggattcgaaggcaagtttcctgcttactgcctaccgaacgcttgttgaaacgttgaggtctaaagttgacgatgctgaaagcgatggctttggatgcttcgaagagcttgaagcatttaagatcatgtttgaagcgtcgactactgtcgtcgaaacttgtgaaaatccagatgatgttttggcggtggagtcccaaggagagtgctt

SEQ ID NO: 24858 - DNA, 598 bp, Gossypium hirsutum
  Clone ID: LIB3585-024-P1-K1-F1
cggacgcgtgggcaattctacaaattttcaccttgcgagaaagctttaatggattcaggttgtgttgccttgaaagtcaattctcatctggtgaatgtaaggaatagtggctttggcaatggagataacacatttctgggggagagaattagagggagtcttaataacaacagtgtttgggtcaatcgggtggcaaacagcttaagcacttataataagaaagctatgaagatcaaacctggcgcttttgctgttatcacatcaaataatcccagagaagccaagaccttaccgtcacgtcgattcaacagacaaagagttgaccccaagaatgtggcttcagtcatattgggaggaggtgcagggactcatctctttccccttaccagaagggctgccacacctgctgttccaattggaggatgctataagctgatagacattccaatgagcaactgtatcaacagtgggataaacaagatttttgttctgacacagttcaattcagcttccctcaaccggcacgttgcccgcacgtattatgcaatggtataaattttggagatggttttgtggagattttgcagccactcaaaca

SEQ ID NO: 24859 - DNA, 479 bp, Gossypium hirsutum
  Clone ID: LIB3585-024-P1-K1-F12
gtttaacaaacacctccatctccatctccatcacattcctgcataaaagtcctttcctcttcttaatcacactcacatgaatcacaaacccaaacatttcttttagatttgttttctttttttataccgtcattgaaagtcgcttttcaatttcttgtttatcggtatatcaagttatatatgggtaactacgttactgctcttgcatgtcctccgtcggatacggccgggaaggtcattctttgggacgggtctgtgcaggattttatttggccgttgacggcggcggagctgatgctggagcatcctcaacaagtggtggtggagttccacgaggcggtgaaccagaagaggccggttccgttgccagctgatcacaagctcgacgtgaaaaaggtttacgtaatgctgcccgtcaaacgagggaagccgacaacgctgtcgttcgaggaagctcgtcgtgtgctgtctagtgcgaa

SEQ ID NO: 24860 - DNA, 638 bp, Gossypium hirsutum
  Clone ID: LIB3585-024-P1-K1-F2
cggacacgtgggaggagatttgcagctttatatgttggtaaacatatcgttgcactggacaatgacatagatgagattgtaggccacacatatttatttttgaaagagcagcttgaactttcaaatatgccacctccttccgggatacttcatggaaccataatcgatcaatttatcacttgcggtaaatcaagagatgtcgcccatgagcttgcttcgcagatttggctggctgttctcgacaatttggaggaaaaccagcacacatttcttttacttaagcgccttgctcttgagggggacgtttttcttccgttcccgtactctagatcaatcaaagtacaatggagggtgttcgagaagctcttcacagatttccgcgactgcttcgatcaggcagattactatgatgttctggcaatagcgaagaacaagtttcaaccgattccatctgcatggtttaaggttcaaagatgtacatcaaattctttgtaacgatctattataatgaagaaatttgtaacattaaaagtggcgttgtttttcaatcgaggcatcaaataagtacacgtttcaatacaaattgtaagctcgatgaactaacatcaaagatcaattaaaagatctcaactcgacac

SEQ ID NO: 24861 - DNA, 639 bp, Gossypium hirsutum
  Clone ID: LIB3585-024-P1-K1-F3
cccacgcgtccgatgattcggaatgggcttaaagcaaatgtggcagtttatacaactttgatagatgcatttgcgaaatgtggaaagatggaagaggcactagagctatttgagaggatgaaaactgatgggcttgaaccagatgaagatttcatatggggtcattgttaatggtttgtgtaagagtggaagattagatgaggctatggagtatctcaggttttgtcgtgctaatgaagtggcagtcaatgccatgttttattcgagtctcattgatgggttgggtaaggctggtagagtagatgaagctcagaagctttttgaagagatggttgagaaagactgcccacgggattcatattgttacaatgcccttatcgatgcccttgcaaagtgtgggagggtcaatgaagcattaatgctgtttaacaggatgaaggatgaaggatgtgatcagacggtttatacatacacaattctcataagtggactgttcagggagcgtaagaatgaagaggcaatgaagctctgggatatgatgattgataaaggtttcacaccaaactgcagcttcttttaagggctctctcaattggggctttgtctattaggcaaggtaacaagggcctgcaagatttt

SEQ ID NO: 24862 - DNA, 263 bp, Gossypium hirsutum
  Clone ID: LIB3585-024-P1-K1-F4
cccacgcgtccgcccacaggtggggaacgaggtgttgaaagcattaaaccttgggttaaacttagcagtaaccgggggatttcgcaggtgtttccggttgtttttcaatgagggtttgaatgggggagtgaacatattattggaccggtttttgcaatgggtgtgggagttaataccataggaaataaaaggttaaaccgagctttggaccgtggttaatggataggcttggcgatagccagtgcgattttaagacccaattt

SEQ ID NO: 24863 - DNA, 504 bp, Gossypium hirsutum
  unsure (1)..(504): unsure at all n locations
  Clone ID: LIB3585-024-P1-K1-H1
cccacgcgtccgctaaacttggttctgaatctgggaattgcagtggtgttaaggtggagcaggaagttaatagggttggaaccagtggtggtggtggtggtggtggtggtggtggtggtggtgggggcggtggctgtnggtgcataagcagacatcatggcggtggtgggcaatggaagccagtcttgctgagcattgcagagattggaatttgaaacgcagtgtcatttgcatgctgttattcttttccctcacccaataaaattgcaatcaactatatatatataatcaagttattatctattttttttttttcctacatggatagagtgtgtgttagatgttatattatgtggacatatagaagattataatatgtaatgtacaattttctaaagtgttaaggttaatgatgtttgagagttttttaaataaaaaaattttgtatggagtgctgtattaagacagatgaaaggaagggttgaggtctgggaaagtgaaatt

SEQ ID NO: 24864 - DNA, 248 bp, Gossypium hirsutum
  unsure (1)..(248): unsure at all n locations
  Clone ID: LIB3582-022-P1-K1-A1
ncttttagcgttcgcttgcttgttctcttccatggctgctgagctcagatagaactcttaactaaccgacaatagcactcaccttgggggctgcctcagcatccttagtcacgtggccaatatccatgccaactacagaactcgaccgatcaacagactctgatctgtgctgggaagcaggctgatgatactgagtcacttgaccactacgacgatcaaaacgagtgcactgtcgactctgtcctacg

SEQ ID NO: 24865 - DNA, 490 bp, Gossypium hirsutum
  Clone ID: LIB3582-022-P1-K1-A3
cccacgcgtccgattccgtccatgtggactattaaattgtggaaatagttgctttgccaatgttgttctgcagtgccttgcttctactcggcctcttgttgcttacctgttggagaaagggcatcggaaagagtgcagacgtaatgattggtgctttctatgcgaacttcaaactcacattgaaagatcaagccaaagtcatcatccattttcaccaactaatattctctcacggttgcctaatattggaggtaatcttggttatggaagacaggaggatgctcatgaattcatgaggtttgctattgatacaatgcaatcagtctgccttgatgaatttggtggagaaaaagcagttgatcatagctctcaagagacaacacttattcagcacatatttggtggtcatctacagtcgcaagtgatttgtacaaattgcaataagatttcaaatcaatgtgaaaatatgatggatttaactgttgaaatt

SEQ ID NO: 24866 - DNA, 468 bp, Gossypium hirsutum
  Clone ID: LIB3582-022-P1-K1-A4
cccacgcgtccggagacccccaattttgaccatactcaagaggtctgttcccacgctccaactcgccggtatgcgcaccaaacgcaaacccaccatatcgcaccgccggtgctggtgcttctaactgtggctgccaaccacggtcatatcaatagtaacaccgctgttcgagatgaccgaatcgattgcagatctgacattagattcatggacggaagcttcaaccacgaccacgaccaaaagggcgaccaccacgaaaggccccgtccgtcggctgcaactgagtcccttccacaatgttcacagccaccaaaacattctaaatagagcaaatctgtcgagcttcatattcaatcagagcatcgacaagctgttgaaaaggtaacgaaactggggagagcgacgcatgggagacaatggcttcaaactcagatgagagtccagcgagaaggaccaccgttcgttcag

SEQ ID NO: 24867 - DNA, 418 bp, Gossypium hirsutum
  Clone ID: LIB3582-022-P1-K1-A5
acgcggacgcgtgggcagcatcaatactcaggtcgaccgcgtaataatatgacgccgttttccatatattgaatgtgaaagctggtagacttgttaggatattagggtaaaaaagaccccgaacttgtcgagttccgatctgtcccgaccctatagggtaaggtgttttgggcaggtgtaggtaaaattcaacttgccttaatatatttactaacgttaattttagggttaatatgcaagtttgtcactgtgttactatagtccattatgattggtaataaatttatcactatagttctatattgaaaaaaaaaaaaaaaaaaaaaaaaataaaaaaaacaaaacaatagaaaaaagcaaacatcagaaacttaagaaaacttactgggaaacgatcaaccatcttcctacgttaaac

SEQ ID NO: 24868 - DNA, 493 bp, Gossypium hirsutum
  Clone ID: LIB3582-022-P1-K1-A9
cccacgcgtccgcccacgcgtccggaaaaaaacccaaacttttaaatggatccctgccattttgtaaggatcctggtgggtaatttagccctaaaattcccatcaacacagtcatcttcttcatgttattgcaagattaaactcaagaacttcccgcaccaagtagctacaatcccacaacaagacatagaaaccaacaactgttcttctcagaaaccgttggctgcttgttttagtcttagcaagtctcagatcgacaacatcgtctcgaaatggggttcgtcgtataaagtttccatcgaggtttacgccggtggcagcggaagcggcagtacgtgtgggttgtcgtcagggaaattactagggaaggtctcggtgccgttggatctacgcggagctgaatcgaagccgtgtgtggcgcacaatggatgggttactataggcaaaaatggttcatctttacagttgtgtttaacggttagaaccgagcgag

SEQ ID NO: 24869 - DNA, 524 bp, Gossypium hirsutum
  unsure (1)..(524): unsure at all n locations
  Clone ID: LIB3582-022-P1-K1-B4
aaaaaatagtatgtgcatgagattcactagattttcactagattttcgttagtagcattttagagtatgattggaattgttacataagtaaaaaattaagaagagattatgagaagagaaaaacttgtatgcattcacgttgtatcctagtagatctccaattttaacatagcctgtagagatgaaattgttttgaatcttatcatggacaaaatgatagtcaatttcaatatgcttagttttttcatgaaacactgtattatggaatatatgaagagcagcttggattcacaccacagttttgccagcaatgtagtttttaaactgacttcacttaatagttgatgcaatatgcccccaaagtggatcttctgtcaatcaccgatcctgctcaatctgcatttaagaaacactcaacgttagtgtgttcataatttttacgtaatagatgttgtcctagagttccctttaaaaaacaaaagatntgttccagagccgnctaatatctaattgttggagaagac

SEQ ID NO: 24870 - DNA, 443 bp, Gossypium hirsutum
  Clone ID: LIB3582-022-P1-K1-B5
cgtacgcgtacgcggacgttcgcagagtgtaagctcatgagcactgagccaaagacgcacgttattgttgggaacagccatgatgagtgctgaactaataggaaaacggtgtgaccatggggctcacgtagttgcagtaaaagcgtgacttctatttagtggcatacaactactgggaaaccgttatattgcgctagcagctactttggataatgaatagctatcggttgcacaccaaatgcaggttaaagactgtctattataaatttctggaacaccatgataacatgattggtaaatggaatgaagcaactggaacttgtcgagaactatgctacctgaagaatcatacttcagacatgtttaaagagacatttcccttttataatagactgtgaaatatccttaaaattgatatcacaaataaatttgatcccttatta

SEQ ID NO: 24871 - DNA, 237 bp, Gossypium hirsutum
  Clone ID: LIB3582-022-P1-K1-B7
ggaaccttacgagcctttgtggatcaaaggaggtggtcactgcaacttggagctataccctgattacatactccatctttgcaagttcatttatgaaatggagaacacgacaacagcgattcggcttaaaaggattcggcaaagtctcagtctaccaacaaggtcaaataccaactcttcagctcagggtgacgggtgctgtaagattaaaatatgccaacctaaatgcctcaaatg

SEQ ID NO: 24872 - DNA, 372 bp, Gossypium hirsutum
  Clone ID: LIB3582-022-P1-K1-C12
cgcgtccgtgcacgcgtccgtccacgcgtgcgtgcacgcgtgcgttcttagagaggaggaactggatctggagtgggaacacttgtgatctcgaagatcagggacgaatacatatatcagatcaggatccccttcgctggactagcatctcctaacgtctttgataccgcatcggagccttacaatgctactctgtcacttcatcagttggttgacaacgctgatgagtgcatggatctcgataatcaggccacagtctgatcttatttggcccgacacttaagctcaccactatgagctaacgcgaactgaatcacctgatatctgcaacaatgtctggtgttacatgctgctgacgatgccctggctatg

SEQ ID NO: 24873 - DNA, 481 bp, Gossypium hirsutum
  unsure (1)..(481): unsure at all n locations
  Clone ID: LIB3582-022-P1-K1-C4
gaggtaataggagtcgaataataaacttatctcgagcttctaatctatcatctcctggtagaacaagatctatttcaggcaggacattgcagtcacaaataggaagagagagactgcctgatgttgccctggaaggagataagttccatcatcgagggagagatgaagcttatgctgacagtttacatagattccccagagagaggcatcatgttcagccatccaggaataatagaataagttttatgcgtggaagagatcctaactttagtagctataataatgggcaagatggtgcttattttggtactggaagaggtgggaggaagatcttgaatgatgatccaccaattttctcccagttacccccaaggaggcggtctcctggtggaagagatggaccttgctgacgtgggcttncaatggttcgcagagttccaagaaatcttagtncaagtcgatgcattgctgaagatggatc

SEQ ID NO: 24874 - DNA, 446 bp, Gossypium hirsutum
  Clone ID: LIB3582-022-P1-K1-C6
ctcaaacccaaaaccatatctttaccaaacccttctcccatttcactgtcccccttctctctgtggcgccgcctctcaggcagcagcctctctcttctgctcttttataaaacataactggatccaaattgcttgacgaggaggaaaaacagaatttagtagaaacgtttccgtttcatctgagtacggtcaggaagagggtttatgtgcaatctgattacaaatacctcaacagcatatccagaatacatcctgccttatttggtccatgttcttgctcatcattcatgtcccaacacagatgaatgcaaggatgttaaagcatttgagctaatataccggcagttgtttgtggctatttctatgttggtgaatagagatgaagatacaaagtcagaagtcggagtcaacaaagagaagcagagtatttctgggaatatttctat

SEQ ID NO: 24875 - DNA, 480 bp, Gossypium hirsutum
  Clone ID: LIB3582-022-P1-K1-C9
accaccactacccacaccaactccaaaatttttcatgcaaaaatgggattgttgagggatgctggcgtcgtttacaagcctgtagagcagattgatcttggtccttgcagcaatgagtcatattttaaagccgataaagctcctcgtatggctggatttctgctgaaaatctttgcctggttcttggagtcaaggatcattggagcattgttgctgtacatagtgaagaagaacaatcaagttcacaagcttgtttcgaatgcaactctggaggaaccacctatgttcgtccccttgcatcctattactgaccttaatcaacaagaagtcaaacaaattgactctgatgcatctccaccagaacgagttcaacaggcaataaaatgcattcctgtaacctcagagaagtcactagatgatctaaaatcaagctgcttccggcgcttgacaatagcagattattcaagagcctatagtact

SEQ ID NO: 24876 - DNA, 459 bp, Gossypium hirsutum
  Clone ID: LIB3582-022-P1-K1-D1
cccacgcgtccgtctggccattgttcgttgctaaaatgcgatttggagggttcagaagtttctgagactgtgaagaaaatttctccagaatccaactgtattcctagatcttctgaagagtctaaaccaagtataaatgttctgacccctgaagaacagtctaaccagcgtaaaatggtagcatgcgttggaaagtcatcttccacctcatccgcttccatattttctgtatcatctgttcctgatagctctaaacctacagattctcagaataactcaaagcaacaagtaatgcctgacaacaatctgagcagtaagaaaggtcacgctacaaatgatgtgcctagggatgaagacagacatgacttatcacgtaaggcagtaaaagagcgaccaaaatcctcttatagttctacgtcaaaagtcccacaccaaagcaagatttcacatgctttcatt

SEQ ID NO: 24877 - DNA, 521 bp, Gossypium hirsutum
  Clone ID: LIB3582-022-P1-K1-D10
gctactactacgagcggtgctgttaactgtaaccggaaaaggacggctgctgaagctgcgacggggtgtcggagaccggttaagctctcttcgactaacgggagtgggaggaagtttaggggtgtacggcagagaccgtgggggaaatgggcggcggagattcgtgatcctgctcgacgtgtacggctttggttggggacttatgatactgcggaagaagcggctatggtttatgataatgcagcgatcaaactccgaggtcccgatgctttgaccaacttcgttacccctccggccaaagaaaacaacgagaaacccgaaaaccttaacgtcagttcggtttccgggtacgagtccggcgatgagtctgctcacaatctttcttccccaacttcagttctcaacttccgaactcaatcaagtgaagaaacggcggtggaacccaaaaacagccccacgaatccaagaagagagagtaaaccgctgcgctaaaggaggagagcttctggttccaccgaatg

SEQ ID NO: 24878 - DNA, 464 bp, Gossypium hirsutum
  Clone ID: LIB3582-022-P1-K1-D8
accacgcgtccgcccacgcgtccggaagaatgcccgcctctggtcctccaaatcttggatgacccaggtctcttcctttactcaattcttcactcaactgtaccaaaatggtctcctaaagaaccactccaaagtcctgtgtgtctctgctggggctggccatgacgtcatggctctatccaaaatgggtcttaagaatgttataggtgttgaactgatagaatccttgcctttggttagcagggccaatccccataatcttcccttctttgatggggcttttgatgttgccttcactggtcatttgatggcggccttgtatcccttgcggaatgcagaggagatggagaggactgtcagaaacggtggagtgtgtgtggtggttgtggatgaatgtggtgaggaagaagtcaaggagattgttaggttgtttaggaggtctcagctgctcagcttttctgatg

SEQ ID NO: 24879 - DNA, 540 bp, Gossypium hirsutum
  unsure (1)..(540): unsure at all n locations
  Clone ID: LIB3582-022-P1-K1-E11
attttcccttgctttctcttcttaccagccaaatatccccccttaagatttaaattaagagttttctgttaattatataaaaaaaacagatttttttgccatgaaatttggaaagagccttagtagccagatcgaggagactctgcctgaatggcgggacaagttcctttcttataaggagcttaagaaaaaattgaagcttattgagcctaattccggtgagaggccgaataaacgggttaaattggatggaaattcaggcgatgttgccggtgccgtagataaggccggcgtcttcgacggagacggtatgtcgacagaggagaccgatttcattaagcttttggaaaatgagctcgagaaattcaacactttttttgtcgagaaagaggaagaatacatcattagattgaaggtaattcgaattctganttgaattctatctgtctggttggggagtttttcttttccccttttatctggctattcgtttcttcttcccgtaagcaaacaggggatttaatattaaagctaaaaacg

SEQ ID NO: 24880 - DNA, 394 bp, Gossypium hirsutum
  Clone ID: LIB3582-022-P1-K1-E7
gctgaagccattggtcaggacgccaatataagagcatagcaggtcgatgagagcccacagtgacggagcatacatgatgtgtacttcaacacactcaaggagtagactacaaatcctcatcttgcaccaagactgagatgtatggttcgtgatgttattgatctgcgtgcaaacaactgcattaccatacttgaggaggtgaaagccaaaacaataacagaaattcattcggaggctgaaaagaatattgggctgtgaacaggtgctactgcaagtatcagaaatagtcgtgtcgcttctgataatccaatgagacctgcgcctgctggctatcctatcaatcgtcctgatactgatggtatgaagcctgaaatgccaggaactacgacgatgc

SEQ ID NO: 24881 - DNA, 374 bp, Gossypium hirsutum
  Clone ID: LIB3582-022-P1-K1-F10
accacacgtgcggtcacgcatgcggttgctttctattagcgagagctggcttgacctcttccatggctgctgtgctcacattgacctcctcactaaccagtcaccagatatccaccttgtacggcagcctcagcaacctgagccacgttaccaatcctaacgccaactgcagaccttggatgctcttcagcctacgcaccggtgtaaggcagaggctggtgaaactcactcttgatcaccaaaatgaggatcaattacgctgtgctgaagtagctgtcctacgtcataagatccatcgcagaggacttttattgccttaatttaccagtgcttctatgctctaatatgttgtacaaggggagggtactcatggt

SEQ ID NO: 24882 - DNA, 263 bp, Gossypium hirsutum
  Clone ID: LIB3582-022-P1-K1-G11
aggaaatatgccctcagagatcggacatacatcatcctataagactcagaccctactacactggctgtggacattgatcataaaaggcaatgacatgaagtgcgtacgctgatctggctgctgcatacttgcgtggtgaagcgaattactgcgtcacccgccatattttcatgctgtatggggagactgaactaagtgatcataccatagatctagctactcggttacctggattaacagctgtggatcctgcataccactat

SEQ ID NO: 24883 - DNA, 150 bp, Gossypium hirsutum
  unsure (1)..(150): unsure at all n locations
  Clone ID: LIB3582-022-P1-K1-G4
ggacagggagcccggngnacgggcggcagnggagcgggggaccaagcagcgcggggggagcgncnccggctgatcctcagncgcgngctcagctaggggcagacaggggcngaccaacgatcaaacgcacacaaaacgcggccgcaaaag

SEQ ID NO: 24884 - DNA, 533 bp, Gossypium hirsutum
  Clone ID: LIB3582-025-P1-K1-A11
cccacacgaccgcataaactacatcgatccctacacaaatctccaaacaatactctctgcaacatcagcagctcctctagcatcgcaaagcatctcttcagtcatacgttctggataacgtccctcattcgatccctttttcgattactatttgaattttgaagggaatgaggcaggatctgagatacaataatgtatagcatatatcttagcaatttactgaactatctcaagcaggatcttagaatagtgatagctttcagtataacatatattaggatatataggaggctttgatggatactgatgctagtacggatgcaggatcttcgaactcttatgcaaactcgaaaggccaacctaaagacccacttcaagatcagatgattcataaaaagaatactaaacaaaacatgccacgacgcataccaaaccgctcagcaaaggaccatgacaatccgcacgacatgctgaccgatggagggaacattacagagagccaacctgcctgctcacccgacagggaggactac

SEQ ID NO: 24885 - DNA, 539 bp, Gossypium hirsutum
  Clone ID: LIB3582-025-P1-K1-A12
cggacgcgtgggaaccctggtgctgttgccttctactcgctccacttgtcgcccccactcgcgcaatccgaacctaggcgattctttccttattctccaaacaagcaaacgacccccaaatcttagagcccctcgaaaccctcgtctctctctcagaaatccctctaaaccccccaaacccactgcaagaaatgtctaaggttcccatggatgtggtcaccgatatcttccatcgcctccccgtcaagactctcctgcgtttcaggtccctttctaaaccctactgctctctcatagacgaccctgatttcaccaatgcccacctcgatcgttccatcaaaaccagatccaatctcaacatcatcctcaaaggtttgcatctctattccgtggaattcgatgctctggataacgccgttcccatcgactaccctttgagtagtggagctgggactgaagcctttggttcctgtaatggaatccttgcattccgtctcaccgataaaaacctcgccttgtataatccctccacgaggcag

SEQ ID NO: 24886 - DNA, 539 bp, Gossypium hirsutum
  Clone ID: LIB3582-025-P1-K1-A4
gatcctacttcagttcgtgcactacggaaaacccggatccactgttctggaccattgatgcctcctgggggaaacattgaggatatacttaaagagcatgagagacatatccagaaggctgtacgtagagcacgtcttgagaagccatgaaaccaataaaaaattgcaacctagtattcttagcagaaacataatggaatatttgaacaatgattcttacaaaggtttgctgtctgcttccgtgtgggaagcttgcttcaaggttgtttactggttgcttccatgtggaaggcttgctccgaggttctttgctcattgcttcctcgaaaagacttgctccgaagttatttgctggttgcttcaagtccgaggtatccaattgttatcacaggcaaatgcaaggtgcaaaaaggctacaatatagtgagattgaaatgctacacaaatttgaggtcctcggagtatttaaaaaaagatggcatacgttttcgcttgatattgcctttgcttgaagatgctatccgatccaatgtcgtgag

SEQ ID NO: 24887 - DNA, 535 bp, Gossypium hirsutum
  Clone ID: LIB3582-025-P1-K1-B11
cccccgcgtacagggaactggagatggagcgcaagaaccacgccataaccctatggaccaacatctaaggtcatccaaatccccaatcatggaagagcatgtccaatgaagggccctccaagggctactggctacgcatcctatggtgaagctcatcaatgtatatcgattatgtaacgtacaagcaagacaacctcagctacctgcactcacacgatagtgacgcttcgaaacatgaccttgaccacaaccgcagaggaacgcatactttcttgacacacgaatacaaagaggcctacattataaaaccgggagttgtatgcaaagtccaagcatgaagcactctgtacttgactaaccaagacaactatgtaaagacattcacaacagggctataccagcctgttaataaccctgcacaatgcgaggaatgcttcctagatgcaagacaacgccctcagtcatatctcctagcctaaaatcgagagaatgatcagcctgccttcaacacacgaagggagctgatcgacgagct

SEQ ID NO: 24888 - DNA, 537 bp, Gossypium hirsutum
  Clone ID: LIB3582-025-P1-K1-B3
cccacgcgcccgtacaatcacaactacaacgcatacagaattggatcgagacagagaaagaaactgtcaaacattggagcatacatggctgtaaaaacggatctaaatcctaaggtcatgcctaatggcatgcctatccctatgactgacgagatgagagatgtcgtcagacatggcgtcgacttgaaagctgacacgaatggtggatctgaaggaggacggggcatagcatggggcataatatatctgacggatatacgggtgggctgtgctgcaagtagtcctgttgggaatgacatggctttggataagccgctggttgatgtgcatgacgaaacgatcaaccaacgaatattcaattgcgataacatgtatggtgaagtggagcctgaggaccatgaaaatgagcattgggctctttacttcactcattcattcaagatttggggcaacgaaagcggatgcggaaccttcgtgccactgatcgcgaacttgagagcttctgtgcgacgagataatcaacaagtacatcatgaa

SEQ ID NO: 24889 - DNA, 535 bp, Gossypium hirsutum
  Clone ID: LIB3582-025-P1-K1-B7
gaaaaagctgtctgaagacaatgtgaaggacttatcaagtgatttgcaggtgacttaagattttacccctctctctctctctcttaaacaaagtcaaggcaacaaatgtttttgcccctataagactgaacaatatgcaattgctttttggttacaagaccaattaacactaaatggcttggatgatagtgcctaggtgatccacaatgtatggggctctttgctacttgggttttatgatttcatctaaaagtcattattaaagtaattaagtcacaacaactcgttttaccaaattcaactttcctggatatttccaatagcttatttgtaggtagtggtgctgttaccttccaaagtccctctttacagtatctctgaagttttgacaactccctgttttggaggtagcccttaaaatgtactctccaggggcttcttatttccttttatttcttttctgtccctaactccatgcgcaataaacgtgtttttgcatcggtgtgtatgcaatcatgcatgtaaatatctgttc

SEQ ID NO: 24890 - DNA, 514 bp, Gossypium hirsutum
  Clone ID: LIB3582-025-P1-K1-C3
gccgagcctacggagacgaggacacatacgggtgccgatggcggctaaatatgagttgagacgaacgcttcatatggcctggcgttaggacacgaagcggactaccgatgtgcggtactgaccttgtactaagatgctcaggctgccgctaaatacattcttagcggcgcgtgagaagctgctgtacaagcacagacagaccactgttcgatatggactgataaacattttctaggattgtgctgcgcagatatgcaacgctaggctgttggatgactatacaggaaggagcttggctgcgacggccacacccaggaaccatgggctagcgactcagatgtacatcgagaccggcaaggaggctcattaccgggcgtgtcctgaccgagaagaccgagctgatgtactcgttatgtctgatcgagaatgctaacggtgcgtgaatggacctgacatacctatctacacgtgctggactagactgctgaaggagcgctgcacatgcatagactgc

SEQ ID NO: 24891 - DNA, 402 bp, Gossypium hirsutum
  Clone ID: LIB3582-025-P1-K1-D10
cccactcttccatactaagcggcgaagctctttgcaatagaaactcaccgtaattcacgattgggtgaaagataaaataacggcatgctaagatatcaagagacccgacgttggtgcgcatgagttgctctacacagcgctaatttaggtctcgacactggagacggctcttgaatgatccttgaatacatgacgtacatgtactcctactgacatgctgaaatcatcatcggaagtatcttgacctaaaagggaatgactgagaaacccttatctattaggaaaagcctctcacagtgttcagaaacaataaacgctgacagaaaacaatgggctgactctatgctgagaaagttaacaacagtctactgttgctccatactgccagggacaatgcctgct

SEQ ID NO: 24892 - DNA, 481 bp, Gossypium hirsutum
  Clone ID: LIB3582-025-P1-K1-D4
cccacgcattacattgactcttgcgtgagcgctgaatatgctgtaatgaggcacattattgaaccttaatgcgtcgaggctagccaagtctgcacacatgtatcaaaaggaagtgtacattgtgccatggatggaggtggtcacagtgctaagagatgccgggagagaagctaaagcatcactggatgctcagatgtggctaactgaaatgcggggaatgagagatgaccagaacgggaggagagaaaaggttgccacagggtagtgcatattgttatgtcatataaggagcttcattgtaacgacttagatgatagacatcgtgatgtttactctaatctacatgacacatgtcacagttgatactaaatcgacatcattattaaatgattaagataagctggagacctaactgagggacagtagctgctgtagtagctaattctgttaaagcatagaagaaaagagaagtaagtggtgt

SEQ ID NO: 24893 - DNA, 533 bp, Gossypium hirsutum
  Clone ID: LIB3582-025-P1-K1-E5
cccacgcgtccgcccacgcgtccgcccacgcgtccggttatatttttgtgaataatatttggtgaatatgttttaatctctgttgtaatttgttagatttaatcatattcattttttatgtaaatttttgtggattaattaatggagttttttataaaaagatatgtaggcacggatctttcctagctttactaaaaaaagtatgaggcattggttatattcaattcctcatatgttgatagattggtggattgttatattgaaattgtatcaaatccagtggttctatgttctaccttcacgctactgagtttgcagcaaattttttgtttggtatcctcattggatgctccaactgctgaaaattcggggtgggaatggtgtttatgctttcagtggcttcatgtgtgtcttgtatgggtttgattgtgtctaattcaagtcttatttgttctattgaatgctttagactgacattcatgtgtgtcttatatggttctcttatattatgatattgaatgtggtgatgtagt

SEQ ID NO: 24894 - DNA, 536 bp, Gossypium hirsutum
  Clone ID: LIB3582-025-P1-K1-F11
catacttgatcttcatatttcctagtatctatgagaagagggcaatgatctgaaaacgtatgagtaagatgttagactttcgcctttggaaacagcacaatccactctgtgttagcaactcctctgtcaagtcgttcttgaatatttgtctccggtaaattacctctcctaagtgaaccagctaccttcaaatcccacatcatatagttgacaatcttctagcgttttccaaaataattccatccttctttcatttctaggtaaccctctttttttctcaaatccatacatgatttcgttgaaatctccacgcaccaaccaaggaattacctcccctacagctaatctcttcaaaacttcccatgtattgttcctatcctgtacatatggggaaccataaaaacctgtgaatctccattttactcttttttctttatcttcaactaacatgtcaatatgtcttttagaaaaacttcagagtattatatccatgtcagttctccatgctaagcacaatctcctcttgtgccttcagg

SEQ ID NO: 24895 - DNA, 537 bp, Gossypium hirsutum
  Clone ID: LIB3582-025-P1-K1-F2
cccacgcgtccggtctcttcttcatttgcaaagttcgttttttcaacttaattactttactaaatattaattctgattggtaaatgctagcatttccattcttttgagcttctctctggaggttacactggcttttttcttttctttttgcttcagcttttgcctttctatatatatattcccagattggaggcattcaaaaatcagggaagtttaacagtgtccatcctctggctcctaatgaaggtttatatataaatttatgtggttattgattttattatttcatgttagttacgcatctgaaatacttcagataaatcctatttcgtagttgagattactattttcatgcaaaaactgaggttttgcatgaatttaggtagagtcataatggccattccaacagtctaagtgaaactggagtctaccatttggttcacgcatagaaacgaataccttgaccaatatgctgcatttagcacggtgttttacgaatttttaagggaaatctgcccgtctcttcgttgcaaagca

SEQ ID NO: 24896 - DNA, 536 bp, Gossypium hirsutum
  Clone ID: LIB3582-025-P1-K1-F3
ctttgatcttctttttttcttttatcctctcaagtcttggtgccataaaaaaattgggttttaaagatctgatatttcattctattgaagggtctattttattttatttttcttgtgaatgggttcatctaatcgactgttcaacagacagagaactgttcatgagatccttggtggaggtttagttgcagatgtgatgttgtggaggcaagggaacttgacaatggggatcctgttagtgacactagctgcttgggtggtgtttgagaaatccggttacactctgctatcacttgtctctaatgttctcctcctccttattggcattctatttctttgggccaaatctgctgcaattcttaacagacctgcaccacctcttccagaattgtatctatcagaagaaacagtaaatgaaatgggagctttcattcgagcccatgtaaatgatattctctcagcttctaaagatatagcgttaggtaaagatgcaaggctgttcttcaaagttgctggatacttgttgctgatttcac

SEQ ID NO: 24897 - DNA, 539 bp, Gossypium hirsutum
  Clone ID: LIB3582-025-P1-K1-F8
ggaaaatgttgttcaagcttggagttcaaagtatgtccaaggggaacccacggttgtgctggctcaaccacattgtggtgtcgaaaagtatggtgaattgatttcgtttagagatgataaacctttggggttgcctgttaggagtttaaaatccagggttttgagtcctgaatttggcaatggatcgagtgattcttcgggtccgagtgcgatggattcatcggatggttccgataagagtgaaaatgggagctttagtgatttgactcgcgaaaatttcgaggggaagtcgaacaagagtggtgctttgggttctccgatgccttggcgttggagatcaggaaggatgagacaacgatttgacggtggtagtgtcacacgcccttctcatttcaggcctctctcagttgacgaatctcaatttcaatcactcaaatcacggtctttacactcccaactcgcttcccaatcacattcaccgagtagcttgtctccctcgcatccgagttcttcagaaccaccaaaatccaaaatgattg

SEQ ID NO: 24898 - DNA, 392 bp, Gossypium hirsutum
  Clone ID: LIB3582-044-P1-K1-A11
aaaaaaggctctcaacctctcccctctccttcgggcaccgggctaaggctcggtcatcggccaccgggccggccgacgatctccggtgccagcaccatcgtatacgttcgccaaaaaagggagaatctcagatccggtcccttcgaagcccctaaacgcaaatccgagctcaaaaccctcaaaagattcgaagaaacacctcagaagcccaagaaacctttcgatttccgaccgtattttctcggagacggttcctcggccggtcacggcgatcatggcttaaaactcaagtgaagatcgcgtggagattctgcctttggggaaggtttgagttgcggcgctactgatccttagaaaccctatggtttcttcatctattttgggccaccgag

SEQ ID NO: 24899 - DNA, 537 bp, Gossypium hirsutum
  Clone ID: LIB3582-044-P1-K1-A2
tcgtaccgcacgacgtcgtacaaaaatagcgagcactttgttcacattctgcatcgctgacattacacaactctgtagaactttgctcatatgtttccatttacttccattaagaaagaagatgattgtagtttgttagcaatactgagattgctactgaattaattcatccataaatatttgaatgatgtttaattaaattgataaatatgagaaaaaagtttaaccttttgattctgcagtcattgatgattcattatattaaccttttgatttgagagtttattattaaacccttttaaaaaaagtttcaagcagatatactataatattagaaatttatgatgcatcatgttactaacatggggacatgtatgtaggattttttagatacgtaatcttataagttttaaaaaattatgaaaatatttaacttaaacattaattatgggaataatttgatttttatagtagagttaaatgtctttattttttcaggtgatatcaacctaaaaatttaaaacaaaaaaattttaa

SEQ ID NO: 24900 - DNA, 353 bp, Gossypium hirsutum
  Clone ID: LIB3582-044-P1-K1-B3
gccacgcgtccgtccacgcgttcgcgccatcaaaggatcaacccttactacgtctagctcagatcggtccaagaccgattcaggggagaacatggggatgacacagacctgcagaggtttgctgtcacacatgatatacttaggggcgtcacctagtcacgcattgccagtctagagtgcaaacaggtgcactttcgatctgccacacgatcgtgacgcggacaaaatatactttgacactaactgccgaggtacagttccgcactggacacatgaagacagagagctgtacaatcgttgtactggagttgtagtgagaattacaggaggaagcactgtgtacttggtcaccc

SEQ ID NO: 24901 - DNA, 525 bp, Gossypium hirsutum
  unsure (1)..(525): unsure at all n locations
  Clone ID: LIB3582-044-P1-K1-C9
atcggagaaagggaaagaagatgctcgaacgaggttacatcgtctctccacaacaatgtgaggacaagtttaataatttgaacaaaacatataggagattaaatgatttactagggagaggcacttcttgcaaggttgttgagaacccgaagcttttggatataataaacgtatcggagaaagggaaagaagatgtacgaaaacttttgatgtcaaaacatttgtttttcgaagagatgtgctcgtatcataatggcaatcgattgtatctacctcatgatcctgatttgttgcagtctttgttgtttattctaaagaacgtagatgattacgagctacttgactcgaaccaacccgtgcctgataaaaaagctggtgtcacagctaaggataatgaggattttgcagagttctcagcaaagtggttagagctgattagcgaaaacggtattgccccattcggttctaaccaaactntaaatgctgaaggtgatgcaaccgagttcaatgggcaaattcgggttt

SEQ ID NO: 24902 - DNA, 500 bp, Gossypium hirsutum
  Clone ID: LIB3582-044-P1-K1-D11
ctatcgcgttcgtgcgatcatcaccatcaactttctagctcttttgaggcgcagatggagctgctgacaccttcaattcagatacgcgaaccttccgcaggaggaacttaaacagagtgatcggtcggatcccaagaagccactcattatggccatcaaggggcagattgatgatgtcgataatagcataacgcatgatggacctggtggaccctatgcatcaggggctctacagggatgctagcatagctcttgcaccgatgtctgatggagaacaagatttaaccggccacatatcgggtcttggcccattcgacttggatgctttgcaggattggaaatataaccttatgagcaaatgtgtcaaggttggaaccatcaagatcacaggtgcaataaccggaggagctaatgagaatggtgaaacctcatggactaccttagacgatgctaagccatctggagactgttatcacaaacgcagttgctggaactgatgc

SEQ ID NO: 24903 - DNA, 382 bp, Gossypium hirsutum
  Clone ID: LIB3582-044-P1-K1-E1
gtccaagccaccaagaaaaaatcaagcccacttcatccaaatgatgggtcaaagaggaaagaagataaccgaattagtaaaagttcagaaactgagaccaataagccagctgagctgtcaaaaggtgttcatggagtaaccaagttggaggatacatcaactcgtcagaattcaatcacatccgcctcaaaacccccagctgttggaaatggacctggcctcaatgttaggcaaggaactatgtggaggagtagtggaagcaagaaactatctatggattccattgattatccaattgaagaagaggctgcggttgagtcactggaggctgaaaaaatggacttgcaaaagagactcacagaagagattgaagtataccatt

SEQ ID NO: 24904 - DNA, 419 bp, Gossypium hirsutum
  Clone ID: LIB3582-044-P1-K1-E2
gaagaatgagttccctcaaaaatttgtttatcatgaagctgtgattggctcaacgtgtttacaagatgttgacaactgaagctactagatcttttggattactgacatgtgccggatggatcagtcagataaagctctgccctttgcaagatgaaattatggtttgagtgtcaggatgcctgtacacctgctgctgagccgtgattgatcatataattatgtttgagcaactgaagtatgctgcttgaaaagaaagtgcttacaagtggctgctctgtcgtacgattagtaattgacagtggctgtctgctgccatttcaacagatctcaagtttttattgttatttacagccaatgaggacgaaaggtacaactgagaggcatgatcatgaagggcttatgttcgacatgaggataca

SEQ ID NO: 24905 - DNA, 536 bp, Gossypium hirsutum
  Clone ID: LIB3582-044-P1-K1-E6
gcgaatgctcgtgaggtaaatcgattaatgtttttggtaagctacaaaatttagactgtaaagtgcatgatttctgtgccctcgatatttctgggcttaatgggccaaaattggaatgatgggccaacaggcccaattcggtaagaacacttggtacgtgattctgttaatacgtgaaaagtaggaatatgcatgaaaaaccctaaaatagataaattactgaaatacctttaaaagtgaaaaatttacaattttatccctagtagataagttaccgaaatacccctagggttaaattgacctaaaatgcatgtttgactgttgttatttactgcatgccatgttgttattatctgatgcatgggattgagatattgacggaggaagtactgaaagtggcttgtccacgtactggaggctttgcctcaatttactgctaactgagcagcaaggctgcaactgtggagtgttgggttaggtgggttgagctattccccacatggagtgtatggctggtacgggtggagtgtaatggt

SEQ ID NO: 24906 - DNA, 556 bp, Gossypium hirsutum
  Clone ID: LIB3582-044-P1-K1-F7
cccacgcgtccgaaaaaatacaaagtattctctctaccccgatctacggccaaataaaccaaaaaaaagagaaatctttggatctgcctccccttttgctgcggcttttcgcctaaccccgaggattaagtggccttgcagatcaaagagtgggacaccgacaaacgggtaaatattttgttttattttctcttttaagaatcaaaacaaatggaaaaatatcatcttttttgtttaaacccgatctttagaccctttggtattcgatcccctgtttctttttttctcgtatgtaaaaaaaacaatagataaaaggtagagtaaaaaaaacaaaattaaaaagaattaaaatgcaaaatcccagtaaaccttctaaagacttctccgttttggtgttttttattttttcttccttttttatttctggaaaagacccctttttacaaagtgaggttcggctcttatagccgaaaatacaagattttccctttctttgttgcttgttttcttttcttttgcgggtttcttttgcggtggagcagtggctgagcgtggc

SEQ ID NO: 24907 - DNA, 554 bp, Gossypium hirsutum
  unsure (1)..(554): unsure at all n locations
  Clone ID: LIB3582-044-P1-K1-G11
cttcattcaattggaaatataaaggtgaccaaaaagaatagaaatacggttatctttgtattttatgtggactaattgtctttaatgtcacactcaaaactactcacgaattcatttatgttttcttccttgatggctagtgatttgcttgagtttctgtattattcttataatgtagagctgtttaatgtcagagtggaaatagaatatctagttttcttcatttacagatggaaactaggctttatgcttcaatatgtcacatttgcattctatatgtagacacatattgtatcttggatgtaatttcatttctcaggagcagtttggttctgattctactttaaaaagtactactgcaatatggtgtttatagctatcggttcaatttaacatctctgttcctacatgtgtatattttatacattattaggaaattttgaatctataatagaaagttctagcttgacttaattacttaatgtgctgtatgttcattgtngattatttcagcaaaactggatcttttgaaaaaaaaatgaattgacatttat

SEQ ID NO: 24908 - DNA, 474 bp, Gossypium hirsutum
  unsure (1)..(474): unsure at all n locations
  Clone ID: LIB3582-044-P1-K1-G3
gctggttcttcaaaaaactgttcatctgctctgtgaaactttcctttcttctttccttttctccgaccaatttcagtctggtttttgcatccagtcaacattcttttgttttcgacatacccagggatgttctttagcagtaatggcattctctctacagctacttgtggtagctccagtatctaataaggcatgtaaagaatatgttttatattctctaaattgaaatgtaatttctatatatgtataatatttcctaggttagaaatttgaaaatgtaataatatcatttttttccattttcatttgttgaataatagtagcagcttgtattttttccattctagtatttctagaatttctattaggattagtggggaaaataggtatttgaactgttttcatatttattggggttgtcgaatttgtactaatattatcttcttcttcctttnaaaaaaaaaaaaaanaaaa

SEQ ID NO: 24909 - DNA, 524 bp, Gossypium hirsutum
  Clone ID: LIB3582-044-P1-K1-G4
cccacgcgtccgcccagaccgacactggtgaaccttttgagtgcttgaccatggaggatctgcttaggttgaatgcttgattcagtcaatgattatgtgagatagggtttcaagattcttattctgtacgtgagattgtgaggtattcattggagctttgctactgagtgacatgggtgtttttgccctaactctgaggctctttcatgctgaggtcagaaagttacttttgatcattgggttggcagtttctttcataatcctttttcagtgtttttcattttcttatgggaaaatatttgttccatcacctactagtaagatttcagtagttaagctggtaatcaatgccaccactttaaatgattcgaacatggctgaactgtttattaatgtggtggcaaatgatactaatggctctgatcctgaggaagaagctaggtacaagcacaacacgctggaagcaaataccagttctgattcgtcatcagaagtaacagatatcttgatgggtcttttagtaa

SEQ ID NO: 24910 - DNA, 362 bp, Gossypium hirsutum
  Clone ID: LIB3582-044-P1-K1-H3
ctcacgcttccgctctattttcaacttgattctcaatctgagtctaatcttcagtcaaatcgtcgatgtcattgccaagatatgtgcaagggcatttgcatatcttaatacatgactgaatatgaaacttataggtctgtgtagatcctgtagaatatcgcatatatatgctctaatatgagaacgaactggacatttaatggcacatgtatggagaattgcgagggatgtcaacctctattacaaccttgggccattcctgtagcactcctactatgaccgctattgtacacgcgattgattcagctgcaaacgcgggaggtacctcgtgatggatctgtgagccagaaagttagacaacc

SEQ ID NO: 24911 - DNA, 427 bp, Gossypium hirsutum
  unsure (1)..(427): unsure at all n locations
  Clone ID: LIB3582-044-P1-K1-H4
tccgggtcttattcaagtataaagatttttttaatctattttcaatttgttgggaaacagttattttaatatttttagtgtatttggtgtattatatattttttaaatttttatatgaaaaaataaaattttaaaaaattaatatgggcggattgggtcgggcctgagttttagtatttttattcaagcttgggcaaaattttatgcccatttttttggcccgggcctatcaattgggcctaaaactttgttagggtccggcccagcccatagacaactctactccagacatatatgattatagtagatgtaaaccatgtgtaagataagaggaagatacataagataagaggaaaatacaaaggaaaataagatcggttttcttataaatgtgacttatatatttactgcanactgatacattaca

SEQ ID NO: 24912 - DNA, 436 bp, Gossypium hirsutum
  Clone ID: LIB3582-048-P1-K1-B12
ccgaaatttgctctctttccttaaaatttgattagaggtaaaaaaaaaaactttaaagctaggttttccggcattttttcggttggtgttgggaaaatagggatttggcttagattggatggtgcagttgatgagatcgggaactcctacggcggaacccgaagcgtgccgggacaaggcgccggtgaaattggagatcgtagaggattcattagaggaagaacatggccctgttaataaacgatccaaactttctccaaatcttcaacagtggagctccgatggcaatgctttcccgatcccgccagcgcaatacaacccgttggatgagccgagtccacttggtttgaagctaaggaagagtccttcacttttggatttgatccaaatgcgcctctctcaatcccaaagcggtagctcagccgcccaagctgag

SEQ ID NO: 24913 - DNA, 295 bp, Gossypium hirsutum
  Clone ID: LIB3582-048-P1-K1-B8
cccacgcgtccgacagagcccaccgaactcactgaatgaaactggtgcattgaacgcacgagaaggaaggcctactacaaagaagccagcatgggccaaacatactctatagccgccctgatgaaactcgaaaccggaacgacggacagcatgagagatacgaccgtgggacaccaactggcgacgcagaacaactactacaggaacatactggacatcaaggcaacggggctagaggacaacccactgacggaccacagatagaccacactgtatgagatgaagatggaaaaga

SEQ ID NO: 24914 - DNA, 257 bp, Gossypium hirsutum
  unsure (1)..(257): unsure at all n locations
  Clone ID: LIB3582-048-P1-K1-C8
aatattaagaataaataaatatattattcatacttgggaaaattcaaattatgtgaattgaaccaacgaccatgatggcatatacaagatacaagagatgaagtaaaaagtaaaaataaaaataaacagtaataaacagtaatacggcgggacagtgatgtacttattacaacatacatatactcaatgcatgatctttcacatactgcacatcatcttctctatagcttaagaatngtcttgatctgtatgttata

SEQ ID NO: 24915 - DNA, 482 bp, Gossypium hirsutum
  Clone ID: LIB3582-048-P1-K1-D2
cccacgcgtccgcatcccctttgtaatcaatgacgcatcatactctataaaattgccaataaaattccctaattgtcttgtcattccttctgacatgaaaccagccagtaaattatgaatctgtacccaaaaaactgtagcccatatgagactgttgctagatccttaccctttactactttatgaaagattatcaggtgtcggttaaaaaaccatggcatatcgtcaatgacccgcttaagatcaacttcactatagaagcgaaataaggtgcgcttgtcctccatctccgtgatcatcacccctcttaatggatgtcataaatctaccagcgtattctttagtgatggaaaattcacaatactctctgcaagtactttccctactagacataactcatacacaaattcgtcagaaatttcttctccacccagcaccaaagggtccttctcttcatccattatttgtagattcgccaaatc

SEQ ID NO: 24916 - DNA, 576 bp, Gossypium hirsutum
  Clone ID: LIB3582-048-P1-K1-D8
cccacgcgtccgcccacgcgtccggctagggtttcgcatgcagccgccgaaccaccaccaggtctggtggtcgacgatgcgcaaacaatggtccaatcttaccaacgaaggagccttgactacacctatggaggttttgtaagtgcattcccccctctttttcttctttatacttaaaaaacctcaaatcttatgttatctttaataaaacgaagcgacatttgaacaataaaataaaatttcaacaccattcaaccttcgcccaaacctccacactcctgaaatattcggctctcctcagcgccgatttaggtaaactctttttattttcattttgaaaattccaggcaaatcaaaagaggggaaaaaacttaaggaaaagaaacagaattcgaaatcacctcttgataatttttgattgctttctctgatattcagtatgggtaaatgtgaaaaaaaaaagaaaagtcccctccattggattacaatcggcctttttatagcccaaataaaatataaaatattaaatttacaaatttccttttctgctctatttttggtggccgtaattttggt

SEQ ID NO: 24917 - DNA, 388 bp, Gossypium hirsutum
  Clone ID: LIB3582-048-P1-K1-E1
cccacgcgtccgcccacgcgtccgcccacgcgtccgcaggatccaaaggaatggcctgttgtagaaccattgccttcttatggtagagggagagagagactgggaggaagacacataagcctcattcatggagatggtcttaccaatgtagtcattacaggacagaacgggacaattgatggtcaaggtgggatgtggtgggatttatggcagaacaaaaggctcacacacacaaggggccacctcgtagagctaatgaaactttataacattcttatctctaacttaacctttcaaaattcggcattttggaccattcatcctatttactggagcaatgtcggtattaaaggcatgacaatattggcttcccttaatggcccaaata

SEQ ID NO: 24918 - DNA, 532 bp, Gossypium hirsutum
  unsure (1)..(532): unsure at all n locations
  Clone ID: LIB3582-048-P1-K1-E2
cccacgcgtccgcccacgcgtccggttgcatggtttcctgcttaagggctgtcaaagctctcaaaacctttatttgtatgctttgaatccaactcctgaataacattttcttcaaatgagtaatcttaagaagggttaatgcactgtttggagcttgaaattggcaattgttccctcattggggattaatgaactagcttgcgcaagaaaaaagtttaggccttaatgtaaaaacaattgcctagttcatatcctaacgtggaacaattgccaagtttagagacaaacttggactaaaaaaagttgagaagttcaggccctaaataatgcatttttgagagctttttcttgctattttcatttgaatgatattattttggactgtagtcatctttcactagaattgactagattggggggaaaggtttggagtcatccaatgaaggaactcactcctttttctctggacttatatttatcntgtatgacatttcagtatggccaacaagcgtttgatgctactggtatggca

SEQ ID NO: 24919 - DNA, 406 bp, Gossypium hirsutum
  Clone ID: LIB3582-048-P1-K1-E3
acgcccacgcgtccgcaccggattcctttcatcaaaggggtgggatgtggtattcataatgctaatggtcggcgcgcttattgcatcacttcttttatcacatttggtcatagccgaattcaccgagagaagtcacaaatcggttccatcttctcatggacagcaaactgatgaagctaccggatcgcaaccccttctaagtaatcaaaggtgataaatcaggtatggtgtgaactgtgaagaaagtatgaaaattaagggaccttttagagtacatagtagagatagaagttccaaaaaaagtaatagtttgagttcagtcagacatgaaatatatgtatttgctaaattttgatggcaataccagtccgaattttgatatattatatatatatatattcacggt

SEQ ID NO: 24920 - DNA, 519 bp, Gossypium hirsutum
  Clone ID: LIB3582-048-P1-K1-E7
atttctttttagaattaaattgatttatttaatagtaaaaaaatttatctgataatatctatcaaatatttccaccttatacatgaaattaagataattatcaatgagaaatttatttatgaatttttattaatattaaattaattgctgaaatgaattaatatttagttttgaattccatctctagacattatttacctcttctttttattaaagcaaatcctctctcttcctttttttcctgaaccacatattttccaaaaatatcttacttctgaaatcttgaccaagactttcttttaaaatttttgcccaaaacagtgctggaaacgattaaggttctattttcttttcatacatgaaggataggaatgaattatttgggatttaacctaaattttatatatacaacataattttttttatttttaaggtatttatcggaacgagtctagtaattagtcatctatattttgtaggtccattaaaggagtgatactaatcacaaattttaagata

SEQ ID NO: 24921 - DNA, 449 bp, Gossypium hirsutum
  Clone ID: LIB3582-048-P1-K1-F2
cccacgcgtccgaattcttatgattaccccgtatgtatgttttcttgagaaaaaaagaaaattgaaatttagaattaataaatgaggagttgtaactaaaagtatgcatgacctgctcatgccccatttggttccagcctagttgttttttaacgacaaaatttggcctctgggtaattgtttgttcatatttattaatgaacactagtcattttattcaagttttgagtttgtgatcctggatctaaaatttaacaagttttagagtaagtagtgttacaagggttgtaattgggcagcagcagaagctattattgtactgtgcagtccctgaattctgttgtttgatatttgcagcaatacaggcacgagtgaggaagcagtggatgagtgtgaaaagcaaagcttctttttcttgtttacttaagccagtgctgtgtgtgtgatgt

SEQ ID NO: 24922 - DNA, 469 bp, Gossypium hirsutum
  Clone ID: LIB3582-048-P1-K1-F7
cggacgcgtgggcggacgcgtgggcggacgcgtgggcaacctcagatctaacagatacgctatcaccggaatctgctccatgaaatctcacaaaactccactttcccccaccttctgccatctctactgcctctccgtcgtccaagaatagttccccggtgatgttctcagtgttgctgacggccaccaggagttggaacggtgtttcccgagcggctttcgtcgtcattgcctctccttgcatggctatgatgttgccttctcggacatgaaggtttatatgatcagggggtgcagcgagtgttaagtatttcccggatgttgcgctcactgagttggagtaatggaagaggtcgaaccagattccgttcgggaaataagcattgactgaaactactcccgggtgtgatgcaggtgaaaccattatacctttacctaccagaaactgtgaattgatttcgtaagtgtg

SEQ ID NO: 24923 - DNA, 467 bp, Gossypium hirsutum
  Clone ID: LIB3582-048-P1-K1-F9
cccacgcgtccgcggacgcgtgggttttattaactggtcgtaaaaaaagggaagaagaaaatacggaagtggtgctcgacttttatagccgatttgtttccatttttttctattattttgctgcttgcatgtttatttttctcctgtaggtgattggtaggcgtcggtcgacatgacagcggcggtgacaaacgcgcggcggtggcggttggtaggtcaagggtcagaagaccctaggtgcggcacacctcgggctaaggttttcagactcccccccccccttttttgcattgggccatttaggctgtgttggatttggttgggttaggggtattgggctaagtcttttggtttgggccccaggttgtaattgggttttgggtagatttgggtaatttggttttatttgggtactgggccgggtaaaatgggctgtacagtggtggtagtcgaatgggtggtaggag

SEQ ID NO: 24924 - DNA, 473 bp, Gossypium hirsutum
  unsure (1)..(473): unsure at all n locations
  Clone ID: LIB3582-048-P1-K1-G5
gttggattgtcattaaagggacaacttttttgaagttcatgaatgattatgatgtgtagttcatttgttgaaaggtcttgagtaagttcattcgttggcatttcgtttagcttattttatgcgcaatgagtgcaaagaaaggagaaaaaaatatattcagagagaaccaaggtatcaagcctaaattttttgtttctgaggttcattcctgctatatcagttggttcatcaagcttatactaccacttaagttgaaagggcatgtcctacggttctgtacaattgtcagagaacatattcagagttttggttgatggccattaaaagaacaactgttttgaagtctgaatgattatatgttgatctatagacactgtataacactatatactatcctattntcttgaaaaatctcatgcggttcattggttggcatttctattagtatattttatgtgcaatgattgcaaggg

SEQ ID NO: 24925 - DNA, 376 bp, Gossypium hirsutum
  unsure (1)..(376): unsure at all n locations
  Clone ID: LIB3582-048-P1-K1-G6
cccacgcgtccgcccacgcgtccgttctattttctctcgtcttatcttcttcagttttacattttttgaattgactagataccctaacatcagacaaaaagatagtgaaatgcgtttgagggatgcagaaactgataagaagaaccccttctgctcctcccctgctttccacttcttcccttaaaccctctcccccttctctctctctctctctttctcttcctctccctttctccacccctgcttcttcttctactatttctttttcaatgcccactgccactctcccaggttgtggctcttttctcgccgncgccgccgctcttacaaacaaaacttcctctctttcccggcgcttctacaccactgctagtta

SEQ ID NO: 24926 - DNA, 320 bp, Gossypium hirsutum
  Clone ID: LIB3582-048-P1-K1-H2
gtctctcccttttctttttctcttcttttggctctggaatttgaaaaaagaaaaagaaaaaaacaggatgagtactgaagcagccaagagaagcaccaccggatctctgacggtgaaacaacggaaaaccgatgaattgaagccttctccggcgcttactgcagaacccaagaaagttatcatcaaaagtgccgacatgaaagacgacatgcaaaaagaggccgtcaatatagccatttccgctttcgagaagaacaatgtagagaaagatgtagctgagtacattaagaaagaattcgacaagaaacatggacctgaca

SEQ ID NO: 24927 - DNA, 581 bp, Gossypium hirsutum
  unsure (1)..(581): unsure at all n locations
  Clone ID: LIB3582-048-P1-K1-H4
atttcaaaggaagatgctgtggatggcaagaagagtaaagataaaggcagcaaaaagaagaagaagaagggggcccctagtgatgctaaacatgagagtgagtacaaaaagggcttaagacctgttttgtggttaacacctgatttccctttaaagacagaggaactcttgcctttacttgacatattagccaacaaggtcaaggctataagaagactaagagagcttttgacaactaaactgccattgggtacatttccagtcaaggttgccatcccgattgtcccaactattcgggtccttgtcactttcacgaaatttgaggagcttcaacctgtggaggaattctcaacacctctttccagcccagcccatttccaggattccaagtcaaaagagccagagggatcaacatcatggatttcatggatgagagggacacgtggaggccagccaagtgatggcgagagtcatcggtataaggatgaagttgatcctttccacatacnctcccactatacttgggtcgatgccaatgagaaaaaacgtcgtataaaagccaaaaaagcaaaagcaagaag

SEQ ID NO: 24928 - DNA, 151 bp, Gossypium hirsutum
  unsure (1)..(151): unsure at all n locations
  Clone ID: LIB3582-062-P1-K1-A9
cagccaagagaaggaagaancncgggnnncagaaaanaagaaaannngcnncangnnncnccncganggcagnngacagagagaggngaaccaacnncnanaaaagggggcaccnnnggngcnnngaccangggaaacaacgaggaaggga

SEQ ID NO: 24929 - DNA, 482 bp, Gossypium hirsutum
  unsure (1)..(482): unsure at all n locations
  Clone ID: LIB3582-062-P1-K1-B2
ctgaagcnaacaaaggcagcggggaagcaggagccaaagatggccgaccgcaagcgccatcacccagcgcgccagtgtgtacgaggagctatatcaaactgccaaatcttgccaaaaacactcgacgatctaaccgatcagattcaccgtgaaatcctaagaactatcctagcatgatccgtgctaaccatgaccaacgccggcatggtcctatgctaggcatcaccactctgatacatattcagcccggctctgcttccagctgccatcgcagtgttaatggctgtggccggtttcttgtcgcccggggcttctgggtggacggcacagttctacctctcctacatacgaaaccgtatcacacaggcgactggcaccaagcaaatcgacgcggaccggtccaacaggggcatgctagatatactagggcatgtcccacaaaaaactaatgaagctagaccgactatccaaaacaaggctta

SEQ ID NO: 24930 - DNA, 198 bp, Gossypium hirsutum
  unsure (1)..(198): unsure at all n locations
  Clone ID: LIB3582-062-P1-K1-B4
ctggngcctncncccaaagaggacaagcaacatcaaccctcagaggtctatgtgacaaattactgtagggggggagaaaattgatgagtaatctctgtcagtgtattttaattctttcaggaatgcgcataggccaaaaagacttgtacaagtccttgtaaatctcaaacttaggcgtaatggaactattactctgtg

SEQ ID NO: 24931 - DNA, 358 bp, Gossypium hirsutum
  Clone ID: LIB3582-062-P1-K1-B7
cgagctctggacgcgaaattagacaaaggcgatctaaaggatgttgtaaagtttacacatggcaagccctgaaactgccgtaaaaaaaacccaaactacattaatcttccttcatcaagatgctgcttttggtctatacaaatatatctgattatggactacgacacgtacaaagatgctactcctaagaaatagtgccaactactacattattccacatctcaaatcttgcatctttctgaaaagtatctttaaattgctatttctgttgctatgaagatactagatacttacatatgtgctatgaacatatttactgcgcatttacatctgtcgatctcatataaagaatctacga

SEQ ID NO: 24932 - DNA, 448 bp, Gossypium hirsutum
  unsure (1)..(448): unsure at all n locations
  Clone ID: LIB3582-062-P1-K1-C11
cggacgcgngggcggacgcgcgggcaacagggcnaaacagcncgacaacancccnagaagaggccaggggagcnggaaacccagaagaggaacagaggcaacngaggaggcnagcacagcagangcagggaagaagcgagaggggggaggagncngaggaagaagaaggagaaggagaagaagacgaagacgaagacaaccccagccggcgcagccgccaccaggaggaggaggagcaggggcgggaaagcacaacaagcaacacaccgcccggggccnncgacagaaacgnccncgcncaagcgnncaacgangaccacgacagcaacaggaaaaaccaacgagaacgaggaacaagaggcaccancancagaggcagggacagacaccaaggcgcgacaccacccaggaagggggaagaagaacgngaggagcgccagcaggagca

SEQ ID NO: 24933 - DNA, 533 bp, Gossypium hirsutum
  unsure (1)..(533): unsure at all n locations
  Clone ID: LIB3582-062-P1-K1-C3
aatnagcncaaacctcaacaaacgngagagaagagaaacggaaaaatcggccaccagctgaaattaaggcagctgttgatcatccgttggaatttgccggtcgttctgtcgctgaaaagttgaaagctttgagggaaaagctctccagtgaaaaggctcgtgggattatcatcacaactttagatgaggttgcgtggttgtataatatccgtgggagcgatgtatcttactctcctgttgatcatgcatttgctatcgtaacattgaattcggctgttctttatttggacaaaaagaaggcttcttctaacgtgagctcttccttgcaagcgaatggaattgaagttcggcagtatggtgcagtgagttctgatgctgcgatgctagcatctaatcagctggaccaggccacgggagtgaattctggtcaaaatggtgtttgtcaaaatgatactcgtgataatgatcttatatgggttgatcctgcttcatgctgctatgctttgtattcgagactagatgctaataagttg

SEQ ID NO: 24934 - DNA, 361 bp, Gossypium hirsutum
  Clone ID: LIB3582-062-P1-K1-C7
cccaaagaactaccacgcgtgcgtcacatatcagacaatgggcgacaccacgcaaaccgacgaatagattactagcgggagaggtccaaggaaccatcaggatgacaaggatgaccatgaatatgacgcaaccaccggtggtggaaagaagactcatcgataccgtcacacaactgatgctctggaagacacccttcaatgccagaggagtcctgaccttatgatcaggacatagcattggcagaggctggtcagtgaaatcgcccaatactgcaagactgattggcgataacagagccatgctagcatagctatacaggatgctgcagatgcataccctgcgactactactgaagacacc

SEQ ID NO: 24935 - DNA, 272 bp, Gossypium hirsutum
  Clone ID: LIB3582-062-P1-K1-D7
cccacacgtgcgcccacgcacacggtgcactaagatcaaccctaggataaaggcacccgtggtggagacacataagggggcggtatacaagaccaacaccgttgctcacaataaaactcgctcaaacatacacaaccatatctacgagcatacatagcttaactataatcactatcagcaatgaaagcgcctgtacagtctcagaaatcgatgctattaccgccaaacagctgattaccaaactgacttaccatgcatacctgactccagct

SEQ ID NO: 24936 - DNA, 248 bp, Gossypium hirsutum
  unsure (1)..(248): unsure at all n locations
  Clone ID: LIB3582-062-P1-K1-D8
cgacgaacanggaaagagagcaacaggggnacngggcaaggcgggcggagcaagcagaacaaaangacnaaanggccgaggccangaagaangcggccaagacggaagcagaacggacagaggaagagaggaancngacaacagngggggaaaagaangggangggagcaagaacggcancaaggcggaaaccgccgncaagagaacagaaggaggaagcnaaggcgaaagaacaaaangngaagagg

SEQ ID NO: 24937 - DNA, 355 bp, Gossypium hirsutum
  unsure (1)..(355): unsure at all n locations
  Clone ID: LIB3582-062-P1-K1-E10
cccacgcgcccgcacaggaaaggcgagcacccaaggcacggnacccaaggacnnccccaaggaagcgagccncncggcgcagaggaaaagngaaggcacncccaaaggaagacccgaccaaaccnagcaagcacaccgccanacagggggacaaggcaggcacgacacacagagacagagaggncgaaaaacccggancnaagcagcacaagaaggagacangngaagcggcaacaancancgaaaccccgccaagggagaaaggggcggcggacgcgaacgcgaagacaccacgcggccngcgccccaagaacaccgncggcgcncagcaacngagngaggaaggcaagcgccg

SEQ ID NO: 24938 - DNA, 174 bp, Gossypium hirsutum
  unsure (1)..(174): unsure at all n locations
  Clone ID: LIB3582-062-P1-K1-E11
gcgccgccaccgccgccacgcgacgcngggaggcaaaggacaaaggngcgcgggggaggagcacagcggcggggaacaccaaacaggagcaaccccacagancaggcaagcacggcacgggcaggcggcangagacaagggcacagagacacaaagagggaaccgagcaggaaa

SEQ ID NO: 24939 - DNA, 199 bp, Gossypium hirsutum
  unsure (1)..(199): unsure at all n locations
  Clone ID: LIB3582-062-P1-K1-E5
aaagcgaaaagccccccaaaacnggannaagaagagcaaaagaaaaaaaaaacgaaccccaagagcaccngcaggnaggcagancagcaaccaacagcnncactaaccgcagcagcaaggccagagacaacngaaccgccagcaccggagcaaaaggacaacaaaggcagcggcaaaccaggcagccaaaacaacaaag

SEQ ID NO: 24940 - DNA, 330 bp, Gossypium hirsutum
  Clone ID: LIB3582-062-P1-K1-E7
cagagtcatgtaatgcaaggaaacaccgactcatagtatgaaaaacagttaccaacatgagagaagacgctaagattgagggaccagtcatagaatacccttcatcggattcagagcgacgaaccaacgggggcgaccgatggggcacaaaagagctacaggcttgggagatagccggttgttacgaggaggcatatgacaccaggccaacgaacgtaccagaggagatgcatacgtagatgaaagaactatgctaggtcccagtggaaaggacacaggcgaacactgaggctctcgcataccatgcctggaataagccatacactcaag

SEQ ID NO: 24941 - DNA, 318 bp, Gossypium hirsutum
  unsure (1)..(318): unsure at all n locations
  Clone ID: LIB3582-062-P1-K1-E9
gncaaagacgacgaccnggnaggcgccgaagncacnggcaccaccaaannccncgcccaaggaancgcggccggagagcggagaacngggnggnncccacncaaaggcncancggggaagccnccnaagccgacnacggcaanacacancgacangaaanncacgcccngngaggaaaacccnnngnanaaacagagccncgccagcgaaccggagcaaggcggcgngaggcacacgnannncccgangaggaaagggaacaaagngacgcnnnaccaagacgcncangngccggacggnangnnaccccaaaaagaa

SEQ ID NO: 24942 - DNA, 235 bp, Gossypium hirsutum
  unsure (1)..(235): unsure at all n locations
  Clone ID: LIB3582-062-P1-K1-F10
cacaacccagagccaaagccnccgncgcaaggggaaggagganganagnggcaagngcgggaagcgaggagncagccccaagacccncaanncaagaagcagnccagnacaccggcgncncggaacggacaggaccagnngacaaacgcaacnacgaagcagaaaacaaagcnaaaaaggccangccagccaacaaagaccagacagagcagagaaagggcggagagcaacaaac

SEQ ID NO: 24943 - DNA, 313 bp, Gossypium hirsutum
  unsure (1)..(313): unsure at all n locations
  Clone ID: LIB3582-062-P1-K1-F11
cccacgcgnccgcccacgcgnccgcngaaagagacancngnngagggaaanacggcngagcgncggaagacnagnaanccggccgcnaacacngcnaaganncagagnncancanngncannccgaaggcgcgggaggaagganccnnncancagagangggcnnccaangannncgnngacagngnnnggggcagnnggcccngggcaacncnggcagggcagcaaggaaaaagcaaaggggaaagangancaagaangggaaannancgagacgaggaaagcannaacaagaacaggacccancgangccg

SEQ ID NO: 24944 - DNA, 290 bp, Gossypium hirsutum
  unsure (1)..(290): unsure at all n locations
  Clone ID: LIB3582-062-P1-K1-F12
nngcaacaggagaaaagcangggcaccnacancggacactccggagagacnnnggaggagggaccaacgaaaggccggaagagaacgaagaagagaanangagaaacganggncacatcncaaacgaggnncaaagcgangggaacggncaaaaaagaaaaaacccngagaaancaacggcacagncaaaacnggaagaaagaaanccncaaagcaaaaaggaggggctacaagaaagnccagncaaacagaaaaangangcaangcagcngacaanangagncaagcca

SEQ ID NO: 24945 - DNA, 523 bp, Gossypium hirsutum
  Clone ID: LIB3582-062-P1-K1-F2
ataaccacaaaaattaattaaaaaaggctttaggttaaaatgtgctaattagaaaagaaaaaaaagagaagaaataaatataaaaaaagaacgaggttcacatggaaaattggatctcctccaagctcaaagttgctgaaactctccttcaacagatcgatcagcaagcggcggagtcgcttaagaagaatgagaagccactttctgatgagattaaaattgatactccgacgaaaacaggtggggttgtgtctttaaaggatcaattgaaaaagaaaccacaagagaattatgattatcaagggaaattattcagtgatcaaaatgctaaagtatctagtaatgatgatagtaatagtaataaggcagttaatgttccaaatctggacaaagaggtttcgagttcgaaagcttccgtgaaacctaagacttcgcttacagatagtgattggactgaacttcttagtacaccaagtcatgggaccggttctttggggaacactcgtggtaatgtggtgtctgg

SEQ ID NO: 24946 - DNA, 506 bp, Gossypium hirsutum
  Clone ID: LIB3582-062-P1-K1-F6
ctccttcgacatgattcttggtgcctatctcattggtaacatgacagcattaatcgtaaaaggatccaggaaagagaagttcagagataaaatggcagatgttattaagtatatgaatagaaataaacttgaaagggatctccgcaatcagatcaaaggccacttgcgtttatagtacgaaagcacatgaactgaggctgtcgttcttcaggatgttcccatctctatcagagctaagatttcccaatcttaatacctgccatacattgaaaatgcatctcttttcaaggaatgctctctagattttattaatcagattgttattagactccatgaagaattttttctcccaggagaagtaataatagaacaaagaaatgttgtggatcagctctattttgtttgtcatggtgtgttggagggaaaagaatccaatctccgagttaagcaagctggaatcaaacatttcatttcacatcggaagacaagaagctgagctagctttg

SEQ ID NO: 24947 - DNA, 444 bp, Gossypium hirsutum
  unsure (1)..(444): unsure at all n locations
  Clone ID: LIB3582-062-P1-K1-F7
gcagaagaagcgagganganccncaacagagggacgaggaccgccggaagcgaagccaannggagacacgnggacaaacggagcaagacaagngagaagacaggcgngaaacgcagaagaaggaggagcagcagcgagacggagaagacccncagaggagaaaccaggaaagccgacaacacggccaacaggaagaaagaaggcngcgcccacanngcgaacaaagcngcagggaacaagacgagaaacagcagcagcagcagccggacaagcgaagcaaggagaggcaacagcgnngccaanggcaagagcaaaggcccgaacggaagcaacaangngngaaggaangcaaggaacagnaccaagagganccangggagggagagagagaaaacaagnggagagaagaagaagaagaggaaagngacgaacgaaagcaacaac

SEQ ID NO: 24948 - DNA, 344 bp, Gossypium hirsutum
  unsure (1)..(344): unsure at all n locations
  Clone ID: LIB3582-062-P1-K1-G2
aacaccccanaggcnggaagngncnccnncaagcgagcacngccggaggaaggggnggcagcgncggggcagggggcaagagaagaggcaaggcggannaagnncaacaacaaaaacaccnnnnncnncacnccnncacagnccgagaggagggccgangcnnaaaccccagccgangccaangcaancaaaancagggggaacnnnngagggnaacgnaagnaggaagnaanaaaaagagnngcagagcnangnccgccanggannnngnngnngancgnngaggnaccgaaagaacagggncnagaggacgaaaaanaaaaagaaagggncnaacaaggcgg

SEQ ID NO: 24949 - DNA, 357 bp, Gossypium hirsutum
  unsure (1)..(357): unsure at all n locations
  Clone ID: LIB3582-062-P1-K1-G8
caaggaaagaggnngagaggacnaaagggccanggagnccagaaaaagaagaggcnnnaaagcgncnggnncaaaccnacggnnccaggaaccggncnnnggnaagcaaancganaccgggncgaaccggaaaggcnngnaggccacggnggngcaaccagcnnaccccngagggggaacaccgacccnncacncccgaggaagacgagaccanagnccgagcccagacccganncggnaacaaangggcnaccancgcncgacnccccaanggncgaaccganaacgcgannaagaaccacnggaacccnacgcncaagcgaaaacgcccnncgangaccgangannngaacgacg

SEQ ID NO: 24950 - DNA, 271 bp, Gossypium hirsutum
  unsure (1)..(271): unsure at all n locations
  Clone ID: LIB3582-062-P1-K1-G9
gcnggancaaagaacanngnangagcnacannancagangancacannnggaaaggngngcggnaggcgngcnnagagngaacaaacnnacnnnnngcngaccagaaacaancnaaancnggcaacaaaaaanncncngagaaaaaagcaggnnnncngnacaaaaggcaaaccaaacngcaangcangnccaangagaggagaangnagacannnngccagngcanncgcaagggccaggcnggcccngccggggcccgaggagaaaagc

SEQ ID NO: 24951 - DNA, 249 bp, Gossypium hirsutum
  unsure (1)..(249): unsure at all n locations
  Clone ID: LIB3582-062-P1-K1-H11
cnnaacnnaacnaagcaagcncgnaagcngnnnncancaanggccgaccgngaccgcncggaccgaggggaccagggggggcgnggaganagaacgaacnaccaaagcggaccancaacaacccaagnncnaaccgaccncacccncgcgcccagcggcggcacacncacggcanaagccgggcnaacccncaccggcaccgncagcggccaaagcgnggcaacgccacgcnncgncaacnncagcccg

SEQ ID NO: 24952 - DNA, 613 bp, Gossypium hirsutum
  Clone ID: LIB3583-017-P1-K1-A1
caatttcttatttttttaaaaaaattgaattctaatgctcttatttgtttaatttcttgattttttttatctgtagacctgaaagattattgagcttttaaatctgaattcgctcgtttttatgttacttgtttttcatgcttattattctctttttagggcttaggatctgtattgtttttggctttttacattgttacaaattgaattctgaaaaattaaataatactcaaggtgtttacatttcatgtttaaatataggtttccataaaaaaaaaaaagattgtgttatcttatgatacttgtaataagagatgatgcatagaaacaacgagttcatttaggcactgttcgttgttgcttttatttctttatttttacttgtaattggatccaaagcaaatgatatttttgaagaattgaaaaaatcttactgagttagtattgcattccaatgatgttattttaaaagtaattactaaatttatgttctacaacagtaaccttttaagatttctcgagcttattgtatactattgggtttttatattgaagagaagaagtctttcttttgctatttggtctaagaactagagtaattttattatgtaaa

SEQ ID NO: 24953 - DNA, 578 bp, Gossypium hirsutum
  Clone ID: LIB3583-017-P1-K1-A2
gcgtccacgcgtacgccggatatagctctgattaattatttctggtagaatgcatcaaaattggctttaactaagtcgccctctagtggttcccaactttcttttcctattttgtgtttaatcttgggtactttccaattgtttgacttctgatatgtatgctttgatgaatcccactacttcctgtgcccactcccttacttccttgtgataaagcttattcctattataccatatcgctcaaaatgaattagctagatttgtgcaatactgtaaactgttatttcctaattctagtagtaactattgtttccaactttgattcatgtttgtgctcgagggtgccactcctacctcctgcagaactggttttgtgaatgcgcaatctcgacacagatgggctactgtctcttcctcttctttacagattgggcaaagtgcatcttccctaagccttcgagactttaggttacctagagaaggcatacatatattcattagttatttttccatagatttattcgaatcttgctgggaattttgaggctccaactttttgtaaagtagcttgtatcttc

SEQ ID NO: 24954 - DNA, 777 bp, Gossypium hirsutum
  unsure (1)..(777): unsure at all n locations
  Clone ID: LIB3583-017-P1-K1-A6
gattcctctgccgttacgtccaaaggatccaatgctactatgttcattgattgtcccgaggaagacaagtctgccaagagaaattcgcaaaagaatggaagaaagaaagggaagcataaaaagaaacatttgtgcgatgttggctccatggaatcagaggtttgtgcggagtacacctgtggaagttcaacatcggagatctgtgagagtagcagtggtgttgttacaagttctcagtcacaaaatatatgcagaggtgacattgatgaagtcgaaacaccagagtctattgcaccttctaaagctcacaagttttcaggggagcatcatacggatagctacgaaattggtagtgaggatcagcagctttctaggtgtcaaggagatatagagaggagacatccttcacatcacaaggttttctcagacatgcatgattctctagtgttggactcaatttctgttggttcaaacagtgaagaagggatgagtggtggtcatattgtcaatccatttaatgactacaaccatgaaatcagtcaattagaggtatcaggttcaagtaccaacaaggggtctttgtatcgagaaaactcatcgtgtagcatttcaagaacttgtgattatactgagganaccaagcatggtatggctcggaaatgctttgatggccgaaaggttgcaccaagcaagagggataagcagtttaaatctgttccttgggaaacctggaagcacagggaacttgcacactcaaacaggaattcgagaacggtt

SEQ ID NO: 24955 - DNA, 660 bp, Gossypium hirsutum
  Clone ID: LIB3583-017-P1-K1-A7
aaattaatcaactcagaaagttcctattcgaactttttctggctattatcacagcagccattagaaagtccccatttgacgccttcaagactttcaacgaattgaacccttctatctccgatcgtcatcaatggcgtcaacgttatcccacaagttttgaattccattcttcttcaaagttatctccgttgtttaccattttattgttttcatcaaagatgccaagcttagcggtaaaactgtatagcatcttcttcaagttccagcaaagatatacgctacataatctaacgcaaattcctgttcacgccgtcgatccttttggcataacttcccggcgtgaagaatcgacggccgcaagcaacccttccttctatgaaggcgtcgccaccaaggacatccacatcgaccctttttcatctctctgcatccggattttccttcccgccacggtggttaacttcgatccgacgacaataatcgaagacaaaagcaaagatggtgcttttatttacagtggctactctcctcaggctagaacaaagcacaagagactaccggtggtattacagtttcacggcggggcttttgtcggcggaagcaatgatagtgtaaggaacgacgcgttttgttcgaggattgccaatctttgtggatgtg

SEQ ID NO: 24956 - DNA, 705 bp, Gossypium hirsutum
  Clone ID: LIB3583-017-P1-K1-C9
cccacgcgtccgaacgcttttgcctgttcttccctacattcccatgtcattagacatttcagatggtcctaaatatggtaacaaagatggtcaaccccgtaatcgtggatactcttcttactcagggggatacagccctagtgatttgactgcaagtgacagtaaaggaaattatagtggttcacttagtggaggtgatatatatggaaatcatggtggtcgcaactccagccgggggttgtccaatctaaatcaagtttcacataggaagcatgggtattagtcctgggttctagactgcacaaatatgcagaatgatatcttaaacccggccagccatcccctgccaaggattctactgcacctttcccacttgttgccttttctcccctatctaaacagttgtcgtcacaaatcttgaagccagacctttgtcccttttgatgaagccaacctagaccagaagaccagacaaatcgggtttgaggaacttatgttccactttggctcgcctttatgcctgtcttgggtgaccaagaataagatcatttgatgatgcaaatcaccattcaatcatttttggcctggattcatgatttgcaggctctctaacacatttttaataatttgctttccatgtaaaacccttacacttgtatccttgacttttggctatttggctgatgaagtgaatttttatgtttt

SEQ ID NO: 24957 - DNA, 713 bp, Gossypium hirsutum
  Clone ID: LIB3583-017-P1-K1-E2
cccacgcgtccgcccacgcgtccggaccgatggtgataaaccacggggacgtattgaaagctttgtctcaggctttgatgaaaacagaggaggcttatttggatatagcagataagatgctgatggagaacccagagctggctttgatggggtcttgtgtgcttgttatgttgatgaaaggtgaggatgtttatgtgatgaatgttggggatagtagggcagttttggctcaaaaaactgagcctgattattggttaggcaaagctagacaagatttggagaggatcaatgaagaaacattgcatgatcttgaaggttttgatggcgatagatctaatgtaatccctgatttaactgcatttcagcttagtgtggatcatagcaccagtgttgaagaggaagttcaaagaataattgatgaacatccggacgatgcgtatgcattgatgaacgaccgagttaaaggttctttgaaggtcactcgagctttcggggctggtttcctcaagcagcctaaatggaatgatgcattgctagagatgtttagaattgattacaagggaacttcttcatatattacttgtgttccatctctccaccaccacaaattaggtcccaaagacagaattttgatactattttctgacggccttttattaattctttaacgaacgagggaagcccgcttttggaggtcgaaccattttattacc

SEQ ID NO: 24958 - DNA, 531 bp, Gossypium hirsutum
  Clone ID: LIB3583-017-P1-K1-F11
cccgcgcgtccggacgtagacctggcgatgcaccctccttcgctctttcttctcttcaatggctgcttaaatggctggatatctcggcagcccttttcctaacatgagtgccaaattgagtggctaatcactatggtacgcgcctctgcactccactcccaagtccgctccaccgcctggaccacccagagctggcaccagatctggcaaccggtcatgtgtgctgtgaggtatgctatgaggcctactgtcgaacctaaggctctcgttacgactgcttttaacattgcttacattgttctatgcataggtctacgaggagttgtgcaacgtgtagggacgcctgcatgcgccgatacatagcaggatccacagcaatggcagcatcagagccaggaccagctccaggaccagcaccagatagcccagcgggtcatcctgggtgtcacgattgctgtggcgcactgtgtctacaactgtagctacgagcatggcgatgctacgaatgtaactatcactgtactcgacact

SEQ ID NO: 24959 - DNA, 686 bp, Gossypium hirsutum
  unsure (1)..(686): unsure at all n locations
  Clone ID: LIB3583-017-P1-K1-F4
gccagtgttgaaagctaatggtgaggctgaagcattgtgtgctcggttaaatagagatggtcatgttgatgcttgtattactgctgacagtgatgcattcctctttggggctacttgtgttattaaaagtcttaggcctaattcaaaagaaccgtttgaatgctacaatatgtcggatattgaagctggtcttggactgaagaggaaacacttgatagccgtctctcttttggttggaaatgaccatgacctaaatggcgtgcaagggattgggcttgataaagcacttcgtttggtacgagggtttagtgaagatgagatatttgataaattatatgaaataggcaaagggcatgtaccactatttcagggtgaaattagatgtgctgctgatgctacaccttgttcagatgagagctcaccaaaggcaaagcagtctcattgctctttctgtgggcaccctggcagcaaaaaggctcattttaagtcttgttgtgaatattgtattactgatagcaatgaaggttgcttgaaaaagtctcaagggtttaagtgcaactgctcatcctgtgataaggttagaaaagacaaggacatgaagaaacatgagaattggtggataatgtttgcaacttgatttncaaggaacaaaattccaaatgatgagatcattggaatgtacatgt

SEQ ID NO: 24960 - DNA, 611 bp, Gossypium hirsutum
  Clone ID: LIB3583-017-P1-K1-G1
gcgatcaaaaaaagaaagagagggagcttccctatccctatttggttctctgaactccggcgcttgtctcaacggcgctttgccgtgtgaccaccgcggccaaaggccgatgcggcgtgagaaggccctctttggctgtgttccaaaatgaacctgaaggtatggattttcgaacctaaaaaagaagaagaaagcccttagcccctcctttcaacaccaatccggcgaagcccaagacggtggaacgacggggtaattcgggtaatctcttttccctttcctttattatctatttaatgtacaaaaaaataaaaaaataaaaaaagtacgaatctaatataaaaaaaaccttgaatccgttttttgcttttatttctttatgctaatgtgtttttttttaccaaaatcccccccttttacatttcaccacatacttggctttatagccgaaagaaaagatgaaaaatgcaggaaaattccctcttttgctactgtttttctagtctgcttccatttctctcttttcgctacttgtttgcaggtacatggcaaggtcaacttgccgtttcggtgcaaggccggctggtggtggcaggcctcgggcatggtgc

SEQ ID NO: 24961 - DNA, 659 bp, Gossypium hirsutum
  unsure (1)..(659): unsure at all n locations
  Clone ID: LIB3583-017-P1-K1-G2
cccacgcgtccgcccacgcgtccgcccacgcgtccgatttctcccattaatccctctaaatctcaatttctcccttcaaatttcaatctgaattcgaaatattggaaaacaactgttgtcccttttggtatcttatattttattctctttttgcttggagtacgataaatttgttggaaagcatcgtcctttttcatattggagctgctcggagtaagactgtggaagagtttggttgggttttattgatctcaaagccgaccagaattgaacttttggttcaaatttgaagaatttcgctgaaataattggctttcgatcctcagaatgggagggggttgacgggcaagatcattttcatagacttttcttaagattgattttgaaggatcttcatggactatgggctttctgatagcagtggaacagatgatgacctccctccttcacatcagaacaggtttcaaagagggggtcgtactgctgccgggaatggaagatcagcagttataggctctgctcctttgcctagaatgcatggtgacatggaaacacanatccatctcattgagcaggaagcatactgttcgatcttgcgggccttcaaagctcaatctgatgctttaacttgggagaaggaaagtttaattactgaacta

SEQ ID NO: 24962 - DNA, 558 bp, Gossypium hirsutum
  Clone ID: LIB3583-017-P1-K1-G8
agaaaatgagagcatacaatgttttagaagcagatccagatttcgagaactgtaacgggtggagcctaacagtggacaggaaagacttacatatattgaaacattccaacattggacttttcatggtgaacttgacaaagggttcaatgatggcgccacattggaatccaagagcttccgagatagcaatagtgttgcagggtcaggggatggttcgggtggtttgttcaagcaatgccaaggaatgtgagtgcagggacatgaggtatagagtgaaggaaggcgatatatttgcggtgccaaggtttcatccaatggctcagatgtcattcaacaatgattcttttgttttcatggggtttagcacattaacaacaaagcgaaaccatcctcaatttctagtggggaagaagtctgcgctaaggatcatggataaacagatattggctttgtctttcaatgtcttcaacgcaacaatcgatcagcttcttaaaccgcagagagaatcggtgatattagattgtacatcgtgtgcggaggaagaggaaagattgatga

SEQ ID NO: 24963 - DNA, 628 bp, Gossypium hirsutum
  Clone ID: LIB3583-017-P1-K1-H4
gaatgttaaaagttgttagctttgaggttgtcaactaagacgaaagggaaaaaaaagtttatatacgttgtctgtgggactaatgacaatggtttttattttttaaaacttcagaaaatggatacaattgcagcatctcctcataaaattcttcatctggtgagacatgcagaaggagtgcataatctagaatcagacaagagtcgtgacccgctaacatcattcgagtttttggatgctcaactctcctctctgggccggcagcaggttgttgctgagaggaaacatgttcgtgaaactggactgctcgatgaggttgaagttgtcattgcttcccctatgacaagaacattggaaacggcagtggggatatttggtggtaaagagcaagcggatgcattagacgtcagctcatgccaggattcaaatgtaaatagcaatgaagcatctgcgattttcaatagtcggccacgaattgtagcatatgagctttgtcgagaacgaatggggatattagaatgtgacaagagagcaagtattagtcagtatcggtctcatttccctacagttgatttttcattgattgaaaatgaagatgatgttttgtggaaatcagatgaaagagaaa

SEQ ID NO: 24964 - DNA, 641 bp, Gossypium hirsutum
  Clone ID: LIB3583-021-P1-K1-C1
ttcttcccaatttccctttttatattttctcttttatttttcttgccgccgttcacagctgtcggagctccgatcgggcaccatcagaacactcctctccaccatctctcttcaaatcgtcggttagttttccaagaattcgacccaaatttgatgaaacaaaggccaaagcttcgatctctttctttctccgatctcccttttatactgtcagatcaccacgggtctccggtgtgtggtacatcgtgccgtggttcgccttaccaccgtgggatcgtcgaacagagatccagagttccgaatccgaactcgaacagagaagtcctttgactttcctttctattttttgcttctctttttcttttctttttttgttactgattttgggttatttggttgtggttactgctttcggttaattggttttgctaggtttgggatgttgagtggaggtgatgagtggggcaatgatggtggtgcccgaatggtgaggtgatgaagggtgctgctacggtggtaccgagatggttgattattagaggctcagtttcggttgagggagttagagaatgatgatcggtgatggagggccactggtgatccccgagagaggggcaggaggcgatggaaaaaaatggtga

SEQ ID NO: 24965 - DNA, 693 bp, Gossypium hirsutum
  unsure (1)..(693): unsure at all n locations
  Clone ID: LIB3583-021-P1-K1-D3
cccacgcgtccgcggacgcgtgggatcttccaagcttgtaatgaaatcaaactgctagagttcaaaccatcaataattgcagtatcagctcttcttatggcatcccatgagctattccctttgcagtttccatcttttgaaacctccattttgagctgtcgacatgttaataaagagaatcagttgaaatgctttaatgcaatgcaagagatggtggctaatgaaacaagcgattcaattattgaaacggtgtcaagctcaagtacaacaactccaatgagtgttttagactgccattgtgagagaagcagtagcagcatggcagccattgcagtgcctgaaaagagagagcaaaggaagcgtcagaaattgaatggtttttgcagtgaaagtaacagggtgaagatttcccagattcaaccatgtggttaagatttctacctagattttctatacctaatgtcctaaaggtaaaaggacaaaagggttcatgaacagctttagttagaactcagaaaagatggttcccttacccttttcttcgagtacaaaattgacgaaagaaaattgactaaattagatgatccattttgtttatttcctttcaaaagaatattaaatttagctggnggacagctgttgggaaagggacacttaggacaaaacatggcttcaaatgttaaaataatacta

SEQ ID NO: 24966 - DNA, 699 bp, Gossypium hirsutum
  Clone ID: LIB3583-021-P1-K1-E6
ttcagagttcagattctgcctcgacgatttcgttttcatatttcaacaattatgccaggtttgcgcccttgaatttccttcactcttttgttacttgctacaagctgcaaaacccaacatgccttgttgtatttcttttgaagaaaaagatggtcaaggctggttaatgccaaaacgaagatgaacttttatagtttatttgtttttcttgaaaagggtatgccaaagtctcgtgcttactttcttcctattgggtatatttggtgaaaaaaatggttggaattgaatagaactaatatttggttactaggaaggttgagttggaataaagagtgaatttttttattagtggaagtaaattgggagtgctagggaaaacactcagattcctgttgttgaattatagcaggtgaattgctgatggagacttcaatatctagttcaattgaaaccggcttagtttatgtatctgaacttgggaaacgagattctttatgtgactggatgcctggaaatggaaattggcaggtatctcctaaattgaatgatacttgtcagagtggatgcaaagaggctgagtattcatgccctcctttgccaagatctggttctcaacactcatcgatgagtgttctgtctgaagttcctgtgcctgcttttgttttcagtaggaggaagaaacggcaaggcagcagcggc

SEQ ID NO: 24967 - DNA, 658 bp, Gossypium hirsutum
  Clone ID: LIB3583-021-P1-K1-G1
cccacgcgtccgcccacgcgtccgcccacgcgtccgctgtttctcaggctgtcaatttatttaagacaaaataaatagcgaattaatttttttttttttggtattaactgaaaattctcattttaatataaaaattatggtttaaatttttgtttttttggtttaatttttgtgtaatgttgaattttgttatctaaatctgtgttcgatcgagcttaataatggtggttagtgaagcttttggtgaggactatatttatttctagcacctggtgaaagcagcttaggtagtatggagttggttcctgaagattagaaggcgttatattttgctgtgaggtttggcttcttgaagacgaagctacgtactatttaatttgcgaattgaagaaggattttgatttatcctatgttgttctgtccttattgctatcagtcttttctagtctggtttacaggtaagtgtctagatgattgttgatggctattgtgacaaagggttacgagaggtaaaccgtcagctatatgatggaaatgagaaatacaaatggagttgtggctgaggaacttcggacgctagaaggagatgacctgaaagttgagattgcgcaaaatgttaaaagatggcataccggggttgttcggacccctgctgggc

SEQ ID NO: 24968 - DNA, 665 bp, Gossypium hirsutum
  Clone ID: LIB3583-021-P1-K1-G10
agaagaataagcaaatgctacatggtaagcccaaatctcacttacaaaccattaactcaaaaagtctaaaaccaaaaataaaaatgcacgtagatggtgtaacttaattgtaataatatacaaaaaaatactaacccataatcataaatttcgataggatcgacccttccttttttaatttacaaataattattgtagcatgaaaagcttcattatttgttgaatgctttatattactgtaaattttgaaaaaaaaatttatgcatggtttattcaaaatatgattcgttatttataaggtgaaaattgaggttatcttttgactgaaaacaatgctagaaatttaaaagcttggtttaagaaaacatatattaaagtttcaggtggttaaagttgtttcaatcaatcttatattaaaatgactttggcatccatgtgggttctagcctaggactggtgttgtggcatgctgtactaggttttgttctaaccagaaataagttttagaaataatgtgcctacaaagaattttatagatatcctgatggccagaaaggatcactgtagtatgacaaatatggtagcatgatgactgcatgttttaagtttgtttatttatcttctctttctcacagtaaattattgtagcatgaaaagcttcatta

SEQ ID NO: 24969 - DNA, 641 bp, Gossypium hirsutum
  Clone ID: LIB3583-021-P1-K1-G3
cccacgcgtccgcccacgcgtccgccgcctccaaaaagccgcgcgactgccctttctgtatccttgaagcctggattacacgctccttaaccctcgatctcacccttgacgcgccttccaagatccaaagctgtatcaaaatattcgccgagcacttccgcttcggccgacaagaggatgcccacgagttcttgaggtacgtcatcgatgcttgccataatacctgtcttcgtttgaagaaattgcggcgacagggaagtgaaggaggaggagaagcagtgaacggcaataccgtagttaaggagatctttgggggtgctttgcaaagtcaggttaagtgtttggggtgtggtgcggagtcaaataaagttgatgagattatggatattagtcttgatattttgaatagtggttcacttaaagaagctatgcataagttttttcagcctgaggttttggatggaaataataagtacaagtgtgacaattgtaagaaattggtggcagcaaggaagcagctgtccatacgtcaagcgccaaatatccttgttattcaactgaagagatttgagggaatacttggtgcgaagattgataggctcattacgtttgaaagaagtttggttctttcaagctttatg

SEQ ID NO: 24970 - DNA, 666 bp, Gossypium hirsutum
  Clone ID: LIB3583-021-P1-K1-H12
tcgtccacgcgtccgcccacgcgtccgtgaagttgcagtcagtatactgcaagaaatggctgcttgcttggaacaaggatcaataaatagggcaaccgggagcacaaatatgaataaccagtccagtcggtcccatgccatcttcacaatcacgttagaacaaatgcacaaaatccaatcagtttctgctgttaatgacacttcggatgaagatatgcgggaagagtatttatgtgcaaagctccatttggtggaccttgctggatctgagcgagctaaaagaacaggttctgatggtcttcggttgaaagaaggtatccatattaacagaggacttcttgcacttggcaatgtaatcagtgcccttggggatgaaaaaaagcgtaaagaaggtgtgcatgttccttaccgagacagtaaactgactcgactcttgcaggtaagatttattttgggttgattcatgcagcggtagtttgaacgagtgacatttagataaccaaaaagtggacagattccaaagttaattttatggattcacttggtggaaacagcaaaacggttatgatagcttgtgtaagtcctgcagacatcaatgcagaggaaagtcttaatactctgaaatatgctaatcgtgctcgcaatatccagaataagcctgttgtg

SEQ ID NO: 24971 - DNA, 605 bp, Gossypium hirsutum
  Clone ID: LIB3583-022-P1-K1-A8
cccacgcgtccgagtgaggattactcggagtctaaaccatttacctgggacgcgaagaacctggcaagaaagttccaatgttgtcgattccagttcattacgagagaggggaatggagcagcgcatgcattggccgttgagggtatgcaagcagaagggaattcattctgggtggaagatgcgcctttgaaagctttggaagtggccaattctgatcgtcggagtgggcgacctccataacccattttctatttcagcgatggagttgagaaatactgatataggatggccattctcaactgctttcttttccggttgttgtcgaatttggaagatttttaccgtttattttattggggttttgttgattcacacagcgcctgaagatttgttggatggagaagacggtgttttgttgatttctttttttaattattttattgtttgctggtttggtttttcccaatttgtttttgttttgattttctttagattgttagttgctgggggacttctcctgtttgctggtcaagcacaattgctataaacggatttttttttaaaaaaaaaaaccccaatatttgtgatcttcttgggctcttttt

SEQ ID NO: 24972 - DNA, 681 bp, Gossypium hirsutum
  Clone ID: LIB3583-022-P1-K1-A9
caaagcttgaaccagttagatcaacttcgggttctgagtttcaaaaacaactccctttcaggtcaaatacctgacctttctggcctactcaacctcaaatcactttatctcaacgacaacaacttcaccggtgaattcccagagtccattacaagcttacatcgtttgaaaaccatagttctgtctggaaatcaaatcactggtcagattcctgcttctttactcaagctcaaacgcttgtacactctttacttacaagacaatagcttcaatggtacactcccagctttgaaccaaaccagtcttagattcttcaatgtttcaaataaccaactccatggtcaaatccctgtgaccccagctctggttcggttcaacctgtcttcattttctggtaatatcgatctttgcggcgaacagattggaaacccatgtcgaacgatcaatttggggccagcaatgagtccagtttatcccaattcgagttcaaatcccacatcgaaaaaacatagcaggttgatcaagatcgtaatagtaagttgtataggtgggttagcgctgctacttatcagtgtggttttggtgcgttttattagcaaaaggaggcgaggaaagggtaaggaaaatgatgtttaaagcaaaggagttgttagcgttgaaggggttgaaggaggaggggag

SEQ ID NO: 24973 - DNA, 614 bp, Gossypium hirsutum
  Clone ID: LIB3583-022-P1-K1-B1
cggacgcgtgggaaaatagttctactgatatgaggttcgcatggcaatcatcaaatttgtagtgtgtttggtttttatggaattaaatgggaacacaatgaggaaggaagtggcttatgttgcatgcattatcaaccatttttccttttaagtagaagttgcatccaaatctcctatatccatctgagtatagtaatgctgacttgaaattaatggttggattttgaagctacaatctgcttaactggttaccttgtccgatatatttagaagaaatcaagaagttaaatatttgataaatgttgcctgtaagtaaccttttagttagtcaatagagagtttggggcttgaaatgaggaataggttcatcagtgtgtaagttattgagagaaaatttgtcctaatacttgcaactagtttatttcatgtaaaaaccagcatttgattgcgactacttcattgaaacctgtcttcggttggtaattcatattttcaaaatttgcctctacgattgcttcctgaaggttgcatggtttcacaatttcataggacatgaaatataatgcacatttttttcttaacgtctatatatttgattatggaaaaaacgctta

SEQ ID NO: 24974 - DNA, 603 bp, Gossypium hirsutum
  Clone ID: LIB3583-022-P1-K1-C4
cctgtttattgcagcgatgttgttattcgatatgttaccatccttgctccacctgactccccaaatactgatgggattgatccagattcaagctccaatgtctgcatagaagactcgttcatttctaccggggatgaccttgtggcagtgaagagtggatgggatgaatacgggattgcttatggacgccccagttcttacatcactgttcggcgagtaacaggttcaaccccatttgctggagttgcagtgggaagtgaaacatctggaggagtggagaatgtgttggccgagaacataaatctttacaactccggagttggtgttcacatcaagactaacatcggcaggggaggggttataaagaacatcacagtgtctgaactgttcatggaaaacgttagaacaggtataaaagtagcaggtgacaccggcgaccaccctgataacaattttaacccaaacgcccttccatatgtcaaggaccttatgttaaagaacatttgtggtgtgaatgtccagcgagcaggttggatgcatggcatcgagaatgccactttcaccggcatctgtctttcaaacgttaccctccagggcacgact

SEQ ID NO: 24975 - DNA, 266 bp, Gossypium hirsutum
  Clone ID: LIB3583-022-P1-K1-G12
cggacgcgtgggcatatagaggtcaatcgacgggggatctgtgtgttgggaatggccacgacagcaggaggagtgggagactgaaacccagacgacgacgacgaactcaactctttactttaccagcaacaccacgaactcatggctgcccattcactcgagtccgacctcgactatgccttacatcttcaactgcaagaagccctcttcgctgcccttgctctacacactaatcaacgcagaccaaccacatgacgggcttcaca

SEQ ID NO: 24976 - DNA, 610 bp, Gossypium hirsutum
  Clone ID: LIB3583-025-P1-K1-A10
gttgcaaggttaaaccaagatgccattgccttcaacaataaactgaacagcacgtcactaagcctacaggacagattgcctggtctcaaacttgtggtcttcgacatataccagcctctcttggacatggttacaaagcctagtgataatggtttctttgagtcaagaagagcttgctgtggaacaggtacactagagacctccttgctttgcaattccagggccctagggacatgctccaatgctacatcatatgtattttgggatggattccatccctccgaagcagctaaccaggtcttggcaggcgatttgctagcacagggagtgtccctcatatcttgaagctatgtcataggaagggggtaaaaggaaaaaagaaaaaggaaaacactattacctgttcctgtaatcttctcatatggaggatattgacattactattagtctaaaatatgtacttcgttggtacgactgttttaataggatattttcacatgtaaaaactccttatttatgcttttagcaggggtatatcgcagcatttctgccagggaagttaatttattgatccttgcctcaataaaaaatgatatggttgctttgtgac

SEQ ID NO: 24977 - DNA, 667 bp, Gossypium hirsutum
  Clone ID: LIB3583-025-P1-K1-B10
gttctatctcactattaaagaatccgataaccctaagttctcgctttatatatgccatacaagtgtagattacttcgcttattcttttattgaagatggcttgcattattagccttacaaaactaataaacatagttcccattttcatctttgtctcatgttttcctccattgatgctttctcaatcattcagatcacttcaattgccgccgaaagtcaccggtccagaatccatcgccttcgagttcggaaccagtcgattctatgttggtgtggctgatggtagaattctacaatacaacggaccaagggttggatttcgagactttggattcaccggtccaaataggtgattctttaaccaacagtctactggttgcaagacataaaatcataaaactgaatatagcttgtatatattattgcttgaattttcacccacaaactctaatacaggtctaaacggatgtgtgatggcactagtgatccaaatttggggccaatatgtggaaggccattgggtttagcatttcattactccttaaataagttatatatttgcgatgcctattttgggctcatggtgctaggttcttccggaaagcaagcgacccaagtttctgcggctgcagacggggagccttaccgtttatgtgatgctttagac

SEQ ID NO: 24978 - DNA, 657 bp, Gossypium hirsutum
  Clone ID: LIB3583-025-P1-K1-B5
atggaatgtgtggacttcttaaagagcttttgcttcaacgttactttagcaaggaagcttgcggtaatacagaagttcctgagtcggacatagttcaagcatgcagaagattgctagatgagaggcatggatcaaatgtgatgcaatttcttcaagcaattaatgggagacctgaccttaccagtgggctaaagaggctcagatgtcgaaccttaatatttgttggatagaagatttagtgccttagttgaggttcaggcttgtggatccatggtgacagaagaacaaccacatgcaatgttgatacctatggagtacttcttcatgggattggattgtatagactttgccatttcagtgacagcccaaggagccccttaagtccatcttgcatctcacccgagcttctctctcctgaaagctcgggtttgaatttaaaacctataaaaacccgtgtttcacattatacttgataaagttggggggctgagaaagatggacttatttagttaatttttttagactttttggttctattttttgtctttggaaaaaagaaaatgtacgagggtagaagcagatgcggagggtgggggtgtagatataaagggaagaaaaatgaaaggaattgtacggaaagggtaacaatacatgatg

SEQ ID NO: 24979 - DNA, 670 bp, Gossypium hirsutum
  unsure (1)..(670): unsure at all n locations
  Clone ID: LIB3583-025-P1-K1-C4
cggacgcgtgggagccggagttataatgatacatattatgttgactctcaaactgtgctgaggtgtcatacaagtgcacatcaagcagagctgttgagaaggggacacactcatttccttgtaactggcgatgtttaccgtagagattctatagattccacccattaccctgtgtttcatcagatggaaggggttcgtgtttttactccagacaattgggaggcatcgggtttggatccaacatcatatgcagctgaggacttaaagaaaagtctagaaggcctagctcgtcacttatttggtgctgtggagatgcgttggattgatgcctattttccatttaccaatccttcctatgaacttgagatctattttcaggggaaatggatggaggttttgggttgtggggtgatggagcaagaaatattgaaaattagtggtagatcaaacagtgttgcctgggcctttggacttggattggagcggctagcaatggttttatttgacattccagatatccggcttttttggtcaactgatgagcgattcacctcacagttttccgaaggccaaatgggagtcaagtttaaaccattttcgaagtatcctccctgttacaaagacatgagttnttggatcaatgattcatttacagagaacaacttatgtg

SEQ ID NO: 24980 - DNA, 726 bp, Gossypium hirsutum
  Clone ID: LIB3583-025-P1-K1-D4
cgaatagcagcggtgaaatcactaaaagtatcaacttcccatattgtgacaacctttctctgcttacggttgtttgttctttcgatggtttgctttgctgtatcaactatccgtggaaagtggactcaggcatagtagttgaggatgtaactgatgtggaaatctgtatctgcaacccggctaccaaaaaggctctattgcttccaagaggtagtctgtccaaagaaaagccttccattggggttgcttttggtccaaaaatcaacgaatacaagatattccgatttttcaatgccaagcgcatatctctagctaaacatcaatcccgagttaatcgtcgacaatgtgaggtatattcatcaagcacaggatcctggagtgtcataggtcgggtaccgtattatcccatgcattctagccatagtccccttgggtccaaccatgttttcgtcaatggaaagatttattggttccttgcttccaatgaagatccactgatccctggctcgatacttatggctgatatagaggaaacctttgaaactattaaccttccaaaagaggtcacagagcactcgtacttggtcaatctcgaaggccatttatccctagtggctgtatatgacgaggatgagatcgtgaatatatggattctcaaagacaagaatgagcctgaatgggagctgaaatgcaacgatcacgtcccgttcttgaatgatgaatgtg

SEQ ID NO: 24981 - DNA, 694 bp, Gossypium hirsutum
  unsure (1)..(694): unsure at all n locations
  Clone ID: LIB3583-025-P1-K1-F3
ctgaaggcagaaatgactgattctggtggcagcctctctattgagtccgatggttactgtattgctgttgagcatcaagctggagaaagtgagaaacccgagcaatctcaccagcttaaagcagagatattttctttgaagtctgaggtggcgtgtttaagatctgctctcgaaactgctgagattaaatgccatgaagaagaaaccctaaacaccgaacagataaagagtgcgaatgaactggttgagcagataaaatctgaagcaagcttgaaagaggcagagttattagctgaattacagaaagcaaacttcaatattgctgacttgaaggctaatctgatggataaggaaactgagttgcagtgtatctcagaggaaaatgaagagcttcacatgaaacttgagaaaaacctgtctcgccagcgagaattagaacttgaaaaagagctaaagttactgaatgaagctattgttgacctgaaggcaaatatgatggacaaagagacagaacttcaaaacatatcggaagagaacgagatgctgaggttggaaatcagtaaaagggacatggacaaaggtaaaacaaatgataaagtggctgctgagctagacgaggcgagggttgccgagcgagaagctattatgaagctgggctngcaatggaggaggcagataagataacaggagagct

SEQ ID NO: 24982 - DNA, 510 bp, Gossypium hirsutum
  Clone ID: LIB3583-025-P1-K1-F6
cccacgcgtccggaaaatccctgaatttgttcccttgaattccccgaattacccctctaaagatgcagagtttcccttaattgccatgtcctccgacgaaatcaccctcaacgtcttccaagacgacccgattcgggcctttaattgcggacacggtacaaccggccgacccggttcaaaaacccgagatccaacttccttcatagacgataaaatgttctccttccctcctttgcaacctcccgaattccgctcctccaacatctacgccgccgcagctgccgccgctgctgcctccgcagaccgtcgtggctcgccgaatcatcaccaaaggaattgggggagtagtcccggaggtggctccactaacagcggtgacgatgaattggatggagaggatgccgacgacgacgaggaggaagacgaggatgatgatgatgatgatcctaacgaaaataatattagtaacaaaaatcataatattaatataaataatcatattaataaaaa

SEQ ID NO: 24983 - DNA, 727 bp, Gossypium hirsutum
  unsure (1)..(727): unsure at all n locations
  Clone ID: LIB3583-025-P1-K1-F8
cccacgcgtccgtatcagtgtgggcactgtaacaaagatgtcctcatcagggaagctgtctgctgtcagtattgtaagggtaagtggtgctcttctatattaaagtgtatttgatctgtttttgtttttacaaagtgatgctctgcttgcttgatggtattgctttaatgagcttctaactccacaggtgcttttctttacatatatttcacatttctaattaggttgatataattttagggttgtttcataagaggcatgttagaaagtctgctggtgctatcattgctaagtgcgcatatacatgtcatcgctgcttaggtgacaagtcgaatgtcaatgttaaaaaagggggaaatatcatgaaaagtaagggcgacacaaaggggcagaagacaatcacaaaaactgcaaggaaattgccacaaaaaggtaatagggccaatgaaaagtcactggcagttcgaatgtcactgcgttcacggaaggataaaaagggtgctgctgctgtgccactgcgccgatcacctaggaaaataaaatacatttctttgcaaaagaaaaagcctggtaggtgcaagaaaggcaaaaagaagtcaaagaagaaagcaactaagaagataaaggaaattacttggcagaggaagaggacangggcttaccatagttactggcttaatggtctcggttggctagtaagccaaatgatgagcgggtgatgcaattt

SEQ ID NO: 24984 - DNA, 724 bp, Gossypium hirsutum
  Clone ID: LIB3583-025-P1-K1-H3
cggacgcgtggggcaatagtaaagaacttccagcaattcctgatactctttcagaggagggaaaggactttgtgaggcagtgtttacaaagaaacccattacaccgccccacagcagcttggcttttagagcatcctttcataaaaaatgcagcaccgctagaaagacccatttttagtgctgatgcatcagacccatcacctgcagttgcaaatgcaatgagaacactgggaattggaaatgctagaaattttccatgcatagattcagaagggacggctagccttccatgtagagctttaaaaacgggatcaggatccagtgacattcatacacctcggaacatgtcatgcccagtttcgcccattggcagtcctctaccacatccaaggtcaccacaaaattttagtggaaggatgtccccgtctcctatatctagccctcatgctctctctggttcatccactcctcttaccggtggcagtggcgccattccatttcatcaccaaaaacagccaatggcctatttgcatgaaggtcttggaataataccaaggtctcaaaactaattttatggaaatgctaacaacccttatcaagaacccaagcctgacatgtttcgagggatttcacaagcttctactgtttctcaagaaatgatttcatcagatactggtgcttttggaaaacagtatggatggccaagccatggggatcataggga

SEQ ID NO: 24985 - DNA, 539 bp, Gossypium hirsutum
  unsure (1)..(539): unsure at all n locations
  Clone ID: LIB3583-056-P1-K1-A4
cggacgcgtgggcggacgcgtggggtttggttctcacacaccaatggtccttggagaagcaaaagttgtccgctatttcccaaattatgaaagaacattagatatagcaaagatgataatgagggataaactttttgtgcacaataagtctgatgaacctattgatctatccaaagaggggaagttggaaaatattgagcatgccaaatcttgtgatgatctttacgaacttgtgggtgaggatttctggttggctacctggtgcaacagcacagcttttgaggggaagcagcttgaagggactagaattaccttggtgaaaatggcacaacagcctggatacgactttgcaatcagaacaccttgcacaccttccagatgggaggaatttgatgctgaaatgacaatggcatgggaagccatttgcaatgcttattgcggagaaacttgtgggtccactgatttcaatgccctcgaaagtgtgagagaagctattttaagactgacatattactggtacaatnntatgccactcacaa

SEQ ID NO: 24986 - DNA, 519 bp, Gossypium hirsutum
  Clone ID: LIB3583-056-P1-K1-B11
gtttcgatctgcacatcaattgtgctttgcttcaatcatccattgctgcaaattttcctaatgctttgcacccccatcctttgttcttcattcaaaatcataacaacgaaatcgagcctcattgctccggatgtcagaaaccaatatctggtccaatttaccactgctcagattgcacatatactatttttaaccttcataaggaatgtgctgaactaccccttgagattaatcacccctatgaccgtaagcatcctcttactctcttgccacaaccgcctactcatccccagaaatgtagttgctatttgtgcagaatccaatggaaggggtttgtttattcctgctctttatgcaactttgatctttcacttgatgattttcttttttcaccaccaacaatcacagttgcaagtcatgaacacccgtggatgcttgtatctagaaaaatgtccgttgtttgtgatttttgtggcactgacggggatcactccccttatcactgtgatacctgtgtgc

SEQ ID NO: 24987 - DNA, 232 bp, Gossypium hirsutum
  Clone ID: LIB3583-056-P1-K1-B7
gccacgcgtacgacggccaagacagcaggatgatatatggtgggtgggaaaaccaacagtgtgagacaatgggatcgccaggccaaggagctggcgtatggtgtggcgtcaacgatggaggatgatgtatataacatcacctctactgaatattacttcaagtctggacataatccgcatgcttatgatgagagtagcagaggtggtaactccttatacgattgtactggac

SEQ ID NO: 24988 - DNA, 414 bp, Gossypium hirsutum
  unsure (1)..(414): unsure at all n locations
  Clone ID: LIB3583-056-P1-K1-B8
cccacgcgtccgcggacgcgtgggcaagtttcagcaagacaaaaaatagaacaacacctattagcagagtttacccattcctcagacgacctctttccaccatctccacggcgtaaccaagtactcctccatttttcatccttttgttctccatttcttagccctttgtcgctagtagattggcagcttcattctctgcccttttgccatgtaagaacttgcacatctaaaaagctttacttagccaaagatagtctctaatgatagcactgatctccaatttatcatcctcatccttttgtagttttttcttattactgataaagcatcactctcgacctctactgccatgacccctagatccaaccacatnntgaagcccttgagcacatgcaatagtccctggcagcaaaa

SEQ ID NO: 24989 - DNA, 343 bp, Gossypium hirsutum
  unsure (1)..(343): unsure at all n locations
  Clone ID: LIB3583-056-P1-K1-C10
nttactcgtnngtgtactnatttactctcgcttggttttggttgcccttcttgttctgttgggtgggggcgtatcagcacggnccttgttgtgncaccagatacaaaatgagtggtaaataaatatgatcatctctattgcaccctacacccgaagtctgtcttaagacaacacaacctagttgtgaaaccagaactgttaacaagtgatgtgcactggtgtatctaaaatgaagcagactattgaacctaatggccacgtcttgtgttacaaaacgaatgctgctaacatgctctacatagttcaaggcagagtgattcatggtattgagataccaggatgt

SEQ ID NO: 24990 - DNA, 554 bp, Gossypium hirsutum
  Clone ID: LIB3583-056-P1-K1-C2
aaaaaaaaaaagcattgtacgatctctccttagcattgtcgccgatctcctcctaaactaaggattccaaactgtcctactcttagttggtggacttggcaatgcatgacagacgacggggattttcaagaatggaggatattgcttgttttgaggtaatgaagcccgaaaaatatcgccatcgagatcaacaacagtagggtcttgtttctttccaggaaaagttttatttttctgattgaaaagctatggcatgcgcatccatggctgtccctacctctcgagtcacctcgaaggcgaaagaggaagagatcaacgggcttcgaagattggattccggcatgaatagagctggcattcgaaggtcttattctgacaatcacctttgttgctctattaatcggatacgtgccgctgcatcgacgaagccgaccatgacaaagagcagttcggtcgggatccttccatcgttgctgccgtttcaaatatcaagttccataattccaaactcgggttaggtcgttttgttcgacgacaacgatgatgaagaggag

SEQ ID NO: 24991 - DNA, 189 bp, Gossypium hirsutum
  unsure (1)..(189): unsure at all n locations
  Clone ID: LIB3583-056-P1-K1-C3
acgcggacgcgntggaaaaaattccaggacctattagtattaatggtgaggaccaggtcagttttcgaagtttggctctttcttttttcccttcccttggcttggtttggttctgccaaagacttccccgccggaagaggcaaggttgatcctaaccagaggtccaaggcctgccggaggcgatcccat

SEQ ID NO: 24992 - DNA, 175 bp, Gossypium hirsutum
  Clone ID: LIB3583-056-P1-K1-C5
cggacgcgtgggcagcagtccaaaaatgagtgtcaaatcaataggttccgggcttttgaacccaagagcggaattcgttccgaagccggaacacaccgagtggggaacccaaacgtgaaacagttaaggggtgctggtgtatttgtaaggaggcagactatggaacctaagggcc

SEQ ID NO: 24993 - DNA, 137 bp, Gossypium hirsutum
  unsure (1)..(137): unsure at all n locations
  Clone ID: LIB3583-056-P1-K1-D1
acgcccacgcgntacgaggctttgctgcattcttacttcttaagcgctggtgaatatgtttaagggtccacggtctgggcaggggcaatgtcaatgcttctatttctgatcctatggggtggggggcccataaaact

SEQ ID NO: 24994 - DNA, 528 bp, Gossypium hirsutum
  Clone ID: LIB3583-056-P1-K1-D12
agaattctttaaaacattcctcaacctttttccctttgtccctttgctttgtctggttttctcttatgagtctattattctgtttccaggttaaagctgcagacaatcggataattcaagaacagcttaaccggaagatttgtgaatgcgaaggattgcaagaaacagttgcatccttaaagcagcagctatctgatgcactagaatcacccaatgtccattctaaagcctcctattcccaacaaatcaaaatgaatggcctgcagatggacaaagaagttgcggcaccaaaagagattagtagagatttgcttataaaaacacaggtgaccgagattgaggaactgaagcacaaagttgtgggactaactgagtcaaaagaccagctagagtcgcagaaccataaactggcagaggagagttcatatgccaaggggctagcctcagccgctgctgtggagcttaaggaattgtcagaagaagtgctaaactaatgaataaaaacgagagactaatggcagaactcgc

SEQ ID NO: 24995 - DNA, 512 bp, Gossypium hirsutum
  unsure (1)..(512): unsure at all n locations
  Clone ID: LIB3583-056-P1-K1-D5
cagaattcttcttatgttaaatctggagaaggtaccctttccaatgatgcagttgaaaatatggctgttaaggtgagtagtgcggatgatttgctccagatggaaggtgcagttcctatttctcttgcagaggatactgcacctatagatggaaacaacactgaaaattcacaggggggtgaaaacatcgagattcaatccacttctgctaccgatgctcattacattccgggtaacataaatgggtttgacccagcagaagtatcatctatctccctacanaaagctggttcagattcgtctagtgacagaatacataatgctgatgtgctagacaactttagttctagtctcgatggaagtgagcctatatatgaaggagaaagatgcatattagattcggtaactacatatgagaaccgggaacctatctatgaaggtgaggttattcttgcaaagcaagctgacaacatttctgtagaggtctgtactgtgaggtccaaagaagaaat

SEQ ID NO: 24996 - DNA, 400 bp, Gossypium hirsutum
  Clone ID: LIB3583-056-P1-K1-D9
cccacgcgtccgcccacgcgtccgttcagcttctaagcaggatgagcttggagactgggtgggttggataaagtctcgcttttgctgtcttctcttcaagctagaggaggtacagggtctttgtgacccgaatcccgcagaatacatcgatgtcaacatagcagacccacatgtcattttctactggggcttacaagcaggaaaaactaatgccatagacatcaaatccgtgaaggatgttttctggaggaatatcagtaccgggtatcaaggccctttcggaaaaatagagttatctattgtgcaagcctctcaagttcccaagtctgctcaattcgataccttgagccagaaaaaaaaagcttgttggaagatgatggactaccatcaacgaaggatc

SEQ ID NO: 24997 - DNA, 484 bp, Gossypium hirsutum
  Clone ID: LIB3583-056-P1-K1-E11
cccacgcgtccgcaactttcgatctctttcggttcacttaaagttcgaacagagatggctacgtggcgatattcaacgatgccgggtggagcggaggcagtttcgagtcgcaatgcggtgggtagattcgtcgacttcagccacggtggtggtggaggtagaagagtgatcaaaccggatcagctgatgttgattaggaagtggcagcttaggccggtgaagagatcgttttcggtgaggaatgtgtcgagtgagcagcaacagaaggtgaaagatctagtaactcagcaacaagaatctccaggcagttataatcctttccctccagatgcatcatctattgcctctagtatcaaataccattcagagttcaccccgttgttctcccctgagaagttcgatcctccaaaggctttctttgcaactgcacaaagtattcgtgatgctctcattataaactgggatgccacgtatgattattatg

SEQ ID NO: 24998 - DNA, 407 bp, Gossypium hirsutum
  Clone ID: LIB3583-056-P1-K1-E12
tcgccgcgtacggtccggaattcggtcgcccacgcgtcgccacgcgtcggaaaattatgaaccaaacagctaaggcctaagcagcaccaggctgcgactacggatgttttcgggtaccgggctacccttattcaactcaacggtgcggtgggaaagggataccatgagaagcttggagacactatttgtgcgacaacggtgaccgaggtcactgcaatcagcgtgagccgactgtggtggtacgtacccacgtagcggctgggccaactaagctgtgcaattaatgaccggggtatattacataaatcactatatagatgttgtcgagctggggagctgctcacataagcggacagcgaaatctgatgctgagagtgcgagctataacgaccgaagcatgccacaca

SEQ ID NO: 24999 - DNA, 511 bp, Gossypium hirsutum
  Clone ID: LIB3583-056-P1-K1-E6
cccacgcgtccgcccacgcgtccgcccacgcgtccgatcggaaagatgaaattgtgagaagagtgaaagaagctgtactaaatgccaaaaggggttcgtggattctgggtggtggatggaacaatgatctttggggaggggaactgccaatggcatcttggatagatgaggtcacaccagataatcccgtttggctaacaaggatggatggtcatatgggcttggctaactcagtggcactaaagttggctggagtcactaatttaactaaagatccaaacggtggaacaattatgcaaactgctgatggagaacctactggtctgctgattgatgctgcaatggaacttattctttcctggattccggaggtctccgtggatgaaaggagggaagccatgcttagagctagtagttttgccttgacaaggggtgtcacaactgtcgttgatgtcggcagatattttcctgggtcatcagttgagcattcctggcaggacttttcagatgt

SEQ ID NO: 25000 - DNA, 493 bp, Gossypium hirsutum
  unsure (1)..(493): unsure at all n locations
  Clone ID: LIB3583-056-P1-K1-E7
ctcgttatctactttaggaatgaaatgaaacccgatttactggaaatatgcttttttgctttggatgtgtctgatggtcgcccctataatcgatttatcgtgatctatatttttttcattttgttatcattgttctcgattcccccattatttccagagtgttaaaacccattgtaatacctaactgaatagcttataatcctgcatgtgcctccgccgcaaatggagatggtattttggaatgaataaccatcttcaaagccacgatctccccccactcgcatactaccagacccaaagcaaatttggaggatctcctgttgaatactgcatcaaagtagacttttgctctcatacttctttctatcgataaactgattcttgtgagtccagattgaccatagcccacagaanaacaggtgacattgctctttggttccctgactgaaaacccagatagtgccaaaaaatgtgattactatcttcatcggag

SEQ ID NO: 25001 - DNA, 325 bp, Gossypium hirsutum
  Clone ID: LIB3583-056-P1-K1-E9
aaacaaacaaattataaatttaaaaaaatcgagtgcttactttgttcaattgttctccagaacctactggaaatcacatcttttgaatttagggtaaaaaagagagagctggctttgttaactgaaagctaaaccggacataattctctgctataaacatgacagcggatcaaaaggttgaatttgtgtttagtggtggctaaggatctttgaggaatgactgacttgtgcatgtttgagcttgtagataatgtttgggatgaatttggtgctagtaatgatcatatagtgcctcatactgttgatgcatatggatctcagttcg

SEQ ID NO: 25002 - DNA, 355 bp, Gossypium hirsutum
  Clone ID: LIB3583-056-P1-K1-F11
ggaaaatgagatatttttgcatggagcaagccctttttcatggtgataactgataagtcaatccggttatacagtatgtactctagttttttgtccttttcaatttgctcttcatagtaatccccccccccccgcggtcatacactttagaatttctacttatagttagctagctggccatttgtacgattcatcctcctaaagatttgcctctttttcatcagtaacataataagtcctaacgtgctagagaaaatttaaaattagcggtactctttcattctttcaaactgaggccttgtttcgtattagtttggatgataaatagaggtgagaaaaatagctcattatgtgc

SEQ ID NO: 25003 - DNA, 323 bp, Gossypium hirsutum
  Clone ID: LIB3583-056-P1-K1-F12
aaaaaaaaaaaaaaaaaaaaaaaaaaaaaaaaaaaaaaaaaaaaaaaaagaaaaaaaaaaaaaggggagggaaaattaaaaaaaaaatgggggggaggttttaggggttctgggtttttagatgtttcattgttacttactgttttttttttagtgttacttattttaaatggttggccgggtttttttcattggccgggttgtaaaacctttggggttgggaaatttttttggttaccagactttatccttttgcacattttgcctttttcgcaagttgccttataatgaaactttccaaacagttggccttttaaaatggt

SEQ ID NO: 25004 - DNA, 303 bp, Gossypium hirsutum
  Clone ID: LIB3583-056-P1-K1-F2
gcggatacgcgtggggagacaaggaactgaatgcattccactactttaaaatcttcaatgaatggttagctcgatcactacatatcactaaacatcactccctgaacgtgcgttaaaacattagattgcacacttttgagacacccaccacaactcaatacaaagctccagccattcgatctacagggactcgaactgtcaacagctcaggtgtagcatgagagtcatctgccaagatgacgacgcatgaacctcatggggttgctttcacattgttcaccatggcatcacagctagtgtaca

SEQ ID NO: 25005 - DNA, 392 bp, Gossypium hirsutum
  Clone ID: LIB3583-056-P1-K1-F9
acgcgtacgcgtgacattagatcctacccatccttcaaacacgacctccctcttagcctacctctcacccggatagagagatgcctgtgactatgggtcactgcatctcatcgagctgcggtctaaacccaattttgtaagataatgacttgaaaaaaactgattacgtggggggtaatttgtgggcagccgtgcagacagaagtctacagctgataaacgcttagctgaagctctgaatgcatcacagtgtacacagactgtactgatgatcgatgaaacatgagcgcatcttgatcgtgaggagagctgtgctagtatgccattagagaagacttcacggcgtgtgctaacaaactaagttgataggacagtatccagagatactattat

SEQ ID NO: 25006 - DNA, 531 bp, Gossypium hirsutum
  Clone ID: LIB3583-056-P1-K1-G2
cgacgtacgcagacgggaaggtaggcaaaggattgtcaccgcttcacagaggcattgattatcgacactttatcagagaacgtagatcaatgtgagcttgtaccactgaatacacaggaggcattcgataaggatgagctgcttaacgctactgcttttgttttggggaagagtcgtatcagtatcgcgtacaaggttgagcttgaagatcgactttccttagctgtgagaagatcgagtgactgaggctggtagaggtgtaaggtatttcacacagacgtagaagctattgcatagctgaggcatcctaatattgctactctcagagcatattattggtcagttgatgagaagcttctcatctacgattacatgcctaatggaagtattgacactgcattgcatgggacggcggagatggcatcattcacaccattatcgtggtctgctagacttaaaatcatcaagggtgtggccaaaggcttggatgatctgcacgagttcaggcccaaaggatatgttcatggacat

SEQ ID NO: 25007 - DNA, 303 bp, Gossypium hirsutum
  Clone ID: LIB3583-056-P1-K1-G7
acggagagaaagagcagaggtatagattcagtattccttctatgggttcagtcatgatctgagatggaagatcatgggaaaagggcttgaattctagcgcattactcagctttatgcatttggggcactaaacatggcaatcggcgcatgatatcaactatagggagagctttgatgtcgcagtgaacaatgcagttgcatagatcaaagttggggctgcatactgtcttactatcgtcacagttgacagttgggttgtagctgctcaggaacaaatcgtgacactgacttgaaaggtgagga

SEQ ID NO: 25008 - DNA, 254 bp, Gossypium hirsutum
  Clone ID: LIB3583-056-P1-K1-G8
ttcgcctaaacaaatcatctccaccgcctcacagaggcttgatatcgcctcccaaatggtgtctatgatagcagggcgcggtggggagttcactgtacgtgatatactaaagaaagcgtcccttaacaacatgatgcgctcggtgtttgggtgtaattatcaactgagttcgtcaaattgtgaaaccgaagaactgagccggctcgctgaagaaggttacgagttactagggaagctcaattggtctgatcatc

SEQ ID NO: 25009 - DNA, 499 bp, Gossypium hirsutum
  Clone ID: LIB3583-056-P1-K1-H10
cggacgcgtgggcggacgcgtggggtgatgataatgaagaagatgacgaggaaagtaaggaagaggagactgaggaaggtaagcggaagaggaagcgtaaaatgtctgtcgttcagaaagctttaaacgaaatgtgggaggaattctataatttggactatgaggatacaattggagacttgaaaacaagatttaaatatgtcaagatcaaacctaatagattcgggttgaagcctagtgagctactagctttggatgagaaagaattgaatcaatacgtttctttaaagaagcttgcaccatatacagataaggaatggaaggtacccaatagtaagaggtaccagcagaaattgaggattaaagaacttctcaaggagaagcaaagacatcaaaaggtcagtaagaaaaggtcaagagaaactgccgagcaatcaaaggaagatgagagcacaaaattggaggattcagagtcatcaaaaccatggcaggaaaagcg

SEQ ID NO: 25010 - DNA, 391 bp, Gossypium hirsutum
  unsure (1)..(391): unsure at all n locations
  Clone ID: LIB3583-056-P1-K1-H5
aaggaattatataaaaccaaacaaacgtatgcgtgaaaggagaactaagagcagggcttcagaagtcctcacagatgtaaacctgagaatggaggctcgaatcttgcaagacatattgctgctctatattgatttcaaggaatctttaaagccctattacgagttatacccacgggagtacataatggtacattataccatcaacaggagaaccaagacttaacttcttcaaggctaacattgcgatgatgggcctcggacttgatacctcatcatcactggaggtgccttagtactggatttgaaccaacaacatttgttganacatgcatggtgctcggtggagatttgactagcaggttttctaaaatcatgacagttatttgaaact

SEQ ID NO: 25011 - DNA, 280 bp, Gossypium hirsutum
  Clone ID: LIB3583-056-P1-K1-H7
acgcacggaatgttccgtaaagccagccactaacaaataagggcatagcaccaagaatctacttgaccaagggagaggggtgacaagagattttccttcaacttattgagccaaacctttggctactgcaaccaaaacacacagattttcaaggcttgcccacgtgaattgcagcaactcagggacatcaatgtaaccggttcatccttgcccaaaaccacaggatcaatcttattgccgcactacattacaaaggttacattaacgatcctcagatacc

SEQ ID NO: 25012 - DNA, 275 bp, Gossypium hirsutum
  Clone ID: LIB3583-056-P1-K1-H9
cccacgcgtccgaatggaactgagagaagtgatccagcaaatacctctcttggaggattttgggggatggattcggctaaaagtgtgctcgaaatcttctgtccagagaccggttcttgtgctgatattggtgccttggctgctagagatgcaattgttacagcaggtggacctgcattcgagatgccaacaggaaggagagatgggagaatatccaatgctgcaaatgttagatccaatattgtagatacaagttttaccatgattgaaatgat

SEQ ID NO: 25013 - DNA, 548 bp, Gossypium hirsutum
  unsure (1)..(548): unsure at all n locations
  Clone ID: LIB3583-061-P1-K1-A12
cccacgcgtccgggctaggtatgttgttgaaaggatggatggtgatctttgggagaaggttctaaatcccgaaaatgaatatagaaggcagctgatagatcaggttgtatcgactgctttgccagagagcaagagtcccgaacaagtctctgcagctgttaaagcttttatgacagctgacctgccccatgaacttattgagcttcttgagaagattgtactccaaaactctgcattcagtgggaacttcaatctacagaatcttcttattttgacggctattaaggcagatccatctagggttatggattatatcactaggttggataattttgacggacctgctgttggagaagtggccgttgaagcccaactgtatgaagaagcttttgcgatcttcaaaaagttcaacttaaacgtgcaggccgtcaatgttttattggacaatattagaagcattgatcgggctgaggaattcgcattccgagttgaagaagatgctcgttggagtcaggttgcaaaagcacaacttanggatgggctggtga

SEQ ID NO: 25014 - DNA, 290 bp, Gossypium hirsutum
  Clone ID: LIB3583-061-P1-K1-C1
cccacgcgtccgaaatggctcaagatgaaagctctttgtccgctttgcaaatgcacggttttgattacgaaatgagggtttgcctttttgttattgatattacgatagtagttcttaaccacctttccaagtagattactcccccgattaccgacaacggttgaagacgagcaaaatgagaagagggaaacgggaaacaaagaaacctaagctacaaagattgtacatacaaggatatctgtaatatacttgaatacaatctgttgataccaagcctttttacgcgtatc

SEQ ID NO: 25015 - DNA, 544 bp, Gossypium hirsutum
  Clone ID: LIB3583-061-P1-K1-C11
cccacgcgtccgcaattagctaaatgaagaaggaatatatacccgataaaggtcggagcttacccgtggatccaaatctccccaaatggatctgccagaactgtcaccattccctctgcatcgtcggagtcgattcctacgtcgacaagttccccaacgactcttctcgatcagcaatgcaggggtcttcgattcatggagctagcagcgtgctgggttcaacacgaatggataactctttcgtcgtgctgccaaagcaaaagcccttggccccaggaatacctccacgacctcgtggcatgcctggtcagcctgatactggccaagctaggaaaggtatggaagaatcatttgtggtggttgataaatcagagtctgcttctgatggaagtgggacgcaattaccatcgtcagaaggtggaccaagcagttctttgcagccgaataactctggatttcactcaactattactgtcctgaagaatgcatttgagattgccacaactcagacacaggttgaacaaccattatgccttgagtgtat

SEQ ID NO: 25016 - DNA, 537 bp, Gossypium hirsutum
  Clone ID: LIB3583-061-P1-K1-D1
aaaccccaaaaaggaaaaaaaaaaaaaagttcacttatttttctggtatggaaaacaaaaggcaagtgagtggctcttcatcatcatcatcatcatcatcttcatcgtctgtttctttggatcatctctttggtccaaaggactcttcttcttcatcaactaccacaactgggctttttggaactatttttccccctccatcagtggtgctggggagggactcaactcactccggaattagaggttcatggaatactcagggtttgccccatcatgccagatatggaacagatcataacactgattatagcaagggacaaagcagcagcacaaggaataaagacaagagttcatccgtttatcacaatgaaacagtggaacctagctatctcagctcatctatttactatggaggccaagaaaactattctccaaggaagaaaaccactgagtctcccccctattttcaaaaagatgggggagatgatgatcccaatggaaacaattctcatggtgcttcaagaggaaattggtggc

SEQ ID NO: 25017 - DNA, 526 bp, Gossypium hirsutum
  unsure (1)..(526): unsure at all n locations
  Clone ID: LIB3583-061-P1-K1-E2
gaagggacttgaacaattcagctccatctactatacaggtttcatctgttaaccaggtcaacctaccgacaaaaatcaggagtaagcgaaagacggatgtgcgggaaccagcaattaggaagggtacaaagtcctctgataatgttgtaaagggaaaaattagtgggccagttacattattccatgatggagcactggatctgaaggaaaagctttgtaacttcctttgttcataccaagcacggagatggtgtgcctttgaatggttctatagtacaattgattatccatggttcgctaaaagggagtttgtggagtatttggatcatgtaggattaggtcatattcctagattaactcgtgttgaatggggtgtaataaggagttcccttggcaaaccacggcggttttctgagcaatttttaaaggaagaaagggagaagcttaatcaataccgggagtcggttagaaggcattatgctgaactccgtgccggtattggtgaaggacttncaactgatttagc

SEQ ID NO: 25018 - DNA, 535 bp, Gossypium hirsutum
  Clone ID: LIB3583-061-P1-K1-G1
cttgaataactgggaagtttaagcctttctttttgaagaaggaataaatatctacgtaaagctgtttattatgaataaaaaagttataaattcaatcataaccttgaattcttaatttaatgcaatgatggcgtacaatgtattggctctcatattgaacgactgggattattttaatttctcttctgctactcgtattggccttcactgaacttctttacagtgatcttgtctttttgtgtgtgtgtgtgtgtgtgcgcgtgtgcattgtatcttcatcctgtttcgctgaattacattgatcttgtatgttctttgtaggtatattatggacatatttgtgagattgatttacatgttaaacccattcagctataatctaataggatttatttttgggatttgcaatgtggtgttttgtttttcttgctactaacatgacatttgtttatgtttgcgcttcttgttgctggtgctgtgaaaaaaaaaaacgttacattagcatattatggcattttctagcaaacttggaaag

SEQ ID NO: 25019 - DNA, 327 bp, Gossypium hirsutum
  unsure (1)..(327): unsure at all n locations
  Clone ID: LIB3583-061-P1-K1-G10
cccacgcgtccgaaaaaaaaaaaaaaaaaaaaaaaaaaaaaaaaaaaaaaaaaaaaaaaaaaagggcgggcggaaatatggatgcaaggaagcgaccgccngcatgccaccccattattctttttttgtgtcgccttaattcaattctcttgccggcgttttacacacgttttgactgatcaaacccttgcgttgccctacctaatttctttttgtaacattcctcttttacccgctgacgtgataacctagaaggccgcaacgatccttctttccaacaattgtcctgcttgaattctgcatttaacccccctctgtgccgctcct

SEQ ID NO: 25020 - DNA, 468 bp, Gossypium hirsutum
  unsure (1)..(468): unsure at all n locations
  Clone ID: LIB3583-061-P1-K1-H12
aatatttcctccattttcagttgtgttcatttaattagcatcagaaatggcttttgtgttcatttaattagcatcagaaatggctttgtctattgtcaaaggactgcttgaacaatatgtgcaatcactgttcaatgagggaattataaatgaacagttttctcatattcaacatttgaaaatggttggaagaactgaacattttgtccagttgatcaatacgtactgcctcgatgtggaaagcatcttagcacaacttgcaagctccattgatctccctgaagtggatttttctaagttggctgctcttgctgcagaagtaacagagagaagctcccggtaatgttgaccttaatttgaatcctggtttagttcatcttataggatgtttgccagatgaagaatattgattgaaatttttgtctgatggtgtttttcttttaagagaaaatngtagtagtaaatgag

SEQ ID NO: 25021 - DNA, 529 bp, Gossypium hirsutum
  Clone ID: LIB3583-061-P1-K1-H7
cccacgcgtccgggtggttcttgttccggtcgctcttggacttgtgcttaatacgtatgcaaaaccgatagttactatcctccgacctgtgatgccttttgttgctatgatctgcacatccttgtgcatcggtagccctcttgcactgaatcagagtcaaattctatcaaaagatggtctccaatcggttcttccggttttggcgtttcacgctgtggcattcgctatcggatattggatcttgaagattcctgctttcaggtaattcaaacctcctatattacatcctatgtatttagaagttccccgaaaattgctttaaccacgtccaacacataaccggttaccgatatggggataccatattgttatgcgcaggcaaagagaagaagtttgccgaacagtatcgttatgcagtggaatgcaaagctcgacaatggcagggcttctggcaatccagttcctaggaggttgcagtcaagcagttccagcggcatgctctgtcatagcaatggctattatgggtctt

SEQ ID NO: 25022 - DNA, 580 bp, Gossypium hirsutum
  Clone ID: LIB3584-003-P1-K1-A4
cccacgcgtccgtcaacttcaaaggttagttggtttattatagccaataccaatatttcatttctttggtattcatttattatatgatatgttatgattatgcatgcacctacatctatttcatgcaataatattgctccaacagctaatgctaatgggagaatttcaataggctcctaattttctgaaaattttcatcgtctttcgggattttggaaattttcaattaagctcttcaaagttttgaaatttttaattagacccttcaagatttcttgaaattctcattaaatccattaaaatttttgaaaattttaactaaaccctctaaaacttaatgccaagatccacagttgattgtaaatcgctaattctgtgaactttttggtgtgaaacctgaaaaagagagcacatatacaaatggccgagaagcaatattccgctgatgttgttgaaggactgaggaagattctcatcagtgaggaagtaaggctggatgaggaggtacagggaaaagtagagatgcttattgctgagctccaaaggagaatcccttttcccgttcctgacgaagatgctc

SEQ ID NO: 25023 - DNA, 575 bp, Gossypium hirsutum
  unsure (1)..(575): unsure at all n locations
  Clone ID: LIB3584-003-P1-K1-A6
cagaaagtgatgttggtgaattggtcaatgttggagtgatatgctacctaaagcagttgcttgataccgggtttttccatgctgacccacatcctgggaatttgatccgtactcctgatggaaagctagccatactcgactttggtttagtgacaaaattaactgatgaccagaagtatggaatgattgaagcaattgctcatcttatacaccgggactatccagaaatagttaaggattttgttaaacttgatttcattcctgagggggttaatttagagccaatcttgcccgttctggcaaaggtttttgatcaagcacttgagggtgggggtgcaaaaaacatcaactttcaggacctggcatcagatttggcgcagataacatttgattatccatttaggatacctccttattttgctcttataattagggcaattggggtgttggaaggaatagctntagtggggaatcctgattttgctatcgtggatgaggcctatccttatattgcacagagactgctcactgatgaatccccgcggctaaggaatgctttgcgttatacaatatac

SEQ ID NO: 25024 - DNA, 251 bp, Gossypium hirsutum
  Clone ID: LIB3584-003-P1-K1-B10
cccacgcgtccggaaattttgactcaaatctttttctttattttaccttgttcatgtgagacatgaaactgcattggataattccctgaatgcctgtagtatcgtctggatcaaagatcttgggttagttttgatgtttactgcctcaacgctgctgttctaattcataaaatgtaatattgctattttgtttatttttcttgaccatatttcattttaatgtaataaatttggatgatctcagtttcatt

SEQ ID NO: 25025 - DNA, 337 bp, Gossypium hirsutum
  Clone ID: LIB3584-003-P1-K1-C12
cccacgcgtccgcccacgcgtccgcttttgtttaaaaaaaaaaaaaggactaagatttattataaccaagacaacatgcatacttgctcctgcctcccctaatatccctcccatctaatcactcctcatttgcatagactggccgtctctagtctccatgctgactgggctatccctgaccttacccctcttattcaccttgcaccacacaccccctttgctcgctcgcgtaatcgccctcatgcctcgacctgtctcccttgccctcattcgcgcagccttactggctaattgttcaccccctttttcggcgcatttagcgcaacttttgtgttgt

SEQ ID NO: 25026 - DNA, 567 bp, Gossypium hirsutum
  unsure (1)..(567): unsure at all n locations
  Clone ID: LIB3584-003-P1-K1-D1
aaaaaacgtgcggatcttgcatggttcgggtcgggtctcgggtcggcgatcgggtcgtatcaaaacgacgtcgttttggtacttatgaacattggccaaaacgacgtcgttttgcctcacctatatatgtcgaaaaacctaaaaaaaagcattatatttttgttttttttttaaaaaaaactgagagctctttcattctctctcgtcttttcctaccttcagcccagacactggtgagcctccgtcgtgactttgttgtggtgagaaaatgaaaatgtttttagtcctttttaaattttttaaaaacctcgatctaaaccaaacatatttttttgaaatcgaaaaaaaagaaaaagaaacgcgaaggaaaaccttcagtcttgccacgttccaaacccttgtcagaaccctaatgggttctgagatattcgaagtgctggaggttgtcctggatagcggcggaaggtggaatgacaagtgagaacccttcctctccctctnttttttttatgtatttattacatcttttcaaaccaaaaaaaaagactacatttatgttttttaaaa

SEQ ID NO: 25027 - DNA, 363 bp, Gossypium hirsutum
  Clone ID: LIB3584-003-P1-K1-E1
catggctatattactgaagattgagcattattttattgggtttcctcagatcctcatcttagatgccaacagctatattccctttgtgagaaaacaatcgtaagcatttctgctggtaagtactgggctgcaactgctactactataggtgatgtttacatgtgggatggcaagaaaagtatggataaaccacctattgcaactcggttacaccgagtaaagggaaaaaagatcccttaaagagttgattttgagagttggtcatgagagaatgtaacttgtaaacaattttctaatatagaatgtaacttgtaaatagaacttatgtaattctaatatagaatgtaaacaattttcttatgt

SEQ ID NO: 25028 - DNA, 598 bp, Gossypium hirsutum
  Clone ID: LIB3584-003-P1-K1-E6
cccacgcgtccggtttgaggggaaaatggcagtgtcattagggctgaacaaggcgaagccatacttgtcaatgatatccctccagtttggatttgcagggatgtatgttataaccatggtctctttgcagcatggaatgaaccattacgttcttgctgtttatcgtcatttggttgccaccattgttattgcacccttcgctcttgtgcttgaaaggaaaataagacccaagctgactctccccattctcctcagaatcctggtgcttggtttcctagagccagtggtggaccaaaatctatactatctggggatgaaatacacgacagcaacgcttgcatctgccactgtcaatgtgattcctgccattaccttcgttatggcattgattttcaggttggagaaagtgaagttgaagaaggtgcacagcatagccaagataataggaacagtaatcatggtccctggagcaattatcatgacaatgtacaaaggtccagcaatcaatttcataaagttgcaagggggaagcaacgacggtgccaccaacgaagccgaggccaagcattgggttgtgggacactaatgctcctaagca

SEQ ID NO: 25029 - DNA, 579 bp, Gossypium hirsutum
  Clone ID: LIB3584-003-P1-K1-G11
gcaaggaacacggttgatctatggtacaaagaaagacaagaagtgcttgaatggcagaaacagcgtaaatttgaagctcagaaattcggctgtgttaagacattgcttggaagggctcgccgcttcccatcgtttgctcattgtacacgtgctcagaaaggtcatattgaacgggctgctatcaatactccagtgcaggggagtgccgctgatgttgcaatgtgtgctatgttacaaatatcaaagaatgaatgtctaaaggagcttgggtggaggcttcttttacaggttcacgatgaagtaatcttggaaggaccaagtgagtcggctgagattgcaaaagcaattgttgttgactgcatgtcaaagccctttggaggaaagaacactcttaaagttgaactagctgttgacgccaaatgtgctcaaaactggtatgctgccaaatagatagtggttcgagctccgaacatgtaaattttggtttcaaaaactttattccaagatgctgctttttcctcaaaagagggatatcagagcttgggttgtccttttctttgctgctgcggtaatttctta

SEQ ID NO: 25030 - DNA, 598 bp, Gossypium hirsutum
  unsure (1)..(598): unsure at all n locations
  Clone ID: LIB3584-003-P1-K1-H12
cgatcgtctagattcatatatattcctttcttggtgcactttgggctattgatttctgcagttgcatataatgttccttttccatgtttgtactaacatggtgtttagctttctatcaactgctctagtatactaaaactctctataaactgcacctgaaatatccttttgctaaacacacgatattccaaatgtacggaaaaaaagatgagtataaccatattagaagcatgtctataccctacatttatgttcgaatttgtataatggtgtttattgggataaaaagcatatgtttatataatcttactatcatcatagatagaccgaaagaatcaaaagcatgtttatataatggtgttcgttaggaaaaaaaattattgttttatacacaatatgcacatgcagaaggaatggagagagaacagagatgaattcaggaagaaggtgagccgctgcgtgagacggtcacaggaaatgttatgatctgttggtctacaatgtgtaccccagggatccaagacttgttgaatgccagcttctatactatataattntgatcggatttggatgaatataagattatatataatgaaat

SEQ ID NO: 25031 - DNA, 561 bp, Gossypium hirsutum
  Clone ID: LIB3584-003-P1-K1-H2
cccatcgtattgagtttctgcgaagggcatagagatccggcagaagaggttctgctaccaaagccttaccaacatgacgccggaaatcccgaacaggatactcgggaacatgaagtagtatccagtgagtttaaagatgaaaaccccgaggaagtagactcacttgtggtgccggaagggcaaaaacgaattgctcagttgcaagcaaaacttttccaagcgactgctgaaggggcagtaaggttgaagaacaggaaaggtcctcatagaggggaggacttcaccttgatgcaggctttgatcaaagcagacttttggcttattatgttctctcttctattaggttcaggatcagggttaacagttatagataatcttggtcagatgagccaatctctagggtatgataatactcatatatttgtatccatgatatgcatttggaacttcatcggtcgtgttggtggcggtttcatctcggagatcattgtgagggatcatgcttatccaaggccaattgtcattgttgtggcgcagctggttatggctggtggccatgtc

SEQ ID NO: 25032 - DNA, 374 bp, Gossypium hirsutum
  unsure (1)..(374): unsure at all n locations
  Clone ID: LIB3584-003-P1-K1-H4
aaaaaaaaaaaataaaaaaaaaaaaaaaaaaaaaaaaaatataaaataaaaaaaaacaaaaaataaaaaggatatggtgtgaataaaaaatacattacaaaaacataagaaaatacttaattttatcagttcaaaaaagctgcctgcttggggttctaggtattgcctgaaccgaccgtgctgaaagttttctttttatataaacnnccaaggccctggttttctaacatcgtcatgctcaatcttctggtattgatgggtgagatccatgtgtccaattctcagtgaaatcttcttttgtgggcttatgagcaattctacatgcatgcgccggacccagctcgttcaagccttctcagntggtcgccttcact

SEQ ID NO: 25033 - DNA, 400 bp, Gossypium hirsutum
  unsure (1)..(400): unsure at all n locations
  Clone ID: LIB3584-004-P1-K1-A1
ctcaagaccagtncggtntgattctttgctttgggccatcagcgtggcctagctagagggatggattttagaggaccgccagcaatgccaagtactcccttagctgatgtttctcctatttctggagattcaagaagattggctgctggtttgaatggttttagttctctaccagagcgggctaattatggttctagagaggaattcatgccaagagatatgagagagagatttgcagcgccagctgcttatgaccagttgagttcccaggaacctggcatgaatttcagtaatagggatttgaggaacccaaatagacctcttgcagcatctcctgcacgaggccaaacatcaggcttcactcaaaattctcctttnnttgctngcggcgagaaagaag

SEQ ID NO: 25034 - DNA, 500 bp, Gossypium hirsutum
  unsure (1)..(500): unsure at all n locations
  Clone ID: LIB3584-004-P1-K1-A4
tcataggtttaataaatcacaacaggattctttcttgcctgtgattgaagatggaagcattgtgtttatgggggcaaccactgagaacccttcgtttcatttgattacaccattgttgtctaggtgtagggttcttacattgaatcctataaaaccccatcatatttgaaactcttttgaagagatcagctaatgataatgagaagggattgtctcagagcgtaggcatgagggtcgatgttaaggatgatgctattgattttttgtccatgaattgtgatggtgatgctcgtgtggcattgaatgctttggaaatcgctgcctccacggcggctgctcgagtggctgctnatcttcttgaaccctntggtgtagctgttgtttcagtgtgtgttgtctaagaagctctcctttttttttttcttgcctctgccacagccggggccgtgtttttctcttttgttcngtgcccttccccggccttttttttttttgcggtg

SEQ ID NO: 25035 - DNA, 589 bp, Gossypium hirsutum
  unsure (1)..(589): unsure at all n locations
  Clone ID: LIB3584-004-P1-K1-B6
catgtcattaaccatctttcgtttggtaaaacgatttcacctcggttactgagtgatgcaaagagattaataccttatcttgggagaagccatgacaggttgaatggtcggctgttcattaatcaccgggatttagatgcaaatgttactatagagcattaccttcaaatagtcaaaacagaggtagttacaagaaaatcttctcgggaacatacgttaattgaggaatatgaatacaccgcccacagcagtctggcacagagcatatacatacctgttgtgaaatttcatttcgagttatctccaatgcaggttttggtaacagagaacccaaaatcgttctcacacttcctcaccaatgtctgtgctataataggaggtgttttcacggtagctgggatattggattcaatattacacaatacaattaggttgatgaagaaagtagaattagggaaaaacttttgatagagaggttaaagaaatgatgtgtaaagaaaaaactaattagtggggatttttttaaggaaacagaatgggaatgttgccctcttttacgtntaaaaccgaaccccaagagttctatttc

SEQ ID NO: 25036 - DNA, 590 bp, Gossypium hirsutum
  unsure (1)..(590): unsure at all n locations
  Clone ID: LIB3584-004-P1-K1-B9
gcgttcgccccgcgtccgcttcgctctcaaacacctagatgtgccctgatataaccatgttcaggattggatcaagaaaaatgtgttggtgtgtagagcttcttcacttgctcctaccattttaaacagggaactatctacacaaactggaaggaagctagaacgcaaagtagcattaatcagtggggcggcaagcggtattggaaaggcaactgcgngaaaaattcatcagtaatggtgccaaagttgtcattgccgatatacaacaccgtctcggccaagaaactgcgaaacaacttggacccaatgccacctttattccctgtgatgtaacaaaagaatcggatatctctgatgctgttgattttgtaatctcccaacacaagcaattggatgtgatgtacaacaatgccggggtaccttgctacactactccaagcatcgctgaccttgaccttgctgttttcaaccaagtcatggacatcaacgtgcgaggagccttggccggaatcaaacatgcctcacgtgtgatgatccctcgttgagctggctcccttctctgcacggcttgggtcacaggaatcatgggc

SEQ ID NO: 25037 - DNA, 638 bp, Gossypium hirsutum
  Clone ID: LIB3584-004-P1-K1-C2
ccacgcccgtccgctgggttgctacctgaaagacattttttggcaaaggtggaacggattatgattttgcatcctgtgatcctcttaaaacaagggaagaacttgacaagcttcaagccgaacaatcaagccttggaaaaagagtgaacaagaaagtagtggcaatgtttgagaaagcagaagatgaatataataatctgatgtccaagaaaaacactgtagagaatgacaagtctaaaattaagaagacgcttgaagaactagatgagaagaagaaagaaacacttaaggtcactttggtcaaagttaacaaagactttgggtccatcttttctacccttttgcccggagccatggcaaagctcgaacccccagaaggttgcagcttcttagatggtcttgaggtccgtgttgcgtttggagatgtttggaaacagtccttgtctgaactgagtggaggtcaaggtctctacttgcactttctttaatcttggctctgctgctgtttaaccccgctccattttatatacttgacgagtttatcgtagtttcactgaaagagggcatgtttaacaacgctaatgttctttttcggacaaattcatgaatggcgtttccactgtccagaggactgttgc

SEQ ID NO: 25038 - DNA, 416 bp, Gossypium hirsutum
  Clone ID: LIB3584-004-P1-K1-C4
cccagcgtccgctttgccttttcctaacatcctgtttcatttgtttagaagcttttcgtttatttatttgctaccaaagaaccctctacaagaggttaatgtttgtgatcatgttttggcaaaaacatgagcttcctgatgacaggaatttgttatttttgttgaatcccatgatcttggactttctttgtttgctgatatttttgggcttttactatactggggattgttcgttgttacttgaactcttagtttgtttattttatttattgaatgaaacttccactgctattgacttttgattaatttgtttaattgtttcacttatctaaactgataggagggtaagaagattgatctgctggacatttcttgtcggttaaagatcttagttgcatatccaaacaccttttttt

SEQ ID NO: 25039 - DNA, 594 bp, Gossypium hirsutum
  unsure (1)..(594): unsure at all n locations
  Clone ID: LIB3584-004-P1-K1-C5
gttcggntaggagtggggcaacccctttgctgtttgggatgaagctgattcagctctttcaatcggcaatttgggtnaaaaattataacaaacatgaggcataatcacgatttgtcaaagattaatctttttaatacaaagaaaatcgtcgtctgatttttttttttcaaatacagatattgaaattcaatttccaagttggattatatcaaagattctgttcataaaacaatgaaataatgatatgcatgacatacaatattaatggaagaataggggttattttagtttaattaattaattgataaagtgaacaaaatctgaattcagtgttagctagttgttaattgcctgttagtttgtgcccaattgcatactttatgtatagaattatcttagtggacgatctcgtctatttccagtctctaacctactacaaaattgctaggtgttttttacttgccttgaacgaattctcatgggagaatttgaatacccactcttcagataaccatgtatagtaatatgtacatgttgtgatgatttggagaagttgaagatgtggaaaagttttggaaattagattggatatgc

SEQ ID NO: 25040 - DNA, 554 bp, Gossypium hirsutum
  Clone ID: LIB3584-004-P1-K1-D2
gcgttcgtccagcgtacgtccagcgtccggccagcgtccgctggtgaaaagagcaggatgagggtcctgagtacacattctttgttggggatttagtcaactgatgtttctgattacatgttacaagagatttttaaggctgattacccgtctgttaatggtgcaacaagtggttactgataggaccacatgacggtcaaaaggttatggattagggaggtttggtgatcaatctgaacagatgcctgccatgactgaaatgaatgggatttattgttcaacaagggcaatgcggtttggtccagcttctaataagaagcctgtcactggtcagccgtgtcagaaatctacttaccagaacgctcacagaaatgctgccgagaatgatccgtgtaacactacaatgtttgttggtggttcgcacctcactgtttttgtagaccacttgaaacaagtctttggccagcttgcggacggtgttcagtggaaggtgcccgctatcaagaaatggcggcactgttcaatatgtctgctcagtgcctggtgcgcagcat

SEQ ID NO: 25041 - DNA, 555 bp, Gossypium hirsutum
  unsure (1)..(555): unsure at all n locations
  Clone ID: LIB3584-004-P1-K1-D5
caaaagcctaacaaactgagnactttcttattcaggaagagctctcgtgattctgccaataaactatcaaagaagctttcagctgttggtatagttgaagagctgtttgaagaaggctcagcaatgcttgccgaaagactaggaaatgatgagggtgcagggcaaacaacatctgggatattcacatgtggtgtatgccaagtcgacctagctccaagtgaaggcatctcagttcatgcaggttccatattctcgaccagctcaaagccctggcaagggcccttcctttgtgctgcttgccgtaataaaaaggatgccatggaaggaaaacgtcccagtggagtaaaagtggcttagcttttctattattataatatatatttgccaccttgttcttcaatcctaattctttgatagcaatccttttttttttcctaggttaggcaattgttttagtcctatattatgtgcaaatgtatatgtattcccactcaataatttattaatctataatatttttataataaaagcctggatgcaaaaaattctttgttg

SEQ ID NO: 25042 - DNA, 501 bp, Gossypium hirsutum
  unsure (1)..(501): unsure at all n locations
  Clone ID: LIB3584-004-P1-K1-F7
gcgttcgttcggtttttcattttgtcagactagtgccccgaaggaggggttgagattctgctaacctttttcagttaatggtgatcaatgtcttaacattatgttcttgggagatatagattggaagctatgtacttngaaaacattcattcattcccaattttcaacattcctgacaaatgattgtattggcggtgtgcccatggatgaagaagagaaagtagtggttgattactcatgtgacccattgctaaacgatggcaagttccaacaatctatcctgtctagtattgcaggggcaggaaaggctatagaggaactttatagatccccgcaagatattgaaggtgtgattagggatggtaaggtttatgttgtccagacaagaccccagatgtgatccctttttgttctatattatttcttctttatggcaagcctttgtaaagtgacggggaaaagagagcttatgaggtgaaggaagcaggtcatcctattaca

SEQ ID NO: 25043 - DNA, 424 bp, Gossypium hirsutum
  Clone ID: LIB3584-004-P1-K1-G5
gccacagctcatcggagataacgttttttgcgacgctcctgccctctacgaactacaccgcctaggaacggaacctgctctctgttgccttacaaaaacgtagatcggagctcgtcaggccttttggcggatcgtttactacatcatgctatacagaggaaggacatgccaacgccctccacgtttgtgtcatccgtgattacaaggcctagatctatgccttattgtccgagttgtgcgccggaattttgaagcttcttgacgagaagctcgttccggccggcggggaccggggattccatggtcttgtacctgatgatcaatggtgattgccatctgtgcttggctgcgctgatgactggcgatgacaggctagctgctgccgtgaatgcgctcactgtgtataattctgctcacgaccttg

SEQ ID NO: 25044 - DNA, 598 bp, Gossypium hirsutum
  unsure (1)..(598): unsure at all n locations
  Clone ID: LIB3584-004-P1-K1-G6
gnttgaagaccatggttngacggaggaaccctgcctggttgtttggagaacataaggagagagaccttgaaatgtgcttcttggtacaggttcatctcagccttctaagtatcgtaatgttagctctgtctatatcaatcttttctccaaaggaagcttgctcttggattgcggagaagggacccttggccaactgaaaagaagatatggtgtagatggtgcagacaaggctattagaaatctaaaatgtgtttggatctctcatattcatcctgatcaccacacgggtttggcaagagtgcttgctttgagacgtgatttattgaaaggagtgcctcatgaaccattactggttataggaccgagacagcttaagcgatatttagatgcatatcaaagacttgaagatcttgatatgcagttccttgattgtaggagtaccacaaaagcttcatgggatacttttgtgagggatggtgcatcaaataatgatggatcatctccacaaagtccaaggcattcaaatgccnaaaatgaaagcatgcccgaaattaatcagactctgtttgctaaaggtagtcgtatgcagagctatttg

SEQ ID NO: 25045 - DNA, 607 bp, Gossypium hirsutum
  unsure (1)..(607): unsure at all n locations
  Clone ID: LIB3584-004-P1-K1-G8
gcgttcgggctggnggagcttacaacagtgggcgtggtctgggcacaaatgcatttgtgttcagtttctggtatttagatcaactcggcatggcatccaagtatgatacgaaaacgtattgcagacagtcactggttggtggaaattatggtttactaaacaccaccaactttgaaccaaatgcaggctgctacagtgcacttctttggcaccggctaatgggaagaaatgttctttcgacaagcttcaccgggacagacaagatccgctcctacactcactgtgcaaaacaatcaaaaggcatcacactacttttgatcaacctcaacaatagcactaccgtccaggcaaaactcgcattcaatagtacaatgagcttgcgacacaagcaccggtctcagatttcagaccataagcatagaattcataaaacgacaattatcaagctgcctcaaggcattgatggtnaaataagaagagaggaataccatctaacagcaaaagatgggaatttacagagtcaaagcatgcttctttatggaaacattttaagtgtaaattcatctggggtcatacctcatcgggagcctttacatgttaaatcagc

SEQ ID NO: 25046 - DNA, 207 bp, Gossypium hirsutum
  unsure (1)..(207): unsure at all n locations
  Clone ID: LIB3584-004-P1-K1-H12
ctacatgtattaaacatgggggtggggggggggggcgtctgtatttctctcttgtgtgtcaacatngccttgtggntaatanaacctaaaacatatatgtacccgagttacttcttctttntgttattttctgttttcctttttgaagatggaaatgcataaattatagagcttgttttcttctgggggggggaaatttagttcttt

SEQ ID NO: 25047 - DNA, 405 bp, Gossypium hirsutum
  unsure (1)..(405): unsure at all n locations
  Clone ID: LIB3584-004-P1-K1-H4
tttactggtagagatttgttggcagtgtacaagaaaagttaatttgaggtttagaaagttgggccaaagagagctatgaagttgtcagatgctgatcaaccagtacaacattttagagccttaactctcagttttttggggccaagtgttatatttttgttcagaaacactggaaaggtacaggtgaaggtcaatattttaatccgctgatttgtgcgaggatgctagtaaaaaattgttttcgttgtcattggaagaaggtttgcccttatgaagaatggaaatgctccttttattctttctttttaatttttctatttgaactgaatatatctgcttgccctgncagtcattatgtgttaatttttttgctgttttagtttcttatgcctgcttttttcactt

SEQ ID NO: 25048 - DNA, 481 bp, Gossypium hirsutum
  unsure (1)..(481): unsure at all n locations
  Clone ID: LIB3584-004-P1-K1-H6
tcgcccacgaccaccttatctacctgacggcggcgggctcgccctctcgaaactacgacgtttcgccgacgcttcgaccgacctcgacactctcgacgacttcaacagtcactattataagtacgaaacttaccctcaactttaccccaaccggtctggttcgatgcttcctttgggggggggggtgatccacgctcagctgccgatcaagctcgggaatcgccaagaagggttagatcggttttatagtttgcttaattttattcgtcagaaaataaaagagaaagaaagcaataatctacatgattctgtcaaaatttggaaaagaagggaaaattttgttctgaattgtttaattgggcatcatttgggagataaggaattcattttgtgtttagatttgatcaaggatctgattaatcgtgattctttagatccactcttngtttccccgttcgggtttcttctgctgctgtttggt

SEQ ID NO: 25049 - DNA, 484 bp, Gossypium hirsutum
  unsure (1)..(484): unsure at all n locations
  Clone ID: LIB3584-004-P1-K1-H7
atccaagtaatagnnatgcagnaagnntgcttttatttnnnacgattcggnattaaaaaagggatggnnagcttnntatgcggattnncattttctgggnnatggctannctcttttgcagnaaattttttatttttcgttgaaactgnntggtttgtgaagaaggcgtgaggaatatataaatatataccgaacatacatanttttaattacaaaattccttttgctggtattatttgacattgtactttttagagggctagagctttgcagggacttgctggtttaggaatgaagatggcaactgttataaaataactcactttcattcatgctattgaggatgtttcttttttcctaaaagggcaacattattgatgtatggtctgcttagtttttttgctcgctgttggtgggaaagggatttggattctcagccttttagctccctcatcattggccggagacattttttttcttgttg

SEQ ID NO: 25050 - DNA, 566 bp, Gossypium hirsutum
  unsure (1)..(566): unsure at all n locations
  Clone ID: LIB3584-005-P1-K1-A3
ccccgcgtccggntgggtataattttctgaggaagtggttgcaaagtcatcccaagttcatcacaaactcactctatattgccggtgattcatacgctggngaaaattgttcccatcattgttcatgcaatatcagatggtatcgaagatgagagcgttccagccttcaatctcaaagggtatttggtcggtaatccttcaacgggttcgaaatatgatgacaactcaaaaatcccattttataatcgtatggcacttatctctgatgaactttatgagtcagccaaaaggaattgtaaagaagaatacgtagaagtggagatgagtaatgtaaaatgtgcaaaagatcttcaagctatctcggagtgcattgcctacataaacaagccacatatcctggagcctcactgcccttctgactttaatacaccgaatagtttggtcaatgaaaggaaatacttcctagaaactcttttttaagactacctgcaggcgcctgccgcgccccctaaattcgggtggcgaaactacaaaacttacctttgctagatttgggcatctggtga

SEQ ID NO: 25051 - DNA, 413 bp, Gossypium hirsutum
  unsure (1)..(413): unsure at all n locations
  Clone ID: LIB3584-005-P1-K1-A6
gttaatttaggggtagaggctcgtgcgatagagctgacgaaggagtgcatgcgtatagagaagaagaaagactcctaagaattggaaggatgaaatcgaggctggcatcgttcaaaaacccgatttgtggccaccggnaaaatagagccgataagccttccttgcgtaatccccggctgcgtcacgaaaggatgggttgtggttggatagcggctattttcgaatgggaaggagttataattaaagataaccccgagctcgagaagcaagcatggttgactcttgctgaagaagaaggccgatcccctattccagcctttatgctgagaagaatagaagggatgaagaatgagcaagcgatttctgaaatcttgtgttggtctagagacccggcntcggttaaaagaatggcc

SEQ ID NO: 25052 - DNA, 340 bp, Gossypium hirsutum
  unsure (1)..(340): unsure at all n locations
  Clone ID: LIB3584-005-P1-K1-B1
cngatgggacatgatacggttattgatggcatgctcaaagagggttatgggatgtatataatgattttggtatgggagtctgtggagagttatgtgctgaccagtacaagattacacgagaagaacaggatgcttatgctattcgaagctttgagcgtggaattgctgctcaaaaaaacggccacttggcttgggaaatagttccagttgaagtttctaggggaagagggaaaccgtctgtagttgtagataaggatgaaggtttaagaaagtttgatgctgctaaatttaggaagcttagaccaagctttaaggccaatggtggaactgntgcggctgg

SEQ ID NO: 25053 - DNA, 693 bp, Gossypium hirsutum
  unsure (1)..(693): unsure at all n locations
  Clone ID: LIB3584-005-P1-K1-B5
tccgcgcccagcgccacgnacaggnncggtggtgtgggggtnggtaaaccgggctttcaagggcccctgtgtaagggcgaacctcaacnnagcgaaaacccttcctcaaccataagnagnatcccaaagnaagggaacccccctnacgnacccctctttggnngtcgaatccccgacgacggnagggagcngnnatctccgaccgacgnngtcacttgcgagttgcggggtaagtcccccttctnnttgattttataccccnntttttgttttttaagaatttgtagtattaaataaaannaagaaatttaaaggggatnngaaagaacgacannatgaaatcaaagnnaaaaaaatttaaatcagagatcccaacctttaaatnntttgttctgttctttttatttcaannatgtgcgtcgccnnctcccgttaccaatcanngtttcatttcggcttttatagnccgattcccatanttaaaatatnntgttattttaattctcgtgctaccctgcttgtgcttctnntgctgccatttttccttctttttccaaactgtttgcatgtcatgtggagtgttcagacgcgtgngaaggccggttgattgggcgcccctgagcggtggttggcgcgccgtgagaaggctggtggcttgaaggcttgcggctcgaaaactttggtggcttgctg

SEQ ID NO: 25054 - DNA, 473 bp, Gossypium hirsutum
  unsure (1)..(473): unsure at all n locations
  Clone ID: LIB3584-005-P1-K1-C2
gcatttccggnacgaggtgacattaactagtattgtgagttaaccaaggtaatatctttcaagtacttagtctttttttttataatcacaagcattttattttctttttaaaaaatgtaatcaagtagtttttcaatacaaaatcataattaaatgttctttagccagattggatagtatgtgttggcgaatgaaacggaaaaatgatctctgaacagaataattagcaactcacctgcttatggtgtttgagtcttaactttcaatggtgttcgttcccttcatccattttatgctgttcaatgcatttgtttgggtttcacttccattacctgaaagctgctctttacatcctaaactctgtcctgatctgccgcttgcntctgtggaaagcaagatcttctaagaccggaatatatncatagttttggttcccttttttgctgttgtccccnnggctcaacangatcccg

SEQ ID NO: 25055 - DNA, 424 bp, Gossypium hirsutum
  unsure (1)..(424): unsure at all n locations
  Clone ID: LIB3584-005-P1-K1-D1
ttncgtccggtaaaaaatttcctctttttattttccccntccatttattttcctaccggnaatacagnngtggttgatnntgaagaagaaaaggaatacannttgaggggaattttntatgggattcgtgctttgtcctcaggtgttaagatctgaggctaatcttttctttcaagtgccaaaaaagaaagaaaatgagcgctgtgaagtcaataaagtgcgtaactgttggtgatggtgctgttggtaaaactagtttgttgatttcatacactagcaacaccttttcctaaggattatgtcccgaccgtttttgacattttcagtgcaaatgttgttgtcaatgggagcactgttaatctggggttgggggattctgctggacaggatgtnnttctcagtgttttttcctttgtgtttctgc

SEQ ID NO: 25056 - DNA, 408 bp, Gossypium hirsutum
  Clone ID: LIB3584-005-P1-K1-D10
tcggtatgctttactttgtaggttctccaaagtgcttaactgagaaagagattttttgtaccttggatttttttttttttgttaaataactgcctgtgtggctgttctgtttggataacttttcaaattattcttagtttccttattttctcatatacaagttcagggatttggttgggggtggggcgcagctctgaggtgtgtggacttcaaggcctaatcctacatgagggactgttactaaggtggaaatgataagtaatgcatctctttgttgattttttccctctatttagttctcattatattcatagcatgtcaataatcgataatggtatccgtttttctagtatgtaaaagggtttcaaaacatggctgttcattatttaattgttaaggctgttcatt

SEQ ID NO: 25057 - DNA, 516 bp, Gossypium hirsutum
  Clone ID: LIB3584-005-P1-K1-D11
ggcttattgcacggggtgggtggaggtgggcgagtgatgatgagaaacagtcgtactcccaaatccgatatcctttttgtgaagaagggaaaaagatattttaaggctgatgatgaagccattgtcgtcttcttccaatttcttgctctacttcttcttggggttgcgggggttctttcggtgcatccaatccattaatgcccagaacgccaccaccgatccttcagaagtaagggcgttgaactcaatcttccaacaatggcgtatacaagcggtggattcatggaatatcagtggagagccatgcagtggaactgctctcacccaaagttcatctgtgtttgaggatcctactaataatcctgcttttagatgtgattgctctttcaaaaataaccctctttgccacattactagcttgggggtttttgctcttgacaaaccggtggtggttcccaaggagctttttgattttgccttttttggagtttcttgaggtttgtttaaaactttttt

SEQ ID NO: 25058 - DNA, 467 bp, Gossypium hirsutum
  Clone ID: LIB3584-005-P1-K1-D7
ccccgcgtccggttttccctttattctcttttgggctcggtttcggcgatggagaaggagactccggcgacgtgaccgtgaggcgattcaggtaagtttttcttttcttcttccttttattttcatatttttatttaaaatagatttatagaaaaatgaaaagaaaaacaagaaaatgaagagacaaaagattaaaacgaaaccttttctttctattttgcttttttgattttttggatctgcccgtattacagtgttttttctttgtattcaaaaaaagaaaaacccctgtttacaatcgtttttctcttttgaaatatcaaaaatcctccccctacaaatgatagatttcggttttttaaagccaatgtttttcttgttccctttgtttattatttcttctctgttgttcgcgtgccttctttgttccttttctgtcctcttttgtttgtttgccgggctggccg

SEQ ID NO: 25059 - DNA, 597 bp, Gossypium hirsutum
  Clone ID: LIB3584-005-P1-K1-E6
ccccgcgtccgctcttgcccccaggtttgatgttgaattcctctcttaaatgttttgaacctgtgcaaagaattttcaacccaactcccattctgatctgtaatctgctgttgctcaaatttgaccctgtgaagttttatgttatgaatggttatagaagcatttcgatgtagcattttgttgtggaactactaagcagaaaattttcgagccatgggtggggtctttgaaggctaaaagctgtgaaatgttggaggataaaaaggtgacagattttaacttcgatgaggaaacaggttgcgtaacagaagtagtttgtggcaacgagacatacagtgttgatgcagttgttgtggctgttgggatcaccacacttcaagaaactatcaagaaaagtgcagcattatgtaaacgggaagagtttctgaaagttttgaacttagccggcatcgatgtggttactgtcaagttgtggctggataggaaggttgccatcccgaatccaagcaacgcttgtgctggatttgatgatttattcgggtgcaccatctttgacttgaatgtaattcatgacgagcctaatgatgatacagaaac

SEQ ID NO: 25060 - DNA, 327 bp, Gossypium hirsutum
  unsure (1)..(327): unsure at all n locations
  Clone ID: LIB3584-005-P1-K1-F10
cccagcgttgtcccgcgtccgtaactctacgaggggggggtgcggacctatccgagagggctcatacctagccctgatatcaccagattctccccgttcccctggctctcggaatccatgtgtgaaccactcgctcattgtagtactaaactagaatttcttaccatgacattggaatcatggggggaggggggggaccattgatcatatatcccaacagtggtgagacttacaatggagaaaccaagcaatgggaggtgagcagtttttttcttttttgtngcttttgtnntgaaatctttagaactgaaatggtttttttttttg

SEQ ID NO: 25061 - DNA, 395 bp, Gossypium hirsutum
  unsure (1)..(395): unsure at all n locations
  Clone ID: LIB3584-005-P1-K1-H10
tgcatgtgctctagggctatttacccttttttaatgcgttccttggtcttctgcacccccccttaagggcattctcattcatgnggagtggggaaatgtaagattgtatattcaatggagttccaacatgacttattgggggggggggcatgggcggggaactaggacaaaaaatatattaaattccccctttgtatttatggggaaccaaaatccttagtttgtaatatcactttcctatactctgggaatatgtaaggcataggagtgtgatggatgtgttgcagggggggggggagactttccttctatgttatcctgatttattgtgcgtcnnnttccggtcctgtgggaatgtttaatttttttgntttttggttgggcggccgttcttg

SEQ ID NO: 25062 - DNA, 588 bp, Gossypium hirsutum
  unsure (1)..(588): unsure at all n locations
  Clone ID: LIB3584-005-P1-K1-H5
gttcaaccttaaaaaatgtctttctctctctgttttcctcggtttctgcgctgtcccgactaccaccttttctttctcctttctcaggagcatagataaagggataaatgcaaagctaaaccattggtcactgattgaagcattgccaaatggtgagcttacgcagacgcaagctcctgggactctgctctgggacgagttccttttttactccactttctagatttttcgataatggtaatgcccctggaaattcaagtcagagtgcaaaattggtcactgtgcatccaatgccctcagatcccatccacatgaatgggaaaagcattcctaaggttgcttctggatcaccgaatgtctccggctccggctcatcaaaagagcatcataatcaaccttttcctgggcaaccgatcaaacgcaggaagcgacacaggaggaagcatgttcaaaaccaagaacaatgtctaatgaggggtgtatacttcaaaaatatgaaatggcaggctgcaataaaagttgtcaagaaacaaattcacttgggnaacagttggtttcacaagtaagaagctgcccctttatatgaca

SEQ ID NO: 25063 - DNA, 500 bp, Gossypium hirsutum
  unsure (1)..(500): unsure at all n locations
  Clone ID: LIB3584-005-P1-K1-H7
ttctcgtgtgcatgatgttaaaatttttggggtggaatggtgcatttattttgccaagaaaattggtcagaagtgagcgttttgatttttaaatcttttttagcgttttgaattttaggaattatatatatataaacagataatattacagttgcccaatgactcagaagtgagcgatgaactatgggaggaggtgatagagttaatgaaatttcgggtggtggacaaggttccgttaattcgtatgcttgcagtccgggcactttcacgatttgtaaatgattctgaaaatagcgacattcttgatttatttctcgaagtccttccattggaacagaactcggtcagtgtgtgaacttatatattgcttctgttgtctcgatgagttgcgtgatttgtntttgttcctattctcttggctcncttttttttggttgnctccttgntgttcttgtgtttgcttgtgttggccntcttttctgtggctttgtttcttgttt

SEQ ID NO: 25064 - DNA, 617 bp, Gossypium hirsutum
  unsure (1)..(617): unsure at all n locations
  Clone ID: LIB3584-006-P1-K1-A10
tgtttcgttttaacacagnatggttaaggttttggggagcgagaaggggaagttggaggccgganaatggatactttttggttatgaagttttntggaagagaccaagaaagtggcggtgccaaaggttgagaaagcgagggttaagagtttggggtttgaagaaagggctaagttagctaagaatccaactggggagaggcggtttgaggttatggttaagaaacacagtaatctttgtttggctgctgatgttgggactgctgctgagttgcttgatattgctgagaaggttggaccagaaatctgtttattgaagactcatgttgacatattccccgatttcactccagattttggctctaaactttgtctgattgcagaaagacataactttatgatcttcgaagaccgtaaatttgccgatattggtaacacagtgacaatgcagtgtgaaggcggtttctttcgtatattggnttgggctgatattgttaatgcccacgtaatctcgggtcctggaattgntgctggtctgaagttgaaggttttgcccgcggttggggcctgttgcctctggcagttttgggctctgttggtttccttgcttagggtgtc

SEQ ID NO: 25065 - DNA, 543 bp, Gossypium hirsutum
  unsure (1)..(543): unsure at all n locations
  Clone ID: LIB3584-006-P1-K1-A6
tgtttggggctgagcctaagggagggggggaggatagnaatcgtcgtgngaacgtacgccctatcaatcaaattcttcaacctccattgactgctaccgtgttagccattgttatcgggatcatcccacaaataaaagctacggtttttggttccgatgctccgttggatttcatcacgggcgggcttgctatgatctctaacggaatggtacccgctgttatgcttgtgctaggaggaatgttatgggaaggaccgaacgagtcgaagctcgggcttcgaacaacaattgggatcgttgtcgctcggcttttgatacttccattggctgggatcgggataatctatttggccgacaaatggaattgtttgatcgccgatgatgcgatgtacagatttgttctattgatgcaatatgcaacaccgagtgccatattgcttggtgccattgcgagcctgagggggtctgcagtgggggaagcttcggctcttttattttggcagcttgtgtttggtttggtctctttttcagtgttttttttca

SEQ ID NO: 25066 - DNA, 240 bp, Gossypium hirsutum
  unsure (1)..(240): unsure at all n locations
  Clone ID: LIB3584-006-P1-K1-B1
nnncggttgtttgattnngttaatctctaatttttntcacttttttgttgggnaatcttnnagttttcaatcatttaagtatatgtaaatgtataatccaagnntcaaattctgnnncttgnaatgcnnnttactgnntttnntgcananattatttgtnnggttgatnngtggtattattcatattggtnntgacgattgaattattagaatnncagttaggcaggnnatttaaagctt

SEQ ID NO: 25067 - DNA, 569 bp, Gossypium hirsutum
  unsure (1)..(569): unsure at all n locations
  Clone ID: LIB3584-006-P1-K1-C12
atgtctaacaactttgcggaacaggcggagggtgtgtcgaatacctcgtatatttggtgggatttgacgnnacaaatcaagttcttcacaatgcagttttgccacgngtcacaagggttgatgatgtntgtattttctgaagggggaatgaaaatatatatcctgagaagggttgcaaaaaagtgtgggttgaaggtgtgttgctgaaatgatacttcgttcaacggtttcttgcatgggagatccacaccccggtaatatattggtgtctatagaaggtcagggtggcttttctttgggtatgtcctgattgttcacttctattgttttctatctaagatgaacattactaattatgtgaggatgtctttgtggaacttacctttatgatgagaagattgaaaatgcagttcttttggaccatggtaatctgcnnaaagttggatgaagtgtttaggcttgaatattgtcagctttggaaggctttgattcttttagactcatgaaggtgcagcttttagctggacggtttggtgttgggaagtcctcctattcttgcccctcatttt

SEQ ID NO: 25068 - DNA, 481 bp, Gossypium hirsutum
  unsure (1)..(481): unsure at all n locations
  Clone ID: LIB3584-006-P1-K1-C2
tgnnaaaatactctcataacaaagttttntcgggcctccaccagnnataactgtacatngtgcaaagnaaaggnntgcggtttgtggttattgggnngaatatgttttgcaccagaactnngcgaattcatcgtcgttattgatcctaaagggatcaactcacggaagatgcanctgataaagataaaattcacgaaaatactacattgaaggatcttgatctgtcgtatgagtttcaaatggacaaatcattgcagaaattcttttttcaccaaatttctctagactgcaatttcttgttttctcaacatataattgattatagccttctattggggctacattttagagctcctgagcaactaaatggcctgctagaacctcccatgatgcctattatcgagagttcaccggtgggtcaagatggagtagtgttattcccctcttttgtcttgttttttgnggcccatgaaccgatttt

SEQ ID NO: 25069 - DNA, 567 bp, Gossypium hirsutum
  unsure (1)..(567): unsure at all n locations
  Clone ID: LIB3584-006-P1-K1-C6
ttcaaccactggntccatctcttctgggtgagcttcttgccaacattgctacactgtcttctgtgtatcacaaacctccagatgcttttgttacccgtgtgaagactgcatctcagagtactgaagatgatgattaccctgatggaaatgaaaaaggtattccgctaatgttggggatggtggtgcatcaccttcaaccagctcaagtagtgtcccatatactgcagctaggaagccatctcctgcccaagtcatgcctgcacctgcttatccagtgcctgatttgctaggcgatctaattggccttgataacaatgctattgtccttgctgatcagccagcaatgccttctggccctcctttgcctattttacttccagcatctaccggacagggtttgcaaatcagcgcacagntagctcgacaggatggtcaaatattttacagtttaatgtttgagagttactcacagatcacacttgntgggttcatgattcagttcaccaagtattcgttttggtctggctgcctgtgggacctcttcaggttccctcctttggctccggg

SEQ ID NO: 25070 - DNA, 427 bp, Gossypium hirsutum
  unsure (1)..(427): unsure at all n locations
  Clone ID: LIB3584-006-P1-K1-D2
cggtaccgcgtattcccggngtcgnacccacgccgtccgtnacccaatagtgttttttgacattggtgtgtattttgataaatacttagnattagataccctttctcccattgtaagggctnnnttttctttctaaaactacagcctttgatatttatgatctgtgggatgttangaaagcaaagaaaatagttgggttttggaacatgaccatttgaagatgtcttggtttcaccattatcatcaaatcaagcaaaaagatggctactttcaatacccatctcctcttcttccacccccttatgctccaactagnnnncataaagattcaagtccttcaccaccatcatcatcatctggttctagaatcagtccagcacttcttttcattatagtatttttggctgtcttgtttttcatctctggc

SEQ ID NO: 25071 - DNA, 597 bp, Gossypium hirsutum
  Clone ID: LIB3584-006-P1-K1-D4
aacaaacaaaacaacctgaaaccgtacactgcctataatcccaccatgaccgcaatatggctgacaacggctaccgtcaacctgcggcgcgagcagttacgttgtacttagacgaactatccgagcaagactgagcgctgtgaggagaagctcaatttcatgcaaaagctgaacctgggctaatcccgagccgctgcaataaaccgtggaggaaaggaaccttgtttacgtcgcctacaaaaacgtaatcggatctttacgtgccgggtggagaatcggttcttccattgagtctgaaagaaaaaggtcgaaagaacgaggaacatgtggcgctggttaaggagtacagatccaaggattgaatccggagatgtcggaagtgtgcgctagtatattgactttattggagtcaaatctgatcctatctgctactgctagcgagtccaacgctttctatctgaagatgaaaggagataatcatcgctatctagcggagtttaaggttggagatgagaggaaagctgatgctgacgatactatgtagacttacaaggctgctcaggatatggcactggaggatctagcaccgacgcaccc

SEQ ID NO: 25072 - DNA, 279 bp, Gossypium hirsutum
  unsure (1)..(279): unsure at all n locations
  Clone ID: LIB3584-006-P1-K1-D6
gnaaatctaaggattgtgtacaggaccggtaacgagcataggccaggtgggttctttcctaaaggtggcaatgggagaattgctagagaatacctctataatgatcaactcagaggactgtgaattgatttatttaaaaactctaagatcatgttataatataatttaagacgaatgctttgtttataattgatttgaataataatctccaaggagacttaatgtattgcttgcatgaaactagtatatatatatatatgaagcatatttttccatttt

SEQ ID NO: 25073 - DNA, 509 bp, Gossypium hirsutum
  unsure (1)..(509): unsure at all n locations
  Clone ID: LIB3584-006-P1-K1-E10
ttgtatgagtttgtggctgatattaggctagacggggtgtaatgccatgctgtataatcccccatccaataacgttcataaaatggcagaagaaatgaaagaattttttgaagcaaggtgngaaatctttggaggagaaatgtaatcaagaaaatattagggttggacaagggaaggtttctagtgggggggggaaagatgttaatgaatcaagtcagcagtgtcctaaaacacttctatcccggaatagctctctgcccaagaagtcaaaggcatctgaggagaaggttgcgaagctgcctctgaatgcaagagctgctgaggttgagcttgctaaaccggcacagaaccgtgtgagcgaattggcaggaaaaagcttacaaaaaggcaccggtagtggtagtggtggctgttcccaggggtctatcaatgccaagccaccattgagcccaggtgcctgcngatgcagttcatgtggcancatttagtgtcattgcagccttcctagt

SEQ ID NO: 25074 - DNA, 636 bp, Gossypium hirsutum
  unsure (1)..(636): unsure at all n locations
  Clone ID: LIB3584-006-P1-K1-E3
cacggaacttaaatattcttggaagtcagctggccatccctcaattttggaaaagaattgcagatggaaaaaacagtcttgcaagcaatatactccatgtggatgccaatcaatgtgtgngaaagcaangcccttgtctgaacaatggaacttgctgtgagaagtattgtggatgctcgaagagttgcaaaaatcggtttaggggatgccactgtgcaaaaagccaatgcagaagccggcagtgcccatgttttgctgctgggcgtgaatgtgacccagatgtttgtaggaattgttgggttagttgtagtggggatncattgggtgagccaccgaaacgaggagatggtcagtgtggaaatatgaggcttcttctaaggcaacagcagagaatactcttggcaaagtctgatgttgccggatggggagcanncctaaaaaattctgtcaacaaaanagactatcttttagaatatactggtgaattgatctcccacacagaagctgacaaacgagggtaaaatttacgatcgtgcaaattcatcttttctttttgacttgaatgatcagtttgtcctcgacgcttaccgcaaaggagacaaattgaaatttgcaaaccactcttctaacccaaat

SEQ ID NO: 25075 - DNA, 203 bp, Gossypium hirsutum
  unsure (1)..(203): unsure at all n locations
  Clone ID: LIB3584-006-P1-K1-E9
gcgttttccccgcgtccgccccgcgtccggnagactttgcagtattacgagcaaaagagaaaacatctgttttggatggggaacagagcaatttaatgagcagctttacagatttctctttattgcttcattatgaactgtaaagaacaacgggaaatttttctcttttacatgcattgtatttagagagattcttttcttgt

SEQ ID NO: 25076 - DNA, 351 bp, Gossypium hirsutum
  unsure (1)..(351): unsure at all n locations
  Clone ID: LIB3584-006-P1-K1-F11
tttcccgcgtccgcngatactttgactgggagcgtgggagggccgggacagtttgggttaactgttttgatgtgtttgatgccgcaattccatttggtgggtacaaaatgagtggcattggtagggagaaagggatctacagtcttcataattatttgcaggtaaaggcagttgttactggggggaggaatccancatggttgtaatttttatgtttttcagattgtctcaacctttgatccttccctcatgtttttttttttaaataaaaaacaacttttgcaataaagttacggaaaacactgtttgtaattgttggaatggaagggaagacaacatgttaagtcttaa

SEQ ID NO: 25077 - DNA, 568 bp, Gossypium hirsutum
  unsure (1)..(568): unsure at all n locations
  Clone ID: LIB3584-006-P1-K1-F2
tctcgcaaaacctctggnnaaaacccctcacctggttgccggcnttcgtttacttaaaaattcaagggtatcttaccgtttgcttactgtccaagacaatggatgagttgccaacacaaagcacatctgccttggcctcacctcgcttacagctaaaccggggatcaacaacggcaacatctggtccagaatcaaagccaaagaagaaaatttgctgtgcttgccccgagacaaagaagctgagagatgaatgcattgtggagcatggtgaagaagcttgtgcaaaatggatagaggctcatcgtatatgccttcgtgcagagggcttcaatgtttgaaattggtattcgaagttcatagaatgaaaataatttgaggtacaaactattattagaggattaaacagatatgatttgacaaaaaagaatccagaaataaaaagaaagcttnatcctaaattgttcatttttggggnngnntttttctttnttatgaggttatttacctctaatnattgaattgtaacatctggaatactnnnnccnnctttttttttttttcttttttt

SEQ ID NO: 25078 - DNA, 321 bp, Gossypium hirsutum
  unsure (1)..(321): unsure at all n locations
  Clone ID: LIB3584-006-P1-K1-G11
tgcttggggattttttagactaaggttcagtgcgcgtgagcccaggctcatttctgacgaggataaatggattgatctcctgacctcttcctaccattcccatcgttgctagcttttggctcctgtctgaacagcngttcacttaagacattgcttactgtttcttttcgtggggggggggggggggctnttntctcttcttnctccntctcccccattgcgctcttttntcctttcccggcttgtgggcctgtttgccnttggcgtctttgcgcttcctttttgcttgtctctttttctttccgctctgtttctgctttc

SEQ ID NO: 25079 - DNA, 611 bp, Gossypium hirsutum
  Clone ID: LIB3584-006-P1-K1-G7
ccccgcgtccgcccagcgtccgcccagcgtccggagatttatctgtcagatctactgaccaagttactcagatgcataagttgcaagccatggtacaggatttgaaggacagtgatggggaattgaaattgatattggagatgtatagacgtgagttcactgattcaagcgatattttggaagcaagagattcagaattcaaggcatgggctcatgttcaaagtttgaaatccggccttgatgagcataatttggaattacgtgttaagacagctaatgaagctgaagcgatatcccagcaaaagttggctgctgccgaagctgaaattgctgagttgcgacacaaattggaggcttctaagagggataaatctaggcttactgattctttaaaagccaaaattgaagaaaatgaggcttacttatctgaaatagagtcaattggacaggcatatgatgatatgcaaactcaaaaccagcagctattgcagcaaattactgaaagagatgactataacatcaagcttgttttggaaggtttgagggcaaaacagcttcaggacactctactcttggagaacataacatggagaaagaattcagcaagccaa

SEQ ID NO: 25080 - DNA, 607 bp, Gossypium hirsutum
  unsure (1)..(607): unsure at all n locations
  Clone ID: LIB3584-007-P1-K1-B2
tcccgggtcgcccagcgtcgcccgcgtcgcaacttctcaccttacggcagttgttgaaattcattggcacattcaataaaagtgtgccaaattcccctatttttttgttaattgaattttcaattagttactgcctaattttaatttacaatagatgagctttgcaatattatgataacccattactcctatgtaaattctaggaagcatttattcaattagttaatttttagctattgatatgcaggcactgactatgttccaattttctagattcactcattgttgctgncaaaccaaaggcactaagtggactcgttattgacgatgatgaggaagatttggtatgactgaattagcagtcactaaactgagcttggatgccactttggtaaacccagaattttcgttgttaatttttttcccctcaattcttccatcttatattncagctnccacaatcaacaagttggnggaaaaagaagctttactcgtttttactaaatagattgaagcttcctggtgagaaccaactttgaattgagctgttatttttcctagtaagagttcacttgttgaccattccttgtatgtctttgtatatatc

SEQ ID NO: 25081 - DNA, 501 bp, Gossypium hirsutum
  unsure (1)..(501): unsure at all n locations
  Clone ID: LIB3584-007-P1-K1-B4
ggcagntgctgntatacattgcctgtggaatttagaatcatatacttatatgtcgagttctatctgatactttatgtgttcagatgttggatagaagcttgcaaatgtcgctgaattgcccatcttacttattagttaggcagagaactctttgttataaaaggttgaatccagttcgtgctatgcccccatcttcagtgatcttacacattgatgaaagtgggaaatttcctgaatctaggaaaacttgtaattcattaatagcttctttaagcatctatgatgggcccttgctcagtgctcctaatactgtgggaatacttggggggttatctgttgattctactctaaatttcttgagaaaattagtacatttgagcaaagagaacgaagcaaaatgtatgccttttgttgtttgctcnganccagttttgaatagggagctttcatcactggagaggagttcgtcttctttctgcngttgaaatgaaccttcacact

SEQ ID NO: 25082 - DNA, 125 bp, Gossypium hirsutum
  unsure (1)..(125): unsure at all n locations
  Clone ID: LIB3584-007-P1-K1-C1
nngcgacgtcatatnnnctcttctattagtgtnncacctaannattcaattcactttgtgccgtctgttttaccaatcgtcttgtgactgggnataaacctctggtctgttactctcaacttann

SEQ ID NO: 25083 - DNA, 314 bp, Gossypium hirsutum
  unsure (1)..(314): unsure at all n locations
  Clone ID: LIB3584-007-P1-K1-C10
cattttncnnccttcctnatnnctcaatnnaactctcnnncttctccgnaatccccaatgcaacnnatcttaaagnnaagtttnntggggaatggctnntctatgggnngaataatactnnngttattttgaacgggcggtgtgaagatgatgccnntgggcccagtaccccaattcanngttgttgaccccttttcnccttaagaagttttnnatgcttggnagnatnnggcacacnnattggctnntttggaccccatttggtgattatttggccctnnggataaaaagggcatattannatcgttggtcaa

SEQ ID NO: 25084 - DNA, 537 bp, Gossypium hirsutum
  unsure (1)..(537): unsure at all n locations
  Clone ID: LIB3584-007-P1-K1-D5
ccccgcgtccgancaggtgtttccctcttttaataagtaattatatgtatataattgctctctttggtgtcagctaagtagccactgtgtcaagttacaagtgattattactcctaagttaacatatacaagaactgttcactcctaagttgcaactgttgtattttttggattgttttttttacttttagtagngaaaaaagtatgattaattctgttaagtgggacaaagagattggaaagcatggcttgaactttgaaaggtgatatcatgtgtaactcaaaccatatttatgtttgagttccttgttttagaaaatggatatagctgctgcttgctgttgacgattcttaacccaaagtattaatgcttgctcagattcttaacccagtgtttatttcatgaaaggttccatcttaaagttgcttcctgtttgactagcagttttctagttttaatgcttgtggattggtctttgactagctcttttctaggactattcaggttgtggaaggctctccagttttttgccggct

SEQ ID NO: 25085 - DNA, 329 bp, Gossypium hirsutum
  unsure (1)..(329): unsure at all n locations
  Clone ID: LIB3584-007-P1-K1-D7
aatccacagctggaaagcaccgttggctggaactgtagtctgtcatggaatatcaagcaatgggttcggggttctggttgtggctctctgtttgggacgcatgcttggcgtgtggctaccatgtgtgggcattatcatttttatcatcgtttggcctcgaggttggtccccntgctgatgttcaggttgttgtctttgctctcgcctaagctcacttctttgactacctttatgacttttgctgtgatgctggggtgcttgtttgcgttgccgtgcttgttgcgcggctttttggtgtgtattttttgtatggttcttttgtttcggtg

SEQ ID NO: 25086 - DNA, 404 bp, Gossypium hirsutum
  unsure (1)..(404): unsure at all n locations
  Clone ID: LIB3584-007-P1-K1-E10
tcgcaaggtgataacaaaggtaatgttaatgaagctggtcattcaaggtgctttagtggttgtgaagagcgagttgatgctttatctatgtaccctaccccttggatgcttctattcatttcttaaatttcataatttcaacagaatagcagtagagaaatatatgagccatgcttcgatttagtatacatgccgaggggtagtacctacttatatactggcttggtctggtcagatcatcgtcgactcgattttaaggttatgtcttgcgcaagaaatttatgctcccccttgttcttggcagtttgtttgcttgtctctgtcatttaaataaataaaagtatctgacatttaaaatgaaacgacgccctctgtggcntctttgattccaggccccnctcttt

SEQ ID NO: 25087 - DNA, 639 bp, Gossypium hirsutum
  unsure (1)..(639): unsure at all n locations
  Clone ID: LIB3584-007-P1-K1-E6
cgtctcgcgccgtggnaaaccgctctnagctttggctnnaaatcattgaacnnccgaaaatcgtgacatttagnngtgagtaccgaagnncgagtttnngaaccgagnntcgggttcttttaaaccgnattcaagnaacnngcattaagnngtattannctccgcncnngtgttcgnnagtcatttagnnnaaccaaacttnnnacctcgcgnacttcaacctggaggagaaatnnccaagtggnagnnaaacccacttactnnncggccggnnaaaatnntgctggnnagtcanntcggnaccggnaagaaagnnccggcaccnnncaaagggnnaacgaatggnnnaagacaaagnagcaatggnnnaaaattttaatggnnnaaatttccnnggtttcgaaaccggtaaccacttnnagccattacgccatnnaagtcaagcaaaaattcntactgtggaactataattacagcccctcgtattcattgatcgaatcccaacctggatttctctctttagcttggaacgaagtgcctttactcactgtttcttcatggcgttgatgaactttcattgtaaaaatggtttccacctggtaatttttctctagtgtggaatggtagaaagcttttttg

SEQ ID NO: 25088 - DNA, 543 bp, Gossypium hirsutum
  unsure (1)..(543): unsure at all n locations
  Clone ID: LIB3584-007-P1-K1-F1
gcccacgccgtccggtngaatcctgattattaataatcctccatccttgcttggctaataatgagatattaaattgcaacatattcctgaactccataccccttcttcttttgatcggcacatatatttccactgacaccaatgtatcccttttctattctgtcctttttgccaccagaattttgcaaaaatattttcccactctccacaaaaagattttggtaagagaaaacatgacatagcttatgctggaattgcttgaagcactgatttgattaaaacctccttaccctttgtttcaataatcttgngctccaaccatcngatnnnaannnaattntatccttnatatttngaaaagcttccttctttcgnctgccnaccacattagggagtccaagattttttttttgatttgngattcatttctctcttttttcggncgatactttcgttttctctntttgcagngnatnngagcggtagaaaattgttgtcttgctgaaattcacacactgtcctgaacactggtctttctctttt

SEQ ID NO: 25089 - DNA, 461 bp, Gossypium hirsutum
  unsure (1)..(461): unsure at all n locations
  Clone ID: LIB3584-007-P1-K1-H4
ttcgcccacgcgtccgggcaactttcagtgggaggagggctggctccttgccaacagctatttcaacctcttctggagcaccctctaaccttccaaatggaattgctaaacccgctacagctcctattccagatttacttgacctgagttcagacgatgtccctgcacctagctcttctggtggggattttccacaggatcttctcggtgttgatctgtcaccaactcttgcaccatcaggcgctggtaagcctccaaaagctagtacagatgttttgttggatcttttgtcaatcggaacgtatcttcctgtgcaaaccggctcgtctgcatctgacatattatcctccagtcaagatgacaaagcccttgcttcactttcctcactttctgcaaatgccacttctcccgtnnccgctgctccaatgatggatttattggatgggcttggccctggtcct

SEQ ID NO: 25090 - DNA, 523 bp, Gossypium hirsutum
  Clone ID: LIB3584-012-P1-K1-A6
cccacgcgtccgcccacgcgtccggtgaagagccgattaatgaaatcgatggaaaaagatttgaggctcatgggaatgacagcaaagtcaatggagtaacttcgacatcaaaacaagaagaaactgtctgggtggagggtcttctccctggcattgacttttgcaaccatgacttgaaggcagttgcaacatgggaagttgatggaacagggtcaataactcaaattcctttatccatgtaccttatttctggtagtctcctcttgcctcccatgtttgctttttgtaacatattctgatcaaatctgttatacttgaggtctttttttgtgttaaatattgagaagtctaaccacgagtggcactattttttcactcaaaatggaaagctttacagtctccattgccagttgacaaagaagtttccatcagttatggtaacaaaggaaatgaggtactttgctttgtcctgaacagataactttctttctaaacatgagtgtttcttctatacttttaaaag

SEQ ID NO: 25091 - DNA, 553 bp, Gossypium hirsutum
  unsure (1)..(553): unsure at all n locations
  Clone ID: LIB3584-012-P1-K1-B4
gcaatttgagaggaagctgtgatagggcttatgtgaaggcacgtgaagatcaaggtgggaggaccgtggatgtgatgcgcattttattgacatacggtctggactcaatcaccagttctgtagagaacaagccatgtcaaaacaaatcagttaaagaatcagttcgagcactgctgaaagaaatggttgattatggcagcaaagatcaacaagctgacatgccgaatgcagcaccctcaagaggggatgcttcactgcatgatcattcaagtacacaaggacacataaaagttccaatgaagccaggcgattggctttgtcccaaatgcaacttcctaaattttgcaagaaatattaagtgcttacgttgtgatggtttattcgaagaaagactgaggcaactgcgggaggatcaggatcatctgccattaaagaagggagattggatatgtgaaagatgcaacttcttgaattttgcaaagaatacaatatgtctgcaatgcaaagagaatccctcaaaacgacatctcaatcccggngaatgggaatgtga

SEQ ID NO: 25092 - DNA, 517 bp, Gossypium hirsutum
  Clone ID: LIB3584-012-P1-K1-C7
gtctggagctgttagaagaatttgaagaagaatggagagaaatgattgataaatatggactccatggtaataagcacattatcaggttatatgcattgcggacattatgggctttgccattcttgaggccttacttatttgcaggtttgacaagtttatgtcaatcagagaccactactactttcatccaacggattttgagtgcacagtccctactagatcgttttgtagaacaagttcgcaattgttttttcctcctcccgtattttgctgatatagatttcttttactatgccaaatcttattgaacatttttttcttttgtaggtggctgaggttgttgaattcaatgaccgtggtttcaagcaaaagcagcgaaggaaatcgcagaaagtctgccttaaaacaggctcaccaattgaatctcatgcggctactgttcttacaccgcatgcctttggtaagctccaagaagagcttttattggctccacaatatgcatcctttgcggttgatg

SEQ ID NO: 25093 - DNA, 186 bp, Gossypium hirsutum
  Clone ID: LIB3584-012-P1-K1-E11
ctgacacgaggattggttcgctgtggagaggaactatgtacgcagtgtgctacaagatgggaagtcgagagtcaaacagctgccgactgtatcttaacgctatcacatataatttacatgtaatttgggccttgtacgacttgtgcacaagctacacttacttattggaatagcattgaggactct

SEQ ID NO: 25094 - DNA, 551 bp, Gossypium hirsutum
  unsure (1)..(551): unsure at all n locations
  Clone ID: LIB3584-012-P1-K1-E2
cccacgcgtccgcatatatgcattaggaactatgatagctatattagtgaatgtggactgtaattgataggcttactcttgaaagtccttgcaaagttctctttatccttagggttggcgattgaaatgtctaatccttatgggatagaaaaacaagcacaacctttatttcataacattaatcaaatgtatgaattgcagccctttaaataaacttgaaccagacccgattcttgtaccttgttttgctgtgcagttcgcaactcagcatcatgggctttaaattgtattaaattttcttaccatgtggtacttacatatttacatatgcctttgaacttttaaattaaagtattagtgaattaaattcaattgtttgatattatttttatttttggtgtctataattaaattaaagtcttagtgaattaatgttgtctgtatttcagttactgcttcctgctcctnctgcagctgatggttcaactgaagctgccatttaatcttcgaattaatatttggtactagcgaccacctgaataataaataca

SEQ ID NO: 25095 - DNA, 489 bp, Gossypium hirsutum
  Clone ID: LIB3584-012-P1-K1-E5
gcgcccacgcgtccgttgccatttgccttaatcatcttcctcttgctttaaaacttcttcctatttaatttctgactgagcttgcgctgaattccatggctactgcagaggttgtaacagctcaaactgcaatccatgaggagaaacctgaagaagtggtcaaggttgaagaaattgcaacacaagaggtagtggctgttgctcctgcaacagaacctgttgctgaagaaccaaaggaagcagtgcctgaagcagcattcgaagaacctcaggctccagaaactgaagccacagttgaaactgaatcaaaggaagtggttgaagagcccaaggctgtgactgaggagccagaagttgacaaaaaagaagaagagacttctgacgaaacagtagcagacccagttgccgaggagtccaaggagactactgagccaaccgttgaagacactcaagagagcacagagtctacagaagctgcagtagctgcag

SEQ ID NO: 25096 - DNA, 273 bp, Gossypium hirsutum
  unsure (1)..(273): unsure at all n locations
  Clone ID: LIB3584-012-P1-K1-F9
ccggggcgacccacgcgaccgagaaagncgaaagagggagncgancacgccgancgaagaacaaaagggaaaagnaaacaagagggggggaaaggcncaagangcgggaggaacgaccaacaagaaccccaangccccncnngaagaaccggcagancaacgccaagaggaggaanncncacccgaaaggcggaaacaggnaacgacaacaacacggcaccgngacgaaaggaacagccagaaccaggaagaagaaggcgaacacgacaacac

SEQ ID NO: 25097 - DNA, 420 bp, Gossypium hirsutum
  Clone ID: LIB3584-012-P1-K1-G7
tcggccacgccttcgattcaacctggagcagcatggcataacaaaaaccattttgcttcttccaagtgggcgggccaaggccatggtgagctctaaaacctttagagttcataccctccaaacacacctcttggacttaaaagggttactcttagcatcaacagtggggaaaaagaaagtgttgttcgtcccaccccgagtgggaagacaacttttatacaagctttcttcagactggttgagtcaactgctgggaaaataatcattgatgatattgacaattgcatgctaggactacatgatctcttatcacggcttgggatcatccctcaggaacctgtcctttttgaaagatctgtgcgaagcaacattgatcctgcaagacagttttcagatgaatagatatggaagagtcttgag

SEQ ID NO: 25098 - DNA, 251 bp, Gossypium hirsutum
  Clone ID: LIB3584-012-P1-K1-H4
ctgaaaaagatgctcagatgtgtatatacgacgcctcttgtgatacccactttggcttctgctgccatattgatgaacaagcctcccgtgaactttctcgtttacctgaggttttattggttaagccagacccaaattacaattctaagcaaaaagattacactgcttcaaacattgaatttattgctaacatagggaatttgcagttgtttcctgctgggaacaccaaacactggcttgttcgaatggac

SEQ ID NO: 25099 - DNA, 536 bp, Gossypium hirsutum
  unsure (1)..(536): unsure at all n locations
  Clone ID: LIB3584-013-P1-K1-A4
aagtgataatgttacagcttgattaactgatgaagaggtggaattaaacctactgtttatagaagtcctagttgaatcatcgactatacatctttagaatataggttcattgaagaggatatcatctgtatatccgatctatagatcgttttacttttcatcattcattttagaaggatatgattgttatcagttctatatgttaaccttgttctagtcttgaagttctttacgatgtccataaatttaggacattgttgtaattaatatctgtgaactttgaagcttggatttatgtgaaaaacatcacatgccttcagagggcatgttttctattattctttagctctctgtatcatgcgcgagtctaagaaggggctggtgttgcatactttgatgatttacgatagatgcatagataatgtttggtgcctgagtttccggttgctgtgcaacnattttatttaattgcgcaatcaaaacttttttattgccatgacttagtcaagggggattatgatgatatgaactcaata

SEQ ID NO: 25100 - DNA, 433 bp, Gossypium hirsutum
  Clone ID: LIB3584-013-P1-K1-A7
ttaatttttatgcattaaaacatgttaatatcaatttaataaaaaattctaaacaataataggtttcactaagatattaatattctagacataatattaaaaagtgaataataagttgctgatgggaatcctactcaaaggatttcttagaagtttcaaaaaaataactaaaactataactaaaactggaaattgaataaataattataattatttaaatgttcctagctcttattaccattgtaaaagttttgcttttgttttaaagttatatatataattttttttccaaaaataattatagttatttaaatgctactagattttatgaccattgtaatagttttacttgtgttaaaaacttatatataatttattttttccaaaataagttttttaattatttattttagcactcattttgctattctct

SEQ ID NO: 25101 - DNA, 446 bp, Gossypium hirsutum
  Clone ID: LIB3584-013-P1-K1-B12
gcacttttaggcatttttattagtttttaaatgtgttggcatgaacctatgtaatcattatcatatttgtggggtgcggcattatgttggcgctttacttgcataagttttgctgcaaactgctgttgaatttgtcgtataaaacttggcattgtatctgtagcattcatatcatagaaatattttgtgaacaattgcattttctcagctttagcccttgggtttgcttgtgttttctcttatcttactggatatccttttgatttctttgttttcttgatctgagctttgtcctaaattgatggtaaatacacccttttggttggtgacttacagccattattggataatacaaagatgaaactttcacaattttgtcacgttgaggtaaatttgattgcaaaatttggtttggattcttttgagttaggttggtcatctttact

SEQ ID NO: 25102 - DNA, 477 bp, Gossypium hirsutum
  Clone ID: LIB3584-013-P1-K1-B6
tgggtgttttgcatacaaagaaactgaagcaacataattcagccgaacttcttccacctccactctatgtgatttactcacagttcatggcccagaaggaagcatttggtgaagatattgatctggagatcataggaagtctgaaggatgctcaggcttttgcccgtcagcaagcaaataaagacaatggcgtatctaatagtatagagagctcaaggatggaggatgatataccagatgaggaagatgatggacagaggaggagaaaacgaccaaagagggttcccagcaaggaggctattgatcaggcgggagtctatcaagttcatcctctgaaaattatcctacacatatatgatgatgaggcatctgatcctggatccacaaaacttattactttgaagtttgagtacctgttaaagttgaatgttgtgtgcgttgggactgaaagatcatctgaaggacctgagtataata

SEQ ID NO: 25103 - DNA, 423 bp, Gossypium hirsutum
  Clone ID: LIB3584-013-P1-K1-C11
caaaagcttactttttaaaatctgtgtgtggaaggtgtagatgcagcaaattattgtgtggggttgacttatgctagcaggagtggtggaaggaaagtggcactcagaagaattttaaaatagaagagcatgatattatctgtctctgcaccctgaggcagtctttattcctatgttttgtgtcatacagcaacacaaaacaacctttgtacttttaagatattttcaggcggaaatggcagtcctgataattcgtatatcttgtgaggtttacttatgtttgctgctgatattcttgtcatttaggggagtactaaacaccaaaattcagattcagggggatcccaagaaaatgatcctagtctgggttcaaacacttcaaaaacccctaaatccccttggattgcctttcctatgttggtt

SEQ ID NO: 25104 - DNA, 511 bp, Gossypium hirsutum
  Clone ID: LIB3584-013-P1-K1-C3
gcgcttttgggcagaccaagaagtaaaattttttagcttttcagccaaaaagtgcttttgggctggttttggtacttgtttagctacatgaacgcccttctttgctctctgctctctgctggttctttgtttctctgctctctgctacgctggttctttgccctcatctctgccctctgctggtttgttctgccctctgctgattctttgttcctctgccctctgccgaataagactattggcaagattagtgaactgaggcaggccaatggggaccttgcaaacgaagttaacatactgcagaagagtagatttgacatggttgaggaaccagtgtacccacgttggcttaatgtttgcttgagggctgaaatcaaagaatatcaaacatcatcaagaaagacatcggaaaaaggaagttcagaaggcttcagaccagaaaactagcaagataattacacaataccccgacacgagcagcacttggtcatataccacattgactgatagt

SEQ ID NO: 25105 - DNA, 533 bp, Gossypium hirsutum
  Clone ID: LIB3584-013-P1-K1-C9
atttcttgtatctatcttagataacaaatcttaagctggcattggagaagaaagaagctggagtagaacaattcaaggttggaaatgctggaagcattacaccatctcaaaaggcaaaagtgcttagatttggaatctcttccaactttaagcctgagacatatcaacgccctaatgatgatactaaaggctctgaggtaaccagaaacaagaaactgtataaagccaaagcaaacttagaagctaatgctatatcttgtgtttgtatgtgatttccaggccaggactgtttcttcagctaagctaaggcgatcaaagttttcgtctgcactcatagggaaggacatatcactaaaggtgcctgaagagagagcttcacgtcttggaaagcctcagtcacctacccctcctgtaaggagatatttgtccggtgataaaggagcctcgacgagaaataaggtcaagtttgatgtagttgagaaccaaccgatgtcaaaagtagtggttccggttaaagcacatggcactagatc

SEQ ID NO: 25106 - DNA, 168 bp, Gossypium hirsutum
  Clone ID: LIB3584-013-P1-K1-D3
gcgttcaggtttaaaatcatgcattcggttctagattattaacacgctttctagcagagacaaaattacggaggaacgcgtaagactggctgtgcttattaattgaatacatgatattaatatgatatgtctgagcttaaaaaacatggagccaggaaacttctatgc

SEQ ID NO: 25107 - DNA, 443 bp, Gossypium hirsutum
  Clone ID: LIB3584-013-P1-K1-E12
gagaaggcaggttgaatatgtcaagaaaagggtgcttctcttggaaaagggcctcaatgcggggtatcagaaagagttttatggtgagatgaaaacaaatgaggtggcaagtgaacagcaagagaatggaaaaagagtcgcagacatgtcaaatgcaaggacaacaaagaccccttcacaagtgactgactgcttaccaccaatagaagtaattgcttcagaagaaatttcagcagctgcttgcaacaacgatgcagatcgattggaactgcctcagcattacaataagatttgcaagatattggaagacaatgttcatgaagcaattcagtcaagcctcaatctaaagaaaaacctccatacattggaagaaatttgtggggacatatctcgaattctttcacctgcagagcagcctgtagtcagtactgctgcaaggtcac

SEQ ID NO: 25108 - DNA, 341 bp, Gossypium hirsutum
  Clone ID: LIB3584-013-P1-K1-E5
cttcaacaagatggctcttgtattgatgctcatggagtcaatacaccagccctcgatgtacctcctcgcaactactaaaacattgcactcacccaaaccaatgatctggcaatacactccaatgcttccaacaaggatactatctaagaatcacgaaccaatataccttacctacaaatgctcatactaaatggcacttgcgacgcacactatatctatgcattcagctcctcgaatgacattgctacgctcaataaaaccggtacagttgccaaaaacataccgcccgaatccatcgctctatctccatgcttagatgccaccttcatcgaataacccct

SEQ ID NO: 25109 - DNA, 501 bp, Gossypium hirsutum
  unsure (1)..(501): unsure at all n locations
  Clone ID: LIB3584-013-P1-K1-E8
tgcttctccaatggtgaatagccgaaagagaaaacttggaagtccacctgacagacaattggaaggggagaagcgccatgagtacatgtcaagttacaatcatgatgccacggaagatgggcaaaaatcgggccggagtagttatgcagataaagaacatagaaggcatgcacatgagaatcattagaatcgttggtgaggcggtaaaagaatggtagtacttttactgaaatgagcgtgtatgattggatactgatttctgaccattgttattgatatttttgaactttgcatatccataaatggtcagagtgatctggcagagatgtacctaaatgtagtacgttttggatttgcctacaatggcgcatatcttggctgtaacaggatgtaccaacgaggatatttctgtcaccatattggcagggggcttcatgacaaagtaaagaggcagntaattatttagttcatatatatgggaaaaaaaaagagagaaagaga

SEQ ID NO: 25110 - DNA, 285 bp, Gossypium hirsutum
  unsure (1)..(285): unsure at all n locations
  Clone ID: LIB3584-013-P1-K1-F3
gcggaaaaatgcaaccactactgctggaaattctagtcaagttaatgattttactacacctattctnctggtgaattgttgtatttctaagcggaggggactaccaattcttnntnttttcaagacttttactgctgttagtgtatatcctactatcattggttttggcccatctgtttttatttatcatcagttaaatctactattctataacttaataatcttgatctttttgagatataattaacatttgcatcccatttcttatattttcaaaataatttt

SEQ ID NO: 25111 - DNA, 395 bp, Gossypium hirsutum
  Clone ID: LIB3584-013-P1-K1-G2
gcgcccacgcgtccgcccacgcgtccgaagcttgataacttggaaacaaatcattttgtccttgtccatgggggaggggttggtgcttggtgttggtataaaacaattgcactcctagaagaaggtggtttcaaagctactgcagttgatctaaccggttctggcattcattctttcgacacaaatggcattaccagtctcccacaatatgtgaaaccattaactgactttcttgaaaaacttcccgaaggcgagaaggtgatcttggttgggcatgactttggtggtgcatgtgtatcgtatgcaatggaactgtttccttttaaaattgcaaaggctgtttttgtggccgcagcaatgttgacaaatggacaaagtactcttgatatgttcac

SEQ ID NO: 25112 - DNA, 349 bp, Gossypium hirsutum
  Clone ID: LIB3584-013-P1-K1-G3
gaatcccggtcgaccgacgcgtgcgacacgcgtcagcacattcgtgtagtcaggccagtcaatctcctgattttagagactatgatctacagggcggtgctatcactccacagggagctatattctatcaccacatggagcctgctatcacttcatgagaagataatcctactgcttgctagtagcaacaccttagctctattctatcatggaaatgcagcaccatcatttaaccaaatatatattgaaacatgcatcttaatcaaattgcaactgattacttacattatgtcattcgaagtgtacatattgtcttgctgctgactcatctagacaaagtatgcactga

SEQ ID NO: 25113 - DNA, 327 bp, Gossypium hirsutum
  unsure (1)..(327): unsure at all n locations
  Clone ID: LIB3584-013-P1-K1-G8
caactctaccgacgtcgtgatattacctgctcttgacatttctgaagatgaanaantcttggacaccggtcctaattccaggtcgactaaggcctcctctgataactgcaacaacaacgatgatccagtgatcgttgattgtgaagctgtggcgaacagcggcaggaagattaatagggttaccgaagaggaagagaatggagtttcgaaaagattgaaagcaaaggctattgaagctccggctatgagcgacaccgacaccgacaccgaggaattgctggagtggttcaagaactctgatccatctcctgaaggtacgccggaaac

SEQ ID NO: 25114 - DNA, 441 bp, Gossypium hirsutum
  Clone ID: LIB3584-013-P1-K1-H2
ctcttctttgcagccttttggaacagttcctgtcactcaagatggagattatgttttatatggtaatttatctcctgtttttcttacatgtagattcagatgctatcttctcccccaaattttttagggtctttgagaatatataagattaaaataaagggcactaaaaatttattcttattgattgatttttttctctattaaaaactaaatatatttagttgtattattaagtggtatgcatattgataagtaaaaatcaatttttaacaataaaaataaataaattttttataaaataatcaatttattaaaaaattgatttatttattatttagtaaaaatggtaaaatacaattttacttgcccttttatcaaagtggttgactggttccagcgtttcatattataatgtaagtggtagtccttttcctagaaaac

SEQ ID NO: 25115 - DNA, 293 bp, Gossypium hirsutum
  Clone ID: LIB3584-014-P1-K1-A11
gtgaaagcagcagagcaattgatgaacatcatactatattgatattcgaggccacgcctgatgctgcgactactacccaagcaatgaaccaagtcgacactacatagatatacgagggtctctcggaagatgctcctgtccaatgtcataacctgaaccagaccaaactaagacatgacacacaggcctgcaaacgcatgctagatcagttgaagcatagatgtgcagaacaacacaaagaaggcactgcctatgattgaacagcttgcctcatgacgatggcttcatgcgac

SEQ ID NO: 25116 - DNA, 570 bp, Gossypium hirsutum
  unsure (1)..(570): unsure at all n locations
  Clone ID: LIB3584-014-P1-K1-A12
aattcatcgagacgattctggtttgtaactccccctgcaattggccctgacgtaccatacacttttggtctcataggtgatctcgggcaaactcatgattcaaacagcacgctcacccattatgagttaaaccctgcaaaaggacagacactgttgttcttgggagacctctcctatgcggatgcctatccatttcatgacaacgcaagatgggatacttggggaaggtttattgagcgaaatgcggcatatcaaccttggatatggactgctggaaatcacgaaattgatgttgttcccgcaataagggaagttatacctttcaagccctacacacaccgttatcatgtaccctatacagcatcagggagtacatctnctctttggtactccatcaagagagcttcaacgtatatcatngtctngtctcctactcagcttatggacattcacacctagtacaaatggcttgaagggagcttcaaagtgacagacagaacacatgctcatgtctatcatctctttacacagtattcatatatatgaggagcatgaagagttgagcatgtg

SEQ ID NO: 25117 - DNA, 484 bp, Gossypium hirsutum
  Clone ID: LIB3584-014-P1-K1-A3
gcacgcgtacgagatctataataagaaacctgtagaaggatccatcagtgatagggtatcagaagctagcgaaagatcgtctgctagagaagcaagcttgatcttctactaagacgctgttgaactgcacgcaatgaggctgtgcttaaaagaaaacagggtcattgatgatgccactggagctgaaaagacgaattatgaagaaatgcgccacaatgcctacgcatgtacagaacacactggctcaaaaggttgacagctttaacagcccatgaaactgcatgaagtatgagaaagatgaatcacgaagaatcgccatcttgccctgctatccatatgtgatgcgcactgattctcttacacaggccagaattgatatgagtgagcttgatgaggatcagacggtgtgcttcaacctcatgaaatgaggcctacattcgtgtcttattctaacctgcacactacggatatgctgcagcttgtc

SEQ ID NO: 25118 - DNA, 406 bp, Gossypium hirsutum
  unsure (1)..(406): unsure at all n locations
  Clone ID: LIB3584-014-P1-K1-A7
gtcaccaaacttttctgggtcattgacactcgggcctaaaggtcagcctattatgatcaaatacacccaagtgttgaagaaccctagaagaccctcactctacttcgtgaatcagattggaattagggttggaaggagggctgtcgatatcccaccaaaggcataggctttcaaccctttcactggtgctgagaccatctntgattctggtacttgtttcacccggctagtaaaacaggctacgtagccgtccgaacgcgtccaatgcgagtagggtgccaatgtacatccttggaggttgacaatgtacacgtacccatgtgcgccaccatactntatgtcactgcatgacgtacactgcacangaaacctactatcacacacagaggcacatacatgcttgcat

SEQ ID NO: 25119 - DNA, 299 bp, Gossypium hirsutum
  Clone ID: LIB3584-014-P1-K1-A8
ccacgcgtgcggaacagatcaagtatcttcttgttcttgatgatgtgcagaatgatgaaaaatgggacgaactcgaagaccgtctggaggaaatcaatgaatatgctacgaatggagtcattgcgacaacacgcaaagaagctgtagcatcaccagtgcaagtactttcaaatcagacacatcaaccaggaagactagtagatgaagactgctggtccatagattaacaactagcattgacactttttccaatgtctcacagattagagcctattggaaacgaaattgcgaagcagcgt

SEQ ID NO: 25120 - DNA, 335 bp, Gossypium hirsutum
  Clone ID: LIB3584-014-P1-K1-A9
acgcgtccgaacacgcgtccgtcaaaacccgatctagtaaaaggacatctctcagcggtgtctctcgcatctgacctggtagcagacctgcaccttctttcgaagtaaacagcagcacggggtacagcctctgcttttgaagccaaatgcaaatacaccaattgcttcatgaggatcctagctgtggaatggactcgtcatccaaaggtgaatcacatggctgcactggtagatcacagttatacgaaatctgtgctatcatttgctgcgaaccaaatttgattgaatgttacaaagaggaatgaccaagacatttgagatcattcacttacagg

SEQ ID NO: 25121 - DNA, 235 bp, Gossypium hirsutum
  Clone ID: LIB3584-014-P1-K1-B3
cgcacgcgttcgagatgaacgagagacggatacctggcatgtcaactgtgctccaacgcctgcgttccattcaagctctaatcttggatcacaagccttactctaatgtgccaggctgggaacagtctagtgacacaccaaaaggtgaattaatgtgcatgcaatacaatgaagagacattcatcttgtcactaacgacaaatatctattcagtgaggaggcctccaacgcattt

SEQ ID NO: 25122 - DNA, 491 bp, Gossypium hirsutum
  Clone ID: LIB3584-014-P1-K1-B4
aaaacgtgttttagttctgtaatgaggtccatgcgtatgagtttcaactatctcagctagtgcacaaaaccatcctctgttttggtcaacgctttgtaaacataaagctgtgtattacactaggaactacagtgatgataactctcattttgtttgcttgattgactgacagttagctgacctttatgaaagggtactgaaaggtatattaggttccatactttggttgtttgattttatgaagttgttcatctacctttcctaattgaataagatcatctagttatttattatcatgaaaaatgtcattaatatcctgaaaggcagaataactttttactgctggctgctttccctttttggcctttgtgcatatgctttgtattttatcctcagcttcaagaagttaggggttcattttgctatcaatttgcagttgaacaagtaggttatatagaataaatctctgttacttggatgtgagtgtggat

SEQ ID NO: 25123 - DNA, 382 bp, Gossypium hirsutum
  Clone ID: LIB3584-014-P1-K1-B5
ctctcgtaccttagttctgctctattaaaggcgcgttatgatcttatctctcttagctccgtgcacactacatacacgagagatacatatatatatacgtaacactaactatgactgttagagtggcaactaaagagagccataactggtcattttgtttgcttgatagactgacagttagctgacctttatgaaagggtactgaaaggtatattaggttccatactttgggtgtttgattatatgaagttggtcatctaaccttgctaatggaataaaatcatctagttatttattatcatgaaaaatgacattaatattctgaaaggcagaataactttttactgctggctgtttttcttttttgagatttgggcatatg

SEQ ID NO: 25124 - DNA, 325 bp, Gossypium hirsutum
  Clone ID: LIB3584-014-P1-K1-C2
gctctagatcgcgagcggccgaccttacagtagcattcgatgtagacacccgagcgccggaggatatggagaccaaagcgcctaaaataatatggaataactcggaagatcctgtaagtcaaacagtcaaacaagttcatattatatttgatcttttcttagacatgcagtgctcactgagtagggctgacggtcttgcgaaaacaaagacattcatacataagagcgctccagatctgcttggcatacggctacaacgtaaggggagacatgtacatctagctctgttgaccaagaggtttggaacagagactatgctggatat

SEQ ID NO: 25125 - DNA, 448 bp, Gossypium hirsutum
  unsure (1)..(448): unsure at all n locations
  Clone ID: LIB3584-014-P1-K1-C4
catcattcctgctggcaagaacaactgtaactcgaatcccctgagccaagtcccgattatttcttatactgctgggcaatgaacacctaacaacctcctgtgcagccactattgcttcagtcattaccacaaacccttcatcttcttcatccgaattcttcaaaccaaattggcacatgaacctattcggatcagattctttatgcggtcgaagattcaaccctntagcgaaaacaacggcagttttcccatcgaatgccgcttcataaaccaatctatcccacgaatgaaccgtccgattactcctcaaagacaaactataatcaaccccatgtcctcgccacatcaaacccgcagcagccgagtaattccatggtngaagagggcacctaacaaaccgatcgaatcatcgaatcatcacagacaaacccgtgacgacaacatctat

SEQ ID NO: 25126 - DNA, 365 bp, Gossypium hirsutum
  Clone ID: LIB3584-014-P1-K1-C8
ctgtatgctggcaaaccttacagttgcatccgaaaattacatcccattgccggaggatatggaaaccaaaatgctgaaaataatatggaataacttggaagatcctctaagtcaaacagtcaaacaagttcatcttatatttgatcttttcttagacattcagtcctctctttgtagggcagagggtagtgagaaaataaagacattcatacaaaagattgcttcagatctgcttcgtttagggctacgttgtaaggggagatatgtttctttagctctgttgaccaagaagtttggagcaaagactatgctggatataagtcctgacctgctatttgaaatagtacatgcatacctgttggaaa

SEQ ID NO: 25127 - DNA, 349 bp, Gossypium hirsutum
  unsure (1)..(349): unsure at all n locations
  Clone ID: LIB3584-014-P1-K1-D10
aatcgatgccaatgcaaaggcaatagaggatatcatctgggattggggttgtgtncatcagggtggggcttatttcgagggctgtatgcaataaagctggagcgacttatttgcatggcttgcttaattgccagaactgttgcgccttataaacgaattctgcttactgtattgaggggtaccgaggcaaggagaatcgcgttagtgccagcattaattacgagctctcaaaaatgggcaaggttcgatttaaagtttgtgagctgactgagaacctgaaaggttaggtttagcttaaaatcaatgctagtgtgtaggggggtgcaccactaatatactaaaaatgctg

SEQ ID NO: 25128 - DNA, 368 bp, Gossypium hirsutum
  Clone ID: LIB3584-014-P1-K1-D11
gccacgcgcgcgggagtcgctgtctgcatctctctgaacaaaaaagtgaaccaaaaagcgtttagagagagaccacgagagagaacaaggagctcaaccacgatcacaagctcggtgacgagctattctctgacacagaaatctacaaggaaatgctgaatgaaatgctgggaaaaggtgatggacagggagctgtgcatggagacatcgatgccgacactggagccaatcgtgcagacgaaggtgcaggtgaggatgaacgagctgatgaccgagctgacaatgttgacaacatcagggacactgagcagcctcatgagcaaacgaagcacgacgagaagcacatcgacaagttcatcaagaacttg

SEQ ID NO: 25129 - DNA, 453 bp, Gossypium hirsutum
  Clone ID: LIB3584-014-P1-K1-E12
ctgcaatactgaagccttcggagttggcatctatcacctgcttggagctggctgaagtgtgtagggaggtcggtcttcctcctggtgtcctgaacattctgactgggctgggccctgaagctggcgctcctttggcatctcatccagatgttgacaagattgcctttactggaagcagtgcaacagggaccaagataatggcagcagctgctcaaatggtgaagcctgtttctttagagcttggtgggaaaagcccaattattgtgtttgaggatgttgaccttgacaaagctgctgaatggactgcatttggttgcttctggacaaatggacagatttgcagtgcaacatcccgtcttattgtacacgaaaacattgtgagagaatttctggacaggcttgtgaaatggactaaaaacattaaagattctgatccctttgaaagaaagatgc

SEQ ID NO: 25130 - DNA, 396 bp, Gossypium hirsutum
  Clone ID: LIB3584-014-P1-K1-E8
cccacgcgtccgaaagaagcatttccagtcttccgtgcacccagttcaggtcaggtacgtcctgatcagttttcattttacgataaccattttagaccagatactcatagattctagcacagccattaaggttcttgtaacttatttactttgcatcttaatcacatgaagatgctggccgtatcatatcttttgaaggccgtttcagtatcagtatctctttctctttctcttctctttagtagtcaagggagatggagtttaccaagagatgcaactgtattcatatatgtattttcgcattaataccgttgttgacataaatacttttgtatcaataaacaaacttataatattgctgtagtattgtagtcttggtgttgagcacctttagtg

SEQ ID NO: 25131 - DNA, 563 bp, Gossypium hirsutum
  unsure (1)..(563): unsure at all n locations
  Clone ID: LIB3584-014-P1-K1-F11
cccacgcgtccgcccacgcgtccgggaggtagcaagcttgaggcaacaactaaatgacttgcaagaataccacaggcagctgatgggggaagaactatctggtttaagcatcaaagatctacggaatctagaaaaccaacttgaaatgagcttgaaaagtgttcgcatgagaaagggacaccacattcataaagagaatctagaactacagaagaagctagaccttatttgccaagaaaatactgaacttcaaaggaaggttgatggaaatggaacagtagaagcaaatgaaggcagcaaaagctcatcccacagttatggtttcaacaatggatatgatgagttgcaggcacctgttgtcgatctccggttaagcctgcctcaacaacttcccgacgctgatacatcgtatagaaacctaagactgttttgaaaaccagtccctctacaatttggaaagcgtattttcaatcttgaggtcaaatcttttgtgaactccgtcagataatttaaatatgcttntaaaatatatatatatatatgtgatagatgtaacatataca

SEQ ID NO: 25132 - DNA, 417 bp, Gossypium hirsutum
  Clone ID: LIB3584-014-P1-K1-F6
tgggaaaaagatggagagaccataaaagtactttaaagaaaggttattataagacaaaaacaaccctcaaagagaaattgcaaaatgtcccgccgggtatgctgaggtaccaatggaaagaagcggttagattttggcaatcgaagaaaggcaaggatcgtgaacgagttggaaaaagcagcaggcagaaacaaaaattcactcacacagccgggttgaaaagttttacatgtgtagctgaggcggaggaactgtcatccggtcaaaaagttagacgccttcaactttttgaaattacacatatgaagaaagatggatctcctatgactcctaaagctggtgaaattatcgaaaaactaaaggataaaaaggcataatacgaagcgatcgcttctagtgagagttctggtcatcttg

SEQ ID NO: 25133 - DNA, 468 bp, Gossypium hirsutum
  Clone ID: LIB3584-014-P1-K1-F7
gaaaagggttatctcccaaaacaagaatcacaagaggagaaaccagttattgagcttccacctcttaaagtcaaagatataccagtcttcaaaacacaagatcaagagggtcttcatcaaacaattgcagctttagtggaacaaaccaagtcttgtacaggcgtgatttggaactcatttgaagagcttgaacacgggtcgctgaccgatttccggtacaattttcgggtcccgatcttcccaataggtccactgcacaagtattttccagtcccttcaactagcttactatctcaagatcaaagcgccatctcatggctaaacaaacaagcacccaaatctgtcatctatgtaagctttggcagtgtggcaagcattgaaaagtcggaatttgtagaaatagcatggggtttagctaacagtgagcagcctttcttgtgggtggtgagaccaggttcagtgattggc

SEQ ID NO: 25134 - DNA, 414 bp, Gossypium hirsutum
  unsure (1)..(414): unsure at all n locations
  Clone ID: LIB3584-014-P1-K1-G10
cccacgcgtccgatgaccctgatgccttttcaatggatgggttccatggctcgttggtcgagtatatacttagaggaaccgaaaagcttcattccaaggttggcagatacaagagcccagatgagcaccctttcttcccagatgaattaccagaccccttgttgccacctttgcaatatccacaggtactacatcccattgctgattcaataaatataaatccgaaagtgtggcaaatgtacttcagaaatcttattcccagattagtaaaagaaggagatgatggcaattgtggatctactgccatttgtgacaccatgtgtttgcaggctctttcgaagagaatacactatgggaaattcgtggcagaatgtaaataccaggcatctncagatgcttataaagctgcaatta

SEQ ID NO: 25135 - DNA, 316 bp, Gossypium hirsutum
  Clone ID: LIB3584-014-P1-K1-G5
cacgggctcaaccgctgccgcaacgattgcacttgagatagccctagaaagcaaccttaaacccaagacgatagcgctggcaggggaacctgcttgcataacatgcgacgatgcttgcgaagacacagccgtggacctagctcatgaggctgcgcactttaatcaggggcaaagtcgctgtgcctggtcttgcacttgtgctcacgcacgtgttcacgatcgagtcatcgaggaagccatagcgcgtgcataggcacgtgcatttgagcatgctgtcagggatgctgtcaagcaaggtgctcagataggcactgag

SEQ ID NO: 25136 - DNA, 412 bp, Gossypium hirsutum
  unsure (1)..(412): unsure at all n locations
  Clone ID: LIB3584-014-P1-K1-G6
tgctgcctttgcggcaactggggctggttttattgcaagggacatgacattcgagaactatgccggacccgccaagcaccaagcagtggctcttcgagtcggagctgaccacgccgtcgtatacaggtgcaacatcatcggttaccaagacactttatacgtccactccaaccgtcaattctaccgcgaatgcgacgtttacggaacagttgatttcattttcggcaacgccgccgtagtactccaaaactgtagcctttacgcccggaaacccatgtcccaacaaaaaaacaccatcacagcccaaaaccgaaaagacccgaaccaaaacaccggtatttcaatccatgcatgtcgaatcctacccacaccggaactcgctgccgncaaaacaagctttccacatacctag

SEQ ID NO: 25137 - DNA, 469 bp, Gossypium hirsutum
  Clone ID: LIB3584-014-P1-K1-H2
cccacgcgtccgggtcaatggaaacttgttgacgaaggatgtagcaactcaaatttatacattactaaaacaaccatatctcaattaccttgttcaggatgacttcaaacctttacttcaagaactattggcaactcatcctgggttggagttcttacagagtacacctgagtttcaggaaagatatgctgaaactgttatatacagaatatattactacataaatagatctgggactggtcacctcactcttagagaattgaaacgtgggaacttgattgatgccatgctacattgtgatgaggaagaggacattaataaagttttgaggtacttttcgtatgagcatttttatgtaatatactgcaagttttgggagctggatacagatcatgatttcttgattgacaaggagaaccttatcagatatggtaaccatgcgcttacctaccgaattgtcgatagaata

SEQ ID NO: 25138 - DNA, 344 bp, Gossypium hirsutum
  Clone ID: LIB3584-014-P1-K1-H4
aggaactgtagtcagaagatctcctagaggatctcaatcatctggattgattcgtgatccaagttctctttctagcagtgaacatgcttcttttgaagatgcttctaccagcggaactattgttttccgtggccaacatgatgactcggattctcctccaactccaagatctaggctaggtattcaagggagaccttcagctgcatcggttgaagatagtacatcaaatcttgcagaggcgaaggctgcaatgcaagctgggctgaggaaaggaaatgcaagggacaggtctgcaccgagcaagaacaatggtaccgggaatgaaaaccagagaagagatcaat

SEQ ID NO: 25139 - DNA, 208 bp, Gossypium hirsutum
  unsure (1)..(208): unsure at all n locations
  Clone ID: LIB3584-014-P1-K1-H7
cccggggtcgaccccacgccgtnnccggttctagaaatcgcgaggcgnngccgctcnntagaggatnnccaagcnnttacgtaccgcccgtgcatgcgnnnacgtcggtgagctcgtgtctattagtgggtcacnnctannaattcaaaattcaactgngcnncgtcngtntttaacaaaccgnntcgtgacntnngggaaaaccnnn

SEQ ID NO: 25140 - DNA, 220 bp, Gossypium hirsutum
  Clone ID: LIB3584-014-P1-K1-H8
gactgatctcacggacggggagaccgacaacgccagaagcaggccggcgcatggacataagagcgggccagcgacaccaaaagcaaccgagaggactcccagggcagggacggctagactgccgcactgaggtgagacggggccagaaatgtccacgcgacggagaaccaaaccaacttggaccccacccaagaacccacttcatgcaggacccggagcc

SEQ ID NO: 25141 - DNA, 427 bp, Gossypium hirsutum
  Clone ID: LIB3584-014-P1-K1-H9
catctctaggttatttctctctgttggttttaagtagatagaaaatgagttgccacagcctagcagcccgtcagtgaagaagtcagaagagaagggtattgttattgttcatgaagtcaagtgcaagctttatgtcaagtcaactgatccggcagataaagattcatggaaagataaaggcacagggcagctttcaattaaacgcaaagagggtattggcaagggttcaaaagattccaagccaacaattgttgttcgaaatgatgtgggaaaggtcttactaaatgcttcgctttatccagggatcaagatgattgcacaaaagaattccgttgttgcaatatttcatacatcggtaatacatatggaagtcaaatacctggatctttttgacattccattttctaatttgggacaatggtgggaa

SEQ ID NO: 25142 - DNA, 270 bp, Gossypium hirsutum
  Clone ID: LIB3584-015-P1-K1-A10
cgcagtccgtccggatcccggtcgacccagcgtcgaccgtcgttagatgaggcggcgtcagagaacagcaacgtaccagcgtgcaggataattctatagagcaccaaataaataatgaccgcggtgaaacgacggacggaaaacaagctaccaactaaatagctgcacacatacatcttcgcagctggcgaatacaaaggcaggcccgatcgactccaacaagccagcagaaggaaatggacgcgccggaacggccataaggcggcggtg

SEQ ID NO: 25143 - DNA, 534 bp, Gossypium hirsutum
  Clone ID: LIB3584-015-P1-K1-B1
cccacgcgtccgaaattgatgaggatcgatggcaaataaggccatcccattcaagccttataggaattgtgaaagacacttacatgcccaaactttgccaaaataccgtcaaaaacccaaaagcacctttcctagcttcttaaccaccatacgcagctcttagcatcactgtgtgaactacccttctcctccacaacctagacctatatcaacaaaagtcatgatgacaattgttcggcagcttttaataaaaaagctaaaaatgcaagaacactgagctgaagaatatgcagatcctaccgtttatatgttcttatatagctacaggattttgttccttttttggtagtgtttgttgcaaactgttcacactaataatagaccataattgtttttttaaatatatatacatgtgttagctatatagtttctcaggtgaactggttttctagacctctttgttgactaactatcatttatttattgtaaaagttctgtttaacatttatttataaaaaagaaaacagacatttt

SEQ ID NO: 25144 - DNA, 355 bp, Gossypium hirsutum
  unsure (1)..(355): unsure at all n locations
  Clone ID: LIB3584-015-P1-K1-B11
aaaaaaaaaaaaaaaaaaaaaaaaaaaaaaaaaaaaaaaaaaaaaaaaaaaaaaaaaaaaaaaaaaaaagaaaaaaaaaaaaaaaaaaaaaaaaaaaaaaaaaaaaaaaggggggggcagataaggggaaccaagntaacgggcgcgggcatgcaaagaaaaaactttaaaaaagggcaaccgaaatcaaattaacgggccggggtttaaaaaaacctagacgggaaaaacctgggggtaaccaaactaaatcgcctagaagcaaatcccccttaaacaaactggggaaaaaacaaaaaggcccccacaaagggcccttaaaaaaaggggcaaagccagaagggcaaatggaacc

SEQ ID NO: 25145 - DNA, 543 bp, Gossypium hirsutum
  Clone ID: LIB3584-015-P1-K1-C3
ttttattttccccctaaaatctaagttcttttatcgagatcaaagcaggtaaaaaaccgtttattggcaatgattttttcaaagttttaacccttttcatttaactcgtttttattcagggcttgtttgatatatctgcttttgttattattatttattttaatttttctgggtttatgttatttttctgaatttaggattcattttaacgctttgggtttttctttttgtgtatgtatatgattattcttatgcctttgctttttttccctttttctttagatttttgggttaaataatttttgatattttctatcaagttcatgtatatatctgtttatgttttaagttttctgggtttatttcattgtttttgaatttagtattgaattttattggtttgggtcttcttttctttttttttttgtagatgttatatttgatgattctttgtgcctttcctttttgcttttagatttttgggttgactaatttttttattttttctatcaagttgatgttttttggcttgaatttattcgg

SEQ ID NO: 25146 - DNA, 357 bp, Gossypium hirsutum
  unsure (1)..(357): unsure at all n locations
  Clone ID: LIB3584-015-P1-K1-C5
ggcgcccacgcgnccgcnggngggaggnnnngnnnncccccggnccaaacacaanngnnaggaccngcnggcacngggccancccannacacaaggcccgangnngnnaaccnnccggacagnagnnaaanagnagngccgagaggggaaggaagnggggaaggcacggncnagannnaaangcagggccnggaggcccagacanngaaggaagagangagacagcaccncnngcancncggcancngncngngccagnncncagncccnggcagaggaacaagcaagaangnancaggngccaggnggggnnnngaaaaggaaggaaccngagggaggangggangganacaagca

SEQ ID NO: 25147 - DNA, 354 bp, Gossypium hirsutum
  Clone ID: LIB3584-015-P1-K1-D11
cccacgcgtccgcccacgcgtccggcttgagactttgaaggttagggtgagagtctacaactctttatattacctacaccttagattcattcatttcattctttgattttgttactgtattgtatatttcaatcattgtataaatgcatcagcactaggaatttcacaaataggctcttaaacaagagcatatctagatataattgagcatatctttacataatcgttgtatcattgtataagtattagcataaagtttatctagatatgctcttctgctagcagttttttctatctcagagaaagctgtcgatgtaaagatatttaatcaatgcacgcttttttgaagttgct

SEQ ID NO: 25148 - DNA, 544 bp, Gossypium hirsutum
  Clone ID: LIB3584-015-P1-K1-E12
gcaggatttgctgctagctattgcaaattgtaccctcccttgaagacatatgaatatggttttcgggtattcttgttgacattttgtattgtactggtgtctgggaacaactcaagaaccttcttcagaactgctttttaccggttgttgcttatcttcattggtgctggcctgtgtttgattataaatatatgtatataccccatatggtccggagaggatttgcataaattggtggttaaaaatttcaagaatgtggcttcttccttggaaggctgtgttaatggatatctgcaatgtgttgaatatgagaggatcccttccaaaattctcacttaccaagcatctgatgatcctttgtatagtgcttacagatcagttgtgcagtcttcaagccaagaggatactctgctagattttgccttatgggagcctccacacggtccttatagatcattcaactacccatggagaaactatgtcaaagtaagtggtgcattgagacattgtgcattcatggtcatggcaatgcatggatgtatac

SEQ ID NO: 25149 - DNA, 549 bp, Gossypium hirsutum
  Clone ID: LIB3584-015-P1-K1-E4
caaaaaaggatctggaaacctgtggtgttcttggtgcttttcttgaaaagggaactttctatgtaaccactctgataatacctaaacaggaatcaacttcaaattcttgtcaagctattaatgaggaggaaatttttgccatacaaaatgaacggtccctttttccagtgggatggatacatacacacccttctcagagttgtttcatgtcatcaatagatctccatactcaatactcgtatcaggtaatggtgcctgaggcttttgccatcgttgtggctcctaccgataattcaaggagttatggaatattccgagtatctgaacccaatggaatgagtctcctgaaagaatgccaagagaaaggatctcaatttcattctcacgaagaaacagtagatgggagccccatatatgaacgctgcactcatgtctacaaaaattcaaatctaaggtttgaaatctttgacctgcgctgagatacaaaaatgtacataataaaatgggtgcaacctgcatgccacactacaggatctagcttattagaaa

SEQ ID NO: 25150 - DNA, 521 bp, Gossypium hirsutum
  Clone ID: LIB3584-015-P1-K1-E9
cttttccgatctcaaccaccatacacacacacacaccattcccttctccgttgctttttggccacatgcccgtctcctctacgactttccaccatcagtcataccccagatctaccttcaatcaccactgttcatgccgaccaccgcacttcaatgccgtttgtccctatcgccgcttatgccaccgtggtaaacaacccaagtttgtgtcccctccattcctatttttgtattttagttcattaatattatttattatttattattagtagtttattattattttgactattatgtatttaatttctttcattctgttttgctatagtaggttttgtttttaattgtagctaatagttttagtattattctttagttagttttgtttaatgtggtggttgtgattggcttttgtgtaggtgtatattctaacaggtgtcgctatttcaccggttctggatattgtacattcgaatactgtcaatactgaatttgttttttttataggataggtgggaatg

SEQ ID NO: 25151 - DNA, 549 bp, Gossypium hirsutum
  Clone ID: LIB3584-015-P1-K1-F8
cccacgcgtccgggaggaaatgagcgctaagaaagtgttagtagtcggcggcaccggctgtttggggcaacatctcttgcaaggcttttcagagatccaagcaactaccccgtttgcgttggcattcacctacaactcctttcctcctcagcctctgctccttgcctttcccacctctttcgctttccacgttgatttgaaaactggactgggtttcgattccatttctcaacaatttggccagcctgatgtggttgttaactgcgctgccctgtcggtgcctcgtgcttgcgagaatgaccctgatgccgctatatctatcaatgtgcctagttctcttgtaaattggttgtcaagctttgcccaaagtgacaatactcttgttattcatatctcgacagatcaagtgtacaaaggagtgaaatctttttacaaggaggaagatgaagctcttcccgttaatgtttatggaaaatcgaaagtagcagctgagcagttcatctctgagaaatggtcaaattttgctattctaagaaagagtattatatt

SEQ ID NO: 25152 - DNA, 535 bp, Gossypium hirsutum
  Clone ID: LIB3584-015-P1-K1-F9
gaatatgtggagcagtgagggaaggcagataaaaaagcaaaagttaagtgatcacatcaatcagattacaatgttaaatgttaggaggtcatatattgaattgtgtcatccatgattttatactaggttaacccaaccgctttatcacaccaaacttgaaagaatatgggttaaggtcgtctaactggtgtttttgagtatccttcatcgccatgcttcgaaacgttctgcccttgaatctatgcggctcaggttgcgtattcctttggttttgtcaatagcaagtatggattgatttttttccccggacttgaattacttgactcaccaatatcattatttctagccggggttggagtatcttcagcggagatctgtttgtagaccgagggagatggaaggcctctgatctccatcatcatcaaaaggctccagataggatgcctctgtaggctctaccattgaatactctctttctcgtagggtctttgagataagtgtcttgagaaagttcatcacttggacggaatacacc

SEQ ID NO: 25153 - DNA, 541 bp, Gossypium hirsutum
  Clone ID: LIB3584-015-P1-K1-G10
cccacgcgtccggtcaaccacgccaaatttgataccgccgaatagaacttcagttcgcgcgccagtgtctatacctgcgattgatcctcctaatcgaagtagagacaaaaggtttacagctgatgtaggacagctcaaagtaaacgacattggagatcagcgtgaaacttctgcacttcgtgatgaacttgatatgctacaagaagagaatgagaatctacttgacaagcttcgttctgctgaagaaagacgtgaagaagccgaatcaagagctagggagctagagaagcaggttgcttccttaggagaaggtgtatctctggaagctaaattattaagtaggaaggaagcagctttgcgtcaaagagaggctgctcttaaggctgcaaaacagacaaaagatggtagagaggaggagattgcagcctttcggtcagaacttgagaatttgaaggatggggctgctaaagctgtcgaacagctccatgaagcagaatctgaaacaaaagcccttcgctcaatgacacaaagaatgattttg

SEQ ID NO: 25154 - DNA, 539 bp, Gossypium hirsutum
  Clone ID: LIB3584-015-P1-K1-H9
cccacgcgtccgcagaatttagaattcagaattgagagaggcaaaaaccattgaaggggcctcgcccaacgactgctgctctatttgccatggatactttaacgttccttgccaagccaattgttctcattggttctgcggtaactgtattatgcttgtttggcaacatggatccccatttcaaacttgtaaatgccctctgtgtcggcgtcagattactttgttagttcctggtgaggcctcattaagggagcgtcataatccagcagttgctgagattctggaaaaggttgaaaaatacaaccgttactttggtggtcaatccaatggtctcattcagagactgcaagaccttccttttctgcttcgcagattgttacgagaaataacagatcctcaaagaactcttcctcttgttatcagagctcgtatatatcttgcaatgttcttaagtgccatctacgtattcagccccatagacattattcctgaagctatcttgggggtagtcggccttttggatgatcttcttatagcac

SEQ ID NO: 25155 - DNA, 575 bp, Gossypium hirsutum
  Clone ID: LIB3583-014-P1-K1-A11
cattgctttcagctttcttaattggtcagcgtatgaacagggaaacagatcgcgaacttaaagcatactgccttgcctttgatgatgaacttggtcctgctccagttgctgatgttagctctttgacccattacggtgaaccttatgatgggaacacacgtttctttagaagcacgttgtttgttgctgcggttagatcctgttatggtgaatcttccttgcttcatggtgtggagtggatgccaccaaaggggggtgtaactgaagaacaaatgctgaactttatgggagctaacacaaacttatccttgcatcaggcaaaagaacttattgaggatgaggaggttggttttgcatacataagtcaacgtgaagctcgcccatctctatattcactgattggattgagggagcacataaagaaacgcccaccactggcaacaactgaaaaggtccagcaatttattagggctaaagggaaggaatcaattgttgccggattttatcatgaaggttacgaggagcctttgttaatgcttatgaaacgaagaggtgtacattctggtttggtagtg

SEQ ID NO: 25156 - DNA, 599 bp, Gossypium hirsutum
  Clone ID: LIB3583-014-P1-K1-A12
cccaaaattcccagtgccgacagcccaacacactcacacggtcacactcaccaccttccggcgtccaccaggccgccaccatcgtacttcattcgtcctccaccgctccaccatcatcgtctttcacgccttgaccacaaagaagtaggagtagaataaatcatcaagaagaaagaacaagatgaagttggatgtcgatgttttgagatatctctccaaagatgattttagggttctaactgctgtcgagatgggcatgagaaatcatgaaatcgtgccctcagacctcatcggtcgtattgcttccctcaagcatggaggcacttataaggtcttgaagaacttactcaagcataagctagtgcaccatgattcttccaaatatgatggctttcgtctcacgtaccttggctatgatttccttgccattaaaaccatggtcaaccgcggagtctttactgctgttggtcgtcaaattggggttggcaaagagtccgatatctttgaggtttccaatgaagatggtactgtgatggcaatgaagttgcataggctcggtagaacgtcctttagggctgtcaaatctaagcgtgattact

SEQ ID NO: 25157 - DNA, 321 bp, Gossypium hirsutum
  Clone ID: LIB3583-014-P1-K1-A6
cccacgcgtccgcttcaagattagtcgcagcatctctctcttcggtctctatctcatgcaggcaagaagtattatggagagatatttgcaggtgttgttgggtgtctagtcaatgtgaattttacctgtgaattttaccttcatttgaactttgttaaaacttgaaatgcttcatctttagcattcatcttcttctttcaacagattgtcatctttagcatccatttcttcatcttcatttcttgaagcatcaagaggagaaatgggctgaagaaagagcatcagaagtttcttggagctttaaaggttggatgggtaagt

SEQ ID NO: 25158 - DNA, 356 bp, Gossypium hirsutum
  Clone ID: LIB3583-014-P1-K1-B1
acatgtgtgactgaggagcggagaaaccgtagttgctgtgatcggacaatcttgcagcaaggccacttgcaccgctggcagaacatcatggaggaggagtgtggcgacggcagcaacaacattatcgccgggggcatcgtctcattatgtcagccgctagctaagatggatgctcactccaggtgtcagggtctgcgacatgcatcgatgcaacacacgcatcgcatgcatgaacagatcgagtgcggaccgatccgatgcgagaggccatgcgaaaggctaccatagaatgtactgtccgtatgtgaaatctagcctgggaggcgcgacacgccatatcgcagtttgatcaaaac

SEQ ID NO: 25159 - DNA, 465 bp, Gossypium hirsutum
  Clone ID: LIB3583-014-P1-K1-B2
aagacatactcttcattgatggccacggcgcccaatgcgatcagcacaatgtctgcccacacggtggtggctatgctttttagttcaaaggaacaaggttccctgtgttctactgtgcctgcatcaatacaggaaagctgtggttggcgccaacaagtgcaacactgatttcgagataatcctgcagtgatggcttctacgcaacacttcacttggagcatatatttcatctacagtgaagactatatcagtggtacaatggcattgacgtgtgcaaagtgcattctgcctcatatgtccatatatacacacactagcgcacacagttgagaggacgggactttataaatttgctgcgctgaaaggaaatcagaggtatgtatacatacatcaatatatataggacatcaactgggaacatattgaagtaataatggaatgactaactctcagtttaaaaaacac

SEQ ID NO: 25160 - DNA, 598 bp, Gossypium hirsutum
  unsure (1)..(598): unsure at all n locations
  Clone ID: LIB3583-014-P1-K1-C12
ccgaaaccctagatgcttgcccccattcaactgtcggtcgacccttaatccaccactacaatcaacggataatagcctgtggtggagcctcctttttactcgacttcaaggtttgatgatttcagccacgaagtcctctctccgccttcgattttgacgaaagggatagagatctccaaagcacattcaagaaggtaaagtttctgttttctttctctttgatttttctttgttcaaaatgcgcaatgtgtaaatctgaggaaacaagaaaatagggggaaacgaaaaaagaaaaaaaggaacccagaatctgaatctcaccttttatttattttgcgttttgtatttcaaatgtattgattgtgtgcgtatatcgccactgtttttcatgtgtctttctcccctcccccaaaaaagagagcccttttacaattgaagcaaaggctttatagtcgaaaagaaaagagagaaaaccaaaaaaagaaaaaatgaaatacaattttcattcatctccctttgctgttttgttgtcgctttttgctgctggtgcttggtttttgttntgcaggtactagtgcgctggcgctcgggtatggag

SEQ ID NO: 25161 - DNA, 213 bp, Gossypium hirsutum
  Clone ID: LIB3583-014-P1-K1-C2
caggcgacgcggaaaggagagtcgaggacgagagtagcagataagtgctgaaagagagatatggcacatactgaacagcacgagtcctggtactacttacagatagggctgatcggctatctatatgtatagaatattaatattgtatatagataaacaagaatcgagaatagttaggagtctttcggctctatcggcgtcgagttcgctacc

SEQ ID NO: 25162 - DNA, 516 bp, Gossypium hirsutum
  Clone ID: LIB3583-014-P1-K1-D12
aggagacaagccttgattttaacttctatttacttgcctgtaagggtttcttttaaatttctctgcaactgacaataacatctccaggtacttgttcctgccttctgccttggagtctaaaatatcaggtaagaaagcaacaaagcatatggcagccgaaccacatttgtcctccatgacatcctacttgcaaagattgtacttctcagcaaacaactccatggcttggaaaacaaaaatgaatttattgtcgaaacaaaggtgcgagacttactgggccaatcacctccgtcacttcagcaggtccaacatttgtttcgagctgctccagagcaaatgattcaattgaagatgcagctctagcaccctcgtagagaattggaccatctttgtctgcaccaaatgctaagatggtaggaaatccttgcaccttgtacctgctcatgagagactgctaacgacaccccattaaaacagcatcaaaacatataaaaatccagaagcacttatatagag

SEQ ID NO: 25163 - DNA, 573 bp, Gossypium hirsutum
  Clone ID: LIB3583-014-P1-K1-E12
gaaaatcagcttattcaatggcttatgagagtgatgtaaatacttaaacatgagccgtcctcaggaaccacatcgcccattcttccattttggaaatcctttaccaaagggttctcagttgtctccaaatctgctttctttaatgaacgcatttgaggtcaacttgtcaaagaggctgcaaaaacttgtgccaaaagacaaggatgacatcctaagcttgtcatggatgaaactagcgacggagtcactgagattcaccgtgacataaacaacctgatagctgatctggaaatccctttgactgattgggatgacaagtggttagatgtctacctggacataagtgtgaagttgcttgatattagtcttgcttttaccttcgagattagaaggctcaaccaaagccatctcttacttcagcgtgtcttgcataagttggaatctcactccccagagcggttcatgcaggcctgttcctcgcttgatagctggagacagcatataggcacaaaaaatcctagacttgaaacttgtcacccaatcctgcacagtcttgtggaatccttaaacttg

SEQ ID NO: 25164 - DNA, 604 bp, Gossypium hirsutum
  unsure (1)..(604): unsure at all n locations
  Clone ID: LIB3583-014-P1-K1-E5
cggacgcgtgggcactgcaagtgttccaagttgcaaagaagtggtgatttgctcactcccaagacaatgccattgcatcaaccttctcctttgttgagatctaattctttggtctcagctgacactggccctcatgagcatatgctctgcttctcttcactcaattctgaagttccttttatcaacatcaaagatggtgactttttggagataagtacacaaaatagtggtttttcttactatcaacctaaaccctcctcatatactagaaatgcaggttatggctctggaagcttaaatgcaagcatgcatgggggttttaatggtgtcagagggccattttctccatctcaatggattgagttagaacaccaggcattgatctacaaatacatcacttctaatgtggcagtgccttccaatttgctcaacccactcaagaagtcactttatccttatggcttcaccagctctcctgctggatatttgcctcccaattcattgngatggggctctttccatctggngtactctggcagcaatgaccctgagccggagaggtgtcgtcgaactgatggaaaagaaatgcngtgctctcgggatg

SEQ ID NO: 25165 - DNA, 618 bp, Gossypium hirsutum
  Clone ID: LIB3583-014-P1-K1-G10
ccgggatccgggtcgcggacgcgttcgcccacgcgtgcgaaaaaaactaaacgtttctccccccccaaagtcgtgccgctcagcaaagattgctcagaggcctttgaaccgtcgtccgactccgattgcgacggagccaacgaagatccggccaaacaggtaaaaccccttgctctctaaccttattttctcttttattatcttattgctaatgaataacagagccacgaaaaaagaacaaagaaatgcgaaaataaatgaaatcaccttccaaaactcaaagaaaactctgttttctcgattcttttctattgatattgtgtatattgatattctctctgtattgattcccttacaaacattttggccttttgttttataggccgagagaaaagaaaataaaaaaaatacaaaatccccatttttcgttgtctctgctgcttgtttgttgtgcaggttcgggtacggaggtgcgcgggcgcgcatgtacggaggctatgcgtgaagaggcaggcgcgtgtgggggagcgtacatgtgtgctggcgtcgacggcttgatggcttgctggagcggcggctgatgcgtgtgaaggctcatggggcaaaaggaaggttgga

SEQ ID NO: 25166 - DNA, 600 bp, Gossypium hirsutum
  unsure (1)..(600): unsure at all n locations
  Clone ID: LIB3583-014-P1-K1-G11
ctctattagaaagacaaaaaaatccccctttgcaaattagcagatccaaccaaagtctccatctttttcattttattggcaatgcttaagcttcgagattcattcttctttctacccattttgtgtttctgctttgttttcattgttgacggttcggttcatgagtacaatggtgagaaattcgtcggtaaaggcaatgcattcgtcgtccatggcggcagcgaaggcatttattcttcttttgctgacccctacaatgtaaccgccactattggtgactcttatatccgttttgagaaggttacattccgtagacccaaagaagctgctaactttagcagcaaggctatacaagcagttgctttcgaggtcgaagatagagactcgattgggggttcagcttatgggggtcaaagagctgtttgttgcacggcagatcttgcgaaactcggtgtttgtttggaaggagaagttatttatcgtccttccaccgagaatcctaactggccgaaagtgttcggcatctcctntaatggagatgatgaggttgcaacattgcgatcaaggtctataaagattactaaaactgggatgtataac

SEQ ID NO: 25167 - DNA, 581 bp, Gossypium hirsutum
  Clone ID: LIB3583-014-P1-K1-G12
ggcattgaattccagtcttcagttacaaatgcagaagacgcaggagtcaaatgctgagttaattcttgctgtacacaacttagaagaaatgctggatgcgaagaatatggaggcatccaatccacccaataacaaatcaggatcccatgtcagtgctgaagaattgagagtaatcatctcaggaaatcacacagatgacgatgatgatgacgagcagagggaattggaacaactcgttaaagaatatagagacaccaaggaaacctctgtacttgaacaaaagatcatggaccttcacagagagatggaggtctacaagagagataaagatgatcttgaggcacaaatggagcagctagcacttgactatgagatactgaagcaggaaaatcacaacatctcctacaaactagagcaaagccaactgcaagatcaactaaatatgcagtacgattgcccatcttcctttgctaacataaatgaactcgaggcccgaatagagtgcttggaaagcgaactcaacaagaagtcaaaagaatcctctggctccttaactaccataaacgaactagaaacccaca

SEQ ID NO: 25168 - DNA, 444 bp, Gossypium hirsutum
  unsure (1)..(444): unsure at all n locations
  Clone ID: LIB3583-014-P1-K1-H3
gaattcacaaagtcaagtggagtcaactctcaaggaaatactcgaagtggtcaagccgttgcatgaagactgggttactcggtttaagatcatcaatgaactgcgtgaagtcgttcaatctatcgaaaatttaagaggtgcaactgtggagccatttggatcctttgtgtctaatctcttttcacggtggggagacttggatatttctatagaggtatctttcggtcaatgtgtttcatcagctggaaagaaacggaaacagactttacttggagagttactacgagctntaagaaaacaaggtggatggttgaggttaaaattttttcctagtgcaagaattcccattttgaaaatcgtaagcaaatggaaaaacatctttggggatattcaaatggttattatcaaggccgaaattaagtcaaggtcttggtttggcttaat

SEQ ID NO: 25169 - DNA, 588 bp, Gossypium hirsutum
  Clone ID: LIB3583-014-P1-K1-H9
ctcaaacatttcttcttcttcttttaaaaaataaataaataaataaataatagaatttgcttccacagcctatcctacttctcctttctctttgcttcactctctgggtttttctttttccttccatatctcactcaaaattctatctcatcagatctcttgtcataatcagatcaggagggaaggatgctggaaccgtccgatgtgtagacttttgactttgttgtgatcggtagggactttagatggggcaatgttacggtaaagttagtcaaacgcaagtaaatgaaacgacgtcaaatgctaccacaacagtcacagaggtgattccagccgatcctggggggcaaacgccactgcaatccagtaacggcgctgttaattattttcaatcagttaagaatactccagctaggtcatccagccagagtccatggcccagcccttacccccacggggtgactgccagtccgcttccaccgggtgtatccccttctccggccagggcttcaaggggttccacgcctaggagattcttccggcgcccgttcccgccgccttcgccggccaaacacataaaagcgtcgc

SEQ ID NO: 25170 - DNA, 543 bp, Gossypium hirsutum
  Clone ID: LIB3583-016-P1-K1-A4
ctcgaaggcctcggaacgcaggtgagttccttcactttcttttttctgatgataaaataacaaaggactcgagtagataaaaaaaaaaaggaagagcagagagtttaaaaaaaacgaagggaaaatcaccttatttcgtctattgcctttttgttttgctattgcatatgttttctgtatattttcaaaaggggaacccctttacaatcagaatccgtaggctttatagccaaatgctaataaaaaatacaatgttttttttttctttctttctatttgttgttgggtctgttgtcgttttgtccatttctttgcaggtgcaggtgcgtggcgctcgggtacgggactgtgttggcgtacggaggctgtgcttgacggtacggaggccagggttggcgtggacggaggcgctggggggctcggactgctgcggcgcaagcagacagctaggtctctgtctaattttagtattttgggcctatcgggccttgtaagtgtgggttaggtttagttgttgggctggggttatgtaactggttgggg

SEQ ID NO: 25171 - DNA, 574 bp, Gossypium hirsutum
  Clone ID: LIB3583-016-P1-K1-C7
gaagatgatgagctttcttctttatttacaaaggaagaacggaatcaactgtacgatagtcttcaaaccggtgggaatctagctggggctcgccgtgaagctgtggagtgggtgttgaaagtcagtgctcactattccttctctgctctcactgctcttctaactgtcaactatctcgataggttcttgttcagcttccggttccaaagtgagaagccatggatgactcaactagctgctgttgcttgtctttctcttgcagccaaagtggaggaaacccaagtgcctctcctactggatttacaagtggaggagaccagatatgtgtttgaggccaaaactatccaaagaatggagattttggtgctctcttcccttcaatggaagatgaaccctgttaccccattttcattccttgattacattaccaggaggcttggattaaaggaccatctctgctgggaatttcttaggagatgccaccgcattctgctctctctcatttcagattctaggttcatgtgctaccttccttctgtaatggccactgctacaatgctgcatgttgtggata

SEQ ID NO: 25172 - DNA, 570 bp, Gossypium hirsutum
  Clone ID: LIB3583-016-P1-K1-C8
ctttaatatgggttcttcaattttgtcttagattatgcatttatttctttccctagatttattaattatgtttttatttcagttgattttttttttttaagaataggttttttttttattgattatgtttcctcttttatgtaataagattgatcttcatttaaagggacatgtgaaataataaaatccaaagcagaattttatcaagaaaaccctaaagagaactgtctctctctaataaatcctaaggtttcaatttccttttgaggagctgtttgaatttcctttcaacaagctgaactatcaatccgaaacatggtcatcacagtttatttcactatcagttaaatttgcaactcgaaactcctccccaattttagcatgtttctgtctcttatctgtcatggtcatgaggcatgatctgctcactgaataagtaaatcacattgttgtaacactatttccattacttcatcaacaatgggcatctggtactgggatatgtcagtgcggacctttcacttgaagctgatcagtctgatgtttcttgaacctccccttgcaattact

SEQ ID NO: 25173 - DNA, 428 bp, Gossypium hirsutum
  Clone ID: LIB3583-016-P1-K1-D10
cccacgcgtccggttcctcctccagacccattccggtcgacgccaccgccgtgtttgccactctgcggcgccggtcggaaaatctcgctaaatcatcaatgccgtaggttctgttcaaggcaacattttatgccatcccatgctttcctcttcttcaccgcggttcggacccatcccgctggacatcgttgccgtgtctgtcattttccgatgactaacgaagcccagtgcctcgtcagtgccgtaggtttcgattggtgcattttggtcgttcctcttcttcgccgtgggacgggcttactgctctcgacgttcccgccctcttttgacaatgggagaagaaatagtgagcggtcaagatgttcggggccaaaatagttgtaccatcaccaatgtgcatgcctttcagcactagaccatgacacaac

SEQ ID NO: 25174 - DNA, 573 bp, Gossypium hirsutum
  Clone ID: LIB3583-016-P1-K1-E12
aattggtgttaaagtaccaatgacttctggaacatatttgcgaagactttcattctcctctgaggttcttgctagtgataaatcattgcatgattcttctctatgtaatgaagtctttacaaaagatcaagtgctggacattgccagtgattgttcagtttcagatgttcatcttcatgtcccttcaagtttaacaggtgttttggagatggatgcagaggaacttggaaatggccataatgcaccaggtgcaaacctggagaactctagtctttcatcgggcattgagaccacaatggatgcaaacccagatgagaattctggtttgcttggtcctagtttcctctttcctgccggaaaattttcctctctgcgtggagatataatagctgtccatggttttgaccaagggttttctgacatgtgttcaagccgtgaagactatggtgatctttatcgatatgggttttgtgatagaacaaaaaattgttgcattcatgtttcagtggccgatcaaactgtgaagatttttggatctgttgaccaacatcatttccctactggatttgggtc

SEQ ID NO: 25175 - DNA, 738 bp, Gossypium hirsutum
  unsure (1)..(738): unsure at all n locations
  Clone ID: LIB3583-016-P1-K1-F6
cgtgccggtggtcaatggaagtcccagnncacccagtcattttcannaccaatgcagatnngaattctgggaatgacccatggtgagtggacgaacaanncgcaactgagtgcgacacncnntgaagttcnnctccaaccannctgccanntgatgtcnnatctatgtcangnnagatgccnnagtgagcccttttacatcggtgnnngcgtccaaagtgggnnnatttcccttttcactttgcaacccagacatgtnncggaaanntgggagtnnagacacangnncaacactnnntgattcgnnngccttcaacggcngnngatgtggcnnaagttcaaaataggatntnngcaactgggacncnntggtaatnnggagccgnnacaattcttagagaaattcccttagaatcacntnntgatcagatnntcagtggaatttcaagtcttcaactganntcttacagcnncgatttctttcaaanccttgggagnngtaagnnttgtggtaacccgagaccnnncataccaggaaagcatagnncatgcttnngttattttatcncnntccttttcttttggttgctttttccttaatggaagctcatnnntctcatgannattatggcncnnctcggaaaattgttacccagatttaaagtagcactttggggaacccacncnnctggttctcnncttttctttccccttctgattcaagaannattatgctcgg

SEQ ID NO: 25176 - DNA, 424 bp, Gossypium hirsutum
  Clone ID: LIB3583-016-P1-K1-F7
ggctaacataaagttcacctggttatcatcgggtaacaatggtggttgtttaactttaaacaataaacggtcggatgattcgcgtggttcaaatgtcactctctcatgctgtttaaggtactttataggttgatctaatctcaaagacattaatccagaatttcaagggtgagttcaaggacacttctttagcagaagctgagacaaagcagagattgctcgaaaatacccgaaagttcggacaattctatcaacaataatagaagataatgtttacaaatctaattattagatttgattttatgacctaaatcccaatttaactttctaacctagtttatgcaagtactttatgcaaaccagggttatcatttcttttgcacgtacctgtttttggacttatgaaagaagttgttaagcccca

SEQ ID NO: 25177 - DNA, 477 bp, Gossypium hirsutum
  Clone ID: LIB3583-016-P1-K1-G3
cgcacgcgtccgatattatatcccagccgatatccatgcctatcctgcatgctagcccctaagccagcgcgacggacgccaacactggtgagacctgctgacataactccagacatgatccttgactatcgccttcaatattcctgaccacaattcgcacaccctcttgattaccctctgcatcataagctgtcttaacaaacagcttgaccatctggcacaccataatgcacaacactgtgatcctcactgctatactgattcctacgacattacccaaagcaatgatccatgagatgatacacattttcacacccagctcctcaccgtgggcatgctaacttattatgtagcttgttctctagcatggctactcgagtccatggtatattccatgatgtcatccatattgtagaggggaggttagaagtgcagatcagaatgcacaacttcttataaacatactgataagcatat

SEQ ID NO: 25178 - DNA, 568 bp, Gossypium hirsutum
  Clone ID: LIB3583-016-P1-K1-G8
cccacgcgtccgcccacgcgtccgcagaagggtccccattctcctaacactagttcacctttagatgctggtaaagtaattgctgaatcaggatatgaagatcagaaggatgatgtgcagtttgggaaagcttgcgacttcaatgataacaaaaataatgataaatcgctggtagacaaaaaacagttgataaggcaggaaagtggatctgccgaaatttcaggggatccatcttgcaaaacagatcttgagactgttgatggatctgcagtgaacttggatgttaaatcatctgaaataactgagaggtcttctcctcaactgtcaaataataagtttctcatgtacacattcaaaagaaagaggaagaaggattctttgagcagccctgacagagattgctcacatgatgatgacattttgcacaagaagataaaggagaaccaaaatggttctctagattcagaaaagtccacgttgacatccgaagaatctagagatagtcgacgactagttcaagttgctcgtcagctcatatcattatcggagaagaagttgaggtagtatc

SEQ ID NO: 25179 - DNA, 267 bp, Gossypium hirsutum
  Clone ID: LIB3583-018-P1-K1-A1
tacaaacgtccggatgaggccctgtgtacttgagcccccaagacactacgaagccgctaccaatgggtggggtgacccgacctgtcaacagctcaggacagctgcagtatttgtaatgtgcgggactagagaacctaatggcctcgttctgactttcttcaccaatgctcttgaggttgtctacattgcacaaggtggacgtatacaacgtgcttgttatggctgggtatgcccatacattgcaggattgacagggattgcatcatc

SEQ ID NO: 25180 - DNA, 582 bp, Gossypium hirsutum
  Clone ID: LIB3583-018-P1-K1-A12
tctgaaagaagtctcattccgctccaaggatccaaggcacataagtgaagtggtacagcagattaaaactcttcgtcggcaagtcatggccagggaatctgagaaagctgagagggcaaccttggttactcaggaaaaacttcaacttgcggggaacaggttcaagcctatacggttgtctgacctttggatacgccctgtttttggtggtcgtgggagaaagattccaggaacactggaagctcatgttaatggttttcggtattctaccactagagcagatgagcgcgtcgacatcatgtacggaaacataaagcatgcattcttccagcctgcagagaaagagatgatcactcttgttcactttcatctgcacaaccatataatggtggggaacaaaaaaaccaaggacgtccaattttatgttgaggttatggatgtagtccagacattgggagggggaaagaggtctgcttatgaccctgatgagattgaagaagagcaaagggagagggataggaagaataagatcaacatggattttcagagttttgtgaaccgggttaatgatctatgggggca

SEQ ID NO: 25181 - DNA, 577 bp, Gossypium hirsutum
  Clone ID: LIB3583-018-P1-K1-A8
ctagattacttagttagaggcagagcggcttcaaaatggttcagcggctcacttaccgcactggtcgtggctatgccaccaaatccaaccagcatcgcgttgtcaaaacgcccggaggaaagcttgtttatcagaccacaaagaaaagagctagtggacccaaatgccctgtcactggcaagagaattcaaggaattcctcacttgaggcctgcggagtataagaggtctagattgccaagaaacaggaggactgtgaaccgtgcctacggtggagttttgtctggcagtgctgttagggaaaggatcattcgtgcctttctggtggaagagcaaaagatcgtgaagaaggttctgaagattcagaaggcaaaggaaaaggtgtcatccaagagctagaaacttgatatatactatctctgtatcgtagtttgaggtgtggatttatgtttttaccttggctgtatgaacctgcatttctacttatctttgtcgacaaatctacttttgttaaaattttgtttttggttcattcacttgtctgctctttcttgaaatttcctttgggaaatggatgc

SEQ ID NO: 25182 - DNA, 569 bp, Gossypium hirsutum
  unsure (1)..(569): unsure at all n locations
  Clone ID: LIB3583-018-P1-K1-B7
ttctcatttgagtaagtcttcgtcttcttcttcttgtcataaccagctttgtaagcaaggtccaggggctgttgcaggggtggtaacggctggggctttcgttttagccttatttgctggggctctcatatgggtttactctaaaaagttgaagcatgtgaagaaatccgagtcttttccatcggagattatcaaaatgccaaaagagttcagatacaaagagctgaaagcagctacgagatgcttcgatgctaatagaattatcggtcacggtgcgtttgggactgtctataaaggcattttaccggataatggcaacattgtggctgtcaagagatgtagtcatactagtcaaggcaagaatgagtttttatctgaattgtcaataattgggacccttaggcatcgcaatcttgtaagattgcaaggatggtgccatgagaaaggtgaaattttattagtttatgatttaatgcctaatgggagtctggataaagcattatttgaagccagaacgccattaccatgggctcataggcagaaaantttgttagggagtgcctctgctt

SEQ ID NO: 25183 - DNA, 353 bp, Gossypium hirsutum
  unsure (1)..(353): unsure at all n locations
  Clone ID: LIB3583-018-P1-K1-C10
attattccctcttttgagttttaactgttctcttctttttttctctcttagttctctcaagagggtggctttatcttatatctttggtacctccactatcccataatatcaaactctcctattttttttctaaatatctggtcgtttaccaacaactaacataaaaactgtcgacaattctctaaaacatataatgcaaactgcatgccatcatggaatatctttattgatatattcctaatcactttaccatttaatttcacactgccganttattttttaaaatttctgcctcttaaattaccttaattttctgtaagctaccttcttccaccatcaataggatctaccca

SEQ ID NO: 25184 - DNA, 570 bp, Gossypium hirsutum
  Clone ID: LIB3583-018-P1-K1-C2
gacaactccctggtttgtacttatccagaaatccgtcttttttaggtttgaattctctgggacaattgaacgaacacatcggctgcagttttgtgatggatactagtattccaacccagaccagtaaataccaaatcttgcaacctcgaagcttatactaataaagagcacattttcctttgaagtatctcgacatgtttggtatttcatacggggagctcttccttttgatcggagccactgctgctctagttggaccgaaggatctgcctaaaattgcaaaagtagctggaagatttgcaggtcgatcaattggatatgttcaattagctcgtggtcagttcgataatgctatgcaacaatcccaagctcgtcaggttcttctttttctttgaataatataacaaagttgaagaaaacccctctttaccaaattaaaatttatgttcttgttcttcttcctgccaagaatttggaagtgctttaatgtccattggaagaagaatttctatatcatcttgaatgttatataggttatagaaaatgaattttttatagcatgctctgact

SEQ ID NO: 25185 - DNA, 453 bp, Gossypium hirsutum
  Clone ID: LIB3583-018-P1-K1-D2
gaaatacctgacaatcaagcggaacctaaggcatgatcactaatcgtcagaaaacagatgctcattaggggctgcaaaccatggatccagctaaatctctttcaagaccctgaagacgctattactgcttgaaacattatgaatgtccagtagagagcggatcttgagtgttatcatcggagtgcacgaaatatccataaatgcaaagctagaaaccctgattagggcattgcagagtatgagcgaccagtctatatacgtcgatcactcaaccaattctgatgcctattcaacccacaatctatcttcagagaaactgagccagttcctgtccaagacatgggccgttgcatttgactctgtttttacatagcgaaaggaatgtagtcaatggataatgatcaacgactcaccttcaatctgaacaccgtggaaagcaatctcttgtgcaaa

SEQ ID NO: 25186 - DNA, 579 bp, Gossypium hirsutum
  Clone ID: LIB3583-018-P1-K1-D7
aaaggagcaaagacatcatgaagctggagaagaggattaatgaaattgttgatcgactcttcaaaagtgttagtcagtctgtaggggtggcaaacatccgtgagtatgaagaaaatcagctcaaggctgcccagaatatggcagaagagaggcttagcttgagtaatcaacttgcaaagttgaagtatcagttggagtatgagcgtaaacgagatgtagattcaagaattaagaagctggaatcttctatcagttccttggaaaatgatttaaaactggttcacaaaaaagaggctgaagtcaagttggcaacagaaaaggcttctgaagatatcaatcggtggaaggaagaagtgaaggagtggaaatccaagtcagaagactgtgagaaggaaattcaggaatggaagaagcaggcttctgctgctacgacatccatatccaaacttaatcgccaaataaattctaaggagactcagattaatcagctggatgaatggaagggggaaatcattgaaaagtgtgacttagagcacattgagcttcctctcattgcagacccaatggaaactgaatctt

SEQ ID NO: 25187 - DNA, 420 bp, Gossypium hirsutum
  unsure (1)..(420): unsure at all n locations
  Clone ID: LIB3583-018-P1-K1-D8
attttgtctgtctttgtctcttgatgctattttgatgtctcgagtaaccgtanaaggtgtttgaagagctgactaaagctgtagttagcccttgtctttttgtaagtaatgttggccaagggtgcgctagcccacggtggttattgatgctttgtcattcaagctgccaccgtgagcggcggatatattacataaataaataaagagattaatggggtatgtgtaatgaaaaaaaaaaaaaaaaaaaaaaaaaaaaaaaaaaaaaaaaaaaaaaataaaaaaaaaaataaaaaaaataaattaataaaatcaatatagggggtggggtaaaaaaaataaataattaaaaggggcgccccttttaaaggatcaaagtttactaccccgtgtttgcaaggtaaaagtttttttttagggccc

SEQ ID NO: 25188 - DNA, 285 bp, Gossypium hirsutum
  unsure (1)..(285): unsure at all n locations
  Clone ID: LIB3583-018-P1-K1-E7
aacaatacaactcctaatgaacacttcatgatgttccttcttaaaatacctaacctcancaacgtacgtgttatttaatactattatccnncaccatataataatattaatactaaaatgagagcatgctcatatattctcttagaatcttctctaaataggcaacccatcctcgattgaaatgatttactgattttcaacctagccattattatattatacacgtaaagaacaccagattttcaagtacaaaattttcttttttccctttactataaaagaaac

SEQ ID NO: 25189 - DNA, 581 bp, Gossypium hirsutum
  Clone ID: LIB3583-018-P1-K1-E9
tggaaagccagagattgacgatgttaggaaactaattggcccagtagttgacaaactaccagtcctttgttcggatgcatctattttaagattcctcagagcaaggaactggaatacaaagaaggcgagcaaaatgttaaaagaaacattgaagtggagacttcaatacaagccagaggcaatccgatgggaagatattgctcaagaagctgagacgggaaaagtttacagagctaattactgtgacaaacttgggaggcctgttcttgtcatgagacctggtctccagaatacaaactcaccagtggggcagatcaaatacttggtttattgcatagaaaatgctataatgaatctggtccaagatcaagagcagatggtttggcttgtcgatttccaagggtgggcaatgacaagtatatctgttaaggtgactcgggaaactgctcgtatcttgcaagaccactatccagagagactgggcataggaattctctataatcccccaaaaatatttgaatctttttggacgatagtgaagccattccttgagactaagacatacaagaaaatgaaatttg

SEQ ID NO: 25190 - DNA, 530 bp, Gossypium hirsutum
  Clone ID: LIB3583-018-P1-K1-G12
ccacgcgtcggaaacaaacttgaaatgagcaggaagaaaacttggaaaacctttcatggagattcaacagaaccttcgccatcctctaagaaaacaaaggcctcttaacttcgttggacccaagccctccaattcgcagccagaaccatccttaccgattccggcggatcaagattccaaaagctaggggacaaatgacgccagccttccataactagagcatgagccgccctattgcctgccctcggtacaaataggtaagaaactttctcgaactgtctctccataacatgaatactgttgataatcggtcccagtaaagatctatcctctccgtttgaattgagcttttcgataatagtcagagaatccccttccaatagaaccctcgtgaaacccatttcagcagcaaaagacattgcccttttgcatgctcgagcttcagcagcaaaggcatcaaccacgtcgttcaaagggtaagtgtatgcccccatacaatgcccatcactatttcttgctaatatagctgc

SEQ ID NO: 25191 - DNA, 582 bp, Gossypium hirsutum
  unsure (1)..(582): unsure at all n locations
  Clone ID: LIB3583-018-P1-K1-G3
cccacgcgtccggctttcctttgctgcattctgggtcggtccgccaagcagaatgaaaaacactataacagagtctaactattattaagcctgcttcattttctacctcaggctggcagcaccttccgccttgttcatctataactctttttttttttcttaattagttactgcaacaagttttttgcctatcaatccaatccaaaactacctatacttatataaaagtgaaagttggaatatttgttttatcaattaattaagaggtaggttggataacaatggcacctgctctgggaagcctgcaacagaaaagacttggcaatgccctaacctttatggctttgctattgatacttttcttcggtaacgtgcatctctctctctctctcgttataattttcatacttcactttctttttttgctcatggcttcactttgattttgtatataaatgaattttaagctgttaattgtcaccatctctttttcttttcttttttttttctttattttgatttcttttgtaaaaaacagaaaagaaaattatanaataaattatagctcctagaaaaatatta

SEQ ID NO: 25192 - DNA, 551 bp, Gossypium hirsutum
  Clone ID: LIB3583-018-P1-K1-G5
cccacgcgtccgcccacgcgtccggtgcaaccctgtggggatctgtgagacacatcatatctccttcagttgctgatggtgctttccattattatgagaagatatcgtatcagttgtttttcattacaaaggagaaagttagacattttaaaagattgccagtggacctaagggcactccaggatgggctttcctctttgttgataccttcacagaaagttatgttcagtcagcatgtgttagcactttcagaggatcctgctttggcaatggcattttctgtggcgcgacgagcagcagctgtcccatatttgcttgttaatggaacatacaggaaaagtacccgttcctatattgattcttcaattctccagtatcagttgcggaggctgaatactcatggatctctcaaaggatcacatgctcatagccggtccactcttgaagttccaatcttctggttcattcgtaccgatccattattagtggacaaacattatcaggccaaagcgctttctgatatggttattggtgtccaatcagagtcgtca

SEQ ID NO: 25193 - DNA, 536 bp, Gossypium hirsutum
  Clone ID: LIB3583-018-P1-K1-G6
cccacgcgtccgctgataatgccttatctcctaaaaaggttacaggaaatggggacaggtaagcttcatccaagcgaagttatccctagctgcaaagctgttatcaccaaacatgataaaataactgaagtgacttttctaaatatatatataggaagattgttttcccattatcaagctctgatatgatgagtttctatattctgtggatttcgagttgaagagaagtcctagatgtatgatctgctacacatgacatagggactgtcttcttgacttggtcgttgactctgctgttctgtaattaaaaaggaatattgttgcttttatcattgccgtttactttaactggaaaaagtgattcataaatctatattaaattgggtttaccaaaaatgttttgaagggactttccacagcccaaatttcaatctgaacacaactacagtggtccgttgttgtatcgccagaagagagaaacaaatagtccttcgccagaggatgcatcagagggagcagttgttcggcgggggcgc

SEQ ID NO: 25194 - DNA, 460 bp, Gossypium hirsutum
  Clone ID: LIB3583-018-P1-K1-H10
gtggagtggagacatcgaaagcctttgactgcgcaaaactgctgacaagcattgtttcagaatccaaacagctctctctctttactcttttttctcctcattagttaaattttattctttttctgcgtaatttccatttttcctgatgaaatttacatttacgatgaagaagaatttaccttaatttttttaataattctttatttttctttttcattgaagtttgttcactgggcttgaccggctctacacattcccaaactcttcttgatctcactttcatttattccaccaaaaaacatatcaattttacttcaaaatcaactataatttttcatttttggatcacatttggcaatagtctttgtttaacaatgcacgttaactgttcgatataatgcttctttatacgctctgcgaagtgttatatgtatgttttacattttggttctggttttca

SEQ ID NO: 25195 - DNA, 220 bp, Gossypium hirsutum
  Clone ID: LIB3583-018-P1-K1-H7
gaatgatgccaatgagattggaaccctgatagtctctaccagaaatgagctgttgatactaaggggaggtagttctgtacaggtatgaccttatttcatctacttatagattagtctcattggactcagccaattactcaatgcaaatctcctctacaccacttgaatgctattcagtctaatcacttatttattttatacactgttgaaactgatttat

SEQ ID NO: 25196 - DNA, 553 bp, Gossypium hirsutum
  Clone ID: LIB3583-050-P1-K6-A4
gtaaaaagcatattttcttataaagaaatgcatgtttcatggataaactagaccgcactttagagactgtagatctaagctttattatacagacacaaatgacttccaaaaactcgtacacatacatgagggttgtgctttgtgccaaaggtcaatacaagggctccagcacctagagtgcatctttggccctaattaaaaactagttaatagcttgtacatggttgatttgctaaataagaagttgggaatgatgagtggttgaaatggcattggatgattgaatacacgcttggtggtggcagctgtggtattggtgaagtatttgaaatgcagaacaatgtctgaagggggttttagtaccgatggttgtcgtcaaggatattcttaagtgttctgcctagaataatgtcttaaatctttatgcatttagctccactgtttattttgtgaatgttatcaatgggatttcttctgctttttaaataatggagacacatgtatttcaaatgcactaattaaataattcgactgatttggtatttctttgttt

SEQ ID NO: 25197 - DNA, 680 bp, Gossypium hirsutum
  unsure (1)..(680): unsure at all n locations
  Clone ID: LIB3583-050-P1-K6-A5
cgnaaccgnantagcttagagttggaaaaacagtgaattttccgggaaagtttttcacttttttccttttttgcagagaagaattaaaagttaaagctttaattctcccattcgagagagaagaagacgaagactgaagattagagatgggaagagccaaagcaataacttcaattattctcattcaatttatattgctgcatgtcacaaaatcccagcaaggcttcgaagaatcttcggctgcgaggactcttaagcaggaatcgcatgatactcatgaagtacattgttccagagaaagaagtagggcagcctggcagattatagatgattatttgatgccattcgttgaagaagaagggtatcagatttcaactgactgtaggcttcatccagacaatgatctttttagggatcaagagcgacacaagattcatttggatgtaaacgagtggcggtgtggatattgtaagaaaagctttcgtgctgaaagatttcttgaccagcattttgacaacaggcactacaatcttctaaatgttaatcaaagtaagtgcttggctgacttatgtggagcattgcattgtgattttgtgataaattccaatttgctcaaggccaagtgcaatcctgctgctgcagcgaggaaccgccatctttgtgnaggttgtttctaatta

SEQ ID NO: 25198 - DNA, 700 bp, Gossypium hirsutum
  unsure (1)..(700): unsure at all n locations
  Clone ID: LIB3583-050-P1-K6-A6
gnagnacaagnatggcaggtgacagagataaaggaaagtggatcaaaatgaatgaagacgaaaatcatggtgngaaataataacaataataatattgaagatcaaaggcttttcccattaaccaaccattccccatttcctggattgttaaacaatggcatgcctttgaattcatattaccattgggaaccttccagtctgtctttgtctcagtttggaaaccatggattaatggccccccaaactgagaacttcttcaatggtaacacaacgagtgtgccgttgccgtgttccacgaccgttccatcggcgacaatggcttcatttttccccacctatcctccctatggtacgaatccaggcagcaatgattcaagacaaatgaattatctgcaattgttgagcacaaattttctttcaaattccatgaagcctttttcgttgaatgtaaacgctggcctcactcatacacaaaacgatgatgaaaatcatggagatgatcaagataataccgattcctgataatggaaattacttccattgcttcatctgctttcatcgatgtcagcacgagcttggatgaatttaactggtttcagatcatcaaattaggaaagaattacaataagggtctctatgtttacatctctatatctatctatatatatatttatgaagcaagagaaaaggagtagtaaca

SEQ ID NO: 25199 - DNA, 589 bp, Gossypium hirsutum
  unsure (1)..(589): unsure at all n locations
  Clone ID: LIB3583-050-P1-K6-B10
actcgntatttcatgtgctgcccattgggcgagccagacgatgtttaggcattaggctttgatggcgttttcttttcattgcacaatatgtgactcagcttaattacaaccatgggcactagtccgtctacaacaacctcataatcatggcctacaccagctgggaaaatcttggctcaagtgggggagagtgattggcacagaagttgtcttctttaaagtatatttgatatccatgacccattcctcgaccaaataacatatgcagtcatgcactaagatcacaatngagagtgagaaaaaaccacaaagctttgtaagtgctttaagtcctctttgatgtcattatcctaatttggtatctatgtagcatctcctctgtaacttttagatacacatctggaagttgtcacaaataggtggaaacaggctgntttcttctcatgcttttttcatctcgagttgcaactactcgatgggttattttaaaatgtgctgagatcttttatgaaatgagcttgttttactacaggtgggactcaactggttaatagcacaggagaatgttgtgccaattctaggagccaaa

SEQ ID NO: 25200 - DNA, 606 bp, Gossypium hirsutum
  unsure (1)..(606): unsure at all n locations
  Clone ID: LIB3583-050-P1-K6-B6
ctgggnagtctgatgtagatgatcgaggtcaacctcaggcttttgtgtgtttcttggtggaaatctagtttcctggagctcgaggaagcaacaagtcatatcaaggtctacagcagaagcggaatataggagtgtggctcatatcaccgctgagataatgtggattcaagctttgctggctgaattgtatgtttcagttccacagaaggcattggtatggtgtgatagttcggcagctgttgcagttgcggggaatccagttatgcactcaaaatttaaacatgttgaaatggatctactctttgttagagaaaaaattgctgatggggtacttcatatagggcatatacctggttcagaacaaactgccgacatactaactaaaccactgtcgataggggcattcaccaagtttcgtgatcgactaggtgttgcaagtagggaagaacttgataagcatggggcatgttaagaataataacagttagtagttggtgacggttaggagagttaagcttttctgttacagttggttagctgagcttattaaatacatgcagttgtattcatgcttttatgatgaaatgaaagtaattcagtttattc

SEQ ID NO: 25201 - DNA, 661 bp, Gossypium hirsutum
  unsure (1)..(661): unsure at all n locations
  Clone ID: LIB3583-050-P1-K6-C6
ntggnagcaatgcgtggctaggctagntgtggctatgttcaatgctgttcttcgtgattctggtgatgagatccctactgatcccgtgtctgatcccattagtgatcttctagtgcttccggtcccagctggtaaagcaagttttggtgctggtgcacaactgaaaaatgcgattggaaactggtctcgatggttgactgacctctttggtatcgacgatgagatcgaccaggatggctgtgacaagcgacaagacacatccataaagtctttctatctccttaatgcattgagcgatctcatgatgcttcctaaggacatgcttctgagtaaacctatcagggaagaggtatgtccaacatttggtgcaacattgatcaagagagttcttgacaactttgtcccagacgagttttgccctgatccggttccagatgttgtgcttgaagccctggaggctgaggttagtcttttaatcatgtcctatgctgctccagttctttattgtttaaatatcaatgtatgacacatttttatggatatggatacaaggacattaccttccaaagacctccaagtacatggagaaacctataaaaaattgaatatacttgcatgcaaatttgagtaacattgtatctgtgtgtttgaaatgtctaaa

SEQ ID NO: 25202 - DNA, 666 bp, Gossypium hirsutum
  unsure (1)..(666): unsure at all n locations
  Clone ID: LIB3583-050-P1-K6-C7
ccccgcgtccgcatgaatcctgcactgcttctaactatttgagaactgcagttatagaccccccccacccccaaaaccaaaattctcttcctcaaccaagtttaggtctacagtctacacattgcttgtctgcttgggtagatattgctgatatttgacctacagctttttgggccattgacggcatgattatatcctgtttcttgtttctttgatatgaaataggacagtatgttttcttaggcggtgtcctaccatgatggactaactgaccttgattctggaccatgacaactttgaatggacctttataaaatctcaaggtatacatgtgttctgagagctgatgtggtaaagaaaaagaaaatgtcatttggcatgcattttcagtttttctgttgatttagttagctaaagccatctgcaacctggcctgcaggtttgttacagttttggcttattagcatctatgttgctcaaagggttcttttttcttgaagcgcccatgtccaacactcatgtttgacgtatggatatggggatattaacttggaaggatcctccaaatatatcttatatcttaatatccgnttcagatacgcacctgtagacaacattcatgcccaagtctgagtaacagagattagcattctctgaatattgctt

SEQ ID NO: 25203 - DNA, 605 bp, Gossypium hirsutum
  unsure (1)..(605): unsure at all n locations
  Clone ID: LIB3583-050-P1-K6-E1
tgaaacgcaagnaactaaatgaacctccatctgcagagtctgagaaggaaggtgaaaatgcagtaggtgatgtgaagaatgaatcttcatcaacttctgttgaggatccaaagaagaacagtgacagtggcaacagagaaaatttatggacattgccaactctggcattgtcactgatgaagaccgtgaggctgatcgagatgcttcagagaagcttgctggcatgattgaggagaggttaaagaccaatcctctcccaccacctcctccacaaactgctcctgatggttctgggaaatcaaattcagatttgcctgctaaatcaagggatgggaactctgatattgatttaatgagaaatgatggagctgaaggtaaaaatgatgatgagactaccagtgagagcaaagcgacaactgaaaatgatcgacctgagacaagctcacctgatcgtagatatgataggagtagagacagagagcaagatcttaagagggacaaggagcgtgaaattgaaagattagaaagagaaacagagcgtgaaaggatgagaaaagagagggaacagagaaggaagattgaggaggcagagcgtgagtatgaaa

SEQ ID NO: 25204 - DNA, 610 bp, Gossypium hirsutum
  Clone ID: LIB3583-050-P1-K6-E9
cggccgcgtgggatgataaccagttgggggtgggggaagtctagaactgttttctacttttgctttgtgcattttttggctaggatgagttgtacagggcaagtaaaacaaatctttagcttctgagaattccctatttctttttctgaagaattttgtcagctttacttgattgtaccaaagcatcaaacttgtataaatatgtgaagcaatgcctctagaaatgtgcagatgttactattagctagtagctgtacttccttagagtcttttattagatgttttcgtaccaaagttcagcagtataacagtctgacgccatatatttatttaactaaaatatggcttgtgatattttgctgcatttgaggtaatgttcttaataacattaagaaaatgatagtaattatcccctttctttttaatgcatatttaaatggaaacggttttttgtgatcaagatgaaaagaatagagcacatatttcgaagtggctaaggttatccattagaatgtatggaagttttgagaagtcattggacgagctgagatcctttttcagagaatcaatgtccgttttgagttcctttattaatatttcctttcttttt

SEQ ID NO: 25205 - DNA, 470 bp, Gossypium hirsutum
  unsure (1)..(470): unsure at all n locations
  Clone ID: LIB3583-050-P1-K6-F10
cgtccgcaaaacttcctttgctcaggggctgcttgcttcatcatcatcttcttcttcttcttttaccttcaccgcttcctcccctttctctctcgtcccaacttggtacccatcccttctctcctgctctcttgtcaatccctcgtttgaccccaagnaaaaacacccaacttatccctatctctcaccactgcggcggcgacctccaagtccggcggcgaaaatcggtcccctcgaaaacccaaaaagaccaagaaagaatagttgaagaagaggaagtggaggtggaggaggaagtgccctggattcaagagaaggcattggaccttgttgagttcactggttctgttactcaagccatccctggacccagagttggcacaagctctttgccttggattcttgctgntcctttggcttatgctggtatcacttttgtcattgcttttgtcaaaactgttaagaaattc

SEQ ID NO: 25206 - DNA, 578 bp, Gossypium hirsutum
  Clone ID: LIB3583-050-P1-K6-F3
cccagcgtccgcccagcgtccgaacactacggagatggtttttgctcttcccgtcctgttcaaaagtttataatgttcttcatgagataaggcttactggatttcaagatcaaatgggccgaaatgttcaaggtgccttacctgataaacaaccagtcgcagtcaaagagctggaaggaactattgaagcaagaagtttcgagctgctgtgtcaaaggtgggaagcatttatcacaaaggtcttgccaagctggaaggctattgttgtgagttcaatcacaggtatttggtctatgaatatgctgagaatggctctctggagaaatcatagaaaatccaacacttgctgagagactgacatggagaaagagatggatattagcataaacgttggtagagccatattttatttgcacaccgagtgtagagaatttctatgccatggaaatttggaatgtgaaaatgtagtccttgatgaaaatttgaggccaaagtgaaggaatttgggttggggatgctttatggtgaagcatcctcccgtagggcttcagcacagaaagatgtggaaagattttggc

SEQ ID NO: 25207 - DNA, 373 bp, Gossypium hirsutum
  unsure (1)..(373): unsure at all n locations
  Clone ID: LIB3583-050-P1-K6-F7
ctagnaattgatgtgggattgaagagtttgatgaaagccaagtaggcttagattctataatttgtatgtcaaaccatatccggaatgcgagaagatgtttgggaggtttgctgaaggtgctgccattcaagggcggcatccggttgggatgtggaagctttttaaaccacaaaagtatgcagaatcagaaggaagatgtgaacaacacgaaatcttttatggaaccactagtttagctcacaaagctactgatctatcatttctttgtagtccaatctgaaatgtgtaaataagcttcttctttttttgttgtatacagttcttacattcaatattcaatctctaaattggaagataatatatatttacccat

SEQ ID NO: 25208 - DNA, 655 bp, Gossypium hirsutum
  unsure (1)..(655): unsure at all n locations
  Clone ID: LIB3583-050-P1-K6-F9
tcggncgcgtgggccgaaaagcaggggtaggggggggggtgtgtttccaacaggttctacgaaagctctacagtggagttcccatgtttccctttggcattggtttgttggttcgctgtcaatcattattatgctataacgttcaactttatcttacatcatctgtaatcccctcatcgagctacgtgagtttgaggttgcatgaatgatcccgaacctatatcttcgtcttgcacaattcatttgggaaacatatttttcttgaattgcagttggaagtagctcatgatagggagaaggagttgcttcatgaaatatccgagttacagtggaggctcatttgtgcccaagaagaactgcaaaaatataaaacagataacgctcaggtgtaattttatttccatccggtgcacggatggaggtagaactgagctcttaaaccatatgatcctaacagaagctagaaagagacgattcgaaacagttatgacctactacacatgaggtcatagtctaaggaaaaggaaaggtggaaaggagttgtagaggttgagattcgaattgtaaatctattggaccctgaatttaaaggtgattgcataactggattaagcttctggtttgtagcacgatactcttnttgtatcatatatag

SEQ ID NO: 25209 - DNA, 627 bp, Gossypium hirsutum
  unsure (1)..(627): unsure at all n locations
  Clone ID: LIB3583-050-P1-K6-G6
cggncgcgtgggntaaagaatagcattacaagtgttatgtgaaaaggataatgaataaaataaataaataaataaagcacccaattgtttactttgttngaaaaatcaatagcattttcagctatggcattagctactacttgttcttcacttcccctgtttcatcttcatcttcaatcatcttcccctgttctcttcttcccttcttcttctcgtttcaactcaaagaaaagattccacgctcgaagcaccactcgctttactcgcgttcttgctgtttcgaacactgctttagattccaacaatggggcagcagcagccattggttctgaatctgaagacccttcttcttcttatggaagacgatacttccctttagctgctgttgttggccaggatgctattaaaactgcacttttacttggtgctattgatcgtgaaattggtgggattgctatttctggtagacgtggaacagctaagactgtaatggctcgtggattgcatgctgttttgcctcctattgatgttgttgttggttcaatggctaacgctgaccctacttgccctgaagagtgggaagatggtttagctcagcgagcggaattcgattccaatggcaatgtt

SEQ ID NO: 25210 - DNA, 579 bp, Gossypium hirsutum
  unsure (1)..(579): unsure at all n locations
  Clone ID: LIB3583-050-P1-K6-H2
ttcgcggncgcgtgggcgcgtatgaattagcggaggaatgcgctgatgatgacgaagacaagaaggcaatacgaaatttaaggaaattgttcaagccaagcttaaatcacacgactctcttgtccgagaatggggctttgaactcccagaagagagaagcttgacaaatgcaacagtgaagtatacggattttctgtcggcaacagcttctggtagaattgaaggcgaaagagtcccgggtaaacttgcaaccccttttgagaagacaaaggttgccgcttatacacttggcgctatcgcaccttgcatgaggctctttgccttcataaataaagagatccaagctcttctagatcctaatgatagcactcacatttacaagaagtggattgatcattattgctctgaaaattttgaggcttatgctttccgcatcgaagagttgctggatactctaagcatatctttaactggtgaagagctagatgtcatagaaaagctctaccatcaatctatgagactggaagtagatnttttctcatctgaaccaattctacaggaagcagtggtccctttgtc

SEQ ID NO: 25211 - DNA, 570 bp, Gossypium hirsutum
  unsure (1)..(570): unsure at all n locations
  Clone ID: LIB3583-051-P1-K6-A4
cccagcgtccgcagcacgngttttagcaggaccttagcttgcattgctgttgctctcttcttttctttcgtnattaaatcatttatttatttatttaaattttctgctataaaaacaaattctccatttcaattttcatattggagttttaaatttgcatccattaatcaaatcttgataaaatgatcagttcagtctcatttgctgcctctttagctccataccatcatacaaaaagctcaaatccctatcaccgtctcctcatttccccaaaaccaattcaacataaaccttccctccataaatttcacggtgngaaaagcttgctgctacagcaatttccattcacagtattcgaagccgcctttggttccggcgagctacacttcgccgcaagggggctgttagtgccgccggatgctaagaacagggttcgggttcgggagaggaggattcgataggagccttggaaacggttctcaagctttactcggcgattaagaaccaaaatgtacgggaattatctgaaatcattgacgatgaatgccaatgcatctgcaatttcttctc

SEQ ID NO: 25212 - DNA, 580 bp, Gossypium hirsutum
  unsure (1)..(580): unsure at all n locations
  Clone ID: LIB3583-051-P1-K6-B6
atgcacgtttcgcgccacaccaccaccaaaaccctcaacagnacttcttttaaagacccacatgcaccgttcacttaatggacaacggcgacgctttggaactcggcaaagcgagttcaagctcgtacgtgtactagacgacgacgttccactcgccactatcgttaaagtcaccgacgatcttcaatggccgttgacgaaggacgaaccggtggtgaagcttgattcggttcattaccttttttctttgccggtngaaaggatgggaaaccgttgagctatggggtgaccttcgtggggcgtggacatgggaatagcttgagctcgttggactcgtttttgaaagagcactcgtgcttcgccgccggcgtgggttcgaccggcgataagcacgtcgattggaaggcgtatgcaccgaggattgaggattataacaatgttttggcgaaggctattgctggagggacggggcagattgttaaaggaatcttcacatgcagcaatgcttatattagccaggtccaaaaggaggagaaaccattgtaaggcaaccaccagggaaaactcatgggatcattgc

SEQ ID NO: 25213 - DNA, 565 bp, Gossypium hirsutum
  unsure (1)..(565): unsure at all n locations
  Clone ID: LIB3583-051-P1-K6-C4
cccagcgtccgcccacgcgtccgtttttatcttctttccctttcgtggacactctacattagtcaccagtctcttacaacgtagnattagcatagtaggaataattttttttgagatgcgccatactataattttaactttagaaggaagtttcaaactccatagctttcgatagaaatctctagaaatgagttgtgatgtatttaattagngagtagaaaaacccaactgtaatagtttataggcactgcacaccgagaacatccccgatggctcacctctccaagccattcatcttcatgaggaacttttgccagtgggattcgaaggttccttcccgcatcaaccgcatcaaaggtattggtaataatttccgctctccattctctaatattattatcaatgagctcaacaacaaactccaaattacaattatcaactggatgatttaacctgtaattatcagaaccttgaatccaggcatgattaaaaatagaaatattatcacctttccccaccctctaactcgtgcctttctgaagcactctcctcgttgcccatatac

SEQ ID NO: 25214 - DNA, 689 bp, Gossypium hirsutum
  unsure (1)..(689): unsure at all n locations
  Clone ID: LIB3583-051-P1-K6-D8
ttctcaccttccccaanagnaacccaccggtgcagcgcccaccaccaccaccacaacctccgataccactagcactactaggaagtgtaaaggcaaaggtggacccgataataacaagttcagatatagaggtgtaaggcaaaggagttggggtaaatgggtagcagagatccgtgaacctcgtggacgtacaaggaaatggcttggtacttttgcttcagctgaagaagctgctcgtgcttatgatcgagctgctattgttctttatggttctaaagctcaacttaatcttcaaccttctatttcatcttcgtcttcgtcttcatcttcacgaagttcttcgtcatcttcttcttcttcaactacacaaagtttaaggcctttacttccaaggccttcagggttttcttttagttactcaaaccccacttcttaccaagcttctttaatgtctgccgccgcctctaacggtggttctggtggtggttattcaaggtttatgccatatggggtttatcaacaacagcctatggtgtatccgtccatggtgcaaaatcctttacagatagttcaaagtgaacctagccttgttgttgaccctactgtgacgacaacctcgtatatgaataaccctaaccctcaacaagtacaacaacatgatcaacaaggtgctttgtacgatgatgtta

SEQ ID NO: 25215 - DNA, 655 bp, Gossypium hirsutum
  unsure (1)..(655): unsure at all n locations
  Clone ID: LIB3583-051-P1-K6-E2
tttttcgtcttaactcctcnccttccttatcacagctaacatctccacttcaacattgagaacccaagatgaatcctttacctctatcctcgtgtctcagaacggccttgatttcgtcaaggacttgctcgtcaacgaagccatctcttccatcatccctttgcagttgcctgccnaccatcgaaaaatctgcccgaatcccatttctgggaaatgttcatatggttatctccaatgttactatttataaaatcgatgttttggcgtcttatgttaagcttgggaattctgggatcgcgattgttgcttcggggactacttgtaacttgaccatgaattggcattattcttatagttcctggcttgttcctattgagatttctgatggaggaagggcttctgttgaggttgaaggaatggaggtggggcttacattaggcttggagaatcatgaaggaactttgaagctgtccctcttggagagcggttgttatgtgaaagaaataccataaaattggatggaggagcttcttggctttatcaagggatgattaatgcctttgaggagcaaataggatctgcagtggaaagtgctattaccagtaaacttaaagatggaatcttaaagcttgattcatttctgcaatcccttccg

SEQ ID NO: 25216 - DNA, 698 bp, Gossypium hirsutum
  unsure (1)..(698): unsure at all n locations
  Clone ID: LIB3583-051-P1-K6-E9
ccagcgtccggtaaagcaacaaaagtcttggcaaaccggggggggggggcaccattatgctccattactctttcatcagnaaacaataactctcttcaatgtatatctgtattcatctatccatctgtctattcaagaccatattcagtctctctttgaacactcttgcctcttcattccttcatggacctggggcatcttcgatcggcatccaccgcttcctccgcaacagatggaaccatattcatctgataagttgtctccctctttttgattccctctgtagctaggatatgggcaaccttgttagattctttatgggtaaatcgaaagacacaatatccaaagcctaaatttagttgcttagagtctttaatataaacttcaatctcagatctgtcttcttcctttgcttgcagtttacaaatcaccgaacgagaatctccttcaattttaatcgcctttaatctgagatttaaccctagattgattgcctggagacacgccatcgcttctgctgcaaaaatagactatatgttcttatgcatgacttttttgaacaaataactcctgctctttcgtttcgaaccactaacccggagcaaggctcattcctttgcttgttaaacgtagtatcaaagttgattnttaccatcaaaccgtttggagctacccatttgtccgtgtgtatccttctc

SEQ ID NO: 25217 - DNA, 456 bp, Gossypium hirsutum
  Clone ID: LIB3583-051-P1-K6-F2
agttaactatgtatgacatgctttaactgactttggtggtcgtcaacccccaattatccggacttgactactgtgtggggtagcttggctcgtattaaggctaagggttatcgggttggaccagtgtatgacgatgtgctggcaatggcttggttttttcttgagctaattgttaagtcaatggcattgtgagcaaacacgtctgttctatcatagccttccattagatgaagatgttcccccgatgcagttgaaagagggtgtgttcagatgtataatccagctgtatgattgccttctaactgaagttcatgagcgttgtaagaaaggctaagcttggcgaaacgattgaacagcagtctggcattcttttgttatgatcttttatccattattgagcctcgccaggtttttgaattggtatgcttttatttgattcaatagtctatttttgtg

SEQ ID NO: 25218 - DNA, 637 bp, Gossypium hirsutum
  unsure (1)..(637): unsure at all n locations
  Clone ID: LIB3583-051-P1-K6-G1
tccggggtcttttttattcacttgtgagtgtatcatttcttactggttgaatgattgttgtcaaccagacaaaacanaanataaatgccatatccatgtgatgttgcttgcaacagctgcatatattatatgtatagttgggatcatcatgatgtatgtatggtatgctccagaaccgtcttgtctacttaatatcttcttcattacatggacactggtactcattcaactcatgacgagtgtttctcttcacccaaaagtgaacgcgggtatcttaactccgggactcatgggactttatatagtattcatctgttggtgtgcgattcgaagtgaaccagctggtgaaaattgtattcggaaagcagaggcttcaaacagaacagattggcttacaatcatagtaatgtttcattctttcgaaaatgtttaacgggctgagacacggttaaaaaggaagcacctgtcggagatgcggtaccgtacggttacggtttcttccacttcgttttcgcgactggtgctatgtatttcgcgatgctattgatcggatggaatactcatcatattattaaaaaatggacgatcgatgtcggttggacaagtacttgggtgaggatagtgaacgaaggctagc

SEQ ID NO: 25219 - DNA, 387 bp, Gossypium hirsutum
  Clone ID: LIB3583-051-P1-K6-G11
ttttaaaagaaaccaaaattacttccccatacttgcaattaaataattttttaataatgccacttaaatggaattcactgcccattttttaaaaacaacctaactgttaaaaaccttgcatatccccaatttaatcgctttacataaaatcccactttcccaagatgaccaaataccaaaaaggcccataaccaaccgcctttataaaaaatagcccatcctaaaattaaaaataaaaccatccctaaacactctcataaaacccaaccaatttaatagttacacccaacgaaaccattacatttcccacctcccaagaacccgctcctttccctatattccttcccttcttcacaacataaacctgatttctacttaaaaatctaa

SEQ ID NO: 25220 - DNA, 667 bp, Gossypium hirsutum
  Clone ID: LIB3583-051-P1-K6-H8
gccaaccctttgacagaaagccttagggcggggggtccaatctcacatttattttctttgctggaggtgttcaaaaaaaaaggcaaaaacttgtgcaatgggactaatctcagctcttgcagcagcttctgcatcttcttcacttttatcccaaaccaatcaaaacgttgcttttgctgagggacccttcaattttcctttattttcttcttcttctccttccccttccccttccccttccccttcaggctctcctcagtcatctactgggcaactaccatctcagccgtctgcttcaccggcatctacgactgataaggaaggttctgggaatgttaaggctaggaatgataatccaaggacgtcctctgctggctttgatcctgaggctttggaaagaggagccaaggctttgagggaaatcagcagttcctctaatgcgaaaaaggcttttgaacttatgaagaagcaagaagagacaaggcaggcagagttggctgaaagagctgcagaatttaaggcaatgcaagcccaagctgaaactgaaagacaaagggtaatatacgatgaacagaagaactaactcagcatcaagcccaaacaaagtcacagatggctcgttacgaggatgaattggcaagggagaggatgcaggcagaaaatgaat

SEQ ID NO: 25221 - DNA, 561 bp, Gossypium hirsutum
  unsure (1)..(561): unsure at all n locations
  Clone ID: LIB3583-052-P1-K6-A4
tgaaatctgttcccanagacttctcatctttatctgaggcggaggtgngaagaagtactagaagatgtacggttagagtgttccaggtttggtacaatcaaatccgttaatgttgtcaagcatgccgaanagtatcatggcaaatggagaaaacaaaatgaatgataatacaagggaaactggaaccagagagaagctagctgatgacaaaataaatgttgaaacggagacgatggaagaagtcactgatggaaactctggacgaactgctgttgtgaactttccgagtaactatcatgatttagtggcaggcaatagttataatgatgagaaacctgctggcaacctttctgacaacgagttatgccgacaaggtgagtttgaaggtgatatcaataatgaagatgtaaaccatgggagtttggatgatgaaccgtatccaccagggngggtttgatagcaacagnnctgctggagctcggcttgatactgaaatggctgttgaagatctgactttggagattgtagacaagacaatttctcgagaggcccttaattcat

SEQ ID NO: 25222 - DNA, 651 bp, Gossypium hirsutum
  Clone ID: LIB3583-052-P1-K6-C11
gtctgactttacccgagtctgcttaccggaggcgcagggctcacagaaattcaactttcctgtacactgcccagacaataatcctcgttttcttagcaccgataagcctctctcgctcatatgcccgagccgcatatgccataacttcgtggtgtcagaatctagatcatctgatgatgacactcccgcaacacctgtaaccgaggaaccatcgaggaagtaaaggccccgctccaaattaccacgtatcacagtcaaagcacccgagaataccttgagaactccaccttcagcagagtaccgaaagcctttcttgtccaacgtactcaaagagatcaaatttttcttcatttctggaatgtgccgaacatcagttagaggtctaacaataccgtcaaacatctttatacgaactgtgccaatccccatgacttgacatgcgtggtcatttcccattagtactgaaccagaatgcttctcgtatgttgagaatgcatctttcgaagtacttatatgaaatgtagctcccgtatcaagaatccatctcccaccagcgtaagagtcggatactgcaagaacgatctcggcatcacttgaaagatctgcatcagctacattcgcacgatcattttggtgctcctgtgattctga

SEQ ID NO: 25223 - DNA, 630 bp, Gossypium hirsutum
  unsure (1)..(630): unsure at all n locations
  Clone ID: LIB3583-052-P1-K6-C5
cccagcgtccgattgatttgaagaaagagcatacttgcgcaagtcgtattgtacatttttgcaggatttgggcatgaggctgaaagtgtaagttcatggtccacattcggatgccaatgggctgatttatcgtgttgaatgtgaatattgggtttcattagttgccattctgaacatcaagcatcatttataatggaaatagaaagttaatgtaattcgctgcatgttttatgtgtaacgcacatgcatgtctttcctgtttatcgtcaatgtatgtatttaatttcttcataaagtttatagcttcaaaaaatggaagtaatactaatgttatattaggtagaaggtttttaaatttgtttattcgacgttataattcattttgcaaacattgagatgttatttactgcaatttgctggttgtttcaatgctggtatctggattgaaagtagaatttgaattcaccatatcataattatagaaatgaaataaagtttttaatgttagcatttttctttttaaagtatatatctttattntactgtctataatgtagatgtttatagctgctgttactaataattttgggcaacatttnctggtttggataggatgcctttggtgagcga

SEQ ID NO: 25224 - DNA, 571 bp, Gossypium hirsutum
  Clone ID: LIB3583-052-P1-K6-C8
cggccgcgtgggattgtcgttaactattggctgctgggggcaactttacaccttatggattctggttcagttgcatgaagctgtcccaggaaagagatacaatagatatgtggagctcgcacaagctgcttttggagaaagataggtgtttggcttgctctcttccctacagtttatttatcggggggaactgcgacagctttgattctcataggaggggagaccatgaaactgttcttccaggttgtctgtggtcctctctgttcatcaaatcctctgacgacggttgagtggtatctggtgttcacgtcattgtgcattgtcctgtctcagctccccaatcttaattcaattgcagggctctctcttgtaggagccatcacagccatcacttactccactatggtgtgggtgctctctgttagccaacaaaggccacccacaatctcttatgaacctttctcactgccctcctcttttgctgtttttttctcagtcatgaattgccttgtaatcgtagccttcggtttcaggggccctgattttgtttttgggttcctggctctttgcc

SEQ ID NO: 25225 - DNA, 656 bp, Gossypium hirsutum
  unsure (1)..(656): unsure at all n locations
  Clone ID: LIB3583-052-P1-K6-D7
cggccgcgtgggcacacagctatggtaaattctcatttcttgcattaaagaactttatcacacagtctaaaaccatgcttttcagccgaatcagttcgaacccacttttctgggttaattttcttccaaaattatcaacgaaatctttgggtaaaacccagtcatcgttatggcaaatacaatgagagaagacgatgatgataaagacccaaagcttcgaaacacgaaagagaaccagttagaccatttttatttgtataagagcaaaggccaacatctgctcactaatacacggattctcgacgctattgttcgaagatcgaacataaagcctactgataccgtcttggaaatcggacccgggaccggaaatcttactgtcaagctactggaagctgccgaaaaggttgtcgccgttgaaattgataagaggatggtggattttcttcataaacgcgttgctgagaatgggttgcaagagagactcaatgttatatgcaaagatgcaatgaaggttgagtttcctcagttcgatcttgttgtggccaacattccttatggaatatcttnccctctcatagctaaattggtttatggaaggaacccttttagagtgcaacattgcttcttcaaaaggagttgcacgtcggttactt

SEQ ID NO: 25226 - DNA, 528 bp, Gossypium hirsutum
  Clone ID: LIB3583-052-P1-K6-F6
aaaaaaaaaaaaaaaaaaaaaaaaaaaaaaaaaaaaaaaaaaaaaaaaaaaaaaaaaaaaaaaaaaaaaaaaaaaaaaaaaaaaaaaaaaaaaaaaaaaaaaaaaaaaaaaaaaaaaaaaaaaaaaaaaaaattaaaaaaaaaaaaacaaaaaaaaaaattaaaaggggggggcacttaaaaagccatggagggggaggggggggggaatcacccaaaattaagtcactttaagcggatccccaatttaaaaagatgggggcaataatcaaaaaggccccaaatgggaaaacacccaaaaaggccaccaatgaatgacgcttgaaaaaaaatcctttatgcaggggggcattaagggcgcggggtgtagtgcctacatcacttgccaacagatttagctggccacacctttaatgtccgttccttttttttcgccccatttaccgggggttagggtgggtttcttccccggggggccactaaagggggggcgcccagaagggcccggatttaggggtttccggaactt

SEQ ID NO: 25227 - DNA, 640 bp, Gossypium hirsutum
  unsure (1)..(640): unsure at all n locations
  Clone ID: LIB3583-052-P1-K6-F7
ccccgcgtccgcggccgcgtgggctgtttttttgcacttgttaacttttatataaacctcttgagtattatcttctaaactttctggcttatattttttttggtatatttgcttgacacctctggagtaaagtactttttcgaaatctcaatgtttgtttcatttctcctttcaattccaacagggcaatgtgtttttctcgtctttgtttgcctaataaagcaggtacttttttgttaaatgttttcttgatctgttggccaagagtttgtgctaagatttgcatttcaactttaggtattattcttgtttatgctgtggagactcgcatctatatataaactaaactattgaaccacttctgagtaatttgcaaataatgaatgaaccagcttctcaagctagtattaagctgtgtcactttcatctgcgcataatgtgatggnttgatagntgaaattatggatgatctgaatctagctataggtgattaaatatatgatcaccaaagtagtggcatccatctaaagtagttttctaccttcctgggctaagttcagttaagtctatatcatcatcctccccttggcatattgcattcattttagctatagagttatttgcacaatgggtgattatc

SEQ ID NO: 25228 - DNA, 687 bp, Gossypium hirsutum
  Clone ID: LIB3583-052-P1-K6-F9
gcgttcgttttgaggagacttgcaaacgatgaaagcggggggggtcattaacaaactaatgaaatgttaaataccttcctggtattaagctcggcaaaaatgtcattgcggatccagacctcgacaatgcagtaaaagatgcaaacatgttggtctttgtgacccctcatcaatttatggagggcgtgtgcaagaggcttgttggtaaagtaaggggagatgttgaggctatttctcttattaaagggatggaggtcaaaatggaaggcccttgtatgatctccaatcttatatccgagcagctcggcatcaattgttctgttctaatgggggcaaatatcgcaaatgagatcgctgtggagaaattcagtgaagcaacggttggatatcgagacaatcgagagattgcggagcaatgggttaaattattcagtaccccttatttcatggtcactcctgtccaggatgtggaaggggttgaactatgtggaactttgaagaatgttgtggccattgcagctggttttgtggatggacttgagatgggaaataacacaaaggctgcgataatgcgaattggtctaagagagatgagagctttctccaaactgttattttcatctgttagggatagtaccttctttgaaagctgcggggttgctgatgtcatcacaacatgcttggggg

SEQ ID NO: 25229 - DNA, 578 bp, Gossypium hirsutum
  unsure (1)..(578): unsure at all n locations
  Clone ID: LIB3583-052-P1-K6-H7
gcgttcgcccagcgtccggctggtttaatgattatggagggggctgtaatatccatataactttctagagtggtaaattaagagtaaataccaagttatatgggaaaatatttttatctttagttgtgagaaaaattgatgcaaccatatacctagtgaacatgatgttnaaaaattatcagccttatagcatagtgtgcactatacaatcttaataactcaatcggtttcattcaatattgactttttaattgtgtttgatgctattattagttgtgttatctttcttggttattattccggtcttgaaagttgaatttgattgagaaaaaaacttaggatcctatcttgattttgatacacatgtaaaaaaaatacttatatgacatttgattttcttgattgttttactggctgaaatgaatctgttcgtatacacaatagatgagtacttcagtggttgaagttagtggtgaaaaagtcaaagcaatatcggataagagattgacagaaatattttgtgatattngtattaaagagatattgaaaggcaataggcctggtactcatttcacaaa

SEQ ID NO: 25230 - DNA, 257 bp, Gossypium hirsutum
  Clone ID: LIB3583-053-P1-K6-A2
aaaacccccaaaggagataccagagagtggcaacaagaatgcccaccgccagaagaaaggccacagccaccatgcccacaaaggggcctgaaaccattccagccaggaccaccaccatcccaaaggccattccaggagtggcagcaacattgccaccagccaggacaaaggccggaaaagaacaacaatgtgtgagggaatgcaaggaaaaggaccacgagaattcatggaggggagagagagaagaagaagcccaa

SEQ ID NO: 25231 - DNA, 388 bp, Gossypium hirsutum
  Clone ID: LIB3583-053-P1-K6-A8
gcgttcggttggcagaccatgtctaggactggggccagactggcaaacacagctatctcgcggccaagcctctcgtttaagtcacaacaagcgacggacgtactgcggtatcctacaacgttgctccacctaactggtccttcgggcagaccttcactggcaaccactttcagtagccacctaatgaccctcttttttgttaaattaaatgttgaagtatatagccatagtataaactaggtctagctagttagataaattgtagtatatgttcatagggaccaattatgggcctcttgggtaaaaatcaacaaaagagtttattttaaatagccctttatcattttgggtttagtttaattatggggttggtgtccctacttttttc

SEQ ID NO: 25232 - DNA, 167 bp, Gossypium hirsutum
  unsure (1)..(167): unsure at all n locations
  Clone ID: LIB3583-053-P1-K6-B1
acccttttaaagagttggtaaacgagacctgcgacccgtgcagtaccttcttgccatatggacaccagtgaaacggcaaactccttcaacagcccgaaagaggtgtaattcccaagagcatggcaaattgtgtgatgatgagacatgntttcntcttgcaaatagta

SEQ ID NO: 25233 - DNA, 560 bp, Gossypium hirsutum
  Clone ID: LIB3583-053-P1-K6-B12
ccgtatcttttttcctcctcactttcctcctttcccggggggggctcttctacctatactttcacttctatccccaaatccctttctctccatacatcctcttccaaaaatcaccggacactttcccttgcaatccccacattgcacaaattcgaatctcaagggtaaaaattcttatggtacaccccccataatgggctcagaaaccagctttctgacttcaaaaatgcacttctaatggctgggattttaaaccgtactttgattatccctcctattctttctcaccatgcaattgcactcggtaactaccctaagtttatggttcaaagccctaaagaatccttgtttcggttcgagatcatattattgagctcattacaagtggaaggtaactgggtattgctcaatttccctgtttatacatctattgaattctgcgttttacttaaattttgttgttgagctatatgtataggtcaattctgagcagaaatttcatagtaatcttaagatttgggactttggactttaaatttccttttgatttcaatttttgt

SEQ ID NO: 25234 - DNA, 464 bp, Gossypium hirsutum
  Clone ID: LIB3583-053-P1-K6-B4
gtgcagccactggtaaactactacaggtgaggcgcctcctaaatccagccaataccttactacaggctgtgcctaaaagtagagagactatgagcgatgttccggattgtgaagataggcttcacaggatccaaatgtattcacaccacgaaactgaactccgtttatatattacccttactggatctccaccaatgtttagcatgatgctttctatagaagatgagtttatggactcgcctgaccttaaaaacagccctccacgtgcacatcctgctgcagcctaaaactcacctatcacagatcctaatgtatgcatggatcctactgcaagctttaaacacgacttccggctgcgacataagatgcatgcctggctacctaaactgttatgtatcatcaaattgacatgctatctattctgcacttgctcatgcaatatccaaacaacattgctcaaggaa

SEQ ID NO: 25235 - DNA, 685 bp, Gossypium hirsutum
  Clone ID: LIB3583-053-P1-K6-B5
ccccgcgtccgcttcacttcctcccgctctatttttatcttttattttatgtttctcagtgaagcatactttcaaacagtttacattcttcaatagtttcaatgtcactcattctagatccagccctttgataaaaaagaagaagaacccaaatccaatttctctggactcgtgagaatttaaaacacgaacaaaagaaaaagggtggtttgagggagtcatggtgtttttgcaaaggagtaagcaagacggaaagaatgaagggcaccattttctcaaataaagctccggcaatggccagaatcactggcgccgccgctgatggaatctctgtcaccggattcctcatccaccggaatcttctcttaactactcacgttaacctcccttccgtagctgctgctgagagctccgagatccggctccaaaacggcgttgctgccactctcgtacctcaaaggtttttcattaccagttctgttttagatctaacaatagtgggcttagatgccgtggatggagaatcaaatacccaggggcaccaacctcattacttgaagacgtgttctaaaccgaatttatatctaggaagtgccgtttaccttctaggttacaccgagaaacaagaagtgacagtaggtgaaggaaaggtggtgattgccacggacaatctcataaaactgtc

SEQ ID NO: 25236 - DNA, 606 bp, Gossypium hirsutum
  unsure (1)..(606): unsure at all n locations
  Clone ID: LIB3583-053-P1-K6-C11
tcgcccagctccgtcggtacaaacagctttatagggaaggggggccaacanaggcttttctgctagtagaaatcacgaagaactatggtccatccaaaatgaaaaanaanaagtgaattatcaccaatggtgattttcaggattattctattgcctacagtgatgctggtctaaaggctgtgccaagaggccaagcatggtattgaaaacagacagtactggntctggnaacctgcgaaaaagttgcatcctggagatgctgggggagaaaagatgcagatgctgatgatgaggatagtggaaatgcctctgaagctggtgacaatgcatcaggcaatgaatctgcaggtgatgaatgctctcgtgaagagcatgaagaagaggaagagatgggccgcgatgaagttgatggcaaagctgagagtgaaggtgaggctgaagggatgactgatgcacatgtgggaggagatggcatgtcgtcattttcagagcattttctttttacggtgaagcctcttgcaaagcatgtacctgcagttttaccctgaaaaagatcgaaacagttcttgtgttttctacgcaaatgatgatttctatattcttttc

SEQ ID NO: 25237 - DNA, 577 bp, Gossypium hirsutum
  Clone ID: LIB3583-053-P1-K6-C12
ccctcgcgtccgtaaaatgttacaggaggggggtgggggggacgtctctactaacgactctggtatcttgttctagttctagcttcattttaacagagtgctgtgtcacctattgcaacctgactaatatatggatttacatagattgcaaaagtggtaagtgcatcaaagtaattgaccgactgagggagcatgaaatgaaggggcttatctcttgtgttagttgcattgtctctagatgcaagtgagagctggttggttagacctttagaggggaaaaatctttatatgattttgagttacttcggactaaaaatatcatgcaattatgatactgctagacacactaacatttggcctttctttaagttggacgaaaatcctgtttttaaccgggggctgggaccagttaaatcgcttaacactcagttgcctgggtgtttcctcttagacttcaacatatgaagtctactatcacttatctttacacgagggattcttattctgggtcttatgagcactcatttttgcccatgctagtgaaagatctttcgagtacctatcaagtatattgatt

SEQ ID NO: 25238 - DNA, 696 bp, Gossypium hirsutum
  unsure (1)..(696): unsure at all n locations
  Clone ID: LIB3583-053-P1-K6-C5
naagngcggncgccttgccgatgagaacatccgcgatgaggctcgtcgccaccgcttcattgccaacaacaccttctccgccaagtacgttcccttcaatgctggacccgactccaccgagtcgtactcgctcgacgagatcgtataccggagcctttcgggcggactgctcgacgttcaacatgacattgaggctttgaagaagttcgacggcgcgtattggagggagttgttcgattcacgcgtggnggaaaaccacgtggccgtacggatcaggagtatggtccaaaaaggaatgggttttacccgagatagacccgaacgacatcgtttcggctttcgaagggaactccaatctgttctgggccgaacgttacgggaaacagttcttggggatgaacgatttgtgggttaaacactgtggaatcagccacaccggtagtttcaaggatttgggaatgaccgttttggtcagccaagttaaccgtctgagaaaactgaaacgacccgtcgtcggagtcggctgcgcatccaccggcgacacgtcggctgccttgtccgcttattgcgccgccgctgggatcccttncattgtctttttaccggcaaataaaatctncattgccccattaattcaaccgatagcgaatggctctttcgttctgagcatcgacaccgattttgacggttgcatga

SEQ ID NO: 25239 - DNA, 637 bp, Gossypium hirsutum
  unsure (1)..(637): unsure at all n locations
  Clone ID: LIB3583-053-P1-K6-C7
gttttatccttacccagtttcatgggggaaaaggccctcctggttggaggccgaactgaccctgcaaatgacaaagtttcagtgtggtcatttgatacggagacagaatgctggtcagttatggaagcaaaaggagaaataccggttgctcgaagtggtcacactgtggtccgagcgagctccgttttaatcctttttggtggtgaagatgctaaaaagaagaaactgaatgacttacacatgtttgatttgaagtccttgacgtggctcactcttcagtgcacgggaacaagaccatcaccaagatccaatcacatagcaactctttatgatgataaaactctttttgtctttggtggagcatcaaaatctcgaacattgaatgatttgtactcacttgactttgaaacgatggtatggtcgagaataaagatacgtggttttcatccatctccaagagctggntgctgnggaattctttgtggaacaaaatggtacatagcagggggtggaagtaggaaaaaaagactgcggagactttcatctactacattctcaagtctgagtggtctgtggccattacgcctctttttactaatcataaccactaacaagggatttagcctagcactcgtgc

SEQ ID NO: 25240 - DNA, 566 bp, Gossypium hirsutum
  Clone ID: LIB3583-053-P1-K6-F4
cccagcgtccgaaaggcttcattttgcttcttttttttggttgagccattttagcttatgttgttttagggtgtattcgcatgcacttgatgatggatgaccaaggcggtaacaatgctgtaactagggaatacaggaaagggaactggactgttaatgaaacaatggtgttgattgaggcaaaagagatggattatgagagaaggatgaagagaagtggggatcacagtgaagggaggaacaaaccgacagagttgagatggaaatgggtggaagattattgttggggaaaagggtgtttaaggagccaaaaccagtgcaatgacaagtgggataatctcatgagggactacaagaaagtgagggagtaccaaaggaaagtagctgagagagaagggaatgatagtaagcaaagatcatattgggagatggagaagaatgaaagaaaagaaaagaacttgcctagtaacatgttgcgccagatatatgaccgtttggaggaggtggtggagaagaaaggagctcaaacggtggccgctacggctggtggtggtggagggtcagat

SEQ ID NO: 25241 - DNA, 460 bp, Gossypium hirsutum
  unsure (1)..(460): unsure at all n locations
  Clone ID: LIB3583-053-P1-K6-H12
tcctgtcaatatttaccagttcttcaaccatgctggaaccccttccaccaaattgtgggtctttatacttccatccttccatcgccattccgtgcgccactgtgttagctgttcttggtacgtgtagtgaactttatacttctgaatctgagtgattttcatttgatttcttggatataggctctaattcattatctgtcttctgtttcccaattcagtttcctaataaccgtcaacgcatctcccttaacctgtatttcatgaaaaacctttttctttcgccatagcgacagccattaagcacgcccttgcctcggtcgttgntagatctgcaatattatctcctgggtaagtacctgatgccataactatcccgtctttatttcgcgcaatgactccagctactgaaatatgctagatctggttaaaagacccatcaaaatttatttttattacatct

SEQ ID NO: 25242 - DNA, 702 bp, Gossypium hirsutum
  unsure (1)..(702): unsure at all n locations
  Clone ID: LIB3583-053-P1-K6-H2
cccggttcgacccagcgttcttggccgcgtgggtttgtttagcatgaaccaggtaaaccaatccaanaactccaaatgagataaatcctggggccaatcatatcgtaatgtattccatgtttcttttgtaacagtcaatcacggaatatgtgctccctgttctccaggccttgcttgcatcttggacatactccctcgtttgttaaccttctgattcttagattcactagagtaggcaaataatacaatcgtaccttcttcagatgcctctccaaaaagaatacaatcgtcagcgaacagtaggtgagtaatctggggactccttctgcatgctttaattcctctcagagacccttcctctcttgcgagtcttaagagagtcgataaaccctcactgctgatgagaaataaaaaaggactcagcggatctccctgtcgtaatcctctcattggccaaaacgttttcccgacttcaccatttagaacaatcgagtaagagactgtgcttatacagtgcataatgagtcgaatccaacttctattgaaacctattttgcccatcatttgctccaaaaattcccattccacctgattgtacgccttgctcatatcgatctttattgccatagaacctttctttcccacccttttgttcctcatagaatgtagaatctcataagcgagcaaatattatcagggatt

SEQ ID NO: 25243 - DNA, 300 bp, Gossypium hirsutum
  unsure (1)..(300): unsure at all n locations
  Clone ID: LIB3583-053-P1-K6-H7
cccacgcgtccgctaatccacaggcgtggccatgcctcttcatgcacctgcaattccacatcgttgagagactcattccaaaatagctagctactccaaaatactcagttgctctaaattctctgcctttggtctaaccatggttctctttctccctttgcctnctatnctnannactcaagtcaaagcccatgnncttggcatctgggcctttgcacacaggnaaaagccccccataggggctgaaaatcacctccgaagcccgagaatcatgcattttttttttcctattgcatcttt

SEQ ID NO: 25244 - DNA, 337 bp, Gossypium hirsutum
  Clone ID: LIB3584-038-P1-K1-A5
gcagtggttaaagctactcgtccccccaaattacactgatttcatataaggaggccaaccatctgatccagagggcttgaagagaaaaattaacatgatctcttgctaggttgatgctttctatgagaagtatgtagatgcgagattcactgagaagggaaaagctctaccggttgtacctatactctacaaacggaatatggatatacactatgtgctgtcgtgtgatgagcgttaaggtgacggaattattcgggacctgttacaaaactctatcgtcatatgagtgctatgtggaatgtgtatagcacgaactgtgacaacgcatatgcactgt

SEQ ID NO: 25245 - DNA, 541 bp, Gossypium hirsutum
  unsure (1)..(541): unsure at all n locations
  Clone ID: LIB3584-038-P1-K1-A9
cccacgcgtccgcccacgcgtccgcaactttgtgatatattatgttgttgtcccttgtgcagtactagctctgtgtattcatccaacaacttcccataatctattgaaccggatttcctgggcattctgtgtatatctggaagctgcttcagttttacctcagttgcgagtgatgcaaaacaccaagattgttgagccttttacagctcattatgtgtttgcgttgggtgttgcaaggttcctcagctgtgctcactgggttctccaggtttgatcttgtgacgttaagttgaacatgattggttttccgttagtcatgtattaacactagctattttgaaagtgagacccagtctgtgcattaagtggatactagtctgtttattgtaaaatttatctacttaggaaaaagaaagatagcttcagcctgcatgattaatgatcctgaaggttgaattgaatgcttattgtgtgagtgtggttgttggttctagatgttagttgatgccattttaattagcctnctgtgtcaacataagtg

SEQ ID NO: 25246 - DNA, 409 bp, Gossypium hirsutum
  Clone ID: LIB3584-038-P1-K1-C5
cccgcgttcccgactgtgctccagaccagtctggcgcctacgcctcaggtcgtaggggggggctcaggaccatccttttccttacactttgatggccctcctctcatttagagagctggcttacgctggctctgctaatgtccagtgcctctgctctattgacatgagcgatatctgtatgcatgtgtctaactgcttcaggagagaggttgtgctggatctacaaatgattgatgggtggaggcactgaacactcgagatgctactcagtggagttgtcatgcgatcatagatgggaggagcttcatgcctatacgttggctgaaccacgttggatgatgctggtgtctatgttcggatctgtgctggtggttgctcggcgattctctactgggacaagccgatgtgg

SEQ ID NO: 25247 - DNA, 356 bp, Gossypium hirsutum
  Clone ID: LIB3584-038-P1-K1-C6
ccaacccttccgtttaccgaatctttgaggtttgatggagcccttaatgtggatgtgactgagtgatgggctaacttttgcagcactccctggatcccattctctcatttaaataacacccttatcattacacttataatatctaaccatcctcctctattgacatgatcgatatctgaacctatgtttctaactacttcaagacatactgttgttgtaaatctacaaatgaatgatttggggtagcattcacaactaaagatgctaattaatggttttatcaccaaaacaaatatgctaggtgctacatacacatacatccgatgttcaacattggatcatggtacccagtatat

SEQ ID NO: 25248 - DNA, 610 bp, Gossypium hirsutum
  Clone ID: LIB3584-038-P1-K1-C7
ctttatgatttagctaattagtgctcaatttaacaaggaggttgacaaagagtcttcagcagctaataaaaagcaggaggaggatgtcctggctcccaaacacctcagacgagtcaagactcaggaaccaggggtggtggtgtcgactcagttgagacaatcattccaggggtaagattaatattcgagaggttgttttacgagcccgtgaatccaagttagggaccgaatctgaaaccaagtcaccatacaaagagaaaaccattttgtgaatggattcatgggatccttttgttggttttagagactccatggaagcaatggtggaagctcagggattaaaatactggggaagccttgaagagcattttgggtggtatttgaaagctactagtgaaagcagccatggatatatccttggtgctttcattgatttgcttctcgatgttagtaaattgcatttgggtgactaaaatacaaatgtcccaaattttttagggttgcctcatttaaattaaattaaaattagtttggggctcaaatcataatctttttcaatgaattacaatgacccgtggtttattttaaatacatggggaaataaaataaa

SEQ ID NO: 25249 - DNA, 554 bp, Gossypium hirsutum
  Clone ID: LIB3584-038-P1-K1-D10
gaaatacctcgaatgcgattgataatagatgatagaaaattatgcacactcatcctgaacattatgtatataaactcaagtgcgaaatcccagattcgcagtctcttttttattatccataccaatgtcaattctcttcttgaacaatttcttagcggaatcaaccctaagctctgaaccaatggcaaccaccgacgccaatttgggtggatttcggccgttcggaggatcccaacacagtggggagctcgagaacctcgctcggttcggcgtcgatgagcacaacaagaaagagaagcgcacgcatgagtacgtgagggcggtgaaagcaactgagcacgtggtggcggggacgcttcaccatttgactgtggaagccattgatggtggaaaaaagaacgtttatgaagccaatgtgtggatcaagccatggatagaacgtgaaggaatcgcaggagtttaaacacgccgatgattccccttcttttacgacttcggaccttggtatcaagaaagatgggcatggtcatcgattgaaggcgtgcgaatacatg

SEQ ID NO: 25250 - DNA, 364 bp, Gossypium hirsutum
  Clone ID: LIB3584-038-P1-K1-D8
cttggagttgcatgtaaaagatgggcatgtaaaactaacatgtcttggacctgattagttgggtggtgagaaagtgcagttcacagttccttcaaatgtttgttttgtatcatttgcaacaaaagattacaacatttatactgagtggcgcattgacaaataatgatccaattgtatgctgagagccattattcacttgtaagatgcatcctgtgcacatgctttatagttcacaagacatgctatctgctgaatcaatccttgcttgaaacgtgggtttcccatacttgaccatatcatttctttactaacttatgctgagtgaaacaatgcttctaagatttatcttactgttacaaatatt

SEQ ID NO: 25251 - DNA, 474 bp, Gossypium hirsutum
  Clone ID: LIB3584-038-P1-K1-D9
ggcttgtctaagtctaaacatatggcgctcattgatatgcatgcttgatgctgcagtgccaacttcgagaatcatcaaacaggggttgaataacaacaccatctacgcagtcacattacaggattacacgatatccgagatgctatttcattcactgtacttggtggatgttgacgaggaaagaattggcagagctttgaagccgaattcaaagaggaatggctatcattggacgaacaatgatggttcagtttccaacactcggctatggtggcaccgcagaggattaaagcatcaatggggttatgtgaatgatgaaagggggattacaactgatattgatcgcatgactgcatttaggacagctttaacagcatgatccaagtgggctgactcatatgtggatactaacacaactaaagttatatgataaggaatatatccatcacactacaacggctcggacatgaatga

SEQ ID NO: 25252 - DNA, 334 bp, Gossypium hirsutum
  Clone ID: LIB3584-038-P1-K1-E6
gccacagccgtccgcgcacgcgtgggtttgactatactttttattccaggttttattgattgatttgcctcaattgaaaggagcagatgtgaatgagattatactcacacaatcatctttgcataagttcgaagtcaacaattttcaacaaatcttttattattttggctatttatttttttacatattactatttatttattagattgtttctttttctctttaataattcgttatctgaaatgagcaaaccattgcatggttgttcaaaagatagattttattttataattttggtctaaaattaatctaaaacatcttttaaacagaataa

SEQ ID NO: 25253 - DNA, 441 bp, Gossypium hirsutum
  Clone ID: LIB3584-038-P1-K1-F2
cccacgcgtccggtgccgtacacatagacgcaaggcttgcaagattggaagagagatcacggcttgtgcagattaatgatgagagcctttgtgattcttgtcatgctcgccttggaaccaagctttttgccatgtatccagatgatacagttgtctgttacaagtgtttccgtcgtcaaggcgagtcaacgtctgtaactggtcttgattttaagcaagatgtcttattcaaacccggttggctggttacccgctaagccaccagaagttaatttcaggtcgaagagctgggcgaagaagctatgggtctccctttatttgctttgcttcagtcatgtataattgctagctttttgacacatttctgtgcaccttaaaaccacaagggtgacactcccttttttgaaagccctcttatgacattccctttttttctctatt

SEQ ID NO: 25254 - DNA, 567 bp, Gossypium hirsutum
  unsure (1)..(567): unsure at all n locations
  Clone ID: LIB3584-038-P1-K1-F8
gtgaaatctgggagaaatggaatgtctatgtggcttgaagggcttagaagaagcaatgttgtctctgtgtctggaatacctgagtattcatacaaggatttgcagaaagcaacttataattttacaacactaataggacagggagcatttggtcctgtttataaagctcagatgtcaactggtgagactgttgcagtaaaagtgcttgcaacagattctaagcaaggggagaaagagttccagaccgaggttatgttgttgggaagactgcatcacagaaaccttgtaaatttggttggatattgtgcagaaaagggtcagcatatgcttgtctatgtgtacatgagtaaaggcagcttggcttctcatttgtatagtgaaaatcttgaacctctgagctggaacttgagggtttatatcgctttggatgtagccagnggcttggaatatcttcatgacggggcagctcctcctgtaatacaccgggacattaaatcttccaatattctgttggatcagtccatgagagccagggtagcagattttggtctttcaagagaagagatg

SEQ ID NO: 25255 - DNA, 251 bp, Gossypium hirsutum
  Clone ID: LIB3584-038-P1-K1-G6
accggtccgtattcccggtcacgcagcgtacggaaattgtaattgcttatctccaaacctcaactctacagactacatactcctcaatagagcggtcaccttgaccaatcaatgttcgtactatatactgccaatcaacctcctcatgactattacaaaagggcctcctctagctataccaacccgactctcacctaaacagcaactctactctataccaattcagcctttccccttaccaacccttcttc

SEQ ID NO: 25256 - DNA, 149 bp, Gossypium hirsutum
  Clone ID: LIB3584-038-P1-K1-G7
tagatatccttccttccttctcaggaaaccaatcattcatactcacgcatgctcaaccatcagggtggttattatgtaagcaatctaaattctctgcacgtagattacctactagtgcactataaaaaccatggcagtactcaactcaa

SEQ ID NO: 25257 - DNA, 428 bp, Gossypium hirsutum
  Clone ID: LIB3584-038-P1-K1-H5
acgcgtccggatcctttatttttcttccttcacaattttggatcatgctatcccttcggatttttcctttggtagcttcatatattatgccttggaagaaaaattcgattataaattcatcaaagaatcaagtaagtgatgattacaatcaactttgaattttgctttttcttcttaggaaacaaaaactctattacaagtacatatatgttttgttgggttttcttgtgtttgaacatcttctgcatgagttttgtagggtttttatttttcattggaaatatcccttattgcttcatatgttaaatttattttattttattttcttctcctactgtccagttaagtatgataaatttaaatttggaacaaaatttatcaccacattcgacggattccccaaaaaaacattaaaatcgaaatctccg

SEQ ID NO: 25258 - DNA, 392 bp, Gossypium hirsutum
  Clone ID: LIB3584-038-P1-K1-H7
cacacgcgttcgcctgtcggtgaggagattcaattatggtacactcgattttgcattcaaaagattcttgagactgctatggatactgctagggtggaattagaccagactgcacgtcataaggagaaaactgaagagccagtgaagcgagcaagagtctacaacagacgaagaagatcgactaaggtcatggagcgcaagcagctactcgaacagacaaaggaggcagagcctgatgcgccggcagtttatggagccgaagcctcggatgatgcagacaccaaggaggttgttacagaactagacgttgttactgacgagccagtcttcgaggagactactaatgaaacagtgcctgaaccagaagccgaggagatcaatgaagccactga

SEQ ID NO: 25259 - DNA, 417 bp, Gossypium hirsutum
  Clone ID: LIB3584-039-P1-K1-B1
atccaacaatcccacgcgcctcctccgagtttttcagcgactccctgacgtcccccgacgtcctgacgacctcgccgttaatcttccctacattatgtccggtaaccgccgagttgttcgagtcagtgaccgaggcgtttcacagtggcagcagcagcgggagttacaactcgccgagttcgctcaccagttgctgcaccactaccactcagagacggagcctgatgcagagaagcgtcagtagccattccctccaaattcaaaagaatgggtttcataattgtcatttggccaccagccttaatgagtctattgattcttattccgtcccggtgaggagagttttcagtacaggagatttagaccagggaaatagcatggggcagcgaaattggaggtgggagagtccactgggga

SEQ ID NO: 25260 - DNA, 563 bp, Gossypium hirsutum
  Clone ID: LIB3585-066-P1-K1-A11
cttgacagcattgcatttctccagtacatctttagtcagtctttcgctggttggttgtcgagatattactactcttggtcttgcatgtccttgtcttgagaagatttgcttagatggttgtgatcatctggaaagagcatccttttgtcctgtggctctccggtcacttaatcttggaatatgccccaaattgaacaccctcagaatcaatgctccagatatggtgtcacttgagctcaaaggatgtggtgtcttatctgacgcatccataaactgtcctccactaaaatctctggatgcttccttttgcagccaacttaaggatgattgcttatctgcaacaactgcttcctgctctctgatcaagtcattaatattgatgtcttgcccgtctattggttctgacggcctttactctctgcgctggcttccaaatttaacaacacttgatttgtcgtatacctttttgacaaatttgcagccaggtttttgctctggttttcatcttaaggtgctaaagttgcaagcttgcaaatatctctctgacttatcattggaacctc

SEQ ID NO: 25261 - DNA, 473 bp, Gossypium hirsutum
  Clone ID: LIB3585-066-P1-K1-B10
ctctgtcatatatgcagctaaaattacatgataggagttcaaattaaaaacgtgtttatgatgacaattaggttggctatagaactaatcatctctttggcatgatttgacattttgtttggttaactacagtacataaattattttaactagaggtgcacgaatatctaacatgctttgctttttagaagggtgcaagagaatatatagaatatacatagattgatgtatgcatatacaagcatatagagtgaatagtcaatgcatctacagcagcctttacagtcgaaatgtgtaatttgtttatatttgaaacttatgaatcccaaattttgctatgaccagattctgtgaatcattaaaaaattcacttagcgcatgtatcgattgggatatgttaatacttctttttggattgaggtttgtgatttttaagttaactgatttgatgtggtgcagctggtacatctatt

SEQ ID NO: 25262 - DNA, 511 bp, Gossypium hirsutum
  Clone ID: LIB3585-066-P1-K1-B12
cggacgcgtgggcggacgcgtgggcggacgcgtggggtcggactttggcattagaagaatgtgccttgtggatgccaacacgaactgggttggaactgcaactttcctacacccttcgtcaacagaatccagttgggtatactgtaccgatccatcatcctgtgatcaatcaagtttttagtagcaatcgtgctgtaaaaatatccccgaattgtcccgtggcaagactgctgcctgcaaggaagtacatgcctggagaggttgttgctgttcgtgttccactcctgcatctctcgaatttccatattaatgattggcctgaactttcaacaaaaagatacgctttgatggttttgatgctcccttcagatagtgcaaggcagtggcatgtccatgagttggagctcgtggaattggtgctgatcaggtggctgttgctcttttcgcacgctgcaattttagaagagtcgatgagggctagtgatcttcttatggagcagaacgttggcct

SEQ ID NO: 25263 - DNA, 175 bp, Gossypium hirsutum
  Clone ID: LIB3585-066-P1-K1-B9
gacccagcgtccagctacccctacaaccgcacttcttgttgtgtgaacccacgcccccaatcatttgatcagtccgtgcttcgagttctcacgttgaaactaaaccctctgatcattgtcgcgtgggcccgaggtctttaccgatctatggtccgctcactcatatcgctgtaat

SEQ ID NO: 25264 - DNA, 526 bp, Gossypium hirsutum
  Clone ID: LIB3585-066-P1-K1-D4
attacgtttcatgatgtccggaatgccaaggcctgttagggcacgtgctgctgtggcagacatgtctggtgatcgcccaagaaagcccggccgacagatacgtatctgttggatgcacactgtcaaccccgatttcacggtggcaagcaagcttaagcagctggtgaaaaggcatgctactgaaactgctgcgatgctcaatgcatcaactggaaaaggaggagaagcttgcaaagcagcaaggagaaactctgaacgcacattacaagaagtatgacatgatagatagtttgatggctgatggagctgctcgacgtttggcacggtgctataatatgagggcctgagatgactcatgccctcttacctttgactgacatgcatcaaccctatgtactaacgtatgtagagaggacctttacttgtagagaggatctttacttggcatgtattagaacacttcagacattagggatagctgctcttctatgataatgcatgtgcacttagattttggtcatgttat

SEQ ID NO: 25265 - DNA, 567 bp, Gossypium hirsutum
  Clone ID: LIB3585-066-P1-K1-E10
agaaaatcactactgttacagtcaaggttcagcttttccaagcttcattcggaaatgcaaaacgacaattttgcaaccgtctatggcgacctcgcagccaagcaatcgaaagatcaccagagcgacggagttttctcttcctccaccacctcatcctccacttccgccgcttctgtcttcgctctttaccatcctcgcatcctcatgcaacaacatcaagatatgatcaaccgccacaacctctgcctcactcgcctccgtgaagctgcaaaggaagccgaggcactccgccaagagaatacctcccttcgatctgccaaccgagatctcaacaagcaactcagcgcactgatccaagtctctgtgcagaaccacttttcatcatctgattacaataccacgccgattgagttggtgaacgcgttgcgaggactttgtctcggtagtggcggtggaggggaggtagatgtttctgatgagagtccgacgagtgtgatggaaggtggtgcggtggacgtggagcgggtcatgttacctaagatcatatctgttaggttctaatggata

SEQ ID NO: 25266 - DNA, 448 bp, Gossypium hirsutum
  Clone ID: LIB3585-066-P1-K1-E2
accacgcgtccgtgtcaatgcgattgcttgggctccccatagctataagcacatttgctctgcaagggatgatacgcatgcccttatttgggagtcgccaactgtcgctgggcctaacggaatctgtcctttgtctatgtactcggctagttccgaaattaatcagttgcagtggtctgctactcagcctgattggatagtcattgccttatacaacaaaatgcaccttctcaaagtttgaggttgcctgcttgaaatgtattcaactctcatttgtgttgcatataatgctcacgcttgtaattaggtgggagttaaaaactgtagaatcaggatttatctggctgataattttgctagtactttgtaagaaccagcttaatctacaataatttgttaggtcctcacatcaaatatgatactcgaatacatatttggattgtgattg

SEQ ID NO: 25267 - DNA, 566 bp, Gossypium hirsutum
  unsure (1)..(566): unsure at all n locations
  Clone ID: LIB3585-066-P1-K1-E6
cccacgcgtccgcccacgcgtccgggaatctggattctgttaactcgacgatgtaattggatttggatttactgctattcgaattgtctttgatttgcaaaagcggcaatccaatcttcgatctctatcaatcatggataccagcactgttgcagatggcagttcctttttaagtttgtttgcagctttatcatatgggattgcttccatggctatggtttttatcaataaagcaattattatgcaatatgcgcactccatgacccttcttactttgcagcaattggcaactaccttgctcattcactttggtcggcaaatgggttatacaagagcaaaaggggttgatattaccacagctagaaggcttctccctatttctttattttacaatgcaaatgtggcatttgctcttgcaagcttgagaggcgttaatattcctatgtatattgctataaaaaggctcacaccacttgctgttctcattgctggattcttttctggaaagggaaagcctacaactcaggtgaccctntcggtagttttgactgctgtgggagtttatg

SEQ ID NO: 25268 - DNA, 133 bp, Gossypium hirsutum
  Clone ID: LIB3585-066-P1-K1-F1
ctagagagaccatcatcactgcagactactactgacataacacgagacagattataattgtacgtacgatgctatgctatatattcgtgctgtttggcagtggactctccgacagatggcgaacgttactctc

SEQ ID NO: 25269 - DNA, 377 bp, Gossypium hirsutum
  unsure (1)..(377): unsure at all n locations
  Clone ID: LIB3585-066-P1-K1-F10
cctnggcaagcaaaaagagaaagaaaacgagggaggataataagagaganggagggcnaatcggggggagcagcangataagaaaaggcaaaatcacgcaaacacaacgccaaatgtggcagagacgctgagaaagcggagaagctcaaagacaccgcgggaaggggtggccacgggggcggagacagggaaaggctcgacgaagaggactacagcagctgcatcggtggcgaaacggagcaggggacgaagacggaggcctacacgcgcaaagagcacaacaggggcaacggaaaagcaacgagggcaacacgaacaacgggaaaaaaacaccaagaagaggcaagggaaaacaaaacggcccgagcacgggggac

SEQ ID NO: 25270 - DNA, 170 bp, Gossypium hirsutum
  Clone ID: LIB3585-066-P1-K1-F4
cccacgcgtccggttttcccaagttttgctttattcttttatgagatttgcattctgatcccttggaggctgatttgggttgtgttggtatactttgttccggtaattatactacgttttttcagccatgatgaaatgcaatgaatatcagttaatcactttttcatttg

SEQ ID NO: 25271 - DNA, 571 bp, Gossypium hirsutum
  Clone ID: LIB3585-066-P1-K1-F8
tgcttacttaaaggcatctcattgtttcctaagatatcaagcccctgggtgctcccatttgtatatgttacctttgtacaccgtgcctatagccttgctgaatttctatggtgcggaggcacattccgaggttggtgcaatgatcaacggatgtggttgatcaagagaacaacttcatacttatttgccttcttcgaaaccatcttgaagctattagggtattcacagctaaactttgttgttactgctaaagtagctgatgaagacgtctcaaaaagatatgatcaagagctgattgagtttggtgctgcttcaccaatgtttgatattttagccacacttgcaatgttgaatctgtttggtagcttaggggcaatcaagaaggccaccatggatgcagatcaggactccaaggttttggaccaatttgggttgcaaattctgctctgcttggttttggttaccataaacttgccagtataccaagcactcctttttcgaaaagacaatggcaagatgcctacttcagttatgtacaagtcaattgtttttgccttgctagcctgtattc

SEQ ID NO: 25272 - DNA, 461 bp, Gossypium hirsutum
  Clone ID: LIB3585-066-P1-K1-G12
cgcgaacataaccgtttaagtaccgccggcatctcctccatttatttacgggaatagctgggaacatatccataactatcctctcatatccgccgactccgcctccgataccgcttccgcattccgtatcaacagatttactgagatcgacatctagaagacttggtcggacaaccaagaccaagtcattatcggccatggcaactgaacacgaagaatatatgggcagattgaaggcacagttagcaaaattgtttgaaggtccgcttaaagtgactgatcctaacgagctggatgtagagccataggatgcagcctgaaaaggaaaaaatggtgataaccagtgtaacaatgccaaaaccctctggactaaaataaaagagaagggagctccatatcgtgggccccctgcagtgggagaggcaataaaaaaaaatctcccaacctctaaaataatcgaa

SEQ ID NO: 25273 - DNA, 450 bp, Gossypium hirsutum
  Clone ID: LIB3585-066-P1-K1-H3
ggcacacatggcagtggcgagcgcaagcgcacgcattatgctgtccatgttcaccacaacgtgcatgggagaagctagaattccaagagtgtatcctagtggcacatgactgaacgcccatgctacctgctatggcgggtctaacgctgccgtcaccatactaagagctcgtggatatgaaaactcttacagccaatgatatgaaatcaacacggccgcattcaacactgctttgtacaacaagggcatcatctatggtgcttgctatgagatctagtgtgctacatgaacacaggggagccatgcagggaccccaaccatatccagtacattcaaccaactttcgaccaccagactacgccgtttcatgccacaatttgctcgtggtgtaaccctgcttttcctcactaaggacctaatcatgcggcatgttcttataagattggctga

SEQ ID NO: 25274 - DNA, 227 bp, Gossypium hirsutum
  Clone ID: LIB3585-067-P1-K1-A6
cccacgcgtccgggcacgcgttcaagctcatggaaatattgatagtattactagcagatatatatagcatatgcatgaccagcatgagatgcaggctctacaacaaaggttgaatgttaagattaaggcagctggcatttatgacataaatgtgacacttgcgcattgactttcggtaccttgtaatcactgatactcggaactggataaaaccgactctgatgctg

SEQ ID NO: 25275 - DNA, 286 bp, Gossypium hirsutum
  Clone ID: LIB3585-067-P1-K1-A8
cccacgcgtgcgcccacgcgtgcgcacaaaattccagatgggctaaacgatgcaatacactgtagtgttgcatatgtcacagttgttggtcggttatggcaactacgcaagaacgaggcgtcaggataatcattacaatgagggtggtgtaataaacctaaagcataggagtggatgtaatacgctacaaggccaatgagcatttgatccttcttatgatcactatgagtattgggcatgagatttcatctatgctccattctgttgacttaaatatggtagacct

SEQ ID NO: 25276 - DNA, 252 bp, Gossypium hirsutum
  Clone ID: LIB3585-067-P1-K1-B12
cccacgcgtccgctgggttttttttcactttctataaaacctatttttagtgtaatagtttgggaaggcatttttttataatcaagaactggctaacacaaaagataacatttttggggaaaccaacaagagccaacaaatggttatctgcccttattatggcataaacactcgagacagccaaaccgtttattaaaatcttgcccctgacctataatgggggtttcatgtgtccttcaagccaccaattta

SEQ ID NO: 25277 - DNA, 461 bp, Gossypium hirsutum
  Clone ID: LIB3585-067-P1-K1-C1
cccacgcgtccgggttctttatgtgaggtacaggaatccccaaatccctggcaattttggatgatcatggttaaaaatgggaattttgacaaaaacactactctctgtccagaaaatggaaaaaaaataagtaaaatagtgacagacagaaattttccgtgttttggtgagggatgtatgaatcaaccagttgtttaccacaagtactcaatgctgggtggcaaccagaaggtttatttaactggagaatttaatggaacatatgaccttgatgccaacttgggtgaaaatgtgggcaacaactccttcttttcagtctcatggaggaagaatactagcacaggaagttggattttttctcacaggttgacaacatcaactaaatatccctggcttatgttatatctacgtgcggatgcaacggaaggatttaatggtggttatcactataatggacgtgg

SEQ ID NO: 25278 - DNA, 439 bp, Gossypium hirsutum
  Clone ID: LIB3585-067-P1-K1-C2
caaaaacaccccaatcaaagatgagttgcaatttgttcaaaatctacacccacctctctctaaagctcgcggcacgagcagaaagtaacacccattcatcgggcactaagtgccagaatgaacgtgaaaaggctgcatggtcccattgcgtaaacttgtatgagttaaccatgcttcgtttcaacaaaactgttgattccagcaccaatctcaataaggatgatgctcaaacatggctcatcacggctttaaccaatctacatacatgccggaccgggtctatggaactcggggtcccggattatcttctttccatgatgtataacagcggtttccaggtaattagtaacaccctggctctcaacaagggaccttacaaggtaccaacctacaaagattggtttctgtcatgggtgaaaccccgggacaggaaactggt

SEQ ID NO: 25279 - DNA, 268 bp, Gossypium hirsutum
  Clone ID: LIB3585-067-P1-K1-C3
gcgcccacacgtccccccacacgatcggtacaatcctacaggcttccactctcgaagatcctaacaaattggcgtctgaaatcccaggccaaagctaaaaactatctctctttgccataatgtatacaaaattcttgcttccctccagctctacacaaatatggtaagaccctctttctctgaccaaataatgccagtccaaccaccttgcttcacatgttgaacgacaaaaaattcgttcaacatcatccaactcaataccccacat

SEQ ID NO: 25280 - DNA, 268 bp, Gossypium hirsutum
  Clone ID: LIB3585-067-P1-K1-C6
cccacgcgtccggtcctacaaaggcagagagaggttccgagaccaccaactgacttttagacctggatattcatattccgaatacatggattagagtactgctcggattccttcaacatcttactcttttttctgcatataacagttcagtgcttaacacaaatcgcttattagctgtgatatccaggtccttaaagggcagcgtgaaaagctgttcccatcgactaagtgttagacttggatatttcaaagacatggattggaagca

SEQ ID NO: 25281 - DNA, 446 bp, Gossypium hirsutum
  Clone ID: LIB3585-067-P1-K1-D11
tgaagctggaacagatgaacttgtgggaatcccaattgtcccctctgataaaaagaataacaaaaatggggtcatttttgttcttgagaaggcttcattggaagttgctaaagttggaaaggtatatcgaacttgaacttcgtaatgtgcttagtgcttctgttatcgtttacgagtatgagtttttgtattttttaattgataattttcattaaagaagtttggttttcaactgtaatttgtcttgttggttgtaaattgttacagagttttcaactcttgaactcagatgatcatgccaatttcttgcggaaaaataacaggaatcctgctgattacagacctgacataacacatcaggctctactgtcgattctagatagtccggtcaataaggctgggagattgcaagctgtgtatgttagaactgagaaaggtgtactttt

SEQ ID NO: 25282 - DNA, 138 bp, Gossypium hirsutum
  Clone ID: LIB3585-067-P1-K1-D4
cttacgtttgcttccaatgcactcttaaggtgcttgggataataatccagatcacaagggacttaattactgcgaaatactccaaccgtaagttgttacttccacatttatcttttaagttacgtacacaattatagc

SEQ ID NO: 25283 - DNA, 241 bp, Gossypium hirsutum
  Clone ID: LIB3585-067-P1-K1-E10
cccacgcgtccggataaaacaaataaaagactccttttttattactcaatcttacgtccaagggcattcaatttaaaaccaagaggaatgctacacactaataacaattacatgactctcgttcacaacgccaccacttgtataactcatgcactaacaacatcaatcacattataccaaatcacattttcaccacctgcagctgttactaaaacgcccacaccaatcacaacttccaaac

SEQ ID NO: 25284 - DNA, 210 bp, Gossypium hirsutum
  Clone ID: LIB3585-067-P1-K1-E12
aaacattgttctccacgattgcaaaagcaaaataaaaatgaagaacagtaacagtcataccgagctaatcctactccatccttgtatccaaaaacaaggcagctctatcagattatggccttcttgccatacaattaactttttcactattgcgctttctttttaacttctcattatacaccccgaaaagttttttttttcctgtatgaa

SEQ ID NO: 25285 - DNA, 464 bp, Gossypium hirsutum
  Clone ID: LIB3585-067-P1-K1-E2
caggagagaaacgacaccgtcgagtgagctccgagctgaaccagaagcactggattcaacgtcgcggcgatcagaggcgaactctcgccgtagatcaacggcggagaagatgccaaccgaagctgaacttgaagaattctttgctgctgctgagaaaaaagttaaagaacagttcgcggaaaagtataactacgatatcgtcaaggacgaaccgttggaaggacgttaccagtgggttcgattaaattcatgaaagaaaaacgccaaaatcaagccagaaaaaggaaaagaaaaaacaaggaacacatttttagaagaaaaccaagagagcaaccaggcgatatctcataggtactactgatttaaaattttactaaattttagggtttctattttatgtacagaatgagacaatgattaataacggagaagaaagaagaagagataagctcttaattggtctg

SEQ ID NO: 25286 - DNA, 277 bp, Gossypium hirsutum
  Clone ID: LIB3585-067-P1-K1-E4
cccacacgtgcggccttactccggcatgttcaatacttactttcgttgatctttgatagagattaggtggttaatttttcattatggggaagatcatgatcataatcaacggattaacaaggatcagacgtttggatgcgagagttgctcttcaacgcaatgatcttgagctcgatcctgttaacgattcttctatgaccactgactacatgacctacatgtgtaacctcgacagtgctcacagtcaatgtaaacatcatgagcataatgtgaagga

SEQ ID NO: 25287 - DNA, 402 bp, Gossypium hirsutum
  Clone ID: LIB3585-067-P1-K1-E5
cgaacatttgctgacatagatttggatgatgataacatatgttcagtgcctatagactgcgagaatggagcgactgaagaggtaagagggaatgtatcttcatctggcacatccaaacgtaaaagaaaaaaggctcaagaaagtgtcgaagatgaacaaattaaacttgtgagtgaacaacttggcgaaattgctaatgttttgaaacaatttactgcggataagacacctcatctttacaaagaagtgatgtcaatggaggtagaaagatttgatgatgacttcctctgttctgtgtttgattatttagtgagtcatgaatctgaggcaaaagcttttttagtttaaagaaagagcatataaacatttggctttaaaaatttttttaagggttgagatatt

SEQ ID NO: 25288 - DNA, 224 bp, Gossypium hirsutum
  Clone ID: LIB3585-067-P1-K1-F5
cgcatgttagcacaagaaccgaaaatttttcgtattgcccaaagaattgtgattatcatcagcaatcggtgatcgatctgtttttccccgcctccaatttcatcgaatcccttcgctccttctcgccaatcaataatcgagcaatatgtatgtggagaagagatcgagaaacatattatataaaagcgaaatgagaaaaactccttcactggtcgacctttgtg

SEQ ID NO: 25289 - DNA, 408 bp, Gossypium hirsutum
  Clone ID: LIB3585-067-P1-K1-F7
ctcaatcctccgtccattcgttcgtttactcgctttgtcgttggtgctgcaagagccaaagagagggttggggccaataaggaagcttctggcgttacaacagatagtatataggtcaccggagtaataccattagatcataacgaccggcggattcttctctcgatagagctcttaaatggccagcagccgctttatggctagtcctacatcgtacgtcttgattaattggctaacacctagagtaccggttttgttgaccggtgtggcgcatggtatctactccttgtaccgatacgtcgacttctcattactaatacgcgagcttgccaaaaccgtaaaggttcgatcagttttgtgcagtgacgctgataggaacgttccggttcgatatggtaacaagacagg

SEQ ID NO: 25290 - DNA, 175 bp, Gossypium hirsutum
  Clone ID: LIB3585-067-P1-K1-G1
cggacgcgtgggggagattttctttggtatatatgacagaaagagagattaattctatgtactatttggaaaaggattgtaataaacagggatgccacttcatttgtatccttcttttaatagattaatgccatataagcattttcatctaaattaaatataagaaccacaagat

SEQ ID NO: 25291 - DNA, 283 bp, Gossypium hirsutum
  Clone ID: LIB3585-067-P1-K1-G10
gggaaaccaactcctgcgaaacatgcgggggtggttatgggagcgctagctttctggtagatggctattgacatagcgattaaacctttactggacaaggctcgttaccccatggacaactccaaccctgatcgggagcccgacgacatcgactccgatcgcaaggactactcctacttctactcccatcggaagcctatatcttatgctgatgccgtcgccaataacatagcggctgcaagtgcagggcaagattcttgtgtgtggaccaatccaagtaatc

SEQ ID NO: 25292 - DNA, 458 bp, Gossypium hirsutum
  Clone ID: LIB3585-067-P1-K1-G5
ggaaaaagtaatacaattgaagtataaataattttgaataatatttggcaacatataatgcttgctaatacacttgatataatacattgggcagcctctatgtatgcttgcttgttgggttgaagatccaaatggaatttattttaagaagcatcttgccagggttgttgactgtttgtgggttggagaagatggaatgaagctgcagggtgttgcaagtcaaagttgggatgctagtctccttctccaagcgttgcttgctaccaatttatatgatgaaattggaccaactctgatgaaggggcataatttcttaaagaactcacaggttagggataatcctccaggagactttaaaagaatgtttagacacatttctaaaggatcatggacattcgctgatcaagaccatggatggcaagtttctgattgtactgcagaaagtttgaagtgttgtg

SEQ ID NO: 25293 - DNA, 300 bp, Gossypium hirsutum
  Clone ID: LIB3585-067-P1-K1-H3
cggacgcgtgggtggttattgtagccattatatcctctttcattctggctgaacaaatgtttctgggaagggtgattggagctaccgtcataattgtgggtctatatctggtgttatggggtaaaaacaaggattacatgaagtctccacctccaccatcgccactaatggatgggcaaataatagaagcagctaaaatagatatgggtatcacagttgatgacggcaccaaaggaacctcgatcagaggtggaaaattacaagagaaaagggggtcaattatcgggctaaaaattttta

SEQ ID NO: 25294 - DNA, 361 bp, Gossypium hirsutum
  Clone ID: LIB3585-068-P1-K1-B12
cccacgcgtccgcccacgcgtccgcccacgcgtccgggagaccgggatctaaggttcctaaattgcagtattccgagaacattgattccagtatattattattgagagatgaatatgcttggcatatagggggggctctatctcatgaagagctagaggaatggaaactgttgtatcatagttcattaaatggcttaagttttaacacattcctgggcaacatatctaggttgcgtaattactcaattgaactgcagaaacggtgatgaaccaactgtcctgattatcaaggatagagaaggttacatatttggaggtattgcttctcagccttgggagaggcatggggatttctatgggg

SEQ ID NO: 25295 - DNA, 248 bp, Gossypium hirsutum
  Clone ID: LIB3585-068-P1-K1-B2
cccacgcgtacgaccacgcgtgcggcttgcccttatgaccctgctctctgctagggttcactctccgtgagtttcgcatacaatacagctcacgcacatgccctcaaacatggccgtggaaactccagcccagattccccctatggcatcagcgcggccgactgcatcgtgtggcacggtgaccgactcctactcagctgctgatatagaaaaccaagaccgttccccgtcgtctcatgtgccatctg

SEQ ID NO: 25296 - DNA, 315 bp, Gossypium hirsutum
  Clone ID: LIB3585-068-P1-K1-B7
aagaaatagcacatatattgatggagcgcaagaagggtattgacagttggaactgcctattggtgttattgaggacaagccaactggattttgagctggcagatgtgcagcaattgcagattctggaactgctctggtcgcaggaccaacgactgcaataaccatgataagctatgcaataggtgtcactggagtagttggtcaggagtgcatggcagatgttcaacagtacggtcagactatcatctatctagttttagctgggacacaaccactgaaaatttgatctaaaatggtatcgtgcacttttgatgg

SEQ ID NO: 25297 - DNA, 447 bp, Gossypium hirsutum
  unsure (1)..(447): unsure at all n locations
  Clone ID: LIB3585-068-P1-K1-C11
cccacgcgtccgtaactctgctgctcctcttcttcatttttctctattttcagtggaatcaaaacaacagtcacagatttgtcttttcgacaattgtttgttattaaagcaaacaatggttgacgtcgaccggcgaatgtccggtctgaatccggctcatgtagctggtttacgccgtctctctgctcgtgcttccgctccatcaactccgacttctcttcctcttcgcaacggtcttcagtctctctcttctctagctgataaagttataacccatttacgagattcggggttccaagtccagccaggtttattggacgctgagttcgcccgagccgaagccgagttcggtttcgttatcccacctgacctccgagccatattatcagccggcttacctgtgggtcctgggtttcccgattggcgatctngtggagcccgactcca

SEQ ID NO: 25298 - DNA, 334 bp, Gossypium hirsutum
  Clone ID: LIB3585-068-P1-K1-C12
atcatgcgatggtaacgctgaagcagaaatgcgcgaaagcgcaaagtgaagagcagaattaaaataatagtgacggattctaaagagatacagtagatcaatgttaaagaacacaacgtatgacgtcgtatcgtctaatgaggaaggaaggatcggaataacgtagcttagtaagagtggtgatgtagtcaggcacgatgtgtatgaagtcagagacgtcttattgttggcagaggcttacaatattggttggggttagcggaataagatgaaagagatggacatgatgacacgttgatagtccaagcagaatgatagcacgctaagtgggtac

SEQ ID NO: 25299 - DNA, 420 bp, Gossypium hirsutum
  Clone ID: LIB3585-068-P1-K1-D12
aatatcttttctacttagttacaagggctgctatcgggtcttgcttttccaagattcgcacggctttgcctctccttgtgttcttccatggaagaaccaatgctccgctttcaaccaattattactcaaaatcatgccccaacttgttacctactgagaaattcatcgatcactctgctataatgaacgaggctcgaatgggagctactctgcttcgcttgttcttccatgactgctttgccaatggatgcgatggatcgattctactagacgacgatatatcggacttcatcgcacaaaaaaatgctgccccgaatcgcaactctgctctgaggatacaatgtggtcgactacatcacgtctgccggctagatagtaagacctggacatgtttcctgtgctgatatcttggctatttct

SEQ ID NO: 25300 - DNA, 436 bp, Gossypium hirsutum
  Clone ID: LIB3585-068-P1-K1-E12
gttactcgtaggctaagaagctgaccatggaaaatgaaaaactcacatattgcattgcccatcttggccaagcagttaatgtggctgatcagaaattagagtgcatgagaggtaagaattgaaatatattgtgctgaatatagaagcttatatgttatgaattgaactagaaccagaaatcatatacaagtaattttggattaggacaacagaaagtcgattacctgtaggtctagagtaattagacttctgagatatgtatatccaagaaaaacagacgacttctgagattattgtcagggttgtatatcatagctaagttgacatatatatatggatgttacttaggcaagtgttatcttctgcacattgtgcgacaggaaaaaatgcttgagtgtgttcgacccatcaataaactactcaaatgatagcaggg

SEQ ID NO: 25301 - DNA, 449 bp, Gossypium hirsutum
  Clone ID: LIB3585-068-P1-K1-E4
agcaggactgggcgcatcgtcgatctgatctttcatcttagtcagtctttccgatgggcggccatactgcgaaatcgactgggtcacctatgctcgagagtctttctacaattgtagatccggcgtggaatccaaacagcggtgccactactcaaatgacgacgtgacttggcgaaactatcagatgctcgcatgtgcaatggaggcggtaaggtcattataggtcatggcctctgtatacctatgacgtatgtcggtggttcaactatgatggctgatgacagaagcccgctgttgcttaatgacctaatgcatgttcctgatgccgggaagaacttattgactgcctttaagtttgcaaaggacactcagagcatgttacgagtatgatcctaaccgttgatatgtcaaagatcagcagacttatccgaccttgctttgcgggaatg

SEQ ID NO: 25302 - DNA, 226 bp, Gossypium hirsutum
  Clone ID: LIB3585-068-P1-K1-F7
ctttactatccatctctcgccacgactttcaatggccgagcggaaggcgagcgctccactgcgctcagctcctcacccgacaacttgccaagaaggacatgctaagtctgatgcagggccacgagacagccggtaagactaccaactcaagcaagattaagcacgacaagcagccaccacataaacgcacgctggatttaaagtgccaacgcgggagggataacac

SEQ ID NO: 25303 - DNA, 478 bp, Gossypium hirsutum
  Clone ID: LIB3585-068-P1-K1-G12
gttcctctgacagtgaatctggtgctgctaaagcttcaagtccggtattggaagctgtagattccggaaatcaattagatgaaaagacaagtgctgataatcctcttgataggaataaatgcaatgggttcgatcagcttgagcagacttctcaagcaaagtcaagttctgtcgagtcagattgtcaccaagatggggacagtgctccaaatgagagaccagtttcacctgagaaacgctacagggctgctatattgaagaatcgatttgctgataccattctaaaagctcgagagaaagcacttactacgcagggggagaagggggaccctgagaaattgcgtcgcgagagagaggaacttgaatatcaaaggaagaaagaaaaggcacggttgcaagcagaagccaaagctggtgaagatgctcacagacaagctgaagcagaagctgcaacagatgctagactgaagagagagct

SEQ ID NO: 25304 - DNA, 281 bp, Gossypium hirsutum
  unsure (1)..(281): unsure at all n locations
  Clone ID: LIB3585-068-P1-K1-G4
cccacgcgaccgcccacgcgaccggncacgagaaacaaagagaaacnaggcgggaaacaaaggcgaccgcggancggagaggcaagcncgagacagaagacgagaccgacanaaacaccgaaaaggaccaccaaaagcggngccacaggccgcaccaagaccaccacacaagcncngaaaaaggacaaggacgcganaaacaagaaggcgaaaccggaacccccggcgaacagancggcaggagaaangggcaagagggaaaggccaaaaccgcaaagcaa

SEQ ID NO: 25305 - DNA, 182 bp, Gossypium hirsutum
  unsure (1)..(182): unsure at all n locations
  Clone ID: LIB3585-068-P1-K1-G7
cgaagacacagagcnaagngagnnggngagaggangagncgnggngcagcagcnggagcaaagggaaagaagaagggagccncacacaccaacgaccgngcgaagccggnngagggaaagaacaaggacaacgcngcngaggagaagacaccacaggaaaggaacaaggncggnggcaaagc

SEQ ID NO: 25306 - DNA, 456 bp, Gossypium hirsutum
  Clone ID: LIB3585-068-P1-K1-G9
gagctgtaaaaggttggatgcagatcaggaacaaccattagaacatgaaaggtctagtagtgatgagagcgagacttcagggaaactgaaaaatactctttataatcctgctgttgagatatctctttgcaaacacttactatatgaagggatgggggctgaagctgcatgtgaagtgtttgatgctgaaaaactggatagcaaaaaaattagctctttaggtgctgctgttgtgaagaatgataaacttgttgttcgaattgggggtcattactttccatgggatgaagcagtacctattattttagggatggttgcgtttggaagtgaaaaaatatttgaaccaaaaggcatgataccagttgacagagtggagaaatccattgaaggggatccatcaacagatgtatcccgtagtgcgagctggaggctttggcctttttctttgaaaagatc

SEQ ID NO: 25307 - DNA, 486 bp, Gossypium hirsutum
  Clone ID: LIB3585-068-P1-K1-H10
gttatttctattgctgctatgctatcagaggggaattcaatcttttaccgtccaaaggacaaacaagttcatgctgataatgcaaggatgaattttcatactggcaatgttggtgatcatatcgctttaatgaaggtttacaattcctggagggaaacaaatttctcaacacagtggtgttacgaaaattatattcaggtcaagagcatgaagcgtgcgagagacattagagatcaattagagggtcttctggagagagttgaaattgaactaacatcctgtcctaatgatttagaggctataaagaaggccattacatctggatttttccctcattcggcaaggctacagaaaaatggttcttaccgtactgttaagcatccacagactgtttatatacatacaagctcagggttggcacaggtgctcccaagatgggtggtataccatgaattggttcttaccaccaaagaatacatgagacaa

SEQ ID NO: 25308 - DNA, 109 bp, Gossypium hirsutum
  Clone ID: LIB3585-068-P1-K1-H12
gcgacgcgttctactacgcgttctgtgaaaaaatgtgggcctctaaagaatggatcaaaatttgttccttaatgaggttagacgttaacagggtagcatggacagctga

SEQ ID NO: 25309 - DNA, 227 bp, Gossypium hirsutum
  Clone ID: LIB3585-068-P1-K1-H3
ggccgcggtgctgttgaggacgggaacaatgagagctcgacggaaggccgcggtgctgttgaggattcttcggagatggagtgctgggttggatacgaatgatgttgtgaatatttcagtcatgagcgagggtagattaacaacaatgttgtcagcataattggaaaccattggtttcattcttttacggtggatgtggaaatgtcataaaattttaccccttctct

SEQ ID NO: 25310 - DNA, 441 bp, Gossypium hirsutum
  Clone ID: LIB3585-068-P1-K1-H4
atgcgaccgacagttactcacaatggcttcaaatcttttacgagttgcaaaacatcccggccggagtttctctcccacgagttgtacattcggctacgtcaataattgggggacggttactaattcatggaggagaagattcattgaggcataggaaagatgatttctgcatcttagatattagtcacatatcattagaaaaaatgcatcctacaagattgaattcataaagaatgttagcaaacacgtggcgaagacttaaacccgaaggttataaacctgggtgtcgatcatttcatcgagctagtgtcgatgattcgggtcgatatttgcatgtgttcggcagaatggtcgacggatagttcaacctgctgaaccggtagggcttaggtatgatagtgagctatttctggtggagttggtactttaaggttttaatgg

SEQ ID NO: 25311 - DNA, 742 bp, Gossypium hirsutum
  Clone ID: LIB3583-003-P1-K1-A2
attttgtattgtgctgttttgggtttcatgatcatactggagattgtcatgattcgtgtatgcatagatgttttctttttcatacttctaggtgtttccattcatctgtaaggattgggtagatattctttaaaatagttttgaatggagctcatcgatgaaattagttgggattgtttgtgtgctggtgggtattatttgcaaatggactttgatagaaaatttcaagtagacccaaggtatcactatatatcatctgaatgggaagtttttgtgtgattactgatatattcatctgtgttacctaggcttatagcatgtttacatgaagggaaattgagttgtaatcttttaagtgaacaggttctaggttttggctatttcaacgttttaggttgatttgttgttctactattctctcttgtttgaaaagctatgttggtttctgctttcagttgcattatttgcttttaagttgcttctcttgtttttagcctgtagttataaaatctattttatatatatgcttggccttaacagtgaatgagaaagaaagcactaagaagaagaagaagctatgggaagcacaagtattgctactttcaactggttgatgtgataatgttgttttataattggtggttgtgagggtccagttttttagatatattatagtaaaagatttggccaactgatgaaagcttttaaagttgttcaaaatgtccttcaaggcttcaaagta

SEQ ID NO: 25312 - DNA, 667 bp, Gossypium hirsutum
  Clone ID: LIB3583-003-P1-K1-B11
cactaagccacgccacttccgtcacactccccatccccgacaaccgtcgtcgcaccccttagccgacaccaccttacgccttccccgatccaaccgctaccaccgtcaagagaaccaacatcccacccccatttcatttttccttttcataaccttctcctaaacccaacaccaccattcgctggcccttgtctccactgaagcaccatcgaacaagtccccatgccgtcatcgcaacccgtacccggcctcgcaccacgccaccatcgaccccgcgcccatgccccacttctatttttatttaattttccctattatcccacgccgtccgatgccttggccaccgccgaaccacgatcgaacaccaacctcacacccacgtcgcaccatcgtcatcgaacggaaccccatcgccgtgcgccaccactccttttcttccaaaccctattctccctttctttctcttctttttccttggaacacccaaacccccacccaccaccttaaccaaaacccccaaaaacaccctttcaaaaaatttggcccaacctagccatcgctgcagccgtaagcactatcgctgtggccaccactgccgtgcaccgccgctacccgacactgccaaaactatctgcaatattgtttctacgacgggaaccatggtttg

SEQ ID NO: 25313 - DNA, 602 bp, Gossypium hirsutum
  Clone ID: LIB3583-003-P1-K1-B4
atctcgagcgcgcgctgtcgatgtagcagattcacgttcacgtgcgtgcgcctgcgacgttatagtattgcgatagcgacatctaaattaatggcagtggccgtacaacgacaacactgggactgccaaaaccttgcccaactcaaacttaatgcactagatgcacatttccctagctgcagttgtcgtaataacgaacaggccgataccgattgccaatactaacacatgctcaatctgaatggcgactggcactctccctgtacattaacatcaagcgctgtggttgttacgcttaccctcaccgttacagttgcaattgccatagcgctagctcctgctgctttcgctcctttctttttcttcatggtcaccggctttggctgtccagctctagctctaaagctgcgtctacgtttacggtttagagctagagctgaactggacctcaaccaactagaactggatgatggtgaacgttcaggtacagggccatgatcgacagagactggttctttgactttggcgttcgagttcataatcgtaatctcttactctagattgaaacagcaataacacttatctctatctatgtctatgat

SEQ ID NO: 25314 - DNA, 699 bp, Gossypium hirsutum
  Clone ID: LIB3583-003-P1-K1-B6
gaattctctccaaacagcagatatggtttaaggaaaagtaactcaggcaaatttccaagggggcttttctcacaaaagaaaagacgtgggaaggggtatggaatctccaagagacaagggaaaaaaacacttgattcaggagaaggatacaaagttggcccagtttcccttcccaaatggggagcttgctaatgacaatctccatcccgaagagtatttgagttattacaattgtttactaagatgtggaaggttaagtgactgtgttgatttgcttgaagatatggaacaaaaaggtttactggatatggataaggtttatcatgcaaagtttttcaaaatctgcagtaagcaaaaggctgtaaaagaagctttccgcttcacaaagctgattgcaaatccaacattgagtacatttaatatgctgatgtctgtatgtggatgttctaaagattcagagggagccttccaagttttacggcttgtccaggaagctgggttccaagctgattgtatactatacactacattaatatctacatgtgccaaaagtggaaaggttgatacaatgtttgaggtgtttcatgagatggttaattctggagtggaacctaatgtgaatacatatggagctctgattgatggttgtgccagagctgggcaagtgcccaaggcatttggtgctaatggaataatgag

SEQ ID NO: 25315 - DNA, 488 bp, Gossypium hirsutum
  Clone ID: LIB3583-003-P1-K1-C12
ggcattaagtcgtcgactgagcctttcaactttagcctctctctgaggctgagcaacaagttgtcttggagtagaaactctcggtctcaggttcagagttagaaactgctctgccaccgcctcaacgcttggatgcccaaatgagtaaggcttgccgccgggggagaaaacaacgatggcaacttgagcagcgcaaagggtagcgagctcgttcgctttcttgaatagccccgagcggcgtttcgagaaagtgacctgcctcgagccactatccttcaccattttcatctcgatttttcgccgacccatgattttgtgttttctttcagaaatattttgatggcataagatgtgctgaatacatcaacatttatagtaagaaatcagtgaaaacttgaaggccatttgaattggaaatatttctaaattatttgatactgccaaatactaaataatctttcattattttatgtataattaattatctc

SEQ ID NO: 25316 - DNA, 638 bp, Gossypium hirsutum
  Clone ID: LIB3583-003-P1-K1-E2
tgggatttcatatgtacgactacgaattcgatggcccagctcagatatgacacacaggctaggaacccccaattacatggctccagaacagtggcaaccagaaataagaggtccactatcatttgagactgattcccggggattcgcatgcagcattgtggagatgctcactggtattgttccttggcatgggaaatcagctgatgaaattcatgacctggttgtcagacaacaggagaaaccacttattcctagtggccttccctctgcagttgagaaagttctccttggctgcttcgagtctgacttcagaagccgtcctttaatgaaagacatatcgcatgtatttaaaagctcatagaatggaggtgaagatgatgggcgttggacagatcttgggagcacaatcgtatcacacagaaaacatagcaccactggctacacagagtggcttctttcaaaggatcatgagctagtgggtgacacagtgcgtgccacaaagctatctaactcctgcaaacctgaaaatatggatgtaccacaaggaaatgtggtgggcgtagaatatagcaccgatcgagatgtgactggtatggtgaacgatcatggcattcacgacccgttaagagctaatgttt

SEQ ID NO: 25317 - DNA, 646 bp, Gossypium hirsutum
  Clone ID: LIB3583-003-P1-K1-E3
cgtagtcccccatttagcaatatacccaccaagctccaagattctctaccatggcgtctactttaacagcactgacaaatgtgggtctggtttcatctccaacaaccctacccaagaaccaacccatttccacatccagaacttccttgaaaaaccctcgaacactctcactttcccccaagatgacatcttcatcgagactcttatttgggtcattgagtttatcccgattgaactcaccctataccaataatcaccgtgttcgccgcagctgacgggccactgctgaggaagcacctattcaatcgaaaataacaaatgatgtggttgtcgatataagaatcgggaacccagtgggtgaactagctgggaaaattgtgattgcattgtacggtgatgatgcgcctaaaactactgagaatttgcgtgccctgtgctctggcgaaacgggtgtcgggtataaaggttcgggttttcatcgagtgattaaagattttatgagtcaaggaggagattttgatataggagatggaaccggacgcagaagcatatacggtcggagccttagagatgaaagcttcaagctatctcatgctgcaccaggagacgatagtatggcacatgctggtgctaacaccaatggcag

SEQ ID NO: 25318 - DNA, 527 bp, Gossypium hirsutum
  Clone ID: LIB3583-003-P1-K1-E5
gtaaaatagagcctttgtcgtatcaagaagcttcaaaactcccttgctataaattaagagtgttgcttggcattggatttagatacaagttctgaggaaagaaaaatggcaatggctagtgagaaacttttggtgcaatgcttggttgcaacattgttgcttattgcagcggtggaaggagctaaagagacgaccatctgtaacattccattgaaaaagttggagcagtgcaagccggcagtcaccggggaaaatcctccaccgccaaccaaggaatgttgtagtttgataaaacaagccgacttgacttgtctctgcaactacaaggacgctcttcctgctttccagattgaaccttcccgtgcatttgcattgcctcagaaatgtaaatgtaagcatgccgtaccaccacaatgcaagccctgaatcacttcaagttacaggcacaggtgaagattatgaatcatgtctgagatattatttgtattgaaactgttgttaaatttcaccatctttcttcttgttgc

SEQ ID NO: 25319 - DNA, 713 bp, Gossypium hirsutum
  Clone ID: LIB3583-003-P1-K1-F10
atgaaattgtaatttagggattaaattgaaaaattgaaaaatatacatggtaaaatagtgaaataaatcaaatgtagggctttctagcgacctatatgaaatttgactatggtgggttaatggaaaatttcatgaatttcattttatgagctagggactaaattgaaataaaatcaaaattataggggtaaaaatataattttgctaaaatatgattttggaatgaattgaatagagtaaatattaaattgagctgaatttattcgtttagatcaagacaatcctcgtatggctatagatcaatgcaaagataaagttttggaataatcgcccccgtatctacgtttaatcgttgaggtaagttcgtgtaattatattgcatttatatgtcttgtgttgaaatatatatatgtaccatggactgttatttattaatctatcgcatatccaacaatgttacgtcgactaccgagccccgtttgaaccttaggaattcgtaggatacaaatgacatgttattatggtttacatgattcaagtgttggtcttgaatgtcctatcgatggttgaggtctggcatgtgttgcggatactccatagctcgtgagcagcatcgtgtagctacgtttcgacctacagctcgtgtgagcaggcctgttttcatagctcgtgaaagcgtacttattcacagctcgtgtgagcatacatgtata

SEQ ID NO: 25320 - DNA, 745 bp, Gossypium hirsutum
  Clone ID: LIB3583-003-P1-K1-F5
taattatttacacactggttcagatggtggaatcattcaccgcgatgttaagtccacgaacatcctactcgatgaacagttagtagccaaagttgccgattttggggtctcgaaatttaaccttccggacgaagaacatagtgttgatgtcaaaggaacgtttggttatctcgaccccgaatacttcttatcgctgcaattgacgaataaatccgacgtgtactctttcggggtcgtacttctcgaagtactttgtgcgaggccagcggttatggcatcgaataggagggaagaagtgaacttagctgaatggggaatgctttggttgaggaaaggtcaactcgagaagattatcgatccgatgctagttgatacaatcaaccccaactcgttaaggaagttcgtcgagacaaccgagaagtgtttaagaccgtccggtaacgaaagaccgatgatgcgagacgtgttgtgggatttagaatacgcattgcagcttcagttaattccgatgaacaatggaacattcgaagacagtacgactaatgtttccttagaattctcaatgacgcctgtcctccatcggttaccttcaaatagcttcccggccgttgaggaagaaggtgcggccttactatctcgtgatgctttcgatgtattctcattattgagtgttggtgaggctagatagtctccactggtttaaatgttgataagcgctacattttgtaagtactattcttttggt

SEQ ID NO: 25321 - DNA, 569 bp, Gossypium hirsutum
  Clone ID: LIB3583-003-P1-K1-G1
gacatggcaagttggggaatcaggcccaacacagttacatacaacacccttatcgatgcctatggcaaagcaaaaatgtttcaagagatggaaatgacactcgtggagatgcttagagggaaggattgcgaaccagatgtttggaccatgaactccacaattagagcctttggcagcagtcggcaaattgaaaccatggagaagtgttacgagaagtttcagagtgctggtatccagcccaatattaagaccttcaacattctgctagattcttattgaaaaaactggaaactactagaagatgagtgctgtaatggaatatatgcaaaaataccattactcgtggacgattgttacctacaatgtagtgatagatgcctttggaagggctggtggtttgaaacagatggagtatttgtttaagctaatgcggtcagaaagaatcaagcctagttgtgtcacactttgctctctagtaagggcttatggtcaagctgggaaagctgaaaaaatcgctggtgttttgcggatcattgagaattccgatgtaacattggacattggggttc

SEQ ID NO: 25322 - DNA, 606 bp, Gossypium hirsutum
  Clone ID: LIB3583-003-P1-K1-H1
cttaagatctccttcgaccttcatggatacactgattcctagcagactagatagcccaaatggcgcaaacataggctcgacagacatctttctcactattcagcataatccaggtaaaccaatccaagaactccaactgagataactcctggggccaggcgtaatttaatttatcccatgtcttttttgtaacagcgtagtcacaaaagatatgctccttattttctagtccttgcatgcatcttggatagaccgccttgtttgttaatcgtttaattctgagatttactagagtaggcaaattgttcaaagtggctctccaaactgtaataagtaatttgaagggaagttactattccatagctttttgtaacattttctgatttcgatcgggctgtatctattatcattaagcaaattaccatgtaataggattttgtacccactccttactgtatactcacctgttgactcccccctccaagccagaaagtcatcatggggattcttaatcagctgaatttggagaattttttgggcatcaccagttgagaaggtatgttcgatcaattatgttttccaagatctagtgttgttgtcgatcag

SEQ ID NO: 25323 - DNA, 774 bp, Gossypium hirsutum
  Clone ID: LIB3583-003-P1-K1-H5
cggacgcgtgggttgaaactcttagcaaaatcaaaattccaaaacactttcttcagccctttcatatcttcttcccctatcctcactcattgcctccgtccacgtcctatctttagccactgcctctgccgtagcagaaaataccagatttgacagataagtggtttctcttttcttgagtctttcttgcgctaaataatgggtgactttgttagactccctatttgtaaaaagaaaaacacaaagattaaattgacaactaacgttctgagcatctttgatacacacagaaatctcagatctgtcctccttttcctcttacagcttttagatgaccgaccgagagtcaccttcaacctccacctccctcaacctaagttgtaaccccagcttcagtgcctgaagacacgacatttcttctgcagcaaaaatgaacagtatgttcaagttcatttttgttttagaacaaatgacctctgctttactgttacgaatcactaaccctgagcacgactctttgttatggttgttgaaagttgcgtcaaagttcactttcaatctcagtcccatgggagaagtccatctgtctacacaaatccttttcaggaagacattcccgaaatgtatgttccctcatttctgctcctgtttgacaccttggacacatggaggaagccatcattctgtgaaagtgaagattactaaaactagacagataggtgcataagaatcttcagacttgtattttgatttaagaggtagatccatttccat

SEQ ID NO: 25324 - DNA, 521 bp, Gossypium hirsutum
  Clone ID: LIB3583-005-P1-K1-A11
ggcctagacaaaattttaggcccatattttgggccgggcagaggacattggccgaaattttttatgggccgggcccatgagcacctctagtttgctatttgatctgacattctaatttatccattttttgagtagaggagacaaaatgcaatattacttttacgctttcaggtattattttcaatatttacatgcttatatagaggctgctgaaataatgcttgatgatgatgttgcttcaaataaagcaattgggtcttatgggccaagatttcttcaggaccaacggaaaatcgtgccgagattttccgttttgacgcactgcaacactggaaggtttgattgtcttttctcctgctgtttctcttgtaatgttggcaaaaaggcattagaattcatacaataaccgaattggcatattatcatgtgtctctttctttacagtcttgcaacagctggatacggtactgccctcggtgtcatctgtgcacttcatgctgagggagttctggaaagagcat

SEQ ID NO: 25325 - DNA, 523 bp, Gossypium hirsutum
  Clone ID: LIB3583-005-P1-K1-A3
ctcggaacttcaaaaaacccaaaaacctctgatagaaaaaccccaaaactaaaaaaggaaaatctcaccggagagccggactccttatttgattctatcccctcaaaaccctaaacaatttcttttaggatcttgtcttttttttcacagttccttaatgtattgatcacttattctgttgtgttttttgttggatcgagtttggtcccgcaatgtcggatgatatgttgctacatttctcttctaattcctcaaaccaatcggacaattctttgcctacaaagatggctaagcttgaagctcgcttagtaggcaaggtttcttcagccactgtttctcagcagccgccgcaaactcaacaactactgcaacagcaacagccggtttgggcttctctatcgtcggcttcgaaattcgtttctgctgaggacttgtcggaagcttctagttcaagtgattccgatgatgagaacggaagagagtttttaatacaagccaacacattgaagcgccagaaaattca

SEQ ID NO: 25326 - DNA, 516 bp, Gossypium hirsutum
  Clone ID: LIB3583-005-P1-K1-A6
gcgaaaggccccaatttatgtcaaacgtcttaccgattcgaaatcagcaagacattgcctgatttttccagcgtgctggcttctgtacactctcgttctccctcctcctctctacacccatctggtttacttctcacgctcggtctcccttctacctttcgttctcccttgacattatttcgggctccttttccccccttgatttctggttctttctatacatcgattcggggattttctgctagtttggctgaggtgttcggcttatctagcgcagactttcttcacagacttgcttgggttctcttccgctcgctctatctctaaatagctttggtggatttctcttggcgtggcagtgtcgttgctggtgttctctttgtgaacaatctcgtcttcacagattcattatcttatcgatctgcacctaacttgtaaggcattattctctcactctgaaaccctaaaatatcaattctgccctccaatctttgtgagatccataatacatcccat

SEQ ID NO: 25327 - DNA, 440 bp, Gossypium hirsutum
  unsure (1)..(440): unsure at all n locations
  Clone ID: LIB3583-005-P1-K1-A9
cccacgcgnccgcccacgcgnccgccgggaagcgccgaaacagnccaggagccacagcaanggcggcagggaagccgcggcaggnaccaggaccagcaccagaaagnccgacggaaccgccagggggacaacaccgcggagccgcagggcggggnacacnggagcnacaangagggcaangagcgnggaggaacaaccaaaagaccngacacgggcaacagngcaaaccagcgcgacaacagcccgagaagaggccagcgcgccggaaacccacaagaggaacagaggcaacngaggaggcgagcacagcaaacgcagggaagaagngagaggggggaggagnccgaggaagaagaaggagaaggagaagaagaagaagaagaagacaaccccagccgccgcaaccgccaccaggaggaggaggagcacgggcgggaaag

SEQ ID NO: 25328 - DNA, 183 bp, Gossypium hirsutum
  Clone ID: LIB3583-005-P1-K1-B4
atgacatgaagtttctcaacttcattctgtgtatctctatatgttctcattgaatgtaattttgttttgacattggttacttattattcatttgaaatggaaactatttaccataaaagtttgggggggggggaccaaagaattttgttgatggtcccttcttcacccccacacattaacctc

SEQ ID NO: 25329 - DNA, 432 bp, Gossypium hirsutum
  Clone ID: LIB3583-005-P1-K1-B5
gtgacacgatcgatacggaaccgacgctatgattaactgtataatctgattgtaagttttttaacatggaggagggtcaaatgggaattataggtgattgtaggtatttgacagaaaagggttttggatccgatcatgggaataacagcgccttcagactgtgctaatcaaactcttgttttaccggaagccgacggatccaatgctggtgatctcaaaacgtgtctacgtatatgactgcggcttgtccacggatatcttggaagaagatgaccactagttgcttatgactggcatgtgatcacaactgcaggaccgttgaccctatgctattttcatggtgctgacttcttaaagaagggtagaaggcgggccaattatgatacatttgaacgtagtatgatatgactgttatggattactcaccacaat

SEQ ID NO: 25330 - DNA, 522 bp, Gossypium hirsutum
  Clone ID: LIB3583-005-P1-K1-C10
caaccattaaaaagtcagcgcctttttttgtcttttacattctgttctaacgtttccttcgcagaggaggaggcagccgaagatacaggggtgtgttcatggatgtggattgggatttgcatgcggtggtgaggggctgcgccaccgttacaacaaccaccagcagcagcggcggcggctgcggtggtgttgctgcaaacagttctttaatggcggatttataccctcaatcccgtttttcttcgtttggtagccaagaagaaccttttcagggtcaattttcgtgttttccgaaccagttcgaagctaagaacgccatggaggaattgcataagctttacaagcctttcttccccaaatctcaacctcagacaaaacaacagcaagaacatcaacaagtaaagcctaagctgtctcaagttggctctgttacaacaactagtagcagcacgtctacgaacaattctcgatctaaaagaagaaagaatcagctgaaaagggtttgccatgtgccgccggaag

SEQ ID NO: 25331 - DNA, 527 bp, Gossypium hirsutum
  Clone ID: LIB3583-005-P1-K1-D6
cccacgcgtccgcccacgcgtccgcttaaaagatggcaatgtcctgcaaggatggtaaacctgggagcctggatggtgggaaatatgtaaggtacacgcctgagcaggttgaggcccttgaaaggctttatcatgaatgccccaagcctagttctattcgtcgtcagcaactgattagggagtgccctattctctccaacattgaacctaaacagatcaaagtttggttccaaaatagaagatgtagagagaaacagagaaaagaggcatcacgccttcaagctgtaaataggaagctgacagcaatgaacaagcttttgatggaggagaatgataggttgcaaaagcaggtgtcacagctggtttatgaaaacggatgctttcgccaacatactcagaatgctacacttgcaaccaaagatcctagctgtgaatcggcagtgatgagtggtcaacaacgtgaaacacatcagcatcctccaagagatgctagtcctgcagggcttttgtccattgcagaagagact

SEQ ID NO: 25332 - DNA, 413 bp, Gossypium hirsutum
  Clone ID: LIB3583-005-P1-K1-E2
cccacgcgtccgctttctctctggaaaatctgaatatactaagcacacggcatctgagactgcgactagagctaaggaaaaatctatcgaagcaacttaacaaaataaacaggacacgccatagataaccctgatcggaactgatgtgtcactcagagtccgacgagagggaggacaggagcgacacacatactcaggaagggcatctaccttacacactacatgcttatcatcacatcagtggtcgaattactcactactatcaggattagaactgataatgtgtatattgatcgcacaggcagatataacattcggactcacaggatctgcatattcctgacgagtatttgagggtgtatatatatatatggcagtgggactatagaggaccgaacggaagaacaatgtgt

SEQ ID NO: 25333 - DNA, 521 bp, Gossypium hirsutum
  Clone ID: LIB3583-005-P1-K1-E6
gcggtcctcatcactggtgatcttacagatgggaaaagcaaggatttgttagtaatgaagcaaaatgaagaggaatgggttgaatacaagaatgtaatggaagatgttgtgaaaagaagtggactcgataagaacatcttctatgatcttagagggaatcatgataattttggcgtaccagtgattggtggcttattagatttctactcaaagtatagcatcaatgggcaattgggaaggagtggacatgtaaatagtgtcacactcactcttcaggctggtcagcggaagtatctgttcgtggggttggacagcaccatgtctgttgagttacgaggtccaactaatctatttgggcatccaactgaccaactcttggctgaagtagatatgtagctatcacaatgggactctcaaccacttaaaccagcaagcaagatatcttttgggcatttgcctctttcattttcagcatcctctcaatctgggaagaccctgaaagatattttcctaaagcattc

SEQ ID NO: 25334 - DNA, 458 bp, Gossypium hirsutum
  Clone ID: LIB3583-005-P1-K1-F1
gttgaattttctttaatttactatcacatttggtgcttctgagctctggccaaggatgctgcttgtgtgagatatcaaactcgaagcttgctcttcttttctggtatttgacatctgcttacacatctgcatttcttcaagtgtttgtttaagggctccaatatctttgcccgacttcatgaactcaagtgctgccaaactcttatcaatttcactgtaaacatgtagaaaggagtatggggctttcattggagttattctactcttgaaagctctcttggtttcatcaagctggctccatggggcagattgaattgcgcatttatatgcagcatggctgtgcgactgtacatttgtcatgcgcttgcagggataccttagagccattcctaaagctgctacgtaccgatggatgggaaactccgtagacagaaggctgaatccattaaatttgcggt

SEQ ID NO: 25335 - DNA, 526 bp, Gossypium hirsutum
  Clone ID: LIB3583-005-P1-K1-F10
ctgatgagaatgtgttaagattggttgaagagcaaaagagggagaaagaagaggccctgaaaaagatacgtgttctggaaaaacagctagatataaagcagaagttggaaatggaaatcgaagacttgaaaggcaagctgcaagtgatgaaacatcttggacaagatgatgcagctgtacagaagaagatggaagagatgaataacgagttgcaagagaagattgatgatctgcaagatctggagtcaacaaacaaagctcttatatacaaagagcgtcaaagcaacgatgagctacaagaagcaaggaaagtgctaattcagggtttgccagaattgttgggtaatcgcactaatattggattaaagagaatgggagaccttgatccaaaggcttttcatgacacttgtaagtcacgatttcctcctgatgaggcggaaattcaggccactactctatgctcatcatggcaggagaatctgaagaatccagattggcatccattcaaagttatagtggagggagg

SEQ ID NO: 25336 - DNA, 504 bp, Gossypium hirsutum
  unsure (1)..(504): unsure at all n locations
  Clone ID: LIB3583-005-P1-K1-F5
tttttctatatccgaaaatctgttcaacagctgtatttcaactgattttgaaacattagcatttggatccacttgaagttttagatgtaaagcacatctctctctttggatagagtcgctttctttttcttccgtttgcattttgtgcttgaagaagtggtgagaggaaggatttggatcggagatggctgagatttccggcgaagcagcggtgatagggagcaatgggaggagtgattcgccggcgaggatgtctttgaccacggcggtagtagctccgccgttggcggtgtcggcttcgttcaaggagagtggagggaaaggttcgtcgaggaggaaagttgctagacctagcttcgatgcggataatgagttcattacgttgcttcacgggtcggatcccgtgaaagttgagcttaaccggctggagaatgaaactagagatcaagatagagaactgtgactagctcangcagaaatctaggcattgcggatgtctggaag

SEQ ID NO: 25337 - DNA, 531 bp, Gossypium hirsutum
  Clone ID: LIB3583-005-P1-K1-F6
gcgcccacgcgtacggtgatatgtctttgacaaatattactgacttacctcctggaaggatacctgttgaaacatacggcattgaaggaaccgacaatggctttaagaatatttatgtgatgatgctagaggagttagaagcaggaggaagactttatattgtatatccagtcattgaacaatcagagcaattacctcaacttcgggctgcttccgcagatcttgagaccatatcaaatcagtttcagaattataactgtgggttgttgcatggaagaatgaagagtgatgaaaaggaagaagcattgagaaagtttaggtctggagaaacagatattttactttctactcaagtaattgagattggtgttgatgttccagatgcaactatgatggttgtgatgaatgctgagagatttggaatagctcagttacaccaacttagaggacgagttggtcgtggggcaagaaagtctaaatgtatattagtagcatctttttcaagtagcctaaatcgtctgaaggtgcttg

SEQ ID NO: 25338 - DNA, 523 bp, Gossypium hirsutum
  Clone ID: LIB3583-005-P1-K1-F7
cccacgcgtccggcttgccatggtacccacatgtcccctgaagagtttgttcggcatgccagcgaagagtgcactgatccagataataaaaaccgtttggcaacattccctagtaccaatcctgccggctctgctcagacctgaagcgtaaaatggacatgcaatcaagtgtgacattgaaatacacgtgagatgctgtctcaaatttccaaccgagcctggcggttgtcataggtatactctgtgtcatgtttgccttgacgtttttcctgcttgtctatgccaaattctgtcacagtgcagcaacggttcatgctgatcatcatcgtcgaatactcaaccgaacaaggtctcggtcctcagggatcgacaagaaagttgtggaatcgcttcctttctttaagttctcttcacttaaaggatcaaaacaagggcttgaatgcgcagtctgcttatcaaaattcgaagatattgagatcctaaggttgctgcctcaatgcaaacatggctttcacattgattg

SEQ ID NO: 25339 - DNA, 441 bp, Gossypium hirsutum
  Clone ID: LIB3583-005-P1-K1-G1
cccacgcgtccgcaaagaccgaataagatcactctcttgaatcctccaccgtctattccattgacttcccgtaaacttcccgaaaagtctaacctcttctcagaactcccacccatacagggcccttctcctcctttgatcccccatcccccatttcaacaacagaaaattacccataaaagactcattttctttttgggttttcttttggtcttaggatttaggaaataagaaattttcaaaattgagaagaagtagaagaagccctagtgtgtcatgatcagatgctatcgggtgtaagataagcgacaccatgatcaacacggccaacggtacgatttcgacctcttcgtcctcggcaaacgctcaatcgccgggtttgaagacttattttaaaaccccagaaggtcgatataagcttcactatgaaaagactcaccc

SEQ ID NO: 25340 - DNA, 447 bp, Gossypium hirsutum
  Clone ID: LIB3583-005-P1-K1-H11
cccacgcgttcgcccacgcgtccggtttctcacttatattaaatccatttgggtggaaactgaggccagggacctgaaattgctattaatcagcttattaacagggaaaaaatgatcgaccaaaaacagaaaaaatcgaagaggctttccatgttctttcattcttggtctaggtttcttttagaaagagtggattcccattttatacttgattcaacaatcttcttgctttctcagtttccagtttatagtcgttggattttgttgatcaaagatggaagttgtcatggattctagtcttcgtcgccttgtgaacagaaggctggaatggttggaaatgaacaaggatcaggttttagattggaacgccggaacaactcgtagacgagaccgactcagtgcattacctaatacagtgctttctcgcattctatccaagatgcccat

SEQ ID NO: 25341 - DNA, 529 bp, Gossypium hirsutum
  Clone ID: LIB3583-005-P1-K1-H6
gcgcccacgcgtacgtgattttgggcttgagctgaactatgcgcaagtatggcgtggaattgaagcatgctcgggagcggcttcagggttcatacacagatgcatataaccagccgccttggtactgtgagaagatagagaagacaaaccctggtagttttacgaagcttgtcatcgcagatgattaaagatttcagcgtgtttttctgtactttaatgctttgatacgtggttaccaaagtggttgtcgaccacttcttttcctcgaagccatccctatgaaatcaaaataccatgaaattctgcttacagcgactgaactgaatggggatgatggtatttcccatgtagcattcgctgttgtagatgatgaaaatgaggacagtaggcattggttttttgagcagtcgagatctgccgagtacacttccagctctataacctttgtctctgatagagataagggattaatgaagcatgttctcgaaatatttgaaaatgctcaccacagttactcaatatactactt

SEQ ID NO: 25342 - DNA, 520 bp, Gossypium hirsutum
  Clone ID: LIB3583-005-P1-K1-H7
cccacgcgtccgcccacgcgtccgaaccgcgaactcaggaggagagaaaccagcgatccttctcatctaccgcatatttcctgcgtcttcgtatctgtcttatgatgtctattttcttcgtcttctcatttccttttgcaactacaaacaacaattcttaatattcaaaaataaaaaaaatggcgtctttacttcttcgtcaacgaagagtttcagttttgggtgtttcccggattcttcaagctgttaatggtgattcctctcgactacaaccggaatcgaattgcaggacatttgctagatttggtgtaataataaggaattacagcagtggaaagggtactgcaaagttcgattttactgatctcacccgacctcatacatggtatcctaatgctcgaaaaaagcaacgcaaggttttcttgcatgtaggtccgacaaatagtggtaaaacataccatgctctgaagcgacttgaatcaagttcttctggtgtatattgtggtcctttaagattgct

SEQ ID NO: 25343 - DNA, 562 bp, Gossypium hirsutum
  Clone ID: LIB3583-006-P1-K1-A2
cccacgcgtacgcccacgcgtccttaaacaacaaaaacatacactataacaaaaaaataaacaaaaactaatattgagctattattactactttcaaaaacccacaacattaaacaaaaaatacaactacaatctaactaattcaaattctaaacgggggccaccctttttttatataccactttacttaccccttccatctacaaataaacttttttatttgtaacacataaatcaatctacttgcccaaattttaacaacctgtagtacataaaaaacctcttctttaacaaaattttaatttctttggaagaaaatccctttttccccagttgcagttaaactaaagggcccccatctattcgcctttcacaacattttcccacctttattgttaaatggacccccccctttttatgtcttttaaccctgcttaatttattttttacccccacttgtgccacttacatttgcaagccccctaagccccgctcttttcatttttttactttcctttcctccaacgtaccccattttccccttaaaatttttaaaaagggg

SEQ ID NO: 25344 - DNA, 678 bp, Gossypium hirsutum
  Clone ID: LIB3583-006-P1-K1-A4
cggacgcgtgggttcatttcaatcgtttgatgaaatatgttcaattgcagaggaaaaacgggtggactttttacttcttggaggagatcttttccatgaaaataagccttcgaggtcaactttggttaaggccattgagattcttcgtcggcattgccttaatgatcaacctgtgcaatttcaagttgttagtgaccagactgtgaattttcagaatgcatttgggcatgtgaattatgaggatcctcacttcaatgttggcttgcccgtgtttagcattcatggaaaccatgatgaccccgctggagtggacaacctttctgcagttgatattctttctgcatgtaaccttgtcaactatttcgggaaaatgattcttggtggttcaggcgttggtcagattacactctaccctattcttatcaggaagggctcaactactctagctctttatggtcttgggaatattagagatgaacggctcaacagaatgtttcagaccccccatgccgtgcaatggatgcgacctgaacctcaagaagggtgtgaagtgtctgattggttcaacattctggtgcttcatcagaacagagtgaagatgaatgctaaaaatgcgataaatgagcgcttcttaccacgcttccttgatttcatagtgtggggacatgaacatgaatg

SEQ ID NO: 25345 - DNA, 708 bp, Gossypium hirsutum
  Clone ID: LIB3583-006-P1-K1-B4
gcctttctctccttccctcaaagtttccaccagccaaacatggccacgctggcgagcggccgttctgaggccggggctccgtcacgggcggtggtcggagcaagaaaagtggggtttttaaccccgttctcgacctccaccttaaggcccgatcctccagacgcaacgagccgaaaaaggagagacctttcatccatttctcggtctgattccagcactgaagacggtctccggggacaggctttcgagaccggtcttggtagagcaggtggcggcagacggtaggtgcggcgctagtcagatgcaggtgggggtggccgatgggacgtgcggcatagcggtggcagaagacagagctgcggcgctagggtttcagaaaagctgaaaccctagtttgacttctgttgggccagggtaattttgggctgaattgggtttgggtagttgggcttattttattgggctttgggtttctgatttgggctgataatttgtggttttgggcccaggcaaatttggacttgtacaatgatattgagtggcaaactctttttgtcattttatgttggctactttggaaaaataggaataggtctgttttttttaatagtcacaggtgcacccaagtcatcgtggatacaagttacacgtaggctaggagttatcgggatttagatgtgaaaatgaaactgccaagaaccgtgatga

SEQ ID NO: 25346 - DNA, 636 bp, Gossypium hirsutum
  unsure (1)..(636): unsure at all n locations
  Clone ID: LIB3583-006-P1-K1-B6
gcattgtgagactgttactgatggaactgacaccctggacccatggaagtttaagatttcatatgataagttggtaattgcatcaggagcacaggcatcgactttcggaatccatggcgtgaaagaacatgcaatttttctgcgtgaagttcaccatgctcaggaaattcggaggaagctacttctcaacttgatgctatctgatgtgccggggcttcctgaagaagagaaacgtagattgctgcattgtgttgttgtaggaggtggtccgaccggggttgagtttagtggtgaacttagtgattntattaggagggatgttcatgaaagatacactcatgtaaaagactatatccatgtcacactgattgaggcgaatgagatactgtcttcctttgatgatcgtctccggcgctatgcaattaagcatttaacgaagtcaggagttcgtctagttcgtgggattgtgaaggatgttaaacctgaaaatcttgtcctcactgatggttccgaggttccctatggattgttagtatggtcaacaggtgttggtccttctccttttgtgaactctctaggacttccgaaatctccgggtggaaggattggtgttgatgagtggcttcgggttctact

SEQ ID NO: 25347 - DNA, 692 bp, Gossypium hirsutum
  Clone ID: LIB3583-006-P1-K1-B9
gcacttgcacgagtttgcagcgagtaaggcttcaaaaccaatcgtctgtcaggcgagttatcctcggagttcaggaagctgcctctcgtctacttcttggatgtctcgaacaacgatctctccggcaacattggagaccaagaatgggacatgccggcgcttgaaatgttgagtttggcaggaaacaggttttccggaaggttgcctaactcattcgggagccaaaagattgaggacctggacttgtcagggaacggattttcaggtacaattccacgtagtttcggaagtttaacggagctcatgcaattcagcctatctgcaaacaagctaatcggtgaaatccccgaggaattatcttcatgcaagaagctcgtgagtctagacttgagccataaccaactcagtggccaaattccatcaggtttcgctgaaatgccagttcttagtcagcttgacttgtcggacaatcaattatctggtgaagttccaccgcagttggggaagatggaatcactgattcaggtgaatgtttctcacaactatttacatggtagtttaccatctaccggggcctttctcgctataaattcaagtgcagtttcccgtaatgatctttgtggtggagctgaaacgagcgggttaccaccatgcaagaaggttaagaatctgaattggtggttctatgttgc

SEQ ID NO: 25348 - DNA, 694 bp, Gossypium hirsutum
  Clone ID: LIB3583-006-P1-K1-C5
caagatatcacctacggaacgacaagaattgcagaacaaggaagacaaggctcttgtccatgctcgatgaggtggatagacgatataggcaatattaccatcagatgaaaatcttggtgtcgtctttcgactcggctgctggttgtggggcggctaaaccgtacacttcacttgccctgcaaacaatttcccgacatttccgttgtttacgtgatgcaatcagcaaccaaattcaattgacacaaagaagtctcggagagcacgataattcattgaacaatcaaggatcggtaataccgcgtctacgttatgttgatcatcagcttagacaacaacgagctcttcaacaattcggtgtgatgcgaaacgcttggaggcctcaacgaggacttcctgaaagctctgtttctgtcctgcgcgcttggctttttgagcattttctccatccgtatccaaaggattcggagaaaataatgcttgcaaagcagacaggtctgacccgaaaccaggttgcaaactggttcattaatgctcgggtgcgtctttggaaaccaatgattgaagagatgtacaaagaagagtttggtgaaatggactcgaacttcaaatcttctttggaaaatgcagccaaagcaactggtgagaattcttcggcattcaaagatagaggcgaagagttgcacgagaatattac

SEQ ID NO: 25349 - DNA, 588 bp, Gossypium hirsutum
  unsure (1)..(588): unsure at all n locations
  Clone ID: LIB3583-006-P1-K1-C8
atgcacgtgagccttagagcttgaacttagaccctgcttatgaaacccaatggtcttatggcctaataattgctacatgcaaaacctgaacagttgatccataattccgtatcataatttcatgcatagacacctgatcagatcacatattcttaattttagctgtacttagtcatagaattcatttattttattttgaagattatttactctctttcaggagtttggtcatcgtgttaggttggcaactcatgctaacttccgcaactttgtaaagttggctgacattgatttttatcctctgggtggtgatcctcgagtcttggctggatgtaagaagttcctgatgtggaaactttttcactttatcatattgatgttggtatttatgttggtaatagcttttaaacataaatcccatattgctgttagttgtcaaactaatttggaagatttgcctgaaacactgcatcttgtttgcttgcttagttaattgataagagactatgttcggtaactataggaggaagagacagagaggaaaacagggggaaggagagggttatgcatncccttgttcatattgct

SEQ ID NO: 25350 - DNA, 660 bp, Gossypium hirsutum
  unsure (1)..(660): unsure at all n locations
  Clone ID: LIB3583-006-P1-K1-D1
gtgttaagcgctcctgcatggcgatttgggcttcaaacntcgcaaaaattagggctccgatgtgctaatcggtggattcccaattccgttcattgaagatgtgatctcacagcgactctcgcgttttttccttcttaaatttcaaactcgttaaagggtttttgagggggattttgttgtggtttgtgatttttagggttagggtttttgaaggcatgaaggggactttagatcgaaccaaggtgattctccgccacttacctccgtccatcacggagtccgtgcttctcgaacaagtcgatagtgccttttctggccgttacaactggctctcctttcgtcccgggaagagtagtcagaagaatttgtcttattcaagagcgtacgtggacttcaagaggccagaggatgttttagagtttgcagaattctttaatggtcatgtatttgttagtgagaagggggctcagttcaaagctgttgttgagtatgcaccttctcaacgtgttccaaagcagttctctaaaaaggatggtcgtgaagggaccatatccaaagatcctgagtatttggagtttcttgaattccttgaaaagccaggtgagaatctttctagtgccgagatacaattagagaggaggggaggcagaaagagctggt

SEQ ID NO: 25351 - DNA, 582 bp, Gossypium hirsutum
  Clone ID: LIB3583-006-P1-K1-D5
caataacttagtagaatgtttaaatttgtggctgctttgcatttgatttttatttacttcgtgttgcgtaaatgagaggcatgtaggttaagtgtttgaccttgtgggtgtctgtgtagggttgattgtgttgttgtggttgaagacaacatgcatggcatgggtgcatgttactgctgctacctgttgcagtgttttatcctaagattcttaatgttctttttgtcaatgaaatggcagccaatagttctccaaaaaaaaaaaaaaaaaaaaaaaaaaaaattatcttcaaactcaatcacataatcttattaatactccaatcagaaaactaaaaattaataaaaaaaaaaattaaaaaataaaaaaatattaaaaaaaaaaaaaggggggggcctttttaaagatccaaattttactcccgggttcttggaacttataattttttttttgggtgccccaaaataaaattaatgggcggccgttttaaaacttggggatgggaaaaccctggggtttccccattttaatggcttggaaaaaaatccccttttcgcaagtggggataataacaaaagggcc

SEQ ID NO: 25352 - DNA, 723 bp, Gossypium hirsutum
  Clone ID: LIB3583-006-P1-K1-E4
ttcactctttctttctttaaaatactataaaaaatgtgttattattaattatatttttaattataaaacagggggactcatgagcagatacattcacgaaatcactgaaggttaatgtttcatctcggacacaacaaatgttaatttttacatattattacaaagggaccaaaaatgagctcaattttggcatcccacagttgcaacactcaaaaacaaaaatgctgcggcaagtatttcacactcttaccctgattggcttagatgttcctggagctgaaaacagagctttgacatttgagatagcaacttgcattgttgttctagcgatgttagtgattcggatgttacctgtgacatcgggtctttaagtagccgagtgagccgagagcataacatggaagcatcttgattgttggaacatgctttggctataagttcaagcagttgacagctttggtcttgagccaaagatggttggggagggactgggggaacaagaaaagggtgttgaagtagcacagggatccgccacctcttgttacggtcccatacaagacatttcttcatgatatcaagaagccacgggttagaaactggttcatatgaaatctcatggtttggatcagttataactttaaacttggaccagaaagtcttgtaatcagcaaaaggcgttctcccataaaccatttgataaagtttgcacccaagggaccaaat

SEQ ID NO: 25353 - DNA, 594 bp, Gossypium hirsutum
  unsure (1)..(594): unsure at all n locations
  Clone ID: LIB3583-006-P1-K1-F4
aaaaaaggttcagccaacggcagcacagatcgcccgataccgactttttttttaattatctaagcatccaatggcagcagctgtggaaacttcaccagttttagagattttagttcgagaaccagatggatattctatctggaatggacctccattcaagaataataatcaacctgggattaagcttgaaaaagttccttgcaataatgctaagtatagtgaggatggttcaaggattatggtgacgaaaatggactctgctattggtatttatgattccaacactttgaaagagataaggtgttttcaaatcccgaatgtagtcgcttcggccctgtccccgtgtggggcttatcttcaaacctttcagaaatctactacgccgcaggaaaagaatgtggtcttatggagcatagagaccggggatcctgtttatgagcagttccagaaaaacatgacaaaagctacatggccatcaatccgattcagctccgatgaagctgttgcatgccggcttgctacaaatgaaatacangtttttcgatgctgctgatttctctaaaggaattttacatcggctaagagttcctgggg

SEQ ID NO: 25354 - DNA, 644 bp, Gossypium hirsutum
  unsure (1)..(644): unsure at all n locations
  Clone ID: LIB3583-006-P1-K1-G11
ctcaagatggtatttaggacatgggattcgtaacaaatatatacaaaattgttgtataacttggtgattatgctacaaaagaactgttgctgaaacacttttgtataaagatggagaacccagctacagattgaggcagattgttagaattccaatagtagagtgtgtgattgtttcagcatcatgctccccataggcggttttagttaactagttactttgttgatactacatttaagagacctctgtaggaaaatactgggaatacagcagcatgtgcttgctcctttgccataaggcctatgattntctcagttaaagcactatggaggagatcaatgtgttaggcagtctcaagtgtgctactcttagactcctgctttgaaaagtcagctgctatagtacgtgttattgtatatgtttatgtattaatgattagtcaagatgagttggaagagtatatgaaaacaatatttggtgcaaaattccggtggtagagattcaaacaaggttgaaaaaattcttcattttctttttttcccctcaaaaggttggtgtactggttttatttgattgctttagtattctgctctggcatactcttgcttctaaccattcttaattttgtggcagtaaatattttt

SEQ ID NO: 25355 - DNA, 565 bp, Gossypium hirsutum
  Clone ID: LIB3583-006-P1-K1-G12
cccacgcgtccgacgaaacgcaatgaaaccgcgatatcttgtgtggaagggaaaaaagaagagaatcattcacagaacccagtttgaatccgccaccaaaatcatcagattagcaaggccaggaaccacgttgcgacggtaaacaagaaatctcgtacccaacaatggcggcgaaaaagcccaaatcttccactcctaacccaggcaatatgagtccacgcgtttggttttactccattttactaactcttcaatatggattccaacctattatctccaaacgcttcaccagacgagaagtaattgtaacttcatcagtcttgacatgtgaggtagccaaggttgtatgtgcccttattctcatggcaaaagatggtagcttaaagaaactggcaaaggaatggactttggtgggttcacttactgcatcaggtcttcctgcagcaatttatgcacttcaaaacagcttgttgcagatatcttacaggaatctagattcacttactttctcaatgctgaaccagacaaaaataattttcacttgcatatttacatatatcatact

SEQ ID NO: 25356 - DNA, 453 bp, Gossypium hirsutum
  Clone ID: LIB3583-026-P1-K1-A1
atggatttgagagcatagttatcgattgttagagatctgaccatgcttaactccctccatgttttcgatgattccttggtcatgaatgttatgatcgagcgccgttgctggtgaagatttctccatcgattagcttccttgatttctataacggagtatttgttgaaagttccgttgaagaagaagaaaaaactctgtttctacttcatatctacaacgtgttgctgatgatgattgtttctctaattccacctgttttacactctccgtaccagtaatttttcattaatttcaagcaatccttttaaaaaaaatccctcttctctttttgaattcaaaattttgaattttttgttgttgttttctttaagatgatgaaattgctaggcttgtatgggtgtctcactttgtggacgtgtcggtaccggagattcctttgccatgccctgtttt

SEQ ID NO: 25357 - DNA, 534 bp, Gossypium hirsutum
  Clone ID: LIB3583-026-P1-K1-A3
cattctcgtgctaaagtttttcaacaagcagctgattcaccatcacatctgatctctagcagctcgcgaaagcactcctgactcctgctgtaaatactcatccacctatagaagagcctaggaaggtactcctgctgggagctttaatttagctcagataagccgtgattgcatcactagtgagttcctgaaacctctagtgctttcagctgctgtgattcccctttagggattctttcaagttagggcctatttactattagtgctcataggtctttaggccttgatctatgcgagagctatgtggtagagtccatttaatagtagaaatggtctatagggactctatttaagtttatctaactagatactgaatatatatataaaataaacaccccacatttgggaaggaaatagttgatcgttgacttaagaggatctgataagctactgataactgcactggacttcaagggcttttggtgtttcatgctgttggtggaagaactggatctggtcttggatcattgcttc

SEQ ID NO: 25358 - DNA, 310 bp, Gossypium hirsutum
  Clone ID: LIB3583-026-P1-K1-A4
ccctcgcgtccgagtagagttatagatcctagagtagagttagcgagattagccatttagtataggggtagagttttggtagctcatctagttgagttaactctttctggatttttgtttagagttcttaattagtatagtttatgtatgttgattcgggtgccttttgtagataagatcacatataatcatcatattaattatgtatactgtcatgcatttcggtttctgctgttcatttgttggctgtttcatgctactagcattgttaattttcttcattttgaagttaatatttttataggcctct

SEQ ID NO: 25359 - DNA, 461 bp, Gossypium hirsutum
  Clone ID: LIB3583-026-P1-K1-A7
ttccattttcaaccatagaaagacagtgcaagtaatactgggccatgcttaactcccaccatgttttcgatgattgcttggtcatgaatgttatgatcgacaccggcgctaaattaaactggtttagagagctggtccttttgtagaccggagctttagctgaaccaagttccgttgaagtagaagagatgtcttcacaagtagttcatttcatcaacgtgctgcagatgatgatagtaactctaattccaccagttttactctaatggtaccagtaatttgccatcatctctgccttctggttgatagtaagattccctcttctctttttgaggggcggaattttgaattttctgtagttgctttctctaggatgcaagaaataaactcttctttagggaaccccattgccattggacaggccgtgggcttacaacgactggacgagggaatacccgggc

SEQ ID NO: 25360 - DNA, 627 bp, Gossypium hirsutum
  Clone ID: LIB3583-026-P1-K1-A8
gtttcatagctacagtttatcagcagtaaaccgagtatgctagctagtgatcaagcctatgtcgatacagtggacatctctattaggagagtagttagaagtacattgactaatagttagattattatctgctacaactgcaataaaggaaaggtataaaattttagaagagctaggagaaggtacctgaggtagcgagttcaaagccttcaatatagagacatttgagattgttgcggttaagaaaatgaaaaggaagttctacttttgggaagagagtatgaatctaagagaagtcaaagccctttgtaagctaaatcaccctaatattgtaaagtttaaggtggttgtcagggaaaacaatgaactattcttcattttcgagtacatggagcataatctgtaccaaatcatgaaagagcaacaaagacctttttctgaagagggagatacgcatcttcatgtctcagatgctgcaaggacttgtccacatgcatgggaatggatattttcatcgagatctgaaacctgaaaacttgctggtcaccaaagattttctcaaaattgctgattttggactggcgagagaagcattgtggctatgtgggcgcagtctcactgatttct

SEQ ID NO: 25361 - DNA, 504 bp, Gossypium hirsutum
  Clone ID: LIB3583-026-P1-K1-A9
ccctcgcgtccgttaatctctcagtttcttctttatcccctaaaactcttcagctatttccctttgttaaccaataagagagagagcatttctgttcatcataggtcaagctggtatcctagtaggttacgcctgtagagagctctactgtcttgtacatggcattcagcctgttggtcttaagcctagtgtcttttctgtcggaggaggagatgaagctttcaactcctttttcagagtaaccggcgctggtttacatgtccctcgagctgttttttaggatcttgttccgtccgtaatagatgtagttagatccggagcttatcgtctattattccaccctgaactgcttatttgtggctaagtagatgctgcatatatctttgccagaagcctctactctattgggaagagttattgtggatctttgccttgataggatctgtaagctagctgataactgtactggatcttaagggtttttggtgtttcatgctgttggtg

SEQ ID NO: 25362 - DNA, 542 bp, Gossypium hirsutum
  Clone ID: LIB3583-026-P1-K1-B10
gttagaaatacagatcagtatatgggaagagagataagagtttggttctcagagacaaattcttaagagaagagctttttggcagacaaccatgaaagtaataattgaaataggctagcatataaatcccaaactgcctgtcggagatactgaggataaaattgtttcaagttatcaatttctatattgtagtctgatggatgaagaagttatattcagcaaatgtaagaaagctattagttgtatggagaaagttgataaagaaatttgtactgatgtcaattcaaggcagttctgaggatcggctcttgtggaggaggtgctaggtcagcatgctgcactgaaggactgtattgagcagttaacagctgttgcatcgtcaagagttaatctcatctcacatttgagagaagctcttaaagagctagaattcaagctggagcaagttcgttctcagcttcaagctgcacagtctcgagcagaacaagctggtaatatctgcagacagttgttgaattgagacaatcctgagttagcatctg

SEQ ID NO: 25363 - DNA, 459 bp, Gossypium hirsutum
  Clone ID: LIB3583-026-P1-K1-B12
atatcatttccttagagcatatttagatttatttacgatacatagccagggagtctatcctgttatagagttcccagccatagagttccgttcatcggatttgtagcgagagttccgtaaggtaggttccgtttgagcttgagaggttcttcgggcttgagtgtctttcggttgtttcgaggaggtattcgtttaggtatcctcgtatcttcgagaggatgcgtttgggttgatgttagtaataggttgtgctcccagaggagtcgttgctgtagtatttttgtcccatgccttaccatggttgggttggtccttgctagctagtttctgagtagtatgttagctttggagttggagatgcctccaactatgactctgttaatagttttgctcaacttatgtggcctaaaggtcacccactcttttctgacactattcataccctagcgtcgcatatgg

SEQ ID NO: 25364 - DNA, 611 bp, Gossypium hirsutum
  Clone ID: LIB3583-026-P1-K1-B4
cccacgcgtccgcgactttttcacttcgaaacctttcacttctctttcatttctcttctcccagatttccctgaaaagaaactcaatctctctttaaacgcaaaccccacagcaaatacttcaaccccattcctgtctttcccttcaaagtcaaaaatccaatttttcttgttaaaatcgcccacttctgtttccttctctacaaaaccctctccttctttcatcccattctgctcttccaatcgttttaccatttcgaatttgaaaatatcaagttaggaagccaaaggatagccccaaacttcaaagttcagtcttggagaagaatctaatcaaaattacaacgagggagtagggaacccagttctcccaactttcatttcaactcaaaagatgagcttgagtgatcaagccttctatctgatggcctttattgctttcacgacatctgaggcgtttacaagtatggtcattgcagctgttccaactctctctgcgatgggaagagctgcggtttctctttccaagctagcagatacagcacgagaggagcttcccagtactatggctgcaattaggctttcaagcatggagatcagagatcttacact

SEQ ID NO: 25365 - DNA, 599 bp, Gossypium hirsutum
  Clone ID: LIB3583-026-P1-K1-B5
tattttttttataggttagggagcagttttttctttttcctctaagagctggccatcgggttaagctgttggatctgtttttaagctgtttcctagctccttctgctagctgttgctggcgccggagagtggagttgctggagccgttggcggtgctagtagtgagtgagtggtggtgagtgctgtgttcttcctgctccatcatcggaataggtttcccgatgtgcgagatggctttatctattggttgcggagtgttttcgctgctgcctaagctatgattgactccctttgtcatcatttgcgtgaggtcggagttgttggggagtatgtagccgtcattgcttgcattctgctaaggtgatgtctctggaaccctgagcttcatatgctgcagtacttttcgattgctgaggtttcctatgctcttcatcaagtggcctggagatgttagcttaggcattgagttcatgggttagttgggggttaggatttttataggtctggatttggcttttaagggctttgggttgaggtggccatagttattcagatttctgagctggatacttatgggaattctactgttaccgctgttt

SEQ ID NO: 25366 - DNA, 636 bp, Gossypium hirsutum
  Clone ID: LIB3583-026-P1-K1-B8
ccctcgcgtccgttcagtttttaggtaagagtcatttaagtttccaggaggcctggttcatatggtcttgatagtagggtcttagaatttaagagatagaagtcaagcaagatagcattatctgtaggctatataactgtatagaaaaagcatctccgtattaggccactgcagtcattagaaactgttattgtttgaatttgctacatctgcttagagactgctgattcaacaatacactctgcatgctaattatgtggttctttgaaaggtcttgagaggatgtttgagggtgttgtggatgccttattttgtttgtagggtgtgtctgtctgttagagcatactaaagaaattgaactctacaaaggttgatgtgtcgaaaaggtctgctcatttacaacaaagcgagtctccgtcgatggctatgtctgataacggctatgctgaaagagattaggggtttaaaattggaggacatttggctgactaggaaagggtagtacttatgaagaagatttgtgtggttgacctgcaccgtttgcatcattgcgtgctacaccttgaaaatcaccctctgaaagctccatcaacagaatctgagttgtaaatttctcagcagcaattactagaatga

SEQ ID NO: 25367 - DNA, 555 bp, Gossypium hirsutum
  Clone ID: LIB3583-026-P1-K1-B9
cagaattccagggtagtcccagagcgtccgcattttttcttcttttcctctagctagagttttcaaagcctagcttgcgccgttatttttagtttctttataagttttctatctttctctagctagagagcaaaagagtttgcccatccttgctgctagctccgttgagcgctctccttcgatgagcgagccggttattttatcttcagttaagagtattccctccctttttctttttgattttcgaatagtaataattaaaagaaaaaaaagatgttttctgttattgtatccattctaagagctaaagataacctttagaaattttcgtttttgatagattttcatatattttttgaatccccccatcttttttacatccgtttttcagaggctttatagccgtaaaataacaatacaatattattccttgttactagtttatgtctaagttctactctctgtatgctcttgtccttgctactgttctatcattgtttctgcctctgttatggctgctactttcgtttcttttttgctctctttgcaagcttt

SEQ ID NO: 25368 - DNA, 483 bp, Gossypium hirsutum
  Clone ID: LIB3583-026-P1-K1-D1
cccatcgcgtccgttacaaagtttaagttattagtcttatgatggtgattaattatgatttttaagctgtcaaaagaggttgtaaagtgaacaacatatatgttatgacatgtaaaataagaagttatgatgaactaatggattagtgctacgtgattgtgaatattgaatttcgtgttaaatgactaaactaaaaagtacgtgaaagttttatgtgttattatttgatatgtgaaaatgatgttaagaatacgatatataatgtgtattgagaattaagaatttactaaataaagtttcttgattattgtaaatgaaattaaaattgttctttaaattgaggaaaaataaagactaaattgaagaaatgcaaaagtgtagttaaattgagaaaatcgtgaaatcaatactaatatgaataaagatcataattagtcatggaaaggaagtgtaaagaaaatgtccttaaaagttttaatattc

SEQ ID NO: 25369 - DNA, 551 bp, Gossypium hirsutum
  Clone ID: LIB3583-026-P1-K1-D11
cattttcttcttctctttctatatttcatctcttcagcttcttccctattccacccatagtttttaataagagctttagtttaaaacagacttctttttatatataaaaaagagacgatactgcttctaggtacttcgtcttcttccttctagttatcccagcgactagtcttgtcatgatggttgttagtttcgttagccctttttcccagctgctactgctatctattttctacaaaggatgagtttgcgtatctgatgttactgagcttcaagcattagccattctaatgtttgctttccgggttagagttgttagtttgtttagtccttcgggttgggttccggagtcgccgacgttattatctcaagagttaagcccattctctgcgctttccatgatgagatcgcttcaacggttcctcctgattcgttagtcgcgtatcctagctacctctccttaccattaatatattgaggtcgtcatcaatgctagatattttgaggaatttaagcatctgatctatgttgtcggctaggaactattaccc

SEQ ID NO: 25370 - DNA, 522 bp, Gossypium hirsutum
  Clone ID: LIB3583-026-P1-K1-D12
ctgattaggtaaaaagattagaaaatttacatagctctagactcagagcagtccggaatagctagagctgagtaggctgttgagcctgcaaagcgcatatctgcttctattagtaggtagagataaagtcattcagtatatatctgaagagaaagaagtttaggctttcttatccaagctagattttgacaatattcatttcagctgattctcctccagagagaagcaaaacaatcagttcaccttattgcaagtgatgagactggagagcatatcttccccttgctgatatggttgatatttctgctgaagagcaaagccttagcaagcgcctatcatagatgcaaacggagtatgtaggacttaaagctcgcctcaactctcctaaaaaaacgaaagtttctcttttgaggatgtcggccattcatatctacccaagagcacgaaagaattcaaatacacactatattgagattctctctaccgtttttgtttttgggattttaggactcccttgcttaa

SEQ ID NO: 25371 - DNA, 579 bp, Gossypium hirsutum
  Clone ID: LIB3583-026-P1-K1-D3
cggtcgcgtgggcggtcgcgtgggcagtcgcgtgggtctagtccttgcatccgctatgaagagttttgaagaggagatttctgccgtcccatcgtcttcgtcagaatctatgccggttgtggttctctcttcggattctggtgtctctcatccggatcttggttaccttctcgaggcttccgatgatgaacttggtctgcctccccctacagcttcctcaactgttgctgaaggtaggtccgtagcgactgatttggtgcgtgctgtctctaactcctcgggtatccatgatttgtgggggttcgaggtactattccccaactacgattctttcgagttaggattcgtagataatttctatagttggcaccgttgcttatgatggactgttcgagtattccgatgtctatttcgattcctccgatatttctggtctgctatggcggccggaaactttgtcggcgaagtttaaatccaaacttataatccttaatatagaatatttagagagtagttagattgctttccaagcttatcacataggctgtcatagccgatctgtaaattagttttttcagc

SEQ ID NO: 25372 - DNA, 543 bp, Gossypium hirsutum
  Clone ID: LIB3583-026-P1-K1-D4
gtatcccgtctaggataggtctgatagagagagttagttttacttaggacttctcaaatatctctctcaccggagaaatcccgtagagcttgacactgctaaagagcctcatttcttcctattcctgctttgccacgttctcgtcttctgctgggatccccctgtacgtttagcgttatctttgttctagaggacttcaatacaacctgctttcaagctttcccccttcattatacttgagctataatcgattgaatgggtctatttttcctgtaattgggctattgaagcagctccatgtctaggatttatgccggaataacatctctggtgtcatccctgcttccatttccgacatgatgatctaggaaattttggatttgtcgtacaatgacttgcatgggtctattccgctgtcatttgccgagctcacatttttgtcaaaatttagtgaggcatataatcacttgcaaggtgtgattccttctggcggacatatttatagcttttctagctcaagctttgaagggtaccctggacttt

SEQ ID NO: 25373 - DNA, 455 bp, Gossypium hirsutum
  Clone ID: LIB3583-026-P1-K1-D5
agcttatcgttttcatggagagagaataagtctgctagcgtagttttgctcttttctcttttcctttcctagggctagcttagttctagccatagactttcccggaagaagagagcgtcgatgatcctccgaagaggttcgtggtctagccggagagcgttgcgtttagggtttctcgtggtcttaagagtgctactgctgtgagttgaaagtagttaatgtctgtatggggagttagatcttctgctgcgcctccgccctgaagatccccagaagagattcgaggagagtcagctagtatgccgtcttctagtagtaaggcttcgtcctcaatgccaactaaagagcttgatacgattcgagcatgtacaacatctatcccagaagcaattccaggagagtctgctacattgccaccagctagatcataagccggttaggtagcatcaatgtgt

SEQ ID NO: 25374 - DNA, 537 bp, Gossypium hirsutum
  Clone ID: LIB3583-026-P1-K1-D6
ccctcgcgtccgccctcgcgtccgaagtcgcgtagaggttcctggcattctctgctataggctgcttcttagccgaggctgagttccaagacctgctcctgttagtccgtcagttccgccagggtgtcatcattgctttgccgcaaggtgaggttctctggatcttctatgatggctttgtgcgtgttgtttctatctttctactagactctggcttctgagctaatctgctcgactacatccctagaagattccatcttgctggtttccctgtagaggttctgaggcttctgtagaggcttgctctgctgttgctgggttgttgtgtgtggggggaggtgtctgaggttgtagttagtgtaggtgttgttgttgttgtagtagtcttccccagccgccgcagccgcctccaggaggaggaggagcaggggcgggttagctcatcatgcaactaccttctctgagccttcgacagattcttcctcgctctagctttcttcgttgaccacgacatcattaggttaatccttcgtgttc

SEQ ID NO: 25375 - DNA, 578 bp, Gossypium hirsutum
  Clone ID: LIB3583-026-P1-K1-E12
cattttctctttctcttctccaagagcttagagctctgttttttacccataagccttagctcatctctaagtttttctgatctgagttttctttatttctcattctgatcattgttttcctagaatattttaacttcttcctttctttctttctttgcttctctctacctttgttagttatatattttcctgcttttcttttttctgttatagtaacttctaggataggccttcgtgtttctgttttaagggattttgtttctttgatgctgattattagatataccttctttagttgttagatgttgttgttttttgttgtgttgaggttgtggttttgctttgttgctgtttgttgtttcatctctcgaagatccgggttgtggtgttgttgtttttattccggcttatatgtgtagaagttagcctctttagctgatgtaagatgttatcgttgtagttgtagcggtgtaagttgttgtagatggtgttgtttttttagtttctgttcttaccaaagagataataatccaagctgtctctgtgttcggtcggttgtagtttagatctttgctagc

SEQ ID NO: 25376 - DNA, 553 bp, Gossypium hirsutum
  Clone ID: LIB3583-026-P1-K1-E5
gaagaattctaactctctcctctccattcaggctagatccattcatgcctctcattcgcatgctcttgcttcactttaaactgttacttgagaagcgctgatgtgccatggagaatcatacctcgaggattatctacttcgatttcgaaatcccgtccctacttcgatagcgtgaagacaggcctcgaccactaagataaaccctttctttcttttattttcttatgtcaaaatttcgtgtattccctaagttgtttttctcttttaggtttgttctgtttagttatttgtctgggtatcacccttcaattactttcggcttgattttttttagtatgcgtaaaaaaaatttcaatggatagttcacggctttatagctgaatgttcaaaagaattaaaatacaattttttttctttgttcttcgtataggctgttgctctgctgctgtttgctaggtttttttcgcaagtacggtacgtgtgctggctctaggcgtgaggtgttcggtagcgcgcgtggaggttgttcagttctgtaagctggggcttgtct

SEQ ID NO: 25377 - DNA, 492 bp, Gossypium hirsutum
  Clone ID: LIB3583-026-P1-K1-E6
ccctcgcgtccgggatagagttaggttagttagtctagatagtttcgaggattctccgagagttcggttagtcaggttgttgagctaggttctcttctttaggggtggttgctgtgtttgtttttttcgtgtgagtctctttcaggttccctgttgtttcgttgtttttcgttgctctccgctaggttttcgggctctcgttgttgctttatgttttgttagttcctggctgtgcctttgctcccgaagctgaagctatttgttctggatgggcctagtctagttttttctttggtatctttctggatttgttgctggcatgatcttagttaatgttatatctccatgtttgtctgtttctgtttctctgtactgtctactatttattcttgcttttgcataccctccatgctttgttctagatgtccctgctttgtttaagatatataagttaaaaaatttgccccaaaaatttttttttttttttttttt

SEQ ID NO: 25378 - DNA, 482 bp, Gossypium hirsutum
  unsure (1)..(482): unsure at all n locations
  Clone ID: LIB3583-026-P1-K1-E9
ctcctattcattcagccaaactctatagtcctttcagactagccagtctagaccttcatattacgaagagtcataatagcaaaaagcctaatccggctccgtccggccgagagtccaaagagttcgctcaaaagcctctaaatcccccctccaaaactccgattgcgacgaagtgagcgaagattcgagggaacctaatactgaagttagcctctttttcgntatttcttttattctcccaattgtttagccagaaacaagataagaacgatttccaaatcggagaaaaagaaaaacttaaaggaatcacctttttaagaactgttttcgaaaattttttatattcaatatgcctctattgagagagtccccgagaagactttacaatcgaaaaatcaaaggctttatagcggactgttcaaaaaagtaaaaaaacacaaattttgttttcgtagttactgctgttgttttgtctgtttcta

SEQ ID NO: 25379 - DNA, 300 bp, Gossypium hirsutum
  Clone ID: LIB3583-026-P1-K1-F1
agctgcggccgccgttccatgaggagcatattatagactaatcgacaaccacgttagcatgagtttgaactgtcacatatgcacatttctacatcctagactcaattcaatgctagctgtctgaaccgccaccttctccgctctcatgctagttacatggagtggccactacatcgtaagagcctgcacaggctctagcagcgcagcacagtcctgagaacccgatctgattccaggggacagcagatgcggtagaggcagtacttagcggccgctagaggagcatttcgtcttagaatt

SEQ ID NO: 25380 - DNA, 493 bp, Gossypium hirsutum
  Clone ID: LIB3583-026-P1-K1-F10
cgataggagttttcttcctatttcatagtttgttcagttattcatatgatttctagagttaaaagttattttatgcaatcttacttttactgtctaatctttgagttagtaagttttttgcatggttgtgttattgcagtctctgtcattgttagagagctgagatagttctagctttctagtatgtcttctgttgttgcttgatgattatagatatttaatccacttgtttttaatagagttccattgccatcatctgtaagcgtggctaatgtgcatgtttaagtttttgattatatatagaagttaagcttggtaagatattcattgctatttaatgcatcgactatcacctatccttttacaacttttgagcacttagcattttgttgtatattcgcgtagggaattccagtttatcagtatcatattttatcttactgttttcaagttattacttcgacaactacattcacaatttatctctcttatc

SEQ ID NO: 25381 - DNA, 601 bp, Gossypium hirsutum
  Clone ID: LIB3583-026-P1-K1-F12
ctagatcccatagcagtccgagtcagatagagtattcatcatcgtctcctagcatctagcctttatctagtatcgtatagattctagctaggacaggttctgatcttctttccttagaaagttctttcctcagtagcatttcaagttgaagtgctcccagctggtttgatttggcttatgttctttatctgcgatattcgtttgtagtaagttgcatatccaaagtggcttctctcttttgattctgcattgtgattccaagtaataattattataagatagcacccctcttcaagtcctttgtcagagcttagatctttccatgcttctggagattactgttgcatggttcgagatcctgtttctaatagtaacaaggacttactcccatgcattgccactagaagcacagtagttgaatttgttactcagttccacacccactatgatcacctctgcatctcatgtggctgaaaggactcggctgcttctttcgctgaggggtcatagagatattgttattgctgtttacgactatgatcctgctagtataatatcatatgcccttagttccaaagagtatgatgagagggtttctggt

SEQ ID NO: 25382 - DNA, 425 bp, Gossypium hirsutum
  Clone ID: LIB3583-026-P1-K1-F5
ttcatgtttctccctagttccctatatagagctttctttagtagtttctccctagttcttgttttctttgttgtagagagagtgctagttagttgtttttgatgtagttagtccttgtagtatagtgttgcttggcctgagttatgtgcttgttgtctcttcttttattggtttatattgattctttgagggggtctttctctagagtttctggttatcatttctatgcccctctgttcctttttgtttgtcgagttagaagcatttctatgcattgattctgagtttaccgctgtagatgtttaggctgaagggtttctactagcttagctcttcgttggtctgttcctattactgttggtcgtctactctagtgctgttgtcatatcctttatcccagagctctacatattattttgggagct

SEQ ID NO: 25383 - DNA, 569 bp, Gossypium hirsutum
  Clone ID: LIB3583-026-P1-K1-F7
gtagatagcgatctccaaggtcttagagttcctgatttatatagagaagattctcagatattataatcccttaagaacattttgctgtcagggttgaccatctatccttatctctagattgctcataagagagtgagagctagtttctcatagctttcttagctgagggatttatttaattcaagaataatcattccctgatgtgtctgtagcctggtttctctgcttctgaggatgatcctgatgtttgattctttattgagagtgctttgctgctaggatcttctgctaggatagttgtgcatgtgatatctgtttgtactagcctgattatgtagatattgttcttgatattcgacatcaaattgaattgcgtaaccctctcgcatttgtacctaatgattcccctaattctatgatcttacacgtttttccctttaaatttgagttatttgatttgtgtttgacatgatgaacactccatcagcctggctctttagcggatgcttatgctagtggtctttatgcctattatagtattgcgagtgctatcgggttaaagatgcctc

SEQ ID NO: 25384 - DNA, 541 bp, Gossypium hirsutum
  Clone ID: LIB3583-026-P1-K1-F8
gtccagatattccagggtagtcccatagcgtccgtctagaccctagctagtttcttatattagcctctgcccatatcatcatatctatagactattaggttgaatgagatttttttttttctttatcctattcaaagagataatattttactaaataatttggatatcatattattcgagtaaataatcattaattctatattattttaataaaaacccagttgtatattttttattctcccaactgattatattccatgtttattaagatgttgtatataattttatttggtttatgtaggactagaacttcaattgatcttagaatagcttatgtgctaatgcttgaggcatagatgctctcatatcttatccaccctttagatgcttcctcctacaccttcttttgatttatttatttaagactaggaatagagacattcatttatgttggagattgctgagaatatatctatgaacctttatttatttattttcatgaagtgatgggaggatggtttccatttatttttactttttt

SEQ ID NO: 25385 - DNA, 489 bp, Gossypium hirsutum
  Clone ID: LIB3583-026-P1-K1-G11
tatctagataagcttttttcaccttataatagtagattaattttctctctattagattagcctgagtatgcgggtagttcgagtataaagtattgtactagagtgaggctttttattgctagaaaaataacaatttaaaaattacagaaatctattttgtattctagttattactgcttctcatgcattcgatagctagtatgagccgttcggtgagtgatgtcccgtatggcgtggagagctgtagtgcagagatctcacgagggcagccatccctctgctgcccttccagagtattccaagagcttctggagttctaggctgctgaaattcttttttcttttgagttctttagggtttgagctaagttttagatatgggtttttgaatttaggttaaaattgtatttggactgatataagctctttatttgagcctcaaaaatttgttaaaagacattggttatgaacttttatagattttcatctt

SEQ ID NO: 25386 - DNA, 166 bp, Gossypium hirsutum
  Clone ID: LIB3583-026-P1-K1-G2
aagtacaggtccagatattccaaggtagatccatagcgtccgaatttatcagtcccaaatctccaattcttttagcaagatgtttttagaagtagtctcagttagagaaccaaacaagtatagtatatagaaatttgtatcccataaaagttacaacctttttttc

SEQ ID NO: 25387 - DNA, 573 bp, Gossypium hirsutum
  Clone ID: LIB3583-026-P1-K1-G4
ccgtttttctatgcgttcggagtcagcagttttttcgagccaggctttattttgtctcgttttctctcccgagctctctttcggttctttatttctctttcggctagttctctctcctcgttgggtgttccggtcggtgttgccgggttcgggttcggccggttgtcttttccggctctgctttcctccgtgtcgccgcttctcggttattgattctcatactgttttgtttctcactcgtttgattctaactgagtctagcgtccgagtcctctcattctcggtcggttcgaggatattgttagtctgttcggttacgttctcgttgtattcgtttataccggtatgctttctaatcctaaacatccttacttttattctgtagggtttgtaagaatctccgtcggttattggtatattccggctccggagtattttttaagggttgtttgttgaggtagtggaggtatggttgtggattctagtacaactttcactatgttacctgcgagtttatacgtctcggaggcgtctgagttcgatcaccgagttggccggtttttcttgcgagct

SEQ ID NO: 25388 - DNA, 431 bp, Gossypium hirsutum
  Clone ID: LIB3583-026-P1-K1-G6
tcctcactttagccctctcgtccgttctcgcgtccgcactcttcccatttcattttctcatactcctaacagaggagtttgtattctcagttctttctcgtttcttcttctatattctagcaaccttcatttaaatctttgcaatttcttggtcagccgattcacttgattatagaaaaagaatcttggttagctttgaagatagcatgtttgagtctgacttgttaagcccgaagattgttgttgattctctgatctaagatgagatggcttcctaagagccttaggcgtcatcttcttccagaattgggaagtatattggttttgcactcgtcaaaacttgattaggttattctagatgcaaaaaggttttgaggttacttatatgtgctttatggctagattaggggtggattgtcttatggggtgcc

SEQ ID NO: 25389 - DNA, 496 bp, Gossypium hirsutum
  unsure (1)..(496): unsure at all n locations
  Clone ID: LIB3583-026-P1-K1-G7
cttctctctgtttctcacaaaaagaaagttagaaactaacatcatttttgaaatagaagatttagatctgagagagagagagaggatgtgtttatgtgtggggcagagtctatgctcatttctaggggattagggattcgtaagggctgagttataggtccccgatagcttcgaaaggcctttccaatacgacgacacccgccccatccttgactggatctgctcctccctccgcccttccaaagtcctctccctctcccaactctccctgtatgagcttatcgtactagaagggtagctgttggagggggaagactaggactttgcttatgatagcatttcggccttctcgtcgaggagggtcttcctggaagcggtttttggagctgtagtaagattttaagatattaaggatgcatctgtagcatataaagctgaagctntagagctacagtaacaacttaagcatttgcagtctcagtttgacatgcttaca

SEQ ID NO: 25390 - DNA, 512 bp, Gossypium hirsutum
  Clone ID: LIB3583-026-P1-K1-H1
cggtcgcgtggggtttctagagctcctagtttagtcttatatctgttctgagttctttagattcttctatttaagtctctattttgagaagatagttatagttttttcattgtttttctttacgaagagcatctgtgtggtgcttttttattgttatccttgctctatgattagttctgagttgtatctatatgggcatgttctctctgagaagcttcttcttcttgttctttttagggttttatttttagggttctaaagaagctaatttttatttatttatggatccatgatgttattttacatactgcgttatctatctgaactttccctttcaataaggattttgaagataacttttttacttgctgagatcccatatggattttcacttttttctcctaaagaaatactccaatttaaagagatggatcattgtgtcatctctatgtattggtattgagtttaagatgtttatattccatttttgagtttctactccgagaagagct

SEQ ID NO: 25391 - DNA, 606 bp, Gossypium hirsutum
  Clone ID: LIB3583-026-P1-K1-H10
ccctcgcgttcgtcctcgcgtccgctctcgctttcgttggtgtaggatcattgtctaagctcgctactctgaggagatccctgtctcttgagtttctctatgccggctagctttgcctttagcttagcaagtccctgagctttttctttgctccctcctatgctgtgtcctgcttcttttcgatgtttttctttagagtagtgtgtgtgtggtcttgtgtagagtacctccgtgagttttaggtttgtgtgtcccttttagtagtagggcttgtccctgttgtcgtatttctccctggcgtcagtttgtgtgtgtgccagtgccggtgcgcgggactagcaagagaggtgcggttgctgtgccttttccggtgcctactgttttggcggtgagtttatgcgtgccggtgggtggatgataagctgtttctgattttagtagtcgctgttgtcgtaagtgttgaggtattgctcattcctttcgtttttgtagatattcatttttctactgctatcaagtcagggaaaggaagagctgatcttctcaccttattgcaactcatctcggttttttttcgtggctttgtgaataattgtctggcccttc

SEQ ID NO: 25392 - DNA, 586 bp, Gossypium hirsutum
  Clone ID: LIB3583-026-P1-K1-H4
catgtattctagcgtcagctagctgtttttttagagtattagttttccagtttctagtagttgttagtttagaggagcttctgttagttagtataagttcgttcctcgtgtttgtatattcagaggtttagcatttgcctcttatgttcttgcctagagtttagagtttttcatttccaatgtaggtgcttctgttattcatgatcctgatattagagattttctgttagttatttttgttcctgtcttctttgagtatgtggctgtattgcttatccctgcaagagaattatctcatcatatcagttctgctggtatggaagctagtggttcctgctatatgttgttcgcgatgtataggtagcatttttatcgggtccttggatggagcctatgttgtttttcgtgtagaggttggagttgttttctttttcctcttcggagcttaagctcacgtatttgctgggcttcagtaagtaagagctgaagggtagttcgttccagatcctcagttcgaagaagttatgaagtttatcaaaagaggcgtattcagatcttcctactataatgtactcctgggatcatt

SEQ ID NO: 25393 - DNA, 652 bp, Gossypium hirsutum
  Clone ID: LIB3583-026-P1-K1-H8
ccctcgcgtccggcttcttagagtggttgcctagattagtttggagtttttttgcttcttcttatttgagaagagtatagctctgtatatatatgttagttagagtctttttaggtgaggctttggctttgaggcatttctagttcttctcccatagtctcctcggagatcttctgtatttgagggctctgttgaagttccttcttgcattatatgcttgctgtatttgtatctttctgctgttgtttgccgctgctagccttctgcttttgtctgcctggagcatagggagctcctctgagagagcttatccagttttcatcgtcttctgtatcgtcatactctggcagtttaggctgatttggtgcttatagtggtcttgcttgtgtcggaggagatgcctcttagagatagttttctctagaacatctcatctttcagagtatagaattctttaatatagtaagagaaaggagcccatgttactcatgctctactagcagagcaatggctttcacgggcatgtaagatttttcagagtcctttttcaagagatgcatatactactctgttgaaagtagctgtacagtttctctgagctggggccgagttggtttccgttcgcgatgtggagtagaatctgtctgcagct

SEQ ID NO: 25394 - DNA, 402 bp, Gossypium hirsutum
  Clone ID: LIB3584-045-P1-K2-A2
gctaaaactacctccgcttagcaagaggggatgcggaagaatccagatagccgcccggataggcatctaggtcctccacctggtcatagccacgtgcctgcaaagccacagagtgaatccgaatctgctacacactaggaaaaccccctgatggatgatcatagctggatggatgggtatcagttgacaccatcattgaaaagctctgggctagataggtccctcaatcatgcatctcatgtagatcccagcgatgtcaataacagcagcaatggttggaatggaatgagaagattccctcaccctgtgatacagggtccaacagcgcagtatcaaatggaaaagcagaaaggctggcagggataccatactcttgagcatctgaaaaatcgacatgaactg

SEQ ID NO: 25395 - DNA, 548 bp, Gossypium hirsutum
  Clone ID: LIB3584-045-P1-K2-A5
gtattttaccggaggcaaatcccaagtcaagttgctgaatggggaaggatgagcatgtgtgatgccaagagaaggctccttgccaatgccttgcttgacatatccaatgaatggtttatcctcctctccgaatcttgcattcctttatacaatttcagtgtcatctaccagtacataatgaaatccaaacatagcttcatgggtgcatttgatgaccccggtccattcggcagaggacgatacaattataatatggttccggaggtgaatatcagcaagtggcgtaaggtgtcccaatggtttgaagttaaccgaaaactcgcaatcaacatagtggaagatgttacctattatcctaagtttgaacggttctgccgaccagcatgttacgtggacgagcactacttccccaccatgttaaccatccagacacccaatctcttagcgaatagaagcatcacatgggttgattggtcaaggagtgggcctcatcctggtacatctggcagatcagacattacaaaagacttcttcaagagaatcttgga

SEQ ID NO: 25396 - DNA, 548 bp, Gossypium hirsutum
  Clone ID: LIB3584-045-P1-K2-B4
attcctatacacccatgtctgaatatatggtcgacacaggtgtttcaagcaaaattgaaaagtcagtgcagcataggttgtaacaaaatcttttcattgatttaaaagacatacagactttgcttggtagagtcaaaagaaaattggatagatgaaaaattgaaggggtagaaaactagaaagatggaaaacttaatttttctttccataagtgtgtttggtaggagagatggaaaaatggtaattttctttccatccataacttggtaaagttgaaaaatggaaagaaagaaaataaaacatttgaatggattggtttttatgcattagggggaaaaatgttcatccctcttattttctttcctctcacttttcttcccaaccaagcaaactcaaaatttacttttcttccatttttccactcccttctcccatccttccacttttctacccaaccaagcacacccatagtgcctctttgcttgagaaagataactactaagatatatatttcatattaaaaccaactattaggtgttccattttct

SEQ ID NO: 25397 - DNA, 359 bp, Gossypium hirsutum
  Clone ID: LIB3584-045-P1-K2-B6
atcttagagagaacgtgcttacagtgatatggcacctccacggataaggtcaacacaccaacctgcacaatcacctgagctctgattgccgccatctagacaatctcatgcccaaacatgtgatctagctcatgattcagatctctaccctccaaggaaatgtgggacggtataatctgagtcctgcgtttatgaaacactatcccaaaactgctttaatctgtggcaaggttattcgagatgcaataacacaaactaagaacgattattggctgataattaacgagatgggtccatctgtaagcggacgatgtgctgctcctgtattccgaggatagacaggaagcgagcgcatatca

SEQ ID NO: 25398 - DNA, 437 bp, Gossypium hirsutum
  Clone ID: LIB3584-045-P1-K2-D11
cccacgcgtacggccattttcgatgctgattttcagcccacccccgattttattgaacgaaccgcgccccactgtaaggtaactaaaattaacttaatagtgtctctagttggattcaatttagtgaattcaagcaccatttagcatgtttaggatcaggtggagtgaaagtaaatattggttatatgcattacaggacaatgaggatgtaggattgggtcaggcaaggtggtcgtatgttaacaaggctgagaatctactaaccagacttgaaaacataaatttggcatttcactttgaggtagaggcaacaagggaatggtgttttccttaacttctttgggtttaacgggactgctggagtttggaggattaaggctatggaggagtccggtggggggtcggagaggacaacggttgaggacatggatattgct

SEQ ID NO: 25399 - DNA, 340 bp, Gossypium hirsutum
  Clone ID: LIB3584-045-P1-K2-E11
caagctgccaaattatgttatcggctctctagaagaccagctcatgaatagagatggtgtgtctaagatcattaagcgtctcttcccaatcgaagatttcttctaaagacaggcctccaagagctgcaccaactagtccctctaggccggctcttgaagcaccagtaagaacaccatcaagggttagatagttgtgttgatgtgtcagataatacttttctacagttggtgtgagagttgagagcataaagcataaaatttggttatcttattgtttctctaattaatgacttccagcatcctatttaaattgctagccagataacctatttcattgctc

SEQ ID NO: 25400 - DNA, 444 bp, Gossypium hirsutum
  Clone ID: LIB3584-045-P1-K2-E5
tttacacttaattgcctcaaaaatgaccctaaatttggttgccaaaaacacttaatacactaactagaaaccaagggaaagagaaagaggatagaagagagaaaaaaaaaagaaatggagggttatgttgagggccttggcgggggtgcttctgggaagtcgtgggctttactattaagagatgactgatactgtagtaacaggccaacgggggcctaaaatgaactgaatactcaaaaaaaaaaaagggggggatagagagagacaaaaagaatgatggatgggaggagggaggggttaaagtggggggtgtagggaggcaactgagatgatgcacaaccatgataagtgttatctgtgacggatatgaaagtgaccggtatggctgcctatgttgagaccttgggttataaaaaaataatttgctaatgcacactgcatgat

SEQ ID NO: 25401 - DNA, 477 bp, Gossypium hirsutum
  Clone ID: LIB3584-045-P1-K2-F1
aataactgatacctctctctcaccgtatcagcgcttacttgtgtattctagtttatcccctgttgttcacattgcgaatgtcaggtctgctgcctcagagtcgactgcaaatattaccgagatccatgatgggtggaatttttcagatgatggctacaacgatgatgactatgatgcactggtaatctcttatgtgaaatgatccactgatggaaaagagcttgttgctgcacgtagtgataattctatatatgtttatgatcaccagtcataaaagcctaccctacgaataccggctcacaagcctgatgcatacactgcgtgttttgctgattaaactggacgtctcctattttctggcagctatgatcatctgtgtaaggtgtgtgacaggctttgctttggcactagaggaaaagcaactgagtcttgatagggcatttagaaaggattacattcattgatagccgtggagat

SEQ ID NO: 25402 - DNA, 429 bp, Gossypium hirsutum
  Clone ID: LIB3584-045-P1-K2-F6
ctccaagcgtaagcgaagagagcctcaagactaatcgattgggctcactgtggatcacatatgcagctagacttttggtaaggaccatcaaacactaacctcaggacttccagagaacggtttggaattggcatacgatcgagccacggacagccacgctccaacgctgatattttgcctgaaatcgtatggaagctgaggaaatggctatagcttgggatggaagtaaaatacagccaaaagcttaaacacatggataaatacttatccgaaatcataaatacacgtaagcgagagttggtgagtcaacatcaaagtgggatccaacacgacgatgagttatgccgtttcatgaaaaaaaaagagtcctattcagatgaattccttcaacacgtggcgctcaatgtcatactagatggacgtgacacg

SEQ ID NO: 25403 - DNA, 385 bp, Gossypium hirsutum
  Clone ID: LIB3584-045-P1-K2-F8
caaaacaggagttcttaagcttctaaaatacttttaaatctgcatctttaatgctaaacattgaaaatggggtggcgcttatagagatctaagctatggaacgcgtgaatagcatttgagagctatgatatgatctacctagacaaaataaagcctcagaggatcacaaacggttgaaggttgaaaacaaactggctgcacaaacttaagataaatggtgagcaaacgaacaatctccatctttcaaaaggtccaactggcccaaagacaacggataaaccaacatttcatgaagacaactgattagagaaccgtaactttgatatgtcgcactaagaccccaagatctgatatatactcaccaaaagaaccttacaatatggaa

SEQ ID NO: 25404 - DNA, 420 bp, Gossypium hirsutum
  Clone ID: LIB3584-045-P1-K2-G12
agaaaaactaagatgagccgaacttcctcctgtacaagagaatattgataaattagagaaagctataaatgagggtagttcctatggagctcaccagatgtacaaatcaatcagtgcacgatatgtatctgctgaaagatattctgagggcttggatctgcttgagtcatgttcatgtctccagttgaagcatggccaggctacttgtggggcatgctctcgctgtacttgtttgttgatacacttgtcaaagggaaaattccatataactaacacattcttgaccgcgtcaagaaaatgtatgaagtgtcaactaaagagcacttggctagtaacatgtcagatgatgaagatgttcgagaatccactgaagctctagtggcagcaaaaacacgtctagagggctgatcatcattctta

SEQ ID NO: 25405 - DNA, 550 bp, Gossypium hirsutum
  Clone ID: LIB3584-045-P1-K2-G7
cccacgcgtccgcccacgcgtccgatttatttatttattactgagttttcgttcttttttcttctgttaattacgcgtttaacttttttttaaaattaatttcggtttttattttaattgtttagttacttgagttaaaaaaatcgttttcaggcgtttggttttgtcgatggaggatggtggtcgtgcgagtctctcggagctgagattcatggatttcatacattgcaaggtggtactattgtattgtttgatcgaaagatgccgaggaactttcgaaaagatggttataattggaaaaagaaaaaggatgggaagactattaaagaagctcatgaacacttaaaagttggtgataaagataggattcatgtatattatgcacatggtgaagataactcaacctttgttcgcaggtgttattggctgctagataagtctttggagcaaatagttcttggtcattatcgtgaaacaaaggaggtttcactagccacacattcaaattcgagtttgttaacagatcagtctactcctttgcttgttacag

SEQ ID NO: 25406 - DNA, 455 bp, Gossypium hirsutum
  Clone ID: LIB3584-045-P1-K2-G8
cggccgattccggtcgcccacgcgtcgatggatgctgtgctgtgctacagatgctgccgaaggcttcagacattgccttactgaaccggctagtgtcattatcagtgcatgctgaccgcgggctattttcaaagaagaagaactaccttctatgcagttaatcacatcgattgtgttggattcatgttattgccttgatatggagttcgatttgcacccttcatggtttaatatcgcctcctgaacgtggtcaatcatgacaatttaaaggacagaggaagcatcttccagccagacagtggaactcaaggagatttctctaccggattggcttggggtacttacactagactggatatctctgggcaagaagacaccaatttttcgacactttatgtagatcactgagcatagattgaggtggagagaatgatggcagcttataccttaagtag

SEQ ID NO: 25407 - DNA, 265 bp, Gossypium hirsutum
  unsure (1)..(265): unsure at all n locations
  Clone ID: LIB3584-045-P1-K2-H1
cccacgcgtncgggtcgagacggggggcgactgctctacggaccccgaccttccagcccctagcgctcgactcatggattcttctatagtggcacgtatcgtcgattcactgcccgtcgtctttgaacgtgttgacgcgaccaaccctgacggccacgaagctgatcggctcgtactacgtccgcatgttgtcagctgattattgaccgaagaggctgacacagagcgtccttaccatcatgcggtcagtgttgctggcggcagg

SEQ ID NO: 25408 - DNA, 515 bp, Gossypium hirsutum
  Clone ID: LIB3584-045-P1-K2-H11
acttgcactccgtatggctcgttctcgcatcaatgctgctatttcccattctcaccctcatcctaacttccaagctctcacttttgtcaaaaatttcagacacattagatcccttctcacccaggttgaccacatctcttccggagtcgatggcatcttaatggacttaggaatgtcatccatgcaggtcaacaatcctgcccgaggcttcagtgtgcttgctaatggaccccttgatatgcgcatggatcctcaggctagtctgaaagcggaagatatattaaattcttggccagatagtgaagtgggtagaatcctccgggattatggagaagaaaggaattggcgattgctacaaaacaagcttgctcaagctcgtcttcaaggtggattgcattccactggtgaattgggtgatgttattcggagtaccactcctgggacaaaaggaggtaggcaaggttggataaagactgcaacatgagtgtttcaggctcttagaatcgctgtcaatg

SEQ ID NO: 25409 - DNA, 457 bp, Gossypium hirsutum
  Clone ID: LIB3584-045-P1-K2-H5
gctgaagtcagttcggagtggagtattgtacccggacgtgggggccgtcccacattggcttcacttcaacctggtggaactgtatcttttgagcaccgaaatctcaaagggctgaacaggtccattctcggttcattgaccaccagtaactgtgttaatcctcaggatgatcttgctttcaagctagaatatgtgcatccatatgtggatggtgtttataatccacgcaaccgaactcttcgtgcaaactgcttcaacagccggaaactgagtccggctttcaccggtgtgccaggagttgatgaagtcccaccaatatgggttgatcgagctggtgttaaatttaacattacagagaatttcacccgtcaaagcatattcacttaccgacttgtgatggaagagataacaactcgtgatgaaagcagacatatatctacaaacggtcaaagagtgc

SEQ ID NO: 25410 - DNA, 351 bp, Gossypium hirsutum
  Clone ID: LIB3584-046-P1-K2-A8
cccacgcgtccggaagccgttgttgaggctgcagtgcaagggtttccagagactccaaatgtgctgggccaatcgggcttattttatttagattggaaattgggctttatttaaaagacttggactattaataaatttgggcttttatttgtgaacagacttaggacaattaatttattattttttgttatattcatgatatagactttttatgtgggcccaggcaaaatggacttgatacactgcccctctatgctcattatcgtgtaatgagaatacatcagaaactttttctaattttcttttggtgcttatgattcatcaatagcagcactgagcaaaagggaggtt

SEQ ID NO: 25411 - DNA, 545 bp, Gossypium hirsutum
  Clone ID: LIB3584-046-P1-K2-B2
ggtgatcggaggccaccgaaaggttgctatccttctccccttcgcttctcctggttcagatcttccaaaaccaaaccaaaaaaaacttgaaacttttaaacttcttttgacccaatcttcacgctactctggccatcgccagtcaacaatcaaccgggcaaataaaagtcggtccaacatgtctgatctagagatcaatagaacgcaaaatcaaaaaccttgaaaaggaggagtttcggtggttcggtggccaatcccaacggttaagaggcaaatgaggaggagtggcaaaccaaaatcaatccgactatggagatttgggatcggatgagcaactgaattttaagattcaatttgagcatttggactagatttccggggaatccaaacagacaaaggcaaagaggaggctttaggttgtcatttggaggtgcccgagtgggagacgatgccggagtggtagcggcagctagggttacgaaggagagggagaaaaaacactcagttttcagggttaaattaattggtaattagatgaaaagaaa

SEQ ID NO: 25412 - DNA, 550 bp, Gossypium hirsutum
  Clone ID: LIB3584-046-P1-K2-C8
gctggtcaaagaagagctggaatgcgagcaacaatggaaaagtgcgatggagcgtagcttcaagcgcatggataacgaagtcatcaagtggaacgagagcgtcgtcggagctaattgccgatgcgatttacaatctccggagtgcgacgccgttggctccaccgcagtcgtctctatcgttacgtccgataaaatcgtcgttgcaaactgcggtgattctagagccgttttgtgtcgtaaaggcaagccagttccgttatcgtctgatcacaagccggatcgaccggatgagctagaccggattcaagaagccggcggtcgggtcatttactgggatggccctcgagttctcggtgtcctcgcaatgtccagatctataggtgatacctacttgaaaccttacgtgagctgtgaaccggaggttacagtaactgatcggacggtagatgacgaatgtttgataatagcgagtgacggtttatgggatgtggtgtcgaatgatactgcatgcagggtggcgcgtatgtgtttgaggggaaaggtcgacgta

SEQ ID NO: 25413 - DNA, 549 bp, Gossypium hirsutum
  Clone ID: LIB3584-046-P1-K2-D10
cccacgcgtccgggagcatattctccagaaaagtggaaaacctcctcttccttggtttattcggttccgcatagtttttgaagtagcttctggacttgcgtttttacacaactcaaagccagatcctattgttcatagagatttaaaaccgggtaatatactgttagatagaaactatgttagcaaaattggggatgttgggctcgctaagcttatttcagatgttgtgcctgacaatatcaccacgtacaaagactctattcttgctggtactctcttctacatggaccctgagtatcagagaaccggcaccgtcagaccaaaatcagatctatatgctcttggacttacaacactccagttagtgacagctcggcatcctaatggacttctactggcagttgaaaatgccattaaaaattgctgcttagctgacattctagacaagtcaattacggattggccactagctgaaactgaagaattagctcgaatagcattaaagtgttcaaagcttagatgcagggacagacctgatcttgacacgga

SEQ ID NO: 25414 - DNA, 183 bp, Gossypium hirsutum
  unsure (1)..(183): unsure at all n locations
  Clone ID: LIB3584-046-P1-K2-D4
cgnntccggttctatgatcggcgaggcggccnangctctatgaggatctcaagtcttacggtatcgcccgtgcatgnccgagcgtcatagcatctgtctattagtggtcagcgctagaattcaattcactcgggccgctcgttttacaagcgtcagtgacctgggtaaaacgcctgggcgtta

SEQ ID NO: 25415 - DNA, 583 bp, Gossypium hirsutum
  unsure (1)..(583): unsure at all n locations
  Clone ID: LIB3584-046-P1-K2-D5
aaattagatgatttgtgtgatttgctgaatattccaatcatgagaaccactgttagaaaggaggaactctttgccaaattgttggaatttctggaatctccccatgctacaactgacattctgcttgctgaaaaggaacagaagggtaaaaagcgtaacgctacaccaagcaaaaacattgcttctggtgaaacatcagacacatcagccaagaagcgacaaagcacaccccaaggtggggaaaaacgtaagcgttcatccgaagttgaggaaaaagatgaagatgttgaatcccctgccagtgaagatgattctgatgaggatgatgttgacactacagtcaaagaggagagtgatgacgaatagactaactcaaaggaagaagaagacgcacccaagaagtcaagcaataaaaataccttcaaaaagaatgcaatggatcgtccagattcaaaacttaangagacatcggcatctggaaagaagcttacctctgcaaaatctaacagaaagtcttccggatcaactttcaaacaaggtgctagtgatggagaaagggactccaagctttaaattaaagggt

SEQ ID NO: 25416 - DNA, 503 bp, Gossypium hirsutum
  Clone ID: LIB3584-046-P1-K2-D8
atatattctctaacaattgcatcatcaatttcttcttcatttgttgccctacttgatttctcaatgcattctggttttgaataacaagtgctgcttgattttcttttttcaaggaaaaatgaagtttgtatggcattgtcgtgtgttctctaatagaattgaaagcaagagatttttggataattaacctcaattataactagaaaaaagtgatcatatttggagtggaagatttgtgaatttttttgtcaatcttggaatttaccttgtgctaaggtggtgaatattagtcattgcatggatcaatatttgggtatcttttcataccgctaggtgcttgcactcatcagtaaggatgtggcggatcttctgtaaaatggtcgattggagctcagcgatgaacttagttggaattgtttgtgtgctggtgtgtatatgatatggaaatggattctgattgaactatacaggtaatatctaaatgcatggcactgcatgaatta

SEQ ID NO: 25417 - DNA, 470 bp, Gossypium hirsutum
  Clone ID: LIB3584-046-P1-K2-E3
gtctgttctctgtactaatgacttcaagcattcttaatggaggagccacttgcgccagaagatatgtggtactgtgcacgctgcaaagagcaccatcaagccagtaaagagtcggatcttaggaggctgcctgagattgcggttattcatttaaaacgattttattataatcgattctcgaaaaacaagctggagacatatgtatggacttccccacttgacaaatgcacgaatttgtcaagatcatcattggcctctagggaatggcgaggttatctagatcgatacatgctttatgctgccagtaaccactatggaagtatgggaggcggccactatactgcattagcccatcatgggggcggacaatggtgtgagttcgatgatagtcatgtatctcccatcagcctggagaagataacgacatctgctgcttatctgcttttcacagaagagctgtagaataaaaa

SEQ ID NO: 25418 - DNA, 419 bp, Gossypium hirsutum
  Clone ID: LIB3584-046-P1-K2-E6
catgtattgaagactcgaatttctgtctacatgattcataaaagctctggttatttaataaacataacacaaggcggcgaagaataccataaggggaaagagaatcctattaatgtgcttttttatgggtatggtcactattacatactggagtcattgccggaactaatttccagcaaataaagacatagaagtttggtcttgttatatgattatgattgcataaaaagaaataagcttatcttatgttaaatggaggaattccattgaaccaagaaatagtctgaggttgataaattatgttgcacctacctcggctttagcaattagctcaatacaattctgtagtttctgagaaagtttcttgatttttagaactcaatacaatactttagattggtgaaacattatagttattt

SEQ ID NO: 25419 - DNA, 601 bp, Gossypium hirsutum
  Clone ID: LIB3584-046-P1-K2-E7
atttaaaacaatgtatatttatcttacttggggtatagtataaagacgaccaattatacttaaacataacgtataatgtagtgatgatgagataatatagaatgacaatatgggtatgatatataacaaataaataagagaatgatataatagtactaatgtaactataataatcataataatattaattatcaaatcataataatgataaaataaataaggtaatttaaaacaaataaaatgaaagatgtatgagaatatgtataaataaataacgagcgaaaaatgaactaaatgagtgaaaaatgtacaagtatgaacaacatcaattttaagaaaaataagaagtaagacaataataaatgagtaaataatagtaaaaaaaattgcatgaaaagctgaatttgcaataaaaaataaataagtaaataataataaaaaatttcatgaaaaactaaaattaaataaatgagggactgaattgaaatttaaataaaattacaagtataaaacataataaataaaataaattaaatagtaaaacaaaataaaggaccaaaacgaaatgagcgaaaaggataagggactaattgggaaaata

SEQ ID NO: 25420 - DNA, 564 bp, Gossypium hirsutum
  Clone ID: LIB3584-046-P1-K2-E9
gttaggcttaatcttgcctttttcccttcgcttttagtttgaatctttattacgccgacagagtttcgggccgacacaacagtgcagaaaactcagacgaatcgtaatagacatcgggatattcgaacaatccgccatacgtcacatggccaccaccgtagttatctgcgattccgaactcgaataagtcattgttagggatctgatccccaaattcccacaactcaccggttcctgacgagtcagtgtcgagtctcagcaactcagtaacctcgctccttatttcctcacttgaagatgtggtagccataggaggaggtaaaccaagatcatcatcggaagcctccaaaaggtaaacaagatccggttgaggttcgctggaatctgatttcggattcaacagcggttcctgtgcatttgaagttgatgacgctgccgatatctcctcttcgaaactcttaataaacgatgcgaggtcttgggtaacaggcaaagaatcagagtcctcaaggagatctaatagatcgtctctgagtctcttcaccataggtgagtctaggtcag

SEQ ID NO: 25421 - DNA, 210 bp, Gossypium hirsutum
  unsure (1)..(210): unsure at all n locations
  Clone ID: LIB3584-046-P1-K2-F12
naaaaaaaaaaaaaaaaaaataaaaaaaatatttaaaaataaaaggagggcttaaaaaatataatagaaattaatgtgcgttagcgttcatagaagattcaaatctaacttgatctacatgaggtagaatactgttgaattacgtgggggctcaattttttagaacagaatgaatcatttcccgaacttgcaacatcatatcctttttca

SEQ ID NO: 25422 - DNA, 215 bp, Gossypium hirsutum
  Clone ID: LIB3584-046-P1-K2-F4
cctgaatggcgactcgcactgtctctgtacattaaactcaaaggctgtagatgttacgcgcaccgtcaccgatactgttgcacgcgccctcgcgctagcgcctttagctatattacgttgctgtatggtcacggacaccgactgtgccctgtaagctgcaaatctaaggctcgcgctaccgttagcgattagagctatacggctcctgcacctca

SEQ ID NO: 25423 - DNA, 503 bp, Gossypium hirsutum
  Clone ID: LIB3584-046-P1-K2-G12
cccatacgtccggagaggcggccggagagacctaatgcatgatctacctttcgtgtatcaagagaacacttgtataaggcttgacatatcttatatactgggcttccttgcataacgtgaggattgcataattttacatgtctcggagaagatgaaaaaagatgctcatcctttttacccacacggacttatggtggatgaggacggatcacttcacccttgaggacatgggtggacctttaatgtaggtgggatcgctcattgtacaaccatagttagcgcaaagaacgtgcatgataccgacggtcttactcaacatggggtaagaaaactatctccaagctgttgaaatcaaatccatgggcattattactctaagaggcaacttacgattcatgttgtatgcggcaatgtgatcagagcgaggctcactgaagcctgtctttgcctcagccggtcatagagtatcactggagactgccgacgtgatgggaaacatgact

SEQ ID NO: 25424 - DNA, 564 bp, Gossypium hirsutum
  Clone ID: LIB3584-046-P1-K2-G5
caaaatgattagattatcaaatcattgatctgggtattaggatgtgaattcaacacccaggttatggttaaatcccatgcggtttcagcattgaaatccatcattgaaatagcaagttcggttgtactcgaaagattagaacccaagttcttcgagatgattgtcggagttttgaaacaatgcacaaccaggatcactcaacggggaataaattcagctttgcatgttcttttagacgcttgcccttagggaagaaatcggctaatgatggttgaatcaggagcagtttccgcgcttatcgagcttgaattaggatcacccgaaaagagaaccaccgagcttattctgggtatactcttccatttgtgttcttgtgctgatggcagagtagagtttctccgccataaaggcggcatcgccgttgtcacaaagaggatcatgagagtttcaccggcggccgatgatcgagcagtaatgatactttcgttgataagcaagttctcagccaccagttgggttgttcatgaaatgttgggaggtggaactgtaacaaagctttgcatg

SEQ ID NO: 25425 - DNA, 520 bp, Gossypium hirsutum
  Clone ID: LIB3584-053-P1-K2-A10
cctacgaagagcagaactaaagacattcgtggattttcatggcaatgaggctgggaaaggtggggatctaactcatgatgagacaactatcattgccggggcactagaaatgactgaaaagactgctaaagttgctatgacgccgatatcgaatgcattttcactggatctggatacaactcttgatttggaaacgttgaataaagtaatgacaatgggtcatagcacagttccagtttattatggaaacccgaaaaatataatcgggcttgttctggttaaaaatcttttaacaattgattcagaaggtccggctccgatgagaaaaataatcataagaaaaatcccccgtgtatgagctgacatgccactatatgatatacttaatgaatctcaaaaaggtcacagccatattgccgaggaatataaggatcttaataagagcaaagaacgtctagagtttaacgatagctgtaagaagcgaagaggtgaacccgagatgtcaagaaatgatgatcgt

SEQ ID NO: 25426 - DNA, 578 bp, Gossypium hirsutum
  Clone ID: LIB3584-053-P1-K2-A3
caggattctggttacccatgcttcaaaggcggtcctcgagcaatacaaaatttaagaaaacgattccacttaagtttgacagaagagcaatgtgtgtcattggtgctttccctgatcagcagcagtttagatgcatggcgaacacggcagtatgattattatcagagggttttgaatggaatattgtgaattcagatttgatgtgttgcccccattgtcgcatgtttggtaaaatcaggctagtgaagattttcataggaaaaagatactcgtgtcttatagggacggtcgccatgcaatgatttccaaggttttctacaagatatattttttttttcagaggggaaaggatggttcctagttcctaccagtttgtggtctgtcttatatatgtttgaggaatttgtcactgtatcggcgtatataaacgaaggaggcaaactctttcttagcagagctctcttctgttgttcatctcgcgtccaccagtctggctctcggtgattaaattactaggagggtctactcgaatgctgtctgtgtacgcattctcagaacattgcatactgtacagagtg

SEQ ID NO: 25427 - DNA, 264 bp, Gossypium hirsutum
  Clone ID: LIB3584-053-P1-K2-A5
gaggctatgggcctgtctatggatttggtgacattgccatggtggttacaaggagatgagtttggagagactggctctaacacagttaccctaccttattcttgctgtattgatcttcctgctttgcttgcaggaaaattatattcaatagacttctgcatgtgtatctctttgcaatttgtactatctgactagggggttcgatgaacgggaaacaacgtctgttatggggcatactattttgtgtttcagttttaaggcttg

SEQ ID NO: 25428 - DNA, 169 bp, Gossypium hirsutum
  Clone ID: LIB3584-053-P1-K2-C11
aatatgagtacataagtaacttatcgccaagttacagaaatagggacagcaaattatcgaacagtctccatatgtgaattataattttctttgggatatgcaaaatccaaagagccttgtaaaaattatgtcggtaagtctgatcaagaataataggaacgtttttctg

SEQ ID NO: 25429 - DNA, 327 bp, Gossypium hirsutum
  Clone ID: LIB3584-053-P1-K2-C2
ccggattcccggtgacccacgcgtcggtggcagtgatcgatgtatcgattggaatacaaccacaaacacacactggctgatggacactgcgacgatgcaacctggggttgattaatgaactcgcgactatggtctcaaaccgatattgtgggaacctacagaagtgctacttacggacaacatcgagtttattgaactatgagaaacatttctgagctgaagaacctagttggacggttcatcctaattaacatgcggaatggactatttggagacacaatcggggtcaaagagctaacttgagctttagctcaaaataatcgagat

SEQ ID NO: 25430 - DNA, 532 bp, Gossypium hirsutum
  Clone ID: LIB3584-053-P1-K2-C8
accacgcgtccggactagttctagacgcgaccgcagcgacgtggctgcgggttgtcaccccaacatgcgtatggaaaaccatgagatgccttgatttaggcactgaaaagaagctgaaaaagtcaataaagggcgtggatgaattcgctgaagaagtgattaggacaaggaaaaaggaactgtcattacaaaccgaagacaaaaagcaaagatcagatttgataacagtgtttatgagattgaaagatgaacaacgaaagccattttccgacaagttcctgcgtgatatttgacttaactttatacttgccggaagagatacatcaacaggggcgtggagctggtttttctggttgctcgaaaagaaccccgtggtggagcatgaaaattcttgcagagatatgtaagaatattaatgaaagagacgatatgaaaaacggcgccgatttgaagagcccattgatatttagaccagaggaagatcaagagatggactatttaaaagcttcattatctgaggctcttagattgt

SEQ ID NO: 25431 - DNA, 479 bp, Gossypium hirsutum
  Clone ID: LIB3584-053-P1-K2-D11
gaaaaagaagacgataactcagaagcagaacacgatcaagaagaggaaaggagaagcgcacacttcaggaaaattaggtcctggttgacgcgaggagacatatttgtagtctcagcaaactttccaggtacatgacgtggcataccaaaaccagaacctgacgataactgggttcagcctatacaaccagaacattatcccagaccatagccaaaggatctacgcgactgtcaaaatcacaccatgtgaaacaatgggatagacagagccacgcgctggcctttggcatgtcactcaggttgttggatgatatattcaacagtgaccgataagagtgttacttcctgactcgacagaggcagcgtgcatttgaataaagagtgaaaggcaataataagcacatagcctcgtgtttatagactaatgtgaaatttacgagtctgaagcaggcatgtaatgaaataaaaatggtgacctat

SEQ ID NO: 25432 - DNA, 528 bp, Gossypium hirsutum
  Clone ID: LIB3584-053-P1-K2-D12
cccacgcgtgcggttctgaaagtggctctttgtctacagtttcaagggaggacaacatggtggtgtcctcagaggattcttcatgccctgatgagtctgagttggagttggctcttggtttgtgccttgatggttttaagatgcaccaagtctcatgaggtggtcaatttgctaggatttcgactgctaaggatttcccttctgtcatttctgcttctccatcaccttcttcttcatcatcatcatcatcttcttcttcttcttcttctttaagtacggctaatgtcacagctgggaccaagaggactgctgattctgtggctgctgctaattcctctagtcaagtcgcgggatggcctccgatcagagtctataggatgaatagcatggttaaccaagcaaaaaaccagaccaccgaaggatttatctcgacaatggagaaccataaaagtgagacctctacggttgaaaagggtactactggcattagcagctaccataatagtggcaatgctaaactcataaaat

SEQ ID NO: 25433 - DNA, 422 bp, Gossypium hirsutum
  Clone ID: LIB3584-053-P1-K2-D4
aaaaaaggtggacataagcgctgacaatccaaagattacttcaacgcgttgattaaagaaaaagatcggcgacggggtgggtcctactaaaagttgctgctgcaagtgcttgaacatgaagggaagataaggcggggaggagagttttaagagttaaaggctttcggcggcgatttacaagtgagagacttgatcaattcgtggcgtaaaacaattgaatgggaggaggtgtatacaacgagttttatggggagaaaccgtagggatcataccctaagctctctgctatactgacatttttccacaatgtatgaccattgggaagggtccgttttaaaccatatttactaaagtgtgagtttacttattactgaatgggtccgctccttttgcgagtaatttaatgctgtgggttttggttt

SEQ ID NO: 25434 - DNA, 546 bp, Gossypium hirsutum
  Clone ID: LIB3584-053-P1-K2-D9
cgaattcttttgccgaagctgctacagaggccctgaaattaggatttggggaaccaattgctatatctgctgagactggtctgggaatgacagcacttcatgaatctcttcagccaatgcttgagaattacatggccaaagttttagatggcaaaagtagccaagatgaaaacctcagccaggataacgattcttctaaggatgatgaatctaagctgccactacaattggctattgttggacgacccaatgtctggaagtctacgttactaaatgtgttgctacaagaagatcgtgttttggttggtcctgaagctggtttgactagagattcagtgagggcacagtttcaatatcaagggagaactgtatatctggttgataccgctggttggttgcaaagaggtgatcggcataaaggacctaattcattgagtgttatgcaatcaagaaaaaatctgatgagagctcatatagctgctttggttctggatgctgaagagatagcaaaagctcggcgcagcatgacacatgccgaagttgtta

SEQ ID NO: 25435 - DNA, 439 bp, Gossypium hirsutum
  Clone ID: LIB3584-053-P1-K2-E1
agcctccaatacttttttcacaagtgactgctgttgattcctttctttgagttaattctgaatgcagattgattcggtaattacccaatcagactcgagtacttttttagttgacctcaaatagcttacaagcactagtgtcacatttacatctttatgttgaaatggcagttttgagattttgatgattttggtgtcttaggttcaagtctccatttatgattctttttaggattaatttgtttttttttttgtattatagattttatataaaaatctaaaacaaaaatattatcataagaatatttgttaccttttaaatagaaagatttttgtcatttttcaattaagttgatgttcaattaatttgtaataatgactcagttaaagtcttaaatgattttatattatcggacagtaaaatatgagttgtggtggt

SEQ ID NO: 25436 - DNA, 519 bp, Gossypium hirsutum
  Clone ID: LIB3584-053-P1-K2-E3
cccacgcgtccgaaacaagcaaaacaacattctaaaggattatccatcttgcactctaatactgatctgcttgcttatcttcaaagcactctggataccctggatgatgaggcaggaataaaggactgctacctagatttgggttcattccctgaagatcaccagactccagccactgcgcttattgatatgtgggtggagcaatacaaacttgatgaagattgtgatgcctttatcaaactccatgaactctccatcagaaatctggttaatcttgtagtcatgaggaaagatgatgcaagtgaagctgatagcttctacaacgatcactttgtcatgcagcatgatcttcttagagagcttgctatctatcagagcagcttcgatcccatagaaaaaagaagacggataattgtagaattaagcagaaacaatttcccgaattggtggtcggaagagaagcagcaaccacttggtgctcacctcttgtctatttccacagatgaaacattctcatac

SEQ ID NO: 25437 - DNA, 435 bp, Gossypium hirsutum
  Clone ID: LIB3584-053-P1-K2-E9
cgagcagcaatggcaggttagcattgttaaggtcaaagtttgggctttttgctagtaggaattttgtggcatgcacatttagaaggtggtctaacaatgaagatagtttcaatggcaacttgtgaatgattctttttaagagttggaacaatattcttgatttgatcacaatgcaactttgtgagacgaatcattttcttaatgctttttgtagttcttgattacattttttcttgggaatgtgcaaatttggaaggaaaaagaatgggaaacaattggccacgtatttgcaatttgtataagaggtggcattttgtaggccacgtatttttctgatgattgaaaaaaaaaaaaataagaacaggatagacgtttacaaaaaataccagaaccaaaaaagaaaaaataaaaacagctatgcataaaactataaaa

SEQ ID NO: 25438 - DNA, 527 bp, Gossypium hirsutum
  Clone ID: LIB3584-053-P1-K2-F7
cggacgcgtggggctaagagaaaccaaagatggctccgaccaagaacgtccgtacaatctcacaagaggccttcgacgagttagtgaaagagaacatagatgacctcgggatggatcccgccgaagctctagaagacgccatccaaacactctcccttcaaggcgtcgatctttctgggatcgtgaagtgtgttcctggagaaggcggcatcaaggaccatccggcgatgcaatgcttggataagctgaagcaactgaatgctgattcgaaggatcaattcggcggccaagatttagtccaaatcactgccttgcttaatgacctaagtgaattatgtatttctaataaagaagattcggggaatgcagtgattgttgctaaaaacggcggtatcgaattggtttgtttgatctgtagtaaaattccaactgaatcaaggcagtgtctagtttcttgttttaaggcaatggcatcattgcttacagatgttcaaagtacagagagttttagggcaagtggaggaccg

SEQ ID NO: 25439 - DNA, 427 bp, Gossypium hirsutum
  Clone ID: LIB3584-053-P1-K2-F9
gttctagatcgcggcggcggcggagggtactgttccggtgaggaagagcaataagccagtgaaagcaaagtaacagcagctcatttttgttcttgaaaatgttagttaatttgcatgtttttaatactttgggtattcaattttttctctaggtgtcaaattatataacatataaccatcatcaaggggaaaaatacataattgtatacagttgtgtagcttctttatgaatatgaacaacaaaatagatatttcagtcattgaaaaaaaagcgaactgagataaagcatttaaagtggcacaaaaaagaaaagccgatgccatgcaaagaagatgatattgaatatcagaaatctaaaaatataaggggcggcggttttagaggttcaaggtttacttccgcgtgcttgcgaggaattaccttttt

SEQ ID NO: 25440 - DNA, 553 bp, Gossypium hirsutum
  Clone ID: LIB3584-053-P1-K2-G10
aatagaaccgatgctgatataaagtcatatgtaaagagtagtaatcattagtcttcagttcctgccgctgatgatttcaaggttacagggattttaacgaatggaccatgtctgttcacagcaataactcatggaactggtttgaggtctagagaagaagctccttatcaaaaccgtcaaagagaacttgctcgatgaattagacagctcaagttgtaaatgagcttttgaaaaggcgtgaagaaacacaatggtatattgagggagattttgatgcttatgttaaggaaattcagcagccttatgttagaggctgacagcctgaattattgatagcttctcatgtttggaagactcaaattcctgcctacatgattcatagaagctctactaatttaataaacattgctatatacggcgaagaatacctgaaggagaaggagaatcctatcaatgtgctatttcataggtatggtcactattacatactggagtcatggccggaactaatgtccagcatatcaagacatagaagtttgggcttggtatatga

SEQ ID NO: 25441 - DNA, 464 bp, Gossypium hirsutum
  Clone ID: LIB3584-054-P1-K2-A12
cccacgcgtccgcccacgcgtccgaaaatatatcataacatgaactgaagttcgatcagtgacttgaaatttgacctgaaaaatccttttatatacatttctaaaaaccctcttgaagggggtgctcttcaaacactctacgggattaccttcttcttcacctgaaaatcttcttcctctttactctaaccatccatgtcaggaagaacaagaactaaccaatggggcgaccaaccaaatctaaaagctcaacaattggtgcggtgagcgtggatcgagcaccatcggataattccaaaacccatcatcattcgatatctattatcatcaccctttgacgacattaacgaccaccgatcaacaactttcttaccattgaacccattattagcctctgcatgcaaccaaactaacccatcagacactggccccatatcagtctacgcaaagcacatcataaaatg

SEQ ID NO: 25442 - DNA, 421 bp, Gossypium hirsutum
  Clone ID: LIB3584-054-P1-K2-A4
cgcctttacatcaaatggaaagctagaagcatttaaaaaccttaaaatttgaaggtgacgctttgcttgtttgcatcaactgtcgttcagagctcaaactcaaatgtgcatggaatggcagaccaaaggatgattgcccttggcaggcgtggaaagaggagagtatcttagaagttatgcaaagccacggctatcctgtgagatcagatttctctttgcctttattgattatgaaatgcattccttttgcaaatgtgtataattttttttttcattaatgattctagggttgagtatatgtataatatatataaaaaatattatcgctttaaaattgcttaccatttggttgagcgatccttggagctgggctccatggtttgccacaaactttgaggctctatagaaagttttgtttggt

SEQ ID NO: 25443 - DNA, 269 bp, Gossypium hirsutum
  unsure (1)..(269): unsure at all n locations
  Clone ID: LIB3584-054-P1-K2-A8
atttcacttacccaaaagcaattacatgaagagcatgataatcaacataaaatggatgagttattggaaacccacataaaattcctggaaacactgggaatagcaggagttagtcatcacagtctacttttctctaaaacagcacctgtacaagttgtagaggaaagaagacgaagacttatgggaaaaaaaaaaatatgggttgtgccgaacattcaatcttcaagtttctttctggttgaaacaggaaaacccnntgatgggggctg

SEQ ID NO: 25444 - DNA, 426 bp, Gossypium hirsutum
  Clone ID: LIB3584-054-P1-K2-B10
cgcaacctccttcgtctctatgggttttgcatcactgcaacggagaggcttctggtttatccttacatgtctaatggaagcgttgccactcggctcaaagccaaaccagcactggatgggggaacgaggaaaagaatggcattaggagcagcaagggggttactgtttttgcacgaccagtgtgaccccaagataattcatcgggatgttaaggccgcaaatatacttctggatgatgattgtgaggccattgttggtgactttgggttggctaagttgttggatcatcaggagtcacatgtgacaacagcagtgagaggcaccgtgggacatatagcccctgaatatctatcaaccggtcaatcctctgagaagacagatgtttttgggttcggtatccttttacttgagctcatttctggactc

SEQ ID NO: 25445 - DNA, 449 bp, Gossypium hirsutum
  Clone ID: LIB3584-054-P1-K2-B2
gtccactgcatctatatcattccctatagagtctttcatcagatcagttacatccctcaggtgctagctcttcaaatagtgttccacttgtggatacctctcaaggatatcgtctataacatctttgaattcctcaacggttaagaaaccagagttatctttatctgcagctcttaaatatggcagcgatatcttccatgactttacgctgatttatagtggcgcaatcaccaagggcatacacatcttcacatccttttactcgcaaccattcatcggttgctagaacacgtctattagcctgcccaatttgccccatgaagtccttcacaaaagggcgagtctcaacaccagtggaccaaacaaccaatccatgaggtacagaacaaatctctcctttcgccttgagcttcatagtgatcggacgcgtgggctagttctagatcgcg

SEQ ID NO: 25446 - DNA, 443 bp, Gossypium hirsutum
  unsure (1)..(443): unsure at all n locations
  Clone ID: LIB3584-054-P1-K2-C12
atttacaaggtcatttcccattagatggtcctgggagacctcttccatctaatctgagtctttctcaacttatgaattatggacctcgtattttccctgttgctcctctccaatctgtctcaagtagacctgcgagtctataccaacggtatgttgatgagatgccaagatatcgtagtggtactgggacatacctgccaaatctcaaagcttcagtgagagaacgtcattctgcaaattcaaggagggaaaaacataattatgacagaaatggccagcagggtgatagagaagggaactggaatggcaattcaaagtaccgagctgctgggcgtagccaaagtcgcaatcagaatgaaaaatcaaagttctcatttgaccaattggcagatgttggtggtgaaagcagaactgagaggcctngtggctcacgtagacatgat

SEQ ID NO: 25447 - DNA, 458 bp, Gossypium hirsutum
  Clone ID: LIB3584-054-P1-K2-C6
cccaattcatggaaaattggtgttaccacagggatacattgatgagcattgcaaaacattatcaaaccggggagagcatccctgaagaggtatacctgaagctccttgctgcaaggactttccgtgctggttctctaagtcttcgtcagattcgatttgctagcttggatttggaactacatacaaaatatataccagatggaccagaatctgtttatgatgttgatcagagagtttccagaaaaacacaagtgatccccccattgccagaagatagatttctatgtggtttcaaccatatatttgcaggtggatatgctgctggatactacagttacaagtgggcagaagtgttgtctgcagatgctttctcagcatttgaggatgctggattagaagacagcaaggctgttaaagaaaccggccacaagttccgtgagactgttcttgctcttgga

SEQ ID NO: 25448 - DNA, 505 bp, Gossypium hirsutum
  Clone ID: LIB3584-054-P1-K2-D10
cttgctggttaagccaagctcagtagtcgattatcagttcagattatcttcactcctctccaattcgattcttccacgccaacaatggcctcccaatcaccgcccaccaccgcctttttcacgcgtgctactctgtcgaccttcacgcgccgcccctggcgggtgttcctttccctctcgtcctttgcccgccccatttccttcggtgacgcctccgcccgtatgaagcgtaacctcaactacttccgggtgaactacgccatgataatcctggtgatcctcttcctcagcctcctatggcaaccgatctcaatgatcgttttcttggtcgtcttcgtagcctggttcttcctctacttcttccgtgacgatcccttggtcattctcaaccgttcgatcgacgaccgcatcgtgctggctatcctcgccgtaattacgattgtagccctagttttgactggcgtttggctgaacgtgttggtttccgttctaattggggctttta

SEQ ID NO: 25449 - DNA, 497 bp, Gossypium hirsutum
  Clone ID: LIB3584-054-P1-K2-D4
cggacgcgtgggatgcctccaacattgggtttgggtcagttgcctcccatttcttcttttcctgaaaaccataggagggtgcttgaaaatattatgatgaggactggatctggatctggatctgggaacttgtataaaaagaaatcgaaggtagagggctggtcagaggatgaactggattttctctggattggtgttcgtagacacggacgaggtagttgggatgccatgcttagagaccccaggctaagattttcaaagtacaaaacttcagaagatttggcagctaggtgggaggaggagcaacttaaaattctggatgggccagcttttccagttcaaaaattccccaagctaacgaaaaccaccaaaccttcttccttgtttccaagcattcctgatggaatgatgacgcgggcactgcaaggtagtagatttgttgcaccctcaaaatttcaaactcacctgactgatatgaagttgggttttggagatct

SEQ ID NO: 25450 - DNA, 484 bp, Gossypium hirsutum
  unsure (1)..(484): unsure at all n locations
  Clone ID: LIB3584-054-P1-K2-E5
gcttgatgtatgcttgctttggcaatcttacctaacactggaaaatttaacaaacaaacaccttaaccctctgctacacttcaaatagggagagtttatccacaacgtgttgactagtacatttcgaccttgttgttgttggaggatagtgacaggaagaattggtgcctcttcttcaagcattaatctagtccaggaaagttacaaggtattaatataggaatagactaggtaaaccatctttcaatattgtacagcaacgggggtgcgggtggtgtggngttatgggtgcacccactagctntgaaaaaatgacaaacatgtctacctaattctccacgacgaagtgaagttttttttctggtgaaactgaaagttgatagaaattgtggtttagaaaggatcttcaccaaccccatatgtctttgtcagctaatctcaagaaagttggataaaaatggatattatattcaatccacctact

SEQ ID NO: 25451 - DNA, 412 bp, Gossypium hirsutum
  Clone ID: LIB3584-054-P1-K2-E7
tttatcttataatggaataccttcctggtggagatatgatgacattacttatgagaaaggatatcttgactgaagatgaagctagattttatgttgcagagacagttttggctattgaatctatccacaaacacaattatattcatagggatatcaagcctgacaacttgctactagatagacatggacacttgagattgtcggattttggactatgtaaacccttagattgcagtaccatccaagaaaatgattttattgtaggaggcaacagtaatgagagtggggaaagtgatgaacgcccagcagcactgaagcgaacacagcaagagcaactagagcactggcaaaagaaccggagaacacttgcttattctaccgttggtactccggactatattgctccagaagt

SEQ ID NO: 25452 - DNA, 442 bp, Gossypium hirsutum
  Clone ID: LIB3584-054-P1-K2-F5
cccacgcgtccgcccacgcgtccgcccacgcgtccggggttatttatgtactgggcctaaggtttagtttaagtggttaatgggtttgtttttatattttgggttctaaatatttgggtctgggccgggtatgaattgggaccaacaagttaaatgtgagtttgacaagaaattgagtagcaaaaaggtatgaattgagaaagaaaaatatataggtttagttaggattaaatttgatattaaagtaaaagttagataaaaatttcagcaattaaattgtgttgtgttaatgattgtgaaattattttaattgtttgtagctaatatcgagcctaaagcatcggccaaaaaggaaaagaaaagattgtcgaggattaaatcagaaaagaattctagtttgtatcactataattcaaactttatcgttattatgtgtttaatt

SEQ ID NO: 25453 - DNA, 495 bp, Gossypium hirsutum
  unsure (1)..(495): unsure at all n locations
  Clone ID: LIB3584-054-P1-K2-G12
cggacgcgtgggcaaacccttggccacgtcacgcacgaagtcatatcggctgattttgctggctatgaggcttgctttgggtggtgctgttgacaaggggcataacataccttctttgtggcctaaaaggaagaggctttggaagctacttggagcgctggttgctgcagctgaaatgtacctgaatcagcctataccttaaatattgcctgtaatgacttatgggaggacttacagtctgaatctcatcaaatatctaatcaaatgaatcatatttcaaagattgtgagatcaaatgagtgatcacattcttttattaaggctaatgttagggtaacagttggagtaacgagagggtatatgtgagaatctaagtatgaaagtgagtatgggaggggttttatggagaatnctatcttgactgataacgtgtctgataaggtattggataaagctgggtctaatgctggatctggtgttggatctagctttgct

SEQ ID NO: 25454 - DNA, 385 bp, Gossypium hirsutum
  Clone ID: LIB3584-054-P1-K2-G8
tgacattttgggcacaattgacttcatttttgggaatgcagcagttgttttccaaagttgcaacatcctgccaaggcaacctttggctaaccagttcaataccatcacagctcaaggcaaaaaagaccctaaccaaaacactggcatttgtatccagaaatgctcaataactgcatttggcaaccttactgctaaaacctaccttggcaggccctggaaagaattctccactactgttatcatgcagtcaaagattggggcgctcttggacccagtgggctggaaaggatgggttgccaatgttgacccacctatctcaatcttctatgcagaatatcagaacagtggacctggatcaaacgtggataataaggtgaaatgggct

SEQ ID NO: 25455 - DNA, 407 bp, Gossypium hirsutum
  Clone ID: LIB3584-054-P1-K2-H1
cccacgcgtccgcgcgaaatttatctccaaagatgtgccaaaggttattgggacttccttgatagtccgaaaattgatcgacatccggttctagttgccgcttcagtcggcagctatggtgcttatttggctgatggatccgagtatagtggcaactatggtgcttcggtgacattggaaacattgaaggagttccataggagaaggctgcagattttggccaactcgggtgccgatctcattgcgttcgaaacaattccaaacaagctagaagctcaggcatacgtagagcttctcaaggaggaaaatatagacatcccagcttggttttcatttagttcaacagatggaaccaatgtggttagtggtgatcccattacagaatgtgccaaaattgcagattcatg

SEQ ID NO: 25456 - DNA, 471 bp, Gossypium hirsutum
  Clone ID: LIB3584-054-P1-K2-H10
tccaatcgacccacgccccgcttatcgagacgcgttttcagactcgtgatcacatgttacaaaaaatcatatctattatttttggttgggttaggattttcttcgttttaacttcctaaaccacccaatattttaactattactacttttaaaaaaaaaggaatataaaatgaaatagtttaactattattaatttcaataattcaacaataaaaatctaaacctaatatttaatcacattaacaataacatatctctaaaccaaactaaaatttccacttaaaataatttccccatttatttaatcaattctcttttaatattaaatattccatttatcattataaccatacatactttcccaatacacatatataaacattattattatcaacatttcaaatatcaactcataaatcaaatatttacataattgtaataaatttttattaatcataattccaatcatat

SEQ ID NO: 25457 - DNA, 555 bp, Gossypium hirsutum
  unsure (1)..(555): unsure at all n locations
  Clone ID: LIB3584-054-P1-K2-H6
gaactctattgatgacgggaatgaagggatctccaattaccagtcacaagtaagaacgcttttctcggaaatttttaaaatactacacatcaagtttacgttttatgtatatttcagattagagtagaactcggtttagagccattagctaaagagtacggatggactcaaagtgaacgaactaatgaatttagaactccctgtccggttttcgacaacgagaactttattgatgatggtaatgaagtgagctctaatcaccagtcacaagtaagaactcttttcttgtaaatttcgaagttcagttcatttaatcaatgtaattactgttaaaacaagtctccaaaactacagataaatatggagcanattagaagcttggaagtacctaatataggtattgaggatcaaaatcaatcataccagaatattgggatcgatatgaatgatccaacagtccccgatgaaggaagcaatcaacaaaatatagttgcagttgcagagaatgaaagctcaatcttgccttctatttacataaccatctaatagatttta

SEQ ID NO: 25458 - DNA, 293 bp, Gossypium hirsutum
  unsure (1)..(293): unsure at all n locations
  Clone ID: LIB3584-055-P1-K2-A3
cccactccnttggcggaggttgaagagtttactttaaaaattggttaagacattttatgctgcaaatcctgaggcacttctttaaaaaacaagaaaagggctgaaaaatgggaccttttcaaaaagcacgagcttgaagttttaaataaaaaaaaagttcacaacctcatgctgatttacactagggctaaacagaattcaaaggagtctaacctcttagatgtaggtggtgataggctaaaggaatctacaaatttgtaagagagagtctatataaatacaaaaacttaact

SEQ ID NO: 25459 - DNA, 411 bp, Gossypium hirsutum
  Clone ID: LIB3584-055-P1-K2-A7
attcagtccgattccatcatctctgtagcgttaaatactgaagctatcaaccgcctacagaaaaattccaagtaaataaagaagctaaacaacaaaatatgtctgcagagcatttgctgttaaccgttgacgatgtcgatgatcataatcatgatggtggtgtgatgaaattccagattcgtgatttgaggaaagtatcggatgcgggcgttcctgtactaaacggtatcaacatcggtagccctaaaggcatgatcgtcggtatcatcgcaccaagcgggcgtggctaatcgacgctgcttacagctcttaatcgcctgtgggagcctccatgcgatacggtgttccttgacggccgtgatattgttgaccttgatgtgcttggacttcgccgtaaagtcggcatgcttt

SEQ ID NO: 25460 - DNA, 277 bp, Gossypium hirsutum
  unsure (1)..(277): unsure at all n locations
  Clone ID: LIB3584-055-P1-K2-C3
acgatgttggaatgattatagtttatgtaatatnttatgttgtagtgaaattaattctgaatgttgtttttgaaaagggattttattctaaaaaactaggtgaagtatttttgtaagtgaatttggttgtatttaccattgtttattttttatagagcggataagaaaattatatgtttaatttttttgacgagtataaagttaaattttttgtggggggttctttttttgattaacaagtttttacaacgttttttttttccaaattttaatattt

SEQ ID NO: 25461 - DNA, 488 bp, Gossypium hirsutum
  unsure (1)..(488): unsure at all n locations
  Clone ID: LIB3584-055-P1-K2-D7
caagccccgcctggtaatgcaaaagccggggagaagattttcaagaccaagtgtgcccagtgccacaccgttgacaaaggtgccggtcataagcaaggacccaaccttaatggtctgtttgggaggcagtcgggtacaactccagggtactcatattccgctgctaacaagaacatggctgtgatttgggaggaaaaaactttgtatgattatctgctcaaccctaagaagtacattcctggaacgaaaatggtattccccggattgaagaaaccacaagatcgagctgacctcattgcatatttgaaggagtctacggcatcctaattgggctggaaacagtaataatttcagttttacgtattccatttccatttgcagtcattggagatngtttctctgtttcaaagcaacaggatataataaaagaataaaattagacctttgtggtgtaggtcagccatgcttgttaatttgcacaatgagca

SEQ ID NO: 25462 - DNA, 457 bp, Gossypium hirsutum
  unsure (1)..(457): unsure at all n locations
  Clone ID: LIB3584-055-P1-K2-E1
agaaatatttctgctaagaccaaccattcagtaaatctttctactaagcacattttccactgtgcaggtagtgcaggttcacaattctatgatatggaatttgaaatttgttttgccttttccatttaagtccatgccttttgcaactatcatcatgatgcttgattgtgtgctcttactttgagaagtttcaaacacatgccctttttgttttcagctttccaatcagtttctttctagaattgtttgtttaattcctctctctttgtttaccggttttatcatatttttcctcgatttcttctcttctattaactnggttntatcgaagtttctagaacaagacgattaagaaagaaaagtcaaaatacctagagaaatgaggttttaagctaatcagcatacatttactttcttttacacaactcccttgaagctcttctagtggccctaatct

SEQ ID NO: 25463 - DNA, 466 bp, Gossypium hirsutum
  Clone ID: LIB3584-055-P1-K2-E11
gtcataacagtcaagggaagaacgagtttttggctgagttattaataatcggaactctaaggcatcgaaatcttgtaagattacaaggatggtgccatgaaaaaggagagattttattagtttatgatttaatgcctaaagggagtcttgataaagctttgtttgaagccaaaacgccattgccatggcctgaaaggcaaaaaattttattaggggtggcctcagcattagcctatttacatcaagaatgtgatcggcaagttattcatagagatgttaaaaccagcaacataatgttggatgaagcttacaatgccaagctcggagatttcggtttagctcggcaagttgaacacgataagtccccggatgcaacggtagccgccggcacgatggggtatttagctcccgaataccttctaacaggacgagcgacggataaaaccgacgtgttcagctacggagc

SEQ ID NO: 25464 - DNA, 520 bp, Gossypium hirsutum
  Clone ID: LIB3584-055-P1-K2-E7
taacaaagcaacagcctttggtggggtaggaattttagtaaaatccaccgctgcactaactagaattgacaattgttacttagatttcacagctatagtgatggaagaccctgttcaagttcatgttaccaatgggcttttcttaggagatgctaatgtagtgtttaagccgattaagggaaaaatatcagggctgaatatagttaacaacatgtttaatggtaatcctggaaaaatggttccaaacatccaattagacgggacgtttagtaccgttgatcaagtggtgatccagcacaacaatgtgaatggcatgagcctgaaatcaacggttggggaaatgacggtggccgggaatggaacaaagtgggttgctgatttttcatcactgttagtatttccagaccggataaatcatttccaatactcatttcatattcaaaaggaggtgtctgcaggattccctgtacatgcagttacgaatacgtccaataatattgtagtcgtagagagtgacaat

SEQ ID NO: 25465 - DNA, 288 bp, Gossypium hirsutum
  Clone ID: LIB3584-055-P1-K2-E8
gtgaatttgtaattattatctaggtaggtccttggtctggttggtgtacatgaaaacgggtgttgaacagtgatgattgggttagttgaggattttgatgggaggaaaaagttactatgaaaatagctgactaaattatttggggtgggatttgtaagtaaagaatggggaatgcacaactagttgttttaggtttcaagttggggtttggctgtatatatagtcagagatggttggctgtttctaactttgctattaatgctcaaagatgcttggcactgtcaaaaa

SEQ ID NO: 25466 - DNA, 371 bp, Gossypium hirsutum
  unsure (1)..(371): unsure at all n locations
  Clone ID: LIB3584-055-P1-K2-F11
gttaaatcggagattcaaactagacttatccctcttttaaactcagtttccggtcaggttttagatatacaggatgtgtttagaagattttctttggataatatntgtaaaatttcattcgggtttgatccttgctgccttgaattatcgttgccgatgccggcgtcggagtttgcggaggcttttgatttggcgtcgaagttatcggcacanagagggttgtcgtcgtcgtctttgatatggaaagttaaaagggtattgaatttagggtctgaaaaagagcttaaaagcgccattaaaatggtggatcaatttgctcaacgtatgattaatcaacgacgggaacttggttttttccgacaagagtgatc

SEQ ID NO: 25467 - DNA, 493 bp, Gossypium hirsutum
  Clone ID: LIB3584-055-P1-K2-F2
tcggagaccgtgttgctcagttgttacatgttcaatcggtcatccctttcttgcaaaataatgatgatagtatgcaacaagaaattcttattgtgaacacccaccttttatttcctcacgattccagtttatccatcgtaagactgcaccaggtttataaaatactacaatatcttgaaacatatcagagagaaaacaaactcagccaggtgcctgtcatgctctgcggtgactggaatggaagcaagcgtgggcatgtttacaaattcctcaggtcccagggatttgtttcatcgtacgatattgctcatgaatatacagacagtgatcacaagtgggttagccatcgaaatcatagaggaaacatctgtggtgttgatttcatatggctccgtaaccctaacaagtcaataaaaccattgaagataagttgggctgaagcagctttcggtataataaagtatcaacttcaaaaggctcaattgaatgaaaa

SEQ ID NO: 25468 - DNA, 275 bp, Gossypium hirsutum
  unsure (1)..(275): unsure at all n locations
  Clone ID: LIB3584-055-P1-K2-H1
ctgaaggtgaagccttcaaccgaagggctaaaagcttaagcaagaataggatgaaatttggacatgtttgtaaatcaaggaacttgccagatcagcactatagctccaagtgcactgaaagaggcataaggngcataacaaataagtttttaaatgggattccaaagtttgtgaagatagtagaagttggtccgagggatggattacagaatgagaagaatattgtacctacgtctgtgaaagtngaattgattcggagattggtgtcttcgggg

SEQ ID NO: 25469 - DNA, 489 bp, Gossypium hirsutum
  unsure (1)..(489): unsure at all n locations
  Clone ID: LIB3584-055-P1-K2-H12
caaccctcgtaaaattttattaatatctgttcagggcattgaaatttacatcatcatgagttacatcagcatcaaagagaaaattatgcactaggaaaaaacaactgataaaagtatccaagtacctaactttctttgttatccaggttttaaggcctttcgccgtattcatgattgattagatgctctatgatgtcttcatgttacaatatcaagttgctccattgtattcatcttgttacactccttgtacatcccatgcatgactttagtgctggttatatatttacttcttcactgtctatggtaattaactacaaacaaggntaaattggcttttctagcactttgaaatttacgttcctaccaactctcattttgtaagtttctttatgattattgtagcctggatttttcttggcacattttgtcttgctaacatttacataatcttaaaaagtaaactaaaggttatgtgttttggttctg

SEQ ID NO: 25470 - DNA, 360 bp, Gossypium hirsutum
  unsure (1)..(360): unsure at all n locations
  Clone ID: LIB3584-055-P1-K2-H2
cccacgcgtccggttggttcttctgggtttggtgtgcatcggatacacattttacttgcgttcgtgcgttcttaaacaacgctttatcctgctcagttatttcagtggtccttggatcatccgaatcacgttcattttgttcaccatttggtggggtttcggcgaaatcattcggctaaattatctaaggaggccaggaagagtgttgaatgtacttgattttaaatggcaagagaacgtctgcaaattttacattgtttcgaatctaggttntgcagaaccgtgcctcttcctcactctcatgtttcttctccgtgcacctttacagaacatagacacaggtattctaagcangaaatg

SEQ ID NO: 25471 - DNA, 452 bp, Gossypium hirsutum
  unsure (1)..(452): unsure at all n locations
  Clone ID: LIB3583-057-P1-K1-A6
tcggggcaacctttttttctccaagcactgacactcctcgctgctgggacatggacaccgatgacacaaaccacggcggtaagggttcaatgtcgactgtaggaggttttgttcgtgtcggaggggagagtctagcggtggaaaaagactccgacaaccttaatttgaacttcaggcactccatgttgcaaatgatactggagaaagagatatattcgaaagatgatttgagagagcttctcaactgtttcttgcagctgaattcgccttattaccatgggattattattagagctttcacggagatctggaacggggttttcaacgtcaagcctggtggtggcggcgccggtgcttccccagagcagcattttgggttcaggccacgtgacttctaggtgccgctgttgctacgttatctatggnctctctttttttcttttttttttttt

SEQ ID NO: 25472 - DNA, 553 bp, Gossypium hirsutum
  Clone ID: LIB3583-057-P1-K1-B10
aacctattagcttagatgaatttcaaatttcatgttgattatatttaaaacatgcagatcaaatatgtggttacatacgtgcttgttgtatagacagtttttatttgatgtgtttattattggtgttgtatgtttttttaatacattatattaaagttgttaatgtggtaggtacacaagtgtttataatttgtgtatgtgttttttttttaattttataagcaaataatcattgcaatatatgtaaaaatagtttaaaatataaaaatttattaatatatattatgtaaaaacaacaaaatcattgcaaaacaatttaaaatataaaaatttattaatatatatatatatgtaaaaacaacttttctggaaaatattttcaagaaatctaccaaataacagaaaatattttacacagactcatccaaacaccaaaaatatttttcagtaaatcattttccagaaaagtaaattattttctaaaaattattttccggaaaatatttttactgccaaacaaacagacccttattatattgagtatctggatatt

SEQ ID NO: 25473 - DNA, 556 bp, Gossypium hirsutum
  Clone ID: LIB3583-057-P1-K1-B2
cgaagtttgttgtaagtgcaaaaaacggaggagtggaatccaggaaatcatctcttcacgatttcccaccaaaaagtcggggaaaaaagggaaaatcaggggtagggtttcccctttccatcaatcgatcaccgttcgatcaatcgacgtcatctccggcttgttcccgccgtcgatcgaccctcttttttcaaaatacgttggtgatttcgtttagaaatcataatccggtcatgtttcattccatttcctgttcaaatttaaagcattagggtttgtgttggaaaaggattataaatatttcgtttttttttgttgggtttccttttctgctttgatcaaattatccaaattatccaaattctgtaaattcggtgattagggtttgcaattttgtgcgtatttgttttcatttctgttgaattcttggggctatgcatattgaggaattgaaggcaggggaaggggcggaaagagctggagaagaagaaaataagagttattatggaagtaatgagatcttgggtattggaagaagcgttgaggaatgggatgc

SEQ ID NO: 25474 - DNA, 599 bp, Gossypium hirsutum
  unsure (1)..(599): unsure at all n locations
  Clone ID: LIB3583-057-P1-K1-B3
ncagtggagatgccatatgaatcatataacggagtgaatgttagacttaggtatatactgaaagtgacagtcagtagaaactatgtcagcaacattgtggagtaccaagattttgtggtccgcaattatactcctcctccatcaatcaataacagtattaagatggaagttgggattgaggattgtctacacatcgaatttgaatacagtaaaagcaagtatcatttgaaggatgtcattattggcaagatatattttcttcttgttagaattaagctaaaaaacatggagcttgaaatcaggcgtcgagaatcaactggatcagggccaaatacatatgttgagacagaaacccttgctaaattcgagttgatggatggtgctcctgtaagaggagaatcgatcccaatcagattattcttaagtccgtatgaactgacaccaacatatcgcaacatcaataacaaattcagcgtgaaatactatttgaatcttgtgctagtggacgaagaggatcggcggtacttcaaacagcaagaaatcactatgtaccggaatcttgaagcatcataattgttctttcaaatctagatatgttc

SEQ ID NO: 25475 - DNA, 520 bp, Gossypium hirsutum
  Clone ID: LIB3583-057-P1-K1-B4
gatgccttagaagttatatatgatcattattgcaatcatattcagattgatgatgatgaagatctctacactgctgctgttcgatttcgtttactacgagagcatggcttcaatgttcagtgcgagaccttcaacaagttcaaaaatgagaaaggaaagttcaaagaatccttaattagtgatgtgaaaggcatgctagaattgtatgaagctgcacattttcaactacacgaggaaaatctattagaagaagctctttctttcaccacttttcatctaaagttggcagaaactacggtagactatcctctctccactcagattgctaatgctctaaagcgtccccttcgtaagagcttaccaaggttggttgcttggagttacatttccatatatgaaggatatggtacccaagacaaaaatttaatgaaatttgcaaagttagatttcaaaatggtacaacatttgcacatgaaggaaataagtgagatatacaggtggtggaaaggtttagatgttg

SEQ ID NO: 25476 - DNA, 381 bp, Gossypium hirsutum
  Clone ID: LIB3583-057-P1-K1-B5
aagcttgcccctccatttaagaatgttgaatttgagcttgagtttggcaagggaatatcccgggaaagggagagcatagatttggcaacgaaacacaaacttgttacaaagtctggcgcattctacagtttcaacgactggaaactccatggcaaggaagccttcagaaggtttttagctgaaaatagaagtgctcttgaagaacttgtgatgaaacttagagaaaagctacttgatgctgagagcaagaaggaacgacaaacagatatctcggatgattgtgggggtaattgtggcgttgaaaagttttgtgtattcaatggatgagataatacaggatcttgtttcaaattttcaatggcatccgactgtctttctctc

SEQ ID NO: 25477 - DNA, 455 bp, Gossypium hirsutum
  Clone ID: LIB3583-057-P1-K1-D11
cccacgcgtccgcgacgaatgtggcttcaccgaccgtaaaatcaccggagtctgcgatccttctgtagggcacgtggccatcactctcgatgttgtctacctccgtgggtcaattgccgccgtccactccattctccagcattcgttgtgtccggagaacatctttttccatttcatcgtatcagacgccgatctggaaactctcgttcggtccacgatccctcagttgaagttcaaggtttattatttcgatcccgagattgtaaggaacctgatatcgtcttctgttaggcaagcgcttgagcagccgttaaattacgctaggaattacttagccgatctgctagaaccgtgcgtacggagagtgatctatttggactctgatctagtcgttgttgacgacatcactaagctatggatcaccaacctgggttcacggacaatcggagcacccg

SEQ ID NO: 25478 - DNA, 462 bp, Gossypium hirsutum
  unsure (1)..(462): unsure at all n locations
  Clone ID: LIB3583-057-P1-K1-D12
cccacgcgtccgggagtctggaatgaactccgagctgccggttagccataagaaggtgatccgccgattgtgcacagaaaaaaccagttgcagtcgatacatctcaaggcaaaccgacactctctaaagatgttcttgcagggatattttctcaggtttagtaatcaaggtctaaaagcgctaggttggcacgacaagtcatattatgtaggtatttctctatttattattcaattactttatgtttctcatcagggggttttggaaatagagtgagcctctgatacccgattattctcgaacgaatatttgctcttagcttaggtccatcgaacttttgtagtcggtcaagttttaatccggatttacaccaatgtagaacaactctatccttgtattttcgatatgattaatgtctcaataaagaaacaagtcttggttggaaaaaaaaaatannnaaaa

SEQ ID NO: 25479 - DNA, 514 bp, Gossypium hirsutum
  Clone ID: LIB3583-057-P1-K1-D5
tgaagcacattaatggatgattaaccaggctttcctgataatattaaatatgatggtgatgggcattactggattgcattaccatcggcaaattctgttcctttggatattgcgtttaggtatcctttcattcgaaaggttatggcgatcgcgatgaagtatatcggacgattacctacggagaaagatgcgggtgtcttggtagttgatttggaagggaagccggttgctcactaccatgatcatagattatctatgattacaagcggaatgaaaatcggaaatcgggtttactgtggttccgttcggcacccgcatattctcaaacttgacctggcaaaagaaaatttgtggctttcttctactatcacaatgcaatgagccattgaataataatgaaaaaaacttttgagaaactttgtatctttggggttagtacattatcatttgttgcttaagagaggctcccaagggcctttgctttttctctcaatatatatttttggatctttcc

SEQ ID NO: 25480 - DNA, 532 bp, Gossypium hirsutum
  Clone ID: LIB3583-057-P1-K1-E10
aaacccctctagactcaacccataagcacttaattacaacgagagtaaattgcatcagagatcccgaagcgtatgattctcattttccatgggtttcaaattttaaaaaattttgattatatctcctaattttcaaggttatgtcaattaagtcctttcattactaaacttgttaaattcgctattgaacaaaatgacactttactttttaaattataaattatgtcaaataggatctaatatgttgcttaacaacgaacttaatggttttagtatcatagggacttaattaacataatcttaaaagtttaaggatataattagaatattttaaagtttaacaattaatttaaaataagttatagtttaggagcctctagtgcaatttactcttttaacgagctacatctatgaatgactaagatttcttattagtagcgtgtcaaaatttcactaattgtgttctaaaatcatttaaaacaaataaaagaattgtttaaaagatcaaagatttcgacttttgatttaatat

SEQ ID NO: 25481 - DNA, 588 bp, Gossypium hirsutum
  Clone ID: LIB3583-057-P1-K1-F12
gcgtgtcaagctatctggatacgaagaattcttgatgatttaaagcaaacacaagtagaggcaacgaccatctattgtgataatcagtcaacaattgcaatgacaaaaaaccctgtttatcacagcagaacaagacatattgaaacacgtcatcacttcataagagagctggttgcaaagggagatatcaagttggagcactgttgcactgaagaacaagttgctgatttgttcacaaagccactgccaccaaagaagttcatgtatttgagagaattgttgggtgttggagagtttctaccttaagggggagtgttaaaggcagctttttatcaacaattaggtgggtgaagttgcaatgaagattgatatcagtaaggcctacgacaaggtggatcggaactacctgtggtatattttgctgaaattagggtttgttgcgagatgggtttactagataatgctttgtgagacctttgttcagtattcagttttgcttaatgatggaaagtttggcccgattatgtcaaagggcggattctacaaggagacccgttttcaccttatctctatatcctatgtgatggg

SEQ ID NO: 25482 - DNA, 589 bp, Gossypium hirsutum
  unsure (1)..(589): unsure at all n locations
  Clone ID: LIB3583-057-P1-K1-F2
gcgtggaagcaaactatagtgtctcggctccaaaggtcatgtattattctgcccgaggaccagatcctgaggacgggggtctagacaacgcggacataatgaaaccgaacttggttgctcctgggaattcaatatgggctgcttggagtactctcggcatggaatcagttgaattccaaggtgaaagcttcgcgatgatgtccgggacaagcatggcggctcctcatattgccgggctagctgcattgataaaacaaaagtttcctcatttcagtccagcagccattgcttcagcactttctacaacggcttcactttacgacaaaaacggcagtccgataatggctcaacgcgcttatacgaaccctgatctaaaccaatctccagctacaccatntgacatggggaacggcttcgtaaacgcatcatcggctctcgatccgngtctaatcttcgaatcaacctatgaagattatatgttctttctttgcggcatcaacggttcaatccccattgtttttaaccacacgggtcaaaactgtcagctctataactcgacagtcaccgttgctgacttaaacttgccatc

SEQ ID NO: 25483 - DNA, 123 bp, Gossypium hirsutum
  unsure (1)..(123): unsure at all n locations
  Clone ID: LIB3583-057-P1-K1-F5
tccgcccacgcgtcgcgtttggactgtaaaagaagacattaagacaattactaangatgctcgtgctgcgtctgtggggctgttatctgatatgggtgccatccacaanctcgnncaaccgga

SEQ ID NO: 25484 - DNA, 526 bp, Gossypium hirsutum
  unsure (1)..(526): unsure at all n locations
  Clone ID: LIB3583-057-P1-K1-F6
ttaaaggttttcctatggtgtggcgggtttattagccctgcgttcagactggtctttgataaccgagtggtgccaaactggtaaaggggttacggccaaagaaaaccaccttagaaccaaacatttacatccttatcaatcagctgcagtaaactgaaccccactttttcagatggcatcctaataatagcagagattccgccaaagcaggacaagaaagagagactcagcacttgcgttaatattacaacagatgaagtaatatccagatcttatggcagagatttagagaggggaaacaatattttaaaagaaggatttaatttaagaaaccgcccgccatttagacttgttgaattattgaatttccctgtgagatgatccaaagcaaagggacaaagcatgggtagtgaaatcagttggtgcgtaacatctgacttaacttataagcaaattgattataatctngtaatataagttaataaataaagaagaagatgtctgcagccaagttgattatttagat

SEQ ID NO: 25485 - DNA, 404 bp, Gossypium hirsutum
  Clone ID: LIB3583-057-P1-K1-G4
gggggcagacaaaatttcctggattgtttgtacaggaaatgagaacttgactcttattcttttcctgctttggctttatgctcatttttccagtagacttgatgcaaatatggccacgagaatttaggctcttattggttgtcacttttactccttcgtttctctagttgatttttgcttcctaaaaggttgctaaaaaataaatctaaaagagagaagcaaagtcgtaattgattgagaacttataaatgactagaatactataaaatttctagtatgattgttcacgaccagcttgttgtgaaagcatttgtttgctatttccccgttcatttttattctatagttaagttgcttaatttattttcttatcaacctgtgtatctaaatgatgttttatgaat

SEQ ID NO: 25486 - DNA, 495 bp, Gossypium hirsutum
  unsure (1)..(495): unsure at all n locations
  Clone ID: LIB3583-057-P1-K1-H9
gatatattgctcgtacggtgttggaatcccgaccgaaagatcaaatgtgtacaagctatcaccaagcagtgagtgcaaacatattccttaccaaattgataccttagtcgatgaagaagatggtagttgcttgaaaagcggagtatattttgcagacggagacgaaagtgtaccagttttaagcgctggattcatgtgtgctaaaggttggaaaggaagaactcggtttaatccatccggtatcaatacatacgtacgtgagtaccagagcaagccgccaactagtggtattaagagcacggcgcacgttgacataatgggaaacattgctctcatcgaagacaaactacgtgttgcggcgggagccaccggagaagagatcggaggcgataaggtttactcggatatattgagaatgtccgagaggataaatctncagctgtgaggatatttcgcgagctcaattacgtttatcgtcatcaaattagacgtcgc

SEQ ID NO: 25487 - DNA, 496 bp, Gossypium hirsutum
  Clone ID: LIB3583-058-P1-K1-A1
gagatttcgtgcatatgattttgggcaaaagattgaccgcaaagttgaatttggtccgaccttagacatgaagccttttgtcagtggttccaatgaaggagatttgaaatacactctttacggtgttctggttcattgtggatggagcactcattctggtcactactactgttttgttcgcacatcaagtggcatgtggtactcccttgatgacaacagggttgtccaggtcagtgagaggactgttttggagcagaaagcttacatgttgttctatgttcgtgacagaagaaatactgctccaagaaaaactactggtattcttcagagggataacttaaaagcaaatgttaatggaaggtctgttttaaatcaaaatcttaaggagcatatgcaaacttgttccgttggtaaaaagttaagtgcttcaggcacttgtgctgctatgactccgaaagttattgttaatggtgacttgtcaaaggagacaatcatg

SEQ ID NO: 25488 - DNA, 395 bp, Gossypium hirsutum
  Clone ID: LIB3583-058-P1-K1-A10
tcggaaccgtcgcgacgcgtcgaaaaacctgttgctttctcaaccctacctaactctttgggtgcgcgcttctttcgactatacaatggtcaatcaggcttattgccaaaaattgggtttactcacaccaatgtcttataactggcaacagcgatccaagctaaaccgtagtctttgttatcacaaaggtagtagaagttagagaataggggaaatggataatactcttgtttgcttcgatgttttatgtatatgggggtccacaacaaaatcctgcttatgtgggataaaagatataaaaactaataaaatcattttctgttgtggcctcgtctttcatgtgcagtgctccagtcggctggctactacgagccctgcgcgcagcagctggctac

SEQ ID NO: 25489 - DNA, 575 bp, Gossypium hirsutum
  unsure (1)..(575): unsure at all n locations
  Clone ID: LIB3583-058-P1-K1-B4
attagttacagtttcttgagcctctgttgcttctgttatctcagtgtataaatgcagacctgatgtagtgagcaaattatgaatgaattctatattttctctcattttctaataatcattttaccttccttgattctcctttgagtgtttcaggttgatttagcaaaacttgaaagccaatcaccgtcaaatgtcgattccctgaaggagaagaaacagcaactgggttgtttattatcatcctttatcactttctcgagaaaatcttcaaaagcaaaaggttcttgaaatatcgatggagtcttccagaaatgccattgaggcatcatcccctgctacctctcctctggaaaaagaaacgacacctgctacctctcctccggaaaaggtaacgactgctgctacctctcctccggaaaaaggaacgactcctgctacctctcctccggaaaatgaaacgactcctgctacctctcctccggaaaaagaaacgactcctgttacctttcctccggaaaaggtaacgacttcttcgacctctcctctggaaaaagtaacaactnctgctactgcta

SEQ ID NO: 25490 - DNA, 509 bp, Gossypium hirsutum
  Clone ID: LIB3583-058-P1-K1-B5
gcaactcttgcggaatcgggtgggggtaccatttgctttacgcataaccggttactgaacttgttgctggcagcgaaacttgaactgaatcttatgcagtctctgaaatagggagtctataaaagcaactataatactaatcatggatgcactcactcttatacatactgttattgatacaggagctgctaaacgagctggaaccttacctggaacttaaccgcaccgtgaatatcgctcaggatctaattcatgactagatcaattgctcggaggaggatggggcggcagcatgagcaccagcatgtaccctagagagaccagacgcgagaccactacttacatggatactcacatgccatagactgtactattaactgaaatagccagagaaaatgcagactatatcacttgctaccgcaataagctccgatatagggacggtgcctgtgacactgcctacagcactgatgacggcgcacattagcaagctcaaggccaacgtatat

SEQ ID NO: 25491 - DNA, 133 bp, Gossypium hirsutum
  Clone ID: LIB3583-058-P1-K1-B7
ggcaataactggttcgagacgagaacagagaacgagaacgggatgaagggagggcataaataagcccattaaccgggcatatggcagagcatcataatgtgctcaaacagcctaatgtgttgacttacacgca

SEQ ID NO: 25492 - DNA, 330 bp, Gossypium hirsutum
  Clone ID: LIB3583-058-P1-K1-C7
cgtcggaacccgggccccacgcgtccccacctccgccgtgggtaaagattctttattattcaaaacaaaggtggaacacaccaaaaaggctttctttacatagccacttattttattctccaaacagaacagaaacagagacagagataaagaaagacaatcagaataaccatttaccgtacatattgagtcccacgcatctccatcttgctcaaacgacctgatctcgtcgcttcaacgccaacacagagatttgctgaaaccacattagcatgacgcaccagactgctttgggagcaatgtgcgatagtcacacaccccagatttact

SEQ ID NO: 25493 - DNA, 598 bp, Gossypium hirsutum
  Clone ID: LIB3583-058-P1-K1-D4
cccacgcgtccggccgaagcaaaagaaaataagaaagaaaagaaagctttaagggtgcggcaacttgctaagctcaatcaagatcaagaaaagagaaaatcaaatttggatcgggggaaactaaagttgtcgactaaccgtctcattccgttttacatcgtccgaggtaagtttataagcaaatagacgtacttaattttaattaaatgcaaattatatgtgctgaaatgaaatgtaagaatatatatatgcaaatgttgaatgtgtacaagcttggtaaccatgttcatgtattcgtttcgaccgagttacgacgtccgaaagccccgtatgaaccttaggaatagctgggatacatatgccatgacataggattctgatatgtgatgtgcgagtaagaccatgacatcgatatgtgactccgatatatatgtgcgagtaagaccctgtctgagacagtggcatcgatatgtgattacatgtaagaccacgtctgggacgttgacattgtattatgtgtgaatatccgagtgtcttatccaattctgaatggttcatcaggcaaagataagttgtgatcgaatgtgtaaaacgacct

SEQ ID NO: 25494 - DNA, 345 bp, Gossypium hirsutum
  Clone ID: LIB3583-058-P1-K1-D9
cccacgcgtccgagttggttcatgtaggagacatcagcacattctgtatggtgaccagaccctgctggagaagagctaaatcctgtggggttgctgaccatagggctctgattccatatgatggaacataggtttttggttacttagaaagtgaattatggcagaggacttattatctgtaactttttctctcgaattctcgatcatagatgctttgttcatttttattacattgaagaaatgaaaaacttattgattaccaaaaaaaaaaaaaaaaaaaaaaaaaaaaaaaaaaaaaaaaaaaaaaaaaaaaaaaaaaggagggaaaataaaaaaaaaagaaaa

SEQ ID NO: 25495 - DNA, 571 bp, Gossypium hirsutum
  Clone ID: LIB3583-058-P1-K1-E12
gttccgatgacggcatttcttgcaactaacatctttatatatacggctcctttcaaagccgtggcggaggcatgtgaagtggataactcgattttcaacatgcctttacttctatttgtagcccttatcggtgcgacagtgggaggattgcttgcacggcaaaggaaaggggaactacggcgactgaacgagcagctgcgccaaatcaatgctgctctaaagaggcaggcaaagatagagtcatatgctcccacactgagttacacacctgttgtcggaagaatatcggaagaggacataatcgtggatccgagaaaagaagagttgatttcttgtttgaagagtgggaagaactttttaaggaatcaagaacacgagaaggcttttctcaagtttcaaacagccttggagcttgctaagagtctaaaagatcctatcgaggagaaaaaggctgctcggggtttaggtgcttcattgcaaaggcaaggcaaatatcgagacgccattaaataccattcgatggttttagcaatctccgatcgagaaagagaggaatcaggaaacacggaag

SEQ ID NO: 25496 - DNA, 425 bp, Gossypium hirsutum
  Clone ID: LIB3583-058-P1-K1-F2
cgcgtccggccaccctgacggaaaaaaaagtgataattaacttgcagttaggatgaagatatgtgaagctagacatgacgagcatgccatagcagatttgtcgacactactcattgacaaaacataatctcaggagtgtccacttcctaaaacttaagcttataacaatcatgttagaggcacatcaccattccactcatttcgacccagacaagcggctcatgacccattaccttcacttcaagaaagaaaaatctgacaaaaatcctgatctgtaccgtgcactagccaaaggacaaatacctaacttatagatattccatgctacgactctagattgtgcccctaacacatctctgaatctgcaaccagggtaggttcttatcgttcgcaacataaccagcatggtcccgtcctatgacaat

SEQ ID NO: 25497 - DNA, 614 bp, Gossypium hirsutum
  Clone ID: LIB3583-058-P1-K1-F6
cttgatcaacagctcgtttggagcttggtattctcctaaattcttagacctttcctttcgtttgaaatgaatgtatgtgctattcaggataaaataaaaactgaagagattaaatgttaagttaattgttgatgaccgttcttaagaatgctcaattttaagtatgaaattgctaaactaaatatacttaaatttgttgaggagatggactgctactgattgaaataatagggaattatgagaggttaaatgccaactttggcctctatcccaaatgctggactttcagcatttaatttccctgtttaaagatgttttaaacttgccaaatatgcaacaattgcatatgttaattaattaattaaataaatgatagtgggttctttaccttttctttcttggttgttttgttgcatctttgtgctagtatgagtgatggaattaagtgaaattttagtgaaatttttagctgtcgagggagctgctgaagcatgcagtttgcatgcatgctgtttaatttcttaccaatttaggtggtctgatcgatggttgtttattgttgtccaaataataattaaagatcatccaagtgattaggaaattaaaatggtctg

SEQ ID NO: 25498 - DNA, 559 bp, Gossypium hirsutum
  Clone ID: LIB3583-058-P1-K1-F8
cccacgcgtacggaaaagaaaagcaccgattcaatctcgtcatcagcccttacatatgccttagtcggtgatttattagattatttgccagatctgctgttcatcctacgttcaattccaccgtctacaggaaaatctagtggatgttataattaactgaagattgtgtgattcaatcgaatcctactgtgaaacgatgacggacgaattaacaagccgatcagagatacaaaaggagctagagagggtacgtcatcgtctaagggatcggcaaagaaggcaatcaatgagccttgaggaaaaagacaagcatttagccagacgtcaaatgaactatcaattgccaagacaaagagccgtaatggctcgaataaaccctactatatcaccaattcaattacctttaactaatgctttaacttgtgatgcgggttctgatgttagtgctcgttgtaatgctgatgttgctgctgctgctgatgcttttctaagaacggatcacggactgcatctaagactgattctctataccagaaacttccacagtcagctccccttt

SEQ ID NO: 25499 - DNA, 365 bp, Gossypium hirsutum
  Clone ID: LIB3583-058-P1-K1-F9
gaccgacgcgtacgggttttttctttttcttctttttcctaattttggattgtatttgggctggtgggtttgggttgtgaattctttaatgtttgggctgaggtaattgggttaggataggttgggttttgggtggtgttaggttttattttagttttgtgtattcaagctgtgaggttatattgatcctggataaggattgagttgtacatccattatgatcattgtcgttacacactttaaaaaaaaataaatttttatttaaaatgcatattcttatgaacatattatcctattattttgcaaatttattaaaaatgctaatcggttcctatgggggggccgttcaaagcttaatttatttg

SEQ ID NO: 25500 - DNA, 614 bp, Gossypium hirsutum
  Clone ID: LIB3583-058-P1-K1-G4
cggacgcgtgggcggtaacagttatggcggatggcctattctctccggaccttatctaacctaacaaagatgtcgttgaccttaatttgcacgataggattcttcatcttatttttacttggataatggtccctaccaacaagcattacgataattggatacagcattgctttcacatcaaccgtcactttgacttagttttagttatttttcttaacattgtcaacatcatccgtttttctgtgtctagtaacaaaacgcttaggtatggaactttcttttccaatatttttcgagccttgaagttaaaagtccatgttgatctcggtcgagctagtaccttttatttcgatatatcggcttcttatagttgtgattggattaaacgcgatagttaatggattcacaaccccgattgtgttggtcaataagcacaaggagcgactgctgatcaacaggaggaaggcgtgtcacgtgaagatgatcctccgcctccgagaatgtatattcccgctttgatggctcctttgtctccttgtacccttagtctttttgctgctatacatgggtttctctccgtgttaatgctcagtttgatgtattaatcatctatg

SEQ ID NO: 25501 - DNA, 581 bp, Gossypium hirsutum
  unsure (1)..(581): unsure at all n locations
  Clone ID: LIB3583-058-P1-K1-G6
ccacgcgtccgatctggaaagaaaatagtgagttttatgaacagctacattttagaattaaaagagattgaaaagagaagcccgaaagttttccagtcatcagtaaatggcagcacccatctgattagtttgtaaagatcaactttgacgccgcatataattggagatcttgccattcagcactggagattgtggttagaaatagtgaaggtaaggatctattagcatgttcggagatccatcaacaagttgcatcagcttttgttgcggaggcacttgcgtgtcgaagagcaacacanatcggtatcgacatgcaatggaaaaacattattattgaaggtgattcagtatcaataataataaaaaatgcaagacgcacagtcaggataaatcactgataggcgcttatatacatgatattcaacaggtcttattttaaatttagaaagtgcaaatttgaatacactccacgaacagaaaagagcctagtaaactctattgcagctgaaacactgaagagtaagaaagagattttcctaataagaagagtccctgaatatgtagaaaaacagaaagaaagg

SEQ ID NO: 25502 - DNA, 512 bp, Gossypium hirsutum
  Clone ID: LIB3583-058-P1-K1-H3
ttctctgtcaacaacttgcaccagtgttatatttcctagcttaaacaaggttaacaaaaaatggcgggtgaggatattcaacctattgtgtgcgacaaatgaactccacatgctcaaagctcccaaagatcaaggatcatgcccctataacaaacctcactactataggaaggcatccacaccacacatgtttactgcattaaacaagcatatatgttcctaatttgccaaaataagcacactcaaaaagaagtctactcacttgcaagacacgattacaacatagcatagtgcaacttggctctctctcattaaccagtaggaggccttgtcactacagctataccctgattcctgctcaccttcgtcctcagcttgaggaagaagctcttctgatatatatgactgcaatgagtatgatgtccaaggggctgaatatgacccaaacttttctgtacaagatctcaaacctcgggcatcttaatacatctaatttcctcatggatacaatt

SEQ ID NO: 25503 - DNA, 543 bp, Gossypium hirsutum
  Clone ID: LIB3583-058-P1-K1-H4
cccacgcgtccgcttttttttaatcagttgtaaggaccaaactgaattttattttgagggcacttctcgatgatgtaccctttacagaactgccttagaagtatttggttccttgtcaaaccatcaatattatgttcccttttccatgcttcccatgaaagttccagtcttgctctgccagtggaatcttctcactacactggatcaggttccggagccataggacgttgtgacgttgacgttctcgtaagtaaagttcatgctgggaccagtgaggatgaagtctttcagtgtctcgtgaatgatggagaatgtaactccatacagctttcccatgatcttattgataagttgctgcaccggttcagggatgactggaaatctgcattgggtgcttttaaatgggcagcatctcgcccagactataagcactctcatcaggcatatgatacgatggttgatatcctcggtaaaatgaaacaaatggatcgaatgaaggactttttggaggaaatgcgtaaggtcaccttgtacgcttacacg

SEQ ID NO: 25504 - DNA, 395 bp, Gossypium hirsutum
  Clone ID: LIB3584-026-P1-K1-A11
gcgtccacctggcttgctctccagaagaaattcggtccgatgagctggggaaggtgccaaacaagtgttgcctaactaggagaacctgtactgcaccctatattgtcttatgacgccgctaaccatctgcaacctcagctatacacgacataggcatgccaactttaagctagctttggcactaagtggatgctggcaaatcgtaagtgaagacagagatttagagagttacgcttgccatgagaaagacattaaatgatttaattgtgcctgaaccataaacgcgtgtgttcgtgaaaaagtgtggcgcttggagagtaattattatatgacacagtgtgtaagacttgttggctaaaaaaaaagcgcgttagagatcagttactacctctcac

SEQ ID NO: 25505 - DNA, 608 bp, Gossypium hirsutum
  unsure (1)..(608): unsure at all n locations
  Clone ID: LIB3584-026-P1-K1-C2
cccttccctcctccctttttttccccaaattgaaaacccacctacagtccccaccgatccaccatcccacctgcggtctccggtcctccagcactccacctccactccacgacactaggtggctgttctcttcacttcgattcttctgcaacttccgagtccgacccaaacccttcaaatcaacaagttcaagccttcaagattttgaagtcattttaatatatttgaagtcactttgaaggtaattcattttccagactttggcatgtcattttccagattttggcatgtcattttccagattttattttatttccagaaaaacctgtttacatgtatgagtagtaaatacttcttgtcatccattttcttggtcaacaaacgggaatttgatcttaaagatccttaagattaaaatacgaatgaagttaggtttacatggtcatgtttttgcaaagtcaaaatttcatctgcttttctttttggtttgatctgttttttggttggtgagaaagtgaatgaaaagttgctgaaaatgaatngaatngaatttgttggttgatgtaaaatgaattgaaaatgaactgtggcggngttttgtttttcgt

SEQ ID NO: 25506 - DNA, 569 bp, Gossypium hirsutum
  Clone ID: LIB3584-026-P1-K1-C4
attgatatggaatcgatctctcttggcggcaaggagtacctagtaaaaactcaccatggtacagtttcagttgctgtgtttggagaccaagataagccggctcttattacctatcccgatttagctctaaatcatatatcctgttttcaaggcttgttcttttgtccggaagctagttcgttactcctccacaacttttgcatatatcatataagtcctccagggcatgagttcggagctccaccaatctgtcccgatggttttatgccttccgttgatgacttggcagatcaaattgttgaggttctcaacttttttgggcttggtgctgtaatgtgtatgggggttacagctggagcatatattcttaccctatttgctatgaaataccggcaacgtgtccttgggttaatacttatttcgcccctatgcagagcaccctcatggacagagtggttgttaaataaggtgatgtcaaatttactatatttctatggcatgtgtggagtggtgaaggagttggtgcttaagcggtactttaataaggaagttcgtggtaatgttcaagt

SEQ ID NO: 25507 - DNA, 543 bp, Gossypium hirsutum
  Clone ID: LIB3584-026-P1-K1-D8
agaagaggtggtttctctcttgatgcattccgtgagagaaatagcatgcagtggtctcccaaaacagaggactagacaagctgaagagaagcaagaatggaatgaaatacgggcaggtttctcttgctgcagcaatgacaagggtgaaacttgcagcctccctagctgcttctatagtatggttgtctggtggccatggtctggttcaatcattgataaaggaaactttaccttcttggttcatatccgttcataggtctgaccgggatcaaggatcagggctcgtggcaatgctcggtggatatgcacttgcatatttcacagtgctttgtggtgcttttgcttggggagttgattcttcttcatcagcatcaaagcggagacccaaaatccttggttcacacatggagttccttgcaagtgcactagatggaaagatatcgctcggttgtgatggagccacatggcatgcctatgtgtcgggattcgtaagtctaatggttggatgcaccccaaattgggtcctagaggtggatgtagacg

SEQ ID NO: 25508 - DNA, 600 bp, Gossypium hirsutum
  Clone ID: LIB3584-026-P1-K1-E10
cgcttgcagctgttctatttgagtggcattctcacggtattcttttgtgggattgtgatgtcacattggacctggcacaatgttaccgagagttcaagagttactacaaagtatgtctcttccacagtgttattttagggcaatagaggtcatccatcattgatattaggaggaaaaaagtcccaattttaactctttatgtgcctcaattgattcagttcttttgtttatactcaggcatgcctttgctaccttgtcatttgttgctgagacttttctctttctttatgtcgggatggatgctttggacacggagaagtggagatttgtcagtgatagccctggaacgtcagttgctgttagtgctgtgctgatgggtcttgttatggttggaagagcggcttttgtgtttcccctgtcatttttatccaacttggcaaagaaatcagctagtgaaaaaatcagcttcagggaacaaattataatatggtgggctgggctcatgagaggcgctgtatctatggcacttgcatataatcagtttacaagggggggccatactcagttgcgaggaaatgcaattatgattacaagcactat

SEQ ID NO: 25509 - DNA, 518 bp, Gossypium hirsutum
  Clone ID: LIB3584-026-P1-K1-E12
gaaactctgtcccagggtcgaagctttagcttcagcctgatatcaatcccaatgcacacaacaggcaggactcttgctaagagaggactcgagtccacccacctcttctcactggacttcctgatgatcttgccatagcatgtctagattcgagttcctcgagctgaacaccgaaaactcagagtcgtttgtaagaaatggtatcgacttctggctggcaattacttttattcttttacgacaagtcttgaaacgacagaagagtgggtacatgctctcaaacgagatcttgatggcaagatatcatggaatgcatctcaccctatgcattacatgtggcagccgcttactgcagtttcaagggagtattctgaggcacttggtttcgggtgcgctgttctaaccggttgacacttgtacttgcttggaggaaaggaccgacaaaggagttcaatgagacacgttatcctctataaagctcagacaaacaagtggtatagaacaccagatatgctttg

SEQ ID NO: 25510 - DNA, 522 bp, Gossypium hirsutum
  Clone ID: LIB3584-026-P1-K1-E5
cccacgcgtacgcaaaatcactaattctttgtctgatactagctcatcttttgcatttcctgccactcagttcaatatctgacaagtcgctttttattcaagcactaaatttaacgaggattatctcatgaatgaacatcatttacagaataacacacgggatttatctaaatagcaagataatgagattggttcgcacaattgtagaatgaatacccaccacagatacatgaaaaataatctcaaatcgaaggatcctcaaagtcctagctcataccttgattctggcgtaggttcttatgtattatctaacagagtgacccgtattcagttaaatcatcaactatttgacgatgtagatgtacgttaatgtgaaattcctcgaaaacacttgtattttgatgaaagaattggactaggttcctatgtacaggtctaccatgctgattggaatggcactaaattcactgttaataaattcctataccagaatttttctggttctgcttttccttgacttca

SEQ ID NO: 25511 - DNA, 323 bp, Gossypium hirsutum
  Clone ID: LIB3584-026-P1-K1-G1
gaagattgtgccacctcgaagttctttctgtgttaatgaaaaggtgagtgacttattaggagactctccatacgcagtcatataaaacctggtagacattctgtggagattgtggcaacagatgatcataggaggatacgagatttgagaatatctacttccatgagttctgagagtagtaatcggcgtaaagatagtagctgggagaacgagtataagaaaggattgaggcctattctttggctttctccgaacttcccactgcaaactgaagaactcttgcctttgctagatattcttgcaaacaggtcaaaagcattcgg

SEQ ID NO: 25512 - DNA, 162 bp, Gossypium hirsutum
  Clone ID: LIB3584-026-P1-K1-G3
cccacacatccgttgcattggatcaacaggatacaagtttacttcagcagacatcatagccttcctcaggtagtgcactgtacataactcacacaaaggctacctttatgaacagcggtttagagacaacctgccgcaagaaagcagcatctgagtgggctc

SEQ ID NO: 25513 - DNA, 387 bp, Gossypium hirsutum
  Clone ID: LIB3584-026-P1-K1-G7
gccacgcgtgctaatattgagtcttgttcctacttacgtctaatacattggacagacatatgctgaccggtgtggcataacaacactgcactgacacgatacatgactctggggtaaagatgaatcagtgttgctgtacctagggactatacattgctgatcgagcgtgagcgctgaaatataggtatagggtatgggactgacgactctggaaaggatgacagaaatctcacatacgagctctcgaggactgtgacgatcatgggaactaataatactgcacatgtagggcgcatctatacgctgtagatgggatgcaataaatatgatgcagacaagcaaccaagcgttcgttgagagctaagaatgaacatgactagtgtgaac

SEQ ID NO: 25514 - DNA, 433 bp, Gossypium hirsutum
  Clone ID: LIB3584-026-P1-K1-H11
ttttaccattgagttctttcgctcagtgttcttggtgcaacatggttggatgcctagacatgcaccaggagcgtgttaggtcaacccttaagttggataaattggatgatgttagcaatgagtggattaatgcagatgttcttatattcaacactggacaatggtgggttccagggaagctttttgaaactggttgctacttccaggttgggaactcagtaaagcttggaatgtcaattcctgctgcattcaaaatggcattaggtacttgggcatcatgggttgagaacacgattgacacaaacagaacacttgtctttttcagaacatttgagccatcacactggagtgaaaaatcccgtaggttttgcaatgtgacccaaaacccattgttagaaactgaagggagggaacgaagcattttttcagagac

SEQ ID NO: 25515 - DNA, 615 bp, Gossypium hirsutum
  unsure (1)..(615): unsure at all n locations
  Clone ID: LIB3584-030-P1-K1-A5
cggaanggcagggccgacccacgcgtccgctgggttttatcaggacttggtcatgactatgggcttagcactcaaagcatcaagaaagctgcagtgttgcacgataatggaaatatgaaaccttggcttgacctgggaattcccaaatataaggtatactggataaagtttctaaaccctgaaaatcaatttctaaatgagtgcaatgtaaatccataaatgggccggtggtggggttgacacactctgaatccttagaaaattgagggctcaaggggaactaaggtgctgacaattttgacactgagctagagaattttgaagggggtgttagatggcaacaacaaaagtatagctgtgatgacctggatgggtgcatatatgtgtatgtattctaaaacttttcagtaaaaataaaagaaagggctccctggaggtggctacagatggatatcggggggctattgaagtgattgttggcgaatggagaggtagcttctttcattgactgcttccttctagctttgtgtggtacagtgaattaatgtgagaaaccttgacaaaataatcatacaccgagaagggcgtgatttgcattcaaattcaatggcgcca

SEQ ID NO: 25516 - DNA, 558 bp, Gossypium hirsutum
  Clone ID: LIB3584-030-P1-K1-A6
cacgcgtccgttcatacgaggccgaagagggtggggatgacagaactggtgctttcacatctggggttggtactcgttgggtcagagccccggacctactttatggctcaatagattatggactaaaggtggattggtggtcatggggttgcattttttcagagctcctaaccgttgagccgctttttcttggggtttctgacatcgatcagcttggcagaataatcaatgttttagggaactaaaccgaaaaagtctggccaagctgttctaaacttcccgattacagaaccattttttttgccaagatcgaaaacccagtcagtttagaagcttgcttacccaacaggtctccggacgaaatctctattgtcaaaagacttgtttgttataacccacctaatcgagctactgcaatggaactgctgaatgacaagtatttcaatgaagaacctcttccacttcctgtttccgagctgcatgtacctctcacaaagaatgaccatgatgaggattcacccggtgggtggaacgattatgacggcatgggatctgact

SEQ ID NO: 25517 - DNA, 286 bp, Gossypium hirsutum
  Clone ID: LIB3584-030-P1-K1-B5
gaacggtaaggcccgggccgaccgacgcgtcacgcgacgcgtcaggctttccaaatcagagttggaatggctgttactttgaacaagacggggaagctggcggagaattttatggtggtcgggccctgaccaggatatacttgcaagtgagcagaaagaggtagctcacatgacttagtctcactaacaaacgtgcgtcaaagactgatgctctaaatggacatgctcaatgtacgacacatcgacattgaaagtgacttgcactcactagaagcacttatctaga

SEQ ID NO: 25518 - DNA, 525 bp, Gossypium hirsutum
  Clone ID: LIB3584-030-P1-K1-C9
cccacgcgtccgcggacgcgtggggtggaacacaagatcttttggagaaagtaagggtcatagaagctgatactttgagtgtaattcaaggtggtatgactgcgggaagcactacatcggagtcaagctgtgaagcagtacgactttgctgcaaagtgttggttgaaagacttgtccctctcaagcaaaggttgatggagcaaattggatccttagagtgggagacgctgatccttgaggcatatcgcaactctgtaaacttatcagcaagttcactatacgtaccgaacttctccaccatgcactacctaaactatgctgcaactgtgagcgaggtggaggtaaaccttataacaggcgaaactacaattctacagacagatatcatatatgactgtggtgaaagcttaaatcttgctgtcgatttaggacagattgaaggagcttatgttcaaggaatggggttctttatgcttgaggaatacaccaaaaacttagatggattagtgattacaaataacacat

SEQ ID NO: 25519 - DNA, 582 bp, Gossypium hirsutum
  Clone ID: LIB3584-030-P1-K1-D12
cccacgcgtccgcccacgcgtccgcccacgcgtccgacacagtcgccaccccagccgctaacaacaacagcaacaacaatctgtctataatctttgattcaccagacgaaatggggaatgacatttcggcttctatagacttctctgaatctccatctttttcagtccctccatttctgacacatcaagaccatttcaacctgtctttagtgcagtctcaaatgcaattacctgatgtttcagctgaggggctctcacagtacactaccgacactgttggacctcttttggggcctccactgccatctgtttttgacgaagattgcttgtcttcggtgccttcgtatgtgcctttaaactcttcatctccatcaggctcctttcttggtcctcccatgactagtttcatgcctgctgggactattgctgatagttccggggttttcgctgagaggattcttttgaattctgaacttcaaccacaagacttggaatttcagggtgataatgctggaatcttttgccctgatacagtccaacgagttttcaaaccaggagatttgcagggcctgagcagtgaca

SEQ ID NO: 25520 - DNA, 213 bp, Gossypium hirsutum
  Clone ID: LIB3584-030-P1-K1-D4
agaaatatgataaatctatttgatgtatacaataacatgtgggttgagaacatgacattgatgcggaggaagcatatagccattcttgttgggcaatctgattaaaatcaactcactgtgatgaaagacccacgaggctggatatgcttacagtgatatgatcacaattcgtgttactcagcatgatgtctagagagaccttgctcttgatca

SEQ ID NO: 25521 - DNA, 380 bp, Gossypium hirsutum
  Clone ID: LIB3584-030-P1-K1-D8
gaccgacgcgtacgcacacgcataccatcctaaaccgccagcttacactctacattatcaaatcctacatactccaacatgcgagcgcgtttataaactatactatagccaaaacacaatccactcactctacaacatacaacactctaaaaacccaaaccccacccaacacacatcattatcaccatataccacatcccccttaaatcacatcacctaatagcacataacccatcacctttcccaccaccaaacctatcaacatcctcaatgacaaatgccatataccctttcattatgcataaagcgcttattttctactatcaccactaacattaccactaccatttcccaaactcctaatactaactatattcacc

SEQ ID NO: 25522 - DNA, 396 bp, Gossypium hirsutum
  unsure (1)..(396): unsure at all n locations
  Clone ID: LIB3584-030-P1-K1-E11
cggaancccgcctcgaccgcgacgcgtccgaaaaaatcttaccaatttctatcttctaaaaacacaacttttaatctctaactacgcaaaaaacgcatgctgtctttctacacgtacgtgtggcaaccgctgtccaatatgccagattttcccttacataatcaagaatactacaactgaaactattattctaccatttacaactccaacaatgcactttgatgtatcttatatcgaagttgttgttaagaattgatccaaatgtagaaacaactacacttgcaacccttccaattgtaaataatatcttgctaaaatgaacaacaaagagaagcacagagtcctttctctttttaactaaataaatcctaatactttattatatctcaccaaatc

SEQ ID NO: 25523 - DNA, 583 bp, Gossypium hirsutum
  Clone ID: LIB3584-030-P1-K1-E12
cccacgcgtccgttgatgctgagtgtttcatagtgagtacagttaatgctttgcggacaccaatggtcaatgcaggcatggttctatgtgacaggcatttcggtggaattaattaccctgttggtggtgttggtggaatagcaaagtctttggccgaaggcctgatcgatcagggtagtgaaatactttacaaggcaaatgtgactaacattataattgaccaagggaaagctgtgggggtgaaaatttcggatggaagggagttctttgctcaaaccacaatatcaaatgctactcgatgggatacatttgggaagctgttaaaagcagaaaaccttccaaaagaagaagaaaattttcagaaagtttatgttaaggctccatcatttctttcgattcacatgggtgttaaggctggcgttctgcctcctgatactgattgtcatcattttgtgctcgaggatgactggacgagattagaggaaccatatgggagcatcttcttaagcattccaaccgttcttgattcatcattggctccaaaaaggcgtcatattcttcacatatttactacttcttcttt

SEQ ID NO: 25524 - DNA, 150 bp, Gossypium hirsutum
  unsure (1)..(150): unsure at all n locations
  Clone ID: LIB3584-030-P1-K1-E2
gcgtccgagcaaaatcaggtcaaaatggaggagatgatgttgtacaaaaggcttttgttaagtacctaaatcctaggttggtggaccgttccctggcttttgaccaantcttaattacccaacttaagaaaaaaaaacttccagggaacc

SEQ ID NO: 25525 - DNA, 197 bp, Gossypium hirsutum
  Clone ID: LIB3584-030-P1-K1-E3
cggacgcgtgggatttaggatatgggtttattagaattgggttttaggtcatgggttattttggtaatggatgtgttttgaaaattgtaaatgacttttttaactatttagtcttgacttattcttattgggttattattgcaataataaaggcccgacaaatgttactacataaagcagtatgaagacattttttc

SEQ ID NO: 25526 - DNA, 189 bp, Gossypium hirsutum
  Clone ID: LIB3584-030-P1-K1-E4
acgctacgcgttctacaacgcgagcggccactctaccgacacaaacctcacctaagcctttatcagcagcagtaacaccattctggttgtaaccttaaatcaaccaaccgaactggggattaccatttcggttctaataaactcctttgaatctccatctttatcagcccttcaattattgccccttca

SEQ ID NO: 25527 - DNA, 525 bp, Gossypium hirsutum
  unsure (1)..(525): unsure at all n locations
  Clone ID: LIB3584-030-P1-K1-E6
gccacgcgtccgctcacgggagacatatttggatcagctagatgtgactgtgggaatcagctaaccctggcaagggggcacatggaggaggctgaccggcgtgttttagtaaacctgcggggacatgaaggcagggccattgtttaaggccacaagttccgtgcctatacttagcaggatgcttgtctgcatacagtagaagcaaatgttgagctggggttgcctgttgatactagagaatacggcattgttcacagatacttagggatctggtgtgcgacaatgaacttatactaacaatcttctaatacagtgacttaaggtacngattacaatgcagtcggttcactactatactatacaagacacagcgtcttgcgccaacactaaatggcatttacactcatacagatgataggtatcatgcgcatgtacacacttcgagtgatgctggttgatctaagatcagcacttcgacttgctatcatgctgtaacattcgacatgatcacctaatacatgataa

SEQ ID NO: 25528 - DNA, 455 bp, Gossypium hirsutum
  Clone ID: LIB3584-030-P1-K1-E9
ccgcctcgacccacgcgtccacccacacatccgcccacgcgtacttccacgccactttctactcctcccataatttcctctctctgggaaggtgtctattaccatctctttatcacatcaaactccccatccaaacgctacctccacacttcaaaattttgatactctttctcaaaatactacttataaaatctacctatctcactatatatccaatcacaagtaactatatacaacactaatcttttttttctaatttactaaaacattctccaatggaaaatgacaataacaaagtctacaaaaaaacaacctctgaacattatgacaatttttagtcagaggctaactacgaatcccttcttaaaactctctccaatccactcacccaaatccactcacatacaatccaacctaaataacctacacattcaattgcctcacacaaaacatat

SEQ ID NO: 25529 - DNA, 586 bp, Gossypium hirsutum
  unsure (1)..(586): unsure at all n locations
  Clone ID: LIB3584-030-P1-K1-F12
ggctacctcagttgtcgttaattctacaatttccaatgctgatcattctaaacaaatagttttccacattatcacgaatggggttagctatggtgctatgcaagcttggttccttagcaatgacttcaagggggccacgatagaggtgcagaacatcgaggaattttcatggttgaatgtttcatatgctcccatcgtaaagcagctactggatgtaggttcaaggacctattatttcggggaaaatcctaatattgagccaaaattgcggaaccctaaatatatttccttgttgaatcaccttcggttttacataccagagatctatccgcaacttgagaagatagtattccttgatgatgatgttgttgtgcagaaagatctaacaccacttttctcattggatttgcatggaaatgtaaatggggcagtggagacttgtctcgaggcatatcatcgttactacaagtatctgaatttctcaaatccaatcatcagctcgaaattcgatccgcaagcatgtggatgggcatttggcatgaatgtttntgatctaattgcctggaggaaagcgaatgttactgca

SEQ ID NO: 25530 - DNA, 350 bp, Gossypium hirsutum
  Clone ID: LIB3584-030-P1-K1-F4
accccaaggcccacccacgcgtgcgcgttcttctaccactatcttcttcaatccgttgactactcagctctacaactccaagaacaaacctcactgtgacgcgttcttctccaccctgaaactggtctttttggacactccactaacactgccgctgcatctctgagattcaagaagcttaattatgggaaaggatactctactggtttctctgctgtgtctaaagctatctcacttaatcctgactcccaaatctaaaggcttaacattgctgatgatgttactcagctaattggtaaaacaccaatggtgtacttgaacaatattgtgaaatgctctgtttcaaatat

SEQ ID NO: 25531 - DNA, 582 bp, Gossypium hirsutum
  Clone ID: LIB3584-030-P1-K1-F8
caatctcgaacaaatccacgaaggtcttcaaggatatgattaactacagaaatcatcactcatggcgcggaagaatttttagaaacggtttgggcaatcaccagttctcatcacttcaactctgatggaaaatggaggccttcctgaaggcaccaataccaattcactcattaaggaggccattcatgtaatcagctgtggctatgaagagaaaacagaatggggcaaagagattggatggatttacgggtctgtcacggaagatattttaactggttttaagatgcactgtagaggatggaaatctgtttactgtgtaccgaaaagaccagcatttaaaggatcggcgccaatcaatctatcagatcgtttgcaccaagttttaaggtgggctcttggttcggtggaaatcttcctcagtcgtcactgcccactttggtatggctatgctggaaaactgaaatggctggaaaggcttgcctatataaacaccattgtttaccctttcacgtccatacctttactcgcctattgtacaaatccagctgtttgtctcctgacaggaaaattcatcatcccaac

SEQ ID NO: 25532 - DNA, 591 bp, Gossypium hirsutum
  Clone ID: LIB3584-030-P1-K1-H11
ggaaaggctagcattggtaaaagcaggaagggaagacagatgtcagtaccaggctcgaactggcggcgagcagaaaaagactggtggtttaagcaaccctcaaaaagagcacaagaagtatatgccgcttgctgcgaagaaagccaaagctcaaagatctcgacaagagaaaaataagaagaagtcacgttctggcaaacagttccgtgggaagaaagcttggaagcaatgacaacattatttttaacattcatactatttccatccaacacacgaatgccatgatgtttgagctggattggttggtcacattaagaatctgctggggtatcggtttggagaatggtactgaattggttgaaccgtgaatcgatacaaaccggttgaattggtgaaaaaataaattgaattggcagttggttttttttaaagatttttaagtagcttgaccagttcgatctttgattcggttttaaaactacaaatgttagaaaagttttatttatatctttcctttttgataacaagttgcggtagagtttttttcttgtaacatataacttgacaaatggatattaaaacaaaaatttt

SEQ ID NO: 25533 - DNA, 569 bp, Gossypium hirsutum
  Clone ID: LIB3584-030-P1-K1-H4
gcccttaatcctttacttcccctttctcctttcctcaagcacaacatcaacaatccctcttcatcccgatggatgggattcatacccatatcagctttaatgcctaattcccctatttcccacttcactcgacaaagaggacaatttgcaccctcagtttccttcaatgcttctggaaattttgacctctccttgtatggtgatgaggatgattcctctcaagcagagcctacaatgcctcctagtgaaggtcgacttgaaacgattattgataatgatgttataccgcggcttgatctgtccccgtttcaaagtgccaccggaattacttcacctttatcagctgaaccaaaagagtatcttgaaaaaacaattggatttacaataaattataccagagatgatccacatgatccaagataattgtcagaatctcctgatatacggctatggtttgtaaggctagatgctgtgtatccatggctccctgagttgatagactggcgagctgatgaattagcccgttatgcagccatgttagtcccacatcagatgagtatgacaatggg

SEQ ID NO: 25534 - DNA, 373 bp, Gossypium hirsutum
  Clone ID: LIB3584-030-P1-K1-H8
cacacattggctgtcatttctatgcgctgtgacaatgaggctactcgtggattctggccattatggggggggcatattaaagaatgatatgggggattcattggcccttaaaacgatcattaacgaacatggacacacaatactatgatttaatattgaacctatccaacgagaggctgccgttataatacttacagatggtatatataaaagctgtcagacatctttactcaaaatataatgaaataatgattgctgaccagatacaaattggactaacacgaacactaaaaatgaactcttgcaatagggaaagcgctcgctcatatgtgtgtgacactcagaaaagctatttgtgctagcatactacctg

SEQ ID NO: 25535 - DNA, 249 bp, Gossypium hirsutum
  unsure (1)..(249): unsure at all n locations
  Clone ID: LIB3584-031-P1-K1-A2
gtggagcactactccaaactaaccaatgaactcaaacaaaacattcaaattgtaaccacattatcttttgcgcactcaggccaaattaacataactatggctatatctctaaaaacttccaattcccttcttctcaatgtcaatcaaattcaatctaaatctcaaagtattgaagctattaaaatcttcaagcaagctctataagataaaanntccattcacctgaattttcaaacatagcatactctt

SEQ ID NO: 25536 - DNA, 302 bp, Gossypium hirsutum
  unsure (1)..(302): unsure at all n locations
  Clone ID: LIB3584-031-P1-K1-A6
caacaacattaanctctatgttatacttatctttatcatttacaactgcaattattcgatgcctgggttcctcatttaaaataagggtattctccactcaaaataccttacttttaacatctcaacataaatgttgcagcaaaacaatatctttaagcttatcctcaacaacttactaaacaattgcattgatctcttcttttaaatatcacataacaaagaatattacaacaatttttattacacattctcaaataacctcaatctttgtatccattactactctcacaacataactaaaa

SEQ ID NO: 25537 - DNA, 256 bp, Gossypium hirsutum
  Clone ID: LIB3584-031-P1-K1-A8
catactctttctacacatccacttttataacaatctaataatatctatattctacattactaggtattagccaatatctgattacatactatctacaccacatacaccatccttgttatattccaaacaattcatctctataaccactattaaatcaactctctctctaacttattttcaacctacctaattaagaccattcaaaagcttaccaggaacttccttccctaacctcctacccacttattcatataca

SEQ ID NO: 25538 - DNA, 268 bp, Gossypium hirsutum
  Clone ID: LIB3584-031-P1-K1-B10
acggtacaaggcttatctttcgaaaacaccaacttatattatacacgctcaacactaactacccggggtagggggtaaaaaatccaaatctacaaaaccgatctagatcaacttcaatacactaagataaacttaaatcaaactctaagactgtatacacctacgcccatgctcatcaccacagcaatcatcacacaccccaacatccataatatctacatacttacaaccccacttatcctaaacacaaaatctgccattgcaatta

SEQ ID NO: 25539 - DNA, 321 bp, Gossypium hirsutum
  Clone ID: LIB3584-031-P1-K1-B5
ctttactttgaaataaagggcattttcattcatggccttttgttcatgctaggtaccacctactactcgggtttatggctgtattacaggttatttttctacatactatggctaaaacgctatcacagctagcactatatacacaaacgaacgtgaacgcttaaaactcatcgatagatttggaccgatacaggaagtcgtacaagttgtaactcaaatctccaaatgcacctcatcaaaggctgttgcacaaatcaatcaacaataataaacttgcatatctatcaaaacgatagttttttccaatagcttgttcatatc

SEQ ID NO: 25540 - DNA, 293 bp, Gossypium hirsutum
  unsure (1)..(293): unsure at all n locations
  Clone ID: LIB3584-031-P1-K1-B6
ctatactttgaaataaacggcatatacattcactgccttttcttcattcatactaacatccaatcaaagggcttgtgggtttttcacatgatacatttaaactctcctttacctaaactcatatataacttatccatcatactatggcttcttaaccttctaagagctcacctcatgatttcaccttataagatccaacgatcaatcatnctctctttaattattaaccaccacaacgaatttttcattatcaactcttcatcacaatataactttaccaattccaactacac

SEQ ID NO: 25541 - DNA, 396 bp, Gossypium hirsutum
  unsure (1)..(396): unsure at all n locations
  Clone ID: LIB3584-031-P1-K1-B7
gcanaagttcnagattgggttggcgttggagctgatacagaaatacaaagtgactattgctgggattgggcggcctataatgttcaccattnctaantcatcngaaactgataaatacgacttgtcttccgtaaggatggtgaaatcctggggtgcacccttgggtaaagagctttatgactctgtaagagccaagttccctggtgccaaactcgggcaggggtactgtatgaccgatgcatgaccagttctagcaatgtgcttatgatttgccaaggaaccattcgaaataaaatcccgggcttgtgggactgtattaaggaacgcatatattaaaattttttatccccacactggttcttccctgccaaaaaatcaaacccggagagatcttta

SEQ ID NO: 25542 - DNA, 321 bp, Gossypium hirsutum
  unsure (1)..(321): unsure at all n locations
  Clone ID: LIB3584-031-P1-K1-B8
atcaccccaatctcatatctctcctttgtttcccattttatatatctttgctcaaccctaaccctgggggaccggccatcattcaacatgacacatcacaaaatctaantcaaatactaaaaacgccaagctatccgtaaaatccaaaacttcaaagaaatcacggaaggctgacaatcatccaaacaacccaaagaggcctgctacttccttcttacctttcattgaggagctccgtgaccaatacaataacgatcaccctaaaaacatatccatttccccattcaccaaaactaataaatataaatacaatatcttctc

SEQ ID NO: 25543 - DNA, 271 bp, Gossypium hirsutum
  Clone ID: LIB3584-031-P1-K1-C12
actagccctgcaaatggatggcgcttaatcgcgcgacctatacccggacgtcagtccaagggggagccgcggatgattacgagggcgcgcttgtcaccttaataccctttatacgagccctgtctgagcattcgtcattgcatatcttggtggtagttgcaaatatttaaatgataactttaaatgccgaatacgggaaaggttccatgtgaacgtcacttgcacattgattagtctatcctaagagactggtgaagctcctttctacagc

SEQ ID NO: 25544 - DNA, 332 bp, Gossypium hirsutum
  Clone ID: LIB3584-031-P1-K1-C5
gcgctgagatttaccttccaaccaaccttcaaccactttaccaacacttttcatataaccctgatatcacatgggatcagggttcttatcaactacaacgccacttccacatagactacaataatgctcctctttctctaaaaaatcaacctgtaaccgatgaaaaatcctatggatctaagaaacccattattatttaatacaagatcatccatgttacctacctcattgacttaacatgcctcaacaagcaattattgctcattatccaactctcttactaacagcacacaatctcccttcataatgcactaagtatctactgcattact

SEQ ID NO: 25545 - DNA, 363 bp, Gossypium hirsutum
  Clone ID: LIB3584-031-P1-K1-C8
gccaatattaacatcacagatatacactgaggcctatgttctactgcgtagcaactacaaaacggggagtgtgtgtgatctgagatggaaatctacacttaaaaatagatgcaagtgttgagacatctccacttgcaactcttgaaattgtaaataaaaaggagctaaaatgaacaacaaacataccactaaggcctgcggccttttaactaaataaattctattactttaccctttatcaccaaatcttaatcaggatttcgatcttaatcatccctaatgcggccttttctgctatgtcaaaatgtattatactctcaaagaaagtttgtactttaactataaacaatagcaccccctttt

SEQ ID NO: 25546 - DNA, 335 bp, Gossypium hirsutum
  unsure (1)..(335): unsure at all n locations
  Clone ID: LIB3584-031-P1-K1-D11
cccactcgtcctctttgaggtttgatggaacccttaatcttaatgttactganttccacacgagcctgggcccatatcccagtatccactttatcctttcttcttatgcccctgacattacaactcagaacgcttccatgatcagctatctgtggctgagataaccaacactgcttttcaaccctcttcaatgatggccaaatcttacccacgacacggcaagtacatggctttcttccttatctaccgaggatatgtttctcccaaagatgtcactgctgatctggccaccattaacaccaaacccacaatccaattttttgattaaaacccta

SEQ ID NO: 25547 - DNA, 554 bp, Gossypium hirsutum
  unsure (1)..(554): unsure at all n locations
  Clone ID: LIB3584-031-P1-K1-D12
ctttctgtcttccccacttcaccctcacaaacttcaatctaccaccaccattggatcgagggganccgggattctatctttgaagtgaaatcaataccaagcctgggcttctccgaacttaaacattttcttcgtgccgtggtacagactttctttaagcaaattacattgtgaatatcaggattcaacatggacaaggtgatgagattggccacagagagaggggtagtgctattcagcaagagctcatgttgcctatgttatgctgtcaaaattctattccaagagcttggggtaaccccaacaattcatgagatcgaccaagaccctgaaggcctataaatggagagagccctcatgaggattgtgtgcaaagcgccggctcccgctttctatataggtggaaagctggtgttatccaccaatgaagtcatgttcctacacttaggaagagggctgatccctttgctggagccatattaggctttttgctaaactaaatacaaattacttctttaaataaacattgaaagaaattatgtgggctaaaaatc

SEQ ID NO: 25548 - DNA, 229 bp, Gossypium hirsutum
  Clone ID: LIB3584-031-P1-K1-D3
actctagatcatgagcaagcggtctgactgtatcaacctgaccctctctgccaatccacgacctagattggagatggcgtcactttattcgaactcactctcatgaatcaagacacggtccttctggagagcccctactactacaaagatgactcgctttacggcacaatcccctttaacacagtctatgttatgaccaaatgcccgcaccatgtcacctatcctacat

SEQ ID NO: 25549 - DNA, 453 bp, Gossypium hirsutum
  Clone ID: LIB3584-031-P1-K1-D4
gcgatactttgctagagcagattagaggatctttctccgaattatttttctgttagctgtcctagttaggtgggttaagggcattcataagtaggcaatggcttgatgaaaatggcattgactttctaactctttaactcattgttcactaaccccagctgaaaacaaatacaaaatttgaatccacaggttccatgatgacattgtgccctccaatcctggctcattcccatttcgcaccaagttaaaaaagtttatgaagattgaaaagagccatagaacatagtttaccagaaatgtgttcactaaagaagctttgctggatgctatgttttaaattggttctgtaaccatttactgaataaatctctactgctgataaaataacttgggcgcactaaaaatgccgaagttattttaagaggtaccaaatttctctggattttcatttca

SEQ ID NO: 25550 - DNA, 457 bp, Gossypium hirsutum
  Clone ID: LIB3584-031-P1-K1-E12
atatctcgaagagtcaactccagtgatgccgagaagtttgcagaaatttgtccttgcccctggagtggagttggatgggggtttatatggggaatgatatcattcatatttctcggtgcatcagtgtatctaggacttctcatcttaacttgacctgaggttctggaattggttgaaagtcatcttggtactggcaatttattattgtacatcattcagcactgtgttaaaatggaggatgccatttttccttattcagaacatagtttatttgtttgcaatttgattcatcattcatccagcaatgtattgaagtgcaattctgtttttggtattagatagtaacagcttggcttaattctttgaaaccctttctcatttgggctcaacattccttttttttttttttcagactgcacctagacttacaccagaattgtaaaaagaataattattt

SEQ ID NO: 25551 - DNA, 246 bp, Gossypium hirsutum
  Clone ID: LIB3584-031-P1-K1-E5
cacatcatagggggtctgtagctgcagctaaagtcatttcactcaccgctgcattacaccgaaatgcactgggacaactctggctagaggaaactatggctgatcgacctacagcttgctatattcagatggaattattgtgaactggtctgtaccattctcactttccaacatgggaactgtctgtatggccattggcactctctctgaaaatgttcatgaatcacgctggttgtggtggttaca

SEQ ID NO: 25552 - DNA, 237 bp, Gossypium hirsutum
  Clone ID: LIB3584-031-P1-K1-E7
ctgaccatcagcggacacgcggctgccacttaatgactgtcaaaccacggacaaaacagggtgccgggtaacaatcttagagaaacgtatacttgtttgagaaaacagggcactacgaataaaactcagctataaggctcaatgcctgcctgatgctaaagataactactcgcttattattcaaaaaccgaccgagacaacaacaaaagattaaccacttctactcttaaaacttta

SEQ ID NO: 25553 - DNA, 209 bp, Gossypium hirsutum
  Clone ID: LIB3584-031-P1-K1-F5
ctctagctatatcgcacgcccacaggctatcactcccaagctcacttacacgcccattctaccaaagagctctgatgtcctttcacccaaagtcaaaacactaaccgactgtatacaacatcaagactagaaaatccctgctgcatcaccacttaatcgcctatgcgccgcatgcgaatgtcagcatctacacggataacgagaagacc

SEQ ID NO: 25554 - DNA, 531 bp, Gossypium hirsutum
  unsure (1)..(531): unsure at all n locations
  Clone ID: LIB3584-031-P1-K1-F8
caccaccaccatcatcatcaccatcatactcaagatcccatcatgtcaaatgatcaaatcagtggtccaagtgcttccaccgcacttggtgttggcgttggcgttttcccgcttcttacagcagctccatgtctagctccactgaatgtggaagaccccgatttgttcaataacaatggtcgtaccaagctcagcgggatgcagttatggcaggatcaaaattcttcccctcacaattatcttaaaaaaccatcctcattccctgatagcaataattcgtcttctatgaagttgatacaaagcagtggcgggggtgggattggagatggagagagtggtggttcgggatcaagctcagcgaccacgtgtcaagattgcgggaaccaagctaagaaagactgttcccataagagatgtagaacatgttgtaaaagcccgggttttgattgccctactcacgtgaagagcacgttngtacccgctgttaggagacgagaacgtcagcttatggcggctgcagtcaccactgct

SEQ ID NO: 25555 - DNA, 168 bp, Gossypium hirsutum
  Clone ID: LIB3584-031-P1-K1-G10
atcatatcctactccggaatatacactatcgagaacactgtattcgcaccttccactccatggggcacgggtagatccaattaagaggataaaataactctatccttaacttctcaatgaatataatcaccattacccttcacaaatacgtattccgctctcaaaacc

SEQ ID NO: 25556 - DNA, 468 bp, Gossypium hirsutum
  unsure (1)..(468): unsure at all n locations
  Clone ID: LIB3584-031-P1-K1-G11
aaaatttatattatttatactatattttattattttattgacttgatatctcaaccaaataatttattgagaaaaatgactaaaattatatattacaaactaacaaattttattaaaagagtaatattgtcttttttatattatcaaatttataaaaattaatttaaactaaaaatagatttagaaatatacctacagaatttgaatctaagataacatgaaatctaaaacctcaaatcaaagctttgttttttatataaaattttcataaatatatttttaacataatttttcacttatatcataagtgtgtcattatatcataagtgtgtcattgtttaatttttattatattnttatcacattctgtcaacaaatttaattatattagaatattgaattcccacaatatgggtaaaatatatattaatatttacaaaaaatttttttataattaaattaaaattt

SEQ ID NO: 25557 - DNA, 455 bp, Gossypium hirsutum
  unsure (1)..(455): unsure at all n locations
  Clone ID: LIB3584-031-P1-K1-G12
cacaggtgctgaaggagtggaaactgctctgaagttggcaaggaaatggggttatgagaagaaaaaaatgggcaaaaacgaggctattatcgtctcttgctgtggttgcttccatggtcgcacattggctgtcatctctatgagctgtgacaatgaggctactcgtggattcaggccattattgcctggtcatattaaagttgattttggtgatgctgttgcccttgagaagatctttaaagaacatggagacagaatagcaggatttctctttgaacctattcaaggagaggctggtgttataatacctccaaaaggttatctaaaagctgtcagagatctttgctcaaaatataatgttataatgattgctgacgagatacaaantggcctaccacggtcaggaaaaaatgttggcttgcgattgggaaggtgttcgtccaaatgttgtgata

SEQ ID NO: 25558 - DNA, 343 bp, Gossypium hirsutum
  Clone ID: LIB3584-031-P1-K1-G7
gacacgcgttcgactgttagctgccattgtagagcagccaccatctcatacccttctatacggggtcgtggttgtatattatgaacaccacaactctattgacttcaagcatgcagacatcatcacatctacgattatgagcacgcttctaacccgaaccaacgtgaagctgatcaacgctgtggcggctgacgacttaataatgaaggaagggagaatcggccttgttaacacaaactcagccttgatgtcaaagaaccatcacacacaatcctgcctttaccctcatgtgatggaggccaaactcgcggcgagctcttgagactatgatgcgccatatgga

SEQ ID NO: 25559 - DNA, 321 bp, Gossypium hirsutum
  unsure (1)..(321): unsure at all n locations
  Clone ID: LIB3584-031-P1-K1-H6
ctggtataaacataacgaatccattgaggcaacataggagcacagcttaacatctttgattgccatgaacaacgggatacttgaactagggtgtagctagtcacaaatgccttatgcacactctgaatgcttctatggcataaatctttgtttagcgctttaacctgacataatacattactttatatctaatatgctggatgatgatcncagagacttggtttttggctttatggatccattaccttacttggtggaactcagttactttcctgtaacacacaatgtattcttacagtttaataagggagatcttctaat

SEQ ID NO: 25560 - DNA, 108 bp, Gossypium hirsutum
  Clone ID: LIB3584-031-P1-K1-H9
cggtcgcccactcgatgttagaggagcggcttagagacagcttactcgctctcagatgtttttggactaaatatcatgcggtacaacctactggaaaactctacccaa

SEQ ID NO: 25561 - DNA, 259 bp, Gossypium hirsutum
  Clone ID: LIB3584-034-P1-K1-A11
taatacattccctcctaccaatacacgtgataacatcacttaacccctttactacaaaactttatgcccatatagaaccaaccctatcacaaatcaccatttaaacttattcctcatcgaacatattaccatcaccaatctaaagttccatccatgattcaactctcacatacctacccatgaaccctcttcccaccaaattaaaaaatgaatactacacaacaaccaaacatatctatctcacctaccactttcactt

SEQ ID NO: 25562 - DNA, 458 bp, Gossypium hirsutum
  unsure (1)..(458): unsure at all n locations
  Clone ID: LIB3584-034-P1-K1-A12
ctcatcaccannaactggattattttttcaaaaattttagnaaaaaagcaananaangactgttncgatgcttttctaaagctgtaggtggccgccatatttcggttcctcttctctgttatctttaaactggtgttggcaaccattttaagagctgctaaagatcctggtccatccatattcagtccattgattaagaaagctcaggatttatcttttttagagaaagaagatgggttggcttcattggagatcatacagaaaggggggtgtggggaagtatataaatctgaattaccagcaactgattgcaaaaatatgtctaaacacaacattaaaaaactcccaatcaaatcaccttatttacttataaccatttccaccatcataacaaaaaaatgcttcaaatcaaatcatagatcaccacattacgccaaattccacataagaatcttctt

SEQ ID NO: 25563 - DNA, 402 bp, Gossypium hirsutum
  unsure (1)..(402): unsure at all n locations
  Clone ID: LIB3584-034-P1-K1-A7
tgaaccactctatacttcattttatttctcctatccaattcataaatgcgtngtgtttaaaacaagattcttgccactccagacccctccatttttagacacaaccatacttaaaccccgaaaccaacctatcatagatttcgagcaccatgaattctatgagattgaagatatattaaacacaaacaagctctattaaaaacaaaaaattatttaccagaccttactatttaatccacataatctttgacaactaaaataacaaaccccttgaatatatggttttataacaaaatcacaacattcctaatcctttcccgcttttttttaagaacttcacttcaaatcattaaactttgtttccttaataaaaaaataaaactcctcttttctgcttattgc

SEQ ID NO: 25564 - DNA, 426 bp, Gossypium hirsutum
  unsure (1)..(426): unsure at all n locations
  Clone ID: LIB3584-034-P1-K1-A9
gacccacgcatacggagatctaaagagagagagagaaatatatcgattacatttaaatcatcacccatccaacgcggacgagtttatatataaaaattgttttctcaactcnnnacancctncactcaatactgaccagccacttttttcactggaccgttcattaaataaaagaagaaatgagtccacattttcctttctaacacctgcaacaactccaacaataacaacaattatcgctctcataataatcatcacaccacaatcaaccttacttctaaccgtaataaccattcccatcttctcctttttaaattcacacctttatcccaaacccaaaccaaacacaactataattacaattacttcaataaccaccccgtaaccctaccttaatagccacctagactgaatttaaatacattc

SEQ ID NO: 25565 - DNA, 611 bp, Gossypium hirsutum
  unsure (1)..(611): unsure at all n locations
  Clone ID: LIB3584-034-P1-K1-C9
aaaccaccagcatttgcagctacagtcacagccacaccaaaagaaggttaatcaaaaccaatctgactggtcaaagggtgcttcaacagaatcgacaagtgaattcggatcctctcagcaaacctcaggctgaaccagctcaagctgaccaacagcccatgaataatgctttgcagatgggtacaaccacaaccgcagcagtgtccgaagttggcattgattcagctaacaacacagtgcaaaatgttccttctgctggttctcagtggaaatcatcagatccagtgtataatcctggtatgccaactgtggccactcaagtgggatccatagggagcccccctcttacaaattcagctgctagtgttccagtaccttctgtcagccaagggttagggcagagacaattaccaggtggcttaccacttcatgggagcaaggctggggcacagctgccacaacttccacaaatacaacaatcttcaacaccggccccatctcaacaacactaccagccacaagagcaattacagcaagacctgcataattcacccncacaacagctgccattgcagcaacagtcacaacagcaaactccacatctacaagca

SEQ ID NO: 25566 - DNA, 551 bp, Gossypium hirsutum
  unsure (1)..(551): unsure at all n locations
  Clone ID: LIB3584-034-P1-K1-D10
aactaatttcgactcctgaatgataatattaataaaacttaccaaaaatcaaatcccctaaaaactcgccctgtattttacaccgttaaatcaccaacctatcancttttanttcttttacacctggtgctactataaatgattccactttgcttcagcaaattattgtctcatttctgatggtcattttgcactaccaaaatatcattaaaagaaattttaaaaattgtttttccttttttaaatggtgtagaccttccaacttgtatcgttatctgtaaacaatgtatacacatacctaaatataattacttttacaaatgtgtatgtacaaacaaatttccttccatttacaaaccaaccaatccttctactgtaacctactattaactatataaaaccttttacaaactgaatcatcaaccaacccttcttccctcaagacctttcttttattatttttcaattcttcatttacacttttgactgaaaatacaatgattttttttctaaattaacaccttattccttttctttcacaaaacctaatt

SEQ ID NO: 25567 - DNA, 541 bp, Gossypium hirsutum
  unsure (1)..(541): unsure at all n locations
  Clone ID: LIB3584-034-P1-K1-D6
ggattcagtatttgaggctattaagaatgctgaccttgattttgagaatggtgcatggagatccatatgtcgacctgcacgagatctggttgcacgtatgctggcaagagatgtttcagtgaggttaactgctgatgaagtattagggcatccatggatattgttccatactgaagcaacattgggaatggctgcttttgagacaaaaatgggaaaccatgaaaaaccggcttccccacaactgaccatctcacctggggttgtgtcagagagaagcaagatgatacccaatggctttctcaatgatgattctttcctgtttttatcatctaatagttcatatacaaggtcagaagtgcaagacagcgcattggttgatgctctaactgttgcgatttctcgcgtggcgatatctgaaccaaaaagaaccaggctatgtggccctactggtcctattcaacaagagttgtcttctaacattaaggttaacaacaacaaccaccacctttgtacagcattntgagtccactgcattaaaagt

SEQ ID NO: 25568 - DNA, 366 bp, Gossypium hirsutum
  unsure (1)..(366): unsure at all n locations
  Clone ID: LIB3584-034-P1-K1-D7
ggaannccccggcgacccacgcatacnaggattatcctcgagctaattatatatccttatttcaagatgtaacataatattacaatacgaccgttttttaatacaaatctgtacccacatcaaaatattcatactaaatcaatacctcctcccctcattaaaactactctcacatcattttagtcactcattcttaatacactacaacctcattctaacctagagtttttacatataaactcttatcaaagcataaagcttccttaattcatgactgatttatcaaatcatgactcggatgaccttgcatcattttcttaaaataaaacaaatagaccttatggagtccattatcaatcaatttta

SEQ ID NO: 25569 - DNA, 309 bp, Gossypium hirsutum
  Clone ID: LIB3584-034-P1-K1-D9
attttgtttagtgcgtaaaacaaagcaaaaggtttaagttttttttgtttgttggggggggcgggggggttaattctgattactcgatggatgaaattgatagcgaaagcgtatcatccatgacagaataaatagagagaaaagcaacaacaagaacaaaagtgttaaagagagagtgtttcaacctcttgcaaagataatatctatattggcgaaaaaaaaaatgacgacagatagcaaagagttgaagagaattgagaacaagattaacaagcaagtcccttttgctaagacaaggaaccaactttt

SEQ ID NO: 25570 - DNA, 532 bp, Gossypium hirsutum
  Clone ID: LIB3584-034-P1-K1-E10
cccacgcgtccgattaaaaccaggcaaacatgtatttgccgtttatggtgacaactttttcaaaagtggaagttacacaatagaagctatttgtgctgccccattcatagaggaaaaggagaatcttagagcagtggaggcagagattctgtccaaacgagcagaattgtcaaagtttgaaactgaatacagagaagtcctggcacaatttactgagatgacaggcagatacacgaaggaaatgcaagagattgatgagcttctgaaacaaaggaatgagattcatgcctcgtacacaactattcctctaattaagcggagttcaagtaggaaaaagagtagggctgcctccaaagaggccaaagaagatggtgaagtaagagacaggaaaccttctacgagggatagaaccaagaagaaatggtataatatccccttaaaagttgacaagagaaagccatgctgaacaggttataaaaagccagcaacttttggggtctgaaagtaatctgtttgtgcacccaaaatttac

SEQ ID NO: 25571 - DNA, 577 bp, Gossypium hirsutum
  unsure (1)..(577): unsure at all n locations
  Clone ID: LIB3584-034-P1-K1-E11
aggcaatgcagaagaactggatacaaactggcaagaaggttcagttagcgagtatcgtcaagaggatgctggaaatgtaaatggggaagaaagtcattcacagggtgcccaaagggtttggcgtgaggatggctctcgggaagctgttgataattggtcagaagggccttctggtcctccaagaccacgtcgttcaatcccagttagaaggttcaatagatttcatccacctgaagatgataatgtgtatagtatggaacttagagagcttctgagcaggagaagtgtctctaatcttcttcgaagtggtttccgggaaagtctggaccaattaatacattcttatgtggaaagacaaggccgttctcccattgattgggatctgcatagaaacttgccaactccagcctcaccagaacgtgatcaagagcagcagagggatggaataaatgatgaccagaacaatgctatcagcagaccgtcactggtgttaccttctncttctgtaccaccaccacaaccggtatggcatcaaagattacatcacactagcttgtctcggccagcatgcatagat

SEQ ID NO: 25572 - DNA, 461 bp, Gossypium hirsutum
  Clone ID: LIB3584-034-P1-K1-F11
ggaaaatgagacaggacatgttagtaatacataaaaggtttcatgaagaaagtataattctctcctcggttagccgggtgggatgccctatggaatctgtacctcggtggcaataacaacgaacttgtggctgcagtccagaggaaggtacaaattgtatattgtcaataattcccatctccatatgttcgcggcatatcattgcctcacctcaaattaaatgcctagccgctaaaaatgaaaaaagtccagcttcgaaacggcatccatgacctagttgttactgtgtccttttccaaattccaccgggaaccctttatttattgacgtttcttgaacatgtcgaaaacaaaataaaatacagggtaataatggattactttaccatcatatttggtaattgacatgtctctcaacgtgaagatttttgacttgtgagatcagtttatgagtgtagaact

SEQ ID NO: 25573 - DNA, 576 bp, Gossypium hirsutum
  unsure (1)..(576): unsure at all n locations
  Clone ID: LIB3584-034-P1-K1-F4
ggtactcctgctatgacatcgagaggttgtctagagtctgattttgacacaatcgcaagctttcttctgagagctgcacatattgctagtatgatgcancgtgatcatgggaagccgctgaaggcctctgtgaagagtctccaagaacataaggatattttggagcttcggatgcaagtggagacttttgcatctcaattttcaatgccaggttttgacatttgaatgaattgtgaaggtgcctacataccgaaagttccaacgactctgcagaggaattgtggggtaagctgaggttattttcctgtaaccaacccacatcatcatgtctttctataacagtgattgaatgcccgaaaatattgcaacaattttgatggtgaagctgctggttttttttgaacctatatgttctcattgttgctagtcttctagttgtgtttgcagatttgtttacaaataatattgaagccgagaattttgttctgatagtggatccagtgtaagaatcaacaattcgtgatcttgtcttttatgtaggtgacttgatttataaaggatatcatggtaatatta

SEQ ID NO: 25574 - DNA, 540 bp, Gossypium hirsutum
  Clone ID: LIB3584-034-P1-K1-F8
aaaaatcaacctcatgttcaggtggctctcagaatgaagcaaagtggttattctactggttggtggggtggtgatactattccatatataatttgctgtgaacaggggactagttcaagcaattcaacagggatagcttaccgtgcaaggcatcctgatgagttgaaaaaagatgaagggaaatggatgattgacattgattactacttgtcacagcagatccatccagttgtatctcgattatgtgcttcaatacaagggactagcccagagcggttggctgattgtttaggacttgactcatcaaagttccaaagtaaatcaagtgtagctgtcagcaatgacaccgctaatactctcttatttgccgtagatgatgaggagagatatcggggatgtgagccactgacattgtcgtgtccgagctgttcagccacttttacctgtcctgctgtattcagctccattcatacaattggtgagaaaccaaaaaaaatgcaacaagaggaatctactagcaatttctggctaaacgttgcg

SEQ ID NO: 25575 - DNA, 496 bp, Gossypium hirsutum
  Clone ID: LIB3584-034-P1-K1-G7
cccacgcttccacccacacatccaatttctttaatttctttttgctttcatttcttattttgcgagcggattacatcaacaatttcctgtgttcaacaataataccaatcccaacaagcaacaagtgaacttataaagttttaataatctcacattgtgattctactcttcaatctctcacagataatgtacaaaataaccccacttcattccctaaattgcttactgtttttactttaaaagcattttctgataatacttaatctattatcagtccaaaatctatacttgatatcaaaccctattcagctttaaaaaaccctttttggtcttaatcaagtactcctaaaacctcacaaccttaatccaaacacaaacttcattccaaacggattattcttgccatttattattctttcaaacattattactttgatcccaacttaccaaaacctctccttttttgttcacaacttaagatccaaatcccatcttt

SEQ ID NO: 25576 - DNA, 449 bp, Gossypium hirsutum
  Clone ID: LIB3584-034-P1-K1-G9
attccccggcgaccgcacgcgtccgaacaatttgcaatctcaactcaccgtttctcactatttgattctccttaaaatcataactccgtgagaggagtaataatcacaagtttgttgcacactaactattctaccctcatctaaataagatttttactaatcagctttctcagaatgcatactcctgagtttaagtcagatttactcctatgcctactgacatcatcatcatatctactcgtactcaaaatattcttaatgagaatggtacaatgattacatagttcacttctgttgttcataaacaattcaagtttcctgagaacagtgtttatctctatgctcagaaagttaacaacaccaatcttttctccattacacaggcctacttcctactatacaaactccttgcaggcctctctgttcccagctctttctattgatttctc

SEQ ID NO: 25577 - DNA, 498 bp, Gossypium hirsutum
  unsure (1)..(498): unsure at all n locations
  Clone ID: LIB3584-034-P1-K1-H4
cgtccgatcctatcacaatcaagagatttaatgcccaaagcttcattcttacatgatcatgacaacggaaaatctgagagagttatgtttcaagctctttggtattcctctcattancaattctgttccatcataccctactgtctctcctattaatcccactaacattgcatcaaggccatgcttaatctgcaccaaaccaagctcttacatttacatttgatcaaaattctgagcatccaaaactctcactcttcgcatagaactctcctatttttaacacactaagaacatcatttaaagtagttcaacctaatacaattacttctctgagcagatctcttaccccccctactacccctttcacccattgcctacatccccactctttccttctcttccctccattctctatatcatctacttccctttacttttccctatttatctcttatacgattacctccccctccaaaataacttcttttatttcttatc

SEQ ID NO: 25578 - DNA, 239 bp, Gossypium hirsutum
  Clone ID: LIB3584-034-P1-K1-H7
cccacgcgtcgcacctcgccacctcgatgttcctactatatcaaagtgaaaagatgaagattagaatgaaaccaaaaaaattataagcaggttgtcaatgtttatttgtgctttggttaagatacaagctgacggtctacacaattacatccattgattctatactgctcattgtgcgatgtctacacttaagtcattgcttttgctgtgcagaacttgagctacttacattatattgt

SEQ ID NO: 25579 - DNA, 569 bp, Gossypium hirsutum
  Clone ID: LIB3584-034-P1-K1-H9
gctcttcctccattcaatcatcctgcaccgaatcgaatcaagagtaatggtggaaatgagagactgagggttggttatgtcagcagtgactttggcaatcaccccttgtcacacctcatgggatcagtatttggaatgcacaatagagagaatgttgaggtattttgctatgccttgagccaaaatgatggcactgaatggagacagcgtatccagtctgaagctgagcattttatcgatgtctctgccatgtcatcagatgtgattgccaaaatgattaatgaggatggaatacagatacttatcaacctgaatggttataccaagggtgcaaggaatgaaatttttgccatgcagcctgcacctatacaggtttcatatatggggtttcctgggactactggggcagattatattgattacttggtcactgatgagtttgtttcccctttgtgctattcacatatttattcagagaagcttgttcatctcccacattgctactttgtgaatgattataagcagaaaaatcgtgatgtgttggatccaacatgtcaacacaagcgatc

SEQ ID NO: 25580 - DNA, 491 bp, Gossypium hirsutum
  unsure (1)..(491): unsure at all n locations
  Clone ID: LIB3584-036-P1-K1-A3
atcaatgagtccttctccctactttgatcagtctctcttccgatttgatgaaaagctaatctctgcaactgaccggcccagacaatcgacagatcatcccatcaggttcatttctagaaggcaaccaaacattctcaaatttaagatcaagacaggccctgaatttggtggcgcggatggccggagcaaaaagtattcgcatttcctgttccatcctgcttggccattggctctctccttcatccaaccatctttgttcttgccaccgtcagcagtgaatattcacttccggcgataagattttagtaagtatttgctttgatagccactatcttctcctcccttnttgaaatgccctgagctagttttggagtttgataagtattattttgtaaatttgatacttaggtagttgatagttcatgactaaatgggtaaattatagatgattgtaaccctacccaaactgtaaaaaactatggtgcttttct

SEQ ID NO: 25581 - DNA, 612 bp, Gossypium hirsutum
  unsure (1)..(612): unsure at all n locations
  Clone ID: LIB3584-036-P1-K1-A6
aaagaaatcagattatgtgcaagaaccaatttcaaaggagaatcttgaagggatttggaacaaaatgattgaacttaaaagacctgcgttgactttgaatccttatggtgggaaaatgagtgagatttcggagttcgaaaccccatttcctcatcgagcagggaacatatacaaaatccaatactcggtgacttggaaagacgatggtgtcgaggcttctggtcgtagtttagatcagattaggaagctttatgattatatgactccatatgtatcaaaatctccaaggagttcatatctgaattacagagatgtggatatagggattaatgaaaatggcaatgcaagctactcagagggtgttatatggggaagaaagtattttaaagggaattttgagagattggtgcaagtgaaaagtaaggtagatcctggtaacttttttagatatgaacaaagtattccatgtcttggatcttggaagagtataacggcagaataaaagcttttttaggtatatgaacctcattatttctatctaatctttggttatttgtagacttaatatctaaaactatatgtngtattgtttgggtctacatatatatatat

SEQ ID NO: 25582 - DNA, 221 bp, Gossypium hirsutum
  unsure (1)..(221): unsure at all n locations
  Clone ID: LIB3584-036-P1-K1-B2
tgtacaagacgtcgtgaccgagntggcgccaagcctgacccgctttagcctcgccgttcaggaattctagncgttgaggttttctctttcttgaaaaaaaaaaaacaaaaatcacaatcaaaataacctttgagtacaataaaaaatttacatttctaaaaaatttcttttgggggtctgatgttattagtttttttaccaatgacccagaaattttactt

SEQ ID NO: 25583 - DNA, 405 bp, Gossypium hirsutum
  unsure (1)..(405): unsure at all n locations
  Clone ID: LIB3584-036-P1-K1-B6
cccacgcgtccgcgcactgcaagatagcaaaatttgagtggaactttttgagacaaataatgaccattacagagaacagcttcaccactctcaaaaccagattaaagatagagactgtcatgggcgaagctatagctcaggttcgggagataactgatcacttgcaaaccttggcagttcaggctgatatattgagcttaaagtacgattcggaatcagaccgaggccgaagcttagcttggcttcttaagaaagttaagactttgggcattagggcgaagtcgtatatgtaatcatccggtctatgtaaagaaaattttcttctagtgaagttctaatgaaattgaattggaatctatntaataaaaaaatatctattatttataaaataatttttatgcctat

SEQ ID NO: 25584 - DNA, 297 bp, Gossypium hirsutum
  Clone ID: LIB3584-036-P1-K1-B8
gaactcatactcgcacaacccacaagctagacctcacattcaactgtcaaaattctcatcgcggggccagcgtctacacacatcattctatcactcacatacagctttcaactgttaatataactcacaacactcttatggcatcgccaaatactaccattccagcaactccttcatctactcctttactaaaaccttaatatcaaactactccatcaataacaccacttttcacaaataattcaagtgcaggtcactttccttcagaatcactaaatagcccatcaaaaattgtta

SEQ ID NO: 25585 - DNA, 477 bp, Gossypium hirsutum
  Clone ID: LIB3584-036-P1-K1-C4
gaccacgcggacggacaatacagatgacagtgatgaggagatggcttctggccaaaagagcaaagcttcctcaaagttgagatcacagctcatctacacttcggtccaagaaaacccggatagcatataatagcttgcctgacgacttgcttgaccagttaaaatacgagccactgaacttgcttgatcggtataaaacaagatccgtactttgatcatcttaaaatctaaagcggaagcaagattcctactatgaaccatagttcaaccctgagggacgcttgataattaacgagggaaggaagccaaaaaatggtgctgtatcacaccccgattcatatagaagaaatgaagtgccaagccattttctcggttggctcttcaagaaacaaccacaagaaaaggaaaacatcagagtctggatgggcaatacacggaaagcgagtatgcttgcaagaaggctggtggggatgtaaa

SEQ ID NO: 25586 - DNA, 616 bp, Gossypium hirsutum
  unsure (1)..(616): unsure at all n locations
  Clone ID: LIB3584-036-P1-K1-C8
aattgtaagtgatctcttcaaaagctcctgccaatccttgaatatgttgtgagatatgacagagaatagatctatcggtatcatttgagactagtttcttaataacaattagtgagtcgccctctaagactaccttcctaaaacctatatccagggcaaaatagacaaccctctcacacgctctcgccttagccacaatagcatctacgatgcccaccatcgggtacgtacatgcacccatgattagaccctcagaatccctaactagtaccgctgaaacagaaagattagaaatacttgcgaaggaggcatcaaaattcagcttaataaccccgggcataggaggtctccacagagcattccttttcatactaacagtcaagtctttagctttagcaaaacttaagtcctgatagtagctctgaataaaactaaccagatcatggagctcaaagtttaaccccttattgactagtttatttcttttgtaccagagagcccataaagagatagcactaagtntcttttcattcatattcattgctagaaaggcactgacaaaaattgttgttccttccgaggtaaaaacaccgaaatccattgagagcttcaaaag

SEQ ID NO: 25587 - DNA, 570 bp, Gossypium hirsutum
  Clone ID: LIB3584-036-P1-K1-C9
cccacgcgtccgagaaactctattagtattcctatggcaagcatatattatcttggtgtgttcacgttctctcttctgtaagtgtttcatgggcatatatctccacatcaattatctaacttgtctgagggaccgagcaacctttttagctcggacagtgtagggtgagtaaatatattttaattctgtgattactacttaataattaaaatttattttatatgaatataaatataaatattaatctttaatatctaatatattttattatctttggcattttcagtatttgctttgatttctgttttatttttaggtttaatggtagaggtcagcgacatgagaaaagattgttggtaggaaatgcagatgcaaagcgcccacttctgaatggtcttttgattcaggatcatgatattcaacatcatacgtctactacataacatattacggttcttctcctaagctcaaattctcattttctacataaatttgttcgaacggttaggttagatccgatataccacactgactggaacgctgtatcataatattagaaaatgaaaaatg

SEQ ID NO: 25588 - DNA, 606 bp, Gossypium hirsutum
  Clone ID: LIB3584-036-P1-K1-D12
cccacgcgtccgcccacgcgtccgagcatatcaagccattgatctttcaatccttgttcttctctttggaacaatggtggtaagtggatacctcgaaagagccgatgcgtttaagtatttgggtaagttattaacatggaaaagcaaaggtgcaaaggatttgatttgtaggatctgtttaatttcagctatttcaagtgctttgttcactaatgatacatcttgtatggtattaactgagtttgtattgaaaattgcaaggcaaaataatctcccaccacagccatttttgcttgcacttgcttcaagtgctaatattggatccactgcaacacctattggtaaccctcaaaatttagtgatagctactcaaagtggggtttcttttggtgaattcttaattgggattctccctgctactgtgttgggacttgtatgtaatgctttgttgctcattttcatgtatggtgacttgttatctgttaagaaaggtcaacaagattcaactgtagcatttaatggtgatggtgttgatcaccaattttcaccagctacaatgtcacatgtggaaaccacaaatgtggactcagttcatcatcatgaaag

SEQ ID NO: 25589 - DNA, 338 bp, Gossypium hirsutum
  Clone ID: LIB3584-036-P1-K1-D8
tccgatgcacttcactaaagaggtaccagctcagcttgggaactatccttatatctaaatccggaggagtctccagatatatgatcacacatacactgttttcctcccctaaaccacactcactaaaaaagaccatcattgcactctctactgcatcacatcaaaagactgctaatattcatcttcataacaacagactacttatgatattggtcttcgactctaacacatacttcccatagcaacatacattcaactctttttattccaccaccaattaaatttttaacattctctttcaacaacatatgaacagcacattctcttactctcctaat

SEQ ID NO: 25590 - DNA, 390 bp, Gossypium hirsutum
  Clone ID: LIB3584-036-P1-K1-E4
ggtagccagccctttctcttaataccaagccttacaatccctcccaaattcgccccgaccaaagtcttcggcgggtgcgttcaatcaccggcgtgccaatctgctcatgtaattccttatcctcgcaatatcgctccttgcctctatgccccaaaaagattagcgaatacatcccctaataaacggccaagcaatggaaaggcctccccatcacctgtaaactcacgggacagaaccgtcttgcgaaagtcaccagtgtcctttccttcggcgtactagtaatcaaagcgttcatggaacctgccagggttttgagaaaaacctagaacatccagcacaaccgtaacattaaacctcaacgacattcttcaaaatccctaatgtactgac

SEQ ID NO: 25591 - DNA, 433 bp, Gossypium hirsutum
  Clone ID: LIB3584-036-P1-K1-F2
cccacgcgtacatgaagttcgaatccgatttatttacacctctctctgttacagccacattacattttggaaatgcactgttcctactgcttgtctccccacaattcttggtcacgaggccgtctgagtggtaaaaagtttgcgtgacaatattaacgaggtatcaccaacagatgttgtcattccaacttttttatcagaatgaggacagtaccaatattgcttttcaacaaggagtcatttatgttcaaaatttccattcaagatccatccttggattcctagatattagaacagcagattctctcaccttaacggatacgtcttatatcatttcctattcctctccattttctctcaatacacggttgttgatattaaccatgtactcaaaattgatcccgcaatccctttcaaacagggtcatcctttt

SEQ ID NO: 25592 - DNA, 542 bp, Gossypium hirsutum
  Clone ID: LIB3584-036-P1-K1-G12
ctaactagcagtcctgaaatatctagtactcaagataaggatgttggcatgcaaacatctttggagtacagtccgccagatttaaacaagggcattacagagatatttgggaaacttgtcaacatatatagagcgctgggtgatgaccgaagatcatttagctactacaaggcaattgcagttgttgagaaattgccctttaaagttgaaagtgcagatcaggtaaaagatctgcctggaattggaaagtcaatgcaagatcatattcaggagatagtgactaccggaaagttatccaagttgcagcattttgaaactgatgagaaggtaaagacaataactttgtttggtgaagtttggggaattggtccagctacagccctaaaattatatgagaaaggacatcgtacattagatgatttgaagaatgaagattctttaacaaatgctcaagtgataggattgaaatattttgatgatattaagacaaggatcccacggcatgaggctcaagagatggaattagttttacagaaagtagc

SEQ ID NO: 25593 - DNA, 453 bp, Gossypium hirsutum
  Clone ID: LIB3584-036-P1-K1-G4
gcgactactcgtacatttctagatcgcgagctacaggtctaaagcatacaagctcacgcacgcgaccatgcggcggtggggttgtgttatatagaaacataaaactaatccactgtccacaactttacaactgcgaaaccgctaaaactacccaactaaataacttaatagcatatcagcacatccccatttcgccagatagcgtaatagccaacacgcatcgacctatcgaacattcgaacagtctcactggctaattggacactcccactagccctgtatcaacccattaagctctggtggtttcgcgcatactcacagcttcacttgttcacttgctagcgccctatcctttggttttcttgctttcctttcttgctatgttcgcacgttttccgccttatagcttaaatctgtaaatcgctggctgtctccaaggtaccgatttactgc

SEQ ID NO: 25594 - DNA, 296 bp, Gossypium hirsutum
  Clone ID: LIB3584-036-P1-K1-G7
caattttatgagggttaataattgaatagtatttttctataaatatttatttacagagcaaagagggagaaatggactaaattgcaagaatcccacttgatgaaattacatctttaaaacccagatttgtgcaagatttcaattacccaacatcaaatctcctcagttcttgtcatctttttttagaaaaaattgcggggctaatacattcacatttatagaggggaaaaaccttttttttatttatattatatatattgtctaattcttattgatgatacgaaaaaacaatgttt

SEQ ID NO: 25595 - DNA, 595 bp, Gossypium hirsutum
  Clone ID: LIB3584-036-P1-K1-G9
gcttactgaggtcataacatcagctgaattccatccaattcattgtaacctgcttgcatatagcggctgaagaggctttattcgtctagttgacatgcggcaatctgcattgtgtgattacagtgcaaggatatttcaggatgaagaatgtcatgggtcacgatcattccttactgagattgttgcttccataactgatataaagtttccagttgatggacgtcacatcttaagccgtgactacatgaaccttaagctatgggatatgcacatggattcttcaccagttgctacattcaaaattcacgaacacttacgcccgaagttatgcgatttgtataacaatgactccatatttgataaatttgagtgctgcctcaatggagatggacttcattttgcaactggatcttatagtaatctcttacaaatcttctttcatagtggtgggagtgactaggggtcttctatagaagctagcaaaaatcccaacagttttaaaaataggaagccactttcaagggcaagaaaatcatttctaagtaaccttacccgcgggttttacaaacaaggtcactaaaacacaaacgttgtt

SEQ ID NO: 25596 - DNA, 445 bp, Gossypium hirsutum
  unsure (1)..(445): unsure at all n locations
  Clone ID: LIB3584-037-P1-K1-A2
accactcctacaaatcaacttcattaaccctaactacactncaatacaattcccccatataaaaccacaggcattgcgcaaaatattgcaaaagcgttcacctccacaaacantaaacctctattacacatccacacactcctctcctaatttacaatacacttctttccacacttacattcaccctttctttgatcaattgagacacccaaatcttcaccttccaacactccttcctctaccacctctcttcaatttcaaccctcaacagctctctactatccctccacaacttgtcaacaaacttattccagcacatgctttcaatcataatttctacattgcactgcacacttaacaaccattccaaatttcttaggctcctactaacaaacctgaggccatttcatctttatcaacataagcaaaacatccctcacctcac

SEQ ID NO: 25597 - DNA, 292 bp, Gossypium hirsutum
  unsure (1)..(292): unsure at all n locations
  Clone ID: LIB3584-037-P1-K1-A6
gcgctaactctaaattcatctctattcttctaangcgcttttacatacttccttaacgaaacacaaatccaagctcttgtgttacaaagacacggtcttccaaaacaacacattacttgaactgagacataattctcaacactacaaaaacttctaaatctatctaatctaacacatccaaagccgattgacttggtattcatttatccactttcaaatctataattactaaattctcgaatcactcatataaaaatctactaaatttgatacaacatttcctctatcaatc

SEQ ID NO: 25598 - DNA, 111 bp, Gossypium hirsutum
  Clone ID: LIB3584-037-P1-K1-A7
tatccaacaaccaccttattctatcaatggcgaacttattagcactgtcgattacactctaaacacgaaaccatccaatgatttaaacatggctcaacaaaaaatctacac

SEQ ID NO: 25599 - DNA, 564 bp, Gossypium hirsutum
  unsure (1)..(564): unsure at all n locations
  Clone ID: LIB3584-037-P1-K1-B2
gaaactctaaccaccggagtgcaccacatgggtttgccagctataatatcggatctacttcaacaatggtgggggcgttgtcctttagaccatatgtanatccatggacaatacctgcttctcaaaaccagcagttcaactgacaattacagccaccatcccaactcaaatcctgacttttgcaatagataaaggaatctgatccaatctccagatttgatgaatgttgacaggcagttatactgatccctttctgcagtaaaggcgtgtaaatggacgcaaaatttcttttgactcaattttcattaggatgctacaatgcacaagcaacagctggaagttacgttctcagcatggaaatcatgcaaagataaataggaaacgaacatctgcacttttcatagtatgtaatagtaatatggttgaacaatgcaattctttgcatatattttgcgcactttttaaggccacattgctttctgttgatattttagttctacagtgtagattaaatatatgaagatttgcttgacggatagttgatctaaaccgatcaactataac

SEQ ID NO: 25600 - DNA, 436 bp, Gossypium hirsutum
  unsure (1)..(436): unsure at all n locations
  Clone ID: LIB3584-037-P1-K1-B3
gaagctttaacaacanaagttcaccacatacgtttcccatctatactatcgcctctactacaacactcgcgtacttgttatccttaatactatacttccactcatcaacactacctccatcacacaaccaacatttcaacccaccaatacatacaccaccccaactcaaacacttactcattctaactatatataaaacacaaccactctccacattcaatcaatctgtacaggcttttatactgacccctcccttcagtaaatgctaatcaaatatactcaaaatatcttcagactcaacaaccattagtactctacaatacacaagcaacaactcaaattaacgtcctcagcatcaaaatcattccaacatcaataagatactaacatctacacttttcataaaatgtaataataatatttttctaacaataca

SEQ ID NO: 25601 - DNA, 330 bp, Gossypium hirsutum
  unsure (1)..(330): unsure at all n locations
  Clone ID: LIB3584-037-P1-K1-B8
naaaactttacaatattataaacaatcacgacacaacatcttctacaaccantactataacaggagctggggtcaactgtgaatagaaaaccactactgtgacactagctcatataaacccccgaaccacaacccataccttaatccatatcgtctcatcttcaaacatagacacttcaaaaatgtctagctgcattctcaacatcatccataaaccccaaatcgcataatgccttatcacttaagaaacctacactatcctatccactgatcgccaaaaacaacttccaatgataaaacatgttaatactcaacctcttcataatacaa

SEQ ID NO: 25602 - DNA, 427 bp, Gossypium hirsutum
  unsure (1)..(427): unsure at all n locations
  Clone ID: LIB3584-037-P1-K1-C10
nacancttncgtccacacattcctccacactttcaaccnattctatttgtacattcagtaggagatgtggtaattgctaaaaatctctaaaaaatcttacttattccccccttcacttacattctcatcaatatctattttcaatcactctttttccaatatcatcaaaaaccagccctaacacaccaacttaacctaacatcatcatcatccattgcggcacccatctatctatatactttctctgtacccctaactctgatcctttctatctttgcaaactctcaatgaaatcctctttacactttaataaaaacttttacctatccatataacatactccagatctttgatcctaaccttactaatccttttactttgtctcacatcacttgtaaccaaaataatcgatttactcaactatatt

SEQ ID NO: 25603 - DNA, 580 bp, Gossypium hirsutum
  Clone ID: LIB3584-037-P1-K1-D1
cttaataattcggttttcggtagagttaaaagcattagcttatcgtcttatctgaatggtacacttccgactccgtggctcccactccttcaccagctccatctccagggctgttgatagcccccagtcctatatcttcaccggctcactctccagcaccatcacccgaggaacatcatcttctgccttgtcccaactgcaaatctcctgctccttccagtcatagtcctttgcgttcaccagatccggggagtggttcctaccctacttttcctcctttggtttctcctgcaccgtctagtgcagcaacccacccccctcctccttgttatttaccaagacctcaccctagccaaacttctaaccaccaacctgtaatgagtcctctatcaaagttgtccccaaatctaccacctttaccttcagtgtcttacggctctcgtacagaccagggtatgaacggtatgaaaggtccagtttctgcaccacctgcgcaatcttcatcatctatagcaacaagtgttctccccaagcaactctggttattggcattcttagggatcttgacctttcatctcca

SEQ ID NO: 25604 - DNA, 237 bp, Gossypium hirsutum
  unsure (1)..(237): unsure at all n locations
  Clone ID: LIB3584-037-P1-K1-D10
aagacaaagcnncanannancnnnnnnnaggccgacaaaagaaaacgaaaaaaaagaagaggagaaacgggcgannncnnnaagaagncgggnnnnagnnnnnggggggaaaaaaangnngggaggannaagcagngcgaaagngncnccgccggacgagcnnggggcggccggnngccgaaccccaacaccnaagaaaacggcggacgcncnggngaaacggnnccnngagacgaa

SEQ ID NO: 25605 - DNA, 568 bp, Gossypium hirsutum
  unsure (1)..(568): unsure at all n locations
  Clone ID: LIB3584-037-P1-K1-D2
gctgctcgttctcatgtagtaatggatcatttcagtactgtaagggcaaaagtgctcacagcatgccaatcaagagacactgacaacctagaaggagaagagaatgtaaaagaaaaagaagagacgtcatatggttctctaatgattgagaggttaactggaagtgaaggacggatagatcatgtacttcaggataaaacttttgaacatccatatctacaagctattgggtcacatacaaactattggagggattatgatactgccctgttcattttgaaacatttgtatcgagatataccagaagatcccaacttcctgggggagtctattgaaggcagcttgaaagatgagaatgcatccatgggctggtctgatgaaagagagactattgatgaagaacttccattgacattctccgccagagatatggtgaaaaacttctcgaggaaagctaagaaatntataaagaagccttgaatggcaacagatntcttttcttgctgtacgctagaaccaaatgctagctgatctggtcaagaagtgatgcactactccttcgtcatac

SEQ ID NO: 25606 - DNA, 195 bp, Gossypium hirsutum
  Clone ID: LIB3584-037-P1-K1-D3
gaccaccgcatgcctgggacgagacacctacaacatagagggacctaaaaacaatacagtgaccgacgagacacaacatggttgactagggaaacacaggcgaaccgcaactgaaggaccgagcgataaagccctctatgatcagacggcggaacatccaaaaggacaagcacacgagcgccacataccaacata

SEQ ID NO: 25607 - DNA, 287 bp, Gossypium hirsutum
  unsure (1)..(287): unsure at all n locations
  Clone ID: LIB3584-037-P1-K1-D5
gtagnacaacancgccagccgccccacaagaggaaccaagccgaccgccgccagccnacgacanaacggcgctagggtagcaccaacaaaaaacaaaccacccgccgnncaacaacaacgncacgacggaaaaaaccccggcaccacacaaaagaaccgcgcagcacaacacccccccgccagcaggcggcaaaacaacgaagagggcaccaacgaccgcccccaacaacagcggagcaagaaggacgaagaagacgacccgcgcagcagcgcaacaagaaccgcgg

SEQ ID NO: 25608 - DNA, 555 bp, Gossypium hirsutum
  unsure (1)..(555): unsure at all n locations
  Clone ID: LIB3584-037-P1-K1-D7
ctncaanctctnacctgnnnaancatctaaaactataccttaaactttatggaactgggttgcgcagagtgggtgtgaatgttagataagggtacattttttatataagtatgttctatctttttaaggtctaccatgtatttggagtctttagagggtcatatcatcataccatgtttgaaaatgtgcaataactttttagctagactttgtgaaaattaaacaaaatggacccttatttgtattcgacagtaacataggttactatcatttctaaacttatctaaattgaagtgtaatttttatatatgtataatatttcctaggctggaaatttgaagatgtaataatatcatttttttctatttttattagttgaataatagtagtagattgtatttcttccattctagtatttctagaatatctactaggttcagtagggaaaataggtatttgatctgttttcataccttatggggttggggaatttggactaatattatcctcttcttcctctatttgagaattagaaggtaaaactagattaatcat

SEQ ID NO: 25609 - DNA, 511 bp, Gossypium hirsutum
  Clone ID: LIB3584-037-P1-K1-D8
ctcacacgtccgataatttaaaacatcctagcttgctcatcatgccaaaagaaacagagaagagcactgggcatgccaaatattatataaaccctccaccatcaccattgattgatgcttcatagctaaagaaatcatcattttacagagcattgatagctaaattcattgcaactatgctctaactttacatcacagtctagactgacattggtcacaagaaccaaaatgctacctcctctgactcatgttctgacataggccactatgatatttctactgacttagatggcatgatcttcatccttgattactgaactgctggaatttctaaatgtcatattaacccaacatgaacatttgctctgttttttgctcgtaaggactcattgatccgagccattacatacatgcttgctcagacattgggatccatatattgggtagagctggttaatgcattccaatcaaaatactacaacatgtatggaagtggactcaacactctaac

SEQ ID NO: 25610 - DNA, 183 bp, Gossypium hirsutum
  Clone ID: LIB3584-037-P1-K1-E4
gcgacacgccttcgtttacgtcacttccatgtccaatttcttggcagattctaccttctgaaaagtaccgggactttgggtccaatatcggcacagtagacagatcatcattctacaaggattaccagatcgaccactatttcactgtcactacttatacacttcaatggtgtcgccatcaca

SEQ ID NO: 25611 - DNA, 434 bp, Gossypium hirsutum
  unsure (1)..(434): unsure at all n locations
  Clone ID: LIB3584-037-P1-K1-E6
gggcgggcccaaacaagacncaagcagngaggaggcngangnngagcaggccccgncaacagnngaacggggggcgancaaaagagaacnnagacaannnananagganagggcncaacncaaaanaccccggcgaaaggggaccgngccncgnncngcnacnncagagcggnngcnnngnngcnngnnncgangggcacagagacgganngnnncngcnccaaccgcngcaagnnncangangnacccnnngacacagnaannggaccangcgnngcnacnccnaaacaagggaggnacnnaacacgncngnaccccacncnaggnacaaaaaccagggccaccngnggggaagcccaaagcacaaagngacanggaaggacaaaaaagaaaaaaagagaaaaaaacaaccaaaagaaaaaagaaaaaaacag

SEQ ID NO: 25612 - DNA, 467 bp, Gossypium hirsutum
  unsure (1)..(467): unsure at all n locations
  Clone ID: LIB3584-037-P1-K1-F10
ggcgatccaggctgatataatcgtctcgaaaaacggtaccgttaagacgatcagctaggcgagtgagagggcgcatganaatagtactctacagatcatcatttatgtgagggcaggaaggtacgaacagaatgatttgaaggtggggagaaagaaaataaacttgatgttcataggggacggtaagggtaaaacaataatttcaggtggaaaaagtatttttgacaacatcaccactttccacacggctgcctttgctgcaaccggagccggttttattgcaagagacatgacattcgagaactgggctggaccagctaagcaccaagcggtggctcttcttgtctgggcagatcatgccgtggtttaccgttgtaacattatcggataccaagacactctttatgttcactccaaccggctattctaccgtgaatgtgacatttatgggacggttgatttcattt

SEQ ID NO: 25613 - DNA, 438 bp, Gossypium hirsutum
  Clone ID: LIB3584-037-P1-K1-F4
gcgcgcacgcgtgctcccacgcgtgcgaccacgcttcctacagagctctgcaactaaagtgaaagatgtggcggataagagcataaatgggactagtgcttcttacataacaatcaatattgattgcaacatagactcatccttgccaataaattgtgctgcaaaatgttaatttacaggaacactgagatagaactgccaaagctatctgcaacaatgttaaattgactgataacggaactgtttccccacaatgttaaattggccttcacatgtggaataatacatatactatatatataaatgtgtgtcaatagtagaatcatagattatttgtttacacatatggacaaatcaacaaatccgttttagctttacatggaatcagaattgcttcgatgactcacttacacagctacttaagatctttctcattac

SEQ ID NO: 25614 - DNA, 480 bp, Gossypium hirsutum
  unsure (1)..(480): unsure at all n locations
  Clone ID: LIB3584-037-P1-K1-F7
gccacacgcacagagacgcatccgcccacgcgngcaaccacgcaggaaagccacgcacagagggacagggaggccagcgaggacacacccgagaccacacgtgaagatgaaaagctgcataccaaattcaaaaaaggagtgaaaattaaggactgactatacgccatggagtgaacaacattcacacactcataaaacaatcaaccgatgcgataggtgtccgaaagaacacgatgcttgcatctctactgacaaacatgtggagagcaaaaacaaacagcggcataaagactcgcatgtatgacaagatcatgccaatcatgataaacataatgagccactgtcaagctagatccgcacccaacatgcgagtgccaagcaagaggcatatacaaggtctgacatcatcctctatattgaagatgatccagaggaaaattgtattatatgatctgaataacatggatgaaagaagcattt

SEQ ID NO: 25615 - DNA, 546 bp, Gossypium hirsutum
  Clone ID: LIB3584-037-P1-K1-G12
gaaacgttaggaggccttatgatttggttgacagcaacctttgcagttctgcaaaatggaaaagctgaggaccaggcagcatttgcgtccacgatgggtctacttctgagctattctttaaatatcactagtttattgagtggtgttttaagacaagcaagtcaagctgagaatagcttaaatgctgtggaacgtgtaggttcatatatcaatttgctttcagaggctccagatgtaattgagagtcaccgtcctccacctggttggccttcatctggttcaattcagtttgaggatgttgtcctgcggtataggcccgaacttcccccagtcttatgtggattgtcatttactacttctccaagtgaaaagatagggatagttggaagaactggtgcaggaaaatccagcatgctgaatgcactatttcggattgtagaactggaaaaaggaagaatcttgatcgatggttgtgatacttcgagatttggactctcagaattgcgaaaggctcttagtattataccacaatcaccggttcttttt

SEQ ID NO: 25616 - DNA, 525 bp, Gossypium hirsutum
  Clone ID: LIB3584-037-P1-K1-G2
ccttcacataagaggcccagaaagggagcattttcaatgtcaccgtcgcccttgatgcaacaattgagctgtgaagtagtgaacgtgatacaagatgggtcaaagagtgcttgggagaagaagcattggatgaagatgaggctagtgcaattggaagagcagcaagtgagctaccaataccaagcattccagctggagaagcaaaggctcaagtgggttaaattcagtggcaagaaagaaagggagatggagagagcaaagctggagaacgaacgaagacggctcgaaaatgagagaatggtgctgcttgttaagcaaaaggaattggaattggttgatgttcagcagcaacatctgtctcagcagcattcttgtagcaagaggagagatccgtctaacataagtggatgaaaaatagagattctagttttagattttagatatagatacttaaattacatgaaagtttgttctctgcttttgtattgtcaaaatttttgtttatgaacaaacatctatgttttc

SEQ ID NO: 25617 - DNA, 493 bp, Gossypium hirsutum
  unsure (1)..(493): unsure at all n locations
  Clone ID: LIB3584-037-P1-K1-G7
cccacgcgcccgaccacgcgnacgcccacgcgaacgcccacgcgaacgacccnancacagcgggggcggggggaaaacccacgcccncangccnncaaaannnccnggggaacacgaaggcaacagccgagggagcagcagcacaaacggcacnacaggaggagaaaacngaagaaccagngaaggagcaagaagcaacaacagangaagnagnggccgaagccccggcagcggaagcagcggccgaagagccaaaggaagcggagccngcggcggaggcagncgaggaaccggaagccncgagagaagcggaaaccaaggaggngagagaagaaccaaaggcngnnacagaggagccagnagnagaggagaccccnaaggaaacagngccagaaccagnngccgaggagaacaaggaaaccacagaacaaaccgnngaaaccaaaaaaaccacaaagacgaaagaggcagcagcagaagcacccaaagaaga

SEQ ID NO: 25618 - DNA, 437 bp, Gossypium hirsutum
  unsure (1)..(437): unsure at all n locations
  Clone ID: LIB3584-037-P1-K1-H10
cccacgcgtccggaaggcccgaattacagcaggcctacattgcccaaacccgaaataaaacagaggccgggaattacaaacccagtagtccaaaacaatttcagaaacccctanggtttctggggtaaacgttcacgccgcaaccatgtcctccgcacgagccgaatctccacgcgcgccttcacctgcacagcaagaaaggaaatatatggcaagaaaatcaaagatttgcaaaatcaaattgatatgaacagatttgcttctttatattgtttcattatggctataaaaagccattaaagattaaaagggattagaaaatcaataaaaaagtagcatttcgcacaaaaagaggaaccgaaaatacaaatagagagttcaatactgagaaaacagaaatcaattcaaaaggttgatatcaacagttttttttcctt

SEQ ID NO: 25619 - DNA, 285 bp, Gossypium hirsutum
  Clone ID: LIB3584-037-P1-K1-H11
gttacgcatttattacagctatattacatacaacatgcttaatgtatatgggtattgggttatgctgggggaaaactttcttagtagcgtatatctttctatgattctttaggtccattggagcactggattactcagcatctatcatcaacttacttggaggggcttgagttcccatatcaccttgctttaatattttgaaacataatgtacgtatggcactattgaacactaaagaaatacgagtttcagattcaaaataaagtctcaataaatatggttctt

SEQ ID NO: 25620 - DNA, 447 bp, Gossypium hirsutum
  Clone ID: LIB3584-037-P1-K1-H2
aatcaaccaccttttatctagatcagtaaaaaatcatactttttttcttttcacacaatcaaattacattaacaatggtcgatcaataacacctatcctaacctaatccttctttatccttatatacaaaaacaatgattactctaacaatatatccctacttgctcccatttcctccttcaccatacctattcttataacttttcaatacaccctaaagttctttactatttaacaaactgccacctggatcatagccgtgacaattgtttgtcttttgatgattaaagcaaatcttattcctcgggtcggaaccaatattaccagtgtcttgaagatcctaagcagaaagatgatactgatacgccttttataagggacattataattcctcatcactatactccaaaacttatagttcaccaagtccctactttgggataccca

SEQ ID NO: 25621 - DNA, 485 bp, Gossypium hirsutum
  Clone ID: LIB3584-039-P1-K1-B10
actaattccatggaaactactaacctggaatctcatcagatatatcaacaccaacaagaggttggtgacgattgcatggggcagccaagcagcagcgggaacgggggagacttggttgaaaatggtaacgaagaccatatgttctgtttgtttctggattctttgattaccgacaatcagcagcagcagcagcaatctaataatggcgacctttgggaagctgaaatcatgtctccaatggtggagtttgggaacccccaaaactacttcaatcatcaccagcagcatccttagcaaagctgccaaagtagtagatgcattttggttttacatttcatattataaattgaaaatggattagaaagtatcggtttcatttgtatgcttgggtggtggttgttgtattgtagtttcgtctctttggttggggtaaatgtcaaagcaaaaacttgtttgtttaagaaaaaaaaaaaaaaaaagggcgg

SEQ ID NO: 25622 - DNA, 397 bp, Gossypium hirsutum
  Clone ID: LIB3584-039-P1-K1-B5
cccacgcgtccgaggaaatctaattctccaaacaaagctcaagattaccctttctatacaggcactgttgctgctgcttaaaatcacttcacagtggttataatccaacatatctaccatacatgaatagtgacatggagatccgtggagagtagggccatgataaaagaacctgttctgatggggttttttttttttcttttttgaagggtgtttttttttctccttttttccttgaaaaaaaatcatatatatactagattttaactgtgaatgttatatatagactggatctactctatgatgtggctctttttttttcttcttctgtttttgttaattagatcgacttttgtctttctttttgaatcaatgaagaatggatagaagttttctt

SEQ ID NO: 25623 - DNA, 412 bp, Gossypium hirsutum
  Clone ID: LIB3584-039-P1-K1-F6
accaaacacagagggattggtaccgtgcttgctttagtgttgacccaatggtcataaccgacttggagactgcaatgcatgctcatcaatatgatgattatcgaggtggccgggaaagatgtcgtggaacaggaggaggaccacgaaaggagatttcacgtgcggctaccaattttacaggctaattggacttctcggcattgtacgagacggtaaacaaggatgaattttggggtcatcttgaatgatgtagcctcgcttaagcagatgctgaagatttacacagtgaagatagtgttgaatccttgcaaggtgaggttcagcctgtctcagtcaaggatgactatttagatgccacgtgctgtgatcctattaaggtgggacacggaatgggaggactagattgtcagag

SEQ ID NO: 25624 - DNA, 412 bp, Gossypium hirsutum
  Clone ID: LIB3584-039-P1-K1-H11
atagttctagatcgcgagcgttccctttgttttttttttcataagaggaagatagcttactgccagtgccatcaatataagcaaagttctgatacatgctacgaacacatcttctacagatggacacaattaacggtgaaagagaacaactaagagaatggcaattgaaactgtatgaagggcatcatatgtatgacaacagagacacttgataacactcaaagctggattttaagactgatgcttctcccacttgaggtgcttctcaactttccaggtgtagaacaggtcgctcctaccaaactatacgcaggcagttgtcttcaaaaaccggcacttaccactcctcttgagatccaggctgaaagtaatcataccgagcctgaaacacaacttctgcttcacaattttg

SEQ ID NO: 25625 - DNA, 399 bp, Gossypium hirsutum
  Clone ID: LIB3584-039-P1-K1-H8
aacatgggtaaagtcgctcaaggccataggaggtatttggagttcaagcagacaattttgctgagacagattgttatatagtcgagtgaatataccagtgcaatactggatctataagttggatccagttctcaaacactgagaatgaaacttactaaaggcgcagggggcaaccgaataagaagttggcgattcctgacaggcctaaagacgaggcttacttctatgccaactcagaagcatgcttgcaacaacgagatggccaactaatgatcacgtgagtcgtgctagcaggatctgttatgtctgaatgacgaatgcagtatggattgactagacgtgagcataatctatcctgaatcacagaaggtccttgacacgagtgaataatgttttaca

SEQ ID NO: 25626 - DNA, 524 bp, Gossypium hirsutum
  Clone ID: LIB3585-045-Q6-K1-A11
aaaatgcagaaaggcagtactcaaattgccctgattttggcttcacttattatctcaaatattgtagttttagttgtttcacaaggccaactaagagttggtttctactccaaatcctgcccaaatgcagagtctataatccgcaaggttgttcagaaagcagtggctgacaatcctaggaatgctgcaatcttgctaaggcttcattttcacgactgctttgttcaaggatgtgatgggtcgatactgataagaaatgatgaggatggtgaactcaaagcacaaggaaacttgggagtagttggttttgacatcatagacagcgccaaagcccggttggaaaatctttgccctggaattgtttcttgcgctgatatcgtttctttggctgcaagagatgctgtttccttggtcaatgggccattttacgatgttccaactgggcgcagagatggacgggtctccaagatgtctctggctaagaatttgcctgatgttgatgattcaatcaatgttctgaaatc

SEQ ID NO: 25627 - DNA, 334 bp, Gossypium hirsutum
  Clone ID: LIB3585-045-Q6-K1-A2
gtccgatattcgaactgcaatgcatgtaatgagtgaagtttcacatgctttaaacggtgcaagctaaccgccagggtgaggatataaccatttttgcatgaaaagtcaactccaattctcaatcgagaaggcaccatgtatatccaaaagtcgatcgtgaaacttttttttatctatacaggtgagtgcaaaaaaaactcttttgtcactttatcgtaaaatgaatgttactgaagaaatgtcatttaagtaatatatatgaatcttgtttatttgacatcttctgcatacataaaaaaatattgaacgtcttctaattcaaaacaataataag

SEQ ID NO: 25628 - DNA, 324 bp, Gossypium hirsutum
  Clone ID: LIB3585-045-Q6-K1-A6
cccacgcgtccgcccacgcgtccgcccacgcgtccgcccactcgttcttcagaggaggcaggtttgccttgcatcgcctgttgtttaacagtcaccccaagcacccaatggacctcttaatagcaagactgatgaaactcctaaagaaattcctttagtcagacaacaaaaagtaaaacttcccgcttcaccgaaagcttctaataaagatgttaccagcactgttaagaagcctctaggtgcaaaaagaactgtaaaaactgtaagacttgttgccagaaagcttacttaaaagccaagttaaaatatttatgatcaaaaacc

SEQ ID NO: 25629 - DNA, 469 bp, Gossypium hirsutum
  unsure (1)..(469): unsure at all n locations
  Clone ID: LIB3585-045-Q6-K1-A9
gagaaactaaaacccaaaaagattcctactagtttcttgctgagttccagattaagctatctgttttttttttttttttggttcattttgagagtttggggaggcaggatgattcagttgttgtttttggtcctttttgcggagggtgcaatggcgttccttctattggtaaagattgggcctttgagagagcttgtgataaagagcatagatcaattaaagatggggaaaggtccagctactgtgaaaactgttgcaggtactatgtctgtgattcttttatccagtctgatgagcattgttaagatccagaacaagggtgcaaagcttggaaccatgtcacctatggatcaggttctttggaggacacacttgcttgaagcttcactcatcggttttactctatttctcggnttcataattgatcgcatgcaccattatattaaaaaacttattgggttgaggagta

SEQ ID NO: 25630 - DNA, 543 bp, Gossypium hirsutum
  Clone ID: LIB3585-045-Q6-K1-B1
cccacgcgtccgaacgttacctgtatcgtttagacactattaactttcaatatagaactgcattaacagggagagggaatcttactttgacacaatacccaccacacctgacctgccaacactatcacctatgcacgaaacaaccagcatgtcctatatacactgataaactctaactcaacttcatcaacaactacttgaacatgtgctatacactcatccacatactgaagatcatctacctatagagccactccgacgacactagtcacaccatggccacagagttcccatgctaacattaaggtgacatcaagcacgcgctaattatccttcccacgttctgcaacatggacatccccaatggcgtacgctgtgtatgctactgactaccacgaactgactactatccttctgtatgtagctagttattggctgttcatgtgtgtcatttgcttactaaataatttgtgtttccttttatctgcaagcatgtctgatgaataaatgatgaactcagatgttcttctgtttatatctcta

SEQ ID NO: 25631 - DNA, 542 bp, Gossypium hirsutum
  Clone ID: LIB3585-045-Q6-K1-B11
cggacgcgtgggcgtcttcccatctctctctatttcccctttcctaccattttccggcgcaatcgccggctattttccggagaattcattttagggtctttttttttttgctttctagagatctcttcctctgaaactggtttttgttgattgaagagaaagaaatggatggggctaaagagacgggacttagaaatgtgagctcaacttgctcaatctcggagtcagatgattatgatctgtcacgcctccttgataagccaaggcttaacatcgagagacaaagatcatttgatgagagatcactgggtgagctctctattgttctcacaagaggagctcatgacaactatgagaccacgcactctcctggttggaggtctggtttcaatactccggcctcatcggctagaaactcctttgaaccccaccccatggtggctgatgcatgggaagctctcaggaggtctttggtgtatttcaaaggccaaccagttggtaccattgccgcatatgaccatgctttcgaggaagttttgaac

SEQ ID NO: 25632 - DNA, 347 bp, Gossypium hirsutum
  unsure (1)..(347): unsure at all n locations
  Clone ID: LIB3585-045-Q6-K1-B6
gtcgtcgttaaccgcaatctgtacccaaagtaattctccatggctcgaactttgcttcacctaagttcgtccattattgtttgtgccctgatctncttcaatttcttcaccgtctacgcaaaaaatcatcatactgggccaatgctacttcctatacaactgaccttacgtaataattcccagcagcgccattacaacaatatccctcgaaaaaccctgaaatcaccaaacttttttttcctttcaacacattccccttaaaccatctgacgaaataccaaaaaggcccacaccgatcgctctttcaaacatttgcacgggctggatggctaatggtaccctccctt

SEQ ID NO: 25633 - DNA, 591 bp, Gossypium hirsutum
  Clone ID: LIB3585-045-Q6-K1-D5
cccacgcgtccgttctctttcaaaaaatgttcacttttggtgggtttttgttggtctccatctctgctctgttcttctctctttttgatttcttcagcaaagttttctccagggcttcaatatttaagcttaaaccagaggaagctatgcttgatgctattgaattggaggatgaagaaagtgaagtatttgaagagattgaatcaccaaagttggttttcaagtttcagtttcaaactcaaacttttgaagaattcagcaagaagtttagagatattggcatggaaactgatccttcaactagcacgaacaagtatgagttcaattcaaggaatgatttcgaatttacaatggagaatccaaatgatataagcttttgtgtcaaggaattatatactgattccaacaatgggttgtttccaaaacaagatttcttggaagaaaacatcaaggatgaagaagctgttatcattgaagaagtaacaaaggaagatggtggtataatggaggaggaatccagggaagttgttaatggcaatgaatgtgcaaatgctttggatcatagttcaaattcaaatgaattggaaacat

SEQ ID NO: 25634 - DNA, 254 bp, Gossypium hirsutum
  Clone ID: LIB3585-045-Q6-K1-E2
tcggccaacgtttcgggataaaatcggaaggggcatcatcatgttaaaccttggacctacaaatacaaccttgtggcggtgctcgtccacacaattctcttgtaatacattaacagggagaatattgttgctctacaagctttctttgtgaaacacttcatcagttgggtcacctgagcgttttgcctcaggggtcttctcatgtctgggccaactaatgatctaccaacatgcggaactcgcattgtttatgg

SEQ ID NO: 25635 - DNA, 323 bp, Gossypium hirsutum
  Clone ID: LIB3585-045-Q6-K1-G1
cccttccgccttttttatagatattttcttccgatgttaaaggactggttccctggattagcatttagatgtggagaagctcttgctttctgggtttttgttctaatgagagatcttaggattagattcttaattaaactcttcaaaagatcactctttgctgctttcatctgcatttttgctttaggaggagccgtactgggaactgtagtaggagcaatgaacgggcaaacaacagacactgggtttttcaggggagctgcaattgtggctgttgcctgtgcgatcacagacgttcaattgctggaagcatctgctgacgg

SEQ ID NO: 25636 - DNA, 556 bp, Gossypium hirsutum
  Clone ID: LIB3585-045-Q6-K1-G4
ccggaatggccgggccggaccacacccgtccggttgatttcctacctgcttttgattctgttttgttaatgtcagacggggagatccttcaagcagcttctgatgaccatttattagcttctagtcaagaatttcaggaccttgttcatgcacacaaagaaactgccgggggtggaagagctgctgaagttaaccctgccaagggacatggaacatccactacagagatcaagaagagttatgtggaaaaagagtttaaagaaccggtgggcgaccaactgatcaagcaagaagaaagggaaaaaggagatacggggcttaagccgtacttacagtacctcaatcaaaacaaaggctttgtgttcttcttcctttctactttctttcaccttttgtttgtgtgtggtcaaatagcacagaactcttggatggctgccaatgttgataatcctaatgttagctcgttgaaattgatcacggtttacttggcaattggagttttctcaactctattggtgctatctagatctcttttcacagttaccttgggtatgag

SEQ ID NO: 25637 - DNA, 343 bp, Gossypium hirsutum
  unsure (1)..(343): unsure at all n locations
  Clone ID: LIB3585-045-Q6-K1-H10
accgacgcgtccggataaatctnatcaatcccgttcttattcctaattcttttttttcacccatacaacctacaacgggccggatttacttataaacttgatccaattcccactacttcacttctttatggtcagatttccaccacttacatcccttggttcccataaatacatctcactcactgttccacatttaatccaaaaaatctgacatacccaaaacataatttgtccataataacctgacacaacacctcctctacagcatgaaaaaaactcgttaaaatactaaatcaaaactttttcatcaatatcttattcaacatcataacaggaatttatc

SEQ ID NO: 25638 - DNA, 585 bp, Gossypium hirsutum
  Clone ID: LIB3585-045-Q6-K1-H7
tttctctgctatctttattgatataatgcaatatttattttattaatgcagtaaatcacagtagagggagtatttgcaggttacgccaatgttctagtatactgcactgccttcttgctgcaatactactcaacactgaatgcactagtttaagcattacttatcttcaagataccataccaaagtgtgctatttgttatactggaagcccaccatcttaccattttgacattgtctctcgcgctcgacttgataatattattgatcacatggaagatagatgatgtagtgaaaatgtacctacttgtctctctcgtaaaaacacctatttagggtcatcacagcaaatggtgaacctatctgtcttttattgactctaaagcagccatcataaatccaatccatagttctacaattgaaatctaattaacttaagtacttctatagatcatcattcaccgctgatgctaacaaatcaactaataatttctttttcaaatgaaacaacctatcggaatttatcattgctgatctactaacaaaatgaattagaaattcttaaaatgcttatctttctcgctgttc

SEQ ID NO: 25639 - DNA, 423 bp, Gossypium hirsutum
  Clone ID: LIB3585-046-Q6-K1-A7
gtccggaattccacgcacgccccagacattcggcgagctacgtgaacactcgtgtgattctctataactcttcaccatccatgccttcacatacgagaagggcgctaattttcccttatcttctcatacttcttctctactacaatatccatatcataggctaccccatcaaactcaaacgctgataccaacgcattgcactgcatgttctacaactcaagttcatttcatgatgctctaatgaatataacgttaacttcatcctcactatcctagtatactcatccatgatcacctctaacaacaacttaaccatcatagactctcaggacaccttgtactggctattacagtcacggccagacctcgaaaacaaagactgtgccctctgagttgctatagcgctgagacaactccttactc

SEQ ID NO: 25640 - DNA, 107 bp, Gossypium hirsutum
  unsure (1)..(107): unsure at all n locations
  Clone ID: LIB3585-046-Q6-K1-B1
tatacatcatccatacctcaataatacataaatttgacaaaactaactttctactggatgggctcattattatanaaggaataatctcctcccatcccctctaaaat

SEQ ID NO: 25641 - DNA, 323 bp, Gossypium hirsutum
  unsure (1)..(323): unsure at all n locations
  Clone ID: LIB3585-046-Q6-K1-B11
gtccgattccggtcgaccacgcgtcgatcattataatattattatcacctctctctgtccctcactctgtgcctttgctactgtggttcacacaagctgaaattcctgctacagaccactctcatcacagctggttttgtcatccatctatggaaccctgcaatggattacatatgactgtgtcttaaagattcccagtttaatacattgaggtgtaaagtggcttatggtctgatgtgtggggaatctttggtctgatattggatttggctttgcctgacatttccagcanctacatataggntttttttctttcacgtgag

SEQ ID NO: 25642 - DNA, 309 bp, Gossypium hirsutum
  Clone ID: LIB3585-046-Q6-K1-B6
aagatgaagtggattcacttaggaagagcgaagaggaagagggagttacggagcctctattgggctcaaatacggagctcaaggaaaaagctgtagggttcattgaggcttggaaaattcctggggttgctccttttgctttctgcctcttctttgccaaattggtcgcttacacatttctctattggcttccatactacattagccatacaggtattcttctttatttccttctcctatgcatttctctattgtagttttgaatgctgttgatagataatttgttataccatgtgcctatatggaatt

SEQ ID NO: 25643 - DNA, 451 bp, Gossypium hirsutum
  Clone ID: LIB3585-046-Q6-K1-B9
gatcttttgatttcaactggagagagtgagactttcttgcaaaaagccattcaagaacaagggaggggaagaattttggacacaatcaatgagattcaagaaaggcatgatgctgtgaaggatttggagaggcatctcaaggagttgcaccaagttttcttggacatggcagtgctggttgaggctcaaggtgagcaactggatgacattgagagccaagtgaaccgagctaattcatttgtgatgggtggcactgagaggttgcaaagggctaggacctaccagaaaaatacccggaaatggatttgttatgctatcatacttttgctctccatcatcttctttgtggtgatattcaccgtgagaccatgggaaaacaatggcggcagcggcggtggccacaacaacccaaccccaccggcaccagcaacaacttcaccttcaccttcac

SEQ ID NO: 25644 - DNA, 452 bp, Gossypium hirsutum
  Clone ID: LIB3585-046-Q6-K1-C1
ctcaaacttacatccattcgtacgcttgatgaatatgtctttctaatcatggaatacaaccatcgtacgagcggagggattaatgttgtcatgacttttgctaactactcaaaaagaaacgcgatttttatacaaacaccacaacacagtataaaacaccagatagaagaattgcttcactggtgtgtcctatccctatgctaaccattagatggtctaccaacagaagatatcagactgacatggctgattcaaaaacagatgcagaacttattgaaataatcctaaccaaaggatggtatggggactagaattccccaaccaaatggctatatcaccaccatattcttgtatatcaccgaccagcatggcgtagaatccggacatccaagatgcacgatttaacgactagcagtcggtactacctccactaacatcctcagtaacctact

SEQ ID NO: 25645 - DNA, 432 bp, Gossypium hirsutum
  Clone ID: LIB3585-046-Q6-K1-C9
cccacgcgtccgcttgttccggagactgatggttaatcctgcatactatggcttggagagtggagaagatgaaacattgagttcgtatttgtccagcttgctgcaaagcacctttgaggatctagaagatagtgggtgcatcaaaatgactgaagacagtgtagagcctatgatgttgggaacaatagcatctcagtattaccttagttacatgactgtatcaatgtttgggtcaaacattggaccagacacgtctcctgaagtgttcttgcatattttgtcgggtgcttctgagtatgatgaacttcctgtgcgacataatgaggaaaactataatgaaacattgtctaacagagtccggtatatggtggatcaaaatctgcttgatgatccacatgtcaaagcataccttctattccaggcacatttttc

SEQ ID NO: 25646 - DNA, 363 bp, Gossypium hirsutum
  Clone ID: LIB3585-046-Q6-K1-D11
gctaaggtgtgtctgttggagactgtaatttgaattgttccagattcatgcttgttgggtttcgagatatttcagttcaaggtctatctaaaagtcatataatattttagtcaatgtgtagtgtgttaactacgattcgctaaatagtcaactagtgtgcctatatattccctctgtactcggtgaaagtacagtcggaaaaattgcagatacaacagagttcatggaaactcatctctgaaaatcgtttctgactgttactttcatgtacaatgatatcggcacattacttcgtaacgttccgagagaggttacccaacactcgtgaccgtgtacaactagccaaactccctaccgcctcaa

SEQ ID NO: 25647 - DNA, 452 bp, Gossypium hirsutum
  Clone ID: LIB3585-046-Q6-K1-D12
accaagcactcgatcgattactcataacctccttcacaaacttcttcaccaaccacccctctggcgagggatctatcttcagagctaccaccatcaataccattaacaacctccctaaccctaatctatcattatctcttacactatcatctaaaccaacatttaaatgatcgcttaaattctttaccaggcctcctaccagctctaatctcagctctaatcttagctcatcctctatctacacctacattaacacccactctttcagtggctccttggctgtcacttattcaaacgctgatgcaaacaacactacaactaagactaatacttttcataaacaatattaaaaacaatggcataacccattttgtaacacccttaccaagccaatgacacatatgctaccactgattacaagtgtaactagaagtctaactattatccaaaca

SEQ ID NO: 25648 - DNA, 480 bp, Gossypium hirsutum
  Clone ID: LIB3585-046-Q6-K1-D2
gcattacagaatggaccagtcgttggttctctcctaactctcctttcggctcttctttcgcctttttcattagggttggagaaaaaccctaaaacagaagttggttttaggaacagaaaggcagaagcaatgaaaggagggaggaagaatctaaagagggcagcaaaagaccaaatattgaaccttcaacatggccaaagcgtcatgcaagtgctgtctctaaggggatccaatctcattgaggtaatagatgctcgaggacaaaaatcactagcattatttccagctaagtttcagaagagcatgtggataaaacgagggagttttgttgtagttgatgaaagtggaaaggaaaaggcacttgagtctgggtccaaggtggcatgcattgtttctcaagttctgttttttgacccagttcgggcactacagaaatcttctggaaggccttaaaattttaaaatcctcaaatctagatga

SEQ ID NO: 25649 - DNA, 598 bp, Gossypium hirsutum
  Clone ID: LIB3585-046-Q6-K1-D5
gaccacgcgtccgacaccaccccatgggttccatagacacgccgacgattacgcagaatggttcaacacaatcccaggccggcgctgctccggccgacgacaaccagcggccgttggcctcctcaaacggagcgccggagtctgaggcaacgaaaaagaggaggtctggtatactccccctagaggtgggtactcgcgtcatgtgccgctggagagacggcaagtatcatcctgtcaaagtcatcgaacgccgtaagctgcagtccactgagcccagtgattatgaatattacgttcattacaccgagtttaataggaggcttgatgaatgggtgaagcttgaacaacttgatcttgattctgtcgaaacggtggttgatgaaaaggtcgaagataaggtagcaagcttaaaaatgacacgccaccagaaacgtaagattgatgagacacacgttgagggtcatgaggagctggatgctgccagcttgcgtgaacatgaagaattcacaaaggtgaaaaatattgcgactatagaacttggaagatatgaaattgagacttggtacttctcaccctttccaccagaatataatgattc

SEQ ID NO: 25650 - DNA, 347 bp, Gossypium hirsutum
  Clone ID: LIB3585-046-Q6-K1-D8
tccgtattccaggtcgaccacgcgtccgctcgttttttattcatattctttttttcttcttcgttttccatattcttccatgagtatcccagagctggtaggatggagagaaaaagaaacagattcataatttggaaagaaatttgttcattttccatattatagtctttccccaccgttggacatttgatttttccagtctttttgttgtgaaaaagtgggagattctcgtagcatcgttgtatatttttgctacatttgcgttggagagatctgatgttcctttctttgtgcgcagcgatctacgagttgaggttggttttactgccaggaagactccttcactt

SEQ ID NO: 25651 - DNA, 527 bp, Gossypium hirsutum
  Clone ID: LIB3585-046-Q6-K1-E11
ggataccttaactgaggatgaggcgaggttctatgttggccagactgttcttgcaattgaatccatccacaagcacaactatatccacagggacatcaagcctgataatctattgcttgaccgtaacggccatatgaaactctcggactttggattgtgtaagcctcttgatagtagtagctttcctgaccttagggaggatgaccatggaggggggagaaacttaaaaccctcagcggagagttgtagacattctaatgttcccacaacacctacgcggacgcaacaagagcagttgttacattggcaaaagaataggcgaacattggcttattcaacagttggcacccctgactatattgcccctgaagtgttgttgaagagaggatatgggatggaatgtgactggtggtcacttggggcaattatgtttgagatgcttgtaggatacccgcctttctattctgaagaaccattatcaacatgtagaaagattgtaaattggagaacccatttgaaattccctg

SEQ ID NO: 25652 - DNA, 494 bp, Gossypium hirsutum
  Clone ID: LIB3585-046-Q6-K1-E12
attcggtcttcattaaatcactttatgttctgctactatttttctcatcctgttctaacacactattccgtaacactgcacaactatattccccatcacataaatctttatcatgtattccatgaccgatacatctatatgatcatcctaaacatttacattttgtgaaactattaatgatataaactctgctgtcctccgcattcatgaccatactggaactaaaatcttattatcctaactaaagaattcattactttataacttttctacaccaactacttctcaacatcagtagcaatcattactttaacaacttaatatgcgaccattgcctaattcaaaaattatcacccctgactctattgcccctgaactgttcatctatacagcatatatcactgaatgtcactgttactcacttgtggcacatatgtctgagatgcttgtagtatcaccctctttctattctgaagaaccattatcaacatgtc

SEQ ID NO: 25653 - DNA, 148 bp, Gossypium hirsutum
  Clone ID: LIB3585-046-Q6-K1-E2
acaactctggcgtcccaacgaaacatagcggcattcctggaatcgttatggactctacgaacaatcatcccaggaaggctgcctaccgaatactccttaatttaccagacgattgagccattgcttgcgagggaaaggttgttgggga

SEQ ID NO: 25654 - DNA, 475 bp, Gossypium hirsutum
  Clone ID: LIB3585-046-Q6-K1-E4
ccacgcgtccgcccacgcttccgagagaaaaaacatgattcaaaatggatgactctattaacattgcgccataactctggtctgggtaggtctctagcctttatcgacaggctattccatgttttcttcactaccaaggaactggcaactggaatgccgacactccgacataaccttactgtgacttaactacaagatctgattaatgatattgacgctgacgggaatgggaccatcgctttccctgaaatttcaaccttatagcaaagaaattgaaagataccacttctgaggaggaactgaaagaatctttcatgttgatcgataacgatcagaacggtttcatatctcctgccgagctatcgtacgttatcacacatcttggcgagaaccttaccgatgaggatgtcgatgagatgacccgcgaagcctatgttgatagtgacggccagatcaactactacaaattcgtcaa

SEQ ID NO: 25655 - DNA, 424 bp, Gossypium hirsutum
  unsure (1)..(424): unsure at all n locations
  Clone ID: LIB3585-046-Q6-K1-E7
gctttaatcgaactaaagggggcttgattcatctaaaccatggtaggccttagcctctgcaggaggttggcaatgcatccttcttagccgcattatacagtgattatctggatgctgctgagacacttggatggtattgcgagaccaattcctattgaactgatgtgcttgcgtgaatatggctgagctagatggatgacatccttggcaaagaaactcagagaatgagctacgtagcggtttatggtaaccattacccaggacatgtgcaccctagaggtgcaggtaaagctaggagtaccatcagatatctctgangagggggatggaagtgtagccactcataaaagccaaactcgtatgcgctagtgggagccatgtgcggtggaccacgcacgaatgagagaattcactatgatcgcac

SEQ ID NO: 25656 - DNA, 432 bp, Gossypium hirsutum
  Clone ID: LIB3585-046-Q6-K1-F4
gcgtccgaaaatctaaataaactaaaactaccatttcttttatttgtctctttggcttttgcatacaaagatgatggcttacttggggcgaatcgaacacgacaacgactccgagtccaagctcgacgacaatgttgccagcttatctaattccattgacctacaaggcagtatcagaaagggtgatgttagcagtttatccagtcaagattgcagtggtctttattcggctacagccttgttcttaagcaaaccttatgacagcaggggatatacgatggatcgcttagctctcatggcagacctcctatttgacacgatcagtaagctgtaacggccattccattagcagatatgcgatcgccgatgggtggctcgagatatacctgccttaatcgtggaaaactcagataggatgatggtctacctata

SEQ ID NO: 25657 - DNA, 401 bp, Gossypium hirsutum
  Clone ID: LIB3585-046-Q6-K1-G1
gaccacgcgtccggcacgcatgcgactactctctcgttgttcatacaaaccctatatttgatctgtactcaccgtatcgagggatgagtcacgctgtgtgctgagcacgatcccaacgatcaaatgcctcacaacactatatacgactgtcaaagctgccagagacctcaccactcaagtgctgtcataaaacctaacaataggtccttgaccttgtacttcaactgactatgctgcacgatactttaaaaatgcttactatatgggcctaacaccttatgaaatggtggaacacatgatatagaacggcatacgactactctgtaattgctcacaaaatcaagagaggtgtcaacagaaatcaaagaataaagcttctacaactgtttgataacacaaat

SEQ ID NO: 25658 - DNA, 191 bp, Gossypium hirsutum
  Clone ID: LIB3585-046-Q6-K1-G2
gtccgacgtacatgggctattaaactattgattcttaatgaatctgattatatgctgaaccaaaggtacaaagagcaaggttatgatgtgtactgacctctgccaccacaactccaggtctcacaaaaatatactaccttccctaactaaaaatgaccattcatcaccaattgtatcacttatcctaacaa

SEQ ID NO: 25659 - DNA, 360 bp, Gossypium hirsutum
  Clone ID: LIB3585-046-Q6-K1-G8
gtctcactttggctggcgcacaatcactgacagttattcaatctccatctttctttctacccatgggcagggtcgatcacaattctgtctataatcgctcttatcctctagttgatgctgccataggctctaccgtcataaccatataaaataaccactgtacccaccataatgaactgctgcagctaggtcatcatcactcttacacaccggataatctgatgccagctactattgcctatgaccatttcggaaagggacttattcaaagaatgccaatgtgtagacatggttattttcatgttgtgaacaatgactacactcactgggaaatgtatacacttgcacgaagtccaattc

SEQ ID NO: 25660 - DNA, 495 bp, Gossypium hirsutum
  Clone ID: LIB3585-046-Q6-K1-H5
cttacaagctccctaccgtcactcaacatgaattaaattaccagaaattaagtgcagagaaaaagtggacacaggagctaactccgcctcatttatcgaaagagcaggctccgcctcatctatccaaagctcctctttcgtctcacaaggttttcgtgttcttttcatttattggataattttctgtttggttgctgagaaaaaaagaggaaaaaagttgttgctataaattggactatctcattgacattatgacctgtttgatttctttaatccatttgaaagatagttgactggttattgacttattggaaattaaatacctaatccctttccggggagtgttttgattttcttactgttcgtttaatttgtttggtaccttgttggtgttgggcgaggattgtggttctagtcaagtaggtaaaagtattgatgcaaagtagtcatgcatctttcatgttttttcactcctttagaattgacagttgaatg

SEQ ID NO: 25661 - DNA, 306 bp, Gossypium hirsutum
  Clone ID: LIB3585-046-Q6-K1-H6
ttcactgcctaaccctccgttaaatcaaagtccaagaagaagattttagaggagacgactcacatttatatgagagtaatcctaacattaatctaattatacttgtctaacctaacttcaaactgagtttacatgatcttttaaatgatagtaaagtagtgcctctgtctgcttatagagatttaggagttcacatcacactgttacatcgtcattctactgggcattatgctctggattagttcgttaatccatttgaaacataaactactcggtatttccttattaaataataatatcctaatc

SEQ ID NO: 25662 - DNA, 253 bp, Gossypium hirsutum
  unsure (1)..(253): unsure at all n locations
  Clone ID: LIB3585-046-Q6-K1-H9
cgatttgtaaaactacattaatatataaantcgacattttatattatctaatccgatctgtatattcgctcgtgattctcaaggccaacttactaccacatctcatcaactccacctacagaaaaaacatcttaaaactaccttacgttctttataaatattagcaaacaatgaattccatggtctgtagaactatatatagcatgaaatggctgttattaactctgtcaaagactctcataacaccacctat

SEQ ID NO: 25663 - DNA, 342 bp, Gossypium hirsutum
  Clone ID: LIB3583-027-Q6-K1-B10
gcgtctgtttggtttgcgagaaaattaggggaaagaaccattgaaaatgaaaattgaggtaaaaaggaagaaaaattgttaattaaataattttgtcttatcctctttatagatcgttttgggggttattcaatttatttccttttgcaaagatttaaaactatgggatctgtaagttatctggaattgtcttcatttcacttggttatgctatatttcttttccattttcctcctctatttacccgttgaggcttcacatgttaacactgaatggaaagctatgtgcctggtatttacatgcttccagcatagccttgaccggtgacctgttgcttattat

SEQ ID NO: 25664 - DNA, 192 bp, Gossypium hirsutum
  Clone ID: LIB3583-027-Q6-K1-B9
gagttttctgaatctgctggactacaatatccatgttatatgcacatccattcgcccggcgggcacctggatccaacttttttatattgggaatgattatgattctttattcccacagctcgaccacaatccataatgaagttgagtaagcctgatgtgttcctcaaaatatgtaactagtgagtgaaaccc

SEQ ID NO: 25665 - DNA, 466 bp, Gossypium hirsutum
  unsure (1)..(466): unsure at all n locations
  Clone ID: LIB3583-027-Q6-K1-C12
cggacgcgtgggtgatcatgtgtcagatgaagagtctgagaagaaattggatttgttttcagagcatgcatcggggcttcttaaaacgatatatggtggggcaattcaagcacttccttctagttttagcctcaggaaacaatttcttgagatactggaatcaatagaggtggcagattcagaggagcttcgtattgagatactgagggatatgaagagagacttttcagctgatcctgaatattgggattggttagcaagacttgaaatgcctgatgcctcaattacggnggagaagaatgaagatgccatgtattctcggttgcaaaaggcagttcaagtttatgaagaggcaataaaagcagtgccttcagccacgatgtttaaattgtacataaattttttgctggatgccattgcttctgaaagaggagaagtagaagcctttagcttatccaatcatgcc

SEQ ID NO: 25666 - DNA, 382 bp, Gossypium hirsutum
  unsure (1)..(382): unsure at all n locations
  Clone ID: LIB3583-027-Q6-K1-C3
cgaaaaggggataaatgggaaggacaatggaatgggcaggcagggagaagcacatgagaggaatacctaggaagatggtgtttctggcagtgggggcattcgccaaggcggtagcaactcttctcaacaccacctccgttcataatgctgataccctcattcgtcttgtgcgttctcgaccccctggcataccactcctcactgttagtaatcacatgtctaccttggatgatccacttctttgngggttcaaaggtttcccctccttgnatgcccatttggcacgatgggtacttgctgctgaagacatttgttttaagatttctgtgctcactaatttttttagacttggtaaatgcatacctattacaaggggtgctgg

SEQ ID NO: 25667 - DNA, 320 bp, Gossypium hirsutum
  Clone ID: LIB3583-027-Q6-K1-C9
cggacgcgtgggctggagagatgcactccaagatatgtgcatggggatgtgaaacctgagaatttggttgctgtcttctggactccaatgaaaaaaacttttttgtgaccttgattactccaaggcgagatagtcgagtgtcaacatgttgagtatgatcaacgtctgatgttttcaggggaactgtcgattgctagtgtgcatgctatcttgtagactgtagcaggagaatgatctaaagtttgtttaacactattttctcttccgactgaactatgcaggaagggggggaaataagctctttggtttaaaaataaatt

SEQ ID NO: 25668 - DNA, 176 bp, Gossypium hirsutum
  Clone ID: LIB3583-027-Q6-K1-D12
gggaagataatgatgacgacaatgatgatggctatggtgggggtggtgagtatggaatgggaagagatctgcctggaggcgtcattcaactcaatctactcttggaagatctgccatcggccgctggagaggtcgacctggcagaacaaatggtgaagactatacgtagatatgac

SEQ ID NO: 25669 - DNA, 198 bp, Gossypium hirsutum
  Clone ID: LIB3583-027-Q6-K1-D3
cttaagctgcttttgttctcacttctcacagtgaaagaccatggttggttccttctttttaactctttgaagagcgtttcatttcgcgcttttaaggtctcaaagaaaagggaaagcttaccgataagctctgtcatcttttttcggagttgtttcagtggcgaaatcgttaaaaatggagagaaaacagggtttttt

SEQ ID NO: 25670 - DNA, 545 bp, Gossypium hirsutum
  Clone ID: LIB3583-027-Q6-K1-D6
ttttgatattgaataatctctgttcaagtgagcaagttcagttttcattgtttttgttgcttatctgtcagccgttgttagtttgggcattccatcaattttgtttgcttattgttggcagatcagcgctctaaatagtgatgtaggcaaaattttgttagttgcctctgttattgaatgaaaactatttcttgattattacaggttgttctgttggtttagcaaagacaaggttagtttgttctgaactttctaatgcctgatttattttattaatgatttatttttaaatttcaatatagtaataatatattatttttaaatattatctcaacttaagggattgcattggaagctttagatattgaaaggggatagccatccaccccatacctttcctttcttcttcataaaaaaaagctcaaattccatttttgtgttaatgttaaaagtcatctatgaagttttagtacatttataaatttttaagcgtaaattgcttgtagtggtagagccagaatatttttggccgaaataaattatat

SEQ ID NO: 25671 - DNA, 224 bp, Gossypium hirsutum
  Clone ID: LIB3583-027-Q6-K1-D7
ccgtcgatccgtcgacccacctcagcacctcatcagagtcaggcgactcgttcaccacccaatggaagagaacggaacccagcggagccatccgctacaagagctagaatgcctagaactttgttaacataagtacctaaacatacgaaactttttcaatctcaagttctgcaacatattattaggctacagtcgatgctttgagcaaccacacttttttccac

SEQ ID NO: 25672 - DNA, 295 bp, Gossypium hirsutum
  Clone ID: LIB3583-027-Q6-K1-D9
acgcgtcggccgaagttgtggcaatgatagtggcaatggaatggctcatttcatttttcatcataaggggacaacatgtgacagaaaccccaacggaaagatcactggcttttcaagcatttctttattccaatcatctactcttacaaaaacactcgatctgaacctcaagtttcttcaagctctatcttagccataatgagttccttatctatctaaacaacccaacacttctttccacacatttgaccttaaaaattaccgggaggaggaagagaaccttacttctgacaca

SEQ ID NO: 25673 - DNA, 430 bp, Gossypium hirsutum
  unsure (1)..(430): unsure at all n locations
  Clone ID: LIB3583-027-Q6-K1-E3
gtgttaacaatgactgcatttagctcctatttccatacatgaagtggaaaaggcctacagcatctctgcatggaagcatataattgaagagggatacatgtattagcagatgaaattactaaaaatttacaagtgatttaccagcttcaaatcattacattacaattgagtcacccaataaatccagttagtttcttcagttaaaactagaacatctgagaataatgaccaactgcatacacttctttgtatcaaaatgcaaacccaaatcattgtaggttgccaccttangcaaccggagggcggagtacatgatcctctgaggtgtctaacgacgcangcggcataaactgccacatggcaactccaggataaccaaagaaaggaaccaacttgtttcctggaacttgacccttggcagtagcaaatg

SEQ ID NO: 25674 - DNA, 383 bp, Gossypium hirsutum
  Clone ID: LIB3583-027-Q6-K1-E5
atcccggtcgaccacgcgtccgtggtgggtggcgccggtaccgcttaatagcagctgcgccactgcgaactttttttttttgcagagcaggttattttgaacctaaagcagagcatggaattggaattgcccaaatacccggagatggatgaagatcaagctatcaatatcactgattcacaaatattttattatgttacgcaagtcgctaacgtatatcatatcagtgcatacaatatatacaaacaagctgacaggcttatttcgccataccataaacatcacaaatgttgacaccagcgtggcagacatacctgcaacagtattaaattgccttcgtatgcgcgagggtggggagacactttattactcctatatcaaat

SEQ ID NO: 25675 - DNA, 256 bp, Gossypium hirsutum
  Clone ID: LIB3583-027-Q6-K1-E7
tcgatccgtcccacgcgtcgcaatggcaaccgagctcctttagcaccagtcacttggaggagagtcaaatgactgggagagcttctaccttatggcagagctgggctcgatgcacacccacggcgcgcctacctacgatggtgttcacacagcgatatcaccgacacatggacattatctggagactacccggcgcagccttgcatcaaccaagccttttatttcatttctatgaccatgtcttccttttgggggg

SEQ ID NO: 25676 - DNA, 371 bp, Gossypium hirsutum
  unsure (1)..(371): unsure at all n locations
  Clone ID: LIB3583-027-Q6-K1-E8
tccgtatcccggtcgcccacgcgtccggttgaatgattcagttatcggcttttgacttttattacatatagaaacaggtccaggagaggagacatgaagtttgtttggttttttcattcgtgaaatggngatttgcattaggcgagagattgatggtctacagagagtctggagtctatttatttttttttattgtgtagatcctttttgattctctaactatactatatttaattttgttatttttatattgttttattataatccgttttttttattttttttttttgatatattttattcttatttttggggggggggggggggttatttattatactttcttggttttttatttttcattttgtttt

SEQ ID NO: 25677 - DNA, 221 bp, Gossypium hirsutum
  unsure (1)..(221): unsure at all n locations
  Clone ID: LIB3583-027-Q6-K1-F2
cccacgcgtccggttatgccggttctggaaggcatttgatcgaggaaaaccagtctcaccacccgagaactgatattgctcgtggctacatgactaactcggaactagaaaggccggtgaaggaatttgggcgaagatgtagtcacatttctagaatatacagtatttggagaaagtgtgcgtgggttntncactgtggggtgatagaagatttctgacaa

SEQ ID NO: 25678 - DNA, 223 bp, Gossypium hirsutum
  Clone ID: LIB3583-027-Q6-K1-G10
ccgtccgaatccacgtcacccaccgccgcaattctagtcaacggaaaatcaccattttttctgtccattctttcaaacacggaaggagagccaagggcgacgcaccaacattatggagacatgcatgccctacatcatgatttggaaaaacagaaccgaacataagggttgaaagataaaaaccattgcttttacaaggaaaccactcccggaaaaaacattt

SEQ ID NO: 25679 - DNA, 316 bp, Gossypium hirsutum
  Clone ID: LIB3583-027-Q6-K1-G9
cccacgcgtccggacagacagtgggaacaaagtgaccaagtttcagcagtgcctgcttctgaatataagttattgtccttcgtcagaggttgatctgtcaagcggaaaaaatctggtggttgttgtctacaatcctttgggatggaaaagggaggatattatacgaatcccggctattgatgagaatgtcatcgttaaggatcataaaagaaatgaaatcgaatcgcagattgtacctctgctaaatgcttctttggtcataagacattactattccatggcatatgtgggaagattgccaagagctaccccaaag

SEQ ID NO: 25680 - DNA, 583 bp, Gossypium hirsutum
  Clone ID: LIB3583-027-Q6-K1-H12
ctctgttaacaagagaaaattcggtgtgaacatcatgaagcgggcattgccatggagtgaccaggttgatgtaatttcatcggatgaatcttcttcttcatcatcatcatcatcatcatattcttctctcgatgtcgaggttcaggtcaatgatggaaccaaaaatgtcgcagttgatcaacctcctaaagaattatcctctgatggcttgttgatcagaaaggctgaaatttatcaggaatatatgaagcaattaccaattccgacacaacggggctctgttattccgtttaccacatggatgggattaggcagatccatcaaacaattatatgggcagcctttgcattacctcactaacattctcctaaaacagtgggatcattcaagagtcggcagtgaggacgagcataggccccttgacatcatcgttcatccttgcaaagctgaagctactgtctggctcgttgaagaacttcatcgacagacctcatcacatcatcacatggccaaactgtggcagtcagatccaatgcaccatgctttcatcgattccatttttcctcaattgtgaagtgcatgc

SEQ ID NO: 25681 - DNA, 381 bp, Gossypium hirsutum
  Clone ID: LIB3583-028-Q6-K1-A10
cgaccgacgcgtccggctttgctctgccaaagacttccgccgaagaggacgcgttgttgatcctcgacagaggtactatgactgcgagaggcgataccagtcggagacacgtggacaaactgtgcaatacttgtgttaagactggcgtgataggctgttgaaggaagagcaccagcgtgacgaagacgagtttaagatgagataccaggattgccgacaacactgccaacaggaagaaagacggctgcgcacacagggcgaacacagctgccaagaacaatgcgagagacagcagcaggaggagcctgacaagcgattcaaggagtgtcaacagcgatgccaacggtgagagcaacggtcccaacaggagcaacaatgggt

SEQ ID NO: 25682 - DNA, 508 bp, Gossypium hirsutum
  Clone ID: LIB3583-028-Q6-K1-A8
aaaatatctaatcgcagatgatgaaccaaatgcttctgtggcaggtatagagcgtttgaatggattgtctcagggttcctatcaaaaagttgattgcaatggtggtgttgatggtggatcagttgctccatacacttgcagcttgcaatccaagtccaagtcagctgttcaagtgcagcttgatggtttgcaggacttgaagtccataccccaggagcctcgtgtgagaggggaaatagcagaagtaaaaatactacctgatgagtcgctgagccctcaaaggtcacttccataccgtcagtctcgttatactgttcactccagatatcagatgaaggattttccgggcaaagcttattctgtggattcatcattatacaatgttaagattgaggtgaaagctaactaccggccacagcatgttccattagtttccctcatgagtaagctgaatggaaaagccataattggtcaccctctaatggttaaaggtttgagtgatgatcac

SEQ ID NO: 25683 - DNA, 219 bp, Gossypium hirsutum
  Clone ID: LIB3583-028-Q6-K1-A9
gtacgacatggggttgtttgagtccggttgttcactaaattcagtggttgcgattctgatggaggagagcgatttgccgctatcgaaattgttggaggcaattcatgagaaggttaaggacagaatgggaaatgtgagtttggccgcggtgaaaagcgctgtgctgcttgtagggcagagagtgaaatatggattggataatgatgaagctgatatttt

SEQ ID NO: 25684 - DNA, 189 bp, Gossypium hirsutum
  Clone ID: LIB3583-028-Q6-K1-B10
ctctcatccattttgtgagcttgtcgttctcactcacagcttttattggactgaactatgacgtgaaggttccaatatttgagttcttatcccatgccaaaccttttctttttgagtatcctaaacccactactgctcttaccactacatcatctggtaaacttccaactgctgtacattccactttag

SEQ ID NO: 25685 - DNA, 263 bp, Gossypium hirsutum
  Clone ID: LIB3583-028-Q6-K1-B12
ccgtccgtatcccggtcgacccaccgtccgcccaccgtcgcggaccgtgggctgtgtaatagagtttctagagcacttgaaaagagtgtcagaatttatataataataccaatgttgggactcatactcttcacatgatctaaaaaattaaggctctctgcttatattatttcactcgtgctcaataaacctaacattttgacaagagactaccaattatgataacttattcttcaacacttctcccatagaaccagcattgc

SEQ ID NO: 25686 - DNA, 386 bp, Gossypium hirsutum
  Clone ID: LIB3583-028-Q6-K1-B4
cccacgcgtccgattttttccttttctctggtttttgtcttcttgtttcttattttatcgattccttgcgggattttcaaaagagagctgaaggggatgcaaaccatccctcccacccccccttcctatggcacaaaccgtttattttctttcaattatgaggtaatttgattgattttttgaattccaggtttggtggtttctaagaagtttgcattagttttgggctgagaaacacgataagatagcaaggaagcaagcaaagagttaaaaggttatataatcgttgagaatggccaccgcttcatcgtcggcaactttcttcggagacagggcaaaaaatgaaaacccgatgattaaacaacaatcattcggcgcacctactt

SEQ ID NO: 25687 - DNA, 336 bp, Gossypium hirsutum
  Clone ID: LIB3583-028-Q6-K1-B9
gccacgcgtccgcaatctcatctctctcctttgttttccctttgctctctctctcttttgcgaacgctaaccctacctaccaaccaggataacatgaaggaggaaaatcaagcagatactaagaggccaagcttccggaaatccaaagctggaaagaaacggggaaggctgcaaggatccaaacaagccaaagaggctgctaggctttttgttcatggaggagttcggagcaatacaagaggatcaccctaaaacaaatcgtgcggtgtcggaaagctggggagataaaggagagctgctgaagctaaaagacctatgagctaggcagaaagcgga

SEQ ID NO: 25688 - DNA, 494 bp, Gossypium hirsutum
  unsure (1)..(494): unsure at all n locations
  Clone ID: LIB3583-028-Q6-K1-C2
agcagatcggagaatagaagctattcctgccttgctgcaagatgctattgatcgattggttgactcgcaagttatgactgcaaaaccagactcttgcattattgatgtctacaatgagggggatcattcaatgcctcgtatgtggccaccttggtttggaaagcctatttgtgtcatgttcttgaccgagtgtgacattacttttggaaggatgattagcgttgatcatcctggggacttcagaggctctctaaagctttctcttgcacctggatctctccttgtgatgcatggaaaatcagctgattttgccaaacatgcacttccctctgtccgaaagcaacgcatacttgntacatttaccaaatatcaaccaaaaaaatccatgtctgacaacccaaggcttncttcacctttactttcttagtcttcacaatgggtttcattgcctagtaaatcacccaaccattttcgcctctttgctggccccaagc

SEQ ID NO: 25689 - DNA, 212 bp, Gossypium hirsutum
  Clone ID: LIB3583-028-Q6-K1-C3
acgccgaaacacaacggcagctcggtaatatgccatttcttcacacaccctcccacatgccaccagttcattgggctgcggcgattcatcaaaatctccggctgtgtttagtgaggatttgaacaatccatataatgagggtcactctgaaattatcatgaaggacttccttaatctgcctgcagatgcttcctctgatggttgctttatat

SEQ ID NO: 25690 - DNA, 280 bp, Gossypium hirsutum
  Clone ID: LIB3583-028-Q6-K1-D1
ttctcattgcatcgaatctaaagatctgtccatatctcaagatatgaaaccggttttgaatacaggaggaaccagctctctttgctcagattatttcctcattgatgctcaagaaaccaaggcagattgtagtgtttcgaggacaccagattccaatctttgtgcagattctcatataaactctttagcttcccattatagtgcattcaaagagtggcaacctcttagtgatgcgagtgagtaccatgaaaatcaacgaatgcacttggaagtacttttc

SEQ ID NO: 25691 - DNA, 231 bp, Gossypium hirsutum
  Clone ID: LIB3583-028-Q6-K1-D11
cgtccgtattcccgtcgcccaccgtcgcttttatctcattatcctgaaaacagacgagtgtcttcttgatagaaagaaaaaacaggtgtgtgaggttgcatgggttcatacacaaatgtttaatggcactgactgtacagtcaaccagttgtccttcaactgcatgcgtcatggaaacaggcaatcgcatccccactttaacctaaccaaaccacctatcaacacaataca

SEQ ID NO: 25692 - DNA, 229 bp, Gossypium hirsutum
  Clone ID: LIB3583-028-Q6-K1-D2
acgcgtccgccacgcgtccgcccacgcgtacgacaacttccatcacactaaacctatctgcactcagtgagtgaaccagctcggtttcttgagcagtcatggagcacacactaaagccaatcttgcacaggttgttgccattaatcaagccatgactcactaatgttcgcggcctttgaacactgtctattacttaccaatgatcaccaacaactcaaaaactttcttt

SEQ ID NO: 25693 - DNA, 173 bp, Gossypium hirsutum
  unsure (1)..(173): unsure at all n locations
  Clone ID: LIB3583-028-Q6-K1-D5
ccgcttacacttctttgctttcttttacgtttgctgcttgttctcttcatggctgctggctagatnatcggtactaaccagaccagacccctgnggcacctcacacctcaccactaccatccatgcactccgactgaatgctttacctagctccgttagccaagctgtcaaac

SEQ ID NO: 25694 - DNA, 199 bp, Gossypium hirsutum
  Clone ID: LIB3583-028-Q6-K1-D7
gtccgtattccaggtcgcccacgcgtccggtgcggtttgtctcgatgagatagagcagagcatatcggtagaatggttcccggtgtaatcacggtgtatttacaaggctgaactgctttaaagactcgtctgtctgttgtaggcaagctgacctattgtcatccacctgtgagataccctgtaaagcttgaatttctta

SEQ ID NO: 25695 - DNA, 386 bp, Gossypium hirsutum
  Clone ID: LIB3583-028-Q6-K1-D8
gcaaagactgcgaagacttcacccaagaagggacgagtttctttcacatttattgaaatggccagacgtctagctggatttctggttctgttacttgtagtatcgatctgcgaagccgcttttctttttcaaccaatctccgattctcatcgatctaccgctcttgaactcttcactcccgaccatggatcattcaaaagcttggaagaaacatatgaggcactaagaacatttcagattcttggaattgaaaagaagcctgatttaacagctacagcttgccgctcaatttctgaaactgttgggtcatcttcatcgactgcaaaggatcttttctatgctttaaaagcaaatagtatagcggaatgcaagattgacaagaaagc

SEQ ID NO: 25696 - DNA, 142 bp, Gossypium hirsutum
  Clone ID: LIB3583-028-Q6-K1-E1
gcgtccgactagtctagatcgcgagcggcccctcgcgatctagatctagatttaccctcatttcaagctcaaggctctgagcatttttgtgctgacctcccttcttctcttaatactaccatttgtggaggtcctattattt

SEQ ID NO: 25697 - DNA, 241 bp, Gossypium hirsutum
  Clone ID: LIB3583-028-Q6-K1-E3
gttatattatcatttcaatgggaaggataaacgagtgtatttcaaggttgttcaaatattgttgtttggacacggttcgattcttacaatatgagtgttattcgcgtgcccatcgatactgtagtcagaatattataaagtgggtgaatgttataaactatgttgtatgtatgttcagttataatgttcaaaggttggtgtttctatcacccaactttttcaattattggttttatctata

SEQ ID NO: 25698 - DNA, 298 bp, Gossypium hirsutum
  Clone ID: LIB3583-028-Q6-K1-E7
cgcgtccgctgaagggaggcaaagctggttaaagtgggatatcctatatttgtcctccagaaagtctgcgctgctgctgaagcagttgctggagtgccttaacaatattcaaataaataggatccataacttattatcctgaaactttaaattcaattttaaaacattaccaccgatagatggaacctcaactgtcaacatttcaagggtgctgctgtatctgtaatgaggcaaactattgaacctaatggccttgatttgccttacttcaccaatgcttctaagattatttactttt

SEQ ID NO: 25699 - DNA, 152 bp, Gossypium hirsutum
  unsure (1)..(152): unsure at all n locations
  Clone ID: LIB3583-028-Q6-K1-E8
cttgcttgttctcttccatggctgctgtgctcatatagatctcgtcactaaccatcaccaggagccagcggtgttttcatcctcagcgacctcaaccacntcaccaatccaaatgccaactccataactagaatgctcttgaatctaatcac

SEQ ID NO: 25700 - DNA, 207 bp, Gossypium hirsutum
  Clone ID: LIB3583-028-Q6-K1-F2
atcccagtcgaccacgcgtcacgccaccgtacgtgggacacacatttaggtgagatgtatttataagaaatgtgactgtctgctgacgtgtaaacagagagagccttgacttaccccgacaaaagcgaagaaatcctcacagaacaaactgaacacaaaatcgcaccagacagcacacagtactaacgaaacatacaagctgaaaca

SEQ ID NO: 25701 - DNA, 219 bp, Gossypium hirsutum
  unsure (1)..(219): unsure at all n locations
  Clone ID: LIB3583-028-Q6-K1-F9
gcctccgacacgatcgaattaaaactacttctgcaacaaccatggtttntctcaacacctctgttgcaggacgaggatcttatattcctagaaactgcctcttcatcttcattccctgccaatacatgactcacaactgtcccagcgctctatctgactgagactgcaccattcagagtcatactcactaattttccgaccggaaattttaaaggctgc

SEQ ID NO: 25702 - DNA, 216 bp, Gossypium hirsutum
  Clone ID: LIB3583-028-Q6-K1-G10
tcgatccgtcgacacgcgtcgtccacatgcgaacaaagctgcagggacaatacaaacagcagcagcagcacctgacggcattaggagtgtaacagcgtgcaatgagacaaagccaacggagcacatgggaagatgcagacagaccaagagatcatgaagagaagaaaacagggaaagaaaaaaagaaggacaagaatctcaactagacaccttata

SEQ ID NO: 25703 - DNA, 155 bp, Gossypium hirsutum
  Clone ID: LIB3583-028-Q6-K1-G3
cgcgtcgacacgcgtcgcagctcgataatgttagaggaccgtaattgggggtaggaactaggcatatgattaagaagaggttatgagctgtggtgtataatgagttggtttaggatggagtatgctattttgtaatgtagggagtaaattgttgc

SEQ ID NO: 25704 - DNA, 164 bp, Gossypium hirsutum
  Clone ID: LIB3583-028-Q6-K1-G7
cccacgcgtccgtattgagcctaacccctcgctactccaaccaattcggccgtttttacgaggcattgccctcgtgatgaccagcagcaactccgggaagcgcatctctcctcagttgccttcgaaataaacaaaggatcgatcttcgtaccgcactacaattc

SEQ ID NO: 25705 - DNA, 148 bp, Gossypium hirsutum
  unsure (1)..(148): unsure at all n locations
  Clone ID: LIB3583-028-Q6-K1-G8
gcgtccnattgaacaacctttactagataataactttatatttgcggctataagcaatagacgtncaggtgtggatggtgggggcaggccgtccatatggaaagtatccaanaacaacgcatggtgatcgtggactaacaggctaccc

SEQ ID NO: 25706 - DNA, 341 bp, Gossypium hirsutum
  Clone ID: LIB3583-028-Q6-K1-H8
gactatcgtaatcatggtgaggaataagtcagcttgcgtagttttgctcttttctctaaaccgatccgtgggcttgcttagatcggccgaagactatccacgaacaagacgcgaccatgatcctacgaagaggtacgagcacagcacgagacaaaaccaaccggacacaaccaaacagaccgggatacacaactggagcgaacgactggctactacaatgaacccggttgtgcaacattcgatcctcgcgccgataaaaaggagctcgaacctaaaaccatgcacagcattagacctgtccatgttggtcagaatgtaagaacagagaacttgattttttt

SEQ ID NO: 25707 - DNA, 518 bp, Gossypium hirsutum
  Clone ID: LIB3583-029-Q6-K1-A2
gttgacatagtgaattttgccctatgttactcggacttgggtgtgagtgtcaaaaatgggtatgtatttaacacgagtatcgttagacttttcaaaggttttccatgtaatatacatatatcaaacacgagtgcttcaagaaaaatgaagagtatgagcaacatagcattgtgtgaccgcttgctgtcaattgtcagttgacatagttaattttgcccttacgttactctgactctggtgtaagtgtcaaatatgggtttgtatttaacgagagtatcattaggcttttcaaaggttttctatgtaatatccatgtgtccgacacgagtgcttcaagaaaaatgaagagtctgagcaacttatcattgtgtgatccctagctgtcaattgttagttggcatagtgaattttgccctatgttattcggacttgggtgtgagtgtcaaatatgggtgtgcatttgacacgaatatcgtaagaattttcatttttcaaagggtttccatgtaatatccatc

SEQ ID NO: 25708 - DNA, 529 bp, Gossypium hirsutum
  Clone ID: LIB3583-029-Q6-K1-A7
acaggttagcgacgccatggaggtggcgcaacttagtagcttggctgcagtcgacagccacgccggttcttgcgaggcggagatgccgtcgcggcttctaaatgatgccgttcggtcattgccttatcatgtcgtcaaggaccttttgtctatcggggtgtgttctagatgcgttctacggatattgggtaccgaggaccatatttactgccattcatcgttttcacaatcgatgctctgttcagttcttgaagaagtgactagttttaaatcagaaggcgattttcaattctgcagcgtttgctcgggtatcttacagttaagttaccgcgatgacaaagaaacgttggtgaaaatgaagagtccaaatgatatggctttagtcattgcggagttggttaagaaagaaggccatcaagtcgatggattttctctagaagtttccataccacaatttatcttagaaaatgaatcctcgttgttgtcaggtatgaagaagagatatgaatcagagccatggtttcaagaa

SEQ ID NO: 25709 - DNA, 175 bp, Gossypium hirsutum
  Clone ID: LIB3583-029-Q6-K1-A8
cgcataatacgaatgacaagaggaaaagcacaatccttacgtatttgaagataaacatttctctgctgcggtcaagacagggaagggccgagtttatcttattaccaggttaacacacttcattggatctgatttattcaatgttttgaaatgagcataaataagagcttattag

SEQ ID NO: 25710 - DNA, 455 bp, Gossypium hirsutum
  Clone ID: LIB3583-029-Q6-K1-B2
cccacgcgtccgatcctcactcttcaaactgagattatttcttcaaaattttttctccttttcttttctggatcctcgacagagtataagcctttgctctaagcaggttagtgtttttttttaaaatatttttttccatttttatatgattttacgatgaaaatattagcatatatgatgcatgcaacactgtttttatgatcttaaactcatcatttctgttcgtctttttttttcttattgattttgttaacctaaatgtgtattaagatttgaatttagtgatttttttttgcgcgaaatgatatatgttgataatgatatagaagtgaatatttctgtttgattagaagcaaagcatgatggaattgaattgaactagccgaattagtcatcgattcgtctgtttaatccaggaattttatggccttgtaggtttttgatctgttaactaa

SEQ ID NO: 25711 - DNA, 294 bp, Gossypium hirsutum
  Clone ID: LIB3583-029-Q6-K1-B3
aacacaccaacacacgctgactatacaaactgaaattattttttctatatgatctctccttttcttttctggagggctcgacagagtataagcctttgctctaagcacgttagtgtttttttttaaaatatttttttccatttttatatgattttacgatgaaaatattagcatatatgatgcatgcaacactgtttttatgatcttaaactcatcatttctgttcgtctttctttttcttatcgatttcgctaacctaaatgtgaatcaagattcgaattcagtgattttttt

SEQ ID NO: 25712 - DNA, 242 bp, Gossypium hirsutum
  Clone ID: LIB3583-029-Q6-K1-B6
gcgctctctatgagctgatcatctcgattactcaagaaacatgctgttaagtacggctagggatatgacacagagtgctaatgatgtgggacagagcatggataacaaggctcatgatggtggtggtgctgataggacataaatggacatttcaattactgtcagatatttgtattaagcttatatatttgctcgaattcgagtactgatactctaaaacttattttatgcttattatcata

SEQ ID NO: 25713 - DNA, 154 bp, Gossypium hirsutum
  unsure (1)..(154): unsure at all n locations
  Clone ID: LIB3583-029-Q6-K1-B8
cgtccgtatcccgtcgcccacgcgtccgcccacctccgcctcgtcactcggcggagaagcataatctaacattacactttatcctggagcgttatttaagcggggagtggtcccncaacaaacatggccgtggccacgtaaagttcattctctg

SEQ ID NO: 25714 - DNA, 578 bp, Gossypium hirsutum
  Clone ID: LIB3583-029-Q6-K1-B9
agatgctgcagtaaaggactctttaatcaagtctattcagttgcaactctctgatgccaagattaaacttgcagacaagcaagctgccctggaaaagacacagtgggaagcaatgacatcgaagcaaaaggtggaggagctgcaaaataatattgattccatgcaaggagaattttcatcatttatgctgttgttaaatggtttaacaaagaataatcccactacacatgctgatgattatgatttagaaccataccctttggatcctctcccttgtatggatgatgtcaatgacgaggagctacagaaaatggaagaagcaaggcaagcttatgttgctgctgttgctgctacaaaagagaagcaagatgaagaatcccttgctgctgctgccagtgcaaggttatatcttcaatcatttcttttcagatcagaaagtatggaataaagcaatataagaattgaagtaggcttggcaatccgtgtatacgtgtcacgttcggtgttttgttttgtgtaagctgtgtaaacacaaacgcaacacaacacaacacaacacaaatgtgtattaaaacgtg

SEQ ID NO: 25715 - DNA, 286 bp, Gossypium hirsutum
  unsure (1)..(286): unsure at all n locations
  Clone ID: LIB3583-029-Q6-K1-C2
gcgatcgaaacaccatctagaatgcaggaagactaacgtcagttgttctatccatagcatcacaacctccaggaaggggtactacgtttcaatgcctaaaactnacaaccattccaatctcatcttcatcatcacccttcatcttccaaacacttcctaaaaccttaaacctcgctttattttcaccccattctactccaaaaccgcctcccttttctgctctcattataaccctttcaccttccattctagctccttctcccctctaacaaacctctcatattaa

SEQ ID NO: 25716 - DNA, 377 bp, Gossypium hirsutum
  Clone ID: LIB3583-029-Q6-K1-C3
ccacgcgtccgatcgaagcagagacaggaatgttcgtaaagccagcagacaaataagggcgattgagccaaggagctacttaccaaggggaaaggtagcgagggataccttacttattgagcaacctcgtactcaacaaacggcgttttacgaggctgcctgaatttcagcacactcgaaaggattctcgtgtgcttcaaataacaagacgatctgtccgactcattaaggtacttcgggcctggcaccaagaaacgcactgatggctgcctacttttagagagctacactgtcctccggaggagaatatctaaacaacatgttatgggaattgtcatacttcgaagtatgtatctatattaacgttctaacttatt

SEQ ID NO: 25717 - DNA, 195 bp, Gossypium hirsutum
  Clone ID: LIB3583-029-Q6-K1-C5
gattttatttcagtgaaggacaagaaaaaaattttaaaattaaaaaagaaccctctgcagccatggctgggcatgaccagcaattgcgcggagctgatgacataaagaatttcttacatgaaaatgaaccatcaacatcaaacgttattatttatgacaccctcgttcctttttacgatattcttctttttattt

SEQ ID NO: 25718 - DNA, 437 bp, Gossypium hirsutum
  Clone ID: LIB3583-029-Q6-K1-C6
ccggtcgaccacgcgtccgcattctcctctctgtctctcgtgtactgttaatggtggtttcatttgaagcttagccctttttctttcagtttgctggttttctagatatgggtaagctcaattcttcattatttcttcgttcgtttgttactggtggaaggaatctttccagtttgcacccttctttttcttgttcttttaacaccattggtacccacatcgaagctttaagtaagaattcaatgaccgaaaagggaaacccaaccaaggatgaccgcttccataacgtcgatgaagcatccaacctcgaagacactatgagccgacagtacccaacgccgcagggcggtgctatgaccaacaatggaagggtcttcatggaacgggccacctcagccgtcccaagacatatcaatcaccgtcccaacaaattatcc

SEQ ID NO: 25719 - DNA, 186 bp, Gossypium hirsutum
  Clone ID: LIB3583-029-Q6-K1-C8
cccaccgtcgcccaccgtcgtcaacaaagctcttccttaatttcacctgttgctgtggtacgccatatatggcgtgctaccttcacattcccattaattattaaaagtatatttatagaaaaatattatgaaataccgctttgaacttttgaggaaaaggtcaaaacgcgtgtatatatcaaaaag

SEQ ID NO: 25720 - DNA, 242 bp, Gossypium hirsutum
  Clone ID: LIB3583-029-Q6-K1-C9
actcgcacgcgtcgcttcgtgaagctttttgctcattcctacaggaaagagaatgatgctgggaggggaggttgcaggctgcattgcttgtgccaatccttaccgaagcttgagaaggtgtacacttaagtggctgtgcacttagttagacacccttacgacattgtggtataaatatagactgcccactgtgcgaaacgatctagaaaaatagagcaccatttgttaaatgagacttattt

SEQ ID NO: 25721 - DNA, 121 bp, Gossypium hirsutum
  unsure (1)..(121): unsure at all n locations
  Clone ID: LIB3583-029-Q6-K1-D8
gcttgtcatcacagaagtttcatgccaaaattgcttactctgaatggtcagaaggttggccctgatgcatctattgctggggacttgcttcaattcctgnanccnnttttgaggaatgctg

SEQ ID NO: 25722 - DNA, 331 bp, Gossypium hirsutum
  Clone ID: LIB3583-029-Q6-K1-E1
cccacgcgtccgcccacgcgtccgcatcattgacaactttccagggaaaatgaaagtttaaccgacgtcataaaattcttgtcctgcggaagtttttgcactgctgctgtcaactttgtgtttgggggaacaaactcctcatccttcgtctccaatatgcattgtgaatcgtgtttgtattattattatttatgtattttcgtgtttgatgtattattttaatataaatataggcatacattattttgtatattttttcctgcccgcttataatcttccattatcagtcattacttattatttttaatttaatctaacttttatttatttt

SEQ ID NO: 25723 - DNA, 254 bp, Gossypium hirsutum
  unsure (1)..(254): unsure at all n locations
  Clone ID: LIB3583-029-Q6-K1-E2
cacccgtgcgtccacacatccgtattcttataacattttaatgataattctctcatgtacaacctacttattctcaaaaacacgcgactgcgatatatatgacgcgggtggggtctaaacaatacactctactttatcatttctttttcnaggtgaggcagataccatcttggtattatcatctatctttccacaacgtctctttattttgaatcaagacatactattccaattaataaactctatctttcttt

SEQ ID NO: 25724 - DNA, 175 bp, Gossypium hirsutum
  Clone ID: LIB3583-029-Q6-K1-E7
gcccacctcgcccacctcgtactgaaacatgatttgagcaaaatgaaagagagggataatttaaggagagactgtttaagaattgatatgcataggacaaagctaaagctattttaattggacctacatatgcagttatgcgacctaggaataagtaaggatcaggttgtgtttt

SEQ ID NO: 25725 - DNA, 347 bp, Gossypium hirsutum
  Clone ID: LIB3583-029-Q6-K1-F6
attcgtggtccttgttaacgacagaaatggatacgtcgaaatgtgtttctcctcatcttgctaagcacagcgcggttgaataataggaggaggagcggcatgcacatgagctagaagacgaaaggcgatgcgcccaattcatgaaattagacaacgatccggaagaaccggacatttattaacgccgagcatatatacatggacgtctacgctgagctatactccgaccgtaccaagatcatgcggctcatattcttagctgaccactgccacaatacccagatgcacttggaggccctaaggatggctcaccatgacctcaacattgggcagagcactcacgtcta

SEQ ID NO: 25726 - DNA, 386 bp, Gossypium hirsutum
  unsure (1)..(386): unsure at all n locations
  Clone ID: LIB3583-029-Q6-K1-G7
cgttttgatgttcgcagtttcaaacgcaacaaatatattgtgtacgaaatagagagggcaaaataacagaaggtggaaaggatacaattcacacggtgtattatgcatgggccatgcaacaagtggatgtagaagaacttggagagggtgctctttatccaatatggaagcttagagaaatgcaacaaattggtatacaagccctcatctaaaagctcgattttatgccgatgtcctcttatagatggatattgtaagatttgaccccttgataatattttttccgatgatatgatcctcctctctgggttttgttagtttcttcaccagggagattttagctgatgaaatgaattttttatttattattttcagcanntnnnana

SEQ ID NO: 25727 - DNA, 198 bp, Gossypium hirsutum
  Clone ID: LIB3583-030-Q6-K1-A2
cttttatctcattatcctgaaaacataacaattctgtgattatcattgacagataattgcataccgtgtgagggaaaacaatgagttcaccagcacatcattattcatctcattttacatgacaaagcagtgtgcaagaatctgttgggttgaacaaaacttatatggtatctgatagagtaaaaggacctttagatg

SEQ ID NO: 25728 - DNA, 293 bp, Gossypium hirsutum
  Clone ID: LIB3583-030-Q6-K1-A9
acggtatttcatgcttataaaacatgaaagacctgtcttttatttaattgcgattatgggacactggggatgcttatatcagaaagcgggacttccatacaacactctcaattggaactcagagtgcttcgtaaccattatgcactaatcagtatcatacatctacatagcacacacactagttctcgatcatgccattctaagtgtgcaaatgcctcacctatagcaataatttgataagtgacgcagctaacattgtataaacgattattggaaccagaagcctgataata

SEQ ID NO: 25729 - DNA, 129 bp, Gossypium hirsutum
  Clone ID: LIB3583-030-Q6-K1-B7
ccgtccgatcccgtcgacccaccgtccgcccacgcgtcgccaccgtcgccaccgtcgtctttttaactgaaattcaaatgctttgtctaccttaaacatggctctatttaccgctgccctctatgcttc

SEQ ID NO: 25730 - DNA, 383 bp, Gossypium hirsutum
  unsure (1)..(383): unsure at all n locations
  Clone ID: LIB3583-030-Q6-K1-C7
cgtccgtatcccggtcgcccacgcgtcgcggaccgtgggcggacctgggtttccagcacaacttcgaaagtggattcctccgtgggcctggaaataaacaaaggatcgatcttctaccgactacattaaaggctacattctggtcctcgcaccgaagaaacggccactacaaatggtctgtcctcacctttctaggcataatcacactgtcctgatatttttaaaaggttattgaggaacaattatttgaccgagaaaatatattaaatcttttgatangatgatcatacctatagacttcatgagcccatttgcgttgatttgaaggtgcgcactgtggatcaagatgacaagaccattatactcgaaatttggacacctct

SEQ ID NO: 25731 - DNA, 222 bp, Gossypium hirsutum
  Clone ID: LIB3583-030-Q6-K1-C8
ttacaaaaaaataatttttttatggtggcacctaatttcatttcgctgctcgtgattttaccccgcctttaatggcaaaacctttcttttacccaatttaatggacttgcgtatttatacattacgcaagatgctataaacaagtacagtgctgctcttggcaaatttggtaaaaattaatggaacagaatttctaattgttaaaagccatcttatgttgat

SEQ ID NO: 25732 - DNA, 422 bp, Gossypium hirsutum
  unsure (1)..(422): unsure at all n locations
  Clone ID: LIB3583-030-Q6-K1-D2
aactatctgcgccatgaccatcaaccanaaccttgcttaccctgaacgtgccaacattttcaacccacaatccggacgcttttccaccctctacacctttcaccaacacatcctacaacgactccaactcagcgccgacatttgagatctttaccactcaactcatattattccccactcaaacgacaaccctcacattattctatacctgttaatatgctcctccaaaatccaaaccatcaaccacagcggctactcaatattcgaccattacttaaaccaaggtcatctccttacagtaccacacaactttacgttcatgaaacacccctgatccaaaagagcctaattcgacctacttctttcaccaattgcgaagtctccatcacccctaatatctatcaatgtcttcttcattccaa

SEQ ID NO: 25733 - DNA, 587 bp, Gossypium hirsutum
  unsure (1)..(587): unsure at all n locations
  Clone ID: LIB3583-030-Q6-K1-D6
ctaattttgacattgttctaaattttctagctaccctatgtgatcggcttttagactatgatgaaaatgttcgaaaataagttgtggatgttatttgtgatgttgcttgtcattctcttgttcccattcccattctggctgtaaaactagttgtagatcattaattcatgattgagttttactttcctgcatgttttctattggaccttgtgcaatttgtaggagtcactcaattagtgctctatgcaaagcaagaaagatagatgaagctaaaaataaattcagagagatgacaggatgttagtatatgtggtcacaaggaagccttttatactttaatatttctacctcacgcacaaacaaatgaacccagatagttattattttcttagctaagaacaagatgagaaggaaaaatagaaactactttgatacaattcanacacatatatagagtggttttgacttaccagatcaaagttgagaacaagattgataggatgagtcgaaaaacagagcttctttaagtctgcttgttggtggtggggttttggaagagtgtcaattgaaaaacagggttttcttgc

SEQ ID NO: 25734 - DNA, 563 bp, Gossypium hirsutum
  Clone ID: LIB3583-030-Q6-K1-D8
cccacgcgtccggtcaacttcagcaaaggctaaagtctagggctaagaaagaggcagaacaaaaggctaatgctgaaaaatcatctgggctggagtcctcatcctcttctctgaatactggaaaagggaaaccatctagtgagaaggatggggaagctatgcaggttgatagccttccggagaagaaagcagagccggagccagagccggagccgacatttgagattttgaccaatccagccagagtggttcctgctcaagagaagttcatcaagtttctagaagacagccgatatgtgcctgtgaaatcggcaccatccgggtttgttcttcttaaagacctgcgccctaatgaacccgaggtgctctctctaacagatgcacctgcatcagcagcatctcgaaccactggtcgaccagcagtagggcaacagagttcctcatcagctatggcggttgatgatgaacgtcaggtcccgcaaccttttgagtacacatcctgatttcactgggttatgaaactgaagagggcctatgattttcccagaatcgggcagtgtttt

SEQ ID NO: 25735 - DNA, 177 bp, Gossypium hirsutum
  Clone ID: LIB3583-030-Q6-K1-E2
cccacgcgtccgcagctgcaccacaactacagataagagagttattttgaacaaaagcgtcgttgttctgtgctgcttcttctacttcgctcgggtctctttctccgaagttcctccttcattcttttatttattcaatattgtaaaagatcgcccacggtgaggatattcaacccc

SEQ ID NO: 25736 - DNA, 406 bp, Gossypium hirsutum
  Clone ID: LIB3583-030-Q6-K1-F4
ctgactcgaagctgctgccatgcactgatatgtcaagcctgtatgacttcgcagcttagttagccactcatgcctctctcttttgttccaatgacaatgcagagagatcatcgtgtgcctttcgcatgctaagaatacctgcatatgatgtgagcagaaatggttgtttcatgtccactgtatgtgctggcgaatggacaaggaagatgactgaacaggaatctgcatgagacacttagaacagactttcatggacttgagataccaagcactttattagacggttacgcattgcttacatcaaggtcttgcacgtgcactgatgcctcagacgctcattattttagaacatagggggagacacctaatgcgacatatcttgccagctgtttccactaatatcatg

SEQ ID NO: 25737 - DNA, 228 bp, Gossypium hirsutum
  Clone ID: LIB3583-030-Q6-K1-F8
catcaacaagcatcttgataatggcaagtatgttatgtatacagctgagcaagttgaacctttagaacgagtgtatgctgagtgccggaagcctaattctttgcatcggctacatcctataatcgacatccacattctttacaaaccactacctgggccaacaatgaccaacgtcttctcacaaacaacatatggtcatagagagctctctcgcttcttgcatgccaa

SEQ ID NO: 25738 - DNA, 348 bp, Gossypium hirsutum
  Clone ID: LIB3583-030-Q6-K1-G5
cctccgattcccggtcgcccaccgtccgcggaccgtgggtgcattttgcgccattctctattactcacttctctgtagtatgttcactggtttttaattatttaaaattttttatttctttttttttgtaattccaaatgctttgggacagtagtgagaaatggcggtgcaacacagatatggttttttttttaaatctatatctcttacataaactttgtgctgactttttatttctcctaaatatacgaatctacatctggtctgaaacaattgatttaatgatactatatctcaaatgtaggaaaagcttacctaaagtaatcttagatctgattgaatttgtca

SEQ ID NO: 25739 - DNA, 263 bp, Gossypium hirsutum
  Clone ID: LIB3583-030-Q6-K1-G8
cggaccgtgggcggaccgtgggcgttctggacttgacgctgttctaagatagttgtaaggcatgtaatggggaataaaataagtgcctatgtaagaggaagaccttgtttgtggtgttgcagtcctttgttttaggaatacatacgaggaaatcttactcttcttttttattgtcgaatatatattttaaaatattcaccttgctgtcttgtctacttgatcttttttgatatctatgcaagttaattttattgaatttctgt

SEQ ID NO: 25740 - DNA, 240 bp, Gossypium hirsutum
  Clone ID: LIB3583-030-Q6-K1-H4
cccacgcgtccgcccacgcgtccgcgcttccgttttgatccttttttatttttttttctttttagatgggccggttacttatttattttgtgaatcaggtaatttatgatgcaggcgtcaacgcatttagtcagagggaatttcggcattgagatttcgaaacggagagtattcctttgctttggtgaagttaagcaacgttttttaactttgaatcgcaatttttgcatccgaagtggt

SEQ ID NO: 25741 - DNA, 228 bp, Gossypium hirsutum
  Clone ID: LIB3583-030-Q6-K1-H7
ttcccgtccccacgcgtccgcttttcacggctgacccccataatgataacagttttcaaaaaagactttattcccgtctttcagagattgccatcttattcttctcggacctggctacctttagagctgcaacggcgaatcctcttcagacatttttctctaacccttcagacatgactatatctttttgggataaggaaccgcttgaattgctttatcttgagtcct

SEQ ID NO: 25742 - DNA, 448 bp, Gossypium hirsutum
  unsure (1)..(448): unsure at all n locations
  Clone ID: LIB3583-059-P1-K1-A10
aaaaaacacccttcatactttaccttttcttatctctaacacaaccaaataanggggngggatctattacactaatatgtaacacacctccccaatatatactcaccatgaagttcctataatacactccatttaaccgaataaatgatttcttgatagaactaaacctttcttaacgtaccatcaaatataacctttaatcatactcttgcaaacacacaggaactaataaaatactttctctcattttgtaaaatgaaatccttaactctcttaagaaatcttcacataccgactcctcaccattttaattcctagttagcatatcaatccataaaacttttatctacttaatccttaccctctatcacaataatccataatattacttaaaatgcatttaaatcacaccaattcttcactaaatcaaatcattaaatacttatta

SEQ ID NO: 25743 - DNA, 569 bp, Gossypium hirsutum
  Clone ID: LIB3583-059-P1-K1-B9
aaaaaaaaaaggaaaacctaaaccgtgaatgctctctgcgccactcaaagaaaaccagccactcgaaggctctccgatccctcgcccgactctgattacgacggagtgagcgacggtccggctatcaggtaatctctttgctctctaatctctctcttttattccttttttactcaaataatgaactaaacaaaaaccagatgcgaaggaaaaatttcattcacctttaaaactctgtttttcctttgaatattttttttctttcaatatctgcttctgtgtccatcgttttcagtattccaatggcttttttatagccgaaaattgcaaaataaataataataataataatctaaaaatccaatccgttctccgtttctgttatttctttcgctgctcttgtgtgtgtattttgcaggtacatgctggcgtggagatggcgcacacgcgcggaggtgcaacacgcgcggggatctggttcgaatttgcctatgacgcagaagcagaagcctgctgttgctgctgcaccagaaaaattagaaacccctagggttttgaatttgggccgt

SEQ ID NO: 25744 - DNA, 373 bp, Gossypium hirsutum
  unsure (1)..(373): unsure at all n locations
  Clone ID: LIB3583-059-P1-K1-C1
gggcgacccacgcgtgcgcccacgcgncgcaaaatacagagcttatcgaatcatggtgaggaatagtcagcttgcgtattttgcgcttggctttttctttccttggcttgctttgtctgccaagactttccggaagaagagcgatatgatcctccaaaagtacaggactgcggagcgatcaatggatacactgacaaagacacacaggtaaaaagtgaaaatcatatgggaagacaacacacccccgcctaaatcccaagaatacagatcacaaatccacacagaaaagcacacccatccacaagtctgaacatcacagacacacatccaagcatcagatgtacacattgcccacaaacaagcgaaagacaca

SEQ ID NO: 25745 - DNA, 313 bp, Gossypium hirsutum
  Clone ID: LIB3583-059-P1-K1-C10
cgggtcccacgcgtccaaacatacaaaagaaaatggcaatagcaagagagaaccaacaagctgggggcttactgataattggaatccttccttcaatttcaagaaaatgggatatattattaaaattttatggagggcattaactactcttgaaagactgggtttcttactgtgtctggataaatcaggtggaaaaggggaaatggcaattaatatgtgacggtgggtgggttggtgttctgagaattaatctcagcgatctgaactactgctgttaattactacacttacatcaacggacaaaatatgggta

SEQ ID NO: 25746 - DNA, 340 bp, Gossypium hirsutum
  Clone ID: LIB3583-059-P1-K1-D12
gcttagtgcaatgctgcttatatattcaaagagttgggtgcactttaccatacattcagttggactgggtagcaggtcaagtagtgccatcttgtttatctttaaatccttggttttctttcaccacaagtaataagcttaaccgtaaatgccccgtcataagatattctgattgagcgtagtgaaacacaactagagaccagaatgaagatccagtcctcttttatgccatcacgaaacatgttgattatgtttttcaggtgaagttaatagttaaatcatacaggtgggcttccttttatatcgggtgcaacagacagttccatgttgagtgtcctac

SEQ ID NO: 25747 - DNA, 391 bp, Gossypium hirsutum
  unsure (1)..(391): unsure at all n locations
  Clone ID: LIB3583-059-P1-K1-D3
gcgctatttcaacgaggacagtgacgaanacgatacatcatctgaatctcgcactcggaaagtacaatctcagacctggttgattctatggagttgctgcaagctgcccatcattaagcccaagatctggcggactggtcgactatgaggactatgaggatgatgaatactatagaccacctcccaagaagcatactgagacctcagaggacgatgaatgaaccttggagacccttatattgaagccgtagttgatttctagagagcatgtgaatgaaatagcttataagaagcatcgtctgttttaaagctccaaaacaagaaaaagggtatatgcggctttgtgttctaccctaagccaggcagtgctgccaagtaagaaaactgcaaa

SEQ ID NO: 25748 - DNA, 494 bp, Gossypium hirsutum
  Clone ID: LIB3583-059-P1-K1-D8
gtttttaaggtgttatgacttttcgactcaaagggaggcacaagttattccaattcgacggcctggtgtgcgcaagtctgaatcaaagtgcaagaactctttcctacagtcctactgaaaatgctgttcttatctgctcagatgtggatggaggatcttatgaattgtatgtgataccaaaagatagctttggcaggggagagatgcaggaggcaaagaaaggtcttggtagttctgctatatttgtagctcgtaaccggtttgctgttcttgacaaaggcaacaatcaagtcttgatcaagaatttaaagaatgaggtggttaaaaagagtggccttccagtgcctacggatgcaatattttatgctggaacaggtaacttgttgtgtcgatcagaaggtagagtagttatatttgatctccagcagaggcttgttcttggtgatctttaacccctttggtgaaatatgttgtttggtctaatgacatggaga

SEQ ID NO: 25749 - DNA, 399 bp, Gossypium hirsutum
  Clone ID: LIB3583-059-P1-K1-E2
caagaatacagatcgtaaatctgttcttgccaccagcaggacaaccaagaatccacttccaccctcaaggaagtgtttaccggtgttgaagaaggacaaagctacagaagctagtagaaatacaagtaaggctaaagtctgtgagagtgcttcacatcaagcaagctatggaaagaaccatctttcaaggaatagagggagtgatagctttgtaatgatggctactaaaagtggatccaattcagctgctcgtatattgccaagatctttcaagccaagtgttaagactgcactcaggccttctaatgctcaaagagcgtcaaaatcgaagtgttcttcaagtttgaaaaaacaagcatcttgtgctgcaatcttatccaagaaagacataaaatgtac

SEQ ID NO: 25750 - DNA, 462 bp, Gossypium hirsutum
  Clone ID: LIB3583-059-P1-K1-F11
ggccttttctggaaccttctatgtatatgataattctttgccatttgtacgcgttggaattacacggatatagatttttacgattgtttatcttagggcacataaatgaacttaagttagacatgtttttgattgaagggtatcaagatttaggtcaattgtgatgtgattttctattgaaacggtcatttatcatgaattttaggcggagaatttttgtttcttgtgtagtggatggtagatgacatgtttagccacaaggagatttttaaaaaaaaaatttgagcagtgattccatgatacatagtatattataaaagtgcttttgttatagtcctggaatttacattactatatacggtttgcatgcttggtctacagaagctgttatggaaaggtttaaccgtcggaagggatgctggagtattcagtcactggagtgagcactattgctatgatgtc

SEQ ID NO: 25751 - DNA, 279 bp, Gossypium hirsutum
  unsure (1)..(279): unsure at all n locations
  Clone ID: LIB3583-059-P1-K1-G11
ggatgaataaaaatgaatccagttctgatggcaaattccatactagaataaataatccttctgtgttgttggcctttttcttgaagcaaacaaaggaattagctcaattcaattgtttggctcgttgttttgtttcagttgcaacttcctttgtcaacttgtaactgtacattccccttttctttntaaagcatcgaaattaatttcactgtttttatcacttccactcgttcttgagatgtctgtttaaatccaccttgcgaattcccaaaataccaa

SEQ ID NO: 25752 - DNA, 372 bp, Gossypium hirsutum
  Clone ID: LIB3583-059-P1-K1-H10
cccacgcgtccgcatttatttccccttcttcttcttgtctccctcgcatttcatctcttctccgtgttgtttttcaccgaactcgtacggcgatgcgatatttcacgtctctgttttcattttgtacgaaaatcccatccaaaattacctaagaagatacaatttttactccactcttttctgtcccctgttccttctgtttaaaccctgttttccttttttttttttggcttgttcatcagcattttctctgttgttttaactttttttttgatatccagattttgatttccaattttcgatagttttcagaaatacccatatcggaaattagctccccttttttgattgtttggttggttagggtctatg

SEQ ID NO: 25753 - DNA, 392 bp, Gossypium hirsutum
  Clone ID: LIB3583-059-P1-K1-H3
cgtgcgcccacgcgtacgagaattttgagagcgtcgatcgaaagaaaggaagcaaaaccctacttattcttcgttgaaaccgccgcattgtcattatttacagacataccctctcattctcctttactctttgatgattgtggttgttggggagagcgggaggagggatttgcggtggaaataagtgatgaagttgaaggcgcagtcgctgttgccgtcatactagtgttcgttatgggtggagcgaaagcgtggatgtttagcgtggtatcggtaaacctgaacggctccgttctaagcaacaagcatgtatgttggaggtggagatcctctgcggcgcaacagagtaagccaatctcatggtcgctcgtcttttggcttgatgctttttc

SEQ ID NO: 25754 - DNA, 328 bp, Gossypium hirsutum
  Clone ID: LIB3583-060-P1-K1-A5
tcgcccacgcgtccgcccacgcgtacggcccgcgtccgacaccaccctcagagtagataccatcttaaccgacaacactcccaacaggcgggaagcctgctgtacatgcagctcctacaaatctgccaggaacaacatgcgagacacctgcacaataatgcctcacgagcgatgcatggtgagtctacacacatatcatcgacccgtgcacgttcccggtccgaatcctcattctgaggctgaatccttctgacactaccaccaggattcctggaacgcagagagagaaaccacgtggataccttgacaaggggcggaccgtgacgaa

SEQ ID NO: 25755 - DNA, 449 bp, Gossypium hirsutum
  Clone ID: LIB3583-060-P1-K1-A6
ccacgcgtgcgccacgcgtcgcacgcgtccgaccgactctcgaggagataccatgatagacgacaacactgccacaggagggaagatgctgtcatacagcgcgtacaaatctgacaggaacaatacgcgagacagcagcacaaacagcctgacaggcgattcaaggatgtgttaacaccgttgtcaacggcacgagcaaggtcccggaccgaagcatcattctgtgaatgaatgcttgtaacagtaccaccaggatctcattgaaggcgagagagagaaaccaagtggatagattaacaagaggcggaccgtgacgaaggagagcaacatcaaaggaacaacccttactacttccatctgagatcgctccataaacgattcatgtaagaacatgtgcaatttcagagtacttcagaggtttgctgtcaaacatcatttacttaagggca

SEQ ID NO: 25756 - DNA, 527 bp, Gossypium hirsutum
  Clone ID: LIB3583-060-P1-K1-A7
ccccgtcgaccccgcgtccgcccacgcgtccgctctgaaaaaagaaagcctctttagaagaacaaaccaaaaaacttcaaacgggggttctgtgtaatcaaagagaaccggacgcctgtctttacttcattctggggatttggtgtttgagaaaaatccttgaggagtttcggacgctgctctctcttttgcacttgggagctcttcgttgccaatttgatggatgccaataactgtatgtctactcctcccagtgcagagcccaccatgtacacaggcgattggagaacccacttgctgccagattcacgacgaagaatcctcaataagatgctagtgcatcttatgatactctctttggtcaagtatacttaacttgctcagagtctttcgcatgttgaccttagtcttagttagtattgctatgaaccaatcattcccattaataactccttatttcctcttccaacgtgttttctttgttttgtaaatacatggctttagaaccaaagcttgttcttttactc

SEQ ID NO: 25757 - DNA, 565 bp, Gossypium hirsutum
  Clone ID: LIB3583-060-P1-K1-B3
cccacgcgtccgcttttaagcctcacactctttcgctgtaaaacttgtgcttctgcaatggctatgagcgggttggtttccacccgaaatttcggtcattttatcggttcaggtatactatgtcgaggggagcaagccatcttgcttcacaggggagaaagatcatctttagccgttgtgcatgggaacattgtgaaacctatatcagtttctccgaatggaaggcaatttattttgttgtcactgcaccatagtgataagtctcacagagtttatcctcaacacagaagtaaaggaagttttgcatgctgttctttctcaagttcctcgcctggaggttggcttgaggcaggtgacaaggacaaaatagtagaaaacaggacttctgctttctataaatctgaggagtatgacataactgaagcaaagttggactctttgccgtctcctgatgaaaccaatgaagctattctagttgagagagatatcccttggtggcagagttttccaaagcgctgggttattgtactcctctgttttgcaacatttctgttatgcaacatgg

SEQ ID NO: 25758 - DNA, 466 bp, Gossypium hirsutum
  Clone ID: LIB3583-060-P1-K1-B4
cccacgcgtccgtttggatttgtgcagcgacggcagtggatagcgggaggagagctttgcaatacctgcgattagatgaggagattcaaaagaaagaaacgaatggttttgatggtctgaaggttgatctgattattaccgattattgtatgcctggaatgaccggctacgaattgctcaaaaaggtgaaggaatcttcagcttttagagaaatcccagttgttatcatgtcatctgagaacgttatagctcgaatcgacaggtattgtttttttaagtaacttttatggccttaaatcattgaaaaaaaattgggttaaaaaaaaataatggatcttgaaattgttgataaacagatgcttagaggaaggagcagaggattttatagtgaaaccagtgaaattatcagatgtaaaacgcataatagattacacgaccacagagttaagagagggagaacaaagag

SEQ ID NO: 25759 - DNA, 496 bp, Gossypium hirsutum
  Clone ID: LIB3583-060-P1-K1-B9
gttgttgattctttgcagttcttgccggcggccgtttaacttcagagtatctgtatgatattctgactaaggccagtgtggtcaagaagaaaattccagttctcatctgctgtaacaaaaactataaagtgacggctcataccaaggagttcatcagaaagcaaatggaaaaggaaattgataaattgcgggcatcaagaagtgcaatatcagcagctgatatttcgaatgacttcactctgggagtacctgaagaatcatttacattctctcagtgtagaaacaaagttacggttgcggaatcttctggtttgaccggtgaggttggtcaagtagaacagtttatctgggaatgtgtaaagccctaggctaaatcattcttctttcttttttattggcaacctctttaaaaagctggtttgataatttcatctctaacattgatcgattttaggaaaatgactctaggaaaactggtgaattagtaagagaaaac

SEQ ID NO: 25760 - DNA, 639 bp, Gossypium hirsutum
  Clone ID: LIB3583-060-P1-K1-C3
caggaggcacgtcttatttgtgtactaggattctctcagtgcatatttattatcataccggcgtgcgtggattttatatggagagaaggtggcactactgtttaccctttgaagggaacttagcaataagctgttctcataaaaactgtatattacatgttcacacgtccacaatttttattgtaaaggttatcgaccagttgcgagatttatggccttgcaagattcatatatacaatggtgatttttttttcgttgataaaaaagactgactgctgaaccttgtaatgattcttattgccaacagagatctgatttcttccaactcaaaacttagtaagaaaaggggttggtggacaccattgatgtttacagctggtctaacatcagcaaagtatttgttcaagcatgtcttaagacaaaatactcttacacaagctcgtaagaacatgtctcgccattacgacctgagtaatgacctttttgcactcttcttggatgagacaatgacatactcttgtgcagtatttaagacagaagatgaggatttgaatgatgcacaacacacaaagatctctcttttgattgaaaaagcaggaatcgatagctagcatgaaattcttgagattggatgtgggt

SEQ ID NO: 25761 - DNA, 576 bp, Gossypium hirsutum
  Clone ID: LIB3583-060-P1-K1-C8
cccacgcgtccgctctttttttgtcgatttaaaattcaacccaaaaacctgaaaaaaccaaagagaaaagatgactttaacgctgtttactagattatttctttactgaaaaagctctttttttcctcaaaaaatcttctaattgatattttacctttgattttttcttccttaaatcattgaattatgatattttctaagcttggccgatcagctccccgatcttctcattcaagaaagttgttgtaccgtggcggaggaggtgccattaccggtggaacgtcgacgagcttgccgcttttgagcggcagcgtatatcgaataattgggcaatcaggatatttgatacgatatctatctctaataggagctcaaaaggagtttacttcaaaggcttatttgtcagatttgaatatctttcttgctaaccctagaattcgtcactttttctcaagtgaaaccccaaagaacaagaattatgaaaacttttaccctaaggaaaagaaggaaattccaaagcaaaatgaccaaaaacctgacttccaaaatgattcgaagacagattaccaatgtaat

SEQ ID NO: 25762 - DNA, 392 bp, Gossypium hirsutum
  Clone ID: LIB3583-060-P1-K1-D12
cccacgcgtccgcccacgcgtccgcccacgcgtccgcaacctccgaaagcgaaaatcaaatcagcgacgggccactggcactccctcctccccccgactgatcgttgccgaggattggctttaattgatttgtttgttcatccatggcgggcataatataccagctattagcctcctccacgcttctctctctgggtctttaccatctcatctgcaccacccgtaacttccttaaatccccacaatcctactccgccaagcctttgtacccattccctttctcctccaatctccggctcaagcaccttgccgtctaccttctcatgctgtgccttttcattgcattcctccaccaatctttcatctactccgacccctgatccactcgaaaa

SEQ ID NO: 25763 - DNA, 455 bp, Gossypium hirsutum
  unsure (1)..(455): unsure at all n locations
  Clone ID: LIB3583-060-P1-K1-E11
atttgctgaggtcaacaattacttcactacaaatcatgatatcatcgccgcatgaattanaggtggcaaggccgaacatgaagggtcctggaagcctttcagttttaccattttcacgtttaggtattgaaggctttgctgcttgatatcctaaaaagctgttagtgctattgaatgacttcagcttgcttcttgttatcaaaatgcatcgacattataaggacatgcttgaaggcacttgtatgagtcttagcactgctttgttatttaacggcgtaatagctcgcaatatatcttagtctctagtcgcactgatttgccatttgcatcaaaactgaataactctttttcaacctgaaccgactcgctatccaactatatcctttcattctcttggcttgcaatctactttactaatgtggacctagcgcatcgttctctttataatacataaa

SEQ ID NO: 25764 - DNA, 566 bp, Gossypium hirsutum
  Clone ID: LIB3583-060-P1-K1-E12
cccacgcgtccgccgacaatgaagccaaacagaagattgcatgagagttggcaagaatcattttcggtgggcaaaccagctttgcttccataagtccaagcaattccggatcggattctaatgaagataacaaaaggaaaagagatgaatctggcggcaacagctatgttcttcaaagatttggtgaagcactgaatgagaatcctcacagggtgttcttgatggaagatatggaacaggttgattactgttctatgaaaatcattaagcatgcaatagaaaccgggaaagttacagtttcagatggtgttacaattcctgtaatggatgccattgtcattttcagctgtgaaagcttcagctcattgtcaagagcttgttcttcgaggaaaaggccaaattgtaatgacccagaagagatcaaagaaccagaaatggcgcaggaaaagaacccatctgtttctctagacttaaacattgccattggagataacaatgaaaaagaccagtcaagaactgatgatgcaactgggattctgaaacatgttgataagcaaattattttc

SEQ ID NO: 25765 - DNA, 567 bp, Gossypium hirsutum
  Clone ID: LIB3583-060-P1-K1-E5
cccacgcgtccggaagaacttgatgctagtgctgcagcgccatggtctggttgggggacaaaagattcctgccctaaaaaatctttggacaaaacttccaaatctagtagctgggatactgtttcttcttggggaacgaagactgctgcagttcatgaatctggcttcattggaaatgataaccagccaggccaagggagaattgaaaatgaatgggataataaagcaagtcaagtaaagccggtgcagtcagcatctggttggaataacaaagtgacagaggaaatggtagttcaatcgacatctagttgggatgaaaaagcttcttgggaaaagccagttcagtcaatgtctgattgggtttcctcatctgctgcaggctcagatgagtcacctacaaaaggctggagtaagaatagtgcttgggaccaacaaaagtcacagacaatgaataatgcttgggaccaacaaaagtcacctgcaacagatagttcttgggatcggcaaaaatcatctacggcaaataattcttgggatcaacaaaagccaccagcaaatagttcttgg

SEQ ID NO: 25766 - DNA, 503 bp, Gossypium hirsutum
  Clone ID: LIB3583-060-P1-K1-E6
gcgcccacgcgtccgcacaaaatctctcctcaaattgtgcactacgggtgtatggttgatctgctaggccgtgctggaggcttggaagaagctctagatctcataaaattaatgccaatggagcctaatgatgtaatttgggggtctcttttagcagcatgcaggatgcacagaaatcttgatatggcaggatatgcaactgaaaggatgaaagaattagcttctgacaggactggtatccaggtgcttctctctaacatatatgcctctgctgggaaatggactgatgttgcaaaggtgcggctgcagttgaaagagaagggggctcgaaaagtgcctggatcaagctcaatagaggtaaatggacaaattcatgagttcacttcgggtgatgaatcccatccagaaaggatgcacatagctgcaatgctagatgaaatgcactgcagagtggaggctgccggccatgctccagatcttaataatgttctacttaatgttga

SEQ ID NO: 25767 - DNA, 698 bp, Gossypium hirsutum
  unsure (1)..(698): unsure at all n locations
  Clone ID: LIB3583-060-P1-K1-E8
cggtaattccccgggntcgaccccacgccgnntccgcccacgccgnntccgatcannctgactcnnagccattaaatgggtatcaaatnnttccccaaatnncttatttctgtgtgtgctagtgtctcttccaacccagtcgatgctctgtgtcttcacccaatcttnnaaaatcnnntgggttcaaatctttntnncagcaaccctagacccgaacgnnngtattcangnnaatcgcnncccaacccagnnnagttgcnnaatattgnnngtgtgannatgaccctgannctttnngagacnncaaananntctcccctttcccttcacnnctctttaacaagtnnaaacccnngaatcaganntcttgcattttnngctggtcaaaggccccgcatcannaagtagaattggaggtnntctcgtacctannctctcttcagtntctttcggggcacccccatcatcnntgccaagataaagttttcttctcctggggattcctttaaagctcagcngaaaaaaatcttgaaattttataagaagatanntcactgcctgttngtttgtctatttttcgaaacgaagtttgttttctgcttgtcccagatagtcccaaagcccgcagcnagaagattcgacattgttctgttgtacggcgactaaaaacccatagcattcacggaagatatgattgc

SEQ ID NO: 25768 - DNA, 537 bp, Gossypium hirsutum
  Clone ID: LIB3583-060-P1-K1-F11
gaagaacgccgtaataagtcattctatggtggcgtatatggaaatagcgccataaaaggtaaagaaatagtggcggtttttcctaaacgccgccaaaggtagaaaggaaaatgggaaagaaaattgcgattgacgacacaaaacaaagcaggagcaacttagctgatctccgtctccctgcctcaagagaaaaaggaagtatctgcgagagggagatacattgccatgattctcgtggttttattcgccaattctgaaggcaacatcttagttgaacgaggtgatctttgttataaccttagctgtaaaggatgtatgtgggaagctaccaacaaagcgactttttctagataaatacagaaggaaatgcttgactttggatgaaattatttgaaagcaggatttatttttgaaggtctcaacaacctaccaaattttggcgctgttgctggtgagtggtttcaattagaataatttctatttacattgtttcttttatgccttcgtatttacatgcaagtgaaattgaatttgatc

SEQ ID NO: 25769 - DNA, 572 bp, Gossypium hirsutum
  Clone ID: LIB3583-060-P1-K1-F12
cccacgcgtccggggaaagccactctgggtctctctgatcttctcttctcttcctttccttgaggcgctggttttcttaggttcagatacggtagagaagaaaaagaacgtatgatgggatctaattccgggcagccgcagttcatagctagcaccggcaaccggagtttctcaaatgccccgctgattcagaatgcagatactaatcaaattgtggtgcctgaccggaaaagctggaaaaacttttttgcatacatgggtcctggattccttgcttcaattgcatatattgatcctggaaattttgaaactgatcttcaagccggagcgcagtacatatatgggttactttggatcatattagtgccttcatgtgctgctcttgttattcaaaccctggctgtcaatctgtgtgttcttacagggaagcatttatcatagcactgcacaactgaatatcctagatgcccaaacttcgggatatgggttcttgctgcaatcgctattgttgcatgacatatttctgaagcgattggctcacccttttgactaaaacatgctcttcaacatcc

SEQ ID NO: 25770 - DNA, 464 bp, Gossypium hirsutum
  Clone ID: LIB3583-060-P1-K1-F2
cccacgcgtccgcccacgcgtccgctctcttcgaaaaatcaaggaaaagaaaaatgcctaggtatgatgaccgccgcggtagtggtacacgcctttatgttggtcacttgtcttcgaggacaaggtcacgtgatcttgaggacatgtttaggagatatgggaggtctcttggcttttgcctaacatggaggtctatggtgagagggtccatggtggatttggccagtctttctagtgttattgcctgtttttatcgaaatggaacaatatcaaaagtggtgtttttgattcaactctgaggggcgaactctcaacccttcgataattgtgtcttgatggcctttctgtttctggcacccctttacgcagaatacgtgatgtggatatgaagcgtgactatgcattcgttgaattcagtgaccctagagatgctgttgatgcaagatattcattgaatggtagag

SEQ ID NO: 25771 - DNA, 517 bp, Gossypium hirsutum
  unsure (1)..(517): unsure at all n locations
  Clone ID: LIB3583-060-P1-K1-F3
ccacgcgtgcgccagcgtncgccagcgtccggttgaggagcagaaatcttgaggcatgcgaacctagtcaggaaacttgggggaacctggcttttgctgagcgaaagctattgaaagctgaacgagctttatctaaggttgaggattatttaaaaccagctgaccggcaggcagatccagaaagtataactgatgaggaaaggtttatgtttcgcaagctcgggttaaggatgaaagctttcttacttcttggtagacgtggagttttcgatggtactatagaaaacatgcacttgcactggaaatacagggaattggtaaagatcatcatgaaggctaaaaattttgatcaggtaaaaaaggttgcaatagcactcgaagctgaaagtggtggagttttggtttcagttgataaaatctccaaaggatatgccataattgtttaccgaggaaaggattatgagcgaccttttacaataaggccaaaaaatcttttaacgaagaggagggctttggc

SEQ ID NO: 25772 - DNA, 393 bp, Gossypium hirsutum
  unsure (1)..(393): unsure at all n locations
  Clone ID: LIB3583-060-P1-K1-F4
gcgggcaacgaccacaangccaacaaaggngctggaaacgattctagcaagaacaacaacaancccanangcaaggccaggggagtcagcaacatggccaccagcaacaacaaaggccggaaaggaagcaacaangngngagggaatgcagggaaaggnaccaggagaanccaaggaggagagagagagaagaagaagcagaagaggaggaaaccgaagaaggagagcaagaacaaagccanaacccnnnccacnnccaacgcagaacaaaccaancncganncagggaagaacanggcaanngcagggncccccaaaggnnngcnncaaggcagccgaggcnaaggggcaacaangagnnccgcnaaacaaacnaagaagcaaaccccaaca

SEQ ID NO: 25773 - DNA, 184 bp, Gossypium hirsutum
  Clone ID: LIB3583-060-P1-K1-G12
acatcaaacgaacaaccattactacttgcataataaatcgttacaataacaattcagagaaaaacatatcaaattcatagtcctacataggtttgctgacaaacatcatttacttaggggcataaaccagttccccattgccattttataagcaaaccccaacactttctttcttccacaccat

SEQ ID NO: 25774 - DNA, 321 bp, Gossypium hirsutum
  Clone ID: LIB3583-060-P1-K1-G8
acgcgcgcctcaccttaccactctcatttcttactacttccttcttcttcttcaacatcatctatctggtggtcttttctttgcttcttcgcacgctctattcttataacagctacctatgttttttcttgttgttcatttatcaattctcattatactgactgatgctatggcttctgctgctaactgcttactgtattacaccaagtacactaactgccttactgtttcagaactagcaaaaccattctttgcctgctgcccttgtcatgttaccacccaccagtcacactcttgtgaagacatttcatcacagagcta

SEQ ID NO: 25775 - DNA, 559 bp, Gossypium hirsutum
  Clone ID: LIB3583-060-P1-K1-H5
attgtcgcttaattttaacgcctcaccgttcgatcttcaccacgtcacctgtccagttctcatggatgggctcgatcaaaggtgtatttaccggcaagaaggcttctccagatgatccaaacatcagcgccgaatccttcactctcctccgattcgccgatgaattgaagaatgctagaaaattggggaaatttaagcaatacgtagttggtagaagcagcgacgcaacatttgcggatgttttcgagaagcaagaagccattgttagataccttggaggttgtgatccgaccggaatgaatcttcaaccaagtcaaaagaaagaagctgcgaagcaatgtgattgcacgttgttggatgtcgagaatgcgcttgcaaagttcacttgggctaaagaagcacatcagaagatggctcaactgaaagaggaagggaaaccgatgccgaagagttttgctgaggtgcaaaagctaatgggttccacaccattggatcatgccaggtctaacatggcaaatagtggtcaaattagcagaaatgcgctttgtccgtgtggttc

SEQ ID NO: 25776 - DNA, 191 bp, Gossypium hirsutum
  Clone ID: LIB3585-047-Q6-K1-A1
cggacgcgtgggtggaggcaaaagattttggcttcgatttagcaaagcttagtagcttcatgctgaagtttctgtattaataaatgagttgatgatattgtagtgttgttcttcttttctcactgttgatctcgccaggtttttctttgtttgatcattttaccctttaatggatcgaaaacagattaatc

SEQ ID NO: 25777 - DNA, 532 bp, Gossypium hirsutum
  Clone ID: LIB3585-047-Q6-K1-A2
gcgaagacacatagacaaactcgtgctgctacgcccattagatttcaataataaaactggacctccacctgtgcgatgaaattaacaatcttaggaggatcaccacccatccttattacataaccgatgaatgaaaagagcacacacacacacactcactctctgtgtctaatatcaacaggggccggaatcacgactttcaaatccttctcctccgcgaaatccttactagctttcatggatcaatctctccaataacctaatattaccataccacaacctcattgtggtgtatggagacctgagcactacacctctttatgtatactcaatcacgttcataacgaacttgcaagatcatcagaatgaagatgcaatatttggaacattttccttgattttttgcacccttacattgataccccttcataaatatgtgtttatcatgctgggtgcacatgatagccatgaaggtggcacttttgctctttactccctgcttcttacgcatgctaaatttaacttgctttcc

SEQ ID NO: 25778 - DNA, 239 bp, Gossypium hirsutum
  Clone ID: LIB3585-047-Q6-K1-A5
agcgttcaagcgacatcgtcgtcgaactcacaacatcctcttgcctgtccaatcacaaggactttatccgtgcgggtccctggattgatatacaagggattcaacaccaacagatgaaattactcaatccatctcatgatctcttgacaaatattatcaatgatcatgatgaaacaccttatgatcgccagcagaagccgcattatcttcatctagttatcaattacaaatataactat

SEQ ID NO: 25779 - DNA, 422 bp, Gossypium hirsutum
  Clone ID: LIB3585-047-Q6-K1-A6
tttttcgatagaaggaaaggaaaaccctaaacgctcctgttgtgttgacttgaccctaattaatttatagagagaacagataagggtggcttgagctttgaccactgattatccactgtgtctgtctggagcaggaggagaatagctaacgaagaaaaaaaatttaatcgttaattatacactgtaagaagtgggtctttttggctctcagtttttagtctgagcgatgcctaatttaaccgttttatcttggccaaatttgcagtcactagcaatggctactaccaatcttcagtttctccaaaatccattcccaagacccactttttcttctaaatatttagtgatgagagctccgaaaatggtgttcaagtgtggatgtagcaagatcagcagtgttgggggggatgctttatatttca

SEQ ID NO: 25780 - DNA, 297 bp, Gossypium hirsutum
  Clone ID: LIB3585-047-Q6-K1-B10
gtatctctgaggtgtcttaataaacgccttcatttactttcgtttccatttacttttggtggcgttttgaattttagtagcaaaatgagagaggctttagttcacatcggtcaggctggtatccaagtcggaaatgcctgtggagctttactgccttgaacatggaatcagcctgatggccagatgccaagtgacaagactgtcggaggaggtgatgatgcttttaacaccttttcagtgaaactggtgctggaaagcacttccctagtgctggatttgtggatctttagcctactg

SEQ ID NO: 25781 - DNA, 549 bp, Gossypium hirsutum
  Clone ID: LIB3585-047-Q6-K1-B12
gatgaagagagaaataagaagcccaaagtagtagagcacaccgagactttacaactatcctgcgacaatgaagaaatgactgtaaagatttcattagtgttagcaaccgaagaaaagagcatgttgatccggtgtttgaaggtgaactcaaattttttgtttggttagtagcggatatgccaagcctggaaccataggtgatcgttcaaaagttgaatgtacttctagaggcaaaaatggttaagcaaaaaaggaagaagttcgctctgcaagtggtggaaaccatgagacaggaggtagctaaactgttatcgacgggctttattaaggaagttgagtatccagattgggtctcaattgtggctatggtgaagaaagcaaacgacaaatggagaatgtatattgtcttcaccaacctcaacaatgcgtgtcctaaagtgtgcaggttggtggattcttgggtttcatgatctcaaaaaggggaatataggtgaacccgaaaaagatccgtgctatcttggaaatgtctcctctacgaacagtaaatga

SEQ ID NO: 25782 - DNA, 556 bp, Gossypium hirsutum
  Clone ID: LIB3585-047-Q6-K1-B4
cctgtcctaaattttattgccaaacttttttgaaagtgagaatcttgatgatgctgcatcggcaataaacgactatacaaaacaagggaaaaaaaaattatacgagtctttcgagatatctcagttgcaaatgtacagttttgcacttgtcaacaaaaagaagttgattctttctttgcaacttcccccaccttctattgttttctgttgttgtcagggtatgttaagcctaacgaatagtgaatactagggtgtttctaaaggactttgacttgtagatctatgattattcttctgagtcaaataaactgctacagtggaaatgggtaccttttcatggagaacagactttgccctgcaactgaaaaagatgggagccttgacataagaagctcttaagagaatatgtcaaaaagatatacaggcaaaggaacaatctttctggtctaatgagcttcgatgaaagctaaacaagctagggatggtcggctccaggagtggttcaagcagaaactgtggaaagaagggttagagaaatgagctactggatttgaca

SEQ ID NO: 25783 - DNA, 130 bp, Gossypium hirsutum
  Clone ID: LIB3585-047-Q6-K1-B5
gttaagatatactcattgctttaaaatgtatacttcaattctcatttttgaaccgagttgttatttttatagctgattgagaaaaacacttaattctgatatttgttgagggaggggcttcttgtgattc

SEQ ID NO: 25784 - DNA, 283 bp, Gossypium hirsutum
  unsure (1)..(283): unsure at all n locations
  Clone ID: LIB3585-047-Q6-K1-B9
tcgattttctctttctcaactccatggcttacagctttgttaaaaacccattgagcctttgctcatgtgtggttttaactgatctgggtgctctttataccgcagacccagcatanccatccaacaaacaaaataaagattttgcggttatgtctatgccaccaacaatccctgccgcaattgttgnncaaaaaanataattttgtttaaatagtgaatttatgcagttaaaacctaaattcacaatttttccaaaactagaaatacttgcacattttcaata

SEQ ID NO: 25785 - DNA, 274 bp, Gossypium hirsutum
  Clone ID: LIB3585-047-Q6-K1-C10
cccacagcgtccgcccacgcgtacacccactcatttctatttatacaggttttcgttttatttgggtgggagggaaagctcattcaatcttacctttcctcttcaatggcatcttcaaacacgtcgataaaataatatattgaaactgtacgaattaatgatgatatcaaaggcatgatatttgaaaggatcttcttgcctgcgctccaaccaaaaacttagcttaatgcatataccatgagaaggatatatttccttttacgtaccatacttt

SEQ ID NO: 25786 - DNA, 278 bp, Gossypium hirsutum
  Clone ID: LIB3585-047-Q6-K1-C11
ataacgagacagggtagcaggcagaacaagggtacaggttgcctctatttgcctttggggctagcgaaaatcgctaagtgtttgtgacagacactgaatggagccgtggtttctgaagtgatctgctttaatcctgttatgtggctatgactggaatatatatctggacctgttatgtttttacttgtgactgctcttgtgatggatggaacaatgggtttagttttcatgtttgttttgtgattttatttttattgaaataaattgtttttgatggg

SEQ ID NO: 25787 - DNA, 178 bp, Gossypium hirsutum
  unsure (1)..(178): unsure at all n locations
  Clone ID: LIB3585-047-Q6-K1-C12
cccacgcgtcctagggccatttgtgtatcatgtttatatacaacaagtcatcncgcctatgttgcctgttttcattagactttgccatgcttatcaaacctcctaacttttgggttttctatataatgttaaataaaggttattgtttttttgtttatgaaatttgtcttccaatatt

SEQ ID NO: 25788 - DNA, 449 bp, Gossypium hirsutum
  unsure (1)..(449): unsure at all n locations
  Clone ID: LIB3585-047-Q6-K1-C4
cccacgcgtccgcccacgcgtncgtccacgcatccgctcgatcaatcttttattgccagcggcagtgaggatggacaggtgtatatatggcacagatgctcacgtgagctactactgacatagcctggacattctggagcagagaattagctgagctggaatgcaggaaaccttcacatgctagcttcacctaaacgatgacggatcaatccaaatttggaggttagatcgctttaacctgaaaggtggagagcagagcaatggtagcaaccaccagtgcaatggaaggagctaaatgaaacaatttatagtctatcaaatgagggctgtgaagtcggtgtaaattatgcaattatttgtttctgttctttgacatcctaaagccagaaaaaggccaaatgtctctcttgatatgacacttttagccttgagaaccatctctttttgtt

SEQ ID NO: 25789 - DNA, 542 bp, Gossypium hirsutum
  Clone ID: LIB3585-047-Q6-K1-C6
cccacgcgtccggtaggggaaaagtgttttcaacactgtaaattctcatccgatgggaaacccattgatggtccatggtatttacaagaacccctatatcaaaaatggaagcaatgggattgtcgtactgattgtcagtaccattgtatgattactagagaagaacagagggaaaaactggggaataaacccatcaaatatcatggaaaatggccttttcaacgtgtttatgggatacaggaaccagttgctgtagctttctctgcactaagtcttgctgtacagtttcatggttggctctccttttttatccttcttaactataagttgcctttgaggcctgataaaaagacttattatgaatatacttgcttgtggcacatctacgccatcttggctatgaacttctggttctggagtgccatttttcacagtcgagatgttgagttgacagagaagctagattattcgtctgctgttgcgttagttgggtatggtcttattctagcgatattacgagtgttcaatttgagagatgaagc

SEQ ID NO: 25790 - DNA, 188 bp, Gossypium hirsutum
  unsure (1)..(188): unsure at all n locations
  Clone ID: LIB3585-047-Q6-K1-D7
gcccgggatgtcgtgatagcctctgtaacatgtcttaaatggcgagaagcttctcggaaacaggcgtggaccctatcatttaactctaatgattcgcctccttatcgngatattacccctaaacaattttagatcctgattactcaaacagtattccaaactacattattgcattgcctatcaatttt

SEQ ID NO: 25791 - DNA, 307 bp, Gossypium hirsutum
  unsure (1)..(307): unsure at all n locations
  Clone ID: LIB3585-047-Q6-K1-D8
cggacgcgtgggttagttccagaatggttgagaagtactggccctgttactgggggtggtggcggttgggcccaccactttgcttcctcttcttttaattcaaatatttctccactggttcatcatggaagacatanaaactttangaatataggtgattctgattcccctcgttatgcatttttggatcgggcgtcttctttgaattcacggaggagttctagtaatggatttgcaaagcatgcttacagtagctttagtaggaatcaccgagattaaggaccgataatggtataaatatagctta

SEQ ID NO: 25792 - DNA, 520 bp, Gossypium hirsutum
  Clone ID: LIB3585-047-Q6-K1-E6
agggcttgtgtaagaccaacctggcagagctagcagcatagctagctctatgcatgacgatatggccaggcttgcttgtatcagaccttacgttgataccaaagctgatagaccgctccaatgcacagggatggcgcaaagaaatgcttagcacatggaaaggagacagctgcttatactccagagaacaacactactgtgccgaggagcaaatgttattgagatgaagacaacctggatctgtactggggatttaaacatgtataggtagctacagatatcaactgtgagggaaactttggaaaatctgagaattcacgttaaatggaaaattgcgaccttgctgtccttaacaccagatcattgacatgatgttcacgagcagctactccgcccgagagacaacaacgtcgagaggacacaagctgtctatgtaccataagaatatggtgccatattcaaacatgactgtttaaaagtattggataccactcaagtgattgattcgagcgatgatgat

SEQ ID NO: 25793 - DNA, 378 bp, Gossypium hirsutum
  Clone ID: LIB3585-047-Q6-K1-F10
ctgcaaagcattcggacgcctgtaaaccaacagctaccgatccagattttatgtgcctgagtgaggagggttccaccgccatccatggctgcattgggagggtgttgatgtgcgacgtttgcgagcaagttccggctgcgttcacttgcaaagccgatgccgccgcgctttgtgtcgcttgtgatgccgatattcactccgctaatcatttggctcgtcgtcactaccgtgtcccgatcgacccttttcttggtccacaaaaagaggatgtagtactgatgggttcttggtctttgttacctgctttcaatcatacgctgggtgagacacatgatttggtgatttcatatttggatccatttattgttttgcagtacc

SEQ ID NO: 25794 - DNA, 318 bp, Gossypium hirsutum
  unsure (1)..(318): unsure at all n locations
  Clone ID: LIB3585-047-Q6-K1-F12
ataacacattttccttttgacacggtttttcttacccttttttttttcaaaaattttgaacgacgatggatgctttccgcctctcaccaccatcccccctnctactccaccacaaagagatggtaccttaaacaccacacggaggaccccacaattcctataaatgaaaccaacatctatcctagaagaaatgaatatattcacacaaaccccagttatatcaaccacacaagacacactctacgcagcgcctttactctttggatctcgtgttggtatggttgataccaccatcgttactcaaattcaacttgcggg

SEQ ID NO: 25795 - DNA, 342 bp, Gossypium hirsutum
  Clone ID: LIB3585-047-Q6-K1-F6
gaggcatagtatgagacagatgagcacgacggcggattcatggtgaagccccggaagctttctatggagctgcgagacatatacagctcccatccattaaaagacatcatatgaaccataacatggatgatccatctaacattgcagttttggatcttatctttaatgctgctaaaacctgtccaacaatgccagcactgttctcagatcataccttcaggcactatgcctacctccgagacagtctttctcatcttgttcctgccttaaggttaccaggtagaaaactagtgtcatcggctgtttctcccagtattgcaccccatgaggacccgtcccatc

SEQ ID NO: 25796 - DNA, 483 bp, Gossypium hirsutum
  Clone ID: LIB3585-047-Q6-K1-F7
attcttttcctttttctcctctgtttttttcttctcttcagtctccgtgccggtcgcggtttcgcggatctgatctcgattcatgtcgaaatcggtcggatcgtgtcgacactggtacggacccctaatgccgagtccggtaacggagttctgataagttttcattgttcttttacaggtaagaaactgtcttgggctgactatagctaaggaaaatggatcaaaatggttctggtgggatgctgataattttgactgggataccgaagatgagctggaaattgataattatgcaatcgcctctgctcaggagtgcacttaccaatgggaagctgttttaggcacagcagaggtgagctcgtctgcagattctccgaattccaaggtaattgatcattttgttgggatggggttctcccaggaacttgttacgaaagcaattgaggaaaatggataggataattcatatttgatacttgaagc

SEQ ID NO: 25797 - DNA, 344 bp, Gossypium hirsutum
  unsure (1)..(344): unsure at all n locations
  Clone ID: LIB3585-047-Q6-K1-G12
cccacgcgtaacgcccacgcntactctcttactgaattcctcccattgttttccggttccgaccgactgacganagactgattcatttttatttacgggctacacataaaccaaatanaaacaatgacattgaaattattcgcgaaattgatgtttgcaaatgctagccctgtgatttgcctgacttgtctgctataaaaacccaagatccggagtggtacttcttttacccactcgaacataaacacacaaccgacaacatgctgaaaacgcctacccaagctaattactgaaaaactacagaaattcgaccaaaaagatcaacacctgcagagcatcttaat

SEQ ID NO: 25798 - DNA, 237 bp, Gossypium hirsutum
  Clone ID: LIB3585-047-Q6-K1-G7
cgtccgattcccgtcgacccaccgtccgggcccaatcatcctgatgttgctgcaactttcataaatgttgctatgatgtatcaagatattgggagatgaatacacacttgtatctgcagagccttaaaaaaagaaaggtgcttgtgaggaacatttcaaacactggtgctatcatgcctgcattgcttaattgtatggtgccttcaaactttacaccaccagaaagaaaactagaca

SEQ ID NO: 25799 - DNA, 116 bp, Gossypium hirsutum
  Clone ID: LIB3585-047-Q6-K1-H4
gccacgcgtccgcacacgcggccggagattggacgaatttttgattactcgcaagagcacgatacagggagcagttcatatgggctgaagggcgagcttcaggacaccatgaggga

SEQ ID NO: 25800 - DNA, 575 bp, Gossypium hirsutum
  Clone ID: LIB3585-047-Q6-K1-H9
atcctgctggccgctcttctactgcagggtgacaatgctgcatagccatccaggaacacctcgtgtgcacgatcatccagatctcatcctttgtcaatcagtcctgggtgcagcatcggggctcagggtggctgggtgacatgcagactcacggctgggacaccgactctggcaccatcattttcctgcacacctggtctaagggcaacttcagcgacgaggaactcctagatctggagttgctgttccgcgtctacctcattggattaacccgggaggcccaagaatacgtcagtcaactgcacttcacgtatccttttgaaatacaggtggtcggtggctgtgagctacgttccagtgacttttcaaaaggcttcttgcggtcagcttatgaaggatcagattttgtgactttccaaaacatgtccctggtgccatctccaggagctgatagcaaagcccagagcgtctgttatctcataaaccagtacgaaggcatcaaggaaatagtgtacaggctcatcacgaacacctgtccccgatttgtcttgggtttcttcgatgcaacaaaggtg

SEQ ID NO: 25801 - DNA, 420 bp, Gossypium hirsutum
  Clone ID: LIB3585-048-Q6-K1-A12
cccttcccatccttctctaatacataggatattatcctaaaaaattgcattttactgtagctgctgtcaaggaagcgatcgatactttaaggagtaataacgttaatgcctttgtgttggaccttcgtgataataggtgattagctttcgacatgatccgttttaaactcgcccttaagacaggtttttctaaaagattaaatttgctgcagcggtgggcttttccctgaaggaatcgaaaccgccaagatctggttagacaaaggcgtgattgtgtatatttgtgataatcgtggtgttcgagatatatacgacacggatggtaggtcagcaatatcagcttcaaaacccctagctgtcctgttaagcttggttgtaacaaaaataccattttttactggttcaatggcaaatatattt

SEQ ID NO: 25802 - DNA, 364 bp, Gossypium hirsutum
  Clone ID: LIB3585-048-Q6-K1-B10
ccgtccgtattccggtcgaccacgcgtccgatcactcatccggttgttagtttgtatttgaaattttaactgctgaaagatatgggaggaatgtagaactgattcagcaagctatagaaaacacaataaacgtatgccatttgatatgtatgtaatgatgtatacgacatgtgtgaaaatagaacagagttaagaatttaagacacattggtttgtaggaatagtacatgattttataaccaaaagaggagagctagataatgtgaatgctttgaggaaaatgcggattactctagttagattttgatataaaaagacatgaaatgatatatatttacaatgggaatatataaggaattttttt

SEQ ID NO: 25803 - DNA, 288 bp, Gossypium hirsutum
  Clone ID: LIB3585-048-Q6-K1-B9
aaattgtcgaaccccattttatgcacgattacgataccctttgcaatgcacatcttgatgagtcaaagcgtaagcctgaaaccagtaagttatcacaactgttccgttggatctttcggctgggggggaatgatgatacaccatcccacggagttgaattgtagtctgctttttaaggaacaaaaattgaaggtataattgtttccttttccttgtagccactcttttttctgtattcactctatggctaaacacaaaatcgattttggtacaacgatgtatcttggt

SEQ ID NO: 25804 - DNA, 329 bp, Gossypium hirsutum
  unsure (1)..(329): unsure at all n locations
  Clone ID: LIB3585-048-Q6-K1-C1
cgtccgcctcctcgtagcctccatgattgccttggggttttaggatcggaagataatgtggctgaatactaccagcaggaggtataaatgctagagggttttagcaaaatggatgccttagccaagcgcgacttattcctggcaccntaaatgatgactagagaagaacacatggaaacacacattaattatcccatcaactatcatggcaaaccgccttttcaactcctttatgggattacacgaaccagttgctgaacctatctctgcactaagccttcctactcatatgcatccctgcctctcctttctcatccttctcaactata

SEQ ID NO: 25805 - DNA, 434 bp, Gossypium hirsutum
  Clone ID: LIB3585-048-Q6-K1-C5
gccacacctgcgtgcactcgtgcgcacagacatgcgatcttttacttaaatgaactaacaaccttggggggccgggcgtgaccgagctattgagcaagagatatcagccccagaatccatcaccgaccgtcactggccacagagcatgcgtgtagttctctttgactcagaagaataagattacatgcctattgaactcaacagacttttgctcaccagattctgctacctccatgaacacttttgtgatcttgagcattaaaacactgacgatctactacaagtgccctgctttagcagtcattgtatcattttatagacctttggtgcgaccaaacttcagtgaactgaagatgacaggagaagatgttagcatgaaaaaatctgtactttcaccttggactgatgcgactagacagttacacaatgcacta

SEQ ID NO: 25806 - DNA, 257 bp, Gossypium hirsutum
  Clone ID: LIB3585-048-Q6-K1-C6
tcgaccacgcgtccgaccacacgtacataccaagcaacattcccaacaacaatatcgcttcttttatcgcctcttctgtcctcatgtgtggcttgaaacactcataccaacactaccaccaaccctaccgataactctgcggatgaacttaatgctaatcttacagctaacaagacatctcatatcacatacaatctaaccctcaactgaattcttttctactttattaaaccatacctaggagactaccaagctga

SEQ ID NO: 25807 - DNA, 111 bp, Gossypium hirsutum
  unsure (1)..(111): unsure at all n locations
  Clone ID: LIB3585-048-Q6-K1-D3
ctcaggccaatcattgatcccattgcgtcaatatttcaccttatgttttgtgcgaaatctnaaccttcagggnaagcctcatttttatacattgataggcccaccattact

SEQ ID NO: 25808 - DNA, 556 bp, Gossypium hirsutum
  Clone ID: LIB3585-048-Q6-K1-E5
gtccgccgttcgccgcaaccacctccgccgcgcgcctcctccgttttctttactccggcagctccctcgccagggtcggttaactcttgctctctttttaatcccctgcatcgaatcaccggcgtgccccatcatgtcagacccggccgtggacaccagctccgagatcaccaccaaggacttaaaggagaagaaggaagttgtggaggaggcagagaatggaagagacgcgcctgctaatgggaacgctaatgaggaaaatggggagcaggaggctgacaatgaggtagatgaagaagaggaggaaggcggggaggaagaagaggaggaggaggaaggtgatggataggaagaggatggagatgaagatgaggaggccgaggcagctactgtcaaacgggcagcttaagacgatgaggatgacgacgtctacaccaagaagcagaagactgatgaggatgactagacagcaaaaaaaaataggaaaagtaaacttaacaaaaaaaagtccaccgtgacctattcaccctccactttccgtctaataatttaaact

SEQ ID NO: 25809 - DNA, 336 bp, Gossypium hirsutum
  Clone ID: LIB3585-048-Q6-K1-F10
gtacttcttactttcctagctcggcactcactcattggcgcacagaaagactggagacttcacgcagaagggacgagttttttacatttattgaaaggcagacgtctagctggattttggtctgtactgagatcgatctggaagccgttttttttaaccatctcgatttatcgatctaccgtttgactttactccgaccatggatattcaaagcttgaagaaacatatgagactaagacatttagattcttggaattgaaagagcctgatttacagctacgggtggcgtcaatttctgaactgttggtatcttcatcgatgaaaggatctttttat

SEQ ID NO: 25810 - DNA, 404 bp, Gossypium hirsutum
  Clone ID: LIB3585-048-Q6-K1-F8
aaaaaaaaaaaaaaaaaaaaaaaaaaaaaaaaaaaaataaattataaaaaaaaaaaggaaaaaggggggggggtttaagtttaaatatgattatgcttacttatactttttatttatgttatctaaattattaatattggtcgtttgtgtcaatttaaagactgttaaatcctttaaattacccaatttaatagttttatagcttttgccatttttgctttttggcgtattttctaatattgccttacgtgatagattgttccaaattgttgaactaattaaatggttaattttaaattgcttttttatcttttattagattatgaggttgtatttattatgtttttttttatctgttttaactggttaagtttttttgctgctttaatattattatttttttt

SEQ ID NO: 25811 - DNA, 357 bp, Gossypium hirsutum
  unsure (1)..(357): unsure at all n locations
  Clone ID: LIB3585-048-Q6-K1-F9
ccacgcgtccgtttcactttgtctaaaacctttttagtgttattgtttctaagccattttgtatgatcaagaactggtacacaaaggataacatttggaggaaaccaacagagccaacagggtctgtcttatgagctacactnaagccaaaccgtcataaatcttgcctgactaaaggggtcatggcctcaccaccagttatgatgccctctaccggacttatgaccaactctttcacgtgacccttttggaccactttggtcacgcatgtgaagtggacataactcaattttggtatgcggactgcatctgaggaaaaacacaggaagagtttcatctttctactgtactgtttgg

SEQ ID NO: 25812 - DNA, 493 bp, Gossypium hirsutum
  unsure (1)..(493): unsure at all n locations
  Clone ID: LIB3585-048-Q6-K1-G2
cccactacgtgcgagcacgcgttcgnggacgcgtggggtgtttatttaaagcattgaatgtgctatcatcgggaagggattaaaacaaaggcggatgctgccaaaaactgatctatttagggcttatcagaaatgctgtgtcctaggcaggggcccctccccagccacgggtgagactctgcaaccaggggctggtccggctgccccctcatactttgtccctccttccctacaggaggtctccagagctgcactggccctgctctgttaccccaggctgacctctgtccccagggcctggctgaatattttgaaccgggttttttgggtcatatgatatgcagacaggtctcatgtcctggagcacttggaggagcccccagacagtcccggcctggaccaggagtttctttggctttcaaaggctggagcagttgcccctgccacccacaggtcccacagagttccaaggacttgcttcctcaaatgcacc

SEQ ID NO: 25813 - DNA, 179 bp, Gossypium hirsutum
  unsure (1)..(179): unsure at all n locations
  Clone ID: LIB3585-048-Q6-K1-G3
tcttaaaaattgaaatcataaacaaaaacacttgcagttttcttaatggggacgatagttcaaactacgtntgcactgtttttctttgtcttctttcccctattgncttttccacatcccatgaccgattgttcataattggactgaagaacagaaagttttatcgcaacaattcttta

SEQ ID NO: 25814 - DNA, 283 bp, Gossypium hirsutum
  Clone ID: LIB3585-048-Q6-K1-H10
cccaccgtcgctttatctttcaaatccgtcttttatttcctttaactatcattgcacgagggtttttatttcaggctcaatcaatctattccattgcttatgtgcagttatttttgagattcagatccttcagctaccctttccaagagagcaatccttttggatccacagtagaaaggacgggcataaatatggggaggtccttttatcactaccccgtagtgtcctcgcacatcaagcttcccctttctctaaccctagacgggggcactctaaattcctc

SEQ ID NO: 25815 - DNA, 205 bp, Gossypium hirsutum
  unsure (1)..(205): unsure at all n locations
  Clone ID: LIB3585-048-Q6-K1-H5
cgaccaccacattttgcttcgtatctttgataatggaagcttaatttttgcttcaactatcattgncagggatcgtttgttattctgaccaactgccagcaatcattaaagccatttgtgaagatgttaaacggcaataagctgtgcgacaaagggtgttaatttaaatgttggtcaaagtattgtctcaaccataccatctcta

SEQ ID NO: 25816 - DNA, 330 bp, Gossypium hirsutum
  Clone ID: LIB3585-048-Q6-K1-H8
tcagattcttttttatctcgtagccaaacttatgcgatgctgaaacagcaaatggaggttgctgctgggtagatgattacaaagaagcagctagaatacgtgattctttgaaaatattcgaggaagaggaacctgttttgagatttaggaggttgatcaaagaggctgttgctgatgaaagatttgaggatgctgctagatatcgtgatgagttgaaggaaattgcacctcactctctcctgaaatgttcaagtgatgcaacaaccttgggaatcagagttcaagttaggagtgttgtatatatgaggggcgtagtctgccctgatgagg

SEQ ID NO: 25817 - DNA, 460 bp, Gossypium hirsutum
  unsure (1)..(460): unsure at all n locations
  Clone ID: LIB3165-001-Q1-K1-C6
cccacgcgtncgaaacagtctgagggaagatctacctccagcacatattctcaagcccctgcaactaacggttcaactcctccggcaccagtaaatcccaaaatggaccttcttagtggtgatgactacaatatgccgaaggcagatgattcacttgcccttgttcctgtgggagaaccacaacaaactactcctgcgtcatcacagcaaatggccctcgtactctttgatatgtttcctaacagcaacaacacttctaattctgtaaacacccaatcttcaggtttgtccggacaactatatcctttggctcctcaaattcagcagcagaacattttggctcctcaaattcagcagcagaatggaaatgcaccaaacatcaggttacctcgatatgagcaatcatttgctcaaggcactggtcctgcctggaacaatcagcttgttcagcagcagcagc

SEQ ID NO: 25818 - DNA, 336 bp, Gossypium hirsutum
  Clone ID: LIB3165-001-Q1-K1-D2
tccgttttttttatatattccaaaaaacataaaaccatcttttattatttctgcctgtgagaaatataatgccacaaagctatgcaggtagtacatattgtaagaaaacaacacgcatgcttccatgatggaaacatgattttattttatgcaacacgcattgacacaccaaacgacatatagatatagtaagaagcgacatgcatgcttccatgaaggaaacacgaatttattttatgcccacacacacacaatctttcactactgtaaatctcaacatatgacccagtggaaatttgcatatatggctctggctcactccagcgcctctttttt

SEQ ID NO: 25819 - DNA, 332 bp, Gossypium hirsutum
  Clone ID: LIB3165-001-Q1-K1-D7
ggaaaagttttcagaataggacatcttgttatacctaaacgagttgcaactgctgggttgtttagctggtgtggagatgatattgaaagatgttggatacccagttaagcttggaagtggagttgctgctgcatctgcttatctgcaaaataacatcccaatgatcccttcaaggatttgatgaagaatattgcaattaattagtccatgtaaacttttttttaaatttatttatttgctccatcataaatttgtaaaaatatactttgatatgtttctctattatactctctctatctaagtcttttattttaaaaaaaaaaaattataat

SEQ ID NO: 25820 - DNA, 428 bp, Gossypium hirsutum
  Clone ID: LIB3165-001-Q1-K1-D8
ggagaagagcgttaaggttttaaaaaacgcagcgaaaactaggaaagtcccagctgaggaagtgctttcagctttttctgttattgaaaaagctaaaattgatccatcggcattccttgaaacgcttggtggattggattcacctgaaaaaattgaaaggcggccgttatttccctcttacggcggttcagaggttcgatgctgctggaaggaggattgagaatggtatatttcttggaccaattggtttcttaacctttgaaggaaaattttcatggaagaacagaatattatcctttattttcgaacgaatccgggttaaaattggacttttcaaccctctggagatcggtcttggccagaaagatgatagagaaccaaacaccaaagatcctttctttatctggttttacattgacgaagaaatc

SEQ ID NO: 25821 - DNA, 458 bp, Gossypium hirsutum
  Clone ID: LIB3165-001-Q1-K1-E6
cccacgcgtccgctctatcaaacccacgccataactgaaacaaccttgaaccttccttttctccatatacataacccaaaaccttttccctgtaaaattttcttcatggggtttcctgctagttacgccgaagttaccttacccaaacccttgcttttcgcactttcattactttgtttcatcggaaatctaatttccgcccttttaaaccgcctcggactctccgatttcatcgaatcggacatggtttggcccgaaaaccggacccgaacattcgagactaccaccgtacccgctcttctctttccggttataaagttcgaggagctcgtcgtcgacccaccggagaactgtgccgtttgcttgaacgagttcgaaagaggggaagagatcaggtgcttgaaaaactgtagacacgttttccacagggcatgtttggacccgtggatggatcatga

SEQ ID NO: 25822 - DNA, 440 bp, Gossypium hirsutum
  Clone ID: LIB3165-001-Q1-K1-F10
cctagccacccgttccttttctcttttatcctttttcaattttcttcttttctccttcattgtgtcgcccaccaaactcatttttccttggcgtccttcccttctccactggtgctaatttttgtcatttttcttcctcccttttgattttatttcattatttttttagccttgaattagtctcttgaaccactcaaaaattggatcgcactgttgccacaaagatctccattgtcgcccctttaacttgctagagcattgatttaaacatcccagaacagcagtgaagccatttttcgtccgcgctctcgcttcgcaccatatcattgtacgtttaagtttggtgaaggaagcgcagatttcacaagtagtactgcggttttgtgaaattaaggtgaagttggcaaggcaattaattcttcagaaacctagaatcattg

SEQ ID NO: 25823 - DNA, 217 bp, Gossypium hirsutum
  Clone ID: LIB3165-001-Q1-K1-F4
cacgtggtgttcattgcgcgccctgcggtccttgaaaattcataggacctaatttcttctcgtccctttcgtactcataatcctatcaagtgtccaaagttaacagcctttggtcaatggaacaatgtacgctttggatttcctccaaatgcttccgtaacctgcgtataaagattgtctctcacggctggtcacgtacgttccattccctaacccg

SEQ ID NO: 25824 - DNA, 232 bp, Gossypium hirsutum
  Clone ID: LIB3165-001-Q1-K1-F7
gtcgtgtcttatcactctccgtaattaccgttccgtccaaaaagcttcactgggaaaatggcttggcgtggtgcaggatccctctctcgctccgtcatgtctgccgccagagctccatcgctccgcacccctgcgcctatgcctcgcgtccgtctccctacttcctcagcttcccgccttcagtcacgccgtctctccttcgccccttccaggaatttgggagaattgggat

SEQ ID NO: 25825 - DNA, 201 bp, Gossypium hirsutum
  Clone ID: LIB3165-001-Q1-K1-G12
gaaaacgaattttttctaagaagagctttttttttttccttcgaaagcatggaagaattctactctgaaagacggcagccattggaatggaaaggctttgatttgtagctttcaactcggctctcttatatattagccctagcaattgtttgctctttagggcacaacctcttccccttcctcttgaccttggccatgccc

SEQ ID NO: 25826 - DNA, 382 bp, Gossypium hirsutum
  Clone ID: LIB3165-002-Q1-K1-B10
caagaacttggctctgcatttcttctcgcttttccttgtaaaacaaaacaaagcattcggggaaggctaaacagtcggaaaaggatacatcaggatccaagattgagaaaaaagaggcaccctctttcaatttcatactccaatataatcccccaccccccttccccacccaccctttttttctctgatacttcaccatctccattttcctttttgtctacttctgcatcctcataattgcgctcaatcaactatgagaacagatatgagaaaaaactccaagtcttcgtggcctaaagtaatcgctcgaaaatggctgaatataccgagtggagctgacgagtttcagtccgattacgccgtaaacggcgaaactggtgac

SEQ ID NO: 25827 - DNA, 372 bp, Gossypium hirsutum
  Clone ID: LIB3165-002-Q1-K1-B9
gcggatgcgggattaacatgttggtttcacccgaggcacgagtcgttcgttgttccgagtgccacacccttaccaatcttgtcccaatgaatgctcgaccgggccgaaccaggtataatgggccgccgagaatgcatgaaaatccatacgggaacggcccaagcccgcaacatccacaatatccacaaccgcgaccatccttatctccagttccgatttacgggagaaaacgagcacttctttgtggtgtgaattaccatggaaagagttataaactcaaaggaagtatcaatgatgtcaagagtatgaagtaccttcttgtggagacattaggatttcccaatgattccattctaatgctcacagaaaatg

SEQ ID NO: 25828 - DNA, 397 bp, Gossypium hirsutum
  Clone ID: LIB3165-002-Q1-K1-D10
ctattacaagtggctgttgaagtctttgttagttgccgaggcatatctcggtcgactcaactccactcagtccgatccatggcgtctcttcaccccacgatatctcctcaaagcctcctttctttaacaaaacctcgaaaacccatttcgaggcacctctcagcttcctcattaaccacctcaaaactgcccgagggccttgcgttctcgggaaccaaacagaaaaacaaaagggaaaactcggtggtggtggtgaagtcattagccgaggagcttgacgtgataccagttcaaagtgaggatgttacagatatacaagaaggagttgcggtgagtcaggcgccgagagaatcgtcaggaggagagttagtgactcaagtaggtgggtttagcaatg

SEQ ID NO: 25829 - DNA, 389 bp, Gossypium hirsutum
  unsure (1)..(389): unsure at all n locations
  Clone ID: LIB3165-002-Q1-K1-D5
gtgggcttgttctaacgtctcatttacttgtcttacttaaaggaaagatattttcaagggatcgggtactttcacgagatgaggtactccatatcaatcttcaaatttgacttcgccaatgcaagggcaggaaagggagtacaaactagacgatcttgatatcaaagaccacgaaattgacatatatcttgatctacatacaatcaccaatacatcaccgtacacagagctggacaccatctcacttgccaaagctagaggtctctttcatcatctatgtcttctgcacatgtgtgtggtaccaaagagtcatgtgaggcctgcaatctnatgaattctgacccagcaccactttcttgccgagcatatattgggacttgacccttaca

SEQ ID NO: 25830 - DNA, 392 bp, Gossypium hirsutum
  Clone ID: LIB3165-002-Q1-K1-E2
ggaggtggaagtggaagtggaagtggtagcttaaacattttattttacttcagatctcagctgaagcccttttcctttcccttaaacatcattttttttatttttttatttatttctcatcctattacatggcttccatccgtcggactctctcaccggcatttcacggccgttccacccagaacggcgctgctgtgttctcctcttctccctctaataagcttttacataaacatttcccctcttctacttcctcaacgctcctcaatttagtttaccgccgagggtggcgccggtcttttcgccgctgtctcttcttttttctaataggggtgctttttggaattactccggttggacaaatggatgccgatattcgacccaaggatttc

SEQ ID NO: 25831 - DNA, 408 bp, Gossypium hirsutum
  Clone ID: LIB3165-002-Q1-K1-F9
ggaacctttcttatgaaccctaaactctttaccatttgaccccccaatttctcaaaccctctaaaaaggattatcttttttttttccatggctgcattcagatgcaaaccttcggccgaaacagcctctttaacggtctctcagttcaggcattttctatctaattacatgcactatggtcgcatggctagttcctctcactgtaccaccatccgcaacaaatgggatgaccactttgtcaacactccttatcatttcacttctttcaagcccgtctcgcttcgtggcgaactcgtcgaaaagggttctcggtttttggatattaggaggaactcccacgatttaagcaaggatgtcgatagagaattgagagagaaactgggttgtaatagttttagggtattgagt

SEQ ID NO: 25832 - DNA, 332 bp, Gossypium hirsutum
  Clone ID: LIB3165-002-Q1-K1-G12
gaactatggccgagcggtgcgaagccttaggaaactcatggtggaagccctctgcgatactggcaagcaaattgtaacattttcttgaccatagggacgattgactactcgaaccgtctattggctgcttcaaaacagaaataacttgagactcgcagagccccatggggcgctgtatttgatgaagccaatgattaaaggcatccggggcgcagagctctcgacctattctcaaactctaaataagtcagaccgcgggcttggatgacattatccttccacaagatgaaaaacggcctgtgctccttcgtttgccaattaaactgtttggt

SEQ ID NO: 25833 - DNA, 398 bp, Gossypium hirsutum
  Clone ID: LIB3165-002-Q1-K1-G2
cccacgcgtccgcttcccttcttaaaccacacagataagactatactcaatcatttactacactctctgtctcaatggccaccaagacccatacggatccagagaaaccaaatgccgagggcaccgccgagaacgaagacacgagtccggtggaggaggttgccttggtggtgccggaaaccgacgaccctactctccctgtcctgacctttcgtgcctggttcctcggtttggtatcatgtgtgctcttaatctttctcaacactttcttcacttaccgtacgcagccgctcaccatctccgcaatcctcatgcaaatctcggtcttgcccattggcaagttcatggccaggactctaccaaccacccagtacagccttctcgggtggcacttcagc

SEQ ID NO: 25834 - DNA, 374 bp, Gossypium hirsutum
  Clone ID: LIB3165-002-Q1-K1-H4
gttctttggagaagtggtcgtagttttggaggttttgattcggcaaacagggttggtgcggaggcaaggaaaggagactttaacatcttcaggaccaagtcgactctcagtaagcagaattccctattgcctacaagaaaagagaaagaaatggagactcaaagagccgaaggtgccactggccttaacgagcctgttaacaaaagtgttcctgttggaagatacttcgatgctcttagaggacctgaattagaccaagtcaaggactctgaggacattctccttccaaaagatgagatatggccttttctccttcgtttcccaattaattgctttggtatttgtcttggacttagcagccaagctgttctatg

SEQ ID NO: 25835 - DNA, 344 bp, Gossypium hirsutum
  Clone ID: LIB3165-002-Q1-K1-H9
ggggaaaattaatgggttccataagccttgggggggtaaatggtcctggctgcccctaatttaaccttttggtgggggttaaaaatgaaaaagtagttaggtttttggccgccggttattccctttcttttggcttggctctttcccttcccaaggcttcttctaccaatccacaggcaaggagaaaatgactaatcccaaagataataaggttgaagaggtaaaggaaagtgaagaaatatctaagcctttgcagcggttgccgagtccgaaagaatagacagctctctgaaagagtgtgcatagaagtgctgtgacagtggacaaggtaccgacaggattgt

SEQ ID NO: 25836 - DNA, 297 bp, Gossypium hirsutum
  Clone ID: LIB3165-003-P1-K1-B11
cccacgcgtccggttttctggcaatgttagaacccactggactttcaggtttgaacccaaattttcagtcgtaagggaatgcaagaccctgttacacgcaaatgccctttctctcttcatcgcatctcagtcaccccatagccataactctctgtttctctgagctctctcacgtcatgggcgatctggtattgcagaaaatagcaatttctgggccaacgctggcctcaatgatccaacgcctatcatcttcccctgccgacttagacggcctcctttttcggccacgtcactttg

SEQ ID NO: 25837 - DNA, 374 bp, Gossypium hirsutum
  Clone ID: LIB3165-003-P1-K1-B4
gttttaatagtttattattagttcatctttgtccgttggatcattcagtttgctggggagggttctttgatttgatttgatttagttactggggtattgatttgatatttttggggttttggattcaactttaaagttgaaagctttttttttttctgggaaacgtaagaagttgatctttcagtgtttgggtttaatcattgagtttctctttgggtaatgtgaaaaattttggtcaaagcacagagctggtagatgacctaaaagattatatatatatatataaagctgattgactggtagattaacaaaagcttcaccaaaggggaagaaaagaatttttttttttgggtccttagaaatttgaatttttt

SEQ ID NO: 25838 - DNA, 136 bp, Gossypium hirsutum
  Clone ID: LIB3165-003-P1-K1-B8
cggactcgtggtcggacgcttgttcggacgcgtgggctgaaattgtatgtaggcttcagactgtgattggtttcagtaccctttatgttgtaaaacctggaccaattatcttattatatttctaaatctttctatc

SEQ ID NO: 25839 - DNA, 276 bp, Gossypium hirsutum
  unsure (1)..(276): unsure at all n locations
  Clone ID: LIB3165-003-P1-K1-C9
agcatggtaatctanngtttgttttaaaaaagaaaatagcaatcataggaggcttttatactgaggaagattcaccanctatntccgtcttgcataattccttcatggggtcactgcttcctcctgcttgcatgcctgtccactttctttctaccaatttttccaaatcaacaaccctttgtctgttaccccattcttttttataccatgccaccatcttgtccatgtcatcttccatttccattgtcaatgtatatcctattcttcattatacat

SEQ ID NO: 25840 - DNA, 303 bp, Gossypium hirsutum
  unsure (1)..(303): unsure at all n locations
  Clone ID: LIB3165-003-P1-K1-E5
ttcttctccatatttgcatcaaattcttctcactagctcccctctcaatgcagtagagtcanaccggaagtgactccattctcaccactaatctccacctcatgccacacctcaacatagtatccccatatacttccttaacctctctctgctttcccaacctactcccaagactacatctacaccactactatctcatgcaattagaaacagattccaaaccaaacatttctatccatctatttggacgcattagctcgaacactctcatatcctccattgcaacaacgactcacccctcta

SEQ ID NO: 25841 - DNA, 338 bp, Gossypium hirsutum
  Clone ID: LIB3165-003-P1-K1-F8
cgatgatggtctcgctgagaccctttaatggggtctttccgtatccatcaaagcattcattggttcatagaaacaggcagacagctctaaggggtaccatttacatgagtgctcaaacacaagcagttccttccagaacccagaggataatggagagcatttcagttagtggtgaggttggtggtgctggtggtgcatactcctataatgccttgaagaggttggacggaatttggtcaagcatttgctctactcagactgttcagcaagcacctcagcaggtagtttcaagctttcctggtgtgtctagccattctgttcttgctgaaaaacaatta

SEQ ID NO: 25842 - DNA, 251 bp, Gossypium hirsutum
  Clone ID: LIB3165-003-P1-K1-H4
cccatcgcgtccgcccacgcgtcctttttatctccctgtatcgagccctctagtttgtgggagcgcccagattttaattcagggctaaccttatagctcattttggaaccatcgccatacttcagatagatgagccaaagatgttctcaaatcttctgggtagcattgagtattggacaataatattcgatgagagaaacctgagaggagggcttcttgctgcttgaagcttgaggcaagcaaggcgctgt

SEQ ID NO: 25843 - DNA, 294 bp, Gossypium hirsutum
  Clone ID: LIB3165-003-P1-K1-H5
attccagggcgagggcaccaccacgtgccgtcgtggcagcattgtttcatccgtttatgggaccaccaccaggcctgggtggacagtgacattggttctacgctcataaggttcgggaccactactggtgatgtctccctcaccttagggctacgccatgctggaaacatgcccgagaatacttcttctttctcagctagagacgttggggggctgttaaattgaaaatacatattccacagtaatagctaaaacaattttcatttccaaaaaagataaagaaacatctatatc

SEQ ID NO: 25844 - DNA, 369 bp, Gossypium hirsutum
  Clone ID: LIB3165-003-P1-K1-H7
ggagtctcaaatcatcagccatttatggcgtctttcatcttatccttatgcggtatacccttccgcggcctgcctccgccgttcacctctctcttcccgccataatcttatacccgcctcaacatgccgcccgctctatcaccaaaacacaacctcgttatgcaaaccatctttaatatcaaagacccgaaatttaaaggtccattcacagcttagatgcccaatcatttctcctgaagaccgttggggcacttgggcttctctcttcgccatcggtgcttttggtctatggtccgagaaaacaaagattggaagcatggtgagtgcggcattggtgagcacattgtgggggctggcagcaagcaatct

SEQ ID NO: 25845 - DNA, 371 bp, Gossypium hirsutum
  Clone ID: LIB3165-004-P1-K1-A9
gagaaattgcagacaggaaaatggaatgtatacagatctgctcgctctccgttgaagctagtatcgcgatttcccaatcatcctgatattggtacattgcacgacaattttttactcgccgttgatttctttggagataacaattatctcggtacaagaattcgagtcgatggaacggttggagagtataagtggatgacataccgagaagctgctacagctcgaacagccattggttgcggcctaatacatcatggaatactaaagggctcttgtattggattatatttcatcaatagaccagaatggatcattgttgatcatgcttgctctgcgtattcccttatatcagttcctttatatgacactct

SEQ ID NO: 25846 - DNA, 378 bp, Gossypium hirsutum
  Clone ID: LIB3165-004-P1-K1-B9
cggacgcgtgggcgtactcctggttcgtagctcaacagagagttgaggccctagcacgtaccagtgataatggacaggaacggtcggagagctccgcagcgtggattggccacatcaacaggacactaagccgtttttaaggcgttgagggagctgatacgactatgttgacagtggcagatccaggttctgactgtcttcatctaatcttaccagaactggattcgtcccaaggtggaggttagtttttacgtcagataatcagacagagcgctcaagtatagaagccattcagtctctacagttatgcatgataatatcttgtgttggggattcaacaaagctttccacattggtgcaagacgtgttcaacgaacc

SEQ ID NO: 25847 - DNA, 251 bp, Gossypium hirsutum
  unsure (1)..(251): unsure at all n locations
  Clone ID: LIB3165-004-P1-K1-C2
ggtttacagtgattgagtcaattacatcaacctatcttcttggtcatagcacggtgcatggtgatagactctgttaaggacattttcngcaaacagaaaccaatcagttatccactcctagttacacaatttaccgtcaaaagaatctttgtgtcgactctttcacctaggttgtaagccgatacgatagtttaactaagggtcgaggctctagctattgatctgcccctagacgtgcctgcgcgttgaga

SEQ ID NO: 25848 - DNA, 292 bp, Gossypium hirsutum
  Clone ID: LIB3165-004-P1-K1-C6
ctgagtccaggacttaccacttttttttcgctctacagcaaattttttccctagaacgtcgcagttctcatggacaggctcgtccttcacatctacccaaactacattgcccaatctaacattacactaacccgtttttaaggcgtacaggtatgtcaattgtctgtactgacagttgcaatgccagctcctaactaccatctctaaattaacctcatcaggattcgtcccaaggtatcagtaaatagttacgccagagaaccagacatagccctcacgcaaaaaaaacaaa

SEQ ID NO: 25849 - DNA, 184 bp, Gossypium hirsutum
  Clone ID: LIB3165-004-P1-K1-E4
tggagcccttagcgagttctatcgggtaaagccaatgctttctgggatcgggggggcaactcccttgacctatgctaaaactttaaataggtaggacggtgtcgttcacattcaggggcgatgaaactgctcctttttttggcttactcggtgccgttgcttgccttgttttcttctgtatggg

SEQ ID NO: 25850 - DNA, 333 bp, Gossypium hirsutum
  Clone ID: LIB3165-004-P1-K1-E5
gacctattcaacaccatcatcttaactgctgagattacacacatctctatacggtatgtacgagtattgaccatagctccttcaatcctctactacactttgatatgccattctaaaaagcaacagacgtataggctacccttgcttaccttgctgcatatatctctccctctctatatattgaacccaccatttgttttgcttcagattctcgattctgatgtccatctttgcagatattttgccgctgctacgccttgatcgcatggggtcgaagagtatgcttttaccagcgtccttttcgcaagcaataaccgatgccatgagcaacac

SEQ ID NO: 25851 - DNA, 371 bp, Gossypium hirsutum
  Clone ID: LIB3165-004-P1-K1-F10
cccacgcgtccgatttttcaaagatctaactgcctttgtgcttgggggtttaagtttggcgggatttagttgatatcaagaaagcttctgttttgtaaaaaaaaaaggtaaatagagaaggattatggatctaagtttggttgaatttgattattaatttcgatctgaagatatggatagcattttttggttccgttccgttaactaagacctttattaaattcacttatggaatttgctcgctagcacttaggccccttgactttttttgcagacaaactgaatttcaggtgttttgattcatatctaatttgattcttttcacaggaatatatttaaatcattctttacacattcattgaaatgtaagt

SEQ ID NO: 25852 - DNA, 244 bp, Gossypium hirsutum
  Clone ID: LIB3165-004-P1-K1-G11
cttaatcgaagcctttacacattcttcttgcactacaccttgtggggaccctacaacttgccagattgaatggacaatttaaagcctaacataaacaacaactgcatgaccttctctaacattaaagttacctatattttgcatgtctgaggggataaagggccaaaaaaatcttcacaatgtgagctgttttgtgccatgatacgatacataccccatctgattcgttcctgctaattcatat

SEQ ID NO: 25853 - DNA, 162 bp, Gossypium hirsutum
  Clone ID: LIB3165-004-P1-K1-G12
ctgaatcgaagacttaagacattcgtgtagaactacaccatgtatggaccctgcgacgtgctagattgaatggacatgttagaggccaacataaccgagaactgcatgagctactctaacaaaaaagttacctattattgacatgttcgagggggttaaggg

SEQ ID NO: 25854 - DNA, 168 bp, Gossypium hirsutum
  Clone ID: LIB3165-004-P1-K1-H12
caggatcgaagacttacgactttcgtgtagaactacacatagtatagcccctacgactggctagattgaatggacatgttaaagcccaagaaaaacgacaactgcatgggctactctaacaaagaacttacccattatcaagacgtccgagtggattaagggccaaaa

SEQ ID NO: 25855 - DNA, 343 bp, Gossypium hirsutum
  Clone ID: LIB3165-004-P1-K1-H4
ggaagacccaggcggacgcacacgcgttccgcttaaagggagattaagttcatataactgggatggcttttgtgacgtctggggaattgctggccactttggtgccaattgctttttattggatatactcaggtatgtatgtgatgtttgagtcaaggtttgagaagtacaagttgcactccaagaaagaagagggggagaagaatttgggtttcaaaaagggaggctttaaaggctctctttggccttaaagttttgctattggatattaactttttaacgtttccggtaacaagagaaaaaagtgggaggcattttcaaagaaatcacttacctttctttt

SEQ ID NO: 25856 - DNA, 397 bp, Gossypium hirsutum
  Clone ID: LIB3165-005-P1-K1-A5
ccgtgagccccaacccggctcctgtgttttactttttcgatcccatgaatatcggtcttcctggtcttagttatctgccgcctgccaacgcggtggcgcctcctcctcctcctactgccggttcgccgtatttggaggatccgagtaagaagatccggaagccttacactattaccaagtccagagaaagctggactgatcaggagcgcgataagtttctcgaagctcttcaattatttgatcgtgattggaagaagattgaagcatttgttgggtccaagacagtaatccagatccgtagccatgcacaaaagtatttcctaaaggctcaaaaaaatggggcaactgaacatgtacctccccctcggccaaaaaggaaagcagctcatccgtaccc

SEQ ID NO: 25857 - DNA, 352 bp, Gossypium hirsutum
  unsure (1)..(352): unsure at all n locations
  Clone ID: LIB3165-005-P1-K1-B7
caaccacctaatactaatgtctatggcaacctcaatctcatgtctgaaaatcccaaacccttcttctgcttcacctccatgttcctcatcaacctcatcttcgaccagttgtagattgtctgtaccacccaagccttatattgtgacgataagaagttctcaaactgagggtcctttgagaagacctgtggcaccttctccaccacctcctttgaaacccgtcccaccttcttctccctccgcttctcctccgccacaaccgacacctncttctttttcttcccctccgtctccgccgccttcagcggcagctgttggggaccagaatgtgatcactttggagtttcagaga

SEQ ID NO: 25858 - DNA, 399 bp, Gossypium hirsutum
  Clone ID: LIB3165-005-P1-K1-E6
cccacgcgtacgaagaaacacaggttttgtatgatggttcaaacattgactcgcctgtatagtactcgaaatgtaggatcttttcgcctgtgtgataatgcaatgagacatcaccaccaccagcaacaaaacgcaaccgcggcaggcggtaataacgagcacgtggatgatgtccatgatcatctgcaaccaagtgaagataaatcaatggggcagcaaaatataggagagcctgcggttgaaactccccaggagaggccacaaacagatatggagcagatgaaggaaagattttctaagttgcttctgggagaagatatgtcacggggaggcaaaggtgttccttcggctttggctttgtcaaatgcagtgacaaacctagcagcatctgattttggg

SEQ ID NO: 25859 - DNA, 261 bp, Gossypium hirsutum
  unsure (1)..(261): unsure at all n locations
  Clone ID: LIB3165-005-P1-K1-F11
agtcattttcgatcagtataaaaatgtatccaaaactaatcgatcaacgccgctgggatgtccaactttttctccaaggcggaggtgacaagcagcggccgtcctgtcctcccccgcaacgaagtcgaatgccaccttctctccgccgtcgacctcgaacctgaagaccaccgtcacttctccctcttaaaatcggggctcctcatcctcaccacccaccgnctcatctggctaccttcttcttccgcctncacccctact

SEQ ID NO: 25860 - DNA, 395 bp, Gossypium hirsutum
  Clone ID: LIB3165-005-P1-K1-F4
cccacgcgtccgggggcattagcaatagctacaaaactgccacaactacgcccaccaccatgccatgcgtcggcatcccatacatgcaaaccagccaatggatttcagatggggattttatacgtggccttatatctaattgcactaggcactggtggcctaaaatctagtgtctcaggatttggaactgatcagtttgatgacaaagatgaaaaggagaaagcccaaatgacctattttttcaacaggttcttcttcttcattagtaccggaaccctgacggcggttacggtgctcgtctacttacaagatgaagtcggtcgaagctggagttatggaatctgctctgtttccatgtttgtagccatcttgatattcttatcaaggactaaaag

SEQ ID NO: 25861 - DNA, 202 bp, Gossypium hirsutum
  Clone ID: LIB3165-005-P1-K1-G12
cccacgcgtactctacagattattaatggttctggctgtctgtttgactgattggaaaggtttactacaaactgtgggccccattgctgctcttaactcttgtctagaactcaacacttaccacaggttgcaaatgatgcaaaccaagaccttcaacatgtcctagaagtttttgcgctaaggacacacaccagctctgtgt

SEQ ID NO: 25862 - DNA, 395 bp, Gossypium hirsutum
  Clone ID: LIB3165-005-P1-K1-H1
cccacgcgtccgcccacgcgtccgtgatggcagaatgtattaccaatatgaattggagccaccccatgtattgattaccgcaactgcagccggtaatcgcctttacctattcagcgtaaccggaagtggtcttcaatggaagaggcattaccaggatttaaagaggatatccgagtcttttcgtgtaatctagttttggatctccctggattatgacatgagtagattagtagtgatggatatttttactctgtaatttaaagttgcaacaaaaacaaagagtgtatttgcagcacagttataaaatgtgcaactttcttcaaagtaagatttttgctgaaaagctatacagcttgctagaagccacttatctgaacttgggataagtgtcagat

SEQ ID NO: 25863 - DNA, 280 bp, Gossypium hirsutum
  Clone ID: LIB3165-005-P1-K1-H6
gaacgtacaagcagagctgtgacactggggatgggcaatgttgggggctgcgggtgttttcatgccagggttattaaccaaggtggggattctaaacactccatcggggtactcagctggaacagcggactacttcactgacaccacatctttcttcatggtagagctaattaacatcggttgtgatgaagggagacgatctgctgacattatcaagccagggcgtgttaatacagaccccatcttgcctaacaacaaggtgaccgggactgatgttgga

SEQ ID NO: 25864 - DNA, 211 bp, Gossypium hirsutum
  Clone ID: LIB3165-006-P1-K1-A4
tcgatcagaagccgggcacagtcccttttttttgacccaaagccggctttagcccggcgatcccggccgaagacattgtcaggttgggaggttggctggggccgcacatttttttaaaaattacccaagtgtccctagatgagctcaaccaggaccagaatcttctgggggaccaaaaggttaaaagctcgttggttcttattttccattc

SEQ ID NO: 25865 - DNA, 218 bp, Gossypium hirsutum
  Clone ID: LIB3165-006-P1-K1-B10
ggtcaaagccctaagtatatgattcttttcatatcttaccactctaagaagggaacatcatttaattctgcaagatctactctctacgtcgaagaacttttccgaactaaacacttatactcgtgagtctctttaacccaagctacaccgatattttaaagtctaatatcttaggttacgacacttcttacttcaaaactgctttccacaagagttcc

SEQ ID NO: 25866 - DNA, 326 bp, Gossypium hirsutum
  Clone ID: LIB3165-006-P1-K1-B6
cttacctcccgatccaaccacaagagcttggtcctggctgctgccgtcaaaacaatgggtgaccgcagccgagacttcctaggcggtgaaatccgcaacaccatcagattctagtctattgatgcggtcgtgaaagcggatttcaaggcatgctgggtagcccacaggctgtgctcccatgggtcacattgtgttcaagggattcatgacgtataacccctagaacccttactggttcaaccgtgaccgcgtcattctgggcgctggtcatagttgtatgctgcagactgctctgctctacctggctaggtacgacagtgtcctgg

SEQ ID NO: 25867 - DNA, 226 bp, Gossypium hirsutum
  Clone ID: LIB3165-006-P1-K1-H2
cccacccgtccggagagaaaaccattcttctctcccgaattggctcgctagaagatcagagagttcgatgccatgagtttgtggaaagatcttgccaagaggcttcacggtagagttaggccaatcaaatgtgcacatattacagaatcaactcatttcaatcagctagtacgagatggagccatggctgtcgtcacagatactggcttgtacaacctgtgtgttg

SEQ ID NO: 25868 - DNA, 140 bp, Gossypium hirsutum
  Clone ID: LIB3165-006-P1-K2-A3
gaataccgggcgaccacgcgtccgccacgcgtccggatggcagattattaccatgtttccgagcgttcagatgccctgagggcttttccaaccatcgctgatcgggatggaagctgcaggcatacacgagacaactgata

SEQ ID NO: 25869 - DNA, 129 bp, Gossypium hirsutum
  unsure (1)..(129): unsure at all n locations
  Clone ID: LIB3165-006-P1-K2-B10
gtcaagccctagtatatgattcttttatatttgccancaagaagggacgtagccgtgttatgaatcaccaagggtgtggctgcaaggctactgggaaggatgcagaaagacgcgttatatgcaccacca

SEQ ID NO: 25870 - DNA, 242 bp, Gossypium hirsutum
  unsure (1)..(242): unsure at all n locations
  Clone ID: LIB3165-006-P1-K2-G10
ccacactgcggctggcggggcgaaccagaggaaactctgtggaggctcgcacgatactgactgcaaattggtcgttgactcgggataggggcgaagattatcaaccgttagtagctggttcctcgaagtttctctcacgatagtggagccttagcggttgtatcgggtaagacatgattagaggatgggggcgcacagcctaacctattataaactgtaaataggtaggacgggcggntctt

SEQ ID NO: 25871 - DNA, 468 bp, Gossypium hirsutum
  Clone ID: LIB3165-006-P1-K2-G6
tcgaccacgcgtcgccacgcgtcgagagctgtagacctttatggttgcattaaacaaagccttcatactggatggcagccttcagggattatggatttgacccctgggactctagaccctgaagtcaggagggtatcgagcctaaatggctagcctacgggagatcataacgcgttatgctatgttgggtgcagaggtgcgattgccctgaaacttggaaggccggcttatccagcagaaacagcctccttggttaaaccgggtgatcccaccacggacatacagtttggcagaccctacactttgttggttcgagatggcactcagggattgagagcacaaagttccagactggccaaaccggttcgaggggaacaatatttttgggttcgagaagaccttggaggctgggagccggctacctggagacactgttaacccattggttttggaaagatagaagcattg

SEQ ID NO: 25872 - DNA, 237 bp, Gossypium hirsutum
  unsure (1)..(237): unsure at all n locations
  Clone ID: LIB3165-006-P1-K3-B12
gtcaaagccctagtatatgattcttttcatatttncttctgagaaacgaaccttctttgactatatgtggagctgaacctatgttccttgctttccactttagatgctttccactgtttggatggctgagttgctaattacagatggtgaagcatgaagcctgggtaccatgcatactgaccatctagaccattggaaagtagtgtttgggagtgctgaaccaggtggttaggtgcc

SEQ ID NO: 25873 - DNA, 450 bp, Gossypium hirsutum
  Clone ID: LIB3165-006-P1-K4-G1
ctcacgcgtacaggccgtccgcaatcctttgtagagctgacaagtccattgtgacgatgtcattgctcaaataatgacaggtgtgcggtgtccattaaaacacatatatggatgacactatttaactatgtcacagaggtgggatcagctttgttcgggtccaatataaaagctcaacttcccgttaacgcttaacaggtccatatgtgagactcctagttcagtggggtcttcgtgagcttagagaccggcttgattcagtaaagatcacgcagacgatcactgaagccatgaatcttgtggctgatgatcaagcatggagagctcatgaagctgctgtcaatggcggacctttctgtgagtcgcatggatgaagctctttacatcatgaatgaacagtttcagactgcagaataaatgctacttttacaaacgataggcttgctaaaa

SEQ ID NO: 25874 - DNA, 403 bp, Gossypium hirsutum
  Clone ID: LIB3165-006-P1-K4-H2
ctcacgcgtacgtagagaaaaacataaaacacttccgaaatggctcgcatgaagatcagagagtactattgcaagagattggggaaagaacatgtcaagaggctttcacgttagagattatgccaatgacatctgcacaatttacggcatcaactgatttcaatcagctagtacagatggagccatggctttcgacacagatactggctggtaaacctggtatgttgttcggtatgcgtggacagagtggtttgggtgggtgaaatatagattgtgctcaagttatagcgttagcgaaagagcgtcttggcacataggtggaaatgagtggatgcaagggacctgttacaactctcattggttgacctttcatacgtcacaatgaaaagcatttacttaacga

SEQ ID NO: 25875 - DNA, 393 bp, Gossypium hirsutum
  Clone ID: LIB3165-007-P1-K1-A8
cccacgcgtacggttaggtatagcattcactactcgtacccactactagcaagggcttcctaaatgagctcatcggctaccattgccactgccattactgcacaggctaacatgggcgctactttcaccggcctcaagtgtgcctctgctttgccagtcatcaagaaggccaacaacgacattacttctgtcgcaagcaatggcggcagagtgcaatgcatgcacgtgtggccttccactggaaagaagaagttagagactctgtcatgcctacccgaacttacacccgagcagttggctaaggaagtagattaccttcttcgatcaaaatggagtccttgcttggaattcggattagaggcgggattcatgcaccgtaaatactggagccta

SEQ ID NO: 25876 - DNA, 396 bp, Gossypium hirsutum
  Clone ID: LIB3165-007-P1-K1-B2
ccacgcgtccggcagaagccaatatgtttttcttagaatctccaattggtgttggatgttcatactcaaatgtttctactgattacagaaatataggagatgagttcaccgcaaacgatgcttacactttcctgcataagtggttcgtgatgtttccgtcgtatagaacacgatccttttacatagctggagaaagctatgcgggcaaatatgtgccagagctggctgatctcatttatgacaacaacaaggatccttcactttatattgagcttaagggtattttgttaggtgatccagaaacaaatgatgctgaagactggagaggcatggtggattatgcttggagtcatgctatagtgtctgatgaaacttacaaaatcatcattgggagct

SEQ ID NO: 25877 - DNA, 181 bp, Gossypium hirsutum
  Clone ID: LIB3165-007-P1-K1-B3
aaatccaagtttgttttcgaagaatctacaatacctgagggttgttcatattgagaggttggggctgaaaacagaaatatattatatgagttcaccgcaaactttgcttacactttcctacataagtggttcgtgatgttttcgtcgtatagaacacgatccttttacatagctggagaaa

SEQ ID NO: 25878 - DNA, 383 bp, Gossypium hirsutum
  Clone ID: LIB3165-007-P1-K1-B9
caaactcccatcatccgagatcatcttgaacatagagaatggcggatgcgaccagggctctgtatgccccatcactcaacacaaaggccgaaaagctctttcctttcagacataaaaggcaaggcaacggccgtggttccatgaggaaaaccgctaccaaggctgctgcctatggaagtacatggaacggtcctgaccgggtctcgtacttgggtgcactatctggggcgccttcattttacttgaccggagaatatcgtggcgactacagatggtacactgcatggactctcggcggacccatagacatctgccaggaaccgtgagctcgaagtcatctcactggaggtgggctatgttgtgtgctctagggtgtgttttcc

SEQ ID NO: 25879 - DNA, 200 bp, Gossypium hirsutum
  Clone ID: LIB3165-007-P1-K1-D10
gactgggaaccgctccctctgaggcctttcccgggcgacgaacagtcgactcaaaactggttccgacaaagggaatcccactgtttaattaaaacaaaacattgcgaaagtcccttccgatgctcactcaatgtgatttctgtccaatgctcttaatgtcaaagtgaataaatttaaccaaacccgggttaaccggggga

SEQ ID NO: 25880 - DNA, 114 bp, Gossypium hirsutum
  Clone ID: LIB3165-007-P1-K1-D8
cccaccgtccgctaaccgttactcacggggatggcaacactagggagtccaaaacgtgggtgttttcctcggggagagttagtctatctaactaacctctgcccaccctggaaa

SEQ ID NO: 25881 - DNA, 198 bp, Gossypium hirsutum
  Clone ID: LIB3165-007-P1-K1-E9
aggacgcgtgggctgttaaacgatttcttgctagaccacgcctgcctatatggggacattatatctgctgcctgaatgttattttctacaaccacattggctgcgtgccagttttggcaatcccaggaggagaacttaagttattgtaagatagattataagattgacttcctttggtgggctgcaggctcataacat

SEQ ID NO: 25882 - DNA, 389 bp, Gossypium hirsutum
  Clone ID: LIB3165-007-P1-K1-F11
gtccttaggccacgaagttcatggtgttgaaggatttgggttggatttatttgattctcttggagattgggtaatctgcatatcggcatagtctggtttatttgttgacatctaaaagatgtcaagtaagaaagaagaaaaatctcaagcagctgccgacagaatcaaggctgctgcattgactgctgcaaaaggcctcagtcgagctcaggctgaaagggcagctgctgccgcagctcgaaatgttaatgcttatgggcaaaaggaagaaggacctagcagatggcaggagaagagggaagccaagaagcagatgtatttgatgagcacagagaaggcggtgaggttaggggaaaggaaagacaaggcatcaatgtctacaatgggtg

SEQ ID NO: 25883 - DNA, 209 bp, Gossypium hirsutum
  Clone ID: LIB3165-007-P1-K1-G11
gaaaccctaaatcaacagataatggcgacgtcggacagtgattggaggtggaaaaacattgtttttggtgaacttcggagaactgctgcttattacaaaggcccacatttcatctactctcaatcttggttgcaacagaaacagcccttaagggggaagccgtctggctctgtccaccagactaagcaacagcataccttgttaaattt

SEQ ID NO: 25884 - DNA, 389 bp, Gossypium hirsutum
  Clone ID: LIB3165-007-P1-K1-G7
aacgactcgagaaaagcaatccataacttctggttattattcatctgcatttgggtcccttccaaactctacactgaagtctgaaagaacattctttattaaaatccaaaacccatttcataaaatccgataacattgctcaccatcttgattctgacaagttgatccatctgagatgtcattttttcacttgagattgtctgctcgacatccacattcaagcaatgttccagacacccttttgtggcctatttcctctgtggtggattatatgcatcgccaaccaaacgtgttgctctcaaattaccatcaattttttgtgaagaaagtattttccctctattcctgtagatgttcattgagccttcagcctgttagagctttgcaaa

SEQ ID NO: 25885 - DNA, 359 bp, Gossypium hirsutum
  Clone ID: LIB3165-007-P1-K1-H3
gtccaaacttgaggtcaggtcgttcaagcatggcagtcaatgaaactgggaaggatggaatcataggggtagggatgatgggaagagaacatcttattaatcttcaccatcttagaacccaaggagtggtggttgtttgcatagctgatcctcacgtaccctctcagcaacttgccttggaactggctaaatcctttgattggccacttaaggtcttctcggggcaccaggaactactggacagtggcttatgtgatgtagttgttgcgtcaagccctaatatgactcattatcagattctgatggatattttgaaccatcctaaacctcatcatgtgctagttgagaaaccattgtgt

SEQ ID NO: 25886 - DNA, 276 bp, Gossypium hirsutum
  Clone ID: LIB3165-007-P1-K1-H8
cccacgcgtccgcccacgcgtccgtccacgcgtccgaacggatatttatgcttggtgaccatgatatggatggagcccttagtgatgcagagttgaatgagtttcaggttaaatgttttaatgctccattacaacctgctgagattgtgggtgtaaagagggtggttcacgagaggatatgaggaggagtctgcaaccttggattaactgttgaagggttgctttatcttaatgcacttttgatagaaaaagggcgtgttgagacaacttgggctg

SEQ ID NO: 25887 - DNA, 389 bp, Gossypium hirsutum
  Clone ID: LIB3165-008-P1-K1-C11
cccacgcgtccgcccacgcgtccgttctatgctgccttgtggaaaaaaaaaaaagaaaaaaaaaaaaaaaaaaaaaaaaaaaaaaaaaaaaaaaaaaaaaaaaaaaaaaaaaaaaaaaaaaaaaaaaaaaaaaaaaaaaaaaaaaaaaaaaaaaaaaaaaaaaaaaaaaaaaaaaaaagggggggccgtttaaaagaaccaaagttaaataaccggggaatgcaacgtaaaaattttttaaaggggccaccaaaataaaattaatgggccgggttttaaaaactttggaacgggaaaaaccctggcttaaccaaattaaatccctttgaaaaaaatccccttttcccaagttgggaaaaaacaaaaaaggccccaacaaatcgcttttc

SEQ ID NO: 25888 - DNA, 398 bp, Gossypium hirsutum
  unsure (1)..(398): unsure at all n locations
  Clone ID: LIB3165-008-P1-K1-C2
cccacgcgtccgaatctccttcctagttcttcctctttctggcctaacaagaaatggtgacagtgaacacacctgagtttgatagaacaagcgaactgaaagcttttgatgacacaaaagctggagttaaaggccttgccgatggtggaatcacgaaggtccctcgaatatttcatcaaccgcctgaaaaactccacanattcccagtttcaaacgattcccagttcagtattccggtcatagaccttgaaggagtgaacaatgatccgattactcgaaaggaagtggtggataaagttggaaatgcatcaaggaaatggggttttttccaagtgatcaatcatgggattccagttagtgtcatggaggagatgaaggatggtgttaggaggtttcat

SEQ ID NO: 25889 - DNA, 393 bp, Gossypium hirsutum
  unsure (1)..(393): unsure at all n locations
  Clone ID: LIB3165-008-P1-K1-D5
gcattacaagagctttttgaagcttttttttaatttataaaccaatgtttttcggtggccacaggggaaaacccttcctgacccatggaactacaggggctgccccgccgaccggtccaagtccggtggttggaccagtgcagccatgattctaggggttgaggcatgtgagaggctaacaacgttaggtatcgctgttaatatggtgacatatttaaccggcaccatgcatttgggaaatgcttnctcagccaccaccgtcaccaacttccttggcacatctttcatgctttgtcttctcggtggttttatcgccgacacttttcttggcaggtatctcacaattggaatcttcgccaccgttcaggcaactggcgtcaccattttgacaat

SEQ ID NO: 25890 - DNA, 393 bp, Gossypium hirsutum
  Clone ID: LIB3165-008-P1-K1-D6
gaggttctgtttgattatgaaaccaaaattaatcaggctgcctttcctggacttcaagggggtccgaacaaccacacaattactggtctagcagttgccctgaaacaggcaacaactccggagtacaaggcctaccaagagcaagttctcagtaattgctcgaagtttgcacagactctggctgcaaaaggatacgaacttgtttctggtggaacagagaatcatctagttttggttaatctgaagaacaagggcattgatggctccagggttgaaaaggtattggaagcagttcatattgctgcaaacaaaaacactgtacctggagatgtgtctgctatggttcctggtggcatcaggatgggaactccggctcttacgtctaggggattt

SEQ ID NO: 25891 - DNA, 301 bp, Gossypium hirsutum
  Clone ID: LIB3165-008-P1-K1-F12
cccacgcgtccgtaaccttacaatgtggtctccaaggataacccatcggagactggtgattgccaatgatgataagggagctcaagaggagagtgtccagatgcgcggtgagaggaaaacagtgggcaacaatgcccggagggagatgatgtatgcagctgcagctgctgctatgtcctcggctgcggcggacgcaactgtgttgcatgcacaagtcatcgcacaagcctagatggcatattctcctgtgactgttgctacgataactgctaggatgtgtctgacctgaagacatggcaat

SEQ ID NO: 25892 - DNA, 372 bp, Gossypium hirsutum
  Clone ID: LIB3165-008-P1-K1-F8
gagacgcgttggtcagctactggatcatacaaagcaccaatttcccataagccggggtcacccaatcttaacgctaaagccctgataacaatcatttttgaacctcggtaccaccagtgggcgctctgtcccgctctttctttgctctgctatcctttccagcatccacagcttcgctctaggcaaggctaaagtgcttaaagccaccagcatgcatgcattggcgggcaattctgacccagagtgtgaagctgaggccgactccggccagctgatcagtcagggcgagctcgacgctttcatggtgaagaaaagagggattgtattgtatgacccgggggacttcacataagcttgccacacagagactac

SEQ ID NO: 25893 - DNA, 394 bp, Gossypium hirsutum
  Clone ID: LIB3165-008-P1-K1-G2
ttccgggaaaaataaaccataggaggcaaatggttaggctggtgggaggaaaacccagaggggtagaaaatgggttcggttccccaaaaactgaccttggattttaaaccaacttttgtacccaaaacgatcagactttttttcaagggggtttaactaatcgcaaacgttctgttaaggtttaaaactcgatgcttttgtaaaaagattggaagagaaatgagaaagatcgatcctttaaacgtgaacttcctctttgcatgctccttctcaacgatgccattgtagctttaaaagaggagtcagtgcaatgtatgtcaagaaatgttgaaccagttttagaagagttcattccattgaagaacaagaaggagaataatcaaagtgaagaaga

SEQ ID NO: 25894 - DNA, 346 bp, Gossypium hirsutum
  Clone ID: LIB3165-008-P1-K1-G6
gttgtctggatatttgagctcttttcttataaatttttattcctttcttatggataaaagagaaatggatgaaaccaagccatgaagttgtgagagcagccacgtttacccccaccaggctcagtcactaccttttctctactttcttgatctgcatggttccacttccaatgttaacgccttttttctatgaattccataccctacttgatttatggaaaccattctccgtgtaaaacaatctcttccttaccctacaacagttttcccttgcggcaacgtagtgtgcctccgtaccgggaagccttcatccgtacgaagatggcggcgctccgtgcttcacggt

SEQ ID NO: 25895 - DNA, 391 bp, Gossypium hirsutum
  Clone ID: LIB3165-008-P1-K1-H4
ctcaaaaacactcacgaaacccaaaggccttcttttacgaatccctcacctacggtacacgatggtcatagttacagaaaacatcatttgctgaaacttactttccgactctgaaagaggggtacagattggctcgatcaagggcctgatgtgatctcagaatttctcaaattggttaatttgggttagagaatcgtcgtgcaacggataatctattttacaagcgttaaccagtgaagcccgtgaatgcggatccatagaggaacgattgcatgctttgtaatagctgaaccacctctggtacgggagtgtcagaaaaagtcgatgtggacgattttgacctattgggcaaagaacctaacagggcttcttcactcgaaattatggataa

SEQ ID NO: 25896 - DNA, 195 bp, Gossypium hirsutum
  Clone ID: LIB3165-009-P1-K1-A6
cccacgctttcgatgactttctttttttactgcgccattttctctatggggaggttcaaatacctttgttcaagtgctctctacgaaccattcttgactaccaagacctgcgctccacctggatataacaacaaatctctgactgttgttcctaaagtaccaattctgcttgaggactctaatccggcttaaaag

SEQ ID NO: 25897 - DNA, 172 bp, Gossypium hirsutum
  Clone ID: LIB3165-009-P1-K1-A9
agtaccgtaccggccgtcccgacccaacccacccgtgcattcaaaccttaaaactcaatcaaataggtggaagctttggtaaagagagtagatatggtggtgggattggcaaaggaagaagacttgatagaggttcccccagtaacccctgacaagagcctgacatcaccat

SEQ ID NO: 25898 - DNA, 384 bp, Gossypium hirsutum
  Clone ID: LIB3165-009-P1-K1-B10
ctcctttgcttttcatacccaaagttattagcaaaatcaaggccatggttccggcaggaaacaacccttttgaattctcaaaagaagcctcatatctttatagtttcttgctcttcctctccaacttcccagtccccagaggccaatgtccagactgctgagtcttgtgtcaacctgggtctgtccctcttctccaaaggacgcgttaaagatgctttagtccagtttgaaacggcacttagtttagacccaaaccctgtggaagcccaagctgctctctataacaaagcctgctgtcatgcctaccaaggggaagcaaagaaagctgctgagtgtctccgtactgctttgagagactacaaccttaagttcggtacaattctc

SEQ ID NO: 25899 - DNA, 352 bp, Gossypium hirsutum
  Clone ID: LIB3165-009-P1-K1-B3
aacacacttactatacacttccttatatccaacacaaaaagctcttaagatagttaaattagacctggattactccactatttaaagacactacacgttgtcttaaatacacatgttgcaatccatcctttcaatcaaaaaatactcaattacataaagatagcttaccctcctaaatggattttggcaacaaacacatacactattgacctcaatttaataagacaaaaaatgaactctcaagatcttacttataagaactcactttttcattcctgcccatttgatacctcttttggagattataccaacacagtaaacttccctacatataattcttgatcttataact

SEQ ID NO: 25900 - DNA, 349 bp, Gossypium hirsutum
  Clone ID: LIB3165-009-P1-K1-B5
atcaaactgagtataaatgtctttttataaagcacaaatagctctatggatggtgtaaatagtcctggattactctcaatttaaagacctatacttggctattaatgctggtgctgcaaatcttcctttcaatcaataaatatctattgcgacaaagaatgctttccttcttgactacattcttgcaacaaacacattcactattgacctcaatttaataagagaaaaaatgaactctcatgatcatcttataagagctcactttttcagtcctgcccatctgatacctgttttagagatagttcctacacattataacttccccacatataatacttgatcttatgac

SEQ ID NO: 25901 - DNA, 133 bp, Gossypium hirsutum
  Clone ID: LIB3165-009-P1-K1-B7
tccacccataccatacactactacttccttctactagcaatggcattcgaagtaatgagatcaattaccattgtcactggctgtctgacacaagctatcattggggttcatgtcaccgaccgaaagtgtgact

SEQ ID NO: 25902 - DNA, 380 bp, Gossypium hirsutum
  Clone ID: LIB3165-009-P1-K1-B9
atccgccagagaattggtccattgcttatgaaaatgcagaaaagatatgggaggggtgatgaaagaggcgagttaacagagaaagagattattagagctgagaggaactcaggtgtaattagtgacagagtgagggaaatccaaatgcaaaactatatgaggaaaaaggaacaaaaagaacgcagggaaacggatcttcgtgaagggttgcaattatacaagagcggcaattacgagcaagcgctggagaaattcgagtctgtactgggatcaaagccagagcctaatgaagcagctgtagcaagttacaatgttgcttgctgttattcaaagcttaatcagattcaagctggtctatcagcacttaaagatgccttgga

SEQ ID NO: 25903 - DNA, 348 bp, Gossypium hirsutum
  Clone ID: LIB3165-009-P1-K1-C1
atcaaactgaggatacacgtctttttctaaagcacaaaaagctctatggaggggtaacaatacatctggcttactctctaactaaagacataaacttggccttaaaggctggtgttgcaattctacctttcaatcaataaatacctatcgcgacaaagatggctttccctcctaaatgcattttggcaacaaacacattcactattgacctcaatttaataagacaaaaaatgaactcccaagatcgtagcatagagactcactttttcaatcctgcccatctgaaacctgtttgagagattatacctacatcttatacttccccacctataatgcgtgatcttatga

SEQ ID NO: 25904 - DNA, 385 bp, Gossypium hirsutum
  Clone ID: LIB3165-009-P1-K1-C10
gctaaattacaaaagcaactcaagatctttacagtcgaaattgacatgctggggagggcatatactctttgcaaaccgataggaacaatcttcaagaagagattgcacatggagcttctataaagaaggagctggagagtggctaggaacaaaatcaaggagctacaaaggcaaattcaacttgatgctaaccaaacaaaagctcagctattgtttgtcaagcaacaagcttctggtcttcaagcaaaagagcaagaagccatcaaaagtgatgctgagcttgagaagaaattgaaagctttaaaggagttagaaattgaagtcgtggagcttaggagacagaataaagagcttcaacacgaaaagagggagttcactgttaaac

SEQ ID NO: 25905 - DNA, 265 bp, Gossypium hirsutum
  Clone ID: LIB3165-009-P1-K1-C12
gccacgcttccaatacgattctatttctttattcgagcgagcacaaacccggggaaggcccacccaaattagctcgctcatatacacaatacggccgcctacaacgcataatgctccatagcacccaccgccattttaatgcctcatgtccacactgacgccttgatcacccactgctatctcttgccaactatacataatcgcgattccaaggcttatttttacgaacccgatgagctaagtccaaaaacccggaagctctctc

SEQ ID NO: 25906 - DNA, 199 bp, Gossypium hirsutum
  Clone ID: LIB3165-009-P1-K1-C3
cacacacttcccatacctttttttttcttcaaaaccaataattaaaaagaaaggttctttataaacccttcaatcacacaattaaacaatactctataatataaaaacaataagactcatctaccgctctatattataaattcctaacacctacttaatacaacttccgtaataaaaaccaactcacgcccaccaacca

SEQ ID NO: 25907 - DNA, 355 bp, Gossypium hirsutum
  Clone ID: LIB3165-009-P1-K1-C5
ctcaagctctctatgactatttttgtgtactaagccgagctcatcaaggagaggtacatgcaccgtcaatcaagggcttacaatccaccgttcctgactaccaatccaagccctccactgagaactaacaactatagatctcactagacggttcccaattgtgacaactagtagcttgaagactatcatccacaggaataacttgccaactgcaaccaagcgctacatagcaacacgtgttgtccatgctatgagagcaagcacaaatatcatcttcaaggtgacccacaacaattgtgaattgacatacgctcaatatctaacagcgacgctgaggttagaccgccgttataca

SEQ ID NO: 25908 - DNA, 216 bp, Gossypium hirsutum
  Clone ID: LIB3165-009-P1-K1-D1
gacacacttattttacacctctatatctcgacaaccaatagcactagaaaagaattactttataacccgttcgataccacaatacaacatcactcttggataaaatgccagtgtcgctaatcaaccgtgcactgtataatggccaatcaccattctgttaaatttcgtgctaaaagcgacccacgcgcccgttacaaaatacccgacccatattat

SEQ ID NO: 25909 - DNA, 189 bp, Gossypium hirsutum
  Clone ID: LIB3165-009-P1-K1-D2
gccccacttcaaactcaatttcttatcacgaattccaagtacacagaggggaaggcctctatcaatgctgcccaaccagcttcacacaatactgaagccaagttcctaaaatgatctcatctacagattgagctcaaaactcctaaaccctattttgtagactctctgaatcccatcaaacgttacacc

SEQ ID NO: 25910 - DNA, 213 bp, Gossypium hirsutum
  Clone ID: LIB3165-009-P1-K1-E1
accacacttcacatacaattttttatctacaaatccaaaatctataaggaaagttccaatataccttcttcactcactaactaaaacaacacagaagaccataacaccaatagaactctaatatcacatcaagattaaaatacctaacatctatataaatcaccttccttaacaaatccacctgatcccaaccacacaaaacatcaaccataa

SEQ ID NO: 25911 - DNA, 264 bp, Gossypium hirsutum
  Clone ID: LIB3165-009-P1-K1-E11
gtcccacttaactttcacatatatttcttgtcatccgtgatcggaaagcgaagctagattctctcttctgcatccactacctccgacaacacttcagtccctgtccaaaccaacactctagaccgattcaccatcaaaatacctaactccgctatccctgcctctatgaagcccaacaacctcatcacttctgtaacaaacaatagtgtgaaagtgcaatacattcaagttttctcttcttctcatacgaaaaagaagcagaca

SEQ ID NO: 25912 - DNA, 211 bp, Gossypium hirsutum
  Clone ID: LIB3165-009-P1-K1-E2
agcccacacttccgaccgaattttttctatctataacaaactacaaaaaggatggctctaatcgtccttatgctatcactacctccctcgattctgacaagcattcacttagcacacctgtagaaccgatatctatttacatgattaaaatcgctagtcctaactttaaaaatatcaaccaacatacacctgctagagatagcctaatgta

SEQ ID NO: 25913 - DNA, 384 bp, Gossypium hirsutum
  Clone ID: LIB3165-009-P1-K1-E9
ccccacccaaaaaaaaaagaaaagtttatcccaggctctctcgaaaaacattggggtggattacgaaggctcttttcaacaacatactacgtcgtttcatccatcaagatttccatgaagctgtttctttcatgaccataattgatgcttttctcttcctcatggttcattcggtggatagattggggatatggcaccggttacctgttgtcttaggctcaatatatctggctgcacgtcgccatcttcaccagcaatacaatctcatcaatgtcggggtaactccatccggcgttcggcttagcccaggagattatccgcacagaacagctagtggaagttacaatgatcctttcaatgagggagctggcagccaaagatctt

SEQ ID NO: 25914 - DNA, 225 bp, Gossypium hirsutum
  Clone ID: LIB3165-009-P1-K1-F2
aaaacacttaactcacaactttttttctctatatccatgaactgaaaggggggctccatttccatttctgcaaccactacctacttccaatctcacatccacttccaaaacaatcttctacaccaattcacatttaaaacaattaccatctctattaatacctatatatccacatccacctatacaattatcagtataatccttacatccaactacacaacatct

SEQ ID NO: 25915 - DNA, 120 bp, Gossypium hirsutum
  Clone ID: LIB3165-009-P1-K1-F5
aacacgctttcgtttcaactttatttcaccaactccgtgactggcaggggggggacgtcctttactgttgtagccaatgcctgcttccagcctgtcagatacgggcggagagacatacct

SEQ ID NO: 25916 - DNA, 362 bp, Gossypium hirsutum
  Clone ID: LIB3165-009-P1-K1-F6
cccacactttcctttcaacttttttttttttgctccgcaacctgtttgggggggtcaaactgcccttctttaacccatgccaacttaccatctttaactacaaacttaaccaattcctacatttcatatcaatatatatatgtctaatcatcacaataatcacattcctacactcatactcactatccatgtatacactcctcattttccacaagccaataacatcttacatacctcttcatcatctacacaaatcgaacctacattgcctccactttcctttaaaaactctttctgtatattatgctaatctacttcaccctcccttactttaaacatccttttttctgggatatactaca

SEQ ID NO: 25917 - DNA, 376 bp, Gossypium hirsutum
  Clone ID: LIB3165-009-P1-K1-F8
ctcttatggtcctgactaatgtgtttttatcttctacatcctctgcaatgcgggaaggtggacctgatgttgttgggcttatcttaccaagtagcttcggagcttccttgtatttcatgaccagaaggaacttgaagttaggtaaggctacattaataactataggggggcttgttgctggtgcagtggtgggatcagccgttgaaaactggttgcaggtagacatagtcccatttcttggaatacactctccagctactgtagttggtgaaattatactcttctctcaattcttggtatctctctatctacggtaggaataagctggatgtttttgttatttaatatgtaaaacctgtaactattcattttcatg

SEQ ID NO: 25918 - DNA, 351 bp, Gossypium hirsutum
  Clone ID: LIB3165-009-P1-K1-F9
aaaacgcctagctcaaaaccttttttttttattcccataaattcccctcggggcccgggtctcttttcccacataccgccccaaaaagctccccattccttgtcaatcctaaccctataaatcccattcccagatccctcacaaagcaattccttgacagacccaacgctgtccaactcgcatcaagagccatggacatcatccaatcgcctactgccacgaggcaatccgcagtcctcagtcacctcttaatcttccccgtcagcaccccactatcagtggcgaggccctctctatgcagaatatgtgctgcgttcttgcttggcactctgacttagcgcgcttttggct

SEQ ID NO: 25919 - DNA, 379 bp, Gossypium hirsutum
  Clone ID: LIB3165-009-P1-K1-G11
aaaacccttctctttctcccttatttatttatcaccgcaagtggaaagggcggaagggccttgattgcccgagagaagaactccttaaagccaactagctgctggcaaaagaaaccatcttgagtctaacaagaaagccatgtccatccactgcaagagactgtctgcaaacattcatatgtaccacaacgttatgaaaataccattagcacgcttatgcaaaacattcaaaagtcctcttgtacccgtgctttcctgatctcaaaaaataaacatctacactccacagaaagaacggatatgtcaagacagattgcaaagcatatcatctatctatgtcgaatcttggtactatataacatatcataaatgctctttc

SEQ ID NO: 25920 - DNA, 369 bp, Gossypium hirsutum
  Clone ID: LIB3165-009-P1-K1-G12
tcccacttctctttacacttcttataatcttaaccataactgctacaccgagatcagctctttttctccgatcacccacctcctctaatcctaccaacccttcccatttcaaaaccccttccctccaattccctctcctttccctcactcctcctaacctcacccaccattccaccttccttctcaccatcttcttcccctataaaatctaaaaactcttcacccaaatctccaacttaaccctctattaatcccacaccctttttgacttccttcaaaataaactcaactttttttccctttccttttctccctcaacccttttattttccctcccccttttttcccttttcctaatcatcttttttt

SEQ ID NO: 25921 - DNA, 243 bp, Gossypium hirsutum
  Clone ID: LIB3165-009-P1-K1-G4
aaaaccctctactttcatcttttttttaccaactccttgaactgtatggggggctccaatctcctttctgcacccacttcctacgtacaaacttcaactcctgacggaagacattcctctataccaattcaatattaaaataattcatctcaccaaggatacataaattacctaagactaccataccatgatcaaccttttccctttctacatagtcataacatcttaccgtaatccccatca

SEQ ID NO: 25922 - DNA, 213 bp, Gossypium hirsutum
  Clone ID: LIB3165-009-P1-K1-G6
cacacactttcctcacatttttttattattaactcctcgaattataagaagggcttgaacctcatttctataaccaatccctacttacaaacttcaaccacaaaccaatacatccttaacatcaattcacactaaaatacccatctcacaataatacaaactatcctcattcaccataccattatcaacactatcatttatttcaaaatcata

SEQ ID NO: 25923 - DNA, 249 bp, Gossypium hirsutum
  Clone ID: LIB3165-009-P1-K1-H1
aacacgcgttcgtccaaactttttttttacaattccgtgaatgggaaggggggctctattgttacgtctaaaggcaatgccaccgtccaatctctaatcacgaaccatagcaagcgtgtacatcaactcactattaaaaccctacatattgccatagatacctatgttatactctgccacctcatgcgttatcactataaacgtcatcatcaacttcacaacatttacaagtacttttcaatacataca

SEQ ID NO: 25924 - DNA, 276 bp, Gossypium hirsutum
  unsure (1)..(276): unsure at all n locations
  Clone ID: LIB3165-009-P1-K1-H12
ntcacgcgttcctttcatctctttttctagagctccgtgaccagtaaggggggctacaatctccgttcttcaagcactgccaacgtacaaacttaaactacaaaccgtagcgactccattcatcatttcactctataaatcactgatatcgccaaaaatccatatgctaagcgacaaccaccatgccagttgtaaacctaaccatttgtccacacggtacacaacatcaaaacgtacttttcatgccatacgcacatgaacgcgtaccataccaac

SEQ ID NO: 25925 - DNA, 348 bp, Gossypium hirsutum
  Clone ID: LIB3165-009-P1-K1-H3
cccacgcgtacgtccacgctttcttccacgctttcggtgaacggcactgggaggtggatttgtccatcctaagagactgcagaagcccattcgacagcgcgtacagcgcgagcttcgaaagggaatcgcgttaaaattcctgtaccgagacgcgtcggttgacgagtacgttagggtgtccgaatacgtgggctgcggcctctgcatgagttatcttttctgtttaacgagctgcccaccttgtaaacggataagcccgaggttggttccaccggcctgaatagcaccgtacgtcgtgtggagtacagaagcgcccccgacagtccttgtaaatccaatgggccgagt

SEQ ID NO: 25926 - DNA, 244 bp, Gossypium hirsutum
  Clone ID: LIB3165-009-P1-K1-H4
agccaacactttcctcacatcttttttttttcatctccttttactataagaaagactccaatcttctttctttaaccaattcctacttacaaacttcaacaacataaccaaacaattcttcaactccaattcaaaattaaaatattcaatctcactaatgataacataacttatactcatattatcataccattatcaaccttatacttaattacaaatgcataacaactttactatactttca

SEQ ID NO: 25927 - DNA, 386 bp, Gossypium hirsutum
  Clone ID: LIB3165-009-P1-K1-H8
gtaaaaatgtcagctgccccttcttcaatgcgctgctgggtggattttaatggcaagaattatctgtctcatggtaaattagtgtgtttgcctcccagaatggggtcatcaatgctttcataccattccagagctgattttctgaaactcaatagccttacttcactttcttctttccagcataggaatgggaaactcaaacttcagtcaaagcctatggcaccatcaagaaagttacatcaaccatgtgcattggttattagatgtgatcaccctcaaaatgcggatttgcctcgctattattccaagaaagagaagaagcccttccctgtgcccatagtggagctgaggcgagctgctagggagaggttcaagaaaagcagagg

SEQ ID NO: 25928 - DNA, 273 bp, Gossypium hirsutum
  Clone ID: LIB3165-011-P1-K1-A11
gtagggtggctattgtcccaaaggttgggtttttcggtcaaggccttcgtgaccggaaagggaccttgggaaacctggcctgaccaccttgctgccccattaaacaacattgcttggccctatgccacaatctttgccccgggaaagtgatcttagagagtaaaaggggtttcgcctcgaaattgttttatttgggggggagaatgaaattttgcggcacaattaaagaaagcatattgaatttttgtggtcctcaaaaaaaaataatgaata

SEQ ID NO: 25929 - DNA, 151 bp, Gossypium hirsutum
  Clone ID: LIB3165-011-P1-K1-A5
tcggccaagcgttcggatgacttcaacaacttcttgattgtttaggcttcacccgatacatttggttaacacagagacaccattcccgatggggcactttttttggtgcgacacatgtgggccccaaaatgggtgtgtatccactttcatg

SEQ ID NO: 25930 - DNA, 417 bp, Gossypium hirsutum
  Clone ID: LIB3165-011-P1-K1-B3
gttgagcagcaaaagcggtcacagtcccaagctgaggcccaagcagagcagtccctatctcagtctcatgctcagtagccatgactgcctcctgtgccaaatgctgttgatggccgagtatcattttgccttaattttatgtttgttttggtcaccttgttccattctatgtatttaaaggaggcggctttgcttcatggtggaagatcacctgtctgacccccaagttattcatttgtttgtgtggaagaatacatcattcacagaactatcgaagtttgtaaaaaaaaaaagggcgcaaaaggaaagaaaaaatccgagtttgagcttaaatgtatgtaaatttgtaccattgtaacattgcacgactgtaatcatcctcagattttttagagtgatgtttcttgttttgcaatc

SEQ ID NO: 25931 - DNA, 378 bp, Gossypium hirsutum
  unsure (1)..(378): unsure at all n locations
  Clone ID: LIB3165-011-P1-K1-B4
ttcatacgttactagattatttcgtttctatgttatcaccacgggtacanacatgtgtcgttcctaaaatacctttgatgcccggttctgagccaccaatgctggtgctccagttgggaatcagtatctaatcacttaccgggggcgcaggaggtgcaatcatccttagagactatcattacgtggacaagctccctaatatgagtagtgtacgcttacctaaacgtgtcgttcatgctaaacgagccagcgcgaaagggttctcagaggccactaatgatctatccgacctgacatgtgctgttctcctccgtgccccttgagtacagacccggctcattggtagatcgtccacggttattcttatacgcggttgtc

SEQ ID NO: 25932 - DNA, 422 bp, Gossypium hirsutum
  Clone ID: LIB3165-011-P1-K1-B5
aaaaaaaaaaaagaaatctccaacccaaacccttcctccgccggcatttgtttgcaaaaaaaaaaaaaaaagaagttcaaattgaagaatgcctgttttttcttcaagagctttgtccaggacctccgccaggcttagaaggcaaaaaggggcccctaaaggcaattggcccgccgggtccaggacctttgctgtttctatgggggagctaaccagggaaaggctgaaagacccttttttacatttggttgctgccttgccgacccggcaggccgaataagccctccgtgtcgccggcaaaggcttttcctttaccttcaaggttgaacccgcccttaacaccctggtcgactttgcttacaataagggttacgggttttcaatttgataagctaatttttaagcttattttctttttcttt

SEQ ID NO: 25933 - DNA, 417 bp, Gossypium hirsutum
  Clone ID: LIB3165-011-P1-K1-B7
actaggggcactggcattacagtctgtggtgaacaccaaaattgagcaaacattttctcttggtgggtgcaccctcactattgttgtgccaagtgcaaatgggccacttgtgatcggactcgagacgagccaggccctatggctggagattatttgcacctttgtatttctttttgcttccatatggattgcttttgataaacgtcaagccaagcacttgggtcgagtggtggtttgctctatcattggtgttgaggtgggccttatcgtatttatctcaactactgtaacttccaccaagggatatgcaggggttgggatgaaccctgcaagatgtttgggtccggctttaattagaggcggccacctttggaacggacactgggttttttgggctggacctgtcgttgcttgtgt

SEQ ID NO: 25934 - DNA, 203 bp, Gossypium hirsutum
  Clone ID: LIB3165-011-P1-K1-C4
gaccgaaagtgttttaccaatacagagtacgtttacttaatgataacgtgcattgtaggcgctacaactgcccattatctttgagccaaagctgtttctgaaatctaccatctggggggagaaattagccaggggacaggttggctaggggcggacatttacgttacgttcaaagggggggactttggtgttggcaaagggat

SEQ ID NO: 25935 - DNA, 156 bp, Gossypium hirsutum
  Clone ID: LIB3165-011-P1-K1-D4
ttgttgttgaagaagtgctactaccatggctacaaataagagcgttggggacttgaagggagctggtttgaagggaaagaaagggtttggtagaatcgatcttaacgttccattggatgattacttcaacattactgatgacccaaggatccgggc

SEQ ID NO: 25936 - DNA, 111 bp, Gossypium hirsutum
  Clone ID: LIB3165-011-P1-K1-E2
cccacagcgtccgtaatacttctccatacgactttatttttgagaggcgcgtacagcgaggagggatgtttccggtgacgatgatcataacactatgtttctcttctttgt

SEQ ID NO: 25937 - DNA, 427 bp, Gossypium hirsutum
  Clone ID: LIB3165-011-P1-K1-E6
gaaaaaggaagagatcaacagtgctggtggtggtggggtgaggccaaagcttgtgcttcaaccacgtacggttcccgtgatggaggagtgtaaaaaggactcgacggtggccaagcccaaaggggcaaatcctttcggccaggcaaggccgagagaggaggtgttgaaggaaaaggggaaagactggaaggagatcgatgaaaagcttgaagctatgaagattaaagaggcagtagctgttacagagaaagagagaggggcaaaggcaagcttcggtaatggccatatcccggctgacaagagctggaggaagagtgaacctgttgaagctacagctgatgctgatcatcaaccccaaagtgctgaggaatcggagaatggccatgttgcagagaattgaagatagacactgacaaatgcgaagcat

SEQ ID NO: 25938 - DNA, 292 bp, Gossypium hirsutum
  Clone ID: LIB3165-011-P1-K1-E7
ctcaaaccctaaaagaaacagcggaagggcgctgcttgcactttccatcaatggtgtttgggagccataagagcacgagcatgagggcttcactcaagcaaaactacaaggtttttatataagtaaaggagcatcacatgaagtaagctattgaagcgaagatagtggtattgaaccgttagagaaaggttgagaaagaccctggcctccccagtgattgggctttcaaggaacaagaactcaaggctctcgaggctcgccgagctcgggcactcgaggaattagagcaaaa

SEQ ID NO: 25939 - DNA, 424 bp, Gossypium hirsutum
  Clone ID: LIB3165-011-P1-K1-F10
cgaatttgtgctagactttgaggagatatatgtgattgattcaaagaccaagtcaattaccagagcaaaggttttggtcactgttccaggaggaagaaaccgggatagaaagaatgacctacttgttatacgtgataacggaaactccttcaaaataattcattcgagtgaaagagatgatcctacaactgtaatcgaaagggaagaatgggacaaaaccagacaagacatggaaagacatctcaggaagctacgagatttcagcatttcgaattggttctaatcgaacgtcgaggttgtttcatgaagattgcctggatttatcagcacggtgagaaaatgaaggatgaacttgtaaaatcaaaacttgagacttaggattaggaaattcactttcttcaccaatggttcctagctgaagctg

SEQ ID NO: 25940 - DNA, 424 bp, Gossypium hirsutum
  Clone ID: LIB3165-011-P1-K1-H10
cccacgcgtccgcccacgcgtccgtttcgtttcaactcaaaccttcgtcttgtctccctttctacagagcaacgtgaagaaggggaaagaatggggaaaataacgtataagagactgaagggaagtcaaaacatgaggcaaaggctactcttagcaacattaaaatcaactccggttctcatagaagacatccacgccgacgacaccttacctggtctccgaccgcatgagatttccctccttcgtctctttgaaaagctcacggatgactgcctaattgaaatcaatgaaactggtacaaaattgaagtacaagcctgggattatagttggagggagtcatctggtgcatgattagggtggtagtagagcaattgggtattttttggaagccttgatcttgcttggtttatttgctaggaaaa

SEQ ID NO: 25941 - DNA, 376 bp, Gossypium hirsutum
  Clone ID: LIB3165-011-P1-K1-H9
cttccggtgttcctagttgaactcaaccggatcattttctttggggggaaccaaaggggaaaaggctggttgatttttatttccaagaccaataccaaccgcgaaaagcgtggcctatcaaccctttacacctccgaatttagaacttagaggtgtcaaaaaagtcaccacagggatacctgttttgtggcacccaagcttttatagccactttttttttagacccttagatgggggctttccctatctttgagaagcagttttccccatgtgttgttttgcccacccaccaataggaaacgtgtgctgggtttaccccgtcgagagacaggtttttttcccctactgatgcccgcgtcacaatatttttacaccc

SEQ ID NO: 25942 - DNA, 348 bp, Gossypium hirsutum
  Clone ID: LIB3165-012-P1-K1-A4
ggggctctcttgccttgtcttttgccactttttttgaatatacttgaaccaaagaagtcttgctgtaatggcggggcgagtatcacttctgtccaaaactactttcaagctctactctatcttatctttttcggtctctatcattccgtcgtcctttcgcccctaccacaccaggaatctacatctatgctctgtgcatagatcagttaaaccccaatcctgtcaagctaagatctaaggggaagagtgaatgctatgtgcttctgcctacttatgactcagctgagaggagacaaatcatggagaactaataatatagctgttctgtgctgctggatgatatctaac

SEQ ID NO: 25943 - DNA, 327 bp, Gossypium hirsutum
  unsure (1)..(327): unsure at all n locations
  Clone ID: LIB3165-012-P1-K1-A7
aacggaatggcccgggctccgacgccgatcgcgtccgcgataaataataaaggatcacaaataaatacagtatctattactactctttnntagatttctntnnttctgcntttgcgagtttgctcntnngaaaatatnnngtgtaataccannaatttntnnttttnnnaaaaatgggaacccnncctccttacccattggctnnntcttttcggggcccctttaaacaccaatttagcaagggaccctattttggctttattctttcgcttacctggttggggctaatttttcttttgctttggcgtgttggnctttttctttctc

SEQ ID NO: 25944 - DNA, 410 bp, Gossypium hirsutum
  unsure (1)..(410): unsure at all n locations
  Clone ID: LIB3165-012-P1-K1-B3
cccacgcgtncgctcagaagggaaaaaagtagcgtatccgtagagggaggaccagaaattcaatgggtttcaccatgggtttgaacttcgttctcctcttagtcatggtagctaccaatatcctttccctttatcatctctcttccaccgtccaatctcccaaccctcctccccctgttcccgtccctgaccaccttctccgtcagcttaacaccatacgcgccagcattaaccacctcacgcgccataacccttcttcttcatccaccactgctgaacccagttctgctgtacctcgagatcttatcctccactctcagatcggtcccattgcttcttcttgtcacaaccatcctgatcttcttcataggtatatgaattacactcctttttcgacttgcccttacgat

SEQ ID NO: 25945 - DNA, 407 bp, Gossypium hirsutum
  Clone ID: LIB3165-012-P1-K1-B6
gtcagccgccgctcaagtctttactcaaaagacacacacagcctctctccccttcatattcccacttccaaattattcctccctggttttcttccgactatggaagacggtttagggcagtcgccgacatcagccatacgccgccgctactccatcacaaccccagtacaaatccctacaaagctaactctactcacaccaaagccgctccaaaccgccaccagcctctcaaacggcagcgccaccgctcctttgtctcttgacctcgagcttatctctctcaaagcttctttcgcttcctacacttcactcaaagacatcctcccttcccccgctgtcgccgtcaactctccgaccgccgccggatccgctaccagttccgggtacgaaatctccatacgtaaccg

SEQ ID NO: 25946 - DNA, 189 bp, Gossypium hirsutum
  Clone ID: LIB3165-012-P1-K1-C1
ccaggtaagccccaggggggcagggggctggttccggggttaaattaagcccctaattttttgttccatccaattggaccggttgtttagggttgatgaacaattccaagtcattgtttccaaataagaaggcttttttcgatttcccgggggcccgtccagttggggcttacttgacataactggggc

SEQ ID NO: 25947 - DNA, 393 bp, Gossypium hirsutum
  Clone ID: LIB3165-012-P1-K1-D12
ggcttcattacctgcatccgcctgtgggactgggatacccttttccagggctggcttagggttgccagtgagagctgccccagatagcatatcggggaaggtggagaaaagcgtcaaggaagcacaggaggcgtgctcggatgaccactctagcggagagtgtgtagcggcatgggacgaggtggaagagctgagtgcaggatccagtcacgccagggacaagaagaaagacaacgatcctttggagaattattgcaaagacaaccccgagacagatgagtgccgcacttacgataattgaagtcttattatattatgacggccttttttgggtttggtgatgaaaaatttggagttggcctaaaactctgtttaagttgttaatgtcacact

SEQ ID NO: 25948 - DNA, 332 bp, Gossypium hirsutum
  Clone ID: LIB3165-012-P1-K1-D3
gccaatctgtaaagtccaaagaagtcagcttcagctatcgtttctcaatgtctttcttcttctttatataatcttatatgtagtctaactctgcaatcttccaatcccagcaagcggcccaaccaaagtcagatgatgatagatcgttattcaatagctttgtttctggttttttcatatcttgttggcctcttggatgctagtgctggtgatgctgatccacgttacaggggttgtgtggcagaatgcgagaaaaactggttgtgctgggggaacttgctttccacactgcaagtttcctttccgatggtgttgcccaatgatggtcccat

SEQ ID NO: 25949 - DNA, 393 bp, Gossypium hirsutum
  Clone ID: LIB3165-012-P1-K1-D6
acaagtcgttgtttcaacaggcaagttctatatgtttatgatccaaggctgacagactctgttctggaaccaattatatatcagggcagagtggcgtgtggttcaagaagagaacgcaatgagaggctgttaaactatgcatggacatgaggacggcacttaccagaactgaactagcatccctatctgaagaggctacatattgctggggctgtgaatggattggagactacaagagctacactgatggactctaggcagccccagagacatttgccaagaaccgtgagctcatagttattcactgtatgtggcatgtgtggggtgctctaggatgcgattctgctgcgcttttgactaggcatggcgatgaattcggtgaggctgcgagga

SEQ ID NO: 25950 - DNA, 189 bp, Gossypium hirsutum
  Clone ID: LIB3165-012-P1-K1-E1
ggcagccgtgatggcgaccttgactatgcagtcttcagtggagaccaacaaagtcaccatgccagctgttgaccgagcaccggttaatatgtatggatcatgagacagagcttatgctgctaactcagctactatgaagaacatctttgaggatagtgggcgctaaacacaacaacatctgcatggctg

SEQ ID NO: 25951 - DNA, 187 bp, Gossypium hirsutum
  Clone ID: LIB3165-012-P1-K1-F1
ctcacgcgtactgtttgggtggccactaggggtttgatcatcgaactcatataggatggatacacagtcaaggaagaaccaacgcagaagattgtggaatcagacggtcacacccaatgttacacattgcggacatgacagttatatacaaagcatgatgaggtatatagcatgtgcgaggctgacg

SEQ ID NO: 25952 - DNA, 382 bp, Gossypium hirsutum
  Clone ID: LIB3165-012-P1-K1-F12
agaaaatataagccacacaaaaaaaacaaaaaaacaaacaaacaaacatttccgatccggaaaaaagttagatcgttgaccatgaactccggcacatccgacggagaattggcggcgcgtggatcgagcgggagggtgtgctccacatcgtcagcagacaagaaaaaagagaaggcaagagtgagccgcacgtcgatgatactgtggcatgcccaccaaaacgacgccggcgctgtccgcaagcttctcgaggaagatcgagctttggtcaacgctagagattacgacagccgtacgcctctccacgttgcttcgctccacggctggatcgacgtcgccaagtgcctccttgaatatggtgccgatgtcaactcccaagatc

SEQ ID NO: 25953 - DNA, 420 bp, Gossypium hirsutum
  Clone ID: LIB3165-012-P1-K1-F7
attcctctctcggtatatgttcaatcaaattccaacccaaagtactgctcaactttcttaatttccaacaagttttcttttaatttccctgtttttgcatcaattaaatatctcattactccagtacagactacagaggttttagccatggcgtcccttaacccaagtgggtatgaaaagttttcaggttcaccaccgaagcagggcaaagaagcagccacaactgggattccacttagctcctcaaaccaatacttcaacgagagttgtgagaccaatacccgtcttcagactaaaactcgagtcccttggtcttcagggctctgcgactgcttctctgattggagaaactgttgcatcacatgttggtgcccttgcgtaacttttggccagattgccgagatagtagataaaggatca

SEQ ID NO: 25954 - DNA, 253 bp, Gossypium hirsutum
  Clone ID: LIB3165-012-P1-K1-G10
ctcgcgcgcctgtacttaacagtaaatacgctaattcaatgggcgcttagaaccatatccatatattgcaaggggtcagggggctgatattcatgttaatagcccatgacttgacctagcttatatagtatatagattgttcataagtttggatcaaaaaacgccagtgctagtgacatatatcatatttaacagattatgtttgggtggagctccttgatgtacgtctcggatgagctcaacagcgagggga

SEQ ID NO: 25955 - DNA, 254 bp, Gossypium hirsutum
  Clone ID: LIB3165-012-P1-K1-G4
gaattgcccggcccacgcatccgtgtcaattcaatcaaaacaaatttttgttgatacgatgtttctgcgcctcctacagattgcggttttggatactggcgaaaggcaactatcctggaacttcctctttttgtttttcatctctactgtcgagctgatactgctcgccacatggatgtcatactaaaggctctagttggaacaaatttgccgccttttcaacatctgaggcgtgcgcaccagaactacacctg

SEQ ID NO: 25956 - DNA, 222 bp, Gossypium hirsutum
  Clone ID: LIB3165-012-P1-K1-H1
cccacgcgtccggtattgtttgtgtgtgtagtctaacactgttgcaccaaacgcttgactagccaattgtctttgtattgcatttactgtttccgcattgagagcctgcccttgattgccgagtgccggtctgtctggctactgttccaatggagtccttcgctgctctacgatcatttcactattatgtgagtgctgcttcacaagctcgtctgacgcatg

SEQ ID NO: 25957 - DNA, 158 bp, Gossypium hirsutum
  Clone ID: LIB3165-012-P1-K1-H12
tcgatcgtttacatgcccgacaacctttactactttttaagatgatgatactgggttcaattttgtgaatcaggtgaacccgtatcgcatcctgaagaaccaggctcttgaatctttgtaccgagtgaatattgggggcagctccatttcacctacac

SEQ ID NO: 25958 - DNA, 389 bp, Gossypium hirsutum
  Clone ID: LIB3165-013-P1-K1-A3
gcttggcagaatcagtgattggtgcggaccctttcgacccggcgctctcactcagtgcgagcccggacctgttttgtttttgtaattatgtatttttcggacgaaatggaaatacacactactttttaggttgaatcactgaatacatagaacgaaagcgaagaaaatttcttaaatttgtagaaattgtcagttatcacctggcgttatatgtggatcacattgtgaggccggttcctgcgcgtccagttgaatcgggggctggtccctcgacggaggaaaaggagaacgcgaaggatacggaggttttccaaggaagcaatggggaggacccggttattcacgtggcggaatgccgcatacgacccgaggaagattgcacttataat

SEQ ID NO: 25959 - DNA, 418 bp, Gossypium hirsutum
  Clone ID: LIB3165-013-P1-K1-A9
cccacgcgtccgcccacgcgtccgctgggtttctttcaaaacaaggtttttctttgacgtatttcctcgctttcttttaaagagaaaccacaaagaaaaaggaaacgggttttgaagaaggagatggttttcatgtgtgagattttcttgcccggaggaaagttggaagaaagagagtgggaaaaggagagataataaaaaaagaagaagaaaaagatcaaatttgcctaaaaagccgtagtagcagaagtggaaaaagggggtaattcctttttaagcaaagaacaagaaccctaagtttttgtttgtttaatctgcttatctgctgggctaattggcaatgtctgctacgataatgagtgaaccaatggtggtatcagcaccatcaccagaaactcaagcaacatcagcaaaactt

SEQ ID NO: 25960 - DNA, 313 bp, Gossypium hirsutum
  Clone ID: LIB3165-013-P1-K1-D5
atccggcgccacgctcatttgatctactctttgactatgaagcctccctttctcacccaaagggatctttaagggtttattagtggaagtgtgcaggcacatcctacttaagccccgattctttgttaaagtgtctcagacccatgaagaagctagccctatttttatttactgcctgcccatttgttaccaccacggtttcagcaacgccaggatttaatttgttattatacacaaatgagagaggacttagtacttttattactttgggagatgcagtaacacatgggccactttaccatgacgacgcttt

SEQ ID NO: 25961 - DNA, 423 bp, Gossypium hirsutum
  Clone ID: LIB3165-013-P1-K1-D8
gcttctgcttctcatttaaacattcaaggcaaaagaaaaagagacaaaacattgaaggaaatgacatgtttctgttgcttccttacaaccttgtaaagttataagcatcgtgtcagaatttctctctgccaattgccaaggttctcattatctatggtttgatggagatagagataagatagatcatggtaaaattagttgagtgcgttacatggtggattttgttaaggaggagattgcacctactagtcttaacatgtcatctaaaaaggagcttctttccacagccatgaagagaaccagcgagtggattttctctcaggagattcccagtgatgtcactgtccaagttggaggagtttctttctcactgcataagtttccattaatatctaagtctggatacgtaaggaaagttgtatc

SEQ ID NO: 25962 - DNA, 417 bp, Gossypium hirsutum
  Clone ID: LIB3165-013-P1-K1-E2
cccacgcgtccgcccacgcgtccgccccccactttcccccacatatccttcatttcccagatctgtgccactttttacttcttttttttattcattttatgctattttccaatgtcccaactccccatacccattgcttgacttcatgatcggtttttgtgttttcatagtggaatttgcattgcaaagattttggtttttttagctttcattgtaattagcttgtttttgcttctacatcaaacaaagatcccatcttttaaatacccaagagaggaaaagaaaaatatggcttcggtgaatctgtgttcttgggttcaatcttactccattttcaaccaagcttctagatccaaatattctcttttgcccagatcccttccattcaaccccctcatgaatctgtcatcttcaacc

SEQ ID NO: 25963 - DNA, 174 bp, Gossypium hirsutum
  Clone ID: LIB3165-013-P1-K1-F2
ctaacagccatgaaaatgttggagaaacatcgatggtcatcatacatacacctttttagctaatcagcaaggagatggaaatatgtgtatggggatgctttcattgtaatgcctctgttgagtgttgtacaaatacctttatgaaattagacgcaatgaatatttattaaggtt

SEQ ID NO: 25964 - DNA, 179 bp, Gossypium hirsutum
  unsure (1)..(179): unsure at all n locations
  Clone ID: LIB3165-013-P1-K1-F8
ggggnaacanccataaaaaagttacaaaaacatctttggtgatcatacaaacacctatgtcggtagtcagctttgagatggaaatatgtctatcctgatgctttcatcgtaatgcctctgacgagtgttgaacaaataccttttatgaaatttagacgcattgaatattcatttaggtt

SEQ ID NO: 25965 - DNA, 428 bp, Gossypium hirsutum
  Clone ID: LIB3165-013-P1-K1-G10
cgaagtctgtttttcgttttctctctctatagctcaaagtcttggtttgctggaagagaagccaaaaccgcgaaagcctataccttccaaatctcttcaatctttcgtaagactattgcacagaaggttttttcttcttttttttcctttttatttgttacgttgttcgttcccttttaattccttttttttaccttcaactttcttccctttatctaattttggaaaattggagttctttggttcgcgccccttttaactttaatttcccttcaattccttaatttttttgggaagaattggttcgaattctgtgtctttgtggcttttgcaaaaattagggccttttgagggtgtaggtaccctctagggttcaacttttaaagggtcgatttttgaaggaaaattttgcttattttggggctttt

SEQ ID NO: 25966 - DNA, 419 bp, Gossypium hirsutum
  unsure (1)..(419): unsure at all n locations
  Clone ID: LIB3165-013-P1-K1-G2
cggtcttacttcttgctanctctccttccactaagatctaggcttgccttcactcactttcttttgtaattatattgttaattattactgttgttaatagactccagttttagtaatttcggtttgatggaccggaagcgaacggagagccccagctacacgcgccggtggagtagtcactcgggcacggggagcactggcggcggtgttgagtcacctgcattgtcgccggcgcataaccagccccgccacgcgcgttcttcctccgccactggcatttccagcataaagcgcacccaaaacttcgccgcgaaagctgcggctcagcggctggctcaggtcatggcttcgcaaaccactgacgatgacgatgaagaagatgacggcgacgatctaggtttccggtacagtgctccacc

SEQ ID NO: 25967 - DNA, 415 bp, Gossypium hirsutum
  Clone ID: LIB3165-013-P1-K1-G4
caaaattgatcattctttatatgtttttctctcaaatcccgaatctgtctttacaatcaaagtgtcccaagctatggaaaatgaaacccaatctttattacccaaaaacagatcatcaaatccaagctattcaactccagaagggctcgaattaaggagtttcagattaggtctcaactggttttgtttagatcaatccaatttatggaaagtgagtctttcttggtctttcttcttcgtgcttgctattggggttccgattatttcgcactatgttcttttatgttcaaactgcgatgaaaagcatcggcgaccgtacgatgcgggggtcagttatcactttcctcttttggcggggtttcttttattagtttatcttcttgggctcggaaatatgggaaccaggagttccttt

SEQ ID NO: 25968 - DNA, 320 bp, Gossypium hirsutum
  unsure (1)..(320): unsure at all n locations
  Clone ID: LIB3165-013-P1-K1-G8
tccacgcgtacgatgatgatgggtccattctatcaattatcacagatcatattggtgttgaccttggttcaatcaaaggaagaagagccaattctggcggctttagaatagaaaacaggtgttaaaatcattattatgattatatagtattatttcctttcgcgtgctttagttgatcaagatcgagatcaaaaaaagggatacattttaataacggatggattgatctcattttctggtctacgtatgagaattggcagagttattatgttgctacttttatgcggnncaatcatgatgcacaggtcatattggggcct

SEQ ID NO: 25969 - DNA, 396 bp, Gossypium hirsutum
  Clone ID: LIB3165-013-P1-K1-H12
cccgaatggccgggtcgacccgaccgacccgtccggctttaaagtgactactttggttgctattaggccaagtgaacaatctgcttcaaagaaagaggtctctgatgcttcttggttatcaactgcttttgaagagccttatggaactgcagctaagatgcttgttaaaagaaggacttactgtttggagatgaactcgttttgatctctgcttcttgatctttgaagggagagcagtcgagcacaatagtcgagggggaagaaggcatagcatacttttggaaagctgacgatcaaacaacaattttgttacgtgttgtagctttttaatgcaagagcagtgtcctgtgaaagctgaaaccttgcttatgaatgccattgaaagcaatcgacgca

SEQ ID NO: 25970 - DNA, 209 bp, Gossypium hirsutum
  Clone ID: LIB3165-014-P1-K1-A9
cccacgcgtccgcggacgcgtgggcttttttttcttttcccacttcaccttctcggggggcaacctctccacaccgccattgcatcgtctgcactctcaactggatcccctagtcttttaagctttaagtgaaaccgacaaccaattgaaacattttctttgtcccctgttagcaaacattgggaagcaggattttcaacatggacaag

SEQ ID NO: 25971 - DNA, 435 bp, Gossypium hirsutum
  unsure (1)..(435): unsure at all n locations
  Clone ID: LIB3165-014-P1-K1-C3
ccggnccgaaanccgggggggccacagcgtccgcccacgcgtccgttgccctttgttataggatcgccaatgagaagggcctccttcacctgctgcatcctttctaggaccctctccaccgttcacgacggaggaacagtcaaccttcaccctcgtctcctccgggtggcgctctttagcagcagcagaaccgacaattccaattctcgccgccattggatctctccgcttctcagttccttttcgaaaagctctggtcaagccgtctctctcggccttgtcggcgttgtcgcctctgtggccactgctgcttcggtctacgccaaggagccgccaccagctgaaatcatcccaaaggacgttgttctttatcagtatgaggcctgcccattttgtaataaagttaaagcattcttggactactatgatatacca

SEQ ID NO: 25972 - DNA, 416 bp, Gossypium hirsutum
  Clone ID: LIB3165-014-P1-K1-C4
caaggcacaatgattatggatctacatccttcctaggaatagatgatgcaattgaaaatgcagagaatctgaacactgccgaatcatggcatgtggtacaacatgaagtttggagagttgctagagctgtcaagcatgcctccttagtccttgatggaaaactcacatgaattctgcaagatggacctacccttgagacagcaatatacttcagtgagagtgacgaacatgagagagatctagattatagaaaattcacttacttccttgccagattacattaaaatcaatcatcagtactgagccttatttcaggtatttctatgtcagaatttcatactatagtcacagctttcatgaagggaacaacaaaatgggaatagcattggcatcgagaattaaggcaaatagaccaa

SEQ ID NO: 25973 - DNA, 218 bp, Gossypium hirsutum
  Clone ID: LIB3165-014-P1-K1-C5
attaaaaagggggccaggaaatttgaggaagtcctctttaaaaccaaatttgcatttaccttgctggtattggcaaatttttattcttccctctttcttctgttaacactttaatttattgtttactttaaaattcaaagaacaacctatttataactttggatcagccagtgttgactcttaaataatgtgtgctgctattacttattctgtctctt

SEQ ID NO: 25974 - DNA, 378 bp, Gossypium hirsutum
  Clone ID: LIB3165-014-P1-K1-C7
ctcgaggaaggttcgttcttttgtaatttctcatcatagttcttgtttaatttcgtttgggtttatcaagttcttcatgcgttttagttttatttaagcattggtcatttgttattattattattatttagggcttcacaattgatgatgaaaaggtttaattccccccccccttttcttttttggttcatgttagaagaaaaaatggagcaagagtcaacggggtctggaagttcaaaaatttcatcgttacaatgggttttcaaggacaagaacatggcttgggaagcatacaaaagcaagcccttttcacatagggttctgctttttctatccagtatgggaacgcttgtggcattccctgcctctagcctacta

SEQ ID NO: 25975 - DNA, 400 bp, Gossypium hirsutum
  Clone ID: LIB3165-014-P1-K1-C8
ctctttctattttcccactatctctttccatcattctacttttctactcaaccaagcgcgactcttaatgtttagaaaactgatattaaattccgattactactcttagatgtctcctttttcatttgtagtaaatgaatatcatgctaccgtgtcagtttcttgatatcatattttatgatgggattaggaaaaattttctattgttctttccccctccaagaaaagaagatactctctagggtctatatcaaatttttagtactgaaattatctgttttacagccacaccaggatgggccagcttattaccctgttgtagcaatcctgtctctaggatcacctgttgttatggacttcactcctcattcaagattaaattcatgcaaaagtacggtga

SEQ ID NO: 25976 - DNA, 176 bp, Gossypium hirsutum
  Clone ID: LIB3165-014-P1-K1-D5
accacgcgtccgcccacgcattcgatgaactgatgtttgctttcacataccaaaacgaggagggtgtatttaaaaacgcatcccaacacccattaaacgacttattaaatgaatcacatcatcctgttgtttctttggaatacacacgctatgatatttcctccaccttctactat

SEQ ID NO: 25977 - DNA, 306 bp, Gossypium hirsutum
  Clone ID: LIB3165-014-P1-K1-E2
agccttccgccgggggtacctttaaatctttaacggccgctttatacgtgccaagctaatgagcgccgggcagcaatggattaactatatataactcacctgaatacaatccactgaacccacattcacagcgaacgggactggcagaaccatggcgtaaccgagaccaatcggagcgcgactctagtccgtctctgcagcaggactagtgacgtgtaggctcagaccgagctctcttgcgaacaggagcacccactgcttggaacatggtacgacttatgtcgcgaatcataaaccgcgcacggt

SEQ ID NO: 25978 - DNA, 411 bp, Gossypium hirsutum
  Clone ID: LIB3165-014-P1-K1-E6
aaactcaaccataactcatattgtctactgtttggtagcaaaaaggcatagccaagccaagcagaggaaaacatgaactcatcgcccaatcctccacaaccccctccgccgcagtcttccacttccaccaccgccactgatggctccggcaagaaagtcaggaaaccttacaccattactaagtcgcgtgagagctggactgaagaagagcacgacaaattccttgaagctcttcaactgtttgatcgggactggaaaaaaattgaagattttgtcggttcaaagacagttatccagattcgaagtcatgcccagaaatactttctgaaggttcaaaagaatgggactattgcgcatgtgccgcctcctcgtcccaagcgcaaagctgcacacccttaccctcaaaaggcc

SEQ ID NO: 25979 - DNA, 407 bp, Gossypium hirsutum
  Clone ID: LIB3165-014-P1-K1-E8
gtttaggcagttgcgggtttataagactcctgtacttggagacacccagatatcagatgctaaagaggactgcaaattatgaggtaaggaaatatgaaccattcatagtggtagaaacaattggagagaagctatcaggatcaaatggctttaatgctgttgctgggtatatatttggtaagaattcaacaacagagaagataccaatgactactcctgtgtttacccacgcacttgatcccgaactatccgatgtatccatccaaattgttctaccatctgagaaagatataagcagtctgccagatcctagtcaagaaacagttaagttgagaaaagtggaaggaggggttgctgcagcattgaagttcagtggaaaaccaacagaggatgttgttcgtgagaaa

SEQ ID NO: 25980 - DNA, 404 bp, Gossypium hirsutum
  Clone ID: LIB3165-014-P1-K1-F11
agcattcgagcggccataaatccggctccgacccacccaaagtagcttgattttatttgatatatggtgaccgccgcagcatcctccatggcggccaccgccattttggttccacgtgtccacactgccgttaggatcacccactgctccgccttgccgtctctccctcctcgcgtttccagctcttctttttcctcttccgttaagctaagtccaggtacagctcttatacatggcctttttaacactcacttccaacatcacctgcgaaatgtaatcactagttccaagatttattttcttatttattaacttaaattttgaatgtattgaaattaaattgtattttttatgatagtaaaaatataattttatcgattaaataatttatattatcatgggtc

SEQ ID NO: 25981 - DNA, 106 bp, Gossypium hirsutum
  Clone ID: LIB3165-014-P1-K1-G3
tttaaaagacccaaaactaacgatatccacccacttgtaactgacaatggatctgaaatcgttaaggctacaattcctgggcatgatgctccacaacccttattcc

SEQ ID NO: 25982 - DNA, 186 bp, Gossypium hirsutum
  unsure (1)..(186): unsure at all n locations
  Clone ID: LIB3165-014-P1-K1-G5
ccgttccatgtaacggcacttgcacatgggttatttatcctaaagacgggggaagcccggggcacaccgtcagcgcgagcttcnaaaggaatcgggtaaaattcctgaaccgggacgcggctgctgacagcaacgttagggagtccatgtacctcttcaatttacacataacatttttatttttct

SEQ ID NO: 25983 - DNA, 201 bp, Gossypium hirsutum
  Clone ID: LIB3165-014-P1-K1-G9
gacaccatagcgcttttatatagtgacataaatataatatactgggcgcggttttacaccgcgttgactgtgaaaacactgtcgtgacccaacttaatatcctcgcagaacatatccctttctccagatgtcgtaatatcgaaaaggggcgcacagatcgcgcttttcaacacatgcgcacactgtatgtggaatgtgaca

SEQ ID NO: 25984 - DNA, 424 bp, Gossypium hirsutum
  unsure (1)..(424): unsure at all n locations
  Clone ID: LIB3165-016-P1-K1-A12
ggaaagcaaagcaaacgaaactcctctcnctcatctcactccttacccaaaacaacgggggctttcaccttgtttaaatttttttcctctcttcgtccaagatgccggctgctagcacaaatatgtctgaccgagagggagaatcatttgttgaggttgatcccactggtcgctttgggcgctataatgatttgcttggtgcgggtgcagtaaagaaggtttacagggcatttgatcaggaggaaggtatagaggtggcctggaatcaagtgaaattgactaacttcagtgaagacctgtgcttatcaataggcttcaatccgaggtacagttgctgagaacgttgaaaaacaagtatatcattgtttgctacagtgtctggagggatcgagaacataacacattaaattttatcactgaggtc

SEQ ID NO: 25985 - DNA, 520 bp, Gossypium hirsutum
  unsure (1)..(520): unsure at all n locations
  Clone ID: LIB3165-016-P1-K1-A2
gggaatggaccgggctcgagcccacggcgtcacgcnccacagcgtgacgtcaaacttcaagatacacccaatttcactagttttgttttctgtcacctcnntctctctcagcgcagtggcnntgcagccnnatctccaaaccgtcgcccgccccgctgccccgccgcccaacccccgagctctgggaggtgtnncagtcccaaacctcagnctttcatnggggaaagaaaagtgaagctcgaagattcacacaacccaccacggcaggttctcttcgggaacgttttaaaggtgatcggcggcccgaaaatagagatacgaccgaagagacacccagaccgaaaaaggacccgatgggaaaagggggttggcttaccgaaatatttcggaccgactcaacaacgacaattactnnncgagggaaaaggggatgggtgcgattccttggttccaaagcctcccatgaatggatggaacctnncactatgctgtcatggaagttcctatgaaataccatcag

SEQ ID NO: 25986 - DNA, 344 bp, Gossypium hirsutum
  Clone ID: LIB3165-016-P1-K1-A6
ctccttgtaaggcgtttgctccaccacgtttgtttccttgtggtaagaaagttattacagccagatgttctgataggaagtcggttcttacttgtggtcagcggtgtggtaaacttcttgagtgtgggcgccatcagtgtgaacgtatttgccatatcggagcttgtgatccttgcaaggttctaattaatgccccctgtttctgcaagaaaaaggttgaagttgtcatctgcggtgacatggttgtgaagggaaaggtgaaagcagaagatggcattttttctatgtgtttaacatgctaatgaagtttaaatggtgtaaccattactgtgcttaaatattgc

SEQ ID NO: 25987 - DNA, 430 bp, Gossypium hirsutum
  unsure (1)..(430): unsure at all n locations
  Clone ID: LIB3165-016-P1-K1-A7
ggacagggccgggctcactgtttaacaaaaaatnggacataaactctctagcctctctttttttttctttaacnaacccaagntttctatttggtctgggttctttgcatttnnccattagctaaaccttgtaaaangaacaaagannaataaaactctttgatggaagcgcgcaaggaatggtggctaacagggcaagtcctgaaacgtttggttaatgaatccaagcaatcacgcaatggtgaaatgagttctagatcacctgtttcctacactccatcaaggtatgtatcttcattgtcaccttttggttccaagaatcatagcagatcagattcataggtgctagaaatgtgtcgaacaatgttggttttggtgttgggccaccaattcgatccattactggcgaggcattgaaatgaagcgatac

SEQ ID NO: 25988 - DNA, 421 bp, Gossypium hirsutum
  Clone ID: LIB3165-016-P1-K1-B11
gaaaaaggggaaacccaaaatgtttgcctttgtttggtctgccgttcaaccaccatcagtgcaccatgaacgatggatggtggtctaccaaagcgttccccttatgccttcatttaaagcccagcctcaaggctcatcaatttcggcctcaaaacccctctcaaccttcgacgccggcgaagaagacgaggatttggtggctcgttcgcaaagtaagtcttctatcttctctttattatactaaaaagcatgcagagcaaaaaagaaaacaaaatagacctgagaaaaataatgtacagacttttgaaatctttttttctttttgattgctcttttttttttatgtttcaatctatgtgtgtataaaaataccatgtttttttttattcccgaaattcccctattttcaatcagttccctc

SEQ ID NO: 25989 - DNA, 289 bp, Gossypium hirsutum
  Clone ID: LIB3165-016-P1-K1-B12
cggacgcgtgggcggacgcgtgggttccgttgtagctgactatcatttctacttctgttacgatggcggctactaccttctctccttccttctccactccctcggtcaattcttccttcaaaggccaaaaaactttaaccaaccctaatctaagctttttggccctaagttccaaaatcctggaggtttttaaaagcacccagcctgcctcctgataaggctgggggctaacttttggcctttcgattggcttccgttcctgccgtccaaacacacatatttttcgatt

SEQ ID NO: 25990 - DNA, 427 bp, Gossypium hirsutum
  Clone ID: LIB3165-016-P1-K1-B5
cccacgcgtccgcttctccagtcccttgccgtctagtaagcaaaatcgaaataatagaacaaggattaagagggaagagatcgctatggtggttacgaccttattgtctccctgtaattcaattctagtccgcgggtttcccataagagaaaacgaatcatcatctcccccattgtttttaagcgttagagacaggtttctgaatcggaacaaaaggttatcccgtggcggtttgcttgtgcagcttaatgcaaccgaaggttcagccgattcaagtaagtccgaagaaagtataccttttgggctaaacccgattccgacgagcctccaccttgggctcaaggtgaaggcaagagttccacagcacagcagagttttgaggttcctttcttcgtttacttgcttgcttcagcggtgaccgccattg

SEQ ID NO: 25991 - DNA, 418 bp, Gossypium hirsutum
  Clone ID: LIB3165-016-P1-K1-B8
aacttgagtagggttccccttttccaaattcttatctgtgttcagcgatggcggttgctgtggcagtaacaggtggaggtgggcaatacaatggtaggatgacctggttcgttgttctgtcatgtatgatggctgccatgggaggcgtcatctttggctatgatattgggatttcaggtggagtgacatctatggagccatttctcaagaagttcttcccagaagtatatagaaagatgaaggtggacaccaaaatcagtaactactgcaaatttgatagccaactgttaactcatttacatcttcactatacatagctgggctagtcgctacgttcttcgcctcatcagttacaaaagttttcggtcgtaagccgtcaatcttgacaggaggtgctgcattccttgctggttcagcc

SEQ ID NO: 25992 - DNA, 397 bp, Gossypium hirsutum
  unsure (1)..(397): unsure at all n locations
  Clone ID: LIB3165-016-P1-K1-C10
cccacgcgtccggggaaatgatttcaaanaaaaacagaaagcctccccgttggaagagtgagctcttgtacatttaagttcctttagtgccatagaataagaaaaaaggttatcccttttgcacaaaaaaaaaaaaaaaaaaaaaaaaaaaaaaaaaaaaaaaaaaaaaaaaaaaacccaaaaaaaaaaaaaaaaaaaaaaaaaaaaaaaaaaaaaaaaaaaaaataatctaaaatatagagacacctaaataaaattctctggccgtatttttacaacattgggactgaaaaaaccttgggttgcccatggggtgcgttctttaacatatccctttttagacagctggcataataacaaagaggcccacactaatccttcttcaaaacatttaccc

SEQ ID NO: 25993 - DNA, 410 bp, Gossypium hirsutum
  Clone ID: LIB3165-016-P1-K1-D10
ctttagagttctttacaatgtgaccgttttctttctaaatctaaataccactacggggggcgttattttacttattcaatcaatacaattgccaggcaataactattataaactgcccaatgccagattagtaacatcgaatctaatcaaagatatctgtaagaagtgcgacttctttgaagcgctgcaccactggaatccctatgcaattgatcgacagagtgtcaagcttgacgaaggagcatttcatgaaatacatggtgcaaacgcttatggtactgaagccaagcaaggccctgaaggtcaacaggctatacatactgctttcgactcagaaagtaccttctatatacgccgtttccatgaatccaacatggctgcaatcccagggctaacctatgaacacagca

SEQ ID NO: 25994 - DNA, 424 bp, Gossypium hirsutum
  Clone ID: LIB3165-016-P1-K1-D12
aaatcaagcacggtttctttaagagacatattttgtctccgtgtgtgtcagaggtcggggatgatttgcaaaaggccatgctgtcatgtcagggtttcccagcagggggctgaattcagcacatgtattcagaattctcatgatgatccatcaaatgtagaagtagcctccccaatttttaaaactgatggagccagtgctcagcaactaattctggatgaagacggttctgagcttcggaaacagcttccagcttttgttaattctgcaactttgggaggaatggaatctgcccatcatgtggctcaaacttagagacaatattctctccttatctggagccaatccaaatacacagtgagctaaatgttgacaatgatgcagggagtaataatggccttgaactgccagaatttggggctga

SEQ ID NO: 25995 - DNA, 410 bp, Gossypium hirsutum
  unsure (1)..(410): unsure at all n locations
  Clone ID: LIB3165-016-P1-K1-E1
ttcaaatccgtacggaacttagcggtagatcgtttaaagaggcttttaatttttccggtggagtgcgacggaaagggccagacctaatgatgtagtggtcttcccggaagatgagaattatcagtctttcacttcatttttgctgcagcgattccgctagctataaggtttggcagtcatcctcaacaagtcgtcttctccttcttcccataagggtaagggtcctgaatcagctcctncaagatcacatccaatgtcaagcagaacttgcagtttttgaagttgtggaaggattccaaaagagtaaatctagtgcacctaagcctgcaactagttataggagaaaagaggtgcaaaaggaagagcttcctgaagacataaaactttatcgtgatcctacaacgaccctt

SEQ ID NO: 25996 - DNA, 396 bp, Gossypium hirsutum
  unsure (1)..(396): unsure at all n locations
  Clone ID: LIB3165-016-P1-K1-E10
gaattccctggatgataggccaagatgtgtaattagtcatgttaggcaccggcagacgccgcctanacagatgcttagacagtttgaaaataacatcgtgacaaagtaagaggatgggtagggttttccgtaaagacagctaccgtataacagccgggctgatattttactatgccataagatttgaaccctgcggtctaaaccaactatatgctatgaactatggaacaataccggttgtccatgcagtcngtggactgagagacacagtgcagcagttcaatcgttaagagttggggtcggtggcatttgacagtgcggatgcaagaagttgatacatgcataggtaactgtttgtgcatatcggagttaaaacaattgggaagggttgaaata

SEQ ID NO: 25997 - DNA, 418 bp, Gossypium hirsutum
  Clone ID: LIB3165-016-P1-K1-G5
gagtatgtaagtagagaatcatgcctgatgttatttctattactgctctgaattggtcccggctgccagaagcaatttgatttaaagcatcttcttaaccaataattgtgtttcttcaaataagcttttggtattttgctgctctctccttgaaatattggatcaactgacatgttcgttttgaaattggatgcttaggatttgtttggcctagatgttttataaaaaactgttgttcaagtagatctcttctagtgctgtaaaagattaaattaaaaatatttaaaaaaacctaaacttattaaactgagggttttgttggtacaatgtaagaatgtggcaagaaggttggaggcagttcactcgatgggctgagagttgtaagtggtagtagatagattggtcccctcttgttatg

SEQ ID NO: 25998 - DNA, 432 bp, Gossypium hirsutum
  Clone ID: LIB3165-016-P1-K1-G6
ccggccactatctttctctttgaaaaatcttagcataataaaatcccgacatggaaaccgctggtggttcaatccttcacactctcgccttctccagtaacaccgcaactgcaactattaacaataaccaccatctttttctgcctcctaaaaccaatccttcattttcctctactttcccgaggaacttcaacttccatggaaaacccctgcaattcaatggcttcactgctttcagctcgccttctagtgcccagagccaaaacccacctcaggaactagctgttcttctcgaagttgatggggcattatggatgcatatcgtttgggtaatcgccaagccttcaatttagcatttcaaaagctcgggcttgactgcgcaaactggactgaacccgtgtattcagatcttgtaaggagaagtgctggtaa

SEQ ID NO: 25999 - DNA, 416 bp, Gossypium hirsutum
  Clone ID: LIB3165-016-P1-K1-H8
gtggtttgtgagataaaaacaaaaaaaaattcttatacaaacacacacacatcgaaaggcagtaaaaaaaggttggaattgttactctataagcgccgtctacaaatctcttctctatttcacttcgaagcggagaagaaaatagctcaaatatcgaaaaccgtaataatgggaggaggtggtgctggtggttcagtgaaagatgtgcagtccaagggtgagctcgatgggttacggcagagtggcgcaacgcttatccttcacttctgggcttcgtggtgtgaggcttcaaaacagtggaccaagtgttttctcaccttttcaccgatttccccaacttttactttcttagggtagaagctgaagaaccacctgagatatttgaggaatactcgggttctgcttggccttttttt

SEQ ID NO: 26000 - DNA, 264 bp, Gossypium hirsutum
  Clone ID: LIB3165-017-P1-K1-A7
gcatgttgtatcctctgctcattagttctgtttgtattcttgtctgtttgatcacaaccctatttgctaccgatttgttcgaaatcaaggttgtcaaggaaattgaaccagctttgaagaagcagctcatcatctccactattcttatgacagtaggaattgcaattgttacttggattggtgtgccatcttccttcaccatttacaattttggggttcagaaagttgttaagaattggcaactatttttgtgcgtgggtgttg

SEQ ID NO: 26001 - DNA, 412 bp, Gossypium hirsutum
  Clone ID: LIB3165-017-P1-K1-B2
cttttctaccagttttggttctcgaagcttctttctttactgaacgctcccagacctctgccatcggattctatcgccctcgacactgctctggacaaccaattatccaggtaagtcattccttgtctcttcaatccttcctttgctttcctgatttagggacttttttgaaacgacattcttcgaaactctggcttaattcttttatgtctaaaatgtatgccctaaacactgatttgtcctcctcgttattttgaaattttttgatgatactgagagcgtcaccttcgatctccacttgtcggaatcctctttctattccccactggatggcctgtaataggccagcgcttcttccgtgaaaggcgtggccactcaattattcatcagcaattgagatcccagaaaaatt

SEQ ID NO: 26002 - DNA, 319 bp, Gossypium hirsutum
  Clone ID: LIB3165-017-P1-K1-C7
cccatacttccttatcaaacacaacatatatatctatcaacatcctcattactaccgcgcggctcaatcaccaatcaacaccgccccaacacttaaactcccttctctatccactcatccccacttatatattctacacccaatagcaactttcacatttacactgataactctagaaataccataaaaatttgaatgctaacattaattctcatttctacaccctcatgcatcgaactacatctatcctctctactcctacatctctcatcctcattctttaactactcattcattaaaatttcctagattttaccaa

SEQ ID NO: 26003 - DNA, 335 bp, Gossypium hirsutum
  Clone ID: LIB3165-017-P1-K1-D1
cccacgcgttcgctttgtgatggggatatcaatacttgtggctgtcacagtgcttgtttacattgaagataacattgggtggggatggggccttggagtccccaccatcgccatgtttttgtccatcatcacgttcatcatcggctatccactttaccgacacatggatccggcagggagtccgtttacccggttgttacaggtctgtgtgtcagctttcaagaagaggaagttggccatggtttctgaccccaacttgttgtatcggaatgatgagcttgacgcctccattttcgtaggtggaaaacttgttcacaccccagacatgacatttc

SEQ ID NO: 26004 - DNA, 412 bp, Gossypium hirsutum
  Clone ID: LIB3165-017-P1-K1-D2
ctttaaccctttttttttatttttttttaaaataaatctcttttaaatgaacaacaaagaacagggaaaatccgaagaagaagaagaggaagtagtgatggaatcgaagcctttacgtttccttactcaacaatctttatttgtagccgttcgatctggtgaacttgaagcggtgaagcagatattagataagttgaagaaagatgatgaagcgtgtgatggatcatcaacggtgtatgatctgatggctgctcaaagtgaatcaggggctactgctttttatattgcagctgagaataatttcaatgaggtttttgattatttgatcaaattttgtgatgtggagattgttaagatcaggtctaagtctgatatgaacgcttttcatgttgctgctaaacttggacatttg

SEQ ID NO: 26005 - DNA, 410 bp, Gossypium hirsutum
  Clone ID: LIB3165-017-P1-K1-D5
cccacgcgtccgcccacgcgtccgaatatgtatctttcatgttagcagcaggggccaaagtggcgtacgagaaagaaaggagcatcggatggctatgtcttgtagttgtcatgtcaagtgctgcaacagtgtaccagttgtattgggactttgtaaaggactggggtttgcttcaaatgaattccaagaacccttggctaaggaatgaactaatgcttcgtcgaaagttcatttactacttctccatgggattgaaccttatcctcaggctggcttggctgcaaacagttgtccattcaacctttgaacatgttgattacagggtaaccggactgtttttggcggcgcttgaggtgattagaagaggactgtggaatttctacaggttggagaatgagcatctaaataac

SEQ ID NO: 26006 - DNA, 407 bp, Gossypium hirsutum
  Clone ID: LIB3165-017-P1-K1-D8
cccacgcgtccgattttctcgctccctttactttaatccaaagcttcctcccctcgctctgacatccacttctaaaccttcttttctctttccaaccaggaaactctctcttccttctctccacagtctcattttcaatcaatccaaaaacagttctaacaataattctagtaatagttgcatagtttcttcagctttcgattccttctttattctctgcacttcgcttgctctatctttctcgctattcgtaaccgatgtgggagccgcctcggcctttgtggtgacccctccccggaaattacagtccgatgagttggctacggttcgtctttttcaagagaacactccctctgttgtttatatcaccaatctcgccgtcaggcaggatgcttttacgttggatg

SEQ ID NO: 26007 - DNA, 413 bp, Gossypium hirsutum
  Clone ID: LIB3165-017-P1-K1-E5
gcaaaagagcataacgttgaagacacggcggttaatatatgctgctgaaaacaaccaatcgagtgattatggatcgtctacacagaaaatcaaagacgaaagtgatacccaaggtctttcgcaatggaagtgtatgagttcaaatgttagcgatacaggcagagagcagcagggaaattctgtcaaaccgggtcaggagtcgcttcaaaatgagggtcaagctgaagggatatctgacaagctatttgtatctgaaaattcagagagatttgtggaggttgctcattgcagtggcacttgtgaatcaattgcattaaaactcgaagagaactctgcgtttgttgacgagatggcacataatgttgttggactacaaagtgataaaagaattgcatatgttatgattggagttg

SEQ ID NO: 26008 - DNA, 409 bp, Gossypium hirsutum
  Clone ID: LIB3165-017-P1-K1-G11
cccacgcgtacgcccacccgttcgcatttttttagtgctcactacatttctctcggcgggggtctcaacattcctaatctccaaagcctatcatatccctaatccattcccctattatcttcttactagcgtctaccatcaaaaaacactctcgatctatcttcactcaccatactccagctttacttcacactctcaagccacgttcagttcttgctgcactccttgactgaagccaactctcactctgtttttcgagaactctgccagatagaggcatctctaattccccatttagatcataagtttactctcataacgagtactacttgacacacactttatcaattcagcaaatacattggtcatgatcgtggtaataaaaaaagctatgagcaatttgacatga

SEQ ID NO: 26009 - DNA, 417 bp, Gossypium hirsutum
  Clone ID: LIB3165-018-P1-K1-A12
atactctatatcaccatggcaatgaccactttccatatgccacgaccttctttctggaagggtcagggtatcagattttcacagaaaccatcatggttccgagctcaacccagaaccaaactcaacccctcagtcaacattaaagcttcagctggtgtacgaaaagaagatatcgtcatcgtcggagctgggattgctggtctcgccactgccgtgtctcttcgcaggctagggattgggtcagtggtgcttgagcaagcagcgtcgcttagaactggtggaacctcacttacccttttcaagaatgggtggcgggtattggatgccattggtgttgctgatactctcaggggccaatttcttgaaattcaagggatggcggtgaattcagaagatggaagggagttacgctccttc

SEQ ID NO: 26010 - DNA, 264 bp, Gossypium hirsutum
  Clone ID: LIB3165-018-P1-K1-A8
cccacgcgtccgctcaaaagagtctgttatttttcttacttcctcaaaccaaaaggcacgccagcattataattgcttcctcaaaacctgtaattttcaatggttgtttaataatcctttttttccaacccaaacttaaaccaattccaccacttttccttccaaaacttcccaacccaaaagtcttgaaaacccaacaaattcccttacttttcttcaacaattttaaatttattttcctttttacaagcaccactttattct

SEQ ID NO: 26011 - DNA, 263 bp, Gossypium hirsutum
  Clone ID: LIB3165-018-P1-K1-B5
gaggaattctatcaccttattactctggctaaggataaattagacaagtcaatggtggccccgcattatatcttgttatagcattgaaactcaaattcgaaccagctctggcatgtttcttcagaaagctcatgatgaagtagttgctgatatctaacctaggattgctgcatggactttccttccattaaagaatggggtgtccatgcatatactacattaccagaatgttctatagttttaaccacattttcatttttttt

SEQ ID NO: 26012 - DNA, 401 bp, Gossypium hirsutum
  Clone ID: LIB3165-018-P1-K1-C12
cggaactagcgagacctgaggaaaagcttgctggtcttcgaattgatgggaaatgtgacgccaggagccggatgtctttttacactggcatagggattcattcactgatgcctgatggttctttgggacccgaaacagaggttagaggattgcctgatggtgctaagattaattttgttacttggtctaatgatggtaaacttttggcctttagtgttcgttttgaggaagaggagagtagttcaagtaaacttagagtgtgggttgccgatgtcgagactggaatggctaggccgctgtttcagtctccagatatttatctgaatgcagtgtttgataattatgtttgggtggataactctaccctcttagtttgtactattcctttgtctcgtggagat

SEQ ID NO: 26013 - DNA, 472 bp, Gossypium hirsutum
  unsure (1)..(472): unsure at all n locations
  Clone ID: LIB3165-018-P1-K1-C2
atacccgggctcgaccccacgcccgtccgtnattgaattcaaagaaccttgacccatgccccagtatcttcgtatttttgctttctttctttcctatatgccggggtagcactttccctccattttcaagatcggagagcaaagttattacccttgtgaacaaacctgcaaggaaaagccatntggccctgnggtaccttggcagtgcagngtcagtccaactcctaaaaatggtgcgattccaatcttggtagtggtgaagaagtagttcttgacgttccacagaaatggtctgggaggatatgggccaggcaaggttgtaatttcaacagtaatggcaagggttcttgtgatactggtgactgctccggacgacttcagtgccaaggaacaggcggtacaccacctgcaaccgtgatagaaatgactcttgggtcatcttcttcaccactgcatttctatgatgtaagtt

SEQ ID NO: 26014 - DNA, 427 bp, Gossypium hirsutum
  unsure (1)..(427): unsure at all n locations
  Clone ID: LIB3165-018-P1-K1-C5
gcaagaccaagtaaaacgagtcctaagcaagattaaatagccagaaacaaactcgaaagagaagagggagtaaagcttgaaaatgtgccaagcaagtatccgattttgaggaggcggcatagattggttgttttaatacttgactgctatgacagcaacgggttacctgagaagaagatggctcaaattatacaagacatatttaaggctgttcggctggacactcaaaatgcaaaattcacaggttttgctatatcgactgctatgccagtctcagaaacaatggagttcttgaaatcagcaaagattcaagtaaatgagtttgatgctctgatctgtggcagtggcagtgaagtgtattaccctggaacttacacaacaaaaagatggaaagcnttttgctgatcctgattatgcctctcatatt

SEQ ID NO: 26015 - DNA, 408 bp, Gossypium hirsutum
  Clone ID: LIB3165-018-P1-K1-F12
cccacgcgtccgcaactcaccatttggtgtatttgaatgctaaatccctgagacagatatggttttgccatccccacttctatgagctgatggtgcatgctttacagtgaaattgctcttattttatccaatttaatcttgtctagtgtggtaacatctgcgctaactttcttgcaggtaattagatgctggaatgcttatttgggtcatgaaattttcaaaagtgtagtaggtcttggagggttgggccgtgggcctgagctttgtgtatggtcattactttctttgaggtgcggaactgttgttagtgcagacagcaccggatctgttcagttctggaatggtgataatgggactcttcttcagacacattctacccacaaaggtgatgtgaatgccttggcagca

SEQ ID NO: 26016 - DNA, 419 bp, Gossypium hirsutum
  Clone ID: LIB3165-018-P1-K1-F2
taaaatgaccacaattttgggtattcacttaatttttctaggtataggtgcttttcttctacgattcaaggctctttattttgggggcgtatacgatacctgggctccgggagggggagatgtaagaaaaattaccaacttgactcttagcccaagtgttatatttggttatttactaaaatcgccctttggaggcgaagggtggattgttagtgtggacgatttggaagatataattggaggacatgtatggttaggttccatttgtatatttggtggaatctggcatatcttaaccaaaccttttgcatgggctcgccgtgcacttgtatggtcgggagaagcttacttgtcttatagtttaagtgctttatccgtttttggtttcattgcttggtgctttgtctggttcaataata

SEQ ID NO: 26017 - DNA, 370 bp, Gossypium hirsutum
  unsure (1)..(370): unsure at all n locations
  Clone ID: LIB3165-018-P1-K1-F3
gtagcagccattaaagccatgtctccgtgcgttacctacgccgctcgaaccctcggctggcgcgacggcgccgncgcgtcacacctaaagctcatctctcttgtagtaatcttcatctccagcatcgccggcatatcttcccctatcttcctagctcgttacttccaagggaaacccgtttacgacaaggcgattttggtaatcaagtgcttcgccgccggcgtcatcctctcgacctccttagttcacgtcctccccgaagccttcgctgctctctccgattgccacgtcgcttcccgccatccgtggaaggatttccctttcgctgggctggtcacgttactcggagcccttctggctcttttcgtcg

SEQ ID NO: 26018 - DNA, 406 bp, Gossypium hirsutum
  unsure (1)..(406): unsure at all n locations
  Clone ID: LIB3165-018-P1-K1-G2
atttgtcccgcgcgacacccaattcttctccatttcatatcttccgnggcgtttcaattggtcaggttagatcaagcatttctcttttcctttcttcttcttatctctgccaaaaaagaaatttaaattcttcagcagatctcatacaaaaaagcaaaaccaaaggtaatggcggggctgttcggatcgcaatcctctacggttgcacccatgattgtcaccagcacaccatccacagatctcgccttgactaattttgcttattgctccccttccgatcttcaaagcttcgccgtccctggctccaaactctttcttcgctaacgtcggggatgccttccntcttactgtttcttctcatgaaagcatacgcaatggatatattgctctaaatgctatccatcgt

SEQ ID NO: 26019 - DNA, 400 bp, Gossypium hirsutum
  unsure (1)..(400): unsure at all n locations
  Clone ID: LIB3165-018-P1-K1-G3
gaaagggattcttcaagctggttcttcatatttttattacaaataatgtacgaaagcatgaaagtgagagtcgaacacgtcgttgaaacaagaaaaattagtgaggaatacaacaccagcgatgaagtccgtcaggttttcagtcaatggagtattgatggatttacccgtcaaaatcaccccacagtgatccaggttttattggaccaaaataaagacaaagacatcacaggcaattgcttgcccaacctggtttatgtctctaggcaaaaaagcaagacatccnctcatcatttcaaagccggtgcacttaatgtcctggtccgagttttgctgccatgaccaatgcacctgttattttaaccttagactgtgacatgtactccaatgatcccacaac

SEQ ID NO: 26020 - DNA, 182 bp, Gossypium hirsutum
  unsure (1)..(182): unsure at all n locations
  Clone ID: LIB3165-018-P1-K1-G7
cccactcttacttccatcntccaacttttctttaagaaacagccaaaggacccgccccaatataacaattcaactccccaaaatggatccataacctagggaaaaggattgactctgaggactgaacacaacggtcccagtccctaacccatctgctgcctacgcactgctcgagctgctcc

SEQ ID NO: 26021 - DNA, 415 bp, Gossypium hirsutum
  Clone ID: LIB3165-018-P1-K1-H6
ggagggccggcccacgcgtacgctttctccatctctctcctttcccccacaatcattgcttaccttcattctctatctcccggtctggaccctacttaccggttctcctctgacaatggattgctgctcgtcgacttcgtcggtttgtactgtaaatccaaacctactaccaggcggaggcttcccctctccctcaatactcggactatgcgccgcttttcaacctccgccgccaataattctgttagggccgttcttgatcatcttccaactactactactactactactactactactactactactactactactactacttccgtttcttctgcgtctgatcatcaatcatccgcttctcaacctaaggttgcaaatttagaggatataatatcagaaagaggtgcttgtg

SEQ ID NO: 26022 - DNA, 436 bp, Gossypium hirsutum
  Clone ID: LIB3165-019-P1-K1-A1
caaaacccccaacatctgcaacaaatccccctcatctttgttccacaaacagcaccaatgggctgcacttcaactgtttcaatggcactgccactatcacccaccacccaaaccaaagtctccatccccaaccctgtcctcaacccacttccactcaagcattcatcaatggctgccaccccaactacaagacccaatgcaacaaaacttgaagtcaaggcttcttcttcttcttcttcttcttcaaacaaggagaaggcagtgactatgttgacagcagctgcaatgacaacatcaatgatggtccctgaaatagctcaagcagctgatggggttaccccttctctcaagaacttcttgcttagcattgctgctggcggtgttgtgcttgtcgccattattggagctgtcattggtgtctctaactttgaccctg

SEQ ID NO: 26023 - DNA, 409 bp, Gossypium hirsutum
  Clone ID: LIB3165-019-P1-K1-A4
aaccattatccagccactgggaaaatgaactcatttaacggtcaccggagagttgaaaaccaatgacccattttcgttttctccatcttcttgtagagattgagatatgttgaagccattgacgacaacgcttagctcctcgtgcttagggtcaggtgtacggatacaccatgtatatttcacaaagcatggtgaccttatcaggtcttatgaagggtctcgttttacaaaaacttccgaaggttcattgcatttcaattctgatgagcaaaatttttcccgaattggaagattaaaaaccaggtgccagcaccagcaacatgtatttcccaacagtatagcacacatttcagctgatggcactcatcaagaccaaaatgatgtttttaaagcaacattgatatggagg

SEQ ID NO: 26024 - DNA, 426 bp, Gossypium hirsutum
  Clone ID: LIB3165-019-P1-K1-B11
cccacgcgtccgtccaaacccagcttattctgttgctctccctctcgcgcaatggaaaccaacgacgacacctccaaagctaagggcttaagctttgatgatttcctcagcaagaagccctactctcctcctacttgggcctcccatctcaaaccaatcccttcccatgtcttctccctcgcccatcttcctactccaattcacaagtggaatctgcctaatttgccccaaaacacggaagtttggttgaagcgtgacgatctttcaggtatgcaattgagcggtaacaaagtcaggaaattggagttcttattggcggaagcagtggcacagggtgctgattgcatcattacaatcggcggcatccaaagcaaccactgccgcgccaccgctgtcgctgctaagtatttgaatctagactcctat

SEQ ID NO: 26025 - DNA, 403 bp, Gossypium hirsutum
  Clone ID: LIB3165-019-P1-K1-B12
cccacgcgtccgcccacgcgtccgatcgtctcttatctccatttgtatccccacctttctggtcactctgctatacctcatcaacatcccaacttctcacgccttcctcccactaacttatccttaccagtcatatttaaggcctcgtttccgaaaaaatgtatcattttagtccccagggcatcatcatcgtcttcaggtcaatccagtgttggaaaaaaggtttatgaatttgatcctcatccaactctcaccaatgatgacctcaagccgacaagaccaagtcaaaggaactaccactggaagcaaatggccagacattgggttggtcttgttgttggtgttccagcatattacatggcaggtagtcttgttgagctggggatggcttggtggcaaggga

SEQ ID NO: 26026 - DNA, 258 bp, Gossypium hirsutum
  Clone ID: LIB3165-019-P1-K1-C9
gaattcttctcttaattactaatggaatcgatcttatattaatcctttcttcgaacgaatccacccaaaaggggaggtattccaatgcaataaagtgacatagcgaatatcgctggttgcttaaggactattggcatgggtatgcctggtgatggtgaatatactggcacattgaatgagcctggtcgatggattaatgttcatattgtgcatactgatatgcgtgctgtgcgtgcgctcttattgacatctatatga

SEQ ID NO: 26027 - DNA, 374 bp, Gossypium hirsutum
  unsure (1)..(374): unsure at all n locations
  Clone ID: LIB3165-019-P1-K1-D1
cccacgcgtncgnccacgcgtncgnccacgcgttctaaacttctctagttaactttctgtttgtcccactgctgtcattggaatccgaagtatatatatttcattttcataaaggaattgaaaaaggaaacttcatgcgaatctttcatcttctatgttttacttaatttggatccaaattcctcagaaaggcctttttcttctttgaatcttccattttcatccttaatcctccatgggcaagggtggtggttgtgtccccagcaagaaaaagcatccttcctncgccgaagaccctgctcgccgccgtgggtcttncacaacagccgncaacaacgcacccattcccgccaccgatgaagaaacccgcgaaa

SEQ ID NO: 26028 - DNA, 332 bp, Gossypium hirsutum
  Clone ID: LIB3165-019-P1-K1-E8
gttccatgtgaacggcactggcacatgtgttatttgtatcctaagacacggatggagacggggcgactgtgattccagaacgagcttccaaagggaatggggataaaaactctgaaccccaacgcggtaactgacggcaacacttggaactgcggaaacgcaagtgtgggaaaacctacgagttatatgatgtgcacaacgacctactgacagtgtaaacggctaacccggaggtaggcaagacggatcagatgatgaacccacgtgccgtgcatggcgtcacaaagttttccgatttaactacatcggaggaccgacggcagtatctacgc

SEQ ID NO: 26029 - DNA, 322 bp, Gossypium hirsutum
  unsure (1)..(322): unsure at all n locations
  Clone ID: LIB3165-019-P1-K1-G6
cccacgcgtccgaaaaaaagtcctctttataaacccttgccttcctgtaaccctctctgtatgtccttcgattcgcttaccttttcctttttggccatggctacttgttcagcggacttagctccgcttcttggccccaacgccaccgcagcagccgactacatatgcaacaagttcagtgacacttcctttgccgttgacaatacttaccttctcttctcagcctacctcgtcttctccatgcaacttggcttcgccatgctttgcgctggttcagtgcgtgccaaaaacaccatgaacatcatgcttactaacgtnctcg

SEQ ID NO: 26030 - DNA, 281 bp, Gossypium hirsutum
  unsure (1)..(281): unsure at all n locations
  Clone ID: LIB3165-019-P1-K1-G8
gaaaaacgggccgaccaacgctttcnaacngcaaaaatataaaaaaacatttataaattttataaacaaaacaaaaaaagcgcaaactcgtgcatttttcaaaacttcttcccacccccacaacaccacacaaacttaaaaactttccctctgacaccctcacaccctattgcctaacctacctctcactttctccaacctcttccccatgaaagctgagctatcaacaaaagctccagcacctcatccattcaaactcaacaactctcctactacaccac

SEQ ID NO: 26031 - DNA, 403 bp, Gossypium hirsutum
  unsure (1)..(403): unsure at all n locations
  Clone ID: LIB3165-019-P1-K1-H2
agaaattcaattatggcggaaaagtttctgttctatattgcttaaagggttgncgacanagtgtgccgtgtcactgtagaggaagttcgcttggcgtttaatgtcaaaaccgatctgaaaaagctggaggacaccatgatcagcattaaagctgtgctcttggatgccgagcggcaacagcaccaaaatgaaaagctgcgcctctgtatggngaagctcagagacatctnttacgatgctgaggacgttattgacgatttcaagtgtgaagctctccggaaacaggacggcatcaatcatcccgacatcaaaaactaaaggtgcgagttttaggttcctgttgtttgtctttttcattctctttaaaaatgagtcataaaatcaaagacatcaatgggagact

SEQ ID NO: 26032 - DNA, 434 bp, Gossypium hirsutum
  Clone ID: LIB3165-020-P1-K1-C12
cccacgcgtccggcgaaacccagcatctaaacatccaccccctatttttccatggccaccaaaactgcatcatcgtcaagctcaaagtcacaagcccgtacatgcctatgctcccctactacgcacccagggtccttcaggtgcagcctacacaggaatttcaacaagccaccgactggccggagcagggcggttcgtatcgcaccgaattcctgggagttagccctgcaagccaaagcaaattccatcaaggcgttgctgctccaaatcattaaaccatcgagccatgacttgcaaaggagaaggaatttccagcctaagccttccaggttttgcatgttgaatggcaacagaaacgggttcggggtggctgtttcctgataatatattggcctcccttagtgtttactttaatgtatatatacaaggattta

SEQ ID NO: 26033 - DNA, 156 bp, Gossypium hirsutum
  Clone ID: LIB3165-020-P1-K1-C2
agccttccgttagaacccacaaagggtgtgggtcgattaatactgcaggacggtggtcatggaagtcgaaatccgttaaggagtgtgaaccacctcacctgccaaatcaactagccccaaaaatggttggccctaaagcccgggacctatacccgg

SEQ ID NO: 26034 - DNA, 363 bp, Gossypium hirsutum
  Clone ID: LIB3165-020-P1-K1-C6
cccacgcgtccgacaaaaggtcacactcaaatttgtagacatatcttgctccattaagaggggagtttgcccttgacttgaccgtccttatacctgtaaacacatctccaaaaactgtacctgtcgtaaaacgctcataagttgactcaacatgtaattgtggccgtctttgaaaccgtttttggtcggttcttacaagttttaagacaggttgattatctgggaagtaggttctagacttgggtatcttttgctttaacttttgatgtaaaataacctggcactgaatgtggactgttgggggaaatttggagggatatcaaatccatcatcgagcaggcagctgtcagtgaggtttttttt

SEQ ID NO: 26035 - DNA, 289 bp, Gossypium hirsutum
  Clone ID: LIB3165-020-P1-K1-D12
cccacgcgtccggatcagtgagactcttttgtttaacctgtagcatatagtaatagaaggcagtattagcattggcttcttcaatgacttaatgggaaccaatggcaacggggaccggttcttcccgggacaaggcaacaaggggggcccctttaaccggcctaaaatctgcctctgctttcccagtcaccaggaaggccaacaacgacatcacttctcttgcaagcaacggtgggagagtgcaatgcatgcaggtgtggccgcctcttgagaagaagaagttagagac

SEQ ID NO: 26036 - DNA, 439 bp, Gossypium hirsutum
  unsure (1)..(439): unsure at all n locations
  Clone ID: LIB3165-020-P1-K1-D3
cccgtccggtggtttctttgtctctctagctagctatagctcttcttctctttgccgtgttccactttttttatttcatttaaaaaattgggttttcttttgaaataataaatcgactcatatgtagtatctgattntntaattttttgcgggtgtggcttgttaaatttcttgagcacattggaatgttaggtgttactagcacttgcagaacaaaaaaaagaaagagttggtctttacatccccttttgtgtttatgtttttttattgtttttcttagttaaagatttactgtatagatcttgatttttgggtttttccttcttttttcaacgtgtacttcccaaatatagaaatatgtaaatcattcaaactgcatgggatttattttatctgttttattttcattgaagtagtagttaaggacttttatatagca

SEQ ID NO: 26037 - DNA, 418 bp, Gossypium hirsutum
  Clone ID: LIB3165-020-P1-K1-D8
gtttggcatgcacaacagagaaaatgtcttggtattttgctatgcattgagcccaaatgatgggacagagtggaggttgcgaatacagtcagaagctgagcacttcatagatgtatcgtctatgtcctctgatatgattgcaaagatgataaatgaggacaaaatacaaattcttgtcaatcttaatggttatactaagggagcaaggaatgaaatatttgctatgcaacctgctcctattcagatttcttacatgggatttcctgggactactggtgcatcatatatacactacttggtcacggatgagtttgtttcacctcttcacttttctcatatctactctgagaagcttgtacaccttcctcattgttattttgtaaatgactataagcagaaaaatcttgatgtcttggat

SEQ ID NO: 26038 - DNA, 297 bp, Gossypium hirsutum
  Clone ID: LIB3165-020-P1-K1-E8
gcttttcattccttgtatggcaggaactgtggtggcgtgttatgggaacggcgcaatactgaaacccacaatccttctcgcaaggtggcctacccaaatgctcgggcgggtgattatggatgtgcacccctgccaactgatgtgaaagctgacctcccgcatggtctgacggtccgcgcatcggcccaaggctgccggtgggccacactataaagaattaagcagcgaccattccgcaggccaagctgatgccattgtgggccaatctgagcatgcatgcttgtgcagagcgagtct

SEQ ID NO: 26039 - DNA, 433 bp, Gossypium hirsutum
  Clone ID: LIB3165-020-P1-K1-F6
aacaaccgtacttataacagattaaaggaagcccctcacactgaaagcaaaaagggacattggtgattccaacaaaagcctttagcggtttcatcagatctaccacaatcgcaaaccgtgcaaacttctctctccttgattttgttgtgttatagttcacctttaccaccttctccaatgtccttgctattattctcaacagtttcttgttataatacctatacgggagccccgacattctcatccacaccactatctttgagggatgttgcttgttcgtagagaagtctcgactctaaggttgaacagtgaggtaattcccataaaccatttatggtccctctgtgagtgctttggtatagtcttgactcaaagcaaactttaccaagtaataatcattgtctatgtcgatcacctgaaatgatctaacaag

SEQ ID NO: 26040 - DNA, 273 bp, Gossypium hirsutum
  Clone ID: LIB3165-020-P1-K1-G1
ctcttctgctctcttccttcccaacacaacataggttattcgggttttgggtggaggcggcggcggcggcggcggccctgtctgaaattaacaggtctcgtaatcgacatgcgaccaaaggggtcgtttgtatctgctgccggtttcgatagcagtctctctgttgtcatcaaaagcacacgacacatgaccaagctaatcttagatcccatatattatcacactgaaaaagtggctgatggattgactggagctgaatggcacggatgggtt

SEQ ID NO: 26041 - DNA, 435 bp, Gossypium hirsutum
  Clone ID: LIB3165-020-P1-K1-G10
cgctcttcatttcccataccttgtttccctctaaatctcgcctctttcgtgggttaaccctttctccacaccgccatggtttcgcttccttcaccaactgctctaaaaacaacgataacctcacaacaccaccttcacaagatcaagataaaaaacttccttcttctaaagagcaactgtcttttgctgctgcaacaggggagcttttcttggggattgcatcaaaattaattaaaaacagattgaataatgaagattcaacaagcctggtttttctcagacccagaaagagaatcaatgagagtgaggttgaatataatggaaacaatgataaggagagaattgggttagtgatgaaggatgagatagaaccagatgtgatatgggaacaaagggttaaagacattgaagctgagaatgaaagaagagtggtta

SEQ ID NO: 26042 - DNA, 430 bp, Gossypium hirsutum
  Clone ID: LIB3165-020-P1-K1-G4
ccactttttatttctccaaagcctagcctggtgtgttttcctttttgcttcgagttaaaagggagttccttttcacagttatcatggctttgaatctggtttctcctactgaaatccattctatctccttcttgggttcaactcattccagctccttctccaagctatttccagggtgttttgctttgaaaaaagactgtcccaccacctttgggaggaaatgtcaatgttcaactcaggctcctcaaccaccacctgcatggcctggacgtgcttctccagatcccggacgcaaaacttgggatggccccgagcctatctccatcgttggttcaactggctccattggaactcagacgtctgacatacctgcagagaatccacctaaattcagagttgtggcgcttgctgctggttcaaatgtgaccct

SEQ ID NO: 26043 - DNA, 170 bp, Gossypium hirsutum
  Clone ID: LIB3165-020-P1-K1-G8
gatgaactctcagacttgtaagcgtaatcattgatcgtagttttgcttctacgagtcgtataatcagaatctgactataatcagaatatgacttgttttgcgaatttaacttgttttgcttgtcaagagaacatttatatattatatacaaatgtacagagcttttaatc

SEQ ID NO: 26044 - DNA, 187 bp, Gossypium hirsutum
  Clone ID: LIB3165-020-P1-K1-H3
aaaaaaaaaagagaggtgtgaggccagaccgtattccggtggaactccggccaagggtccggccaccgaagcctcgttggccccggccccggccactgtccacggtgcccgtaaaggtgaccagtccgtgacagaaggtagtaggagagttgtgggcatgcatggtgtgcgcgctgagtgacttgcg

SEQ ID NO: 26045 - DNA, 374 bp, Gossypium hirsutum
  unsure (1)..(374): unsure at all n locations
  Clone ID: LIB3165-021-P1-K1-A7
gtcgttcacacacacaatcttcaatggtattgtcntatccttcccgtctttctggcaacagaaacggcacaagattcattaccccagcgagtaaaaggaaggagaacggtggtccaacttcaagaaaccagcagcttgccaagttccaactcaaggtttccaacacggttatcgcaaggtctgtggtggttttattcggacttggattcattgatgctgggtatagtggggattggtcaaggattggagtgatctcaaaggacgtggaggacttgctaaagattgctgacttcatggtttgtacgttatgcatctttattgtatcttcctttacgaaacagactactgacacttaaccttctttagctaatata

SEQ ID NO: 26046 - DNA, 187 bp, Gossypium hirsutum
  Clone ID: LIB3165-021-P1-K1-B6
taacaacagctgctttcagtgtcgcactctgtcagatctgttatttcaggactaactccatgtacagaggctacgccagtcggacaacgtgtgctgcaaccaattacgaccttagaacattcagtgcagatctatactcaaggccgtgatccacgtctacctcttaaaccagcgatctataaaaccc

SEQ ID NO: 26047 - DNA, 330 bp, Gossypium hirsutum
  unsure (1)..(330): unsure at all n locations
  Clone ID: LIB3165-021-P1-K1-B7
cccacgcgtncgnccacgcgtccgaattatgttcccttcgataattctctcctcgcgatggactntacattattattattattatagaattattattttcctgttaatttatataaatactctccgctcttcttcttcttcatcacttgcaacttcaacaaacatccatggcctcctttggtctatattctattctctccgccggtttcctctatttcggtttcattacctcgaggaagcgccgacgtctgcctttgcctcctggtgctaaaccatggcccatcattggcaactcgccacatatgagccctgtgcctcaccaaagtttag

SEQ ID NO: 26048 - DNA, 419 bp, Gossypium hirsutum
  Clone ID: LIB3165-021-P1-K1-C9
cccacgcgtccgcggacgcgtgggtcttatttaatttttggtagcagagaggagatcatcacgagatggagaagaaagggacagtactgatgcaaaggtttgaggtgggacgattactgggtcaagggacattcgccaaggtttaccaagccaggaacctaagaaccggcgaaagttgcgccattaaaaccatcgataaagagaagataatgaaaggaggtttgatagatcaaatcaaacgtgaaatctcagttatgcgcctcgttaaacatcccaatgttgttcgactctatgaggtaatggctagcaaatcaaagatatatttcgtgatggaatatgttaaaggcggtgagcttttcaacaagatcgctaaagggaagctcaaggaagatgacgcccgacgctatttccagcaattg

SEQ ID NO: 26049 - DNA, 442 bp, Gossypium hirsutum
  Clone ID: LIB3165-021-P1-K1-E6
aaccgggggaccacgcgtccgcaccacccttttttaattaccacctaaactttactttaacataaccgaccgggtctacctggacttttccctctgcccgacctacttccgcaacgctactgccgccgacagcatccctctatgctccgacccttctccgttaggccgcctagtcctcggcctctacggcaacctccttcctctaactgtctccactttcaagcgcatgtgcacctcttcctcctacaaaaacaccctcgtccacaaaatattccctgggcagttcttccaagctggacgccaaggccgcagtagagaatacggcgaagtccgtttgccccctgccttggacttgcctcggaacactgagactgtcgactctaaggccttcttgcttaaacattcaaggcccggtgtcgtttccctttgtttgtcagagaac

SEQ ID NO: 26050 - DNA, 400 bp, Gossypium hirsutum
  Clone ID: LIB3165-021-P1-K1-H9
cccacgcgtccgtaaaaactttcttttcttttcataattccccttcccccatctgtagcgttggtgctggttcatggatattgaacccttgtgggatcttggggggtggttttttattttcattgattgcatggcagctacacctaaaacaccatcgtcatcatcatccatagtggctgagacctttgccaaatcccactctcttcttttccttctcacccttttcttcattttccttctactccttaaccctaaacccacaaactaccccatggactcacccaatggcaccccttctatccctttcaaaaggcttcttttagatgcttcctcaaacatgaatttgcattccaagcaaacacgaaccttgggtacgtcgtcttcgtcacgtaaagagttt

SEQ ID NO: 26051 - DNA, 307 bp, Gossypium hirsutum
  Clone ID: LIB3165-022-P1-K1-A1
aaattatcagttgcagcaacttaatccatctcctaccttcatttaggtaacgccagtttttgcaatttctagggttttcctttttgtttagctactcttttcaattatttcatattatcagtttttttttttaaaaggggaagggaaaaaaattaagggagggttttaggttcggggggattttgggatgaaagaccaattgaattcggatctgtttgacccgagaaatgaaatggactcggattactcccgtggttccgccggttctggtggtgatttcggtttcgctctcaacgatagtaatttc

SEQ ID NO: 26052 - DNA, 413 bp, Gossypium hirsutum
  Clone ID: LIB3165-022-P1-K1-A9
cccacgcgtccgcccacgcgtccgattactcactgataaccatgtccaagtgtagggatgaagaagatcccaccactcgaaaacccgaatacgatcgactaagcaaattgaaagctttcgatgaaacaagagctggtgtaaaaggacttgttgattctggaatcaaacatgttccaaggatgtttcatcatcaattcgagaataacccggtttcatgtggcatacaggttagtattcccattatagacctcgaaaaagtgaagcaaaatcgaactactcgtgaggagatcgtcgggaaagttcgaaacgcgtccaagacatggggattctttcaggtacttaaccatgggataccaatgaatgtcatggaggaaatgaaggacggtgcacgtaggttcttcgagcaagacgtt

SEQ ID NO: 26053 - DNA, 355 bp, Gossypium hirsutum
  Clone ID: LIB3165-022-P1-K1-B10
ctcactcagtcggtccctaaggtcactgtctttttttacgttgccccaaacgttgtctgggccgattaagaaacatttaacgaccctaacacaccacgtggaatgccagctttctacttcgctacctcatacaagatcaccgtcatgctctcttcttatgctcaccaacacttcaaaatttactctgttatgcactctctaaccttactttcagctgatacatcaatctataggtttgccatacatgcctcttataaagttttgtcattatacgcaaatgaaccaaaatgcattattgcacaacactcgattattattgaaggcttctctgtcgatacttactatatgctgaaag

SEQ ID NO: 26054 - DNA, 272 bp, Gossypium hirsutum
  Clone ID: LIB3165-022-P1-K1-B3
attcttcaatccggatttccttgccaatctctatccatagtggaaatatgacgtcccaggggtcgtcttatcattagatttcccatcatatcccaacctactaaaccagtcgttgatttagaggtattactatcacagcgcgtgtcaaaaatgagatagaatttgtgaccctatataccatatcgcatatcacaaaagagtgcactcgggatagacgctgtgcttgaagacccccgacactctcgggaaacacgaagactctcttcaatttc

SEQ ID NO: 26055 - DNA, 325 bp, Gossypium hirsutum
  Clone ID: LIB3165-022-P1-K1-C7
ctcgatatgaagatatccatatcattctttcttttagttgtataatgtccaatcgagacggggcaaattaaagaatatacagcatggcatgttgcggttgggtgtaaacataagacaaatgcgaaccaataataacagccctcccttaacaaggttggttttaatacatttaaatgaaggcatggttaaggttatggttttttttttttaataaatcaatggacctaaacctgttaattattattttaaactttgaccaggtttaaaaaaaaacataatccttccattgaacaaaaaaaaacaaaagggggccgcccattttaaa

SEQ ID NO: 26056 - DNA, 419 bp, Gossypium hirsutum
  Clone ID: LIB3165-022-P1-K1-D1
gcttaagccctttcctcttcgattttcacgtttttccctttttctctctctcctttgccggggccggcaacaccaccaccaatttcactctttggtcccgaaaaccccgccgaaatccaaccgctcccgctgctgccatgttattccctcaaaatcctgtcttttccgacacttgcgccgccatcattagcggttccatcgccctctctgtcctccgtttatggcaggagaccgccaaacgcggcctgtttgaccaggttctggactatggaaagatgaagccactgtgaaatcaatgagcagatgtggtgactacagggaacttcttaaaggaccactctattatgctacgacgattactttggcttgtgcattctattggaggacttcacctatagcaattgctgcaatatgtaacc

SEQ ID NO: 26057 - DNA, 414 bp, Gossypium hirsutum
  Clone ID: LIB3165-022-P1-K1-D11
cccacgcgtccgaacaaattgattttcatagtttcccatttttatatatttaatgctatggatgtttcctttgggacgtgtctctgacactctttttatttacttgaaaccatctctttcttctctgacctccatccatgctttatttcgggagctctaaattctaattgcttctgaaactccaccccatatcttgccaagtaccatgacgtttaaaagagtagtttctcatgaaatttttgggcaccggctagttagccggtccaaatcgcctgttatttctattgtcttgttttcgcttcttatattttttatgtttgcatacagtatcatttctaacatgtcgctgcaatcggctgccttcaatgttcttcctatttcattcactatttctacgcaaaggaatatgatcgt

SEQ ID NO: 26058 - DNA, 414 bp, Gossypium hirsutum
  Clone ID: LIB3165-022-P1-K1-D12
cccacgcgtccggctctttgaatactccagtaccagtacaaggcaggtgattgaaaggagaaatctgcagtcagaaaggatcgatcgattggatccaatttcaacccttgagcttcagcttcaaagtagcacatgtgccatgttgggcaaggaaatagcagaaaagaccaaagagctgagacagctgagaggagaggagcttcaagggttagatcttgaagaattaaaacatctagagaaattacttgaaggaggccttaaccgagtcactcaaacaaaggatgaactatttttcaaagaaatcagcatccttaaaaggaaggaagtagaactgatggaagaaaaccagcaattgaaagagaaaatggggaattcacctcatgtggtccaaccagctgtggctcagcaaggcct

SEQ ID NO: 26059 - DNA, 407 bp, Gossypium hirsutum
  Clone ID: LIB3165-022-P1-K1-D2
gaagacacagttctctcatactaaaaaagacatggaagtttaccttgtaattagagattgggttgcattgcttgttgttgggttattaatgatatggggatggagaactttaaactgggtatggctggccccaaaaaggctcgaaaggtgcttgagacaacagggctttgcagggaatccttacaggttcctttctggtgacataaaagagctcttcactatgagcagacaaacaagagcgaaacctatgcctcttagtgatgatattgggccttatgttgttccttttcaacatcaaactgctaaccagtatggaaagaattcatttacgtggtttggtccaagaccaagggtgaacattacggaccccgaaaaaataagagaaatacttaacaaatttaatgact

SEQ ID NO: 26060 - DNA, 276 bp, Gossypium hirsutum
  Clone ID: LIB3165-022-P1-K1-D7
cccacgcgtccgaacttggaattatctgttttttctatcaattgtgcttatctagtgggagttggcaaaagtatcttcatactgtaagtaaatgtaattaggaaatgattttgtcccgtcccaacacttattttcatgatctatttttcttaaaatgatatattttgcacccatttctggaatccaatgtgcctccgacctttttcttttttggtggaagtttttaggtaagggaaggaggaaattaaaattttttgcttatccaaatcttatatc

SEQ ID NO: 26061 - DNA, 409 bp, Gossypium hirsutum
  unsure (1)..(409): unsure at all n locations
  Clone ID: LIB3165-022-P1-K1-E1
cgacccacgcgtacggatgcttaaatntntgtaattctcactttttttttctttaaacacaccatcaattatcccgcgcgcttattttatttcttaacctcaccatattcaaccacttgtttgtcacaatggaactggaatggtgtctgcaaccatttcatgggaaatatgcttaatgttccaacatcaataccttcccttgatcaaaacctcacaccctttcgataccttgcaattcacataaccatacatctatcggtgataaatcttaatcaaagatagaccattggactttcaaataccctatagagcatgatattgcgagcaactgagattatatagaaaagatttggcatcataccttttataaaccgatcaaagatcaccaacagtccattacatgctcaaa

SEQ ID NO: 26062 - DNA, 422 bp, Gossypium hirsutum
  Clone ID: LIB3165-022-P1-K1-E4
gaaagcactaaaaaagcaaaaccatgggctcttcttctctacttaagacttcaccagctggagacatgtctgcgtgggttcagggtcacacccttcaccaaccttacacttgtgcggtgaggagccaccctgccgcaccctccggactaactgtacgtgcaagctaatatacccatcagcatagcaagactgctaaagctattgcttatcctggccgagggacttaccatatgaatgactgccaccctctctgacctaaagcgttcactctctatcaggctcgtaaacacagctgtttactgacccgcgtgctcatctgacctcgtcttagctgctcaacttattgatgacatatctggaggcgacatctgtgagctaactctatagctaaccacaatcgctggcatcaatatggttctttt

SEQ ID NO: 26063 - DNA, 411 bp, Gossypium hirsutum
  unsure (1)..(411): unsure at all n locations
  Clone ID: LIB3165-022-P1-K1-E7
accgatcgtcttcatggttaagcttcttgccctaccatttctcattacttatttcgtcacgtgtgttcccctagggaacactgcanctacaataacatcatgtacccaaacaccctaccccggtgtctgcaaccatttcatgggaaatggtgttaatgttgcaacatcaaaccttgcccttgatcaaacccgcttctccttccgtgaccttgcgattcaggtcaccctaaaccaagcggttcaagctcatcgcctcgtctctaccatggacttgacttctttcaatgagcgagccaaattggcttggaacgattgcttggagctctaccagaacaccatttcccatcttaaccgatcaaagagcaccaacagtccattagatgctcaaacctggttaagtgctgccattgc

SEQ ID NO: 26064 - DNA, 329 bp, Gossypium hirsutum
  Clone ID: LIB3165-022-P1-K1-E8
cccacacgtccggcggcggcggtgctgttggtcggaagtgttgggtagtgagttgggcggtggatggcgggaacggtgctggaggtcaaaaaccaaatttggaccccaatcccactcacaatcagagtgctttcatatctcggaaccaaacttatacgatgctgcaacaaccaatggaggttgctactcaatctgatgattacaaagaagcacctagaatacgtgattctttcaaaatattcaaggaaaaagaacctgttatgagatttacgaggctgatcaaaaagactgatcctgatgaaagagcagcggatgctcctagatatacc

SEQ ID NO: 26065 - DNA, 262 bp, Gossypium hirsutum
  Clone ID: LIB3165-022-P1-K1-F11
ctgaattggctaaaaacttcatccatctatatatttattatggatacaacccagagggacggggccaattgctaccttatctgtccattctttaggctatagacgccaaaaggatcctcctttgtcaattaaatcttatcttgtatcaaaacccacaaaaaccgcacatcactttagcctggaaaactaaccgagagaggcctctttcgcatatagcctaaatgagcatggaagcatgcattggactaatggcacaaagctt

SEQ ID NO: 26066 - DNA, 419 bp, Gossypium hirsutum
  Clone ID: LIB3165-022-P1-K1-F12
agagtccaagctggcaaagatatttttgttaataaattgacattgcaacaggcgagggacgcgagagatgcattggcaaaattcatctatgcaagcttgtttgactggcttgtggaacaaatcaacaagtcacttggagttcataaaaaatacataggcaggtccataagcatccttgacatttatgggtttgaatcatttaagaaaaatagctttgaacagttttgtataaattatgcaaatgagaggctgcaacaacacttcaaccggtatctatttaagcttgggcaagaggagtatgggttggatgggattgattggaccaaagttgattttgaagacaaccaagagtgcttggacttatttgagaagaaaccattggggatattttctttgttggatgaggaatcaaaatttcc

SEQ ID NO: 26067 - DNA, 329 bp, Gossypium hirsutum
  Clone ID: LIB3165-022-P1-K1-F3
gaacaacacacttaaaaacacttgtgatgatttttttatcgagtacttcaacagcctatggccaggggagagaaccatggtgtaaacactcattatacacctccagaacgactcacgctcgactgccttatcatacccgacgaccgcatcatgaaggatgactgttcacccaccaagctaaataggatcaaggaatgcacacttatttatagcaaccgcaatgatcccgttgatgacctagataagctaggtgacaccttcccgggccaatacattgactctcatggtgctctgaaagccatagttcacaatgactataataacaaatg

SEQ ID NO: 26068 - DNA, 345 bp, Gossypium hirsutum
  Clone ID: LIB3165-022-P1-K1-G2
aaaaaaagaagtggggctttgaaattctctcctttctcagtctccgacctggctccggtgcggcggaccaccgtcatcgccgtcgtgccggcaaccgtaaacggtggccggaaatcgcccctaggagcgcaacttggacgacggtggggcgatgctgcaggcgtcggtggatgggacaggggtcagaggctgaacggctagggttttaggttttctttcatttttctttttctattttgtgtttgggccatgtgggttgtttagtgggtatttaggggttagtgggctatatttgagccccaaaattgggctgggcatagggtatatacgaatatcattctatat

SEQ ID NO: 26069 - DNA, 383 bp, Gossypium hirsutum
  Clone ID: LIB3165-022-P1-K1-G7
cttccaaaatcaattgcttcacaatggcctttttaacttttgctctttcttccccaacacgcgcgggttaagtaattaaattcttcccttccacccctgaaatcccgggaacttgccctgttttcattaagaaaaccaccaaacctgttccttctggtagcccattggaccggccttacccaattttggactttggttcaattttccgtgaaccaacattttacttgacccgtgaattccctggtgactattggtgggacacttcttgacttttaacttatccccaaacctttgcttagaaccctgagcttggagtcattcacttcaaattggccatgttgggagctcttgggtgtgtttttccttaacttgtggctaagaac

SEQ ID NO: 26070 - DNA, 272 bp, Gossypium hirsutum
  Clone ID: LIB3165-022-P1-K1-H10
ataacacaaagctctgaaaatgcacattcatgttctctgcttatttgctcaagagggcacgcggtttatacaagactgaaagggtctaaggttacaccttctgtcaacatgacattacctagtagaggcaccaccctgtggcacaatgccgactaactgtgccagcatgctcatatttccatacgctcacaaagtatattaaacctattggtcgtcctagccattgaatatgccccatagctgattacaaccctaccagctgtaaactcttc

SEQ ID NO: 26071 - DNA, 419 bp, Gossypium hirsutum
  Clone ID: LIB3165-023-P1-K1-A1
aattgggggagaggaaatacttcaggggatggtataatatagggccagttggtcctatggggaatagggctggtggaatgggtcgtagaggtatcatgggaaatgggggaaatggatttgggcagggcatgggtgcaacaccttctcccatgcacccacagtcgatgatgggtcaaggtttcgatcctgcttttggtggacccatgggaagaatgggcggttatggaggttttcccggtgctccaacgccaccattttcagggattttaccttcatttcctcctgttggaggagttggtttgcctggagtggctcctcatgttaaccctgcattttttggaagaggtatgcctatgaatggtatggggatgatgccctcgagtggtgtagatggacctaatatgggaatgtggtcagat

SEQ ID NO: 26072 - DNA, 157 bp, Gossypium hirsutum
  Clone ID: LIB3165-023-P1-K1-A10
acacactcgtaccaaacaaacttgcaatttttttatgggctatacatataacttaggggggttcacaatcaacaccactttcatacaccctactaaataccaaaactctgtaatctccaaatctctgcatccacacaatgtggcactcaaactactc

SEQ ID NO: 26073 - DNA, 436 bp, Gossypium hirsutum
  unsure (1)..(436): unsure at all n locations
  Clone ID: LIB3165-023-P1-K1-A2
cccacgcgtccgagagtctgcgcccctttcttagagttaccacagacggacatggcttgaatgagcatgacagcctctctccttccgagctcaagctccagtttgactagacttcctttcgagagctgctcgcagaggtgcgattgtggccaaggcgaccagcgccgaccaaggagacaaggccagcttggaaataatgaagcaagagggcagcaatgggaggagggaattgatctttgccgctgctgccgctgccgcttgctctgttgcaaatgttgcgatgggcgaagaagagcctaaacgtgggacggctgaagctaagaaaaaatatgctcctgtttgtgtcacaatgcctactgctagaatctgtcggaactgaaccttagtttctctgtatctaatgtggatntgtatgtgagattcatgtactgagttg

SEQ ID NO: 26074 - DNA, 267 bp, Gossypium hirsutum
  Clone ID: LIB3165-023-P1-K1-A8
gtaccggccgcacaggccgcccaacctacccgttttttttttcctaacctttaaagaggattaattattaattaaattaagcgggaggtctgggtcaagtcttctttcttcaaccaccacaggtttctctctatttcaattaataccttttctttctttcttgctaaacacacatttttaccgtttccaatttattattattaataattttcggttttgagtttccaattggtggattggttgagtaattggttagaacttagtacc

SEQ ID NO: 26075 - DNA, 312 bp, Gossypium hirsutum
  Clone ID: LIB3165-023-P1-K1-B2
cccactcgtaccaactaaaattccaatttttttatggcctccacaactaaagaggagggggtcctatatagcaccttttacctacataggaacacagacagaaaaacagtaatctccgtaacttctcacaccgattaaattagagcaaatcacaccccaacgaaatggctcgctcaccatgtcagcatacacaccgacactcataacaccgatactaccacaaaaatccttctgctcactcgactcttacattatttacaaactttaggaagcacacatatactctcagatcttatacatagatacgtcttg

SEQ ID NO: 26076 - DNA, 415 bp, Gossypium hirsutum
  Clone ID: LIB3165-023-P1-K1-C10
ttgaacagcctcaatcaagtacttcaatttttggacatgatgaggaagctgaatgggcggaatacaaaataaaagaaacaaatatgttcactgttgacaaatatcaacagattggctttttccccaatgagagggctttttcattgaggtaccaaaccgccggaatgttagagaccgtgttacggcaaggggtattgggggaagatgacaccggagaggaatcaccaaaaaatgttaagcttccttcttgccagccttctatcgtttgtgaaaattgcctatattcacaagcaaaggatcgacgagcaagggccttccatatcatggaccccaaaggctttgtggatatgcttcttatcttccttgaggatagaggtgatggcccactcgttcatccatcacttggcaatataat

SEQ ID NO: 26077 - DNA, 429 bp, Gossypium hirsutum
  Clone ID: LIB3165-023-P1-K1-C9
gttgcagtcagcctgagttaatgatcataccatatgttctcttagagcattattgttgccccacactgtacagatcaaccaaaaggggattgttgtgggcgtcgtgaatgaatgctatcttgcttgtgggagttcagtgcggggagaggaagaacttcggtagtatatggtgtcagcatttggtctttgtcaatccatccgaaagcattcaacctccaggtgttatagcagttatgtagtcatcatgcttgaaagttgtagattcagattagtttagtttagtttagttttcataatattgtccaaggtttatttgggtggcacgctactcgctgccctttttccatccaattgaacttggtttgttctacgctcgtattcagtgccattacttatcgtactttgggtcaaagtgtattttttatcttc

SEQ ID NO: 26078 - DNA, 413 bp, Gossypium hirsutum
  Clone ID: LIB3165-023-P1-K1-D12
gcggcgggaaccaacttgaagcgcggctaacaactggttacaagccctcgggcctgttttgtcgccgtttctacccaatttccaaggataaagaagatgattattgcaatgctcctggggttgaaaccagggtccctgaatttggttctaccaactcccttctctaccttaaccctaatctcaagagtctcacggcatacatggcaccgttggtgaagttcctggaagggattggttatgtgagtggtgaaaccatgtttggagctccgtacgactttcgatatggcttagcagctgaaggccacccatcccacgtgggatccaagttcctgcaagacctaaaagatttgatagaaaaagcaagcgcttccaatggagggaaaccggtgattctcctcttccacagcttggga

SEQ ID NO: 26079 - DNA, 235 bp, Gossypium hirsutum
  Clone ID: LIB3165-023-P1-K1-D8
caagggtgccagttccaccatcaccacctatttaagataaatttgattattatggggaggttaaaatttgaaattgttgaatccctttttactagttaatgcttaatttctttaatttttctattgtaatggcttaaattgagacaactcgttgtgtatgctgtaatttgctgttgttaacattactcttttaatttgagttattcttttctgctgttgagtttttttggggttc

SEQ ID NO: 26080 - DNA, 431 bp, Gossypium hirsutum
  Clone ID: LIB3165-023-P1-K1-D9
ggaatgggccagattttggccgccatggccgtcgcactcttgattcgcttgttctccgggcctggcccagctagcttgccggaagatgaaacctgtgaagaaaacgactccgtcaacggagatgatgctccgccatcagctggcaaagttcttccggtcaccataacgtggaggaacatcacatgttccctctccgataaacactcaaaatcagttcgctttctgcttaaagatgtgagtggagaggcaaaacctggaagattactcgccgtaatggggccatcaggatcaggaaaaaccactctgttaaacgttctggcgagtcagattttggcatcaccgcggttggcgttgtcagggtcttttggagttcaatggaaagcccagttcaactaaagcttacaaatttgcttatgtccgacaggaggatc

SEQ ID NO: 26081 - DNA, 422 bp, Gossypium hirsutum
  Clone ID: LIB3165-023-P1-K1-E11
gcaatctcttcactctcccaccacaggacattcacagtcccaaatatataacccctaaaaataaaaaataaaaataaaaaagagagaaaataatgacttttttggggggttagttagggtttgattcaagttttctggttgttgcaggaaaattttagttcagttgcattaatggcgtcatcatctctaccattacaagaggttcactttctctccccgagaactacttcgaagcaccggttttatctctctagatgttcttctctctctagagtttctcttgctgggaacggccatttaaggaacggtgtcgttttgcgttctcgagttcgagcgcttaaagaggaaggagtttcctatgaggaaagggagcgagaatttatcaaggaagtcaacggtgggtttggatcgaaagggaatgg

SEQ ID NO: 26082 - DNA, 303 bp, Gossypium hirsutum
  Clone ID: LIB3165-023-P1-K1-E9
gcccacctcgtgggaccattgattttcttatcttaacctaatggcaaggggatgaagtactgattcgggaagaacttaaagaggcttaggtgtttgacaggaccaaatggtcatattgtgtgagcttccatgtcatgacaaattggggactacagatagaagttgtagaatcggactatgttgaggatgcaataacttaggttgtaagtatgatggcataggtaaaaaggtaaaggggaacagcaatagttgtagacttatattaatggcatttgtttatgtctacttgtgatgtgctgtttt

SEQ ID NO: 26083 - DNA, 248 bp, Gossypium hirsutum
  Clone ID: LIB3165-023-P1-K1-G3
ccaacccttccgttaaggcagccatggaatattctctactttggttacccccatttttgccagcatccttcaaaacaaacattgcaagccgcacaacaatcgcaacccatcggttcattggcctaagcccctacgcaagggtcccttcttcaaggttacccccatgtcttgtggtaaaaaaggttgtggtgtgaaagccgaacttaaccccccaatggtgataagcctaagcacaaggctcttccttt

SEQ ID NO: 26084 - DNA, 195 bp, Gossypium hirsutum
  Clone ID: LIB3165-023-P1-K1-G4
cttccgcatttttttggattttgaatagagccaagaggttttagggtaagctcattcctttggaggaagaggttttggggatttattccccattaattaaaaattattgggcgtgggagcccaattgatccgaagggtcatggttgggtccggaagggatcattggatttttggaattaaaaaaaatggatggga

SEQ ID NO: 26085 - DNA, 230 bp, Gossypium hirsutum
  unsure (1)..(230): unsure at all n locations
  Clone ID: LIB3165-023-P1-K1-G9
cccacgcgtccgcccacgcgtccgccgacttagntaaatgacttgagaggtgtannagaatttttttctctcgggcgaaatccaaataccactacnttaaacgttattttacttattcctcgaatcgaatgcacatctatctctatactgttacgtacaattgtttttcttctattttttttaaaataaatttttttcattttaactgtttattcttatattattttatt

SEQ ID NO: 26086 - DNA, 326 bp, Gossypium hirsutum
  Clone ID: LIB3165-023-P1-K1-H2
cgggccggccccacccgtccggttttttgttttaagagtcgccctttggtgtttttttaatccaaccattgaggtgaggagggaggttttgctgtgggggaacctgcggttccggctccggttgcaagtccgccggcggcggcggttgcggttgcggcggttgcaagatgtcccctgagatgacctttgctgagcaacccacacttgagacactggttctgggcgtggccccccggaaggtgaattttgttggacctgaaatggaacttggggctgaaaatggctgcaaatgtggagataactgcacttgcaccccttgcatttgt

SEQ ID NO: 26087 - DNA, 414 bp, Gossypium hirsutum
  Clone ID: LIB3165-024-P1-K1-A10
cccacgcgtccgcccacgcgtccggcagcccggtttggcaggttcgtcgtggaggttcagctgttaagagctccgatgttatggcccggaccgctgaaaaaggtagcagtagaaaagaagttaccgaaactcgtcgcggtaaaattggtaacagtggcaacaacaatagtaacaaagccaaggtcttgaatttgaatgtgccaatgtgtattgggtataagcatcatttgaattgtagaatcgacaataacagtgccacggttgccggcattagcaccgacccgaacggcggcaggaatggtagaaccaacggccctaacgtcggaagcggtagtaacttttttaacttccggaatcttttcactaagaaagtttattaagcgtgtaaaccttttttaagttggattgtaattt

SEQ ID NO: 26088 - DNA, 194 bp, Gossypium hirsutum
  Clone ID: LIB3165-024-P1-K1-A3
gtgctggtagggttagtttaggttgtgggctgatgggagttttaatttgggccatgtattattaattggactgttttattattattttttgaattttttttgatttgggctcgggctaaggttgaaattaggtttggttttattaggccccgggcaaaatttatgccttacactcttaatatactaatcttttc

SEQ ID NO: 26089 - DNA, 298 bp, Gossypium hirsutum
  Clone ID: LIB3165-024-P1-K1-A7
aagaaaaacactctaaacactgtgagcgagaaaacttgtggtacggcgtcagaaatgggcatgctcttagtagatggatggctgttctcacctggaccattggttacatcccggattataaacaggtacaagatgatggacaacattaagttgtctatgctttacggggtgggatgtagagcaagcatggatgcaattgatatggtgcatgacggtgcttaagacatgcagaaaccagttcgatattgtagtgagcaccggatcaatgggtaggcattggtcctgaaggaaagagaac

SEQ ID NO: 26090 - DNA, 371 bp, Gossypium hirsutum
  Clone ID: LIB3165-024-P1-K1-B10
gaatagtatgttagtgctacagaacccaatatctttcacaccataggatctcttcctggggactgaattcataaggatgagcccaccaaacctataaatgccatcaagcctattcaggagaatctaccggcttccgaacagactggggctaaagaaaccaaacatgtaaagggaactctacctgaaagattctttgacaataacgaaactgatttacgcacttaccacattaaacctctgaagatacatgtcaaatatgcggtcaaggaattagatacgttgatataagaagatttgccagcggtggacactcttatctaagacgacgatattgcttcgaggtaaaatgtttggggaggctgaatcttttg

SEQ ID NO: 26091 - DNA, 415 bp, Gossypium hirsutum
  Clone ID: LIB3165-024-P1-K1-B11
caaaaaaatgaaagcaatatcaccaccatcaacggcggctataatcatccactcccatcatcactacctaaatcaccgtcgttggtttttatctccgccgcctccatcaaaccggcagttccaccccgccgcgtcaatctcccgaccccatagtcttaaacttactttcataacaaaagcggccgattcaacttctcagcctaattcagcaaaaaccattgtcgctgatgatggattctcattgtccaagctttcatttggtgttgttggactcggtgttggaatttcgctcctctcgtatggttttggggcatacttcaacattcttccgggatccgaatggtccgcgataatgctgacttacggcttccctcttgcaataatcggaatggccctcaagtacgcagaactgaaa

SEQ ID NO: 26092 - DNA, 283 bp, Gossypium hirsutum
  Clone ID: LIB3165-024-P1-K1-B5
gaaaaaaaaaggtcttggtgatttacagtcttttctgggatctgattaatgggtttttttttaataatcggactgatggttaacactctactggattgattactcattatgatgtagagggagactagataacattgaactgtgggggccacatgatgtgcatcttgtcttaagtacttaagcaacctgtcgttcgcaccctaattgcggcttgagctgtacaacttactgtgagaccaggttgataaggttggactcatggtccgggtgtttaagctttgta

SEQ ID NO: 26093 - DNA, 151 bp, Gossypium hirsutum
  unsure (1)..(151): unsure at all n locations
  Clone ID: LIB3165-024-P1-K1-C12
gngcaggaggganncgngcaccgnaaanactcgagcctacccacgnactacganggacgctgcgggaccangnggaagcggccnangnncgggngcaccgacncggcncaggganggaaggagcnngaggaangcaagaaggaanacccca

SEQ ID NO: 26094 - DNA, 282 bp, Gossypium hirsutum
  unsure (1)..(282): unsure at all n locations
  Clone ID: LIB3165-024-P1-K1-C4
aacaaaangaacaaaaacataatattaagctttttacttctacaaactcaaaagaacgaacgctcatttttacaatcttgcgaaaaactatcccaaaacaaaagctccttctcaactccacaatttacgtggttctaatcttcccatcatcaacccactttctacaaatattacacataccctttagctaaacaaaactcttcttttaccataccactctcatttctcctctcatcatccaattaccctaactaaattttcaacatcatcttcttaactctc

SEQ ID NO: 26095 - DNA, 408 bp, Gossypium hirsutum
  Clone ID: LIB3165-024-P1-K1-C5
gcgcccgtactcaccatcgttacaaaaaaaatatatacaaatgtaaacccagtgagacaacaatggacggattggcaacattcaccaatggctcataaattattttaaaacaaaagctcattctcaaaatctaggtaagcgaaggaattatatcatcgccatcaacaccatggaggtaatgaatatagaagaccggggttatacagaccatgactatagcctttattattaaactcatggttgcagctaccagaaactccaatgaaaagctggaaaagggcaacggctcggacagaatgatcatcttatctgaaggcatcataaacagatctcaaatcccacagcacttgaactgagaaattccctgtaactatagatacaatcctgttgggctgagccagaaatctg

SEQ ID NO: 26096 - DNA, 202 bp, Gossypium hirsutum
  unsure (1)..(202): unsure at all n locations
  Clone ID: LIB3165-024-P1-K1-D5
agaaaaaaacgaccgacgcgggcgaacaaantacatttctctcacctctccatactccaaattccatggctctcgtaaccactgcagtgtcctttccttctaccaactgcacctataaaactactcaaacctctatcatatctacttaaagaatctcattcaagatggtttatttttactacccaaactaatcaagtatacc

SEQ ID NO: 26097 - DNA, 188 bp, Gossypium hirsutum
  unsure (1)..(188): unsure at all n locations
  Clone ID: LIB3165-024-P1-K1-D7
aaaccgggggcgacccacgcgnaccgcccacgcgnccgcccacgcgnccgaaaacaactgctncacaanggccncnacaaccagggcgggggcnnccccagcaggcgccggnaaggcagagaagnacnccccnnccaccccngaaaaccagggaaccggccgngangccangaggaaaaccaccaagc

SEQ ID NO: 26098 - DNA, 166 bp, Gossypium hirsutum
  unsure (1)..(166): unsure at all n locations
  Clone ID: LIB3165-024-P1-K1-D9
aaccanggcaggccagggcaaacccgaaacccnnannnncccccaaagnanagnngccccgaaaccccaaaagggccgcaaagcaaacccangggcaggcncccncncncnnggcgaacgacagcaagcagaaagaagaaggganggcaaggggaaaacaaacccg

SEQ ID NO: 26099 - DNA, 270 bp, Gossypium hirsutum
  Clone ID: LIB3165-024-P1-K1-E10
cccacgcgtccgctgaaaatgaactctaatgcttaagaaaaccccaaacttcggccaaacggaaaggcaaaaaagagaaatctttttttttgaatatttttaatccaaaaaggcttaatttctctttgcgtgtgtgtgtgtttgttttttgtttctctctctcgatttttcaaaatgcaaaaaaaaacggcgttttcgttcccccacgagattttggaacacgttttcttgtatatacaatcggaaagggaccaacacacagtgtttttg

SEQ ID NO: 26100 - DNA, 390 bp, Gossypium hirsutum
  Clone ID: LIB3165-024-P1-K1-E12
ggagtctgacatgtgtgcgagtcaacgggctcaaatacccggaaggcgcaaggaagctgacgggcgggataccttgtgggtgcaccatcgaccgaccttgatcttttgagacgggtacgggtgacagcattcctttaagaaccaagaaggatggttaactatgcctgagcccgactaaaccagatgaaactctggtggaggaccgcaccaatactgacgcgcatatcttgcgactgacttgagtataatggcgaaagactaattgaaccgaatattagctggctcactgcacagttttcataatgattgcgggagcccttagcgagttttattatgtcaacccaatgattaaaggcatcttgggctgatcgaaatatagctattcttaaa

SEQ ID NO: 26101 - DNA, 231 bp, Gossypium hirsutum
  Clone ID: LIB3165-024-P1-K1-E5
gaccgacgcgtgcgcactcaccattgttccaagtatgttgtaaaccaagctttaaccagcacccaacatggcctcactggcaggctacaacgatggcgccttccttggcatatctgaaatgcaaaaaaaccctatgaattttagcgggggagctaggtcatcttctgcaacactatccaacttattcaaaatgaagaccgaaactgtttttttcaatcccaacgccgattt

SEQ ID NO: 26102 - DNA, 401 bp, Gossypium hirsutum
  Clone ID: LIB3165-024-P1-K1-G12
gtggcgtacagtttccgttatttttccttcactttccatttgttgaagcagagggaaggtgtcagcaatggcggccatgaatctggtttcagctggggttcactctttcaatttaaaggccggtaaaaggttttcaatttccaaacccaagggttgcaaattgggtccgcgagctgctttggtagaagccggaccaagaggcgatggttccccggcggctctgcaagtatcgagaggggaccttgcggcggacctgcaagcggaggccagggccatggtgcgagccgtaaatgcctccgtttacagccccgaacttcttgccaacaaatatgggtcacgaccttgtcaggcggcgaaaaggacattggaaatattggtagccttaggctcatttgctttgc

SEQ ID NO: 26103 - DNA, 415 bp, Gossypium hirsutum
  Clone ID: LIB3165-024-P1-K1-G2
atccaatccaacttaaccaagttggaaacttaagagagagaaacagctagcaatggaacatggggtgaacctacaggataccagatgggaaggctatgctgattggaggaatcgacctgctctcaagggtagacatggtggcatttttgcagcctcctttgtcttggttgtggaagtgctggagaacctggcgtacttggcaaatgccagcaacctagtgatgtatttgtccaagtacatgcacttatctccatctaaatcggcaaacaatgtcaccaatttcatggggactgcctttcttctagctctgcttggaggtttcttatctgatgctttcttcaccacttatcacatctacttgataagcgcattcaccgagtttctggggttgatcattcttacaatacaagcacgg

SEQ ID NO: 26104 - DNA, 414 bp, Gossypium hirsutum
  Clone ID: LIB3165-024-P1-K1-G8
cccacgcgtccgcttatggccactcctctgttcctcagaaactctctattccctcctctccaccattcctttctttccttccccaaatcttctttcccttcgtttccttcctccattaaatcaaggcctctaacttctaccatgatgagaggaagtgaaataacagaggaagtttccgaaaccaaagaggcagtaaatgtggatacaaagaagaaaactatatttgtagctggagcaacgggtagtactgggaaaagggtcgttgaacagctactttctaagggattttcagtcaaggctggggttcgtgatttggggaaagctaaaactttgctttctaacgacaacccatctcttcaaattgtgcaagcagatgtgactgagggatcagcaaagctagcagaagccattggt

SEQ ID NO: 26105 - DNA, 371 bp, Gossypium hirsutum
  Clone ID: LIB3165-024-P1-K1-H1
cgcctggtaggattgtaagggcaattggagaattagctaaatctattggggctgaagggttggtggctggtcaagttgtggatataaatagtgagggactaacagatgtggggttggatcatttagaattcattcatgttcataaaactgctgctttgcttgaagctgctgtagttttgggggcaattcttggaggtggatgtgatgaagatgtggaaaggttgaggaaatttgcaaggtatattgagcttttgtttcaggttgcggatgacatacttgatgtgacaaaatcatctaatgaattagggaagactgcaggaaaagatttgttggctgataaagtcacttatccaaagttgattgggatagag

SEQ ID NO: 26106 - DNA, 355 bp, Gossypium hirsutum
  Clone ID: LIB3165-024-P1-K1-H4
cccacgcgtccgcccacgcgtccgcccacgcgttcgcccacgcgtccggttggtgttattgaagacgaggaaaatgcctatactggaactagagtccggccctttgttgccacgccaagggttgaggatgagaagaagcaaagtcccactaccttgaacaagattttatgtcttgaagagcttttctctttggaggtttggagagcatctctggcagagctccttgggacagcagtgttggtcttcgcaatggataccatagtcatctcctcctacgagacacaaacaaaaacgccccaccttataatgtcatttcttattgctgtcactatcacagttctcctcctagccacgt

SEQ ID NO: 26107 - DNA, 402 bp, Gossypium hirsutum
  Clone ID: LIB3165-024-P1-K1-H5
atcggcttacccgccgttccagaaggttcgccgtcatcattcgaccgatactgatccccaacctattaaacttttgataggtcaattatgaggcaagatgaatgagatgatagaaaagcgtggcgtcatattagattaccttgtaagcccaacaattgtgagtggcacgcggatccttgaattggttgaggaaagagtgagcggactgctcgttagagatgggaccagcaatggcgatgaatttgctcttttttatttctttttcgaatgttactgtttctttaatggtggtgaacgcgcctgcgttgctggtggtgccggagctgctggctgtaatgaccattggtttttcggcgggggagagggcggaaattgaagcggagaggcggtggttgagcttgt

SEQ ID NO: 26108 - DNA, 286 bp, Gossypium hirsutum
  Clone ID: LIB3165-024-P1-K1-H8
cggacgcgtgggcggtgacccatctaagttctttcaaagggacgatggattccaaagagatgtgtaccaaattgcattgtttctggcagtcctctactttgttgtacagttcctaaggacaaccctttaatacccaaaataatttcttcattatatatattttcatacttataattattgtaaatttgtaattatatacaccaatactcagaattttttttttctttttttttaaatgtatattcggaaaaacccttataaaaaaaattttaagcatattcttagt

SEQ ID NO: 26109 - DNA, 290 bp, Gossypium hirsutum
  Clone ID: LIB3165-025-P1-K1-A11
ggaaaaccggccgcgcccacgcaaccaaaagttccctcccactaaatggttttttttccctcataccaactttcgggtgggttattatcaccttccatctcctccctttctccaaccagctttttctgaaaaccatgttaattgactcaaaccctagaggctcacgtttactctctgatcttcctggttgatgaaggatggaaataaaattcaattgagactcaagatttttataattggaccgtgccatctatgactcaacaaaacctccatggacttaacattaaatt

SEQ ID NO: 26110 - DNA, 213 bp, Gossypium hirsutum
  Clone ID: LIB3165-025-P1-K1-B7
atttatacgtgttttacaggaatctttctatttttgtggccgaatattcagaaggccaggctcgttttctactataaattaattcctccatatatgttctctaactgctctgtttctaaacttctataattctgaaactatagcaaattgctttcaactcacaattccctattgtctaatctactgacttttttcacatgaaactcactaata

SEQ ID NO: 26111 - DNA, 411 bp, Gossypium hirsutum
  Clone ID: LIB3165-025-P1-K1-C1
gcagaggcagcaatgggtgcatacaaagcaccaattccttatttcctttcttcacccaatggtaacgctaaaaccctgagaaccccatttttgaaccttggaaccaccagcaggcgcttccttttgttcttcctttcctctcctatccttcccagcagtaacagtcttgccctagacaatgctaaattgcttcagtccaatatcatggatgttttagcttccagttttgacccagtgagtcaagctgagaaagacgccagttccctcatcagtcgcagagtatctgaagctgtggagttgttggagagagggaaggaattgcaggctcagggtgattttcccaaagctcttcacttctttactttggtggttgaaaattataaagattttgcattctcagactatgcaaga

SEQ ID NO: 26112 - DNA, 191 bp, Gossypium hirsutum
  Clone ID: LIB3165-025-P1-K1-D2
cccacgcgtccggaacgtataagcaaagcccactgtgggtgctgctactgctgctgctcgggagcctttaacatcagcatcagcaccatcatcttattctttattatcataatttataacttaatctaatcattaataatacctatgctgtttttcttttagtcatttacattatttctattgaatcctct

SEQ ID NO: 26113 - DNA, 266 bp, Gossypium hirsutum
  unsure (1)..(266): unsure at all n locations
  Clone ID: LIB3165-025-P1-K1-D3
cggacacttgttcatatctactgctactgattccctttcttgctctgaaaccaanccgcgcgtggttaaattgtataagcgtcccattccccacagtgttcatcactgctattgccagagctgtttgtgcagcaacatttgttgaggtacaagatgacgtatcgatactatgcctgtttcggccttggattccttactgtctatgatcagctgttggaaggttacccgggtgatgaaggtctagattccacctttcaagcttatat

SEQ ID NO: 26114 - DNA, 278 bp, Gossypium hirsutum
  Clone ID: LIB3165-025-P1-K1-D8
acccacgcaaccgccccttcctttcaatcttcttctctattttcttcatggaaaagctctcctgggtgggttatttcaaacccccgtttccaaaaccctactctaaaacccaccgccccattcctccgaccttccaaacccaacctcccttttttaaaccatccccattgccttccatcagatcctccattttcgaaccagtatgaagaaaccgttatactctcataaccttttggttaactgtacctttttcagtcttccaattcaatgctttaccc

SEQ ID NO: 26115 - DNA, 370 bp, Gossypium hirsutum
  Clone ID: LIB3165-025-P1-K1-E1
ctgaaactgcctgagcaattgtagtaaccattttatttaccctagattctaatctatgtggtcacgctctgcataggcttcagcctacactctattcttcaaacgcttatctgcatttgaactgaacggagatctggactgcagttgtcgatccatgttgagtcaggagatgatacatgaatgaattgcgtgactgaatgatctactgaatgatcatagggagaataagagtggcagtaagaataacagtttattctacgattctccttacggatacagtatcgaatacagtataccaaacggtggaacaaacaagggcataactgctgttaactccaactgctactgcaagtgatcttgatagacttac

SEQ ID NO: 26116 - DNA, 190 bp, Gossypium hirsutum
  unsure (1)..(190): unsure at all n locations
  Clone ID: LIB3165-025-P1-K1-E5
gggnggacccacgcgtccggggaaacaaatgttcactgcctactccaaaatttcttttattttgtcgaccataagggcggggggttttgttttttatttgagcaacaaccttcacacaaatgaatccgacaaggaatatattttggggatctaaaagaccttaactgcatcggctttatacggatttata

SEQ ID NO: 26117 - DNA, 278 bp, Gossypium hirsutum
  Clone ID: LIB3165-025-P1-K1-F11
ccgggcggacccacgcttccgttcacactttcgcaaaatcagttgctatttttattttctctacaaccatggctctagggggggcatcattctccggtatggcagaatatttttcccctttcaccccagtaagtcggggaacatggccgtgttttcatgatgaaaaccaccaagcctgattcttcaggttgcctatggatctgacctatctgagtattgtacttgtgtccaaatttcgttaagccaccatcatacttgatctgtttagtttctattgt

SEQ ID NO: 26118 - DNA, 225 bp, Gossypium hirsutum
  unsure (1)..(225): unsure at all n locations
  Clone ID: LIB3165-025-P1-K1-F6
cccacgcgtccgcccacgcgttcgagactcttttgtatacctgttttattttttaataggaagcagtaatagcgggggccttctccatgatctcattggcaaccattgccaccgngaaccgatcctacccagaacaggccaacatgttggtcctcttcaccgtcctcaaatctgcctctgctttcccagtcaccaggaaggttttctacgactttactttttctt

SEQ ID NO: 26119 - DNA, 216 bp, Gossypium hirsutum
  Clone ID: LIB3165-025-P1-K1-F7
tcataactttcacctaatcaaaacttttaatatattataaacctcaccacaccgggtccggtgaaacccaatccagcaccaatcatcacacctaccctgctgttttacagagacatttttctccattattggacaccacaaccatttatgtctgaccttattcttctcgaatacccacggtactacactcctctatacacaataccgcccaatacc

SEQ ID NO: 26120 - DNA, 415 bp, Gossypium hirsutum
  unsure (1)..(415): unsure at all n locations
  Clone ID: LIB3165-025-P1-K1-G1
cccacgcgtncgcccacgcgtncgcccacgcgttcgctccatttaccatctaccccttggggtcccttcgttgtcctccaagccccaagtttccaaatggtacctcctctttatgtggcccgtcacggtttggtctttgctcttaacttgggttttaggccatgcgtttatttcagagcggaacgcctttaagaaactcaaacttcaagcttgggttgttcccaaatacaatatgcaatattcttcaaaatggcaaagagaaactatcagtaaattgattggacaagccattcgagatgcagacaagaaaggagctaagtggctgagtttaggccttctgaatcagcatgaggtgtttagcagaaacgttgagctttatatgaaaaggaaccctcagcttaaaataaaagtcgta

SEQ ID NO: 26121 - DNA, 127 bp, Gossypium hirsutum
  Clone ID: LIB3165-025-P1-K1-G3
gcaaggtctttgcttatgatatctccgacgacttacatgacattaccatatgggaagggtggggtcgattcattgttccaagctcccattgaacgaaggtacctcactatgcttgtaatgagctcct

SEQ ID NO: 26122 - DNA, 383 bp, Gossypium hirsutum
  Clone ID: LIB3165-025-P1-K1-G5
cgcgcacttttaagtacaatccttcttacctgctctttttatttattctacgtccaccacaacagctggggctaatactaaacctaacaacaatttactataccccaccaatcaatataatcaccacctggaatctatcactacgatgcaacatcacccttgttcccaaacggaccccgatgctaaccctaattttcactacctacttttgaacccccaccattcggttcctccaacgccggctgctgtcgctcttatccacctattcttcaaccaggatcatggcatggtttgacgccggcactgaccatggattccgaatctacaattgcgatccattgcgcgagatctttctccgagacttccatcgcctgagcggaatc

SEQ ID NO: 26123 - DNA, 408 bp, Gossypium hirsutum
  unsure (1)..(408): unsure at all n locations
  Clone ID: LIB3165-025-P1-K1-G6
ggtgctcatcaaagagagcaatggcnaaccacttttatctttcgattccaatatactctgggctggaaccgttgtacggagaaggatcacagcttgaagaagctaagctttgattcggtaaactgaagtccaggtttttcgaagtattcggtcacccttccgaagtcttcgctcgatctccagggagagtgaacttgattggagaacatattgactatgaaggatactcggtcttgccgatggcattccggcaagacacgattgttgcatttcgaaagcgtgacaaaggagaggctgaaaagcttcttcgaatagctaacgtcaatgataagtacactacttgtacttatcctgttgatcctaaccaggtaattgacttgaaaaaccatatatggagtcattatttta

SEQ ID NO: 26124 - DNA, 301 bp, Gossypium hirsutum
  unsure (1)..(301): unsure at all n locations
  Clone ID: LIB3165-025-P1-K1-H11
ggcgggggggacccacgcgttctgaaggcatatcgatttatcaaaacatttttttttttacatagcatngttcgatagcggagggtatcattggagattttccaagttcctgactatggtctccaagaaacttgataaacaatgtgctgaacttcttgagggtttgcttcatcatggaaggcttaccctcaacaaatgttgtaaccaccaaatccatgtccaattggaagaattgaatttgtaccataaacccttgttatagttcttaaagctctttttatttaaccattcccttcctttt

SEQ ID NO: 26125 - DNA, 432 bp, Gossypium hirsutum
  unsure (1)..(432): unsure at all n locations
  Clone ID: LIB3165-026-P1-K1-A1
cgggnccgacccacgccgtccgatgaatatacctgaaaaataagttcttcgaaaatcgttatttcttgttnctgaatatnctctgatagtggcgtccgatcactagacttgtctgtagaagtcgcctgacattgtcttattattgtttttgagtcccccataagtctaattgaatgggttcttagtgaaatccctaactttgtaccttctaaacatgcatatgcctctgctgcgaaaggtgaagggacatttctatgaataaccgtctttaacaccattaaatttcccctcagatcccatcctacaagaccagacgttgatctgaatgttttgccatcgatcgctgcatcaaagtggatcatgattctcgttgatttctggagaacgatatcaaccataaagcataacagaagagtagacattggccattgt

SEQ ID NO: 26126 - DNA, 399 bp, Gossypium hirsutum
  Clone ID: LIB3165-026-P1-K1-B9
tatagcttccaaaaaccctaagcctgctcacttatttgcccgtttcatctttctttggctagctacttattaggtgcctgcattaaattgttagctgcattaaagaacgctatcatcagcttgtggtaatggacaaggtaagagacctggcatcgaagaaggctgctgtgatattcacaaagagctcatgctacatgtgttacagcatcaagacacttttttatgagcttggtgctagcccagctatccatgagctcgaccatgatcctagcgggagagatatggagtgggctctaagagggttagggtgtgacccctcagtcccagccgtgttcattggtggaagatttgtaggctcagccaaagatgtcatatcccttcatgtagatggatcactga

SEQ ID NO: 26127 - DNA, 408 bp, Gossypium hirsutum
  Clone ID: LIB3165-026-P1-K1-E6
cttaatttatagtttcccaattgaaaagtacagaagaacaacaagatttgattgattgagagaggaaaataaggttgaagacctttcgaggatggtttctttgagtcgagtcttggcggtttcctatacgataaagccatccattccctgcaacacttgttctttaagctctagatttcctcaaaagaaacccaaactgaattcgaaatggcgatccatggcgactgaacctgactcttcttccttcgcgccttctattgattctgattcttccgctgataaagttacagccggattttgcatcatagaagggcctgaaacagtccaggattttgctaatatggaattgcaagaaattcgggataatatccgaagccggcggaacaaagtgtttctgcaaatggaaga

SEQ ID NO: 26128 - DNA, 400 bp, Gossypium hirsutum
  Clone ID: LIB3165-026-P1-K1-F7
cccacgcgtccgcccacgcgtccgctcgtgtcatcaattaactggtctttgtttcaagctggcttcaatttgaagtcctgtaatcaagccgccacaatggcgcctgtaagaaccacaggcgctattgttgcttccactgccgccatctccatttccatggcgatcttctcttacttcctcttcttcaaaaagaccaattcgacccttcattccaacaagaagaaaaaacccagaaatggagtcgtcgatgccattggtaacacccctttgatccgcatcaatagcctctctgaagccactggctgtgagattctcggcaagtgtgagttcctgaatcctggaggaagtgtgaaagatagggttgctttgaaagtcattgaggaggctcttgaatcaagtg

SEQ ID NO: 26129 - DNA, 401 bp, Gossypium hirsutum
  Clone ID: LIB3165-026-P1-K1-F9
gtctttccctccctccctctcagatcaaagcttcaaaatggttggttttattttgatgacaattttagcagatccaacggctaatccctgtttttctccggttcaaattcggcttcatttttcgctacctttgtaaattgccgcgaaaaaccgtaaccctaaccctaaagctcctcaacttttctcaatgacgaaggttcatggaaccggcgtttacgacttcaagcgctgccatgtggcggagtacctggttgagttagccgacaaaccgaaaatgaaacctcctcacagttcatcccttcggagctctattactttgtctgaaatctagcgggaccagctgactagaatagcagccgcgaattggctgaggagcggtggttcgaagcctgaaaagccat

SEQ ID NO: 26130 - DNA, 401 bp, Gossypium hirsutum
  Clone ID: LIB3165-026-P1-K1-G3
ggttaacattggcctatctatgctttgcttcgtttcttcaggcagccaatgctctccaaaccaaggctgctaaacaaaaggtgtggagaaatacaaagaaaccaacattttcacctttcatttcggaataaaagctgatttgcttttgaatttaaaaaaaaaaaaaattcgagatttacaagaaagggaaaaggaagttgaaattatatagtaataagaaaatggtagctttctcaatggttccatttttgggcacagttcgatctacaccttctttaacgagtttggcaccttacaagcgccaaatatcaatacgaatctctccagtttcttttccaaggaatgggttctttccgttcaggaggtttcttcaagcttgccttcaatctagttctgctact

SEQ ID NO: 26131 - DNA, 402 bp, Gossypium hirsutum
  Clone ID: LIB3165-026-P1-K1-G8
cccacgcgtccgcccacgcgtccgcccacgcgtccgcttgaattatactgaaccaaagaaagtctctgctgtaaatggcggtggcagagttatcgacttcctgtaccaaaaatcactcttcacagctctcgctctcatcttcatcttcttctcgtttctctcatcattttcgtcgttcctttcgacccctacccacaaccaggaatcctaccatctcatgctctgttgcatcagatcaagttcaaacgccaatacctgtacaagctcaggatctcaaggggaagagtgaatgctatggtgtcttctgcctcacttatgatctccaagctgaagaggagacaaaatcatggaagaaactaattaatatagctgtttctggtgctgctgggatgatatctaacc

SEQ ID NO: 26132 - DNA, 289 bp, Gossypium hirsutum
  unsure (1)..(289): unsure at all n locations
  Clone ID: LIB3165-026-P1-K1-H9
ttggttaatggaanaatgtaagnaagggaagttgggaaaatggattngtaantttgggaaaaggattggatttgaggggtgggtatgggggtattagttatgaaattgttgggtgttggggtaatgttagagttgattttgaggtgagagagggttgttgtgtgtagagagggggatggattgggaatggtttttttgggggtgttaattgggggatgaaaagtagatttagaattggtaaggataaggggaatttgattgtttaattaaaanaaagtattgtgatggt

SEQ ID NO: 26133 - DNA, 297 bp, Gossypium hirsutum
  Clone ID: LIB3165-027-P1-K1-A12
caaatccggcatttctttactcaatagctacccacactagatttaatgatgtgattttgacataccctctatattccttctttaaaactatcactcttatattcaaacaaagatggcaatatcatctagctgctagctaggaaatgtaccgactactcacagaacaaaaattaaagttagtaacaaattttatagtaggaatattaacttaaccccatgcatttcatctttgacttaggaatctaataacccacttttaaaagcctatttaaaacatttacaccatgaagggaaaag

SEQ ID NO: 26134 - DNA, 257 bp, Gossypium hirsutum
  unsure (1)..(257): unsure at all n locations
  Clone ID: LIB3165-027-P1-K1-B1
acgaaaaaaaaaacagtntaacaatttttttactagtcagtaaactctctcaaattgaggtgggggcttccgccgttgcttccgccgctaaaaagaaaaccgctgtctccaagaggcctaaatcagctacttcacacccttcattgattgagatgatttcagacgcactcgattcgttgaacgagaggaccggatcgagccaatatgcgattgcgtgatctatcgccgagaagcataagcccttaccggctactttc

SEQ ID NO: 26135 - DNA, 330 bp, Gossypium hirsutum
  unsure (1)..(330): unsure at all n locations
  Clone ID: LIB3165-027-P1-K1-B6
cggagctgttcaacccggggaacgtgcctaatttatcgacaatttggtggctacagggggtaccctttctgctgcaatacgcttactagaacgagccggggctcatgtggttgaatgtgcatgcgttgttggcctgcgtgaggttaagggacaacatggactaaatggaaagccattgtatatacttgtggagccacggcagcagattaattgttctgcaccttctgttaatggagttgaaacatgcagacacgacgatctgattctgggagcaagctttggttccncactcaatcccacttcaaaaagtgattagtgttttttttttgg

SEQ ID NO: 26136 - DNA, 338 bp, Gossypium hirsutum
  Clone ID: LIB3165-027-P1-K1-B8
ttcaattttcctattttgatttttaagcttctaattccattaattcgagatatatatactccaaagttgggattttcttttctctttttcctctttcaagtaaagaaggaaatagaaattttccgggaaaaagaatccagctaccatgtcaaccatttcgatttacagaacagaattcttgactttctctaccaatggacccagaccccgccacaaatttcaaaggctttccctttctccatttatgaaaatggattctaaatcaaccgaaaaggttccaaaggaagaatcttctataaagctgcaaacgtcttcaattcctcagcttgaaaacccga

SEQ ID NO: 26137 - DNA, 344 bp, Gossypium hirsutum
  unsure (1)..(344): unsure at all n locations
  Clone ID: LIB3165-027-P1-K1-C2
cgctcctccaccgtcaccgncggtggcggcggcactactttcgtcatcaatggtactgaaggcgacagcctttcgtactccgaatttattgctcagttccactccctcgctcactgtctgaggaaaaactatttcctttccagaaacgacgtcgctttgatcctctccccgccctctcttcatgtccctttgctttatttcgctcttatgtcattaggaatcgttatttctcccgctaatccactcagttccgactcggagatagctcaccaggttcaactcagtaaaccggttattgcctttgccaccttaacgacctctttcaagctttcgtccctcaaaca

SEQ ID NO: 26138 - DNA, 342 bp, Gossypium hirsutum
  unsure (1)..(342): unsure at all n locations
  Clone ID: LIB3165-027-P1-K1-E1
cgatcctttagaacnctnntcggaatttgggaagctangggaggtgtnncagaaaagggttaccaaacagggatnnaactggctttnggtggcagcncannagcgttcaaatagcngnnacgttgctttttttggatccctttcngnnatgtcggcttcttttcctttatcattngggtgaagnncagaattcaacncannagtgtnntggattgggttcaccncnaaccaataaggnngaacgtgaagggctgggtttaagacnncgtcgtgaagacaaaggttagttttaacccttactggatgnngccgccgtcgcaatagtaaattcaaccctagtac

SEQ ID NO: 26139 - DNA, 359 bp, Gossypium hirsutum
  Clone ID: LIB3165-027-P1-K1-F5
ctctttcaaaccccggaccgctgtcttctttaaacgcgtccatatccgagctggtttggtcgaaccggacggtggtaaactcgtcgacctccacgtgtcggaaccggagcgggagttgaagaagcgggaagcggcttcgttgcccaaggtgaagcttactccgatcgacgtgcaatgggttcacgttttgagtgaaggctgggctagcccgttaaccgggttcatgagggaatctgagttcctccaaactcttcattttaactcgctccggctcgacggtggttccttcgtcaatatgtcggtcccgattatattggctatcgacgatttgcaaaagcgagtatcggtgagttcgacag

SEQ ID NO: 26140 - DNA, 356 bp, Gossypium hirsutum
  Clone ID: LIB3165-027-P1-K1-G4
ttctgatgactatgccagtggcatgaagctaaaaaaatcagtgaagaatggatgcaggcgcatctgatcggtcgaagcttggtgctgctagtttggatgttgatgatcgacaggcacaacatcgacgtagacatgactctagcgaggatgactctgaaactgatggtgggagggaaaagaatagaggtgaagttcaaaagcaaaagtttgagggtagtgaatctgattctgatgctgacagagcgagaggtcatacaaaggaattgattaaggaaggtcgtcaaaggcatgactccagtgagggtgactctgattctgatggtgggaggcaaaagaagggaggtgaagttcaaaaa

SEQ ID NO: 26141 - DNA, 397 bp, Gossypium hirsutum
  Clone ID: LIB3165-028-P1-K1-A12
cccacgcgtccgatcaaactgaaaagctctgaaatgtttgatatggttttttgtacctgtgaagaggaccaatcacacattttgcggcttatctttcaatctgattgcctcgggatgacaactttaccatcaattcgaacgcaaggtatgtgggaaatctttgaccactctcgtcctttatcgcttgagcactcttctttcagcaatggacaattgaaaatgtgtaaaacatcaagacagagaagcatgtctttttccggaagagatgttagcttgggacaattatcgatcatcaattcttgaagagaggcgaggtcttgaaagcccccggagaacatgaattccagattctcaaaatctgaaaggcggataaaggtgagagaaggaggcacatcat

SEQ ID NO: 26142 - DNA, 290 bp, Gossypium hirsutum
  Clone ID: LIB3165-028-P1-K1-A2
tactgtcctagtgtagcatgtgatgaaactgattatgtgaaacaattacttgaaagagttttgactgtgtataaaggtaattctacacggaagaaataagcccttgtaagcaaaaaaaaaaaaataaaaaaaataaaaaaaaaaaaaaaaaaaaataaaaaaaaataaatataatataatttaatatttattacttttaattttatatcttttttttattattaaattttattttatatttattttaattttttttatatttttttaaaattttttaattttatatttaa

SEQ ID NO: 26143 - DNA, 393 bp, Gossypium hirsutum
  Clone ID: LIB3165-028-P1-K1-A5
cgtcggcccacgcgtccgatcttatttttgtttttttaagttgggaaaggaaagagaaggaaggcagtgaaggtgagcattggggcactaatgggaaaaacaaagaaagagctgctaagcaaagcgccctggaggggagacgaccatgacaactccaacaaattcgcagacgccaagctcaaggttaccaaccagcctggttccacccccaaaatgcacgtccctcaccgtaagtccgccgcttcccgactcgacgacgacgactcccttgagattgaccctgaactccgttacagctttcagcgcaacttccagtttcttcaacgagtttttagcatagacactgttgtgaagcctcttccacctgcaatggcatacaatgtttcccgcaac

SEQ ID NO: 26144 - DNA, 393 bp, Gossypium hirsutum
  Clone ID: LIB3165-028-P1-K1-B12
acccacgcgtccgcccacgcgtccggtttttcgtcatcggaatgggacccatcgctgggatttacacgtcgaagattttccctttgaagcttcttgcacaaggaattagtttaggagtggcagtgaatagggtgacgagtgggatcatttcgatgactttcctttcgttataccaagcgattaccatcggcggtgcttttttcttatttgctggcatcgccgccgttggatggttgtttttcaatatatgtttgccagagacacgtgggaaaacattggaggaaactgaacggctttttggcaatttggtaggttggagggaagtggataagaagatgaaggaagataatactaaaggagccactcatggccaataaggtagtgaaggatagt

SEQ ID NO: 26145 - DNA, 393 bp, Gossypium hirsutum
  Clone ID: LIB3165-028-P1-K1-C1
cacgtgtgcgcacacgcgtctttttttaaaggcgagtggcgcgagcaattggacttcaaggccgacaacaaataatctaagaacctttagggaaatgaatcaaggatgtttaatcttggttgggattttggtgacactgagtttaccatattcacatgcctttgggagaaatgaaaataagatacaaactgctgtttttctatcacctaagttcgtgctcggaccaggatctgtggaaaataggttctattacaacgtcgactttccgaaaggtcatattgcggtgaaaagttttgatgcagaagtaattgacgaggccgggaatcctattccactgcacgagacgtatttgcatcattgggttggtgttagatactatgtacgtaaaggtgt

SEQ ID NO: 26146 - DNA, 418 bp, Gossypium hirsutum
  Clone ID: LIB3166-001-Q1-K1-A12
gcacatcttgagcatgacaattgtcggaggagatcacatgttgaaggtatgaattttctacttggttgaattagttacgcactactcaatagttgtaaatgcatcccatttgtattccaataaatttttagttttccaacatataatcttgaccgaaatataagtattcatctaaacctaacctttatttctctcttattatatgatgtgagaattttttgttgaattatgtaataatgcttaaattaaatgtaacaaggttttggatatggtcacttgcaacttgcaaggtggaccatcgaatgcgcgaactttttgtaaccagtcatcggataaagactctgtcacttcggcatgaattgtcaaatcattgtttgaatggtcaaattcgttaagcattttagaagaattttgtcat

SEQ ID NO: 26147 - DNA, 418 bp, Gossypium hirsutum
  Clone ID: LIB3166-001-Q1-K1-A9
gttaggcaaacaggccatcttctttaaccagggaccctaccatgccaagttgaggaagcttgttctccgtgccttcatgcccgattccatcaaaaacatcgtccccaacatcgaatccattgccaaacattccctccattcattgcaaggccgtctcattaccactttccaagaaatgaaaacctacacattcaatgttgctctactatcgatattcggaaaggatgatcaagtgctttacagagaagatctgaaaaggtgttactatatccttgagaaagggtacaactccatgcccattaacctccctggtacgcttttcaacaaatcaatgaaagcaaggaaagagatagcccagattctagccaaaatcatatcgaccaggaggcaaacgaagcaggtggattgcaatgacttg

SEQ ID NO: 26148 - DNA, 415 bp, Gossypium hirsutum
  Clone ID: LIB3166-001-Q1-K1-B9
cccacgcgtccgatttttctctattgcagaataagttaaaataagaaccaactgatcattgatgcttatctgtttttcttcccattatcaacgacggtatatttttcttgtttgtaagaaatccacctaactttagacaaaaccagaaagaataatttgtcaagcaatataggtggaagccattaatgttcagattctgaaattaaactgataatgttgtagagtagattagggttgaaatataagtgtggactgactagcagtttgtcattgtcaatattggctactgaaaaatgctaatatgaatggatggcaggtgggagactgggaaatctgtattgtgacccattaatgacatcgggtgggcacaaaataagtgcgagacaacgatggacaccaaccgctgtgcaacttc

SEQ ID NO: 26149 - DNA, 412 bp, Gossypium hirsutum
  Clone ID: LIB3166-001-Q1-K1-C9
ggacttctgtctggggcttcaatgcctgcaaggccatcgcaactagatccacaaccaccacagcaacagccacaacaaccgcaacagcagcagcaaagtcaacagcactccttgcttcaacaacagcatcagcagttccagagatcaccaatgatggttggatcaaatcctctctcacacttgaatgccattgggcagaattcaaatatgcagttcaacaatcaaatagtcaacaaatcttcagttctccaacttcagatgatgcaacggcagcagcagcggcaattgcaccagcagcagcagcaaccacagcagcagcagcaaatgcagaggaaaatgatggggctaagtgcagctgtaggtatgggaaacatggtcaggattgggggcctaggcaatgccactggaatcg

SEQ ID NO: 26150 - DNA, 411 bp, Gossypium hirsutum
  Clone ID: LIB3166-001-Q1-K1-D11
cgaccgtcggcgaagcggtctaagtttcgtaaattcctcgatacgttttgtacaccttccgattacttcagtgctatgcggcttatccttccttcactcgatcgagaacgtggaacttacggcctcaaggagtctgttctcgcaatttgcctcatcgatgctctcggcatgtcgagggattctgctgatgctctacgtcttatcaattggcgcaaaggtggagctaatactggtgctaatgctggaaactttgctcttgttgctgctgaggttttgcagcgtaggcaaggtacggtttccgggggacttactatcaaggagttgaatgagttgcttaatcgattggcttctgctgaaagcagggctgagaagactgcaatccttgctactttgattaataagacaaatgca

SEQ ID NO: 26151 - DNA, 264 bp, Gossypium hirsutum
  Clone ID: LIB3166-001-Q1-K1-E10
cccacgcgtccgcccacgcgtccgcggacgcttgggctgaatccggctttgcatacgggagcttgaaccctgatgcggataaatttgataattacattttgagatgggagaaacttcttataccaccaacaactctccttattataagacttgatgggggatgtggcaaggatattcatagccattaatagtggctaccaaatatggtgtccccactttggtaagctatttttagccttctgggtgatcattctacattaccta

SEQ ID NO: 26152 - DNA, 215 bp, Gossypium hirsutum
  Clone ID: LIB3166-001-Q1-K1-E2
ccgacgcgctcgtgatggtgctggtaattatggtgggtttgatggggggtgtggtggaggtgatagtggttaccgctgtgatccccgaggagatccttctttccgatatgcttgccattctggtggccttactgggactcttataggtactgatatacgtacatatggacgctatagaagttactgtggaacatgccctagttctgacaataatt

SEQ ID NO: 26153 - DNA, 214 bp, Gossypium hirsutum
  Clone ID: LIB3166-001-Q1-K1-F2
ccaccttcatttttaacatctcatgcataatcacgactttttaaacccaccaaaaggtggttttttaaatctaatttaaaacccatatcggatattatccttagtcccttattcaccaaaaattcctttatttctaatttcatggattacccaaattggccggtggacctttaaaaccggtggaattttgccgtccggattggtacccctccct

SEQ ID NO: 26154 - DNA, 419 bp, Gossypium hirsutum
  Clone ID: LIB3166-001-Q1-K1-F9
cccacgcgtccggacgtcgaaaaaggtaacatcggaaaagaaaattgccgtcctcgaggccgtcgtcggaggcgttccttgatcgttgatccccgtgaagcgtcttcgtttatcaaaattgagaggatggataattcaacggcggagaaagggagcccggggcaagagcagcaggctgccggagtggggattcttcttcagattatgatgcttgttctttctttcgtcgttggccatgttcttcgccgccacaaattctactaccttcccgaggccagcgcttctttgcttattggtttgattgttggtggacttgctaacatctccgacactgaaagaagcatcagggcgtggttcaatttccacgaggagttcttcttcctgtttctgctacctccaatcatctttcagtcagggtt

SEQ ID NO: 26155 - DNA, 333 bp, Gossypium hirsutum
  Clone ID: LIB3166-001-Q1-K1-H1
gaaatgggaccctgctgcgtgcgagagtaagagtgagagcgatagggggatcaatcattggggttaaggtgcatctctgtgtcgtgctgcaccagagaagaacgactaacaaccggatatcaaagtgtttctccagatcgtagcttgctgttcaacggacatagattgccttgtcactcgacatggacaaatactaaataatatcctatataaaatcaattactctcagagctcactatagatcttctatgggaaccatggcggctatcagatttgttggagacgtacgcaaagttcaaaagaattactggactagacactctagtgatccta

SEQ ID NO: 26156 - DNA, 422 bp, Gossypium hirsutum
  Clone ID: LIB3166-001-Q1-K1-H11
cagactgcaagaatcaattcagaaggccaaaaagtacaaaaatttcatcatccccatcacctctggattagggtaattactgaagtgaagcgcaaaagatggcagaactgagccttggtatacttatagatattgttgatgaggaatggatgagagatactctgcctgatgacgatcttccactgccacctgtaatggttgctcgaactgatgataccgaagactcaaatcatgagactcaacaagtggatgacaatacctggcatgatcttgaattaagtactcaatgagggtattggatgctggcaatgcttggtacctttgtatgaaaatggtactcccatgacttaatttatgtctcattcttgatatgttgtagacctaagttatcattggatcatttaagaaggtttgttcactca

SEQ ID NO: 26157 - DNA, 219 bp, Gossypium hirsutum
  Clone ID: LIB3166-001-Q1-K3-A4
cccacgcgctcgtgatggtgctggtaattatggaggttatttatggtgggtttggaggtggttatcttgatgacttaattgattacaaggaaagatactactacacagtatgattgacatacatttttaaatactaggaacaaatataggaaccgatatacatggatgtagacgttaaagaagttactattaaacaggccactgatgccaacattattt

SEQ ID NO: 26158 - DNA, 379 bp, Gossypium hirsutum
  Clone ID: LIB3166-001-Q1-K3-E3
gaaatgggacactgctgcgtgcgagacaaagagtgagagcgatagtggtatcatgtaattgggcttaaggtgcatccctgtgtctgatgcaccagagaagaacgactaacaaccggatatcaaggtctttctccaaatctaacgcttgctgtcgaaggatcatacattgccttgcacactccacattaacaaataataaaaaatatcttaaataaaatcaattactctcaaagctcactatagatcttctctgggaaccatggcggctaacagattagtaggagacgaacgcaaagttcagaagaattactggactgaacactactgtgatcctacggtggaagctatgaagactcactccaaagccgctgatattgac

SEQ ID NO: 26159 - DNA, 318 bp, Gossypium hirsutum
  Clone ID: LIB3166-001-Q1-K3-F1
cggactcgtggggaaacattttgatttcagaaactaactaagtcaaacgacttgcaaaaggggcatgctgtctgagaatctctagctctaccgtttactgaaagaaaacgtgatatgatccatacgtattcttttcttacagcaccaagtttgctgctatgcaaagcttgttcatgtgatggctgataactttttggagatttcctgtgcctccaccgaaacgacactcaatgataaatcatatgcaatggaaataaccacaatgatgtcctttaggggcatgcagagagaattaacaaatatctttaaaagttaata

SEQ ID NO: 26160 - DNA, 380 bp, Gossypium hirsutum
  Clone ID: LIB3166-001-Q1-K3-G3
ccaatgcggccgaatattcattcggaagaataaaggtggacagcttgtgcgcgtcatgggggcacactgacatgtgcacaaacgtattgagtcccatactcataccacagaccctgttagcagtggaattgagagggactttaagacattgactccaaaagctattgataaagctactcttcctactaacattgaacaggtatgtcttatactaatatcttgtcgttaaaaaatataccacatgtctcggtattaataatgcgggttaagacatgaactgcatagtgctaagacaacatgcttgttgacatggggataaaacagaagaaacgcgccacatgcttgttccttattgtttatatggtctttactagggacat

SEQ ID NO: 26161 - DNA, 204 bp, Gossypium hirsutum
  Clone ID: LIB3166-001-Q1-K3-G7
cccacgcgtccgaaaaggcagtacgtttaagagctcgaacctattacgggtttgacgaaattcctacgacggttaattacaattcagtgctatcgccgaaaatgatataagccttcttttaacgggattttaattatatccccgaatacgatgcagagaaccgacattgcttttggacccaaagccggattcataaaggcgatc

SEQ ID NO: 26162 - DNA, 419 bp, Gossypium hirsutum
  Clone ID: LIB3166-002-Q1-K1-A1
ggaagtaccatactaaaagaaatctttgatgatatattttaattaagatatgttatcatgtatatgaagccctctctttcccatgtttttctcttgtgttcgagaataagagtttccactcacttgggtcataagaaaaggcttttatatatatatatatatatatatatatatatatatccatcaagtctcatgggacaaatgagaggtgtgtaagggccacgtgtagatcgtgtatagtctatgtgttcatgcgcaatggagacatacaacaacaaccccctgctcgcccacaaatgtgagtttagcggttgacagtggtcttcctggaattcaagagttgtataggtagatagagtttggagaagtccccatagtatgggagttgtagatggtatctaggaaaggaggagaggagc

SEQ ID NO: 26163 - DNA, 310 bp, Gossypium hirsutum
  Clone ID: LIB3166-002-Q1-K1-A6
cccacgcgtccgcggacgcgtgggtgaacttatccatttatgataaaaacaaaagccttattatggatgaggatggttgtctaagatcgattgttgaagtcttgaggctcgggctcacaacggaggcgcgggaaaatgctgcagcaactttgttcagcctttcagctgttcatgactataagaagagaatagcagatcagggaggggcaattgaagccttaacaagggttgtgaaaagggggacgcccaagaggaaagaagatgcccgaactgctttatttaatctgtcgactcattcggacaattatgc

SEQ ID NO: 26164 - DNA, 406 bp, Gossypium hirsutum
  Clone ID: LIB3166-002-Q1-K1-A8
gtttgatatatttgaagcaaatgtgcctcgggatgatccacaaaggatgatgtttgagagggaagtaattgggagggacataatgaatgttgttgcatgtgagggaattgagagggttgaaaggccagagacatacaagcaatggcaggctaggacactgagggcagggttcaagcagattccattggatcaggaccttgtgaagaaagtgacaaatatggtccaatccaattatcatagggattttatcatagatgtggatggccgctggatgctgcagggatggaaggggagagttatttttgccctttcatgttggaaacctgtgaagaattaaatgtcatgaggaactatagggagcaaattgcagattagttttgattattcagtaaactaagactcacta

SEQ ID NO: 26165 - DNA, 414 bp, Gossypium hirsutum
  Clone ID: LIB3166-002-Q1-K1-B11
gatgcagacaaaccagctgaggaagtgaattttaccctaacatatgtgggagaaagtctagagaaattaacattggaaatgcaaaaaagcgaccaaaggatggtaaggattgaattttgagttttacagagcaaattatgacctgaaaatgaaagcatgtactgtctactaacttattgtctatcattttaatgaatgatgcaaagatgaagtctaatattcacttataacaatactcgtcttctcacttattcctgctgccatgtatgtagaacttgtcattcctttaatgagctgtctattttatcttttgcaaactatacattgccattcatttttgtttaatttcttcattcattctcttggttacatgtagttgttgagaaaatgctatcctgctactgtgcattcaag

SEQ ID NO: 26166 - DNA, 370 bp, Gossypium hirsutum
  Clone ID: LIB3166-002-Q1-K1-B12
cccacgcgtccgcccacgcgtccgcagttttgtatcatttggaagtgcagagcaaagtgaggttgagttcaagaagtaacacactcttggtggcatgcgagttctcaagtagccttctcttttacttcaaattttggctgcccctgtttatttatttccatttttcccctctcaaaggcatgaacagttaatgaaaatggttgaaattttcatgcaaatatagttaactaagatttatttaatatacaattaaggttagtcaaaaggtagtcggtatagagtgggatggaactaggataggactaaatggaggaatgattgataattgtaataatgttaatttactccagaaagaaatcgtattgaatct

SEQ ID NO: 26167 - DNA, 414 bp, Gossypium hirsutum
  Clone ID: LIB3166-002-Q1-K1-B5
cccacgcgtccgcttttgactactaatcaagaccccagtctccatagcttccaaactttgagggtggctttgaataattatatgaaatcagtaaagaaaatggcgtgtgagatacttgaaatgatggctgatgggttgaagatacaacccaggaatgtgttgagcaagctgttgatggatgaagagagtgactctgttttcagggtgaatcattacccaccatgccctaatgttcaacctttgagtggtaatggcaatggcaatggggatgtgattggatttggtgaacacactgatccacaaattatctcagtgttgagatctaacaacacttctggtcttcaaatctctctaagagaaggaagctggatttcagtgccacctgaccaaacctcattcttcatcaatgttggt

SEQ ID NO: 26168 - DNA, 400 bp, Gossypium hirsutum
  unsure (1)..(400): unsure at all n locations
  Clone ID: LIB3166-002-Q1-K1-B8
cggacgcgtgggcggacgcgtgggggagtggaggtcatgttatttggacatgattttggtgccacttggttttttgaccatcatattttatcattgttggttatggtataaggttaagactcagcccctctctaccatctttggaactaatgctggcggacgtcgcttctgggtctctgacatgattaaggacaacgaaaaaaagaacatcgtggcagtccaaacccttcgaaacacaattatgggatcgaccctgatggccacaacctccatccttttgtgtgctggtctagcagcggttatcagcagcacatacagcgtgaaaaagccgctcaacgattccatattcggngctcacggtgaactcatggtgtcactcanatatgtcaccatcttatgc

SEQ ID NO: 26169 - DNA, 413 bp, Gossypium hirsutum
  Clone ID: LIB3166-002-Q1-K1-C10
cccacgcgtccgttccattccaaaacccaggcagcagcatgtgtggaatacttgcagtccttggctgcattgacaactctcaagctaaacgctcccgtgttattgaactgtctcgaagattgaggcatagaggtcctgattggagtggactacattgccatcaaaattgttacctttctcatcagcgtttagctattgtagatccgacttcaggcgatcagcccctttataacgaggataagactgttgttgtcacggttaatggagagatatataaccataagcaattgagagaaaagctgaagtctcatcagtttagaactggaagtgactgtgaagtaattgctcatctttatgaagaatatggagaagattttgtggacatgctggatggaatgttctcatttgtcctt

SEQ ID NO: 26170 - DNA, 280 bp, Gossypium hirsutum
  Clone ID: LIB3166-002-Q1-K1-C6
cacgactcgtggggcccacaaatcaggggactggccggaaccgatagggccaacgacgatgaaactatggcggttgatcgggaatccgacggagctaacaatgaggtcggcggcatcgaggtttgttccctcgataatcgtgggatgggccggagttccgttcccaacaaaaaatcagactattcgacgagaattatggcaaaagatgcaattgccttattggatcatctgggctggagaaagcccatgttttgggcatttcaatgggggctatgattgc

SEQ ID NO: 26171 - DNA, 415 bp, Gossypium hirsutum
  Clone ID: LIB3166-002-Q1-K1-D10
catgagaatggaagatgattcatttccaggatctggtttagagaatggaaattacaacaacaacaacaacaagagcaaagggttcaaaacaaggaaagcctacttttactgggtgacaagggagcaaggctcgttcgagtggttcaaagggataatgaacgaagtagccgaaatggacgagaaaagggtgatcgagctccacaactactgcaccagcgtttacgaggaaggcgacgctcgatcggctctcataaccatgcttcagtcacttcaccacgccaagaacggcgtcgacgtcgtctccggaactcgagtgaaatctcacttcgccaagcctaactggcgtcaagtttacaaaaagatcgccctacatcatcctgacgaaagaattggagttttctactgtggggcacca

SEQ ID NO: 26172 - DNA, 309 bp, Gossypium hirsutum
  Clone ID: LIB3166-002-Q1-K1-D3
cccacgcgtccggtcgaagatgtttgtttttgttggaccgattgtcaatgcatccttctcattctctgtctagtatttcttgtagtttttctctcttagaaattgaaacagagagtttaggattttgagaggtttggattctggtggaagagttgatgtcaggttgttctgctgcttggttctgtgtttttgcttcaataaagcagagaagaaattggtgctaattgctattgagtgagactatcatatgtaatctggaataagagtgtacttttaatcctaacatgatctgtggttttatattctgta

SEQ ID NO: 26173 - DNA, 400 bp, Gossypium hirsutum
  unsure (1)..(400): unsure at all n locations
  Clone ID: LIB3166-002-Q1-K1-D5
cccacgcgtccgcccacgcgtccgctgcaagtgcgaatactgggaaagtaaatgtccctggaaaaccgccaatacagattcgtgaatcatcagatggtgttattacactggcaggatctactgaagttagtgtcagtacattaaaagaaatgggtgcgtgcttagaacagggatctttgagtagggctacagggagtacaaacatgaacaatcagtcaagtcgctcacatgcaatattcaccatcaccttagagcanatgcgtaaactcaaccctgtttctggagatggaaatcctaatgattctatgagtgaagaatatctttgtgccaagttacatttagtagatcttgctggatcagagagagcaaaaaagacaggttccgatgggatgcgttttaa

SEQ ID NO: 26174 - DNA, 399 bp, Gossypium hirsutum
  Clone ID: LIB3166-002-Q1-K1-D6
atctcgcatgaatcttctcttctgataaaagtgcacttgctggaaagagtgtgcagcatgtttacacgactgcttctatctcctaaggaacctgcaggggacccccttcaaatcaaatccatggctttccaggaatgcacactgctgattaccaggattacactccatgcactgatcccctgaggtggagtaagtatggttcacacttgctcactttcttggaacgccactgtccaccgatgttcagagaggaagcactgcttggttacacctactgatgggtataagccacctattacattgcctatgatgcctgatgaatgctggtacacgaatgtgccatattataggatccttgatcagaaatctcatcagaactggctgacgaaacaatgcgag

SEQ ID NO: 26175 - DNA, 406 bp, Gossypium hirsutum
  Clone ID: LIB3166-002-Q1-K1-D8
ctttttcttccttttttcgattttggtttttttttccctctaggatgaaaattgatagcattaacaaaatccatgtaatctagaatctcaaatactgctaaaagaaaaagcttaaaaagactacccaaattttgtaatcttcaaaaaccaccacttctttatttttccaatccatcttgttttactttttctctctataaaattagaactcacaatattcttttattcttatagctctaaatccaatcacctttccattttcaataccattctctctaaacatatcttcttcgttttggtgtttcatgttaaattgttctcgacttatctacattgtctggttcttcatcacctgcttattctctatacagtatatacataatctcttaccaagccaagcctaccc

SEQ ID NO: 26176 - DNA, 392 bp, Gossypium hirsutum
  Clone ID: LIB3166-002-Q1-K1-E1
cccacgcgtccgccggtgaagaaacacccttgcaggtgcgcttgaatggggttgcgactttcattggttttgttggactcagtgtagcttttgctgttttggtcgtccttttagttaggtacttcaccggccatactgaagactcgaatggaagacaacaatttggtgcaggcaaaactagtgtgggaaatgctatagatggagccattaaaattgtcactgttgcagtcacaattgtagttgttgcggcgcctgaaaggcttcctttagccgacaccttaacccttgcttactcgatgaagaaaatgatggctgataaagctctggtgcgcaagctctctgcttgtgagaccatgggttctgcgacaacaatttgcagtgacaagactggg

SEQ ID NO: 26177 - DNA, 245 bp, Gossypium hirsutum
  Clone ID: LIB3166-002-Q1-K1-E7
gctcaacacataaaacagatacctggtcttcaagagcatggtcaagaaaaagagaggccgcttattgacttgcaaggaccggataaggctgctcaagaagcccttctttattaaggtgaaccagtgaaaaaagcccaaacttggatttcttggggcccggaaatggatgctttgcagtcaagtacaaaccactccttacaggctgagttgagagaacgtacagagcaatataaccagctctggcc

SEQ ID NO: 26178 - DNA, 413 bp, Gossypium hirsutum
  Clone ID: LIB3166-002-Q1-K1-E8
caccaacggagtcttgcttccccctcggcaagaggacatgacatccacactgacgggctggatcattgaatgactgaacgccgtaaaactgatcgatgcacagcactttatcgtgccggacggacactacatacccaagctggtagccgtgagagaaagtgccatcatccagatcctcaggaccatccccaacaaataatacatcatgacatagatcatccgggacgctctcaacagctgcaacggagatatgatagacgaggcattcactgccaaacatacagtcaaagtacccttcacatcacgtggaaaagagcgaattcaaggctagcaagataatgttcaaagctgctgctgacaggactagattcacatcctacagctctgactaccacacgtggagtgatgacttg

SEQ ID NO: 26179 - DNA, 411 bp, Gossypium hirsutum
  Clone ID: LIB3166-002-Q1-K1-F1
ctcaaggaaatgggccaagagatatccaataaaagttgagagcaagactaaagtaatttacaatgcaagtaaaatcatttacctatatctagatactgcctgggaaaaggagtcatggtgcaaaggtcttcgtcttgcttcatgtgaggacaatgaaaagctgaactggttcaccaagttgaatgtggacttccaagcttatatggcattgctaaacgctggatattcctcatttatgaagccctccttaggtttcagtgctgagccaatagagaagggaagcaagtctgatggaatatcaaaagttaaattgttttggaaaagactgtcaagaaagagttcaaaatctggttcagaaaaaaagggaaattcgggtaatcaatccatccgtgaagagagaaagtcctttga

SEQ ID NO: 26180 - DNA, 411 bp, Gossypium hirsutum
  Clone ID: LIB3166-002-Q1-K1-F11
cccacgcgtccggggtattcagcactcagcccttgtaatggttattcagtagatataaggaatcacttaaaaaaaatttgttcccagtgtacccttcaaaaaataacaaatttaaaagcttataattgacaaaaacctgggaggttattctttcaccattttcttcccaatgttcacttttcatcttcctatcaaattgagagaaagaaagctcagaacatcgaatttgtctccaagctgttgcagatacagagtttgaatggagatgcgtggaagaacaagtatctacttcaacaagcagttgcccgctcgataattgttaatttcttaattttgatcggcgatttagcatccaacaacgatcccgaactcaaatgtggtgatgtttatcttttgtgtcggtatgtacct

SEQ ID NO: 26181 - DNA, 409 bp, Gossypium hirsutum
  Clone ID: LIB3166-002-Q1-K1-F5
gtcgatagctactttcaaagacagcttgaagaggatctttgggtcatttgcgttcgacgatgcaatagaggatatgctggagaagcaggaagatgggtactgagtcacttcgcaaaccgccttcaatgaagctgctggagtaagctcggttggggatgcagtatcgggagacgagttgtttctcttatgtatcaaagtccccgcaactgcgccaatgataacagctaacagcacgataatggagatgacgaggatgatgagacgccttcgtgtctttcgcttgaaagctcgttcttcagcctcgtctactttgccatagcccttgaaagacttgattgaatccattgcccaacgagatgaaaagataggacctctcttcgatgcttctttgtaaaatatgacaatatac

SEQ ID NO: 26182 - DNA, 359 bp, Gossypium hirsutum
  Clone ID: LIB3166-002-Q1-K1-F8
ctctggtgctgtaaaagccttggtaaatcttctaggctcaggaacattgagaggaagaaaagatgctgctactgctttgtttaacttgtcaatctttcatgaaaataaggctcgtatagtgcaagctggcacggtgaaataccttgtcaagtttttggatcctgatagtgggatggttgacaaggcagttgctcttctctcgaacctgtccacaattgcggaaggtcgtttggcaattgtacaggatgacggtatcccagtactaatggaagttgttgtatcatggtcgccgaggggtaaggaaaatgctgtctctgcattgctgcaactatgccttaacagttccaagttttgtacct

SEQ ID NO: 26183 - DNA, 287 bp, Gossypium hirsutum
  Clone ID: LIB3166-002-Q1-K1-F9
tctacgcatctatactattactagcattatcacgaaatgtgctgcctacgttactaaactggtctaggacatttaagcctatgggacggctgcatagattaatcaagtgtgatgctctactacgcttcgaatactaccgaatcgatgatggacaaaccggatactacagaatatatctctgtgctctatatacgtgacgtctacgtggctcaaatgaacttgtcaccgaaggtaatgcatatgcaaatctgtaggaggctgtgaatgggcaacgacggaccggcaag

SEQ ID NO: 26184 - DNA, 398 bp, Gossypium hirsutum
  Clone ID: LIB3166-002-Q1-K1-G12
ggagttgcttcttgctgcatttttgtcaataatgattcttcaagagattacgatattatcagttgttgtgcatgtatcaatttcagaaattctgaacaagccagccgggatggatctatttttcgagggtagaaatcgtaaaatgattggtggtaccagctggcagggggggcccataataaaagatcacctttttcttcattattggtcgcggtgatcaactatatccaatttccatggagtataaatatggtcattgtgaaaccaataatttacgggcaacagattgcttagatcataaatgcgatgagcttgagctgtctttctcagacctagatgttgaagacaatgctaaagtgaagaagtgtggtgttagaatagtgtatgagaaagatttg

SEQ ID NO: 26185 - DNA, 396 bp, Gossypium hirsutum
  Clone ID: LIB3166-002-Q1-K1-G2
cccacgcgtacggaaggtttttgctgataaggcttctgaggatactctccaatatgcatgctaacaactctgaccaagcttaggatcaagatctagttgctcatctgttgaggagcctggccaatgtaccttgtacaactaatggaacaaacttatctggatttcttcaaggattacatggtgcagcaaatgctgggtggtctcttgggaatcttgaaaagccaactgatttaacctctggcagtactgaacatgttaagacctatggttctgcctctcaaatataccactgtgctaatctcgcggagcgacatggtgctatttgttattgagggactgtacctacttctgatttggcacatagatgagcttacagcgatgctcaagatggaattc

SEQ ID NO: 26186 - DNA, 317 bp, Gossypium hirsutum
  Clone ID: LIB3166-002-Q1-K1-G9
tcgtcctccccgtctagtctataaaatcgatctaggttttgttactccggttatttttgtccagggagccgttatccattttcttttggtgccatccctgtgtgcacccgctaccgatgttcttgccccttcggatggagcggagagaccaaagttcattgagggcctgcagaacattcaccaggatggatcacaccctcggttgatatatgaagaccgagactggaacaaaaaaccttgtccaacatgttttgggggacgaaggggtcttacaaagaatcttcatgccatttataaattaatgcccgattaaattt

SEQ ID NO: 26187 - DNA, 404 bp, Gossypium hirsutum
  Clone ID: LIB3166-002-Q1-K1-H1
cgcactcagtccactaccatctgccacctcatcaccggattctgacgtcatgtccccgaactatcagcttctcctgacctcctccgtttctcaaacatccgtttccaccacgactaccaccaccatttcaactatcatcaccatttccagtcactgaaatagaaaattaatctctctatccactattgggttcacgcattttcatcttcaaagtccaaagtatatagactgtttctgaaaccaaattcaagttttatctaaactatcggttagaaccgggtctaatctttggttgttggtttggttgaaagatggctattttgaaagctactgggtgcgttgagagagtctacccccagttccgcgtccaatctctgcgataactacagaggagaatgtaaatg

SEQ ID NO: 26188 - DNA, 389 bp, Gossypium hirsutum
  Clone ID: LIB3166-003-P1-K1-A11
gtcctttcttgatacaatatttaaaccttttttaaagcctagccatcttactcagaaagaagctatcctcatgggagcagagacttaaccaattgtgtctaacatcttactttgtgcctatgccgcgtttattgttcaccataattacttgcttctatatatactttcatatataccaacttttttactcatatatgatcattacatcactgatgtccttaacatgcatttataattcatacctttttatacctcttcatctaacactcataaatttttccttctctaaatcttacttctgaagtaccacttctcctaatgcttcaatcactaattcataaattgtttattattcactatttcatactttgaaactttatttattaatt

SEQ ID NO: 26189 - DNA, 326 bp, Gossypium hirsutum
  Clone ID: LIB3166-003-P1-K1-A5
tttccaggttggaccaacccttccgccaacccttccgttggattaaaatgcaatggacctccattttggccttaattaacctttggaggattccaaacaagccttccgggtggtcaagccatttttaccactttcccaaatttccaaattgttggagggccaaggggcacattccattttccgtcccctggtccttaaccttgttgccagttgaccacctgcaattggtgggttccagttgattaatagggggccttctgtggatgattttggacccttttccgtatccaataaaatcctggattctgggggggcaaaaggtgttt

SEQ ID NO: 26190 - DNA, 282 bp, Gossypium hirsutum
  Clone ID: LIB3166-003-P1-K1-A7
gttgaaagatgacacctataaaggttgttacttgggatccttggcattgtggatcgtttgtgagttttcaaatggcttttaatttttttttttgttgtgcttagtatgcaattttgattgtgagggcaacctctttgtattttcataatagaaagaaataagaagggaactgtgttttgttgaaaaaaaaaaaaataataatataaataattactccggggttgctattataaaagtttgaagtttttctcggtgcaattctttttgatacatttttttttt

SEQ ID NO: 26191 - DNA, 148 bp, Gossypium hirsutum
  Clone ID: LIB3166-003-P1-K1-A8
gacccacgcgttcgcttactcattttcatcattaatcatgctttctaaagaggagtcactcatatcaagagcagggtcctctaaggagccaaaactcaccaaattgttctccgaaacacctttaagcatctgacacaagcagaaattc

SEQ ID NO: 26192 - DNA, 305 bp, Gossypium hirsutum
  Clone ID: LIB3166-003-P1-K1-A9
attattaaagggaaagaaagatcagatttatgtcaaaaaagcaaaggatatcaagagagagaacaagaagaagagctaagctcctccagatgaatattcacaacagcgttcgaaagataacaagaccgacaaattcgcacactagaccataaaagaagagagaaacatatctacggtttaatatactgaagaacccatagaggtctgaaatcttcttgaagaacataattgccaatgcgatcacatacgccaagaacaccaggataaagtcggagactctcatgaatttgaattatgcacgaaag

SEQ ID NO: 26193 - DNA, 390 bp, Gossypium hirsutum
  Clone ID: LIB3166-003-P1-K1-B1
cccacgcgtccggttttggctcggccaagactccatcaaggaagatcattccaacatcattgaccacactgttcttgaattattctaccaaggtgttggtttgaacacaactggtagtgtttgcaaacccgtctccggatccctacctgagttttctggcagtccaacaaaaaaggcgattctttcttgggctgtcttaggtttggatctggatatggaaaaattgaagcaaaaatacagcattctccatgttgaaaccttcaactcggagaaaaagagaagtggggtttcagttaggagaaaaacagatgaaactcttcatgtacactggaaaggagctgcagaaataatcgtagccatgtgctcagactattatgagagcaatggggg

SEQ ID NO: 26194 - DNA, 361 bp, Gossypium hirsutum
  Clone ID: LIB3166-003-P1-K1-B10
cccactcttccgcgttctctttggatccttatttatgcacaaaggtttattcagcttgtagttttctacaagagtgcgagaactccatctaggctcatctctttatggtcgggttctggttgatgtatatgtggggttgttgctgttattcaaatatatagctttctttgtttgtcgttgttttttaacatttttatcatttcaactcatgatttttcttccatgcctacttatattattattttaattttataataactgtattcaattctacatttttttttatttatatttttatgggtgttgttttaattaatttttttattattatttctataattatttattctttattttttta

SEQ ID NO: 26195 - DNA, 209 bp, Gossypium hirsutum
  Clone ID: LIB3166-003-P1-K1-B5
cccacccttccaaaaggttgtccaccattccgttccacaactttggattgccttccaagcgggttttattggattgagattcaatggaccccttgattttttattcgcccaatttttaaaaaacgggtccattgttcgcaaagttgagtccgggggttcactgccaaaccgatgtaaatccttaatgcaaataattgaatccgtagccg

SEQ ID NO: 26196 - DNA, 330 bp, Gossypium hirsutum
  Clone ID: LIB3166-003-P1-K1-B6
attttatttttcaaaggtactctctcttccctccattggttcttccggtgggggtttttttatattttcctcctcctccttcctctccttccttttttcctggggaaaggaggggggatagcctccaaaattgcctttttattttttatgaatcccggttttattggcctatcccttattttcctggtaaaaatcccctttaaatccatccaaggccttcatttcccccctccaaggactccgaaaaatttggtttggaaggcctacaaacccctatgcaaggccaaaaggtgctttgggtccctctctgaaccctcttgatcaagctct

SEQ ID NO: 26197 - DNA, 418 bp, Gossypium hirsutum
  Clone ID: LIB3166-003-P1-K1-C2
cccacgcgtccgcccacgcgtccgccagttttggattgggcaacacgtcttaaaattgctgctggtgcagctcgtgggatagcttatctccatgaagactgtcatcctcgtattattcatagggatatcaaatcgtcaaacattcttttagataacaactttgaagctcaggtttccgactttggacttgccaagttagctctggatgcaaatacacatgttacaacacgtgttatgggaacttttggatacatggcccctgaatatgcatcaagtggtaaattgactgagaaatctgatgtattttcctttggagtcgagcttttggagctaattactggacgaaagcctgtagatgcatctcaacctcttggtgatgaaagtctagttgaatgggcccggcctttactgagtcatg

SEQ ID NO: 26198 - DNA, 235 bp, Gossypium hirsutum
  Clone ID: LIB3166-003-P1-K1-C3
ggcgaaattcctactctaccaaccaaagcggggtcggttcatttaagtctaagacccaaggctggttttaactctaattttggaagcacttcctgaaaaaacccatgcttacctttctctatgtgctgtgtgctgcatggttcactcaatgagatctctgttcgcatagatggccaatgatggatacattagcattgggaaaatggtccagttgcagcagggtgtgtaccttttg

SEQ ID NO: 26199 - DNA, 286 bp, Gossypium hirsutum
  Clone ID: LIB3166-003-P1-K1-C8
cccacacgtccttccacgcatacgaaattttattgtgatggaatagataaaaaaaagtaagagagaggcttttaaacactcaaccaaccccaaaactttcagtcatggatccttttttggagtggctgaatttcaagcctcttttcttggcttacaaaatttggagttttgatcgtaatgtgggttttgtttgagcgcttacctatatccatggattcatcttttgaacgattttcgctcaatccatcataatgtaccctatcgtacatggatgaaaagcgagaac

SEQ ID NO: 26200 - DNA, 431 bp, Gossypium hirsutum
  Clone ID: LIB3166-003-P1-K1-D10
gacaatttcgtaggcataaactctttcaagtttttcatggtgtacaaggggacattgcatggtcgacgacaaggttctattacgagggatgaagaggtgtaagtctttaggtgcattggctatggttcatgccgaaaacggcgatgccgtgttccaagggcaaaaaagaatgatcgagctcggtattaccattccagaaggtcatgccctttctagacctccgatggtaatgacttaaaacgcaaccacaaccgcaatttaaacaaccttacacatgctttcttttggttgatatattgtaatttcgaggtagctagaagccgatgcaaccatgatggcgattcgtttggcgagtttcatgaacacgccgctatatgtcgttcatgtgattgtgcattgatgctatggaagagatagcttaagctcgaaaa

SEQ ID NO: 26201 - DNA, 350 bp, Gossypium hirsutum
  Clone ID: LIB3166-003-P1-K1-D12
cccactcctccctccacacatccaccctttttttctttctatgtaatgctgtagaagaagtgtctacctgttaatggagcctccatatattctacatgaattctaactttattatctaccaaatctaacataactttcactccaattcatacaattagtcattcttcataattattttaaatttccatgagtctgttatccccaacattacacaaattttttattattaacaatatttgaactataatttcacttctttagcatctcattaacattcccatcattacttatcactatctataacttaacctattcattttattgaaaattacacttattaaaactcattt

SEQ ID NO: 26202 - DNA, 170 bp, Gossypium hirsutum
  Clone ID: LIB3166-003-P1-K1-D2
agccttccagaatattttaaaattggaccaccggtatattttgttgtttaggatttcaactaccgcttggaatcattagatacaaacaaggttttctccatcaacccgggtgattcttactctctttttaatgagatattaagaggatcattggtttcaaaatcaaactt

SEQ ID NO: 26203 - DNA, 372 bp, Gossypium hirsutum
  Clone ID: LIB3166-003-P1-K1-D4
gcgtcccggccggaattccggtcggccaggggtccgtcatttaacgtaaaaggtcttccttgccctttttttcttttcggcggggatcttaaaggaacggttaatcggaccgttacggccgatttctcgtcaactttgggatcttctttgacacctcgggggttcaggttattcttacccggcggccttatggatcccgaatttgattatctggttaaggctttgcttattggggattctgggggtgggaaatcatggtttcctttgagggttggtgatgattcatatttggataggttcatcaagtccattgggggtggcctttaaattccggctgggggaccgggttggaaaacccttaaacttcaaatt

SEQ ID NO: 26204 - DNA, 377 bp, Gossypium hirsutum
  Clone ID: LIB3166-003-P1-K1-D8
acgcccacgcgtccgcccacgcgtacacggacgctttaacttttgcgaggtatactgaaggaactgcttttgagagacctattacatgcaacatctcttatgctgctatgaagctccactcggaaaggagaacaatttgagaagcaacagggctgcactattaagaggatagacacccttgaacaaaacccagcccataaggacttctacattccttaacctttagaagccatagcaactcatgaacaatatgctccttgcatctttggacaagatatcagatcacatgtgcgttcttttgatatgctgacaggacaggaggatggcaagaatgtattgagagcaagaaaatcacgtaaaagggcgcttacaggtcc

SEQ ID NO: 26205 - DNA, 221 bp, Gossypium hirsutum
  Clone ID: LIB3166-003-P1-K1-D9
acggctgagcgtacaatgacatattgttcgttgtttcattgatagccaacacctttctgtgaggaacttggtaatagtgacgaacgttcaaaatcctttgtgttggtttacgaactctgattaacctaagatctcaggggcaattatggctctgccaattagagaggtatttacccgttcaaaggaggatgatgtcctgttgtttgttgacactctcacga

SEQ ID NO: 26206 - DNA, 216 bp, Gossypium hirsutum
  Clone ID: LIB3166-003-P1-K1-E4
aagatggtaaatgcggttctttcggtcccaacctcctttcccgtcctggcttattgtaatgtggttcaggccgatccctttcctaaaccaagaaccggcccaattcctacctctgtgggtccaacctggtagccacccgcattttcaattttttaaggggctgcagaacctgcaatccgaccttagcggcggtctttttttgcagctcgtgcaaaa

SEQ ID NO: 26207 - DNA, 405 bp, Gossypium hirsutum
  Clone ID: LIB3166-003-P1-K1-E9
cccacgcgtccgggaacattcaaagagggcaattacgctgatgctcattcaaaataagagaggcgcccatttctaacacagctcttctctcccatattcctgaaggcgttctccatcacattctttggctaatggcacgaccagagccagcttgctaccatagagtcggctgcagatgagaatccattccgtgtggttcttgaaggaattttgagacaagcaacttgcaccactgctgctgatctatgaagaaagaatctggcatctcatatatcctacaaaatataagcactctctggtgaagttctttccattgaattatgaatacaatccctcctcttaacagagtcttgacaactcactaatagtcagttctgatttttacatcaataaaattgttcactt

SEQ ID NO: 26208 - DNA, 322 bp, Gossypium hirsutum
  unsure (1)..(322): unsure at all n locations
  Clone ID: LIB3166-003-P1-K1-F10
aattcccgaagagacccacgcgtccgttcttcttcctctttcccatcaattttttattatccttccacacnctctacaaagatttttataaagaaaataaaaaaccccccaccttatcctatattataatcaatcccatcaccttaattctatcttcacacttacaattgttttcattcaacatactatcctaacaatctatatcatctaatacacattcntccaacacataatccatacttaactccataacaatcctctctaattattttcaactgtcaccacttatctcctcatcttacctaccataactttcattctc

SEQ ID NO: 26209 - DNA, 186 bp, Gossypium hirsutum
  unsure (1)..(186): unsure at all n locations
  Clone ID: LIB3166-003-P1-K1-F11
ctaagctatatcttttttttaagaagggcttcctgggaggacagcccttcttntccctaccttaccccttactgaaccttgaacatacccacccaatttccctttttaaagattttcctttctacagataccaagatttaaagataattcaagtcagaccggccttccatacagattctgaattct

SEQ ID NO: 26210 - DNA, 251 bp, Gossypium hirsutum
  Clone ID: LIB3166-003-P1-K1-F12
gctaatagctgtattatatcttaactattctctcgattcgcttttctcattcaatagtgagtttctttaccaacctaacactttttttctctatcaaatttccatctgtttctaatcaaccatccctttcttcttatttatatctctctatctcaatcctccattcctcgtttgctgcagtatacaagattcttaacctacatgcctctctctatatagaaatttgtctctcaacttttcattccctgagt

SEQ ID NO: 26211 - DNA, 232 bp, Gossypium hirsutum
  Clone ID: LIB3166-003-P1-K1-F3
gacccttccgcccacaccgtccgtaagttgggcttattggtattgggcttgtttaggttagggtaggttagtggggttttgggggggcccaaatttggcctttccccctctgcccgaaaaatgggggggtttattttttcttttcctattggttcgccatttctttttaccatttcgtaagcattaactctttcaaagttttcattgggtacaaagggacattcattgtcca

SEQ ID NO: 26212 - DNA, 405 bp, Gossypium hirsutum
  Clone ID: LIB3166-003-P1-K1-F8
tattaatttcctcttccccaagagaattcggaaaagcctttcaattttctcttcttcgggtggtttttttaagtcaataaaaatgtcctgacattaggttatatgagaatcaattccatcgttttgattctattttcacacttttaattgtttttttttgagagaagatgcaagcaatagagatggcggaaacacagcggcgaacacataatccatggatgagttcagagcaatcctcgagagttgaaatcaacggtcacgaattgtcgatcatggaaccgacgataacggacatacttgagactgaactcggtgagcctcaagatcagcatgataacagtactaccaattcgaatctagggattggagaacgagctttctctgctgctggtgctgccgttttgt

SEQ ID NO: 26213 - DNA, 322 bp, Gossypium hirsutum
  Clone ID: LIB3166-003-P1-K1-F9
cccacgcgtccgcttacattagaatgcatgcttccacgcttatgtctcatattcagggagtggaggctacaacacactcattcctgatattcaccccatgctaacactctccccaaattacataatgctcgtaggtaccagtggcaagataccatctccggtcacttgtgcgcaagcttgttgtctgctggacaactgcatataggtcactgcagcttgataacacgtgttgcactggggacaatatctgacctatctgctatagctattaaacacttgtatcatggtgctcaaaatgctcatgatgcttaagacactcatt

SEQ ID NO: 26214 - DNA, 184 bp, Gossypium hirsutum
  Clone ID: LIB3166-003-P1-K1-G2
gccgaacccttccgcccacccgtccggtgattgtcaaattccttgggaagacttgaatattggtgaaagaatggggctaggttcctatggagaggtctaccatgctgattggattggcacggaggttgccgtgaagaagttcctaaaccaggatttttctggtgctgctttagcctgaattcaa

SEQ ID NO: 26215 - DNA, 361 bp, Gossypium hirsutum
  Clone ID: LIB3166-003-P1-K1-G4
gatccattccctttagttagcttcttttaaaagatcatcacctgaaagctgcagctctcaggagtttgtagaagctagtcatttttcatatgttcgttgacaaattcataacgccaggagccctggactggagatgaaatctgtagaaatctcgtggaggaaaacgaatcacgaagtgtgcatttgtgccgcagaagaggcctcttacatgttatattattctgacatggtattatcagagtttgagtctagcctgtttcgaaaaccaaattctatctaaattatatacactaaatttgggctcaaccaggccgtctcatagtaaacgaattgttttaaatgctcgtgctgaatcaaggaa

SEQ ID NO: 26216 - DNA, 168 bp, Gossypium hirsutum
  Clone ID: LIB3166-003-P1-K1-G6
gtctccacgcgcctaaaagcgcgggagtggaggggattattattgacctttggtgggggcttgttgaaaaggaaacacccgcttcctattatttgggtgggttcgcccagcttttctagatggcaaaaaaacatggccttaaattccaagctgtcatgtcattccatc

SEQ ID NO: 26217 - DNA, 197 bp, Gossypium hirsutum
  Clone ID: LIB3166-003-P1-K1-G9
gccaaacaagtgacttccccttctccatgtcttattctatgcccgctgaaagggtggagccatctccatcttatgaagggggcattggtacccagctagctgctcactctgacgaggaagtacttacactagccaccaacatgcctaatacacaagcaatatggtgagtattaaaggagacgcggcatccttctttt

SEQ ID NO: 26218 - DNA, 320 bp, Gossypium hirsutum
  unsure (1)..(320): unsure at all n locations
  Clone ID: LIB3166-003-P1-K1-H1
cccacgcnttctaaggatttccccttccccgttctatactattagccccgatgttgatcgagancgtctgactgtgaaaggctgcgtcnaaatgaaccgttttgcttccgtcaaatgctgcgtcgaaatgaaccgttgcccttccccttttgaatacctattgaatattgtcagaataatggagagtaggttttccttttttttttgcttcaatttctataatatagtttctgattttttcttgcgatttcagtttctgacatatgtttcctttcatacacgagttggtttccgcttaaccagattaaccagaaaccaca

SEQ ID NO: 26219 - DNA, 244 bp, Gossypium hirsutum
  Clone ID: LIB3166-003-P1-K1-H12
tgaccctgataagggcagtgacgaatgcggtggtgttggcattcttggcattgcttgggcttttggtgggatgatctttatccttgtttactgcactgctggtatctctggtaagtttcgactctcttcccctcatgtgtttgatgaaaaaggccattttttttccaacttcttttcgaagttgtttttcatggtttacagtaattgaggtaaaagaaaaccggatgatgatttagcagatgag

SEQ ID NO: 26220 - DNA, 200 bp, Gossypium hirsutum
  unsure (1)..(200): unsure at all n locations
  Clone ID: LIB3166-003-P1-K1-H6
cggaatcggaatttcagagtagaccgtacgcgtacgtgaccctgataaggtcagttacaaatgcggtggtgttggcattcttggcattgctagggcttttggtgggatgatatttatccttgtttactgcactaatagtatctcaaacaattctcttcattttcctggaaaattatctnctgtttccccagaaaaatttt

SEQ ID NO: 26221 - DNA, 414 bp, Gossypium hirsutum
  Clone ID: LIB3166-003-P1-K1-H7
tctgaaggttttgagatggctgtatacatgaaatgagaaggtaattatctgaggagagtccatcacttaaacgctcctctgcttctgatccacctttgaagcttcatcggaaatgtagaagtgtgactaacggattttatgacgagaatggtgaaattgcagcagacatcatatctgctgcagaagtcaaggatgaccctgataaatcaaatgacaaactgataagaagacggcagaaatccgaggccgactttaatccccgtgctcctgaaaagatattgaaagaggataacaccagtaatggaggattttcaacaataacggcaaaaggcttggctcatagatccaaggcagcaactcgcactaatccaagagccgatgccgaagtatttgggttcaacaccacagcaacag

SEQ ID NO: 26222 - DNA, 429 bp, Gossypium hirsutum
  Clone ID: LIB3166-003-P1-K1-H8
ccagaactgaactgaaaaacctttataaaaaaatacacacacacacactaaacgaagccggaatggcactgcatattgtgaagcttccctttatctcgcgctgctgcgatagcagtaactctactctatttttcttatcgaaatcctactctcctattcatgggagattgctcaaatctcatttacatagaagctttgctgtttccaagtcagaaaaacttcaaataccaaaaaggaaaaaaaggttggatgagttatgtcttgaaaggtttcagcagtatagtcgaacattcatacagtcatggattttgcaaggcaaagtttatgtgaatgggaaagtgtttaacaaagctggaacacctgtctctgacaaagctgttgtagaaatcatagctgaaattccgaaatacgtatgttgagcaggatata

SEQ ID NO: 26223 - DNA, 421 bp, Gossypium hirsutum
  Clone ID: LIB3166-004-P1-K1-A11
cccacgcgtccgcccacgcgtccgttttttttttttaacttataaacaatctcttatttggtttaacatgaatttagctgttacatgtataaacccaccaagaaaaagaatataaagtcggtttcctacacttgaatatacactcttgattctcctacacttttggaggggatttatgagtatacacaggaagatggcacctccacccttcctatcaatggaatctcatcatctcactgtatctgtgggaaaatcaccgatcctggctgctaatattcgccaaacgccttgatttatcccatcaaacaaataaacacaaaagttaactttatttgcttttaaaaagaaatctaaatttggcttaaaagttccaaagaaacgatgacggtgaaaaagcgttgccaccgttttcatcatcatt

SEQ ID NO: 26224 - DNA, 303 bp, Gossypium hirsutum
  Clone ID: LIB3166-004-P1-K1-A2
tcatgccatttgtcttttttaacaatgtcttaagggttggggtttctattcatagttgacttggataaatttcactttcttgtttagccgagtgggtgccaatatataatgcatattatcttgagttgtatagttggtgattgaacgatcttcagttatagttttagagatatatacgtctcacctttgcagagagctactaaatggttcacgggggggtcctactgtcgatttttggagaaatggctcatctccatggagagtgacttaatggttaaatgaggggcttgaatgtcgattttt

SEQ ID NO: 26225 - DNA, 422 bp, Gossypium hirsutum
  unsure (1)..(422): unsure at all n locations
  Clone ID: LIB3166-004-P1-K1-A4
cgaattgacccctcacaccactatcagtgtttgtgtctagttttataacttttccaactaaactggcaatagcttataatattttcttttggtacaggaatcccgacagacctggaaagcggatccaagctaagatcctatttggaaaaggcctcgacgagtcgaagtctaccatccacggctaaatagtgagatagtgcccagacactatacagggaccctgagtcagcaccacttcataatccaccatgctntgaaacttaacaaggtaatacccattagccgcatccattaaacggaagggttgtgagggttttcagagactgacgattccattatatagagccccatagcctatattacgccctagaagcttaaccaccaccgcagactccatattcttaaccagaatctttttaatt

SEQ ID NO: 26226 - DNA, 331 bp, Gossypium hirsutum
  Clone ID: LIB3166-004-P1-K1-A5
tcaaatcgtaaaaccgcgaaattccctgaatataaatggaggtggatcaattcgtgttgctatactattcggcggcaacatcctatcacatcaaccaccatagaccctcaagacatcttcgggcctcctattctttctcttttgaaaaccctaacgacccttcctacttcaccggattcgataccctcttcacctagatctgtcaattgagcgttgtaccaccgaaacccaatccctccgatgtcttcagctctctccgttagcgcattaaggacattcttagcgtgatcgtcgctcttctcttctgcgttagttgctgcgctctcacagc

SEQ ID NO: 26227 - DNA, 352 bp, Gossypium hirsutum
  Clone ID: LIB3166-004-P1-K1-A7
cacgcgttcggtccaaccgccccttttgataaagactgttccattagctgtgggatatgtacagggtggggggccaactgggaatgtggctaaacccaaaaagggtcaaactgttgcagtttttggactgggtgccgatggtcttgccgccgctgaaagtgcaagggtttgtggggcttctcggatcatcgctgttgatgtgaaccccagaagatttgaagaagcttagaggtttgggattacagaaattgtgaaatcaaaagactacgacaagccaattcaagaggtgattgtggagattacctgcggaagagtggatctgcaatgtgattgtacaaggagcgttcaagcc

SEQ ID NO: 26228 - DNA, 419 bp, Gossypium hirsutum
  Clone ID: LIB3166-004-P1-K1-A8
ggaatacttagccgtggacaagcaaattgagaagaagagggctcgttgttcttcaggtaagatcgataggaagatcatagagaataacaggagaaatcatatgaagaatttgtatgccagcctcaattctttacttccccatcgtaattccaaggagctattgtcacttcctgatcaaatagatgaagctgtgaactacataacgagtttgaagacaaggatgaacgaatccagagagaaaaaggaaagcttaatgagaagaaagagatcttatacatgtgccgataccatcacaagtgaaaccacagcaaggtcgaaatcttctgaaattaagatgaacgaaaatgggtccgtcatggaaagggttttaacgactgggaaagacagtctagtcatgttttatgagatgatttacattc

SEQ ID NO: 26229 - DNA, 233 bp, Gossypium hirsutum
  Clone ID: LIB3166-004-P1-K1-B10
ctttcctaatgcttgtatcaactcactaattttatgccattctaccatatactaggtgtgtcatttttaagagacatctactgacttttctcttgtaaaaagatacctaatttcatttcttctctacttatgaaaaaagaataagacactgatagttctgaaatgatttttaactctattctaatataatctcgtgtttctattggtctccttcttgagtataaagttacact

SEQ ID NO: 26230 - DNA, 360 bp, Gossypium hirsutum
  Clone ID: LIB3166-004-P1-K1-B8
gaaatagcaattaatcggagtatgcaattaaaatagtttgacttcatataaaaaagggtggttttttcttttttctttgtggtgtttggattttgggtttttttgagtcttttgataatgtcgtcgactacttcgtctgagatgcaagaaccgagcatcgacactgttaaattaagttacgaaatcttttcgattcttgatagtaagtttttgtttggctacgatgatcagcagaagctattgatttctgaaaccgatctcctcggcatttgaatctctgtcgttggttcatccgttctatttgaattcgttttcttcttatcaagaaccagatggtttaaatatgattttttgagtatt

SEQ ID NO: 26231 - DNA, 429 bp, Gossypium hirsutum
  Clone ID: LIB3166-004-P1-K1-C1
cccacgcgtccgaatcatcaaagccaaaatttcaagagcttatgtcaggactgaactatgtgataccagcctggtggtaaaggatggatatcaatggaggaaatatgggcaaaaagtcaccagggataatccctgtccaagagcttatttcaagtgttcttttgcaccaagttgccctgttaaaaagaaggtgcaaagaagtgttgatgatcaatcagttctagttgcaacatatgaaggtgaacataatcatcttcccccttctcaaatcgaggcaacatcgggttcgagccgccttggttcggtccctgttggttcgaccccagttaagtcatccggtccaaccattactctagacctcaccaattcaatcaagtcaagtgatgaagctagaaactcaaagccaaaactagattcaccagaagctac

SEQ ID NO: 26232 - DNA, 403 bp, Gossypium hirsutum
  Clone ID: LIB3166-004-P1-K1-C11
gaaagatgtaatggagaattggtggcagagagtgacaagttagccgcgcaagatgggggagatggagatgacaatgcacgacgaccgcggcgtgaaaagttgaaggacatgcttcagaaaatggaggtacagcttaaaccattaatggaacaactcaacagagtaaaagatatgcctattccagaatttggaagtctccaagcatgggaagctcgagcaagtgctgctgggcgtgctgtaaatggtgattctggttctaatgatccttccaaaaattctcagggttatggtggcacacctatgccatttttttgggagacaaaggttgaagttgccttttctggtcttgatgggcaggaagatgtcagtctgaaagtgctgcaaatccctgaagttttgccac

SEQ ID NO: 26233 - DNA, 285 bp, Gossypium hirsutum
  Clone ID: LIB3166-004-P1-K1-C4
aaatcccggggcgcaccacacccttccaatttggtaccgcggtggtgtgtttgcaaaggcttaacaaagctgggaaaggtggaggaagtaggatcattatcatctaacgacaactcccctctaacgaaagatactgaagataattttagaccttcgattatcattttaccagtattggattgcgtaccacctccgtattgcttataacattcccaggattgattgatactcgctcctcttcgatactacataaccgatcaattctgcaaggataacatcctctga

SEQ ID NO: 26234 - DNA, 309 bp, Gossypium hirsutum
  Clone ID: LIB3166-004-P1-K1-D10
gccaactcaaaacccacaaaagccaaagtctctatttacacagaaactacaaaaagaaaggcagaaagaaggtatggaagtaggggtgaatattgggattaaaggaggaggagatgaaatggttggttaggtgaaggatatatttgggtttgaagtgacacttctgttgctagggtttcccggtgatgtgtttggtattaggttctgatatctttccctcactttttttttataattttacttttattttcacttctttatactctattacaaagactataattatatgtctcttttttcatttttttt

SEQ ID NO: 26235 - DNA, 243 bp, Gossypium hirsutum
  unsure (1)..(243): unsure at all n locations
  Clone ID: LIB3166-004-P1-K1-D8
cccacccttcccccnggtttaaaatcttttatttattccaaaaagaaagttattgaggggttgttcaaaggtgatgatgttgatcgtcctcttaaccttgaagaagaatccttaaagactgttcttaataaagaatatcctgttgatatatcaattccttatatcaacaacttttatatatggaaaccgatcacctttatgatgtataccttttaagtgaaacctttcttcatggcttactct

SEQ ID NO: 26236 - DNA, 416 bp, Gossypium hirsutum
  Clone ID: LIB3166-004-P1-K1-E12
gtgaggttgaatcggaacaagaagaacattccctttctctctcgcagcattcatggggctcacaatctgatcaagaacaagccccaccacaaaagcctacaaattccacagcgtctcatgaacttaacctgtttaagccgttgcatcatataccaagccattgtcagcttaacagtgttccaaataaccataaggaaaccagatatatggtccacaacactaggcaagagctgcagtttataagggaacaccaaaaccttcagaaaccagaacaaaatatgctgtgagtattggaacaaaggttttcattattggaggggttggagataaacactactacaatgatgtttgggtcctagacgtgagtgcttcgtgttgggcgcaactagatatatgcggtcagcagcctcaaggca

SEQ ID NO: 26237 - DNA, 386 bp, Gossypium hirsutum
  Clone ID: LIB3166-004-P1-K1-E7
ggaggattgctttagtgaaaaagttgagaaccttgaacagaataatgtgtctagcgggtgtgctcatgtcatttttgaggcttcaattaaatttgggcatccatctggtgttgaggaaatcaagcctttctcagtgggatgttcatcgccacaaccagatatgccgctgtggaaaacaatggaagatgttccagcagctgtaatgccagttaatgatggccctctagataaaggccaggacctatgaaggtgaaattgtgcatcctgaagatgtggatggtgggtgattaagctgaaaccagatgctttatttaaacttttgttggttgatgcttatttgataaaatcttcgctatgacgagtgtgtaattcacttctggctaaat

SEQ ID NO: 26238 - DNA, 242 bp, Gossypium hirsutum
  Clone ID: LIB3166-004-P1-K1-E9
accacacatacgcccactcttccgcccattctttcattgttagagactattttcttagccagaattcttaatcataaaagactttttttcctcagttgtttaaagaatgttcttataataaagagtatcctattgatttatcgtttcctgatatcaacaattttatctattgaacttatgatttcacgatgtattacctttaatgttaatcctttcttataggcatactcccattattttac

SEQ ID NO: 26239 - DNA, 352 bp, Gossypium hirsutum
  Clone ID: LIB3166-004-P1-K1-F12
cggacgcgtgggcaaatccctctctatcctttttggtttcttcatcggaaaaaaggggaagcccgtttcttttcagctcagaaatggatgtttacgagactggtttcatatctgaaaccccacaaagtgaagaagatatggacgtaaagaaaggtccatggactgaagaagaagacttcacgcttaaagcttatgttaatatccatggcgaaggtcgctggaacttagttgctcgcttatcaggattgaaaagaaccggcaaaagctgtagattaagatggctgaactatttgagaccggaagtgagacgggggaacattagtcttcaagaacaagcttttgattctttaac

SEQ ID NO: 26240 - DNA, 427 bp, Gossypium hirsutum
  unsure (1)..(427): unsure at all n locations
  Clone ID: LIB3166-004-P1-K1-F3
cggccctttatttttcttatgggattcgggtcctttcattcatccaaaaaaaacgggctttggggcaccttaaaacaggcctcaatgatttctncccatccatggggtcaagtaccgggatgcccattcagaaatccacgatcatagggataggatgtcaactttttttgagaacctatactagaattttcacacatatatacatatatttgcttttaaaagaatagtcaaatcttttatataaaaaaaaactcaaatccttatagcttatcatacttttaaaagattttattataatcaatatgttagatacatttttcctaggagatcaatgttcttgcttgttttcagattgcaaatcaaagttaatctctcaaactttttaattcttttggtgtttagtacttacagaattcaatttttttta

SEQ ID NO: 26241 - DNA, 418 bp, Gossypium hirsutum
  Clone ID: LIB3166-004-P1-K1-F4
cccacgcgttcgcccacgcgtccgataaaatccccactcccctcttcttcgttcagccgcgatcctctcagtgtttgcctatctctctttctttctcactatagcacccttctatctcagcccttttttattttctgttattctgtgaggaggaacatcattaaaaaggcgggatctttgacgttgtcgtgtaaccaaagattgttacttgtacttaacatatttttttccctatattttattcttttctgaaagcaaaccggtggttgagtttttctttttacctgagtcttcaatggcgggtttcattatatctggtttaaagcctcttccttgtatctacgatagacccgtcgctggcgttatctcgaggagttcttcaaaatccagatttttaaccaaaaacaagaatttccca

SEQ ID NO: 26242 - DNA, 424 bp, Gossypium hirsutum
  Clone ID: LIB3166-004-P1-K1-F5
ttaggagaagaggattgcttaggtgcaaaagtggacggttcgagactaaggtacgttgacgatcagctccgacaacagcgagcgttgcagcagttggggatgatccaacacaatgcttggagaccccaaagaggattacctgaacgtgctgtttccgttcttcgtgcttggcttttcgagcacttccttcatccgtatcctaaagattcagacaaacatatacttgccaaacaaacagggctcacaagaggccaggtttcaaactggttcataaatgctcgagttcgactttggaagccaatggttgaagaaatgtatttggaggaagtgaaggaacaagaaaggaatggcagcgaagtgaaggcaaacaaaagtgtgcaaaaggagtcggagtccagctctagtgcccatcaagaaaatgtgt

SEQ ID NO: 26243 - DNA, 422 bp, Gossypium hirsutum
  unsure (1)..(422): unsure at all n locations
  Clone ID: LIB3166-004-P1-K1-F8
gttcattgnntacccatatcaatatcatttttttattgggtcattttggtgatcatggtgcaacttcaacggctactggaaactccaaaagccttgctattgaaagagcaagcaatgacttatgctcgtgggctggttgctgggtttgcaatgtaaaatatggaacatctcatttcctttgcagatgcatttggagcaaccaggttaagatgagaattcacctgcatcagataagacaccatcatcaactaccataaaatatcaagtgccagtgcaatggctaaatcacattccacagcatatgtataattttcaaggccagctacctcaatatcaatgatatcccttccatcctatgcagcctgtaccactttcgtattctatgaataatcaatggccttctaatacataccaaaaattat

SEQ ID NO: 26244 - DNA, 385 bp, Gossypium hirsutum
  Clone ID: LIB3166-004-P1-K1-G12
cccacgcgtccgcccacgcgtccgcctttgttttcgcccacgcgtacgattcggggatggcattgatgaatttcaagcatcagcagctgcttggtcccaaatcatgccagtttccccccctagatcttgtattactagcttaagtagtaacatgttagatttgtctttctacaaagcggcttatcatgaaacaactgttaatcaacctggtttagatcattcttctgagtgtaatagcatagtctcaggtgggcggttcaagaaggctagggttcatccatcttcaacttcaagccaaccacctttaaaggtgagaaaagagaatctaggagatataataacagcacttcaccagttagtttccccaatttggaatggtagaact

SEQ ID NO: 26245 - DNA, 427 bp, Gossypium hirsutum
  Clone ID: LIB3166-004-P1-K1-G2
gtccgcccacgcttccgcccttttataaaatgaattctcattgattacccaacaaaatttattgggcgtgttatggttgctgcttccagtctttaacctgagcctagtcatgaagtgttttcatggctgaaatctctgcctttagcaccagagtacaggcctactctgtatgagtttcaagatccaattgcttacattttcaagatcgaaaaagaggcttcccagtgtggaatttgcaaaatcataccgccggtaccgcctaatttttttctgaagttgagaaatcagatttaagagcctaatttttttctgaagtttgcaaaccctagaaaatccaattttgtacctcttttttctggctattttttttttcaccgcccctttcaattaagtcacaatccaatctctggcgaagccttaaaaccca

SEQ ID NO: 26246 - DNA, 350 bp, Gossypium hirsutum
  Clone ID: LIB3166-004-P1-K1-G5
gcccggccgaaccgggcgacccacgcgtcgcaaccatattttaagttgcttttttttttctagactggaactgtataacgcgcagtaaataaccgtgggagacaccaacatgaaccaagctgctgttctttgaccgttaagaacccatagagacacgatacgtcaacagcgttacacgaatgcgaggtatttaccaacagtgttggttccacggtgcacttgatgaccaccattagatgcgcttacttaccggcgctgaatcctatgatcctttgcgtacagaggactgccccgtgtcactagcaacatgtgattcaccttgtttgttgaaggctgggataacaaccgtt

SEQ ID NO: 26247 - DNA, 408 bp, Gossypium hirsutum
  Clone ID: LIB3166-004-P1-K1-G7
gcttatgctggtagtgggaggtatagggaagccatggtggtttttaagaaaatggaggaagagggctgtaagcctactttgataacttataatgtggttttgaatgtgtatggtaaaatgggcatgccttggagtaaggtcatgactctttttgatgggatgaaaagtgatggaattgcccctgatgcttatacttataatacgcttataagtagctgtcgtcgagggtctttgcatgaggaagcggcttcggttttcgatgaaatgaaattggctggttttagtccagataatgttacttacaatgcattgttggatgtttattggaagtctcggcgtccgaaggaagctatggaggttttaaaagagatggaactttatgggtttgcccctagcattgtgacttat

SEQ ID NO: 26248 - DNA, 392 bp, Gossypium hirsutum
  unsure (1)..(392): unsure at all n locations
  Clone ID: LIB3166-004-P1-K1-G9
gtggttcctcactggttcaatggagactgttttccgggcgtactcatcanattcggggagatgcaaagtacatgggaattcctttattgggtgatgaggtgtattgctgcacaaagaacatggccttgttactgcttttttcttatacacctacacactattatgatgaacttttacggatggtttctaaataagaaaagccatacttacattctttagtcctttgttatgaacattcttacttaagcggcagacctctggtacttttcatttggattccttttttacatatacgtcggaatacctttgctgcttttttagttttttgccctccaatttgcttatgcttcattcacaattgacttatatactgcagcagcatacatgcactt

SEQ ID NO: 26249 - DNA, 393 bp, Gossypium hirsutum
  unsure (1)..(393): unsure at all n locations
  Clone ID: LIB3166-004-P1-K1-H10
ggaancccgggggacccacgcgttcgcactctttctcagaagactgagattttttttcaaggcatgaaaaccatatcgacgttgttaactccaaagccttctctaaatttcattaccggaccatctcgactcaacaacttctgaatgtggtggcagcacttctcttgaaccagagaccaagacactttgataccgctttgtcattggaacaattctgcaatgacactgtgatgacatttttgcatcatcatggattatgccaagctgggaaggtgtgtataaagattacaggttcattggcgtttatggccttatggttatagatgctttctaccattagttttttacctggaactaattctcatgcttctgtctttattctttggatgaacc

SEQ ID NO: 26250 - DNA, 316 bp, Gossypium hirsutum
  Clone ID: LIB3166-004-P1-K1-H3
aaacttgaatccttcatgggaaaaattcttggttgcatcagaagatgacccaacacagtgtcgacacacctcgagccctctaggtaatggtgcaattgtggagacatctgaccaaaaaatagtgctgctgcaaagaagtaataatgttggcgaatttcctgggcaatttgttttcccaggaggccaccctgagccacaagaagttggcatagaaacccacgagtactgcaagtgctcgaaagattctgagcttgttaataaaaaggtttctcaggagatgttcgaaagcattatccgtgaagttgttgaggaaatt

SEQ ID NO: 26251 - DNA, 414 bp, Gossypium hirsutum
  Clone ID: LIB3166-005-P1-K1-A12
gttcaggggagaggaagcttgatcagacacctacatgggcggtggctggggtttgtgctgttatcatcatcatttctattgtcttggaaacagttcttcacaaacttggaacgtggttcacagaaaggcacaagagtgctctgtttgaagccctggacaaggttaaagctgagctgatggttatgggtttcatttcgctgctcctcacttttggccagagctatattgccagaatttgtatcccaatagatgttgcgaataccatgttgccttgtaaatctgatagtgagcaaggcacctctgaaagcagtgaataataacaccgtctaagactgttatggtttgtaccgagatctttgtctactatttcaactgctcctaaatgcaaggaggggcattgaaccactttatttt

SEQ ID NO: 26252 - DNA, 434 bp, Gossypium hirsutum
  unsure (1)..(434): unsure at all n locations
  Clone ID: LIB3166-005-P1-K1-A4
gtgatgtttatgcattcggtgttgtgctgctcgaacttctattgggaagaaagcctgtagaaaaactagcaccagctcagtgccaatctattgtcacatgggccatgcctcagcttactgacagatctaaactcccaaacatcgtggatcccgtgataagaaataccatggatctgaagcatttatatcaggttgctgctgtagctgtgctatgtgtgcaaccggaaccaagctaccgtccattgattacggatgttctgcactcacttatccctcttgttcctatggagcttggagggactctaagagttacacaacctacggtcccttgaccctacanactgactctgatgtactgacatgactcgaaaatcaagaccgtattttgctacgatgacgactgccatgcaattttcgggtttgcatcaattaat

SEQ ID NO: 26253 - DNA, 414 bp, Gossypium hirsutum
  Clone ID: LIB3166-005-P1-K1-B1
ctggatggggggatgcgtttaaaatgaggtctttgttggtaggactgttatgccaggtggagctgacgtggaacaattacataagatttacacgaaatgtgggtcaccgttagactaatactgcaagaagtataagttgccgtatgcaaccttatttaaacataaggagccttatcaacgatgcgtaagggagacatttagagattgactaccatcatcactaatgcttatcgatactaggatcgcaattgatactgctgaacggttgactggcactgatgcattaagaagcgaattctttacaacagaaccttatgcttgtgaaccgtgttggttttcccaaatatacatccagtcaagagatagatgcaaaacgaagagatgattaagctcggagactcaaagctgtcggta

SEQ ID NO: 26254 - DNA, 390 bp, Gossypium hirsutum
  Clone ID: LIB3166-005-P1-K1-B5
ccgggcgcccacgcgtcgacactccacttaagttaaagataagggctaagcgtttggaggcagaaatttcgggaagaagagggaggaaaatgtgaagagcaacacgttcagcaggaagaccaaggtcggcagaattaagaaggaagtttgagaaatatatctgagagacgacatttactgtggagctgcggcttgcaaaacgtgtgacagttccacgtcacgtgctcctttggatgtttgctactccccttctcattcttgataccaatgtcctttttcatcagatcgacttgcttgagaactctgtcatcgacaatgcggtgctgctatctgtggtgctggattgaagttagaattagaacatgggcgttacaatagacttagagctct

SEQ ID NO: 26255 - DNA, 284 bp, Gossypium hirsutum
  Clone ID: LIB3166-005-P1-K1-B7
ctcagattatgaaaatgaaggtattgaatcagttaatagcacacctgggggagatccaagttattggtggatctattgcacacaatgtttaacttgcatacaagtttttttggatgcaagttccgattgatgctgtttttcagaaggtagaaatgaatgttattattggtgtcactcagtgataaggttattgaaagttttattaatctttggtatattacacgtctgtcacttcagattttctaatatttattaatttttttattttttatttacttttattt

SEQ ID NO: 26256 - DNA, 417 bp, Gossypium hirsutum
  Clone ID: LIB3166-005-P1-K1-B9
cgaacacatgcaatctatcgtattaaatggtcatcacccacaaaagggcgatctatatggggacggtcactacatgaattaatggtccttacccggagaggcccattagataaacatgctacaacatcataggataacctgcctcagcactgaatatatatatatacacacgtggatgtatccacaacatattacccatcgcatctgtaatactcccattatttgaattattacaatgttaattccttaacattgatccattgattacaacattatgtaccaactttttataaataccactattcatttcctatatttctatttctttatgataaacatcgtggatttggactcactgttgtgtctcctagtattactttacttggtttatcatgtacaatggtacttacttgctaa

SEQ ID NO: 26257 - DNA, 439 bp, Gossypium hirsutum
  Clone ID: LIB3166-005-P1-K1-C1
gtttggttttcttgcagggaagaatcgatgattttctctttttcttattggctttggtaagacgccattgtaaaagggagaagtcgaagagttggagtttccttcgtgtctttgctttggtttggtctgctttctatttttttggttgtctttgtaaatacgcgtgggcgttggaattggactcgtataatgctggggtgggactcttaagaacctttcgtaaaaacatccccttaagtcttaaaaatggctctacatgatttctgatacagatcgcttgctttcactctttctgaagatctaaaacaatctccccctcccctccgtagaaaattttctttcttgtttttgttttagtaacagaaacgaaacatatcgtagataaaagaaaatgatgagagtgaagacaaaagcaacagggttggccccggtggcaagt

SEQ ID NO: 26258 - DNA, 370 bp, Gossypium hirsutum
  Clone ID: LIB3166-005-P1-K1-C5
cccacgcgtacgcataagacttcatcagtccataggtcacgcctttaaaccttccaacgggcccaaagggggcaaagtaagcttaatctataccttcctaaaatgcatcaaataaaactcaattttaaccttcttgaaagcactgaaaataatacccttcaaaacatgaactaatcctttataatagcacttaaagaaatacccttttttgtcactaccccttctgtaatatctggttcaaagccaacttcgatgcaaaggatttaatacctgctgtaacaccataagtattaagtctttttttaaaaactttgttctgcagaatttgaaactgttatggttaaaactttatgtcgttttttgctttcta

SEQ ID NO: 26259 - DNA, 229 bp, Gossypium hirsutum
  Clone ID: LIB3166-005-P1-K1-C7
ttcactcaccattgttccaagtttgttgtaaaccaagctagaacctgtgtgcatcatggtcgtattatctgcctccaccgctgccttctttcttggtgactcttaattgctttgtaaccctctgaattttagtggatgagctatggtattggctctatcacctactaattctttcattttcaagaccgttgctcttttttatcaagaaaatcgccgtcttctccaaagc

SEQ ID NO: 26260 - DNA, 264 bp, Gossypium hirsutum
  Clone ID: LIB3166-005-P1-K1-C9
tcgttctcgattctatttataaattggaaccttatttcttgaaaaaactcgtgctttttttggaatttcactcattatttcttctataacttactaatattgcatttttttttgacatattttttatgatttatatttaatacctttttaccattaacatgtatattaccatatttaaatgtttatgatttatttatttaaaaccttcataatcattatttattaatatatttttattcatttttcaaattatttatcttattt

SEQ ID NO: 26261 - DNA, 330 bp, Gossypium hirsutum
  Clone ID: LIB3166-005-P1-K1-D1
cggggcggcccaagccttcgggttttggccaaccttggcggcggggttaatgttgtttccgcctaccaggggttttgaaaaggatgaccaggaccttgagttggtcgatgattgtgtgcacctgtggacctattctatttaaaagtttaaatttatcagactcaatagaattggatcaatccttttttctggcgttaagggggagaactgaaccaagaattctctttctttatcatcaatcgaatcactgttcgcgacccaggattctattttcttatcaattcaaatcaccgcttcacgtgttttccttttttcttaatcagatgaaat

SEQ ID NO: 26262 - DNA, 256 bp, Gossypium hirsutum
  Clone ID: LIB3166-005-P1-K1-D10
tcgctttggcatcctattttttttttctgaaactttgtgatcgttttcccagagcacacttagcattatcctgcaatgtccagtttatttgtattataatgttgtttatgaccctttactgccgttaaaatttaccataaacctatatctttattaccttcaaacaccatttatgcttttaagttcaaacttttactcatgttttgtttataatgtcctaactttattttctaatggtttaaactttggtggattt

SEQ ID NO: 26263 - DNA, 431 bp, Gossypium hirsutum
  Clone ID: LIB3166-005-P1-K1-D2
atttgctctctctatatgtgattcagtggatatgtatggtttcactgtggatccgggtgataaagaatgggctagatatttctcagaatctcggaaaggccacacacctttgcatggcagggcttattaccagatgatggagtgtttgggtctaatcaaaatccattctcctatgcggtcggatccaaaccgagctgtgaagtgggtgccaagtcaaactgctattagagctgctagaattgcatcagagaaattgttgaggagggttggagctggatctgaagacctgcttagttcttgctcgatattgaagaagcaagttaaaaggaaacatatgtcgatctctagtctcagaaaggctgctgttgaccaccaaaaatttgtgaaaggcacaacaatgtatccattggagcataatcctggacatggtc

SEQ ID NO: 26264 - DNA, 436 bp, Gossypium hirsutum
  Clone ID: LIB3166-005-P1-K1-D3
ttattcttaatgtttagcatgatcttcatgttttggcatctgttggggtatgcttgattgatttcccttgatatatgatattgattgactttacattgggttttattatgaattagggatacactagtttacatgtagagaatgctgtctttgctttgtgtgactgttttatctgtcacgtttttactgttagtgcatctagtttccaagcatataataacttaaagcattatttagtatttagttatttgtaagctgtctttaattatctgttagtgaagtaagtactcactttttgcttcattgaccaagctttaactgacctatatcaagttgcgttatgtttcttgaggattacttcttagctttctttcccggtagaacttgctaaatgattggcaatagggatttcctttaaccgtccaaccattttttg

SEQ ID NO: 26265 - DNA, 227 bp, Gossypium hirsutum
  Clone ID: LIB3166-005-P1-K1-D8
cccagcttccgaaaaactttaacaaacacttcgacggcagagcggagcattaaagagttcttacaccttttttaaaaccttaccacctaataaaccatgactcttctaatcaattattcaaaaaacccaataaggccccgttcaggacagtatatttaaagctgcttaattgatgccaactttttggatacttcaatagccttcgtacaatctactctgaaactaaa

SEQ ID NO: 26266 - DNA, 160 bp, Gossypium hirsutum
  Clone ID: LIB3166-005-P1-K1-D9
cctaaccctaatatgattttatccttcaattatatacccctacactgtacttataaagccattcttccatctttattaatacctaatatcacttaacaaaactgatactttgttacttattattgaataataaatgattgttttcttactttcaattacc

SEQ ID NO: 26267 - DNA, 421 bp, Gossypium hirsutum
  Clone ID: LIB3166-005-P1-K1-E11
gtctacgagtctaacaacgatccaagaatctttcagtgcgaaacgatgtatgaagaagattacaaaaccctactaacggctgccattgcatatcttgtttcatgctctctgattgataaggcattgctcgtcagattcatcttagctcccttggttgtgtttgttttccttctccacaaatgcttaactacgcgaaagaaggttggtaatgcagaacatgttggtgacttacaaatgcttcctaagcctattccatgttctccacaaggtcatacaaggaacctttcatcggattctccaaaacaagtgctaatagctgcgtcaatagagagaagcgcgtaagaattcttcactagtttaaggggtttgatagccctcatgcaagacattagaatgcatttattttggtacaatgtcatta

SEQ ID NO: 26268 - DNA, 427 bp, Gossypium hirsutum
  Clone ID: LIB3166-005-P1-K1-F1
gcaaaagttgatgagtatgctcgcggaatgatcagtggttctggatcaacacttttcgaagaacttggactatattatattggacctgttgatggccacaacatcgatgatttagtttctattctcaaagaggtgaagactactaaaacaacaggtccggtcttgatccatgttgtcactgagaaaggccgaggttatccatatgcagagagagctgctgacaagtatcacggagtggtgaagttcgatccggcaactggaaagcaattcaaaggcaattctgctacccagtcttacactacatattttgctgaggctttgattgcggaagctgaggcagacaaaaatattgttgccatccatgccgcaatgggaggtggaaccggattaaacctcttccttcgccggttcccacaaagatgtttcg

SEQ ID NO: 26269 - DNA, 251 bp, Gossypium hirsutum
  Clone ID: LIB3166-005-P1-K1-F2
ataaataaagtgcttaccttatcaaactaaccacaccgactcctcattactgtacacagggttatcactccactgtttatgaaaatctcttatctatatctttctcaccattaatattgtctttctctaatatcaatcacgaatctttccatattttctaatagctgatctaacttcatccttagtatattcatctttatttaaacacttatacatagttcttcttaatttatttactattttatttcaat

SEQ ID NO: 26270 - DNA, 189 bp, Gossypium hirsutum
  Clone ID: LIB3166-005-P1-K1-F4
gtcacggcaacctacaacccatgagttggttgctaaggatttgcatggaaatgattggcgattcctgcgtgtttttatgtgtcaaccactaatgcactttctttaaagtggatggagtgctatttgtaagctccaagaaggcttgctgcaatagatgcttttataattttacaaggcaacattggtaaa

SEQ ID NO: 26271 - DNA, 432 bp, Gossypium hirsutum
  Clone ID: LIB3166-005-P1-K1-F5
caggagacgccatgaaaacgaccgtctcaaacttcgacatcccagcggcaagcatgtcgagcttcgacatactcagcgtagcgacgttcatattcatttaccgacgaatccttgaccccatcattgctagaataaaaacaaaccctaagggcctcaccgagcttcaaagaatggggatcggtctcgttatagctatactagccatggtggcagcaggagttgtcgaggttttccgattgaaatacgcgaacaaagattgcccaaactgcaacaacgcgagctcgttgagtatattttggcaaatccctcaatacatgctcataggagcatcagaagtattcatgtatgttggtcaattagagttctttaatggacaagcacctgatgggttaaagagctttggtagtgcactttgcatgacatccatatcat

SEQ ID NO: 26272 - DNA, 334 bp, Gossypium hirsutum
  Clone ID: LIB3166-005-P1-K1-G11
cccacacgtactcccacgcttacggccatgttcaccaccaccctacggggtaaacatgcgagggggcaacaacacaggcaccccatagttccatggcccgatggccgtactcaaggtcctctccttcaagctcaccctcatgtcttgtggtaaaaaggttggtggtgtgaaggctgttctaatcgccccagtggtgagaagcctaagcacagggctcttgctaatgttgggtgggcttgggttagtcaactctcaaagagagaacgaggcgaatcaagtgccttatcaaaacgagttgacccattttaaagcgtataactctctgaccaaggac

SEQ ID NO: 26273 - DNA, 357 bp, Gossypium hirsutum
  Clone ID: LIB3166-005-P1-K1-G12
gtatcattctttttcaaaacatgtctttatttgattgatgatgctttttaacaaaaacccatctaactaatccctttacttttattgtttatttttcagattttatcgagtcttgcaacatgggaaaaagcaatattatcacagattggactcagatctatgccatttactgtatgtattagtggcaaacactgtttttccttatatattacgctgttttgttctcattactttctattatcttctatttttactttgatattatcattcatttctatcaaactatattttctagcctcatctcctttcttttttaggtcgactttatctacttcttcaattcttatatttcttttt

SEQ ID NO: 26274 - DNA, 257 bp, Gossypium hirsutum
  Clone ID: LIB3166-005-P1-K1-G2
ccttccatccccaccggccgcctttttttttttttttccttggcccttgaaaaacttgaacttcttcttttttatcggggaaactttttcaagaatccaaagctttttctttttcaacaattcccctggttaaaagcctttttcttcaacttttttggcctttggtccaaaccctcttaaattaattactttcttttggaatgtttggtccctgcgactccagttctttttttgacttcacttttggatgttatttg

SEQ ID NO: 26275 - DNA, 343 bp, Gossypium hirsutum
  unsure (1)..(343): unsure at all n locations
  Clone ID: LIB3166-005-P1-K1-G5
tttaaaacgaaccagagcttacacccctctcaaaacctntgcaaatgataagctaagccatttatccgaatcgcaagcgctgaaattggtcatcagtcgctgtgtggaaccccataagtttgtttgagctgaagtgatttatattgacaatggaaaacaaagatgatgaggtgaagaaatcacaagttgtggaggccagggcaagaaatatcagccacaatgtgcgatgtaccgaggggtggagtcagtccattgaagattcacaagccgatattgcaattcttcctaaaaaagtaatccgcgatgagattcgatcctggaagagtgacaaagagatttacag

SEQ ID NO: 26276 - DNA, 311 bp, Gossypium hirsutum
  Clone ID: LIB3166-005-P1-K1-G6
ccggacactaattatacttcgcgtcgtctcttagtaaaaatctgatcattcgcatttctgtttattcttatgatatgccgtgcagtggacattatcagttaaaatggccgcaaatatattatctgaaaggcctttgttcatatgagcaatctcaactacttttcctgttatgattcaagatgacagtgacatcacgcaagctcccgatcatcacgacagtgttcgaggaccctgcacgtggaagagagcttcattgtatgagttacatgcagtacattgcatgatcttttgagatagatgagtgcgctatg

SEQ ID NO: 26277 - DNA, 421 bp, Gossypium hirsutum
  Clone ID: LIB3166-005-P1-K1-G7
caatactcgaatgctaccataaatacaggcaacaatcaggcaacactggaagaataacaggctgtaagctttgtactttcagaacaccatcataattgtaccgatgtaagccattacctttatcggatactgagctaactgtgctgaaacatccacatacttgcttaatagcgtaagcagtacactttgggtgaaggcgggtgctaacatttatgcctattctcaaacgatcattttgttgcacatatttgctagtccaactcatgagtatctggacaccaagttcagcattagaagaagcgcctagcatcttaacaacttgtcctacagaattgcagacagagggcgttaacctgttatcagtacactggtgtttgctctcctaccgtccatctgagaactgcaaagctttacatgtgca

SEQ ID NO: 26278 - DNA, 436 bp, Gossypium hirsutum
  Clone ID: LIB3166-005-P1-K1-H4
cttggccaccgtttttctctttgccttccctcttgtcaaagctcctttcgtctttctgctgccaaagaaggtaaaaccgaaacatcaacaattaaaaaaagaagaataaaggaataagctgcaaataatgtccaaatcaaaccctagtttccctccccagcaattatccaaatctctgaccaaatcgttcatggctcagaaccaagtcatggactcgcttacttcccacatctctctctaccattgccattctctctcccaaaatccaaaccctacccctaatagcaattcaaggtcttcgatcctcaggtggttctcatctctcaccatccatcaacgtcaagctcaactcacaaccgtcgattccaagttcacccagctcctcatccagatgctcggcaagcttcgtacacgtggccatggcttcttcattatt

SEQ ID NO: 26279 - DNA, 282 bp, Gossypium hirsutum
  unsure (1)..(282): unsure at all n locations
  Clone ID: LIB3166-005-P1-K1-H7
gggatatgtacagggtntggtgtcactgcaaatgttgccaaacccaaagagggtcaagcggccgcattttttggactgggtgccgttggtcttgccgacgctgaaggtgcaagggttggtggagcttctcggatcatcggtgttgatgtgaaccccaaaagatttgtagaagctaagaggtattgggattacagactttgtgaatccaaatgactactacaaacctgttcaagaggtgattttggacattacctacgttggagtgtgaccgcagtgtggata

SEQ ID NO: 26280 - DNA, 321 bp, Gossypium hirsutum
  Clone ID: LIB3166-006-P1-K1-A1
atgtactcatgtctacatgagtatctttttcaatatttaaaacgggtaatgattttatcaactacatgctagctaataagaaggggttaacagtccttacttagagaacagagttatcttctttctttccctttttttcttttgggggggggggttgagtggagggttgatatatactattttatactatagtttttaggttctttcttttttctcactgtatttgatctttcaatgttacccccctacttgtacatgttcaagcatgtggttgatttgaagtgagttggtttaccattaattgaactattaataatcttg

SEQ ID NO: 26281 - DNA, 399 bp, Gossypium hirsutum
  Clone ID: LIB3166-006-P1-K1-A10
aaggaatctagtgaatttcggtaggtcattgctagtcatgaaaatgcatggagaaccagaaactctgagtttgaggctgagcttgagcttaagcgcagaatggtggaagatgagattgaaatgaagagacgggcctgggagttaaaggagatggatataaataacaaggaggaccaaatttgtgaaagagaacatggtcttgatgttcgattgaggatattagcagagaaagagaaagatgtggctgagaagtcaaatctcatagatgtcaaagaaaaaaatatgagtgctttcgaaaaggaacttgagttgaagaaagctgctttggaaaaagaaaaggatgagatgagttaaatgatactagaccttcaaaaatcattgttgtcatttgaagataaa

SEQ ID NO: 26282 - DNA, 292 bp, Gossypium hirsutum
  Clone ID: LIB3166-006-P1-K1-A12
atagcatccaaaatcaaatcctctgagaagaatctatgagaccaaacatagggttatttggagattcaattacgcaagaatccttcagatcatgcggctggggtgcttctctcgctgatacctactctcgcaaggctgatgttgttctttgaggctatggcggatacaacaccagatgggctttatatttgatgcatcatcttcttccttttggctcaactaaacctcctgttgctaccacttttttccttgtggctaatgatgcattttttccagggagatccagtgaaag

SEQ ID NO: 26283 - DNA, 228 bp, Gossypium hirsutum
  Clone ID: LIB3166-006-P1-K1-B3
tcctcacatttctccacaaaaaaagtcttccaatttttttcccagtttcttccaattttttgcccagttttgctttgctgcaataatcaaaggcagtgggatctaaagaatcgaagggttgtttgtattttagggaaacgaaatgaaaacaggtttggtggtggatggcgattatgtatatgaagaaagagaaagcatctaaactgtgcttaataacttcgctttttc

SEQ ID NO: 26284 - DNA, 210 bp, Gossypium hirsutum
  Clone ID: LIB3166-006-P1-K1-B7
ctctcttttccttcacactttctgttccaccattcgtcccaagggagtaggtgggactcagctcaattttgggacctcacttttgaacattaaatcggtttacgaactcacttagtctgactcgtcggtgattgtgctcccgttattttacatgcatggttggcttacagacttaccaagtggcctctctctaagagcttgacgacctat

SEQ ID NO: 26285 - DNA, 354 bp, Gossypium hirsutum
  Clone ID: LIB3166-006-P1-K1-C11
cccactcgtccgataactgtatggggatggtatggagggactcaaaaaagccaaaccggatactcttgtgggagccatggatgcttaacctgacaagcattatggatttcacgatatccgcaccaactacaactacaccaaaccaactctcgcatgcaatgctggtttggatggtgtacttgatgcattgtctgatgacaagttaactggaattgacatgtattccatattttctgcagttccaccaatgtttttcacactgtcaccaccttcagcaccttgaatgccattaatattcttttaagatcccttaaattgttccttttttgtgtgactttattcttattaattttg

SEQ ID NO: 26286 - DNA, 290 bp, Gossypium hirsutum
  Clone ID: LIB3166-006-P1-K1-C5
ggccgacccacgcgggcgggagaattcagttttagaaggggatggaggatattgaacatcttttcgatcggaagtgacatgtggatggaggatcttttcagtcttgagctaatcatcacgacgagcatgagagggactttgtgttatgttgcgcctgagtacggtggatgtggctacttgatggagaaagccgatatttacagtttaagagttttgatccttgtgaatgtgtctggttagagaccattgcatgtgcttgcttcgcctattaagctcgaaaaggcaaactt

SEQ ID NO: 26287 - DNA, 398 bp, Gossypium hirsutum
  Clone ID: LIB3166-006-P1-K1-C6
cccacgcgtccgcccacgcgtccgcgaaaaaacttcaatagcctctcaaactctttcattgaactgataagcagctcatgacaaaactacaacaagtcctatgtgggatcttttcatccacccaaaatttctgaaccttcttaaacttgggaggacattgttttctttttttcttgtaatagaaatggaaactttttaagtttgaagacatccttttgagctcttttgaagtcgtttttacagtttcttgtcgaatacccagtttttctttcagcctgttttcttcagtttagtgattcttttatgggaaattgactaaagattgaatttttatttctgggtttttgttaaaaaaagtaaaacttggcatttttgctcttcttttttttttggttctt

SEQ ID NO: 26288 - DNA, 410 bp, Gossypium hirsutum
  unsure (1)..(410): unsure at all n locations
  Clone ID: LIB3166-006-P1-K1-D1
cccacgcgtccgatttgcaggcacgcataaagataatgctcccattgctacttctaattgattgaagaagagctctgaagtcaatggactaagcaaagatgttcagaagcttttgtggaaaaacaaaatgcgctttactaaagcggatgctgtagttaaatctcttggactggcggngcccaactggaaagtaaagaagctggtagataaggaggaagacgaagttggtttagatggttctcatgctgctgatgagaccaattgcaaaaaggtgcttgatgattcagttgactgttctgagtgtccttcaacatttccagcagcagttaatgctgaggaggcatgtgaaactgatgagttgagacccttgaagaaggccaagttactggttgatgaaaagtgctctgatg

SEQ ID NO: 26289 - DNA, 272 bp, Gossypium hirsutum
  Clone ID: LIB3166-006-P1-K1-D10
cccactcgtccgaggcaacactaactctggatttagttctggtttcaaggggtttggatgggggtccttgagaaggatggggctaaagtcaacgtggccgacttggtggggaagaccattctcttgtacttctcaacccattggtgcccaccatgccttgctttcacaccaagccattttgtagtttataacaatatcaaggaattatgtttatacatttgaagtgatttttatttcgagctacagggaccatatccttctttgttgacttt

SEQ ID NO: 26290 - DNA, 162 bp, Gossypium hirsutum
  unsure (1)..(162): unsure at all n locations
  Clone ID: LIB3166-006-P1-K1-D5
gcgcttactcgtgttccgttcttatccaactgttttcattttctttttgggattttcnctggggcagcacagattctttaanttatctcatgatccctacgattagctctacaataacagaaatctcttgttgatcaaaatggtaaaatctcgttttattct

SEQ ID NO: 26291 - DNA, 398 bp, Gossypium hirsutum
  Clone ID: LIB3166-006-P1-K1-D8
gtcaattcttgtagtggttttattgaatactctttaagtactactagaggggctagaaggctgacatacaatgatccaattggtatgatcacaccacataataggttggccatctctctggatcacgagactcaccactaggaccctgattatgacaggaactatgatcggtacatgcaaagatttgaccctaagtttaaggtcaatcgtggtccatacacaatgcatcctatctacacccctgccattcactacaacaccgtatttccacatcctagatccactcatccaacataaatatctactgaacacctaccttatgctcttccacaacatatacacgctccctgagacgctacaacaaccgctacaagaatcaattgtggccatccttaaac

SEQ ID NO: 26292 - DNA, 385 bp, Gossypium hirsutum
  Clone ID: LIB3166-006-P1-K1-D9
ggtgcctgcagctgaagcaactattgaagctactgctcaagggattgcatgaatgctttgcgctcatggaccggaggtggaatggagaatatgtacaatatgggaagctgcttatggtctgattcccttgagctcttcagctgttgatcttccagaaattattgtttcaaccccattgcagcctcccatactatcatggaatctatacatacctcttcttaaggtgctcgaataccttccacgtggaagtccttctgaagcatgtctcatgaagatatttgtggcgactgtagaagctattcttcagagaacatttccacctgaatcccccagggagcaaaccagaaaaacaagatacagcataggttctggctcaaagaatctc

SEQ ID NO: 26293 - DNA, 329 bp, Gossypium hirsutum
  Clone ID: LIB3166-006-P1-K1-E11
ggaccatcctgagttgtgatttttgaaacactatctgccgattatcctctgaactatttgggggtttccgcttcttaaatcagccaaaaaaaaacctacacctttatctctttgtgttgaaacgatcaaaagaaggaatgggttctgaaggatcaagcgtcgtctagcctaggaatttcagattgctacaagaactctagagaggtgaaaaagagaattggggatggaactgtccgctattgaaagcaccatgctgatgtcgtatacatgcaatcttgtactggctctatcattggcccccctaatactgctcatgaaggacgcatcta

SEQ ID NO: 26294 - DNA, 345 bp, Gossypium hirsutum
  Clone ID: LIB3166-006-P1-K1-E12
gcgtgcatagagaacgtaattattgggatcttatacacagcattctgtgggaattttggtggggaaacgtaattcctgctagggaggccttatcactgggcatggaggaggatgccaagacatatgatccttcatccacacacaagcaaacagggcttgcaatttctaagagcataaaattagctagtgaagcaaagatgttctgtagggagattgcaggtcatattgaattttatagatgatcctaagttggaacctcattagtcattgcacttttgccatatttgttatttattttccaccaaatatttattaaacggcattgaagaagctattgcatgttaa

SEQ ID NO: 26295 - DNA, 416 bp, Gossypium hirsutum
  Clone ID: LIB3166-006-P1-K1-E6
gccactcatacgctccctgctttgctctgaaacgtgcaagtctttctgcaacggcgaccgtctatccaactactgtgttggaagatgaacatccactatccgtagagttccacatcgatatagagatactgtggactattttggagactgcggagaccgcttttctccagcctgtaccatcatcataattcgctcaagatggtgaacctaccaagactatcaaggcccctgcaggcttggattctgtgctttacaatacgaacgccatctacacgatttcgagttctaaggcttttcgtatctctttcacggattctgcttgtaggggctgtggagtcacggtttacacgaagaaatacatctataccattgatgatgactgctttgatgctcaagatccatttgactatgacatc

SEQ ID NO: 26296 - DNA, 391 bp, Gossypium hirsutum
  Clone ID: LIB3166-006-P1-K1-E8
cggacgcgtgggtttcgacgtttctccctaaccctaagcctgtgccctcttcccattttgctcaattcgagttcacctccggcaccacttccaccaccacagcttccaccccgtggcagaccacgtgacatgagagaaaggagtagatcaccaatcaggggtgcacctccacccatttccaaaatcaaagatgcaaatcttatgagaaggccaaaaagaagttgacaatattagaggctccaaatattcttacaattgcattgaagagatttcagtccggtaaatttggaaagcttaacaaagcggttcggttccctgagtttttgatatcatgaatatacatgctctatggagtagtggtccatttggatatcatgaatgcagcattttc

SEQ ID NO: 26297 - DNA, 397 bp, Gossypium hirsutum
  Clone ID: LIB3166-006-P1-K1-F12
cccacgcgtccggttgactcatgcaaacgcttacgcataatgaaaggatcagaagcaatgggtcttgcaccaagagcaatggataaatgcaagagcagagcctaaaaacaagatcctggaattgagcaaaaggcttggagggaaccttcttattgggatggggtttatggttttttaatggttatatatatatatatatttggggtatattgatttgccaaaagaagaatcatggggacatttttgttatgttcaagaagcaattaacttaaccttatatattgctggcttggtttgttgctgataatgggggctttgttattaataatttcaccatgtgggtttttttcttttttttgctattggctttgttgtcatagcttattgttatgtgtgt

SEQ ID NO: 26298 - DNA, 293 bp, Gossypium hirsutum
  Clone ID: LIB3166-006-P1-K1-F8
ggaggtttttaggttattttttatattaacacaaatataactattcattctgggtgaaatgactataacttcatggttttccccaaaattattgggggggccttattaaaaatctttgagatttgatattcaaaattctttaggctactctaaaaataattcttacttgttttcaaaactgccaatttttttgaacaaattttttttcaatttttcttgttttattctattaatatacacccatattaataaataatttagtatttaaatttctttactaacatatatttttt

SEQ ID NO: 26299 - DNA, 316 bp, Gossypium hirsutum
  Clone ID: LIB3166-006-P1-K1-G10
cccacgcgtccgtaaacaaattttaaaaaatatcaaaaaaattacttaaatgatctaataaggaaaggaaaaatgacttttaaaatctaattaaccattaaaaatacataaaatcacataattcccttatgcttcctataaaaataaatgttggggacccacttcagagtttcttttctttcttaacataattccaacagcatatatttttatttatctcactttacagcataaatcaccccagaattataacctgtttcttgagaaaaactctatttttcccacctttaatacttgtttcatcctccccgttttt

SEQ ID NO: 26300 - DNA, 346 bp, Gossypium hirsutum
  Clone ID: LIB3166-006-P1-K1-G11
cccacgcgtccgtaagctttactgatgttactgattcagttggcttccaacctgatgtcggtactttggcatgtggtcttgttgctgatggccagctcatccatattcaccaatatgcagttaggctttgtttgcctactaaggctgcccattctgaaggtatcattatgtcttctgccgtctgcataacttggaccccagataatatgagtatcagtcagggggcagttggccaaagttagatagttgtctccacttataatccatatttccgttttattcttaggggtcagatcactatcatgcatataattactaaatatatgaactgcagcatgtaggattg

SEQ ID NO: 26301 - DNA, 291 bp, Gossypium hirsutum
  Clone ID: LIB3166-006-P1-K1-G8
cccacgcgtccggcagaatttgaacctaaatcttgccagtttcaatgcccaattctggtccgaggccctccccttttggtcaacaacctccctttcctcaatctggaggttcagctggattccccggtgccttgccgccaatggcacggtctggtccgtcacctggtttgatgggaatacctgcagtgcctcctactggaccaccacaatctgctttacctgcaaatgtacccccagggagaccccttggtcaacctttctggtcacttcttccccttttgggtttagacc

SEQ ID NO: 26302 - DNA, 359 bp, Gossypium hirsutum
  Clone ID: LIB3166-006-P1-K1-G9
aaataaaagaaaatgccgtagaattacttagttgatctgaacgagaaggaagagtgacttttgtatctagttaaccattaagatgcataagatcgcatattcccttatgcttcctatgaaatgaatgttttagaagagtgctgtgtttattttctctcttgacataagtagaacagcaaatatttctatttatcttactttacagcataaatcactccagaataagaacctgattcgtgagagtaactagattcttgaagcctgtgaaactagtttcatcctccatgtatagtagcctggcacgaatgacatagttttaatctagctctttatcatgcagcgaaatttggagcagaagg

SEQ ID NO: 26303 - DNA, 386 bp, Gossypium hirsutum
  Clone ID: LIB3166-006-P1-K1-H10
ggtcaagttaatgtttggatatttcggattctagttgtttagttggacaggtttgaattgtcaactttcttttatgatccaatataatcaaattataaatgagttcaagttgattgaatcaactttttgaattcaggtattttcccgaaggcatcgacatctacttcgagaacgtctggggtaaaatgttggatgctgtgattctcaacatgagagttcatggtcgcattgccgtctgcggaatgatctcacaatacaaccgtgatctacctgtaggggtacacaatctaatgtcgattgtttacaagagagttcgaattgaaggattcgcgacagttgattactatccacatttttcgaaattcttggactttatactgccttac

SEQ ID NO: 26304 - DNA, 409 bp, Gossypium hirsutum
  Clone ID: LIB3166-006-P1-K1-H2
cccacgcgtccgctgatttgtaatgtttatttgaggatttgttcatattggttcaatatggtttccatggctggagtcattcaacgtcctttaatggcagctgctgctgttgcaatggcgtctgtttctgttgattttcctgctaaactcccatctcctacatcggatactgaaacttccatatccaattccttaccagagtccaattcatcattggttgctcttatatcagcttccaagcttgccaacttgtcttttgttactaggattcgagtaccgctacctagttttaactttccggttccgaattcaggccggaatttcgttccgaacatgctgtgttcttctattgcttcggctcctctgttggttaatttatatcagtcagctgagtaacctaaaggatcta

SEQ ID NO: 26305 - DNA, 396 bp, Gossypium hirsutum
  Clone ID: LIB3166-006-P1-K1-H5
cccacgcgtccgctcaaattgattagttagctttggaccattgtatgatattctgagatgggggaaaagcatggggattttcttatgtttagttatatagatattgcaatgatttaaccgattttaatcctgattttactgattttttaaggtttagtcttactatttcacctaatgaattcaataaattttggaattaatatatatatatatattttatgtcgtatgcaagagcatgaatgactttgatacctgggctgtggttaatcttagctcaaactttctccctttttatggactttttggctactcggtgttcaataggagtatattattaccgaatgatcatgtcgtattattaaggagatggggctttaatatttttactttcttcaa

SEQ ID NO: 26306 - DNA, 156 bp, Gossypium hirsutum
  Clone ID: LIB3166-007-P1-K1-A1
gctttgaagtgcaaaataaagggattgtgggtgtagaataagcggtgacggatctaacggggaactccgttttctctttttaccgctattcccgacctatttttaaccccctcaaattctcttaggctccaatccaggtatattattttttgtgtt

SEQ ID NO: 26307 - DNA, 313 bp, Gossypium hirsutum
  Clone ID: LIB3166-007-P1-K1-A2
ggttgggttagagctgattcgtaaggtttgcagaacaaatcgtcgggagaaagggaagtagataaagattattatatctttactaaaagccccctcaactgcagttacttatgaatgtgctggcacccatgtttctatgtgaagtgctcctactgctattagagctgctgcaaacacttattgtcaggtttttgtttcttacagcgattacaatgtgcagcttattgtgctagatctgacgaatgagcccaaagcttttcatcgagataataacgctgattcgatcatagatgtgcttagggcactttcaagt

SEQ ID NO: 26308 - DNA, 388 bp, Gossypium hirsutum
  Clone ID: LIB3166-007-P1-K1-B1
ggaaacccggcgggacgccacgcgttcgaatggttttttatatcaaacccatatccattttatgaccattacccatcaatcaagacatggcatgctctggattattgtttccaaaggaatcccatccataaacttaagagacccaaaggccaaaacgttgataattcaagcttgccaggagtttgggttcttcaagctgcttaaccatggcgttcctattgaaaccatagccagattagaagccgaagctcttaacttctttaatcttccccggtctgtgaaagacaaagccggtcctgccaacccctttggttactgcactaaacggattggacccaatggagaattgcgattgattgaatatctccttattaaacaccgtcaaaac

SEQ ID NO: 26309 - DNA, 235 bp, Gossypium hirsutum
  Clone ID: LIB3166-007-P1-K1-B3
cccacgcttacgcccactctttcgctcaatctttgttgttcttccaccaaacctccagtggcgaagggtgttgagattagatccggtcatcactcgcttacatatgattactgttcgagagtcttccataaccgcttctaatggaagtcttagcgcgatccctaactgaacagcctgcaatcctgtctacgcttctgcaacaaacagagatgttaccttcccgctgatcattgtc

SEQ ID NO: 26310 - DNA, 416 bp, Gossypium hirsutum
  Clone ID: LIB3166-007-P1-K1-B4
ccaaaatccagaatcctttcctatcttaaattttcattcgggaaacctccattactttctgttctgtggtccaacattgggtttcagcttttaaacgagtttcgttactaaaagtaatcatttcgtcgccattttttttggtgagattatgctaagagttttgacgacggtgacaagatccgaccaaaaacaacaaggaagcaactgtacgatggctttttctggctttggaattgggggattactgttgatggtggctttggcggcctccatggtgtttctcccgttgatgttgccgccgttaccgcctccgccattggtgcttttgttctttcctgttgggatcatggcggctctcatgttcttggcgtttttcccggcagaggttgtcggcaacgcggttgctagttctttat

SEQ ID NO: 26311 - DNA, 385 bp, Gossypium hirsutum
  Clone ID: LIB3166-007-P1-K1-B5
gtaaaattctgcagacccacttttactgaccattttttaagcatacccttaagcgaaaacggcgggaaatggcatccacaccagaaaaattgctgattaatcttttgaagaagaaggagaagtagcagagattggttctttatggctgaaaatgaacgaataggcacggttagatgctgagcaagagcccatcttgtcagaattttactacagtctacttttgtcttagaattcactaaaaacgtgctttgggcaataccatttgttaaacaaagttaagcaatttaagatctttcaaggtgttactctggttgatatattcatggaggttgttttggaagataaaggtatggtaaaagctggcttgggagattttaaagctttt

SEQ ID NO: 26312 - DNA, 407 bp, Gossypium hirsutum
  Clone ID: LIB3166-007-P1-K1-B7
gctactcttcatccaggctgctattcaatctgttctctcactcaggcaaatcttgatgtggatctctgggccttggctaaggcaatgtctaaactacagtacccactacactacaaccttaacgctaatgtatctgctaagaggtgcataatatgggacagtgtattttcaaaggccaagaaactagcaatgatgcttgcaggagctaatgagaaacacaaagctgatcacatactaaaacgcctcttgaactggcgagatagccctccagaacaactgataggactgccaactacactaacgcttgcactgaaaaacacgattgagtacgggactgtggattactggcgtgaccaaactctgactgcaaatatggcattcgtgagagcagtagcacatatagggat

SEQ ID NO: 26313 - DNA, 413 bp, Gossypium hirsutum
  Clone ID: LIB3166-007-P1-K1-C1
aatccgaacctgttgcaataaaaggcccctatggtctttaatctttgacctttttgagatatggcaacctacttttggttgctggtggaattgggataacaccatttcttagcatactgcatgaaattgctgcaactcaagggaatggcagtagcagatatagattaccatccagaatccagttgatatacgttgtcaagaaatcacaatacattggcttgttaaaatcagtttcttccctactgcagaaccacccctcaaacaaatgtcatctgaaactaaaagtttttgtcacccaggaaaagcagtgtggtgcaacactaggagaaatgcttaatgaggcatctcaagtgcaatgggttcatttcggcttaaaaggtccaatttactcaatacatggaccacaaagcttg

SEQ ID NO: 26314 - DNA, 349 bp, Gossypium hirsutum
  unsure (1)..(349): unsure at all n locations
  Clone ID: LIB3166-007-P1-K1-C3
cccacacaatcctccactcatacgatttgtttgatttttacatgngttatgtcggaatggtagtggtagttctcaatcctgatctaattaaatcttttacgaaacccaatttacaattatttatttactaagcccgtcttctgcaacttgaatcgattgagcataatgaatccactcaaaaaacaataccttatctttgtcatgataaaatgaagaataatcacatatatgatcgcaagagtaaaaattatgcaaaatgctcaattgataattttactcagatgttcatcatttatcaaaactggcaattccgttgctttttacaatttttattatttaaaggctacta

SEQ ID NO: 26315 - DNA, 413 bp, Gossypium hirsutum
  Clone ID: LIB3166-007-P1-K1-C7
aaatttcaatcccaattcccctttgcatggcaaaagagttgatatttttcttggtttttgttgttttttcatcgaacccagttttttctcacttcatcttcaacgggtttcatgattcatgcgaccaaatgagcttaaatggagttgcagacattacaaagaatgggttactccgtttaaccaatattagccaacgtgcaattggcagagctttttactcatctccttttcagttcaagaactccagcaatggcaaagctttttctttttcaacagcttttgctttcgccatggctcctgcgtacccaacccttggcggccatggccttgcttttgttctttctccttcaaaagaaattgcaggttatcacagtcaatatctaggcttgcttaatccaagtaatcatcatggg

SEQ ID NO: 26316 - DNA, 305 bp, Gossypium hirsutum
  Clone ID: LIB3166-007-P1-K1-C9
caagaacatatggcagcatgtggttcgaaagaggaagaatgagtggaaggagtttgagcggtcaggaagtgtagaagaaggggaccggcagcctaaacaatctgacgatgcttattactcgtccttggcttatgaaaggaacttgaaaggcttaaaaaaaagaggaaagatgaggaagaggaaaccgatgagagggatgatacttctacgctgaaaaagccgagggttgtgtggtctgtcgagctccatcaacaatttgttgcagcggttaatcaactaggcattgataaagctgttccgaaaaa

SEQ ID NO: 26317 - DNA, 406 bp, Gossypium hirsutum
  Clone ID: LIB3166-007-P1-K1-D3
cggacccgtggccggacccttgggtggaactgttggtcgtggaggattgggcaagctttgcatgcgaggaagcaattccagtcgtggagtgactactgttggcctgagggccatttctcgtgggtgtccttctctaagggttctttccttgtggaatttggctactgttggagatgacggtctttgtgagattgctgagggatgtcaccagctacagaagcttgacctttgccactgtcctgctattactaatgagtctttgcttgcccttgcaaagggctgccctgatttgactgatctgaccattgaaggttgtgcaaacattggaaatgaaggtatccaagcaatagctcgctgctgtcccaacctaaagtctgtttcgatcaaagattgcgcccttcttgga

SEQ ID NO: 26318 - DNA, 422 bp, Gossypium hirsutum
  unsure (1)..(422): unsure at all n locations
  Clone ID: LIB3166-007-P1-K1-D6
gccaacaaccccttaattcccgcaaaaatggcccgccgtcccgcccgttgttaccgttcgggcaggaccaagccgtaccccaagtcgaggtccaaccgcggtgtccccgaccccaagatccgcatcttcgatcttggccgcaagcgcgccaacgttgacgacttccctctctgcatccacctcgtctccaacgagtatgagcagctgagttccgaggccctcgaggccgcccgtatttgcgccaacaagtacctcgtcaagacctccggcaaggacaagcttcacctccgcgtncgcgctcaccccttccacgtcgtccgcatcaacaagatgttgtcctgcgccggtgccgatagactgcagaccggtatgcgtggtgcctggggcaagcccaacggcactgtcgcccgtgtcaacattgg

SEQ ID NO: 26319 - DNA, 407 bp, Gossypium hirsutum
  Clone ID: LIB3166-007-P1-K1-D9
tcttaacctcccccatggccgaccatgggttcatcggggggccctccacgaccataccacgaacggcggccggtgctaagcgaggcgggctctctcggccctcttttctgtaggttcaaaggtggaacctccataaccagtagcaacgcaagaaaagggggggggacccttcggttcttcgctctccaccgtggccaatggtcaaacccctaggggttcgacgaccttcagatcggtgagaagacgccggagcgcacccaaatggtggatcgaaggtgcgttttttattactattttattcttttattattatttcatatgtaaaaaagaaaaaaaaaggaacaaagcaaaacggggtaaaagaaaataaagattggaaattgaaacgcaaacaataagatcaactt

SEQ ID NO: 26320 - DNA, 264 bp, Gossypium hirsutum
  Clone ID: LIB3166-007-P1-K1-E2
gaaacctataatttactaactggcaagacttgatacattgaataacttgactgttataactgaggggaacggtaaaaacaaaaggctaacaaccttgttcaaccttttattagatgtacccttctttaatcccttgaaatgaacggatttaaaaaaattggttccattaataatattcacgcactttataacatattccaactctagggcccaaatctttttttattctcgcatacaaaccttttcccctaacacgcgaaattt

SEQ ID NO: 26321 - DNA, 408 bp, Gossypium hirsutum
  Clone ID: LIB3166-007-P1-K1-E8
cccacgcgtccgtttccacgtaaattctgttgtcttgttttacattcatattgcacgataatgttgctcattggcacttcaacaattacgctgaaatacatcttagggcagattttatatgcctatagcaggtatgaaaaaaagataccattttctttcccattgagttacgccatctttgctgagttacttctatatttagtttttccacttctcttgtccttgcaataataattacttgacgatagcctatctagttccatgttaagttctctttgcaggttgaagcctctcacctggaaaggaagtctgaaatgttttgaatttaggttgtgaatatgtaaattcatgctcactgcttgagtttagaaaactagttttctttttggttttttacaaatataaaat

SEQ ID NO: 26322 - DNA, 190 bp, Gossypium hirsutum
  Clone ID: LIB3166-007-P1-K1-F10
ggactgacaaatatagcagaagaagaccacaacccacccacacacgcacgggcacacaaaaaaaaaaaaagcagtcaaaacttgttcttattattaaagaagaagtgagcgaaaacgtttccatgaaaaatcatcaaagctcatcggttttggcgtcggccaccaaatactgcagccaagttggtttgat

SEQ ID NO: 26323 - DNA, 383 bp, Gossypium hirsutum
  Clone ID: LIB3166-007-P1-K1-F3
ccgcccacccttccttttaaatctttaaaatatttttttttcataagaaaaggaaaaggtcccgcatgtgtttttcctacctccttggcaaactccaaaactagaagaccttcactgcaaccctgcttatctatttaaaagcccatatacaaattttttattaaaaagtccatgttacaaattctctcccctgattatatacctcttgattaagaccatgattttaataaaaacgaaaaacactctctattaaatctctttaaccttctatacattttctattacatctcctatacccaaatcttaaatctaattttcttataaattctttaaaatatacaactttttcctttttttatccaattttttactatttcctaatt

SEQ ID NO: 26324 - DNA, 377 bp, Gossypium hirsutum
  Clone ID: LIB3166-007-P1-K1-F6
ctcacacttacgctaaaattcaagacaaggaatgcttccaaccagacaactaccgcgtaagcttggtcgaaaaccagctcgcggacggccataccttgatcgattacaacattcacaaggaatttaccctccaccttgtcctgcgtcttcatgggggtatgcagatcttaaccaaaacctaaaccggcatgaccatcaccctctaagtcgagagctctgacaccatcgataatgtgcaggctaagattcgagtcaaggcaggcctgccaccagaccagtagcgtgttatatacgtcggaaaacagcttgaggacggccgttccatgatcgattacgacatccaaatggaattcaccctacaccttgtcttacgtatt

SEQ ID NO: 26325 - DNA, 412 bp, Gossypium hirsutum
  Clone ID: LIB3166-007-P1-K1-F7
ggcttagtgggttatgctgtgatgaaaactgttcaccttataatgaatctgtaggcgatggactcagagctttgctaactccaaaacttgccagcatgttgagagatcatgtaccaaaagacctactgtcgaagctgaatacaaacctagagtcaccagagataatctggaactcttcaactcgagcagaattgctgaaatttgtggaccatcaaagatctagccaatgcccagatggttcgtatgacctgaaagattcttatgtctttgcctatgaagcactgtcaaaggaactttttgttggcaatgtgtatttgatggtttataatgatcaacctgactttgagatctgtgaaccagaagcatttctgtgtggctttaattgactttatagcttttctagtgcacaatc

SEQ ID NO: 26326 - DNA, 326 bp, Gossypium hirsutum
  Clone ID: LIB3166-007-P1-K1-F8
gcctcttaaacctcaatacatacatgttttttttttctaggtgaatgaaggtgagggtggggcttcatgggcaagcaacttccagacagattttccatacgtctctatgttcagaaagcatgttgttggtaaatacaccatatcattcggtgagatcaacacctcaaatggttggtgctcaatcaatctacatggcatctgtaaaaggaaaagttgcattttgacccagaattcctacatcacgggctctctgattcgaagtacgggcgaacgttcttttcaagatcgtaaactccgacgttgatcataagtacttaattcaggag

SEQ ID NO: 26327 - DNA, 402 bp, Gossypium hirsutum
  Clone ID: LIB3166-007-P1-K1-G11
atcagttctaatcatctcataatgtttttttataccacaacatgtttctcatcagggaggcagccttactatttgacaacttgtgatcttgttatgctgtctacgaactacatccaaaagggtcttctctatgccaaaccagaggataactgtgaagaagacttgatcaacaatgtcttggatcggctcaagcagtccctttccatagccctcgttcatttctatcccttatcaggtcggctcgcatcgaaaatttaagaaaacccaaagtcttatttcttctttttggactgcaataacagcccaggagccaaatttatacatgcagcttgtgatttatctgtgtccgacaattgttcccctacttatgttccgttgtgttgttaatccttttttgaccat

SEQ ID NO: 26328 - DNA, 167 bp, Gossypium hirsutum
  Clone ID: LIB3166-007-P1-K1-G3
aaaaggcttggtttttttcttttcaccaggggaaggttctttggaaatggaggaccattaccgccattcctaagctaatcctccttaatcctattttccaaaaccagggaggttttaccaaataatggcttctggctttaatttcctcttcaaccatagcttttttt

SEQ ID NO: 26329 - DNA, 404 bp, Gossypium hirsutum
  Clone ID: LIB3166-007-P1-K1-G9
cccacgcgtccgaatagagagagagagagagagatcaaatttagtttttttatatgggtggtttttgagagtaaaaaatatatatggagttggaacgtaagaatggggaatggataaaatcgggaagctgtgatcttggtcttagaagaataaaggtaagaaaagaaagcgttgatgaggaagaggagcccttgagtcccatggctcgtatgttccaacagcctgaatccaacgtctacattattgctatgttgggatttaagagccccattgacccacactttctcaaggttgcagatgagaagaatggtggataggtgaaatgggtgaaaacaaaggtagacttagataatcatgttaaaatacccatggttgatcaacatatggcctccccagatcagttt

SEQ ID NO: 26330 - DNA, 150 bp, Gossypium hirsutum
  Clone ID: LIB3166-007-P1-K1-H6
acccacgcgtccgcagagaggtagttatttaatttgttgcacaaattattgatggctgatgttttgaattggagtaattttctgaataataatggattgatgttatagcgagacattttattacttatatatgttttcaatattgtttct

SEQ ID NO: 26331 - DNA, 168 bp, Gossypium hirsutum
  unsure (1)..(168): unsure at all n locations
  Clone ID: LIB3166-007-P1-K1-H9
cttgccttgcccttttatttttccttgcagatcaanattatcctccatgattttgcgtggcaggtttcttgcctccggatctgttgcgtccctttaccaactttgatttgatgtaagattttctaccctaggggtttttttggttcccgatctatgttttacattgct

SEQ ID NO: 26332 - DNA, 301 bp, Gossypium hirsutum
  Clone ID: LIB3166-008-P1-K1-A10
ggcactcgtacatgggtcagttgatactaagtttagcggaagcccatacacagagggtacagaacaagcttgaaaatgcaataaaattaaaattcatgaaaccgacacacagagctgacaataacgtgaggcattaccctgacctacaaggatgcctatggaagagttatttctaatgattaacggactgcccaccctataaactgctcagaaccgaagtagggtccaactgccagaatagcaccgatagcattcgtgctgtatcgaaacgccatatgatgtccttgaaaatccttaagac

SEQ ID NO: 26333 - DNA, 390 bp, Gossypium hirsutum
  unsure (1)..(390): unsure at all n locations
  Clone ID: LIB3166-008-P1-K1-A3
aatcnaaacaagggatgaatgaattcatattttaaancgngagnatcggtcgggtgcggcaccgtaatttagttcaactcttgggatattgccggcgtcaaggtgagctacttttggtctatgactacatgccaaatggaagtctggataagtacttgtacaaccagccgaagctcacccttaactggagtcaaagattcagagtcatcaaaggtgtagcatcaggattgttttatctacatgaagaatgggagcaagttgttattcacagggatgttaaggctagcaatattttgcttgatagtggactaaatggaagattaggagattttgggcttgctagattatatgatcatggaactgaaccacaaactactcatgttgtgggca

SEQ ID NO: 26334 - DNA, 403 bp, Gossypium hirsutum
  unsure (1)..(403): unsure at all n locations
  Clone ID: LIB3166-008-P1-K1-A5
gttataacaacggttagttaagttccggcatatcttaaacagctataagataaagtatacgtgtggtctgtggttgctgaaaccggggtcttacaagtaactaatacggttcctttgaacttgaatagttggacagaagtgtactgccggatgaaaccattgttgttgtagttgtgtttgttgatgagtatttttagattcttattgcttaatatcatcattatgttcttctcatcctgtgtaaatggccatcgtgtaatgcaaggtgcagggcttctgattttccaagggaatatgacggtgaatgccttcaaatgagaatgtcatacagtccggctgcacacctntttctattcttggtgcagtggactgactgtcaccttgcaggtgcactcgggctgtt

SEQ ID NO: 26335 - DNA, 246 bp, Gossypium hirsutum
  Clone ID: LIB3166-008-P1-K1-A9
gccactcgtacatgggctcgtggactctaacatacaggggacgcccggccagcagaggcggcagggttagcttgaaaatgtaattatcttaaaaatcctgaaccggtgacgtggttgctgacgagcactgtaggaaatacatagacctcggacgtggcctgttaaaaagacatatgaagtgcttaatgggctggagacgctggaaacaggtcaatccactgtcagcttcactagacagaatagcac

SEQ ID NO: 26336 - DNA, 293 bp, Gossypium hirsutum
  Clone ID: LIB3166-008-P1-K1-B12
ctcgcctccttatcaacacttacgctatatgaagagatcccaattcatgggataatccgcttcaatttaatcccaatagatttcaagattcaaacattgatcttaaagatcaagattttcggtttttaccatttggcggtgggagaagaggttgccctggttatactttcggtcttgccaccgtcgagatcgcacttgctcgcctcttgtttcactttgactgggaattgccttacggaattcatactgatgatgttgatgttgatgaaattttcggccttgcatcgaggaaa

SEQ ID NO: 26337 - DNA, 296 bp, Gossypium hirsutum
  Clone ID: LIB3166-008-P1-K1-B2
catgtatcagccattcaagagaccattttccttccaatatcaacctttcagatccttcatgtctggcaagatttcgagctcttcgggcaaacaaaactgctaagcccggactcttcttttccttctatctttcgacaacgccgtttcttctatcttgatttactaagctttccaccgtaggcggcgcctcctcaatcaagaatcgaggaaactcgtaacaacatccctcttttgccatttcatgagctactatgttggctacccttgagttcaacttgcgtactatggttagcacg

SEQ ID NO: 26338 - DNA, 403 bp, Gossypium hirsutum
  Clone ID: LIB3166-008-P1-K1-B4
cggacgcgtgggcaaactccgaaagaggttccctttgtttccttatctaccatattcgctgctttgaatttttttgctgtttttcaatgagtaccactcttaaatcaagcttgctttgttttattgctgttgtgggaattgtggctgcggctgttaccattgttgtagttgcagttccagaaggattgccatttgctgtgacaatgattttggcttatttggggaagagaaagatgggagatccagcaatggtgagaaagctctttgcttgtgaaacagagagctctgccactgcaatttgtactgacaaaacaggtactcttcaagtgacaaaattttgggttggtcaagaatctatggaggacggaggtggttcaatttctccatttgttgttgaattgat

SEQ ID NO: 26339 - DNA, 337 bp, Gossypium hirsutum
  Clone ID: LIB3166-008-P1-K1-B5
gaaaacccgggggggccccacgcgtccgaggaaatttattaacaaaatcgttttgggtttgctatttaaaaaaaatggaaattggggggtgcgtgttttggtccctcactggaaaatccgggccttgtatataaaattttctcaatgacacccaaattttccgcttcttgagatcgaaatgccacaaaaactctaagatgaaaaggaatcccctttcagtattaatggaccaaggcgtttatgcgtttttttgtgaaggacatttctcacgattcaacatttgagtttttgagaaaaacctaatatgccctaaagatattatattaaccttgtagag

SEQ ID NO: 26340 - DNA, 190 bp, Gossypium hirsutum
  Clone ID: LIB3166-008-P1-K1-B6
gtagggttaagagtatggcatctgtgccaagatttatcgagggaatgtcctcagataatatgagaggtttggatttagccatttcttccaattaatccattgctccaagtttcattgttaaaaaaaaaggctcgaaaaaggcttttcctcctggcttcaggccaaaatttgaaggttttacttactttct

SEQ ID NO: 26341 - DNA, 258 bp, Gossypium hirsutum
  Clone ID: LIB3166-008-P1-K1-B7
ctagctttaaacactatctcatgtcaagaagattgactggtagggaagaccaaaggctacagacttaacattgaccatcataactcttcccaacaaataacacattagcttatatggattatacaacacaatacttggagaccacaaagaggactaccataaagagccggatctgatcttcaagctatgctctttgaacacttgctacacctatatcctaaacactgagacacgcacatgcttgctaaacaaacaatg

SEQ ID NO: 26342 - DNA, 313 bp, Gossypium hirsutum
  Clone ID: LIB3166-008-P1-K1-B8
cacgatcccaacctcatcagttaaatacacagatgtaaatccgactccaaccccgagcacggagttctattcccagtcaccgcaccactcattcagacaaccttaataccaaccatattttctgcctcaatacacatccgcatatccccctccaccatgggctgcaactcccggttatttcaacagccaaaaccaccgctcttctacaaataacatgatctccactccccaagtgaacaccactgcatcaaattccattacagggcccagacccttgcagcataattgctcattccccataagaggaaccaac

SEQ ID NO: 26343 - DNA, 339 bp, Gossypium hirsutum
  Clone ID: LIB3166-008-P1-K1-C1
cccacgcgtccgaattatcttaatctttccaaaaactttttctctggtcacatacatatcgattgtgggatttggacgatgcatcgccttcgatctctgcatctagctaacaattcatttgctgggccaacaccagaaagtcgtggtatcaataccttacttaaaaatgatccattcacaattgaatggcttgttacgatcaaaaactgcagatactggactatgtagcgatctagattcacagaacgtaagccataatcttttcaatggaccacattacatattctactaacagactaacattactggtggtctacagattatcaaattacatgttca

SEQ ID NO: 26344 - DNA, 399 bp, Gossypium hirsutum
  Clone ID: LIB3166-008-P1-K1-C3
cggacgcgtgggcaccggcggcggcggatatggcggtggggaagaagctcgacgtcggaaggaaatctccatgttgctatcggatcccctcgacgaaggccttggccactccttttgctacgtcagacccgacccaacccgactctcttcgtccaaggtccattccgaggaatccaccacgactttccgtacgatctccggcgcctccgtcagcgccaacacgtacacgccgctctcgacggcgctggtggacccgtacgtcagctacagcaacggctgcttcgatagggcggcggctttcgagagcaccacatcgttttcctcgatcccgctgcagccgatccctaagagcttgataaattcttcccgtcccatgtccggtagcctagtttcaagttc

SEQ ID NO: 26345 - DNA, 399 bp, Gossypium hirsutum
  Clone ID: LIB3166-008-P1-K1-C4
cccacgcttccgcccacgcgtccgcccacgcgtccggaccttgctaagattgcaaggaacgatggtaaaaccgtcctccattcagcggcaagaatggggcacttggaagtagtgaaatctttgctcagcaaggatccaagtacaggttttagggtagacaaaaagggtcaaactgcactacatatggctgtgaaaggtcaaaatgaggagatagtgctggaattgtttaaacctgacccttcagttttgggcttggaagactgtaaagggaacactgcattgcatattgcaataatgaagggccgtactcagattgtacgttgcttgctatcggttgagagcataaacatcaactcaacaaacaaggcttgagaaagcccacttgacattgccgaaaaa

SEQ ID NO: 26346 - DNA, 163 bp, Gossypium hirsutum
  Clone ID: LIB3166-008-P1-K1-C6
gaaaatacttatttaaatacttaccgaccggttactcagcatatcgtaacggacgtgggagcggcggctgttgttggatatttgatcatatcctgatccaaatggctgaggacatgtataaccttaagaattcggcggtgaagaggatttttcaagatgtcaa

SEQ ID NO: 26347 - DNA, 403 bp, Gossypium hirsutum
  Clone ID: LIB3166-008-P1-K1-D12
gaattctccaaaagtgttacccccaatgtatgtttgtgaaataagtgatcaagaagcgggggagaatattcctggaacagaagtcaatgcaaaacctagtgttgttccaagggacaatcctattggtaaaaactttagcaattctgtaaaagaatccatcaccttttcaaagacaaaaccaggcatgctgctcaaaccagctcatgttaggagaccatctgtcaacatgtttgaggttgtaaagctgtctgctacagttgattcaggaactcctggcaatgtaaaaagcggtttatacattgcaacggatctgaattctcaaagtaggcttgtattagaatgattgagtttgaaaattatgtgatttaaaggactcaaattattcatagtgttttatagaaat

SEQ ID NO: 26348 - DNA, 274 bp, Gossypium hirsutum
  Clone ID: LIB3166-008-P1-K1-D8
taacaacattaccaccctcacattactctttacttctttttcctctctccccacaatgcggcgctttctaacataaaccatttcatcttcttccacctccctaatcaattcaacttcacttcttctacctaatctataccacctatccatattcctctttcttcccttattcacacctaaccactttttaatcttttaatttcactttcttatctcttaaactttaacaataccaaccaatatccccttttctttcttttttacacatacttat

SEQ ID NO: 26349 - DNA, 302 bp, Gossypium hirsutum
  Clone ID: LIB3166-008-P1-K1-D9
ctcactttctctcccttcctttccttcatttttatttctcctttctcattttcactgggggaaattattgaaacaaatttgctaattttctcccataaagagatgaaaaattttcatactattactgtcttttcaacatttctgatgtttctacttttttcattactctcataaaaaactattaccattcccataatatgcaccccttgcctacaactattttcattttctccaacacttttttcactctcatcttcatcttcttcaccttctccccttttaaccttatctactttccacca

SEQ ID NO: 26350 - DNA, 373 bp, Gossypium hirsutum
  Clone ID: LIB3166-008-P1-K1-E10
gacccacgcgaacgctcatctttacatccatattcctacaatctttttttccacatgcttatacaaatgctgcggacttattttcttcccccaatcaatacttttacattcaaattcattaacaaaaactttataaaattctctaccattactctactcatttaataacacattttactattacaaatttttttacaatcctacaaatataaatttttttacaatttacacatatttccaaaatctaaaattttttaactattaataatcattatcttttaccatatataataactttttttcacttcttcttattcattctctatttttttgataataaatttttttaacatattaacccttctatttttta

SEQ ID NO: 26351 - DNA, 402 bp, Gossypium hirsutum
  Clone ID: LIB3166-008-P1-K1-E3
ttcaacttttagcagaaatccctaactcccttctcccaatctgccctctgcaacttcgaggtccgttagtcagcctctccctccgtcgaacgctccctccatcgctcactccattgattggtgtgttcagtcgattaatcagtcgctgtcatctccactggaggattgacgtcatccacgttcttcagagcatgtttctcatattgagaagatccaagccaagtcaaataaggtaaaactccacaacccattatagtttagaaagtcatgaccatgttgaagcgttttgagttccttaaatttcaatgtcgtgcatttttgcatagtaatgaaatacatgccttggtagtgattgggtcttctgcgtaccaaatagtatatacttggcagataaagccatgt

SEQ ID NO: 26352 - DNA, 353 bp, Gossypium hirsutum
  Clone ID: LIB3166-008-P1-K1-E7
gacaaatctaagccacaaagggctgaatcttatttacaccatgcactaacaacactctgcgtcttacaaaatccacaaatatgctataaccttatattaaccatcatttcacacctatataaactctaaatacaaaacatttacatacaacgccatagcatatatctaaataatcatacgcctgccctctatcttatgcgatcatcttcaacaccaatcccaaattgataacccacactacactcaatgtaactctaataaccatcaaaaccacttctacgctgatggtaaagatctcgagattccacaatttggaaccaagggcttcagcacacatggctgattgtatctaa

SEQ ID NO: 26353 - DNA, 175 bp, Gossypium hirsutum
  Clone ID: LIB3166-008-P1-K1-E8
acaaatccaatctaaatattccttaattttttttaaacctttcaccatcaccaccctgccacttacttactacacatacttcacataaacacaaattaaccatcatttcacctccattaataaccctcacaacataaacatatccctttacatataccacatctatttatcacat

SEQ ID NO: 26354 - DNA, 392 bp, Gossypium hirsutum
  Clone ID: LIB3166-008-P1-K1-F10
aaaccaatcacacggatataattcccccttcttatacctaccatttctgacctatgggcggtggacacattaatagctccctacaatctcatcgactggccccttctatccatttctttgctttctcttacgctatcctccagaccactctattacaattactgcgataataaaggtcactacttactcaaagctgacacagtcagcatatcacctaatcctgcgattacgcgctaataccggtcaccttcacgatctcagctcctactggatacgctatcactgatcccaaagcgggcattgacgtttacttcttccgtttttatatccatttaaaaaactcattactctttttaggtaacatcttgtcctattactggtgccaacttttt

SEQ ID NO: 26355 - DNA, 275 bp, Gossypium hirsutum
  Clone ID: LIB3166-008-P1-K1-F5
gagtaataaactcattgattagctatgccatttattttcctaagccgactcctattggtgcagcctacttaacttgttgaaacctcctcctctatgccaaacactgattcatccaactaccaatgcctcctttgcaccatattgctgcttctttcacccacactatcaaagctctatgagcctttctttaacatctctgctttccatattatacttttacaatcaattccaatcactctatgtctgtctatagctcctgtttatattggtttact

SEQ ID NO: 26356 - DNA, 159 bp, Gossypium hirsutum
  Clone ID: LIB3166-008-P1-K1-F8
tccactcttactactacgattacctccattcctctttcagggaccttcctataccaggacgcgatttatctaatcttcatttttcaatcaaatttatacattccaatactaaacgcttgcataatagttatctacaagattttaactacatatcacata

SEQ ID NO: 26357 - DNA, 435 bp, Gossypium hirsutum
  Clone ID: LIB3166-008-P1-K1-G4
ggaaaacccggcccgacccacgcgtccgcagcaaccacaaaaaaaaggagagttaaaagagtttttaaaaggaatctgcaaaagaaaagtgagcaacttgtacaagatttggagcaacattgaaggatatagcaatggaaaggagagtgaattacgagaatgatctcaatctcatggcaactgagccaagattgggattgccttgttgtggtgatgatgagccccaaagaaaaacaaatcccagtatcagaaataataaaagaactgtacctgagatttctgaggtatcgagttctgagagcaattctagcattacaatgtctgggagtgatgatcaagacagtccctctcctgccaaggaacaagttgtaggatggccaccaatccgttcaaacaggaaaaattgcttacaaagttccaagagaaatgaagttg

SEQ ID NO: 26358 - DNA, 332 bp, Gossypium hirsutum
  unsure (1)..(332): unsure at all n locations
  Clone ID: LIB3166-008-P1-K1-G5
aagcaagataggacacgataaaacccgntttttttcttcttcttcttattgttcttgtgcggataatttaatattaaagattaaaagttaaagacttcgaaacaaggattcagttggatatctgatcaccatatactgatagtctgataccaaaaagggtttttaataggcggctgagtcggtatcaatctttgaattttgccgtgaaattgcttcttgaactttggaatctgccttttggtggtttgggtgcatggcaagccttgtgggtggctttttatttttataccttttaaagcttagtatagggaaatataaaactctcttttcaa

SEQ ID NO: 26359 - DNA, 272 bp, Gossypium hirsutum
  Clone ID: LIB3166-008-P1-K1-G8
tcgatataatcaaggagtttctcattcactctttttctagggcttccccaacatgccattgatggggtcttgatgcttcatatggaaatacttagtgaattccttatggggggttgatgatacattgacttgtatgctatctcacagattatatcacttcaaaaactattactgaacaaaattttttaacatcacatattttttccaaatcttatttcatataattaatttaataattaatttattataattaattttaaatatttcaattt

SEQ ID NO: 26360 - DNA, 195 bp, Gossypium hirsutum
  Clone ID: LIB3166-008-P1-K1-H12
acgctttcgattgttttgaaaaaaaaaaaggagtttattttattttcaaaaactatgggaatgggtgggggttctatcgatagagtccgggactgaaagcattcttaacatctagccttcatgcaaatccgccaaagctcatctttcacacatcgcatggaaccattatcgattgcttttttctttccctttcca

SEQ ID NO: 26361 - DNA, 130 bp, Gossypium hirsutum
  unsure (1)..(130): unsure at all n locations
  Clone ID: LIB3166-008-P1-K1-H6
cggaatngaaaacccgacccgcgcgnccgcccacgcgtgcgttgaaagactcaaagactcttttctttgctgaaaagcctggcacttgttggccgcattaaataccctgaggaggggccatagagaaagg

SEQ ID NO: 26362 - DNA, 214 bp, Gossypium hirsutum
  Clone ID: LIB3166-009-P1-K1-A10
cggacgcgtgggattcctttctgatttttctcctcactttggtttcatcttctcaaaataggggatgctgctaaatggtcacaggattttggtttggtaaagcccatggatgatatgcttcctaatacatgcacatggggaccaattgtttgagagaaaaacaaggtcaccagagcaatttgaatgcccatgatggatctttactcaacactaa

SEQ ID NO: 26363 - DNA, 418 bp, Gossypium hirsutum
  Clone ID: LIB3166-009-P1-K1-A11
ctcactcgtccaaccaataataaataaagtattataagaccgtgcatagaatattaggtaggaaggcaccttctcatggaacccatacacttttcactacttacaagactgacaaattcaatatttcccacagggtcagcgctagcacctatctaccagatgcagggcttttaatggaactgcatggacggcgcttcctgcatattatcacgcacatgctcactcctggcagatctcttatatctgatcgatctgagttctcagacactaaatcatggttctcacacaatcacagaatctaccaggctgaacactttgacgcatcctagataatatactatactagtcacgccacttgtaggatcatgcccttcgaactttggcatgttacccacacatctaacacagggagttaacc

SEQ ID NO: 26364 - DNA, 199 bp, Gossypium hirsutum
  Clone ID: LIB3166-009-P1-K1-A5
atttaattcccgttttccaatcttttttgatatatctttatgctaaaaatgtcgttcctatgggaagaagatcatcccttaagagcttagatcactaatcattcttggttgatgaatctttttcgtttaatgtttcttacgtttaatcatatgatctatgactattgctcctttatctaattatatttctataatattt

SEQ ID NO: 26365 - DNA, 143 bp, Gossypium hirsutum
  Clone ID: LIB3166-009-P1-K1-A6
cccacgcgttcacccattcgtttggccatgaataattaattattataaaacctttcccacaatcttaggaagaaaggcgccatctcatagaacccatacacttttctctccttacaaaaatcacaaattccatatttcccaca

SEQ ID NO: 26366 - DNA, 422 bp, Gossypium hirsutum
  Clone ID: LIB3166-009-P1-K1-A9
gtaaagtctgtttatttgttagcatcgctgatcactagcgcctatgcgcgggaagacatcgtgctaacatccaaagtgcccagcgactatcgtatataagctgaagttggctgaccataaaaacacgcatgcctcgtctaatattctataaatcgacacatggtagtacaaactcgatcctgtgtccgataagctttacactactcaggctcttaccatccatgctccatggccatgggttgttcgcaaaatcattggccaagacatctgccactgtgttgaatcaacattggttgatgcccaatcaaagtcaatgcaacttgcaacccgatatgtcagtcttcataagtttatagaggttgaggagaagataaggtatgatcctcacccagataatccaacatgatggaccatttgtcgac

SEQ ID NO: 26367 - DNA, 416 bp, Gossypium hirsutum
  Clone ID: LIB3166-009-P1-K1-B1
cggacgcgtgggcggacccttgggctgacgtttaaggaattggatgtttgcaactttggggcaatcccaattgtgtagcaatatatatatataatgaaaaaaaagtgttaaaaaaataattacccattttcaccaaagtttgccagaaagcaaaggaagcatgcttttgatgttagaaatccatcatctacatcaactcaacccagaaaaagaacacctttctgcccaaaaaacccaacccagaacacaactgaaactatcaaaagacagcttttttatgttccctttttaactgtttttagtttcttgtttcgcttgtctttctagttgcttcaaacagctgaggtgtatatatatatataatggagattcttgttagatgttttcaaattattgcatgagagaagagcttgtca

SEQ ID NO: 26368 - DNA, 281 bp, Gossypium hirsutum
  Clone ID: LIB3166-009-P1-K1-B11
ctcactcgtacaaccacgcgtgcgggtcagcttgcgatggatgatgcttgagttgagaacaggaaatcaggttgatctctcagaaaactagatgcccagatctgcactcctaacaaagctatgcggaccggcgcttttgctgtgagctaatcccatcaccttgcttttcgagcgaacaaaaaagatggctaaaagatctatcatgtgttaaggctgaagttttgtaggagtgaagtttccaaggcactttttttagctacccctgcctgttttctaagatc

SEQ ID NO: 26369 - DNA, 426 bp, Gossypium hirsutum
  Clone ID: LIB3166-009-P1-K1-B3
gttcttagcgttaaccgcactttcgaactgggttttttcaccataaatggtgagtctgattggtatttaggaatttggtactcttcgatcccgactcaaacccgggtttgggttgcgaatcgtgaaaaacccataaaaaatatcaccggatcttcactggaaatcaccggaacggggcggttggtggtgaaggaatcgccggattccgtcgtttggcagagcgacaacgttgaaaaagcgaaaaggtttgtttttttagagactgggaatctcgttttgtattcttcaaatgggttaaaagtatggcaaagctttgattttccgacggatacgtggttgcctggcatgaatttaaccgcccagcaagctttaacttcatggaagagctcgttcgacccatcaccggggcttttctctttgaggcta

SEQ ID NO: 26370 - DNA, 250 bp, Gossypium hirsutum
  Clone ID: LIB3166-009-P1-K1-B5
gtttgctttggtagatgcttttggggtttttcttaatttcatcccgatagaggcttctgcttctgggatagtttataggggtttcttctctgattttggagttgaagttcccttctcttaatggactaggttatgctgtataggaaaattgaatatgggttggttcattgtggattcggttcgttattttgtcttgaatatgatcaatcagattcttggctggcttccttcgaaagccatctaagtcttc

SEQ ID NO: 26371 - DNA, 359 bp, Gossypium hirsutum
  Clone ID: LIB3166-009-P1-K1-B9
ggttttgcaagggaagttctattaatttttatttacaatggaagagtggttaggtggggagcatgtcattttcagctggggatcattcttgtaattcttgttctgaattggagagatggtaaagtcccatgaaaggagtggacaagtgacaaatcaacagttgcgtaattataaataccagctttgagcatgatgttaaaaagttgcagtctcagttgcaggatgagactgatttgcacttagctctagcaagtgctgttgaacattgtggttcaccttcgtctaattctccaggcaagcttgctgatatggcccaataactcttatatagcatatctgttcttgatattacctcttca

SEQ ID NO: 26372 - DNA, 147 bp, Gossypium hirsutum
  Clone ID: LIB3166-009-P1-K1-C10
ctcacgctttcaatattcttttgaaatcttttctatccggtttccttgcccataggtggtgctttacatttgctattgcatatcccctcgaacccgaccaaaaactgagactaaatattggattggatggtttttttcaatgctctt

SEQ ID NO: 26373 - DNA, 412 bp, Gossypium hirsutum
  Clone ID: LIB3166-009-P1-K1-C11
gtttgtacgacggaagggcaagactttgctaaagcagtcccatcagacaaacttcggacagcaaaacacgtaaaacccgcatcgagaaacagagtttcttgccgcgaaaaggcggggccaagtggggtccgagtcaactcagcgcgagtcaagctgaaagcaatggatacctggggtaacgacgaccggattccgctggctcaggtggtttccgagttggtaaagggatggtttcaagaggctcttaaggaggccaaggctggtgataccaacatgcaagtccttgttggacagatgtattgcaatggctatggtgttcctaaagatgttcaaaaggggcgtgcttggattagtaaagcttcaaggagcagatcttcagtatggaatgttagtgataagcattcaggttata

SEQ ID NO: 26374 - DNA, 410 bp, Gossypium hirsutum
  Clone ID: LIB3166-009-P1-K1-C12
actagcatcatcatgccaaccccaagtggcaccgcttcgcatacatggaatgtgtcgatgagaagcagtgacatggacatagcaaactactggaattgggaagatattgatgcacttgtctctatcgatcccaacatgccatgggatgattctgagatcaaaccatgaacaaggtcttttaaccatatattccttctcttcttgtttttggttttcttatttaatgggcggttttttttttttttttgttcctctttggatgttattttccctttcttagattgttcattaatatgtatagtctcccctttcaacttgtaactgttaaaaatgagctatataggctattagaagctgccatttttcaaattcagcttcaggggggtggtgtaaattttgttctctacctc

SEQ ID NO: 26375 - DNA, 427 bp, Gossypium hirsutum
  Clone ID: LIB3166-009-P1-K1-C2
ggagatctcattggagaagattgagggcagcacggacgtcaaatatttctacgattcctacacaggccacgtcggaaaccaccgtatcctcaccgtcgttacctactgcgagatcaccgccggcaagtggcttaaacaagccaaaaaagctaacaactccaagtccctccctaaaacccttgtcgttggcttctccgttgaacgccaaaacgattactactcccgttacggcctcctcgagtttccgtacgagctactccatatctgcatcggctcacattgtctcctctaccgtttaaacgaccccgacctttacaagcctcccaagttcctcacccatttcctctctgatccggaggtaattgtagtcgggatggggatcaaagaaaaatcgagtcatttggagaaagatttccaagttaagata

SEQ ID NO: 26376 - DNA, 389 bp, Gossypium hirsutum
  Clone ID: LIB3166-009-P1-K1-C5
tggcagtagatttggagattatggtggttatggtgctagctgctgattttagcagtagttatggggggtttgccggacgccccctccctcccctgtaattccccagtaccaactgccttcctcgccctggctttctcttaacctcatcaagatttcaaggctaacaacctttactcattaaaacatttttaatcattcgtattcgacatattacatccttacccactgttaaaagttttattctcttcaatccattacctctgtcacttcctacttccttaactccatctttccttccatccactactttctctaatcctgtctacccattgacttatgatccttcttcattctcctctttcctttcttattccttatcaatctctatc

SEQ ID NO: 26377 - DNA, 417 bp, Gossypium hirsutum
  Clone ID: LIB3166-009-P1-K1-C8
cggacgcgtgggcggacgcgtggggttttatctctcctttcggaaaaataattgtgagaggaatataaaaaaaagttaatctttgttgaaagttaaaaaaaaaattcggtttttatttatttggatatgttttatttattctcgtagtagtttgttttctatttaaaatatatatttttggtggaaattggctatgtgtggaacaatttcatcacgtgcatttgaattgggattcggaactggattcgtgattagctgcggcttctttggagatgtttgattggaacgacgaagagctaaagaatataatatgggatgattctggtgagactgacagccttatagtaccttaccaagagggaagtgaaaactgttgcagtaagaaggaatggagtcaagcaactgcagtcataaagc

SEQ ID NO: 26378 - DNA, 424 bp, Gossypium hirsutum
  Clone ID: LIB3166-009-P1-K1-D1
ctgggaatatctccaactagccccgaggccgatcttaaaaattgttaatcaaaagccgcatcagggtaaatcgccacactcgttctccttttgtcagacttaggacccctgcttgcctctaagataagtgtcttcttctcaactcctcttaattctgaaatgtatcttgagatttgtgttaagatatccttgcttgttgtttgtttattttcgtatattaacttattacggcttgtccaaattatccaaagcccacagcaaaaaaggtgatattgtttatttgtcccttggctgaaaacccaagttagccagttccatacactgtcgatgttagaataaagtatccaagaaaactttaaaaaccgccatacttctgtcgttgtagggaatcgacaggatacatgattactatccttctcatcct

SEQ ID NO: 26379 - DNA, 396 bp, Gossypium hirsutum
  Clone ID: LIB3166-009-P1-K1-D10
cccacgcgtccgcccacgcgtccgcccactcgtccgattgatacatgtagccaggggtgtgaaaccttatgttatgaccaagttttggctactaccacggatgaagaacatggggaaccaacatcaggcaaggacgaaatgttggagaatggagttcctgcaacaattaatgaggtttctgaagtagattctacatttgaagttccaattagcgaaattcgagacaaaacctggaacgtagatgttgccggattgttggttgaagctaatgattctattaatcagaccctagaggaacatgaagatgctgcagatggggacactatgcacaagccaagaagcaaagctattgcaaatgaagcacttcatgaaaagctcaccacgaaatggtcgttt

SEQ ID NO: 26380 - DNA, 319 bp, Gossypium hirsutum
  Clone ID: LIB3166-009-P1-K1-D12
cgaactcttgagttcctcaataacatggtgagttgtgcttggagctgtagttggagtgacggcttgactcggcgactttttacacatctgaccctaactctgaaaacttgccatatcaccatgctcctctaatgggtgcaccatacagaacctatgctgaagaaattcctcggggcaccaaacttcatcgttcaccacttctctgaaagacttccttagtgaaataccaaacataagcctcacttactaatatgaacaacagcaaccacgtaagcctagacttgttatactaacatgatatgactccgctaacattttc

SEQ ID NO: 26381 - DNA, 408 bp, Gossypium hirsutum
  Clone ID: LIB3166-009-P1-K1-D3
aggagaacaggattgtgagacagagaaccaaaatgcagcacgaacagaacaaggaagagtaattgttttagtttctgataatttacatccaaatgcagatgcaagctagtggctttcttcacagatggatttccaagaacaattcttcaaggaacaaatcaaatttattcatgaagcaagggatgagaaggaggagaagtttgagaagctgcagcagcaacagcgtgagaagtttgtcaagcaatctactaatacttcaaatacagaggaatacaggcgtaggtatgtaattttgatgctaatgtgaatttccatgtgtaatcggatcgaaacatgctaaaatgctgctacacctccttttatttgtttattaatttgtctacatcaatcatgagataccatttttct

SEQ ID NO: 26382 - DNA, 326 bp, Gossypium hirsutum
  unsure (1)..(326): unsure at all n locations
  Clone ID: LIB3166-009-P1-K1-D4
caggagtagttaaagagggcatagcttttttgactttaatttccnaacagaactcnctatatgagaagggttattttctgaaaatttacatccaaattcatattcattctattgtcttttcttcacagatagatttccaataacaattctttaatgtacaaatcatatttattcttgattcaatggattagaatgatgagaagtttgttaatcttcattttcatcatttttacataattctcaatccttttactaattcattaaattcatataattttcatttcatttatttattctatttccttttttctttatttgaatttttc

SEQ ID NO: 26383 - DNA, 369 bp, Gossypium hirsutum
  Clone ID: LIB3166-009-P1-K1-D6
cccactcgtcctcccactctttctcccactctttctttcacgcttccgaaaaaaatcatacgcagatgagctctgctggtcaggttattcgtcgcaaagctgcggcggcatgtgaggcggagaagccactatcgatagaagaagtggaagtggcaccaccccataagcatgaagtccgtatcaagattctcttcactgctttatgtcacactgatgtatactactgggagtgtaagggttacactcctctgtttactcgtatacgtggtcatgaagcctgaaggatcgtggagagtgtgggtgtagggcgcgaattatttgtaaccttgagatcatgttctccctatcttctcctgagtatacatatat

SEQ ID NO: 26384 - DNA, 414 bp, Gossypium hirsutum
  Clone ID: LIB3166-009-P1-K1-D9
gcctcacgttcgaccacgcttacggtttaatattgatttagtgaatcacaatctcgagggatgaacattaacatcatcctgcctttaaactatatctataacatctcatccctgtctgcacgaattgggctgatctatctaatgtacaactagagaggcagttttccttcatctattttcattcaagataatatttcaagaaggtgcatctggtgctttattcggcacttctgggagcaatgttatcaggagcttctggctgactggtctatctacacaaatattgcatgcccatccgtcctatagtatatatacgcttttaaagcaaccaaaattacatgacgcaccctattggaaaatagttattgctgggaaatccgtggcattaccgttaactagcgagtttgttgacat

SEQ ID NO: 26385 - DNA, 415 bp, Gossypium hirsutum
  Clone ID: LIB3166-009-P1-K1-E10
aactgctgcaaaagtgacaccgggctctaacaaggcaataaaggacaggtccaagtgcagcggatgtggggactcaaatcctacaaaaaatatggcacaggccgttgatctgtaaggaagtatttgtgatgacaaacctgttggggctgccatccacccgggtcttgttatagtgtgtatatactatattatatatatattgaattacagcacgagatgttatggctttattttcttgtcataaaattgctccatctccgtggtagagttgagattggtttggcttggcttgatttgtcatgggaataagccaataaggtcagtagatttcatgtgttaatgttgtaatcagttgtgattaaatgttacggaatgtttaatccatcctttcttagaggttcacaagtaaaaagtt

SEQ ID NO: 26386 - DNA, 374 bp, Gossypium hirsutum
  Clone ID: LIB3166-009-P1-K1-E11
gcttgccaaagttgcaggtgagacattgtcattaaagccaatgtcaagcaagatgggaccgtattggttgtagatcacctatgctgcacattgttaaatgggggtcttgccagtaatctaacttcaaatgtttatctgtgctattattattagtgtttcatgaaaccgaacctacagtgtggtataatacctataaattacccaaacgcttctatcactttgtaccttacatacaattcttgaacatatgtaatcatttttgttttatattggactagtatggttttcctaataaataggattgggtattaaatggatttttaattattgtttgtataatatttatatgttatgtttgattcgttaatacttag

SEQ ID NO: 26387 - DNA, 283 bp, Gossypium hirsutum
  Clone ID: LIB3166-009-P1-K1-E5
gcttttaacccatcctcaactggtttcttgaaattcttaacaatacaagtaggtcttatgcattgggacccttgtaatccccatcttctcttttcccctttcctgtgcccttggaaaccaaagttatatgcttctagcactcgatctttgtcagctacctctctgatagcttgtctctacggttcacccacaggttgcttgctgtggagcatctctcagacgtcaagcttacctctcgcatccttcagagattaaatgtaaaacaagctgaataaacaccccc

SEQ ID NO: 26388 - DNA, 389 bp, Gossypium hirsutum
  Clone ID: LIB3166-009-P1-K1-F6
aaaaacccagtattctgtcatcactatggaggccaattggctgctatggtttacaaaggcaggagtaattgcatgagtcaaatggccagtaatcagtgaagccattggtgaagatagtttaaggcaagaaactttgcgacataggctggattatgtgaacattggtaatatacatctagcatccttactattgttcttcatttgtgatcgtataatgtgctaatcttttactttaatcgaaatacacctgattgcacatgcggtctgttattttaatatccatggtttttcttcatctggctttttttaatgatgggttcattatttttacttcctctttcttaatacttacattctttaaaattaatttgtgaaattatttgtatttt

SEQ ID NO: 26389 - DNA, 106 bp, Gossypium hirsutum
  Clone ID: LIB3166-009-P1-K1-H1
gagagtttcattagccttcctatgttgtgagttaactatatagggtcttacgttcattctgggggttagcttgctacatgggttgttcatttcattcatttaaatg

SEQ ID NO: 26390 - DNA, 153 bp, Gossypium hirsutum
  Clone ID: LIB3166-009-P1-K1-H11
aattagacggataaaaaatactattaccatgggttctgcagacaagagggaggaagttattcaggcatggtacatatattattaatcacctatatcaggtgcttctttatcaccttatacgtatttaatatttttgatgggttaatcttactt

SEQ ID NO: 26391 - DNA, 416 bp, Gossypium hirsutum
  Clone ID: LIB3166-009-P1-K1-H2
aaaagccccttctgtcaatttccacattcatgcaggctgctaggaacaatgttctcctagccgttccggcacttctttatgccatcaataactatctgaaattcatcatgcagctttatttcaatcctgcaactgtgaagatgctgagcaacctcaaggttttggtaattgctgttttgctgaagatgattatgaggcgcagattttctgtgatacagtgggaagctcttgctcttttgctcattggaattagtgtaaatcagctgcgttctttacctgagggtagtacaaagttgggtcttcacgttacaaccggtgcttacatctacacattgatctttgtaactgttccatctttggcttctgtctacaatgagtatgcttcttaagaagtcagtttgtgacaagcatttatc

SEQ ID NO: 26392 - DNA, 246 bp, Gossypium hirsutum
  unsure (1)..(246): unsure at all n locations
  Clone ID: LIB3166-009-P1-K1-H5
aaaaaaaaaaaaaaaccaccgatctcattatataaatgactgntttttgtttgtttggggtttctagtttttatgttgctaacctgctttgctttatcaacaacaaagaaggtttttttattatccatttttgggttttcggttctcggttgcgtgcgtttcactttcatgtctaagtagaggagaaatgatattgctttttatcgagttttgaacttttcgcaagcactacttaatttcaacttt

SEQ ID NO: 26393 - DNA, 416 bp, Gossypium hirsutum
  Clone ID: LIB3166-009-P1-K1-H8
cccacgcgtccgcccacgcgtccggctttttcaactccctcatcgatgcttacaatgaactttttttttcttcaactaacacaccattaccagattccttatcaaattgaaactctaaataagcaacaacacgacgttcaaattcggtgacctgaaagttgaaacagcccaatatatttgcaatttgattatcagccaaatctgggttttatttactttgttgcagagatggcaaaatcagttgaaaatagagctttaaagaaaggtgcatggagtcctgaagaagataagaaattaattgcttatattaagagatatgggatttggaattgggcagaaatggctaaaccagcaggattgcaaaggtcagggaagagttgtaggcttcgttgggtgaattatttaagaccgggaat

SEQ ID NO: 26394 - DNA, 252 bp, Gossypium hirsutum
  Clone ID: LIB3166-009-P1-K1-H9
ctgacacatgggctgccctatacatctttttctgctaagacaaaccctatcaatgtagcggtagggcctacactgcctgcacaaacagcaaccgacaaagtccgacttttagatgataatattcggccccgagattgccctttcaacttctaattgagcgatgccaccaggaatttgcggccggttctcaagacttccgccgtacggatgcctgaggagatgttctatggatgtactaccttgtgccagtcg

SEQ ID NO: 26395 - DNA, 402 bp, Gossypium hirsutum
  Clone ID: LIB3166-010-P1-K1-A10
cccacgcgtccggtttccagcagattcagaagatggagtgggaaattttggaggttaaaagtaagcattggttgaacgctgttaaaggggcggttaaaacggtgttttatggagagagattactctgtgatcaagtgtttgcaatttcgtcttccatcagggaatcttgtttcactgatgtttcaaaggaaggagctttggctctgtttggattcccagaaaatgtagccaagtgcaagaaaactcccgagaaaatgttccgtatcttggatttatatgaggcggtttccgacctttggcccgagattgaatcaatctttagcttttaatccacctttaccgttcgatcgaccgcctgtaacttcttaatcaggctcagcgatgcctttagaacgattttta

SEQ ID NO: 26396 - DNA, 287 bp, Gossypium hirsutum
  Clone ID: LIB3166-010-P1-K1-B1
cccacgcgtccggagttgaaattatgctagaaaaaaattaaattgtcatgctggcccctgcgaagtttcattataacaacattagcattccagaccatattcatgagaaagtaagcatgttaatgctgtatgaactaatcatttatatagcacgaatagaaacttttggaaaacgttttattaagtttttagtcgttaaaagactttataaaacaatttatgtggatgattattctattttaaattggggatatataggccatataaaattctatcttatacttaca

SEQ ID NO: 26397 - DNA, 403 bp, Gossypium hirsutum
  Clone ID: LIB3166-010-P1-K1-B12
caggttgatccaatgctcaagagagctggtgccatatggaaacgacacaggcatgcgatagttttatataaacaaaactcaaataaatgatatggctttgactgtataacctattggaacatgtagcatatacagtgaaaacactgtgaatgtttagatacttcttgcagagcaaccgttgcacaccgagattggggctgcccaggattatagaggcatgatatgttgccttggtactaaatctaggaggaacttgtatcataacatgcacatgtaatatcatccctcgtctatgttaaaataaagctgtacaaatatatctgctattgtatgcttgccccaagtgaagcgaaacttgccatggacatcgcacatgcagaggggccgccgctctagaggatcc

SEQ ID NO: 26398 - DNA, 277 bp, Gossypium hirsutum
  Clone ID: LIB3166-010-P1-K1-B2
tcttccacttaattacccgcctctcgcaacaaatctcagcccttgagctaacacacccgcttgtcaccattatggctagagggttgaaaaaacatttgaagaggcttaatgccccttttcattggatgcttgacaagcttggtggtgcttttgctctcaagccatcatttggtcctcacaagtctagggaatgcttgccattgatcctcattctgcgaaacatgatgaaatttgctaacacctataaagaacttattgttattcttattcaaaggct

SEQ ID NO: 26399 - DNA, 427 bp, Gossypium hirsutum
  unsure (1)..(427): unsure at all n locations
  Clone ID: LIB3166-010-P1-K1-B3
gcgggtcgatccacctanacattacaatttcanattctttttttaagggcagttgaatcttcgtagtgaacggtgtaattgatcacatggtgatctaactccctcattgcaaaggataacaggacgctttttttgtaatgggaaccaatattgtatccctcatcattcttgttaggacaaaacaaagaagagtttattgctgctttaccagttgatgaattgattgagaaagctgacggttttgctggtgtttttcctgagcacaagttttagattgtgaatgcgcctacaagccaggaaacatatattttgaatgactggtgagggggttaattattctttttcttttaataaatcattcattgtcttatttttggctttttcaacctactcatctcgaagtgcttttcgcattgttttgaccgaa

SEQ ID NO: 26400 - DNA, 220 bp, Gossypium hirsutum
  Clone ID: LIB3166-010-P1-K1-B5
gaccgacgcgtccgcccactcattctattgacaatggactatcacatattttcctgagtttaagttagtatcgcgagagtttttaatacttactgacctccaatattcatctattattgtcatgatgttagcaacattttttactttacgcttttaaagaaggagaccttttactgtgtttggtgattgtgaatcatacatatgatttccaatatgtttc

SEQ ID NO: 26401 - DNA, 420 bp, Gossypium hirsutum
  Clone ID: LIB3166-010-P1-K1-B7
aatcatcttacggctcgcagaccaatctatataaacaactgcaagcttggagagaaaacgcttcattggtaaatccacctccagaaatataggtcataaaagccaaaggttctctttgctaccttaaggcaacaattgacgcctggttgccccctcatgctgtgtataatattgtcactgttcctgataaccggagagtttttaaaaacgttaaggtgagtgtactagtttcacccacaataataaatcagaagttttgtatcatgttacaattaccctatgttgcttctactctttatttttcccaaatcacccatgtttgacaagttttcatattgtgggtacgaggatatgatccttaaaagaaccttttatgcatgaaagaatttgaaacacacttcaagtccgagtaacattaac

SEQ ID NO: 26402 - DNA, 437 bp, Gossypium hirsutum
  Clone ID: LIB3166-010-P1-K1-B8
cccacgcgtccgcggacgcgtgggtttggtttcaggtataagggtgggaaatctatacggggatccaatatcagcctctgttgggcacaagatcactgctagacagcgatggactccaaccgcatttcagcttcaaattcttgagaatatatatgagcaaggaactggaacaccaagcaagcaaaaaatcaaagagatggcatctgaactagcacaacatggtcaaatctctgaaacaaatgtatataactggtttcagaataggcgagctcgatcaaaaagaaagcttcaatcctctacagattcagttaatgcagaaacagatatgagcacaaaagagaaaaggactaaaccagtagatccggacttcattaccaacatttcacaaggagttgaaagcttctatttccaagcttctatttcacgaggctatgatt

SEQ ID NO: 26403 - DNA, 432 bp, Gossypium hirsutum
  Clone ID: LIB3166-010-P1-K1-B9
cggacgcgtggggaaaccaacataataaaccctctatgcctaaagtccggagttctcctggcctttacagcctcagcacgcttcatccccaaagtaacaacaaccatagtaatcaccaagtttaccagccgcatcatcattcccaccaaaaccaccagcaacaacacccctacagcggtcaatctccaagaacatccccagattatcggaccgaaaaggccccagggccatacgattttgtgaggggagctatggggcacagtcatgttccagtaaaccgggtctattcagtaggaagacaaaatttggggaatggataccccatgtatactggctgctgcgatgagtgcttggtttatgcaagtggaggtgctaataggagaggcagcctttcaacaagtggaaggcttggtaagcatgatagtccctgtc

SEQ ID NO: 26404 - DNA, 325 bp, Gossypium hirsutum
  Clone ID: LIB3166-010-P1-K1-C1
ctaaaccttttgaacaccccgaatcttcatgtttcttgtagatttattattctatgacaaacaagggattcatttgagtttttgtaagaaacttgagggagttttcaaacatcataagggaggaattgtctaatttagggctaaaatcttctgacagagcatgttttgtcaatcttttaagccagttcttgtaagaaaaaaggaatcttggtgatttcagtcttggaatgacttcaaaaccagatgctaaagggcttgatacatctatgttacttgcaaaaaacatgaattttttttccaattttctcgtattgttctgtgagtt

SEQ ID NO: 26405 - DNA, 416 bp, Gossypium hirsutum
  Clone ID: LIB3166-010-P1-K1-C12
agcagtccggtccttcacctgctgcggcacctggtttaagtgttcaatttgatggaaaatctaatagccgttccttggacattgactttgaggaaaggctgaaagcaattagaagggctgcacttgaacaaaagaaggtagaggaacaaaaagaatttggaccaattgactatgatgcacctgttgaatcagagaagaaaacaattggtcttggcactaatattggagtaggaatagctgttgcggtctttggtctagttttttcccttggagacttcctaccaggaagtgtcaatccacctgaggaagctgcagtgattgacaagaaactgtcacgagaacagaaagctattcttgagactaggctggcacagtttgaggcaacactaagtacctctccagaagatgaaactgca

SEQ ID NO: 26406 - DNA, 352 bp, Gossypium hirsutum
  unsure (1)..(352): unsure at all n locations
  Clone ID: LIB3166-010-P1-K1-C3
cccacgcgttctcccactcttcctccnagatcctattttcaatgagatgctaaagatgcgtcagcaattatagcatgtgcaagcagaactttgtgcacgtggtggttctgatgaagtacaggttctcaaggaaaggattgcttggcttgaagctgctaatgaggatctttgtcaagagcttcaggagttccgtagcagatgcaccattgtggatcaacgtgaaaccgatgctcaagatggaagttcttgttctgtcaaaagtgatgggcttaaaaggaacttgcacagtatagagtctttttgactatcagaggggtgaaaaccattttagctactgatttttagaatattt

SEQ ID NO: 26407 - DNA, 421 bp, Gossypium hirsutum
  unsure (1)..(421): unsure at all n locations
  Clone ID: LIB3166-010-P1-K1-C5
cgaccgacgcgtccgagggaggtgtatcatttcatcaccttcttggttaggttttacttctaatgatancaaccatgctgctccttttagatccaaattgaggccaaataaacgctattaatgtcctgataaagctgctgctgttccaaaatttccttgactgttatgagaataaccttacattctttgatttctacactcacatttttaatcatgttctataagatcttaacactttatgcaatgaaccatgcatgcctggtcatcattctccatacaacacttcccacaattcttaacccactaaacaacattgctaaaggctgttgctttctattttttaataaaataatatcttgttaattctcatattccctaatcattttctcatgtaacactttttaatacattttaaacctcc

SEQ ID NO: 26408 - DNA, 428 bp, Gossypium hirsutum
  Clone ID: LIB3166-010-P1-K1-C6
gtgacacaaggggcttgtcaagattcacataatcgactattcttgtgaattggcctctagttctgttgtctatgttgaagtccaatctgcctacctccctatagtccctctatttcttcaagaatcctttttttataagaaacctgagagtcttggtagacatatccaagccatcaccatgcttggatatggttgtaacggattaaactctttggtccaaggttggacaatcaagtattgcccgtagattattcaagggccttgcgataaaaccttctcaaaaaagtctgtacactgaaactttgccaagacatattttgtttctatatccataacacgaaaggctttagagggtctccgaaacctacttatcacatttgttaaagccccatagtccatgttcctacctagcagtttcataaccaccg

SEQ ID NO: 26409 - DNA, 377 bp, Gossypium hirsutum
  Clone ID: LIB3166-010-P1-K1-D1
gaaaaggactgttttcttgtggctctgatgggaatgttgatgtgcaagtgaaggaagagctagtagtgaacctgagacaaaaaaaattattaagaaaggcaatacagtttgttctgattctgtcccgaaagctcggaagaaacctagatttgttgtgcatgcagctggtgatgtaaggatctcatgttatggatacagatggcgaaaatactttcagaaaatgttgaaaggaaattctaatcctaggaactactatatatgcacttctgctgggtgtcctttacgtaatgcttatttatacagctttctgagtattctatatgctttttattataatacatataaagggtgtttatttatctttatcttgccttttt

SEQ ID NO: 26410 - DNA, 209 bp, Gossypium hirsutum
  Clone ID: LIB3166-010-P1-K1-D10
gaaagaacatggaataaccaacattagcacaaaccgcaccctatgactaacaaccaaccggtacatacaacaacgcatttaacgtgctagaaataacagaaactgtatgatcatgagaaatagatctacatcaatgaatgggcaagacacaactatgactaaaggccatgtgaatgctaacctcaatcacacaggagcaataccatact

SEQ ID NO: 26411 - DNA, 285 bp, Gossypium hirsutum
  Clone ID: LIB3166-010-P1-K1-E1
tgtgagttgagtaggcggtgactgatacactttagaaggagttgtgtaaggcgagctctgtggtgattagtttctcatgaaactcatcaaagatgatggcagtattgggactattgacagcatcgataattggttggaaggtgtcatcaagcccttctaggactttttcaataagatcctctacatctaatggtttaccaagagtagctagcttatcttgctagattttaatagcttgcatctaagtccctatagtttgggagcctctttgtaattttttttgtt

SEQ ID NO: 26412 - DNA, 309 bp, Gossypium hirsutum
  Clone ID: LIB3166-010-P1-K1-F1
gctggacttaaagaaccatcaccattctcagtttcaacacggtttttccactgccttaccagtggcttcaccgactgtatgccgtactcctaacaatcaatcacttattttttccgttgatggcatcgatcaagaattcccccaagagaatggtggttgcccgatctcagctgtttccgagttggctgctgctatcaatgataataagcagctggaggattataaaaatgacaatggtaatagtaacaccaaggggaaggccaacactgaaaaaagtgatctccctgaaagcttggatcacattctccc

SEQ ID NO: 26413 - DNA, 429 bp, Gossypium hirsutum
  Clone ID: LIB3166-010-P1-K1-F11
atttagttataagtaacaatttgtaaaaccctcttttttcttctcgccaagatctgagagggcatccaccggcaagcatggatatgcgaagaagcacaccttgctcacgatgcaggcaaagatttatggcgaaatcagtgaccacgtgcagatgttgaatgcccttcatgcaaacctaactatcttcccattccagccgatgaacaatattcttcgagccagcagcagcagtatgggctacgcagccgaatgagatgcttttatagccaaatcagaggaaaagagcatcaaagtacggtaactccttccttaaatcccgacccctcggctttcaactcgatgaagatcagatcaagcaagcgagcagtgctttgcggaatcacttacaacaacttgaagcagtatagacttaaaggaaccattaacgac

SEQ ID NO: 26414 - DNA, 426 bp, Gossypium hirsutum
  Clone ID: LIB3166-010-P1-K1-F12
cccacgcgtccggcaagtgatggaaaaaaacattattcaataatagattcttaaggaaagaaaagtggcagagtaagggagggaaaatggaaactgatgatacaggtagaaaaatggaggaggaattaggaggcaataagagattgagtgaaacccctcccgatgatgattgttgcccaatttgctttggtcccttcactgttccttgtcgatctaattgcggccattggtattgcggaagttgtattttgcaattctggaactattcctcggcgtcaaagccatgcgggtgtcccatgtgtacctgcatgattgttaatttgatgccagaggcatcgttggaacaacaaccacagaaccaagaagttgccgaggtgcttaaaagtgtacggaggtataaccttctcttttttggaggtgcacgtg

SEQ ID NO: 26415 - DNA, 431 bp, Gossypium hirsutum
  Clone ID: LIB3166-010-P1-K1-F5
gagtttgagtgatataggagcctatgcaagagagattgtcaagaatgagattgagatgcggtgcgttatattggcttgccaaggccgattattccctgttttcgggtggaggaaaggttgtcaggcattctgagccctttcttgctggaaagggaagcaactggttttcaaaaggtagtcaaaatgtggttcatcccaatgcagacaagatgttgaagcctagttttggggaaccaggacagtgttttccgttaaaaggaagtagcgggtttgttcaaatcaagctgcgtacggctattatccctgaggctattacttttgaacatgttgccaagaatgtggcatatgatagatccagtgcacccaaggactgccgtatttttggttggatgcaaggtcgtgatcttgatttaccaattgaccccaataag

SEQ ID NO: 26416 - DNA, 322 bp, Gossypium hirsutum
  Clone ID: LIB3166-010-P1-K1-F6
gcccacgcgttctgccagaattcgacgtcaccgttcgttcagacaacggcaacgacaagatggggatttactacgagaaaggtagctccatcaatgtttactaccaagacgttaatctcagtaacggcgcgttgccggttttttaccagccaaccaataacgtaacactgttcaaaacggcgctgaaaggctccggcatttaactaaccgccgccttgcttaagttcatttccaatgatcaaaataaaggaacggtgccgtttactttgaagctgagagcgccggttaagattaaagctggatccgttaagacgtgtaaaat

SEQ ID NO: 26417 - DNA, 431 bp, Gossypium hirsutum
  Clone ID: LIB3166-010-P1-K1-F8
cagagagctacagcaatggtaccatgagtctgtccatgtaggccatgctgatctcagcggagagtcgtggtggccctcattgaagacaacggatgatctagtttccatcctaaccaccctcatttggctcgcttcggcccaacacgctgcacttaatttcggacagtacccttatggtggctatgtccccaaccgtcctcctctgatgaggagattaatacccgatgaaaacgacctcgagtatgctaatttccttgctgatccacaaaaatatttcctatcagcgttgccaagtttattacaagcaacaaagttcatggccgtggtcgacaccttatcgacacactcacccgatgaggagtacttaggagaacgacagcatccgtcgatttggtctggtgacgccgagataatcgaagccttttatgggt

SEQ ID NO: 26418 - DNA, 422 bp, Gossypium hirsutum
  Clone ID: LIB3166-010-P1-K1-F9
attgctatgtctataaattaattgtacatcccttcgattacgtatctatttatttggaggggtttagcatagttatttccttggtggtggcacaaaaatatgcaacaagctatagtctgttggctgtaagttttaacatgacctaatcatggtgatgaggacctctattttcatttttaagcatttgaagtgagcaaaaggaaagggtctcggttcgataagggggaataagtcttattttcatgtattccttattcttattatccattttatcaaatcttgtacaaaataatgcatccagaaacaagaatttagaatcaagatattgttccttttaaagagtagacacattctccttatattccaaagcatgttcatccattaaatacttgtgccatacggtttgatgatttagttgttac

SEQ ID NO: 26419 - DNA, 428 bp, Gossypium hirsutum
  Clone ID: LIB3166-010-P1-K1-G12
ctcactgctgcttgctgtttaaaactatatacatgtaggttttgccatgataaatgcagggaccattcaggggataggaaggctacaactgatatgatgtgcatgagctgcctgaaaatcctgcctgttggaccattttgcacgacaccttcatgtggcgagctctcaatggcaaagtactactgcaacatctgtaaattttttgatgatgaaaggaatgtctatcattgcccattctgcaatttatgccgtgttggaaagtgacttggtgattatttttttcattgtatggtggtgaagtggtgtgtggccaaaaagattgtctaccacaagtgttcaataaaagtgttataaataaacttttctattatgctatgattttttattcacattaattgaaagcgtaagagcactttcatgtttttatt

SEQ ID NO: 26420 - DNA, 497 bp, Gossypium hirsutum
  unsure (1)..(497): unsure at all n locations
  Clone ID: LIB3166-010-P1-K1-G6
acgcgnntccgaaaaaatnntgagtgtcangnntttgaaaggtgtnntcttctagaatatggcttanntgaaacccaagttgctgagggttcgtgctatcaagagcgagattgcgcccaattcnntgggtcaatccctcttttcttcttaccccagaccaanncttgcatgctnntctnnncagggagcannaaaagatnntgtgggggttgttttaccaaggccccaatgagtacctttacccgaagaatctccaaccttttgttggtttggtgtggaagggaggccttgtgggttgccgccatatggcttcgatatcaccaggggcccatcagtatattcgttacccgaccgacaaaagaaggacccggacctgtcgaactttgaaaaagcatagtccctgtatctcccatgtgcttccatatcgacccccatttccaccccggtcttaccgttaccggcttgagaaggatcaatagaaagccataaaactttgc

SEQ ID NO: 26421 - DNA, 370 bp, Gossypium hirsutum
  Clone ID: LIB3166-010-P1-K1-H11
cccacgcgtccgctctcacagacgcagttctttctttactctctcaattttctacgctcgaccccaagaatcccttttccatgttctcatctcccaaactagaaaagaaaagggaagacctattttctcctctgcattgttgcgttagatctttgccgcatttcatggatctactacaatcacgccgactcttattctcttcatcttctctctcctagggtttttgttccgtattcttttacttttttattggaggtgctcttgtcgtcttatcattttaagtttttactttttttcggtgtaagttattttgttctcttctttttctttttattagtctccttatagttttatttttctttattttttt

SEQ ID NO: 26422 - DNA, 431 bp, Gossypium hirsutum
  Clone ID: LIB3166-010-P1-K1-H4
cccacgcgtccgatttctctgtctatgacaagtacctaaatggactagaaagagtgataaaaaggatgaagagccaatcagaatcatctcttctgtctgctgttcgacaatcaagaggagaaaagatactcgaggtggatgggacagtcactactcaaccagttcttgaacatgttggattatcaacatggccaggtcggttaatactgacagatcatgcattgtactttgaagcccttaaagttgtatcttatgataaacctaaaagatatgatttgtcaaatgatctaaagcaaatcgttaaacctgagttgactggaccatggggtactcgactttttgacaaggcagtcttgtacaaatcaattttcatatcagaaccagttgttatagagttcctgagcttaaagggcacactcggcgtgattact

SEQ ID NO: 26423 - DNA, 350 bp, Gossypium hirsutum
  Clone ID: LIB3166-010-P1-K1-H6
cggacgcgtccgcccacgcgtccgaaaaaaaagggaaagcaggtggtcgggaaccggcggagttcgtcggatttcacccattcgtcattggagcttccaaaaaaacaactttttatctgagtttcgatcgcagatatagaaaaaaaaccgggaaaatgaagggatctggacctcttgttgctaccgtgctcgttgcgtctacggtggctctcacttcgtcttcatccgctggagtccaacatgtttctttttctccaaccttcttcaaccaggagtcacagaacagtgcgtcgaggaatcgtacggcgtcagaaagggagaaatttcgcgccacggttttgatgggctta

SEQ ID NO: 26424 - DNA, 244 bp, Gossypium hirsutum
  Clone ID: LIB3166-011-P1-K1-A2
tccacacatacgcccatgcttgtggccgaacggttcggatggctccattgctcaccgaaggagtttagattcaagactccaacatgtttggccccacgctagcgagtgtttgggatttttggagggggcaggcaggcttaccctacaagagagagctagcgtgttcttgggcaacttagtatgcatctgtagcatgttgacagtacataaaattacgttgctaattaattgttttgacgcactt

SEQ ID NO: 26425 - DNA, 212 bp, Gossypium hirsutum
  Clone ID: LIB3166-011-P1-K1-A7
gctattcaaagtggatttggacttgtttggtgttggagaaaactgtacattgggtttggaaacgggtttcagtggttttgtagttctgagaatggtgtaagaatctgtttatcgcgcaatgcaatcccagcagggctccagaattgacttacgtgaactgaaagctcacatagtgaagaacattggggctgagaggtcaaaaaggtactttt

SEQ ID NO: 26426 - DNA, 393 bp, Gossypium hirsutum
  Clone ID: LIB3166-011-P1-K1-A8
tcgcttaactggtcatattctcaagtgccacatcttgttttgactgatgcattatttgctagcattgggaggtcagatggtgctgaggtgaacagatgcttacaatatctgcaggatgtctcatgttatgtgaacttgaaacaatgtcttgtgattgcaggaagcttgtgggttgctagttgaattggaagctggcgcaactatttagaccgtttgtacattggctatgatgctgaacatacattaccagatctgtatgagaggtatgatgagcagatagatagctatgttcacagaatgcttgcacagtttcaaaattactataaagagctgtatcctgagatcgtgagcatgatgcccataaggacgttcaagctttagacacacgtctag

SEQ ID NO: 26427 - DNA, 372 bp, Gossypium hirsutum
  Clone ID: LIB3166-011-P1-K1-B2
agccttccgtttttttccttcaatccggcaaaggataatagatttttttggcctcaagccatccttggggaggggaaaacctaattctcttctcaagaaacccctctttaaattaatttaattaaggggaattactcttataactcatacccaaactccggcaactcttcgcacggtccgagaaacacttcaaaatccgcgcatggacgccaacagaacatgctcaaaattacaaggcagttatgtgcagctaggaggtagaccaccctcgcctcatgacaataactgcttacatcggggagagaccaagaccagctgtgaacgcactatcaaattctcctccatgatctccaagctctcaactctttgcgg

SEQ ID NO: 26428 - DNA, 123 bp, Gossypium hirsutum
  Clone ID: LIB3166-011-P1-K1-B3
agccttcctattatatttcccgttttcaaattttttttaagaattcgttaccaaaaaatgccgtcgtcggggaggaggatcaccctaaaaacttaaaccggcaattcatccaaggttattaaa

SEQ ID NO: 26429 - DNA, 405 bp, Gossypium hirsutum
  Clone ID: LIB3166-011-P1-K1-B8
cccacgcgtccggttggtagaatcattattggccttacatactttataatctttctttgtttttgttgttttttacaaatggatgcttcacagaaaactattcttgttattggtggtgctgggttcattggcactcacacagtggtacaactactcaatgaatgttttaaagtgttaattattaacaatcttaataactctgttattgaagttgttgatcaggttaaggaattagtggttcctgagctctctaaaaaactccagctcaacttgggtgattcgaggaatagggatgacttggtcaagcttttctctaaaacaaagtactgccaactgaatatatactataatattttttggtttattggttgcatcacaatggtccattaatttattggcatttta

SEQ ID NO: 26430 - DNA, 420 bp, Gossypium hirsutum
  Clone ID: LIB3166-011-P1-K1-C6
agccttccggaaatttttgtaccgggccctgttttcttacagttcttgttgggagatttttatcctttagatgtttttagaaagagatgtggattttttttttttaattttaattggttacatctggtttttggatgagttcttggaattgtgcgttgattttttttctttttgattactgtaaataaagcacgtaaactacctgatcataggaagcacttctttttttttcaaaaaattgttattcaccagtaagtaaatcataacaaacttcagacagaaaaaaaaattgttttatttttttctcctgtaaaagatggaaaaaattgtatgcttgtatttttgcgcttttcacaaatttttataccttaactgttttcgtttgtctgcctccgaaattcttctcttcaagacgtattt

SEQ ID NO: 26431 - DNA, 279 bp, Gossypium hirsutum
  Clone ID: LIB3166-011-P1-K1-C7
gggacgcgtgggtgggaaagcccaacacaatctttttaaagcagaccatttgacatagattgtgacaatgagcgaggaaacacctgacgacgccataatgctattgcgggtccggaagaaactcttaacacaaaggtatgaatcggaattcggcggtgggagaattagagctgtagaggacttacaacagagatgattaaagtcttgtaagtgtggacagatattgagaagtttcagcctttgatatgacgctgattgtaaagcaagcagtggccctcg

SEQ ID NO: 26432 - DNA, 397 bp, Gossypium hirsutum
  unsure (1)..(397): unsure at all n locations
  Clone ID: LIB3166-011-P1-K1-D10
gcatatatattggcacttgtttttgtattcttctcaattgtcatgctctggaataggtagggtaacaaagggaagcccttagaagccttcagaataatagctccaccaaatcgaaatgcagttgagcagctgttgacattacaagaagtcatctcccaatatgaagcactaatccaaactgcgaatgttattctcctcaagattagggctatcttatttgcagtcttaccacaggccactgacagggttgctctctcactggttttcttggctgtagtgttagctnttgtgcctttgagattcttgatattgtttgtattcgcagaagcttttacgagagaactgccatataggagagacagcaatgaccggtggctgcgaaggcttagagaatggt

SEQ ID NO: 26433 - DNA, 413 bp, Gossypium hirsutum
  Clone ID: LIB3166-011-P1-K1-D11
cttatttcttccatttcactctccccgttgtcaatacaaactcctccataaagtcatatgatgacgccaatccaaataataaaaaacgtaccccgaaattgcaataaaccctactacaaaactgacgccaataaaagacaggtttttgtcttgttgggtgacaactgaagttaacgccgccgacaatgcacgccaagacggactcagaggtcaccagcctcgccccatcatcgccaacgaggtcaccacggcgtccggtttactacgtgcagagcccttcacgtgattctcacgatggagaaaagacaacgacgtcgttccactccacgccagtgctcagccccatgggatccccaccgcattcccatgcctccgtggaccatcactcgcgtgagtcctcatcgagccggttt

SEQ ID NO: 26434 - DNA, 149 bp, Gossypium hirsutum
  Clone ID: LIB3166-011-P1-K1-D8
ggcgaacagaaagaaaagaaggataaataatcaatggaatcaactcgggaatcagccggttcaggggaatgcaatctactggcggtctaccgcgcgtgaacaggggcggcggttttgcaagcacccttgaccgcgtttatttactgacc

SEQ ID NO: 26435 - DNA, 408 bp, Gossypium hirsutum
  Clone ID: LIB3166-011-P1-K1-E4
gttcgatttaagccctctgtttcttcgccttcgccatcgccattgccattgccgttgccttgatgtttgatataattttctgtcaaattttccggttttcgttactacatgatgatcggcgtcgggttgactcttccggctcagaacttgaacgtcttcaataccaggcgagcaagcttcaagagccagaaatcacctctaaatccaacttctcgaagacatgtttcatcggcatcttcgactgagttaactcgggaaaccctttccaacctcgaaaagctccttcagaaatcaaaccaacccgacccggaacgggtcgtcaaaacttccaccagcaacgggtcgatcgaaaccaaaggtaagggtttactcgaagggcttaacctgtcccggatttggcctgaaatg

SEQ ID NO: 26436 - DNA, 355 bp, Gossypium hirsutum
  Clone ID: LIB3166-011-P1-K1-E5
agccttccggggaggcgtcgggattttcaacttcgttttggagggttgtcccattgcgtgacttgctcaaacgatgtgggatctacagcaagaaacatggcgccctcaatgtgtgtttcgaaagagctgagcatttgccccgcgggggggggtccaagtatggaactagcattaagaaggaattcgccatggacccaacttgggatattatattagcttacatgcaaaacggggaacttttaaccccggaccatggctttcctgttcgaatcattataccagggttcatcggccggagaatggtgaaatgggtgaaaccgatcattggtaccacgaaagaatctgataattttta

SEQ ID NO: 26437 - DNA, 405 bp, Gossypium hirsutum
  Clone ID: LIB3166-011-P1-K1-E7
tatcaacctcagcaaaatggttcgatgtcagttttgaatatgaagggaagggaattggaagatcctgctaccaaggcttatatgaaggcaatggcagctagagctttatggcatcttgccaaggggaattcatctatatgtcggagtatcaccgagtctagagcattgctatgttttgcagttttgttagaaaaaggaagtgacgatgtgcagtttaattcggctatggcattaatggagattacagctgtggcagagcggtacaccgatttgagatggtctgcatttaagccgaattctcatgctgaagcttgttctttatcacttattgaagatcattgagaaggcctattcggagtagctgatttcttgtatcaaggcttttttatcttggcaaggactttt

SEQ ID NO: 26438 - DNA, 411 bp, Gossypium hirsutum
  Clone ID: LIB3166-011-P1-K1-F10
aaaactctcacttttccctttcctctcaatcttcttctcttatttccgccatggaaatagggctcctttccttcccttcccccaaacccccgctttcccaaaccctaactctaaaacccaccgccccattcctccgaccttccaaacccaacctcccttctttcagaccatccccattcccttccatcagagccgccatttcccgaaccaagaaggaagaaaccgtcgaaactgtcaaaacccagttggagaactgttacctcttggcagccgtcgaatacaagggcttcaccgtccagcaattccaggacttgcgccgatcgcttcccgaaacgtcgaaactgctcgttgctaagaacactctggtcctgaaagccatcgaagggactaaatgggaggccttgaaacctt

SEQ ID NO: 26439 - DNA, 419 bp, Gossypium hirsutum
  Clone ID: LIB3166-011-P1-K1-F2
gtgacaatcagatgtgtagacagatttgctgtatggagaattttgtgggtgattatacgaatatgaaaggaaccctattggcatattaccatcatttatggttattagcctggatttggatagcttaatcacgaatcccgagattaccagcctcagatgatatgatctagtgctaataggtgagcaggtaatctatttctattccgatttgttgcttttagaacgagaaaaggtaaaaataggaagcaacaatcttggattgtcacttatacagaccatgtttagtgttgatgttgaaccttttactgaaaaaaaaaaaaaaaaaattccaccaaaaaaaaaaaaaacacaaccaaatgttatgctttactcccattattttacctttccccattttttctcttaaattaaattttttt

SEQ ID NO: 26440 - DNA, 415 bp, Gossypium hirsutum
  Clone ID: LIB3166-011-P1-K1-F3
gattgttttaaccgcactttctgagacagaccgttattatgatgcaattgcagttcaacgggcggtcactgctgctaaaaaggactctgcattctcaagtccaaagactcaatcatatgtatcagaggttataacaacatcgccctctgtgaaccatggtgttaaattgcctattgttcctcaactccacaaggttccaagagcactgccattgagagtagctgccatgtttaaagtattggtgcctacgctatttgagaaacagggggctcaactacttgcagttgcttttcttgttgtctcaagaacatggatatcagatcggattgcttcattgaatggaacgactgtgaagcatgttttggagcagaataaggcagcccttatccgattaattggtataagtgttcttcaa

SEQ ID NO: 26441 - DNA, 396 bp, Gossypium hirsutum
  Clone ID: LIB3166-011-P1-K1-G10
cccacgcgtccgcccacgcgtccgcccacgcgttcgcttttcatttccaagccatcccttcggctctctctctctctctcggttaatgctatctttcttgttttccgaattatcgttctaaaagattatcagggcaacattactattactgatatgtagtatactatacggaaattccatgcattgttggtgtttgaatctttgaatctttaatctctgagttccattttcacaccggttatggcttggagcaaactaagatcgcttttctcttttctcaaattccagggcattttgcagcggctgcgacagcagcagcagcagcaggggccatcgcagtcggagagagctacggaggcggctaagcgagccgaatacccgattagaacatatgga

SEQ ID NO: 26442 - DNA, 409 bp, Gossypium hirsutum
  Clone ID: LIB3166-011-P1-K1-G11
gtcgacttttgctgtggttccaatgatttcagttttttattaaaagagaagctagagaaagttgggaagtcgtgcttatttaaaaattatgatctctttcagccaaagaatgattttagttttgaaaagagagattggatgagtgtgaagccaaacgaattaacagatggttctagactgattatgggactgaaccccccttttggggtcaaggcatctcgtgctaacaagttcatcaacaaggctcttacattcagaccaaagcttatcatacttattgttccaagggaaaccagaagacttgacgagaaagatgcttatgatttgatttgggaggatgacagagttctatctggcaagtcattttaccttccaggttcagttgatgtagaggacaagcacttggagc

SEQ ID NO: 26443 - DNA, 238 bp, Gossypium hirsutum
  Clone ID: LIB3166-011-P1-K1-H12
ggcccgcggacgcgtgggtgttaatttagaccaacattttaatgatttggattctataccctccaagtccagtcctaaagaagaaaagaagctttgaatttgaccccataacagccatgtttttgctgcagtgccgtgaaaaagaagttgaaagacaaaatggctgagtttcagattcttaaggagagaatccagcaagagtaccgagaggttattgagcgacgtgttttcgcagtga

SEQ ID NO: 26444 - DNA, 361 bp, Gossypium hirsutum
  Clone ID: LIB3166-011-P1-K1-H3
aggagcacaggagaaatcatcgaccagtggagttgcatacagaccctcttggggatgctcgagccaaggtccaagaagagataagccgtgaatttgctgctatcatggcagctggaacgctgagagctagcgaggcagctgcactggcaaccaggaaagtgatgcataaatacggacacttgaatgttgttatgccacagagttagaagcaggcgaatgtgatttattcggatcttgctctgtaggttgcaaaaatatggatttgagttaaaaagaaaaagcgaaatacgtcggttcaacattggtgtgagttttgtaaatggttatatctatcttattaattttttttgtttttgtgttt

SEQ ID NO: 26445 - DNA, 213 bp, Gossypium hirsutum
  Clone ID: LIB3166-012-P1-K1-A11
attgtatatctcccaaccaccccttctttttttttgctataatccaactctgtaatgtggggtcagtaaaaacatgcataaaatccattccaatgactcaccctctacacctcatcatgacatatgcttttactgagaacaaacatgtctttgttcagctaatcaatgcaatggatccatatcatagtcatcataaagcttatactctatctt

SEQ ID NO: 26446 - DNA, 347 bp, Gossypium hirsutum
  Clone ID: LIB3166-012-P1-K1-A12
cttggctgtgtctctggtgccaggtggcatcatgccagagcctaagcccgggcaggggggctcagaaccgacatcttcggtccctaactaaatagtcactatgttccttccctgttggggattagaaaagtagcaattattccttggaggtcagatgaaaatgattaagctttatggccttgaggggataaaatcacagacattatatatgtacttatatatagctagttaaaatgaagctatgtaaggcctggcatggtggcttacaattataatttccagcaccctggaagcagaggcaggcagatctccctgagtttccaaaacagcctgatctacatagaaaa

SEQ ID NO: 26447 - DNA, 402 bp, Gossypium hirsutum
  unsure (1)..(402): unsure at all n locations
  Clone ID: LIB3166-012-P1-K1-A4
cgggccggcccaacccgtccgtcaacctgaaaaggacttggaagaacctgttgttagtcgctcgagctattgttgccatggggggccttgttgatgtcagcgtcatctcctccaggaacactggccagcgagctgtgctgaagtttgccgctgccacaggagccactccaattgctggccgcttcacacctgggaccttcactaaccagatccaagcagccttcagggagccccggcttctagtggtgactgatccccgggctgaccaccagcccctcacagaggcctcttacgtcaacctgcccaccattgctctntgtaacacagattctcccctgcgctatgtggacattgccatcccatgcaacaacaagggagctcactcagtgggtctcatgtggt

SEQ ID NO: 26448 - DNA, 389 bp, Gossypium hirsutum
  Clone ID: LIB3166-012-P1-K1-A6
acccttccgaatggatcctaaccagggatcacctgaagacgtatttaaagtttactgcaatctggagaggggggagacatgcatttccgcaaacccagccagtgttccacggaaaacgtggtgggccagcaaatcccctgacaataagcccgtgtggtatggtctcgacatgaatagaggatctcagttcacatatggagattacaagtcccctaacacagctattactcagatgacctttctgcgccttttatcaaaagaagcctcccagaaccttacttatatatgtaagaacactgttggttatatggatgatcaaactaaaaaccttaagaaagctgtggttcttaaagggtcaaatgacttagaaataaaaggagaaggaaaca

SEQ ID NO: 26449 - DNA, 310 bp, Gossypium hirsutum
  Clone ID: LIB3166-012-P1-K1-A8
cccacgcgttcctttaactacttcctttcccttaaaatttttattattattgcacccaaaaaagcccgagaaagttcaatttcaaaagggaacttcaaatttttcttcaattttgaacaaacttaaattcaagaatttaaggaagcttttaattttatttatcaaaacaaggattgcattatttacaaggaagatctttcggacaacttttccgccattggcccttttaattttaataattaagaacttcacccccttattaaagaaaccattcggcctattaactttactttctttcttaccatttttt

SEQ ID NO: 26450 - DNA, 284 bp, Gossypium hirsutum
  unsure (1)..(284): unsure at all n locations
  Clone ID: LIB3166-012-P1-K1-A9
ccggccacgacgcacgcgtgcgntctaccaaggtcaatccacaccccatgatgttagcagaccctccatttctgagtggtgggttcacccttaagccttctgctctggagtcaagttctcagcttcagctcaacttacagcttctccaagcatcgccccgcgggatgttttgagacttccctcttaaatggtgacagttggttgccctgttctgcttcagggtattcagtactgctcagtattattgtctaagagaatcaaaagttcttgtgatttggtctggg

SEQ ID NO: 26451 - DNA, 180 bp, Gossypium hirsutum
  Clone ID: LIB3166-012-P1-K1-B1
tcccggtccggcgcagacccacgcgtgcggtgtgccaaacagactcaaccagatggtttttttggcaggactgtgcctgtccacgtcatgttctgtaagccccgagaagggcgggacgactgttatttctgtctccgtgtttctacactatgtgtacaacatttctgatgctgaatgttc

SEQ ID NO: 26452 - DNA, 393 bp, Gossypium hirsutum
  Clone ID: LIB3166-012-P1-K1-B10
cccagagtcgccgcggtttcctgcttcaacagttcttgaacggaacccggtgctcgacgggtccgacccccgccggccgctttgagcctgagccctttgcaacttcgtcgctccgccgctccagcgtcgcctccgcgcctcgcccagccgccatcatgaccaccgcgtctccctcgcaagtgcgccagaactaccaccaggactcggaggctgccatcaaccgccagatcaacctggagttgtatgcctcctacgtctatctgtccatgtcttgttattttgaccgggatgatgtggccctgaagaactttgccaaatactttctccatcaatctcatgaagagagggaacatgctgagaaactgatgaagctgcaaaaccagcgaggtggac

SEQ ID NO: 26453 - DNA, 350 bp, Gossypium hirsutum
  Clone ID: LIB3166-012-P1-K1-B11
tttgcttttcaccatgtcccgggaaccctgcgtgttcctggccccagagtgtggtggggggattgtcttctctctacttgttgcctccctaggaaagaaggggttgctttctgaacaaagcctgtagaatctgatgcttcttatgactccctggctgcacaagaagaaaacgttctgtcttccatagatgtttctaagtatcctacctctttgaagaaaaataggaatggagtgaggtgacagtgggacaggacacagaaatatgtgtcctttcacgacctttgcttactatgtaaatgctgtgccccttgggtaccggatcggaacattgagatagcaaagccagtagc

SEQ ID NO: 26454 - DNA, 455 bp, Gossypium hirsutum
  unsure (1)..(455): unsure at all n locations
  Clone ID: LIB3166-012-P1-K1-B2
cgagcccacgccgnntccgggcctgggctgcnntttcggtattcgcaccttcgcaagtccactacttccttannatagtcagctaccgtggcgttgcgagctgtcggtatcnagtgcttcggcaacccatgcctggaacactctgatgctcgcttgcccacaccagatgcgattacaagtgggcaagaagctacgctgaacagatgtttcagggaacttattctttgttctgcaatagttggatttatctacgggtatgtggctgaacagttcgggtggaccgtctacatagatatggctgggtttgctttctcgtgtttgctgacacttcctccgtggcccatctaccggcgccatcccctgaagtggttacctgttcaagactcaggcacagaagacaagaaatcaggggacagaaaaattaagaggcatgctaaaaataactgattgggact

SEQ ID NO: 26455 - DNA, 388 bp, Gossypium hirsutum
  Clone ID: LIB3166-012-P1-K1-B5
ctcaaatagggttctagttcttggggtccccatttgtcaaaacttcacgtaagctcgtaagcatgtaaccatttaactgaactggggtggggaggggtttaatatttataacactgcccacccttgtggtacaagcaatcccactgatgacaatcctatttcctttttaaattactaccacaatggcaagtccattgtacaaatacagaaaatcaacatctggttctacactgcccacccccttggctgatggaggcgcatctgactaagcaacatctgtgttcaccaaaaccaatccatgaagtttacacctatctgagcctgtcctcaaactacttaccctattcactatatatagaaagtgcttatatatcttgcatatgacaca

SEQ ID NO: 26456 - DNA, 235 bp, Gossypium hirsutum
  unsure (1)..(235): unsure at all n locations
  Clone ID: LIB3166-012-P1-K1-B7
ccggnctcgganaacccgggcggacccacgcgtccggtagcctacatggaccaacagactggcaaccttaagaagtccctgctcctccagggctggaacgagatcgagctcaggggcgaaggcaacagtcgattcacctacagcacgcttgtggatggctgcacgagtcacaccggaacttggggcaagacagtcatcgaatacaaaaccaccaagacctcccgcctgcccatca

SEQ ID NO: 26457 - DNA, 412 bp, Gossypium hirsutum
  Clone ID: LIB3166-012-P1-K1-C1
cagaggcagactcacaggccacccgagccattttgaatagcctgttccttctggccatcctggcggctctgtccgtggcagccctgtgctatgaatctcacgaatgcatggactgctatgaagtcagtcccttcaccaaccggagaaatgccaacacctttatatccactcagcagagatggcacgctaaagcccacgaaagagtccgggaactcaacaagcctgcccaggagagcaacacagaggcctgtgatgactacaagctgtgtgagcgctacgccctgatctacgggtacaacgccgtctacaaccgctacttcaggcagcgcgcgggatccaatatttagcgcaaggaaacagtcgctttgttacggagtctggtttcatattcccctgcagtagcattaccgat

SEQ ID NO: 26458 - DNA, 415 bp, Gossypium hirsutum
  Clone ID: LIB3166-012-P1-K1-C10
ctttgccatgcgacctttttttggctataacttcggacactacctggaacactgggtgagcatggagggacgaaaaggtgcccggctgcctcgtatcttccatgtcaactggttccggagagatgaagcaggccgcttcctgtggccaggctttggggaaaacgctcgcgtgctagactggatctgccgaagattaggaggagaagacagtgcccgagagactcccattgggctcgtaccaaaggaaggagccctggatctcagtggcctccgagcaatagataccagtcagctgttctccatccccaaggacttctgggaacaggaggttcgtgatattaggagctacctgacagagcaagtcaaccaggatctgcccaaggaggtgttggctgagctcgaggccctggaagag

SEQ ID NO: 26459 - DNA, 197 bp, Gossypium hirsutum
  Clone ID: LIB3166-012-P1-K1-C11
cgacatgtctagaaggagctctgccccctcattagagctgctggggacagctatgagccgttccttcacacaggcataactatacagctaattcctactattccatagcatttatacttaaccacctcagtgaaccaagcttgaaggaatttaaaaggcaatttagcttaaatacaaaaataaatttttattttgtt

SEQ ID NO: 26460 - DNA, 401 bp, Gossypium hirsutum
  Clone ID: LIB3166-012-P1-K1-C2
gtgccttgtacccaagtgctttgcttacagcaaatgctgtttctctgtgtcctgacgtcgctggggagaagggattgtttacacacggggatgggagcagactttccactactgtgcaatagagataccgctctcttcagagtaactgtgaacctttttttaaccaacactagctagttttaaaagtcgaaatatttatgatgacgattgtatagcttttaagttatttttctaacgtgtggcttttctgtagccatggtagcgccctagatgtgcatctgggctacccagagtgctgtctctgggcacaattgtggcaggtgtcattcatctcggttttggacactaggcatgagtcctgtctcctttctccttattctccctccacaagctgctcctga

SEQ ID NO: 26461 - DNA, 378 bp, Gossypium hirsutum
  unsure (1)..(378): unsure at all n locations
  Clone ID: LIB3166-012-P1-K1-C6
agccttccggccggtgctaaaataactcaagctatgaggagcccttgtcacccatctaagccagctaatgcagctcccaacggcgacaaggccagagggatctgnagctctctgacatgcacatgagggacctggtgggcatgggacacccacttctaccaaagtgagcccacaaatggaatgtagaagatgtctatgagtttatccgctctctgccaggctgccaggagatcgctgaggagttccgtgcccaagagattgacgggcaagccttgctgctgctcaaggaggaccatctaatgagcgccatgaacatcaagctgggccctgccctgaagatctacgcacgcatcagcatgctcaaggacctcctagagt

SEQ ID NO: 26462 - DNA, 411 bp, Gossypium hirsutum
  Clone ID: LIB3166-012-P1-K1-C7
ccagcaccgagtctgccaactttcactgaagccagcttcaactttcactgaagccagccgtctctctctctctccaccatgcagatctctgccgcgcttctgtgtgtgctgctcacagctgctgctttcaccgtgcacgtgtgggcccaaccagatgggaccaattcatccacttgctgctatgtcaagaaacaaaagattcccaagaggaatctcaagagttacagaaagatcaccagtagtcggtgtccctgggaagctgttatcttcaagaccaaaaagggccatgaagtctgtgctgaagcccatcagaagtgggttgaggaggccatagcatacttagacatgaaaacttcaactccaaagccctgaagacagatgcctgaacagaaaccaaccctgaagtcaaga

SEQ ID NO: 26463 - DNA, 384 bp, Gossypium hirsutum
  Clone ID: LIB3166-012-P1-K1-C8
atttataagacatttgaatctattatacatcttactcggatatggcaaaaattggcgaggggtttgttcatttggagctatcaaatatattatctgaataaatacattctcattatattaagaggcaaaacctgtcactttagttcttaaccacaagtcccaaatccaacaaccttataacgtgactggatacaaatcatgccaaataaatacctaaagagcatcataaggatcacctttaatctgatatcacggctagctctaatataaatcaccgacaaaggcatgaatcaagtgactaccacctatacacagagaaagatggacgccttcaactacttaagcatcctaacttgaactccacctgcttacatacagaaccct

SEQ ID NO: 26464 - DNA, 199 bp, Gossypium hirsutum
  unsure (1)..(199): unsure at all n locations
  Clone ID: LIB3166-012-P1-K1-D1
aaanaaccatgcattcaaacaaatcaactccactatttttcaaatcactttccactctctaatacacctaattcaaccaacaaaaccaccctaaaataactcactatttcctaattacatttcaccaactaaaacactatctcaactttaaaacatatattctaacaaatctaacaaaacctactaacatataaaccaa

SEQ ID NO: 26465 - DNA, 350 bp, Gossypium hirsutum
  Clone ID: LIB3166-012-P1-K1-E1
aaaatttacttttcaaaccattttaaaaattttaattttcaatcctataaaaatccaaatgaacgtttaatttcctcaataaaaaaaacacacaccaaaccacacctttataaaaacaaacccaaaattaacacctacaaatccttcaatcttcactttaatactaatattaactcctcttccacttttactgctataaaagtcgcacaccatttacccctttattatttttatctaatctaaaaaccaaatccataccatctcctaatatctaacattttaatacacccaacctcgtttaaagtagcaaatttaaaaacttattttaatcaaaattctattctattcat

SEQ ID NO: 26466 - DNA, 369 bp, Gossypium hirsutum
  unsure (1)..(369): unsure at all n locations
  Clone ID: LIB3166-012-P1-K1-E10
ggaagagtcggcgccgctagtgccgggaccagtagcctccgcgagcaagatggccgctcgcgagaccgaggccagggggcaggggtactaagtccggacccgcgtgcccttctcccggccgcctgcgccctcatcaagacctcgcgcttctagccaagacatctacatggattattctcgccgtggtcacgaggccgttccaatagagctctagttggcccagattgagaactctggcatttggctgctctgagctggaacctccgggaggtctgctgcaacaggtgcgaccctgaccgctccatgctcgtgggcncgcggggagcgtgcctcccccggggcggccaccttctgttggttgctgtgcgc

SEQ ID NO: 26467 - DNA, 410 bp, Gossypium hirsutum
  Clone ID: LIB3166-012-P1-K1-E11
gtttgagctcacaggcatacctccagcaccctttggggttcctcagattgaggttgcttgtgacattgatgccaatggcatcctcaatgtttctgctgtagataagagcacaggaaaggagaacaagatcaccatcaccaatgacaagggccgcttgagtaaggaggatattgagcgcatggtccaagaagctgagaagtacaaagctgaggatgagaagcagagagataaggtttcctctaagaactcgctggagtcttatgctttcaacatgaaagcaactgttgaggatgagaaacttcaaggcaagatcaattgatgaagacatacagaagattcttgacaagtgcaacgaaatcatcagctggctggataagaaccagactgcggagaaaggaagattttgagca

SEQ ID NO: 26468 - DNA, 342 bp, Gossypium hirsutum
  Clone ID: LIB3166-012-P1-K1-E12
agaaatctttgggcaagtatggccctgtcagtgtggcagataccacaggaagtggagcaggagatgctaaagacgatgatgacattgatctcttcggatctgatgatgaggaggaaagtgaagacgcaaagaggctacgagaagaacgccttgctcagtatgagtcaaagaaagctaaaaagcctgcagttgttgcgaagtcttccatcttgttagatgtgaagccttgggacgatgagacagacatgacgaaacttgaggagtgtgtccgaagcattcaagcggacgggttggtgtggggctcctctaaattggttccagtgggatacggaattaaaaagc

SEQ ID NO: 26469 - DNA, 351 bp, Gossypium hirsutum
  Clone ID: LIB3166-012-P1-K1-E3
gtccgtgatcaccaaggaagaacgaagaaagtgttgatgagggaatccgaaattccttcgagtcgaaccgctgccatctgtcccgtagacgtgtatttttaaactaagccctttgcaatgtcccggcttcctaccctactctgtaattttcactggaactggtaacgtttgtctcgtttcgcaatacagtgtctccattgttgtaaaaaaaaaaaacaaggatgggaagcagtccagaaaaacaaaaaaaaccaaaaaaaaaatcccttaataaaaattttaaaaaattaaaagaaaaaagaaagggtgcaactggtcaaaaacaaaaaaaacgaaaaacatttatttttc

SEQ ID NO: 26470 - DNA, 193 bp, Gossypium hirsutum
  Clone ID: LIB3166-012-P1-K1-E4
acccttccgaaggaagcaatcatggtcctctctgcaaatgccaaattcaccttcaaaacctgttgggggagggtggttgcccatggtgttgaatttgccaagaagccctaacaaagattgtcgcttgctttcccaacaacaaaaccttattttttcacatttatttaagcccccgcttttcccaagtcaaagc

SEQ ID NO: 26471 - DNA, 141 bp, Gossypium hirsutum
  Clone ID: LIB3166-012-P1-K1-E5
aacaatctgatttttaaggtaaattataagatccctattgacttcggaatctgaaatggggacagagcatatctaattgtcaagcaaatctgaacgcaaagttaatttgtgtctgaatgagaaccataaggaaaatgatag

SEQ ID NO: 26472 - DNA, 161 bp, Gossypium hirsutum
  Clone ID: LIB3166-012-P1-K1-E6
cggtttctggcacagccctgaatgtgaatttgttcgtcactgcatcgacaagtcccaggagcgggtggaaggaaaggtgcaggtatctgtcttcaagggccaggtgtaaatccttggccgggagtctccactttcactatacaatgaagagctggtgagca

SEQ ID NO: 26473 - DNA, 350 bp, Gossypium hirsutum
  Clone ID: LIB3166-012-P1-K1-E7
cttgagtcatcaattatctctaaagcgtaaagtaataccatactagaagctcggcttacggggacgtcagggaaaagaggaaccctaactgctcaaagccaattcaagagcacacgttggaacttgttgtggctcgctacagactccaactcagcacctactaatgccttacatacagcctatttggtataattgctgacatgctaacctatctgggaatagtagatgctaaaccgaactacatgttcatggaaccaaggattgctccattctggtaattcaagtatagcgcgtatgccatttacggatgacttatgatgcatcatgccaaatatacatattgaataatt

SEQ ID NO: 26474 - DNA, 371 bp, Gossypium hirsutum
  Clone ID: LIB3166-012-P1-K1-E8
aatgagccggtcacaggttcagcttaggttcagtacagaggaagatagacaccccgttagcagcaagagtgctgtcttgtgtgcacaggaaaggggtacttgctgggcctcagctttaaagaccagcttcctttagtatctaacagattaatgcattctacccttatatcaagtgccttgtagcctgaatttcctgaggcctgagatctttgcttctctaccttactgcctaacacatacttcccttcagcacactggagactcaacacacattggatagcccctctatgccaggagtgcaatatcagccctcttcccagaggttcttaaaaagtccacaagcagctgttctctgccccattctgcaagcg

SEQ ID NO: 26475 - DNA, 353 bp, Gossypium hirsutum
  Clone ID: LIB3166-012-P1-K1-E9
cgaatgctgaacaagcagaggaggcgcccagccttccacagtgcaatggaagagagggaggtagttcttgtgaacaaatgtgtgatggaccagatccccaggatgaactgtcctcatcactgagacgtgacacaggagcacaacaacccacaagtgaagagaggtgtacctgtgtcatgtgttccccaacatatgtgccagaagacctagaagcaaggatgggaagcagtcaaggagccatggacactgggaggaaaattcctgcaggaaaatccaagaagaggagaagaaaaaagaaaggttacaactggtcaaaaccaaagcggaggaagccaatgattgtaccgagaaaa

SEQ ID NO: 26476 - DNA, 383 bp, Gossypium hirsutum
  Clone ID: LIB3166-012-P1-K1-F1
gaaatgtcctttaatccagttgcatttctcagtcaattaagtggtgcgccctgctacctggtagggtgtcaacaaagatgctattattaccctctccattttgtaccataatagattttaaaaatctaatgttctttattgcaagacatgcttttgttaactgatttgtttctttgtaacattttacgtacagtttgacatgctcacaggacagggttgtctgtttatttaacattgtagatgtgtaattaataaacaaggctcactacacgatttagagtaggcttcctcatttatgttctcttccaaattcgatcagttagcaaaactattaatacacaaaatatttctacatatgatgagaatggttacaatttcagttt

SEQ ID NO: 26477 - DNA, 419 bp, Gossypium hirsutum
  unsure (1)..(419): unsure at all n locations
  Clone ID: LIB3166-012-P1-K1-F10
gggaaccacagctgatgccatgtgtcctatcctagagtttgaagcagatcgccgagcttgcatcatcaccatcaactctttcggcacagagctttccaaggaggaccgtgccaagctctttccacactgtggccgactctaccctgagggcttggctcagctggctcgggctgatgactatgaacaggtcaagaatgtagctgattactacccggaatacaaactgctttttgagggtgcaggtagcaatcctggagacaagaccctggaggaccgattctttgaacatgaggtgaagctgaacaagctggccttcctgaaccagttccactttggtgtcttttatgcctttgtgaagcttaaggaacaggaatgtcgcaacattgtgtggattgctgagtgcatngcccagcgccatc

SEQ ID NO: 26478 - DNA, 415 bp, Gossypium hirsutum
  Clone ID: LIB3166-012-P1-K1-F11
aaaggatccccaccctgagggaagcagttacatagtgcctctgccataacctcaccgtcgtcttcgatgtcaaaggccatgcagatatggcttctgctgctctaaagaatatatacatggaatttccccagctgtacaacaacagtatggtctgctcattcttgccggaagtcatctataaaatgagacaaacagatcagaaggtaatcacagccctgactcacaggccttggagcctgagccacactggagacgggaagcctcgctacagcgtcttttggaagcagtctgtgtttgtggtgttggacatcttgcttgactggagcatgcacaatgtcttgtggtacctgtgtgggatttcagccttcctcatgcagaaggattttgtctccccggactatttggaagaagtggt

SEQ ID NO: 26479 - DNA, 143 bp, Gossypium hirsutum
  Clone ID: LIB3166-012-P1-K1-F2
gcgtccgaagccactcttttaagaacttttgtctctcattatacttactgtagctagcttgaaacccgcccggcggcctactttcgtagagcacccaacgttatccatcactactccctgccccttggcgagcggaactctga

SEQ ID NO: 26480 - DNA, 314 bp, Gossypium hirsutum
  Clone ID: LIB3166-012-P1-K1-F3
gttttaaagggccagtgtgccgccgcccccttttccctccatgctcctttcggtgccgctcctggttggcctcctcggcctggctgccgcagaccctgccatctatttcaaagagcagttcttggacggagatgcctggaccaaccgctgggtcgaatccaaacataagtctgattatggcaaattcgtcctcagtttctggcaaattctacgggggaccaggaagaaggataaaaggtttgcagacaagccaagatgcccgattttacgcgctgtccgccagattcgaacccttcacaacaaaggccagacac

SEQ ID NO: 26481 - DNA, 258 bp, Gossypium hirsutum
  Clone ID: LIB3166-012-P1-K1-F4
acccttccggttgaaccacccgccacaatccaaatttttgttaataccctaacaggaaaaaccataaggctgggggttgaaccttgggccactataaaaaatgtaaagcccaaaatccagaataaggaaggatttcttcctgatcagcaaagtttgatctttgttgttaagaagttggaaaatggccgaactttgtttaattacaaaattaaaaagaagtcaattctcaatttcggcttaaaacttcgggtggcccct

SEQ ID NO: 26482 - DNA, 142 bp, Gossypium hirsutum
  Clone ID: LIB3166-012-P1-K1-F5
ctgctaccaaaacaggtgaagaatatttcttaacatcacaaatggaaaccatcttggagggctgcgaaatacctggaatttcgagaacgtaaatgagtttaaaataaatgtggtcacactacattaacctaaagcgcactat

SEQ ID NO: 26483 - DNA, 137 bp, Gossypium hirsutum
  Clone ID: LIB3166-012-P1-K1-F6
ccaacccttccgttcttttgtgggtccttctgtaattgttaagcacagcctggggccaggatggggactacgggtaccatccataccaccagtaccagaactacagtgacaacggatgggtgaacctgaaccgtcag

SEQ ID NO: 26484 - DNA, 388 bp, Gossypium hirsutum
  unsure (1)..(388): unsure at all n locations
  Clone ID: LIB3166-012-P1-K1-F7
cagacttcattcttctttagttgttgactacctcagaagagaagaaaaggacattgcacggagtgatgccttttacacataatatacccccccccacacgctgtaactagaggacccacttcacaaactaacctctgctctttggacgctcggttgtctggttcacgagaattccgtctcacattcttgtgctaaaatacaaaagccctagtaccgggtgcaatttagctagaactttaaatgtagaagtcagttgtgttggctccgaattcatgtcttttgacaaaatacacttggtcctatctacgggttccacatncagactcaaccaacctcaaaaaggagatattcaagaaaaatagcctgtactaaactcatgtattttttc

SEQ ID NO: 26485 - DNA, 279 bp, Gossypium hirsutum
  Clone ID: LIB3166-012-P1-K1-F8
ctctaagaaaatttacttgtttctctacagcagaaatagggagatggaacacatctgtgcacatgtctgcaaagtgggtctcagatcacatccttttttttttttttttttttttttggggtctttttttcggagctggggaccgaacccagggccttgcgcttcctaggtaagcgctctaccactgagctaaatccccagcccttatcctttctaaagcaggcttcttgttgcaaccgtactcctggcttttccaaatccagcacaaatacgtctagt

SEQ ID NO: 26486 - DNA, 341 bp, Gossypium hirsutum
  Clone ID: LIB3166-012-P1-K1-F9
gtcggagcgtgaagggcctggtggcagtaataaccggaggagcctcgggccttggcctgtctacagccaaaagactggtgggacaaggagccacagctgtacttctggacgtccctaactcagagggtgagaccgaagccaagaagttaggaggaaactgcatatttgccccagcaaatgtgacctctgagaaggaggtacaagcagctttgactctagcaaaagaaaagtttggccgtatagatgtggctgtcaactgtgcaggcattgcagtggccattaagacataccacgaaaagaagaaccaggtccacaccttggaggacttccagcgggttatc

SEQ ID NO: 26487 - DNA, 427 bp, Gossypium hirsutum
  Clone ID: LIB3166-012-P1-K1-G10
gccatctcgcctgccattccttgacattgcacctctggacatcggtggtactaaccaagagttccgtgtggaggttggccctgtctgtttcaaataagtgaactcaacctaaattaaaaaacaaaaacccctgaaaaaaactttctctttgccatttcttccttttaaaaacaaaaaaaaaaaacaaaactgaaagctgaatccttccgtgttttctatgcacctacatcttaaactgtgggcaaaagagaaggattggtcagagcagtgtgcaatatgatccagataagtcccctccctcaggccctccccaaaacgtttgcagtgttatttctgtgggtttttttttaaacactctgacacctgttgtggacattgtcaacctctgtaagaaaacccaaataaaattttaaaaataaaataaaaa

SEQ ID NO: 26488 - DNA, 188 bp, Gossypium hirsutum
  Clone ID: LIB3166-012-P1-K1-G11
ctcgtttccagttaaaaaaaaaaaaaattaattataaaaaaaaaaaaaaaaaaaaggaatggtttaattttaaaaacatgcaaccacccaaaactcatcataccatatattaccttattaatactgaacaatttatccattgataacaccaacaccacttgtcattattccactcatacaccacatac

SEQ ID NO: 26489 - DNA, 416 bp, Gossypium hirsutum
  Clone ID: LIB3166-012-P1-K1-G12
actggttcggatcccactgtgactgcagtgaatctgcctggagattcaacagcaggctggatttgggcccgtaacttctggcaaccaataatcattggccatagggaccagagtattccgaggggtctattctggaaaacaggaacaccgtttgccagcaaggcacctgctacaccacagaccctgcttccgtccagccatgaaagccctgctcagccctgacccaggcttgcttcctcatggttcgaggctgggatctgaagtctctcctctgtcccctttcccaggtacttgctttaccgagctggccagggcaaaccaatgcacacagcctttgtatgcttgtagatgttaacttgtcgatgacattaatattgtgaattattttatagagttgattttgtatgcatgtactc

SEQ ID NO: 26490 - DNA, 151 bp, Gossypium hirsutum
  unsure (1)..(151): unsure at all n locations
  Clone ID: LIB3166-012-P1-K1-G3
cccatgtttccnaaaaaagtgttacttgatatacctattggttagataatgaagactagagcctgaagataatttataaaagttttgcttatgttgggtcgtccgctatatactaccaaattttaccatgtcactcttgtcgaaaaatacc

SEQ ID NO: 26491 - DNA, 395 bp, Gossypium hirsutum
  Clone ID: LIB3166-012-P1-K1-G4
tgtacttggacatctggctgggcctcgctactttctaatcgtgtcctgcagccaatgagggctgggttctttccaagggggttttccccacctgccacctgttcctaacaattttgcccgaacgcaacttgcttcccggccttaattccttgaatgtgtctgtgcctccaggaattcttttccactcaatttccagccagaaaaagggtttccttgtccagaaaaaaggccaacttttccaaaactcctgagaacccttacctacgtttgaaggactcaaagaggcccagtacccaggactaccatcgtggtcagaaaaacagggcaaatgtgggctgacatagactgtctgagatgagtcacacattcatcctcaggcttggatgtaatggacc

SEQ ID NO: 26492 - DNA, 325 bp, Gossypium hirsutum
  Clone ID: LIB3166-012-P1-K1-G5
accggatcggacagcccgaccgacgcgtccgggagattacgttctggctgtaaagtggggggtttagttcatccccggtagcccctttcgggtcagtgtgctttaaaacacgctgtatcctgtcctgaacttgtcctttccagttgcttttgttgctagttggtaattcatttttttacaatgtccgcaccctgctgtggggccagaaaaccccgttccataaaaaaaactttgccactcattccaagtgcctttagtgcccttagactcttgaggacatgtgagacatttttctgaaagcaaagctgctgacaaaaaacctaca

SEQ ID NO: 26493 - DNA, 298 bp, Gossypium hirsutum
  Clone ID: LIB3166-012-P1-K1-G7
ggagattacgttctggctgtgaagtgggtggattagcacatccccggtagcccctggcagtgtcactgtgccttaaaacaccctgtatcctgtgctggacgtgtcccttccagttgcttttgttgctagtttgtaattcatttttttacaatgtccgcagcctgctggtgggccagaaaaccccgtcccaaaaaaaaaaccttgccactcattccaagtgcctttagtgcccttagactcttgaggacatgtgggacatcttcggaaagcaagcttcggccaaaaacgtgcagagcac

SEQ ID NO: 26494 - DNA, 410 bp, Gossypium hirsutum
  Clone ID: LIB3166-012-P1-K1-G9
ctgagtaatatcatgatatggggaccgcagaatccatctccggtgggatgatggtgtaggtttcctagttccagaaaaatctccttcacattttatataataatttaatcacaatgtccatcgaattcttccttaggcattctttgtaacagtagtgtgctgctctttaaaatattaacctctgacacatgtgtgaacctcattccctgtggtcactaaaatttcttccccactgagcatcaatctttagcagattttaggaaaatactgaattcttagtcaggaaatattttaggaataatcttgctaacagtatattaagtaataaaattacccactctatgtgtgtttcattttttttaaatcacatagaccatggtttttattaaacaatgatttcaatttttccc

SEQ ID NO: 26495 - DNA, 301 bp, Gossypium hirsutum
  Clone ID: LIB3166-012-P1-K1-H1
ttaggccaaccgtgaccaaaaccccaacttttatttttttctttccttcatctctagtagggcggttaaccagagttcttttggaatatattctctacatgctaatatagtcggcgaaggacaaactgtcttgtgttggattctttagcattgtcagttttttcttgacatttctactgtactattataggtcacaaatcctgacgaaggtagggcttgtaaggggaatgccagtgtgtaccaagcatggcgctgtaatcccttcatgaaagagttgtttaaaaattgtctaacaggatcc

SEQ ID NO: 26496 - DNA, 381 bp, Gossypium hirsutum
  Clone ID: LIB3166-012-P1-K1-H10
gatttcttagatggatagggttaaaaaatttttttatatttaaatgtatatttttgagagagatactacattgccaatgactttataaataatcttaaattaacttacaaatttataagatgcaaaccaaaagattttttttttaaagagagagagagaaaagagaaaaaaagcttttattcttttggatctcattatcagaagtattattcagctcgagaaatctgattcccatattggaaaaatgaacgtccttaagtattcctgaagtgtaaaactgggtgtctcctcccagctcttgttacagtgtttctgaccgcttcttcacccttcacagatttaatacaaagttacaagccttacttttataacatatcctac

SEQ ID NO: 26497 - DNA, 285 bp, Gossypium hirsutum
  unsure (1)..(285): unsure at all n locations
  Clone ID: LIB3166-012-P1-K1-H12
cctagcacccacccgtaacatgcgcggacgggcacctatctaacattgtatggtcccgcccacattctgggccggcggcggtgcgtcattggagccatgaacgggnaccccatctgcagcgcgctgccccacatcccctaccacaagctcgccgacctgcactacctcagccgcggcgcctcaggaaccgtctcgtcggcaagacacgccgactgcccgttgcgggtggcagtgaaacacctgcacattcacacgcctgtgttcgacagtgaaagaaatgatatc

SEQ ID NO: 26498 - DNA, 266 bp, Gossypium hirsutum
  Clone ID: LIB3166-012-P1-K1-H4
taccggaatggcagggccgacccaggcgtccgcaggaaacggggcattcactgccccattgatgtgtccttgacccctgacgtggtgttgggggcgatcctgtcagccttctgcaaagccacatcctagtaccagaaggccaggcgcgaccgaaccactgctaatttccccgccgggtgatccccgctcttaggtgctgggcagaaagaaaaaggggtgggcatgggaaggaaggatgatggatggtgagggaggtggggagggct

SEQ ID NO: 26499 - DNA, 335 bp, Gossypium hirsutum
  unsure (1)..(335): unsure at all n locations
  Clone ID: LIB3166-012-P1-K1-H5
gtatcactttctactatgaataactttatatagtatctacggggcagtaccctgaggcanagatagttctaattctgtaaaccagctntttgggagctgaggttttaagttctttttatgccgttgtttactagttgacctgaacagtgaggcaggactgttaacatattctccttggtagcaagtcttccctgtttcacaaggatttgtttataaaatcgggataactgttagttggcgaaatcagccagagtcacaaaccaacctgctcaaatggctgttcattgtggagcattggccttttcaggcatttccttggtgcagtagcatgccat

SEQ ID NO: 26500 - DNA, 344 bp, Gossypium hirsutum
  unsure (1)..(344): unsure at all n locations
  Clone ID: LIB3166-012-P1-K1-H6
gacctacccgtaacatggcggcacgggcacctatctagtattgtatgtttcggggccaatcttctgggccgcgctggcgttcattgtggccaagcaggtactgnctgnccgaaaggtggtggttgtacgctgtgagggcatcaacatttctggaaatttctacagaaacaagttaaagtatctggcctttctccgaaagcggatgaacaccaacccgtctcgaggcccctaccacttccgagccccaagccgcattttttggcgcactgtgcgaggcatgctgccgcacaagaccaaaaaaaggccaggctgccctggaacgcctcaaggtgttggatgggatc

SEQ ID NO: 26501 - DNA, 260 bp, Gossypium hirsutum
  unsure (1)..(260): unsure at all n locations
  Clone ID: LIB3166-012-P1-K1-H7
ggagatgccatctgagcgcctgtgcaggagcatccgtcagcgggcagcctgtggccagctcaatgacttcctgcaggagtacagcagccaggggtgccaggtgtgagggcgtcggactctggatccctgagctcagccccagggtcagggcctctcacgaagcagggcctgcttaacagggtaaataaaataaaacttttgaccgtnaaaaaaaaaaaaaaaaaaaaaaataaaaaaaagaaaaaaaaaaaaaaataaaa

SEQ ID NO: 26502 - DNA, 303 bp, Gossypium hirsutum
  Clone ID: LIB3166-012-P1-K1-H8
ctcggaccctgtagccgccgcgatgttgatgctcaagaagaaccggattgccatcgatgggctcctttttaaggaaggggtgatggttgccaaaaaagacgtccacatgcccaaacaccccgagctggcagacaagaacgttcccaaccttcacgtcatgaaggccatgcagtctctcaagtctcgaggctacgtgaaggagcagtttgcttggagacatttctactggtacctcacgaatgagggcatccagtacctccgagattacctgcacctacctccggagatcgtgcccgtcaccct

SEQ ID NO: 26503 - DNA, 314 bp, Gossypium hirsutum
  Clone ID: LIB3166-013-P1-K1-A12
ctcaaatctcctgctcatcctcgtaaattttattatcatcaccatggcctaaaatcccaaggtgttatatgacatgactatcggtggacaccccacatcacatattgtgatggacctgttctcagattgcactaatcgcactgctgagaactttcgtgccctctgtaccggctagaaaagcgacagccgcagccgtaagctgctgcactacaaaggctactgtctacatcgagtgatccataactttatgtgccaaggaggtgacttgaccgacagaaacggtaccggaggtgaatacatatacggatccaagt

SEQ ID NO: 26504 - DNA, 434 bp, Gossypium hirsutum
  unsure (1)..(434): unsure at all n locations
  Clone ID: LIB3166-013-P1-K1-A4
cacaccctcaggagattgcttcaatcttggtgcatgttaaacgcttcccttggaatcgaaagggtcccgaccccaaagccacccatcagcaaggctcagattgtcaagcttctcatcgatgccaagtcaccgcagcaacagatcaagtgtctcgacactcttaaatcaatcgcaaccgagaatgctactaacaaaaggtgcatggaatcatccggcgcagttgagttcttggcttctattgtctgtaattacgaccctacagccaccgaagaatcattagattacgagttcgactcaataaaaccgattgatgaagctntaagcattctgtacagtctccaactctcagaagcttctctcaagaaccttatgggcaaaaacggtgattttattttgtccttaaccagngtaatgcaacgtggaagctatgagtc

SEQ ID NO: 26505 - DNA, 387 bp, Gossypium hirsutum
  Clone ID: LIB3166-013-P1-K1-A5
cccacgcgtccgcggatatttgagaatcatgttgtttttggagagcttattcagtcaaagtgggccctacaaagtgacccaaatgcacaaaagtcaatgtcaacaaatttaaacctggattctgaagcatctcaagttactggaggctatagtattggcttctccttgacagtattacagagtgaatgccaacaactcatttgcgagattcttcgagcaactcctgaggctgcatcagcagatgccttacaaactgccaggcttgcaagcaaggttcctacaaatgaaaagagggatgggtcagaagacacactcacttttgctttccgtttcacagatgctactgtttcagttccgaaccagggcgttgatctcattcgccaagga

SEQ ID NO: 26506 - DNA, 414 bp, Gossypium hirsutum
  unsure (1)..(414): unsure at all n locations
  Clone ID: LIB3166-013-P1-K1-A6
aatactcaatcttctaattatctctcctctttttttttagttcgtctcatatcttcaaaatcggcaacaggggaagcaagctaaagcacccaccctcttcccatttttctccaattattatctttattcatccattattctctctttgtgtctatgcttttgttcttctcatagtcttctcagtgttgcctaaatggcgtctttgagctttttttttcccctctggtaagtttttntggactgggttttttgaaaggatccttgtagatgactttgatttcagtactgtctttcaatttttcttcattttctgatatgggttttctttattaattcattgaattgatgttttgatattctatttgttggttcttcttattattttctaaatgtggggtttttcttttttttttc

SEQ ID NO: 26507 - DNA, 222 bp, Gossypium hirsutum
  unsure (1)..(222): unsure at all n locations
  Clone ID: LIB3166-013-P1-K1-A8
attcttgtaaaatattcttccctaatttgtatacctttatgagaaggaaactaaaaaacgagatcgaaagaataaagcaatttcggggtcaccccggttttagcagggcaggtgactgtcctagatgtatcttttagtctttgatgatcatgctctctatgatatctacatttggtnaaaaaaaaaaaaaaaaaaaaaaaaaaaaaaaaaaaaaggacggcc

SEQ ID NO: 26508 - DNA, 241 bp, Gossypium hirsutum
  Clone ID: LIB3166-013-P1-K1-B3
gatttgcctccttttttcaatatgtcgttttgagcttcaattctcagcgttttgggctggcctgtttcttttttttttccttaatttttgggttaaaatttaaaactgacatgtaatgtatgatgtatgtaaaaaaaaaaaaaaaattgtaactcctagagatctatatttttggcaacttgagaaaattttctcaatgttgcttctcctttattataattaaaaataataataacagaaa

SEQ ID NO: 26509 - DNA, 407 bp, Gossypium hirsutum
  unsure (1)..(407): unsure at all n locations
  Clone ID: LIB3166-013-P1-K1-C10
cttcaataatgatcttcggccattcttgttcaactcctgtttggaccgctttttggcaagctattgcttcagctgcaaaggcgaaagttaccccatggtggatctctgaacaggaaagtaagacaaccccttcttcatttctagctacaattcctaaggcagattgttgatgagtcgcatcattagcaccatcaaaattaattttgacgaactcactagtcttttatttctctctccccagatagcccagagaccgcagcagaagagtttgttctgacatgtagtgagctgatcaaagatctagggaatccactgtaaaaaatccatggtagaatntataagaatattttgaagatttaatagtgtccaaacttccactgtgacaggacattcgcgaaagatatgat

SEQ ID NO: 26510 - DNA, 292 bp, Gossypium hirsutum
  Clone ID: LIB3166-013-P1-K1-C12
ctcacttaacttcccgcgattgctagctttattttctctgaacgaccttcccaaaggaagggataatggatacgaaaaattcatgttgagagtattacacatctaagatttggataacaccttttcgtacaccatatttgccctcacaacgaacatcttgttctcgaaagttctaacgaacaccgatatacataaaagattgtcggttcccaacaattcactgaagcattccgagcttgaaaactggcattgctccaaatcatttgaagctaaagatgaaaacggattcaca

SEQ ID NO: 26511 - DNA, 394 bp, Gossypium hirsutum
  unsure (1)..(394): unsure at all n locations
  Clone ID: LIB3166-013-P1-K1-C3
ctctcttctctttgatccccttcaaatcccagattttcaccgtcttctaaccccaaaacgggacggttgcaaataacacaacccaaagcacgaaattccatcaccttcatcacgactatattctaacagaattagtatcgntaccattttttcttgttttctattgaattgcaggacacaaaacaaggggtttcggagttttggtgctctggatcctttttcttttacttcgtcgaaaaggtggtagatggtggaatcagaagtaaagaagatcaagaagggggataaaatgaagtggagatgggtgatcggagctttcactacgattcttcttgctatcgctttggcttcaagaagtacaccaaagatcccttttaaatctggacagtttagc

SEQ ID NO: 26512 - DNA, 419 bp, Gossypium hirsutum
  Clone ID: LIB3166-013-P1-K1-C9
aaagattcaactcccaaaaccgaacccagtacaccataatctcgaaaccgttttgaaaagtgctttactgctccttttgctgcttaaaaacccaacacccataacttgttttttactcaattcaatggatattccaagtcaaacgtgtgacgtccccttctccaagtcttattctatgcttgctgaaagggtagagccatcttcatcttctgaagggggcattggtggccagcgagctgttcactctgacgaggaagtgcttttactagcgaccaacaagcctaagaaacgagcagggaggagggtattcaaggagacgcggcatccggtttttagaggtgttcgaaggaggaataatgataaatgggtatgcgaattgcgggagcctaataaaaagactcgcaattggcttggaacgt

SEQ ID NO: 26513 - DNA, 421 bp, Gossypium hirsutum
  Clone ID: LIB3166-013-P1-K1-D1
ctcattttgagtaatttatttattaggtttcccaaatattattaagaaaataaataatagtacgcataaaatttaatccttttttttcacccaccgattcaaccctcctttttgatttgataactttcttcctctcaatttttcaccggaatatgttatgtgttccacatcttcaggctttactgcaccgctgcaatcattgttagagagctacaagagcattttcagttgcatgatccaatggtggcaaaaggctagaagagctatggattgctttcagagtgttagccgtgttaaaggttccctatgccaacagttattaatattcattttctggttatcgagtttccaagatgttgccacattgcatgaccctagttacattccttccacgtctgagctagctaatccaccgactact

SEQ ID NO: 26514 - DNA, 286 bp, Gossypium hirsutum
  Clone ID: LIB3166-013-P1-K1-D7
cccacgcgtccgggtgttttgagtttcatgtgtggtgaatgaaaagaggtatttctgtaggagcagaggcagagatggagggggcagtggtgggtactggaagcccatagggagagagaaaccaataatagaaacaggaagcaatgaggtggtagggatgagaagaactatgactttctggggaaggaagccttctaataacaccaacactcgatggttcatgcatcagcattgactaattcattctaatgcaactcaggaaatataattgatgcttaagggtaca

SEQ ID NO: 26515 - DNA, 186 bp, Gossypium hirsutum
  Clone ID: LIB3166-013-P1-K1-D9
gctagatttaatttcgatggaccgctcatatttaatagggataactaacctgataattgggggcatgataagaatttaacggactaacctgattctatgaaaacagttatcattatcaacggaatctgtggaaaaatgggcactgagaagacaaaatctccccatggtatatctacactgaaccag

SEQ ID NO: 26516 - DNA, 430 bp, Gossypium hirsutum
  Clone ID: LIB3166-013-P1-K1-E2
ttcacttttatgggcaaattttcatgcacgctttttttgagaacctgtcaaaccagacagggggacaggaaacgtcttccgtcagtaatgagataccaagtttgtccactcgacagaacggttatgcctgtatttcagccagggctgttctgctccgaggcatttacacagagcggactagaaaggatgtgaactgcatgacctgcgagcttatgacgtgacaggcgcttactatgtattagagatcaccttctgaattgaagaaccatggcacagctggcgataaccaaatgctacgagctgctgagctttactcgccaaccataattggacctgtacaagcccaatttctgacccagggcccaataacagattttaacctataaactacccaggcccaactagtctaacccaattaggccaaacatat

SEQ ID NO: 26517 - DNA, 429 bp, Gossypium hirsutum
  unsure (1)..(429): unsure at all n locations
  Clone ID: LIB3166-013-P1-K1-E9
ctggattctattgatcgaaaaagcaacctgtttaatgcttttctaaagttatccaacggaattataggaggtacagaaaaggcaagtttaatggagaaagcagaacaaaatgttagtggtagtaggtttccggttttgaggtcgaagaagtacatttttgtgatagctgtggattgtgattcagtctcggatattcctaaaataattaagacaatcatggacgtagcaggaaaagagaattctattgggcttatattatcgacatccttgtcaatatctgaggtacactcccttcttatctcgggaagcataagtccattggatttcgatgctttaatctgtaacagcggtggtgatttatactatccttcaaccagttcggaagatggtactgngcttcccttcactgtagacttggattatcaatcg

SEQ ID NO: 26518 - DNA, 218 bp, Gossypium hirsutum
  Clone ID: LIB3166-013-P1-K1-F10
gtcaaaactttaaccggcaagaccatcaccctcgaagtcgagagctctgacgaagagctggatacccccacgaagacgtaagacaaggtggagggtggattccttctggatgttgtaatcggccaaggtacggccgtcctcgagctgttttccggcgatgataatacgctgctggtctggtgggatgccttccttgtcttgaggtttagacttgacat

SEQ ID NO: 26519 - DNA, 431 bp, Gossypium hirsutum
  Clone ID: LIB3166-013-P1-K1-F11
cccacgcgtccggctcagtagtatcaattgttttaagagctgggggactaatgcacgagggctggtaaatggcatgcaacagtctttaccggtgacaacaaatgttgttgaaagcttgccctcattggaagtgaaattatcttctcaagaggcttctcccgtgaaagagcccctcctcacttcagacagccatgcacttactgtggagcagccaccggaatgtgctaagaagattggtgaaattgtgccagttgtacaccctgtgaatgatgtaaaccgtggaaccttggagggccatgaaattacttctgctagaacctctaaaactgatacacctattaatgagtgtgttcaacctactggtgctatcgatgaactgcaagttggaagagaaaaaaggcatgatcagccttctgtggtgagagaagtta

SEQ ID NO: 26520 - DNA, 400 bp, Gossypium hirsutum
  Clone ID: LIB3166-013-P1-K1-F3
tctggaagttgtatttcacttggcactgatgtacattagagtctcgaccagagtgatctgagatgtaagcctgggtggaaggatatctttcgtatgaatcagaatgagcttgaagctgagatcagaaaagtttctcgggattcaacccttgatccaaggagaaaagcttatcttattcaaaatcttatgaccagtcgctggatagctgcacagcagaagtctcctcaaacctcagcaattgaatgttcaaatgatgaagacttatatggatgctctccatcttttagagatctagagaaacaggaatttggatgtgaacattacaaaagaaattgtaaactccgtgctgcttgctgtggaaaactatataccctgtaggtttgccatgattaagtcagtg

SEQ ID NO: 26521 - DNA, 434 bp, Gossypium hirsutum
  unsure (1)..(434): unsure at all n locations
  Clone ID: LIB3166-013-P1-K1-G2
cttccgccaacccttccgccaacccttccggcaggacttttttaaggtattggactgaaggtggctgccgcagaaatgttcctgttggaggtggttcaaggaagaacaagagggctttatcatcatcatcaccaccacgaccatcagcttcatctaaaaagcttggtgatctaacaaccccacctactcctaaaaaccctaaaatccatgaaggtcaagaccttaacctagcttacccaccaccaaccgaggactataatagcttgccaaagttcgttgaggtgccctatagccacaaaagcgaccatccgaactctacctcctcttaactcatctcaatgctatngagctcttgaagactgntattaattcaagaggcttgagttcgttcatgtcgatgtcngtttctgattctaatacggtatactcaagtg

SEQ ID NO: 26522 - DNA, 411 bp, Gossypium hirsutum
  Clone ID: LIB3166-013-P1-K1-G6
cccattcgttcgaacttttgtaaaaaatgacttccaacaaagttgtttagaaataaaactccaagattccgggggggactaatcgaacctaggctctgaaaaaagattactgaggacagtgcttgatatcccttttgccttcaaaagagttgaaaccatgctctatagagccaactttgatactgaagtacaatatttgaggaagtctattcaaaccctcgaggaagcgagtgacgaattgaagaacagcatgctattcctcaaactccttgaagctgttcttaggacaggaaaccggatgaatgttggaaccaaccggggtgatgctaaagcttttaagcttgacacccttttgaaacttgttgatataaagggaactgattggaaaactacactgctacactttgtggt

SEQ ID NO: 26523 - DNA, 292 bp, Gossypium hirsutum
  Clone ID: LIB3166-013-P1-K1-H1
gattttgtttatggatggagtctgggttaaagtgggcgttggaaagacaaaattaccctctttaatatttaaactaaccgagctatcttggcgattggttggtacttccattttcctttttctttcaacttccaagcccctgacttgtcggcccggtgtttgagaaggctacgcaatttttcatatgtactataatacccttaataagtcggtatagccagccataaagctaatgtaggtaaggggtatatttgccaatataaaaattgggaataatcaaaatctatatata

SEQ ID NO: 26524 - DNA, 215 bp, Gossypium hirsutum
  Clone ID: LIB3166-013-P1-K1-H2
agccttccgcgaccccttggccggccccttggcttgaaattgttttgttggtacctggccttttgaggggggggttgtgcctttttccttctggttggctacctcctggacctatccccgaccccgtttggccaatgatccaaaggttgcaaagaagggagggggggggcattcaaatggcctggttgatgtttccaggaggcctttaaaatttg

SEQ ID NO: 26525 - DNA, 394 bp, Gossypium hirsutum
  Clone ID: LIB3166-013-P1-K1-H3
ccttccggccggttgttgtggcccattttgaacccgatcttatatatgatggattaaaatatgaagcggagtggattccatggccaggcctaaaccattcaggggtaatatctgcaataattggttaaggagtgtgactaaaaggctgtcttggttggaacttggaagccctctgctttttcatttgcaacggcgatgcggttgtttcaatatccatggaaagattcaaaactatgtatgaggatggtatgacttctcaatcggattgcagaatcgggctgagaggatagatatgtaaaattcataaaagggtgttggagatcttcataaagttcatgaggtcaaatggaggatgatagaatttaaaacagaaaatgttgtacctaaagaataa

SEQ ID NO: 26526 - DNA, 417 bp, Gossypium hirsutum
  Clone ID: LIB3166-013-P1-K1-H4
aatgcccgaccgacgcgtccgaaatgggatcttttcatggtttatgtatgaatgtgctcgatccaaagagttcctatgaagtatggcaatgaggagttttggtgaggaatttatgtatttaatgtttcgaagggtgataactgaagggttttcttgtttccctccaagaggtgggccccaattcttgaggaatggtatttgagaggctttattgaggtgttggtcttgatttttgagaggttatgtttgaggcgggtgaagggcataacaattctgaatatttttagctacaaagtcctatgtcccaaatgaagtaatgcacttacattttccaaaaattcatgtcattagttgttagattattataaaccatgatgttgatgaaaaacttaattttttaattcatctatttataaa

SEQ ID NO: 26527 - DNA, 335 bp, Gossypium hirsutum
  Clone ID: LIB3166-013-P1-K1-H8
cccacgcgtccgcccacgcgtccgcggacgcgtggggaattatgggaggagaatatcaaggctgagcttgttcctatacctgatccaagcctcacggagcaatacgaatatgcaagtgagcatgagataaaatgtcttgttattataacagacatgggtgtatctcaaactggctttgttaaggttcgtcatcttgatcttaagaaggagaaagaggttcagagagaagatcttgtaagatttctgttgaatgcaattgggacacaattccgaaacccttcagtttggttctagtactgtcttcatcaaatttcagtaggtgtatcagtcagaat

SEQ ID NO: 26528 - DNA, 407 bp, Gossypium hirsutum
  Clone ID: LIB3166-014-P1-K1-A1
ggagcaagaagaagatgtcccggtttgccccactctaccgaagatcgaagtccccggaaaacgtcttgatctgattgctgtcaagcttccttgtaggaatgaagggaattggtctagggatgttgctcgcttgcatttgcagcttgcagctgctaatcttgcaacctcggccaaggggttttatcccgtgcatgttctttttgtttcgaaatgcttcccgataccgaatatgttcccttgtaaagaacttgtcttacgaaaaaacaatgtcgggttatacaaaccagacttgaatgtgttgagagaaaagcttcagcttccaactggttcttgtgaacttgcactcccaattgggatcaaagagccaacatattcagggaatgcatctcgagaagcatatgcaacga

SEQ ID NO: 26529 - DNA, 403 bp, Gossypium hirsutum
  Clone ID: LIB3166-014-P1-K1-A10
gcaacgcgtacgtccaatcctacatgcaacaagtcagcgatggaaatggatggagatggaggaaaaaatggaaaaatggctggtgctgctactattgacggaaatatagtccaagctcctctgggtgctttgccccgaccttggccaccaaatgctgatgcttatgaaggtagccaattctcataaagataactgaacatttctggctggccgggtgtgtcatggcaaaagctattcaagactgacggcttttagatctgcctatgtcaatggcattttataaacttgtgcttgctcaagagctagatcagcatgatatactgtcctttgacaccaaacttggcaaaattctgcacgaattgcatgacacttgatcgtcgaaagcaatatctaggatcattgg

SEQ ID NO: 26530 - DNA, 387 bp, Gossypium hirsutum
  Clone ID: LIB3166-014-P1-K1-A2
cccacgcgtacgcaaaaacaaaatgatgcccagacccagtcttttgaatctcttttgatcacaatttattttattttttatttgggatttgagaggttttttttaaaaaaaaatttgtttccattcttaaagttttggagatataaagagaaaaatagaccttagggttaatttgtggttagaaaataaagagattttcttctctccttttttttggtcccaaaataaagaaattgatacttcaaaaatagatagattctaagcgtttttgttctgttaatccttttagggttttttgaacttttttttgttccttttttgccctttttacagctttgattattcccttcttcttcctttaacctgaaattttttgttctattgact

SEQ ID NO: 26531 - DNA, 380 bp, Gossypium hirsutum
  Clone ID: LIB3166-014-P1-K1-A9
acgcatcatcctccccaatttcatcacattattatttcccatttaaccatttaacgttatggggggcactcccagtataaagctaaccctaccccacggccttagctaacactcggcaaacaaacacgcttcatttcaaaccctaagctttttttcaccagaaacatactcaccttccttatatacgatcacttcctttttcaacaaaccctaaacaatcatctcgtcatctcacactaatttaaaaaaaaaaaaacaaatctcgtttttagcatctcgatcttcgttttttttagtactttttttcgaatattcgtatatttgtcgattcgactgttttttgttatttgattttgagggaacagggagagatggtggga

SEQ ID NO: 26532 - DNA, 196 bp, Gossypium hirsutum
  unsure (1)..(196): unsure at all n locations
  Clone ID: LIB3166-014-P1-K1-B12
cccacgcgtncgcccacgcgtncgnccacgcgttcggtttcttagtagcctctgtgaagagcccaatcaaggaaaaaacaaaaaaacccaactccaaatttgttaaaagaaggaaggttgaagattccaaggaggaaacgcccccctctcttccgagagagtttatttaaaagtttcacacactttgaaaggggtg

SEQ ID NO: 26533 - DNA, 282 bp, Gossypium hirsutum
  Clone ID: LIB3166-014-P1-K1-B8
cggacgcgtgggtacttatctaacttgagagatgtcattcatggaagcaagagacaggctgacaaggcaccacgaatggtcagtccgacatctatagcgagcagtgagattatcaatcagataacccatcaagacgttctcaccgactacaaatgtgttctcgagatcaagactcagagctcagctgatgatgatggcacggagggttcaactattgagggaacccttaggcctgacacacctggtcctggagaccgttttatggaacacgactacaatagc

SEQ ID NO: 26534 - DNA, 398 bp, Gossypium hirsutum
  Clone ID: LIB3166-014-P1-K1-C11
aacaataatactcactgagcactgctgggcagcttctagagtattagatttgaaccgaccggcgttacccaaacgccatcacatcatcctcaaattcttaatctcttttctattactcggtctagcttttcgtctcttcgtctccgattctctcagctttttcacttcatccgtcgtcgaagcaccgccgccgttggtggaggagacgaatgtcgtaattgagcctcctcttccagccacttcagcaggtgatttgttgtcggtaaatgagagcaaaacgattccaaacgaggagatatcaatgtcttttaatgcatcaaatgctgcaggtgaatgtgatctattcgtgggggattggatacccgacccgtcggctccggtgtacacgaattcgagtt

SEQ ID NO: 26535 - DNA, 400 bp, Gossypium hirsutum
  Clone ID: LIB3166-014-P1-K1-C2
ctctaaatggattggcaatagatgagtttaaagcagtgacaaaggaagtttgcaagctaccatctgtcctctcttctgcactttttagaaaaatagatgtagactggaccggaatagtgaccagagatgctttcgttaagtattgggttgatggaaatatgctgacgatggatatagcaactcaaatatttgaaattcttaagcgtccaggctgcaagtacctcactcaggttgacttcaaacctgttcttcgagaacttttggcaacccatccaggattagaattcctgcgaaacacgcctgaatttcaagatagatacgctgaaactgtcatatacagaatattttatcacatcaatagatcgggaaatggccgtcttaccctcagggagctcaaaag

SEQ ID NO: 26536 - DNA, 338 bp, Gossypium hirsutum
  Clone ID: LIB3166-014-P1-K1-C5
ctatctctctccggtggctgctttgtatctgagtgtactattgaatgccgagcaaatcgaggacggcggaagtgagagccactatccctagaagaactgctactccaccacacccatatagcatgcaagtgcaccaaagaggaccttcactgctctatgtcacactgatgtatactactgggagtgttagggatccactccattgatcacttgtatacttactgatgaaacctcaaagatcgaccagaaggcgggtggttgctgattaactccaaggaggaagtcgatacgaaaggtgtcgagtggaagaccaaagaggaaggtcgtgaagctttttg

SEQ ID NO: 26537 - DNA, 397 bp, Gossypium hirsutum
  Clone ID: LIB3166-014-P1-K1-D11
cccacgcttgagagagctcgacctatattatttgtagtttgtcttctaacttcagcattgggtggcatggcctttaccattcagtttgtaagagaatttacccgattgggtttgaaccaatcagttggtggggtattggccttagcgttctcaagggagctaagtcctgtggttacatcaattgtggttgctgggcgtattggcagtgcatttgccgcagaattaggaacgatgcaggtctccgagcaaacagacacgctgagagttcttggatcaaaccctgttgattatttggtgacacccagagtcattgcttcctctttagctttaccatttttgactctaatgtgtttcacagtagggatggcatcaagtgcgctgctggctgatagtgttt

SEQ ID NO: 26538 - DNA, 391 bp, Gossypium hirsutum
  Clone ID: LIB3166-014-P1-K1-D2
cccacgcgtccgccaacatcaactagtcagtacactccaagcaacaaggatggtagaagcaatatggatgacaggagtaaacgataaggcatgcaatattggaaaaaagctggagaagaaggcaagttccagtgaggttggttggtggaatgaggcaaaaagatggttgtcattggggacgggacaggggctctgctttttattgtgacaaagggagtgagtaatcatctctataaagttaaacgcccgttgaggacacaatcacgaagccttatgttgagccctcaaaaacccaaaaaaaaaagccttatgctgtatctgctagacctgctatatataccatatgcagtcgtacccatgtaatggaatggtatgggtgagattgagaaac

SEQ ID NO: 26539 - DNA, 394 bp, Gossypium hirsutum
  Clone ID: LIB3166-014-P1-K1-F1
tgcagctttttgacaattttcttagcggtaccattcctcagctgctcggagtatacagcccactttgggtggttgatttttcggacaaccatctgacaggaaaaatacctctttatctttgtcgacgtgctaaccttattttattaaaccttggagctaataatctgcttggagatatcccaaccgggattaagaactgcaagacgttagtacaacttcgtctggttgtaaaccgcctcaatggtagctttccttctgaattatgcaaactggtgaatctttcggctattgaattggggcagaacaacttcactggaccagttccatcagagatcggaaattgccaaaagctacaaaggcttcatattgcagagaatcaatttaattccgatct

SEQ ID NO: 26540 - DNA, 393 bp, Gossypium hirsutum
  Clone ID: LIB3166-014-P1-K1-F4
ctaaacttctttaccttagatttccaagttctctgagatcttcctcctcttcccttttgaaggcggcatctatcaaaaacatcaatggctctccgcctgcctagtatcgataactctaagaaggttcccaagggctactgtgcagtatccagcggagactaccagtagaggaacgtgatgccgtacaccctcttgaaccagactagatgttaagacctgctatggatgccacaagaagagagctgatgtagccatactactggcgggctcacgagtcccagcaatgaagacacctacctcgaagttacctgccgcttgtacacattgtgagatgattaacacacatcaggccatacacttttgtcaaccatatatcactaatacatgtcaaca

SEQ ID NO: 26541 - DNA, 271 bp, Gossypium hirsutum
  Clone ID: LIB3166-014-P1-K1-F5
gaagaaaatattaaagctggtctacttctaatacactgtgggaccagatgtgggatgagaatagagatgcactgcagctgaacatgagctatgaaatgaactcaacaggaaaacttacaacatacaatgactcgggttaagaggttgtaaggcggagttctggtaaatataaccagcagtgcgggaaagggataagtggaagatcttggacgttgcaggatgcatctgacgaagagacgaacagctggtggattataggggatatttaatt

SEQ ID NO: 26542 - DNA, 238 bp, Gossypium hirsutum
  Clone ID: LIB3166-014-P1-K1-F7
aaaaaaaaaaacagttacagatcgctagatcattaaaaaatctaaatcgagttcgaagagttgcagctttgttgaggcggttgtttttgtgtgtgtgtttgggttatggtaattgtctgaagagaaacaaaacaaagatggttgcggcagctgcggttgttttcaactaagggtgccggctttcgttgatccatattttggttaagtaagtttcattttggttgttgatcaacttctt

SEQ ID NO: 26543 - DNA, 140 bp, Gossypium hirsutum
  unsure (1)..(140): unsure at all n locations
  Clone ID: LIB3166-014-P1-K1-G1
atagtcctcatgtactacgcaaactttctttcttcccccgaaggctacttccataccgttatctgcaacgccaaggagttccggaacaccaccgttaaccacgaacctccatttncatatcatgnnggacaaacccaccg

SEQ ID NO: 26544 - DNA, 408 bp, Gossypium hirsutum
  Clone ID: LIB3166-014-P1-K1-G10
tccactcttacgtcacagcgtacgcccacatgcgtttacaaatttgaatttctgggacatgcgggcgtcgccaaacatggagaaaaccaggaaacttgtcctattttcatgcctgctgctggtttctttcttagcttcatcgtctgcccaaacctgtcttaaccatagcttttccaacaggcaatacgccaactgcagtgaccttccagccttgaactgtttcctccactggacatatgatgaagcagctggtaccgttgaggttgcctttagacacaccggaaccacctcatccaggtggtcggcgtggggcatcaacccaagcggaccaaccatgttgaacacccaggctctggtcgcctatgtcaactccagtggcatccctcatgctttcaccacatccatcga

SEQ ID NO: 26545 - DNA, 397 bp, Gossypium hirsutum
  Clone ID: LIB3166-014-P1-K1-G3
ctccttttctttttccttttcatttctagggttttcttttgttttttttaaattgttcactatttgttttaaaattttgtttggttgaaatttcagtttattttatgatattcatcttgttttagtttttagggtttttctgcgattttttttctcattgttgtggttcgattaatgaagtatgattgagatgtaaaatcgtgaagttattatttacagagaaaagaaacgtctctcgctctcctttttctccattttgaactccaaatttttgtaaaaagaaaggaaatcaaaacaatgtcaaagagcaaagcaagaaacaaaaagcgtggatcggagtccttgctcagaaaatcggatccgaaaacccgactcattgatgatttcgatcctgatc

SEQ ID NO: 26546 - DNA, 398 bp, Gossypium hirsutum
  Clone ID: LIB3166-014-P1-K1-H4
cccacgcgtccgggggctggaaaaaatagatcgtttgttcaatacatatgcaaatagttccgcgggcatgattgatccagaaggtattgaaacactctgttcagatctagtaaagtgcaagacaatggtcgagcctcagaaatcactggtagtgtaccttttagatcaactgatggagataagaagttacctgataggttataattgttagctttttgagcggaggatatgaatctattttgcttcatgtggaggctgaagctttttctctatggtgatgatgatggtcaaccgaatactaatttcagcacaatgcgagttagaatatgctcagtttttggttgttgcttagaatcctctgtttgaacagaagagggaccttcatgtacttcggttac

SEQ ID NO: 26547 - DNA, 198 bp, Gossypium hirsutum
  unsure (1)..(198): unsure at all n locations
  Clone ID: LIB3166-014-P1-K1-H7
cggactcgtgggtggaatttcttggcttannctanntgtggatggccatccaccatgacgaatgtcttgacactggtgcgtacgcgttgttttacctgtgcttcttgttgttatttcaatatgtttcaatttatctgttgaaaccactctttactcatgatccattcctatattacacacttttttttttttatagtt

SEQ ID NO: 26548 - DNA, 484 bp, Gossypium hirsutum
  unsure (1)..(484): unsure at all n locations
  Clone ID: LIB3166-015-P1-K1-A1
agtacaaaaaaagcgnnacaccacacgagaggtgtgtgttgcttannacaaccatgaanntgatcgnncaatgctttgttgacccaagagtgggananntattttgcnnctggcaccaaagtgngtgngacttctcannaaatctngnntcatcccaaacggagtttggacttttctaaacttatgtangcncatngnnctggtgattcaaagggtacaaagggccgtccaagctcaattantnncatgtgnnttatgggatgaagaaccaaagtttacaagcttgatgctttttgcagtcttcttacccaaacaacctttgtctatacaatattgcaaaggtgcacgcgatcntgtgtctattcgttccttcctgcatanctatgctcatctnntgctgcattccgagctcgtttttacatggaaccagagacttcagacagtggatcaatgataagtggcctggcagcagggcgaggaggta

SEQ ID NO: 26549 - DNA, 477 bp, Gossypium hirsutum
  Clone ID: LIB3166-015-P1-K1-A3
gtaccggacctgaaggcccggcgccaggcgtccggcttcgatcgaacctcgaccctccgtctgccattctcgattcaccgtgatgaacggagatcaggctgtgcgagcctcaaggtggtgtcctttccgccttccactcccctcggacttcgatttcggcgaagcaaaggagatctcacggcgtatttacgaggtgaagtttcatttccctcttttcctttttattgtcttagatgcgaaaaataaggaaagaaaatcgaaaggaatagatcaagtgaaaaataaacaataaatccaaagattcaaagaacgggaatcaccttcctcttttttccttactttgtattcaaaatctgtgtgttttttttttgcgtatcctctttttacaacgattacagatcctagcttttatatccggaaagaagaaagaaaaaaaaagaattaaaagaattcgacatttgttctttggtttttttt

SEQ ID NO: 26550 - DNA, 478 bp, Gossypium hirsutum
  Clone ID: LIB3166-015-P1-K1-A7
cggaactccaggcccggcccagccgcacgcgtacgcccacgcgtccgattgttcccatccccttatagctaagcatttggatcctgatgaatgtgcgtgggcttatgggatgaatatatttgatctccgcacttggagaaagacgaatataagagaaacatatcattattggctgaaagagaacctgaagtcgaacctaacaatgtggaagcttggaactctgccacctgctttaattgcatttaaaggccacattcatccgattgacccatcatggcatatgcttggcttgggctaccagtctaagaccaatatcgagaaagcgaaaagagctgcagttattcattacaacggccaatcgaaaccatggctgcagattggcttcgagcatcttcggccattttggaccaagtatgtaaactactccaatgattttgttaggaactgccacattttggaattgtagttaacggggtta

SEQ ID NO: 26551 - DNA, 440 bp, Gossypium hirsutum
  Clone ID: LIB3166-015-P1-K1-A9
aaaaatccaagcctatatcttccatccttgacttttttttaaaagaaaactttaacgacctagagattctcacccattgtgtttcttctagaaaaacaatatgcaacaacaagaagatccccagggcaagccactggcacctgttcaagattatccaagaagcgacatggagttcgggggaattaaacccaaatctttacgccgagaagaaaaaagcagttaatgtctcgtttacgttctcaccatcacggtcgtgctaggaaccattcttttgacattcgcaagtatctttttacgtactagaacacccgcattcaagttccgatcggcacatgttagaaatctcaagttcgtaactaagttaacgtctgcgttcttctacttcacactcatgacgcagatcgctgatgagaacaccaattttggagacttccggctcg

SEQ ID NO: 26552 - DNA, 443 bp, Gossypium hirsutum
  Clone ID: LIB3166-015-P1-K1-B1
caaattcatccatggcttcttttgctacttccaatgttgttgttctgtattttgttgtgttaggctggtggattcatttcaatgcagaagcgaggaggcttggtgggtctgtccctgagtcggatcaaacccacagccattgctgttccaataccacaatggccctcttctaactggcaacatctctgttaatctcatttggtatggaaatttcaagccttctcaacgtgccattgtgtccgatttcatcaattccctcgcctcttccaagcttgtttcacctcaaccctcggttgctacatggtggaaagccatggataaatactatcacctcaccaacaaatcttcttcccttgtcatttccttgggttcacaaatcctcgatgagagctactctttggggaaatcactaacaaatgaacaaatactgcaattagcatcaa

SEQ ID NO: 26553 - DNA, 232 bp, Gossypium hirsutum
  Clone ID: LIB3166-015-P1-K1-B11
cccacgcttccaaattatattacacacgattcttttctctgagaacccattcttgaaagaaggtcacctatcaagtgcgcgggtagagatgaaccacctctctctgaacgacactgtcaccaccactaccactaacagcaccaaccacatcaactgctactataggcccccgagcgccaagatatcaatctgcaacgccagcacgcacaaaccaattttctcagcagcactc

SEQ ID NO: 26554 - DNA, 331 bp, Gossypium hirsutum
  Clone ID: LIB3166-015-P1-K1-B12
cgacccacgcgacccggactctttacaaaaaccctatctaaatcttcacaaatgaactgttaacgctaatacaggtgtatttataaaatacatacatccgcaaaacatatataaaattactcaatcgatctttttattaattattatatcacacaaattaaacaaacgaaaaccaaataaataccataaacttaattaactccaatgagttaacaatcacgaataaaaaaaacactgtatacaagcaacatactagcccttaacaaaacagataataaacataggacaaagaataattaataacctaacatgcaacctttaacgcttaagg

SEQ ID NO: 26555 - DNA, 340 bp, Gossypium hirsutum
  Clone ID: LIB3166-015-P1-K1-B2
gtgcaagcacccacaacccgcttgcaacaaacctttcatccgtagcggaagaatgtttcacaggaaggtccagcacccaatgcatggttccctctgatttcttccaatgaagcctgcctctatccaacatgaaaactgaaggccttaccaaaggatgaccttaccaaaccttgcaagctcactgcctttttgtggtacaaggctggtttgacacacattgtcagcgaggtcggagtatccacatctatgcttcacatgtcggatacatgttaatctgttacaatcattgaaacccctcctatggagaatgctggccgctatgcatatatcttgacaccac

SEQ ID NO: 26556 - DNA, 197 bp, Gossypium hirsutum
  Clone ID: LIB3166-015-P1-K1-B3
caaaatcatacatcccttcttttcatgcttccattattttttttctcaatttcgcagcgttggtcggtggatttcatatcattgcataaacaaccagtcttctttgagtattatcctgattattatcaaacatactgcctttgttgagccaatactatagagaccgtctcctaactttaaacatacctgctaatttt

SEQ ID NO: 26557 - DNA, 272 bp, Gossypium hirsutum
  Clone ID: LIB3166-015-P1-K1-B6
cccacgcgtccgagaaaccggatgaacacttgtttattgggaccctcgaaagccggcatctgagacggttctactatctgccatatggcgtcaccgaagaaagatgatgacgcgtgtaaccagtcaccatgaggacaggtgacccggtgttcaaacggctcacatcaatctcaaagtcaaaggacagctctgctatgacttgttctctaggattaaaatgaagtgctcaacttacgaaactcatgaatgccaattgggatcagggatcagag

SEQ ID NO: 26558 - DNA, 353 bp, Gossypium hirsutum
  Clone ID: LIB3166-015-P1-K1-B7
gagccccatatccttcatgaatcggaaattattgttaagaagaaacttgacatgtatgggggggactaaatacttatagagatatgacaccaacattgaatccatctgaagatctttctcatgatgttctgaatattgtggcgaatataatgaactacaggctgatgcagttgaatagcctgctgacccttgatgtgactgtggtttctcacctatgctcagtgagcaggctatatactacaaaccggcttgcttgagcaaatatgctgattctgagttgctgccgccagcaccctatgacaaagctgcaggaaacctttcaccaccgacttcgaagtttaatcagagacagc

SEQ ID NO: 26559 - DNA, 442 bp, Gossypium hirsutum
  Clone ID: LIB3166-015-P1-K1-B8
ctctttccaacttcgatttcaacgagaggaacctttggcatatctgcaagataaggctgtcggcgctttttcttcaaacaaaatcgatttctttatatttgattcgccctctcttttattcgtttatcatgcgatagatcaatcaaaaaaacataaactaaatcggaagaaaaaaatgagaatcaccttgtggagaccttatttagaaaagcttttatgtattgatcttacttttgtgcatgtgtttgctctattttattgcactgatgtgtattcgtgaaaaaaaatgctttcctcttcttctcctatcttcctttacaaagattaaaagctgggcttttatattcgaaaaaggaaataaatcgcaaaaatacactatacttgtttccattcgctgctgtatttgtttccttcttgcaggtacagagtctgttggcatgcc

SEQ ID NO: 26560 - DNA, 216 bp, Gossypium hirsutum
  Clone ID: LIB3166-015-P1-K1-C11
caaaattcgatacatcctctttccaccgtttcactccttcaactacacatcgatgacgcgagggtctttatcaagactgggcgtcaccatgcacccttcctctaaaacggagaatcacagatcttatacttctaccaggctgcaacctatccatcgctagcaaatgtcggctactgctttatctaccctctgattgtcaatgaatgaacaaatgaa

SEQ ID NO: 26561 - DNA, 404 bp, Gossypium hirsutum
  Clone ID: LIB3166-015-P1-K1-C12
tagagagcacatgaatgagtatgctgatgtctttttgaggaccctagtcctagcatatcggcagctttcataaaatgagtgcgaggtgtttaatgagaaaatgactgaggcaaagaactcagttagtgcagatcgcgaaaccttaattgatggagttgcataaatgattgaaagggatctaattctcttaggggctacggctgttgaggacaaactccaaaatggggtccctgactgcattgacaaacttgctcaagctgggattaagctatgggtattgactggagacaagatggagacagccatcaatattggttatgcatgtagtttgcttagacaaggaatgaagcagattataattaatttagacactccagaaatccagtcattagagaaaactggag

SEQ ID NO: 26562 - DNA, 441 bp, Gossypium hirsutum
  Clone ID: LIB3166-015-P1-K1-C3
cccacgcgtccgtaagttttaaaagttgtccatatatattaaaaatagtagaagtatcatagagtcggttatactaaaagtcagattacattttgtcttttctattaaaaaatagagtaaattagtaaaagcaaactagtcattttattaaaaagttcatcatttttgctattaaaaactggtctctgtacatcagtaagaagtacacgtggcattttacgtgttattgtctaattattctgtcagtcatactagtttttaataatacaaatggatgaagttttaaagaaaaaaagaccaatttactatttaatctaacaaataggttttattttgccatttttttagtagagtgaaaaaaatgtaatttaactcctaatataatgactttcatgatacttttaccactaaagactaaataagaaaagttagtactctata

SEQ ID NO: 26563 - DNA, 433 bp, Gossypium hirsutum
  unsure (1)..(433): unsure at all n locations
  Clone ID: LIB3166-015-P1-K1-C4
cggggcggacccacgcgtccgcccacgcgtccgcccacgcgtccggtccatctactacaaatttaggcactgaaagttcaaatggtctgcaaaagcttgggtttcctggttttgacttgccacctactaacatgggtcaggtgagtctcacctccatcttgggcgcagctaacgagcagcaacttcctggtttggaacttgggttgtcccaagaaggtcatattggggggctaaatcctcaagctttgagccagatttatcagcagatggggcaggctagggtgcaccaacaagagcagtaccagcaccagcaccaacaccaacaccaacaccaacaccaacccccttccaaggatgattcccaaggatcaggccagtaaangtataaactttgggagcaattaaagaattgcatttctgagagaggatgccc

SEQ ID NO: 26564 - DNA, 436 bp, Gossypium hirsutum
  Clone ID: LIB3166-015-P1-K1-C9
cggattttgaaattggttatcaataagggtttgttgaagagagtttatacattaattgtctgggtttcgagtttacttccgttaagggttcttttacttggtttatctgttttatctagaccagaacatttcctgtttgaagctcttgcattctcagcttttcttgtcctactatgttgtgctggggtctgtatcgtcatactcgtatactgtccggttggcggattgtcttgcactcggtaatcttaatgacttggaggctcggagaagggttattctcgatgatcaaaatgacactgcatcccttatcgccaatcagactcatcttgatgaaagcattggaatcagccccgagcggaattctgatgcttctactaaacgcggatcgatttcttttcggactttcatacgagatgaaccctcgtctggtccattt

SEQ ID NO: 26565 - DNA, 440 bp, Gossypium hirsutum
  Clone ID: LIB3166-015-P1-K1-D1
ctcttttggaaatcccttctcttcaagcatcgtttatttcttctttcaaaaccccagccctgagagggcgcatccctttccctttcctctaaaccccgacttccttctgcattttccgtctccttccgtgacaacctgcggttttcgcgcccctcctctagaccgcaacgccgtttcttaatcataacagcttccgctgcatctatctctagcaaacctaccgtactcgtcgccgagaaacttggcgaagcgggtttgacgctgctcaaggagttcgccaacgtggactgttcttacagcctctctcccgaagagctctgcaccaagatctcgctttgcgatgccttgattgtgcgcagcggaaccaaagtcagccgcgaggtctttgaatcagctggcgggagattgaaagttgttgggagagctggtgttgggatcga

SEQ ID NO: 26566 - DNA, 241 bp, Gossypium hirsutum
  Clone ID: LIB3166-015-P1-K1-D11
cacacgcttccagccactctttccaccatttctttttttgaacagacaatttatgagagtgggtgcttaaacaagaatgagtgtgaacaaacaccaatcctatgacacggaaaatggcagattacatcaagctcacagatgaaataaaatacttgtctagacaacgccgccaacgcaactatagtcaatcatatagacatgtctaaacaaatctagttgctcataagcatgttacctgaca

SEQ ID NO: 26567 - DNA, 338 bp, Gossypium hirsutum
  Clone ID: LIB3166-015-P1-K1-D12
ctcaggtcctatccctatcttgtctgctactcatatctacattgacgacactggaagggggggtgaaaagattttttccgaaccatatgaaggcaatagtgacatatcaccctatatgtgtcctacttcagataccgaaaaggccaacagcagcagaattccttactatatcaaaatatttctcactattgcgatcttattcacattctccattttaggatgtttgctatgttcaccgattaagctcaagaataaccatgtcagcgtacagcccaccaagaatggtgatttgtgtttcatactggactatgcatggaagatagcatacaaggatatcg

SEQ ID NO: 26568 - DNA, 437 bp, Gossypium hirsutum
  Clone ID: LIB3166-015-P1-K1-D6
cccacgcgtccgaccaactgcaatcatcctagataatttttatcagcagaagctaatagaaggtcgtgtcccaaatgcattcaaaaagggtatatagcgtccgagatatcagccaattccagtatcttcacgaaacagatgaatatgggaaggaacatggagcaccatcttcgctactgcaggatgatcatcatccctcagagaaagggaagggtcgtcgtaaaagatccatgctgagcgaggaggaaaaaagggaaaggaagagacaacatgacgccagatacaggatgaagaaaaaccaggagaatgaaaggctcaaggaagagaatatcaggttaaaaaaccagttaaaagagaaggacagtgagacaacactagatttacatgagttcatgcaagatatggacattatgcagggttttcctattgatttggga

SEQ ID NO: 26569 - DNA, 262 bp, Gossypium hirsutum
  Clone ID: LIB3166-015-P1-K1-D7
cacagccaacatcaaaaggaagcgaccaactcctatgaaaggcggaaaagcggtgcgagcgagcggtggtggagatgaagacgatgattacgatgaagagtggacaggtgcgtctgtgtatcaccaatgtcaaacgcaactgtcaagctaatagaacagcgatggagttatggaaacagcagtgaaagagcccaaatatgtatcaccaactctcctaacaattgaaagaggagattcaaccaaagaagaagctgtatacatt

SEQ ID NO: 26570 - DNA, 436 bp, Gossypium hirsutum
  Clone ID: LIB3166-015-P1-K1-D9
cccacgcgtccggaagggacttgtaagaattttatttgtattgttgatgaatccaaatgggtgaagcatttgggagggagtggcttagccatgcctgttgaagttgtccccttttgctggaaattcacagctaataaactccaaaacctgttcgaagattcgggttgtgtggccaagctgaggaatgattctaaagggaaaccctttgtaacagataatgggaattatattgtggatttgtatttgaagaaagacattggggatttgcaggtggcaagcgatgctattctgaggattgctggtgtcgttgaacatggcatgtttcttgatatggctacgactgttattgttgcaggtgagcttgggatcaccatcaagaacaagtagaaactgcgaaaaaaattactcttttaactatttttttttacatatacta

SEQ ID NO: 26571 - DNA, 440 bp, Gossypium hirsutum
  unsure (1)..(440): unsure at all n locations
  Clone ID: LIB3166-015-P1-K1-E3
cccacgcgtccgggaaagaggggataatagactttctttctacctacaaatacgaaatggatgctggtagatacattggtgagatcccgaaagaaggcgagaagaagagatcaccagcatggtgtgatcgaatactctggtcagggaaaggcataaaacaactttcttataaacaatcagatataagactttcggatcatcgaccagtcagttcaatgttcttacttgatgttgaagtcttggaccataggaagttgcaaagggctctcaatgttagcactgctgctgttcatcctgtggtttccttcgatgaaaatggagaaccagaattttaaccataaccaggaaatccaacaactcaatgagatgaaagaaaaggttactccttcatgaaactggctccaagctgccatgcanggatatcaataatacattacata

SEQ ID NO: 26572 - DNA, 325 bp, Gossypium hirsutum
  unsure (1)..(325): unsure at all n locations
  Clone ID: LIB3166-015-P1-K1-F2
cgtttataccgctaataaatacctccatatacattatccactgcataagccaccaccggcgcggtcacatcaaccataaatacgtaaaaaaactttttaaaacactttccttcattcatcacttcccccttcagaaacacatcactaaacatatcactgaaccccctatctaaccctctctatttttacctcgatttttacctgaacgctntaaccttaaaaaagaccctaaaaaagaacccgctttgctcatcaccggtgctctgatagagttgtcggagctactacctcatctactacctctttctcaggagcacatttatga

SEQ ID NO: 26573 - DNA, 430 bp, Gossypium hirsutum
  Clone ID: LIB3166-015-P1-K1-F3
gaagaatatggtccatgggttccctttattggaactatgttgctatttattttcgcttctaactggtcgggtgctctgttaccttggaaaatcatacaattacctcatggagagttagccgcacccacgaatgatataaatactactgttgctttagctttactcacgtcagtagcatatttctatgcgggtctttcaaaaaaaggattggggtatttcagtaaatacattcaacccactccaattcttttacctattaacattttagaggatttcacaaaacccttatcacttagttttcgacttttcgggaatatattagctgatgaattagtagttgttgttcttgtttctttattacctttagtcgtccctatacctgtcatgttccttggattatttacaagtgggattcaagctcttattttgc

SEQ ID NO: 26574 - DNA, 432 bp, Gossypium hirsutum
  Clone ID: LIB3166-015-P1-K1-F7
caaggatcagccacttgatccacctcttccgttttaagaatactcgaaaagcagcaatggagcgaagcataaattgtatggagttggagttgcagcaggttgctttttgcttcttcttatcatcatcttgttcgctgctgttaagttcaataagaaaggggatggagttcttcaaattggcaatgaaagaagtacaaattatgtattaccagctgacctccgtattgaaattgcgagattcgaccaaggtttaagagtgtttacatttaaggagatcaagaaggctacatggaatttcagttctaagtatagaatcaatggttctgtctattccggcagttttgatgggaagatcctggctgttaaaataatgagacaaaatgcatccaaggtggtacaattgctgaagaacatcaatcatttcaatctgat

SEQ ID NO: 26575 - DNA, 531 bp, Gossypium hirsutum
  unsure (1)..(531): unsure at all n locations
  Clone ID: LIB3166-015-P1-K1-F9
gggaatatgaaaacccgggcgcgacccacgccgtccagaatattctgccatcaagtaacacgtctcgctatgttatttataagnnaagactgannagacgctgcgttcgagtggcgttatactaggaggaatacgtagcggcacaganaagatgcctcgataaaagnnggccgccggtgtaacaattacctggtaactttctcaaccaaccatgtnnaccagctancagcnntggattcnntggtcggataaaaccannatttctcgccggagagtttcccttgcaacacgctaactacannaaccccggtcccaacctctcgcaccttctgaacaatctcagtctacaatgnagtcccagcacaagagaccatgcnntccggccaaccgtcttaccaacgcgccttncacaagtttccaagctccttgtcttctgcactcagcannacgcaacaatatgtgttcgacccggtaaaaccggacaatagccggtcaaaggcttactacanccaaacgtacaagaagaatgcc

SEQ ID NO: 26576 - DNA, 402 bp, Gossypium hirsutum
  Clone ID: LIB3166-015-P1-K1-H2
cggaattgaaggcccgggccgacccacgcgtgcacgatctctcttttgactccttctctctacatttttttcttcagatctccaaattgaagcgcgaaattcgtgttttctgcacaaacccaagcttttgttcaaaaaaagttcaaaaaaaggtggcatttttaatatcagatgtctcatgtgaaatgaagaagacgaacattatcgacctccattgttattcttctttttgttaccttttgtttcttttagtttcagtttttgtatccttatgttcatgcgatgagcattatgcttccagccatggcggacttaccgacaaggaagtgtcgtacataaagcaacgacagctgctttattacagagatgagttcggtgacagaggggagaacgtcaccgtcg

SEQ ID NO: 26577 - DNA, 455 bp, Gossypium hirsutum
  Clone ID: LIB3166-015-P1-K1-H4
gtaccggaatggaaggcccggcgccagagcgacccgttcaacttggtcttgctctcccaactccaaacatgcttaaggggttcgacttgaacaaccaggggcttgatcagctcaaagaaatggggggtttggaagcttggaacaaggctgctggttgtttcgctgacaaagattgtgttaaaagtaaacgcagtttcgagcaggcttttggaaactttacagaagagtgtagaacaaagcctttgcttctttggagtggtcagccaaacgaagaagaagatcacaaggatcaaaagaaagcaactttttcaaccacggatgagaacgacgcagaggaagatgatcaagttgtggggtggccacccattaaaacatggaggaagaaaatattccagcagcagcagcagccccgagttggaagggcctgagacaacagggttgcagagaatgaaaat

SEQ ID NO: 26578 - DNA, 220 bp, Gossypium hirsutum
  Clone ID: LIB3166-015-P1-K1-H5
cgttccatgaagacagtactagcacatgatttcattgatccataataaacctccaaagcccgtgggaggactactacaatctagctataaaaggaaatcagcatctaatgccttaaccgcgacacgtcgactgactgcagctttaggaacaccgtagacgtagacgatgacctagatgaaagttatatgtattgtgatacaatctgacgaccctgtaaac

SEQ ID NO: 26579 - DNA, 203 bp, Gossypium hirsutum
  Clone ID: LIB3166-015-P1-K1-H6
cccacgcgtgcggatacgcttgatcatgggctatttcttatcctggttgcaatcaaggaacggggcgaggaacataatgagggagactatcatctttacttactacattcaacactaccatgaccatcacatggcaaatttacttctgaaatacatactgagatacacacttaatacaacactctatacaagtcgctctacaa

SEQ ID NO: 26580 - DNA, 275 bp, Gossypium hirsutum
  Clone ID: LIB3166-015-P1-K1-H7
caaaatcttaatcaaaaacagatagctatgtatttcaagaggactgagaactctaatacgagggcttatacagaggacttccacgcacagaacatacctgaaaaagcgccatcgatgaacataccaattactatacaacagcatgtaccatctacagatcgattctggtcggataaaccaattactgccggaggagttcatgcaaccgaatctacaaaccacggcccgcctgcgacctattaacatacagcctacctgatcccaagcaagggaca

SEQ ID NO: 26581 - DNA, 397 bp, Gossypium hirsutum
  Clone ID: LIB3166-015-P1-K1-H8
agacattctgcgacatcaggctgtgaatattgtgtcagctcggcttggtcgggcagaacgctgctctcattagagaagtaggcgaatatatgtccgatgcaaatgctcacctttggagcatgaggcgcagcaaggcaaactttttgcgactgacatcggtcttctcgggattattttcggctggaaaatggtttggtgaagtttgcacgtggaagaaccctattacaacagtgctggttcataccctattcgcaatgctcgtttgtttcccagagctgattttaccaacggttttcttatacatgttccttatagggggttgggaactatcgttatcgaccaaggtaccctcctcatatgaacactagtctttcttggccgatgcaggttcttctga

SEQ ID NO: 26582 - DNA, 275 bp, Gossypium hirsutum
  Clone ID: LIB3166-016-P1-K1-A11
ggatgcgttgaatccttgcgacggtaagaacattaatggtaatgagaatcatgaagagtggggatagcagagcaagtggaacgaagaccaatggtgttgatagcagtgataacgaagctgaaagcagtgtgaatgaaagcgggaacagttcgcgtggcggaatgaattcgaccgagaagagggaagggaacaaaagggccgcaagagcagacattgctccgagcggtagacattatagaagtgtttcaatggatagttttatagggaatatgaac

SEQ ID NO: 26583 - DNA, 409 bp, Gossypium hirsutum
  unsure (1)..(409): unsure at all n locations
  Clone ID: LIB3166-016-P1-K1-A3
ccacttcccgtttcggtttaatctcaatattattattacttttttataagagagatgtctaaacaaggggaggcttcctccatttttcatgtcttttcttcttttaaccgncatattcatactcttcatcctttattctacaacccctttaactcccatccccaaccaggccctttcccgtaatctaaggcttccagtcatcaaaccacctcctaatcttccccgtaaaggcaaacccataatttttcatcctccccttcaaggttatgatgatgggatttcgaagtgtgatttgtcaaagggtcattggataccggacctccatggttctctatataccaactcaagttgcactacaattcccgattcaaagaactgtttccaccatggaagaagtgacagagatttt

SEQ ID NO: 26584 - DNA, 353 bp, Gossypium hirsutum
  Clone ID: LIB3166-016-P1-K1-A4
ccaagtcttcctcatgactggcttcaaggctgttttaggaacaaacaaaagggtttcaacggggaaagaagactggagacggttgattatgactatctgcaacaaaaccagcagcagagttgtgaactaatgcggtataggacgatgccggccgagaaccgagtacggtacgactagtacaggaagcgatattggggcatcatgagagactccgaaatggaaacatatgctcatgttgtgtggtaatggttcatcagggaatgtttcagaatatgaagagaaatcagtgaagcaacaggaggagatgatgtatcaaattcaaagcttgtcatcggagaatggtgagagttcat

SEQ ID NO: 26585 - DNA, 394 bp, Gossypium hirsutum
  unsure (1)..(394): unsure at all n locations
  Clone ID: LIB3166-016-P1-K1-A9
acccacgcatccnactaatttaactctcacattacaaccactaaatggtgaactttatgaaccaaacacaccgtgctattcatctccaagatgtctcgcctcctaccaaaattgatgaattcaagattgctcactccataatttcacatggttccttcttgcgagaatgtaatgttcaacactctataatcggtgtgctctcacgtttgaagtccagcgttcatcttcaagataccatcattattgtagcagactactaccaaacccaatcctaaatagcatcctttctaccaaaacaaaaatatcctattggtgtccgacaaaataccaatatcaaaaatcgcataattgacaagaatgccaagataggaaaacatgttatcatatcaaacac

SEQ ID NO: 26586 - DNA, 237 bp, Gossypium hirsutum
  Clone ID: LIB3166-016-P1-K1-B12
aaataggacatgatagagggagaaagatagtcttctttctaattacaaactacgacggtgagaatgtgcgtatcatacagagagaaagtcaataatccttatactttgctgcttaaaagttcacatctattccttctttaggctcaagttactgcctttgcaatgcatactttgctagatggctatctcataatgcatgtgctgatctagcagtagctgtgataatcatggcatatt

SEQ ID NO: 26587 - DNA, 369 bp, Gossypium hirsutum
  Clone ID: LIB3166-016-P1-K1-B3
agtgaattcttaccaaggtagccgaactgttttgtgcggctggatcacctccttttcggggagagctaatgcttgttgggtattttggtttgacactgcttcacacccaaaaagaagcgagctacgtctgaatgaaacttggagatggaagccttctttcgtttctcgacggtgaagtaagaccaagcccatgagcttattatcctaggtcggaacaagttgataggatccccttttacgcccccgggtccctcccatgtggcgacatgggggcgtaaaaaggaaagagagggatggggtttctctcgcttttggcaatacgggcccccagcgggaggcccgcacgacgggctattagctcagtggtag

SEQ ID NO: 26588 - DNA, 396 bp, Gossypium hirsutum
  Clone ID: LIB3166-016-P1-K1-B8
cccacgcgtccgcccacgcgttcgcccacgtgttcgcccacgcgtccgcccacgcgtgcgggaagcatgcgtctcttctctacatcttcttcaccaaaaccgaactttcctctcttttcgccttctcaaaaccccaaaagatccacctacaaaacaatccctcccttcaaaactcgccttccctctccttcattcctctccctccctccatgcactgccaacaactgcccctctttccccgtcctcgaccaagaagccgaccgggaagactctttagaacccaagcaagacactttcaagaaggtccttgttgttcgacgcccagtcatggatgtttccggtgaagaaaatgatgatgggagtgaagatggtgaagccgaaagagatgacgtcatt

SEQ ID NO: 26589 - DNA, 353 bp, Gossypium hirsutum
  Clone ID: LIB3166-016-P1-K1-B9
cggacgcgtgcgcccacgcgtgcgttctccctggtaacaaacaaaacacattaacatggtgtcgaatccaaaacatgactgaattcatggtgaaaggaaggcaaaacttgccggttgacgtcatccaagtaatcgatcagctagagcgccattgcttatctcccgatggatctcttatctccaaatccgcctactactatctccatctagccagagaggaaatgtccagagaaatattacgctacttacaagcaatcgcaatttactgcgaagcaatgcctatggtggacgagtatcagcaagcactttcctgttcgaatcttggaatgattcgagatattcaaggaatttat

SEQ ID NO: 26590 - DNA, 370 bp, Gossypium hirsutum
  Clone ID: LIB3166-016-P1-K1-C1
cccacccgaacggtgcccccaattctcacggtttctcctattctcttatctcctctataggcggcggaaattgtggttcggacgctaccgatgacacgaatgttacatcgactgacactgggaataacatggatcaaaagatagatgttgaagaattggtgaataggcgagtgtctgaaagagagaaaggtgatgacaaaactgattccatcacgtgttgaatatcatcatccatgcttactgacaactataactacaactctgataatatgttcaattctctgaacgaagaggaggacaaacggaaggccaacctcctgaggaacagagtgagtgcgcagctatcaaggcatcacaagaagcatcacgt

SEQ ID NO: 26591 - DNA, 272 bp, Gossypium hirsutum
  Clone ID: LIB3166-016-P1-K1-C12
tacgtgcctagagatgaacaatttgaggagtctaagcagaacgctttctctgcagggaaggttagagcagtgctacacaacttgttgccgcagttgaaagccagcatttccgcccataaccgcgaccttaactccttttccgatattgatggtctttacaaagaagggctccttctcaaattaggctttcacgaaacagtgaagaagttgccgaaaatggtcagcaaattacaagaatctagtgaaggactcctcaaatatgaaacccctaa

SEQ ID NO: 26592 - DNA, 353 bp, Gossypium hirsutum
  Clone ID: LIB3166-016-P1-K1-C3
caaaattctttttcattcaaaaaaagctattttttttgtagttacttgtttcgttttttgggtttagttgattctttgtagttcacaaaaaatggtttccatgtcaaagattgctactggtaatggtcatggtgaaaactcaccttattttgatggatggaaagcatatgaaaccaatccttttcaccctattgatagacctgatggtgttattcaaatgggtctagctgaaaatcagctttgttttgaattcatcaaaaagtggctaatggaacacccagaggcttccctttgtactgcagaaggtgtaaacaggttcaaagagactgcacttttccaggattatcatggga

SEQ ID NO: 26593 - DNA, 376 bp, Gossypium hirsutum
  Clone ID: LIB3166-016-P1-K1-C8
ctcattttcctcttctaaagatttttgtacagtcatgtattttcctgctcgatagatcgtcttctcctcttttgtccctgcaactggtgttgttattatttccaattagattatctccatctctgatctacctctgcttcagtaataccatttccgtcagacccaggagcaaggatctgttctgtctgttatcaaaggcagcatcgaagtttatcttgaaaaaatcttttttcgggggcctccataactcggattccaaccttaaagcaagatatgttttcttaatgtctttaacttcttgtatatatccccgtatgaatcttactgtttctgctccaggtctcctgtggttttcatacatcccattgtttttagc

SEQ ID NO: 26594 - DNA, 315 bp, Gossypium hirsutum
  Clone ID: LIB3166-016-P1-K1-C9
ctgctatctctctctcttctatttcaaaaaacataattacttcctctctctagggttggggggggaaaactttcagagaaccacggagggcactcccaccctaaccctaattgtagggttgttacagcttacacaacaagtttattgtggttatttgattcacgagattcaatttgttttctgggaagaataaaaaatagagaggaaatcaagtttactttagcgtctccgacgacgttgcggatcgtctttttgatgcaatttctacgatgatttcatgtttctgggtttagatcatggtgtttggtagatgct

SEQ ID NO: 26595 - DNA, 349 bp, Gossypium hirsutum
  Clone ID: LIB3166-016-P1-K1-D1
actaaccccaaaatttacgttgaaaaaaaaagtattcctgaattcagtggcgaattctgtggtaggatctcctaagtctgcgcgtgtgggaaatcgaggtggtccgaatcccaaactctgatcatttgatggtattatcgaaaaaaattgtgtttttagtgcctggtctgagccctcaccgtatcgacagaagttaataagctatctcatattacaggatcttctcgaaacaccaggtgcaccgaaaaccaaaagccaggttgctagattcaaattcaacggttccttgacagaaacaaaacctaaccgtagcgataaatgatacatgaaacgctagattcaccatgat

SEQ ID NO: 26596 - DNA, 296 bp, Gossypium hirsutum
  Clone ID: LIB3166-016-P1-K1-D10
gttatttcggtgtacaggaggtggtggcggtgttgatacaaattgctggactggctggggcaatggctggcctgatcttgctatttacactccaggttcaagttttcactagaaattaataaatttcaccactttcactgtgttctaattatacgggtgtactcagttttttttttttttgagaatagtacttatgtaatatgtattttttatattaaaaaattgctatgctataataggagatgtaaataccagaaagacttgaacgctacaattatagagatatttaggttttc

SEQ ID NO: 26597 - DNA, 309 bp, Gossypium hirsutum
  Clone ID: LIB3166-016-P1-K1-D12
aacaaacctataaatcaactttagttagcgcatcattatttcgccaaggcaaaaaggggggggctttatatcacaatctgtatcaccaaacgctcaagctttaaagaaccatgcaatctaacaaatcaactccactatttttcaagtcacttgccatgctttaactacacccatctcaagcaacaataccttcccaaaagaactatatatttgtcaactacatctcgcaaactataacagaactgttaaattaaatacgatatatttacaaatttaacataacctactaacatataaaccaatatatat

SEQ ID NO: 26598 - DNA, 394 bp, Gossypium hirsutum
  Clone ID: LIB3166-016-P1-K1-D2
acccttccgcggacccttggccggacccgtgggctggtgtattttttagactccataagtaaagtcatggggttgacaagtgtcctatagagatataataaaatattaaaaaaaaggcacgtgtcaaattttaaaaaaataaatattttaaggaataaaataactataaatgttgttacttgataatggtgcaggactaaggctgatgaatttgaaacatcttgatttgagtggtaatggtttgagtggtaatggtttcaactctagtatattgtcatctgttgctacacttccgaatctaaagactttgaggatagatatctctcaatgcaatggattaatagatttatatgggttgagttactttgtaggagctgtatattgccagcaattc

SEQ ID NO: 26599 - DNA, 379 bp, Gossypium hirsutum
  Clone ID: LIB3166-016-P1-K1-D3
cggacccttgggggatggataaatatcctccattttctagccaaaatggatttcaatctggggcagtccttacaccagaaagaaattgcccacatttccaattggtggaagcagctaggtttagccaaggaattggagtttgctagggatcaaccaatgaaatggtacatttggtccatggcatgcctcactgatccaaccttatcagagcaaaggattgatctcacaaagcccatgtccttaatctacataatagatgatatttttgatgtttatgggacacttgatgaactcactctttttgtgcaagttgtggagaggtgggattatgctgcatgtgataagctaccttattacatgaaaatatgcttcaaagctc

SEQ ID NO: 26600 - DNA, 397 bp, Gossypium hirsutum
  Clone ID: LIB3166-016-P1-K1-D6
aagagacccaaagtaagactcatccgcggatcctttttgaaggctgtaattacatagccctgggggatctgccctaccagatcgagacatcatccataattcgaaaataaaacaaaaatgtcgagcttggctctctctctccagccagccaacggatctgacatccttctccaaacccgagaatggttccctcctgcccgtgctctaattgctctgcacgccttccgccagacccgtcttgccttctccaacaagtccccttcctccgtcgctgctacctcctcctcttcctcctcatctactgccgaacctagtgctgccactgaatccatcggcgactaccccctttccgcctccagtggccaactaatcgtcggcgttgaaaggtagtatcgcg

SEQ ID NO: 26601 - DNA, 363 bp, Gossypium hirsutum
  Clone ID: LIB3166-016-P1-K1-D9
gttcttagttgctcgcttcaaaattaacaatgtttaaattacttcaatttttttagagggactaatttgttcaatttcaaaattgagaaagactggagatgtcattttcccatttaacatccagtctaatgattaaaccgacggaaagacataattatacaatactaataccttaatgagtcataatttgaaaacgtggggtggaattaactcctttaaagtgatatggtcttgcttacaacaagttacattattgatcaaatctcttacccatcgtggttgctcgaaacaatagcctcgcacagttaagctaaaccatcgaacgctgaagcttttgaagtactggacattgcaattcgtcgt

SEQ ID NO: 26602 - DNA, 364 bp, Gossypium hirsutum
  Clone ID: LIB3166-016-P1-K1-E10
atttttgaatatatgcacaaatgtatattatgtttacatataattacgattggacaggaggactcaatcatgcaaatgagaaaagcagatctaaacagttatgaaatcaatttactgaagaaattgtgaagaacacttgaaaggtccactcaaaactgaaaaaggctcaactctgtgataacatatgttctaaagagcttgtcaaattgtaatataggtatgcactaaataaatctgccattgtagtagctacgctctatgtcaaggtcaggcactgaaaagcaagaagcatcatatttgctgttggagaatgatgatgacagttgatgaagaaaaagctgctaggtcttttgcttctcgcttt

SEQ ID NO: 26603 - DNA, 260 bp, Gossypium hirsutum
  Clone ID: LIB3166-016-P1-K1-E4
ttttatggtgttttgacccatccatctcctcgttttttgtacctacaagccgattccattcgcactactgcgaactggcttctaaaccttctgttggctggttaatcgatttgtttctttgggatggttgccgggtgtagcattttgcgattcatggcttatcaagagaagagatgttagacatgcgtactcttgcatacgacaaacatgatgatgattcgattctatacctatattcacgacgtccaagactaagaaaa

SEQ ID NO: 26604 - DNA, 319 bp, Gossypium hirsutum
  Clone ID: LIB3166-016-P1-K1-F12
aacagactgtgtcctatatggatgaagtgacaattgctgtttatacgaacaccaccgctggaaatatcccatacctaaaacttcacccactgagaatatattcaacactaccggagagctgatgatcgcacaacaagatgaggtttagagaaaattgattggaccaaagctatcggtcatagcttatgacaaggactctcacattgaatgatcttctagtacaggaccagcaaactaccccacatacagtatgaactggtgggagggcactacttatcaaactcttaatgccatgtaaactaaaagatctaggtgagtt

SEQ ID NO: 26605 - DNA, 413 bp, Gossypium hirsutum
  Clone ID: LIB3166-016-P1-K1-F5
cttccgaaaggcagggaaaatttctttcaagaaagaatgtttcaaggtttagaagttcctgaaaaggcgggtgaaatctccagtaacggtcgtccagagtcaactgttatgtctaatgtacctagtttgaatccatttggctcttctgatgtggtaaagccgtggtctcattcagcttcttcttcggacaagccttctagtagcttaagcgagaagccaatgacagttccgactctcccatttttgaattcatctggtccatctagtaagagttctgtgatatcatcccagtgcaatgggatttttggagagaagtggcaggtgagtagtaattctagacctaatccgagtttcggaagtgaactgcctactagaaatggtttttattatggttcgtcatcggggtccaggga

SEQ ID NO: 26606 - DNA, 402 bp, Gossypium hirsutum
  unsure (1)..(402): unsure at all n locations
  Clone ID: LIB3166-016-P1-K1-F6
ccgaataccatcaataagttcattatcataatttttagcatggagaaaaagtaaaaatnggggattctcaagaaacccctacgctgttctctccttacaagatgggcaaattcaatctttcccacaggtttatctacccttctactttgactactctgtcgtttttttcgcatcgatttccgggatccagggaggggggggagcttagatccttgtctttagggcacttttgtttcaggcatgttccgccacgatctcctcggattctgtatatccgaggaaaatacggaagggcaatttggtgaaattaatctaagtccgacgggttgcttctgatggcacgatggtgctagcgcctatgacaagaagcatggcatttaatggaattgcaagcccttctct

SEQ ID NO: 26607 - DNA, 270 bp, Gossypium hirsutum
  unsure (1)..(270): unsure at all n locations
  Clone ID: LIB3166-016-P1-K1-F9
gttgctctatgccatgcacttggtcatgtttctatcaatgtctcctttgcagctgttggtntttttttcacccacactatcaaagctcttgagcctttcttcaacgctgctgcttcccagttcatacttggacaatcaataccaatcactctatggttgactcttgctcctggtgttatcggtgtatccatggcatcactgactgagctgccattcaattggaccggttgcatcagcgcaatgatatccaacatctgcttcacttacagt

SEQ ID NO: 26608 - DNA, 414 bp, Gossypium hirsutum
  Clone ID: LIB3166-016-P1-K1-G5
tcggccattttaagaattaaaaacaaccatgaacctttttaacatggtctaaggtttgaggcatgggggcttccaaagcaaacagtgcaagcaaggattcctcctgcatcacttgcttcaactgaacttgttccagtgccagagccagtgtatcctagggaaagctaccagactactactgtgccatctgtatcatcagatgcagcatcaacagagctcaagctacgactagatggagtccaaaaaaagtggggtaggcaaacacactttccctcaacatctacctcaaattccacatcccagaaaacagtcaattgaaaaaggtgctcagccctatattcctgagagtgaacgctctggaatgttaaatatcagcaattttaggaaggattgacatgacttacagcaatgggg

SEQ ID NO: 26609 - DNA, 318 bp, Gossypium hirsutum
  Clone ID: LIB3166-016-P1-K1-G7
cggacgcgtgggtgggttggctgttcaatgactaatgtcctggttggaagaaaggagcggcggttcttgcaatggcctccgtgccagcaccacctttgcctctcctttcaatattcggcatcatatgtgtcctcctcatggtttcttcttacatcaacttgaagagagaggtccaccatacggtgtttaacttgaagatgttccttctgttcttgcctgtcatgttgattttcgcatctcagtttttgagtaagtgtgaaaggttggtggttccttacctcaagactaaaacggactcgtggcggaggactttaaact

SEQ ID NO: 26610 - DNA, 352 bp, Gossypium hirsutum
  Clone ID: LIB3166-016-P1-K1-H1
cctccgcatataaaaatgaagattttacaaatattttgacaagccttcacattcattccatgcacctgcaataaaaaatatattcatctattttaaaaaatgagatcaaaacttttatatctatttaacctgctcctaactaaaatatttttattataattaaaacgtattaaaataaaagaaattaaaattttcgtaataacttcacataaaaaatactattaattcataattcccctttgttactagacttgctaggatctagaaaatgttgctgttttaaccattttcttggtagaaaattccatgcttaatcaacaatataagggtaaaatttatttcaattataaaa

SEQ ID NO: 26611 - DNA, 386 bp, Gossypium hirsutum
  Clone ID: LIB3166-016-P1-K1-H10
cttggaggcaagaaactggaatgctgataaatttaagaaaatgctggaagagaccatgggggggagatccacctataagcctgaggaaatacgttggcacgaagttgcagtggaaggcgagactggaaaagtatacagggcaagctttcatgaccgacatggtagaacagttcttatactgcgaccaggaaagcagaacaccacatcgttggacaatcagcttcgccatttggtgtatctgatagagaatgcaatcctaaaccttccagagacccaagaacagatggcatggttgatagactttactgggtggacattgagcacaagcgtgcccatcaagtcggctcgcgacactattaatctattacaaaaccactaccccgaga

SEQ ID NO: 26612 - DNA, 354 bp, Gossypium hirsutum
  Clone ID: LIB3166-016-P1-K1-H3
ccggggcgcgccaacgcgtccgaaaatttgttagccgttgcatttatgcaatatttttaaaggcttgtgccgagcaaataggggggagcttctcccgtttagaatacagtagttcagggagacttcatatgaacaggcaagccaaatgtgatggagactggtgggtagaagatctttctgttattcgtattgatttgtatcaaagagtcatgacagcgatgaaatgtcgcggtgttcgtcccgagagtattggcgcgtcgcttgtaaattatgctcagaaggaactgactaagaaatccagtttgtggaatccttctggacacacgaaaattgatttgttttcaactgaccatg

SEQ ID NO: 26613 - DNA, 437 bp, Gossypium hirsutum
  Clone ID: LIB3166-016-P1-K1-H5
gtgccgggaaggaacgggcgggccgacgcattcggttggggtttttgttggtatgcgctttagaatgttgtttgaaacagaagaatcaagtgttcgccgatacatgggtacaatcactggcataagtgacttggatcctgtccggtggccaaattcacattggcgatcagtcaaggttggctgggatgaatcaacagctggagacaggcagcctagagtctccttgtgggagattgaaccattgacaacattccctatgtatccatcaccatttccattaagacttaagcgaccatggccagcaggattaccttctttccacggcatcaaggatgatggtctaggcatgaattctccacttatgtggctacaaggagatgcaggtagaggaatgccatctctgaattttccagggattggagttacaccgtggatgc

SEQ ID NO: 26614 - DNA, 189 bp, Gossypium hirsutum
  Clone ID: LIB3166-017-P1-K1-A3
gtaccggaattgacgggccggaccgacccacccgaatgattttgctttcttgtgcaacttacttgacctttactctaattgcatgctggcaagccggtctggtgacgcttgttaacggctagcgatactatactcacatgggtgctgaccgatcaaatttatggggactgaaagtgcagattagtgggt

SEQ ID NO: 26615 - DNA, 277 bp, Gossypium hirsutum
  Clone ID: LIB3166-017-P1-K1-A9
tctctctccaactctagcaacatcctttccgagcgaaaccgaagaaagaagcttaaccaacgcctctttgctctcagagctcttgttcctaatattaccaaggtcatcctcctcctcctctctgctcttcctgtttcatcattttttaattacaaatattgggttgattgaaactgggcagatggacaaggcttccatcatcaaagatgccattgactacatccagcaactccaagaacaggaggcaacactccaagccgatattatggagttggag

SEQ ID NO: 26616 - DNA, 477 bp, Gossypium hirsutum
  Clone ID: LIB3166-017-P1-K1-B6
aacgggcccggaccgaccgcatgccggaggctttcagtgtgacttccctgttactcaagcaccttatttattggatactatgttaggcaatttctgcgctgcgtggtcttgtcggcgattggctcggatgtttataccggacatctctctgatgatgaaagaacaactgacagtcttatacttggcaggaaccatacacgattgtacacctttttggttcaaatcttcaatatgagcacaggcttgtacgtggatgatttcaagaggtggattctgagaaaaggcaccttggtggcaaacggctcgtttaaatgggtacacgcatcacaacattggtttggttgtgctaaaatctatggttctacccgggctttttggtttcatggttaatgaaatatgctgacaatatagtcaaggtatattccacatcgatggccatgctattgacaatggttctgtctgtgttccttttcagtt

SEQ ID NO: 26617 - DNA, 402 bp, Gossypium hirsutum
  Clone ID: LIB3166-017-P1-K1-B7
cccacgcgtccggctatgctaccatacaaagtcttgatctcatcaagcttgtaagccactgtccaaggttgcagcgtcttttggtacttgattatgttgaagatagtggccttgaagaacttgcttctagttgtaaggacctacaggagttacgtgtgttcccatctgacccatttggtgcagagccaaatgtatccttgacggaacagggccttgttgctgtttctttgggttgtcctaagctacggtcagttctgtatttctgccgacggatgtctaatgcagcgttagtcaccattgcccagaatcgtccgaacttgacccgttttcgtctatgtataattgagcctaaaacacctgattacctgacccttgagccactcgatgttgttttggagccat

SEQ ID NO: 26618 - DNA, 399 bp, Gossypium hirsutum
  unsure (1)..(399): unsure at all n locations
  Clone ID: LIB3166-017-P1-K1-B8
tccgtctcgcccaacgcgnntccggtgcaactctcgtttgggattgtacttgtaatagcatnnggaagtggatactcggtgctcacntagtaagcgcttagttatannttccataattgtgtacaatgacttacttgaaaatatttttaagttttaaaggcctagtttaaggtttggtgatttgagtttaaaaattggtattaaaattgaaaactcatannatactggcaaaagtagattgcaaaagcaggtaggaagttgctttttgtgattgctaacagctcattgcaattgaggttctttttttactgaaaatgtgaccttgtttgactttgacattgcatttgcagacaaatgcagttccaatagaaataccaaatggagtctaatgatttggac

SEQ ID NO: 26619 - DNA, 239 bp, Gossypium hirsutum
  Clone ID: LIB3166-017-P1-K1-C11
tcaacaggaactgctccaggcccaaccattttgtgggtactctttgcgaagcctggcaaatactacccaagaagtctgtggacccactccttcactgcaagtgagggtaacagaatgcctcgagtaaacaccaactatgaccgtaacacaccctgacaatcgaggccttgggatcaccatgcccgcaatcgaggaaagatgatgtatctgcgcacagtacttctgggggagcgggcttc

SEQ ID NO: 26620 - DNA, 406 bp, Gossypium hirsutum
  Clone ID: LIB3166-017-P1-K1-C4
gcaaaattgaagctgaaagcggggagcagaccgtcatgggttggtttggcagctgctttatgggttcagatatcagctgggaacgccaccaacttcacactctattcttctgctctgaaatcggtgtcggggttcagtcagcaacagctcacgttcttgggagtagcaaatgatattggagagagtgttggactcctccctggtattgcctgtaatcgtttccctccttggactgtgctgcttgttggggtctttgcctgtttcttgggatatggtgttatctggcttgatgttagccaaactattcatcctctgccttactgggtgttatggatcgcacttgtggttgcctctaatagtaatgcatggtttagcacagcagtgctagtaactaacatgagaaatt

SEQ ID NO: 26621 - DNA, 415 bp, Gossypium hirsutum
  Clone ID: LIB3166-017-P1-K1-C6
ctctgcactaggccagctttaaatccagttctttcgtgagaacaagttaatattgcggaatgggcaatgacttggcagaagaaaggtatgttggatcaaatcatggactctaatctggtggggaaagtgaatcccgcttctcttaagaaatacggagagacagctgaaaagtgcctggctgagcacggcgttgacaggccatccatgggagatgtattatggaaccttgaatatgctcttcagctggaagagacttcatcagcactaatggaaccagatgataacagtaccaaccatatcccagccattcagacaccacttgagccattcgataacagtgtgagcatgattgacggtaattctggcactgatgatgatgctgaagatgccgctactagtgcagtattttcacaac

SEQ ID NO: 26622 - DNA, 215 bp, Gossypium hirsutum
  Clone ID: LIB3166-017-P1-K1-C8
cggacgcgtgggtaagtatgctaagatctattcttccttcctagcttgcttgcttggctacggttttttattaaaaaattcttcgtatagatctgggttagatctagggtttcttatggtattttgcaactggtcggctgattatgaccatgtccgatctgcaactcgaaaaacgcgcttagcgagtggagatttgctatgaactatatcatcat

SEQ ID NO: 26623 - DNA, 206 bp, Gossypium hirsutum
  Clone ID: LIB3166-017-P1-K1-C9
cccacgcattcgttacatgtttgatgcatatatttttttaaccccccacataacagcggggggcatactcaaactggatagtgaaaaaaacctctaggtttaagcctctcaagggtatctaaacccaacagtagccatctgagtcagcttaaaacgacagaaggtgataatgataccatacatggaatcacatgttctaaagtacc

SEQ ID NO: 26624 - DNA, 205 bp, Gossypium hirsutum
  Clone ID: LIB3166-017-P1-K1-D1
acccttccggggccccttgggtgggaatttgggttcagtaaaggaggcccttttggccggacctttttggggggttccccccagggttggtccttaattgtgggaaaatcaacaatgcccttagtgggaggtaattgaggtctttggctaatacttatgcttacgcaatagtcagtagggatattgagagttaaaactaacaagt

SEQ ID NO: 26625 - DNA, 395 bp, Gossypium hirsutum
  Clone ID: LIB3166-017-P1-K1-D10
cccacgcgtccgatcatatcatagaccttaaaataatcataaaataattatttctgtctcggattttgtggtcacgaaaccactatttcgactaggcccaaaatcaggatattacaaagacagtgacctttgtgcttcttgctgtatgttcatgacctttaccaacttttaaagtaagttttttctattctactccattcaactctaaaatgtagcttatgacttgattcgagatatctctgcctgtagagttctttctttcataaattaactgatttttgtatgtccagattgtccatagaccacaacataagagtcgacattgctcaatatttccttgtctaaaaacccaagtaagccactcccagatactgttaagatcattattacatacc

SEQ ID NO: 26626 - DNA, 287 bp, Gossypium hirsutum
  unsure (1)..(287): unsure at all n locations
  Clone ID: LIB3166-017-P1-K1-E9
cccacgcgnncgnccacgcgtncgaaaaccacaagctgatgttggtatatgtaagaaacactgagaagggagggcgtaatttacgagcacaagtgttactgaaaaacagtataaagcccctttagctcgggtgtcttctctggaagaaccatgtactgaaatttcagagtatgacaaaacacctccgacaagcatgcacgaagcagcaacagattccgtgaatgttagagctctagtagctgacaccaaaaacttgtaactggaaaagattgccgaagtgttggatc

SEQ ID NO: 26627 - DNA, 211 bp, Gossypium hirsutum
  Clone ID: LIB3166-017-P1-K1-F11
attatctatattatttttactggggttttattatttatcttcttcgaataattccactcaagaaaaaaaaaaaaccccttttttcccaaactaattcacacatagggcaactccagacatatacccatgttacattcacaaactatttaacaagttctcattgacaacaataaataatccgaacaaaaaactaaaaacacatcttactttt

SEQ ID NO: 26628 - DNA, 403 bp, Gossypium hirsutum
  Clone ID: LIB3166-017-P1-K1-G5
ccactttccaagaaatgaaaacgtacacattcaatgttgtgctgctatcgatattcggatgaagatgaagatgaagatgaagatgaagaagatactgccgaggaagacggcaatgaagagcagctaggtggtagcagacagcagaacaagaagcaaaaacctaagaatttatcaaacaagaatgtaagacctcatcatcacgcaaaaaataatagatcaaagaagagaaaaagagctaagctgaattaaccaactcttgtgactcattatcagctggagctgctcttttggttatggattttttaaagaaaaatagataatggcttttcaacttatttgagattttgttgtgtctgtcaggcagaccatctaattgaattaagatgagctattgtattattta

SEQ ID NO: 26629 - DNA, 219 bp, Gossypium hirsutum
  Clone ID: LIB3166-017-P1-K1-H5
cccacgcgtccggtgatttaacttcttctgtgcatgtatgagtgacaatgaataactcaaatcacaggattctttttcttttctgtcattttttcattaagtacgattacaatgtatgtatttattcaaattgttataggtgattttttgttgtttcatgtattagatattattgtaaatttgggattttttttggtgtgaaataaaaggcaatcaatc

SEQ ID NO: 26630 - DNA, 231 bp, Gossypium hirsutum
  Clone ID: LIB3166-018-P1-K1-A1
aaaaaaaaagggtttacataaaaaaacctttttccaaaccaaaggggaccgttcccttttttaaaaggtaaaaatacccaccgaccccccctttttaaaaaacccttttttaacaattaacccaagttttcaaccattttgttcccagggttttttatttcaacttttggaaccgttttttgaaaaccccctttttctatggaagcctctatgtgccccttttttaaattt

SEQ ID NO: 26631 - DNA, 415 bp, Gossypium hirsutum
  Clone ID: LIB3166-018-P1-K1-A2
ccgggaataaccgccgggaccgacgcgtccgccagcagtggttcctctatgattctagacgatcttcattacaccaccaccagcaacaacagcgggaccggatgttatttcatggagagcaacgatggaagctcttctgtcaaggctaagattatggctcatcctcactaccaccgtctcttagctgcctatgttaattgtcaaaaggtaggagcgccacctgaagtggtggctaggttagaggaagcatgcgcatctgccgccactacgggtcctactaggaccggctgcataagcgaggaccctgcactagatcagttcatggaagcttattgcgagatgctgactaaatacgagcaagaactcactaaacccttcaaggaagccatgcttttcctccaaagggtcgagtgtc

SEQ ID NO: 26632 - DNA, 313 bp, Gossypium hirsutum
  Clone ID: LIB3166-018-P1-K1-A4
agccttccgattaaattaaaaggattccttctttctagtggtgttgttctctcgaaatccgatgcctccttagtcattcaaattactgacgatttgtgcatgtatgttctggtatatgttgatgatataataattacaggagattcttcttcagagattgacacgtttgttcatcgtcttcactctgaattttctctcaaagatttggggccacttaattatttttttggtattgaagtgcatcggtcttctgctggggagctccacttgtgccaaaaagaatacattctcaaccttgatcggtgtcgtatga

SEQ ID NO: 26633 - DNA, 220 bp, Gossypium hirsutum
  Clone ID: LIB3166-018-P1-K1-A7
aaaaattcttttgtatgaaacccagtcccgtgtttgtttggatgcaaagagctacagtggggcgccttctgaaagacagaaagccggcttaatgcactgctagcgaccataatcacttatccgatacgcttacatactctctgaggaacacagccacagatgatgtggtcatcatggttatatgatggggtatccgctacactgatattcatgaagccaa

SEQ ID NO: 26634 - DNA, 407 bp, Gossypium hirsutum
  Clone ID: LIB3166-018-P1-K1-B4
cggccgcgtggcctttgacagtaacctcaaatggtttaggcccgttaaaatacaatgggaattggaagctctcctgcttcaaactcgcccttgcaggacaaggatccacactagaccatggcacatatctctccggttcttcgaattctaaacgaaactccccattctcctgtaaatccaatacaacactcgaaatgaagcaggatttgcacatgctgatagtaatttcaagcacccagtttcttcaagtaaaaacctgggaataggagtatcgagctgctgggtactccttaatatacatgcggtgaacgtcggttggggggaggagcaaaaagtgcttctcgccggaaacgacggcgtagagattctcgtaatggtctttgtggaaagaagtctgggagagatga

SEQ ID NO: 26635 - DNA, 356 bp, Gossypium hirsutum
  Clone ID: LIB3166-018-P1-K1-B5
ccgcccacgcttccgcccacgcgtccgcccacgcgttcttttaatcgtttagctggtcctataccagagtctttatccattgaagcttataatggtagcttggttggaaacccgggcctttgtagttcaaccaaccgatctttcaagcgatgtcaattgggttccggcatgtcaaaagatgttcatacgattatagtttgtttcgtgatcggcgtgacggtcttgcttgtttcgataggatgcttcttgtatttgaagaggactgaaaaagataaaaatggtgatggtcattcattgaaggaagaatcatgggatgttaagtctttccatgttttaactttcactgaagatgaaat

SEQ ID NO: 26636 - DNA, 400 bp, Gossypium hirsutum
  Clone ID: LIB3166-018-P1-K1-B8
cccacgcgtccggatttttaaaagtaacttttctttcatctgcttcctgaactaagttgaaaaattggtattctagagaggaaaaagaatggaatttgcagagttgagagaagccatagagcaaatagaggtggtggattctcatgctcacaatattgttcctttggattcttcttttcctttcagcaattcacgttctgaagcaactggccacgccttatcctttgctcctcactccctctctttcaagaggagtttaagggatattgcagaactctatggcactgagtcatcattggatgccgtggaatagtatctcgcagatcatctggcttgcaagccattagttcaaagtgctttaaagctgcaggaatctcggctattctcattgatgatggac

SEQ ID NO: 26637 - DNA, 291 bp, Gossypium hirsutum
  Clone ID: LIB3166-018-P1-K1-B9
gccactctctcatagtttatattgtctcatttttttaatcacaatatgaaaagagttgggtgaggtagttgttagcttaaagagaaagaatgtcaatcatcttattccatcgacgccagtgatcgaatcaacgtttattcacctcaaccatacaatattagagctatgaatccacccctccatatcaacagttatcttcatctaccatcaatacgctcgtaatcctcaattcctaagcctcatgttatatcaaaaatgcctactttaatatcgacaccttatcttcaccaa

SEQ ID NO: 26638 - DNA, 380 bp, Gossypium hirsutum
  unsure (1)..(380): unsure at all n locations
  Clone ID: LIB3166-018-P1-K1-C12
cggacgcgtgggtttggggattacaatgatttgttctgtttcttcgttgtttttcgtgtggttaaaagcttcgttcgtgttcaattcgagtaaagaagggtcggccatggaagctgctttgttcatttgttcatttggttttgctattgctcatatgattgtggcgtatagaacgagttgcagagaaagaaggaaactccttgtttacaaaattgatattgaagctatttcagcttgcaagaatggatttccaaggtatcaaaagattctccaagatgaaagagtgaagtaaatgctttactactgtttaacaatggaagcatttttccactatagcanaaaaaaaaattttctccctttttggctcatcacttgattct

SEQ ID NO: 26639 - DNA, 365 bp, Gossypium hirsutum
  unsure (1)..(365): unsure at all n locations
  Clone ID: LIB3166-018-P1-K1-C2
gtggaaaaggattgaaatgnaagcttattantatctttaatccactttcatcagaggggggaatattgtggccctgtgggtgatnaatgacaacaggatctacacaagattccccgatttgttgaaagtggattaaagatgttgctgagcttcctttatatttttctcccacgcgttctctttcgccatttttgttcgttactctggtccgttaccaaagccttctttctttcctattttttttttttaattttatctcttttctattttttttttatacataatatttttgtttcttctttttttttttattatttattttttatctctttttcttttttttattcaaaattttattttttttt

SEQ ID NO: 26640 - DNA, 415 bp, Gossypium hirsutum
  Clone ID: LIB3166-018-P1-K1-C5
agccttccgaaaaaaaaggagtggaaaggttagtgatgactttttgttcaatgaagaaaacaatgggtttaaagacttattgagtttgctattagacgagggagcgaaggaagagcaagaacagcatcaatggctgactggatttgaaactttctttgaagctgaagcaaagattgaagaaattactggttttgaaatggaagaagagttgggtaattccagaaagaagcgagctcgtaaatctggttcgatcgccggtacttcttcgacggtttcagctacttccgataacgccggcggtggttcgggacatcaacggaggttatgggtgaaatcacgatctaaagattgggggggagaagtgtaatcatcccgatttttccgatgagaaattcaaacgtgcgttccgaatgag

SEQ ID NO: 26641 - DNA, 357 bp, Gossypium hirsutum
  Clone ID: LIB3166-018-P1-K1-C8
cccacagcgtccgggaaaaccagattttccattatctgcaagcctatctaccactttgggggaacctagactattagccaatatactgtccaccatgtcggccaggttgccaagatcagtccaaccgacccgcttgataaagtctgtcccattagctgagggatatgtacaggttttggggccactgtaaatgttgccaaacccaaagagggtcaaactgttgcagtttctggactgggtgccgtcggtcttgccgccggtgaaggtgcaagggtttgtggcgcttctcggatcatcgatgctgatgtgaaccccagaagatttgaagaagctaagacgttagggattacagcattt

SEQ ID NO: 26642 - DNA, 402 bp, Gossypium hirsutum
  Clone ID: LIB3166-018-P1-K1-C9
gtcaatcctgttaacggcggagccggccgttctttgcgtggggcgcgtggacttgaagggtcggtgatcgagactttccccaccatgatttactctgaagttaaggttcataagatcggtaaaggagctctggagtgcgcagtttgtttgaatgaattcgaagacgacgaaacgctgcgtttaataccgaaatgcgatcacgtttttcaccctgaatgtattgatgcttggttggcttctcatacgacctgccccgtttgtagagctaatctcgctcctcaaccaggtgattctggagtgagtcaacccactgagttgaatgagaccgccaccgagacacctcgaggctccgaacgacagcagtgactcggaaatggaaggagaagaaaggagaataaacaa

SEQ ID NO: 26643 - DNA, 360 bp, Gossypium hirsutum
  Clone ID: LIB3166-018-P1-K1-D11
ctgctatttggttgcttgtttccactctggctgttgctcgagcgtttctgtatttggctgaggctagagtggataagaggcataggacaatggcgaagtgggtgcttggacaggacatgactgtctcggagtttcttgctgctgatattgacaacaatggttttgtgagcaaatccgagtttgtgatatacaagctcaaggagatggggaaggtatcagaaaaagacattatgcagatcagcgagaagttcgataggctagatgctggcaactgtgggaagataactcttgcagatcttatggagcatcatcattaatctgcaagtaaccttgcttataatcatcgttatgatacgggaa

SEQ ID NO: 26644 - DNA, 310 bp, Gossypium hirsutum
  Clone ID: LIB3166-018-P1-K1-D2
acccttccggaaaactccggcgaacttgttggatagcactggttatattgatttctgccttgttaggttcgttgtagaaagatttaagtataaattaaagtccatctatatgaacagagatgtggagaatatctatatttttttctttctttctgttgggtgtttaaagttttgatctttccttcattgtgttaatgtttcttgtttctgtttataatttgtggatttagtggatatgtaaatcaaatttaatctgtaaatgttctatttggatgccgttaagacatattaaaaaaattatttttttttt

SEQ ID NO: 26645 - DNA, 413 bp, Gossypium hirsutum
  Clone ID: LIB3166-018-P1-K1-D5
cttccgtttggcctttgttctttctcgtacccatggcttcctaatcttctcccgctaatttcaataatggtccttcctctcctgatgattccttctccagccccatagctaacacctcttccccagctcatcgtcgccggcgtggccgccgtcaagcctccactccttcatccgctgccgcaactccacctccaaacccttctcgtttcgccaactcggcatctaccccaaccccagctcgttccaccaggcgtggtcgtcgcccaggcccagccacgtccccatctcccgctgtcgctgccactccatcctccaccgacgatttctcgatgccctcttccgaggggggcgaggatatggaggaggcgacccctacctttgtttggggtaccaatattagcgtccaagacgtg

SEQ ID NO: 26646 - DNA, 410 bp, Gossypium hirsutum
  Clone ID: LIB3166-018-P1-K1-D6
aaaagggttcaactaatgaagagccagagcaggtatacaactacaaaactccttgctgcagcggcagatgctgggacaaaaaccaaagagcagttaatggctgctctggaaacaggaaaacgacaccagcagaagcaagatgatatggaaataaagaagacattgaaaacctcaagcaatgatgaaaaacaaatcaaaaccgtgagttcagcatatccaagaaactggagcataccaaataaagctcatgaaaagcatgtctcttcaaattgggaacaagttcccctccagaacgagatccgagaagatgtttgtaagtttgttcataagctcaccacagagcaactggagctacctacagatgaaaaatcaatcagtgtcgtaacactagccggagaaaatagaggggc

SEQ ID NO: 26647 - DNA, 400 bp, Gossypium hirsutum
  Clone ID: LIB3166-018-P1-K1-D9
aattattgaagctgcactgaaaagggacccctatgaggctgagttcatacaatctgtcgaggaagctgttcatgctttagagagagtgattgcgaaaaatccccattatgtcaacatcatggagcgcttgttagaaccagaacgtatgattatttttcgagttccatgggtggatgatagaggtgaaacacatgtcaatcgaggcttcagggtgcactttaaccaggcattgggtccatgtaggggtggtattcggtttcatccaaaaatgaacttaagtgttgccaaatttctcggttttcagcagacattaaagaatgctttatcaccctacaaactaggaggggcagcaggtggaagtgattttgatcctaagggaaaaagtgataatgagatcatg

SEQ ID NO: 26648 - DNA, 370 bp, Gossypium hirsutum
  Clone ID: LIB3166-018-P1-K1-E8
ctttcaaacaggctttgaaaacttgcacaaaaaacaatccgcaaacatgggtaaggagaagtctcacatcaacgtcgtggtcatcggccacgtcgactccggcaagtctaccactaccggtcacttgatctacaagtgcggtggtattgacaagcgtaccatcgagaagttcgagaaggaagccgccgaactcggcaagggttccttcaagtacgcatgggtcctcgacaagctgaagtccgagcgtgagcgtggtatcaccatcgatatcgccctctggaagttcgagactcccaagtacaacgtcaccgtcattgacgcccccggtcaccgtgatttcatcaagaacatgaacaactggtccctccca

SEQ ID NO: 26649 - DNA, 400 bp, Gossypium hirsutum
  Clone ID: LIB3166-018-P1-K1-E9
cccacgcgtccgcccacgcgtccgcccacgcgttcggaagggtataaaaattacttttcgtgatgagaattgctgttgcagtactagagggattgcatcaagttctttctgttgggatttctatatttagtagttgttttataattcctatttcgaaacaaacaaacaaacaaaaaaaaattatcattagctaagtggtatgttagcaatgttcaactctgaagtcgccaaaaattatacatttattgttttgaggtgatttctttttcttttcctatgcatgtctctcttccttttggatgatattttatttcttatttaatgcataaattattttgagaatgcttactttttcaagtatagggaataagaattatctagttatgggtagtatctggaa

SEQ ID NO: 26650 - DNA, 373 bp, Gossypium hirsutum
  Clone ID: LIB3166-018-P1-K1-F3
agccttccgccaacgcttccgcccacgcgtccgttaatgtcatcttaataggagtgcacggaatgcctggggttggcaagactacgcttgtgaaagaagttgtcagacaagtcaaagaagataagttattcgactcggtggttatggctgttgtgactcatactcctgacgtccagaaaattcaagatcaaattgcagatatgttgggattgaaatttgaggagcaaagtatgactggtagagcaagtcgtttgtgcgaaaggttgaagaaagagaagaagattcttgttgttttagatgacgtttgggcaaaactggacctgatggaagtggggattcctttgggagaagaggatcagggatgcaccatact

SEQ ID NO: 26651 - DNA, 410 bp, Gossypium hirsutum
  Clone ID: LIB3166-018-P1-K1-F4
cttcggtggaaggctaaccattttctaacctcctgaaagttgttgcctcattaactacttcacatatatgaagattcctttagaaactatggctgttgacaaatttctttggctttatgttgctgttagtgtttaaaacattctcagaagtgtttctcttgcagccagacatagcatgtaccttgtattggaaattgctaaatgaaaatttctcccatatgctaattctgttttgtcattctgcatctttatatgggataaagcaatatttagtccttgaatttggtattttcttttgtccacattgtcttggaacttggcaactcttaccagtttttgtccatataattttttttactggcaaaatcatagagtgtcacatcatcacagggaccaaagttgagaaaaga

SEQ ID NO: 26652 - DNA, 416 bp, Gossypium hirsutum
  Clone ID: LIB3166-018-P1-K1-F5
agccttccgccaacgcttccgcaagtcttcaaccggatggaatgctactgctggaaattgtatgatcccgggtggggggttttcagcatttctgagggaagaggagggtaagctgatgagaaatggaagcggtaatggggttagctcaaatggtaatttgatggggaagaggaaggttaggcctgaacaagttattgaagctgcaacacttgcttccaatggccaacaattcgaggtcgtttactacccaagggcgagtactcctgagttctgcgtgaaggcctctttagtgaaggctgcattgcagatccggtggtgctcaggaatgaggttcaaaatggcattcgaaacagaggattcttctcggattagttggtttatgggcactatatcttcagttcaagtcgcggatcccc

SEQ ID NO: 26653 - DNA, 338 bp, Gossypium hirsutum
  Clone ID: LIB3166-018-P1-K1-F6
ggaacgtgttggagtgcttaagaacagggagatttttattgtcagctacaggacactacatgtgcgagatgctgacccacacgagtgtgcaactctgctaagcaatagactgacaatcggtaaaagaacaaagccatggatttcgctatccacgggcacgggtatcacgtggtctatcattgatgatgcgctgtagaagctagctgctcaggctgctgcttaaacctatcatatatagagttgttaatgtgcagaacgactctgtggatgaatgctggcttgaccttgcctaactgctagagggtgttacagataaaggttttaataatgcattcata

SEQ ID NO: 26654 - DNA, 225 bp, Gossypium hirsutum
  Clone ID: LIB3166-018-P1-K1-F8
tgtttttaaaatataaacttacgacatctacatatggtgacctcagtgctacctagagtggaaagcttggcaggcagggggattaaatcaatcccgaaggaatatatcaggcctaaagagaagctaccaggcttaggtaacgggttggaggaaaagaaaaaggaggaagggcctaaggttcccaccatcgattacacaaaatcgattcggaggacaaagaggccg

SEQ ID NO: 26655 - DNA, 301 bp, Gossypium hirsutum
  Clone ID: LIB3166-018-P1-K1-F9
cccacgcgtccgcaaatcttctatttatatatattcacacactaagatcacctactccacggtatgcagttgaccatccttgagaaacaaactacacaaggtttagaaactccgggaaccgccggagatgtgaaggaggagaatcggagtcgtagaagaagttacatggcttcaccgtcttcttcgtcgtcgtctcctagactgcgaccgaggtgtacgtgttcgaaccaaccgggttcggcaccatgtagcaagcatggttacatggtgccaaggcagaacacgaagagatattgtggaa

SEQ ID NO: 26656 - DNA, 413 bp, Gossypium hirsutum
  Clone ID: LIB3166-018-P1-K1-G6
cattgaggaaggcccatttaaggcaatgtacaattatttttcaaccgccaacatacagatcgacggggatttcagtgcaaagctctcaagatatgggtgcgttggtcatatcccagagatggaagagatctccagtaattcagttgctgtggcaaatatatccgtagagactctggagagagggcgcctaactccaaagagcaatgtttggagttttgggatcattctacttgaattactcactggccggaagaaccttgacaaccgttatcccaaggaagagaggaacctagtgaagtggagccggccattcctagccgacgattgtagattgtcactcatcatggatcctcagctcaaaggtcgctttcctatgaaagctgcccgtacggtggctgacattgcacaaaggt

SEQ ID NO: 26657 - DNA, 341 bp, Gossypium hirsutum
  Clone ID: LIB3166-018-P1-K1-G8
cccacgcgtccgtttcaccctttctcctacaaattcaacatgttcttcctcatctgaatgtaaaagtgcatgcagaagaaaactaattttagttttcttgaacggaaactccaacaaagtttcacagatggtttgggatcaggttcagttgagaagttcttcaggcaaccacccacttgtttctggacacccgaaccgaccaattcctaagctcatggtctgctccatcctcttcgtctcgcttacttaccttctctacactctcaagctcttaacaacctctgctcaacaaaccttccaccataccccatttactttcctattttcgtcgctctacaagc

SEQ ID NO: 26658 - DNA, 289 bp, Gossypium hirsutum
  Clone ID: LIB3166-018-P1-K1-H1
gcgccaagccttccgtttcaatttccaaggttcctttgaaccaaaaaattaaccttccttatttttaattttaaaaagtttttttatatggaaaacccaagaacaaggagtggcatccccttgtgctcatcttctagcctagatgctttgactacaacactaagcagctcaattcaagctctgggtcgtggctttgatgtcacttcagatatacggctgttatattgcaaaggggcacctggttcaaggttggttcagcttgatgaagatcataccgaccatcttgttt

SEQ ID NO: 26659 - DNA, 410 bp, Gossypium hirsutum
  Clone ID: LIB3166-018-P1-K1-H10
ctcctttttccatgttctattgcttgaatcaattaattccgcaaccttactatcattcagggtcgaatttaaaactggtagtctaacatgcgataaacctggaatccagttatcacgactgatcgaaatatttgtgcctgtacccaccagtcagcataatccttcagctaaaacacccttagtagcccaaatactcttccatgtatatgaaacgttgttttcccaaattggaatttaagaaatcaacttttggaaaatacttcgcttttaatacttttcctactaaaggatttggattgttcaagatacgccacccctgtttagctaaaagggaaatgttaaattgagccatatttctgaaacccaatccaccctcgtctttaggacgacataaatacttacattgacac

SEQ ID NO: 26660 - DNA, 399 bp, Gossypium hirsutum
  Clone ID: LIB3166-018-P1-K1-H12
caaaaaaaaagaagaaagaaaattcaaaatcatggtatcaaaatctctttgcaatacctggggtctttcctcaacaacctgctttccgaaacaccgatccagaaaaccgatctccacgacgacgccgaagatattcgcttcgagaagatcggataacgatgacttgagctgcagcggcgttggtggtggaggaagacggcgactcgtcgatgaaaacatgattgttctacggaaaagaatacacgagattaagatgatagagcggaactatgaaccgccggcggattggatggagtgggagaaacggtattacacgagttacgattcgattatatgtgatgttttgggcgttttacaatcgcagttgatgaatactcggccaagcttagctttagggat

SEQ ID NO: 26661 - DNA, 300 bp, Gossypium hirsutum
  unsure (1)..(300): unsure at all n locations
  Clone ID: LIB3166-019-P1-K1-A1
ttcttcttatggccgcctggtcatttcaagctgagaagggcttttaccatgagcagctanntcggtggctgagnnataaccaacacgtgcttttggaaccctcttcaatgatggcgcaaatgtgagcccactgccatgggagagtacatcggcttgctgccttatgtagccgagagagatgtatgtgcccaaaagatgtcgaatgcacgctgtggcgcaccatcatagaccataacgcacngaatccaatttgtgggattgggtgcccctacgtggattcaaagtgcgggtatcaaacta

SEQ ID NO: 26662 - DNA, 152 bp, Gossypium hirsutum
  Clone ID: LIB3166-019-P1-K1-A11
ccggcgcccactcgttataccatgagaatgggttttttggtcaagctcatgagggtttgattaatcggaaaatgttaaaggatggacaaaatggggaaaatgaacatgtacaccataaccgtagctggaaggatgtgtatcatcagttgctg

SEQ ID NO: 26663 - DNA, 299 bp, Gossypium hirsutum
  Clone ID: LIB3166-019-P1-K1-B12
gccacacctactgacatatatccggagacctgctttccgggacctgaatggtctcaagaatggaccttgatctcacgacattgaccaaacgcttgctcattcccttaacatacttggacatgatacattgccagctctgactcggctcacaggtctgaacaaacaaagctaatgctcaccgctactgcaatctaattacttgacgcacataacttttgatgggcaaccctctatcacttactaaaacccacacatccgagtagatcgtattactcactaacaaagccaaacacattgct

SEQ ID NO: 26664 - DNA, 399 bp, Gossypium hirsutum
  Clone ID: LIB3166-019-P1-K1-B5
cccacgcgtccgcccacgcgtccgcccacgcgttttgtttgattgaaccatctgaatttcaagctggtctaatttgttgttcttttagggttttttttttttaaatattgttgtctttctaacaacttccatgtcctacatcaccttaatcaaatttccttgctttttacttgtgctccagtcacgtgtctacgactggtggaaaccaggtgggaagtttttcctgcaactttcaagagctctgaagttcactccaatgatattttggggaatttttgggtatgcatcaaatttatctcttttatgcttcaattgaacactttttgttcttcttgatattaattagtagattttgctgtcagaaagtctaaatacatattgcatacttttgaatcatga

SEQ ID NO: 26665 - DNA, 412 bp, Gossypium hirsutum
  Clone ID: LIB3166-019-P1-K1-C11
cccacgcgtccgcccacgcgtccgtgatgaaacttaggttaacttatttcagaactttgggagcagttcaaatgcagatgttcttccttccaaaaccaaagaattgtcttatatggttaattctaatgatcagaacttgggatatcaaatgggacaagtagagaacttggaaagtagtgttaacatggaaggtctatctactccacatctggaaactaacggtccgagtagatttgattctttggtggacgttaaaggggttgcctgtgatcatgagatttcattcagagctggatcttaatcctctcaaacctgcacctgtaaagattagctctatgccagatacaggacctagcattcctaaaactcttcacctgttctgcaatgggattgatgagagctctacagccag

SEQ ID NO: 26666 - DNA, 202 bp, Gossypium hirsutum
  Clone ID: LIB3166-019-P1-K1-C2
gtttaacctcttggtgaggttcgacttgagctaatcttttggtgagcatcgatacatttatgggtgtggttttcgaatctacagaagaatttccctattccttcttaggttcaatactctcttattgcgttgccttatttgtgaaaactgaagagtttggaaattgaagtactgaagctaataaaaccattgatattgcttg

SEQ ID NO: 26667 - DNA, 288 bp, Gossypium hirsutum
  Clone ID: LIB3166-019-P1-K1-C5
gacggattgcctaggtttcgagctggttgcgtgttgattgcggttagagaaggtggggaagagaagggagttttgggtgatgggaggctatggagattccaggactgtctcgggagtttttccagtggacgagtattataaggatgctttggtgatggaattgaagggaaatggtggtgggaaatggagggaacttggggatatgtggggggcatgggagactcctaggtttggtaaaatcgttattgcggaggatgaagatgggtgttgtccttctgttattttcat

SEQ ID NO: 26668 - DNA, 289 bp, Gossypium hirsutum
  Clone ID: LIB3166-019-P1-K1-C6
accgacgcggccgtttttcttttttaaaaaatgttagctttttttaagtggataaaaaagaaaaaaaaaaatatcagacatggttaagatgaaatggtctcgcacctccctatgagtatgaaattgagtccctttgatttttatcaaatgatgaaatctttgttgctagaaatatgatgatgatttatggtttgtggtgttacggatctttctttgtataatatcccttacaaatggattaaaacctttcaattttataattctatttcttatattataatttttaatt

SEQ ID NO: 26669 - DNA, 425 bp, Gossypium hirsutum
  unsure (1)..(425): unsure at all n locations
  Clone ID: LIB3166-019-P1-K1-C8
acacccacgcctcctgtgcttataccattggtgaatcngttattgagtcatctgttgtcaaacgtcttccataaattctttctggtaccttaaccaacattattccaccgaaatctattgaggatgaacacataaagattgatgatctatcttcccatctggattctatctttaattccttcgattccaaattgcttttaacgccattttttaatagtcatttatgtgtgcatgccgcttcttatatcaatatcaatgctacaaaataatttttcaaattattttatctttctccaatattcttatattgatgctgagtttttataaaaatatttaaatatttttaatataattgcttttattaatggcttacctttctcttttttctttaatccaatttaacaatatcttttataataacattt

SEQ ID NO: 26670 - DNA, 403 bp, Gossypium hirsutum
  Clone ID: LIB3166-019-P1-K1-D1
gaagaaaaaaaaatatggagaaatgctagctatttaaagacataagatctgggaacttagggggagcgagtctaatgcctgacaagcaaaccaaagaacttgtcaacatgaagactatcgaccgtgatcataatatacactagaatgtggcaagagagattataaatcatagatcgcttcatcatacaaatataattcgggtcaaagagagtgcattgactactacacatatagcaattgtgatacgagtatactgctaatggcgagctcttttagcgaattagcaacgctggaatgcataatgaagattaggccagatatcttttccagcagctgaactcaagagctagctactgtcattgcatacaaatatgccatcgaaatttgtaattagagaatactt

SEQ ID NO: 26671 - DNA, 346 bp, Gossypium hirsutum
  Clone ID: LIB3166-019-P1-K1-D11
cccacgcgtccgccaaaacctgttcatcattaggttcagtggtgccatctggtcccaaggcggctactcaagaaaagagagattcaaacaaggtagtggagctgaaaagggttttcgccacctttgacaagaacggtgatgggttcataacgaagcaagaattgagggaatcactcaagaacatcagggtgttgatgacggagaaagaggttgaagatatggtagtgaaagtggatgctaatggagatgggctgatcgatttcgatgagttttgcatcttatgtcagaccatagatggtggtactgatgcaagtggtaccacattaaaagaagatgatgggatgaa

SEQ ID NO: 26672 - DNA, 335 bp, Gossypium hirsutum
  Clone ID: LIB3166-019-P1-K1-D6
cggacgcgtggggttcttcaatggcgaggagtctgcatttccttcaatgctgccaacaaacagcgggtatcgaaagggctcaacgactgtaatctcgatcttgatagcagttcttgagttcatgctggttcaacagtagctacacatgtgccattactttggggatgcgtcaggtttatctgcaggttcttctcttctgttcatgtctgcatgaatacgcttggatgacatggattttacaatatagggcaatcatggaaatctctccactgatttacatatttctgggactactgcaattatccattgattgatccaaaagaattaatgttttt

SEQ ID NO: 26673 - DNA, 441 bp, Gossypium hirsutum
  unsure (1)..(441): unsure at all n locations
  Clone ID: LIB3166-019-P1-K1-D8
cgggccgaccgacgcgtccgcccactcttcctggaacctcaatttccttagtggacctctatcatggcaattgtctgttgantacttaaggatgcactcactcccanaagaagagaagagggcaaatgggagaagctggtccctacggagtcataacatgattaaagcatttctgctacagtctagcccaccaaaccatctcatcacctttaacatcattcagacagaagtggttttagataagttaattaattgcgtgcttttcaagcacatcatcatcatcattagctaataatagtttgttctctgtctctctttgatcgtggtggtggtgaataaataataatatatgcatgcaatgggcgcattttgtgatggtgattactgaagggatcattggctattaggtttaactttaacaatgatccatcttcttactct

SEQ ID NO: 26674 - DNA, 260 bp, Gossypium hirsutum
  Clone ID: LIB3166-019-P1-K1-E10
cgaaccccacctccttccaccttttcccacttaatatttatgctgccggaacacccagatcttctatcaagttttgccacccatcaaaccacttctttttacttctgtttattgcatatattgatacctttcatcttttcacgtgaaccttataaacaggttgatattcccattccttatgtttttattgtttattttttgatttccattcttatattcctaattagtgcatgttcctgcacttcttttgtcctaacttt

SEQ ID NO: 26675 - DNA, 373 bp, Gossypium hirsutum
  Clone ID: LIB3166-019-P1-K1-E11
cccacgcgtccgattcttgggaaggctttcggtttatgctcctatatttggttgtgtggagatcaggatctccaactgtatgaatgcgagcgagtcacagaagctcgaatgcgaggaatccagaccttagtcttcctttcgacttccttcggggtagttgaattgggatcttcagaaatgatccaagagaattggagcttagtgcaacttgcaaaatcaatcttcggttctgagattaactgtcttggttccaagcatcctggccttgaatctcagctccaaatgtcaacccaaactgtcccttttcttgatttcggcaaggttgcaagtgatcaaaaagagtggattcttgatgaccgaaagcaacaaattg

SEQ ID NO: 26676 - DNA, 426 bp, Gossypium hirsutum
  Clone ID: LIB3166-019-P1-K1-E3
gtgaatacatgttggaagataggccttgcaacgattgctgccttcatttttgctgcgaggcctgcgccttgtgtcaagaatatcgcgagctcaaaaaccgtggcttcgacatgtcccttggatggcatggaaatatggcgaggcagcaaaatcaaggcctccaaatgccatcggctccggtgatggaaagtgacatgaaaagataatttcatctatattttggatggttctctatgatatttattttattattgttgttattattcatgtgatgccactgtggctccaatgatggagaagtggcatgaaaaagatattcgcacctatatttaggacggttttcgattaaagtctttcatttgatgtgagtgtggttgagtgtcgtcattatatattaaagtcttgtacatttgatatattacatta

SEQ ID NO: 26677 - DNA, 362 bp, Gossypium hirsutum
  unsure (1)..(362): unsure at all n locations
  Clone ID: LIB3166-019-P1-K1-F1
ctaccatgtagcagcacaaggntggccatcggcgtgcggtgtgcggctggtgggtcttagagtttcagatcctcagaaaatgcaaagttgaatgatccaaagcatacgggagatcacacggaagcaacacagcgatgaagaaatctttgcagtcctgcaggagtgctttatggatcctaatgaaactgcccaaaagcttctttatctggatatatctcatgaggtgaaacgaaaacgcgacaagaaaaaggagacagctggggtacaaggacgaggaggtcgaggcagtcgagcgaactattacacatcatctagtaaagatgctggagttgcaaggaatacatctgctcgaagggataact

SEQ ID NO: 26678 - DNA, 412 bp, Gossypium hirsutum
  Clone ID: LIB3166-019-P1-K1-F12
atctttgtacagaacaatgtctgttgtaatttgtaatgacccgtctgggcagaacttgtttgtggtgattgtcaggtttcttgagacctttgttggctctatgtctgcaggggttggagttggatttacttctgctctactctttaagtatgctggactagatattgacaatcttcaaaacttggagtgctgtctttttgtcctttttccttacttttcgtacatgcttgcggaaggtcttggtctctctggtattgtctcaatattgttcacaggaattgttatgaagcactacacattctcaaatttatcagaaaattctcagcgttttgtatctgacttttttcacttaatatcatcattggctgagacattcatatttatatacatgggtttcgatattgccatggaa

SEQ ID NO: 26679 - DNA, 406 bp, Gossypium hirsutum
  Clone ID: LIB3166-019-P1-K1-F6
cccacgcgtccgctttcttcttcctcctcatctttcattgttgctcttcctttgctccgccgcgttgctccaccgtgctctgttttctttctcatttctcatcttttaagaagtgttggtcgtttatgtgcagttgttactttgttcgttctcgttttgttattttttatggctactgcaccgaaacccatcaaacaaagccaccgcgaagaagaacaacaacagcagcgagaagaggagtcatcaaagccgcgagaaaatgaagctgaagaagatgaggaggagactgtgcagagaccatggaatttgagacctagaaaagtggtgatggagacgtcggcggcggtagtgacatcggcggcggaaaagacgagtgaaacggtgggtccgaagtcgatgagattaa

SEQ ID NO: 26680 - DNA, 421 bp, Gossypium hirsutum
  unsure (1)..(421): unsure at all n locations
  Clone ID: LIB3166-019-P1-K1-G3
gcatctttttcataaagcttgaatggtattggttaagggactgagatttgtttggcatgcgggaggccccagaagcacccaacacccttggtttctgtgtaaaagcaaaggaatcttaaattcttctacttcaatacacatacacatatatacatattatatatcaatgttctttgcagcatatactaatggggaatgtgaaggcaacatcatctttcaccttgagttctctctctctctctctatatataagctttcccttgcctttttctctttaacagtttcccttttcttcttcatctcaaagctttgatcttcttccatagctaaagctcttcaagaatctttgacaggtggaaaaatagtgaaaaggtgattgagcatctatntatcgatatctcttgggattttgaaaagaaac

SEQ ID NO: 26681 - DNA, 420 bp, Gossypium hirsutum
  Clone ID: LIB3166-019-P1-K1-H1
gcaaaaacaaacttctttcttataataaaattaaaaactatggtgaaggaggaactgtacatggaccgtacccagcgttttccggtgtccaatttcacttgacgtgatgaaatctccggttagcctttgtacgggcgttacctacgatcgttccagcatccaaaaatggctcgaatctggtcacgacacctgtccagccaccatgcaggttcttccctccaaggatttcatccctaaccttactctccatcgtctaattaatctctggatccagtcttctactctccggccaggctctaactctccacggcttcttccggcgacgccttcggcgatcttcgaggttcaggctaagctattgatggagaaggttgagagggagggctgcgtcgattctttgtctagggttgccgagttcgt

SEQ ID NO: 26682 - DNA, 386 bp, Gossypium hirsutum
  Clone ID: LIB3166-019-P1-K1-H9
cccacgcctaccaaaaaccctaacaatcctttcttttaagcacagcttaaatgtgaaggagaggatgattcaaatattctcgaaaaccctaaccaccatgaccataactctcgaggtcgccagcagcgacaccatcgataatgtcaaagccaagatccaagacaaagaaggaataccccctgaccaacagcctttaatttatgctggtaaacaacttgcatatggccgtacattcactgattacaacattcaaatagaatcaactctacatcttgtattaaggtttataggtgcaattatagagcctttttttaaggatttcgctcttaactacaaccaatacaaaatgatttgtcctaagtgttattctcgggtgcattccttaa

SEQ ID NO: 26683 - DNA, 333 bp, Gossypium hirsutum
  unsure (1)..(333): unsure at all n locations
  Clone ID: LIB3166-020-P1-K1-A5
cccacgcgtccggtaatcacttcatgctgctatcttttttaaaaaatgcctaactaatgggggcacgttagtgatcttcctgtgaattccaataccntgcaatacactgcttcatactcagcagctaatacctataccgtcacatgtatatgacaccgttcctcatactaataaggctgacaagactactgctagaggtgttcattcgcgacgacctgcaccacaacaaaaggaattgtctgactctgatgacgattatgcttgcttcattacgggtggtgtgatgaatgctgcatttaacgcccagattgctgagataagctgcgattacca

SEQ ID NO: 26684 - DNA, 384 bp, Gossypium hirsutum
  Clone ID: LIB3166-020-P1-K1-A6
cccacgcgtccgcccacgcgtccacccacgcgtttttttacacatccgcccacgcgttcggggtgggtaatctaacatgtttagcattactcccacttcccggaatcataatccgtcgaagcccgttagcgtccgccgggttatcaacaatatgcctggtttaggacatgaagaagaagatgtcatgttgctgcatgacaagttttatagctgcagtaatgggggtgttctacaagggtcagctttggttactagagtgcatggtcaagatcgaaatgacaaggattcgctacattaaacgcttaaaagacaccgataagatgttgctagactagttttggtaccatataaatagagtaaagaagagttgcttaaagactggac

SEQ ID NO: 26685 - DNA, 351 bp, Gossypium hirsutum
  unsure (1)..(351): unsure at all n locations
  Clone ID: LIB3166-020-P1-K1-A8
cccacgcgtgcgttcctagcattactgtgtcctttttaaagaatcttattacgacggggagggacctttatatactatgaaactacaacntactaaacgctaaccactaaaaaaactaaaagttattataaaaaaaaaaggaagaatatcttcattccaactatgtactatcttaaccgataaacagatttatactctccggatcaatccccatcactacatttagaattacttcatccaccatcttgaccttcgctactgttcctcttacagattctactcaaaactctaaacgccaacacattgatttcggcagttccaagaaataacctcattcaccacaacaattca

SEQ ID NO: 26686 - DNA, 488 bp, Gossypium hirsutum
  unsure (1)..(488): unsure at all n locations
  Clone ID: LIB3166-020-P1-K1-B3
ggaattcaccgggnccgagcccgacgcggntccgcggaccgccctgggctttcttggagtcaaaataatgaggttactatctaacaatgatgcannaagtttgggggagggggcaatggnccttactctcccactcgcaagaggatgaaatgagactangnntcggagtgattggagccagagacacgggagaatcnntcttccctanntccttcatccaanntatgccaaataccatttggctttttaaaataccatagataaaaggggnccgaatgcattaggtttactttgtgagacatcggagtttgaccagatctaataatncggcaatcctccagaggcttagaggacgacatagatagaaacaacctgcctcaaattctgtatgaagatgaagaccatgacaaagttgtattggcatcagacggtgatcttgcagcggctgtggaacatgcaaagttagttggttggaagggtttgaaact

SEQ ID NO: 26687 - DNA, 410 bp, Gossypium hirsutum
  Clone ID: LIB3166-020-P1-K1-B4
cccacgcgtccgattcaacaagggtgttggcgattttctagattgggaggttgagaaagggggcgagcttgattttgggttcgagaagcgacaatggaagccactttttggtgaagcttccatgtcacataggcctaataagaagattactcaacgtcaagaaccttttcgatcaattgcttcaatggcggaccagtcatcttccctaccttctagttcgccttcattaactctttctttaccttcttcttcttcttcttcatcgaatgcttctttgccttcttcaagaatggttttacctttcgctttcgacgggactcagaatcctgtttactttcctcatccgatgttccagcccgtgccgcaaagtcagcaacaaatgatttcatttagtccccaacagcagcagc

SEQ ID NO: 26688 - DNA, 412 bp, Gossypium hirsutum
  Clone ID: LIB3166-020-P1-K1-C10
cggacgcgtgggtgctaatagtgacagtctaacatagccattcatttgtctgaattacgttgaagagactctggtataatatatgtctgaataaacttaagttcgaagttgactgaagctgtgtaactctctgttaagcatctttatgcatgtttgatcttctaaggttccatttagttggtagttttacttttagctatttgtcccttgctttcagttcatatttttattttctttttacttctaattgagaaaagaaaaagcaaaagcatccatcaaagccaagatgcaactttgatcgaatagaaatgcacttcaattgtattttctgcacatttgatgtttataatgctctctgtttcagctatttgattgcatctatggggcttcaactactatggagctttggact

SEQ ID NO: 26689 - DNA, 279 bp, Gossypium hirsutum
  Clone ID: LIB3166-020-P1-K1-C12
ggatcaatcaaaactcaacatcaagtgactttctttatctcgattcggagctgcaactgcgggagtaatcagtgtcttttttcagcccctttacatgcatgcacacagaactacatcatatgctgcactacaaatctacgttcaaatacggccatgatctgctatctctacatacaacttgctcattgtgatgttgaaacactaggagtggctgattcaaaacttggaaatgccatttaagcaaaacttaaaattgattgtgttcacactaatgctggt

SEQ ID NO: 26690 - DNA, 413 bp, Gossypium hirsutum
  Clone ID: LIB3166-020-P1-K1-C3
aataagttactctataggactcattcacatcatttgctttatactgatatcccaagccttgggcgcgggcatccgaataatgggcactgcatgctttaatcaaattactccaaacacaaaagaacatatatctgcattatcatgtggttacaatgccccaccttattaatacattatacacacaacacacttgtggctacctggaaaaccattttccaaatatcaacccttattactaaatctattacccaaaggaacatttgccaccgattggcccgatcaaaaataaaaacacctttagctaatagcattttaacagatcgatacgctaaattcattgcatcaattcttttgttctttcaattacataaaagtatgcgaacagtaaattatgtagcaaaattgttaatact

SEQ ID NO: 26691 - DNA, 401 bp, Gossypium hirsutum
  Clone ID: LIB3166-020-P1-K1-C7
cccacgcgtccgcggacgcgtggaaatctgtgttccaaatacagcataccgaagttgggatggggaaaatcgttcacctcaaagcttgcatatcatctgggaggattgtgtccgtcgtttcaaaccgaatctcgtcccccctctctcctttttacttcttctaatccggcggttccacggtccttcgatccgccgcgactctcgggacttcttccacccaacaccagtcctgatctctgtgaagagcatctcctgccagcagatgggcaattttattgcattgacggtgggtatgtttcggttttacttccaaaacctggttcattaaggctttttcgtctgaaacataagggcttatggttgatctgtctaacccctcatgctggattttattaatcacc

SEQ ID NO: 26692 - DNA, 420 bp, Gossypium hirsutum
  Clone ID: LIB3166-020-P1-K1-D1
ccacccgtccgggccaagaagggttcaaccaactgatagtcatatttttgctgaaagagttagaacagagaggggcggtgaaaggatcaagtccctacactatctatctcacccttgcaataaggtgactggtaaagcagttatgttagatgaaatcatcaactatgtgcagtcattgcaacgccaggtcgagttcctatctatgaagttggctactgtgaatccaaggatggatgttaacatggaaacacttttatcaaaagatatgttccaatctcgtggattgttcaaatggggtttggacagaatcaagcacaatgctatcaaggttcaatagctccaggccaagtgaaaattgagctatagaaaccaccattaaacaacacctgattcagagatggctttgtaaataggaaggat

SEQ ID NO: 26693 - DNA, 332 bp, Gossypium hirsutum
  Clone ID: LIB3166-020-P1-K1-D4
cgcgtccgaacaaatacggattttatgcatgaataaggtagtttttttagagaaaaagaaggaattgttgaagggtgctgagcagttcaaagatgttcctggctatggaaggattttcatgatctcaggattgaagggctctggagtagaagatcttactaaatatctcatggaacaggcagttcaaaggccttgggatgaagatcctatcacaatgagtgaagaagtcatgaagaatatttcattggaagttgtccgggaaaggttactagatcatgtgcatcaggaaatcccatatggtattgatcaccgtttggtagactggaaggagt

SEQ ID NO: 26694 - DNA, 415 bp, Gossypium hirsutum
  unsure (1)..(415): unsure at all n locations
  Clone ID: LIB3166-020-P1-K1-D5
cccacgcgtccgcttcaaacagaaaaaaaaagtttcgtttttctcacagtagcattgttttgtttggcgagggtataatgtaatttttatttgcggaaacgacgacgccgtacctaaatccatggaagtgatttcagagcaagcagttttcaagaattcatgggaggaaagtaggctcttggcgaaacaggatattacactgctttccttgttgccattgatgaagtgtgtggaagaagtaatcatgttcccgttaaacatactcaaggaggctcccataagaaaaggtagttagcatgggaagaaagatgaaggagatggtaatgggatccttttcaagcttcatttcgaacttctataagagcaaaaccttaaaatttgctcaagaagctcangtgtcggacacaaaatcaac

SEQ ID NO: 26695 - DNA, 405 bp, Gossypium hirsutum
  Clone ID: LIB3166-020-P1-K1-D8
cttgattcttagttctcttcttgggttcttttttcagttgctagaaaccatccgacggatgtttcatctcacttctttagacgcttcttctcccctaacttgctaaactgagaaaaaacttagaccaataacactatccccttacgatccctttccacctcttctctaacatactcagtaaacccatttctcattaagcattgatcccctttctttaaaccttctatagcgagcaaataagcaaccctatccattgatctgtggccatgtttaaattgacaggttcgaaatcttttactcagcccttgcccatcataaatataagtacatattttttatttatcattccttcctttctgtaattttttaacaacagaaagggcatctccttcaacttcgatcact

SEQ ID NO: 26696 - DNA, 355 bp, Gossypium hirsutum
  unsure (1)..(355): unsure at all n locations
  Clone ID: LIB3166-020-P1-K1-E2
aagncngaagnnataacaaaaatgcctttcaaactacaccaatttatacatatttggaacccaaattcatctggggttggttctactggcttttttctattcacattaagccacagtatctttatatcagtacacctttttgcagagaaatggatttggcattgaatttctaacttttctgcacatctacaaaaggttgattgcagattttgccatattttgatttgattttgctttcacaattcatatgcatgtccttgaatttgatttctacacttgttcgttcttgtagttttgaagcaggggagccttgtcggaagatggtgagtctatgatgggttcattgccacattca

SEQ ID NO: 26697 - DNA, 412 bp, Gossypium hirsutum
  Clone ID: LIB3166-020-P1-K1-E3
tgagagtatagtagaaaaaaggaacaaaaatgtttgatgttttggtggaagtaggtccttatgcccgtttgtttatacgcaattttgggtgttggtgcctttgtttttgttgcgagcgagctgtggaagaagatggtgctgcggaagcttaacggggaatattccgggaccagtaatattcctccggggagtctagggttgccgtttatcggggaaactatccagtttatggctgccattaatggtgagaaaggtttttatgacttcgtacgtgtacgaagtgaaagatacgggaattgcttcaaaaccaacatatttggcgagacgcatgtgtttgtaaagagcaccgaatcagccaaaacaatactaaacaatgagctgggtcgattcacaaagacgtacataaagtcaa

SEQ ID NO: 26698 - DNA, 334 bp, Gossypium hirsutum
  Clone ID: LIB3166-020-P1-K1-E5
gcatgaagggaagctaaacaaagataatgacttttcattataatcatcggctgcagattcaggacgaatgttgtctcattgcaagccttttccaagttccaaaacacaacagaagcattgcaagcaccaacgaaactacttgaaagcacgcccagcaaaggttcactcaagttcttacgtgctcattgttatactaaaacactaggagtgaatgattcaaaacttggaaatgcaattaacgaaatactgaacattgactgcgttcacaataatgctgctatcgagctgcttacaggggtgagaactcaatcgacagaactcatatctggtctaa

SEQ ID NO: 26699 - DNA, 418 bp, Gossypium hirsutum
  Clone ID: LIB3166-020-P1-K1-E6
cggacgcgtgggggagcgctaagaatggatggttatttttacgcagtggacgaccaaccccggaagccctctctatttcctctctttcctgctcccgcttctacagttactagtactagcagcatccctcaatggctttccaaccctagcttcaccaccgacctttccctcatcaacgacgccgattactcccttccccgctccctcgacgacgtacaagaagaagatgcccaagaggaagaagaaaacgaagccaagcgacaggagcatgagaagcttccccattcttactagctacttgaggaggaggaagaagaacatgaataagaagatgattctcatggagacaagtactgcgagagaaaaaggaagtagagacgttagaggagacacacgaagaaaaagatttcgaaagaaa

SEQ ID NO: 26700 - DNA, 526 bp, Gossypium hirsutum
  unsure (1)..(526): unsure at all n locations
  Clone ID: LIB3166-020-P1-K1-F10
cccgtgatgaggttattcaananntagtttcttanntgatttatgcctcnntggtcccatttnngccccctaataagggtcggggctcgcttgcaccctgtcttataccatannggaagcttgcanngtgcaggactnnnttctgccannggttccccnnaatcatagagccccaaagctcacatnnttggtgaatagagacccaagggaagctttctgttcaggcattcttactnnngctgttcttgnnngaaatgatgagnnngtagctgcttcatntnnttgtgtnntgttgcattttcttctgtcccaaagggttcaatgccctcgaagtagnnnatgatgtnntgcaagtgngagaaagttnngtcacttcananntctaacagngtnnnttaaacgaaaagaaaaggtgtatcntnngtttttggtaccttcgactnnntagcgatacctattcaaaaacccnntcctaccattcaacgannattgcatggcctctcaacactgggaatatctgaacact

SEQ ID NO: 26701 - DNA, 357 bp, Gossypium hirsutum
  Clone ID: LIB3166-020-P1-K1-F7
cttggcttgtcaagctgaaaagaattttcatggtaatcaaaagatgttaatagcaaaagatgtgattagaaaatctttgcctgttctttcttcacctggcattgactcaaatggtgcactcttgggaaaggataaaccaccgtctgtaactgggcctctaccatcttcgagtgagttgaacagtagctggggtgtttttggaaaagtctgcagaatcgataggccttgtgtggttgatgaagttcatcttcgcagatttgatggcttattggaaaatggaggcgttcatcgttgcgttgttgctagcataactgtaaaagcccctgttcgtgaagtttggaatgttttaactgcata

SEQ ID NO: 26702 - DNA, 292 bp, Gossypium hirsutum
  Clone ID: LIB3166-020-P1-K1-G11
ctcggtacttgaaggcggataatttctgttgagcccttgaagacttggctgagattgagaatagccgcaggaataccaccacatgagagttctcagttcaatgggtttagtgcagatcttagtgcaagaggtacaaaggatttcctgctaagtctgacagctacaaaggaatgcggatctggccaatcattatgcaggatggtatcactgtcaaagaagtgacacataccgttctccgaccacagctactcaataagccttttctttctttttggcaggtatcacagatttt

SEQ ID NO: 26703 - DNA, 372 bp, Gossypium hirsutum
  Clone ID: LIB3166-020-P1-K1-G8
gaagaagatgatgttcatttagctccaagcttttttgatgatgcccctagaactacgaatgccgtgttagattctgccactgatatgaactccactccatcacggccatcaggccgtgttgttggtattataaagaggaactggcactcttattgtgggtctttggaaccaatgtctatgcctgctgggactggaagctttacatctgccctatttgtctccaaagatcatagaattcctaagattcggatccaaacccgacagcttgaaaatcttttggataacaggataattgtggcagttgattctggggaccgtcaatctcggtatccttctggtcattatgtacgagtcattggaaaaataagtgat

SEQ ID NO: 26704 - DNA, 368 bp, Gossypium hirsutum
  Clone ID: LIB3166-020-P1-K1-G9
tcggtaatgtgatttgtccacagtgctattaatgtcttcaggaacaaattcaaccaaccgcgggtgaactcttcgagtaactatcactttatcaaggtcgccagctactttgttatctattcagtgacctgcatcaatggcatcaacaagacctacactggacttgtttattatacatcacaaccacagccaatggaacgggctgggccacatcatacccgtaagagcaccgtcgatagctagactctagtaccactttccgaaactactatagacttgtcacataactaggatctcatcagcgacaacgcaatcgcagttcttaccacgctcataacattatgagcccgatcttaggcgaccgacga

SEQ ID NO: 26705 - DNA, 386 bp, Gossypium hirsutum
  unsure (1)..(386): unsure at all n locations
  Clone ID: LIB3166-020-P1-K1-H11
ccgactccttgatcaaaaacaacattgtttagttttcaagaaaaccactcaacccagctagattttgttaaattaggggttctgaccttcncattcattttaagaatacacgagaaactgactttgcaaatcgaaagctaacattcacgaaagcaaaaaggtactttaaaaatttatttgccaaagcaaactaattcatttcagccccttttgagttgaattcgggctatctgactagcttaaaaactccaattttaatgaacaaggccttcgtcctcacaaataagcaaatttcattctgatttggttaaaaattgccgagagcaatcctaaggtgaaaggcttggatgtaaattcacttattgcatctcacatccaagtaaacc

SEQ ID NO: 26706 - DNA, 354 bp, Gossypium hirsutum
  Clone ID: LIB3166-020-P1-K1-H12
gatttatcttactgttactgttctggattgtggtatgtttaggtgtgcaaaatttgttgggcgagaacagaaaatctcaagaaaagtaccattattgaggtttccagtttggaattcttagctgttgccatttaaatctctggtttttaagtagacttgaatccaatatagttggttctgtaccggttttggcggtattggttggtgcaaactgttccaatgctaattcattgtttcacataggtgaaaatttcagtctatattgaacgtattggcttgtcggacgtcacatttatcgcgttggttgatgtataaataatgttaaaaatatataaatttattttttttcatcct

SEQ ID NO: 26707 - DNA, 413 bp, Gossypium hirsutum
  unsure (1)..(413): unsure at all n locations
  Clone ID: LIB3166-020-P1-K1-H2
caccatgccaataatttgcttctcttggtttaattttttccccaatatacgtacagtcagaggtacgccggctcacccatttactaccncgattgtgttcataaatgatgtgagtggctttatgggacaacttatttgttcttcacccgctcagacgaggtgatgaagctcgcatcgcatgctctggaatctcatcttctccttcaccaactaaacgtggtaatcggagagatacgcccctctttattttaacaataacaacaaggaacagcagttgcagctgagcttctaaactgatgagtccgtgtagagtggacaagtgaaacccaaacactctntaaacactgtatggcatgtaatacgtaatgtatatctgtttacgtgtttcttctttgtatggctttttggtcact

SEQ ID NO: 26708 - DNA, 395 bp, Gossypium hirsutum
  unsure (1)..(395): unsure at all n locations
  Clone ID: LIB3166-020-P1-K1-H5
acggcccttatccttcatcgaagtatcatttttgtttttctcctcctatctcactattataggctggactctcatttattccattttgatatgttcgctttcagttagtttttaatttaatttattatttggttatgtttatttacatactgncacgaggtgagaccttagatctatgctttaaattggttaaattggctctggatgttttgattctttgcggctatatgattcatagttacgctcaagtttaaaatgatcctccctacctgaacactgatttggctttttcgtttttatctgctaaaatatcacttgtcaaatacacatgtttttgctatttcctgatttggaattggatacaagggttaagacgtctaaattctgagaaactc

SEQ ID NO: 26709 - DNA, 327 bp, Gossypium hirsutum
  Clone ID: LIB3166-020-P1-K1-H6
ccgaccgatgacccgacccacgctcccccaccctccttatttattttatttttttttttcgcatcaaaattacgccaggattatatatatatcaaaaaacaagacattaacaaaattctacaatatataccatttttaatattcaccttggcaactacacaaacacaattacagctaaaacaaacactcatgtccttttatcctcaatcttccattttactacagtcagcattaattctcatactaaatctagcgatatctaacttgtcatacctgcgtataataactatctttcattcccccctttgctcttaccacctcaccccc

SEQ ID NO: 26710 - DNA, 406 bp, Gossypium hirsutum
  Clone ID: LIB3166-020-P1-K1-H8
cttcttgcctcctttcatggatgatatgcctaatcttagagcacttattataataaactacggtacaactgaggcaacgcttctgaatttctctgttttcactaatctgacgaatttacggagcctatggcttgaaaaggtgttggttcctgaattgtccaacaccactgctccattgaggaacttgaggaaactatctacggttctctgtaaggttaataacagcttcaatccatcagttctagacctgcccatcatcttccctcgtctaaccgagctcgtaatcgatcattgtgatgatttagttaagctgcctgtaagcatttgtaaggtgaattcacttcaaagtctcagcataaccaactgccacaggttatctgaattgcctgctggtttcggcttgctg

SEQ ID NO: 26711 - DNA, 374 bp, Gossypium hirsutum
  Clone ID: LIB3166-021-P1-K1-A1
gagaaaattagtaaggattttatgcagcaattgttggagctgcactggcgaggagatgagaaaaactctttatccatcaacgaagtgaaagctttgcttctggatttgatggtcgccggtacggatacagtacccactgctgtagagtgggcaatgaccgaactattacgccatcgagataaaatgacgaaactcgtaaaggaattggatatggtggtcggaaaccagaacactgtggaagactctcatatacctcaacttgtctacttggatgctgtcataaaggagacacttcgtcttcacccggttgctccattgctaattcctcatgtgcccagtgagaccactgttattgggggatttactgtccctaa

SEQ ID NO: 26712 - DNA, 371 bp, Gossypium hirsutum
  Clone ID: LIB3166-021-P1-K1-A11
aaattattagggggaaaatgggcttttctcttctgatcagatcaaatcagtctcaaccgtctgattaatcagtcaaaaaaagaaaaaaaccttgtcttcctttataatccgctctcggcttttccctcattttcttcactgattattttcattacggattttttcttttcattttttagcggcggattttgaatttttccggtagggtttaaaaatggttttgctgagagaacatagtaaagccttggcgctttagtctagcaactgccttttttttgtttcttttttctttttccagtaaatgggctgctttcaatctaaagtaacaagacaataccctggacacgaagatcctattattctagcttctc

SEQ ID NO: 26713 - DNA, 381 bp, Gossypium hirsutum
  Clone ID: LIB3166-021-P1-K1-A3
caactccttaattatctctttaatttagtaaagcaaattaaaagatggctaaacttgcctcccttttcatcttaaccctcctcctcgtttccactctatccttgagttttgccgcccggtctggcccagctttcgctaacgactcccctgcaaaaacccaatctcaggttacttaaattaatttgactggcttcaatctccctttcattttctctttcgtgattttacatttgatgatttggggtttttgttgatatattataggccaccactacttctactacaactgatgggatagagcagagtgaagataggtgtgaaggagttggagaagatgagtgtttgatgagaagaactcttgctgctcatcttgactatatc

SEQ ID NO: 26714 - DNA, 165 bp, Gossypium hirsutum
  Clone ID: LIB3166-021-P1-K1-A4
acccgtccgtaatcttcctcttttggtggcctttttacctgaaaatatactccaatttaacgatagtcagttcttttatactctgaaaaagcctatctcccgggatggtttctataatttacaaaagaaaaataataatatctggttaaatttcgtcagggggct

SEQ ID NO: 26715 - DNA, 379 bp, Gossypium hirsutum
  Clone ID: LIB3166-021-P1-K1-A5
ggggaagtgcttggtttaaaaaaggattgaatgtcgaacagaaaaaattggaaaaggaaaatgagcaagcttctccgaacatgggtccctccgccccttgtgggaatagcaatgacagtgctgagactaaacaagaatcagttcaacttccaagtctaaatgcttttgatctaatctgtggatttgatctgtcaggattgtttgacggagtttctgaaaagagagaaacgaggttttcgtccagacaacctgcctcagtcatcatctctaagctggaagaagctgctagacatttgagacttaaggtgaaaaagaaggatgcaggtgtgctgaaaatggaaaggctaaaggagggtagaaaggggatcctgtcgattga

SEQ ID NO: 26716 - DNA, 374 bp, Gossypium hirsutum
  Clone ID: LIB3166-021-P1-K1-B12
gagcaagatggtgaggagttatatctccagaagattgacaaagaacaggcagaactagctcgtgccaacttttcaatcttaaggaaggaggctcaagccatcttagacttggtaataatggatgcaactcatggcagtgaacctggcaagaccatatcactctacgttctggatgcagtagtttgtatcgatcatgagagatatttcttaagtcaacttcaaagtagaggatttttgaggtcttgcttaatgagtattagtagtttttcttctgcggatggtggtcattcacttgactcaatgcaacgggcttgtactcttgaagctgaactcgctttgcttctgagaatttgccacaaatatgggaagtctgg

SEQ ID NO: 26717 - DNA, 514 bp, Gossypium hirsutum
  unsure (1)..(514): unsure at all n locations
  Clone ID: LIB3166-021-P1-K1-B2
attcccggggtcgagcccacgcccgtccnngcccacgcgntcnncgactccatacaagggctatctttctaggcncnnctattcnnccggtggaccccaagccgagccaaatnncaactggtnnctcttannaccaggctnnncgatccanntcaggaccaaacncnntgacagcaagggtggacccannaggccannaatccanncagggatnncatatcannctacggnntcttattaaccccataaccanngaacaantnncaaactanngtgagcntnncagctgantnncaagtcnnaaaggnngaaacanannagataccgnncagttaaccccagtgttntnnctttcaaattccangnnctgataccacnnctttnngaaacctangctnnngactactntcnnaaaatnntggaggtngttnnttccgagggttggaaagcattttctcggattaaagccaacncnnggtcaaaacaatgtnnaccttgataccnnntcagtcat

SEQ ID NO: 26718 - DNA, 379 bp, Gossypium hirsutum
  unsure (1)..(379): unsure at all n locations
  Clone ID: LIB3166-021-P1-K1-B5
cggacgcgtgggttgatggacatgatatcaaagtaaaaggaaaaatatccgtcaagagcgcaaaaagattcctgctcaggatttgacaatgaaacggctcagaggttatgaaattaaggccaatcactgggattccttctacaagttctaccggaatactactgataataagtggggcagtccatacctaacaagagatttctttcacgaaatgggatcaaagatgggagatgatgtgttactcgtagttgccgaaaaaagggacgagcttgttgcaggagctctgaatctcattggaggcgatactatatatggacgcttatggngatgtgaccctcaagtctattatccgagcttgcattttgaagcatgttattat

SEQ ID NO: 26719 - DNA, 378 bp, Gossypium hirsutum
  Clone ID: LIB3166-021-P1-K1-B8
agctgctaacgggtctgcacattatgattcttccaaggagtcaaatactatttgttcaaaaactgaagcatcggaaattggatctttagacaaatgccaagttacttgttccaacccagaaccgtcggattttgtaactgaaaatacagctcggtcactagaacaagaggcctctattccctcaggaaaagtgtttgatgaagatcctcaagatctgccagttgaagttagtgttaagcagttgccaactgaaggagaaaaggaggaatcagagataggtaaagagactacaaagaaactttctgcagctgcacccccatttaatccgtcaacaattccagtttttagctctgtcacagttccgagtttcaaggaccc

SEQ ID NO: 26720 - DNA, 261 bp, Gossypium hirsutum
  Clone ID: LIB3166-021-P1-K1-C12
cccacgcgtccgcccacgcgtccgttctacgcgtccgagctgtcaaatcaaagcatagttcatatgatagcaagattggcacaagactgaaataatcaatgcaccactacttcatatgtgggattcttctctgctcttttctacccatacatcattcaagaaaataaaatgtttgctgcaatttatgtacagtgatataaagttatggtttcgtgtgaagttgtaacaccttcaaatagtaaaacacgtatcgctttcttg

SEQ ID NO: 26721 - DNA, 377 bp, Gossypium hirsutum
  Clone ID: LIB3166-021-P1-K1-C5
gaaactgaatctatctattttcgaggctgaagaaaaatgaagacctctttaagaagattgcgaggattggcacatcacaagcacggtggggaagccaagcagcggccagatgttctagctttgcctcaacttgacgagctcgctcaagcttctcaggatatgcaggatatgagagattgctacgaaggcttactttatgcagctgctgcaactacgaattgtgcttacgaattctcagactcattgcgggaaatgggtacttgtcttcttgcaaaaactgcattaaatgatgatgaagaaattggtaaagtattactaatgctaggaaaagtacagttcaaactccagaaacttcttgacagctatcggtctcatat

SEQ ID NO: 26722 - DNA, 370 bp, Gossypium hirsutum
  Clone ID: LIB3166-021-P1-K1-C6
cccacgcgtccgcccacgcgttcttccacgcgtccggttttctgaacccgaggacgaagaagtagatggctccggttttgccctctttgacgtgatcctaactgggtcgggttccccggaattcaccctcaatgggaaattcaacaaagcccttgagccacgcatcctataagctgccttatcataagccaaagccgcatcctcagctgtctcgaaagtgcctagccaaactcgagccccgtttttagccggatccctaatctctgccgcgaactttccccacggcctttgccttactcctctgtaatgcttccctttggcaggaaccaccgtgggaaccgccgcattcgccaccgtaggaacctctttc

SEQ ID NO: 26723 - DNA, 368 bp, Gossypium hirsutum
  Clone ID: LIB3166-021-P1-K1-D10
cccacgcgtccggtaagatgttgcggaaccgatttcattattcacatactcataatagtactgttggtgttgttcgctgggatgatgtccggccttactttaggccttatgtccttgagtcttgttgatcttgaggttcttgccaagtccggtactcccactcatcgtaaacatgccgcaaagatattgccggttgtcaaaaaccagcatttgttgctttgtacgctacttctatgcaatgccgctgcaatggaggcacttcccattttccttgatagtctggtcacagcatggggtgctatcctaatttcggttaccttgattcttgtgtttggtgagataataccacaagctgtttgttctcgata

SEQ ID NO: 26724 - DNA, 374 bp, Gossypium hirsutum
  Clone ID: LIB3166-021-P1-K1-D11
agcggaagagatgaaaatggaagctgagaagttaaagttggaagctgaagcctcaagaattgcacttcaggaagcagataagcagctggtagttgctctggaagaagctgaagctgcaaaagaagccgagactagggtacttgatcaaataaagatgctttctgagaaaacaaatgctgcacgtgcctcaacctctgaatctggagccaatataactatctccagggaagagttcgagtctttgagtcgtaaagttgaagagtctgataatatagctgaaatgaaagtggcagctgccatggctcaggtcgaagctgtgaaggctagtgaaaatgaggcccttaagagactagaggcaactcaaaaagagattg

SEQ ID NO: 26725 - DNA, 365 bp, Gossypium hirsutum
  Clone ID: LIB3166-021-P1-K1-D2
catttctcaactcacaaagctcatttatttttgaaacagtttaaccccccttcaaaaagaaaaaatacatggtgaagccaacacagactgaggcaaccacgaaccatggctcggacccgaccggtaatggttcaaagtacaagggtgtaaggaagaggaaatgggggaaatgggtatccgaaattcgacttcccaacagccgcgaacgtatttggttaggttcttacgactcgccggaaaaagccgctcgggcattcgacgccgctcagtattgtttacgcggcactggagcaaagtttaactttcccgataacccaccggatatagccggtgcaacgtcacttggcccacatgagatccaagcg

SEQ ID NO: 26726 - DNA, 373 bp, Gossypium hirsutum
  unsure (1)..(373): unsure at all n locations
  Clone ID: LIB3166-021-P1-K1-D4
gctatttatgcttttacctgatctttcatggaacataatttgtttactagcccgttgagccacattggaataataaggatacttgggtctcttttctgataataacatgccaaagccatgtcccaagcatggtcttacaagggatgtttcttgtactgccaatgccatatcccagatatggtcttacacgggagttctcatatcggtgctcatgccatgtcccaaacatggtcttacgggagacctttcatctcggtgccaatgccatgtcctagacatggtcttacatgggacctctcataacctcaatgatgccaatgccatgtcccagatatggtcttacatgggatctctntacccaaatgttatgaca

SEQ ID NO: 26727 - DNA, 370 bp, Gossypium hirsutum
  Clone ID: LIB3166-021-P1-K1-D7
cggacgcgtgggaaagattttgcactcggttttccggggatagaaattaatttttagtttttatcttaaaatatgatgatgcttgaatcagctattgccgcccgattccccgccgctgctaacttctgctcctccgccttccaccgtaactctcttcccccctctgcctaccttttcgaaatcatatacctttttagtgctattcatggcttattaagacctgactaatagaccaactcaatgaacttagctgccaccaatgaataccgtcctacctgcagctccgatgaggttactagttgccacgtcacctctcgccgcccgtttcgccgtggtggattcgacgtaactcggaatagatttcaaagac

SEQ ID NO: 26728 - DNA, 347 bp, Gossypium hirsutum
  Clone ID: LIB3166-021-P1-K1-D8
cgaggcagcattgccctcggtgttccttcgtcccattctggcccctcgcctccttctccttcacctccgcaatccactccgtttaccggttcctttggccattccttcggtggaacctctagttccaatgtttcccaggcaaggccaatgatgcgaggaatagggatgggatcatcagttggttcaagttcacaaatgagaccaggtgggatttctgctcagcatcaacaaaggcctttgcaatcatctcttagaccaacatcttcaccaactagccagtccccttctacccaaaatttccaagggcatggccttatgagagtgtcagcggttggttcctcttcttc

SEQ ID NO: 26729 - DNA, 371 bp, Gossypium hirsutum
  Clone ID: LIB3166-021-P1-K1-E4
atcagaatccatacaactgttccttaattggcattcctcatctttaagctcattgataccattagagttgtggattctaagctctttacttgaattgcatcctgttgattcactggctctggcatctgttgcagcgtcctctgcttcctcctccgtacaaacttgagaataatcatgtttgtctgtcgacttaatctctaggagtaccttagattcttcaacaggctctacagcaggggtctcataactagctcttttatcatccaaagttgatgttgaagtagattcgattgaacctatctcagtagtggagttatctaccgattccttggaatgatgatcagggaaattgagacgagcataagaaccgt

SEQ ID NO: 26730 - DNA, 374 bp, Gossypium hirsutum
  Clone ID: LIB3166-021-P1-K1-E5
catacgcccgtctcctctctctctctctctctctctctctctccctcctttgggcatggaatcagctagccggcgattatctttttccgtttattcgaattgatcgccgagtaattcatcaatggtagcatcatttttcaaattcctttgctttataacgacgctgttttcattctcctcggtctcccggaaagagagaatctccaaagttttttttttgtaattcttagctttgtttcagtgttctgacagtatccatctcttcccgttggatttgataactttataggaaagaaaatatgattttgttttttgagctgaaaagttggtgattttttacttcaattttaaagggggtcaaagctaagttcggc

SEQ ID NO: 26731 - DNA, 370 bp, Gossypium hirsutum
  Clone ID: LIB3166-021-P1-K1-E7
cccacgcgtccgtttgagaaatcaaagagagctttaatttatgaattcatgccccatggatccttggatgggttcatttatgatagaggattgcatcatcgaagttgtcgattggagtggagaactttgtatgacattgcacttggcattgctagaggactcgaatacttgcatcaaggttgcaacacaaggatcttacattttgatataaaacctcacaacatccttttagatgagaacttctgtcccaaaatctctgatttcggtttgtctaaattatgtgaaagaaaggagagtattatttccatggcttgtgctaggggaacaataggttatattgctccagaagtgttttgtcgaaactttggcg

SEQ ID NO: 26732 - DNA, 381 bp, Gossypium hirsutum
  Clone ID: LIB3166-021-P1-K1-F12
gtgctttgatttttggcctaggtgtgttcttggggttctttttaaggagattgagacgagaggacgacaccaatgtagacgatcacgatcacgtatcggatatgttctttcacaacagtgactttcgacatggagcggcgccgaggaaattttccctggaagaattagcaaaagtgacaaatatgttcaaaggtgaaaagctaggagagggaggttttggtgcagtttatagagggtacttgagggacttggatacccatgttgctgttaaaaggatttcaaaggcctctaaacaaggaatcaaggaatatgcatccgaagtgatcattagccgattgagacacaaaaatctggtcaagcttattggctggtgtcacgaaa

SEQ ID NO: 26733 - DNA, 230 bp, Gossypium hirsutum
  Clone ID: LIB3166-021-P1-K1-F4
gctcaaattcggatcgccctgttgtcgggcctttcggtgaaatggccaaagcctcttaaaacccatgatgttatcttgtgcgacccagacgggggagaatacactacttacaattacttgttactggcaccgacggccatactgcgtaagcacgaaaaatggctgacaacttaggcaaaccctggtatcagttatcgagagaaaaatgaatgtgtaagggtgacaatatc

SEQ ID NO: 26734 - DNA, 371 bp, Gossypium hirsutum
  Clone ID: LIB3166-021-P1-K1-F8
gctgcaccgattgttataaagacatggagagatctaccagtgtttgcatcttttgtttcctcttcttacatgtccttactgtgttttcaccatgaataattctgggttagctgttgaagtctcaaaggatagaaatggaactgatcagattcttcttcggaatcctcgtggggcatctgcaaaggttagcttgcatggaggacaggttctttcatggaggactgaccgaggtgaagaattgctgttcacaagcagcaaggcaattttcaagccaccatatgctgttcgaggaggaatacctatatgtttcccacagtttggtcagcgaggatcgctcgagcaacacggatttgcccggaacaggacttgga

SEQ ID NO: 26735 - DNA, 377 bp, Gossypium hirsutum
  Clone ID: LIB3166-021-P1-K1-G11
atcgcctgatggttcgagcaccacagctcacacaccttgggacagggtcctttagcccatcggatattgtaaggcaaggtgatcaggaaccagattatgtaacctcttatgctgcctgcagatccttagtttgtctctctgggtttagggaaataattccagattatctgcctgcaatataccctgtttgcgcaaatctgacatctatgaattgcagctatgctaacattactgccgaacagcttaagccaattataagcaagtgccacaagctccagactttctgggttcttgattcaattcgtgatgaaggactacaagcagtcgctgcaacatgcaaggacttacgcgagcttcgagtttgccctgttgatgct

SEQ ID NO: 26736 - DNA, 246 bp, Gossypium hirsutum
  Clone ID: LIB3166-021-P1-K1-G12
agcccaagagaaaaaagacgggcgggtggaatttaaacgttagaggcactcgaacctccgatcctaaactccctttcaaagtgtctagcgtccctcaaacaacccccttcacagccgtcttgaaattttcaaccacccaattcaaaacacctcctcaaaccaattctatcatcaccaatgattgcctgggaatcaatccccaacaaactcatgaaatgcctcctcaaacatggatcggaactcctc

SEQ ID NO: 26737 - DNA, 401 bp, Gossypium hirsutum
  Clone ID: LIB3166-021-P1-K1-H11
taccggaacggaagggccgggccgagcgacgcgtcaggatcggtggaacagaggagtgaacgcattatgcgactgtcatggacacgggctgactctaggcaagcagaagatgcgcactcgcgggatagctatgcaaggagcatcatcggccaatagcagatctgcggtgcaggagaaggagaaaatacaccatctagccgatggatattacagaactggtgatttctcaaggagacgacaacttgtggggcaaagtctggagatggcacctgattggaggccagctctaagccttatgaaagcaactgaggagcccattggctaagatggcgtgatgggaagttggacaaactgtactgctcaggggcttatcgccggaagaattgccggagctttgactc

SEQ ID NO: 26738 - DNA, 372 bp, Gossypium hirsutum
  Clone ID: LIB3166-021-P1-K1-H12
atatatgggagagcataaaaccaggaaaaaaaaagagcttaaaacaacaaggcgtgctttgcgttttcaactctttaattaaagaagagttttgtgggagttgttaaaaagttgcgacttagtagaaaaggattcaaagcagaagagctttaaatgtgtccagattttggtctattgttggtttcataggtgtttcgagacattaaaaaaggttgttcttttttggtgtttaccttaaaattttcaatatttttttggggtttcttctaaacgaaaacaatggagtggcatgcttgtctcgatgaatatcaaaagcttgttattcggatgagtactcccagggtggtaatcgacaataccgtttgtcgcaca

SEQ ID NO: 26739 - DNA, 164 bp, Gossypium hirsutum
  Clone ID: LIB3166-021-P1-K1-H2
tttttttttttttttcaatattttatagggataggatattttggcgctctcagcgaccgctctaatgaatgatgttctctatggaatgtctgcaaaaagggcaagacgcttcctgtccaatacctcaccttacacgttccaagttggtgaacaagcgttgtctg

SEQ ID NO: 26740 - DNA, 379 bp, Gossypium hirsutum
  Clone ID: LIB3166-021-P1-K1-H3
gttcgaatttgcattaactcttgctgttgcttcttcaactctcattttattgtctctgaaaaagagaaatggtttctgttggagattccagttcaagcaggtctccgttgggtcgaaacatttgcactcaaggttcggcttcgacttcgacggctaaaaaagaccgacacacaactggtcgttccatgcgtacgatacgctccaatttctaccaaaacgacgacagcagctgctcctttactagctccgtcccccaaaggtccggatgtgtctccgaaaacctcaccgaatccgtcatcgacatgcgtctcggccaactggcttccaagagcaacgccaaatctgttaagtccgactcagaaaccgagggctttttaga

SEQ ID NO: 26741 - DNA, 375 bp, Gossypium hirsutum
  Clone ID: LIB3166-021-P1-K1-H7
gaaaagatggggtggttggtgttttaaatattggtgtttcggatcttacagacggaaaaagcgaattggacctgctgttcctgtttctgaaacgagttcttcccgtgctaatatgcccgctgctgaaattccaacccaagccgttacagtgacacttccctttgttgcacctccttcctctcctgcatctttccttccatctgaacccccttctgctgctcaatctccagctgggttagtgtctctcacctctatttctgccagtatgtactccccagggcctgcttcaatttttgcaattggcccttatgctcatgaaactcagttagtttcaccacctgttttctccaccttcaccactgaaccttcaactgc

SEQ ID NO: 26742 - DNA, 288 bp, Gossypium hirsutum
  Clone ID: LIB3166-021-P1-K1-H8
cggacgcgtgggctggactggaccctgttgcagttctctgtgaggttgtagatgatgatggatccatggctagattaccaaagcttcgccaatttgctgagcgggagaacttgaaaattatatccatagctgatttaattaggtataggagaaagagggataaattaattgagcttgctggtgctgcacggattccaactatgtgggggccattcaccgcccattgttacaggtcgatattggatgggattgagcatatagcaatggttaagggtgagattggagatg

SEQ ID NO: 26743 - DNA, 373 bp, Gossypium hirsutum
  Clone ID: LIB3166-021-P1-K1-H9
cttttcttcccttactccccagagcatttggtccgcaccatacccaagttgaaggacatgaaaccatatatttatgtttccattaatgcttcaatgaaagagcacagccatgtttctggatctgcatctgcactttttgtcgggggattttccgtaatgcaaatgggaaaggatatagcacagttaaatctgacaccagactttaacaagactatcataaccatcttgggaaacacagatgttgaaatccactggcatggccaagatttgttagcaatcaatcccatccagaaagaaggatttggtctcagtcgccgcatcgattatgaggtaaaagcacttagtgccaagcgatttgcagataaaatcattg

SEQ ID NO: 26744 - DNA, 384 bp, Gossypium hirsutum
  Clone ID: LIB3166-022-P1-K1-B11
caaagattaaaatgaacattaataacaaatttctttcctttcaaatttcatttgtgctgccgttaataaaacacccatgatcggcatattataagaaagaatattcctcctttatattacaagttcctaaaaattattattattatcagattgtttttctttgttattcttcttgttttgggatttccctcaatccaagaaaatggggaagccaaccgggaagaagaagtttcaagaaacaggcaagaaagtcatggaagccaacaagcagaacaaaggcgccgccgctgatcggacgtccaaagctttcgatgaggacacggcaatcttcatcaacatgtcccaggagcttaaagaagaagttaaccgactctttcagaaacg

SEQ ID NO: 26745 - DNA, 363 bp, Gossypium hirsutum
  Clone ID: LIB3166-022-P1-K1-B2
attttatttctagtccctctcgattggaccaggcaaggttttttgcttacctcctttgactactcttcttaaccaccttctgggtttcctttcttctttgttccatatatcatttctgggggtccttcaattccttcatttttatcactctttcaataacccctttctcagccaattaagtttccatggatactacccttttccaagattttcccagttccatgtatgggttcaaactcgatcatggagcagtaccagtatattcaattcacgacttcgtcagtaataataatgggtttattaaagatagtcctccacaggttgttccgagtccagactcacctgttgagtcagtgacaacaa

SEQ ID NO: 26746 - DNA, 387 bp, Gossypium hirsutum
  Clone ID: LIB3166-022-P1-K1-B4
tggatggatcatctgattttgtgctcacttacgaggacaaggagggggactggatgctggttggggatgttccttggaagatgttcctttgctccgtgaagaggcttagaatcatgaggacatccgaggctactggattggctccacgattgcacgagaggaactgccagagacaaagaagcaagcacatctagaatatgccagcaaacatacaaatcaaaatggaaatacggaatagttaagccactttgactgagtaaagtttgaactccgaagacttggtttgttctcgattacaatattattttgttacatgttttcgtcaacctctcaattacagtcttgaggaatagttgccatacttattgaaaggcaccaatatctcag

SEQ ID NO: 26747 - DNA, 378 bp, Gossypium hirsutum
  Clone ID: LIB3166-022-P1-K1-C12
cccacgcgtccgctcactcactccttttgcccactttctttacctgctttgctggaaacccaagtaatcaccggtcaaatagaaggatcagttttttcttttcttttcaagatcagacggtggttagttgaggggggaaatatgagctgcaacggttgccgagtgctccgaaaagggtgcagggagacatgtgtgttacggtcaagcttacgttggatcgaatcccccgaagcccaaggcaacgccaccttatttctcgccaagtttttcggccgtagtgacttactttctcttatctcttctgtacctgaatcccaacgccctgctttgtttcagtctttattgttcgaggcatgtggtcgtaccgtgaatccggtg

SEQ ID NO: 26748 - DNA, 385 bp, Gossypium hirsutum
  Clone ID: LIB3166-022-P1-K1-C2
cccacccttccgcccacgcttccggtgtttgcggaacctcaccaggagatttaacaggcccgggccatgattgaagaaccaaaaccctcacttggacctaatgaagctaattatggagatggaaccgcttcatgagccaagaagatggcgaagaatgactcgttactgatgaagagagagtagagtcattcaaagcagctttgatatctgcaattgttggcacccttgctggattgcccatctgcctaacccaagtttccagcaccactcagctgctgctccctctatcactcaatttcatcagctgcgcattgttggggatcacttttggctatgcaagtaggagggactcggacaactttcagctcaagaccggcacatctgc

SEQ ID NO: 26749 - DNA, 383 bp, Gossypium hirsutum
  Clone ID: LIB3166-022-P1-K1-C6
cggacgcgtgggcggactcgtgggttatcttcctggcaaaaggttatattcgggctggggagccaggagaggctgagtcactcctcaactccatgggcaaatttggtgtgcaaccaaatgttgtaatcttcacaactgtcattagtgggtggtgcactgctggaaaaatgaatcatgcagccagagtttatgagaaaatgtgtgaaatcggcgttacccccaatttggctacttatgagacactgatatggggatatggggaagcaaaacagccatggaaagctgaagaactcctgcagattatgaaagagaagggtatctctgctgagaggagcaccatacagctagtagcggatgcttggcgtgccattggtttactaaat

SEQ ID NO: 26750 - DNA, 384 bp, Gossypium hirsutum
  Clone ID: LIB3166-022-P1-K1-D4
cccacgcgtccgcgtttacggactcttactagatgctctaactgtcggctgggcaccggccgataactctacgacgaatttcgcgctgatcaagccggaaccgcaagaatttttaccgcagacatcggtggaaaaagtggatacggcggcggagaggacggttcctgctgtggttcctgccaaagggaagcattacagaggcgttaggcaaaggccgtgggggaagttcgcagctgagattagggacccggctaaaaatggcgctcgggtttggttaggtacttttgagacggctgaagatgcggctttagcttatgatagagcagcttataggatgcgtggctcaagagctttgttgaattttcctctgagggtgaactctgg

SEQ ID NO: 26751 - DNA, 386 bp, Gossypium hirsutum
  Clone ID: LIB3166-022-P1-K1-D5
gccacacctccatcagaatcagaatcaatttctgaaaaaaatgcaaaccctagggaggaccaccacaaccatgaccataaccctcaacgtcgctttcaacaatactatcgacaatgtccaggccaagatccatgtcacggcaggccttccaccataccacctcagattgatcctcgctggaaagcacctcgcacatggccactcccttgctgactacaatattcacatagattcaaccttgcatctgggtctgagacttatcgatcccattatcaagccttcttctatggcattcactcagaaatacaaccactatcagatagatctatcctaagtgttacgctcgtgtgcacccctgtgccgagaactactggaaacacaagtgt

SEQ ID NO: 26752 - DNA, 221 bp, Gossypium hirsutum
  Clone ID: LIB3166-022-P1-K1-D9
gctgaactcatggattttcggatctgttttctcataccacatactttaatgttgatgtagtttgttatgctccctctgtcaccacctagcaactcaaggtttattttattttcatctctttatttgttttccccttagcatgtaccttcataatttgaacttgatttattgctgagaaagaatgcattgcaataaaatttgtagcatcatatattggaatc

SEQ ID NO: 26753 - DNA, 388 bp, Gossypium hirsutum
  Clone ID: LIB3166-022-P1-K1-E2
ccgggccccctgggcccaaaatagaggtcctaaaaatttcccataaaaccccatttcggtttccttttataaaaaaaagagaaaggggcggttgaggtttccatggaaaaattggcccgtgaaagtgaagcctttgaagctggaagggttacctagaattgaggaagaggttgttaagaaaatcgcgttgattgaaatggtggggagaggacccaagcctagtttggtttcgtttcatgtatcgtcgtcttcaaggcataaatggaatcgcagctgagaaaattttaggaaatgaggaatcaattgaatgggacgatgatgaatttgacaacttgtgtgatttcccagttgtttccaaagatcttggtttcggttcctaggatgtttt

SEQ ID NO: 26754 - DNA, 387 bp, Gossypium hirsutum
  Clone ID: LIB3166-022-P1-K1-E4
atcaaacgttcttgcactcggtcttacgacgtgcacgctacattgcctacactaggacgcccttccctgtgcgatgaaataaatagataaaaaaaaaaagggctgcagaagatcgtctcattttcaccatttccagagatccaaaacaacaaataccctcacttgcttaaaaagatgatgaggatgtagactaaagcgaccggtctgtccccggcccagacaaacaaagcatcaagttgtgtctgaggcggggaaccagactgctcatgaccgggagctcagacccagaggcatgctgtatcaaacgccagacctcgacaactgtcgtgcccctatcccaccgccgacaatttgagtcagagtcaaatacaagtcaatccatcatga

SEQ ID NO: 26755 - DNA, 285 bp, Gossypium hirsutum
  Clone ID: LIB3166-022-P1-K1-E9
tcagcaagcctcctctccttttttttttttattttttatgagatgatttttttacacatatctacgcctcctaaacttttcacctataccaaacttcattccacaaacacattattttttattgacccaactcacatcaccacaaaacgcgctcctgttttacaataccacaaccaaaaactttactttatatccatctccaattcatacacactttcacaaaacattattatacatctctgccttatacacctccaagattaagctcaactactccctaacaaa

SEQ ID NO: 26756 - DNA, 385 bp, Gossypium hirsutum
  Clone ID: LIB3166-022-P1-K1-F2
cccacgcgtccgcccacgcgtccgttttgattgatgggttgtgcaaacaagggagactgaaactcgcaaatgggctgttgggtaagatgataaaaaagggaatagaaccggatgaagtgacatttacctcacttatggatggattttgcaaatcaggtaacactggaggtgcatcaaagcttttgaagatgatgattgaaaatggttgtttgaagacttgtcatgccttcaactcaattcttcatgttctgagcaaagaatgtgagttggtaaaacaatatgccttgtttggaaagatcctaaagcatggtttgggcccttctgttgtgacttacaccatattagtaggcgcactttttcaagctgacaaggttgaccagtcctt

SEQ ID NO: 26757 - DNA, 381 bp, Gossypium hirsutum
  Clone ID: LIB3166-022-P1-K1-F4
cccacgcgtccgcccacgcgtccgtccactcgtccgctttggtgacaaaatagcgttttttgaaaaggaaaaaaagcttgaaaatgttgaaatcaacattagttgagcctttccttcaatttatgatctaggttttgcttagttctttcattatgggcgattaattagaaatttccttgttattgatctttttaatgttctcttgtagaatttgagttgtttaacttagctttatcctataatagaattttggcatatggcgatgttatttccagccaaacatgccatattaccatgacatgcacattgcgcaaaataaatttttaattcatgcttcataatgttttgcatcaatgtgctaaagatatcattgaatggatt

SEQ ID NO: 26758 - DNA, 385 bp, Gossypium hirsutum
  Clone ID: LIB3166-022-P1-K1-F5
gggccatttaattactcagctcgagatgaagctggtattccacgagaatggtatgacgcattgtctacaaataaacaagagcgtgaagggaattggaagagtagtcagcagctttctgaggtttatgataggcttgcttgtattatctccatggagagtgagaattcaagtttaaatagaccacctgaatgacttttatttaaatagccactgttaagattcctgtataaatctaaattctggaatttgatgtccagtttttcatgtaacaaaacttgggcaagatggcaagggtcaggcacaaaatttaaactactttgtacatcaacgcaaaagctgtatcaaacttaggttttgcttagtatgaaggatggaaagaagtgat

SEQ ID NO: 26759 - DNA, 365 bp, Gossypium hirsutum
  Clone ID: LIB3166-022-P1-K1-F7
ctgggaactaagtttcttggtttttttggcagccgaatcaccattactttggtgaccatctacatgcaaaaagtacccgttttccctgttgaagacacttgaacaagttttaaaagggtttaatttgtaaagtaaaatgctacttgacctctcgccattatatccgcatagcagaaatatttgtggctttcatcggtttttagttgtatgtaataacaatgagtaaattaagaagaaaataaaaaatcggaaaaaaaagcgaaaagtatgaaatcacctctgatctttgtattcaatctctgtatattttttccttttttttctttttacaactgatttgctgcttcgcttttatagccgaagag

SEQ ID NO: 26760 - DNA, 380 bp, Gossypium hirsutum
  Clone ID: LIB3166-022-P1-K1-F8
ctttggtcagtcatggttttaatttctagtttctcttcactagctttatctgagtctcaaatccatgcagttcaatactccagtatatcagctgcccctgcattcttgccagctgctcctctatcttcttctcctggtttacccccagatattgagcctttacttcctactcctaaaggtatggcaccttcccctactgagtcatcattccccaccattccttcaagtcctagccctcctaacccagacagtatgttggctcctggccctggttttgcaccttcaccatttgggtccttaccagcatccactgcggtttctttagcttcagctggagttctaaattcgacattgttttttgggttgctagtggcactatg

SEQ ID NO: 26761 - DNA, 384 bp, Gossypium hirsutum
  Clone ID: LIB3166-022-P1-K1-G1
ctcaattgatgaccagtcatcacactatttgtcaaaagaccaaccccttgtaaagatggtggatcctattctgaaatccttcgacacgaagcaagttgaagccattggggaggtcgtaaatgcttgtgtcgaccccgaacccaaacggagaccaaacatgagagaagttagtgcaaggttgagggagattattggaatttcacctgatggtgcagtccctaaactttttcctcttcggtgggctgagcttgagattgtctaatgaattttgatgatatatatatgtaggcgagctatgatttgtatttatttatagggttaatggaaactttgatgtatatactttgagatagggtggaaaatttgggaaatcttcgtttttat

SEQ ID NO: 26762 - DNA, 401 bp, Gossypium hirsutum
  Clone ID: LIB3166-022-P1-K1-G2
cagccttccggcccaccaaaaatgttggctttgccagttgcttctgcagggggcctagttggctgcgtggttttgggccataggaaaatctttgtctgcacccctttgactcggtcttttaaagagttgccacctgggtcagttaaagtggtggtcgcggaattactgtagggaatgacccctgaatggaaactcaaccactgggaggctacaaaggtcatgtggggtgggacgtgacggagagtgtgaagtttatgactcagtgaagaattcatggagtcggccaggacgcatgccctcaaacattaaggtgccactatcacttaactttctgtctcaagctgtttctgttgataacacactttgcttcatgcggtcggaccctgaagggattgtgtcct

SEQ ID NO: 26763 - DNA, 386 bp, Gossypium hirsutum
  Clone ID: LIB3166-022-P1-K1-G5
cccacgcgtccgcccacgcgtccgttttctttttaccggccggcggcatatgttcgtctcctagtgtaggttacgtcattcgtgtgaaaaatttaaagtttagtaattctttttgttttgtttaatccaacgggtcttttggttttcggatttgctggattttggctacgcttctcctaatattccggtttccagaagccaaccactcaacagacgcacaaaccaaccaaaacgaatcaaaatctcccctttattttctttttcttccacaaatatggttaagagggaaccaacaaaatagttcaactccaaacagcttgacaagttcgctctgtaaaattagctacgtacagtcaacactttccccctaattacgcttccttttt

SEQ ID NO: 26764 - DNA, 217 bp, Gossypium hirsutum
  Clone ID: LIB3166-022-P1-K1-H6
cttgcagcagcagccagtcagcgcccttccagatgatgatgatgatgcatttgaatagagaggagtttgagttgccagagaaccatcaacaatttctgctgctttttcattctcactcctgtctggatgtgagctctctcattttcgcatttaaattgcaagtatggaggagtgacggacgatgaatctgtagtgtcagattctacgaatatcattg

SEQ ID NO: 26765 - DNA, 384 bp, Gossypium hirsutum
  Clone ID: LIB3166-022-P1-K1-H7
gttttgtacgataagaaaggcttatttatttggcagagttttgaccacccaacggatacacttttagtaggccaaaccctgagatccaatggtccaagcaagctggttagccgcacgtctattgccgatggctccgaaggaccttacagctttgttatggagcaaaggtttttaaagatgtactacaaaaccaagaattcaccattgcctttgctctattacaggtcctatgagtttgggaatgggcaaggttccttagcaaatctcaaattttactgctcaccagagaccgaacaagcttatgcttacgagctggggttcacatttgatatgaaaggctctactagttcaggaacctacattttgtcaaggcctaaatacaat

SEQ ID NO: 26766 - DNA, 382 bp, Gossypium hirsutum
  Clone ID: LIB3166-022-P1-K1-H9
cccacgcgtccggctactttgagactcgggttaacaaaattttccattcgttgtgaaacctatttcccttttaaacttttatttgtagcctttcttctattttgtagaaatgatcttagccttactcaaattcacgatcgggaaacaaacgactcgaatcaatcacgaaacgagatcgtatcagaaaccataaggtgccccaaatcctagatttgcacaaagggtgaaaaatggctcggcagacactactagaagcacaaaaccaagaagcaatttgaagtatcgaggagaactaaattttagcctaagatggtccaaaattatatgtattaattcataatataattaatttttatttatatccaatttaatttgggttaat

SEQ ID NO: 26767 - DNA, 423 bp, Gossypium hirsutum
  Clone ID: LIB3166-023-P1-K1-A2
taccggtatcggcaagggtcggcccagcagcgtccgtgcagttgaatatatgtttctctcttcatcagtctaactagctctatattgcagggcatttcatattatcaactgtcaagtcttggcaaacttgatctctcagtttggagatggattctattattgtagtcctgaaatgagcgtattggtagttgttaactcatgccttacttattgtttagccagaaagtatgaagttgcatctttctggcatcgtacatcatgcaatgagaattgaggaataagaagcatatcgtctattgcaacatccggtcttaccatatagttcatgcatctcaccttagttcaatcagcatttttataagcttcggttttttcctgcatgcagatgacaacgagttcgaggatgtcaacatagtaaaaccg

SEQ ID NO: 26768 - DNA, 260 bp, Gossypium hirsutum
  Clone ID: LIB3166-023-P1-K1-A4
aagaaagaagaggctaagccttctatttgtggtctgctggaaataagtatcggcgctgtatgtgctgagcctggaacgctgtcaaatgacaagaaaagggatatacaacagctgggtcatgggcaagagagggctactgagcttgagatgcattttcatattgcctatgaagaaggtgggcccccgtcatcagacgtagaactcgtgcagaacatgctgacatgtttcaatcacacactgtcgtgatcatgagtgcgcat

SEQ ID NO: 26769 - DNA, 430 bp, Gossypium hirsutum
  Clone ID: LIB3166-023-P1-K1-A7
ccgaacggaatgtccggcgccgaccgcacccgtccggagcgaccttttctttttgcaacaaattgactttcaattgatggtgaagccaatctgcacaacacattcttcagcatcacaaacagagtatgcctccgacataaacaccaacagctgcagcagtaatagcagtagcagtagcagtagttccaagtataagggagtacggaagaggaaatggggaaaatgggtgtccgaaattcgacttcccaacagccgtgagcgtatttggttaggttcttacgactcgccggaaaaagcagccagggcgttcgacgcggctctttattgtttacgtggccgtgatgccaagttcaatttccctgaaaatccaccagagatcgccggtgggacgtcgcttagcccgccggaaattcaagtggtggcagctagg

SEQ ID NO: 26770 - DNA, 344 bp, Gossypium hirsutum
  Clone ID: LIB3166-023-P1-K1-A9
cccacgcgtccgcaataatttgtttgatttttctaattattatttttaaacagggtttaatagatatattactctttgttatttgtttttattttgtttacttaaaatttatcggtcaacctgaaaaaaagtaaacttttaggctgcactttaaccaatgtggttaatttttaactttgttttggaaaattcatttttcctggtcatgaatctagcaataattggttacataatgctctagggggggggacaattggtagttggtaattaattaatggcccttgccttttagtcgcaactgacaattgttttctctcttttggttggcattttttggggtcatt

SEQ ID NO: 26771 - DNA, 338 bp, Gossypium hirsutum
  Clone ID: LIB3166-023-P1-K1-B1
gccaatcttacggaaaaatttaatttctcttaacaaatataaacaataagacagggttgaattgatatattactctatgttatttatttttattctagatacttaaaatttacttgcaaagctgcacataagtaaactgttaagctgccctttaaacaatgcgtctaattctttactttgtttctggaacacacattctcctggtcatgaatctagcaataattgggtacataatgctctaggcgggagacaattggttgtatgctatcaataaatggccctagccttttaggctcaactgacaatggtttcctttctttggcttggcttttttcggg

SEQ ID NO: 26772 - DNA, 349 bp, Gossypium hirsutum
  Clone ID: LIB3166-023-P1-K1-B2
gggggacccacgcgtccgcccactcttacgtcaattcttatattataatgcacacattaatactcagcgggaggtatcatttccacacaaaaaacttccaaatatcacaaatcatacaaacctaccaacacctatcatagaaaccacacaacagcaaatccaaccattcattccccccaaacaaccttccaactcagatctgtcaccatcactaactccgatacactcaaaaccatccccaacagataattggatttgttctttcggaagcctatttcgctataaaactaccagactctattagattctctaaggataaaccgtgaaatacaggcttcaaaggcaaagc

SEQ ID NO: 26773 - DNA, 385 bp, Gossypium hirsutum
  Clone ID: LIB3166-023-P1-K1-C11
cccacgcgtccggaacacttctacaggctttggaaaactatcatccacattgagtaatttggagatccttgacttaagttacaattacttgaatgatagcattttgttatctttgagtgagctttcctctctccggtatttagacctatcatacaaccaatttgaaggatcaagtcatccaagaggttttcaattgctttcaagactcaataacttggaaactcttgatttaagttggaattctttgaagaatagcattttgttccatatgagaaatctttcatccttgaagactttaagattgagacgtaatcagttgaaaggaaggctggatcatattcaagggttgaataatttgacaaacttgaaatacttggattaagtg

SEQ ID NO: 26774 - DNA, 385 bp, Gossypium hirsutum
  Clone ID: LIB3166-023-P1-K1-C12
aagagctggttttcctctttctgatagcggtgctgtgaggaatactgaggaaagctttcaggaggactgtcttcctttctttctagatgatgattctagtggtcctgatggtagcccttcctttgcgaaaaagaggtccttgatgaaatctgcttatggattttctgctgatgcaaaagatgctagagaagcaacatctagtcctgtgaatagagtagactttacatccaaatatagtggtgcaagacaaaaattgaaagatgctagtttcaggcttgaaagctgcaaggtgtcaagtgaaactctgcacgaacctcacaaatccatggatcaaagatctgtgaatactcgttcaagagttgcagagtcactggagttgattgac

SEQ ID NO: 26775 - DNA, 286 bp, Gossypium hirsutum
  Clone ID: LIB3166-023-P1-K1-C8
gtttcctctgtatatcaaaattctttttctcgatgttcgctccagccaggatggacgctgttcttactaacgactctaaccggcccgaccttcactttggaggtgaaaagctccgtcacgttctacaacgtccagaccaatatacagcatggggaaagcattcctgcgtaccagaactgaatgatcttagtcacaaaacagatggaggcctgccggaccttggccgcttccaacatacaaaatgagtcgactgtccacctagacctccgttagcgcggtgggatgc

SEQ ID NO: 26776 - DNA, 230 bp, Gossypium hirsutum
  Clone ID: LIB3166-023-P1-K1-D4
agccttccttaaacttccacaacgtgcttgaccttttaatatgccatgggatgatggtggttagtgggtaatacgtattggcttttgtaccatgccctgtatttgttaaaacccttatatattttgggttgggaaaggacttgggaatgggctttgatataaaatgtccacataaattaaattccccaatctcttctctttaatcctttccttcattttttttccaactg

SEQ ID NO: 26777 - DNA, 380 bp, Gossypium hirsutum
  Clone ID: LIB3166-023-P1-K1-D8
aaatattcagaatttccgtacaactttgagatgcatgagattttgggcaaaacgtcgtggtgtttattctaatgttgctggttttcttggtggtataaactgggctttgcttgttgctcgcatatgtcagctataccctaatgctttgcccaatatgttagtttctcgattttttagggtgtatacccagtggcgttggccaaaccctgtcatgctttgtgcaatcaaggaaggatctcttggtcttcaagtttgggatccccgaaaaaatcctaaagatagatatcatttgatgcctataattactcctgcttatccttctatgaactctagttacaatgtgtcatcaagtactttgcgaatcatgacagatgaatttc

SEQ ID NO: 26778 - DNA, 391 bp, Gossypium hirsutum
  Clone ID: LIB3166-023-P1-K1-E1
aaaaaagccctacttttgttgttaatgaaaagaaagaaagacagactctgcagcgatgagactaaataaagaagcacgcaatttatcaaattcgtcaacgaatacaaagtctgattcatcgaaagaatcaatggcagagccttacattgaacaagtagagtatctcgacgttctcactaaaaccggtaaaaagacaggcgtttccaagcccaggggagatgtccatcgagatggggattaccataaagcagtccatgtctggatttttgctgagagtacacaagaattacttctccaaaaacgtgcagactgcaaggactcgtggccagggttgtgggatatctccagtgctggccatatatctgctggtgactcatcgctaataacagca

SEQ ID NO: 26779 - DNA, 326 bp, Gossypium hirsutum
  Clone ID: LIB3166-023-P1-K1-E10
agaaaaaagaaactcctcaatgatctcacggtggtaaagtgacatgctgcatagcggcggatgcatggctggctgaatatccactgtcaggggatgtagtgctagaggaaccatcacaccagcgtcaacaccgattgaaggtgcaatacactgcttgatgtgacactgatgtatactactggactggactagggttatcactcaaagctgcttctcctacttagttatgaaaactaaaaaaatcgggcggagcgtcttgaggatccaagctgacgtacgccctcatgcgacttcattccttatctatagcggcacctgcattgaat

SEQ ID NO: 26780 - DNA, 386 bp, Gossypium hirsutum
  Clone ID: LIB3166-023-P1-K1-E2
ggaataggccccccaaaaggagaaagcatttatgaagaagctgtagaatttgagccggttattcatcacaaccaattctgcccttgggtgaatggaactgttgctgctgctggctgtaatggctccagtgctgatgttgttgcactctgtggatggcagttgacgttggatgccttggatgccctgcggtcacaggggcatattcctgtacaaacagtacagtctgagtcagcagcatcgctgtatagggatgatcaccaaactcctggtaaaaagctccatcgacggcgtcctatgaacaaaaatcacgggcaataatgatggccaaacacgacgtgtaaagacatcttcaatggctagtaagatggaataagcattctcaacgg

SEQ ID NO: 26781 - DNA, 451 bp, Gossypium hirsutum
  unsure (1)..(451): unsure at all n locations
  Clone ID: LIB3166-023-P1-K1-E6
aattncccgggntcgagcccacgcnnngtccgcccacgcccgtccgctttttttggaaaaacttgatatcagcnnatcggtgttgtctggaagtcgtttgggatacccattaaatttcttcgcatgaacccaaatcaatgttttaaggtacccccgtacaagaataaacttgagcttacctctcaacatacaacaaccagacttgtgagaagtccaagganctttgaaggatttaagcatgatctaagaagtcgtggactatgccttgtaccggtctcgagcacgttcccgatgacacatgagtcgacagttgatttttggacaccaacatttggaggaacatttaggtagaaaggaagagaaatggtgggaaaggggggcatagatatggaaatggaagagatattgtttataaatatttattaggaaggaatcctcgacaagttgttcg

SEQ ID NO: 26782 - DNA, 375 bp, Gossypium hirsutum
  Clone ID: LIB3166-023-P1-K1-E8
gttcggaccattagcttctttttctcatttaattctcaaagggtctccggacaggttgagcatgaaagttatctgctaatctggctcatcttctactcaaacagtttgagcatgacactgttttgataccaaaggaaacctcttggtttggatattaccccaacggggccttcaaacccgtcgttcagcctcaagagacaaagctttacagcgaggattggattggtttaaaaccttagatgatgctggaaaggtacactacgttaatgtgtcaggaggtcaccttggaatctccaaagaagacatgaagaagcatgttgtacctttcttgaaggatgaagcaccaatggcggatagcatcgaaacccatggatc

SEQ ID NO: 26783 - DNA, 298 bp, Gossypium hirsutum
  Clone ID: LIB3166-023-P1-K1-E9
gaggaatcctatatgtactaattgtggcggtccggctattatcggcgacatgggagtagacgaacaacttactaaaaccgaaaatagctcgtctaaaagaggagattatatcgcgtctcgtgcaccttgctggtaatggacctaggtccggccagattacagcgacctggcattaccaagactcaatgtgtcgagcttagggcatggcacgcaagggtactacatggaaccgactatgggtactactacaacattgcctttaagacatgaagctttaccaacactgggagtatctagt

SEQ ID NO: 26784 - DNA, 329 bp, Gossypium hirsutum
  Clone ID: LIB3166-023-P1-K1-F10
cccactcgtccgcccacgcgtccgtggacgcgtgggttttctctttttcgttcgctttttttttctttttttttcctttccatttccatctaactaatattttttttatttattaataaaattatagatatccattcacaaggatctctcaacataattaaaaaaaaattttcaacattacatttaaccattttatctaaaaaacatcacacctacatttctcaaaatgctcaaagtattcttccactttaaacataacaacaccattttaaaaacaaaataaattggtaaaattgtatttaaaaacaaattatattaccccatatgaa

SEQ ID NO: 26785 - DNA, 361 bp, Gossypium hirsutum
  Clone ID: LIB3166-023-P1-K1-F11
gggatggccaatgggatgttggattcaagttgttcgatgaagaagacgatggtgacggcaatgtgtttgatggctcataaagcgtacatttctttgctcatactgggaaactgatttcggtcatgtttgtatatagctttgccctttgcctttgttggtgaagttaattactttagacactttgtatttccagggtagttgtaaaaaaataaaaaacaaaatgctctttagcgtgaaaacactagtaactcagtgtgtaaaatttcctcaaggctgttttgcccgtatgacggtgctaaactgctaattgactgttaatatattgatattcaattgcgtggatatcctcttattatgttcc

SEQ ID NO: 26786 - DNA, 390 bp, Gossypium hirsutum
  Clone ID: LIB3166-023-P1-K1-F12
cccacgcgtccgtggaattcctttcttcaagagcttagagcttaattttgatggggaagcacgacgatgagcgctctgtttttcctttaaccagtctccaaatcggagacttgcagtcttatctatcggatcttagccttttcttggcccctgaaagtaaaaaattctacattttggtggacaaccggccatggcttagggacttaggttcacgtcctgctcacttgtggcaattgatggttaccaagtccaggttatctccttttgctaacaccaaaggtcgtagggcaagaaaggatggaaaagaagcttcttccaaatcaaatgctaaagatgccaagaagttggagagatggttctctttggtagatgctgcaatgctgtcgaaaa

SEQ ID NO: 26787 - DNA, 341 bp, Gossypium hirsutum
  unsure (1)..(341): unsure at all n locations
  Clone ID: LIB3166-023-P1-K1-F3
cccacccgtccgcccacgcgtccggtttttttggggtctagtttttccttaaccatcaatttaattcccagtggctaaacctggtttggaccatctttaaccaaaattacactcccttttttcctttttttctttcaaaataatttccaaagaaacaattcttcgatttcttagctaaatagttcaataggtgccttntctttttattttatttacatacatattatattataaggtgatacagcgttcagattcgaatggaagacgatatgcaatattcctttcaccttctagtaactcggttgaagcctcttcagaccgagatgaaatatggactgtgt

SEQ ID NO: 26788 - DNA, 383 bp, Gossypium hirsutum
  Clone ID: LIB3166-023-P1-K1-F4
cccacgcgtccgtggaaattgtatgagagaaagcgggtgattcctggaataagtggagatgtttgtccctgtaaaggctagttggaggtgctgtcggtgtgcgactcttgacaaagggttcgattgaatgattaacgactgcgacacatcactgagcagccttgtcttttacccagcttaaaatgtttttccagttccttggcagaatgattgaagagttggataaatgcttggaaattctcggtttgtatataaatttttttcttcttcatgatttgagattttacttggtggaggatatttcattcactgagcgatgtattattacttagaatgagactctgatacattagtttgagatccctgtgatttccctatgttgg

SEQ ID NO: 26789 - DNA, 391 bp, Gossypium hirsutum
  Clone ID: LIB3166-023-P1-K1-G10
cccacgcgtccgcccacgcgttcgtcgcgagaacattagaagagttgaagaacttcaaggcggccggagatccattcaccgaagaattctttcaaaattttcaatctgtttataaacaacaaatggcaatgcttgaaaaattacaacttcgtaagaacaagctcgataagaagctaaggtacatacatgcatggcggaaggtgtccagtatgatattcgtcgctacgttcgccactgttttgatatgttccgtcgtggcggcagccatggctgcaccaccggtcgcagcggctctcgcagctgcagcatcaatcccattaggttcgatggggaaatggattgattctttatggaaaaactacgaaaacgcattgaaaggacaaaaggaagt

SEQ ID NO: 26790 - DNA, 373 bp, Gossypium hirsutum
  Clone ID: LIB3166-023-P1-K1-G12
cttccactgttttagaagcaatggcttattcgactgctttaagaagagtccctgtatcgactctgttttcgaagctggccaatctttcaccagcacgtaccgtttcagtggcttttcccaccgtggctcgctccttcaataccaatgctcagctcaccaaattcaacgacgaggatcgctccgtcgacgttcagcgccaatctgatcgctctgtctctcgccgtcgcgattctccccgtttcttctctgatgtatttgatccattttcaccaacaagaagcctgagccaattcctgaacctaatggatcaattcacggaccatccattgctgtcaaactccgagttgtcgtcaaggaaagggtgggacatgag

SEQ ID NO: 26791 - DNA, 399 bp, Gossypium hirsutum
  unsure (1)..(399): unsure at all n locations
  Clone ID: LIB3166-023-P1-K1-G3
agccttccgaaggtttttgcaaaccaaggggaaccttcttttgctctttttttgtccaacctggggaaaggggttgggggtggattttaccccattattgttttttaagggcctcctcctaagggggttggccttgccaaaaatttttcattcaggcatcccaatgtttttgggaaaaaaagacgtcttaccctttttgttttcgtagcagatgaatcaagtgacactcccatggcatcacaggatttgtttctgcttaccatccacatgctgaaacacagagtaatgaccagttgagtattccacctacattggatgaagaagataaaccaatggattccaacaactcgaatgatggggaaactgtacctncaaagtcagagagctcacaaccctgtt

SEQ ID NO: 26792 - DNA, 385 bp, Gossypium hirsutum
  Clone ID: LIB3166-023-P1-K1-G4
cccacgcgtccgcccacgcgtccgttgagtgggcattgttttaagagagatggattactggaaattggtgtgggtgtttgtggttgctttcttatttggagggtatcaaagtgaagggtgctgggagattgagaaagctgctctcttccaactcaaacctttctttcctcgtgttaacggtgaagagatttcttgggggaagggaaattgttgccgatggaattgggttgagtgcagcacttccactggacgagtcacccaactcttccttgaggatagttatgatagagagacaacaaggatatctatcagggatggtatctcaacatctctttgtttcttcccttcgaagaattgaagagtcttaatttaggaggcaactaca

SEQ ID NO: 26793 - DNA, 383 bp, Gossypium hirsutum
  unsure (1)..(383): unsure at all n locations
  Clone ID: LIB3166-023-P1-K1-G5
cccgggntcgagcccacgccccgtccgcttattgggcaactcaatattctgtaagtcatagtattggcctaagagacctgttgagtgttcggtaggtagaagttcacaagtccaatggactcaccatagatgcctcgcacacagcttccattatgtgtgaccggcgagtgaagttgacaacagttggtcatatttatatggtgctgcaatatgccgagatttatttgccatcgctacttattttgtatacaatcacatgtgtgtgacaagtgatgcggatacacagagtcaatgtgtgacctctgataaagggcaagtgacgaatgcnggtggatgttggcatctcttggcattgctttgggcttttggtcgggatgaatctt

SEQ ID NO: 26794 - DNA, 336 bp, Gossypium hirsutum
  Clone ID: LIB3166-023-P1-K1-G6
atcctgcatgtgcctttgttgtgatcggtgttgctatctccgagtgaatgaccgcctgtgatgctaaaatctccccttccttgtttcgtacaagtaagcccatagccgatctagaagattgacggtcaaaggctgcatcaaaataaactgtgacttttgatcttcaacaaatctagtgaatgattccattagcctgaaagattgaccagagaccacaacagaaatgtcagatctgttcgttagtacattgacggaagactcaagacattgttgaaagacatggctactatcctcttcacgctgaaagatacgggggcactgatcattctccacaac

SEQ ID NO: 26795 - DNA, 388 bp, Gossypium hirsutum
  Clone ID: LIB3166-023-P1-K1-H3
aaaaaagctcaataagctaaactaattgaaggctacatataatagatgtccaggcttgtaaattctggagaactcctttgctgtaaacctatcccagaaggtcagcagccaataaaaatattgttagatctactagaaaacaaatcaaacaagatggaaattggatcttgttgcataataacttgagccaacaagttatttcaggaagtcattgtatgttttgatgtttgtacaaacataattcctaaatgaatttatcacaatatactcacaggagtcagggaggccaaagaactggaattgtaagctgtactttctgaaccgtgactagatatatcagttgatccgcaacttggtggccctgaaaaatctgttctttctggtatgg

SEQ ID NO: 26796 - DNA, 421 bp, Gossypium hirsutum
  unsure (1)..(421): unsure at all n locations
  Clone ID: LIB3166-023-P1-K1-H6
ccggaacggaagggncggcccacgcgtccgcccacgcgtccgattgtgcatcatttgctttacaacctcttacatcccctgggaggcggatcttgggtgtattacttaatcgcatggcttgccactctagccctcatccttctattcctaccgtttcgtccccaaaaaaaactcaacttgccccctggcccaaaaccacagagcccgaattgggaaccttgaccacaccggttcactttccgacagatcaatacattccctctccgaaaaatatggtgcactcatgcaactcacagaccgatcgttccctgaaggcgtggcctactctgctgaaatggccaaagcctttcttaaaacccacgaagctatatctgctggtcgacccaagatcgcggaacgagagtacactgctcacaattac

SEQ ID NO: 26797 - DNA, 379 bp, Gossypium hirsutum
  Clone ID: LIB3166-023-P1-K1-H7
ggacgcgtgggctggtctggatcagaagcagataaacaactggttcattaatcaaaggaaaaggcactggaaaccatctgaagatatgcagtttgtggtaatggatgctgcccatccacactattatatggacaatgttttgggcaatcccttccctatggatctctctccaacgcttctctaaagaaaaaaatgtatgtgcttctatattgctgctgcatttacatgcaaagctgtcatataatgtatttgatggaagtatatttatagcatcgtattatcgtatgcatgcatacctcgtgtatgcggttctaggctatttattatatgttattaatctgtgactgttaaaatctaatatatatatatgtgtttttga

SEQ ID NO: 26798 - DNA, 386 bp, Gossypium hirsutum
  Clone ID: LIB3166-024-P1-K1-A11
cacgccttcgtccaactcctccatttacgtctccaacaacccacaggaagcccgaagcaaccctttcctagaccccatcgaacactcaaacaaccctccagctctggccatgccgcctccacaaagccgcaagcccgtgaccgagccctccccgacaagctacagctatagctcttcctcgccagacaaagctgcgcctcctaccgagtctcattcgccgcaacggcctggcatcggtccataccacaactctggggtcacgccgtcatacatgggaaggcagtccagcgctctaaatgggctgaccatgcacggagccgacagccaaggcagctacacaaacactgccgtggagatcgacggacagagcaatgtcggtcgtagcg

SEQ ID NO: 26799 - DNA, 304 bp, Gossypium hirsutum
  Clone ID: LIB3166-024-P1-K1-A12
cgaagaccttctttacagcaaagtttataatgaagaacacttatgtgtgctcagatgaccttaacaggccaattctgttcacaatgccaaggcttgatcgtttcaagaccttaaccggcctcttcagttgttccggcaggaccccaaagttgcttagtttgcttaactctttatttgtagtgtggagatagccaaagggatattaaatatttgaaagaaagccccaatgtaaaaaatgtgtgtgctcttctcgaaatgcacctcttacacgcccatcagatgggtatcttatcaaatgtacaca

SEQ ID NO: 26800 - DNA, 372 bp, Gossypium hirsutum
  unsure (1)..(372): unsure at all n locations
  Clone ID: LIB3166-024-P1-K1-A6
aagcaacctctggaacccctggtcatttcaaaccccattcaattcatttcccttttgtgtataaggtaaacccagaacaagggaaccccaagaaaatgaatccctcagataacagtgaccaccctcagcttccaacgatcaagatccaccacccatcattccctcaccatcccaccttcaccggtactcccaccgncggtgcccgccgtaaaatcggtgtagccgttgatctctctgatgaatctgcttttgccgtccgttgggccgtccaaaactacattcgagccgatgatgctgtcgtcctcctccacgtgtcttcaaccttcgtactatttggagccgattggggccctcttccccacattctacaaa

SEQ ID NO: 26801 - DNA, 308 bp, Gossypium hirsutum
  Clone ID: LIB3166-024-P1-K1-A9
cccactcgtccgcccacgcgtgtctttttacaatattttcaaacctacaacggagggaatgttactatctaaaccacaaacattcaacatccataccatttatgtataaataacatatcttcctgtcttccctacataacactcttaaaaacaaattccaactcatgaccagtctcctcccaattccttaacatcagaactgcacacttataccatacctccgctgatccatgtgccaactatctgtcaaagaaattacccattgacaccaactatttaaaacccatgcagcacaggaccgacattac

SEQ ID NO: 26802 - DNA, 307 bp, Gossypium hirsutum
  Clone ID: LIB3166-024-P1-K1-B9
gaaaaacttgccccttacgacttttttctatggcctgatcttcatctactgagatcttttaataactaggctaaacaatacaatccataccaaaccaactcaaaagccaaaacctaacacctaactatttttttccttcacttttgacctccattatccatagatctgttgatcttattttcaagcatagaccaaagctgtcaactaaacacacaagtgttgcattattgcagtcatgaagcaatctgaacttctgctcacggttcaagcatctaggtactaactatattcaccgctcatttagatc

SEQ ID NO: 26803 - DNA, 387 bp, Gossypium hirsutum
  unsure (1)..(387): unsure at all n locations
  Clone ID: LIB3166-024-P1-K1-C12
ctctctctctctctctctctctcttcccaaatccctcccaccctccaccccgtgcgaaaatcctctaatggaatccccgcctccgccacccgcggcagctcctcctctttccaccaccaccaccactactgcagccgccaccgctccccccgccacctatcccgactccatagactcttcccctcgctcccgcaacacggactcatgggacgaccctgctcttcccactacactccacccaaagctccgcctcatgtgcagctatggtggcaccatcgtccctcgcccccatgacaaatccttatgttacgtcggcggtgacactcgtatggttgttgttgatcgccacacttncctcgcttncctacaccaccgnctctccctttc

SEQ ID NO: 26804 - DNA, 388 bp, Gossypium hirsutum
  Clone ID: LIB3166-024-P1-K1-C4
gtcgggagaattaaaggttaacaattttagttttaccgaattccattggtacctgggagcacttacgagagcttgacttggcccgatctgaggatatatgtgaacttccgaggactttttataagctttactgcttgcaatcgttgaatttgggagctactagtttgaagcagttgcctgacagcgtgcaaaggttgattgagcttagatatcttgtaataaccattgaagctacgcatttgaaagaaatacgagcaggatgttggacttctcttcaatacttggaattgtataattgtttcgaattagaatgtttacctgaaggaatgcagtatctgaagtcacttcggacacttatccttacttattgtgatagccttgtctcatt

SEQ ID NO: 26805 - DNA, 383 bp, Gossypium hirsutum
  Clone ID: LIB3166-024-P1-K1-C8
gtctgttttcattgattaatcaaatatatatatttgtttctatttccggggtgtaagggaaattctaccattgttgccaactcaattgacttttaatatcgtcaagagtgaaagggtcagagaattataatccttgctttgaattgttcattgttgggaataagctgaaaacctaactgggaattagaattttagtgtttgtttgttaggtggggagatgacgctagagtctttacctgggagttcagggtatctggatttgtttccagagagacgaatgtcatatttcagtaatccttatgttttaggacttactgtaattgctggaattggtggcttgctctttggctatgacacaggtgtaatatcaggggcccttcttt

SEQ ID NO: 26806 - DNA, 388 bp, Gossypium hirsutum
  Clone ID: LIB3166-024-P1-K1-D10
cccacgcgtccggattcttacaattttgttgaaggagaaagctgatgaaggtggtaagtgtttgtccgaaagtcactggaattcacattgcgttgttacgaggaacaagttcgagagtatgtgtggaggacaaaaggaaggttatgctgtgttgagttacttgtcagggtgcaggaaaggtcaatatctctccaccaacaagaaagaactaatcgagggtataaaagtttccctttcgtcagctgtggtttctggtgtctcgagtttagatttcgacactctccacctcatttggactcaagaaaaacttcaacaacaactcgatgtgatcgaccgacgctgggaaacgtcaagacagtcagcattagcctcgttgaagtctgggaac

SEQ ID NO: 26807 - DNA, 390 bp, Gossypium hirsutum
  Clone ID: LIB3166-024-P1-K1-D4
ggaacatttcaaatttttttaactgtttttaaccgccccatggatttggccactgtgaagaagaggataacttcagggcactattcaaatcctttggactttgctgcagatattcgccttacattttctaatgcaatgacatataacccacctggaaatgatgtcaacttcatggccaagacactaagtaaatattttgaagtaagatggaaagctatagaaaagaagcttcctgtaacgaaaaatgttgatgctgtgccttcaacagcagctgcacctatagaaggtgaaacgaaaagtaatgttttacctttgaaaaagaaaaaaattaacccaaaagatgctatggacaagccagagcccatcagacaaatcatgaccgattgggag

SEQ ID NO: 26808 - DNA, 368 bp, Gossypium hirsutum
  Clone ID: LIB3166-024-P1-K1-D7
catactcttggactgcataggagcttgagtgtttacggctatattctgcataatggatatggataaaccagataagcctcaccactttgagccacagatatataacatggaaaggggagctcgtgataagttaataaatcactacaataccatgagcattcgggattttaatgagaaatatggagatctctgggatttcactatcaagaaagatgatataacagagagataaacttctctcgatcagaaaaagagaactgtacttattagctactgtcatgtgagcatggtctgaaagatgtatttttcggtccgatgcgatcacgtccgattgcagtagatactaaatcgaaactgtcgccttaagt

SEQ ID NO: 26809 - DNA, 388 bp, Gossypium hirsutum
  Clone ID: LIB3166-024-P1-K1-E1
taaacggcaaatttcttctcatacattgtcatgatgtcgttagcttcaattcagggatccatttctaggaagcaatatgatgttttcttgagttttagaggtgaagatacccgctggaacttcacggatcatctctatcatgctctaaggagaagtgggattgtcactttcaaagatgatctaaagctggaggcgggtgaagagatcagaccaggaattctcaaagcagttcagcaatcatggtgctcggtaatcgttttctcggaaacttatgccttttcaggttattgcttggaggagcttgctgagattgttaaacaaagaaaaaatggtcataaagtgtttccaattttttacaatgttgatccatccgattttaaaaatcaga

SEQ ID NO: 26810 - DNA, 381 bp, Gossypium hirsutum
  unsure (1)..(381): unsure at all n locations
  Clone ID: LIB3166-024-P1-K1-E11
cccacccttccgttcgaattatttttttgtaatagtttataggcacttctagctgagaactcccctgacagttcccctctctacacttggaagtcatcgtaaattgtctctgccaaagggatctgcagaattttcttagcagtatcctcattgaagctcccaatatccataagtcaccctaaacatagatacgatcgtcgtgcctacccttcaacataagccttttttcaaaattcctttaactgcccagacactcttccaggtaagtgaaggagagatactngatccatgctgantttggagatcaaagtcatatctttgatccctgaaatagtttccgtgcacaagaaccgctaggtaagtattttattcattttatta

SEQ ID NO: 26811 - DNA, 356 bp, Gossypium hirsutum
  unsure (1)..(356): unsure at all n locations
  Clone ID: LIB3166-024-P1-K1-E2
cggaccccttggccgaccccttggcttttttaatcttcactatttccattttttgtattaattttcaaaacctctgtcctctctctttcttaatttcaatttctttataattaatttttccttattttttgagctcatgcatatatattgnttatgattggtcgaagttgagataacagctcgtgaatacagttatagatgggaaattgctgctccgacgtcggcggcaggatggcagcttttggtggcaccgccgccatcacttgcaaccaaaacgacgctgtcgacatgtacttaaaatctcgtggcatccacggcatcctctctcagatcgagttatcattttctgctacaaa

SEQ ID NO: 26812 - DNA, 218 bp, Gossypium hirsutum
  Clone ID: LIB3166-024-P1-K1-E3
gtctcatcctgggtcataaacatatttttccatcacctgcagcttagctactggaggttcattgtctaaggcaacaagaaacacacctggaccttaatcatacactcgtgtctcctgaatctactacactgactcatcttcctaacgaggaatcacttgtaaaaaccagcctacctcatcatatacctcagcttccgatgacgttcatataactacat

SEQ ID NO: 26813 - DNA, 390 bp, Gossypium hirsutum
  Clone ID: LIB3166-024-P1-K1-E4
cggccaaaactatcatggatgaaatgttatactgtataaatggagaaaacatacgtgatggcactcccacaaatccatgtgcaccagatagagtacctggaggatcttccagtggctctgctgttgcagtaggcgcagggctcgtcgacttctccttaggatccgacaccggaggaagtgtgagagttcctgcatcatattgtgggattctcgggtttaggccttcacatgatgccattagtacttctggagttattccaatggctcagagttttgatactgtcggatggtttgctagagatcctgcagttttaaaccgagtcggacgtgttctgctgcatttacctaatgtcaaccctgtcagacctagtcagatttttattccagaag

SEQ ID NO: 26814 - DNA, 317 bp, Gossypium hirsutum
  unsure (1)..(317): unsure at all n locations
  Clone ID: LIB3166-024-P1-K1-E5
ctnccattacctttattcgcaagcgggccttttccccttttttaggacccaaggccagatgtgggcctctcgatccgtacaactgacatattcaggtgtttaatttgacttcaacttcacatcttataaaaaacaacgcaattgtcctaagataagctcttcgagaacaaaaatctctaattgaacaaaaaggtaaaatctcatatgatccaatttacaatcctaatacaaaccttactagcatttcctatctatcctttagacctacttaatttgaagctagaggcctcagaaatgttaccacaatgataactctc

SEQ ID NO: 26815 - DNA, 385 bp, Gossypium hirsutum
  Clone ID: LIB3166-024-P1-K1-F10
cccacgcgtccggccttatacattctgccagacctaaacccttgcatccattgtgttcttccttaacctaaacctaatcccctgttttaaacactcatccaccattgtcaacggtgatttagcatatcccaacctcgagggatgcgggtttcggccatgaaatcccttctttgctccgatttcaacggaacagacggaacctcttagcactcgtaaggtaaatctctcattttccttttttctcttttatgcgaagggattttgtagagaaatgaaaaaagaaaaatgaattgaaacactggaaaatgcaatatcaaattaccttagtttttcattgctttttcctctcttttttttttattttgtaatcccgatttcagtgttt

SEQ ID NO: 26816 - DNA, 310 bp, Gossypium hirsutum
  unsure (1)..(310): unsure at all n locations
  Clone ID: LIB3166-024-P1-K1-F11
aatctccagctttcccttttctgagtagtgacccttagatgcagtcccaacggttacccttcttcttcccttagcatatctttttcaagcatcgggcagtcttgaaactccttcctcttgttcttcttgcctccgtcgctctctcgcctgatggaaactctgtggatgcagccccagcaggtaatgtccttcccctcttcttatcgcttctttaacaataaaatgggcgttctcattttctgttttaggagtaaaataaaaaccgatattctgaaagaaaactttnttgctgtttatatatctgattatc

SEQ ID NO: 26817 - DNA, 185 bp, Gossypium hirsutum
  unsure (1)..(185): unsure at all n locations
  Clone ID: LIB3166-024-P1-K1-F2
taaatgaaaatgcctttattgagttttccccaggatttgggtttgccccccctaaaataaggtaccatttaatgcttggtaggcaaatttggcctttggataaatcattgcanagataacacatacaatgataaacagaaacagcatcttcagataatgatcctgctggccttgtgcggtgcgat

SEQ ID NO: 26818 - DNA, 392 bp, Gossypium hirsutum
  unsure (1)..(392): unsure at all n locations
  Clone ID: LIB3166-024-P1-K1-F3
cacattctcaaatataacaaaagttttttcattggcttctgcttattcaattagaagtntggctgaattaaaactagaagaattagggggagaatgtgacctattttaatctgatactaaatcaatgatctttttatcctattaacagcatgcaagtgaagaggaagaactgcaacagagtccactgtcggtgcttcatttcgaatacggtggtgatgatgaagatggtgaagaagcaaaggaaatcgaagaaaaagcatgggagctgctgaatggtgtgaaggaaacaagtccactaacaaggtacaaaaagaacaacatttgtattgacaaactgcttttggatctatttagagaagaactggagacaaagtgggatcaaacaagaaaca

SEQ ID NO: 26819 - DNA, 387 bp, Gossypium hirsutum
  Clone ID: LIB3166-024-P1-K1-F7
cccacgcgtccgcccacgcgtccgttcacgcgtccgcaaagtctcaccagggtgaaaatgagttttgggcagagattgagatgctctctcagcttcgctacattaaccttgtgtcgcttataggttattgtaacgaaaaacaagagatgattcttgtttatgattatatggtgaatggaacccttcgtgatcacctctataaaaacgataatattcctctccaatggaagcaaaggctgcaaatctgtattggtgctgctcgtggattagagtaccttcattcaggtgcagtccagagaatcattcaccgagatgtgaagactaccaacattttgttggatgagacatgggtggctaaagtctcggatttcgggttatcgaaaatgg

SEQ ID NO: 26820 - DNA, 362 bp, Gossypium hirsutum
  Clone ID: LIB3166-024-P1-K1-G12
ctggtattcatttcagtaggtagtttaattttttcattcattcattcatttgagtgggggtttgaatccatacaaaaagtatgattcacatcagaatttaacctctgatcatctaactctggttggagtttggttaggccacgtgttattgataaggacatagattgagcaactggcttcacaagttatcctcggttcgggattcagccacgtagccttattccattcattcccctgtaatttctcccaatttatcatacactttatattttgtgtatgtgagtcgtgttattaatgatttctattaggaataatgttatatttagtcctctaattttatataaaaaattcattttaatttt

SEQ ID NO: 26821 - DNA, 383 bp, Gossypium hirsutum
  Clone ID: LIB3166-024-P1-K1-G7
tttgggagctcttggtttatatttttcagggctgttctggtagccacattgtgtctagcagctgcacaaaaattgtttctcaatatgcttagaagtgtttttcgagctccgatgtctttttttgattcaactccagctgggcgtatcctgaaccgagtatctattgatcaaagtgttgtggatcttgatataccgtttaggcttggtggttttgcttcaacaacaatacaacttcttgggattgttggggtgatgacggaagttacttggcaagttctgcttcttgttatcccgatggctgctgcttgcttgtggatgcagaaatactacatggcttcttcaagggaactagtccgcattgttagcatccagaaatctccagt

SEQ ID NO: 26822 - DNA, 369 bp, Gossypium hirsutum
  Clone ID: LIB3166-024-P1-K1-H2
gccacacattcccccaagcctgcgttttcgccttccgcttaaaattcccaaaaatgtggaaaaatggatctttttggtacatcctacaatcctgtcaaaaaaagagacttttgctacccgttcagacattgaaaacctcttcacttcttagcaatgagctgcatatgacattgtatggcttcattgtatttgaagtttcatggtccaatgttcgaggtcttaactacttgaatgaacttcagactgatacctctctagccgtagaggctaaattcatgcgaagatggtaatttgacagcattgatcaagcagcaaagcgtctatcttcatggttctctggatcattggtggagcagcggaatcttaaag

SEQ ID NO: 26823 - DNA, 219 bp, Gossypium hirsutum
  unsure (1)..(219): unsure at all n locations
  Clone ID: LIB3166-024-P1-K1-H6
gtaaattatttggggccttacggtattcgattgtccctaaagggacccactaggaagggtttaccctaatggtctgaacccatgcgaggatatcaatnntgttcaactacctgtggtttccaaaggaatttattcctcctttttgccacttcaaagagggccaaagagattcttcaaaaggtgttaaattattgccatctgagttctgctgggaattct

SEQ ID NO: 26824 - DNA, 389 bp, Gossypium hirsutum
  Clone ID: LIB3166-024-P1-K1-H9
atatcatactccattcccatggcgttctccaccaccaagctattactcactgagctcgcaactacagttaaactggtgcctaccaattacatcagaccaatctccgaccctccaaacctggttgatgttcatgtatcagatgtttccatccctctgatcgaccttcaggacctccatggccccaaccgctctcatgttcttaaacagattgccctagcttgccaacatgatggtttctttcaggttaagaaccatggggtttcagaagccaccatcaacaacatgctgcgtttagctagagatttcttttatttaccggagagtgagcggttgaagaattactccgacgacccgtccgtcgccaaccggtttcaactagtttcaacgtt

SEQ ID NO: 26825 - DNA, 338 bp, Gossypium hirsutum
  Clone ID: LIB3166-025-P1-K1-A1
gtttcttcctcaccaaccgacctctagcactcctcttcaagcaccaattcacctgcctaaatggagaacggtgttttcatgccttgagggacatttttttagcctcatgatttcattttgactttgatttcgacgaaaccaaaagagatctacggcatgtttgcaaggtaagtcctctattttatttcattacactaaaaaaataacaagaaagaaatgaaacagattcgaagaacagaaatataaggtgcttgaaatcacctttcaataatttttgattgctcttctatttaatatgcatttctttgcgtgttcttttttttgtgagtaatatgcct

SEQ ID NO: 26826 - DNA, 393 bp, Gossypium hirsutum
  unsure (1)..(393): unsure at all n locations
  Clone ID: LIB3166-025-P1-K1-A12
ccgtccgtnngttggtggcttttgacgacacttgttatgtctatggagaaggggttcctgtggatgacaggtgacaatacctctggaagagattaaaataattagtgtcacagtatttgtaaatccgtacttggaacctgatgaagaggaagagaaagagaagagcaatggtgacaaggcagctgaggatgaagataatgataagattgggtcgtggtatagcaatccaggaacatgaacagcagaatccggagctgttggtagtggtggtgttggaaagtacttaaaggctaggaacacccaaagtgagtctgctactgctgataccaatataacagcaatttctgtaacgaagaaaaggaaagccactcctggagaatttaaagatttttc

SEQ ID NO: 26827 - DNA, 373 bp, Gossypium hirsutum
  Clone ID: LIB3166-025-P1-K1-B1
ccggtccggaaaggcccgggccggcccacgcgtccgcccacgcgtccgtttgaatatgattgttaactcgaatgaatagaaatggagatgtcagtcaaatgggacttaatagtagtaccatcattttcctgtatcttaatatattggatttttatttacatggtaggatattaaaatgacaaacaggaaggcacctcaacatattttgagcattgttttcgggttcagtagcagcaaatgatgccaatgtggttgagattggtgcggtgaagattgctctataatttacagccataatgtgaatctgatgtccatctataagggattgtcagattaagtgtcaaccttaactagaagataagtcatcaaagaa

SEQ ID NO: 26828 - DNA, 301 bp, Gossypium hirsutum
  Clone ID: LIB3166-025-P1-K1-B11
gagatatataaatccgcggatatcctggtattcaacaccggccatgggtggaatcatgagaaaacatccaaaggggaagattattaccaagaaggtgatcatgtttacgaggaattgaacgttgtcgaggcgtttcgaagagcactgacgacgtggtctaaatgggtggatgacaatgtaaatccttccaagactatggtgttcttcaggggttactctgctactcatttcagtggtgggcaatggaattccggaggtgtgtgcgattccgagatggagccaataaggaacgatacgttgc

SEQ ID NO: 26829 - DNA, 382 bp, Gossypium hirsutum
  Clone ID: LIB3166-025-P1-K1-B4
ttccaagtgaagttgtctgatagctcgtatccagattcaaccatttcatgtaaggggggcgtaaaagaggataaaaaacttcggctatccaaggtagaactaagcccagtgcgtgacatgtttatagacatatcatgcctggatatgggtctcgatttgaggctggcactgtcccacaagagaatcttaacttctatgactgaagatgagatgcaaagcattaaaaatctgattgattcagcggtcctagacccagatgtgaaaggtgggttgagatggccctttggaaaagcaacgagtggggatagatacagtgtcgttggcatttggcacacaatgtctactgcttataaaaactcatccataagactcaaggttcgat

SEQ ID NO: 26830 - DNA, 389 bp, Gossypium hirsutum
  Clone ID: LIB3166-025-P1-K1-B5
cgtccgtttttgtagtattagtactaaccctgttttctaagaccttgataacgggttcggcggggggcttaggagggaagatgattccaacggtggctttggcaatgggtgtttcaatgaaggaggactgaagaagagtggatatggtgatatactagcttcgttgttgttattagaagaagaagccaagcaagaagaagcagagtggatgagtgaatcccaacaagagaaagctttgtttgaatccaatcacaaaagaaaagttcaagcaatgaatgagttttacgatcagcttcaacaacattactctgaaactgtgaaaccatcttggaaatctgtttctgttttggctgccactgttgcaacgactttagggaatgacacgacaa

SEQ ID NO: 26831 - DNA, 381 bp, Gossypium hirsutum
  Clone ID: LIB3166-025-P1-K1-B6
cagctactttagggtgtttagtttttgtttaaggaagcaactcaagcagtgggggtgatgaatccttcaaaactggggtgagtggagacccgaacaatcaggtagcaaagcgtgccaaagtggaggaaggtccatcgtcatctcgtaaaccatcggagagccatggtggaagaagaaagggaggtagtttagggggagtgcttagaaagaaatacttctgctttatgccattttagatgggatggtaatttcagagaaagtaaattagcatggaatttagatgattaatgaaacatgttttttagattaagtactgttctgtatagcagcacctaaaactgcaaagtcactgcattagtcaaagtaatgagattcttattc

SEQ ID NO: 26832 - DNA, 391 bp, Gossypium hirsutum
  Clone ID: LIB3166-025-P1-K1-B7
cccacgcgtccgcccacgcgtccttccacgcgtccgctcccttcctcaaggccggtgcctctcctcctcatctctgcctcgctatctctatctctcgccattttctctccaaatgcaacaaaagccaaaaggtgtctatgataaaattccaatacataaaattccaattgatatgaacttacttcttcggggtttttggataccaaaggaacagggttcacaaaggcatgaaagaacatctggtagtggcataccagaatcatcacagggtcaaactgaacaaactagcatgaggaatcaatctgatagagaacacactgcctttggccttccagcagcagtttccttgggcaatgcttgatctagtagtagctttcaaaagacatagctg

SEQ ID NO: 26833 - DNA, 377 bp, Gossypium hirsutum
  Clone ID: LIB3166-025-P1-K1-C12
cagattctcatttgccagacaggttgattctaaatatcgtctcgctgatggtgagtccccttttaatatttatgggcaaatgccacagaaccatccttctggccaagattttacagacaacagggattcctatctaagcaaatttggagtttctaatggtttatattcctgtaactttgaggaatctgacaatttttctagtagtccttcagttttttccaataagctttctgcttcaagagctcaaattccagtccctcctggattctctgttcctagcagggcgccacctccaggcttttcttcaattgagagagtaaaccatgcttttgacgccacatcaggtaatcatttgatggactcttcatccctattaa

SEQ ID NO: 26834 - DNA, 384 bp, Gossypium hirsutum
  Clone ID: LIB3166-025-P1-K1-D1
cccacgcgtccgaacaggtataggttttaacaggatatctaaaatggccgaaagcgttggggggagcggctcaaacgacgatgatggtttcagggagcaagatcggttacttccgattgctaacgtcggccggataatgaagcaaatgctacctccgaatgcaaaaatctcaaaggaagccaaagaaactatgcaagaatgtgtttcggagttcattagcttcgtcacaagtgaagcatccgataagtgcagaaaggaaaggcgaaagactattaatggagaagatatttgttgggccttggttactctcggtttcgacgattatgcagcgccattgagaagatacttgaacaagtacagagaggtagaaggagataacaaagc

SEQ ID NO: 26835 - DNA, 398 bp, Gossypium hirsutum
  unsure (1)..(398): unsure at all n locations
  Clone ID: LIB3166-025-P1-K1-D10
cccgggcggcccacgcctcccaattcttgtattttaaaggttttttcctagtgaaatggctgtagttgggggcagatcacaaatattggcccacgcgtccgcccacgcgtncgttttcatttatgttttcagatcttctgaaattttttaatttttttaattgataccttaagcaatcttaggtttggaaaaaaccaaataataatatgttagtccactctaatctcattcttttttctttaatttcctttcattttttgtattgtcagttaatttcttctgctgttcaaagatgtcatttatccgaagatctttgccaattatcaatcgttctcaagagctctcctccaatcattcgagtttcaagtgaatacttttcagtgttcctttaatttttg

SEQ ID NO: 26836 - DNA, 384 bp, Gossypium hirsutum
  Clone ID: LIB3166-025-P1-K1-D5
cgcgtccgcttggtttgggtttttccttttttagcttaaaaaccatggatttgagccattggaagcgtgggcaaatcactcgaataggatctgggttttgtgtgttgctgacactgcatttcacattccagcttctagcacaacatctgtttcactggaaaaacccaaaggaacaaaaagctatagtgattattatacttatggctcctatttatgctgttgtttcctttgtagggttattagatgttcgtggtagcaaagagttcttcacattgttggagtcaatcaaggagtgttacgaggctttggtgattgcaaagttcttgtctttgatgtatagctacttgaacatatcaattagcaaaaatactgtgcctgatgaaa

SEQ ID NO: 26837 - DNA, 384 bp, Gossypium hirsutum
  Clone ID: LIB3166-025-P1-K1-D6
gacgcgtccgttaaatcttcatcagcctcacttctatttctttgaatccaattctcaaattccgttgtttgtacaagtcgaagctttttcttgtccgggttgttcttgaaatcttggtttcatttttggtatggatgaaatcgatgttcctccatttttcatctgccccatttctctcgagtttatgaaggatcctgttacggtttcaacagggattacgtacgacagggaaagcatcgagaagtggttgttttcagggaagaacactacatgccctgttacgaagcaagttattgttgattgtgaacttaccccgaatcatacccttagaagattgattcaatcttggtgcttgttaaatgcttctcatggaatcgaaagaat

SEQ ID NO: 26838 - DNA, 273 bp, Gossypium hirsutum
  Clone ID: LIB3166-025-P1-K1-D8
cccacgcgtccgggattatgttttttgaatctttccttttaatttaggggttgagagtttgatggttgatttatcgtcgatctgaaattgtgtttaagtaaccaaaagtctttaaaaagctaaagaataagtaatttgtgaacctaatttacataaaaatattggtttgcttttaacctattttattcggattcgagatgagtgccgtcaatatctgtatatgtattcggcatgaatgtcaatacgagttttttagaaaagatgaagaatcta

SEQ ID NO: 26839 - DNA, 204 bp, Gossypium hirsutum
  unsure (1)..(204): unsure at all n locations
  Clone ID: LIB3166-025-P1-K1-D9
cccacccgtccgtagaatttttgttcttcaatgctgaatctatccatncgttgtttatataagcgggttagtgagccataacaatgnttnnttaacatcaatgttgaaatttttaaacttcgacttacaacaaaatcttgggaaaacccttcaacaacattgtttaaccctttaaccatttattaactttaaaaaaaaatatcc

SEQ ID NO: 26840 - DNA, 431 bp, Gossypium hirsutum
  unsure (1)..(431): unsure at all n locations
  Clone ID: LIB3166-025-P1-K1-E11
ccgtccgtnnataatgccaggaaggacagtaggttattaatttttctctttttcttttcttgcttggcgctgagtttttgagattcnnttcctatcttttnncttttctgtgaatctgnnatggaatgcaagtggtatncggtcanntgtaagtaccgatnntagaaatatttggtcttncctgttgtntgcttattgtattntgttggtggagccccgccagtgtnncaagtcagattngaatatannntacgtggcttatgnnatgtctaaaatctaacctatcagnnngtgtttggttccaatannactaganngcttcttctannattggtttagtnntatgtaatgtnaatatnntttcaatttggttgatannaaaattttctttcctttttattggngctaacccgtcctanntttataggttg

SEQ ID NO: 26841 - DNA, 379 bp, Gossypium hirsutum
  Clone ID: LIB3166-025-P1-K1-E12
ctttgtcctatgagtaacatttagtgtaataaattcttgaatgccgttccttatgttatgaaatgtacagtctgtatgcttggttgaaaatctgtgcaatctacatccagacctttagtgtttgtctcaacgactctgatatgatattaaccactttagttttgtcagccaatacacaccgtctgctggtaacatacacaaatgcattttcatcttgaattcttttgatgtctcatccattactctggcaaaaagaaaaggaatcaacctggtatttgatgaacccattttgtaatctgtacttcatcttttaatcaacaacaattcttatgtttataattgctccattaatacctctttacactagcatatttgactg

SEQ ID NO: 26842 - DNA, 487 bp, Gossypium hirsutum
  unsure (1)..(487): unsure at all n locations
  Clone ID: LIB3166-025-P1-K1-E6
gcggaccgccgtggnngcgggaagaagacattagtgtctatnnactcggtngnncccaatacccaaaacgtgggctgnnngagttgtacttgggaccgnnataatannagggtcccccgaccttccgacttcttcnnccgaggctttacctcgtngnntagaaccccctgatccnnntgatganntggnnngaagatnnaatttgcnncggaaacccaaggggcgtataccccggaggggaattgcnntgaacccatcctcngnnacgattcaagaatccccggttaggtgggacccccagatcccgnngcgattcaaagggaccctcgannttcggtcaatcagggggagtttcgannagaagaagaatcttatntnntccggaacagnnngtggctttaccccggaaaccgatattngnngattccggagaaggtcgaggccccggagnnntagggtttcttatttttgaaagcttcggatgatg

SEQ ID NO: 26843 - DNA, 304 bp, Gossypium hirsutum
  Clone ID: LIB3166-025-P1-K1-F12
atctcatttaaacacaaattttctatcaacccccacaatgaaaaccaagtcggtttattcgagtgctggttgccccaacaacctcgacaacgacaacaaccaaaaccttcaagcatttcctcacaatcaacatctccataagtttgctgtaaatcctttaggcgacgaactcaccttctatgtctacaatatcaatagaaattcacacaagccctgattccccatcaatcaggttgttccaactcctggacgaatacgactttcactaaatccaagaaccccatgctcacgtagaatatgaata

SEQ ID NO: 26844 - DNA, 333 bp, Gossypium hirsutum
  Clone ID: LIB3166-025-P1-K1-F7
atttagagatctcttaatcggaattcaccttctatttttgctttctatgtcgtctgtatgcttgagtaaaaaagaacccttatacaatataaactcatcggctttatagccgaatgttcaaaaaaaagaaataaaagaatacaattttgttcttttttgtattggccattgttgctgttgtccttttgtccatttctttgcaggtacaggtgcgctggcgtcgtacagagactgtgctggcgtacgagggctgttgacgtggaggcacgaacgttgtacggcgcctggaggctgctgggggtgttgcggcccaagccaaggctgctagggttt

SEQ ID NO: 26845 - DNA, 373 bp, Gossypium hirsutum
  unsure (1)..(373): unsure at all n locations
  Clone ID: LIB3166-025-P1-K1-F8
tttccttttcattccactgcactgtaaccctagatgagaagaaatcggaggaggaggagttgaaagataaagaaaacgaanaggggagtaaggaggtttttgcgctttgttttccctcctttcttttacattgccttactaagatgccattggctgttcgctgaaataaagagataaaaaaaaggcgtaggaattttctcctataataccggtcgtccccttatcctacaccgacaattagagttagagtcaaatacaggtcaatctatcatgaaatcagcatcaattctcaagctacatttggttgcaagccacattggaacgcctggcagcaaaactagagtcagtgtataaagcatcagggggaaaaaga

SEQ ID NO: 26846 - DNA, 386 bp, Gossypium hirsutum
  unsure (1)..(386): unsure at all n locations
  Clone ID: LIB3166-025-P1-K1-G1
cccacgcgtccgctccaagtcctttttatttaaaaagtccgtgaacggagtttgtacgaggatgggagacgtttcacaggaaataaaaagagtgagagcacaaatggaagaaaatgaagatttggctatactaatgagaggacttcgtggccaaaatttacgggattcacagtttgctgatgacaatattcagcttcggttggttgaggttgatgaaagcagtgagttcttacctttggcatatgatccggctagcatctcagcatactgggggaaacggcctcatgctgttgcaactcgtatcatacagttactatctgttgctggnggtttcctctcacgcttggctatggatgtggtaaacaagaaggtcaaagagaatgaag

SEQ ID NO: 26847 - DNA, 377 bp, Gossypium hirsutum
  Clone ID: LIB3166-025-P1-K1-G10
cacggagtcgctgaatgacatgaaaaaggttaacactaagtatacttgtgatgtcaaggggggcaaattgaaagaaggggaaaagccaaaagatgagaaagaggaaaaagatggtaaagatgaatcccgaagtaatactaacaaagaattgaaagaaaagaggaagcctgaagagccttctctgaagcatcctggattgattctacaaacaaagtggagcaaggattctaaattgcgtccgttgtcactttcactggattcacttttggattatacagacaaggacattgaagaatccacatttgagctttcattatttgctgaggtgctttatgaaatgcttcagtatcaaatgggttgccgtattttaacatttc

SEQ ID NO: 26848 - DNA, 386 bp, Gossypium hirsutum
  Clone ID: LIB3166-025-P1-K1-G2
tttttatatcgttttttgtaatgttaattcgtctcttccttttattttttattgagcgttatctcacatggatacaatctaaatggacgaattcattagaccaaatcattgcatacaaataaaacatcaatatcagtatttgattgagctaagttcatgcaatttattttattatttatgaaaaaaaaaaatttcttttggtcaatcattgaattgaatgaagaaatcgactgaaatgggaatcattctatatctatataaagaacagcttttttaaaatcatagaccctaaattgataccataagaattcctattctaattaggactcataatattgaaattgaataaacaaaaacaatatcaagataaagataatattgatcgg

SEQ ID NO: 26849 - DNA, 381 bp, Gossypium hirsutum
  Clone ID: LIB3166-025-P1-K1-G8
cttcaaagtggccgattatgttagagaacactattgacgagcctgtagaactttggggagtgagaattttctgctcaaatccggcagattcgtttactttgtctctcatggagccaccttcagctgattcaaagtcagaacaaagccaaggattcttagaaggattctctcttgaggatcgagtacttcaatcccgggaaactcttaccatttggctgtcttgcaaaccgaaagacatgggtttgcacacaactgtagtacactttgatgtagatgataataggattgaacgagtagtgtttctattggctgaagataatgtctcccaatctctcgcttctactaagccttacaggagagctccaagaagaagaaatcact

SEQ ID NO: 26850 - DNA, 289 bp, Gossypium hirsutum
  Clone ID: LIB3166-025-P1-K1-H2
ctcacgtatgctgacttcatcatatttgttgcattgactatccaatttacattgtgcgtcatattaggtggcacaaacttaaatattaacccctctaccactcgcaaacaaatgaagctcgatacgatgacggaaatgctcacctacactcatgtaccaaggtcacctagatctgtgagggtcagagaccttgaacataggcccctgatgcgaaacatgaactcttgacctttataagtcaccattgtgtttggcactacagctgtaagcgtgatctcacttacgttta

SEQ ID NO: 26851 - DNA, 361 bp, Gossypium hirsutum
  unsure (1)..(361): unsure at all n locations
  Clone ID: LIB3166-025-P1-K1-H9
gaatccaagcagctcttgctgcagttggagctctgaaaatctggttgggagtgtacaggcttgctgaaacaggagaagcactggtatcttctgttgataaaatcatatttgtggatcaccggtgtgggaaagatgataatggaaaatgctgctggacccttataccagttacacttgagctcgggggaaagatgcctttattggtgcgaagacgtagatattcaacgtngcccaattgctgtcagggccgctctccaataagtgggcagaactgtgctggagctgagagattttatgttcacagggatatttataattcatttgtcaatcaagtgactaagattgtgaagtctgtttcagc

SEQ ID NO: 26852 - DNA, 213 bp, Gossypium hirsutum
  unsure (1)..(213): unsure at all n locations
  Clone ID: LIB3166-026-P1-K1-A3
cgcgnntccgcccaccgccgtccgctccaacgccgtcctttctctctgtcgtccgatacccaaagagtgcgagcgtgggagtgatagaatgattccgggatgacttcgacnnacccggtgtacccgttgganngttcgccggagggaatcaccgggaaggtgggtttcttgaagtggagggagcctttaataagaaagtncgaggggatttgg

SEQ ID NO: 26853 - DNA, 385 bp, Gossypium hirsutum
  Clone ID: LIB3166-026-P1-K1-A8
cggacgcgtgggcggacgtttgtgttagattttgaatgtaaatgtgaataatgggggagtaatgtatgtcaaagtgatcaccgatgaacagttggagactctcagaaagcaaattgctgtttatgccgacatttgtgagcatctcgttgagatgcataataaccttactgcccatcaagatctcgcaattggtaggctgggtagcctgtattgcgacctcgttaatgacatgtgctggtcacaaaattactgctagacagtgatggacaccaactccagtgcagctttagattctggcacgagatttttatcagacgactggaactgcaagcgagcctatgatacaagatgtaacctcataactgaatcatcatggccaaattta

SEQ ID NO: 26854 - DNA, 326 bp, Gossypium hirsutum
  Clone ID: LIB3166-026-P1-K1-B3
ctggatcacaagcaggaggagagtctttttgaagatatttcatctgcactttgcgagcttacgcagctttgtgaatacttgaacgatagcaatatgaatcgtaacttgaatgaaattaactcagattcttctgaacaaaatgatacaatgcagaagtacattcagaaagccacagagctgcagggcatgtgtaaatccattagagtaacactggatcaacatgtgttccgagaagaacttgagctctggccgttgtttgacaggcatttttctgtggaggagcaggacaagattgttggtcgaattattggtactacaggtgcaga

SEQ ID NO: 26855 - DNA, 442 bp, Gossypium hirsutum
  unsure (1)..(442): unsure at all n locations
  Clone ID: LIB3166-026-P1-K1-B4
ccgtccgttacccanccattctgcataccatcgtgatgagtatgttacaacgatanntttcaaaagatgtgtctcgttccacgaattgagcgataaacgctctanttcaatcataccggatgttaccttctatcaatgggtgttgggattcgctatatnatcttgcaccacgatgtncgttgagaatgccttctaatgatcntgaattctcttgatgcgtgaagatatttgagaccatcccctgcaaacacaggtnccttgctactggagacgttgccttcagctttagcannataggaaaagaaacgcatgngtgctttaaaacttggatctctggagggagannngcaagattgcacctagtcccaaaaagtgggagaatccccaatacccatcaaaccgattcccaattacctgtannaaaatagctgcaccttgacac

SEQ ID NO: 26856 - DNA, 380 bp, Gossypium hirsutum
  Clone ID: LIB3166-026-P1-K1-B6
tttagattttttttcaagttgcactatttcagctccttccagcgtcctatcagatagcgatgtttgactccttactcctttgctttagttttaaccccttagttgatcacctatcagcatctgtttttggagagatcttggtcttgatttgcatcctaatgtgctttttagattgattaattacaaggttcctataaataaggctgattttctagctgaagttctaagtaagtggaaagtattgggttttttttttatttagggagaaagaaaaaatatggaaacgaaagagaaaaagttcctgacggtcgctccctttgagtgtgcttggataaaggatctgaaattccgtgaagctggcagaggatgtgtatcattcg

SEQ ID NO: 26857 - DNA, 360 bp, Gossypium hirsutum
  Clone ID: LIB3166-026-P1-K1-B7
ctcatacctatacctttttctctttcagcctcaaatggccaaaaccaacctcattgtacccgctgccattctcgccgtccttttgtttgctaacgggatcaagttttccgaggaagtccgggttttgaagcggaccataaaacacatcatcattccagtctaaatgtgaacgtcaagggtgacgttttaccagatggatccgccactgtcaacaatgtccaaaaagctgcctatcgcaccgacgctttccgttccacgactcccggtcacagtcccggcgctggtcactagaataactagatttatcacacgaaatattatattattttcattttaagtacgtactgctatcttataata

SEQ ID NO: 26858 - DNA, 176 bp, Gossypium hirsutum
  Clone ID: LIB3166-026-P1-K1-B9
acaataacaaaaaaaactcgaacgggcatgaaaataaattacattctattggacaaaatgatacaatgcagaactacattcaaaaaggcacagagctgcaggggaggtgcctatgcagtacaaccacactggatcaacatgaggcccgcgaagaacatgaactctggccgtagttg

SEQ ID NO: 26859 - DNA, 279 bp, Gossypium hirsutum
  unsure (1)..(279): unsure at all n locations
  Clone ID: LIB3166-026-P1-K1-C10
ggaaaaaagggcgggggacaaacggacaaaaaaaaataaaaagtactaaaaaaaaaaaaaaaaaaacccgcccttttttacaactcgcccccccccccaaaccaatagagaacaaagcaagtgaagcacaacatcttgataacaaaatataaacacaatccctattncagacctccatactattcataaacagagaaaagaaatcaaattctaccaaaaactcacgatataacacaaatcatatctaatttacaacttactgctcagaaaaatctctat

SEQ ID NO: 26860 - DNA, 461 bp, Gossypium hirsutum
  unsure (1)..(461): unsure at all n locations
  Clone ID: LIB3166-026-P1-K1-C11
cccacgccgtccggcaaccttattgcttctacttcagcgtttttcttttcttttttgaaagaatttcgtaaacggggaaaatgtggaacgtgaagctttgggattgtgacggaaacccccacgatttctttggcccttacatgnngatttagaacaacgnntggagctgattcttcannagacacanngatatgagacccccaaattggcttannaatcggtattttggnnaaaacgatagatatttcgtttacccccaganttgcgccgtnnttccagcttttcaggggannaatccganntgtcgaagcgggatcttttcgatccttcctnttattacgacgtgnngtttcaattcacatgaagggaatttaccgactttttacacaaattnnttgatgaatggtcttgctttattatcgannagatattatttaattaaacaagggggacctttcgat

SEQ ID NO: 26861 - DNA, 442 bp, Gossypium hirsutum
  unsure (1)..(442): unsure at all n locations
  Clone ID: LIB3166-026-P1-K1-C4
aaagaaaacaaaatcnngcagatttcgtttgtgttttacgcnnttcacggtgtaacaagatttttatgtcgaggaaaaaaaaatggggtgtcagnnggttcggcnnattaagcgccgnngcagccaaaccaagcgnngagcaattgagtgaaatgatgtgcgaaccatttaattttcaacgaaagaaatcgttttgtgggccagccccatcgatgctttatacctcgaggcgattaccgttanntgccccaatgttcctgtatanttggaccgaatcgcgcctcttttgccanntcgcagacggaatgattgtgtttgaaagtggaagaaggatttgccggcgagctattcagctcgactacaattctgtcaaggcacactacatgttgggacttgccttacttcagaagcaaaaattagatgaaggggtcaaggaactaca

SEQ ID NO: 26862 - DNA, 330 bp, Gossypium hirsutum
  unsure (1)..(330): unsure at all n locations
  Clone ID: LIB3166-026-P1-K1-C9
gaaaaaaaaaaaaaaaaaatttagtgttaaaaaaaaaaaaaaaaaaaactggccgttttaattaaaattttggccgcccaaaccactaacnaacnatcaaccctcccgctataaattccccctttgtttacctctaatttaattcaaagaacaagtccttttctttctaacgctcttgtctccgttttatcttctctctcccgtttttctttttttctagatctgcctctccctctcttgatcctttttttccctctctttttaacatttcgtttaaattgaatggattatgtttaaaaacatttttcacacccttcgatccgtttttat

SEQ ID NO: 26863 - DNA, 386 bp, Gossypium hirsutum
  unsure (1)..(386): unsure at all n locations
  Clone ID: LIB3166-026-P1-K1-D5
cgcgtccggngacaggganactatatatcttgtggttttgggcttacaagtgattgaaagggggggggaagctgattttatcttagcccatgacaccgaagccttggggcttccttcaggtttggtacgtcctatgagtcttgacggccttgagaaaatattagagcattgggcagctaaaaagattccaatggtgggagctaatccggactttgtgactgttgaagctagagctttgagtattatgcctggtaccttggcagacaaatatgagaagctcggtggtgaagtgaaatggatggggaaaccacataagataatatatgaatcaaccatggccatggttggtgtggaagcttctgattctattgctgtacgtgactctc

SEQ ID NO: 26864 - DNA, 419 bp, Gossypium hirsutum
  unsure (1)..(419): unsure at all n locations
  Clone ID: LIB3166-026-P1-K1-D6
cgggtccgacccacgccgtccgattttnnttttttccaaatattctcgaaatcttttttttcggtccaacattcgtcgttcacacgttggagttcgcagncgatgtncgaaccgacgttcgccgataagcgtacatnccctcttttgatacgcttggttatttttttttaaatttcaagattttttttgtttgaatctcattttgactggctattcaacgagatccgtgctaaattaatttgaaaatttccttctaatttatcgatctggttttgtttctttgtctatttgcatgttatcgtgccgatctattgtttttacaagtttaatttgggttctttttatttattatgagaatttcgcattctgattctctcaatttagatttcccccttttagtaagatctttggagattatt

SEQ ID NO: 26865 - DNA, 382 bp, Gossypium hirsutum
  Clone ID: LIB3166-026-P1-K1-E1
gacgaaaataagtaggaataggttttctatcagttcatgtatttgttttgtttgttttttttccttttatctcgatttgttgcgatactatatcggggaactgcagaaggggaaaagggtttaagaagaagatggagttaggctggaaattatcaggatcaagggtcagatttaagtaatgaattcattctctgtgcccatgtggatttggtatatgtacgagctatcgctagtatgttgctggtattgattgagaagtcatatcctaaaggctttcttctctccagcgcaatttattcagaattttactgctaggggtagttgtaatcttttgtttgtttcggcagatacttgcatgttgctttattgagcttggttgtag

SEQ ID NO: 26866 - DNA, 374 bp, Gossypium hirsutum
  Clone ID: LIB3166-026-P1-K1-E11
atggaggagaaagaaacaatttttggttgatcaaatttggtaggtcggatgataaataaatgacaagcctttgctggtcttgcttttggcagtttctgtttatcagaggggaatttccattctactattccgcttttacacttcagaatcttctcccttcagttctcaaatggaaaagttgataaatttagaattttttttggaaaaacaatttcgttgccataacatttttaatcccaataataaatctgtaaaagaattgtaaattagcctaattccttaatttgtcttataattgggtaacaaacaaaattttagaagtttttctctttgccttttcgtatatgtgtttcaaagtttgaccttccactttt

SEQ ID NO: 26867 - DNA, 386 bp, Gossypium hirsutum
  Clone ID: LIB3166-026-P1-K1-E2
cttcagccgaaaccaacataaagtatctgctggatcgccaatctcaagacccgcaaatgggaaaaaataaagaggtaaagttacctatactcggcgtataatttggaaggttcaattccaagaaatgaaaatcgaaaaaaaaaaaaacaaaaacaaaaaagggaaacaaaagttagggttcatttactacaggcaaggccaagacactaatacatagccaatcacttggtacctccacttccacttccacttcaacttcagcttcaatttcaacactcctgttttgctttctgtttggttttccctcttaaacagttgcattgtctttccgcagagtctggcttgatttctttttcattaatctgcattgtgattggaggtgaata

SEQ ID NO: 26868 - DNA, 279 bp, Gossypium hirsutum
  Clone ID: LIB3166-026-P1-K1-E5
gaaaccggcgacccacgcgcgctgacagctccaagtttttctaaacgaactgagctggtccctttggacagtatatgtcatcgcagacagacggcagacatagaccaggatgggaccaagatcatttaagcatcgctgccccacacaggcggtaccctggggattcaccccctacttgtctacactgggcaagaagggctgcaggggatgcaagtggctttggatatattacacaaggctggaaaggccattgcacctgtgagacctttgtcatggaca

SEQ ID NO: 26869 - DNA, 375 bp, Gossypium hirsutum
  Clone ID: LIB3166-026-P1-K1-F12
aaggaactaaaaaggtcaaatgttttagtagaaagggaagttctaggaaatctggtcgagattcagctgagaagaaagagccagtgacgcttagtagtgataggcctacaagggaaaggaaagtcgtagaaaggttttcagatcctcttgttgcaaggtcttcctcgtttaaaactgtcaattggaagggtatgctttcttttctggggttaaggcatgggttcatcacctgcaccacttccgtccaacgatggtactgccattgatcaaggagttgcttacattctccttttgcttgctctagcgattacctatctcatccattgatgatctttttttatattttatttttattggtatatgagctataaatga

SEQ ID NO: 26870 - DNA, 368 bp, Gossypium hirsutum
  Clone ID: LIB3166-026-P1-K1-G10
gacaattagatattcagattttaatacatgggctaagattccctccgatggccggggaacttggcaggctgctcctggagtctttggcaatgcaccggccactgctattaagcatggataccggcatatagactgtgctcaagtatatgggaacgagaaagagattggcttggttctaaagaagctctctgaagatggtgcggcgaagcgagatgaactttggatcactaacaagctatggaacactaatcatgcaccgccagacgtaccaaaggcatcgaatggtacttagccagatctgcatctggactatatagatctatatctgatgcactgcccgaacatcctgcgaatgctagcaagccact

SEQ ID NO: 26871 - DNA, 322 bp, Gossypium hirsutum
  unsure (1)..(322): unsure at all n locations
  Clone ID: LIB3166-026-P1-K1-G9
ggggggggggcggaaaaaaaaaaaaaataaaaaaannatgnataaaaaaaaaaaaaaaaaaacaccgccctttttttttatgcagggccccccacccaancngannaactaaaagaaacaagggctgcaggtccactgcctgaagagacgagtctaaccgcgctaacttatggaggttaccttcattagaagataaagtgcatgaagagcctcgctaaatctgagctgcatgaaaggaagatggatctaactgttctgattgatggggacacccaacagaaccacgatgcacttgcacagttgacagctagaagaattcttt

SEQ ID NO: 26872 - DNA, 354 bp, Gossypium hirsutum
  Clone ID: LIB3166-026-P1-K1-H10
gtctttggtcaaagcttggtttttcatggtgtgtttctttctttacttgggctgaaaccgttaatggaagaaattacatgcaataactgttaatggctgactacgatattagcaaaagaaacatggcaaccatgagaaaatttccatgtatttccttgcttcttttttcatgtttttacatgcaggtttacaatggaacagttgcagccactgatacccttttccaatgtcaaatcatgacggcctcaggtctgttaacatcttctggaaatgcctttgagttgggattcttttcaactggctcaactaatctgtatttggtgattcggatgaagaatgttgcaaccaaggata

SEQ ID NO: 26873 - DNA, 201 bp, Gossypium hirsutum
  Clone ID: LIB3166-026-P1-K1-H7
tgggctccttttgaggctgcatgaccggggtaacgacatcctaccgttaaacgaccgcgctggccgatcagtgccatggtcgattgggactggtaccctctaccgcttaaaacgggtctttgccttggaacgtgaacagttatggacgccactcttactagcttgtccggttgcttccgcctgttcaccgtaccgccaggc

SEQ ID NO: 26874 - DNA, 383 bp, Gossypium hirsutum
  Clone ID: LIB3166-026-P1-K1-H8
gttcccgttggtggtgtgattgtttgtttcaaaaccccataacacatctggatttcatgtgactgtagttgagagttttattgaacatcaagatgcttgccatatggggcgtgtaatacggccagaatcacaaggggtgcagttggcttgcttgtcacgaacagcttcaagccccagtccctccaatgataccaatttcagtacagctccttgcccttggcctagtttggcgttaccgaagacaaaggatgccatgttcttgagccctacaaaatatcataattcccctaaaaatgcgctctcccacaatttggagcttcaactcttgaccacatcaaatcccagtgaggtatcagtttcacccaaaaaacatgataacgatc

SEQ ID NO: 26875 - DNA, 259 bp, Gossypium hirsutum
  Clone ID: LIB3166-027-P1-K1-A10
caatcatccattgccaccaatctagctagaaagctgccatcatcgctctgtggggtttcctcatctcctattaccaaatccactactgtcatctcaccctcgtcaatcagccatagcgcgacccttactcatgtagtcctcgaaaatctctacctcatcaacaactatcaacaggatcaaactctccatactgtaagcttgagatagaagataacaggactggtatcagccgtgatagacgccgacaacgaccgtaaac

SEQ ID NO: 26876 - DNA, 410 bp, Gossypium hirsutum
  Clone ID: LIB3166-027-P1-K1-A11
ggtaaggaatgggcggggcgacgccacgcgtccgcccacgcgttcgataacgcagtttagctacagtggcataggtaggcgggggggggactatcgttagaacatgtgtaagtgtccccaccccaaaagcgtgcagtccgtattaacattctattcactgctatatgtgacactgatgtatactactgcgcgtgtcagggttacactcctttgtcacctcatatactcggtcatgacaccaaaagcatcgactagaacttgggtgtttggtgagattgcatcgcaaccggatacacatgagcttccgatgatggggctggagtgcaagatatgtaatctctgcttgacagatccaaaccactgactttgcttaactactttctgattaacggcgcaccttctttttctgc

SEQ ID NO: 26877 - DNA, 310 bp, Gossypium hirsutum
  Clone ID: LIB3166-027-P1-K1-A12
cccacgcgttcggaaaagcgctttaaagagagggggagggggctgagtcagtggggcttgtcgagtgaccgagtcaaatatccaaaaaaattaatctcaaaacccacccttccaagttacagcccacacccaaacgataaaaaggaaaacacatgggtggtgtgtctaccgcaaaattttgctttaccagcaaataattgttactataacaacatatgcctacacttgtctttcggtaaagcctctttttctttttaacccttccattaccatatgtttcctttcctgtttttttccctttaactaccaa

SEQ ID NO: 26878 - DNA, 389 bp, Gossypium hirsutum
  Clone ID: LIB3166-027-P1-K1-A6
cccacgcgtccgctttggaataagatttaaacacacttctcacttcttcatctgttgatttctaatgagaactccttcactttccagcttttgtttctgtccagtatttgtaagcaaattaaagaagccgagcaagggaaaagctaaatcatcgcttccccaacatctgtaccgtcgattttcactccacgagatcagagttgccaccaaaaactttgactcccacttggttcttggtaaaggtagcagcgcagtagtatacaaaggatttttcgatgatggggcttcggttttcgctgtcaaatatttgcagcacggatcctcacgacagacaatgcttaagactttctaaatgaggcgcagctactttgccagctgcgccaccaaca

SEQ ID NO: 26879 - DNA, 376 bp, Gossypium hirsutum
  unsure (1)..(376): unsure at all n locations
  Clone ID: LIB3166-027-P1-K1-B1
cccagccaaagtgaaacgtttgttgcttccaactaagctctctggtaatggtggtggaaagaaggtttcgaagactgacgaatcttcaccgagtttgatgaatttgctaatgggggtcaaagttttgcagcaggcaattattgatctactcttggatataatggtggaatgttgccaaccctcaggagtagcacgtggtgattcttcagatgcaaactctaaaccttcttccgatggtggggaagctgctagcccactggactgtgatcaggaaaatggcactgtggcatctgctcaatttcctacgaacgaaaggttggattcttgtgtggatgatggtagcactgcctctgncgtgccaagctctgacatgaat

SEQ ID NO: 26880 - DNA, 233 bp, Gossypium hirsutum
  unsure (1)..(233): unsure at all n locations
  Clone ID: LIB3166-027-P1-K1-B10
gaanggggggggcgacgccacgcgtgcggaanaacaatacnttgaagctttttttcgaggggaagacccctgttctgtggaggtggtcatacatgatctcttcccatgccgctccttaggttgctatgccttatactgacaagctcgccgagttatttaagtaaagctttgtcataataacggtccctatcgctgctacttaaatgccttataacaaaaattatcacatttat

SEQ ID NO: 26881 - DNA, 336 bp, Gossypium hirsutum
  Clone ID: LIB3166-027-P1-K1-B8
gacatttcttctatctcatttcttagtccagaagatttttgctgtattgggacgaacctctgattccaagaccttgataacaggttcaacaaaaggcgttagaaggaagatgattccaacggtggctttgtcaatgggtgcttcaatgaacaaggaccgaaaaagagtggatatggcgatatactagcttcgacgttgttattagaagaagaagccaagcaagaagaagcagagtggatgagtgaatcccaacaagagaaatcttcgcttgtatccaatgacaaaagaacagctcatgctatgaatgagttctacgatcagctttaacaacattac

SEQ ID NO: 26882 - DNA, 259 bp, Gossypium hirsutum
  Clone ID: LIB3166-027-P1-K1-C10
cccacgcgtcctataaaaagctttttataaactaaggtgatttcatatttattgtttcgtgttctgatttagtttttttttctttgttcctacatatagatttttcacagaaaaataaggagaaaatgacttaccttaatgctgtctccttcatgtctttgcttgcttcgtcgtaatttaagcttaagcgagaatcttgaagcttcttattggactcgtggtctaacaatgccagattattcctttatgcgatgttcat

SEQ ID NO: 26883 - DNA, 268 bp, Gossypium hirsutum
  Clone ID: LIB3166-027-P1-K1-C9
gaatggggggggcgacgcacgcgtccgctcttcttatcttcaacacttttttctaaaaagcaccaatttccggaggtggcgggcctcatcgtagtgacttaactcccaatggtaactcccttcatagggtaccgtccatggccttacttaaaacttttcttctccaatttaacgttgggaagcatcaaaaaactcgggggctcatcagacttcggccaaatgagattccatatgggaccagttctcaccgtcgacattaacgtgcaca

SEQ ID NO: 26884 - DNA, 181 bp, Gossypium hirsutum
  Clone ID: LIB3166-027-P1-K1-D1
cccacccgttcgatgtgactattgttgttatgggcaacggtggagttcggacgtgagagagtttgaaatgtgtaacagaagaggagcgctatcgcgcaacagatcaatcagttggagcagctgacaccagtgagggtcacacgctcacgggctaggattgcattgtatgtgagtgattcac

SEQ ID NO: 26885 - DNA, 386 bp, Gossypium hirsutum
  Clone ID: LIB3166-027-P1-K1-D7
aaaaaatgttttcctcttcccctactctccgtcccctcagctctctcatacggtgagtcctctgtcgatcttcagccaccactcccaccgctccaaaagcaaccatgttctctagataagttgactctcttcttaccaatccttcagttaaagtgatatgagcaaccgtatttgcttctctgtttgtaaagaggaagacgcaggtctgaaatcctaagctaatacttttagaaccgtttatgagtgcagcaatctcagatctatcctcattttcttcttgaagctttcgaatcaccgttcaagaatcaccctcgatctccacctccctcatatccggttgtaaacccagttgtagcgcttgaagcacgccaccactttagcagcga

SEQ ID NO: 26886 - DNA, 246 bp, Gossypium hirsutum
  Clone ID: LIB3166-027-P1-K1-D8
caaacacgtggtgccttgcctattttcttatccctggcatgtgtttcaggagcaaatccttctataggtgcacatacaccactcccaccaccaaaaaagctagcatgagaaagacgataagcctgaaaaagtgccaaccaatcgcttaatctaataagaagcaccaaccaggatcgcatgaacttgatgaagaggaagacgcagctctattttactaacaacctacttcccgttccggtaattact

SEQ ID NO: 26887 - DNA, 379 bp, Gossypium hirsutum
  Clone ID: LIB3166-027-P1-K1-E1
ctccggagcaattcgtgtgcatgacaacatgcttttggctgcctcggaagccgtggctaaacaagtatctgacgaaaactacaacaagggccttatttatccaccattctctaacattaggaaaatttcagctaatatagctgctaacgttgctgccaaagcatatgaactcggtgtggcaactcatctcccccgtcctgccaatcttgtgaagtatgccgagagctgcatgtactcgcctgtctaccgtagttacaggtaaattttcgtgcaccattttcgtatataatagcttcatcttgaagctcatggtatgctgtatatgttgtctaatagaccaaaaaatatgacttgggttgtgaaatgtttactgttatga

SEQ ID NO: 26888 - DNA, 340 bp, Gossypium hirsutum
  Clone ID: LIB3166-027-P1-K1-E11
ggaatggccctcaagtacgcagaactgaaaccggtgccatgcttgacttattcggatgctcaaatgttgagggaaaccgctgccactcctatccttaagcagctttcattaggtaaggaatgatgttacaagatatcgctacggggatgaacagcatttggatgaggcattgaaacggattttccagtttggtctgggcggaggaattcctcggagaaatgcacctattcttcaaatgatccgagaagaagtcacagaagatggtaaatattggttagtcctggtgtttgaggctaaagctttggaagtgtcggatttcgaaaagagacaagcaaaattt

SEQ ID NO: 26889 - DNA, 394 bp, Gossypium hirsutum
  Clone ID: LIB3166-027-P1-K1-E5
ctcaccaccaccaccgtcacctgctttttgtattgagccacctacaccaccaccgggggccatgcaccgtgtgtcgagtacacaccatcaccctcacccccaccaccattaccataacccacacccccaattcactacagaccaactcgcatcacctgtacccacacgcgcaccaatccattatcattgacctacaccaccatcacctacaccgggtcccgtatacgaagggccactgccacctgtaatcggagtataatacgctccaccttcaccgacacctttctattggtgctttcaagaatttacctctaacctcggttaaaaaaaaaccgcccaaaaagacgagaaatttttttccataaattatttcgtgttcggagttgtgtaaaaa

SEQ ID NO: 26890 - DNA, 231 bp, Gossypium hirsutum
  Clone ID: LIB3166-027-P1-K1-E7
gaatgatctaaacaattactttttttggttccacaagatactcacgcgagagtagagatagaaaaatgatcaaagagaacatattgaggacttcaactaagctccagaagactactaatactaatactttcaataatattgctcacaccaaccacaagaagttacttcaagctctccctaatgaattacttcacaagaacaagttattatgatcacaataatacctccaca

SEQ ID NO: 26891 - DNA, 391 bp, Gossypium hirsutum
  Clone ID: LIB3166-027-P1-K1-F2
gtccgttctgctaaatcttctcccctttccttttccccttccccttccccttccccttgcggtttccctttccctttccctttcccttccccttgggttttaaatcagtgccattgtcaggtaccctcctttatattctctctagtctacccatttttatctcttggatgattctgatctttgttatctatctttctttttttttttcaatctcttagcaaatttgcataacgatccaagaattatttgtcctgtttaagcagtacaactagtgcagtaggaatttacagattgcgcctattatcaccctcattgatatgcactttttttgagttgatctccattcttgtttttggttttatcttttaattctttttctcgctattctcat

SEQ ID NO: 26892 - DNA, 379 bp, Gossypium hirsutum
  Clone ID: LIB3166-027-P1-K1-F4
cccacgcgtccgaaatggaagtgctcttgacgaacttgtgatgagacttagagaaaagctactagatgctgagagaaagaaggaacggcaaacagatatctcggatgagaatacttcagaagaaccagttccaattgaaactaatgatgaagaagctgttatcgccattgaagcttaagtgtgcttagatttgaactgtaactgccattgcatattctgttggataagtagtagatatttcagaggatacaaggatggaaggatttggaggtcctctaattcatagccacatttgaacccttgttaaggtcgacattaggggcttggattgacagcattgtagctcgagtttattggccgtgtttgtgcatgtgggggt

SEQ ID NO: 26893 - DNA, 316 bp, Gossypium hirsutum
  unsure (1)..(316): unsure at all n locations
  Clone ID: LIB3166-027-P1-K1-F7
cccacgcgtccgcatggctaccattccttcagctttcatcattttcttggggggggtagtgttggctttcataagaaggccaaaagtggtgaatgacattaagtttggaccttcagaaatggagattgtaaaaataactggtcattcatggaaggaaggatttatcaaggggacaattcctcaactacctttatcagtactgaactcggtgattgctgtctgtaagttgtcatcagatctttttccaggaagggaattctcggccacctcggtttctgtaaccgtggggctaatgaacttgngggggtgtgggttt

SEQ ID NO: 26894 - DNA, 224 bp, Gossypium hirsutum
  Clone ID: LIB3166-027-P1-K1-F9
ctcctttacagttcaattattcaactcatgtctttctctcagtactttgccgttagttgttgactgaattagcacctacaagaagaattaataaggcatgggagcttgctcattcaatcattatagaagcctgagcttctttgtttatttatggcatcacgggatggtgcatctgatgagggagagcgtgatagtgatgaagaagtatcagcgcaatcactgca

SEQ ID NO: 26895 - DNA, 373 bp, Gossypium hirsutum
  Clone ID: LIB3166-027-P1-K1-G12
cgccatcgtccataattacacttttttccctttttctttctccctctctgggagctgcttcttcttttccgtctcttctctcctttttccccttaataaccaaatgaggaatggtgctaataaaaaagcctcttctcattatcaatatgagaatcactttaaggcttcttcttcttcacaagataatctcaacaacaacaaccttaaaccttctcccaaatctaagcttgctaagaccttcaagccttatccctagccttattatttctaatataagcgtaactttcaagatttatttaaagcttcattccctgttctaacagaatgatatcaacttgactttgtttaccaattcaactaaactttttaattt

SEQ ID NO: 26896 - DNA, 378 bp, Gossypium hirsutum
  Clone ID: LIB3166-027-P1-K1-G3
attccctttactttcccccaatgcagattacccccgaacgtttagttccccaggcctggaatctccaaatcccctaaaatttcccccaattggatatcctcaaatcgatttctcaaaatccccaaatcaaaatacctttgattttcgccaaagtccctttgatttgctctgctaaaaatatcagtagttttcccataacccttaacctcgatctatttcccaaattttttttctgtgaatcttctttgtatcttgcattcgccggcagtctccaggaagctatcgtcgtcagatcagctaaaaactatagcctgaagttcaaacactaaaaatttgcagacgacaatctgcaatggtcccaaatgaataagcctgcct

SEQ ID NO: 26897 - DNA, 198 bp, Gossypium hirsutum
  Clone ID: LIB3166-027-P1-K1-G4
agccactatcgatagaaagtggaagtggcaccaccccaaaagcatgaatcgagaagatttttactgtttatgacactgatgtatactactgaggtagggtcactcttgttctgatctggcataacctaggatcgggagagtgggtgagggggaagttgaccgggaagtctccttcttacgggaatgcaagagtcccct

SEQ ID NO: 26898 - DNA, 269 bp, Gossypium hirsutum
  Clone ID: LIB3166-027-P1-K1-G8
gcaaatcattgccgaggccacctttttatcagcgggcgcacgggccctaactgaacggttttacatgcttgatgacaaacacatggatgaccttgattctgaatccgcgctcgacatcgacagccgcggggagattatctatgccatgtcatctgcagaaaacaggtggggacatcatattgagaggctgataagacatagctgcagagtatgtattccactgtgcctggcatcagatattaaaactatagtatggaagtgcacgattc

SEQ ID NO: 26899 - DNA, 339 bp, Gossypium hirsutum
  Clone ID: LIB3166-027-P1-K1-H10
ctttctttgtggtatctgaacttattaaagcggtgaatagtgttcgccgagagggctgccaaaaatcccccgagtatcaagtgtttttgaatgatcttcctgggaatgacttcaacaccattttcaggtccttgtctatcttccagaacaaactgagggagcaacttggacccggcattggaccatgttttttcactggagtacctggttctttctacggaaggcttttcaggaaaaacagccttcattttgtacactcttcctataatctgcaatggctctctcaggttcctcgagggctggaaaataataaagggaacattttacatggctagcaca

SEQ ID NO: 26900 - DNA, 370 bp, Gossypium hirsutum
  Clone ID: LIB3166-027-P1-K1-H2
atttcacttaataaccacattccttaaattcccatttctgagtctcaaagttcgcggtaatggcgtcgaaaagaatactgaaggagctgaaggatttgcagagagatccaccaacgtcatgcagtgcaggtcccgtagctgaggatatgttccattggcaagcaaccatcattggtccaaacgatagtccctatgctggtggtgtttttcttgtaaccattcatttcccacctgattatccatttaaacctcccaagcctgttttcaggttgccttcaggaccaaggtttaccatcccaacataaacagcaatggcaatatctgcttagacattctcaaagagcaatggagtcctgcactcaccatatct

SEQ ID NO: 26901 - DNA, 302 bp, Gossypium hirsutum
  Clone ID: LIB3166-028-P1-K1-A12
gtaatgtgtataatcaatttacattttaattaaagaagctactttataaacgcgtggacatactacatgagaatacttctttggaacaacgttgacctgaagaaaatgcttattgatccaaaaacccaatttttcatacacaaaacacctatttccctctatgccctaaactcgacctaatcacaatactcaggcctcacacttatgctggttgaataatacaactcttccaacatgacaaataaagtgtgctccaactcctcaaggataaccacaggatttatggcccttcattataacac

SEQ ID NO: 26902 - DNA, 301 bp, Gossypium hirsutum
  Clone ID: LIB3166-028-P1-K1-A3
tttcggcatagaacaacatgcgacacacgtggcatcaccacctacatttgtgcgggggtcacctccgagtacggtttctaatccgcttgtgcaagatgctcaattacgtgatgaaagacttgcactcttttcaacattccaaattccaacttcatcggctccatcatcatcatcatcatcacgcaaaggacggtgtgttaggatgaagtttggccttaaaccggccaccgttggactagaaggtttcgatcgcctaaacacagatcgccgaatttccagcattcctgctacggcctaaaac

SEQ ID NO: 26903 - DNA, 207 bp, Gossypium hirsutum
  unsure (1)..(207): unsure at all n locations
  Clone ID: LIB3166-028-P1-K1-A8
tcgnggacgcgtgggtctatcttctttatttgatgtgagaaggatctttcggccggtgttctccacctagaagcgttaacaatacgattggacaaaaagctcaactacgtgatggaagacgagcacccttttcaacattccagattccaacttcatcggctccatcatcatcatcatcatcacgcaaaggacggtgtgttaggatga

SEQ ID NO: 26904 - DNA, 351 bp, Gossypium hirsutum
  Clone ID: LIB3166-028-P1-K1-B11
cccacgcgtacgaaaaatcatttttctgaaattttcctccatggttatcggcgccaagtttatcatacttctctatacatttctctctataggactcaatccatcacgagcacaaacctgcattcaagctggttaatggtattcccactcttaattccccatagcccatataaattcagctcttttcacacaccttatttgcgcttttgctaacatcaatgcctcattctatcaactttcctttttttattcccctgaccaacacttatctacttttacaaacacaagcaaacaaaaaaacccatcagtcaccacgcttttatccattctatgaggaaacgcaaaccattc

SEQ ID NO: 26905 - DNA, 364 bp, Gossypium hirsutum
  Clone ID: LIB3166-028-P1-K1-B12
gtgcttcctatcttcacccgaaaatgcaacgaatgtcaccactgtctgtcaggggaaagcaataacatgtgcgaactgattacgatcaactgggactcgaggtgttatgccttgatgatggcaaaaccagattttccatcaacgggatcatctatataccactgggatggaacactgacttttaaccaatctactgaccaacatggtagccacagtgacaagatcagaacaaccgacacatttgataaaggcacaactaatagctgtgggatatgtacaggttgacgggccactgttaatgttgtcacaccgaaagaggctcaaactgttactgcattgggactaggcgccggtggtttagtca

SEQ ID NO: 26906 - DNA, 255 bp, Gossypium hirsutum
  Clone ID: LIB3166-028-P1-K1-B8
atgctcttgattggggtttgcttttatagatggcgaccaatacattactgcgacatggacacacactttttttatgccaatttcagtccttcctgaaaaactggttaagaagttgaccacatttcctacttcccgccaataaaatatgggaaggataatttatatccaactgagaataatggttggaagaattcaaacagtggtggtgatttaaccacccaaggtgagaggcctcaatcttttttaagctggaga

SEQ ID NO: 26907 - DNA, 368 bp, Gossypium hirsutum
  Clone ID: LIB3166-028-P1-K1-C2
aaaatggggaaagttcagtttagtgtgaaccaatatattccgaactttattattgcgagcgattaaaataacacgaggtagatgacgatacacacaaagttcgatgagcatgctccaacaccagccatgcatgagggtaaccaagcgcacacttaggaccacatggctcacaaactcgtgcaggaggcttgaaccaatgccacactaggggcttaggactactctgcatctgaatacaaaaacttggagctggtaagctcgaccaagatgtgggtgaaactgaaccaggactgagctataaactcagggacagaaaaggttgatcccaaagcagctaatttgagtgagaaatacagcagttggttaaa

SEQ ID NO: 26908 - DNA, 446 bp, Gossypium hirsutum
  unsure (1)..(446): unsure at all n locations
  Clone ID: LIB3166-028-P1-K1-C3
ccgcagtattgttccgtgtcaccaaatcttcaagcgttgggaaccgcgtttttttcgggttcgtgcttgtgcttgtatcgatatcttctcgggtcttttgctttcccaaatggttcgtttcatcgagacgtcgtgatcgatacgtcggtacgcttcgtcggtcgatccggacgtcggagagcgatgcgcatacccaatcgctacctaaannnaattccgnncggatcgtttcgatcccttcggggtcgcgttaccacgtcgttattcggatttcggacgaccatannatcttanccccggactnnngcttgtggccccttttcaccttaaganntatgattggctcgcgcaaatattgaactcnnttcgagcacgtcttacccttcgtatcgggccaatagacctggccttatggtttagcgtctttttcggtcacctttatgtgg

SEQ ID NO: 26909 - DNA, 367 bp, Gossypium hirsutum
  Clone ID: LIB3166-028-P1-K1-D3
gttgaaggagaagaagggacagctacttgcaataagatgctttcaacaaaggaatctgctcacaaatatgctgaactcttagtaaagcttgctgtagctttgggctttgatggatggctgctcaacatggaggttgaccttgacattagccaaatccccaatctcaaagaatttgttagctatttaacgcagacaatgcactcctcggctcctggttctttagttatctggtatgatagtgttacaattgatggaacacttagttggcaaaatcagttgaatgaaaagaataaaccttttttcgatattagcgatgggatcttcgttaactattcatgggaagaggactatccgaagctatctgcaa

SEQ ID NO: 26910 - DNA, 372 bp, Gossypium hirsutum
  Clone ID: LIB3166-028-P1-K1-D8
ggtaaataatcagccatctctctacacctatgccaacttgattatccataaggggatatacctcatatgtgtaatttataaatttaaattattaagtattttctataataaaaaaaaaaaaaaaaaaaaaaaaaaaaaaaaaaaaaaaaaaaaaaaaaaaaaaaaaaaaaaaaaaaaaaaaaaaaataataaaaaaaaaataatgaggctgaatgatgataaagaatataaaaaaaaaaaaaatgcggggccccgtttaagccaccaattttacctgctcttacaagggggccttaactttttttttagtgcaactgaataggattctccgcaggcccattttaaaacctgtgcctaggaaaaaacttagca

SEQ ID NO: 26911 - DNA, 367 bp, Gossypium hirsutum
  Clone ID: LIB3166-028-P1-K1-E1
atttggtttcactttctgttttcttcttacagaaagttgtcttgaaattggatgtggatgaaggcaaagagaaacagaaagccatgaaagctgtttccggtctctccggtacttgcttaaaacatctctttttgttctctaatgttaatggtttattatcaggaacttgtcttcttcaattctctctaatttttgtaggtgttgattctatttcgatggatatgaaagacaagaagttgacagtgatcggcgacgttgacccgattaacatagtgaacaagttgagaaaacaatggcataccgagattttaacggttggaccggcgaaagaagagaaaaaagatggaggagccaagaaagatgaagg

SEQ ID NO: 26912 - DNA, 357 bp, Gossypium hirsutum
  Clone ID: LIB3166-028-P1-K1-E12
gcgtaaataaataactaggaattttgagttgtacctcaaggaaaatagactagtttggatggggaattaaccctgctcattcataataggaattgtagaacgaaatgaactattgtgcctggaggcagataaaagatggctgcaggagtctatacattatatttcgaatctccttttaggtacaggacagtagacgttcgaccaaacggtgccatcaagacctacaaaatctgatgttacggcacatgcactcgcaaaccattcatgtctctgcaacaaatgaagaggattcagaccactggggaaaggggacaactaatgaaattcgcattacaactaagtactaatatctaactg

SEQ ID NO: 26913 - DNA, 286 bp, Gossypium hirsutum
  Clone ID: LIB3166-028-P1-K1-E4
ccacctcggcgtatttttattcaaacttttgggctcttaattcgatggtaccttcttttaggtatttcaaagaaaatggggcaggctttgggtgtattcaagtggagcagcaactggcttaacagaagcattgggaagtgatgatgtgcttaccggtgcattgttgcggggttggaaacaggcgtgtctcttctgggtcacactggtgtcgggacaaaccagtacggttgtaacgggtgttaatcatccggcctactgaagccaaatcttttataactacacctga

SEQ ID NO: 26914 - DNA, 370 bp, Gossypium hirsutum
  Clone ID: LIB3166-028-P1-K1-F2
gcgaaaagctggtcgaaagaagtttaaagagactcgtcatccggtatttagaggtgtacggcaaaggagagggactaagtgggtgtctgaaattcgtgaaccttacaagaaatcaaggatttggttggggactttcctttgccctgaaatggcagctagggcttacgacgttgccgtcttagcgcttaggggcaaatccgccgctctgaattttccagactcggcttctgttctccctagggctaagtcttcttcgccaaaagacatacaaatcgctgcgtttgccgctgccgaggcttttaaaccagtaacttcaacggatattgatcctcaaccagtgggatgctcatcatcaacctcagtttccact

SEQ ID NO: 26915 - DNA, 347 bp, Gossypium hirsutum
  Clone ID: LIB3166-028-P1-K1-F4
aaaataaataactaggaattttgagttgtacctcgtgaaaaaaagacttctttggttggggaattaaccggtctcatttcttttagttcttttagaacgaaatgaaattatgttcaaggaaacaaatatgtcatggttgcaggagtctatacatcgcatataggcttaggctttaagttaagggcatcgtggtataatcgttcaggtaccgcaggacctaaaaaatcgaatggaagggtacatagacatgtaaatcccttatgacactcctttaatttaagaggattcagcattcagggcgaagtagactactcaagaatttcacatttcattcatgtcctaatttt

SEQ ID NO: 26916 - DNA, 356 bp, Gossypium hirsutum
  Clone ID: LIB3166-028-P1-K1-F8
cggacgcgtgggcagatctgaaaatgaactctaaagcttaagaaaaccccaatcgtcggcaaaccaaaaggcaaaaaagagtatcttcttttgtatatttttaatccaaaaaggcttaatttctcttcgcgtgtgtgtgtgtgttttgtttctctttctcgatttttcaaaatgcagaagaaaacggcgtattcgttccccgacgagattttggagcacgtgttctcgttcatacattcgggcaaggaccggaacgcagcgtcggtggtgtgcaaatcgtggtacgagatcgaacggtggtgtcggaggaagatattcgtggggaactgttacgccgtcagccctacgatggtgat

SEQ ID NO: 26917 - DNA, 385 bp, Gossypium hirsutum
  Clone ID: LIB3166-028-P1-K1-G12
ggaacggaacgggccgggctcgacgccacgcgtccacacttcctgtttaggcttaccctaatttcccacactttctttgtctctacgacaggatccgctaatcaagctcacactgtccttccgcatatgtatacgaacaaatgcagggcattataacttctgctctgtaggttcttgctatatgcttaatcatgccatcctgtttgcaacctttacaaggtactctatctgagcttcataagttctttaccgtgtaaaggtctattcctacataataagagagattatgtcggcagtgatcgtagagttgaaatgacctgagagactttatatacttgctatggagcctgctggggatacaaaaacaccggggccatacatgaac

SEQ ID NO: 26918 - DNA, 358 bp, Gossypium hirsutum
  Clone ID: LIB3166-028-P1-K1-G6
gccggtaacggaagggtcgggctcgacgcatgcgtccaacgtccttttactcttacgttatttttcgacttatactgaaattacccggcagattaccaattcaaaagtccactttgcatattgactattgttggttcaatccacatcattacatttttgatccaataaggactggctatacaaataataccctcatgttgcaaggacgagtgccaatgtatttgccttgagagaaataaactctatagaggcgtgacctgtctacaacctacatatcgaagacccattgtttcccaacttatgatggcttgaagacgcacctgcgcttctgtagaggtaatataacctgttcttgcta

SEQ ID NO: 26919 - DNA, 370 bp, Gossypium hirsutum
  Clone ID: LIB3166-028-P1-K1-H1
ttctgttttacacaaggaagtaattttaagtggatgccagatcggaagagatcgagggattcttccaactgatcttatgcttctgagaatttttgaatcccacaatgtgagaagcttaagcgatatctccatattcttccaacaagcaagccagttaaggttctgttcagttgaagattgtaaagggatagaatccattctcgactcgtcgtactcgaactcgctgtgcagtccacttgagaaccttgagtacttgtggcttgaaaggttggataatttgcatgtgcttattaaattagaagcacctctatctatttctaggtcactgcctctactaggcatcttttctcatcttaaatcatttgtgatt

SEQ ID NO: 26920 - DNA, 379 bp, Gossypium hirsutum
  Clone ID: LIB3166-028-P1-K1-H3
gcgtccgcgtcaccggaatcccaaacgtcgccttcgctatctacaccactcacgtcccgatcgtggctccaaaatccaacgccgccgcatatttaaacaagaaacaaacggagaaaacccaaaaacaatcgtattccatcacactccaaggtatcgtagacccaaccggcgttttcactgacgtttcaattggttggcctggttcaatgtccgacgaacaaatcttcgagaaatcggcgtttcatcaaagcgccgttaaaggccaagtaaaaggcgtttgggtagtcggaagtacagggtacccattaatggattgggttttagttccttacgctcatcaaaatctaacttggactcaacacacattcaatgagaagat

SEQ ID NO: 26921 - DNA, 295 bp, Gossypium hirsutum
  Clone ID: LIB3166-029-P1-K1-A11
cctcaacacataccttcatcttaattttataaacccgccttcaagcaacacccgcagtcataaaatattcaccctttataacatactatttcattcccaatactacaactactctgtaacttcacccttcaataatacatttgacttatcttttaaatcaccaaattcataaaccaataaatcacctatcaatttaaattttacagtacactaaatccatactcgaacacaatatctttatccacagattattttttatctacacctacattaaattaacaaaccataattttac

SEQ ID NO: 26922 - DNA, 191 bp, Gossypium hirsutum
  unsure (1)..(191): unsure at all n locations
  Clone ID: LIB3166-029-P1-K1-A7
cgggaacggaacgggccggagccgacgccagcgcgttacgcgtactttgaagtaccatctagtgcatgaatactatctctgatgcactagccattccaagatggggacttgctaaaccatcggagcaagggctcgggaaagggggcaaagccgaccagctnctgagggtcccctttgacttcnncatccag

SEQ ID NO: 26923 - DNA, 353 bp, Gossypium hirsutum
  Clone ID: LIB3166-029-P1-K1-B1
cccacgcgtgcgtccacccatacggtgattcctaagagagcaccgctcggagtgggcgcatttcaatgttgatgcatatactgctgcatcattgaaggccggaacatatgcatatcctggaatgagacctacgaggtttactggtagtcagagtatcatgccacttggccacacgagtgaacatgaagagatacttgaagttattagactcgaaggccattcccttgtacaagaagatgcctacgtatcaagagatattcacctattgcagatatacagaggaagcgatgagaaagcttttggagcatgttctgagcttggctttgctccgatcgatgagatgttttcagatg

SEQ ID NO: 26924 - DNA, 257 bp, Gossypium hirsutum
  unsure (1)..(257): unsure at all n locations
  Clone ID: LIB3166-029-P1-K1-B10
ggaattccgggggcgaggcaggcgtccgcccacacgtccgttacaanctttatgcacgacagaagcctcactttgggggagtccagatttttatttatacttcacctcacttctcaacccttaaaatcaacatactctctcacgtaacgttcagaaaaccactatccctgatcatacttgtacaaaaccccaccaaccctaccctccttcgttaccctgacttcagggctgatgcacatattgctgcaccaaccgaa

SEQ ID NO: 26925 - DNA, 277 bp, Gossypium hirsutum
  Clone ID: LIB3166-029-P1-K1-B11
cccacgcgtgcgctgcccctttagttcaatacttatgtcaaaacatgcgggcgtttggatacggttactaggaaaaacaaccatcagaggaagctagaattctgactaaatagactaaacttatttagcataacgaaggagatatatgctagacctgaggataaagaacatactcatgaagaccacatatatcctagggaggtgtaccaacggccagaacgcattgagatggaacaccaactcttgtcacacattgccaacactccacacaggaaca

SEQ ID NO: 26926 - DNA, 205 bp, Gossypium hirsutum
  unsure (1)..(205): unsure at all n locations
  Clone ID: LIB3166-029-P1-K1-B3
ggaanaaccgggtcggacccgacgcgtccgggataacgtgggagcatctcgcccgattaatgataataccactaccttttaaccgttgtgttgggcttattccgtgatattggaggccggcccacaccacccgtctttttggacaccaaggcgcggctttcggcccggccgatccgggccggaagacatttgtcaggatggggag

SEQ ID NO: 26927 - DNA, 313 bp, Gossypium hirsutum
  Clone ID: LIB3166-029-P1-K1-B6
cgcgaggacaacacccatctttgtttttctcaaaaaccagtaaccacttgccaggcggcgtctttcatgagcaaaacttccttcacaatcaagcctcccccattaaaggctctttcctttggccctgtgtatataaatattgcttactaaccttactctcccattattcactttgaaaccactctcctgtgaccgagctggctggatggttcattacagaaggggctttgtgcactttttgcgattaatatgtcttagttgctggaaaaacatgtgggtctatagtccttgctatccacccaagagcagatgc

SEQ ID NO: 26928 - DNA, 199 bp, Gossypium hirsutum
  Clone ID: LIB3166-029-P1-K1-C2
ggctctcataaccaacagagcttttgttttctttctaaagatggccaaatggtggcgagaccatcgtaagtacatgtctacgctaccttatgtaccgaggagaaattatgcccaatgatgttaatgcgcctatggacactattaagaccaagctcatcatgcaatttgacgacacgtgccatactggatacaagttcgg

SEQ ID NO: 26929 - DNA, 364 bp, Gossypium hirsutum
  unsure (1)..(364): unsure at all n locations
  Clone ID: LIB3166-029-P1-K1-C3
gtaatatgataataatttataacatgttttggcaaagaagttgaatggttgagggggctggtgatctttaagctgtttgcancttctaatgcttagacactcatgtaggaagttcctaaaagaacttattatccatgtagttttgatcctcattaagacactgatggttcagttagttactccatctaccaagaacacatcaactacattgaaaagaaatttttgtctttacggttcactaccntggaattctctgatttttcttctttttatgggcgcatacatttaattagtggttaaatttactttttattgccaagtattaattaccttgttaagtcaatgaagatgataggctgatttt

SEQ ID NO: 26930 - DNA, 384 bp, Gossypium hirsutum
  Clone ID: LIB3166-029-P1-K1-C5
cccacacgtccgaagaatataaaggttttggcagccaacaactccaatagaacaagatgcacttttaaaccttgacttcctaacaacaaataataaggcaagataagaatacagaggttttggcagccaacaactccaataaaacaagatacacttttaagccgtcacttcctagcaacaaatactaaggaagataagaatacaaaggttttggcagccaacaactccaatagaacaagatacacttttaagccttaacttcctagcaacaaatactaaggtatgcatactaacacatgttttactatattgaaaaaaattatatgtatttataacaatctcttcagtccttagaatgttaatttaagtatataaatattttct

SEQ ID NO: 26931 - DNA, 292 bp, Gossypium hirsutum
  Clone ID: LIB3166-029-P1-K1-C8
ccaaaccttctttttattcttactactacatgaccaaacgctaacatccgtagggttaacataatgttagcagctaaatatcattctagtgtaatatcagacactgttttaattctcaaagtaaataagaacaatctttaagccttactccttcgaagtcaagcatactactttttaacaaatcatgatcttgctcaaaggctttaccaaaaaggtttcttccttgatccatatcacacttgaattgaacaaagcatatttttttttaaaaaaaaaactccggaaaaataaa

SEQ ID NO: 26932 - DNA, 328 bp, Gossypium hirsutum
  Clone ID: LIB3166-029-P1-K1-D1
ccgggcggaccacacccgtccgaacctactaagggaaaggacccttaattttgcttttaatggcaactataaactgcgcactgatattcctatggatgtctacaaaatatatcaacaaggagctggcgcatgctattgacaagttcatcacacactctgctcctttagccgatataaacaatgcatattactaccttctccaaggcataggtctgatatgcatgattcactacaatgctaaagagagtgatgctgctgaatattagcccaaccaaggatcaaaactctaacttttagtcctactgagagtataattatgtgcctactt

SEQ ID NO: 26933 - DNA, 303 bp, Gossypium hirsutum
  Clone ID: LIB3166-029-P1-K1-D11
caaacacttggcatcactaactttttaatttactctattcacaaacaaacaagaagggtggtttttatctttgatcacatcacctgagtatcatgaacaaactttagagcttaaacatattgatcgaagaatccatccctcattgcagagataacttttttccctacaatgctatgaagaagcacattaagccaatataccccaaaaatacgaacgagaagcaccctaacaaacgatccacatttgatctatttcactgcaacgaataacgagtacgagcggctgcatcattctactttatag

SEQ ID NO: 26934 - DNA, 374 bp, Gossypium hirsutum
  Clone ID: LIB3166-029-P1-K1-D12
cttttcaccatctcttcaaaagagctatccaaacaccatttggcctcaaatgtaaacgtcttcacaaaattgtcttcattgttccttgtcactcttatagtatcaatgagaaggggacaatggtcggaaaaagagtgactcaaatgttcaagccgataccctggaaagagattaacccaactcaatgtagtaactccacgatctaaccgttctcttatatttgtagagacaagacgtcctcgttcccatgtaaaccatctgtcagtaaagcctagatctgtaagagtgcaatcctctaacgcctcgcgaaattccttcatttaccgatctgaacggagacgtccactctcattttcaaaagaattcacaatttc

SEQ ID NO: 26935 - DNA, 279 bp, Gossypium hirsutum
  Clone ID: LIB3166-029-P1-K1-D2
cccacgcgtacggacaagcaactttttttttaccagtgtccgcttcattttgggcggcggtagatatctcttgactctcttttctttgcctccactatattatctttggcttcttctttatctcttgtaatttcaaacaataaataacgtgcttctcctgcggtcgaatcgagatacatggctaaggcaccaatgaaggaaatcacggtttgcatgaaaaagcagaatcatcgaccaaaaaccaaaggggcaaaaatttatgggctcgttgtcatcaaa

SEQ ID NO: 26936 - DNA, 318 bp, Gossypium hirsutum
  Clone ID: LIB3166-029-P1-K1-D5
gctcatcaacacctgacctcaagaagcttttggcacctcttagaaatccataagcgaaaaatataaaagttaaaactccagtttttacttcattaaatcattgatgttattccttaaaattaccaacttgcagatatgataattctaaggaataacatatctgcaagttggtaattttgttttgtagatatgacaataatgattcatgtttccacaaggtaatagatacctccatgtaactttgatataattgcgtatggtatacatgtctatacccaatggttgaaatgagccgatcgcaaaattcagactcgaaat

SEQ ID NO: 26937 - DNA, 392 bp, Gossypium hirsutum
  Clone ID: LIB3166-029-P1-K1-D6
cacgcgtccgcaaaacaagtaatgcttccggaggttggactttaggggcaacacaaaaatggagtcgacaagtcaccgtggagccagatgggagtcgacattggagaagggatccatggccagcgaatggcttcaaccaccaatcgtgtaggctggtacaacaaaacacgagctccgtctagcgaaggaccatggtgaatgtgatagatagcactcagagataaacgctataggagagaagaaagagggttaggcccaaagtcaggagcgatcggaaaaaggctttcagatcaccgatagaaggtcaacgaacgagaggggcacggttcagacttcattttgtccaagtaaaagaaaaacaaatggaaaggtaaagaaaaggaggaaggaat

SEQ ID NO: 26938 - DNA, 263 bp, Gossypium hirsutum
  Clone ID: LIB3166-029-P1-K1-D7
taaaatattgccttaaaaccaatttttaaaaagaaagccaaaatacaccattcgtacgttcttaacaatctaaaacacaccccaaatttacttcaccatcttattcttcatcttcgacatcctatcaactcttaaactctcttctccgacaccaaaccaccacatcaatctaatctcaaaccatattaacatttactcccacctcccagtttcatacacactcccatttatctcacatttttcacccccctaaaaatcccatt

SEQ ID NO: 26939 - DNA, 272 bp, Gossypium hirsutum
  Clone ID: LIB3166-029-P1-K1-E11
cccacgcgtccggctatatttttcactcacatcctcaaatgctaacaaccggggggccttcttcctattactcgcttaatccacctatcaaccaacatcagaaacagcctttattctcaaggaagaaatcaacaaatttaagaccatacttcatcgagggactgcatactactattgatcagaacatgatgcttctcaaaaccataacaacaaaagtcaccccctcgatccagagcacagtcaatagaataaagcatatgaacatgaccaaa

SEQ ID NO: 26940 - DNA, 223 bp, Gossypium hirsutum
  unsure (1)..(223): unsure at all n locations
  Clone ID: LIB3166-029-P1-K1-E3
cgcgtccggcaaaacctaaaaatgtnattgatttgtttaaaagtccatcaacngaaacgagggggggttttttttagtctcatgatggcttcactatatccccacaccaaaaatctgacatcaaaactctccaacatctttatactaaagattcttctactaacatgtcaatacattcaaaaaggggatctgctcacttctcctccttattcgttcgacgacc

SEQ ID NO: 26941 - DNA, 276 bp, Gossypium hirsutum
  Clone ID: LIB3166-029-P1-K1-E9
gtcgaaattgaaataccactatttttaacgttattttacttattccatgggcgtaggccgtgtacagctcctatttatgcacccaaggccggcttgagtcggacgatacgggcggaagacattgttaggtggggagatcagctgcggcaactcatttgttcatagatagttcatgtgaccttagatgcgctcaataggacctgatagtctcagtgggacaaacagatcgatcatgttgtgattgaacatatacatccgattactaacctagatagt

SEQ ID NO: 26942 - DNA, 301 bp, Gossypium hirsutum
  Clone ID: LIB3166-029-P1-K1-F1
ctcacttataggccgatttaaagataaactaaatatactctctctaggtatcggagtgggtagcttacttaatgcttctcttaccacattatacgcaaagccatatccagatcttcgaacaaactggaaggcttcttgctataaatgtctcgaataatcgcccttagtaccgatctgcatggcgatgctgattaacaggtatataagaccgaatttgaaataactacaatgtctactgattgcaaccttacgacacttactaactatactattaaccaactgagcatatgcctctgccatc

SEQ ID NO: 26943 - DNA, 375 bp, Gossypium hirsutum
  unsure (1)..(375): unsure at all n locations
  Clone ID: LIB3166-029-P1-K1-F11
cgtaaatgtaacatctatgattgtttcacaaataataatcagattaaatctncgggtgatttatatacctaaccctacacacatcatttgcatagtttattatactaaatgaaatacaaatccaaatcttcaaaattcatgttttcataagtaactgtacattgaaatcatgacttgttgtctatatttgttgttgtaggttttctcagcatgttcatggattgatatgaaagaaattactgcaactaatgatcttgttactgttaatcaagatcatgtaagtttgccaactcgtgaaaccaacatgatcatgatcttgttcctgctaatggctaattttattagtttgagaaaccaactntatgatacaacaaa

SEQ ID NO: 26944 - DNA, 258 bp, Gossypium hirsutum
  unsure (1)..(258): unsure at all n locations
  Clone ID: LIB3166-029-P1-K1-F2
aactttttgaggggctttcttgctttattcttcactaaacacatgcantaaaaggagttgctacaagatattattgggttcaccccaaataaaacgaatcttctacgcagtgaacatatgtccaacggtgagaaggtaagattttaagcctacaatttattgtgggcgatgacatttttacagaacaatgctatgttaattatcaattatgttttccatacttctgcatatacatgtattgaattatcaaatggtatg

SEQ ID NO: 26945 - DNA, 195 bp, Gossypium hirsutum
  Clone ID: LIB3166-029-P1-K1-F5
cgggggggccgacgcgtccgcggacccctgggtactaatccatcttctgtggaggatgaaactaataatgttgctcgctatttttaacattatgatcactccccaaacaattatcttacatattgcaaggacactgataaaattgactccacaaaataatgtaaaggtagccctaacactgatgaagtttctttt

SEQ ID NO: 26946 - DNA, 257 bp, Gossypium hirsutum
  Clone ID: LIB3166-029-P1-K1-F7
gttaatggtatacaaccatttgtgactctcttccattgggatcttcctcaaggcttagaagatgaatatggtggtttcttaagccctcgtatcgtggatgactttcgagattatgctgaggtttgcttcaaggaatttggcgatagagtaaagcattggatcacattgaatgagccatggagctatacttacggtggatacgtagccggatttctagcaccaggtcgttgttccgattggcaaaaacctaaactgca

SEQ ID NO: 26947 - DNA, 209 bp, Gossypium hirsutum
  unsure (1)..(209): unsure at all n locations
  Clone ID: LIB3166-029-P1-K1-G3
ggccgacccacgcgaccgctccttannaacaaccattaatgttcatctattaaccctctatatcgnttctatccgtagttttaaacaatttttaatccttcccactaccaaattctttactcaattctttaattccctacctattcctgctctaattctttataatacccttatcattcattgcttaaaatctccttactcctaaaaat

SEQ ID NO: 26948 - DNA, 320 bp, Gossypium hirsutum
  Clone ID: LIB3166-029-P1-K1-G4
aagatttccaccctatttataatttatttatacatggcattctatttcattattcccgtatttttttacattttcttcatcccccccttcaattctcttcttaatttgttcaaatccaaaaaatccctgtatttacccctccctccatgcaccttttttttaccatacatcttttaaacctttcatctttactcccaaaacccaaattttttctttcctttcaatcacaaaatgtacctctccacattcaatacctatatactctttttcccctttctctttcatcttcatccactaattcttatcattccatcttttta

SEQ ID NO: 26949 - DNA, 380 bp, Gossypium hirsutum
  Clone ID: LIB3166-029-P1-K1-H1
acccacgcgtccgagaaactccattgtaggtgtacctttgttaaatccaaacaaataaacatgtcagtggcttgttctaaaaacttcttccaacggttctgcatggatgaatatcgtatggatagctatattcatggcagttgcttctcaagtacaatgatcgcctccttcgcttctatagctaaccatgctaccaagctacgtacatacataatataccctttcaaccctcattatagggcttgggagatatggctggttgttctagtcatttactctgcctggatctgaccattcaagcttgcagtcctaactcccaagaatgatgcacttttcattcttgataacattgctatggcttccttgctgctgacattatt

SEQ ID NO: 26950 - DNA, 277 bp, Gossypium hirsutum
  Clone ID: LIB3166-029-P1-K1-H11
gccacacgtcctctcaaactttcataaaaacaccccacgtcacatagggggccgtgccctttacaaatctccacacacaccacaaacacccaagcaccaccactcccaatccactcacaaccccatcacctctaacaaccttaacaaccactcctcaactaaaccacaaaaacaactatatctccataaaaaacaccccatacctccataaaaaaatttactcttacaacacttcacagtattcccatacccaaacacatcttataccaactcactt

SEQ ID NO: 26951 - DNA, 262 bp, Gossypium hirsutum
  unsure (1)..(262): unsure at all n locations
  Clone ID: LIB3166-029-P1-K1-H2
atgatattcattgcaactcattcatttctctgcaggaaggatttctccaacgaggaggaaatatacactgatctatttatnatcaactgtnaagattgcaatctcaattgaatttttacagattcaccataaatgtaatgctttttttcctttaactctttgtaaaattgtaaactttaaaattttaaccaattcttttttcaaaaggcttttaaattttttccatttttacttttttttccaaatcttaaaaattacttaa

SEQ ID NO: 26952 - DNA, 149 bp, Gossypium hirsutum
  unsure (1)..(149): unsure at all n locations
  Clone ID: LIB3166-029-P1-K1-H3
ccgggccggccgaggcgtgcgaaggcatncactataacattnactaatccntacccaccctnactttctcccgggacggaggtttttaaacattacacaaccctcanctgccaatttcccaccatgcacctctaaaactaggtttctta

SEQ ID NO: 26953 - DNA, 265 bp, Gossypium hirsutum
  Clone ID: LIB3166-029-P1-K1-H8
gggcaatccgagcagaggaggcattatagaaagtcaaggtggacaaatgctgctagtgccgagcggcttcaagacgaatttaagaagctgtccgttgaaatggccagtaggattgatgagaatgaaaagatgaccattaaagcagttgaagaagccaaccgactctgcaatgcaaaaaagagatctggaagaatggctccaaaaggccattgaagaacttacgtttcttaaagatcacactgcagtcgaatggcaacaccttaca

SEQ ID NO: 26954 - DNA, 373 bp, Gossypium hirsutum
  unsure (1)..(373): unsure at all n locations
  Clone ID: LIB3166-029-P1-K1-H9
atttacaaccatatcttactcaatgccagaatctatcaccggtttttctccccggcaaatccgaagcaagcgtcaaagggaagctgaaaggaagcctttcgccccacaaatacaacacaatggatccccaaagtgaaagagcaagcccatcaaatgattccggcacctcgagaataatcttggagtgcacgtcaagcaatcttcataaacaagaattcacctccgaacaatctcaaccgggtaagcaggacgatagaagccaatgcaatggagatttaaagctaatacatgcaccagaaacaccacaaaaggcgacgatggagactaaacggagactncaacccgaaaaccaagtcaaaacaccagaaaacac

SEQ ID NO: 26955 - DNA, 194 bp, Gossypium hirsutum
  Clone ID: LIB3166-030-P1-K1-A10
caaaacttcaatttctaacctaagaaaaaaaacccccagaagctgaaatagggggctgcccctttgctaccacttcgccgccgctactctgccattcaactggtacatgaagcaacctttttttcagggcttaaccattggtaggttaagctgcttaacactttgagaattgagggggatttgaataccggtat

SEQ ID NO: 26956 - DNA, 313 bp, Gossypium hirsutum
  Clone ID: LIB3166-030-P1-K1-A2
atccgaaagctagtgctgattggatccttgatggtatgaataaaggaactgatagctgtggggtcaccactggtttgggtgctacttctcatcgacaaaccaagcaaggcgctgccctccaaaaagagctcattaggttcttgaatgctgggatatttggcaatggaactgagtcatgtcacacattgcctcactcagcaaccagagcagctatgcttgttaggatcaataccctattacaaggatactttggcattagatttgggatttttgaggccatcaactagcttcttaacaaccacaatacgccgtg

SEQ ID NO: 26957 - DNA, 354 bp, Gossypium hirsutum
  Clone ID: LIB3166-030-P1-K1-A5
gcagtatttcttcagccatgagatgaaatcttggaggcaaatccagattgttagtggtaatctgagagaggtcatagatggtgctgacggatttcaaaatacccatcaaatgcaacaatttgaatctgctaaattcagcatagatcaggctgtttttattcttgagaaagtacatataatatgggagtcactgttacggccttcgacttataagagaagtatgtgcatggttttagagtccgtcttctctagaatcactaaagacatacttttgcttgatgatctggctgcagaagaaacgttacagcttcaaagacttattcatatgatgctggacaacctatcttctttatt

SEQ ID NO: 26958 - DNA, 195 bp, Gossypium hirsutum
  Clone ID: LIB3166-030-P1-K1-A9
tccaattaaggatagatactgcgatagttcatcaaacaccagccatactctgggtggggtctggaactacgatgcggtcaactatacactaaattaaacatgtccataactgaactcatagtgattttgagatcaagataattagctattattgagacgcaacagcatctggcgatttcatcttggtgatctact

SEQ ID NO: 26959 - DNA, 180 bp, Gossypium hirsutum
  Clone ID: LIB3166-030-P1-K1-B1
tccacgcgagcggacattatatgtacatggtgatcacagcatccagaacctggcggcggatttgaacaactaggcggacacccatgccctaaaatatgcttgctggcacagaactgaacgcgcacctcatgacatgctcgatcgccatcactgggcaacatctgaaacagaggaatacat

SEQ ID NO: 26960 - DNA, 388 bp, Gossypium hirsutum
  unsure (1)..(388): unsure at all n locations
  Clone ID: LIB3166-030-P1-K1-B3
ctaagaatccataacaaatcggttaaaaagaacgctttcgtcgtcgtccagacggcggttttaactctaagacgacgaanatgaacggaaaaggagggagctctccttcgtggaacgataaactagtgatggacatgcccatgcacacacgcttcgtcaccctccaagtcaaatgcaagttctcaggtggtagggataaaaccgtcggacttgtaagaataccggtgacggattttatcggagggtattctcccgagacttgcttacagttcttgagttaccgattaagagatccaaagggacttaagaacggaatccttaacgtttctataagactaaaagaacccttacaagcttgttcttcccaagcttgagcgtgtgggcttgg

SEQ ID NO: 26961 - DNA, 380 bp, Gossypium hirsutum
  unsure (1)..(380): unsure at all n locations
  Clone ID: LIB3166-030-P1-K1-B5
aaatnccggggcggaccaaggcgtccggccaaagacgccgccctgggattccttactccaacatatgcaccatctgcagggcggcatatacatcttccgccatcgatgcctggtaaccaagatatttaatttcatttaatttgtgcaaaagaaaagcaacggctgcatggccgagacactatatgactggaagctgatgtttaatgaatttatgcagttaggatatggtcaataagttgtcagaaactttaatttctagtttagaaaccaatttcaaaaatatatatgctacatatctctgtttttgaacaattcaagattaccactagctaggatatatatgcaggtttgtggaagggtgtactggaggcaatgcgtct

SEQ ID NO: 26962 - DNA, 325 bp, Gossypium hirsutum
  unsure (1)..(325): unsure at all n locations
  Clone ID: LIB3166-030-P1-K1-B6
gcaggatgtgatcattaaaatgttgtcttgaagttttaggttttaggtaaccatagtacttacttccattgtcttatgtttgatttcactgttatagagtctatgtttgattcgctttatagactcaaggtcttatgttgactttgtttagttccctgcaggaccatgtaacaggggtttgacatttttatgcatgtcggagagaaactttaatgctggattttgctcttttccttttttgtttgtgtttttgcagtgattgcatgaagcatacatttgagagatttcttcactttccagaagcanatatatattttctacttac

SEQ ID NO: 26963 - DNA, 378 bp, Gossypium hirsutum
  Clone ID: LIB3166-030-P1-K1-C6
gattctgctctgaaaaacaagaaaccaaaataaaggaattttcatacgaatttgaggggaattgaaaatttaataaatgtctataaatttggttgagatttgtttccccctctcttaaaaagccctctctttttcatctctgtcacttgcctcctcctccttcttcttcttcttcagctgtgattgtggcaatgtcttatgataaagaattggctgctgcaaagaaagcagcctctctcgctgctcgtctctgtcagaaagtacaaaaggctttgctgcaatccgatgttcaatcaaagaatgataaaagtcctgtaactgttgctgattatggctcacaagcactggttagttttgtgctgcagcacgaatttcctg

SEQ ID NO: 26964 - DNA, 368 bp, Gossypium hirsutum
  Clone ID: LIB3166-030-P1-K1-C7
gtgttgctagcggtaacttccttgcagctaagagaaggggagttgttgaaggtgttgattatggagcaactggtgaagtaaagaaagtagatgttgctcgattgcgtgagaggcttgatggtggatgtatagtaatattaagcaacctggggtattcgagctctggtgaagttttgaattgcaacacatatgaagttgccacggcttgtgcattagctcttggagcagataaacttatttgcattatagatggccctattttggatgagaatggacgccttattagtttcttgcctcttcaagaagcagatatgttgatccgtcaacgggtcaaacagagtgagatagctgctaaatatgttaaagct

SEQ ID NO: 26965 - DNA, 138 bp, Gossypium hirsutum
  Clone ID: LIB3166-030-P1-K1-D7
gcacctcacagctttgataaagctccacaatcaaaagatgtggggtcctggaatggctgaaggcttgcaatccttgagagttaaagtcatatgacattcaatgaactgatgtcatgaaactattcatggaacgtgaag

SEQ ID NO: 26966 - DNA, 329 bp, Gossypium hirsutum
  Clone ID: LIB3166-030-P1-K1-E1
caactgctccagagaatccatggaatgatgctccatataaggatgctgcgagagaaaactgcactgggagggctatcacttgatgcatttctatcagagtgggcgcttatgacactcttagacccagctcgtagcttggagaacttgatatacattggatatcctggcgattcttcctctgccatccgcatcactaggagaaggcgtctggataggaagaagcaacaatcagaaagaaatgttttccagtgctttgtttttggtccagcaaacgctgggaaatctgcattgatgaattcttttcttgcaggccctatttggattcatat

SEQ ID NO: 26967 - DNA, 370 bp, Gossypium hirsutum
  Clone ID: LIB3166-030-P1-K1-F11
tctactcgtgggtctatatgttcatattcagttacatctccaggaaaggggtcggttcattcctatataggttaaacttctgcatcttaaatgttggcctcacaattcattgtaataaacctgaagagttgccttagcagatattatgttttgtacggttaatctgcatcgactatattaactatcaccaactcattctaaatcaatagcctctttatacacatatgctttaacttaaatgtttatagctattttttaataatataatgatcattcacatttctgcgttggtaccttcaatttttaatctcatttatctctacccacataaataattttcttttttattttctttatttcttaacctttt

SEQ ID NO: 26968 - DNA, 261 bp, Gossypium hirsutum
  Clone ID: LIB3166-030-P1-K1-F12
cccacgcgtccgggaagcttttcaaatctgaagtagttggggcaaaacgtgagggcaagagtgtatatgcttttttaattgaagggtttttgggttgctgtttcattgatgtgggagagaaactaaacttcgtatcggaatcaagctctttctagtatggctatttgcagttatcgccgttttcatttttaggttaaggtcactacctgggcttgtgcttgaactattcctcgaaaagttaactatggacttgattatgat

SEQ ID NO: 26969 - DNA, 163 bp, Gossypium hirsutum
  unsure (1)..(163): unsure at all n locations
  Clone ID: LIB3166-030-P1-K1-F6
cccacgcgtccgcgaaaactgcatttcaacatcggcaagagtgagattgaaagggaagatgagatcgtcgatctgttgcttttgttcgacggtgccgcataccgaagacgttgatgaatttgagcagttggaggaggtgaagatntttcaaggttcaacaaat

SEQ ID NO: 26970 - DNA, 324 bp, Gossypium hirsutum
  unsure (1)..(324): unsure at all n locations
  Clone ID: LIB3166-030-P1-K1-F9
cccacgccgtccgcttataaaagtaatatgtgaacaaagaangagaaaactatttgtttgttgttgaaagccattagtttctctcttgatgggcaacctgttttttttcttccactagagtcgattctacccaaagcccccaaccaacttctgcatcaggaggctcaagaatttctagcaaaaccagtcgatcttcagctccttcaagcttgactcttccatctttcagtgatacaagtagtattaatggatgtcttccaacaccaacgactgaaggagaaatattgggtcccccaatttgaaacctctcttgttcaatgagtt

SEQ ID NO: 26971 - DNA, 281 bp, Gossypium hirsutum
  Clone ID: LIB3166-030-P1-K1-G10
cgaggtttatcgtccaaggtaactcaaaagagttccccgttctcatcgcgtgtctgactgctaatggatcaaaggatgggggggttgcagattccaccttcgcccatcccatatcaggtctctccagtctctcaaaactggatcgtcaaggcgtggatgctaatattgttccagtaaacaacttcaatccgttaaaatcaagctacgtgcccaagcaacttgtagaagacgaggtaccttgctctttcttgcagcagtttaagggatcaaaggaggaaaaa

SEQ ID NO: 26972 - DNA, 365 bp, Gossypium hirsutum
  Clone ID: LIB3166-030-P1-K1-G5
cccacgcgtccggtttatttcgattcttgctgataatattttgttaaatgaaaggttgtaagggatttgctttgtcgtttgtacttattagggttttgagatttgattgacaattaatatgcttctacgtacgatgttttaaagaaaataccttatttccagttaacttgattagggttggttttcgtatctcgaataattttaaggtttttgtttttagatactagaaatcaggatgggttttctggttcttttgagtttgtttcttttctctcgaaaatgagatgatgttatttttatgatttatgacactttgtgtggtatagtcttatgttgacagtgcggtgtattgtcattgagataca

SEQ ID NO: 26973 - DNA, 375 bp, Gossypium hirsutum
  unsure (1)..(375): unsure at all n locations
  Clone ID: LIB3166-030-P1-K1-G6
aatgaatgcccagtttgtaaaggataagttacggttaaaacgttgacaccgatggatgatcgtgggaaggttatctatgacccanaacaggattcgggttttaaaatccctcctcgtccgactgcagggcgagtggattgttggaggcaaaccattcaacggactcctttaaatcttcctgttgaagagatgattcggcgtattggaagcagatttgatttggtacgtgacttgactccaccacgtgaagccagtggttctcgggaaaccgcataacgtactaattgcgtgcttaataggattttgacatctcgtggattacgtggagagcaaaacacagtcgtgccgctcgatgatgttgactngacacccagt

SEQ ID NO: 26974 - DNA, 337 bp, Gossypium hirsutum
  Clone ID: LIB3166-030-P1-K1-G9
cccacgcgtccgcggacgcgtggggtatagaggaaaatggaacagcaccggccgggccaggttcagggatcactgttgctgtcaagagtttgaaactggatggtcttcaaggccacagagaatgggtggttgaggttgccttccttggacaacttcatcatcctaaccttgttaaactcattggttactgcattgaagaggatcaccggttgcttgtctatgaatttatgacccgaggaagtcttgaaaaccatctgtttagaaggacaatacctttttcctggtcaaataggattaagatcacacttggcgcaacaaaaggattggcttttcttta

SEQ ID NO: 26975 - DNA, 377 bp, Gossypium hirsutum
  unsure (1)..(377): unsure at all n locations
  Clone ID: LIB3166-030-P1-K1-H1
tttgactttcaatcacacgggaagatttagaaggggaaaaaatggaagtggtgagagcgggtactcaagtgatggattttgatttcaacagcgctagatcatctccacgtacaagtgctccttctacgcctagacgatttggtgactgtttcttcagtactcccacaagtcctacaagaatgtcggagttttatcgcgaattcgataggttctcgatgatggatgataggcagaaaagcaaaagaagcacttgtttggcgattccttttgattgggaagaaaagccagttacacccaagtcaccaagagccgcaagaaatgacgacgatgatgatgatgantttgcttttgattttagtgaggccttggagaaaaca

SEQ ID NO: 26976 - DNA, 373 bp, Gossypium hirsutum
  Clone ID: LIB3166-030-P1-K1-H10
gggacccacgcgtccgcctgtctctgttttgcttccatttctttcttcaattatcttttctcttcagagagttcaactcttttctcagaatgggaagtactgatgggacccagtattgggcttacacctattaatccctggaaagggagccttaactggccatccgagaaactccaaatttccatcaccggtgctggtggcttaatcgtttcgaacatggttcgacgtttgaaaagggaaggccattccataattgcttttgattggaagaagaaggaccacatgccagacgatttgtccgtgcccaattccaatttggtggacctccagtggagggaaattgcttgaagttaccaatggagtggatcattgt

SEQ ID NO: 26977 - DNA, 375 bp, Gossypium hirsutum
  Clone ID: LIB3166-030-P1-K1-H3
gtccgtgggttttttcctgggttgttctttttgttactgagcgacaattattcctagtggaagctgatctttatgtttcttatcaaggctgccattggttttgcatctgttcttgtttagtctgatgtttcccttccatttggttgctaggtgtcaaccatggacgattacccttactggattgttggtgattgcctgtagttggctaattttacgttcacttgtggtcacagcttttgccacattggggatatgcacatggtggtacatctttctatattcttatcctaaggcttatatggaaatgatagccgagcgacgagagagggtggagaatggtgtagaagatacaatttggatgagcaagaattcaat

SEQ ID NO: 26978 - DNA, 384 bp, Gossypium hirsutum
  Clone ID: LIB3166-030-P1-K1-H5
cccacgcgtccgcccacgcgtccggatttcttctatgccccaatttcgacgaaggagagggaatctcttagcacattcgcaagtctattttgcaggtatgcacggcgtggagaagccgttcatggtgacgtgtcgacgcagagtggcgcgcgtgaaatgtgaagccactggtggctgtttgcggtacgggggaccctttgccctatggttttctgaaaactattaaggagatgggcctatcgggcttgcttaggttatgtttagtctaggtctaggcttttaatgagtatttattaattgggttagctttaataattgggctgatgttttatttttgttttgggctatgtaattaagtttattgggacttttgggccagaagtg

SEQ ID NO: 26979 - DNA, 420 bp, Gossypium hirsutum
  Clone ID: LIB3166-030-P1-K1-H6
ggaccgggaacggaccgggccagtcctgacatgcacttactcggtgcactgtcagattcatgggcggttgtgccaactctatctgaaaggccggctgctgaggctgatgcccatgctaaaggttctatgccctcctttgctgctaatccatcagcatctaactccggaaatcagggttttgatgatccatttggtgatggtccttttaaggctctcccttcaggggatgctgcctcagctcagcaacaaatattgactccggcgactactttccaggctacaatgagccaaaatatggaagcagctcagccaccttctgtaaaatctgagattgtcacaggcttcgacttcggggaatcattctctgcctactccactctcaatgcctcaaacagtcaaccttcatcaggaaatttccag

SEQ ID NO: 26980 - DNA, 247 bp, Gossypium hirsutum
  Clone ID: LIB3166-031-P1-K1-A2
ctggtctttgtattggtcatggaggcggacaacgatgccaaaaagcagggtgtaacaagggtgctgagagccgaactgtcttctgtaaggctcatggtggagggaggaggtgccagcacttgggatgcactaaaagtgctgaggtgaagaccgacttttgaatcgcacatggcggaggcagacgatcggttttttctgaaggatgcgcaaaggctcaacttttgtaattaatgaatttgcatttgca

SEQ ID NO: 26981 - DNA, 199 bp, Gossypium hirsutum
  unsure (1)..(199): unsure at all n locations
  Clone ID: LIB3166-031-P1-K1-A5
tcgggaaattttctcttatncactatcctattatttttaatgattggcgttaaaaatgcatagggatcctcgtgatggtttgcaccatggtatgatggatgatgaaaattgtctgttggtacattttagatattttgatgtattttgatcctaatgtgattatttgttctttttagacattatcaaagttacgttttac

SEQ ID NO: 26982 - DNA, 217 bp, Gossypium hirsutum
  Clone ID: LIB3166-031-P1-K1-A7
gaggggcggggtaggcgtacgcgtcacacatcctcatgctatggtgttttttttctaacgacgacaaagccagggcgagtgtttatgctgctccgatgaccgactacacacaaaccgggtactttaaagttcgtgtaaaaggtgcattgccttagatccaaccggcttacgttcaaggctaatttggtgccgaagaccgattggaagaaaatttaag

SEQ ID NO: 26983 - DNA, 376 bp, Gossypium hirsutum
  Clone ID: LIB3166-031-P1-K1-B2
cccacgcgtccgcccacgcgtccgcccacgcgtccgtagcttgttagttgattgacttcattcaccagatgcaaagactcaagaaaacgctgtcacggcacttcttaacttatctattaatgataacaacaaaacagctattgctaatgcaaatgctattgagcctctgattcatgtgctcaagacaggaagtcctgaagctaaagaaaactcggctgccactctcttcagtctttcagtcattgaggataacaaagtcaggatcggaaggtctggggcaatcaggcctattgttgatttgttggggaatggtactcctcgaggaaagaaagatgcagcgacagccttgtttaatctatcaatattccatgaaaac

SEQ ID NO: 26984 - DNA, 371 bp, Gossypium hirsutum
  Clone ID: LIB3166-031-P1-K1-B5
ccattctatccttcaatccaggtttattggtcctctcctctaccaggcaagaacatgccgatccagatctgctcccatcaggtaaacgttttactctctggcaagagcactttttgccaacttatgcgcattcgagttctatgatctatgaatgtgtggaaaatctattttctggaaacatgatttcttattttggatatcgaagattttagccccaatcattgatttattgattgtattcttttgacattttttatgactggtttggcgtactctatttatctggttgtttgcattattagtgagattcctaactttatacttttcaatcattgcttacgcttttacagcgaacgaggaagaaaccttgt

SEQ ID NO: 26985 - DNA, 166 bp, Gossypium hirsutum
  Clone ID: LIB3166-031-P1-K1-B6
ctttctttttcttgaggtctccaaagcatttctgttatatcggtaattttctctgaggatctgacgaaaaaattcgaatagattaaaacttaagaatgatcaaaagatgatcgttagagcatttaagaagagttattacaccaggtactatgagatgctgggtgtt

SEQ ID NO: 26986 - DNA, 360 bp, Gossypium hirsutum
  Clone ID: LIB3166-031-P1-K1-B9
gaagcatttagtttcggaaattgtcttattgtttctaattcggtatgtcgtttgcaggaaaatattcccctttcccttccccttcccctttccctatcattgacacctgatcttctacttgccatcagccaacatcgattcttaacaccagacaccggcgttcatcaagtctgggaattctgccctgaatcaggaaccccgaaagggctttctaaggtggaaatggctcatcagagttttcgggataaccgtttccataaaaaacatagttctaatctttctatgagaattcgggttaatctgggtgctgaaattgggatttggggtttttttgataataagttgtcatgtaatttgttt

SEQ ID NO: 26987 - DNA, 310 bp, Gossypium hirsutum
  Clone ID: LIB3166-031-P1-K1-C1
cagagaggctgttgcaaaatttatggggaaagtgaggggtggtcgagtgaaatgtgacccacaccgcattgttatgagcggtggagccaccggagctcatgagatggttgctttttgcttggctgatcctggtgaagcttttctggttcccactccttattatccaggatttgatcgtgacttaagctggagaacaggggttgaacttgttcctgtcgtttgtgaaagttccaataatttcaagatcactagagctgccttggaagctgcatatgaaaaggcaaaagaagctaacttgagagtcaagggc

SEQ ID NO: 26988 - DNA, 347 bp, Gossypium hirsutum
  Clone ID: LIB3166-031-P1-K1-C12
cgtgttttaaatagcctatttatatactttgaaaaaatagattttcccctgccacgaaatccttttacaaccatggatccatggctgaagctttctgtactagtctttatgtggttttttttcaacagccaactctccttaggagcagacaccatcttagcaaatcggtctttttactgtaattagacctttgtttcatcgtgtggaaacttcgttgtagggctaattcaaaccaggttattctttcaaccagtacatatgcaaattgtacggttacatggtcactcaacagaccgtattttggtttgcaaacagggagataccagttcttgatacacattttttat

SEQ ID NO: 26989 - DNA, 337 bp, Gossypium hirsutum
  Clone ID: LIB3166-031-P1-K1-C2
cccacgcgtccgcttcttcttcaatcaagccaccatttttgctacaaattagcggaaaaaaaacagtctcaaaaatggtgaagctgagctacattctactgctcatcatctccctcattgttacatctccaccattaacagaaagctttcatatcaataactgggcaatatcaaagctcgaaaccaaacaagaaacagtaaccaatctccagttctacttccacgatacgatcagcggtaaagacccaaccgccattagagtagctcaagccgccgacaccgagaaatcaccgaccctattcggagctttgttaatggcggatgacccactgaccga

SEQ ID NO: 26990 - DNA, 371 bp, Gossypium hirsutum
  Clone ID: LIB3166-031-P1-K1-C5
acgcatttatcaaagtatttattagaattggaaccagatagttcagggaatcatggggcgatttcaaatgcatatgctactgcaggaatgtgggatgacgtatctgaaataagggatttaatgaaagaaaaagggttgaagaagagtcccggttgcagttggattcaaataggtgaaaaacttcattctttcattgctggtgatggatcacaccccaattctgagaatatacaagctacattggctttgttgggaattgatatgaaatccagtgcttaaaaactctgttcttaagcactaatcagatctttcggtaacaaatgaagtgctccaaggagacttaacaccgtcttggggtttgagcgaaaaga

SEQ ID NO: 26991 - DNA, 348 bp, Gossypium hirsutum
  unsure (1)..(348): unsure at all n locations
  Clone ID: LIB3166-031-P1-K1-C7
gtagngcttcaactcatcattttaattgaagaatctgttgctgtgtttttgctgataaaccactccaaaggagattgaccctaaacctgatttttgaaaatgccgccctcgttctcgttaagcaaggagctgtagctagatttttcgagtccgaattcgcttgaaaaaggttcaacgtcaaataactgtttttcaagaaatacaggctctcctctcttgattttaaactcactttcaagctttttaaacgttgaagtttagtcgcttgactcaatgctagtcggcttgtcgtgttatcttcaatttttaactctctatttcctgtgatccattcttttacttttgtgt

SEQ ID NO: 26992 - DNA, 158 bp, Gossypium hirsutum
  Clone ID: LIB3166-031-P1-K1-C8
gcgacactctcccaaaccgtccgtaagttttattaacccactccagggggaggggtactcaaggtctaggaggatccaatactccaacaattcaaaaaataccttacagcactgttccgcccttaaaaattgcctcaatctaagcttcaaactatcac

SEQ ID NO: 26993 - DNA, 250 bp, Gossypium hirsutum
  Clone ID: LIB3166-031-P1-K1-D6
tttctgttcatttatgatctacttatctttttttgtccatctgaacgagggcctccaccggaagatgaggccaactgagttccgtgtttataaggaacttcagcccttcgatgggaacaaattcaacttcatcaaagtatttcttcgaagaggtgcttcttatatttgaatctagtgaatatggctaagctcatttctattcaaccatttctcattgatgctatattatttttcagagtctttgccattt

SEQ ID NO: 26994 - DNA, 227 bp, Gossypium hirsutum
  Clone ID: LIB3166-031-P1-K1-D8
gttcgaggtgtgaatcgcgttacataggacattacatcgaagcccccatcgacgagtctaatgggagtgatgccatgccctatagcaaaggtgatatatatgtgtctttattcgatgctagcattttttaagctacattatctttctcaatgaaataccaaatttctattggaactttttagtaatatttagcattatatattctttagtctagtggatttcatttt

SEQ ID NO: 26995 - DNA, 308 bp, Gossypium hirsutum
  Clone ID: LIB3166-031-P1-K1-E10
cccacgcgtccgggataaaccagttttgttaatctcatgttgaagatcgggaacaataaaacatctcccaaagatgctttgcggaagagcaagtgagaaatggcggttgcaacacgagctatgtgttttttataaaaaaaaaaaattctatatctacttcacataaaatctttgttgctggagctttttcatttttcctatctttatacgaatctgacatctatgttctgaaacatatttgatttgtacgagtgattatgatttctctaaatgttttgtatatcgtttacctgaaagttttatttttt

SEQ ID NO: 26996 - DNA, 326 bp, Gossypium hirsutum
  Clone ID: LIB3166-031-P1-K1-E4
atttgaacacaaacctgctggttttatgagtttgccaatgggctgcgtgtcaggcgaaatcacaagttaaacaaaacctttcccaccaggtgtcaaaagttccttccccattggtgaattcccaaccagtggagcaatttaagagcagcccttgcatagatacttctgagaatgcatcgacttatggacctgcagacggtgcacctgaggaggtagaggcctcgcagtgaaatctagaattgttttataaagagtcatcagcgtcctcctagttacacgacctggtgccttaaaacattatcatttcaagaatttgtggacatttt

SEQ ID NO: 26997 - DNA, 179 bp, Gossypium hirsutum
  Clone ID: LIB3166-031-P1-K1-E6
ggggcgagccacgctttcgaccatattcgaaaacctaaagattttccttccaaaaccaaacctttaaatatgggcaggagagagtagagagaactcacatatccacacacttaagatcattaatttagggttccttaactctattccccgattacccgattccccaattttacagatca

SEQ ID NO: 26998 - DNA, 336 bp, Gossypium hirsutum
  Clone ID: LIB3166-031-P1-K1-F4
aagctcttttaaaatcactcttcattcaactctctcaaacacagcataacttcgtcaacacccttaccaaaaagaccataaccctttagtgttaaaggtactacaccatgtatcatttaaagtttgaaattcacgactggggaagcatcccaccagaccagcagggtatgatctttgtcagcatacagctcgaggacggtcgaaccttggccgcttacaacattcataaggaatacaccctccaccttgttctccatcttcatagcggtatgcatatcttcgtgaaaaccttaaccgtcaagaccatcaccctctaagttgagagcttctacacca

SEQ ID NO: 26999 - DNA, 184 bp, Gossypium hirsutum
  Clone ID: LIB3166-031-P1-K1-F5
gttcttttccatccattgtccacagttagtgtttctaaatttacaagtcatttagtgagaggatgggtctttgtagccggtattcctcatacaaatggttgctaatatttcatccttttcatgcatctttcaaccatgtttttgtgttttaacgtatttgtatagatcgtttagctattttaat

SEQ ID NO: 27000 - DNA, 257 bp, Gossypium hirsutum
  Clone ID: LIB3166-031-P1-K1-F6
tcgcccactctttctgcaattatcatcaaagttttctcagagaaaccccatcaatgggggggtgacatcaaatgatgttgcttttcaaaggttctgctccatcaagtgtttaacccatggcactgtttttggttccaagttggcttatatttaatttggtaactcagatacacattgcccatgtctatacatttgtacatttcaccatacccttcttcagaccacatattctattattgtttgcattcaacttttat

SEQ ID NO: 27001 - DNA, 174 bp, Gossypium hirsutum
  Clone ID: LIB3166-031-P1-K1-F8
gcttaagaaagataagttttttttttatgaaaacactaacaataagcggggtggagatggatgctgctttgtctacatctagtgatcattttgaacctcccaatgctacttgtgttcaggcttgaagtttataatgcaaaaatacttcatgtagatggattttccaaaattaca

SEQ ID NO: 27002 - DNA, 308 bp, Gossypium hirsutum
  Clone ID: LIB3166-031-P1-K1-G12
tgtcttttgtaaggtttttttttattgttttgctaaagaaatgaagacgtgggggtaccatttcattggaaattccataaatcctcttctagattcttctttgggggcataccctattcacctttttgtcttccaaggatgaaataaagtgaaagcattgcttggaaatatattttaatgacttgatgtgcatggcgtactccacctattaagaggagacttagttggataacactaaatcggaatggggagggaacttacggatgttgacatggtcggtatggcaaattcgttttgtgaaaatcaaa

SEQ ID NO: 27003 - DNA, 346 bp, Gossypium hirsutum
  Clone ID: LIB3166-031-P1-K1-H1
cccacgcgtccggtcgtttaagattcttgtcttctgtacgaagtaaaaccatctgtgatgtcaacaattataccccaaaggtcgtttctccctcgcccttttttcttttgctgcgtaactagagttcaatttgatgaattttacagatagataaggttgtagcctgaatttctgtggaagtacgatcattttatagaaaagaaaactgagtttaggaaaaggatggaaaagcagcaacctggttcctcagacgttggtggtaaatgtcaaactgataagctttctgaggaaattgttcttgccaagagtggtcttgtaaatagtatcttcgactctaactttattg

SEQ ID NO: 27004 - DNA, 145 bp, Gossypium hirsutum
  Clone ID: LIB3166-031-P1-K1-H10
atggacgcttgggcggacgcttgtttcagaagtcactccatcggttccagacgagcctcttgttcttagacgtgcatttgaaaatgctgtgatcaaaaggttgatgactgatgtgccttttggagttctgttatctggaggactt

SEQ ID NO: 27005 - DNA, 369 bp, Gossypium hirsutum
  Clone ID: LIB3166-031-P1-K1-H2
gtaaatgtcaatggctttgaaatgaccgaagaaccttctgagcccgaagttcaagatagcaggaataaaaatctgtttgatggtggtcgagtagaggcttccagaaacagcagcgatgctgaatcagagaagcagaataagaagaatgatcattttacaaatgacttcatggatgccattgatgggaatatggatatggacaacccttctgtggttcacaatgaaaaaatgtctacttcgaaaaatgtagctgagagagtccaacatgattctctgctaaagaagattacttctcaggcagaacatgatttaaatggcacgactgatgttgctaagtttgaggtggctaacttggcaggtcgaaacctt

SEQ ID NO: 27006 - DNA, 370 bp, Gossypium hirsutum
  Clone ID: LIB3166-031-P1-K1-H4
gttgaaatctttgacaaacctgaatttgttgaacttgagttacacatacgatctgaggaaaatcccatcgcatctgatatctagtttttccaaattacaaatatttagaacatggtgcacgacaagtggatattatccaaaggaagataatgttctgaatggggacaatgaaaatcttatagaagagttgaaaagtttgcgacatttgaacatactaacgataccaccaattaaaagcttgtttgctctagaaaggtttgtgagcttccacttgtttcaatgttgcacccaagcactacatttgaggcatcttagagagtcaaatgtgtttaatggtttatgcttggaaaacatggagcggtgctagaga

SEQ ID NO: 27007 - DNA, 331 bp, Gossypium hirsutum
  Clone ID: LIB3166-031-P1-K1-H5
ggggcgacgccacgcgtgccgcttactcctcaccatggcaataacctttcttcattgactccactaccggtcgccaccgtctgggtttcccaactttggcaatcagttgactccgttttcacatgtctgtccgaattgggtattcggaaaggaaacatcgtcatcatcatcgcaccaaactccattttcatacccattgtttgcctctctgtgatgtcttttggagctattataaccactagcatccccctcaacacgtctcgtgaattcgtggtacaaatggctgattcaaagcccgttctcgtcttcaccacttttcaagtcttcccaa

SEQ ID NO: 27008 - DNA, 369 bp, Gossypium hirsutum
  Clone ID: LIB3166-031-P1-K1-H7
gaagggctgaaaccgttttgtgccatttactcttccttcctacaaagaggattggatcagttagttcatgatgttgatcttcaaaagctccctgtgagatttgcaatagacagggctggcctagtgggtgcagatggaccgacccattgcggtgcgttcgatactacttttatggcatgtttgcctaatatggtggtaatggcaccttcaaacgagactgagctgatgcaaatggtggcaacagcagcagccattgatgatcggcctagctgctttaggtaccccagaggcaatggcattggttctattctcccaccaaacaacaaaggaacaccattagagattgggaagggaagagtactaagagaa

SEQ ID NO: 27009 - DNA, 152 bp, Gossypium hirsutum
  Clone ID: LIB3166-032-P1-K1-A11
acccattctttgtctgagccttttttatctccaatcacaatttcaactaaagagttcctttctatgaagccaacaatacctaccagtcgattagttatttatgccttctcctattaagaatgctaacaaataacccacacttataattatat

SEQ ID NO: 27010 - DNA, 210 bp, Gossypium hirsutum
  Clone ID: LIB3166-032-P1-K1-A12
cccacgcgtccgcccacgcgttttttcacgcgtccgtccacacgtccgggtgaacgaaccggtccatctatgctgagttttcttccttcctacatagcaatatatttgtgcttttacaagtaatgatggataaaagctgatgtggatatttgttagtttagaagaaaaaaagggtaattttctggggggttcaatagcctaattatcatg

SEQ ID NO: 27011 - DNA, 317 bp, Gossypium hirsutum
  Clone ID: LIB3166-032-P1-K1-A3
gttctatgttatgcaaatttagaaacagaaaccaaataatttcctggtctttgactcttgaactctctgaagcctttggttgatctcgcaaatgggttcagccgtttggttatttttggtagaggtttctattcatatctatatcgttgcagctgaaacagaccctgatgataatagttcgctaagagctgtcatgagtgagtggaaaaatgtaccatctaattgggggagaggggatccttgtgatgattaatgggttggaattgggtgctctggttcacgtgtgatcttcatttatctgtcaaacatgatattgg

SEQ ID NO: 27012 - DNA, 200 bp, Gossypium hirsutum
  Clone ID: LIB3166-032-P1-K1-A7
cccacgcttccgtggacgctttgtttgcaatctcttttttttagagtggggggacaccttatattacattgggttctatcggtgatacttaaatgacacccacccatgtctcagatgaggaagcctacttattcgttatgcatcttgccagtgcttttactcttttccattgacctttaatcatccattgtactagtctt

SEQ ID NO: 27013 - DNA, 256 bp, Gossypium hirsutum
  Clone ID: LIB3166-032-P1-K1-B1
tcgatccgattcaacttgcgtcattttcccacccaaggtcttccgagttttggagaggccggtgcatgaattccaggggcatcagctctcaaattttggctctttcctggtctaagaaagggtttttactgtcatctttctgtcgacatgaccgttcgtctgtggcaagtgggattctattgttgctcgtgggttttttcttataatcaattttgttacttctgttgtcttcatccctgtggtagacttttttttc

SEQ ID NO: 27014 - DNA, 159 bp, Gossypium hirsutum
  Clone ID: LIB3166-032-P1-K1-B12
tcgcggacgcgtgggtttggagtgcctttgttatcctctacatcttactttgtggtgtcccaccttcctgggcagaaactgatcaaggagttgcgcaagcaattattcgttctgatatatgatttaagagggaactctttcttaaagtttttgataatg

SEQ ID NO: 27015 - DNA, 225 bp, Gossypium hirsutum
  Clone ID: LIB3166-032-P1-K1-B3
aaaaaagttcccaaaaagaaaatttttcttcgcaaatagcagcaatggagctggtgaatcgtctagggttcgattgctatgatcgtcttcgacctttctatctacccgttttccaagagaggcattctagctgaccctttttgaatatggctgttgaataaaccactaacagcacttatgagttttcattctattagctttaaatacagttggagttcctacact

SEQ ID NO: 27016 - DNA, 187 bp, Gossypium hirsutum
  Clone ID: LIB3166-032-P1-K1-C3
cgcgattattggaattcgccgagtgactttcctggcccgttaaagagatagtgcggggattaatgcaaagacctaagagaggagaagaaggataagatctacactttggggccaggcgggtcataccgtctaactggaatgagtaacccgcttggaaatataggaatactagtgtagttcatgattt

SEQ ID NO: 27017 - DNA, 332 bp, Gossypium hirsutum
  Clone ID: LIB3166-032-P1-K1-D2
cccacgcgtccgctttgagcctttttaacaaacacaaaaatatgagagcagctatgcctcctattaatacaaagaacatgtctactcctctagaagaggaggaaagtgagctgagaagaggaccatggacccttgaagaggatactcttctaacacattacattgctcgtcatggagaagggcgttggaatatgttggcaaaatgtgcaggtctcaagagaactggtaaaagttgcatgctaaggtggccgaattatttaaaaccagtctttaagcgtggtaactttactccccatgaacagtttttgattcttgaactttatttcaagtgg

SEQ ID NO: 27018 - DNA, 214 bp, Gossypium hirsutum
  Clone ID: LIB3166-032-P1-K1-D4
tcgttggcatctgccatgttccgcatattgtatgaagccttcgttgctgagaaatacaagcattggatggttgtgcgttggacgaacctatgagatgcagtaagaggagcctatgcgttgtcagatatacaaaatcaatcttgaattcatagaaaacttcaataaaaagtggtattaaacatatttagttaagtaccaaagtatttgctttctt

SEQ ID NO: 27019 - DNA, 155 bp, Gossypium hirsutum
  Clone ID: LIB3166-032-P1-K1-E11
cacatttcatgaagaactcattttttatggaagaagtagaaaccatatgcgggacttgtctcattacaaggatgattccagtccaaacgcttggtattactctgactgggttcgcacttaatgccatattcttggaggagaggcttactatgttt

SEQ ID NO: 27020 - DNA, 309 bp, Gossypium hirsutum
  Clone ID: LIB3166-032-P1-K1-F5
ttcttccactcgtctctccacgcgtcctttttttttcgcctgcaatgtatgatatgatgaggattaaacataagcttgtgagcataatgtgacccatctgctttactacttgagcacaatttctgcaggtgtttttaaaattttcaggtgattaattttgttgggaaaaagaataccttttaacttgcatatcttcaagaattaagctgtttgtttttgattcaatttcttaatttacccttggtagctacttttcatttattgattccctctacaaagtgtttttttattttttggaactataaataa

SEQ ID NO: 27021 - DNA, 330 bp, Gossypium hirsutum
  Clone ID: LIB3166-032-P1-K1-F7
gaaaaattctttttctaaaactctttcccagaatagcttttgatcaaaaagctaatatgggtagccttgaaaaagacagaaaaacaactggttgggcttcttgagacccttttggcatctagactccttattcttactctcttatgaacactggtccagaagatgtattcatcaaggttatatgttgtggaatttgtcacactgatattcatcatgcctatatatatcctggcttgtcaaactacccattggtttccttgcatgaaatggctgtttgaagagttgtttgttttttcctttttttttaacttttcacttttatttgtcatt

SEQ ID NO: 27022 - DNA, 143 bp, Gossypium hirsutum
  Clone ID: LIB3166-032-P1-K1-G1
gaactacatgtgtatgagttgaattagatagatcgtgggagtacagcttaccggggtgtgagtcagtaatcagtgaactcactgggtgatcttggcctctttaacaacaaaatatataggggggacttggtggaactattcgg

SEQ ID NO: 27023 - DNA, 192 bp, Gossypium hirsutum
  unsure (1)..(192): unsure at all n locations
  Clone ID: LIB3166-032-P1-K1-G11
tatgtctctaaatggcctgatttttggaggaattttgatatcagagtcggnggnntatcttattctgttagcaacttttagtccatagtctctgatttcaattctttcaacactgaaggttggaaaattggtgccaccaccaacatcatatggttcggtcccatttctccgattaatactggtatttacttg

SEQ ID NO: 27024 - DNA, 147 bp, Gossypium hirsutum
  unsure (1)..(147): unsure at all n locations
  Clone ID: LIB3166-032-P1-K1-G5
cccacgcgtccgctcttntttttatataatggattgaaattatgattgaagctcaaggtttctcgcgtaatttctcctccaaccaaacaaagcccaaaagagaaagtaaaacagccacactttccaagtgtaaatggctcatgcttt

SEQ ID NO: 27025 - DNA, 186 bp, Gossypium hirsutum
  Clone ID: LIB3166-032-P1-K1-G6
cccacgcgtccgtgatgttgctgatccatgtaggaacactgtcaaaggttcacggagtattgatggggacgacggtacaataattgagaaaacctgtgtgttgcttgaattcattcccacggtaaattcatcaggaagcaacgacactataaacagatgggagaacattgggcctcttttaaaatc

SEQ ID NO: 27026 - DNA, 226 bp, Gossypium hirsutum
  Clone ID: LIB3166-032-P1-K1-G8
cagaatcacaattactagaacctttttgagcacgaatactaggataccgggggtgtttccaaagatatggcatcggtcaatcaattcgtatacgaggaccctgttccttcctctttagatgcgggttttaatgcttcatataatgcccccttgtacttcaattcagtcctgggtagtaacctgagcaattgctccgcctattgttggggagaacagggtgccaaaa

SEQ ID NO: 27027 - DNA, 269 bp, Gossypium hirsutum
  Clone ID: LIB3166-032-P1-K1-H11
tgataatggttgagatagcctatgtaacagaatcgtggcgaagaaagcgggggaattcaaatggcctggtgtttgtttatcttaaattcctgccataaacccggtttatgataaacctgatcatgttcaaatttctatctagcctatgccaaattatgcatctgttaatgaaccttatcaaatctgcatcaaatgaagtcctgtgagatgtgtcaaatagaggaaagatacattttttcatatcacaaccttcttattttcagtattcc

SEQ ID NO: 27028 - DNA, 291 bp, Gossypium hirsutum
  Clone ID: LIB3166-032-P1-K1-H12
gtagaagaccacctcatatggcattccttggcaatcctggaaccggtaaaaccatggtagctcgaattctcgggaaattacttcatatggttggaattctacctacagacaaggtaacagaagtgcaacggactgatttagtcggtgaatttgtcggacatactgggccaaaaacgaggagaaaggtccaagaagcagagggaggaatccttttcgttgatgaagcatatcggttaataccgatgcaaaaggctgttgacaaagactacgggttggaggccttggaagaga

SEQ ID NO: 27029 - DNA, 300 bp, Gossypium hirsutum
  Clone ID: LIB3166-032-P1-K1-H5
aagctcactgccggtttgtttagaatgatttagcgaattttctgaattatttatgaatcgctggaatttctgttattttttcttgagttcgccagtgttggtacacatgtagaacatatttatatattaaaatactgaaggttcatgatcaggaatacattactgacccatcacctgcccttttcaaaagctccaagaagggtgttttcggctaatccacctgctgaaaactttgtattgagtagagatcacggttaaaggattttatttgtggtaaagactgttaatatttctaatttt

SEQ ID NO: 27030 - DNA, 314 bp, Gossypium hirsutum
  Clone ID: LIB3166-032-P1-K1-H7
acaccatacggacagaacacttgctgctagagaaagccctggttcggctataccagagcgctatgctcgacaacctagcttttaaggttgacactgatggggataggaatagggaagttgaagtggagcgaacatcaaggatgagtaggagggcacacttgggaagcgatgaaacggctgactcaaaaaagcttatgaactttccatcctctgtgatgctgaggttgatcttacattttctctaatcgtggaaactctatgaattttccagttccaacagcatttgctggttcactagagaggttcaacaggtg

SEQ ID NO: 27031 - DNA, 142 bp, Gossypium hirsutum
  Clone ID: LIB3166-032-P1-K1-H9
cccacacgtccgctcaagatctagttataagaactatgaagcgcttgctggagcggggttataatgatatttagcacgactaaatccatgctgataaacaggctacattttgaatgaccgtcgatcttgcacggcaggagta

SEQ ID NO: 27032 - DNA, 193 bp, Gossypium hirsutum
  Clone ID: LIB3166-033-P1-K1-A2
ctttatcctaaaaactacttacatttgccgtatccaccaaacaagttaaggaaaggagaggcaagtatcaccaaaccatggggtctaaccgctagcctcgaaagactccctagttaacctaaggtggttcctgtgagttacaacgggaagacctactgtttactaattgtactttcctctacaaagaactgtc

SEQ ID NO: 27033 - DNA, 127 bp, Gossypium hirsutum
  Clone ID: LIB3166-033-P1-K1-A9
cctagtacaaaataggttctgtttagtaacaatagatggtaagcgtgaggcgtgaggctgtgtaagaccaaacctattttgtctcacatgaaaacccaggtttttatgtagacctcagggacaaaaa

SEQ ID NO: 27034 - DNA, 283 bp, Gossypium hirsutum
  Clone ID: LIB3166-033-P1-K1-B4
aaggactccaaagtgcacgtgtacttgtttggcgatagttctggtggcaacatagcgaccatgttgcggtgagagcagcaaatgctgactttgaggtactaggcaacattctccttcacccaatgtttggtgggcagatgagaactgaatccgaaaagagattggacggcaagtacttcgtgacgctccacgaccgctattggtattggcgagcttatctaccggaaggcgaagatcgagaccatccggcttgtaacccgttcggtccaagaagtcgaaccct

SEQ ID NO: 27035 - DNA, 233 bp, Gossypium hirsutum
  Clone ID: LIB3166-033-P1-K1-B5
ctttattagtttttattgctctacattcttgacttcctacttattcaatatttgtggggagaggtgttcaaagtatgttagctatggattagaaatggtgcttacagttcattgcatttcatggtttgggttcattattactttcttgttgtcagaaaaagaaaattattcatagttgcttgtttattaattaaccatgctttgaatgtagtttgggtataaaaacttatgat

SEQ ID NO: 27036 - DNA, 184 bp, Gossypium hirsutum
  Clone ID: LIB3166-033-P1-K1-B9
ttactaagaaccctaattctatctttcctaatagactaaaggaaggcaaaatggtgggtttactttaaagcccggccataaacttccaattacaccatttttattggtcttgacaattaccatatctagtagctcatcaaatttcacttcatctaatatatttacctccatgttgatataatat

SEQ ID NO: 27037 - DNA, 253 bp, Gossypium hirsutum
  Clone ID: LIB3166-033-P1-K1-C10
gagctatcctggggtccgttgatttaatgtttgctatattgttggagcactatgggggcaaatggcctttcctgcttagtccccgtcaagcaattgattgccctgagttcagaaaagtctcatcaattatgcaatgcatgtcctggattggattcatgaagctggttattatgcatatgtttacattgtcagattgaatgattcttcttaatgattctagttgcttcttatttcatcatttccaactattatt

SEQ ID NO: 27038 - DNA, 314 bp, Gossypium hirsutum
  Clone ID: LIB3166-033-P1-K1-C4
ttggacgcgtggggaatagggacatttactattcagctcttctctcttttctgcgtctggtcatcaaaccccaaactcttaactagcctcttcctccttctctttactttaatttcattttgctttcacaaattttataccagagcttccaaatgattgaatttttaacctctcaaattaaaatcctttcctttttctcgtttttgttgaaaatttgtttaaaaaagagggtgattttaaaacaatgtattctgattcatggagagcttgtctttcttcagtttctaagagatatcaatcggctctttcaatta

SEQ ID NO: 27039 - DNA, 376 bp, Gossypium hirsutum
  Clone ID: LIB3166-033-P1-K1-C8
gtcatcccctccaagttctgattgcctacctgagagcatatcctttctcctccgtctatcaaatcgaaattgacttgcccatcatctcattccttcttttaagatatctagctttagcaatatgcttccagatgatgactcccataaattctcgacttcttcattgaaagacttccattatgcaccatgcttcaaacttgtaagctttagtgttcaccctcttttcgacccgcctagtagtcattaagagaggacaatgatccggacaagagtgcggcatatgttgaatagtgtcctctgtaaacaaactcattcatgcatcatttgcaactttgcgatcaagttattctcgaatatttgcttccgggcagatttt

SEQ ID NO: 27040 - DNA, 375 bp, Gossypium hirsutum
  Clone ID: LIB3166-033-P1-K1-D1
cccacgcgtccgttggatctaaagtgcccgccctccctttctctcctccaagagccaacattgcacggctaccttaatttaccaatattaccattactactaaacgcttaaactagcattttttttcatacctctatacagtaatatcatagccggtcgggtataacatgaaagtacatgacaattcagagagacacacacacagagagagagtgagagccagaccgagatcttcgattgattgatacccttgttattatagaaaaaaaggtacagagatcaaaggaggagtgaatggccaacacgagaacagcaaatgttaacatgaagagcgggataccgcactggggaaattaccaatttgggcggaatttc

SEQ ID NO: 27041 - DNA, 196 bp, Gossypium hirsutum
  Clone ID: LIB3166-033-P1-K1-D5
catgaaaagagcttttgcgggaatgttgctgcagagagaacagatgtgcgtggggacggagaaactagtaataaagattgacatctgtgagactgcagctgatgggattgtcatccaccaacatgataataaccggcccgtcataatgcgcatgcctatacgttctaatgcaagtttataggatccatttttttgg

SEQ ID NO: 27042 - DNA, 157 bp, Gossypium hirsutum
  Clone ID: LIB3166-033-P1-K1-D7
gaccggacgggccggggcgacccacgcgtcctgtttgatgtaaatccatgttttatttggacacatgcctataaatgaggcgaagggatgtattcagaatatgcttaccatatagtacatacttgttcagctacataaacattgaggttcttcgata

SEQ ID NO: 27043 - DNA, 300 bp, Gossypium hirsutum
  Clone ID: LIB3166-033-P1-K1-E10
gaaggggggggggaccacgcgtcctccactctttcgtccactttttttttttcttaactcacaaagctcaggggtgggggaatcagtttaaccggtctccaaaattaaaaattacatggtgatgccaacacagactgaggctaccacgatccatggctcggacccgaccggtaatggttcaaagtacaagggtgttaggaagaggtaatgggggaattgggcattcttaattcgactttccaacaggctgtaaactgtatttggtttggttacttactatctcgtcggtataaagccttt

SEQ ID NO: 27044 - DNA, 208 bp, Gossypium hirsutum
  Clone ID: LIB3166-033-P1-K1-E11
tatttgtattaagaatcgcttttttttgatcagtgaggagaaaaaaaggggcgggttgtggtggaaactgcggttgctactcccgttgtaatgtgcttctaattgctgaggttgtagcaagactaaccctttgattgaactttgctgagcaaaccacatccgggtcacttgttcttggcgtgtcaccccggaaagtgctctttgatgg

SEQ ID NO: 27045 - DNA, 368 bp, Gossypium hirsutum
  Clone ID: LIB3166-033-P1-K1-E12
ctaagatggaatttcccacttatgatggggttggagatcctttaggaggttggaaagatgcgaaaatttttttggcaatcaacagaccaacgaagaagacaaagtcggcctagcttcattccatcttttaggagaggcacaattatggtttgatcaaatcgaaaatgaggaggcatatctggattgggaacgctttagagagtgttgtcatatcaggtttgagccacctatgagtaataaccccttgggggaacttgcaagcttgagacaaactgggacggttggagaatatcaacgccatttttaatcactactcgctaggactactgatcttaaactcttgcaacaagtaaacttttttactgttg

SEQ ID NO: 27046 - DNA, 349 bp, Gossypium hirsutum
  Clone ID: LIB3166-033-P1-K1-E5
cgttaatcgcggcattcactcaattgattctctatgtttagttacatggaaagcgggcgtggcacatctttttgtcctgaaaatttttcttttaacaacaactacaacagctacttcttttgcattgtggatctggaatctgggtacaacggatacaccaagaggagggttagaaaagactttgaggaatctattgttagctgatagagagggtttggtgatatactttactcgatttcgatgttgtatgaggaagcaaagcaagaccagttacaatgggtgactaaccgtgatcaatatagagcttgctaccaagccaattacaagggttatgtttatgaaatgaatg

SEQ ID NO: 27047 - DNA, 142 bp, Gossypium hirsutum
  unsure (1)..(142): unsure at all n locations
  Clone ID: LIB3166-033-P1-K1-E8
gtcctgatgacattaagcttgagttattaatgctcngcatctgattgcgaaggaactttcacttaaaattgtgagcaagattgaagcatgagagaggtataccgtttatgttgatgtccttatgtggccagtaggaatccca

SEQ ID NO: 27048 - DNA, 355 bp, Gossypium hirsutum
  Clone ID: LIB3166-033-P1-K1-F11
aaagaatggaaacatcgctccaacatcgctaatgagcttcttcatatgcaaggaagaatcgttaatatatctgctagccgtgaaacctacggcatcagaaacattggggaagggatcagtactgcaagggagaggcttcggaaactgagaagatcatctcctcgccgtgaagagaaggatattgttggcctggacgaagacatagataagcttgtgaaacaacttgtcaagaccgatgaccaatggcatgcgatttcaatagtcggaatggggggcatcggaaagacaactctggcaaaaaaggtttacaatcatggtgatatcgaggctcgttttcctttttgagcatgggttt

SEQ ID NO: 27049 - DNA, 349 bp, Gossypium hirsutum
  Clone ID: LIB3166-033-P1-K1-F12
gccattcaggcgaatctgttgccgtgaagaaaatttggaatagtatgggagtgggtcacaagctcgagaaagagttcttagcaaaagttgaaatattgagcaacattcgccattccaacatagtgaaggtattatgttgcatttccagcgaagattcaaagctgctggtatacgagtatatggaaaaccagagtctagatagatggcttcatgggaataaaagaagctcagtgtcagggacgagttccttccaccatgctatattggactggccaagaaggttgcacatcgcggttggagcagctcatgggctatgcttcatgcaccatgagtgccttacaccaatcat

SEQ ID NO: 27050 - DNA, 149 bp, Gossypium hirsutum
  Clone ID: LIB3166-033-P1-K1-F8
cccacgcgtgcgctaaactatcattatatgcccaccagaataaccacgggtccgactcttatataccatacaaagacttaaagacatcttgtctcatcttccaacttcaaccaagacatagttgcatctgggaactacgggagggacat

SEQ ID NO: 27051 - DNA, 385 bp, Gossypium hirsutum
  Clone ID: LIB3166-033-P1-K1-G2
cctctcacccttcatatcagaccgagtcctcgtcaacgggaaagtggttcccctgacgttcaccagagacgggaagctccggtggaaccataacgaccggcggtgcttgaacgttgagaaggaagctctcggattcaccttcgaaggttctagaatccgagtcaatgtcgtcgtcgaaaagagagatagaatcctctgtttcgcgaacatgggaggtatagggaggcagagtttcgtgttcgagcctctctctgaggaatcgctcactctttggtctcagaagcttcgtgattatattgattctctcggtaggccaaagagactattgatatttgtgaacccgttttagggaagaaatgtgcaacttaaaattttggagaagatt

SEQ ID NO: 27052 - DNA, 384 bp, Gossypium hirsutum
  Clone ID: LIB3166-033-P1-K1-G3
cggacgcgtgggtttacaacgagagcgctcagttgaggtccgaatcaaaacagttggagcgaaccaaattaacctacttgagatgagcttcaataaattgaatgaaccaattgataaaaggcagctggatctcaataccaaaagctcatctggcgaattaaattctgaagctgctcatcaaaccggcatcacctctaaaactaatgatcttaagaaggaaagtacagagtatgaggcttcaaacaggatttccaagatctcagatggcaatgataaaaccactgatgattctaaagaagtactgccttctactgaacttgggtttaaaagacttagaggagctgaagacactgaggccatgttgagggatgagcgaaatgtttt

SEQ ID NO: 27053 - DNA, 378 bp, Gossypium hirsutum
  Clone ID: LIB3166-033-P1-K1-G4
gaagaagctatcatctcagctggaaactagtagtgttcgggatgaattgcaggggtcggagctcattccgcagtctgaatctggaaatgtggattcctgggaagtgcgaagttctagtgtggcatcgagcacaagttggaggagaaacatgattcaaagatctccaagtgcttctgggggcttggcaactcgtgctaacgcaagcaggtatgggttgagaaatttaagatgtaagtccatatccgatgttgtcccgtctggttgtttatcatcagattcaagcattagaagaagggaagacacggttaaaacgagaaactctgatggagagggaagttcctccggttccagtaggggaaagatgttaagtgggtcatt

SEQ ID NO: 27054 - DNA, 314 bp, Gossypium hirsutum
  Clone ID: LIB3166-033-P1-K1-G6
agaacgagaaagtggggatgggtttagtagggtttttcgagaaaacagattcggggggaaatgaagggaatttggaagaaagtgaaggaaaaaataaggaaagaaatgaacatgaggaagaagaagctgtcgttttttataggcagcagcagcatcagcatgcaacgttcttgggtctcgatcttaatctgcagccgcctgaggaaattgatttcgggaacgagtttggggggtttgattttggtgttcccgagtatcaatcgtataattttatcgtgtttcatagttgttgtttttttttttcttttttaatt

SEQ ID NO: 27055 - DNA, 225 bp, Gossypium hirsutum
  Clone ID: LIB3166-033-P1-K1-G8
cccactcgtccgaaaaaaaccaatcaaagatttttttttttggtttccggatcgagttttccccttttggattcgattaaatctctccccaaaccctaccatttttcattctcatggtgtaaaatgtaagtacgaatctcttgccgtctacaagaaatacttactttacacgccgtttcaactgaagaatcactcctcaaaaccctagaaaatgtcgggctgatt

SEQ ID NO: 27056 - DNA, 362 bp, Gossypium hirsutum
  Clone ID: LIB3166-033-P1-K1-G9
cccacgcgtccgcccacgctttcttccacgcgtccgcccacgcgtccgggtgcgtgttcgtgggaaggatttgaaggcgggaaattatatatacggtaatctacatttggtagatttagcaggtagtgaaagagtagatagatccgaggtaactggtgatagacttaaggaagcacaacatattaataaatctttgtcttcccttggagatgtaatttttgctcttgcacaaaagagccctcatgtaccatacagaaatagcaagctcactcaagtactttaaagctttctcggaggacaagcaaagacccttatgtttgtgcaactcaatctcgatgtcactttctattttgaaagtttga

SEQ ID NO: 27057 - DNA, 258 bp, Gossypium hirsutum
  Clone ID: LIB3166-033-P1-K1-H10
ccctctctgaattgggttttctatcgcgcgcggggtctctatttataggtatatgtccctctattacttctccacaaaagatcccatattttttttttagatcactctctcctgtgcttacgataataacatatacgtattcaccaatgcatgaacttccgatccaaaggaattttgatccctaactaggaatactttaccgagtttgacccacctgattgactcactgtgtgggggcttctacatgttggagaaact

SEQ ID NO: 27058 - DNA, 162 bp, Gossypium hirsutum
  Clone ID: LIB3166-033-P1-K1-H11
cggggcgggccaggcgtacgcataatttcgcaagtttacaattttttctgctccatggataagattaacttagtgctggcaatgggtagcgccatcatttgatgctaatgaatcctttgctatgatgatggctccttttgttgcccacgtagagtccactgg

SEQ ID NO: 27059 - DNA, 162 bp, Gossypium hirsutum
  Clone ID: LIB3166-034-P1-K1-A1
gatggaagaacacaccagcaatctcctttggcaacttcagtgatcacacttacggtccataaattccacacttggccgaacacttatgctcacacgattcgatatgcgagcagtggttacgtgttcgaaagatgctctgacgagaggaggaattttgatatc

SEQ ID NO: 27060 - DNA, 127 bp, Gossypium hirsutum
  Clone ID: LIB3166-034-P1-K1-A11
ctttaagaagctatactacctttttttatatctcaagtactttaccgcgctgtttataaatcaaactgagggtcttcacacactaaaaaattctcaatgccaacatcaagacgatcatatgatctta

SEQ ID NO: 27061 - DNA, 287 bp, Gossypium hirsutum
  Clone ID: LIB3166-034-P1-K1-A4
tttggtggttcctaacagttgtttgcttaaaaccgggagggccacaattggcagggcaggcaattgatcttgcggagacacgtttgttgaaagatgcctggccagaatattatgatggaaaactcgggagatttataggcaaacaagcaatgaagtaccagacatggtcaatagctggatatttagtggcgaaaatgatgctagaggatccatcacacttggggatgatcgctttggaagaggacaaacagaggaagccaatgataaagagatcatgttcctggaat

SEQ ID NO: 27062 - DNA, 299 bp, Gossypium hirsutum
  Clone ID: LIB3166-034-P1-K1-A5
cgcacgcttgggcagaacatgtcaatatgtttatacctaaattttgggacaatggcgtctttctaaataatcataattatcggaagacacacaactggccctcaacgagtaccgccaagcaacaaggaaaggctgataaaataacttactcatgttcaagagaggactaaacaccttaatatccttcttcacaacttgtgagaaaaaaatgcacatttctatgctcacgaactacttcacaaaaactttgatatttttcaccacacacttatctagatgacttcttgtgcatcttcacc

SEQ ID NO: 27063 - DNA, 264 bp, Gossypium hirsutum
  Clone ID: LIB3166-034-P1-K1-A6
aaatattagcacagttacaaacacttctcgtttgatttgttaaggagagtggttgtgattaaaaaaaaaattgggtaagatcttggagagagagagtcaatgaaagagagagaaagactgtggtgggttatcatcaattcttgtttttgtatgtattattttgggtttttcacctcttccccaaagtaattgtgcatttgatgtgaaggggatagctttaaaaaaggttccaatatttaagctgttttaatggtgaggtggatt

SEQ ID NO: 27064 - DNA, 394 bp, Gossypium hirsutum
  Clone ID: LIB3166-034-P1-K1-A7
cccacgcgttcgaaggaggctagaatgttgggtggcgagttttctaagcaggtgtaaactgtaaagcaactgtttgtggagcgtacggaaaactacgggattccggagcttgagagattgtacagttttattatgaaaggcatttttgaaagtagggagaaaggagtcggagatgatcccaagccttcaattttgaagtttttaatacaatttgcagaggacgaggcaaatttctgatctcatttgtcctcttcacatgtttttatttttaataggtaggctgttgtcaagtccgaattttctcttttcaattcatattagtgagtgggaaaaaaaaacattatttttttcatcatattaatattttattttatttttcttgctcttctttttt

SEQ ID NO: 27065 - DNA, 337 bp, Gossypium hirsutum
  Clone ID: LIB3166-034-P1-K1-B10
gatgtttacagagttatgccccttttagcttatcgagctgacaaggctagggtggctgatcagaagcccggtcccgatccctagttcgctgctgcgatcagctcggttgtgcatcccaagaacccctttgctcctacgctgcattttaactacagatatttcgaaacagatgcttccaaagatgcttctggagctccaaggtaattggggtttgggggtggaaactgaattgactccaccttaaattctatgaggaggttgttatgcactttccatacaatacggaggaaatagcatgtcacataatttttatcccataccttttatacttctattt

SEQ ID NO: 27066 - DNA, 213 bp, Gossypium hirsutum
  unsure (1)..(213): unsure at all n locations
  Clone ID: LIB3166-034-P1-K1-B2
nccacacttacgcactctttcgagtctatttccgagtcaactcaaaactccctccgggtgtacccaaacagattgcgtaattattcgtcactatagaaccatctgcctttcgctccgctgtggcagctatattataccaaactcacaaagatctctaaaatgtctatgatcatgccggcacagagtcaccgttacgaccctgcggtctatgga

SEQ ID NO: 27067 - DNA, 375 bp, Gossypium hirsutum
  unsure (1)..(375): unsure at all n locations
  Clone ID: LIB3166-034-P1-K1-B3
aagaatttctctagagtttgtacagctcctgtagagtgttacaataataattccatagtaactggagctcaggtacaggtagagaaacatggattgaaaagcattctctttttacgacttcatttctctaccgttttgggaacggtaatcctaagccgttcagaatgggatggatcatttggaattgcacctcagtccggaatcctatctgatcttttgagtaatcctttaacaccacctccaccacaaagaaagccagatacaagctgttcagtttaccctggtggccctccaatgccaaattataccccaaaactattgaaatatgttgatacagcagagatgaaaagagggccacaagatcctnctggatac

SEQ ID NO: 27068 - DNA, 330 bp, Gossypium hirsutum
  Clone ID: LIB3166-034-P1-K1-B5
ctcactcgtccgatcactcaacattctcatgttcaatctgcaaatacgaaggtgaggatgccgatcagaaacataccagtagagcggactgaagaggcaactcacaccgatgctctgaatgcagctatggctgagttgatctcaaccttgatcttagcgttcgctggaacgggctcaagaatggctatcaacaaggtgaccgacaacggagcaacaactcgggccggcgttgtagctgacggtctagctcatggcttcggtcttttcgtgggtgcctacgttggaggcaacatcttaggcggccacgtcaaccacgtcgtgacctttggt

SEQ ID NO: 27069 - DNA, 369 bp, Gossypium hirsutum
  Clone ID: LIB3166-034-P1-K1-B8
gaatcatgcaagatctgactcagcatctagtacactttctaattcagattttgctcaaggaccaggtggagatgccaatgagagtttggaggcgtcaactcatctcagggccaatagtgatgttaatggagaggtgaaatctgacccgcagcctgtggctagctcagccatcccacagagagaagctgagttctctcctcgatttatggatccaagatctcgaagccaaagaatctggcgccgacaatcagagagattcgttccaaggatcatttcttctcctggtattgagaacagggctgacctttctggcactgaaacccgggttaagaaattggtagaggactttgagtgcacttcagtcgatac

SEQ ID NO: 27070 - DNA, 281 bp, Gossypium hirsutum
  Clone ID: LIB3166-034-P1-K1-C11
accaaatttctactttgaaaggattcatcaccgcaagagatcaagctccaggggtgcgtctttattgccactgtcaagcaactgtatatcataaaatgatctatactagcatccattattttgcttggttgtgcaatacttgtttcgtgagcgcttctaatcattcggaataatggatactccgaacattaactccttgagccggacgactttgacacagacaaagtattcactaacgactccactgtctttactcatggtcttcttaatgctggaaatga

SEQ ID NO: 27071 - DNA, 349 bp, Gossypium hirsutum
  Clone ID: LIB3166-034-P1-K1-C6
gtctaagcatcaaaaacttgcctacccggatcggtgaactgcacaatctaacgaagctctctatgagagggtgctctagttgtaacttaccttcaacaatcacgaagcttcaacatttgaaggacgttatatgtgatgaggagactgcctaccagtgggagttcctcaaatcttatctcactaatttaaaggtaacagttcatgaacaagatatcaatttaaattggcttcagatatttgtataatctcctcttttcatgtatctcgcagtatccttggggttttcttttttttgtaataattgtagttagggagaaaagagatgtggattgaatccacgctttcatgt

SEQ ID NO: 27072 - DNA, 312 bp, Gossypium hirsutum
  Clone ID: LIB3166-034-P1-K1-C7
gcactcaaagaagagcacattgttttccagcttaatggcatgactgttcaacaggctttggatgaaaacaagttgttaatggtggattatcatgacatttacctaccgtttattgatcggattaatgcttttgatggccggaaatcatatgctactcgtaccatattattcttgacttcgagctggactctcaagccagtctccattgaactaagccttccttacacttcacctaattcccgatccaaacgtgttgacacacctcctgttgatgcatccacaaattggatttggcagcttgctaaggctcac

SEQ ID NO: 27073 - DNA, 333 bp, Gossypium hirsutum
  Clone ID: LIB3166-034-P1-K1-D12
ctcacgcgtccgcccacgcgtgcgtttagatccgggggtgactatggcgcagctaaggagatgcttaaacctgccgaacctggtactggattgattgcaggtggtgctgtgcgaatagatcttgaaatggcatgcgtggagaacgctatgggcaaacaactcggaagtaaaaatgcccttaacaatgccagagctactgttgatgctgtgcagaaaatgaaacagttccaggtggttgctctactacaaggaatccccatggaagagttgtggacgtgatggcattggaagcgttctttaaattttcttcttgagattctctgggaatgttga

SEQ ID NO: 27074 - DNA, 384 bp, Gossypium hirsutum
  Clone ID: LIB3166-034-P1-K1-E1
cgagattgtgaaagatataggatctgtttattttggtgtggtcaagcttgttagaggtagatggacaaaagaactctttgctgttaagttcattgagagaggccacaagatcgatgaacatgtgcaaagggaaattatgaatcatagatcattaaaacatcccaatattgttagattcaaagaggttcttattacacctacacatctagccatagtcatggagtatgctgcaagtggagagctctttgagcgcatatgcagtgctggtagaattagtgaagacgagtgaaggtttttctttcagcaattgatataatgagtcagttactggcatttcatggaaatatgtcacagagatctttagcttgaaacactttccttgat

SEQ ID NO: 27075 - DNA, 292 bp, Gossypium hirsutum
  unsure (1)..(292): unsure at all n locations
  Clone ID: LIB3166-034-P1-K1-E10
atggcactataaatgtcaaatgtgttcaaaggacaacctaacaaacaggtggctgagaatacctaagatggagaacatgggtcgcgagtcagcagacatgggggacagagtacatttgggataccattggaaaggagggtgggaagcntgaccgtatgaaaccgacttactttacgagcacggaaacctccatgtacgaagggacttagaagcggatggaggttggctaggcatgtgtgcaacagccgggcactgcgacactatcatacggtgatgccaaggcgatccatga

SEQ ID NO: 27076 - DNA, 289 bp, Gossypium hirsutum
  Clone ID: LIB3166-034-P1-K1-E3
gctttctattcccttccaaaagctcagttttgcttccgttttacagctcctgattgggatgccctgctttacccttccaacccgaaagccacctgcaccctgtctctcccaacatcaaatagaagcacacacctcctacctttttttctcctcctttttccataagctaaacaaacgcagcttgatcttcaaatccctacacctaataaatccatcggttttttggtttgtaaatccaacggagaggaggcggattgcttgacgcgtatcgcgattgttagctctgacc

SEQ ID NO: 27077 - DNA, 320 bp, Gossypium hirsutum
  unsure (1)..(320): unsure at all n locations
  Clone ID: LIB3166-034-P1-K1-F4
atcccacgtgaataccaaaaaactggctacagtctgtgtgcggacactcgatgagtgttgtatcacacattcaggnagatttaaaggaatggtgagaagacagttagatggacggccaaagcttttatcntgaagacggaggggcactgatgtaagatatnnggctgaagatgatagcatctgaaatcagcttctctatctggtcaacttaaagagcttgaggagaagcttaaggtgctactgcttccaagtgatcctcttgatgcaagaaatataatgcttgaagtgagggcaggtactggtggtgatgaagcttgaat

SEQ ID NO: 27078 - DNA, 369 bp, Gossypium hirsutum
  Clone ID: LIB3166-034-P1-K1-F5
gatttatcggatcctaagtgggctgtattggctgataaaatccatgagaaagaggaaatgctttggcctcttgaaccgaagccaatatctgggaagtgcaaattggtcatggataaaatcctttctttgaaaaaggaagatgatccttcacagcttttggctgaatggatacaacttttgcaacctactcgtgttgactggatcactttgcttgataaattggaacgaaaaaatcccggcatacacttaaaggttatggaactggttttgggtgaagagtctttgcaaacaaacgttcgtgactataccaaactgatcgatgcctatgctaaagaggatcgtgtagaacatgttgagaggatccttaag

SEQ ID NO: 27079 - DNA, 367 bp, Gossypium hirsutum
  Clone ID: LIB3166-034-P1-K1-F6
gcttgtcattccagaattttgcttctactgcaatttcgaatacaaccttttgatagaataaaaataaaaacaaatccgttttattacgactcaaaatttgtacatcgatgctctgctattgttgctttttgtatgcacttgccttttcttccctccatgcagctgttaccttttgcctccattcaccaatatctgtagggagtgtatttctctggacggagacaccgcgatgaaagaaaggaggccattaccgcacgactttgcagtcactttctcattgatttaattttagtgtcatggttgtattctgaactttaatttttttcattttaatttcaggggtctggacgtatttctattaaataag

SEQ ID NO: 27080 - DNA, 162 bp, Gossypium hirsutum
  Clone ID: LIB3166-034-P1-K1-F8
ctggccctccgtctacatgggggatttcagacaatcgacaaaaccttaaccgggaagaccataaccctagatgtagatagcaacaacaccatcgacaattgtaagtttaaagccaagacagggaaagcatccaccataccagacgggctatcttcattggaa

SEQ ID NO: 27081 - DNA, 312 bp, Gossypium hirsutum
  Clone ID: LIB3166-034-P1-K1-G11
ctcagtaatctagtctccctttctttaactcattggttcatcaattgcactcttcttgaggacgggtttcgtgagatggatgacctactttttaatttaaagaagtccattgaatatgtcactgaaacaaaacatggaagattgaaattccaagaagctgtagatcaagtgaagctacaagatgggaaatcatgggatgatctttctctcaagctggaatcagactttggcatacttgatagtgctttgagatcaagagaaatctttcgtaaacttggagcaaattgatggcaattttaaactaaacccatt

SEQ ID NO: 27082 - DNA, 359 bp, Gossypium hirsutum
  Clone ID: LIB3166-034-P1-K1-G2
gaagaatttagacatgattgaggctatggaccttgagattggtcctcaaaggttgggttttcaagaacttaagaaagcaacaaagggtttcaaagacaaagagctacttggttttggtggatttggcaaagtttacaaaggaactctgccaaccacaaacacttaaggtgctgtcaaacgaatcttttatgaatcaaagctagggataagagaattcctgtttgagatttatagtatcggtcgtcttcgtcaaagaaatcttgttcagtttctaggatggtgtcaatgcaaaggttatctcttattagtctattgaattatgccttgcgttagtttggataatgaccctgtttgatgag

SEQ ID NO: 27083 - DNA, 138 bp, Gossypium hirsutum
  Clone ID: LIB3166-034-P1-K1-G6
cttcttcctttttttttttttcatgcactccaggtgtttaataaaattccgatattgctttttttctaagctggggaggttgggtatctgcttaaagatgaaaggaagtcatttcttatcttccttaatctaaacatt

SEQ ID NO: 27084 - DNA, 275 bp, Gossypium hirsutum
  Clone ID: LIB3166-034-P1-K1-H12
ggaaggaacgggtcgaccgacgcatgcgtaccacgacatgagcatccacgcgttcgtttactcgtccggtttcttcattctcggctggggcttcattcgcatgccccaatgtttgacgcatcaccaacgccactcttggtggccaacgtcgccgataaatgagtctttcgacctcgattccaaggctgtattttgatcgtgaaggcgtgatgcggtactcacatacttggggcttgcaatatgctagctggcggatgtgcttgatgttccaacat

SEQ ID NO: 27085 - DNA, 369 bp, Gossypium hirsutum
  Clone ID: LIB3166-034-P1-K1-H6
gaacaagatatgagaatagaagcttcagttgctttcacaagttcaagacctctggttcctctattcatcttcctcttctttattccaggtttccacgcaagaaatctgcaacaatgctcttcttcatgcggagatttgacaaatatcagctacccttttcgtctccagggagatcccgctggttgtggtgatgttgattttcaactattttgccagaacaacaccgtcatcctgaatattctaggaggaaagtactaccttaaaggaatcttttactataagcgtaccatccgtgttgtggatgtttacttagcccatggaacctgtggtctttcttacaagtcttttttcattgagttgaagcccccc

SEQ ID NO: 27086 - DNA, 224 bp, Gossypium hirsutum
  Clone ID: LIB3166-035-P1-K1-A1
cggacacgtgactttacgttcaactaatctgatagtactatcctcctaaaacttggagatgtagataagcgtctacggttgaaaataaataagaaaggaggagggttgaataaactggattggcataaagatggacagcgtggtacatggttgataagattcaaacattcccaccgcacacaatgttgcacatgaaagtgaactgatcaaaggaagggaaaggc

SEQ ID NO: 27087 - DNA, 363 bp, Gossypium hirsutum
  Clone ID: LIB3166-035-P1-K1-A11
aaacttttcaactaatcccccccatggattgcttttaactttaattccttgggtgagaccatacctaaaccaaaagtagtacccaattaccctaggtggcttcaattaattgctaatgtctccttttgacaaatagttatatcaaaattaggtgtgatatatggaccaatagtatgtcaaggaatagtaaaattaccccaaataatcttatgtcaaggaactttgcatgctcaactatgacatgattgagtttggactagcaacacactacgacctttaagaatgtaaagatgaaccccaatcaatccaaaggaaccttgctttcattcaccctaccacgaaattttgcgttatacaaacttt

SEQ ID NO: 27088 - DNA, 387 bp, Gossypium hirsutum
  Clone ID: LIB3166-035-P1-K1-A2
gtgctcggcgccgcggctccattggaggtcgccggagagccttcgtgatctggcgaggacctctgctccggttgtggagaggttccaccggaggatcgctactactgcttctgagcatcctttcaagggagtgatgacaagccttcccaagcctgggggtggagaattcggaaaattctatagtttgccggctttgaatgatccacgaattgaccgtcttccatactcgataaggatcctttttgaatctgctatccgtaactgtgacaactttcaagtcacaaaggatgatgttgagaagatcattgattgggagaatacatcaccgaagcaagttgaaatccccttcaagcctgctcgtgttctcttacaggattttactggagt

SEQ ID NO: 27089 - DNA, 335 bp, Gossypium hirsutum
  Clone ID: LIB3166-035-P1-K1-A3
cagataatgtcactcactaaaaaatacgtcagccactagacgataaagatctggcgagggacctaaacagcgggggagactagatgtcaaaagcggaaaaatagaacatcattgtgctcgtgcctaaacatatattgataccatggtatcaaagtttcaggcctgccaacaatatattcacactctggaagcctcacttcaagaagaaatgtcttgacatgcccctttctatggtgctggacctggagctctatccatgaaagagctggaaacactgtctaggattcacgggggagggcttgagcatattcgatcccttcaacacattaaaggca

SEQ ID NO: 27090 - DNA, 323 bp, Gossypium hirsutum
  unsure (1)..(323): unsure at all n locations
  Clone ID: LIB3166-035-P1-K1-A7
gggggcgacccacgcggccgcanggagcaaaaaaanaaaaccaaagacaagaacaaaaaccaagcaaaaagggaggaggnagaacgancagcagaaaaccaacccccccccgcaaaaccgggcaacacagaaagaaaaaaaaaagaaaaaaaaagagcagaaggaagggaacaacccgcacggnaaaggaacaacaggggcagagcaangggacnacagcgaaccaacggcggacaacggcgccgcaaacaagaagaaaagcagcagcggnggggcaacagccaaggacaagcagaaagacggggacgggcaagagaagacca

SEQ ID NO: 27091 - DNA, 390 bp, Gossypium hirsutum
  Clone ID: LIB3166-035-P1-K1-B2
cccacgcgtccgggctcttccttcacctgtcaccacagagtccaaccatggacattggggttgacccaccatctctttgtaagcagaatttgccaatctaaccttgttgtttgagtcggaaatcactgccggtaaggcatcggactcaaccaattcttcaacctcctctcctttcttcaggacttgcattcgtggggttaggattggattctctttgatgcacccaacatagataatggagcccactggtcgaatcggttgaggtgctataatgttgctcgctggaggaccttggagctgcttcaatagatctttctcttcaggaatttcaacatttgtgttcaaatctattaaactttcttcttcacaaggttccatgcaattcaattc

SEQ ID NO: 27092 - DNA, 215 bp, Gossypium hirsutum
  Clone ID: LIB3166-035-P1-K1-B4
gaaacccggggcggcccacgcgtccgtccacgcgtccggccttgtttcgatgttaaggatatggggaaaccgctggaggtgcgcgatttgaggttgcatttcaaaggctgtccttatatagcactgccgctggagaattatttcgcggtggttggagaagggatggcgtgcttgactgtggtgacagatggcggtgttggtggaggaatggctgt

SEQ ID NO: 27093 - DNA, 334 bp, Gossypium hirsutum
  Clone ID: LIB3166-035-P1-K1-B5
gaaaagaatgcctaaacaggagatttggattggaattccaggtgatgggagatggttgttccgctcggtaattcttggcgcttggttgaggtcggggaagcaatctccaactgagagatctcaaaaagttcttgcagatgagcttagatctaaagttgcagatgaattcatcaagaggcgggcagacacagaatggttcgtggagggtgatttcgataactatgtagtgcaaatgcggaagcctcatatttggggaggagagcctgagctgctcatgtgctcacatgtgctcaagacctgcataaccgtttacatgaaggagaagatatctgca

SEQ ID NO: 27094 - DNA, 364 bp, Gossypium hirsutum
  Clone ID: LIB3166-035-P1-K1-B7
tagaaaattccctcaaataggaccaacatcttatacatatcttgatactgagggggctttcgatacatttacatatgaagagatgtttgtcatgaactgcagtacgaagatgaacaagccatggagtggggctaactacatcaatgcttgtcgttgctcttcttgtcccccaacaaataagaattacgtttattttttggatggagcaactgcaacttctgctttccatccctcttgcactgttgaagccctggttcccatcagtcttcataacataaatggcctctctacttttgatatttacagaaggcttaggatgggcacccaaattacatggaatctttaaatctaaactgggttgggg

SEQ ID NO: 27095 - DNA, 209 bp, Gossypium hirsutum
  Clone ID: LIB3166-035-P1-K1-B9
cccacacttccatcgacagcatgttcagcgcgagctttgaaagggaatcgcgttggaatttctgaaccgggacgcggaggctgacggcaacgttagggagaccggttacgtctgcgggggcctcgggaagagatatcttttttgtttaacggtcagcccaccctggaaacggctcaaccggaggttgggaccaacggtcggatgagcac

SEQ ID NO: 27096 - DNA, 312 bp, Gossypium hirsutum
  Clone ID: LIB3166-035-P1-K1-C10
ctgagtttttctacaaagacatgtctgcactgctggaggccaggggacggtgcgggtgactctagatggacgggagatattcactaatattgtttcaagtgcaatgattcatgcaactggaccttttgatgataatgaatggatgcaaacaaagattgacggatatgaatgttctggcactgttgagcatggtgtgtggtggtcaccaacaatttgaagaggggaagatcaagaagcactttacatttcaaaccacaaatttactgtaaatgttgtgagaaattttatttagaaaacttattggctcattaa

SEQ ID NO: 27097 - DNA, 380 bp, Gossypium hirsutum
  Clone ID: LIB3166-035-P1-K1-C12
gctgctttcatgccggacactgcgcaccacccttcatttgttttggaacagtggtggcaaaggacaccatcggaagcttggttgtacactgaatttgctccatacggaagaccagaagattcttcgatgtcgatgttttttgggaccaagttcttaacatccaaactttatcagctatcccctgttgaggacctggaattggcaaaggctctgatcaggccaggatcaatgtttttaagcgatttgtccaaggcagacaagttctctaaggaaaagttcggaagtgttccccgagtctatgttgtatgcaaagaagacaaagggataccagaggaattccaacgttggatgatccagaattctgaaattaacgaggtgat

SEQ ID NO: 27098 - DNA, 162 bp, Gossypium hirsutum
  Clone ID: LIB3166-035-P1-K1-C4
ctcactcttacggcaacgcgggcattttgatgctgctccacttagcggaaatcgacgcgcttattaatccgaggtgagcatcttaccacaagaccgaacatatgttggtcggttggagattccaggatccacttgtcatagttttggtgatactactgggca

SEQ ID NO: 27099 - DNA, 136 bp, Gossypium hirsutum
  Clone ID: LIB3166-035-P1-K1-D4
ttaaagagttttaaaatgaatggatagtagagttgcggctggtttaaaaccattctactatactaattgataatcattatttttgaagacatggctgttcaatctatatctgtgccctacattaatgtaattgaac

SEQ ID NO: 27100 - DNA, 369 bp, Gossypium hirsutum
  Clone ID: LIB3166-035-P1-K1-D7
cggacgcgtgggcggaaaggccatgtggttctactcctttcacccaactccagtgctttcccattgtttgcctctctgttatgtccctgggcgctatcataaccaccaccaaccctctcaacacggctaatgaaatcgggaaacaagtcgccgattctaagccagttctcgccttcactattcctcaactcctccctaaattagcaggctccaccatcccgatcgtgcttctagaagatcacttgagcagtcaggctggggaagcgaagattgtaacaactttacatcagatgatgaagagggaaccgagtgggagtcgagtgagggaccgagtcaaccaggatgacacggcgactctgctttattcct

SEQ ID NO: 27101 - DNA, 182 bp, Gossypium hirsutum
  Clone ID: LIB3166-035-P1-K1-D9
accgctaatgaatgccggaactttgttactttccaagagaccaaccacggcggagctttggatttacgacgcgccgcctaaaagtgctctaaagccttcttgcatcttgcgatagacggaaagctgctagcttggcccgttgactaacactttccagggtaccatgtataagagcatactaa

SEQ ID NO: 27102 - DNA, 338 bp, Gossypium hirsutum
  Clone ID: LIB3166-035-P1-K1-E9
aatttatcatggatggctgtttggtcaccgtcgagggagaagaagatattgggggatctatctctgctgatgccccataccttgaagtaagcaaagacgcagtggaatgtttcttccgatcccttgaatttgtcaatgccacattcgtcgctgagggaaacagaattcccgtgccaaaactatcaagaaataccaggatgagtatcaagcttgactgtggggagaggagcccgagcgaggaaaggtttgggaaaattttaacaaggaatagtcaggctctaaagccaatgcaccacaaggcccgatactgcttgggggtttcaggccaaatttgcgtc

SEQ ID NO: 27103 - DNA, 188 bp, Gossypium hirsutum
  Clone ID: LIB3166-035-P1-K1-F11
gcttgaaggaaatgaggaaaactaataaggttgatgtggaggatctaacagtggagaatggtttgtttaagtcatttgatgagattgtgaggaggcaattggatcccatttggcttactttggggaagaagacgaaacagctcgtttcggatttgaaaactttgttgaagtttgtggattatcttgtt

SEQ ID NO: 27104 - DNA, 389 bp, Gossypium hirsutum
  Clone ID: LIB3166-035-P1-K1-F12
cccacgcgtccgcccacgcgtccggtggaacacatagaccttcaaattttaacatgtctggtaaggaagatcatataattggagacaactctggggatggtgaactgaaaagggtcaaaagtgatgtagagttgcatgcctcaagtcaagaaggaccaaagctgttcccaagatcccagagccttagatctcttaaggaacagcttatttgtgacaatcttcaacccatatctaagaatacaagcccaattgctcatgatttagaagctcaaagggtaaagctcacatatggagatgagaaaatccggctccgcatgcagagtaaatggcggtttaaagatttattgcatgaaatcgcaagacggttcaatatagatgatataagcaga

SEQ ID NO: 27105 - DNA, 379 bp, Gossypium hirsutum
  Clone ID: LIB3166-035-P1-K1-F2
cccacgcgtccgggtactacaaagtttacttattcattatctctcttgctttggtgtttcctgaatttcttgagaaaattccgtttcatataattttccttcaatgatttgcttcttcttaatttatatctgaatgttcgattgtattgttttttttattcaacgatttcttctgatccaagttaaaattttcacagatctgtgcaagatgagcaacggtgacagtcattggaatgacgaagattggagactcaatataggtgatctgattttcctgagtttacttattcattattatctcttgctttgattttcctgaattacttaggaaaaatctgtttcatataatcttgcttcaatgattcgcttcttcttaaat

SEQ ID NO: 27106 - DNA, 297 bp, Gossypium hirsutum
  Clone ID: LIB3166-035-P1-K1-F4
cccacgcgttcgcccacacgtccggaaagtttggttggttgctgggatctggcaagggtttcctgattaatcgacctgctgagaacgtctataaaacataaaaggaaagcggaaaacaaaaaggagaaagggatatggtgggatgagggaaaaatggctagagaaagttgacccaaagctttgggtttcgggcagtgctcgtataaaatgataacactgattgtttgctttgtaaacattgttattgctctctttgttcttcgttctcttttattcttcgctctacatttattcaaa

SEQ ID NO: 27107 - DNA, 288 bp, Gossypium hirsutum
  Clone ID: LIB3166-035-P1-K1-F6
gccagatcagcttcactcttctctttagtctttctgtatgcaaaattaagttggagagagagttgtctgggcaacactgtgcacccagttaggcaagtattattgcaacatgcttgaagaatttggtatcatgccgaattactaccttctattcccaagtgtagctcagaagtttgtaactaatctctgtggaagcatctactgtgaatcagcttgccaagcgactggcctgcttgatatcgatccaaaattgcgattatgatggggacaacaggctactgagtatgc

SEQ ID NO: 27108 - DNA, 336 bp, Gossypium hirsutum
  Clone ID: LIB3166-035-P1-K1-F8
ggttgctttaagagaatattagaattttaagggattgaaggaaaaaaaatcgggagattatcaatcattgaataggattttggctctgagttcaggaagaaattttgagatttggtgaaaagaattgtaaaattgaaggttatttggtggaataatctgcacattagctggaaagtctgaacaggtttctttaaggattttttcccaacaagttctgacggatccgtctactgaaactaggggttgcaactgtctggctggtctggagtgcatcttaagcattatcagggcccttagaatggggtccttcttatctgctgaaagcatgatcccttc

SEQ ID NO: 27109 - DNA, 118 bp, Gossypium hirsutum
  Clone ID: LIB3166-035-P1-K1-F9
cggacgctagggcggacacgttgtctggaggagtggatcgcaatgtggagagtgcaagttatgcgtccaagccatgatattctcttttgaatgcgtccatgaaggttggggagtttgt

SEQ ID NO: 27110 - DNA, 329 bp, Gossypium hirsutum
  Clone ID: LIB3166-035-P1-K1-G2
cttgaatctttggaaatggctggcatacggcttcttaatgaatcttgttccgacgcagatgagccaaaggagaaacggatgagacctaaaccttcttttgcttcagtgattgggcaagcggttatggtgaattacttgtatactgccttggaacctgtccttagaaaagtggtgaatgaggaagtggagcgcagtattggagaccggctccgatcctttacccggtcttcgttgctacgaattcaagcggtggaacccgaaccatctacccttagactgatttttcctaaagccctttccttggctatctttacctgaagcaagattct

SEQ ID NO: 27111 - DNA, 318 bp, Gossypium hirsutum
  Clone ID: LIB3166-035-P1-K1-G3
agcccattggatagtgatcagagtttgccttttgtgaagaaatcacctatatggcgaacaattgaatctttggatgtcttccaaattgtgccccaaaaaccacattttcaacctttggctgaaagcagagaggagtttcgtgagggatcggcaattgggatcatggtgacctttgccagtttgtttgataagatatccatgttgcattttgatgaccctcgaaacacatttgacagcatttcagaaggtcttgatgacttggaaaagcacggatttgatgttagtctgcttaggcgccgtgtgaattaactacttttc

SEQ ID NO: 27112 - DNA, 338 bp, Gossypium hirsutum
  Clone ID: LIB3166-035-P1-K1-G7
aaggaacctagatttgcattcattacaaagactgaaattgatcacttagattgtggttatagatggagaaaatgtggccaaaaagcggtcaaaaacagcccttatccaagaagctattatcgttgcactagtagcggatgtggtgtgaagaaacgagtctagagatcgttcgatgatacgacgatcattatcaccacttacgaaggcaaacacacgcattcgtgttcggtacagccttgaggaagcggattcggtaatatctggtttgaccccaacattatatggtcctatcaacagttcctaggaatcagtatccttgtgtgaaagttgtacaaacc

SEQ ID NO: 27113 - DNA, 307 bp, Gossypium hirsutum
  Clone ID: LIB3166-035-P1-K1-H1
gcctacaaaaaaccacccagtaccaacagccaacaacacaaagaaggcaaacttgcagcttttttgaagaggatcagctctagaaagttaagtctaaaaaggaagaagagtttaaagagttcagagaatgaaggcagagttagagttgccacctggtttcagattccatcctacagatgacgaactggtgaatcattatttgtgtaggaaatgtgcttctcagcctatttctgcgcccatcattgctgagattgatctttacaagtttgatccatggcagcttccagatatggcgttgtatggtgaa

SEQ ID NO: 27114 - DNA, 267 bp, Gossypium hirsutum
  Clone ID: LIB3166-035-P1-K1-H2
aaaggtgggaagcttggatcacatattcagcgtggagccaatgaaggttaaaaggcgcttccacggattcagaagttgctctttgcgcttagagtcttggaaggttgctgtctacttcaccctgaaagtactcggttggcccatcaacataaagccatcccggatttgatgaatgttatgtcaactcgaggagttcttgaacaaggagcatgtctggatgcttcaatcttgattctgctggattcgttagccattcaatatgcattt

SEQ ID NO: 27115 - DNA, 254 bp, Gossypium hirsutum
  Clone ID: LIB3166-035-P1-K1-H4
ggcctttctgcattggtatactggtgattgaatggatgagatagagttcacacgtaggggagatctacatgaatgatttggttgcacaatttcaacaatatcacgactcatctgtggaagatgaggaagagaacgagggggaagagtgtcttgacgtgaactatcagacctaaaatgctatggcttttaccatatatgaaaaccttgcttaagctatagaatggaaccaactttttgcctagatatatactgct

SEQ ID NO: 27116 - DNA, 214 bp, Gossypium hirsutum
  Clone ID: LIB3166-035-P1-K1-H8
atctattaacagggaaaacagtgtctttaaagaaggttagatttgatactttagagaccatagagtgtaaagttcatggcaagagagatactcgatttaaggaaactaaatcatccaaatgttattaagcttgaaggcttagttacttaaagaatgtcatttcagactttaccttgatatttgaatacatggagcttgattttgctggccttgc

SEQ ID NO: 27117 - DNA, 369 bp, Gossypium hirsutum
  Clone ID: LIB3166-036-P1-K1-A1
aatcccggtcgacccacccttccgaaaaatcccaattccattctcccttttcctcctaatcatgatgcctctcctgggggctcccaccttcattttctactccccacttaaacaccactaccatgtaacccaacacgtcattgagagcattatgaatgcgtccatacctaggaggaacctcagattcctatcctgtggaaccaacaaccccattgatgactgctggctgtgcgcacctcattgggaaacaaaccatcagaggctagctgattgtgccattgctttcgcaaaacatgccactggcggcaaacatggaaaaatatacttagtgacagaccccagtgaccgtgaccctatcaaccccaaacc

SEQ ID NO: 27118 - DNA, 375 bp, Gossypium hirsutum
  Clone ID: LIB3166-036-P1-K1-A11
attttaataaaatttactctttaaaaaaattcaaattgggattttcgggtttcatctcattgttgcataaaattattgtgatgatatcagtatagatttttttttctgttcaaatgattcggttttgagtattatttgtctgaaaacttattttctgagaaggaaaaaaaaaaccaaaactatataggaataattgctagttttgatacttttgtttaacaacactatttcggatttgtacacagttttcttttacatttaggttcgagatttagttttcctttatgttttttttctgttggctcaatagcaataaaaggttggatttttgggaccagagtttggatctttcttgttcatgaattaagcttttgt

SEQ ID NO: 27119 - DNA, 171 bp, Gossypium hirsutum
  Clone ID: LIB3166-036-P1-K1-A3
aaacttcgaagaaaaaagagagagtagagccatgagtggaaacgactatagattggagccatgtggacatccctcccggtgatggtagtagctactctttgagtggcaaaattatgctcagtgccatcgtggttttgttcttcgtagtgtttcttaagtttggtcttttac

SEQ ID NO: 27120 - DNA, 239 bp, Gossypium hirsutum
  Clone ID: LIB3166-036-P1-K1-A7
aagaaatcttcgctttcctgtcattgatgatcatccgtaaaatgcggttctatggggcctttttgaatatcaaaacactatcatattaatacaaagagaggacccaaacacactttttataaccatgaacagctttgccgactcttaatagtaaggcacaagataaaatatcatgcaatccagttgcaaactgaactggtatagtggcaagaaaacccttcccctgacttcaaacacaa

SEQ ID NO: 27121 - DNA, 375 bp, Gossypium hirsutum
  Clone ID: LIB3166-036-P1-K1-B10
cccacgcgtccgacctcacgtacttttaaacatagaccaccgacgggtgctttggcctttcctactactttccgacaacctctgcgccacaaacaaacatgccgtcattgaaaacctagcttcatccctaataccacattccgagagactaattttacacctcaacagacaactactgcaacttgttatgcatcaagtatcacattcaaccgcattactttctataacttagctcccaaatccttgctcgggtcattccataacaacatcttcaccttgaaggaacttcttaccaaattgtttaaacacaattccatatttgtgctcaacccatattttttcaaccttttcatctttctaagccatttatttttt

SEQ ID NO: 27122 - DNA, 354 bp, Gossypium hirsutum
  Clone ID: LIB3166-036-P1-K1-B6
aaaccgtatgggatcatagccattgtaatcccattatcctatccagtatccgctctcacccggcgctttctttcttaacaggcaaataacaaacatcaatctcttcaaatccatttcaatctcccttttcttcttcttcttcttctctatcgagttctctagcttccaatggagacgctagtttattctcaaatctggcggcggtggcgccgtctctgttctcggcttccccctccaacatcttaagcgtcacactcttcctggttcaaagaaaaatcagagcttttggtgccataaaagcttctcttgccaagactgaaggtgcacttctcagaattggcaccaaggataagc

SEQ ID NO: 27123 - DNA, 328 bp, Gossypium hirsutum
  unsure (1)..(328): unsure at all n locations
  Clone ID: LIB3166-036-P1-K1-B7
cttcttttcaatatattaagccaaatttttacaatatttaaataagtcattatatggtattttccaaataatatcactcctttctctcctcaaatttgaattttcttaatccctacccaacattttaatatcttataccaaaccaccttctttatcctttttcctnttctttcatcttcttattctctcacatcctatttttttttttcctatttttttctatatttccctcttcaaattttaccttatttttttttcatcttcactcttttatatattaaattctttttctaccttttcttaacactattactatttttctcttctt

SEQ ID NO: 27124 - DNA, 291 bp, Gossypium hirsutum
  unsure (1)..(291): unsure at all n locations
  Clone ID: LIB3166-036-P1-K1-B9
cccactcgtacgggtcagcacgtttttttgtcaaaacttcacctggggggttggagatgttcagcacactgatgaaaaacataaaaaccccttgtttttttttctttctaagtatcaaatatattcacgtattattatatgattcttttaataatttatggtgtnttgctggttcattaatatcataaagacttgtttgaggttagattttcttaatatatgtcgattaatccacaaactattttatgtccttcgatgttgtgattatttttatttctattgatcattatt

SEQ ID NO: 27125 - DNA, 134 bp, Gossypium hirsutum
  Clone ID: LIB3166-036-P1-K1-C10
ctgtaatggcatcttttctatgggttatcacttatcacacacacgagcttatttgcttacttggtcatctttttgtttctccaatacctctgtttgatatttattacattggaactcgaaataacacaccttgc

SEQ ID NO: 27126 - DNA, 375 bp, Gossypium hirsutum
  Clone ID: LIB3166-036-P1-K1-C11
ggaaaagaaagggatactagcaggctattgagttttatggtttagcaaaggtggaaaaagtggcttaattgtgatttgatttattttggttattggtcatcagggagaagccccagcattctttgttgataatctacaaaatggattttcaaccggatttggcttaaaatccaaaggctttgagaccttcaccgacgttggtgacaaaacatttgtaattggtggggcaaactgtgattccgcatcatctgttggaattcagatttatgacaaatctactgggaaatgggtgattcctacagtcctgggaacaaaaccgaagacatgtaagggccattctgccattcttttaaatgaagatcgtattatgattag

SEQ ID NO: 27127 - DNA, 373 bp, Gossypium hirsutum
  Clone ID: LIB3166-036-P1-K1-C12
cccacgcgtccggcggacctgatggatttataattaaaatgagggatggtaggcatttaagatgtattcaaaacaatccgcaacctggaaatctgccagattatgcaccgcatcctgcgattgttctgaagatggaagatgggactggtcttcttctcccaatcattgttttggagatgccaagtgtgttgctcatggcagcaatgagcaatgtccaaattcctagacctacaatgtatcaagttgttaaggacatgattgaaaagatgggctactcggtaaagcttgtcagagttactaaaagggtgcatgaggcctattttgctcagttgtacctaacaaaggtgggtgatgaaacagagtctgttagttt

SEQ ID NO: 27128 - DNA, 337 bp, Gossypium hirsutum
  Clone ID: LIB3166-036-P1-K1-C3
catctaccactgaaatcatccactttctacgatttgccttaacagcagggcacggctgcttctgtaatcaaagaaactgctatcctgaaacctgttcaccacgtagctaacaattgcaacgaccctactgtacgtggatcatgtgacaccggctgcaacatcaagcgcccttcttctaaaaagcccagcaaattcctagtccaatacacccacctcttcgaggacgaggctggtactacacccttgagggaaaccatcgacgctgtggatatacgccctctggccccttgagaggcgaccagaaagcttaagtttattgaagaggtggatgcttatt

SEQ ID NO: 27129 - DNA, 304 bp, Gossypium hirsutum
  Clone ID: LIB3166-036-P1-K1-C6
aactcttgaggtagaatagctttttattacgagtcttctggaacagtatagatcttgtttttatttgtctcaccaaagtttattctattatactagcgttttcacagggcttcaattttttttttcccataatatcaatggagtctagtgaattttggcacgtattgttttatctatagtaaccattttattatgaatgattttttttggatttttttttgtccattttttttttttcattattattttttacaaatattttttttttttttgtttttttttttttaataaaattttttttttt

SEQ ID NO: 27130 - DNA, 111 bp, Gossypium hirsutum
  Clone ID: LIB3166-036-P1-K1-C7
aacacaaccccatcacattctctttgtatccatcaaacatagaagggggaactaggggcctttaagtgcactggcgtaatactagaacacttgttaccttaacgcacattt

SEQ ID NO: 27131 - DNA, 349 bp, Gossypium hirsutum
  Clone ID: LIB3166-036-P1-K1-D10
gatataataaataagaattttgtagatggaatggaataggaggtgtcccaaattacaaattaattttcaaattccaattcacctcataaaaggaaaagaaaattattgggggaaagcacaaaactgaaaacagattatagaatggtattttattatggaaggcttatatgatattattgtttcaaaacccagtttttctttaatcttttgggtggtgactaattgcttttacgttttgtatatttttttttgtattataaaactttttttttattttttaatattttttttcattaatatttattttttttttttcactatatcttttttattttctaatttatatttt

SEQ ID NO: 27132 - DNA, 347 bp, Gossypium hirsutum
  Clone ID: LIB3166-036-P1-K1-D11
cccacgcgtccgggttattcggcgttccaataggaggagcggcagagcgggccggggaagaaggagaaggcgtagggactgaagcggcgacggcagcagacgaaacgcaattacaactgcaacagcccggtggaagtgagattattaaattagagccgttggattgccagaaccgagggcgcgatgatgatcgtgggatccaagacgcgccgtggcttcggcaggtgcaccgagcgaatcaaagggtttgtaattgatttttctttttttgggttcgggttttttaggtagctttttggtcggtcatcgggttgtggatgatgattactgtgttcataccggtatat

SEQ ID NO: 27133 - DNA, 353 bp, Gossypium hirsutum
  unsure (1)..(353): unsure at all n locations
  Clone ID: LIB3166-036-P1-K1-D8
gggaggccggggcgacccactcttcctcccacacatccttatctaattgatcctatcancttgcctaaaactacgctaacctgtatgttaccccaccctcatctaaatcaaccattgaagcgctgccttcggtgaatataacgaagaataacttgaattctgagttcaaccagngtgcattttgcatggactatttcgaggaaggaactgaatccaattatattccctgtaagcatctttatcataaggattgcttattgccgcgtctggaatttcataattcttgccccgttgtgtcttcactagctgcctacttgtttatccttattattagaggagtgttcgttttgcac

SEQ ID NO: 27134 - DNA, 315 bp, Gossypium hirsutum
  Clone ID: LIB3166-036-P1-K1-E1
aaaaaatcaataaaatggttttttttttttaaaaaaattggaattggaaccgggtggtattccagattcggaaacaaatagtaatacagaatctgttaaacaattggaaccaaataaggaaacatgccctagaggaaagaatagtacatacattaaggtaaagatacacaatatagtagtaatggcctacatagacacagctttctatatagagaaccataatgaaataaaacgaggaaaaagaagaatattcataaattattaaaaaaaaaatgaatgatgctaccataggagacgcctatataagctttctag

SEQ ID NO: 27135 - DNA, 221 bp, Gossypium hirsutum
  Clone ID: LIB3166-036-P1-K1-E12
tcttccacgcgtccgctcaatgtccatctcccatataaacctctagtgggggctatggagattttcaaggttgcccagaatgctctagctcaagttgtatggaatcctgttaatgatgggcagaggacttttctctgcctgcaatttaagccccatcacattgttggcggtgtccattttcttgctgccaagtttcttatttagaagcttacttttttatt

SEQ ID NO: 27136 - DNA, 245 bp, Gossypium hirsutum
  Clone ID: LIB3166-036-P1-K1-E4
ttgacgcgtgggcggactctttgtcccatctcttctctcatacttcactctaggggttccttggaggttttaggaaaacaggaaacaaattaaggtatggagaccttcctaattaccttggagacttgtaacgagggactttcctacaagctttgtcatcagatctctgattcaattactttagcctgttttgcacaggatcctcatagcatgttgtcttttttgtcctgtatctagacaaacat

SEQ ID NO: 27137 - DNA, 282 bp, Gossypium hirsutum
  Clone ID: LIB3166-036-P1-K1-E5
tctttgatgcgggagaaatcagctttttttcccaatgtacatttagagcaagggacaggcacttgggtacttgaagaaaaaggggtaatcataggagtgcatttacaaaacttaatatggttatgaattgactgcatttgcattatttaccattgtttttgatggttgctttttataatattcctttctcttttattattttttattccttttttttctttacattcattaatttatttattttttagctattatttattatttcttcctttttataatttt

SEQ ID NO: 27138 - DNA, 114 bp, Gossypium hirsutum
  Clone ID: LIB3166-036-P1-K1-E7
acatctcctccataataagattattctttacatcttttagtacaaacatactgacgcatgtgatatattctttgataactaaatcaaacccttgtctatcctctaaattatttt

SEQ ID NO: 27139 - DNA, 358 bp, Gossypium hirsutum
  Clone ID: LIB3166-036-P1-K1-F1
tccggggcggccccagccttccgaacctgccaaggaagctgctgcatttttttcaggtttagcttcaaaggctgttggggaagtccttgaaggagaggttcgtcctgatgcttcaaaacaaactcctaagcctgtaagtgctggctcaacagaagcagttgagttggagaaatgtgttctattagagaagagctgtataagaaggctaaagagttcgactctaagattcttggttttgaaacagctatcatgaggccttactttcatgtgcgtccccttaatgtttctgagcttgaaaatggcttaactacctggactttataaaaagagagggtgtcctcaataaggtggtcaaatt

SEQ ID NO: 27140 - DNA, 176 bp, Gossypium hirsutum
  Clone ID: LIB3166-036-P1-K1-F11
aacgaactaaggaactaaataaagatctttacctgggaacactttctagtctcggatgtcttcactaatggatggtatttacctgcggagataaacacatgaggaatcagagcacaaagctctattctctgtaatacaacattataacctaccggaaagttacaaataaacagaat

SEQ ID NO: 27141 - DNA, 284 bp, Gossypium hirsutum
  Clone ID: LIB3166-036-P1-K1-F4
gaattttcaattgtagacttccctattaaatcgattggtcttagattaggttaggtgaattgggttttcagaatggttatcgatattcatagatggtgtctattgtcttttttttacccattttttatttttccattaacttgttttcttttgaagattttgttttattttttttttcctacttttttttttcaagtttttttttattatattttttttttctatctattttattacctgttttttttttcttattctacttttttctatcttcatcttttttt

SEQ ID NO: 27142 - DNA, 169 bp, Gossypium hirsutum
  Clone ID: LIB3166-036-P1-K1-F5
attatgtgcaagttgatactgtaagttacattctatgggtgaattgtgctggatgtgacaagggccccacaaaatgtgatcctggtctaagattaacattatatgatcaaagaattcctccacttcaagcctgggttattgtgatcaatatttttgtacttcaacatat

SEQ ID NO: 27143 - DNA, 281 bp, Gossypium hirsutum
  unsure (1)..(281): unsure at all n locations
  Clone ID: LIB3166-036-P1-K1-F9
acttcctatcatatcctaagcactacaagcattatgaagntcctgacatttacggtcttggagcaaaaacaaagggtgtttttattaatccagctttcattgagccatttgggcttactttaatcgaggcagtatcgtacggtttgcctattgttgccacaaaaaatggtggtcctgttgtcattcatagggttcttgacaatggtctactagttgatccccatgatcaacattcaattgctgatgctcttctgaaacttgttttatataagcattttttt

SEQ ID NO: 27144 - DNA, 376 bp, Gossypium hirsutum
  Clone ID: LIB3166-036-P1-K1-G10
aaagatgttttgtgtagccgaccctccatatgataaatcactccaacagcttcagagcttcttatcaggtctagtttctgaagaaaaattagagctccgagatggaatgtactttttgaagaagtaataatcagctgatatagtaatcggccgtcaattataaagcatttaacaggtagcactggtgaacatgaaaatttccataggatctttgtttcatatttgccacgaatggttgacaccttttcgcttaattagctagtatgattctgttaaagctggtccttctctagaatcaccatacttccgagttctgacaagatttatgcaagtaaagctggatgtaacttgggattctgcgcaagattggacatgt

SEQ ID NO: 27145 - DNA, 373 bp, Gossypium hirsutum
  Clone ID: LIB3166-036-P1-K1-G11
tttacgtttaatttctccctccctccctccctccctaatctctcggcgtccctggccttcccctcccttcctcccaaagtcactatcactacattagctcctttcttttcttttctttctcattcccattcccgcccccccttttttttttcttttttttctttttttttcccatgtgatccacatttcttttcctcttccaatcctttcaatatcaataacttatttgatcggctaattcttttttttttttcatttcattataaatttgaaaatacccccaatccagaaaactggaagatctggagtcattaccgacttcttccgggaacggaaagatccggtacagaacaccatcctcggccgagttatt

SEQ ID NO: 27146 - DNA, 310 bp, Gossypium hirsutum
  unsure (1)..(310): unsure at all n locations
  Clone ID: LIB3166-036-P1-K1-G5
tccactcgtccggtcccgttgaaaccatctaatacctgaaaacatgtcnttcggggccatctgcacactttgcttctgcgactcttacacctactgcgcaaccaataatcctttcttttgctaccaatgtaaccgtacctttaccttaacaatttacccttccgctgactctttttttcctctattcatcgtatggtttctttttttattctataactctatttttgaaaaccctattctttactcaaacctttttttcgtaccctttttttcttgtatctaatcctttttttttcttgctcctgctttt

SEQ ID NO: 27147 - DNA, 361 bp, Gossypium hirsutum
  Clone ID: LIB3166-036-P1-K1-G7
cggacgcgtggggcgctgacgacttctcagctctataattttaagggggtcatggcacccatcagcagtatgggaaccggactcgggccacctcagttggatttggtgatgtttcacagcttccattgctttagactctagctctaaaggttgttgagctccgttggagtatggctctatccttacatggtcgtgcacggttttgcgggttccttcttgatggcctaaaaccatgaacacggcatctcatagtcacttgttgaggcctgtagttgcggtcttgatcttcttctttttcttccgtttttttatggtcattgtttttgactctttggttggttataggtatacctattgcttt

SEQ ID NO: 27148 - DNA, 272 bp, Gossypium hirsutum
  Clone ID: LIB3166-036-P1-K1-H2
tcgagtatgtaggtttcaatgtccccttactctattgttatcagaagatgctgcgacaatgaatgtggaacggcatgttggtctctataactctctcgttgaatgtctaggattgttgctaatcctctcttagtatgacatacttatatgcatatctcaataagtttcctcgcaagagaccaataagttatctgcaatgcaataagtgaattctgaggtaactagaatgcagttctctagcatgttctgtaattagaagtgcccacttggag

SEQ ID NO: 27149 - DNA, 190 bp, Gossypium hirsutum
  Clone ID: LIB3166-036-P1-K1-H4
gggagaccacgcgtgcgagcaaccttaacacaactcaccaacttaaaaacctcaagatttcacttttaaaagacttccgagagacactatgtttggcacgggcggcaactttgactgcacttaccttattcaaagcactaatatgggaaacagcaacatcatgatcgttaagactgagaagagctacatc

SEQ ID NO: 27150 - DNA, 287 bp, Gossypium hirsutum
  Clone ID: LIB3166-036-P1-K1-H7
accatattaagatatttattaaatatttgtatcttgtaaatctgagatgcctggggtgtgtgatctgttgaatcaaatctccaattgaaggacgtaaatagtggtattttgtaccaaatcagctgatgttcattcatccagtattataactaagcggaaagttagaactgaacagaatcagttcgaaggcaagagtaaaaattctcaaattgttaaaacataaatagatatacgttaagaaaatttgtggtcagaaactataatacaaatgcttttttttttggctt

SEQ ID NO: 27151 - DNA, 350 bp, Gossypium hirsutum
  Clone ID: LIB3166-036-P1-K1-H8
gcgcttcatcgaggcaactccatgactttcacatttgcagcaaggtcatggtcaaatacatacagggtgctcccctccttctcttttacttttttctgcttcccaagcaacaagctactattatcctttcgatccgtacataaacaaacgattaataaggcaggggtaggcattggttacgaggttgcactctcccgcattttgtccttcaccggcgacaaaatcggcgaaacttatctcgacctcaaatcatgccctcccgaaaccgttagagccgacactcaccgagcaattaatactgacttacaaaacaagcgtggtggcacatcttgtacactcactcctggcga

SEQ ID NO: 27152 - DNA, 343 bp, Gossypium hirsutum
  Clone ID: LIB3166-037-P1-K1-A10
cagtagtgtacaacacttcctggtatgtacatggctctattgaggaagacgaatcgcccatggctgatgttgatgatgagattcctgatgattcaaaaactgtttctgattctaagcccgaaatggaagtactggcaaagaagtcatatgcgtctatgttaaaggttcggaaagagaatgcaatccctgtgtgatcacctacacaattccctgtgaagtctgcagtctagagccaggagcatacacctattgctgcaccaccttctggttccatgcctgactaagacgctcaggattctagcatcaatgtttctgtaaatgggtatcatccagatgcaaaggc

SEQ ID NO: 27153 - DNA, 364 bp, Gossypium hirsutum
  Clone ID: LIB3166-037-P1-K1-A2
acagtccggcgacgcgtccggcaattctaatgtttatctctacaagtcaataccccgttacccggacaagcttagcaacagtgccagttctagcaaatccagccatgcatcagcagactgtgcaagtctccaactcgttaaaagctccgctaccttctcgatattggaacgggacaaccatgtcgagggttggtccttccatctctcgttatcagaccttattgcgacaggaagacaacttaagaaacaatagaaggaatatgatgatttctttggcgaacatgcaagtggacctcaacttggccaatgagaactcaaacttcattggaaacgttgccttccctttcaggatccaaattgggcc

SEQ ID NO: 27154 - DNA, 281 bp, Gossypium hirsutum
  Clone ID: LIB3166-037-P1-K1-A4
cccacgcgtccgaaaaaaaaaacctcctaatcagtcattagactcggacaggaggagcgctcattgtttaggtgatggcttcgaaccggatcttgaaggagctcaaggatctccagaaagatcctactacctattgcagcgcatgccctgttgctgaagacatgtctcattggcaagcaactattatgggtccttctgacagtccatatgctggtggtgagtttatagtcaccattcatttcctttcgttctattcattttaaccaccaaaggttgcattc

SEQ ID NO: 27155 - DNA, 224 bp, Gossypium hirsutum
  Clone ID: LIB3166-037-P1-K1-A7
acaaggccggcttttgtcatgttatcctgtcagaagacatcgccaggtaggagacgagtttatcaacagagccagttctagcaaatccagccatgcatcaacagactgtgcaagtgttcaactcgatcaaagcctccataccatctccatcttggaacgggacaaccatgtctaggggtggttcctacatctgtagttttcagaccttatcgcgacagggagac

SEQ ID NO: 27156 - DNA, 383 bp, Gossypium hirsutum
  Clone ID: LIB3166-037-P1-K1-B10
cccactcgtccgcccacgcgtccgttggatggcaacgaattttattgaacttgtggcattatgttgttcccatgaaactcgagtgcgtatctttggtatatacctcttccttctccccaactgtatattattcataagttacacacacctatgtgtttagagtgatgacaaaaatttctggcctttttatccgtttcaattcctggtctaaaatcctggaatgatctccttcacactgtagtgaaatagtgtactcaaggtttcacttaaaaggagcataaaagttttatagttaaatcaactctgttttttggttgattaggtctgaattttgacttgaagcttggttatatcgcttttcgagtatgtagatgaaaattgtt

SEQ ID NO: 27157 - DNA, 364 bp, Gossypium hirsutum
  Clone ID: LIB3166-037-P1-K1-B11
gggagatgatactcgtctatgagttcttggctcgggggacccttcgtgatcatcgttacaaaacgaagaaccctcctttatcgtggaaaaggagactggaaatatgtattggagctgcccgtggattacagtaccttcacgcaggtgtgaagcaggcaatcatccaccgggatatcaaatcaaccaacatactattggacgagaactgggtggccaaggtttctgactttggattgtctagactgggtccaacagatatatttcaaagccatgtgagcactgtagtaaagggaagcgttgggtatgtggatcctgaatactaccgaaagcaacagttgactgagaaatccgacgtttactcgtt

SEQ ID NO: 27158 - DNA, 377 bp, Gossypium hirsutum
  Clone ID: LIB3166-037-P1-K1-B2
aaaatcccattttttttgttccaaagatggaaaggtctgaatggtgtgtcacctctaacatacaaaggctcaattcctgaagccattcgtgaagctcaaaaccagaagaaacttttcgtggtctatatttcaggtgaaaatgatgagtcgaaaaacttggatcattcaacgtggactgatcttaaagtaaaagagtcgttgtcaaagtattgcattctattgcatatcagaggagggaccaccgatgctgcaaatttttctgccatatatccacagaaatctatcccctgcataacagcaattggatttaatggtctacaagcttggcaaaatggtattaaattttcttcttatgtaaaaccatttttctcttttct

SEQ ID NO: 27159 - DNA, 383 bp, Gossypium hirsutum
  Clone ID: LIB3166-037-P1-K1-B5
cttaaaatagactcggtacttacttttctcatatcgagcatcttcgaatacccatcagacacggaatagaataggccagattcggcagaatcaagaaaagaaaaaaatccgggttcatctctgtttcctgaaaaaagcttttttttgttgcttatttcatgctagaaagtgggggctgcccttacgtaaatggttgaattgaagagatctttcaaggttggttgataagacagatataaggattgtgtaaacatgtagcaggtggattacgtcagatttcatggctggaaaaaagaggaactttgagggctaacattttgaatcaagcaaatgaggtgttgacagtggaaagaggaggctgttaaattgtattacaaccatgc

SEQ ID NO: 27160 - DNA, 336 bp, Gossypium hirsutum
  Clone ID: LIB3166-037-P1-K1-B7
cccactcgtccggaaaagccttgtactcgtatttttactgatgatattatgaggcgttacccaacactaaagggcgggaaattttggaaagaggaacatgatttgctgttactgcgcgcggttttaaagcatgggtatggaagatggcaagccattgttgatgataaagacttgaggattcaggaggtgatctgtcaagagttgaatcttcccatcataaatcttcctattcctgggcaagctggttctcaagtgcaaaatggtgcttatacaacatatattgtaccaacaggaacccatactcatggaaatggctctggtaatgatgtgggaggt

SEQ ID NO: 27161 - DNA, 240 bp, Gossypium hirsutum
  Clone ID: LIB3166-037-P1-K1-C11
ggatctcttctctttaacggaaacctcttgaactacaaccggaagaacatccagaagaacttagaaaatactgacacccccaacatcaaccttgctaacaaagctgaatactacagaatcatcaaatacatggatctcaagcacaaactatacccttttgaaccattccacccacagctcttagccaatgataccaaacacatcttcttttccaaaagctaaaaacaaaaaaaacattat

SEQ ID NO: 27162 - DNA, 407 bp, Gossypium hirsutum
  Clone ID: LIB3166-037-P1-K1-D4
gaccaaggcttccgttcctttaactaatggtagctgttttttataaccacagccacttgaaacttctatggggttccaggacggataacaataataacagagtaaagcaagttgctattccagaattcaacaagaaaaacgccatatgtaagtacccatttgaatctaacagtggagaagagctttccactgagttgcacaacaaaacaattcaagagtattgcaaaataggggatgtagataatgctatgaaacttgttgctcaattggaggctatgggtttccatccaaattctatttcttatggttttttaattgatactttgggaagtgttggtaggacattggaagctgatgtcttgtttcaagaaatgatgtatcttggatttaaacctaggataagattg

SEQ ID NO: 27163 - DNA, 395 bp, Gossypium hirsutum
  Clone ID: LIB3166-037-P1-K1-D5
ccaacccttccggggcagacttgcttcacgtccttcaaccatgaaaatactcttggggttcatgattcttacagtcttgatgctcatttgcatggaaccaaaccaagttgaagcccaagtggagccgccctatcctccagattatgaagtaagagctcttcgtgagatagcaacagaacttgggaagaaggattggaattacaatgaaaacccttgcaacaataagtcaagttggtttactccaccgccgccgccaaatgtgcctgaggccattaacaacagtactgtcacctgcaattgctccttccccaatggtaaatgtcatattgatggcatctaccttttggggcaggatcttgatggtgttctaccacgctcacttgtcaagctatcat

SEQ ID NO: 27164 - DNA, 383 bp, Gossypium hirsutum
  Clone ID: LIB3166-037-P1-K1-D9
catgagtgctccaagtgacattcattttaaagcagtcaaacgtgttttaagataggtagctggcaccatggatcatggactgttctttacagcaggtcaattagaactagtgggttattctgacgctgattgggcctcatcagttgaagatcattgatctacatctggatatgtggtatatcttggttcatatccggtggcttggtgctcaaagaaacaatcagtagtctcaaggtcgtctacagaagcagagtatcgcagcttagccaactgcgtgtttgaactattgtggattcaacaactgctgaatgaagttaaatgccacagtctaagttgccaatcatctggtgcgacaactcctcgacagtatcagtagttgaaaa

SEQ ID NO: 27165 - DNA, 391 bp, Gossypium hirsutum
  Clone ID: LIB3166-037-P1-K1-E5
ttacatccatgctattgctgtttttcttcccttttagggttagaagtggggaatgtggcgccagaagtgaactctgaagcgatgttccggtgcgtgagagtgagtggcattgaagatggtgacgatcagtatgcttatcagacggctgtgaacatcggagggcatgttttcaagggaattctttacaatcaaggccccgaaaacggctacaacatggctgcagcagttggtgagagttcttccggcgatggaatccaacaacttgatcttattactgctggtcccaccgccgccgtttccaacgcgggtaccgtctcatgcaacgccagttgcagcagcgttacagccgttgcgtcttcatcaaccgtcgcatttttagatccttcctctc

SEQ ID NO: 27166 - DNA, 377 bp, Gossypium hirsutum
  Clone ID: LIB3166-037-P1-K1-E6
aaatacatactttttattttggcctatgttttgggagccggagctgcaataagaaacttctctcctgcttttgggaagctaatgtcaaaagaacagcagttggaaggagaatacagacaacttcattcaaggctaaggacccatgcagagagtatagcattttatggtggagaaagtagagaagaatctcatattcaacagaagtttaagactcttgttaagcacatgagggttgtacttcatgaccattggtggtttggcatgattcaggacttcttattgaagtaccttgttgctactgtggctgttgttttgattattgagcctttctttgctggccatcttaggccagatgcttcaacattgggacgtgcaga

SEQ ID NO: 27167 - DNA, 385 bp, Gossypium hirsutum
  Clone ID: LIB3166-037-P1-K1-E8
cacgtgtgtaccacattattccaatttgagagatgcactctgtcccttcatcgactgagggaatggcatctatgaacacttctgcatcaccagacaactcactttctgacatgtactgttctactccaatgcccttgccttgggatgctgacactagatattttcgcttacaacgtgatggtcttttcaagatgtgagaagggttcaagtcattcacaaaaggaatcagagcctttaagaggtgaagatgatgcaggttctgaatctttgagtaaaggggacgaatggaatgcttgtgaacaaggctcaacagagcagtattgtaaatcctcgcaactctcatcaacaaaaggattagatggaactgggtacttctactcaccaa

SEQ ID NO: 27168 - DNA, 385 bp, Gossypium hirsutum
  Clone ID: LIB3166-037-P1-K1-E9
aggagtttactgaaaaggtccaaattagaggcggtgttttaattaagaaatgggggagatcttcagccgcatctactgctgtgtcaatcgttgatgccatcagatctctaataactccgacacccgagggtgattggttttcttctggagtttataccaatggcaatccatatggtatagcggaggatatcgtcttcagcatgccatgccgatcaaaaggagatggcgattatgtacttgtcaaggacgtgatcttcgatgactatctgctcaagcgaattaaaaagtcggaagcggaattgctggcggagaagagatgtgtggctcaccttacaggggagggtattggtttctgtgatctacctgaggatacaatgcttcctgg

SEQ ID NO: 27169 - DNA, 321 bp, Gossypium hirsutum
  Clone ID: LIB3166-037-P1-K1-F11
atgtctctcaggctatggctactgctagttgagcacagaggaccccacgggaagaaacgtgtatcaatgacatagttgcccctatttccttgtgcaagcccttgaagatacgggccagtacacaggagttgtttgctatctcctccatatccatcttatcatcttgtcagacggactggccacaacttatgcgacttctctgggagcacaacatgaccaatcccgctatacacttaagacccgtggtttggagcgcctcatcttaaattacaaacaacatgcaccgtggcggaacaagacctattttagtttattgtatat

SEQ ID NO: 27170 - DNA, 381 bp, Gossypium hirsutum
  Clone ID: LIB3166-037-P1-K1-F2
atttgggtcagtctgttttatttttcttatactttataagattttaaattctgggtaagtattatttccttttctttttctcttcttgaactgatgcctttttctaataaagaaatgctttttaaaattaaataaagaaaacaaatacattttctgggtatctttggggattgctaaaacatgagttgatttatgtacccaactgtcaatgaaaaacctggtttccatgagttcatctgagtttggtgtagaatatgatgaatggtatcgctgtttgttgaatcaattttatttctaagttcccagaataacctattatcaaggttgggatacttgtttctaatgaattgatttagattgttttccttttcggggataaat

SEQ ID NO: 27171 - DNA, 212 bp, Gossypium hirsutum
  unsure (1)..(212): unsure at all n locations
  Clone ID: LIB3166-037-P1-K1-F4
ctcnttgttngaccgccngatatgatcactgaatattttgattatttggaagaaagcaatatcccgccatactctgtttgctacaaaggcttatcgtagataatatttgatgataataaaagacatgctcgccattaaatacaatcagtcctactgttgaggtaaagcatattgtatgataaaccttgctgctgagaaatgtaactctgcac

SEQ ID NO: 27172 - DNA, 158 bp, Gossypium hirsutum
  unsure (1)..(158): unsure at all n locations
  Clone ID: LIB3166-037-P1-K1-F5
ccactctttcgcccactcgtcctccctcncttttcttacaaatctaaatctgatcgatagatttgattaatcttgccacctcccatcacgacaaataatcatttgaactgtgccacgttgaggctccccttaattaacaaaaatcatttaatcttgtc

SEQ ID NO: 27173 - DNA, 125 bp, Gossypium hirsutum
  unsure (1)..(125): unsure at all n locations
  Clone ID: LIB3166-037-P1-K1-F9
cgtccgggaggatctttctttctttattccgtacatcttaacctnaaccacatcatggaagagagttctcttaaacggtcgagttatntagactgccttttcagcagcaagtagatccatnncca

SEQ ID NO: 27174 - DNA, 392 bp, Gossypium hirsutum
  Clone ID: LIB3166-037-P1-K1-G1
ttccggttcgtccaaaatactttgagatgcctctcactgactgtctctgaagcagttgagcagctggaaaatgttgatcatgacttctatggtttccgcaatgaagaaactggtgatattaatattttatacaaaaggaaagctggagggtacggactcattatacctaaaggaaatggtaaagctgagaatttaaacccgctggtggtcgaatctggaaaagaacactcttacgtggaatagtttgtctgagattgtgagaaagaaagttgcaagctgttctgttcatctgtagatttttcatggcaacactatagatgaaggtcaaggcatgtagagagacatagtacaaggtttaagattaagcgaagatgatcatgtgggggttaaaa

SEQ ID NO: 27175 - DNA, 142 bp, Gossypium hirsutum
  Clone ID: LIB3166-037-P1-K1-G12
ccccaaaccacccccaatgcgctaggaaagagagggatcaacgcacagaattggacatccttggccgctagttcggccatatgaccagtttgctactcaagtcctagattgaaaaaaaaacctcgaatctcatgatttgatt

SEQ ID NO: 27176 - DNA, 417 bp, Gossypium hirsutum
  Clone ID: LIB3166-037-P1-K1-G4
cggggcggcccaaggcgtccggttgacatggggtctagtcctgatttctctagtattggtcaaccaaattctttggggacatgctgaatcctgtggaaactcggttatctaattatacggtgtcttctggtggggcaacgaatggaaacacatttactcctgatgttaggatctttagtggctggaattctggtgaaccgagctctagattgagaacgcaaaaccaggtgtttcaggatgttctgaatcaccatctcgatgatgatgatggaacaaaaatagagcatggttggtcttcttcttatggcgctgctggggatgctccaaggtcggaagaaaggcagattgaaccaccaaatgtgttttttcctgggagactgaataatggtcggagtggcaatcagatcagaagtggac

SEQ ID NO: 27177 - DNA, 420 bp, Gossypium hirsutum
  Clone ID: LIB3166-037-P1-K1-G6
aaaaaccgggccggaccaagccttccgccaacccttccgaaaaccctagagtaatcttctaaaagcaaaggtggctgaaccagggggggttcttaaaactgtggctcatcatcagcctactggtggtgctgccgctgatcaactggctagattgacactaagtgacaaccttgtatcctgaggcttaactgcctgctagagacacctccttgaacaccaccgtagcgtgaccgaagcatagactgaatcagaagcttcgtttgacgctagacatgaccatatacttctacagcgtgaattggaactgtaataccgcctgacacatgactaacatgctgcataatgaatggctatgtgattgagtgctgcattccatgcatcacacgatgtcattgagattgaattgattggtgcaataaa

SEQ ID NO: 27178 - DNA, 383 bp, Gossypium hirsutum
  Clone ID: LIB3166-037-P1-K1-G8
caggccacgattggtttctacttgtttccgaataacaatcacttccatactgttatggacgagataagcaaattcgtgagttctgactgttaatataattaacctgacctacaggctgccataaatgacaggagcttgacattcctccccttgttccaaccaacaagtttgcagtttatgattgtgtagtattactagttagtgtcgtattaatgctggtattattttgctccatattttctgactaccgagcttgattatatggtaaagaagaggtattccagcgcatagctggatcaggatgtgttctggtctgcattcactcgcctgggcttgagtgttatagttcgatgaagctcttgtttcggttagagcctttttga

SEQ ID NO: 27179 - DNA, 361 bp, Gossypium hirsutum
  Clone ID: LIB3166-037-P1-K1-G9
caagaaacaacctgcactaaggatttttcctcccacaacaacaagagtgaaatgcgaaaaagcctaagaagtcgaagaacggaaatgaccccaatgctcgctatcacgctgctaccgtctatgcatattcatggtcgactctaggaaatgttacaaggaatcgaacccagttgctaagggtgttacatgtgttgcaccagtaggttgcgtgagatggacatctatggcagtagacgtaacgtagtgttacgagcgtcaagcatcattgctgaaagcagagtatgaaaaggcaacagaggaggctgataatgctgaccctcaaaatgaggtagaggaaggacgttacatcatggatacccct

SEQ ID NO: 27180 - DNA, 347 bp, Gossypium hirsutum
  Clone ID: LIB3166-037-P1-K1-H1
cgtatccaatgattcatctcaccccaacaccatataaacaggataagataattcatctgtatgtgcttcttgcactttgataaagaaagtatatcattacatcattgtggtgattgctcattcagaaacacaatgtgattagttatttagtaccttagtcaatggcggcgattaggggtaaaatttaggagggcgaaagtctttgatcagtggccgcgactagtgggaggatgaagactagccaagtaagggggttgagcaccattttttccatttcacaattgttttgttacggattttttaagtgtaattcccagtttgaataaaatagaaaaaaaacttttcta

SEQ ID NO: 27181 - DNA, 340 bp, Gossypium hirsutum
  Clone ID: LIB3166-037-P1-K1-H4
caaggaaaagccaacagagccagaagacctttccactcatcacaactcgtacacatcgccagcagccatttcatcaacgatctccacttgctccaaagcatgaagtatgccgtggttatcagaccccaccacgggtgaggtaagttggcacactagctcaatttgttgcaggtctcgaattaccgtgctaattgtttttcacacaattcccatttctttattcttttgcatatgaatccactacttcaacataagcagtccggcttgtgtcaagcatatggatatgatagtccttaacttgtaagcattgcagtaagtacacggagttgagtttgttatc

SEQ ID NO: 27182 - DNA, 384 bp, Gossypium hirsutum
  unsure (1)..(384): unsure at all n locations
  Clone ID: LIB3166-037-P1-K1-H9
cttaaagccaagttttgtgccgtttcntcggtagccttctgttccatagctagcgggaacccgccaattcgccaacgatgtttcttctttagctcttctctttagggcatagaagtcttcctgagttagttgtactggggaattgtctgattctggatgatcggtgtattgaagtgcttttgctgctgatgctctgaaagcatctgattctattcgcactgctcgtaatgtcagttgcaacgtgcgaagagtctgtctccttagccgcaaggtttgttttagtttcgaccttgttctgcgctcttcatccttgtctgccttcaactgttccaactcttcacgcatttgctccagattccggtttgtttcattgatggtctttac

SEQ ID NO: 27183 - DNA, 353 bp, Gossypium hirsutum
  Clone ID: LIB3166-038-P1-K1-A1
gggatacctttattttggagttaatgaaagggagaaggggggtggggatcaaccttgagcatccaatttttagagaattaaacgctgcattcaagagtaacccagatgatgaagatgccttgagagcaatagatcttttgtatgatgcagcacttgtttctagtggttacactcctgacaatccagcacagctgagtggtaagatatatgagatgatgggaatggctatttcgggtaaatggtcaacgtttgacagtcagcagtcagcatcacagtctccccaaacagagacattggaagctgatgtcgatgcaccagtttgagcttggcgtctgcaatgaaaagtgcatggt

SEQ ID NO: 27184 - DNA, 364 bp, Gossypium hirsutum
  Clone ID: LIB3166-038-P1-K1-A10
cggacgcgtgggcggacgcgtgggcggacgcgtgggcggacgcgtgggcggacgcgtgggaaaaaacccaattcatcataacgtaaaagggtttttcgattcacaatgggagagaaaaagaatggaaacaagaaaggagggaatgaaggagaaaagaaggaaaagggttcttcgaacttcgttttcaaagtcgattgtctttgtgaaggatgttccttcaaaatcctcaaatgcattcgtgaatttcaaggggtggagacggtgaaaacagagagcaactcgaacacagtgactgtaactggagctgtggatccggccgccattaaagagaaactcgtgaagaaaacgaggaagaatgttgacc

SEQ ID NO: 27185 - DNA, 380 bp, Gossypium hirsutum
  unsure (1)..(380): unsure at all n locations
  Clone ID: LIB3166-038-P1-K1-A11
gagatattgtatctcctattgttatagatttggtggatgtcattccagaatctgagtttgaggatgctgcagctgatgacccanacaaggatgagaccttcagtgatgctgtgatagctgaaatggaagccaacagctatggcttgcagattataaaagatgctgatctcgaagaactaagggagctaggatctggaacatatggaactgtttatcatggaaaatggaggggaacagatgttgctataaagagaataaagaaaagttgcttttctgggagatcatcagaacaagatcgactgatgaaagacttctggagagaagcacagatcctctcaaatctgcatcatccaaatgtagttgcattttacggagtagta

SEQ ID NO: 27186 - DNA, 374 bp, Gossypium hirsutum
  Clone ID: LIB3166-038-P1-K1-A12
cacaaataaagtgtttttgcacaaattgcaaattaggtactcctaccatctattgtcagaagtccttcacggggaaataaaatgagaaattgggtcaaataatggctttctaatctcgtgcaacaaggggattttggaccaaaggttatttactctaataattaatatttggttaaggtttttggacagtgcttctaatatgttagttttgcacatcgctgaggtagggtgtactgtgtatgaacatctcttaacatggaatggacatccgttctgctccaatttatcttttctgtctctttttctttcctgggtacggggggcagtgaactgtttagcttggagcagcaagggagggagaggatgcaatagca

SEQ ID NO: 27187 - DNA, 385 bp, Gossypium hirsutum
  Clone ID: LIB3166-038-P1-K1-A5
cccacgcgtccgaattttgaaaagacgctttcttccttctccccactaaattaggcagacctaagtaccgttcaggatcagttgagcaatgtactccaagcactctagttactaaacttatatcccttttttgagtattagcgctgaagaaaatagtagatttggaataattaaccttctaccccgaacagccttcatattcgtgcaaaatctgctttaatgaaatcgcccctctttctgtagcttcgccgaacagaatgcaatcatccataaataataaatgtgaaacctgtggaccgcttctgctcgccttaactccatgaagaattttatttttcattgctgatctcataagactagataggccctccccacaaaatagaaa

SEQ ID NO: 27188 - DNA, 381 bp, Gossypium hirsutum
  Clone ID: LIB3166-038-P1-K1-B12
gaggataaaaagtttcgtttcccttctgaattgatatttttggaaaccctagagtttacctcgattgtagagctttttttagatggatttggctgcatatgcattacctacctcgattctttagtcgtagaagcgcgatgtattcgaagaggagccggagtaagccgagactcgagcgccgcaatgcagcgaagcacatcgactacgatgcagcgtcgttttcttcgtctctcgatgatacctcttcatcttcttctctaatcacgcgatcgctcgatttgtccgataaaaccagcttccgtatccaaggaacagagggagagttcgaccttatttgtcggaccttgggcctttctggtcctgaaagattttccattccag

SEQ ID NO: 27189 - DNA, 310 bp, Gossypium hirsutum
  Clone ID: LIB3166-038-P1-K1-B5
cccacgcgtccgaaacattcaatatgaattacaaacttacaggtgaccaccgggagccaatccttcggctggtactggcatatttgcagagagcttcgtattaaattgtggacaagaggagcttgcgaggccacagataattgaaggatctagcgcatttatgtaataaatcacgtagggaaaagggtaattgctaggtcccgccccagactagaacatttaagttatataccatttagtgaatactggactggaggaacatggcagctcttaaatatttagcatattaatgtaacgagcacattattga

SEQ ID NO: 27190 - DNA, 176 bp, Gossypium hirsutum
  unsure (1)..(176): unsure at all n locations
  Clone ID: LIB3166-038-P1-K1-C1
tccgagaagtttgtaggttttcaaggttgagtgttgttggnnttgaggttgagggtggtttttaaaaagaggacatgtgtaggacgttttgtgtgcgtggaaaaatttaccttgcnnattgtatgtttccaattaggcccttcttgtatagtaagtatccatatgttttgtcttcc

SEQ ID NO: 27191 - DNA, 307 bp, Gossypium hirsutum
  Clone ID: LIB3166-038-P1-K1-C10
accacccattttaacaaccatttctatttccttaccataacctctacgagaggggcgtgtacataacaatgcaccgaaccattcaactaaaactcacactgaaactcctgactgcgaacctaaattctttctaaaaatgctacccactatacttcactccataatttacacccaaatgtccacccatatggtctagcaaggcgatgtacaagcttctatacttgataacatacttataacctctccaatcatgcctgcaatcattttaaatagcgatattagtagggcccttatctacactcacgtc

SEQ ID NO: 27192 - DNA, 382 bp, Gossypium hirsutum
  Clone ID: LIB3166-038-P1-K1-C11
cccacacgttcgtcttggctgacttataaatatggagacggttgcaggtgaggcgtgaaccaagtgctaacggatgcggaggctgatgaggatgcttaggaatttctggcaggagctgagattatatttgcgtacagaacggagtcaaatattaaaatggatcttgccattagaatatggaaaaaacaaagggaagagagaccttgaagtttaaagagtgagtgacgatgaccatgagaaccgttcaacatagaagaaactcaggctctctaaagaacaatcttcttttgtcgaaccaagttttaaagaacagaacactctaaatgctgctagtgaaagaataatcaatgatctctatgctttagggttttaatttgttcaa

SEQ ID NO: 27193 - DNA, 378 bp, Gossypium hirsutum
  Clone ID: LIB3166-038-P1-K1-C12
cctagatatttccaggaaatttctttcacttccctacccttttttcctctttggagaagaaagtaaagaagcaacttttagtttcaataacaataattcttttctatcacgctaagatttccttcctaatccttgatccgtgctgtgcggcaataagatttcagagctgatcattcttcttttaggggtggcctggtgttatcattcaggaagctatagttatgaattatccaccagaaaagcttgtgaggttccaggactggaattcagggcgaagcactgaaggacgttattctgataataattggataaattcggggaaaattagattcacaataaattccttttcagaaaagttacaaagaggggttgaatctg

SEQ ID NO: 27194 - DNA, 374 bp, Gossypium hirsutum
  Clone ID: LIB3166-038-P1-K1-C5
gggcggcccaagccttccgccaacccttccgcttaaacccatccttttaagcagcgtgtgatcacttgtcggaggtggcccttaaccgcctaattttcctcgattaaagtcccgtattttacgagaccctatacgtgggtgatgtagccaattcaaggctacgacccgcgatccggatcctaaagcaaaacctagcactccttaccgctatactcacggaccacgctcaagcattggcaatgaaagaagtgatgaaagcatcgttcgaagctttcctcatggtgttgctcgcggggggaccgtctcggacatttcaacggtctgaccatgagatgatagaagacgatttctatagcttgaaaagggttttttgc

SEQ ID NO: 27195 - DNA, 384 bp, Gossypium hirsutum
  Clone ID: LIB3166-038-P1-K1-D11
gcaagctctttgttatcaaaggattagaataacaccgtaaacgctggatacaggtcccattcaaagttgaaccctcagaaattccatcgaaagcttatatttgattctgttaatgagattctagttggaaagttggctctatttggagcatttccggagcctaggataaattccggcaagttggcaaagaagaccctcactgcacaacagcttctaaaagaattatgtctcgagattgagcagcttcaagcaaagaaaccgaattgtgacccggaggaaggtgaggatggtctgaaaaacatattgtgggaagatgtaatgagtcgatcagagagttggacggattttaacagtgagatttcggggatggtgctggatgttgaa

SEQ ID NO: 27196 - DNA, 377 bp, Gossypium hirsutum
  Clone ID: LIB3166-038-P1-K1-D8
atcaagcttcacaactttatgccgtggaaaagaattcacaactctatcacgactaaaggcggcgcaaccaccgccaacagaggcgaaatcagcggagttcgggatagccataggaccgaggatcaactggcgactgatacattgataaggttcagataatattgagattgactttgagaaatagaaggctaaactatttagaaggaaacaattatgtatttggacttcaaaacttacctctttacacttagagcataatatttatatagagcttagaagtaactgctctataacaaacttgctaacagtcttagctaaacgctaacaacttggataacaacttcaactaatgctcatatccttaacactacctttcg

SEQ ID NO: 27197 - DNA, 330 bp, Gossypium hirsutum
  Clone ID: LIB3166-038-P1-K1-E6
cccacgcgtccgcccacgcgtccggtgatttgttcccagctcatggctgtcacaggtgatcccgcacatatgtttctgctgtctatgccttcagcaggacctggtggccgaaatgtgcgggaccatgtggataagttcttggatatgatgcacagtgaggatagagagagcaagagggggctggtggatgctgttgtggattgtcttcacaaatcggggcttaaggaggaagctgggtctggatgggaggtagctgctgcgcaaaaagagtacccagatgctgctggagagcaaagctcatgatattggctcatcaacctacatgtgatg

SEQ ID NO: 27198 - DNA, 373 bp, Gossypium hirsutum
  Clone ID: LIB3166-038-P1-K1-F11
ggcaaccaaacctagctctgtagctttactcacagtgaactggtcaaaaactcggatcataccattaggggggtgttacaggaatttaactaactaaactgcattgattgaacttaagagcggatctgacaaccacggcacacatcacaagagaaagatggtggcatgaatacacatttgaggatggagaaactaacgctcaagggaaaaaacacagatactctagaccatctgagagtgcagcgtaacaacagttcgttgttatattcttactgacatgatcgaatctggtaactgtgcttgcggaggagacacctagagttaaacctaagaagacagctgcaggacagccattgggatgtagtatgcgtac

SEQ ID NO: 27199 - DNA, 381 bp, Gossypium hirsutum
  Clone ID: LIB3166-038-P1-K1-F8
cacgataatcgcaagtgcacaaaattctgtagaatctgatcctgtcagagacacgtatgtccaaagctatggatcagcaaccagagttgggaagcaggggaatgcctctgcccatccaaggtgataatatgcttgtgcatccccttcagagaccagtctctgaggctcaaccgactgagtgctttattggcaatgatacagtgaaccaacaggaagatctgactattgaaggaggaacaattaacatctctagtgtctactccgaagagttattgaactctctgacacaagcactgcagagtgcgggtttggatctgtcacaggccaacatctctgttcagatcgatctcggaaagcatgctaatagggggctaacatcag

SEQ ID NO: 27200 - DNA, 362 bp, Gossypium hirsutum
  Clone ID: LIB3166-038-P1-K1-F9
cccacgcgtccggttgaaagcaatttgtagtaatgaaggagccattatcggggtgggcctaccatgttatagtttcttgcagaccctcctggtttctatcagatccgggtctaatggtttgttaatgcttgataatgtcgaaataaacagtctgaatcgaccaaaagacaagctgctggattggttctttaacccaataatggtgctgaaagaacaaatcagggttataaaactgggagatggtgaagttaagctgttggagaagttggttctttttgggaccaacttagaacgtatggatgcttgggacaatggcagtatagttcctcaagattctcttagagctgcccaaatggaaggca

SEQ ID NO: 27201 - DNA, 426 bp, Gossypium hirsutum
  Clone ID: LIB3166-038-P1-K1-G10
ggttccggacggaacgcccggccgacccatgcgttcttaaaaccgattatagtagttttctttatgggtgtactcgcgcttacaccgtgttaactttcactagatatgtacatgaggcactatcggttgtaatagaaacgacaatatgtgagggattgatgaatgaagtgagggctaagagcagatgaccagaactgtcataactattggttgcagatcattgctttctattgggggactctaaaaatgaaagggaaagaattctaaaagaaattttgaaggaatatgaacagtgctcaagtcaatgcgtgaattttagcaaatcgactattttctatcgctcaaatacaacaggcatggacaaaaaagagatctcgtgtttactaggtgtgagatgctacacaaatttaggtcaatatctaggac

SEQ ID NO: 27202 - DNA, 319 bp, Gossypium hirsutum
  Clone ID: LIB3166-038-P1-K1-G12
gttctttattaacaaaatggctcaggcaatccggggcggggagctgaacaccggagctaagatcccctctgtaggactcggaacctggcaggcttctcctggcgtagttcgctgctgttgctgctgctatcaagatcgggtatcggcatattgattgtgctcaagctgacaatgaaaaagagattggttctgttctgaaaaaattgtttgaagatggtgttgtgcgacgtgaagatctttggataacctgcaaactctggtgcactaatcatgcaccggaagatgtaccggttggcgttaataacaccttacaagactt

SEQ ID NO: 27203 - DNA, 382 bp, Gossypium hirsutum
  Clone ID: LIB3166-038-P1-K1-G2
cccacgcgtccgggacaacaagaaatctttatatgggtccatcaccccggaagtgaagtgtcacaaacttgggaacctagaaaagggaagggtagaagcctcgagacacagattcataaagtgcctaatagttcatttggcagcaccatgtcggctgcatctggatcctctaaaagtgatgacagcagtgctgaggaaaaccataatccgaagaatcgagtcaacagagttaagcagggtttacggaagatcggttctgtatttcataggagtcccaaaaacgagggtcactcaggcaacctcggagaagtggttccatctccccaaaaatctcagagcagttaatgacaaggagattttggtaaagtttgtagtcgacgac

SEQ ID NO: 27204 - DNA, 282 bp, Gossypium hirsutum
  Clone ID: LIB3166-038-P1-K1-G8
cccacgcgtccggaaccatgaaaactagcagtaacacggttcggaaccaaagcggagggaagaaggtattggcttcagtctctgcatagtatggaaatcgttaactttcatgtccataatagaaaatagatgaaggtacttaatgatttaagtaagatatggtaaggatcttcaacatatatgattgcataaacaatgtagctgttcaacaacattcatttaatccaaattacttttatcaaaaaaaataaaataaaataaaatataaaataaaaataaaat

SEQ ID NO: 27205 - DNA, 232 bp, Gossypium hirsutum
  Clone ID: LIB3166-038-P1-K1-H8
cccacgcctccatccacgcctgtgtctcacacatacgactaagacttcatgggtgacagtgcccaaaaaacgtacgacataatcgatgacacccctgcagagcgagcccgaggcatcacatattaacaccgccaccgttgaatgccaaacccacaatcgtcattacaaacacatgaactgcccagcgcacgctgattatcggaaaaacatgattaccggagctgcccaaatg

SEQ ID NO: 27206 - DNA, 380 bp, Gossypium hirsutum
  Clone ID: LIB3166-038-P1-K1-H9
cccacgcgtccgaagtaatcactcatagggctgtctctcttctaaagctaatatctgaaattaatggagagaatcttcttctccatgttaatcttcctcttccaattcttcttgccttcacagtctgcaacaatcatggtgggtggcgtttcacactgggaaaaccctactgttcatgttggagactcagtaattttcaagcataagtatcagtacaagctctacattttccaaaacaaaaatgccttcattctctgcaatttcacccaagcttcccttcttaccaaccccaactcctcctcctatgagtggcacccttctcgcactggtttcttctactttgctttcaacaatggcactctcaaaacatgccgaggctc

SEQ ID NO: 27207 - DNA, 372 bp, Gossypium hirsutum
  Clone ID: LIB3166-039-P1-K1-A1
attattttggacctctcaaaaaataatttttctggcccaataccatcttgcttggatgcacaatctattgaacatctccatttgagcaagaatagattaagtggaaccttgacaaatgcattctttaacagctcttccttggtgactttagatcttagtgaaaaccagttgactggggaaattccatacgggattggaactctttcggctttaagtgtcctccttctaaaagccaattattttatcggagaaattcccactgagatgtgccaattgtattcgttaagcatcattgatctttctcaaaataagctttttggttcgataccttcttgtttgagtcatctaactcttcagccaaattatgaaaaa

SEQ ID NO: 27208 - DNA, 274 bp, Gossypium hirsutum
  Clone ID: LIB3166-039-P1-K1-A9
aagagagggagctgctgaacatgcttgtgtcggggatccaggccgatatagccgggtcgaaagatggaagcggcaccgttaaaacgattgctgaggcgattaaaaaggcgccggagcatagtactcgtcggatcatcatctacgtgaaggcaggaaggtacgaagaggataatttgaaggtggggaggaagaaaataaacttgatgtttataggtgacggaaaaaggtaaacagtgattacaggaggaaaaagtgtagctgagcacatgactac

SEQ ID NO: 27209 - DNA, 391 bp, Gossypium hirsutum
  Clone ID: LIB3166-039-P1-K1-B1
ctcaaaagcaattgtttgttagaagttcttcctaaaactgaatatgaaagacgtgtagagatgcaaaatcttgtgagagacatggcgttacatatcacaagtgcgaaacctcgattcttggtaaaagctggaatgggattaagggagccaccgaaggtgcaagaatggagcgaggatttggagaaggtttcattgatgtggaatcgggagttagaagttctgtatcccttggaaatgtcaccaccaaagtgtccgatgctcacatcattgttgctgcctggttgtggtataaagagcattccagaaggtttcttcaagcatatggatggactcaagattcttaatctttctcggaatcctatgaagagtctcccaaattccatatcaaatt

SEQ ID NO: 27210 - DNA, 386 bp, Gossypium hirsutum
  unsure (1)..(386): unsure at all n locations
  Clone ID: LIB3166-039-P1-K1-B5
gggccgaccaacgcgtccgatcactttccatgaagagatcgcttcattggttcctccagaaacgaaagacgcgaatgcaagctacctctccttaccattaatatatagaggtcatcatcaatgcttgaaatttagtggaattgaagcaactgatctatgttttcggctaggaactattaccctttttttttaaattttgttttttgttgtaaatttatgaatgaataattacgctagtacttgaagagtatgatttttttaaccattaatttgttaatttacgtcaattatgcttaattatttatttgttgtattgttcttgtgatggtcttccatttccatcatttacaaccaatatacaaaaattgtaggcttcaaannnnaaa

SEQ ID NO: 27211 - DNA, 381 bp, Gossypium hirsutum
  Clone ID: LIB3166-039-P1-K1-B8
gttttcttcttatttatctatttgttttctctcaagaaagccctaaacaggtcggatcaggtaacttttccccctttttttcttgttaaagttgaactttttatcgtcatccggttgatctaaaacatttgtttctgggttttgtctgtatcgtcaaattttcttttaatttccgttctaattgtttataattacttcagtttgggaattgcttttgtttgaataaaaggaaaaaaaattaggattcaaagttactttctttttggagtgtattatttatttaactgtttttttttctttgaggaagtcgaagattgatagggaattcgaaccttagactttaatcttaatttggagtggtagtgcaccttaagtcgagtc

SEQ ID NO: 27212 - DNA, 386 bp, Gossypium hirsutum
  Clone ID: LIB3166-039-P1-K1-C1
atctggaccagaagcaaaagaatgagtgggtctggtgcagcagttgaagctactgttagacaagtaagttcaagcaactctgagcttgttcagcgagtggaggcatcatttgaggcaatgaacaatgtagattgttctgaagaaaggaagaaatcactccgagccagatacttttatgacatcatcttcttgattactaatcttaccgcctggttcatccgtgattatggccacactattttccctccactgtactatgaaaaagcttgtggaatccgtggaagtgattgttttcaaacattaggagttctccgtgtgagtttagggtgttttatatttttccttctcatgtttcttactacatttagcacaagaaaactgtttga

SEQ ID NO: 27213 - DNA, 384 bp, Gossypium hirsutum
  Clone ID: LIB3166-039-P1-K1-C6
cccacgcgtccgggaaagctcttattattatacatgctggattttaactctcactggcgtctctcaatggactgggattggttgtttgagttcctaaaaggcatggtgaagccagtggctgcccttaccgtcgtcctcttagccgtgctcttgtctttcatgcaaaacctgggcttggaaaaagagatgatttattccattttcagagcttttcttcagctttctattattgggtttgttcttcagttcatatttaaccaggacaacagtggctggatcgttcttgcctaccttttcatggtttcagttgctggatatacagcagggcaacgtgccaaacatgttccccgagggaagtatgttgctggagtatctatcctggct

SEQ ID NO: 27214 - DNA, 378 bp, Gossypium hirsutum
  Clone ID: LIB3166-039-P1-K1-C8
gtttaacatacatggggaagaacgaaatgccgatcgtgtttccttttgcatgggggcttaaaaagttggacctcctctatgcattactcgacacggaagatcactgcttgttgattcaacgatgccccaacttagaagttctcgaggtaaaactgcaaacctataattttttaatattttgctgcatcgctttcgtgtaattgcaactcttgagacactgcaaaatgctgaaattccgagaaatattctaggacattatttgtcattgtagttttcaatcatgtcttatcgaatatattttctggatgaacagacgaggaatgttattggagatagaggactagaagttcttgctcaaagttgtaagaaactaacgag

SEQ ID NO: 27215 - DNA, 382 bp, Gossypium hirsutum
  Clone ID: LIB3166-039-P1-K1-D10
cggacgcgtgggctgacgcgtgttttgacgcgtgggcggacgcgtgggagcctgccaagcatttaaacaagccttggttacagcgcctgtgttggtacttccaaattttcagcttgaattcactgtggatacagatgtgagcggcgggggcattggtgcagttttgcaacagcagggtaggccgatagcattctttagcaaagctcttggggtgcgacatcgagctttatctatttatgaaaaagaaatgctggtagttttactagcagttcgaaaatggcatgcttatttggtggggcgccattttaaaattcgcatagatcatcaaagcttgcgttttttgtaggatcagatggctattactcccttctacagcgttggg

SEQ ID NO: 27216 - DNA, 383 bp, Gossypium hirsutum
  Clone ID: LIB3166-039-P1-K1-D11
cccacgcgtccggtcaacaagtatgtcgagctatggattgtcaaaacttggtacaactttactgtttggatgatgatgaagcttggactctgtttgaaaagaaagcaggtctagatgacttttctgatgattctattaaaatcctagcaaatcaaattgccaaaaaatgcgggggtttgcctatagctatagttccactgggaagtgccttgaaaggtaaaacccatcatgagtggcaagctgcatacgggagactcaaagatcgtagattgactgaaattgaggatgttaatgaagaaaatgcctatgtatgtcttgaggcgaccatcgactacttgaagaatatggagaccaagacatgtttcttattttgctctttattt

SEQ ID NO: 27217 - DNA, 301 bp, Gossypium hirsutum
  Clone ID: LIB3166-039-P1-K1-D2
ccgggcggaccaacgcgtccgcctgaccaaacaaatgaggatttttttgttgattggaatccagacattgagaaagttggctacaaccgtaggataggctgttaaaggtataaatgcatctacaatcctccagaatctggtgtaacagagggccttttgcttatatgctacacctaacaatgttcattacagctacatggcgacaccatatgatgatggcaattgtctatcttgcacacatgaaaccactcattgtacccattttgagtgaaggagagtgaaatacattgcacgagatcat

SEQ ID NO: 27218 - DNA, 383 bp, Gossypium hirsutum
  Clone ID: LIB3166-039-P1-K1-E6
gaaaaactacttgtttataaacatatgttcaatgggactctttattctttgttgcatggtaggggtggtgacatggattggccaactaggttcaagattggtttggttgcagcaaggggtctagcttggttacaccatggatgtcatcctccatttctgcagcagaacatctgctccaatgtgattctcgtcgacgaggacttggatgctcggttaatggactttggattagcagggctcatgacttcatcagatgttaatgagactagttttatgaaatcggatctaggcgaattcggttacatagcaccagagtattcaagcacgatggttgcttcacttaaaggcgatgtctacggattcggtgtcgttcttctcgaatt

SEQ ID NO: 27219 - DNA, 374 bp, Gossypium hirsutum
  Clone ID: LIB3166-039-P1-K1-E7
cggacgcgtgggtgatcttattaacactgcagaacctaggttctgcaatggcagatgttgtggttgatgcaatgatcgctgaggctgtacaatttgagaaggcctcctttgccggagaccttcagtcattgtcatggttatcgatggcttttggtggagtgtgtgggagtttgctaggaggatatgcattaaccaacttagagatagatattatcttccttcttttctctatacttccagccatacagttgttttcatgtggtttggtcgaagagagttctatggggggtgaagttttatctgatttctgtatttcaagtgattcccatcatttgaatggaaaagaaaagcaataagacacaacttacacgcag

SEQ ID NO: 27220 - DNA, 356 bp, Gossypium hirsutum
  Clone ID: LIB3166-039-P1-K1-E9
cccacgcgtccgggagtatctggctccccctcttcagttcctctcaaattgcgtgcgttgttctcttccttatccaaagcttggataggttaatcctctgtttgggttgcttttggatccgtttaaaaaagatcaagccaatccccaaacaagacgctgttgcagatcttgaatctggggaaaatggtttcttcccaatggtcctcgttcagatccctatgtgtaacgaaaaagaggtttaccaacagtctattggtgctgtttgtaatttggactggccaaaatccaaaatcttgattcaaattttggatgattctgatgatccaaccactcagctgcttattaaagaggaggtg

SEQ ID NO: 27221 - DNA, 240 bp, Gossypium hirsutum
  Clone ID: LIB3166-039-P1-K1-F1
aatctatccaccccccaccatacaaacaatcattaacaccttacaattttaatttcaaatcactaattattatctcccttataaaacccctcaaatcattcatcatcatattaacttcttacatcacttactaacattataatttcatatctccaaatttactcaattccaccattataccttacttttatctcatatcgcaaaatccaactccccctaattcttttttttcaaactctt

SEQ ID NO: 27222 - DNA, 386 bp, Gossypium hirsutum
  Clone ID: LIB3166-039-P1-K1-F11
agttgctgtagctctggcacactttgcctttggacataagcagcacctcaagtgaattgctgctgcatattggaaacctcagcctaattccctgttgaattcattgccttcactggctaatataaagggcacaggaagtggaaatatagtttcttctcagattggtcctttaacagccatggttcgggatggaagggtatccaccagcagtcctcttgctactgctggaatcatgcatggatctccattatccgatgattcatctcaactttctgattctggaatactgaatgatggtgtcagtaatggggaagttaatcattcaaggccaaaacctttggacaatgcaatgtattcacagtgtgtactggccatgtttactttag

SEQ ID NO: 27223 - DNA, 389 bp, Gossypium hirsutum
  Clone ID: LIB3166-039-P1-K1-F6
cccacgcgtccggaaaaacaaaggatctgtcgtcgcttcatcggataaacggattcaggttttagattgttacagtgatccacctggttggaaggatcaattagcaggtagtggaaacttcacagctcttcccaatgaagctttggtttcgagtactgcaaatgtttttacggaagttaaacatatggataagttgtacaattcaattattgaacttggcgaaggactggtaggaggtggaaatatccggttttctattgccatagactcaatcagatttcccgtatcttttggttattacattcagaccttcatgaggctagggttagagctgttctggaatatttgtcatctatggtggcaagtttagaaccatcacatcaacttgc

SEQ ID NO: 27224 - DNA, 203 bp, Gossypium hirsutum
  Clone ID: LIB3166-039-P1-K1-F9
aaagcccccccatttgtttttggaaaccaaaccttgccatcgcgggattacgcggggggagaaggcttatgcccacacaggcgctacgggtagaacgccatgctcgggtatgcgcaagaagctgcacggaggggagcctgtggtggggtggggtgatgtgcggtagagatcaaaccctaggtttggaaaatggccgttggcat

SEQ ID NO: 27225 - DNA, 381 bp, Gossypium hirsutum
  Clone ID: LIB3166-039-P1-K1-G7
atttttcaagaaaaaacaaaacaccctctccccctttgtttctcaactctgtgggggggttatgaaccctagcctttgcgccgttagcccgtcgattgagaggaagaaagtctctcctctcctccttttgggtctgatttcagcaacggagagagtctccggtgacacaatcacagggattccgggcaagccctctccttctcttattatttttgtttaaaagagatttaaaaataaaagataaaaaaatatatataaaaaaataaaaaagaaaagaacacgaaaatggaaatcgaaatcaaccttttttttcttctatttttgctttttgattgcttaatgttcgtaaaaaaaaattacaaatgaaaatcgtggctctta

SEQ ID NO: 27226 - DNA, 306 bp, Gossypium hirsutum
  unsure (1)..(306): unsure at all n locations
  Clone ID: LIB3166-039-P1-K1-H10
cctttccttcttcactttaanaattttaatatttttccctcataacccatatctcggtggattttttttaacaccacctccccctccaattaatttacaatcctatctataatacttatatttccaaccaatacacattcaataaccaccatttcatctcaatattaataacttaatcttaatattaattcacatttaacaaaaccatactaaacattactcaaatttacaatttttaaaatatctaaattttacccaattaaatatacctccacatacaaatcatcttacttccaacataataat

SEQ ID NO: 27227 - DNA, 327 bp, Gossypium hirsutum
  Clone ID: LIB3166-039-P1-K1-H3
cccactcctactaattatgctaatatttatcttgtacatagtgctctacatcggggcggaattcatgaagaaatccattccataatcaatcccgaattgattgccttcatgctcatcttgcctaccatggctgacaatgaagctatagcaattgttgtagcagacagtacctcttactatacatgatatgcctcttcatttcactattctgacgactatgttgacaaatggagtgtagactttcttgccagactaaaaaccataattgctgctatcgatgctttgttcagaccaagcatgcaacagtacactctgcaataccctatt

SEQ ID NO: 27228 - DNA, 273 bp, Gossypium hirsutum
  Clone ID: LIB3166-039-P1-K1-H4
atcaaaaccataaaccatctttagtttatttacacagaactgggcttagtccgtggttgaagatgattttaacacaaaaaatagagctgctgtttttagactaagatcgtgattgataaaattgatctctgacgatcaaacagattgcgtttatgattaacgagtgattttgctagatctagtcttactatgctgttagcagacatatgttgcgctacttttatcaccgacttatttagcatgcttatcgctctactagaaataaccagtact

SEQ ID NO: 27229 - DNA, 274 bp, Gossypium hirsutum
  unsure (1)..(274): unsure at all n locations
  Clone ID: LIB3166-039-P1-K1-H5
gatggcgtgcatcaactacccaaaagagctgggaaccggtgatgtagatctctttggacaaatatctcaactgaagnctgatactgcagggtattgatnccaatgaggtcgatgcctgatcnaaaacggcaccatctgtacttcgccgagtttcttgaattttgatcgcaccggaaaatgataggatactcgattctcgaggatggaaccttaagtgaagtctttcataagttttctgatataggatcaagaagcggcttttattttcttgcag

SEQ ID NO: 27230 - DNA, 290 bp, Gossypium hirsutum
  Clone ID: LIB3166-039-P1-K1-H7
ttcgataataggatggataaccatttaaatcaagaataaaagaggaagaatgagagggaatttataggggaaccacataacatcaccgtagctgcggactgcttgtgagagagcaaagaggacattttcatagactgatcaaactaccatcgtgatccattaatggaacaacgttatagactcttacaccacgataacatgcgcatggacagacgagctaaacatggagcttactaggaacagtatggagacagtgtaaatgagttcatcggatgctaccatggactata

SEQ ID NO: 27231 - DNA, 311 bp, Gossypium hirsutum
  unsure (1)..(311): unsure at all n locations
  Clone ID: LIB3166-040-P1-K1-A10
attggcttctgccgcgcatgcttttctcctcttgtattatttcctaagccgatcgtnctatggaagacagtatggtgtctaatgcaacagtgatgttgttagaaaggcagtgaatgtgccacggaaaagtggcataaggctctagctttgcatcaactgggttgtcagttgctagtgtggtatgtgttctatatgtgcttaatgtttaacttgtaagcataatagttaggccgtattatattttatttattctacatttttattattaattttatatttttataaataattttatttaaaattttttatct

SEQ ID NO: 27232 - DNA, 300 bp, Gossypium hirsutum
  Clone ID: LIB3166-040-P1-K1-B1
tttaaaagtgaataatgatgacactacaacaagcaactggaatggggttcaagcatggaatgatttgcatcattacaacacgttgccctaaaaagagaaggatcaaacaaaaggtagaccttaaaagggaaaaaaaaagtaatatattctccaaaaagaaaaaaccatgtagctaattgtctgtttaaaatgttttattgagtacttgaggtatatattgatcaacatgtaaacgtatgaacaaaaaaaaaaaaatagggtttctttctttctttccttccttctctttttctattattt

SEQ ID NO: 27233 - DNA, 370 bp, Gossypium hirsutum
  Clone ID: LIB3166-040-P1-K1-B4
tccacgcgtccgtccacgcgttcgtgttgttatacattttgaagatgatacagaagaggtgcaacaatgggaccaacagattgttggtgtgtgtcaagctctgaatgacatacttgatagcatggcaaagaagggcatggcagttcctgtgtaatccgatgcatctactgagaacaaagaaactcataagaggatcgactttaaccttctcccatatgcgtaaaaggaacatcatcggtcacctctggtttttacgatttcagttactggggtttattttagtaactgccattttgtcttttgggcaggcatgggatttttgatgatcaattaagggtcctaattaggactattggtaatcatttctttt

SEQ ID NO: 27234 - DNA, 360 bp, Gossypium hirsutum
  Clone ID: LIB3166-040-P1-K1-B7
ctctcctcatcggtcatggttattttctctatttgaccaagacatggtagcagagaacaacatggatgtacgtagcagtgcctgttattctttacgcctgcgaaaggttgactcgagcatttagatcaagtatcaaggcagttaaaattctcaaggttgctgtatatcctggaaatgtattgtcactgcatatgtcgaagccccaaggattcaagtacaaaagtgggcaatacatgtttgtcaactgctctgcagtctcccaatttgaatggcatccattctccataacttcagcacctggagacgactacgttagtgttcacattcgaactttgggtgattggacaaggcagctcaaaa

SEQ ID NO: 27235 - DNA, 375 bp, Gossypium hirsutum
  Clone ID: LIB3166-040-P1-K1-C10
cattcacagtgctccacatacatcttaacccctaaattaaaggctttttctaaagaattattcatttcaacttgctacaaaatattagattaccatacatttctttttgattgagactacaaacatacacattatttcttcatatgtagattttagtccaatttttgaagcctaaccatgtatatatatatatatacacacatgtattaataatttgctttgcaacttgaagtctttttaagttgatgcatggggtcatcctccatttttatgggtttataaatagagggagagagtgagaaaaagagagagagtttaggagaaatatgggaagaagtccatgttgctccaaggaaggactcaacaaaggagctt

SEQ ID NO: 27236 - DNA, 377 bp, Gossypium hirsutum
  Clone ID: LIB3166-040-P1-K1-C11
gagtgtggaaggcaggacattattttaatgctgatgcgcaaatacagtggctagctcagcagtttgaggaaagaattcttgaagaaaaggaaaaagggtaagctaccaaaagaagcaagggtcacgctgcttgattggtggaacaatcattatagatggccttatccaacggaggaggataaattgaaattatcagagataacaggactagatcagaagcaaatcaacaattggtttatcaaccagaggaagcggcactggaaaccttccgaggatatgaaattcgctctcatggaaggctttgctggagatcctatgcactttggtcatggagttggtcccgggagtgataatatttgttaaaagacaaactgcat

SEQ ID NO: 27237 - DNA, 357 bp, Gossypium hirsutum
  Clone ID: LIB3166-040-P1-K1-C2
gttttgtgtacgttaccgaaaatataatttaaaaagaactaggaatattttagagaagaagaatcagtttttgaaaattttaaaaattgccttagaaaggactaagcatatttatattaaaatatttagtaaataaataatgtcagcaccagaaggagataaacctacagaaggaggtgaaggcggtgatgcaccatcagaaagtcaacctcccccaccaaatccacaacatcaagctgcatctagaagattacaacaaacacaagcccaagttaatgaggttgtggatattatgcgtacaaatgttgaaaaagttctggaaagagatcaaaaattatcagaactcgatgaaagagc

SEQ ID NO: 27238 - DNA, 188 bp, Gossypium hirsutum
  unsure (1)..(188): unsure at all n locations
  Clone ID: LIB3166-040-P1-K1-C4
taaccttctacaaaatattacacttcctacatttcttttgattaaactcaaacatacacattaatcttcatatgcaaattttagtccaatttttaagcctaaccattatatatatnatattacacacatgtattaataatttgctttcaacttgaatcttttaaattgatgcatggggtcatcctccc

SEQ ID NO: 27239 - DNA, 287 bp, Gossypium hirsutum
  Clone ID: LIB3166-040-P1-K1-D4
caaatattacagagagagggggcgttctttttccgtcacgaaaatcgaaacccaggacgcggaaaaatcttctattcttttgattaaaataagtttaaataccaagcaatctaaaatcgcctttaccatcttcaaccctttcagagtttcagtaggagactacaaaggagggttctttggtcggtgtttgatattgttcgggctgtcaatgttcattctattacatcccgattctttttaaaactcctttattatttacacaaggtgatcctggctcttttttttat

SEQ ID NO: 27240 - DNA, 373 bp, Gossypium hirsutum
  Clone ID: LIB3166-040-P1-K1-E12
ctgacacctgcgtgaagacgacttttgctcggtctaggactgtgcgccgttgcggcatgaatgctctgattagcaggctaccaactgcgccacgttcagatccttgtacgacctgcgacgcgtttcagatgacatgaaatccaatgatgggccttagaacggtaaggcccggcgaaggtgcaagacgacggtttatgaccgctagcgaatgctcgacgatgtcgactgtgtgcaaccctgagaagatggcgaacgtcacttcgtggaaacttgcatatgcctgtgccatcaacggagacgatatttcgggatgaaaggtcgccttcaaagctaagagttcacctgtcatccaccacaccaccattccctaagc

SEQ ID NO: 27241 - DNA, 397 bp, Gossypium hirsutum
  unsure (1)..(397): unsure at all n locations
  Clone ID: LIB3166-040-P1-K1-E2
tccgggttggaccaacgcttccgcccacgcgtccggctgtttctatgtttttggcattgctcctaatggaagcggatgtgcaaaaggctttggcgttgggtcctgaagggccattaatggaggagttttgggagaatgtgaggagatacgcactttatgcgcttacggtcagtactggggctatatacactatcttccagcctatactggagttgttgaagaaccccatctctgcaattcttatattggtgattatgggtggcagtctctatatcgtttcccaaatactttccgccatgtttggagtaaccgattttacttacacttatggatattagttttttgacagttttcggcttatttggtatntgcttctctatactttataaaccttttg

SEQ ID NO: 27242 - DNA, 364 bp, Gossypium hirsutum
  Clone ID: LIB3166-040-P1-K1-E8
tcccattgcatcggaactcgatttttattctgaaagaacatggttatgcattagacgagctaactcacatgcggtgaaggaagattccgtagccataactgaagattcgcagtctcttaaccgtaacaaggaacataccaagtcaactactcaaaccgaagttaactcgaatttcctgccattaaacaatggaaactatgataaaccacgaaagctagctgaggaaatgtacaaaaacatcaccagtatttcgtttgcttctgtctcctccgatcaacacacagttctatcagaaatagaaactgcagagatgcttggcaactgtgtaatcgactttcaaatatgaaacaagtggctttcgtgt

SEQ ID NO: 27243 - DNA, 347 bp, Gossypium hirsutum
  Clone ID: LIB3166-040-P1-K1-F1
cggacacttgggctgacgcatgggttgtatcatagtaggcagctagcgctacagaacgctctctctctagaaagtgtcacaccctagatgacagtcggctaaggatcttattgaggacaacaaggtataaaagagaagacacagccagagaacaaaacaggtgagataacagaaaatgtcggtaccaaaagatccagcgagcaaatagtgtgggaaaatgatccccttgcactgagaaatctcctaaacgctcaacacaggaactatgtgcatctcggggtgatgatgacaccaacaatgatgataccgatccttactgttctaccaattcttcaccagaggaaaac

SEQ ID NO: 27244 - DNA, 374 bp, Gossypium hirsutum
  Clone ID: LIB3166-040-P1-K1-F9
cccacgcgtccgattctcgttccccttccgctgtattccctgcgtccaagcgcagcaaagaaccttccttctccaaattgaccatacccacggacaaagtatttaacttctagaaccacatacacagatcagcaatggcgaattcggagaacgaaaagatactgagaaaaatggccgatgccttcaaggaacttgccgctacggtaaactcgcaaacggcggatatggaggtggcccctttttcacgcgcatgttctttcgtttctcctctctttggttgtttaggcatcgccttcaagttcgcggaaatggattacgttgcaaaggttggtgatcttgcagaggcgtcaaagtctattgcaacgctaaaagta

SEQ ID NO: 27245 - DNA, 372 bp, Gossypium hirsutum
  Clone ID: LIB3166-040-P1-K1-G12
gtaaattaactaggaaaatattatatagattatcctcataatatttgttgaatgaaaatattaataatcataaataggattagtatttattacactgataatttactttttattcttttaaaaaattataatctatgtttttatatatttaatttttaatattttgttatattattataaaaaaaaatgtatcgaatatattccaaataaaataacgggtctcacaaaattttaactattatgcttttttgacacgtgtcttgacagtgtccgattttttttttttttggcgtgtccggtacgtatctgcatgtccgtgtaggacagcggtacgaggaggttgatgcttcatagggctagtgttcttatagg

SEQ ID NO: 27246 - DNA, 206 bp, Gossypium hirsutum
  unsure (1)..(206): unsure at all n locations
  Clone ID: LIB3166-040-P1-K1-G2
ttcttttattatntnntnttattttcctggagggggttttttttnctatggaaaaaaaaccctatctgatttttgccatcatatgaaaaagcctcttgtccttccctcttcctttttttgctgttacattcttcccgtctttttcataacatggaggtgtttcttcccccctgatttccaacaaatattcgtgaattgtgattcca

SEQ ID NO: 27247 - DNA, 203 bp, Gossypium hirsutum
  unsure (1)..(203): unsure at all n locations
  Clone ID: LIB3166-041-P1-K1-A2
ccacgcgtccgcccacgcgttcttttttcttcactccactaagctcttggcttgatcccctcccaaagatggaccgcttctctcttctcttcctcctcctttcctccggcgntgcttcggccgtcgtctccgacgtttattgcgatgacgatcctctcatccgncttgtagtttccgatggaggagtcgatgatgactccgat

SEQ ID NO: 27248 - DNA, 187 bp, Gossypium hirsutum
  Clone ID: LIB3166-041-P1-K1-E12
cgccgcccctatcatcgcaactgctgctgcgctttacactgcttaattggtagcgtcctctgctcatccgctagttctcgctctaggaataatatagcttttcctaagaaaaagaccaggaatgtagatagttccttatcaaaggctgcgaccgatcctcaatcgatctcttctcgggcttctcttc

SEQ ID NO: 27249 - DNA, 228 bp, Gossypium hirsutum
  unsure (1)..(228): unsure at all n locations
  Clone ID: LIB3166-041-P1-K1-F6
ctttctctctgatctgagtttctgtttttctgtttttttttttttttgcatttggttccttgatttcggatgggctttgatccttgncttgtgggtacttaggttgtctgacttgttcttcctttgatttccgggggtcttttgtgttaggtttgtatgtgatggctggggggagctggagccgatctcttgatgctgggcgtagataggtttccctaggccggcgct

SEQ ID NO: 27250 - DNA, 195 bp, Gossypium hirsutum
  unsure (1)..(195): unsure at all n locations
  Clone ID: LIB3166-041-P1-K1-G12
tctccctttctccttctccttttatttttttcctctttgnagcgaataatctgagatgtttaggtttatcatcacttctctgccctatgctgccttatcttggtaggatctaactacttcctcctctttctctgcttgctcattcctattttgggtttattgaagatggcttcctcctgctcttactattctccc

SEQ ID NO: 27251 - DNA, 143 bp, Gossypium hirsutum
  unsure (1)..(143): unsure at all n locations
  Clone ID: LIB3166-041-P1-K1-H9
tccgctcgcctcccattctccgaactttcttcttcttcgccaccctaatgggttgttttctttgcggcgatatttcctttaccnccctttctccgncgncgatgcctttcatccccgactacttgctcgccttcgttctcttc

SEQ ID NO: 27252 - DNA, 385 bp, Gossypium hirsutum
  Clone ID: LIB3166-042-P1-K1-A1
aatttctgccatattacacacaaacaatgtctgaatctgatccttcttcaaccaatgtgcccccgaaagaccagccaccaccaccaactgttccaatccctgacgctcctccgcaagagcagtcgccgaaaccatcatccactccattggtctcatcgaaagaaggcgtaagtgggaatcccacatcgagaaagttgtcggcggtttatcggggagtaagaagcaggagtgggaaatgggtgtcggaaatacgtgagccgcgtaaaacgacgcgtatatggctagggacataccctacacctgaaatggcagccaccgcgtatgacgtggctgctcttgccctaaaaggtcccgacgcggaactgaactttccggatatggttca

SEQ ID NO: 27253 - DNA, 382 bp, Gossypium hirsutum
  Clone ID: LIB3166-042-P1-K1-A12
cccacgcgtccgcccacgcgtccgttagtatttgaatgctgtttatgcattcaaatgccggagctatcaatttctgagtttgatgggttcaagaactttgtcaataggtgcatctctagattctcctgatggtcattttgaaaggaatcacaccgaaaacggaagtatggtttcccttaagtttcatgagccaaatggggtgctagatcagggccatcaagtctctagtccagtaagaagagatgttaacaggtcattatccggagtaaagtttcttgaaaatgatgatttggatttggaggatggtaagttggaaaaggacaggaataaaacagttcgtagtaacaaggccgttaaaatacaaaatcaggcattattatct

SEQ ID NO: 27254 - DNA, 384 bp, Gossypium hirsutum
  Clone ID: LIB3166-042-P1-K1-A2
cccacgcgtccgccattttcgtgctattcatgttacaaggacaaagtacagcagcgagccctccgagatcaaagctggggattgagaggagaagaaggtcgcgatcagccgagaatgtggatttggagtttcaggaagctaggagatcttcttctgcatcacacagttccaaactaaaagtaggtagaattgtagatggatatctccaagagattgccaaagacgtaaatctgcctctcttaaaattcattgcaatagctgagaccatcccaaatttctcacggcctgaccatgacgatctctaccgagccatcgacatttatctcaaggcacacccggagctaaacaagagtgaaaggtaaaggttatgccgtattctggact

SEQ ID NO: 27255 - DNA, 386 bp, Gossypium hirsutum
  Clone ID: LIB3166-042-P1-K1-A5
cccacgcgtccgatttcttgttatttattttgctggaatagatgaatgttaatgctgcccataaggctgaaaataagagaggttgtattctggccagtttttatcattgcaacacttgcaacgatggttgggagtcaagcaattatttccggtactttctcagtaatcagccagtgtagggctttgaagtgcttcccacgggtcaaggtggtacacacatcaaaccacatacacgggcagatctacataccagaggtgaactgtatcttgatggttctatgccttgctgttctggttgggtatagggatacggacacgataggcaatgcatatggtcttgctgttatcactgtaatgttggttaccacctgcttgatgtttctggt

SEQ ID NO: 27256 - DNA, 383 bp, Gossypium hirsutum
  Clone ID: LIB3166-042-P1-K1-A6
cccacgcgtccgcctttttttttttttttgtattaagcttactatattatattgtatatgcccttttgcaagcacattgcaaactatttcattgtatataaaaaaagcaaacgatgcttcacctgcagataaactagattatacgtactgtattgtgggggcctcaatgttgggcttaccaatgtaagaaacaatcaaagcttcaatttcaacgcatgtcaatgaatgagcgaagcggatatggtagggaactcgataagtgctaccgaagaggcgaaaggtagatccgttcaactcccactgaaagtttctgctctttgctggtttccatccggaactctccgaggtgaattaacagctcgtggatacagggtttggcagga

SEQ ID NO: 27257 - DNA, 391 bp, Gossypium hirsutum
  Clone ID: LIB3166-042-P1-K1-B12
cttcttcttcttcttcttctcatataccatgggagcttgtctctccgccaccaaaggcagtggtggttcaagcggaaacaccaccgcccaccaccgtaaaacagccacaaatgctgaaaaagagtctcaaaagccaaataatcaacaggtgaggtgttctcagccactgaaaaacaaacagaaaccgaagaaacaaagtgggatcatcccatgggggaaacgtacggattttgggtacgataaggattttgatcagcgttatacgattgggaaattgttgggacatggtcaatttggttacacttatgttgctatagacaaggtgaatggggatcgtgttgctgttaagaaaattgataaaaataagatgattcttccaattgctgtcgag

SEQ ID NO: 27258 - DNA, 380 bp, Gossypium hirsutum
  Clone ID: LIB3166-042-P1-K1-B3
taaacattatggcactcccacaaatccttgtgcaccagatagggtgcctggaggatcttccagtggctctgctgttgcagtagctgcaaagctggtagatttctcccttggaactgacactggtgctagtgtaagagtccctgcatcatattgcggaattcttggatttcggccttcactcggtgccgtctctactgtaggagttcttcctatgtcacagagttatgatactgtgggatggtttgctcgtgatcctaagattttaaaccgcattggacgtgttcttctgcatttacctgacgttgatcctatcaaaccaagtcagatcattattgcagaagattgttttcggctatctactattccaagtgaccgaacag

SEQ ID NO: 27259 - DNA, 384 bp, Gossypium hirsutum
  Clone ID: LIB3166-042-P1-K1-B6
cccacgcgtccgtgggattgctctccaagatgcgtctatggaatatggcatgcagaagaatcagtctagaaataaatactctggaggcgctaaagatgcttggtcaccagccttggatgatcttatgctagtaaaggatccaagaaccaagtctgctaaaaagaaacatgttgccaagttgcctcagtcttggcctttactggaacaaaagagcaagaattcccgaaaatttcctggtgaaaagaagaaacatcgcaaggaaatgattgctgtgaagcgccgtgaaagaatgcttcgtcgaggtgttgatcttgagaaaattaattcgaaattagagcagattgttttagatcaggtcgatatgtttgcttttcagccaatgca

SEQ ID NO: 27260 - DNA, 299 bp, Gossypium hirsutum
  Clone ID: LIB3166-042-P1-K1-C10
aaagaaccataggggagtaaccgtgggagaagttttaattgaaggagatagaggggaatctcggcgatgtttatttctgtttaaaaacatatctaatccatgttcattaccggttagagaaataaaagagcgttaaaggaacaccgatgaattttctttgtggaatatatcgatgatcgatcgataagctctgcatttctcaaatggagattgttttaaatcgatgacatgttcccgatgtgttgtgcatctgagcgccagatcggctcgttgatgcattgagtctgcctgtcatttta

SEQ ID NO: 27261 - DNA, 397 bp, Gossypium hirsutum
  Clone ID: LIB3166-042-P1-K1-C11
gcgtccggcggcggcggcggtgtttctaactttttatctccgaaaaagagtccaagattcgaccttccaccggaaatcaccatggccaagacaaactcaacacgcagcgctgctagtttggccggcgctgacaatgatgacagttacgttgaaatcaccctcgacatccgagacgattccgtggcggttcacagcgttcaaggcgccggtggtggaaacgaagacccagagttggcgttgctagctaagaaaactttggagaacaagtcggcttcgttccgttcctatttgttgaggaacacgtcgaatcgaattaaacaggtttctcaggagctgaaacaagttctttcgggaagaccatctaacgccggccggaggttcgacaggactaaatcgg

SEQ ID NO: 27262 - DNA, 385 bp, Gossypium hirsutum
  Clone ID: LIB3166-042-P1-K1-C2
attttgggatgttctaaatttttgaggtacatgtgtactgtgctaagtactctgagtgtgtgtgtgtgtgaaaacaacctggttaaataaactggtcttgaagtcgtctgattcagcccaatatatttgccatagtgtcaacttgataatgtcaacatgattgacgcatccaggaatgtaatttttggaaatgttgccctacaggttgcaactcttcagtgttcaacaattcaaggcgatgcaagatatgggaacacatacgaagggcttactagtattgtccgtaatcaaggatggagacaattgtttgcaggcttgagcataaattacattaaggtattttatgtagtactcaacaataatattaaacatagcttctagtttt

SEQ ID NO: 27263 - DNA, 385 bp, Gossypium hirsutum
  Clone ID: LIB3166-042-P1-K1-C3
cccacgcgtccgataactttggatggtacacatcatggacctataacaatcaaaccaactatgttccttgagattggcagcactgatgagtactggaagaggcaagatgctgccaaagtcattgctctattagtttgggaaggacttgggctcggaggtggtgctgcagtcggaaagtggggcaagtactgacctaataactgacataaaagtcattaagcttttcttgctgttcctttactgtatatgtttttattaaactcaattatctttggagatttctatcctggtattcttattggtaatcaagcacttaattttgatttattttctgttattccttcttttgtttggtttttggaaacaaagagtttctcattcatga

SEQ ID NO: 27264 - DNA, 222 bp, Gossypium hirsutum
  Clone ID: LIB3166-042-P1-K1-C5
cacacacctagtgtccgacagtttttcaagaactagcttaagaagggaatggggcgaaaattgctttaccgtgacgcagcggatgacagcatcgctagggaatcatgaaacatcgccgggtacccactgatgagttaaaccttctaggcaatggttcttcctacttctggtaaccgctcaatctgtggcaatatgcatcgggccacatagcaccggacgtcc

SEQ ID NO: 27265 - DNA, 385 bp, Gossypium hirsutum
  Clone ID: LIB3166-042-P1-K1-C8
aaaaaaacctggcaaatggtagctttttgaacatttggaaccttgaccataacaaagggacgggtccgattcctccagaactcactttgctcagcaggatgaaaacgtttactgtagcttataatttcttgacagggccaattccggtttttcggaccatgtattcggttgacagttttactaataattctgcactgtgtgggaagcctttggatcaatgtcgggagactaccaaggggacgaagactggagtgattgctggggctgctgttggtggggtgacatttgctgcaattggtacggccattgttctcttcttctattaccgcaaagtatctgtcatgaggaagaaggatgatgatccagatggaaacaaatggaccaa

SEQ ID NO: 27266 - DNA, 223 bp, Gossypium hirsutum
  Clone ID: LIB3166-042-P1-K1-C9
cggactcgtgggagctaagttcaagtttttttcataatttacagctccaaggtgacaggttactgtaccagagacaaagaagaaagccaatgtagaaatgttttttttttggtttcaatgtcaattacagtgttgaagaaatatagtcaccataggttatgaatgtaatatttaatacaaataacaactagtgatgagtgttgttctttgcttttatgcctgt

SEQ ID NO: 27267 - DNA, 228 bp, Gossypium hirsutum
  Clone ID: LIB3166-042-P1-K1-D2
gattggtgtaccaaagaggagaatggtttttaagcaatataaattagctgaaagttaaacagacctaagtattttatacgaaagggaattatgattatattcataaattatttattatatatataggtgactatttataaaaataaagaaaaaaaggataaattatgttaaggagatatctcctcctactaaagtttaaaattggagtttggaaaaaataacttttag

SEQ ID NO: 27268 - DNA, 385 bp, Gossypium hirsutum
  Clone ID: LIB3166-042-P1-K1-D3
ctttttgcagattacactctctattttcactttgcttttgctaaatttgataggatcctctcttaaatttcaaatttgtaaagaaattaaagaagcccccccgtttttttcctctcaaaacccaattgattttagaaccctaatttcactttttgttcttatttgaagctcaaaagatacaaattttaaagttttcttttggaaaaaaaattggttttttaaagcttgaatagttaatctgctgcttttttcctcttaattttataattttaaagcttttaccttgaaatttcagctatactgtagctgaatttaataacaaaaataaaaaggatttaaaaagttttatatttgaatgtttttcatcagctgggttgatatgaaa

SEQ ID NO: 27269 - DNA, 384 bp, Gossypium hirsutum
  Clone ID: LIB3166-042-P1-K1-D6
attgacgattagatgtctttcctctaaaatcgtatttttgctaaagaagatcgatttggaaaaattcacacattacccgaacattttttatactcgctaagaatttccttgaatgcaagggcttctttcctcaacgcttctccaaataaaatgcaatcatctgcaaatagtaaatgtgttacctgtggaccacttttgcttgcttttactccttttagtagaccttctctagtgtttattctcattaggctagatagtccttctccacatattaagaagagaaatgggctcaaaggatcaccttgttgaagcccccttgttggacagaaagttcctcctacactgccattgagcactacttgataagaaactgtagacatgcag

SEQ ID NO: 27270 - DNA, 398 bp, Gossypium hirsutum
  Clone ID: LIB3166-042-P1-K1-E10
agccttccgttggggttcctgttgttagaaccaccccaactttgttagaagctctgaaagacaagcaagtcaaaagtattgcttggggcaccaacttcactgcagcaatctgtctccataaatgggtttccggcattgatcagtccatgtgttctggttgtcgcctcccctttaacttcaaacgaaaacgtcacaattgttataattgtggactggccttttgtcatgcatgtagctgtaagaaatgtctcaaggcttcaatggctcctaatcccaacaaaccctatcgagtatgtgacaattgttttaataagctgaggaaagccattgaaactgaggcgtcatcgcaatcttctgtaagtagaagaggaagcataaatctggggactagtgaattt

SEQ ID NO: 27271 - DNA, 360 bp, Gossypium hirsutum
  Clone ID: LIB3166-042-P1-K1-E5
cccacgcgtccgtcacttttatttattaaggggatttttttagcgaggacctaaataagggagagagttgcacacaatattaacggcatttttgcgatctatatacatatctccacgaagagcgcacgtgctgttgctctgtctgtagagcacatcaaacacaaactttttgatgtctgagctgctgaggagagatgctgaagctcttttttgcaagatggacctccaagaacgaagcatgcatccaaactgtttggctgcacttcttgctgagtcattgaaatacatatcagtgctaaccaagctgataagtgaaggcattagaatcgcatctgccaattcgtatgcggctgatcgaga

SEQ ID NO: 27272 - DNA, 388 bp, Gossypium hirsutum
  Clone ID: LIB3166-042-P1-K1-E6
gagatcgccaagaaagagaatgagtatccacacgaggaggccacttgcatgcatgaacctgcagcggaagtggaaacaaagcttgaagaggtgagtaaagaaccagaaatggaggaacatcctatagctgacatctcgagttcatcgactggcgatgaaatcatgaaagaaagcacagaggaaaatgaaagcatcccattgaagttaacagaaaatgcaagtccttcattagaaattcaagactcaaaaaaggatactgaagagagaaccttagtagaaggaagtatcgatactgctgacccggaatcggcaccggctgcagcagaatcagaagagacaaagctaaaggaagctcctatatctgacatctcgagctcaatgattagtg

SEQ ID NO: 27273 - DNA, 355 bp, Gossypium hirsutum
  Clone ID: LIB3166-042-P1-K1-E8
caaagggttagattcagccatgctccttttcttccctccgggctccatactttcttctatttcccctctagccctctttttcccctcctctcctacaatcagctcattctccaaatcatgctccatctctatgttattattaccaattagcttccttgaactttctagctctgcgtaaagcccgttaccttccagattaaaacctagaattggatccggaatattctcaaattttcctactttcctccaatctctatcactcctgaattcatctctattatttttgcctactgatcatccctcctcccttaaccaggcactgcgcattgcttgggctctcattgactgtgcccgg

SEQ ID NO: 27274 - DNA, 383 bp, Gossypium hirsutum
  unsure (1)..(383): unsure at all n locations
  Clone ID: LIB3166-042-P1-K1-F12
cggacgcgtgggtcctaacagagctttcagcttttaaaacagaggtattatttggagcgacttcaattatcgatagtcaataaagtgatttctggttccggtttgattgatacaaactatgagtagtctcaagttgggggtggaggtggtgggggcgcatgacctgttagccaaagatgggcagggatcattctgtgcctttgaggagctcgagttcgatggccagagatgccggaccactactaaagagaaagatctcaatccggtatggaacgagagtttctatttcaatgtatcggatccaaacaagttgtcaagcctcccacttgaagcntttgtttacaaccataacaaagcaaacaacgcgaagacttgtcttggga

SEQ ID NO: 27275 - DNA, 392 bp, Gossypium hirsutum
  Clone ID: LIB3166-042-P1-K1-G12
cccacgcttcctcatttaaggcacatgaattctcgtgaagctctttggtcagtggcatggaaaaggaaaactaatactagttcagttaatggctaatagcagcctagattcctatctttttaaaggtaagaccttattgacctgagaagtgagatttacaattgtgcaagacctggcatcagcactattctatcttcatgaagaaggtgaccattgcgtactacacagagatatcaaagcgagcaacattatgttagattctagtttcaatgctaaacttggggatttcgggcttgctaggctagtggatcatgaaaaagcgtcacaaaccacccatttagctgggactatgggctatttggcacctgaatgtgtgtcatcaggaaaagcta

SEQ ID NO: 27276 - DNA, 393 bp, Gossypium hirsutum
  Clone ID: LIB3166-042-P1-K1-G8
aagaaatccattcaccctcccactcttaaaaaccagatcaaattcctttgtgtgtttgctttttggaaattttattggccataaaggaactattgatacgttagaaaggaggagaaattttcaaatattttgtgaaaaatttagatttaggagagttatggagaaggagaagaggaaaaggagcgagaaagaaaggaaaggaggagtaacaatggagtcaacgaacaagaagaagaagaaggtgacgaaggtagaggaagaagaaggcagcgttggcgaggaagaagaggaggaagtggaggagttcttcgctatactgaggaaaatgaaagcggtggttaagtatttcaacaaaagcggaggaagcgaatggtggagggcggcggtggagtc

SEQ ID NO: 27277 - DNA, 394 bp, Gossypium hirsutum
  Clone ID: LIB3166-042-P1-K1-H10
gcgtgcggtacctgggaagaaagttccttcctttgctaaaggggaaatggcgaatcattggaagaccgtggtggcacagcaggttccacccgagcttcgcgatgccttcatagctgcagtcgacaaaggtaatatccgaaccatgccaaatagaagcatgccggctgatcctcatccgactccaggtgcacttcttatgggagatgctttcaacatgcgccatcctttaaccggcggtggtatgaccgtagcattgtccgatattgttgtacttcgagatcttcttaggcctttgcataaccttcatgatgcagcctccttaaccagctatctcgaatcattctacacgttacgcaagcctgtggcatctacaataaatactctggccggtgct

SEQ ID NO: 27278 - DNA, 345 bp, Gossypium hirsutum
  Clone ID: LIB3166-042-P1-K1-H2
cacaattatcagtgaccaacattttggccttgagattgcaatttttgacatactgatcaagagaggagcataggaattgtgtaaggcacgtgtttgcaaattggtcatggaggaagttagggaaatcttatgagtgatttttggcagattgtgaagtgcgcgactgaggagtgagaggatctatgttcagcattgaagaagaaatataaggatgcttacgataatttaatgaaaaagtctccaaagatgtggactagggcatttttggggactacttgtaaatcagatatagttgacaacaatttgtgtgaagcattcaattcaagcattgtcgaagcttggttc

SEQ ID NO: 27279 - DNA, 358 bp, Gossypium hirsutum
  Clone ID: LIB3166-042-P1-K1-H6
agcagtctgtcccgcttcttcttgttgtgatttaaactgaatacttcattccaattaaaattacaaaagccaatacatatgcatcattccaaacactgaactttaataggtaaaactaacaatttgcttcttttttttcattttccaactcaatcacttctcaaactagggaaacaatgtgactccatttatatacatcttcgagttgtttacctctactttttcattattaaatcaaactaagccaactaaattagtcttggcttcaaaatttggaaatcagacaaacttcttgtttccttaaacctggttagccttcatcatcatgagctttgtttgcacccacatgtacaacttt

SEQ ID NO: 27280 - DNA, 366 bp, Gossypium hirsutum
  Clone ID: LIB3166-043-P1-K1-A10
ctcaagatgagggctctatttcaatcactgaagaggagatcgattctgaccactgaaatccagtaccaacattgactgacaggcggcgacttttgaacctcttcaagattgctggctttgcaggtaaagatgctgactggcagataaaagccaaaaggatagaagctggtttgaagattttgagattgcaagaagaaattattggaggtctacctatggatgacaccaaccaacatggtgaccagaagcttctttattctgaggagctgattgagctgtgttttgaaaggggaagccaagagctacctttgcagggttttgatggtatttgcatggactagctaatcatttcgcaggagccatagg

SEQ ID NO: 27281 - DNA, 364 bp, Gossypium hirsutum
  Clone ID: LIB3166-043-P1-K1-A12
gtcaaaatcaggactctattttttatattttacaagagatcgattctgaccgcggagatttataccaacattgactcacacgcggcgacttttgaacctcttcaatattgctgcctttgcaggtaaagatgctgactgtcatataaaagcgaaaagaatataacctgatttgaacattttgagattgcaggaagaaataatggaagttctacctatggatgacacgaaccaacatgttgacaagaagctccttcatcctgaggagctgatagagctgtatctcgaaagtggaagcaaatagctacctttgcaggtttttgatgtatttgcatggactagttcatcattttctcaagagccatag

SEQ ID NO: 27282 - DNA, 381 bp, Gossypium hirsutum
  Clone ID: LIB3166-043-P1-K1-A4
cccacgcgtccgcccacgcgtccgcccacgcgtccggattaatgagattccatatttgactgattgcaggacaaaatctaaagatatggttactgtcttcctctttgagtctgcaccgagggcacagagcattctctattactttcttggatcttagatttattagggaagggatgtagttccaggaaattcgctaaactagtatctttattttacccggtagctgtaaatcccacaattttctatagaagtttcttattttgggttgtaatggataaatattaggattcgagctagaatgatgtaatagtttataggcgcttcttactgagaactcccttgaaggttcctctttccacacctgaaagtcaacatgttctg

SEQ ID NO: 27283 - DNA, 372 bp, Gossypium hirsutum
  Clone ID: LIB3166-043-P1-K1-A9
aaagactgcaataaagaagtggcttttagtgtattactctcattctcagcgctgggataatggcgagttcgccggctcttgtttcatggctggttctagttttaacccttgcaatggcagtttcaacgactcaagtcgaagctgccagggcattcttcgtattcggtgactcgttggtcgacaatggcaacaataattatctagccaccactgctcgagccgattcacctccttatggcattgacactccgagtcgtcgccccactggtcgcttctcgaatggcaaaaacatacccgatttcattagtgaagcactcggttcggagccgctactgccgtatttgagtccggcactcaatggagataggctac

SEQ ID NO: 27284 - DNA, 380 bp, Gossypium hirsutum
  Clone ID: LIB3166-043-P1-K1-B11
aggcaatcattctcgccaactcgactattgaggagaaagaaagctccatggacgagatgacgaagaagagatgctcaagaagggagtgcaggagattgcaaatgaggatgggacagttccatggaagagaattttggagtttggtaccaatgtgtttcttatggataggactgcaacagacctcaagaataagtggagaagtatgtgcaagggtagcccgggatgcaaatgatatgatgtcacagccttgtgattttgcatcttatatatctcggttaagtcatctctttttgttttaaaggaagtaggtgagttcaatagctctgttatgatttactgtattcagggctaaagcataagtaatatgaagttggaaatgg

SEQ ID NO: 27285 - DNA, 385 bp, Gossypium hirsutum
  unsure (1)..(385): unsure at all n locations
  Clone ID: LIB3166-043-P1-K1-B2
ctnnaagcaggcaaaatttttgtatgggaatgggttttctacagaggaactgcaggatctcaagttgatgatccagagtaatatgtacagataccttagcatattactggatgggcgggagcgatttgaggaggaagcaatgtctcgtataagagaactaggtcccgatgaccagaatagtgaagcaggtggggaggtcgactctagtgaaactaaccagtgcatctattctataaacccaaggctaaagcatttttctgattggcttctggacattatagccaccggagatttggatgcttttttccctgcagcaacacgtgagtatgctccattggttgaggagttgtggaaagatcctgctatacagcaaacgtataaaaga

SEQ ID NO: 27286 - DNA, 383 bp, Gossypium hirsutum
  Clone ID: LIB3166-043-P1-K1-B9
cccacgcgtccgcccacgcgttcgtctatctctaaattctaatgccttctgtgggaatattccaccatccattggtaatttatcaactcttaattggttagatatggctgacaaccaacttgaaggagaaattccagtctcgaacggatccactacaccagggcttgactggttgattcataccaagcacttccatttcgggttgaacaaactctctggtccaattccaagtaaacttttcagttcagatatgactctgatacatgtgctgtttgaaaacaacatgctctctgggcctcttcctttgacccttgggcttgtgaaaactctggaggtggtgcgctttgacaacaattcactagagggggatcttccattgaatc

SEQ ID NO: 27287 - DNA, 358 bp, Gossypium hirsutum
  Clone ID: LIB3166-043-P1-K1-C12
taaattccaactttactaaatttatcattttctgctgcataaactttaggatgatggtttttaacacacaagtgtcaaacctactaaaaacatcaaccattctgaaataatgagtactttaacaaaatggcataccacaaaaccaggcctgactctacgtctccagctaaatatcaacaaacataaacttttcaatacatacactgagtttaataatcctgatgtacaacgtcaactattttctaaacaactgaacgatctacaatctcctgattatgaagctatggctctagactaaacatccatgactgcactttaatatggattgcccacaactggtttttgaagactgatatca

SEQ ID NO: 27288 - DNA, 224 bp, Gossypium hirsutum
  Clone ID: LIB3166-043-P1-K1-D12
ttcacggtcccttcaactaacgccagctctatcgccattcaaattctagacaagattctcagtgacaactacattaactttacgtattcacaagatcgatacatcttccacgttaaactcaccgatggactcacctttctttgtatgtctgatgaaagtgccagaaggcaaattcctttagtccttcttgaatacattcatcaaatatatctttatgacttatg

SEQ ID NO: 27289 - DNA, 380 bp, Gossypium hirsutum
  Clone ID: LIB3166-043-P1-K1-D3
gttctttcttcttaactattcaaagcttttcctcttcttctcttcatttccatgatcattttgatctagagatagcatccaataacatactatcagtagttttcttttctgtgaggttgcaaccatatcgatggcttgtctaaataatatttgcaaagaggtgagtgatgaaaaaatgatgacaaaggaagaagaggattacaccttagatggaactgtggaccgacatggtcaacctgctattcgatccaaaactggaacttgggtttctgggattttactacttgtgaatcaagggctggcaacgttggcattctttggggtaggtgtcaacttagtgttattcttgaccagagtgctcggacaagacaacgccgagg

SEQ ID NO: 27290 - DNA, 375 bp, Gossypium hirsutum
  Clone ID: LIB3166-043-P1-K1-D4
cggacgcgtgggctttttggctattcattatgtgttaatttggcctctttttttgtaaagaaaaatctttagagagattacacttttttttatcccttttcttgtttctatttttctcctcccaaaaaatctctcctccccttttacaatattgttgtttttgtacccaaaaaaatccggaattttaggctttatagccgaaataccatggatttgctattatctatttccttgttctcttgcttcttttctgcccctttttgttttttcttctttgtttcttttttttttttgtttgctactgtttgcgtttgttttggttctctgttgttgttttgcaggtgatgggacgatgggatggggttaggtggtggc

SEQ ID NO: 27291 - DNA, 416 bp, Gossypium hirsutum
  Clone ID: LIB3166-043-P1-K1-D9
atttctgagtacagtacgactttttgctgtaacggttctactggtgatgggtgaaataataacagcgatccagctgtcactcagaataaaaggaacagcaataatttttcagagcacttcaaatggcatgatcatctagtttactatgactattgttgtttgtatttttattttaaatttttctttttttttttttatatattatttttttttttactacttttaatttttttttattttttttaatataatatatttttatttattatattttttttatatttatttatattttatttttattatttttaattatatatttataattttatattatttctatatattatatattttatatagatttttcatactatttttttttatatttatatttttatttttattttatcata

SEQ ID NO: 27292 - DNA, 340 bp, Gossypium hirsutum
  Clone ID: LIB3166-043-P1-K1-E1
aaggccaaaggctcctgtcgtttttatagcttgataaagcccaacctgaccttgatagtgctaatcaaaggatagaatcgataaatgatatgtacaagctactacaagaatacaactctagtttacagatatataacagtaaactccagactgatgtcactgctgctcatgaaaccattaaacgcggtgagaaagagagattggctgctgtggaaaatcttcataacttaaggggtgaacataaatcgttgcaagatcaactcacttcatctatagcttcacaagatggggttatgaagcaaaaagatgctttgctgaacgaagttgcatgtcttagaat

SEQ ID NO: 27293 - DNA, 399 bp, Gossypium hirsutum
  Clone ID: LIB3166-043-P1-K1-E6
cggggcgggccgagccgtccgttcgaggggaaggagttggaaggaattgttaaccagggaaacctgtgctgtgaaacaagaaagctgagataatacactgcagccagagaaaaacaaaaaccaaaaagctcaaatcccaatcagtttaattaagccaaaaatcatcgggaatacagactttgttcatcgattctcctctttgatcttcttttcgtttttttccctttttcatctgaaagctttagctatggatcctttcgatttgtttcgcaaaggttttggttagaatttagtggaactcaagtgtatatcctctgcatcagtttcctttatatacatagaatctactttttccttttaagtaaagaatgagcttgtccaagaaagggacccaaatta

SEQ ID NO: 27294 - DNA, 359 bp, Gossypium hirsutum
  Clone ID: LIB3166-043-P1-K1-F12
atttatttccccttttttttattagtttagagaaagggcttttgccaaaggaaggatttttgcaaacatgggggactcaacttgtctcatgcaaccattttcttacactgcaggccttcccaatgaagccgaagagggaaacccaattcatggtcttggacagtcaatttcgtttggcagattcatgtctgaatctttagcttgggaaaaatggtcaaccttttctcataacaaatatgttgaagaagctgagagatatgctaggcctggttcagtagctcaaaaaaaatctttctttgaagctcattataagacccttgctgctaggaaagcagctgccttgcttgaacaagctaatg

SEQ ID NO: 27295 - DNA, 381 bp, Gossypium hirsutum
  Clone ID: LIB3166-043-P1-K1-F4
gtacgttctctcagagtcgagccttttcatttacccaaacaagattatcctgagaacatgcggaaccacaaagcttctcttatcaattcctccgattctccaactcagtaactcaatctcactcactgtgtcacgagttaactactcacgtggctccttcatttttcctgatcaccagccctcccctcaccgtaacttttctgaggaagttgcaatgttaaacggctatttcactgatttcattaccgaagcttatataatcggcaatccaaagcttcaaaaccgtagcaggcacatttactcggccgtaccaaaaagttcaccaccgttcgtggaagatcagagggcagagatcactctggaaatgtgcatgacaggttt

SEQ ID NO: 27296 - DNA, 327 bp, Gossypium hirsutum
  Clone ID: LIB3166-043-P1-K1-F6
aaaacgcttcttcttgctgatcttgttattgctgatgatagaactgcgaataggtcggcgggctctacagctcttgttgctatgctatgcgcaaggcatctaatggcggctaatgctggtgattgccgagcattcgctatgcgcgaaaaggggaagcatgacgacatgtctgaagatcacagacctatatatccatcataacgggggagagtagaagatcttgatcagggaatcgatgaccagtatctcaatggcggtctatcaattgccagagatttgtctgcacgaggcatgaattatcgcacgggttctaaagaacttctaatt

SEQ ID NO: 27297 - DNA, 182 bp, Gossypium hirsutum
  Clone ID: LIB3166-043-P1-K1-F7
cggacgcgtggggtccaacactattggaagctggataaggacaagggtgtggtgcaatatttctaaaaggttgagacttactaacatcaataccagacaagtcactcagcttacaccacctaccccgactcccatacaacctttacccacaccaaaaattcttaaactcctccaaccttaca

SEQ ID NO: 27298 - DNA, 381 bp, Gossypium hirsutum
  Clone ID: LIB3166-043-P1-K1-G2
tttttagggtcaggtttgaaaattgttattgctcgtgatgctgttcgtagcattgggcaaagtagtaaccatggtgaggatttggataataaacaacaagggtctattgtttcttcaacggatgtaccgttttccataagcacaaaacgggtttttgaagctgctgtggagtattcaaggactatgggttataattttattgcccctgaacatattgctgttggtttatttaccgttatgatggaagtgctagtcgtgtcctaaaaagattgggagcaaatataaatcacttggcagctgaagcagtcaccagattacaaggggagcttgcaaaagatggtagggaaccttcattatcatcaaaaaagatgagtgaaaaat

SEQ ID NO: 27299 - DNA, 379 bp, Gossypium hirsutum
  Clone ID: LIB3166-043-P1-K1-G3
cccacgcgtccgattacagaatcataatcatgggaaacagttgcgggaaacggaagatggtgactgtgctgagcatttatggtggcggcattagaggcataattccaagcgttcttcttgcatcccttgaatccaagcttcaagtatggacccttttttgttttaccatcatcattatttatctgttaatttatattttttgagttgattattgtggtaggaactggatggaccaaatgcaaggattgcagattattttgacattgttgcaggaacaagcacaggtggattgatagccaccatgcttacagctcccaacaaggacaatggacgacaacctttgtacgaggcaaaggacatcgccaagttctatttagag

SEQ ID NO: 27300 - DNA, 354 bp, Gossypium hirsutum
  Clone ID: LIB3166-043-P1-K1-G7
atggttattgtcatattcttctttttaaaccatgactaccactatgatacgacgggcgatgaatatggcataacaagtgtcatcaccaaccgaggctcctgcgtcgcggatcgtggggggatgcacgctcgctcgcacaacagaagctcaaaaggagcaaccaaatgcgactggctaccctaacatgaacacctcccaaatctacctatggaatccaaataatccaaccaaaccccagctacacgactacagaatctacttacaagaatgctgacctatggtacatgacgccctcataaagatcaagaacgagatcgaccagtcgatcatgtaccggctctcctggactgtagg

SEQ ID NO: 27301 - DNA, 314 bp, Gossypium hirsutum
  Clone ID: LIB3166-043-P1-K1-H10
tccacacgttctcaaacccgttcgtattattaatatcaacacgccatagggtaggaatattaacttgccataccctaaaaacagaggtaaggcctaacattaaaactggtccaaagcctaacaatattcaatgacccaaataaaacaaattatataaaaccaaaatcccaaacgaatccgtcactataaacacaaatgacgtccgcactatctataccaatcacaaccccatcatatattcaaacttcaaccccgccgcttatacacacaagcaacaatctgacatcacacaaaaacagttatttttcaccaca

SEQ ID NO: 27302 - DNA, 322 bp, Gossypium hirsutum
  Clone ID: LIB3166-043-P1-K1-H12
ggggggttctctgatttcgaaaaatttgggtcttggtgggtgactttgaattgttcaaaaaggattgaaagataaaagcttttcgattggtgtcggtcttgcagtccaaaattcttcaactttgggtgtatttgatggattggatttctcttagagttagcaaattttattgttaaagtaggttatttgttgtttaggcgattgtaatttctgtacatatcataacatgggttgtatgagttccacagctgcggctgtcgaagatagtcgtgagaatcacaaagagaagctgaggcgaaaagggtctgtggataagcttgtt

SEQ ID NO: 27303 - DNA, 383 bp, Gossypium hirsutum
  Clone ID: LIB3166-043-P1-K1-H4
cccacgcgtccgaaagaatgaaacatagtattctcattctctgttttctcctgtgttcataatactaataattaccacctttggttttgatacatatatatttattttatatttttgagtgctggaaggaatcagatggccaaaaccggagtgttgagttccaatccaacgctgagagcgagagcggcggaattgaagaaagaattgcagaggctggttaagattattgtcgatgatgaggattgcagcgtccagaccatcgatcaagcgaaacatgctctttgtgctttgagagagcttaagttcaatacacgatcgtcggcgaccactttgacgtcgtccttgaagttacatgaacagctgccatgtcctcaagagtttat

SEQ ID NO: 27304 - DNA, 383 bp, Gossypium hirsutum
  Clone ID: LIB3166-044-P1-K1-A12
cccacgcgtccgggaaagggttgattactcgagagatcgcggatacctttatagcgtatccctaaggacttttgttgtccgatatctttggacttaatgagagatccggtgataatttcgacaggtcagacgtatgatcggagttcgattgttaggtggttggaggaaggccattgtacttgtccaaagacggggcaaatgctcatccatactcgccttgttcctaatcgggctttgaggaatttgatcatgcagtggtgcactgctcatagtgtcccatatgatcccccggaggctgcagatgcacctgcagagtcatttgctgaagctttgccaatcaaagctgcaactgaagctaataaagcaacaacaacccttcttgt

SEQ ID NO: 27305 - DNA, 392 bp, Gossypium hirsutum
  Clone ID: LIB3166-044-P1-K1-A3
aaaaaatatcacatttatcaagacatttgcctccggaattattgtgcccaagtctgacatatggcctgtagataaggatctttacttgctaccttctacttctcttgtcttggatgctcacaaagaagggctagaagtttttgcctcagatttctataatgatgttccatttagcttcaactactcctatgatccagtggccgagtatcttcagtttattgacaatggtgaattctctgttgatgggatgatatccgacttcccaataactccatcagctgctatagattgctttgctcaccttggcagaaatgcctccaaacaagtggaccttctggtcatctcaagtaatggagcaagtggagactatcctggttgtacagatatggcat

SEQ ID NO: 27306 - DNA, 386 bp, Gossypium hirsutum
  Clone ID: LIB3166-044-P1-K1-A6
aaacgaccagatggccagcaaaatttttttttttggcttaaaccaacactatccggtagagggattttcaaaacctttatggatccacggattgagggccagttttcatctaaggcagcaacacaaacagccgagctcactctgaaatgtctagagcatgatcctaaaaatcgtccatcgatgaaacaagttgtggaagcattagaacggatcgaatcactaaacaaggaaagaccaaaggagtcctctaaatccggttccattcattcctcaactacgcctagccatagacaacaatctagtagtcagcgtccacagtttcattcaaggcaacatggcacttgagcagcagttcctccaacagtactaaaacttgggctcaggat

SEQ ID NO: 27307 - DNA, 387 bp, Gossypium hirsutum
  Clone ID: LIB3166-044-P1-K1-A8
aaaaaatatcacatttatcaagacattttcttctctctatcatgaaacccaacccttgcatgtgtcctatacatattcatctccactccctacctcaaacttaacttctctcttaaacccacaaataaaacctccaactaccttcctcaactacctatatttaaactccattcaacttcaaccactcctataatccattaacccaatcttttcactttattcacacttcaaaaatctaatttaaccgcatgatataccccattcaattaactgcatttatataatatatatatcttttgctcacctttactaatatacctcccaacaattttaccttctaattattttaaaacatctatcaattttaatactattactctttttaca

SEQ ID NO: 27308 - DNA, 399 bp, Gossypium hirsutum
  Clone ID: LIB3166-044-P1-K1-B10
ggcgacccacgcgtccggccactcttccactctaccttttcttcattcattgttcaatgccaacgaggtaagatccttttagaaagatgcctacctttccgaaaactctcactggtatgaccatcaccctcgagatggaaagctccgacacaactgataacctcatgaccatgatccaaatcaaggaatgtatcccctctgacccacacatgctaatcttccatgttacacaacttaaggatggccgtacccttgctgactacaacatccaaacagactacaccctccatcttgtcctccgtatcatgggtggcatgcaaatctttatgaaaacccttactgtcatgacaatcacccatgatgttgaaagctcccacacaattgataatgtcaaggcta

SEQ ID NO: 27309 - DNA, 391 bp, Gossypium hirsutum
  Clone ID: LIB3166-044-P1-K1-B2
ggagaaagcaactgaggaaatagaggtcttatatggggctgatctggaaactggggtttttggcagtgggtttcctaagaagtccagtcaagttggacttgcttccaacgagaagtacataaattctggttggaacttaaataacttccccaggctacctggatccgttctcaattatgaaagcagtgatatttctggggttctggttccctggttgtatgtaggaatgtgcttttcctccttctgttgggtcactcagctgtccccttcgatactaaaatctgaaggggtacctgtctatcgatgtgttcagaatgctggagaatttgttctgacattccctagagcatatcatgcagggttcaactgtggtttcaattgtgcggaggca

SEQ ID NO: 27310 - DNA, 175 bp, Gossypium hirsutum
  Clone ID: LIB3166-044-P1-K1-B5
gcacttcatcatatgctgcccaagtttgttaagggcctggttgctggctttcgcggaggagcgtgggatactgtggagttcccctccacaattcatggagaattggtgttcccacacaaatacattgatgcgcattgcaaaccagtatcaaccaggtcatagtctcacctgaata

SEQ ID NO: 27311 - DNA, 315 bp, Gossypium hirsutum
  Clone ID: LIB3166-044-P1-K1-C6
accgccgttttatgtttggcctagtccgcctttcccactggtttgctcgtttccctcctcctcctaaagtctctgctgctgctgctgctgctgctgcatgcatcccaagatccatctctgagattgatctgctcatgttctgtaatacccatcatctgtgtttctttctcttttttctcttgatatgtactgtcatggcttgcatatgaccatggagtgctgaaaatgatgcatgcttttttattttcatttttgtcctttgtttgagcaggcaaccttggtgaaaatggagaaaagttaaaagatttaagccta

SEQ ID NO: 27312 - DNA, 164 bp, Gossypium hirsutum
  unsure (1)..(164): unsure at all n locations
  Clone ID: LIB3166-044-P1-K1-C9
gggacctacgcgtccgatnnaatacctaattcnngttctatttaactgacaagaagagggctcgttgggcggtatttttttatagagaggaagaccatacacaacaacattataaatcatattaataattcttatttccatcctcaattctttactttcccatc

SEQ ID NO: 27313 - DNA, 191 bp, Gossypium hirsutum
  Clone ID: LIB3166-044-P1-K1-D2
tccagacttgctctatgaaaaacaatcaatacaggttgctaacagttccgaagtaggggaacctgggtggtgatgctagctgtggggaaaaccagatttttttggatcgcctttcctgtatcgaacttggtcgaactctgaaccttaccaaagtattctgtcctgcatctaccacaggtgaacttgatcag

SEQ ID NO: 27314 - DNA, 379 bp, Gossypium hirsutum
  unsure (1)..(379): unsure at all n locations
  Clone ID: LIB3166-044-P1-K1-D4
tttgcagttctaatcttctggctaatcttccgcccaaacgaggtcaagttccaggtgggtgacttttcgctcaacgagttcaacctggacggcaacaacaccttgcattacgaccttgctgtcaatatcacagtgcgcaaccccaacaggagaatcggcgtacactatgatcggatcgaggctagggcttactacgaggaccaacgtttcgatacccaaactttgccctcgttttatcaaggacacaagaacactagtttcttgaaccctgtattcaagggcaagcatctggttttccttggtgcggatgaaactgcggagttcaatgaagagagggctagtactatntacagcattgatgtgaagctgtatttgagga

SEQ ID NO: 27315 - DNA, 191 bp, Gossypium hirsutum
  unsure (1)..(191): unsure at all n locations
  Clone ID: LIB3166-044-P1-K1-D7
tctaaagtttgtcccnttagcaaacttctctattgttgaaatgaatgtaagtttaatgtgtaattctgtggccttttaccaaatagcaaatctgaccatgattccaagttcttgctctctggaagttgtttttgacaaggttcgcttctcaagggatacaaaacttagcattctactagttcttccttgta

SEQ ID NO: 27316 - DNA, 383 bp, Gossypium hirsutum
  Clone ID: LIB3166-044-P1-K1-D9
cccacgcgtccgcatttagtcagcttccaaactatcttaaagatggtgcaggtggtttcttgaacatgggtggtacgctttcaactggatgtgatggtgccccgctactacctttgctgttcattatcgttaacatgggtttcaacatagcattgctacatcttctcaagatatcttctgctgttgtttcctcacttgcatccactttttcagtgccgatttcagtttacatcttcacattaccgttgccgtatctcggtgttgcttcgtcgcttccagccggtttcgttgcaggagcaatcatcctagttatggggttgcttatctatgcttggtcaccatctgattcctccagtgccataccatcaccatccagctagaat

SEQ ID NO: 27317 - DNA, 377 bp, Gossypium hirsutum
  Clone ID: LIB3166-044-P1-K1-E10
ttttctctcatcttctttaaactttctcaacttatttctgggtttcttttgctgatcttgggtaccattttttaaatgtaattttcacttcaagaatcaagacccatcgatataaaactgcaaaggttttcattagttttccattcattttatagttagatttgatatgaaaaaatgatgaacttagtagggtgtcttctctgtcttcatatttcctcacactgttttaaatcatcgatcttcgccgacctaaaacaagaataaaacatggatcaaacaatctctaattgtcaaattaacaagatgtgggattcaataccaattatttaaatgagttagaaagaatgttagagaatgttttacctcatgctatgctg

SEQ ID NO: 27318 - DNA, 371 bp, Gossypium hirsutum
  Clone ID: LIB3166-044-P1-K1-E2
cccacccgtccgaagaaatcgagattggtggtcccaaacttggaggccacgttggaaacattggtggatgcatttgtgctgttggataagaacaaggttggctatgttagcaagactgagatggttcaagctatcaatgaatctggggagcgttcctctggaccaatagccaccaaaagatttggtcagctcgctctctatatatatacaaattctttggtacattatcgacacaaattttacacatacggtaaaaatatagtaatatacaaaaaaagaaaagggttcccaatatcacatgtaaacatgtgcataatatggtgtttacttcacttaaagtagacaaattgtgcagaaaaaatgcataatat

SEQ ID NO: 27319 - DNA, 386 bp, Gossypium hirsutum
  Clone ID: LIB3166-044-P1-K1-E8
cccacgcgtccgcccacgcgtccgtttggaaaactgccgacaagatggttgccgccaagaagcacgttcctatcgtcaagaagcgcacgaagcgcttcatgcgtcaccagagtgaccgcttcatgcgcgtcgacccttcgtggcgcaagcccaagggtatcgacaaccgtgttcgcaggcgcttccgcggcactcttgccatgccctcgatcggctacggctcgaacaagaagaccaagtacatgatgccctccggccacaaggccttcctcgtcaacaacgtcaacgacgtcgagcttctgctcatgcacaaccgcaccttcgccgctgagatcgcccacggcgtctcgtccaggaagcgcgtcgacatcatcgcccgcgccaag

SEQ ID NO: 27320 - DNA, 400 bp, Gossypium hirsutum
  Clone ID: LIB3166-044-P1-K1-F4
cccacgcgtccgaagaccttggctaagatggttatggtgattgcaaccggggggctggtaatggggctcgtcaagctcaaggctacgtttggaaccacattttcaatttcataaattccatgtctctcaaatgtgcaattgatttaggtttcccagattttattcaaaatcatggcaagcccatgaccattactgagttggttgctgcactgtcaatgctcaaccctaccaaggcatgcaacatctaccggctcatgcgtattttggttcattcgggattctttgcacaacgaaatttatgcaatgatgctcaagaagatggttatgttcttacgaatgcttctcgtctgctacttaaggataatcccttaagcgtaacaccttttttgaaagctatgtt

SEQ ID NO: 27321 - DNA, 384 bp, Gossypium hirsutum
  Clone ID: LIB3166-044-P1-K1-F8
gtagaaggaagtattgatactgctgaccgggaatcagcaccggctgcagcaaaggcagaagagacaaagctaaaggaagctcctatatctgacatctcgagctcaatgattagtgatgaaactttgaaggaaagcaaaaaggaagatcaaagcaccccattgaaggtaacagaaaaggcaagctcttcatctgagcttgaggactcaaacaaggatgctgaagagaaaaccttagtagaagaaagtatcgatgctgctgacagggaatctgcaccggctgcagtggaaccagaagagacaaagctaaaggcagctgaagcagatgcagaagagaaaaagcaggaaacagaaaatgttgttgccactgaagaaaacagcctagca

SEQ ID NO: 27322 - DNA, 377 bp, Gossypium hirsutum
  unsure (1)..(377): unsure at all n locations
  Clone ID: LIB3166-044-P1-K1-G1
tttcgttatttctacatctggggcaagtcgcagaatctggtacctggcattgaataggattggaaaaagtaagaaggaaattatttagggttttccatactaggattctaattttagccggcaggtttaccttctataattcattatacatgggtttgtaagtaatttaatttttatgtatatttgtttatatttccgtttgtattaagtttttgtaccaactctgcactatataaactctngaagcctcttctcgccatatgancttatccaattctttctcaagtgggaagggaatgtacagaattcttgttgcgtcatcttggtgaaaggtatgttgaaagaattcttgttgcgtcatcttggtgaaaggtatg

SEQ ID NO: 27323 - DNA, 382 bp, Gossypium hirsutum
  Clone ID: LIB3166-044-P1-K1-G7
cccacgcgtccgtagctaagtttatcgcaatatgaagttgttgacaggtaatattaaaaacagctaaaaaattctacctataaggttcatttacaatctcaatggaatgttcatattttttatgtactatctggattatctgctgtagtacatataggcagacagaaaaaaatttcctactaccaagattctaaatttctgttgtatatatcctaataaataaattgctgatcatcattcaaatatcccttgaccgattctgcccattcaatgatttgtacttgctcaaacttgaatcaccaaaactggacgtgacttgaatcagaaagccatctctatggaatcaatcgtcagccttcaaggaggttcaaggaagctgaga

SEQ ID NO: 27324 - DNA, 385 bp, Gossypium hirsutum
  Clone ID: LIB3166-044-P1-K1-G8
caggatgctggtatacgagtatgttatataatggaaatttagagcagtggcttcagggggatgtaggaccttgcagccctcttacttgggacattcggatgaatatcatcctgggaacagcgaaagggttagcttaccttcatgagggacttgagcctaaagttgttcaccgtgatattaaatcaagcaacatcctactcgacaagggttggaaccccaaggtttcagactttggcctagccaagctcttgggctctgagagcagctacattacaactcgagtcatggggacatttggctatgtagctcctgaatatgctagcaccggcatgctgaacgaaagaagtgatgtgtatagctttgggattcttattatggaaataat

SEQ ID NO: 27325 - DNA, 389 bp, Gossypium hirsutum
  Clone ID: LIB3166-044-P1-K1-H1
gttcatggaagcttactgtgagatgctgattaaatatgaacaagagctgtctaaaccattcaaggaagccatggttttcctccaaaggatcgagtgtcaattcaaagccctcacagtttcatcttcaaattctgcttatggtactgaaacttttgaaaggaatggatcatctgaagaagaaactgatgtaaacaacaaaagtttcatcgatcccctcgcggaagatcgagaacttaaagataaacttttacagagatacagcggatatttattcagcttaaagcaagagtttatgaagaaaaggaagaaaggtaagctacctaaggaagccaggcaacaattattggattggtggagtagacattacaaatggccatacccttcggagt

SEQ ID NO: 27326 - DNA, 386 bp, Gossypium hirsutum
  unsure (1)..(386): unsure at all n locations
  Clone ID: LIB3166-044-P1-K1-H12
atcggcactggaattccaaccctacaactcgtaaaccctggggtaatattaatgccccgagggctcaaaaacccataagggtggtacaatgcgccttggatcaaggaggacatatttncaagtattggactgcaaatctgtgaaattatatggaaatagaagattcatagacgagagacataggcacagatacgagggtaatcctgatatggtagcacgccttgaaaatgccggcttatctttcactggcaaggaccaaactggtcaacgcatggagattattgaactacccgatcatncatactacattngtgttcaatttcattcccgatttaaatcaagaccaggaaaaccttncgncttgttcttaggtttaataggggcag

SEQ ID NO: 27327 - DNA, 385 bp, Gossypium hirsutum
  Clone ID: LIB3166-044-P1-K1-H3
gcctttccactgggactacgcggattttgaaaaccgggactaccaaatccacgggcgagctctctcattcactgtcggcccctttgccatcgaccttatttacgctctcaacccctattacactcgagggctgggcaggtctcatcgacacgacctatccccgacctctcacttacccccacagcctcctactcagcctagagggctcgaccccaataccatcaatgcgttgccgataactatggtgaccagggggagggcggcgcttgggagcgagtgctgtatatgccttggactgtttgaagatggtgagaaagttaaggttttgccttcgtgtcaccattcctatcattccgagtgtgttgataggtggctcagtgctgag

SEQ ID NO: 27328 - DNA, 392 bp, Gossypium hirsutum
  unsure (1)..(392): unsure at all n locations
  Clone ID: LIB3166-044-P1-K1-H6
ngacgggcctgaatagtgacattggttcccttatcccttgggtgctctctagcttatgctggggcaatttccaataaatatacagctcttgaatctgtatttgttcaaactctattaaatctaaaatgatgcacttcgttattcttaccatcttatgtggggcatacttaaatggatgttttgggtgctccaacttggtgatgtttataatttaagatctgttgtttctgctacttctctttaatatgcttgtactttctcttcaaattctgattgttttatgagttgttccctttatgttgcaatgggttgaaattctaatacttgtcatctcttcttgatttttcaactagatcagcttagttgttatgccttaatgttttcaaatgagt

SEQ ID NO: 27329 - DNA, 313 bp, Gossypium hirsutum
  Clone ID: LIB3166-045-P1-K1-A11
cccacgcgtccgcccacgcgtccgatgacacgtgggtaaatccaatagcgctgaagataaatgggagcgtcaacagtgatttctctaggttacaaagttaccgtggtggccacgcttatggttgcttgtttgatggctttatgagccagaaaatattaaagggggtttcacaaaacatgggccgacgggcgcggcaaaattgtccacaaagggtaggtgatcactcttttccaagataaagcttgaggttggggtttccataatcaacgaatcaatgatcctatcttgaaagattgttctacagctgacgctt

SEQ ID NO: 27330 - DNA, 377 bp, Gossypium hirsutum
  Clone ID: LIB3166-045-P1-K1-A4
tggacaaattagttctatgcatgaaatttttaatggaaaaatagcaatatgctctttgagccaacgtaaaaggactaatttatttcttcttttttttttgtagaggggtaaaatgtaatttgtctctttatacaagaacctccattatacttttattcattttggactaaagtgattggattaagtggacaatcctttttcatgctgatgtggcaagaatttagtgataaattttatatgtttgaaactaaatactagccacatcaatatgaaaaaggattgcaatctatggtgtaacacattccactgccaagtgtgcatatatattatataaattgcctgactttttgtaatgtatttgttgcaactacaatgca

SEQ ID NO: 27331 - DNA, 326 bp, Gossypium hirsutum
  Clone ID: LIB3166-045-P1-K1-A7
tttaagacaaatctctctctcaattctataatcaaacgttcaattgtgagtattcgcatctagatttaatttccatttttagctttcttttctttgaagtttattattaaattatattcccaattttttcttttatttctctgtttattttttaagattaacagaggttttgtatatacatcttgccatagagtacagaaatttgattcttggatttagtgaaaaggggaaaaaggattagttatgaagtctagcacttggtttggaatatccagcatgaaaccttgttgtttatttcttattagttatagaacctctcctttttt

SEQ ID NO: 27332 - DNA, 340 bp, Gossypium hirsutum
  unsure (1)..(340): unsure at all n locations
  Clone ID: LIB3166-045-P1-K1-A8
ttcgaacgcacccctncaccttttctctttttctctctcatggctgataatgagctgtgttattattttcagaactattatatatctcagaaagcagaaaaaaagctaccctttattgcctgatttgaagagattagctaaatgtcgttagcagatatgaatctatccattaatggccagtctcaggttcctcctggttttagatttcatcccacttgaagaagaactttttcactattacctaagaaagaaagttgcttcttaaaagattgatcttattgttataccagaagttgatcttaacaaacttgagcctaggggaatacaagagaatgtgtat

SEQ ID NO: 27333 - DNA, 193 bp, Gossypium hirsutum
  Clone ID: LIB3166-045-P1-K1-B11
cccacgcgtccgtccacgcgtccgtatgctattggtggtgtttggttggtcaatgacgcgtaggattgctaagctgggaattaaaagctaaaggcaaggtcttttcctagaatccactgcaagtttctcgttttatattccctctttacttctctctcaatcgcccaatctctgtgtcatacacgaaagagaa

SEQ ID NO: 27334 - DNA, 309 bp, Gossypium hirsutum
  Clone ID: LIB3166-045-P1-K1-C10
ttttgcctcgaccccaagatgggaaattgaggtatgttggtggagaaacacgaattgtgagtgtgccgagagatattagttatgtggagttgatgagtaagatgagggagctttatgatggagcagcagtgttgaaatatcagcagccagatgaggatcttgatgctttagtgtcagttgtcaatgatgatgatatggttaacatgatggaagagtatgagaagttggcttcgagtgacgggttcactaggcttaggattttcttgttttcgcatcctgaccaagatgtttcataatataatgttgatg

SEQ ID NO: 27335 - DNA, 220 bp, Gossypium hirsutum
  Clone ID: LIB3166-045-P1-K1-C9
aaatctctgaaaacatggaggaggttgacgaatgcatagtatgtagcggcgggggtttcagtatggatttactcctttgaaagcaacagccatagcagtacctccagatgtacaatttaggcgggtgcaaaggttgtacactattggatttgtcggaaaatggagcatctggctttggaagcgctaaaattacaatatgcaaaggtcacaatgagttaat

SEQ ID NO: 27336 - DNA, 376 bp, Gossypium hirsutum
  Clone ID: LIB3166-045-P1-K1-D3
ccgaaccgttttctttcgactttgagcagcaaccattgggagaagaacagatgaaggacatgatttaccaagaggccttggctctgaatccaacttatgcttaacgaaatatagttctatcttctaaatccgtcatttcaagtaatgatttctacaataccttgtggtggctgatacaggccggtggattgcggattgaaagatactttttgcctctgcaataatcttcgaagcggcgtcgctgagtctgcacccgtgactgccattgatgttaggctttcacgaggtcagtccacttgattaatttatgtttttctcctgatgtgcgtttatatgttatttgtttgatatcttgtgcatgtatgacatgcatttt

SEQ ID NO: 27337 - DNA, 369 bp, Gossypium hirsutum
  Clone ID: LIB3166-045-P1-K1-D5
ggcgatataatttaaagacgggaactgtgtgattcatgaagccaaggggaaggctttaatcatggcgagacttagctctttcttcatcttcagcttcttccttcaagtagcactctttgcaacatgttgcagaggggaatcaaaggagcagcagcatcagcttccaaagaaacacgtgcctttcttcatcttcggtgattcaatcctcgatgccggaaacaacaactatatcaacacttcaactcttgaccaagctaatttctggccttatggactaacttttttcaactaccccaccggaaggttctctgatggccgtttaatacctgactttattgctaaatatgcaaagttgccattgattccacc

SEQ ID NO: 27338 - DNA, 370 bp, Gossypium hirsutum
  Clone ID: LIB3166-045-P1-K1-D7
cccacgcgtccgcttcatccttctttctttctcttactctctgagtctggactgaccttctgttcgttaaacccgattaagatttggattccaactgaagaaggaaaatgaatacgcaacttttggagattgaaccaaaggaacttgacatcgtctttattctgaagaagccatgctcctgctccgttagactcacaaataagactgaccagcatgttgctttcaaggttaaaactacatctcctaagaaatactgcgtgcggcctaatgttggcattattatgcccaaagcaagatgtgattttacagttatcatgcaagctcagcgcgaagcccctcctgatttgatatgcagagataagttcttaat

SEQ ID NO: 27339 - DNA, 339 bp, Gossypium hirsutum
  Clone ID: LIB3166-045-P1-K1-E4
taaaattactgcctagaatcatgtttttggaaccttcaaaagcacatgggagaaggtctatctgaagattgctcttctacttgtgagagaaggatcatccaatgaatctgttattagtgtagaggtagtccaatctgcttaatccaaagcataagttgttgaaactgatcattatgcagcttcaaatgagactgctgctgaagttgaatctatttggaatatcatgtatgagcttaaatctgaatccttatttcatacaattgaccatcctaaggatccaaaggatgctacttatactgataaacttaactaaactgaatcaagtaatgcagtttaaaa

SEQ ID NO: 27340 - DNA, 332 bp, Gossypium hirsutum
  Clone ID: LIB3166-045-P1-K1-E9
cctgaagatgcagtgtatgacttttttgacaagatcaactttgctgtgggccgtttcctttagggtggggcttacaatcaccagattggtgccctgtctgatgtcttgaaacagtccatgacacctgggttcaaggcttattgctatacaagtgatggccaatgcagttgcccttgtattgtaccttgtgggcaatggattccagcttgttactggttgaactgataaccactttgtttttttgggatctccgaccttttggattgtctggcatcatgtgttataagctttgtgactctttcttctttacttgttaactagatttgcttttt

SEQ ID NO: 27341 - DNA, 367 bp, Gossypium hirsutum
  Clone ID: LIB3166-045-P1-K1-F10
cccacgcgtccgaagcttctaaagctgtatgagaaaaattgggagctaattgaagcaggggattatagagttcttgctgatgctatctttgaggaggaggacagcaaggtgtcataacctaaaaaaagcaatgcacatgatgaggacattgacgaagaaggttccacacctgatgagcttgttcgccccttaaaaagagcacgattaaaaaaccaagaagggctggccacttgttctcatacaattggaagctttaatgatgccgaaacttgtaataaagagcctaaagttgaggagaatgaaataccttctgcttctttgcaacaccatgcactttaatccaatgttggcaatatacggacagaaa

SEQ ID NO: 27342 - DNA, 371 bp, Gossypium hirsutum
  Clone ID: LIB3166-045-P1-K1-F4
ttcaagttagattacaaaggattcccggaaatatttttacggaacaaacaagatatcgaataccgaagtggtccgtggaacggtcttcgatttagcggcgtaccggaaatgaaaccgctcgattacatgaacttcagcttcgtcactaaccaagacgaggtatattactcgttttatattacgaacaataatttgttttccaggttaatagtgacaccaaccggtacacttgaaagactaacatggatacccgacaccaagcaatggaatccgttttggtacgcgccgaaagatcagtgcgacgaatacagcgagtgcggtccgtatggtatatgtgatactaacgcttcccctgtttgtaaatgtccaaa

SEQ ID NO: 27343 - DNA, 372 bp, Gossypium hirsutum
  Clone ID: LIB3166-045-P1-K1-F6
tggatattgactcgtcatcttcatctttggtaatagaaattggcatctgtaacaagaacggttattttcaaaactccaagagatatgaactctactcctttgaacaagcatttgtaaaaaagggagataaaaaaatgtggttgcaattgatattttcacttaaaacgttgttgagggtacattagggctctttaaccataagtatttgagtgttggtaacatagagctctttaacatcatgttgttgtattgtgttaaaaattctagagtctactttggtatttagacaggttaggactccagtttttcctggggttcaatattaggatttgagatttttagttcttgtacacaattcgtgctcagtaaggg

SEQ ID NO: 27344 - DNA, 281 bp, Gossypium hirsutum
  Clone ID: LIB3166-045-P1-K1-G11
tttttaaaaagtattaccaatttcatggcattgaatttaaaagtttaggctgaccaaattcaatttcttttaagggccaaatttaattttacattatatttaaataatattctaacaaattccaactgttatgtgggctattaaccattcttatcctctttagcttcccccttgtaaagaggtttactttcaaactttttttttctgtttttgtggcatattaaacttatccaggtgaataacatgatcttttattcatttgacgttctcaaattttttta

SEQ ID NO: 27345 - DNA, 370 bp, Gossypium hirsutum
  Clone ID: LIB3166-045-P1-K1-G3
ttcattcctagcactggtgtgtcgttttttcggtatatgtcgactacagataatgatggggcagataagattgagtttatgactgatggggcagataggattgggcttatgaccgatatttcggaagctcttaaggatagttctttcgaagcagtggcttcgcaggctcctgctgtgaatgaggttgctgttgctgctgctgattctgcgttacccgttgctgccatacagtacgttatcgatgcagttcattcttctactggcttgaactggtggagttccatagttgtgacaacacttttggttcgaggtttaactcttccgtttttgataagtcaacttaaagctactgcaaaaatgacgttactta

SEQ ID NO: 27346 - DNA, 359 bp, Gossypium hirsutum
  Clone ID: LIB3166-045-P1-K1-G7
tccttctgcccccaaaatgtttccttttttgggaaattagtattcaatttccctttacttctgttactatggaatcaacgacgtcgtattggtgttaccgttgcagtcgattcgttcggatttttaaccgagatcccatcgtttgccccgactgcgacggcggattcattgaagagatcggttaccatccttacgccgaattccgttgcctcggcaccaatagatttcaagctgtctccaggtataccagcttctacttctgctttcacaagccgtcgtaaccgtggcgattggtcttctttcaattctcgtattgtcttacgcggcggagccttcacttacttagtctgtggggagaa

SEQ ID NO: 27347 - DNA, 339 bp, Gossypium hirsutum
  Clone ID: LIB3166-045-P1-K1-H4
actacatgtttattactgtatagcttttgaaattcgaagacaaagggcttaaaagtgtttccttgtcatcagctgaaagaatcccaagatagatatgggaactgggttttattcagattggaagactggttgtttgttcgggttagagaatttagaagaggacggagtgcttaaagcaccatcgtctttaccagctatccgtcagccacaaacaccaaaggagcctatggagttcttgtctagatcatggtccttatctgcatcttgaactttccaaagccctttctcataaacagaaacagttctagttcaatctttattcaagttcaattacagacc

SEQ ID NO: 27348 - DNA, 360 bp, Gossypium hirsutum
  Clone ID: LIB3166-046-P1-K1-A1
aaaccatcgacttgtgagttcaaatccctgatatgtattgttcatctgattatttatgcagacaaatgctgttattcccaattgattttattggagcatcatcggtcagtgcagaggcactcaaagaggacaatactttagggatattagtacgaatgtacgatgccctaactgatttaaatataattgcagagagaatagaaattactatacttgtggtatcatgtttcaacccgttaattcaaatttctgatctttatttttcatctgaatcatgcacttgtagttcagttcaagtatttcatgaatcctgctttctagtagatatcagtgctgtacttggtatttggatcaatagct

SEQ ID NO: 27349 - DNA, 371 bp, Gossypium hirsutum
  Clone ID: LIB3166-046-P1-K1-A12
attgctgattcggtcattcttcgagattgagctttttcctggtgaaaaaagagattgtcgaggacctagcttggagtagaatttgctggggaatatgagaattacggttttaaggagaggttaatctacccacaaccaaccaaacccctaaaactccaactttagagagcaaaattttattacccccattaagaaaaaagagaagggggggagtcttgtgcgtttgccaaagctgtaatggtgtaacagtagcccttagcagttcaaagttttttgtcatttgtgtgatttgtacatatgaatgtgtgaaatacaatcaaattctacctctttgcaagaatcccatgaattcatattatattaaaataaaa

SEQ ID NO: 27350 - DNA, 293 bp, Gossypium hirsutum
  Clone ID: LIB3166-046-P1-K1-A2
cccggtccgaactctcgcagggtccgagcccagcagcgtcccgtcacaacgttagctattgctagatccgaaccagacgtagggattgggtcctcggtgggtcgtaattacaagagaaagaggaatctaacacatctcaatccaaggcatgacatggacggccgagataccctgcctcaatcttcccacgtactccaactaaaattaccggccaaatcactttctgagcgtgcaacagatcagactgttgagagtcccagcttgcagacagagtgacaaactttaaatgcatg

SEQ ID NO: 27351 - DNA, 382 bp, Gossypium hirsutum
  Clone ID: LIB3166-046-P1-K1-A5
caaagagatgtttacaacactggtttctaagaaaggaaaaataatcacaagaatgaaaagaaatcaatctctaaataattaccagaaggcttcacatctaaacccggaaccatgttattcgttggagcttttgccatgttggttcccgcaaaaaaatccgtcatggacggctttggcacctctggcggattagcacatcgaatgagtgcccaattcacactctgaaagaacggatgctgtttaacttcagtagccccacgcctatatgcaagccgatgctgtggttcctttacgagtaagcctcggatcaagtccttcgctgcaaagctcacatttggatactctggaaatctcaatggctggccgatcacgttaaacagag

SEQ ID NO: 27352 - DNA, 362 bp, Gossypium hirsutum
  Clone ID: LIB3166-046-P1-K1-A7
gtcacagcgttagcttttgcaatggcagaaaaagaggtatcggcggagcctgtggagaccaatccaccaaccgaagacatgaatcccgaaacccaagtcccgccctccccgattttcgatgacagcgtcgacgctgggttggcctacaacggcggctcgaaatcgaagcgccagagagaagaagacggcggagaaagcgacgaggtatccaagaaacagaaggcggagtcgtccgtcgacgatgaaatcatcgagaaaaactcagtgccctcagttacgagtcgggtccggcttggcccgaaagaattcgggtcgtccggggagatgtttgattatttttacaattagcttcattattgggc

SEQ ID NO: 27353 - DNA, 304 bp, Gossypium hirsutum
  Clone ID: LIB3166-046-P1-K1-B2
accactccttcgttacttccaccaacgaaaaagtcgtccatcggatcacgtaggagagggatattgtaaagatgtctccaactgaatcatcactagaggcaaacgtttacatggccaagctggctaagcatgcttaacgctctgaggaaatggtgcaaatcatggaggcagatgcaataactgctgatgttatagagctgactgttgagaacaaaagcttatgaaatgaggatcatatggcacaactatatgagtattgggctatgattgcaacttcgcttatcaagatctgtgctgggatctt

SEQ ID NO: 27354 - DNA, 379 bp, Gossypium hirsutum
  Clone ID: LIB3166-046-P1-K1-B7
cgcaaatcccgctactcagctcactatcactttttttctgtcacttacctccggcggaacttttccaaaacggctgctccgataagtgatcttcatgcttccgatacactccccaaaacccccttcttctccgacgaaagccacaaaaacacctgaattgaactcaatcaaacgcaaaaactcgtcgagttctttccagtcacaaaattctttcgttttccccaacagtaatcgcttatggcttcttctggtcatcgtgtcgttacaaataatcatcctccttatggctcgtggcctccctctttctcaccgccgtacccattttccttcccctttgtcttacgatcataaacccgttcaaaatcgtgctaacttttcg

SEQ ID NO: 27355 - DNA, 394 bp, Gossypium hirsutum
  unsure (1)..(394): unsure at all n locations
  Clone ID: LIB3166-046-P1-K1-C2
attcccgggtgccaccacagccgtccaccacacccnntccgatttaatactattttatcatacgcatatttttttccaagaagaagattttaaataaaaatcaaaaaggaaataaacaaattttttttctctgattgacaagagagttagctaaaacttgactcactcaacaccattaccttaacgtaaataagcacccaaataacttttatattatacaataaatcaaacctatcacattcaaatattctagacagaccgacaaactttaagggcatcttatcaactattcgtagaaacaaaatctcaattcaatactgctgctgtcaatccgcttcactcattgtagctctaaatcacattgctcatcaacatgcctcaaaagtcacaacta

SEQ ID NO: 27356 - DNA, 388 bp, Gossypium hirsutum
  Clone ID: LIB3166-046-P1-K1-C6
cccacgcgtccgtgttttccgctaaatcacatgtctgatactaatgatgatctgagatgttttaataataaccatgaagacaaagaaaacagcgatctcctatgttatgcctggggagatattggaaattttgaggatgttgaccagatgttcagaagttgtgattcaacgtttgggttggggagtctcagtaatgaagatgatttgtgctgggtttcatcttcacatgctactgaaggatctcaagatgtgttgaaggctgatgctaagttgaatggtttaccagagcattgtgcaacttccaggccagacaatgccggtccttcaactattgattcttacaagaaaaatgtacttctaagtgacaaaataagttcccttgatacga

SEQ ID NO: 27357 - DNA, 389 bp, Gossypium hirsutum
  Clone ID: LIB3166-046-P1-K1-D5
aaataattcgaaagagaaaaaaagataagtctgaaatcacctctgctctttgcggtcaatatgtgtatcttcctaaccttacaaccgattcacagcttggcttttatagctgaagagaaaaaagaaaaaggaaaataaattccaaataaaatttccgttcccttctatttgctgctctaccattttttgtttgtatttgccgttgtgtttgtccttcttgtaggtacgggatgcgttggcatcgcacggagactgtgctggcgtacgagggctattgacgtggttgctggaggcgtcgtacgacacctggaggttgcgagggctgccgcggctcaaggggaaagctgctagggtttctcggcttagacattgagcttattgagcctatt

SEQ ID NO: 27358 - DNA, 219 bp, Gossypium hirsutum
  Clone ID: LIB3166-046-P1-K1-D7
agttgctatattttatggatctctagcagctgtgttcaggaggaatcgcagtcgcaaagcacaaaaatggaaacagacatgctgtcaggatcattgactttatccaatttttacccccatttcgtgagtacattccaccactcacatataccagaaatgaatgatgttaaagcatatcacagtataaaggtacgttctattgctcctctcccaacatac

SEQ ID NO: 27359 - DNA, 373 bp, Gossypium hirsutum
  Clone ID: LIB3166-046-P1-K1-D8
atgatacccaaatgtaccacatcacatacattggtacccacacttgcagaggggagtactcatccatggctacaccacgaatcgaccgtctgagtctgatatcaaaactcgaatctgaggaacaaacgacgacaccaagcgatgttacggatttggattcgatgaccatgtggacggatgtaatgatgggtggtgttggttttgaagctgatgtggtgtccaacatgtattcatgcactgaaatcacttgtttggatttagaacctgttgagcttgaaaatggtttgcagtttgatgaccctgattttgcttagtaaaactttggcttctttgtacagttaatattataagccatgttccctatttgtattat

SEQ ID NO: 27360 - DNA, 381 bp, Gossypium hirsutum
  Clone ID: LIB3166-046-P1-K1-E1
cggacgcgtgggtctgaatataaatgagacagttctttctgatcttgggggtggtatcatcctttatgttattcagccacaacagtcaagagtgtctgccagctaacctctttgtttttgtaggagtgattaaacagacttcttttttccctgcatggcaaatgttactcagcgcccatatactttttgtagcttaattttgtggcaaactattagagcatgcattctattctagtcttgccaatagaaagaaattttgatcaaacttggattgtggatattatttgggcttatatcacacacatctatgtttccatttggtatggggtgttactacattctttaactgggtcaagtttgttgtgaagtgtgaattgattt

SEQ ID NO: 27361 - DNA, 383 bp, Gossypium hirsutum
  Clone ID: LIB3166-046-P1-K1-E2
ccacgcgcccgtgagaaaagaatcgtgtaaataacattctaggatgtgctgggaaatggagtggcggtttatataactccatagagcagtcaatattagacatgttccgacaccttcccactcttagcctgcactttccgggatctaactaggtatcgtcattaaagcctgtatatctttcagaattgtcacaagcttgtgtggggaaattatgggttatatgtgtgatccattgctgttggcaagaacttcctccatggtcttgaaaaatataggactggccgactctcgttgtccaaagtgaattaatttgcacaaaagaaaaggttgattcatctcagttgtatttggcgtcgcagttttctgatatatatttctgtata

SEQ ID NO: 27362 - DNA, 382 bp, Gossypium hirsutum
  Clone ID: LIB3166-046-P1-K1-E4
atgattgcgaagtttaggggcactgtgattcatcacgagaaatgcttgaaaaagactatcttggtgtgattgcgccacatactgcaccggattagcgcacttactttccaccgcatcatacgccttacaatgcccatatgacccctgagttctgtatctagatcctacactgtcttgttccactcttgatcctgcgcttggctatcgccgttcgccactataccaataaagagttgcttattactatcctggacttcacctgttaccagggaaaaatcattgtagttcatccgttacctgaagtaacacaatcatatctttcgcttaattgacttttaacatttgggtggtccacttaatgcctgatgacgatatgctacat

SEQ ID NO: 27363 - DNA, 388 bp, Gossypium hirsutum
  Clone ID: LIB3166-046-P1-K1-E6
cccacgcgtccgcccacgcgtacgaccacgcgttcggctccttatgatatcctgacctggaatgactgtgagtctgctccttgttgccacggcattttacgttgagggatacatcttagaagattccgtcatacatagcgtaatgggaataatgtcattggtgggccttgtggcttttgcaatttccttctgtttgggtgttggagcaaccccatgggttataatgtccgagatacttccagttaatattaagggtctagccggcagtgcggcgacgttgctcaactgaatgacggcttgggcagttaccatgactgcaacactagctcctgtcttggagtggtggagggacgttcacaatttatgctggtttggctgctttcaccat

SEQ ID NO: 27364 - DNA, 256 bp, Gossypium hirsutum
  Clone ID: LIB3166-046-P1-K1-F10
ttttacgcgtgttgactttttttattcaatagcctgattggagcatgcaagagggtgttatcacaagcgttttcttccctactgataatcaatggatgattcttgtttgtaagccgaatcgacctgacatgcttattgatccatttggtataggaaagattgcacaggatggtcttgttttctcgacagaacttctcgattaggtcttatgaaataggttctagttcagactgtttttattgatacagttatgatt

SEQ ID NO: 27365 - DNA, 364 bp, Gossypium hirsutum
  unsure (1)..(364): unsure at all n locations
  Clone ID: LIB3166-046-P1-K1-F2
cttgtatagagcacgtgatctacaaagggatgaatgtatgcgnccnccaaatagagggctgctccttccttcattcccctttatatagcccagattcttataattgcactcaatcctcttgtatagaagcaaatacataagcttttgataatcattatcaaccttcacccagtgtttgcatttattcgatcatgaaaagcacaaccctgctgtaattgttacgcatcattcccttcaaaataaaacactacaaaaaatcttatctataacatcttactcactgttataaaaaaaaatgcctctatagataacttcaatgttatcaacttaactacaatttttgcttagatacaaactaaaactt

SEQ ID NO: 27366 - DNA, 387 bp, Gossypium hirsutum
  Clone ID: LIB3166-046-P1-K1-F4
ataaggtaaaagcattcatacctgggttatctaccgagggttctttcaaaggcaggctgtcttgaatgagcacttgcattgacaatcaacaaggccatcacaacacctatcatcccattcttgtaggatgaaaaacactccatgatattccctagttctgagcaaaaacatcatgggactgggaaaggactaggaaatcccaaccgtaccgtgaatatctattaacatgccaaaacaaagttttctgatattaaaagagggatttgtgatagcccacaccctctaattagctaaacagactggctagatgctatctaagttattaatgtacctacaaaatttaccccgctactagcaggatctctaggctcttccaaaggacagata

SEQ ID NO: 27367 - DNA, 375 bp, Gossypium hirsutum
  Clone ID: LIB3166-046-P1-K1-F7
ctaatattaccacaaatcctttagttaaaagaagtctaatgcaaccagtagaggaagctatgcattttctctttctttacataatatataattactgcgtactgatttatcatgcaattggacacagtttttaaggagtgttccctttacaaaggcgattaattaaagtacgtgcatcttttaatgagctccctttacacagagcagaggggtctgaataaatgtgccctgttcaaacgacacaggtgattacaaaaattaagtatacatccttttttctaagatttgatttaaaataataacaaaacataaacatccttataaatatatgagtcattttatattatactattacccccttttaattactcaatt

SEQ ID NO: 27368 - DNA, 378 bp, Gossypium hirsutum
  Clone ID: LIB3166-046-P1-K1-F8
gcctctgcctcgatggccacttttgaaccagttaatgatgaacccagggggaaaaggctatcaagaaaaccgtcgaaaaagtttgtagcaaaaagtttgcttgttattgggggtgtgatctgcctgtctcgcggtcactgtggcctgggtgctaaagttgcaatggcatacatcttaacaaaattgagaaagcgtggtgatagatcaagccaaagcatgcaaacttaaggcacccgaccttatttcatctctgcaactaattttgatggtttttttaaagaggctctttgttacatagacttattgaacttagttgaagtttaactacagagtcggagaaatagcattgttaaagatgtgaaaccccagttttatatt

SEQ ID NO: 27369 - DNA, 335 bp, Gossypium hirsutum
  Clone ID: LIB3166-046-P1-K1-F9
tcgcgcccacgcgtaaggccacgcgtccggaactctcacacaaactcaaaactgttaacgagtccaaggattgtgcagccaaggctacagatgctgcaaagaataaggctaagcagattgaagaagcaaattctggtattcttcccggacccgatggaactaggagccaggactcggaaactgcaagggaacaatacatgattgtaattactgaacttgatgctgctaaacaagaattgaggaaggtccgtcaggactgtgatgcatccttagaagcgaaaattgctgccttcaaccaaacagaagaagctgaacatgcagcttaggttaacatg

SEQ ID NO: 27370 - DNA, 246 bp, Gossypium hirsutum
  Clone ID: LIB3166-046-P1-K1-G12
gaaaacttcatcaaacaagtgtaaatatctgaagtaaaacaattgtgagaggaggtcgtggcaagcgtatggcggggatcactttatgtgtgatattctaggtcaaccatctttctgccgtcgttttcattggccaagacggcatcgttcgggcccagagcttcaattttcctcagtttaagccagaataaatcactggtcttatgaatgacttttctgaacctggatcgctttcttcgactggat

SEQ ID NO: 27371 - DNA, 384 bp, Gossypium hirsutum
  Clone ID: LIB3166-046-P1-K1-G4
gacatctgtggctgtacacttaattactgctacattgcccccttttcatcctagttctatatatgccaatcaatgaacttaattaaatatttaactcgccattcacctttctaactgtgggcacaaatatttgaatatctaatgagcacacttgcattgagacccatcccttttctaggctcaatcatacgccttttatacgccaaaatggcagaataaaaatacaccttattgctgacatataccgcattctgtgtctatccttttctcgagtctcctaacgcaaggaaggatccactatcgttcggtacaaaccgctagtacaaactgtaactgcccctccagcttgttctactaaccactactgctgtcatctgctgagat

SEQ ID NO: 27372 - DNA, 383 bp, Gossypium hirsutum
  Clone ID: LIB3166-046-P1-K1-H10
cccacgcgtccgcccacgcgtccgatttagttaatatttttccttgcaggtccaaattcggaagttcataaagcaagcgatttcctaaaatacttggatactaagagcgaatatccttttcttgaaatatactcttttcaagtcaaaagctttgtttaactggaacttaaactgatttactggttgggtttttttataatggatcttttagtggatgccttattgtttggttttttgtttgtttgttatcttatttgttattattttttctattttttttttgtagattggttattttttttttttattatttttgaaatttttttttttttttttttgtatatttttttttttacttatttatttatgtattttttttaatt

SEQ ID NO: 27373 - DNA, 380 bp, Gossypium hirsutum
  Clone ID: LIB3166-046-P1-K1-H11
cccacgcgtccgaaaaaatcaacagagagcattccttccctctctccggggctaattttcccattgggctagggtaatatacccatcctcgccggaccgccgctcctccaccgtagatggtggtcggtgagtcgcaaaacggttcttttagtcccgttcaaaccagatctaaaggtctagtcctttatttgtgacaaaaagacgaataaagaggactttggtccttgtagccagccttaaaaagctgtgaggccctcggcgccggtgaaacaaccacgacgacggaggacgtgaggctactcaggtaagtttatttcttccttctttattttgaaagattttttgttagaaaaaaaaaattaaaatgattgagactgaga

SEQ ID NO: 27374 - DNA, 390 bp, Gossypium hirsutum
  Clone ID: LIB3166-046-P1-K1-H2
cccacgcgtccgcttctttaattctgaagcaaaagcaaaaagctttcaactcagaatttcctattgcctaaactactgattttttttcacgtggaatctcaactggaatgaatattcttgtcgccagattcacattatttcacagatgagaatggaagggaaaagaataagcttagatactccgaggaatggaaaatccaaggttcttgatccagcattttctgcttttttagttcaacttccgagcaaacttcaaaactgccttaagtcacagctcaagagattagccaaagatggtgccagaataaaaccgttgaactcttctcttgagaagaagaacggttcatcttccggattgcagatcaatctagagaaacaattgcaagcttg

SEQ ID NO: 27375 - DNA, 342 bp, Gossypium hirsutum
  Clone ID: LIB3166-046-P1-K1-H4
cccacgcgtccgaagggttgtttatgaatagaaaatcccaagatgctgcgggtggtgcccttgttctgatgctgaataaagcccctccactttggctagacatccctagttcgataaatttttcggaagcctctaggccagaaatggggaatatcatcatccaagagaaaaaccagtacacagtggctgtgcccgttgaacatgatgcttcttcaattattacatcttctaagcttgtcgcatcaatgacaacagcggatgcattataggaacttccgagtttcaaagagatgataatcttgctgcttagtgaagggggttagtgttgcatttctgccaatt

SEQ ID NO: 27376 - DNA, 358 bp, Gossypium hirsutum
  Clone ID: LIB3166-046-P1-K1-H8
cccactcgtccggcctggttttaatttactcacaatgcgcaccacataaagtgcaatttcctggattatgacccttacctccagcatatccccttttttgcagtctcttcacgttttttcaattcattaacgtcttgcttttacggaaggaagttgaattttgaccctcttgcaaggtttctcatcagttaccagcatttgacgttttatcctgttatgtgtgtggcaagggtgaacttgtatttacagacattactgctattgttctcaaaccggaaagtcccagatagagcatttaacataatggggatccttgtgttctggacttggtttcctctcctgctttcctatctaccca

SEQ ID NO: 27377 - DNA, 380 bp, Gossypium hirsutum
  Clone ID: LIB3166-047-P1-K1-A11
gcaagtcttcctcaaagcatcccatcgatgatcataaaacttctgattccattggttcgttggaatatgaaaaacctgtgcctggtgcacactattatgattcgagtaaggtaaaatctgaatcagtgagaagcaaatcttccttcaaacatcccattgatgatcataagagttctaactcctttcgttcattgcaatctgaaaaaactgtgcctggtgtacactattatgattcgagcaaggtgaaatccgaatcggtgggaaagatttcaacaatggcaagcaagtcttccttcaaacatcccgttgttgaaaagcttgtgcccagtgccattcagttgaacaaccacattgtatctcaatcagaaccaagcatttgt

SEQ ID NO: 27378 - DNA, 395 bp, Gossypium hirsutum
  Clone ID: LIB3166-047-P1-K1-A3
gaacggaagggccggggccacgcgatccgtccacgcgtcccgaaatttctcgagcaaactccttcactaaatggtgggaagattggtgggtattacaaggaccatgaaattcttcctccaatgcctgttggcttccaccgctacattcttcaaaatttcaatggtgaaactctggatggcttgaatttacaagaagtccaagaatttgatcctccttccgaggttcgcgccttgattgagggccaatttctgtcgatgcgtgctcatgcagaaaggttcggaatgccttctcctccaaaacgaatcattgctactggtggggcgtcagcaaataaaagcattctcagctcaattgcatcaatcttttgctgtgatatatatacgggtcaaagacc

SEQ ID NO: 27379 - DNA, 383 bp, Gossypium hirsutum
  Clone ID: LIB3166-047-P1-K1-A5
cccacccgtccgcaaagatacaggcaataccgtcaacaaatgcaaattgttgttgcgtctctagagaaggcagcggggtttggtgcaccaaaatcgtacaccggaattgcttcgaggacgatttcgaagcaattccgttgtctaaaagattcaatatctgaacaaatcaaagctacaagcaagagtttaggagaagatgattgtttaggtgtgaaattggagggttcaagactacgatacgttgattatcagctacggcaacagcgggcactgcagcaattgggaatgatccaacacaataataatgtttggagaccccagcgaggattacctgaacgagctgtttctgttctacgtgcttggcttttcgagcatttccttca

SEQ ID NO: 27380 - DNA, 204 bp, Gossypium hirsutum
  Clone ID: LIB3166-047-P1-K1-A6
cccacccttcctccaagctaaactcattttctaaaacccattctcccaaccgggggggaaatacatatttccgtgtccttatacaattcaaatttctacaccaaaattaatacccaataattttcgcaacctcaaaaaaccctattgataaagtatagtccacaccctcaaagctatcctcatcaccttacatgaagatgattg

SEQ ID NO: 27381 - DNA, 423 bp, Gossypium hirsutum
  unsure (1)..(423): unsure at all n locations
  Clone ID: LIB3166-047-P1-K1-A7
cgtacgagctcggtctgttcaaagcccaaatcaggcattcattgtgcaatgattagcaacccaaagcgatgtgctgccagattgcttgctggtctaatacatncgtcaccacggttatgagattaggggcctgtatttagcatctggcttctcctaccgaagccatatccttttcttgagccgtaaatgggcgtcaactatgcaatagatatnccgcacccggccatcattgacctgtcgataattagacctctgcatgctcggtcagcaatgcatgtctatactatcatcacctaaccccgatctggctgatgagatagagagcatctgtagccgaccatcttggaaaggaatcctgtgtcacctatggcccaaggccaaatacatcgaggctgtagttactggctccatggcacagtatat

SEQ ID NO: 27382 - DNA, 379 bp, Gossypium hirsutum
  Clone ID: LIB3166-047-P1-K1-A8
ctgccattaaaatcataggatcaacgacatcaactcttgaacccatgaacaggggagaccaaattctgtcttcaaccccttacgtggcatgctatgataggatcttcaacactcccttttccctccgtgtgattcaactcctcttacaaaattatcactcttccccacactttatttaaagtagctagattatttctgaaatcatgaagcaaaaagatgaaaagaatcagtcccaatctgatagagctttgaagattatccctgtaacgttactggttttcgcgtgatgcgggttatcgcactatcttggtggaatcttctgttctgagaaaagcttattggaagggaagatagtccaagagctttccaaggctgtttc

SEQ ID NO: 27383 - DNA, 389 bp, Gossypium hirsutum
  unsure (1)..(389): unsure at all n locations
  Clone ID: LIB3166-047-P1-K1-A9
cgcgaatggataaagagntggacctatcgactgcacatngaagacaacaatgntcgaaggcggctttcgaagatgttccttctcccgagcatattcctccactagctgcttattcttttttcgacatcaatgttgccatccttgatgctccactctttgagtaatgatttttggggatttagagatgaggataaggttgttgtcgttagatatgcaaatagtatcacttctaggtcatcatccttcgaccccacctttttcttctagtgatgatgattaggatagttactgcacattcacttcatgacatttgcactattttttttgcttgtttcctatgattatggtatattgaaccttaatgcttaattggtattttaagataaaaa

SEQ ID NO: 27384 - DNA, 386 bp, Gossypium hirsutum
  Clone ID: LIB3166-047-P1-K1-B1
aaaacagccatggtgtattctgcatctccagctcttataacagatctagaaaagagaattggattgatgctggaagatgccaatgcaaacgatctactgattcctaattataaggatgaagatcaaggactaatgctaaattcacctgagcagcgaacgatgcacaacatagatgtggtgcaaaggattttggactatttcctgatgcatgaacaacaacaacagcaacaaaagatagggaaaacaactgttagtaagctattggacaattacttggctgaaatagcaagggatccaaacctttccatcacaaaatttcaagctcttgctgaatccttgccagaaaatgctcgatcatgtgatgacggtctctatagagccattga

SEQ ID NO: 27385 - DNA, 242 bp, Gossypium hirsutum
  Clone ID: LIB3166-047-P1-K1-B10
tccacgcgtcctcaggaattgttttgaccatagaagagcttatttactggcgtggtacaattgctcggggcggttcttccaaatttcttaaggctcttaaagaaaataaggatctatgtgcagacaatggtttgattgggcaatttgatgttggattctattttgctttttttggttttgagaatgttgttttttccacttagagtcctaattcatacaagcaatttgttttggaagctgta

SEQ ID NO: 27386 - DNA, 261 bp, Gossypium hirsutum
  Clone ID: LIB3166-047-P1-K1-B11
gctcaccctgcaaaacgtatcttgtaatgtcaaccttacagctgttgtacggggggcaccttatattgtggggcgtctaagcagcacgggcaatttcctaaaacgatccatgtgaacaagtattgcgtctgaaaacactatatcttaatccatactacaccttgcactgggaacagtgagtggtagcatggaatcaactgcgagggaacgtaagactttgaacgctaacatgaatcgagctacggggacatccattctgac

SEQ ID NO: 27387 - DNA, 380 bp, Gossypium hirsutum
  Clone ID: LIB3166-047-P1-K1-B12
gcacaaccagccaaacctatttttgccggagatcttccagcaggtttgcggagaatttcaaatattgtagcggtttcaagttgcaagggaggtgtaggaaaatcaacggttgctgtaaatcttgcgtatactttggctggaatgggagccagagtaggtgtttttgatgctgatgtttatggaccaagtttaccaacaatggtctcccctgaaaatcgattgctagagatgaacccagaaaagagaacaatcatcccaacagattatttaggagtcaagttggtatcctttggatttgctggacaaggtcgtgcaataatgcgaggtccaatggtttcaggggtcatcgatcaacttctgacaacttcagagtggggaga

SEQ ID NO: 27388 - DNA, 335 bp, Gossypium hirsutum
  Clone ID: LIB3166-047-P1-K1-B3
accactcaaacgcccacctatacattatctctttattgaccgggaagaaaaagggttgtggccaaggagcctggtgcagctccactattgcaatcggaaaacatgcgaattagcaatcagttgactcaattccggatttggatagaccggaatacataatggtgcaacaagtattggatgattataaggagccatcaacacagctgcttattaaccaacaggggcgtaaatggcaacaagacggatcccggattgtatattatcaccgggtgaacagagatggttataaagctggacattttaacacctggctgagttttaggtatgttaaagaa

SEQ ID NO: 27389 - DNA, 378 bp, Gossypium hirsutum
  Clone ID: LIB3166-047-P1-K1-B4
gctgcctcgaattgctacttatttcctagaacgggctgttgagatctcaaggatggacggtgagccatccgacatggatattatggatgctgagggaattacatcattgaatggactctcttgcacagaattctctttttcctccatagaacgagaagtttctatcgatggttatcagcatgatccatcatcaagctaccagcttattagattgcatcccagtagccttggggagaactgtaagtgggtggaaatgtttgaagatgtcgacattgtcctgttttgtgtgtcattgaccgactaccatgagttttcactagacagtaatggggttctcacaaacaaaatgatggcaagcaagcaactttttgaaaccgt

SEQ ID NO: 27390 - DNA, 378 bp, Gossypium hirsutum
  Clone ID: LIB3166-047-P1-K1-B5
cccacgcgtccgcccacgcgtccgctctatccctagatctcgatttccccttttgtatttcgattttgtatttcgttttgtttgatggcattgaatcgctgattcgtttccaagcttcgattctgtttgtagtgacagtattatacatgagctatctcagctgctttttacttgtttctgctttatttgaccatttctatctcagttttttcccccattttatattatgtttctgataatttttgatctctctcttttactcgtatcaggtctatggggctttacgcatgactgtgaaaatattcttgatgtggaattccaaaatggtaatagatggtggtgaagacacaactgttgcaactttatggcttgaggctc

SEQ ID NO: 27391 - DNA, 166 bp, Gossypium hirsutum
  Clone ID: LIB3166-047-P1-K1-B7
cacttaaatctactcttcctataaatacccattttttcttatttttaaaagctggcttcatataaagggtgtgagcacaatcaaattatgaacatactgagagatgggatacaggatactacattgtcttgtccgttttacttggtttccttaatgatcataaact

SEQ ID NO: 27392 - DNA, 286 bp, Gossypium hirsutum
  Clone ID: LIB3166-047-P1-K1-B8
agaagatcaagaccgacaagtcttatggaatcaatggtggtatgaactggggggatggaattgatgcctttggaaggaagggttatgtaaagggtgtttaccaatatgttgacaaatattgtgctgacgtctatggttgcatgcctatcatacaacaccaataactggtcttcttatgatgaggttaatgttggcagtactaccggataggcaatgtggtgggtgactctagacaggattttatactgtggaggtcttatagggtacaatacaccttgctttggcg

SEQ ID NO: 27393 - DNA, 382 bp, Gossypium hirsutum
  Clone ID: LIB3166-047-P1-K1-C3
caaaatcccacacctcctaaacagccatcatttcaacaacactgccctcctgattttccaagaaaggtataagcaacaaaacaggctgtacgcaacatgttttaaataaaacattgttttgtgatgaacaaaaacattatctgcaacatgtaggtgtttgcagagacgatagcaacctacttgctggtttttgtgacatgtggatcagctgccattagttcggttgatgaacataaaatctcaaggttaggagcttcagttgcaggtggacttattgtgactgtaatgatctatgcagttggtcatgtttctggtgcacatatgaaccctgctgttaccctcgcttttgcagctgtcagacattttccatggaaacaggttt

SEQ ID NO: 27394 - DNA, 373 bp, Gossypium hirsutum
  Clone ID: LIB3166-047-P1-K1-D1
aattcccccaccatttttttcctctctcaacaaaatttcatcactcttaaaacggagcttcctaaatggcgccgagggagaaaacggcggacgtcaagggaaacgggaatgggtgtactaaagaggttcattttagaggagtaaggaagcgtccatggggtcgttacgccgctgagatcagagatccagggaagaaaagccgtgtttggcttggaacttttgatacagctgaggaagcggccaaggcctacgacgccgccgccagagaattccgcggcgccaaggcgaagactaatttccccctccctggtgaaatcctcaacaatggtagtaactgtaacaacaatggttataccaactgcagcaacaacaa

SEQ ID NO: 27395 - DNA, 373 bp, Gossypium hirsutum
  Clone ID: LIB3166-047-P1-K1-D9
cccacgcgtccgcggacgcgtgggtgacaatggagtgggttgatggagtgaaagtgaatgaacaggccgcaattgaaaggcaaggtttgaagcttttggatttagtgaccactggtatccagtgcagcctcaggcaactactggagtatggatactttcatgcggatcctcatcctggtaatcttttggcaacacctgaaggaaaacttgcttttctagattttgggatgatgagtgagaccccggaggaagcaagattcgccataatcggtcatgttgttcacatggtcaatcgagattatgaagctatggcccgtgattactatgctctggatttcttgtcaactgatgtagatgtttccccaattgtgcc

SEQ ID NO: 27396 - DNA, 376 bp, Gossypium hirsutum
  Clone ID: LIB3166-047-P1-K1-E12
tcttatttgaagggtacacttcatgctagccctcccactccttcaccgacttgggctccacagccatctatttcactgcatcctaattttgctccaactcacccgccaagattgtcacccaagattcatcgttttccgccttgccctaagtgcaatactgcttctccatctgctcatcgtccccttcattcgccagctcccactcctccaatctctcctgcatcttctagtgtagtggcacatccccctcccccttgtccgtactctcatcccgcagttccaccaagtcctccatccaaatcctattctaacgtaattcctaagcacccaccgttaatgagcccccgatcacagttgtcccccccaaatctaccac

SEQ ID NO: 27397 - DNA, 261 bp, Gossypium hirsutum
  Clone ID: LIB3166-047-P1-K1-E2
cgcacgcatacgtattatataaatgcactacgaggaaaggacgcacctatagggaagcttgccttagaacgagctctttaacagtggctctagagagagacactaaaaacggcaccttacaactactgtctagcgctacgctgctggcggacgcagcaaaatccacatatcaacatagaaagcgacatggttgacaagggtaagggtgctggtgcacgtgctgatcttttgggagctgtccaacactatgggaagctggat

SEQ ID NO: 27398 - DNA, 315 bp, Gossypium hirsutum
  Clone ID: LIB3166-047-P1-K1-E7
cccacgcgtccggaggtctcttccatcctcgagggcaggatctccggtgcctggaccggtggtgagctcgaggagactggtcgtgtcttgaccatcggagacggtatcgcccgtgtctacggtttgaggaacgttcaggccgaggagatggttgaattcgcctcgggtgttcaaggtatggccttgaacttggaggccgacaacgtcggtgtcaccatcttttgttgcgacagggccatcaaggagggtgacttggtcaagcgaaccggtaccattgttgacgttcccgtttgtattgatcttttgggttttgtc

SEQ ID NO: 27399 - DNA, 317 bp, Gossypium hirsutum
  Clone ID: LIB3166-047-P1-K1-E8
gtgggattgtcactttcagagatgatccaaagctggacgccggtgaagagatcgcacctgaactctttaaagcaattcagcaatcatggtgctcggtaatcgttttctccgaaacgtatgccttttcaaggtattgcatgaaggaacttgctgagattgttgaacaaaaaaacaagggtcataaagtggttccaattttttacaatattgatccatccgatttaagaaaacagaaagggaaagttaatgaagccttcgcccaacatgaagagcgattctaggaagattgagacaagatccaaaagtggcgaaaagct

SEQ ID NO: 27400 - DNA, 384 bp, Gossypium hirsutum
  Clone ID: LIB3166-047-P1-K1-F1
attgtcacacagatgggaagctcgtttaagaagtcgatattcgatgagcatgtgcaagtaggtcttgttggttgggcacagaaggtgaagaaaaagaaaggcttaaaagctgctactgggtctgcagctcaagaaaactctgagcaaaacccttcggctgcaattcagatggggagagtgttgcgcaatgcatctgctcctgaggagattcatccttcacacggtacatactgagcggtgctgagaggcagtggagccatacttcagaaattatttattaggtaatagcatttgttatgtttatatcggatgtacctagattcgcaccagtggtttgctttgcgttgcttggttttttagtatattgtgggtatcagatttaga

SEQ ID NO: 27401 - DNA, 378 bp, Gossypium hirsutum
  Clone ID: LIB3166-047-P1-K1-F10
cggacgcgtggggggcggcctagttgtttgtcctaagcctcggcgaattggggttctcgccaataaccctaacaggtccttgagattgcatttgagtcatcaagccgaggtcagtgatttaagagccggtgctgagcttttagatatcatcctcaagaaggaggatttcggaatagaacaatctgcgacacatgtagcatcgtcacctccatttttttgtgggtcacctcctagtagggtttcgaatccgcttgtgcaagatgctcaattccgtgatgaaagacttgcagccttttcaacattccaaatcccaactccatcgtctccatcatcatcatcatcacgcaaaggagggtgtgttaggatgaagtttggcct

SEQ ID NO: 27402 - DNA, 343 bp, Gossypium hirsutum
  Clone ID: LIB3166-047-P1-K1-F11
tccacgcgttcgcccacgcgtccgtccacgcgtccgaaaaaagccattttcgccggcctcatttgacttggtgggggcttttccttcccccttcttactatctctttctctgtcaatcctaagcctaagcctaccctaccccatatcatagcaaaaaatctaggggaaaaaaattatacaaggaggcttcaccatttttatcttaatgttgtaatttgtatgatgaggccctcaaagtctctttatttcctaccgggaagttagccatccttttttataatttttttcaaaaaaatcttgatctttttcctttggcttaaggggtacaagatcaaagtctatt

SEQ ID NO: 27403 - DNA, 376 bp, Gossypium hirsutum
  Clone ID: LIB3166-047-P1-K1-F2
aaggcattccctttcaaagcctatctctctctttctctcactcacacacagtactcacgcttcctccctttgttttctctggtttccatgaggaggattctgctttctctcctacttttagctcaccttggggagctcggcgctgaagataggcttctgaatccatcaaaactggagatgttcgttgatgagcttccagatatgcctaaaatccaaggttttcgtatgctcaatacttcccccaaacccaagtcactcatgattggcatgttcaagaaaaaatggaaattccacagggacttgcctccaacgccagtgttcgcctatggtgcttcaagccgcagggcaacagtccccggtccgaccatcgaggcac

SEQ ID NO: 27404 - DNA, 284 bp, Gossypium hirsutum
  Clone ID: LIB3166-047-P1-K1-F9
gcctctctaaaagactcttcaaatgtctaacccaaggaaggaaggtaacgggggtgttatcactgacggagccagcggtatctccgaagacaccgccaggttctttttacaaaatgatgctttgtgtgtaactgcttatgtacactatgaactggtgaatcaaatgtctgcatcaatcggccttaaaacagctaacgtaccggcactgtgatgtacgacaggagaagcacttgagaagaaccaggacctttcacactggagaaatatggcgaagctatatatct

SEQ ID NO: 27405 - DNA, 381 bp, Gossypium hirsutum
  Clone ID: LIB3166-047-P1-K1-G1
cccacgcgtccgcccacgcgtccgctaaattttgatggcgttttgaccctgtcgagtgatcccaagaactccacgggcagcagtcgaaactggagtgtggttaagaccattccagataatatttgcacaactaattttgcggaattgggtagtggaacttgtggcttcaatagtatctgcacacttaaacccgacaaaaggccagaatgtaaatgcccaccaggttattctttatccgatgcaaatgaagagtacggcaactgccaagcagatttcatgcagggttgtgaagcagatgcacaaaattcctcacaagatttatacaaattagtggaactgcaaaatacagattggccgacttccgattatgagcggattaat

SEQ ID NO: 27406 - DNA, 277 bp, Gossypium hirsutum
  Clone ID: LIB3166-047-P1-K1-G2
ggccgaccacgcgtccgccacgctttcgtaggaacttgactattttttttcttcccttcctaccctttcgtcggagacatataacaatgcctcgcaaacccccatcaatgaacaaattaatgtggagtacaacgtttcctatgtgtaccactaatctactgctgactttgcagaaacaacgttgaacttaaaggctttgccaagttcgattataacaacaagaagctctccaaagttatttttttaatatatatatccgaatgatttactgacttac

SEQ ID NO: 27407 - DNA, 305 bp, Gossypium hirsutum
  Clone ID: LIB3166-047-P1-K1-G4
gttgtacataatgttttacgtgccacaaacattctttcgatatgtacgaagctcaagcgggtgcaaaacgggtttatgcagttgatgccactgctattgcactgcaggccaataaagtggtgtaagcaaatacatttatgctcaaacgcgcattggatagcacggtcgagtcgaggctgtttaaatcgatgaacacgtcgagattatattttcataaagtacggactacaacctgatttattatagcgttctaggaagtgatatctactgctgctgatctaatgctggatcatggtggccaaatc

SEQ ID NO: 27408 - DNA, 324 bp, Gossypium hirsutum
  Clone ID: LIB3166-047-P1-K1-G6
atccctatagatccaacacagccacactttcaggtaactggaaagcaacatggaatgggggaaacagaatcgtgacaagggcaaccccaccccccccctgatgggtactgaacgaaaacctctggatctttttgaggtggaaaagatccccaagtggatgaccggactgactggattatgcacgaatatcatgttgttagcaccgagacagctgggcgcaatgccccacccaaaaagaaccaaactcacggcaattgccattttacattgctgcttccattatgcctgactcttttggggaaagcaacatccctgactttggat

SEQ ID NO: 27409 - DNA, 319 bp, Gossypium hirsutum
  Clone ID: LIB3166-047-P1-K1-H2
gtcgatccggggccagctccgcccacatgtatttcacttttgtatgtaccccaaaggacaggagaggggagcagaaaaacacctttacaaattattacaaattttaatgcatgctgacctgaagatcttgtttgttttttcataaaaaaaaactgttactcacagctcccttactaacaccccctaatgtgtaacaaccaagggaaatgcacttttgtgatgatttttactggaaagctgtaaactatattgtgggttatgccacataatattaatcatgtaatcggattgtttttttattaaataaattatttacata

SEQ ID NO: 27410 - DNA, 382 bp, Gossypium hirsutum
  Clone ID: LIB3166-047-P1-K1-H4
cccacgcgtccggaggatggaagcagtacttcttatgcaattgctagttctcaggagagggggcagatgtttattggtcctgggattgaagtttataaaggtcaaatagtcggcatccatcagcgccctggggacttatcccttaatgtttgcaagaaaaaggctgcaaccaatgtacgctccaataaagaacaaacagtggttcttgatacaccattggactatagtctggacgactgcattgagtatatccaagaagatgagttggtggaggttactccctcaagcatcagaatgtgcaaaaatccaaagtttgcagctgcgaagaaaagtcggtaaatccagccttttccgagattgttggtccatgagcaaagctttc

SEQ ID NO: 27411 - DNA, 382 bp, Gossypium hirsutum
  unsure (1)..(382): unsure at all n locations
  Clone ID: LIB3166-047-P1-K1-H8
acacatttgattttcactatttgttatgtaaccccaaaggacaaggaggaagggggagcgataaaaacaacctttacnataaatatcattacaaatattttaatgcatgcatgacctggaagattctttgtttttgttttttttttctattaaaaaaaaaaactagttcactacacagctacccttcactaacaccccctcaatgtgttcaacaaccaaagtgtgaaatatgcacttttttgttagtatgattttctactgggaaaagcttgatgaaactaatcatatgttgaggttattgtccacataatcattcaatcatgtaatcgggatttgatttttttattaaaataaaatatattttacaatcaacaatttattt

SEQ ID NO: 27412 - DNA, 385 bp, Gossypium hirsutum
  Clone ID: LIB3166-048-P1-K1-A10
tgattttagaaccctaatttcactttttgttcttatttgaagctcaaaagaggcagattttaaagttttcttttggaaaaaaatttggtttttatagaactttcaagaatagactaaattattaaggcttgaataggtaatccgctgcctttttcctcttaattttataattttaaagcttttacctagaaatttcagctatactctagctgagtttagtaaaaaattaaaaaagatttaaaaagttttatatttgaatgttttttattagctgggttgataagaaagtttaattttcgaaggaatccttggatttagtttaacacattcaaaggctaccaatttctttaagcttcaagattaaagtttcaatatttcttaactt

SEQ ID NO: 27413 - DNA, 385 bp, Gossypium hirsutum
  unsure (1)..(385): unsure at all n locations
  Clone ID: LIB3166-048-P1-K1-A3
gggcgcgcgccgngtatacatgtcgtactcattattgactacctctttgactcacgttcttccttagactcatcacactcttcatagccaatacctcttccttcttgcaacaccttctcctacaccaacagtccatcgatacatacacagcgagccccagactcgttcccgatatcgcctccctcccacacattcaccttcaccaccacaatgtcctccaccaacggcaccaatggcacttccgccgccccctcgcagtcctccttcgctgtcaaggccggtctcgcccagatgttgaagggtggcgtgatcatggacgttgtcgacgctgagcaggcaaagatcgcagaggaggccggtgcatgcgccgtcatggccctcgagc

SEQ ID NO: 27414 - DNA, 386 bp, Gossypium hirsutum
  Clone ID: LIB3166-048-P1-K1-A4
tgaaaacattggtaatgttgagccaatgggtaagctagataaaggagatagaactgatgatgacgagttgcctgaaaatcaaaatcgcaatactgcagggagaagaagttcttttctggcaaaattagccatcgcattaggcgtggcagcagctcttactgtcatatcatttggcataaaaggagctagttttggatcattgcttggagttcaacgcctggctgaagtttcaccctcttcaactatggataccactgttggtttcactttcaaagcttttggttatagatttatgcttcctgaatatgcaccaggatggatatacttctggttgcttatggctgctggttgtggactcttcattagtgaagaggctttaaatattt

SEQ ID NO: 27415 - DNA, 388 bp, Gossypium hirsutum
  Clone ID: LIB3166-048-P1-K1-A5
tgcatattgactgtgtctggaacggatgggaggagattgggaattccgagcaggtgggtcttagtttttggcacaaccaagtggaggaaccatccagtttatttagcttaatgggaagtgagtatgatcatgaaatgagaaggaagaaatgcaaatactcctctgacgtgagtgatgggtacattctggaaaacaacggattttggtgcaagaaatgggataggttgcaatacctttcactttggattggtgttggtgaactccttacaccattgccagcggcgggtcttctgaactgccctaatttggaggagattcgaataaaggttgaaggggactgcaggggacgttccaaaccatctgaacgtgcatttggattgagctctct

SEQ ID NO: 27416 - DNA, 321 bp, Gossypium hirsutum
  Clone ID: LIB3166-048-P1-K1-A6
ggcaccctgaagatttaggctgcgttttttgaggccaacgacaagcctgagggccgggctgtatctctattgaccactgctaataccaatggtcaagctgatgcggtcgcacagacggactaccaagactattgcaacaacactctaggcaagtggaaaccagacacgtgcactggtggctgtcatgagaagtgaaccattactgaggacgtgccgaacacttcgctgtggcgcataacacttgggaacattgagaacatgtctggctctaattgcatggacacgcacgagtgtgcagttgagcactggatccatgttttt

SEQ ID NO: 27417 - DNA, 352 bp, Gossypium hirsutum
  Clone ID: LIB3166-048-P1-K1-B1
gagaaaacaaagaaaagactctcccttttttcctttcttttctgtccaagttttcgagttttaagccaagacgaacgctaccatgtttaaggttttgatgatgttgagtcttttggccaccgcttgtatggcttaagcaccaacagaaccacccacatgtccaccatcgacagctgatacttcaacccccaccctattctcaaccccaaccccaaccccaaccacaaacccaaccccgacctctttttttaccccaagcccatccccctatgcatcttcagctgcaacggtatctcctaccacttcctcatctcctatcgttgcatcttcttaacgttcttgtttaaacgct

SEQ ID NO: 27418 - DNA, 277 bp, Gossypium hirsutum
  Clone ID: LIB3166-048-P1-K1-B7
tcgatcactcgttctaaagaagaggtttgtatctcacatctctttggacaagaggggaggcctttaatatcttgtccgtatgttcatcttcagcccttttaacaaaaggaataatggttgcttagaagcatgttatatttgcagttttttctacgcttatggtgactgacaagtttcagagtaacttttaattcagttcaacttattctatttgagtattacagtttattttttttaatattatattatttatttattatatatattaatttttttt

SEQ ID NO: 27419 - DNA, 239 bp, Gossypium hirsutum
  Clone ID: LIB3166-048-P1-K1-C10
cccacgcgtccggtaactgtgttatattctataacacgagtaacgcctcgggagcgatgacgttcttgcctcccgcacaccaatgaacttcttagaacgctcttaatggacttctaacaacgttctgatcccggataacggatccaactcgtctgtcgtaagcattttccaaataaaccccgattctattaatggtctaacccatatgaaaaaaaggttttagaggttctttacacttt

SEQ ID NO: 27420 - DNA, 352 bp, Gossypium hirsutum
  unsure (1)..(352): unsure at all n locations
  Clone ID: LIB3166-048-P1-K1-C5
aaagacaaaagggagggggaacaaccaagaaagaccccgacagagacacaagaaaacacaccgaccggggagcaggaggaacacccagaacaaaagcggcaggagacagaaaaagagaagagaaagcccggggaaagcaggacgcaagcggagaacgaaccgcangagagaaagaggcccaaagaggaccaggaagagacaaaaaagaaaaacagaaagaaacgcggaaacggaaaaggagaggaacgagaacagcgcaaagacgaagcaagccaaccaagaggcacagaagaaacaacaggggcaaaggacaaggccgaggcgggagaagaggaaaagggagcagaaacca

SEQ ID NO: 27421 - DNA, 279 bp, Gossypium hirsutum
  Clone ID: LIB3166-048-P1-K1-C9
gtccgctttttgagagcaatgccattcatcgccttgttgctcgctcaacggataacatgcctgtatgtgcatctacatctattgatgataggcatataactcaaaaaattgacttagcactcaacaaaatcgactctgatattgccaactggatgattcccagactcgaatactgtgaaggcctatctgcacttgaggatgctgggattgctccatcgaagagagcccgaggccctatgaacactcatcttgcttgcaacacacttcttgtggtacacg

SEQ ID NO: 27422 - DNA, 339 bp, Gossypium hirsutum
  unsure (1)..(339): unsure at all n locations
  Clone ID: LIB3166-048-P1-K1-D1
anacacnncacaaaaacccaaccaccaaannnanccaaccgaaaaaaaggggcgcgcggggacnacccaaacagagagggcacgcaagggcccncagccgaggagcagcggaacaaagagagaacacgnnnccccaaaacncaccacggaaggggaanaacaaggancgaaacccgacgcacnaacaaaaggcncggnccagcaagaaaaagccgccacngangagacggnaagccccaaaaccgaagnagaagaaaagggcacggaccnaggagaggcaagcaaccggnanggnagaagaacagggaccaaaaagacggggcccgaagagaggaagcc

SEQ ID NO: 27423 - DNA, 378 bp, Gossypium hirsutum
  Clone ID: LIB3166-048-P1-K1-D10
ccactgttaaagaactttggattatttttttcatcaaattcaaaacccctcaatgccaatgctgagcttcttgttgatttcatttcaaacaagatgaataatgcttgggttggtttggaaaaggcccctgagggtagtttcaagaacaagcttcatgggtttggattgcagcttttagctcgagttaagccatctgagattttgttgaaatctataagtaaagaggtcactaatgttaggattacatacccccccagtttaaattctaggcttgtgcggcgaagattacgacatatagccatgaggggtactgttatacacaggaaatacttttatggttcagttacgttgctttcactgactactgcacttgctgtt

SEQ ID NO: 27424 - DNA, 192 bp, Gossypium hirsutum
  Clone ID: LIB3166-048-P1-K1-D3
atcagattattttccttttcttgctccacttgactttcagggatatagaagaagggttaagaggacaagcaatgggcttcacgcaattattgacaaaatgattgatgaacatttacaagggactaacgccaaggaacaaaaaccttacacagatttctttcatgtaatggtttcattgttgaatacgcccat

SEQ ID NO: 27425 - DNA, 394 bp, Gossypium hirsutum
  Clone ID: LIB3166-048-P1-K1-D6
cggacgcgtgggcaaaatctcattccatttcttcatcttctctctctctctacacaagtagagatatttcactataactattcgtatctaggaagctgtatattgtagcttgtaaggttgaatggaggtgggggacttcttcgtcggaggtttttatggcggtgctgcaggcaatgacttctctccgctgaagatgatgtccacagagcgaaagctcccagagaatttcaccgtcgacgatctcctcgacttttctaatgaagacgccattataaatgacggctttttagaaaatgtcgccggcaattccaccgattcctccactgtcacctgcaatttctccgtttccggatgcgataaccacctctctcccgttaatctccctcacttcttc

SEQ ID NO: 27426 - DNA, 217 bp, Gossypium hirsutum
  Clone ID: LIB3166-048-P1-K1-D7
tgagcgcgttatctttattggacatcatttagatgaggaatttagcaaccagaggggagtcaacgtatgttattccttgatagttttgattataataaaaggttttatattctacattaatggccctggtgggggtcacaccccaagctgggctatctatgataccatgaaaatgcagaagagacctgtttgtacccactgtgtaggctattcctac

SEQ ID NO: 27427 - DNA, 228 bp, Gossypium hirsutum
  Clone ID: LIB3166-048-P1-K1-E11
cccacgcgtccgatctatttcttttcttcccagcatatataataatagctcgtatgatggtttccaaacatgggagctgtagactctcattaatgttgcttctggttttgctagggttggcaaatgctgatatcaatcaagacaaaacagaatgtagtaatgagctagtagggttggcttcatgtcttccttattttggtggtgacgcaaaaactcctaccattgatt

SEQ ID NO: 27428 - DNA, 314 bp, Gossypium hirsutum
  unsure (1)..(314): unsure at all n locations
  Clone ID: LIB3166-048-P1-K1-E4
gaaaacanggagcaaaanaggaaccnananacgaaagaagagaagacggcagaagaggagggaagaacaccggcacaacgggcacnngccngggnacaaaaccaaggggaggacggnacaccaaaacccgggaagacccagacaaccacnancaacacggaagccgaggggaaacaagaaaagagaacacgnaaagaacaagaagcanaacagagaaaaggaggagagggaaaanacacaagacaaaaaaagaagggaagaagacacggaaacgcgaagaaaaaacagacagagcaaagaaggaaccngcagaa

SEQ ID NO: 27429 - DNA, 313 bp, Gossypium hirsutum
  Clone ID: LIB3166-048-P1-K1-E7
tcgtggactcgtgggcggacgcgtgttctgaaactcagaggaaaaagaaaacctgagggagcgaatccaaatccttaaaggacaaatctcagttcaagttcctacaaagcttatgcagatgcccatgaaaagacagagacttaccctagtaccgtcgccatcggatcattgtctgtttcctgaatacgaaatctccattatggtcgtcgccttaaaaaacgtcttcgttggttttacacccaccttcacctccgcagttttttgtctttgccgttgttattacttccgattttgtttccttggtgacttccac

SEQ ID NO: 27430 - DNA, 183 bp, Gossypium hirsutum
  Clone ID: LIB3166-048-P1-K1-E8
acggctagtcttctattcaatgctatatttgatgggacagagcaacggctacagggggggttgatttatggtctggtaccttctcacggagagggtgataaaatgctattggcagcaagaaagagtagaagggcaacatgcactgactttgttatatgtttggctgccgaagattctgctagg

SEQ ID NO: 27431 - DNA, 205 bp, Gossypium hirsutum
  Clone ID: LIB3166-048-P1-K1-F4
ggccggggtccagccgacctttttttgcgtgcacgtcagcgctccgtgcagagcggtcgccctgccgccggggacggactggaacggtccctgtggttccccggtcgacacatctcttaactggtctgacagggtaccgctgttaataaaacaacattggaggccttgcggagctacgcatgtgattttgccagtgcttgatgta

SEQ ID NO: 27432 - DNA, 238 bp, Gossypium hirsutum
  Clone ID: LIB3166-048-P1-K1-F7
aaaaaaataaaaaaaattaagtccttttagagctcactagagatcttttttggggaccattgcggctaacggatttgttggatatgaactcattgtttaaaagaattactggattgaacactgggttgatctgactgtggaagctatgatgctcgacttcaaagccgttgatattgtcaaagaataacgttccgtagtgttttttttacctctttcatttgaagggaaatccattttt

SEQ ID NO: 27433 - DNA, 362 bp, Gossypium hirsutum
  Clone ID: LIB3166-048-P1-K1-F9
tccacgcgttcgaatttatcccacgcttaagctcctaaaagtcttgaagagctattgttacttgtaagatttgtaaagatgcttctgactgattcatcatcacaaaaagatagcatagattctggagaaaatttttcggaaaagcttaaagctgatgatgaatcatggagtcatgtcatagaggctcttttaattggcagtgggacttcctttgttactattgattggcttctgctagagcttctaaaagacaaactgcaacaatgtgtatcttctatatccatggtttcaggagatcattcattgcattaccatgttcaagaaagagcatggattattacacatggctgctggatatggct

SEQ ID NO: 27434 - DNA, 390 bp, Gossypium hirsutum
  Clone ID: LIB3166-048-P1-K1-G1
catcaatcctggttgctacttatgaaggagagcacaaccatgcacaacactctacaccagcattatcatcattaagccccaacagtggtaccagtaaccctcgttcagctcctgtttcttcttcttcttctgcccccaccaaatcttcacctcccactgtaactctggagctgatgaaaccaactgggttgggtaatgataccaaaaacccaacccaacaagttgatgaaccagctatccaacagattttagttcaacaaatggcagcttctttgactagagacccgacttttacagcagctctagctgcagccatatctggaaaagttctagatcacaagtggtaaaattcaacatacttagggagaaatccatagttatgtaattctt

SEQ ID NO: 27435 - DNA, 385 bp, Gossypium hirsutum
  Clone ID: LIB3166-048-P1-K1-G2
cccacgcgtccgcaggccttactcactcagttgcagaagctgaacgatttgattaagaagccgaaagaggaagagcagtgttgcggacaagttaacggtatgaggtgcagtgagggagcctcagataagggagagacgactgtgaagtctgattcagaagggcagcttagtttatcaatgggaagatcggaacatgctctaggagctttatcggatgatgatagtgccataaggacggattacttcggactggaagaagagcccaaccttatgagcatggtggatccagctgacggttctttatcctctccagaagattggcgtagtttagactctgatggtctttttgatcagtccccttgtggttaccaatggtgggattttt

SEQ ID NO: 27436 - DNA, 389 bp, Gossypium hirsutum
  Clone ID: LIB3166-048-P1-K1-G3
cccacgcgtccgattgggggccaattaaagcgatttgcaaaagcccgcaaagatttgttagttgctgtaaatgaaatggtaagacacatgttcgatgaaatcgattacatcttggaggcaagaaatgccgaacgctttgcctctctttatagtgactgccctattcatggccaaacttgtaatcaaaactctaaagatgggattaccaacaaaaccaaaaatgcaagcggaataaaagtgccaaaaatatactgggatctcactcgaaaagctgtgcttacaatggaatggttagatggaattaagcttacagatgaaactgccctgaagaaggcatgtctgaaccaaagggaactgattgaccagggagtatactgctctttgagaca

SEQ ID NO: 27437 - DNA, 272 bp, Gossypium hirsutum
  Clone ID: LIB3166-048-P1-K1-G4
ctcactcttctctacggttttctattttttttccaatccagctcgcctatctatggcggcggctctaagaatcaacagcgggctgcaccactgccatggagaggacctgcacagtgggttgcctcccaagagattcctactgatgttattgatgaagtcggcgattccaatttcaatccttcacaagttcatgcttgtggctaagagcacttacatatcgaagatgttaatggaaacaaatgaatcggatttgacctgagtcaacctttctg

SEQ ID NO: 27438 - DNA, 332 bp, Gossypium hirsutum
  Clone ID: LIB3166-048-P1-K1-G8
gacgcagttaatctgactcattacttttggtcgagatgcattcggagttgaaacaaaggtagtatgaaggacctttaagtttggatgaatcgacattgacctcatcttttttttttttaagctgtgaattataaatatttttcaatatttactagatcaactacatcttatataaatacaaaaggagtatagtgtaatatataaaaaatgggtcgggttgtattctgatattatttatatatcttgaatataaaggtttatgatttattttttaatataaaaaatagggcggccgttttattggatccaagttttacttacgttttcatgcg

SEQ ID NO: 27439 - DNA, 391 bp, Gossypium hirsutum
  Clone ID: LIB3166-048-P1-K1-H12
cccacgcgtccgctccctcccctcagttatccaaacatgaaaggaatggatcttttttgcgcttctcaagcttcaacagccatctgctctagcgtggaccatcgctccatggtccgccatggtcataggcgtattgatcgccaaaattcaaagccttatgcaccttgttcatcacaattgcctataatccctaggccataccatgaaaagagtagcaagaacggtgttaagccaagtgacgtacgtcgaaaaagctcagcagatattcatgatctaaaaagctctcctgcttcatctacatatcttctaagtgatagaccctttattgattggttatcagagtctgatcctactgtctcagcattggttccttctcagccttcaaaaccta

SEQ ID NO: 27440 - DNA, 238 bp, Gossypium hirsutum
  Clone ID: LIB3166-049-P1-K1-A5
tcggcacctaccgagaaacattcggttaagttttgtagaaggttttacacaaactgaaattagtacgcttgcagtcaaggttaattttatggttgtaggaggctctcaaggagagcttgcttttaagcacttggtcagataatgcataactcttttgtactcgttcaacatatgattataatgcaattacgaatgcttatgttatatattacattttgagtggtggtattatatttat

SEQ ID NO: 27441 - DNA, 265 bp, Gossypium hirsutum
  Clone ID: LIB3166-049-P1-K1-B2
atttacagaaaggaaaaaaaaacctaggttgctttctcaacccttcaccgactaacaggcttttgaaggtctgttctactgcctatagttatccaacctccacaaacaaagatcagggtggaccggaccaataaaattggagagtgttactcacaagccgcacatacctacttagtttcaactgtggcgaaacaagcggggattctgaggcatcaaacgcaggtgagtttcttttgtttttattcgatcaaaagaaggtaagtat

SEQ ID NO: 27442 - DNA, 373 bp, Gossypium hirsutum
  Clone ID: LIB3166-049-P1-K1-B8
cccacgcgtccgggagacaatatatgctcggagaaggaagaaaaaaaggagctaaaatctgttgtggaggaaaaatctatagttatccaacctccacaaacaaagatcaatgaggacctggtttctcattttgaagatggcagcaaagaagatgaacatactggagacaaaacaaaagaaaccttcgaagtcccaacatatgaaattcaaaacgaaaagccgaccttggaaactccaaaggatgctgcaagcgacaatatcgagaaagagactgttgctaaagatgaaactgtgaaggatgacatgaaagaagccactatagtagaggagattccaggagagaaagatcctactgagtgcaaaaagacaacaa

SEQ ID NO: 27443 - DNA, 370 bp, Gossypium hirsutum
  Clone ID: LIB3166-049-P1-K1-C12
ctttaatttggtctctctgatctggttcaagtcttgttacagttgttaggttatttatggagaagggatggggccttacccttggtaattctgatcctgtgtctagtttcttccacaacaaaactaattccaccgctggaccagtcttccggttaaaacagcacccagacatgttacagttccctgttagccttgctggctccagggaggaccgccctggaacctcctcttcctcctcacctgcctccgatgacaaccgggtggcggttgatgaggtcgactttttctccgataagaaacacggggttgttgatgaaaagaaaaccggtactgtcaccgtcaagacggagactactttttatggtagaga

SEQ ID NO: 27444 - DNA, 201 bp, Gossypium hirsutum
  Clone ID: LIB3166-049-P1-K1-C4
cacaaacctcaaacaatttaaagcttgaaaaacttggacaaacgaagcgacgtgggatatagaataatccatgacattggaggccaagtgtacatggatggggctaacatgaatgcccagctttttttaccctgtacggggattattggagcaaatttttttcattgtgaattccacaaaaccttcttgatttcacatgga

SEQ ID NO: 27445 - DNA, 128 bp, Gossypium hirsutum
  Clone ID: LIB3166-049-P1-K1-C5
cggacactaggtacatattacctttattctgcataaaacatcctaagcgtggggggggtacttattctccttggcctgaaacgctatcaaattacatgaaaagggttattcaacctctggttctttgg

SEQ ID NO: 27446 - DNA, 371 bp, Gossypium hirsutum
  Clone ID: LIB3166-049-P1-K1-C7
gagagatcttacatacagagatggatagattgtggcaatgtaacgtgtccaaaaactcagcagatgctggagaatttaactctaaccccaaactatgttcttagaagtgtaataaatcaatggtgtgctaaacataacattgagcagcctagcggattagcaaatggtaggctcaaaaagagcaatgggtctttctgtgatattagtggcgacatggcagacattcaggaactggtctctaagctgtcaagccggtgcttagaggaacgtaaggcagctgtggctgaaatccgatcactatcaaaacgaagcacagataacaggatacttatagcagacacaggagcgatacctgttctggtcaacctttt

SEQ ID NO: 27447 - DNA, 295 bp, Gossypium hirsutum
  Clone ID: LIB3166-049-P1-K1-C9
tcggtaaaaatcaaacgaattacaacttaaataatattaaaagatattggttttgatcatcaaattttctgtttctgatccaccaatccaatcagagtgtcgaagtattgaagctgtcttggttctgtttttttttgaaatttgatggctctcgcgttttttggcgtggtggaagggggttagaactaatgtggcttttacctgtgctctttctggcttcttttgtattgttgtggtttccagaatattattgcctgtatttttaattggatcctctatattttcctttgggctt

SEQ ID NO: 27448 - DNA, 287 bp, Gossypium hirsutum
  Clone ID: LIB3166-049-P1-K1-D10
cccacgcgtccggattggagagtttttattatagtgaaaaactgatcgtagtccatcccctgctacttgcttgattgacttgccctttcaacgcccaagaaaaatggcttgtgcttccgctactcccttaaggcttcacctattatcgacacgttcgtgtggattaagggccaaatccttgctcaccctgtcgtttgttttgttcggccacaccctttattggccgcctttgctgtccgtgcatgttcatatgccgttcggctttgttagaccgctaaaactgttgc

SEQ ID NO: 27449 - DNA, 380 bp, Gossypium hirsutum
  Clone ID: LIB3166-049-P1-K1-D12
cccacgcgtccgcggacgcgtgggcgcataaacagtccagcattgcaatggagacattgcaggtctttgctcctttggcaaaattgttgggaatgtatcaaatcaagtctgaacttgaaaacttatccttcatgtacacaaatcctgaagattatgccaaagtgaagagaagggttgctgacctctataacgaacatgagaaagagcttgtggaggcagacaaaattttgatgaaaaggatagagaatgatcaattcctggaccttatgactcttaaaactgaaattcgtgctgtgtgcaaggaaccttatagtatttacaaatctgtgcttaaatccaacagttcaatcagtgaggttaaccaaattgcccagcttcgt

SEQ ID NO: 27450 - DNA, 377 bp, Gossypium hirsutum
  Clone ID: LIB3166-049-P1-K1-D2
cccacgcgtccgcccacgcgtccgcggacgcttttgttccagaatcaaaacctgcaacgccagacgttttatttgagtctcggtgataccgataatagtatttttgagccacatgaccaaaccgactgcagatctggcattgaacacgagatctgatgaaccgaccacgaccactaacagacgcacgacctccatgaccggccccttccaccgatggctcattttcaacaagattcacgttcaaactgaccttctgcaacactcgatcttgacgactctcacaatcgactaacacatccaccagacgttgcaacggcagaactacaggcgacaaacgagcagaggagataaccgcctcaaactccgacggcaaacct

SEQ ID NO: 27451 - DNA, 361 bp, Gossypium hirsutum
  Clone ID: LIB3166-049-P1-K1-D4
aaatggacctggatatataatgtcatctgacatagcacacttcatcgtctctgaatgtgagaaacacaatttaagtttgttcaagatggaagatgtgagtatggggatgtgggtggagaaattcaacagctcaaaggcggtggattatatacacagtttgaagttttgccaattcggttgcatataaggttattatacagttcattaccagtcaccaagacaaatgatgtgcatgtgggtcatgttgcaaaagcagacaaggccttaatgtgtaacatgagatagttttatatgtatatatatatattatttaaataaatatttggtttttcatttcttggtatttctctcggattatatt

SEQ ID NO: 27452 - DNA, 221 bp, Gossypium hirsutum
  Clone ID: LIB3166-049-P1-K1-D6
accacgcgttcggtcatgaacaatttgaaacccaatctctttcaagaaaaaggccatagggggcgtctggcctagtgtcagtctcaggcttcatttacctgtggcgtttatagtgcctaccttgctgagtttatcttaactctggtggttgatttttgctgcctatgtattttcattggtaattactaaaatacaactgatgcagccctagatcccgatgg

SEQ ID NO: 27453 - DNA, 298 bp, Gossypium hirsutum
  Clone ID: LIB3166-049-P1-K1-D7
tttggctgctcatcctcacatgttaagacaactatatttgtctatgggcagcgaacgatgttttattttctattaaaaaataaatactctgttcgctgattaaacacctagatgaccatttagtggagattggctctaatggttttaccaagcctaaggtggttagaaagttcataggatgtggattgctcttgtattttatcatcaagaaaggagtccttctttgcatccttgaggtattgttttccacataacctctattttttcttcaagactccttcgtttattccttcaattc

SEQ ID NO: 27454 - DNA, 244 bp, Gossypium hirsutum
  Clone ID: LIB3166-049-P1-K1-D9
ccagcttccgcgcaatatttttttttcttctcattcacctccaccgggacaaatgtcaaggataataaatctggcgaaatcttaaggaatgacggactatgaacaagcacccaccatggaatgtttggacccactattatgcatctgttttggaagtttttatagactcttgattataatactatatggtcacttccacaaattctttctttcacttacacatccggttgttgctgctgttggt

SEQ ID NO: 27455 - DNA, 335 bp, Gossypium hirsutum
  Clone ID: LIB3166-049-P1-K1-E1
cccacgcgttcgaggacgcgtgggctcgaggatccattgaagaaaggatgatgcatatgactaataagaaaatggttttggagcatcttgttgttgggaggctaaaagctcaaaatattaattaggaagagttagatgatattatcagatatggctcaaaggaactatttgctgatgttaatgtttaatcatgaaagttccgtcaaattcattatgatgctgctgctattgatagaaacttgatcgtgaacacgttcgggatgaataggctctagcggatgttgattaggaggtaggatttttgttggtttttaatgtagtttattttgaattta

SEQ ID NO: 27456 - DNA, 286 bp, Gossypium hirsutum
  Clone ID: LIB3166-049-P1-K1-E11
tcggtggctattctatctttatttcattgcactctccgacgaaagaaacgagagaaaaatgaccaagggttacccaaccgttagcgaggagtaccaaaactccgttcataaggttaagaggaagttattagtgttaattgttgataagaactgtgctccattcatgctccgtatagctaggtacttatctggaacttttgatgtcaagatcaatactggaggaccattttgtactcataagtatcctgttgtgctctgattatgctgtttacaacggtctttattt

SEQ ID NO: 27457 - DNA, 156 bp, Gossypium hirsutum
  Clone ID: LIB3166-049-P1-K1-E9
tcgcggacgcgtgggcggacttcgtgttcggacgcgtgggacactgatcaggctatctttgaattttttaggaagatctgttaaattatcgttggccaagtataagataatgtcctagattatgacgtatataatatttctcctacttcttctact

SEQ ID NO: 27458 - DNA, 208 bp, Gossypium hirsutum
  Clone ID: LIB3166-049-P1-K1-F1
gtacaggaggaagcagctattcaaggaccatttgggcctaaagaggaagtaagttgtaagcgcaaatagcgtgaacaacgatggattgaaatgtgccataaatcatattatgcatgctcaacagagggtggaaatcaatgaggacagcgtattatacattgagcagaatatgaatgtggcctcatttgacacgacactgagttggggc

SEQ ID NO: 27459 - DNA, 145 bp, Gossypium hirsutum
  Clone ID: LIB3166-049-P1-K1-F10
cccggttttactgcaaactccatttttgagagcttattttgtagagaaagagattcagttcgagcgatctatgttagtagaaaatccactcatgagattttttttcttgctctgtttttacttattaagaggggttaacaattta

SEQ ID NO: 27460 - DNA, 322 bp, Gossypium hirsutum
  Clone ID: LIB3166-049-P1-K1-F11
aacattttgcagtgcatataacagcatatgaacaggctgccgagaggaaacacttgaaagaggaaaatgaacagttccttctccacagctctttgagaactgcagcgggacctctaaaacagagccaacgatcttagcatgcttctgaaaggaagcgacttgatgatcccttcaagattcggtagagaaacttcacttcattgagagatgcgttattgaaggtgtctcttaggattcaatcttattgagccggaaaagccaagacttagcccatcttcatttgttttgtcttggtgtacactatcattctagtgtgttgtca

SEQ ID NO: 27461 - DNA, 189 bp, Gossypium hirsutum
  Clone ID: LIB3166-049-P1-K1-F6
ggaccggccggaatcccgggcgccacgcgtcggtccttaggcttacgatctaatccgaaaggactctcccaacgccgggcaagtgacgaactcattgatcggaccgccatggcccgacccgataatctaactgatgcctataacttggatccgcaaaaaccgtgcttacttcatagaggattatattac

SEQ ID NO: 27462 - DNA, 266 bp, Gossypium hirsutum
  Clone ID: LIB3166-049-P1-K1-G11
cagagggggagcagattgatgctaaaaaggtgcaggagaaaatgagggttgttcagatggaaagagaagataagcttgcacaattattgaaagatcgacccaatcaatatgtgcaaggaaacaaagcggactttgttaatcatgcagaaactggagtatcaatactctctagtgcatcatatggtgttgatatgttgaattcaattggttacatttatgcaagacaagctgtaaatgaacttgtaaagaatgcctttaactttgtt

SEQ ID NO: 27463 - DNA, 329 bp, Gossypium hirsutum
  Clone ID: LIB3166-049-P1-K1-G3
cccacgcgtccgcaaaactgctatgagatgcaacaatcccttgtatcaccctcataataggaggcaacttgataggaggattacgatcgtccaaaataaaaccattggtaatcgtaggagtggtgtgtgctcgatacattatactgccggttattggtatttgggttgttaaagctgctgccaagcttgggttcctaccctccgaccctttgttcagctacgtcttgatgcttcagtttactgtcccaccagcctccaatattggtaccatgacccagttgtttgatgtgggtcaagaggagtgttcatgtctttttctgtggacatac

SEQ ID NO: 27464 - DNA, 129 bp, Gossypium hirsutum
  Clone ID: LIB3166-049-P1-K1-G6
gtaactcttgcggaaacgtaggcaccggcgttaccattccaacattggttcgggtgaacgcgacggagaatttgttttaatgaatcggttcttcattttattgagggcttaaaacctcaacaatccatc

SEQ ID NO: 27465 - DNA, 376 bp, Gossypium hirsutum
  Clone ID: LIB3166-049-P1-K1-G8
cccacgcgtgcggcgatcaattcattggacctaagcgatgcttataagctagctgcccgtagtaaaggccgacagatatctgctccgcttgttgaacaatggattgcaagagattcttctagacttagagaagatttaaaggactgatctgtcgaattatcttctcgagggatggtgccattgatgagcgatgtaagtcctatgatcgctccacgcacgaggattgctgcaagcacatggatatctataaacagtgatgatttaaaagcctgagatccttcttgatttattggaaacgagatacttgaaaggacggtccttattgcatgagaaatgagtctgggttatcattacattgaagcattgttagctaaat

SEQ ID NO: 27466 - DNA, 377 bp, Gossypium hirsutum
  Clone ID: LIB3166-049-P1-K1-G9
ttacactttgtggtatcgcaaggttcatgatatggaatatcctgaaagaccgggttgtaccatgttagtgccaaatatgaggtatgttgccacagggttgactccagctacagagtatcgtttcaaaattgtctcctttaatgggacaagatgggaaattccgatttcaacatcctgtatcggagatgaagtcccaagctgccctgttatgggaataagtcaaagcccaacaaccaactgtagtagcctttctaatccatcttctgtggaggatgaaactaataatgttactctgtatagtgatcagaatgatgaccgggcagacaattatctgacatattgcaaggacactgataaaattgtttccacaaatctat

SEQ ID NO: 27467 - DNA, 155 bp, Gossypium hirsutum
  Clone ID: LIB3166-049-P1-K1-H1
ttttcgatcactagcggcctcctcaattttcattaaataaatttttaccttgctgcgggtctttttcccggaacccaaacactttaatttctcataaaaactccgtctcaatccttcaaacaacattctccttatcctttagggtatcaattatt

SEQ ID NO: 27468 - DNA, 246 bp, Gossypium hirsutum
  unsure (1)..(246): unsure at all n locations
  Clone ID: LIB3166-049-P1-K1-H4
nnaaaagcncaccgngcagcnggcagcangacaacccaaggcaccgcaaaagggggacgcgggacagccgnccgacgacgggacgcaaccggacgaaccgacgccgacagaacnnccnccaacgaaaacaaaaccgggaaaacaaggagngaaaaccgcaacaaagagcgcccgnggaaaacanagaagaaaccgggcagcgagaaagccgcgaacaacaaaggcaggcaaaaagaggccccaaag

SEQ ID NO: 27469 - DNA, 377 bp, Gossypium hirsutum
  Clone ID: LIB3166-049-P1-K1-H7
ttgaaagtggattctcttcaacagagaagaagtaaatctatggcttatggttggattcattcaagaagctatccattatctacgtggtccaaaaacaaggttcaaggaaacgaagtagctttttctttaggttatgggttttcaatttgcagaactcccaatgttaaatgttcacaaaagctgggtgaacaatcactgagcatttccagagctgttgagaagaaaccagtgaagaagtctggaaagaacgagcatcacttgtggaagaaaagagattcagctggctcaggacaaaaggcactcaatcttgttagcattgtttctcaacttcccagtgaaaaagagactgtttatggagcattggacacatgggtagc

SEQ ID NO: 27470 - DNA, 187 bp, Gossypium hirsutum
  Clone ID: LIB3166-049-P1-K1-H8
tcggtcaagaaagattttcaagcaaacaaaaatccccaagctaaatccaggaggacggacgattccgtcttacatgaaaaccatttacaggctccctaaaacgtatcttagagaacacgaagtttgcaacccattagggtcagcaaaaccagtttgcaaatgtacaggatggggaattacaaaggga

SEQ ID NO: 27471 - DNA, 359 bp, Gossypium hirsutum
  Clone ID: LIB3166-050-P1-K1-A11
aacacgttcatctatctcattttttagccgagaataaatcttcgaaaaaggcaaaagctagttttaacatctcctctattgtatgagtccttgtgccattcatcctttctaattcattaattcgaccgcgattctaccgttgaacagccattttatgaaaaaaactggtatttttatctccatttttcagccagttgaatcgagcttgttgctctcaaaataattcttcttgatcagcctgaagattaagtcctacctgtacatctgtaatttcagcaagaacttcattagttggctcctgatcataaaggtaatttaatttttcctcccgttccaaacgacttctctttgattctcta

SEQ ID NO: 27472 - DNA, 369 bp, Gossypium hirsutum
  Clone ID: LIB3166-050-P1-K1-A3
cgaaaataccgggatggaatcgacaatctcttggttcttttgattggtggtattccaattgctatgcctactgttttgtctgtgaccatggcaattggatctcacaggctgtctcagcaaggtgctattaccaagcgtatgactgccattgaagaaatggctggcatggatgtcctttgtagtgataagacaggaacattgacacttaacaagctgagtgttgatagaaacttgattgaggtgtttgtaaaggatgttgataaggaacatgttgtactgcttgccgcaagggcctctagaactgaaaatcaagatgctattgatgctgccattgttggaatgctcgctgatcctaaggaggcaagagct

SEQ ID NO: 27473 - DNA, 325 bp, Gossypium hirsutum
  Clone ID: LIB3166-050-P1-K1-A6
gaagcccaaatttcggggaacgaaccggcgaccagaaaaggggggccaccgaggttagcgatgacccaggccgggagacgccctgagcaggcggcgagggccgacacccgcgccgggacaggaagcagaaggaacaacgcggcgccgacgagggcaagtacaccagacagtacgaggaccgcggaaacgacttccgggacacacaaggcgcacacaaaaccgaagtgcaagaggcataaaggacccactggacaaagcaaggacacgcaagcgcaacggagatccaacaacagggagataacaagagacagccagggaaagagca

SEQ ID NO: 27474 - DNA, 375 bp, Gossypium hirsutum
  Clone ID: LIB3166-050-P1-K1-A7
cgcttgcaacggcggcggccgtctttttctcctccctagccacctacaaaaaaagaagagaaaacatcaaaataaaaagggtttttcaacccctaaaaatgagcagccaagaaaggagaagcaaaaaaaaaagattttttgagagaaaaatttaaaaaaaacagcaaccccaccgtcggctgtcgcaccatcaccacgacaccaccgtcaccgccatcccaacgcttagcaaaacaaaccaagaagcaaagaaacaacaaaaaagaaaaaaagagaaaagaaagaaaaagagcaaagaagaaaaaagaaaagggggaaaggggagaccaccgtgctcgccgtcgtcagccgccgctggacagcaggtcatcgtcg

SEQ ID NO: 27475 - DNA, 332 bp, Gossypium hirsutum
  Clone ID: LIB3166-050-P1-K1-A9
cccacgcgtccggatagatcttttttcaaccacgcctaataaccgctcgagtgtttttcataaaaaaaaaaaatacccctttctttcaccaatctattcaaccttctatttgccaaaaagtttatgcacatacttatggttgttcttgttgctactggtaaaaccaccattctttacaagctgaagttggtagagattgtcactactattcccaccatctctttcaatgttgagaccgtttaatacaagaacattatcttcactgttttgtattttcacagccaggacaagatcctaccattatggatacatctattttcaaaacacgcatt

SEQ ID NO: 27476 - DNA, 204 bp, Gossypium hirsutum
  Clone ID: LIB3166-050-P1-K1-B1
gccgctgacagaacattggataagacttgaggcatgagctcaaaggacaaacgggcgcttgaggaagcacggatcaagactctgagacgggatatcgctgcacccctggacccttgaagatttgctgatgcactagagcagatctatttgtatcatgactgacacctgtgacttgtttcccacagcagggaatttcaagagctt

SEQ ID NO: 27477 - DNA, 323 bp, Gossypium hirsutum
  Clone ID: LIB3166-050-P1-K1-B10
attattatggtggataatagcatcttaataataaaattgaaaaataattttggaggtattgagaaatatttattgagaatacatttgacgtaatacatatgacgtaaaaattatttaaaaaataaaattttaaaaataaatatggaatatctaagatgtattttagtagagcttcgttaatacctatacggctatacctattatgatgaaccaacccatgaacatcaacccacttgccctgacttactttgactgcctgttcttgaaaatttaacccgaaataagttacccattttgacctaataaattagaccgtactatat

SEQ ID NO: 27478 - DNA, 365 bp, Gossypium hirsutum
  Clone ID: LIB3166-050-P1-K1-B12
caaaactaaaatccttaacccaattcctattgacccaataggcccaagagactaaaccaattcagaagccctagggtttctaaaccatcctagcgccgcacccctacgtgcctcgtcgacacgtccaacgcccgaagctcagcttctcttgtcccgttgcaccaaaatgaaagccctccatcattgaccttccttcttaacctgcaaacacactaaaaaagaatggaaacaacaacacacaaagacagacagaaaagaaacgaacaaaaaagaactaccatgtaatcggctataaaaagccccaagtattatcaatgtaatttttttatagacatccgaattcaaaaaatatcaattgaaacaga

SEQ ID NO: 27479 - DNA, 348 bp, Gossypium hirsutum
  Clone ID: LIB3166-050-P1-K1-C1
gttttcccaaatatttcttttttaattgctgttttagtagtgtatggttgagggcatggaaatctatgcctaattttggcctatgggtaaaatatgatatgatgcctcagcctttgataggtgccgcttggtttcactagcacggtggatgtgggtggcacatgatgacttttgcaactcctagaagcaagaccaattcatggtgtttgcttcaactttatttcttttggtcaaaattgtcagttttcctttggttcttttggtcgaagaggattccttcacgtaattcaatggtcttcaagttcttgaataccattggaatgttcttaggtgtttttaaaaacaact

SEQ ID NO: 27480 - DNA, 261 bp, Gossypium hirsutum
  Clone ID: LIB3166-050-P1-K1-C3
ggccggcccacgcgtccgaatgtactcaactgtctggaaatatcattttaatctttaaagtggttataaaaggtcggtgcatgtttttagagtaaaaaaaccattggaatttcagttaaaaaattcaggtgaaaagtgaggtgtaaaacgggcgaaagctatctactaatgataagatagtgtctgattttgtggccacagcttgtatcttctacccaaccatttttctgtaaatttcttttttggttacttcgttacttg

SEQ ID NO: 27481 - DNA, 357 bp, Gossypium hirsutum
  Clone ID: LIB3166-050-P1-K1-D11
ctcttcacttctaagttccttctctttccatctctcattttctccccaaagctgcaaaatgaaggttagattttcatgtctttaatttgttattaattttatttatctagataaaataatacgtactcctttcattttcttaaatgtcgacttaaaggttttgtttttcgacagaaaattgtgttgaagttggatttgcatcacgacaaaagcagacagaaaggcatgaagatagcctctggtctttcaggtattatatctattaacacattctacaaaccctaaatcttgaaccttgcaaaaaaaaaaaccaactgtttttttttttttgtgtgtaggggtcgagtcgtttgcaat

SEQ ID NO: 27482 - DNA, 364 bp, Gossypium hirsutum
  Clone ID: LIB3166-050-P1-K1-D12
gaactgtttcggaaaagcccttcaacgacaagaggaaaaatggtggcttcccgtacctcgagtacctccaggaggcctcgatgatagttcacgaaagaaattgcaacataaacgggattgcacgaaccagatactaaaagctgcaatggctatcaacaatgttagtcttgctgatattgaagtccccgaatcgtatttggaagcacttccaaagaatggtcgagccagtttaggtgatgtcatttatcgacatatttcatcagatatgtttacacccgaatgtcttctcgattgccttaatttgtcctccgaacatcaagcgatagagattgccaaccgagtggaggcctcgatgtatttatgg

SEQ ID NO: 27483 - DNA, 298 bp, Gossypium hirsutum
  Clone ID: LIB3166-050-P1-K1-D2
aaacatggaaagaaaatcaccgttttggttgaagaagtgaaggcttttggatactgggggagcccttacagatacagggcagagcttgctccgaagctgaaaggggtgttttatgagtacatgaatgaggatatctgtgggaccatgagcgattttattttgaaatacgagccggttcataagaaagtcccgtttcttcttgacaatgggaaaccatttgtagagacttttgctgtactagcattcactgaggaagcttagtaagtattatccctattttgcccaagattcttattta

SEQ ID NO: 27484 - DNA, 268 bp, Gossypium hirsutum
  Clone ID: LIB3166-050-P1-K1-E10
acctttccctatcttacactatttctctctgttacaagataaatagctctggtggctttatatgtttcgggcgatcctaaccttatccaattcctaaaaaacaactctactctgtcttgatactcgtctcggtttaattccaaagtggttggacctttctcagtgacactacgtttatagtaccgaattattttttaacacagatcattggaaggtaactgtatgatattttcctacaacttcttctgatctctaagaaatttttatt

SEQ ID NO: 27485 - DNA, 381 bp, Gossypium hirsutum
  Clone ID: LIB3166-050-P1-K1-E3
gaaatcccggggcgagccacagccgtcgcaccatatatcctggtttaaggttttcttttaaataatgttaacaggcatgtctaaggggcgcatatatatgtgtgtatttatgtatatatgaaaagtaagctctgatatatataattattattttggatgccaaaaattttaaaaattgtttgtttcaaaaaataaacatataattaattaacggatatcaaaaataaaaaaaaaaaatatggggcggccgttctagaggaaccaagtttactaacgcgggcatgcaacgtcatagccttttattggggtaacataaatgtaatggattgtactttttttaacaacttaatccagtgtaaaaaccctgtcttaccccaattt

SEQ ID NO: 27486 - DNA, 281 bp, Gossypium hirsutum
  unsure (1)..(281): unsure at all n locations
  Clone ID: LIB3166-050-P1-K1-E6
gggggggggaaggcgacggaaaacncnggcgcaaacagggagcgngaacgcgggggaaggggaagaacccgggggggggnaanccgaagggcgaggggaagaaccagaaaggaccccaggacagagcaaaagcaagnacgaggaggagaacaaggacggcggcagcagccaagagggggaaaaagggcacaagaaccancgccgaggagagcgagaagacacgggagaagacgagcacgggaaagaggnagggaaacagaccaaggggagggggggaagga

SEQ ID NO: 27487 - DNA, 217 bp, Gossypium hirsutum
  unsure (1)..(217): unsure at all n locations
  Clone ID: LIB3166-050-P1-K1-E7
gaaaccgcggggggacccacgcgaacgcggacgcgaggacggacgcgaggggaccaaagcggaagangggaagccaggggggggcaanaaacacggggggaggccggacccgggagaccggccaggccaaagagcgccaaggaagccgccgacaaggcaacaagaagagccaggagcaacaaaaaaggcaacggacacggaagaacggaagagaaaa

SEQ ID NO: 27488 - DNA, 318 bp, Gossypium hirsutum
  Clone ID: LIB3166-050-P1-K1-E9
ccctttttaaaaactacacttttatttcccgtcccttgcttcttaaccaaggtttatcgtgaaaattcacttgattttcctggaaattatctgttaattccagaaagttttgctcactgattagtgacaaagatttgttgcaatcgttcgtgccatatagtaaacacgattggctcaacgtatttcattgattagatagacggcggcagcttcttcgatgacctcatcgacttccctaacggagacgtacaagactacgtcttcaccggcgtcatcaacgccggcgtgttttctactatgctgacaactcatcccgtg

SEQ ID NO: 27489 - DNA, 259 bp, Gossypium hirsutum
  Clone ID: LIB3166-050-P1-K1-F10
ccttaacctttcttatcttccaaactaaaaccaaacaaccagctcaaagggggggaccatggccttgcgtcttagcaacaattttgttggaatcctcatcttcataaccttcctgctctcgatccccattcttcggagccggcttctggcttattcgagatggcgttgacggaatgcgaacggtttgtggacaagcccgctatcgtaattggagtcttccttatgcgcgagtcacttgttgtacaaatttgttcgtgct

SEQ ID NO: 27490 - DNA, 276 bp, Gossypium hirsutum
  Clone ID: LIB3166-050-P1-K1-F11
ctcaaaacaagatttatcagttcaatggtgcaaatgccaaaattcaagaaggggcaaaggctttagaagttatgcattttctaaaggaaaagtgccacgagggaacgtgctatgttgcaatatgtggtgatgggaaattggtcacgtagtctgactcatgttagttctgggtcctttttggtgattctgtttcaataagcatatttgttaccagtgaatttgatgcaattcctgttacatctcctggtaatatttttatagctttatctttttgtg

SEQ ID NO: 27491 - DNA, 361 bp, Gossypium hirsutum
  Clone ID: LIB3166-050-P1-K1-F12
gcaatttgaagaaaaaagacaacattgcattaaattcgcagaccaattctatcccccaataagagcaggaagtacggtgattgtcactactcgactcgagaaagctgctcttatgatggctacaactcctttctatcgcttgggatgtttgtctgatgatgattcttggtctttattcaagcaaagagcctttgggatgggaatgaatggaagcaacgcgaacctggaaaccactgggaggcaattagtgcagagatgtggagtggtaccgttggcagttaaggccataggaagcatattgcggtttaagaagtcaagaaagtgaatggttacatgtcaaagatagtgagatatgggattt

SEQ ID NO: 27492 - DNA, 365 bp, Gossypium hirsutum
  Clone ID: LIB3166-050-P1-K1-F2
gccacgcggtcggatgctgtggtgcatatcgaattactgtataatgctcctatttattttacactttgggacatacatgctcaaaaggacatatacatgtcccatgtaaaagtggagactctgcaaggtcgttcttgcttaaggcgaggcctattgagagtattatttactatgtgggttaaaagatgcaatcataactgcaaaggctggcggaacgggttgcgccaatggtgcataagcaggtctcaacatacttcgcggcaaggatggtgtcaggtggcacttaacccatcaagtgagacgataaggctcccatgtagcgtaactgatgccactgagtgtcacacttacagacactggggagc

SEQ ID NO: 27493 - DNA, 343 bp, Gossypium hirsutum
  Clone ID: LIB3166-050-P1-K1-F3
ctggagagtctcttcctgtcaccaagaatccttcggatgaagtgttttcgggatcaacctgtaaacagggtgaaatagaagcagttgttattgcaactggtgttcacactttctttggaaaagctgcccacctggtcgacagcaccaatcaagtgggacacttccagcaagtgcttactgccattggtaacttttgtatttgttcaattgccgttggaatagtcattgagttaatagtcatgtacccgatacagcgccgcaagtatagggatggaattgacaatctactggtactcttgatcggtggaatcccgatcgctatgccaaccgttttgtctgtcac

SEQ ID NO: 27494 - DNA, 243 bp, Gossypium hirsutum
  Clone ID: LIB3166-050-P1-K1-F5
aacaaacgtccggctctatgcctttgacttggaacatgaccttcaaaacctagagaaccttatatggtggggctttggacatatacaacgaaataataggaccaaaggaagatgaagacaccaacatgggaaatgcaaagcaggctgcaacaaattcaatgcttaccacattaatacgaggagagtcgacgtgcttacaattgcttgacagcatatgcatgtgaaacaggacaatggtgtgca

SEQ ID NO: 27495 - DNA, 319 bp, Gossypium hirsutum
  Clone ID: LIB3166-050-P1-K1-F8
cggacgcgtgggcggacgcgtttgtttggagaggaccaaaaaggaggagaggggggaaggtattatgaaaagatacaccttaaactctgtaggagctactagtttgaatactaaagtattccctattaactagtttttggacaattgtaatttttctacaatcaccttttatgacctggttttgttttacgggatattggttccaaactcctttctttttctttattcacctttgttgccatcatttttttttgtggcttgtttatttttgcaaatctttttctgttaatactactatttatttttgtcacaattctat

SEQ ID NO: 27496 - DNA, 278 bp, Gossypium hirsutum
  Clone ID: LIB3166-050-P1-K1-F9
cccacgcgtccgctggcttttttatttgaactgaggattgaataaaagggcgatgcattctggggaatgtgtgcccaatatttgtagtgcaagcaggcttatggaagcattatgtttttgtagagaaaatctgtttccccttcggtttaaatttggtgcatatctagttatagaaaggatctgaagcattttgttaggactcatttgtttgcataaaacattggagagtattattctacttaaattctttgtcatttcttctagcagtgcctttgttt

SEQ ID NO: 27497 - DNA, 366 bp, Gossypium hirsutum
  Clone ID: LIB3166-050-P1-K1-G5
gccgaggtcaacttttatggataaaaccatggacgcaactgaaacccagttttcggtgaggcctatccaattggaagcaattagaacttgcacggaagctgaattctgtccctcaagcaggttcctgacaaatgaagaattggaggcagcagctgttgctctgcaaaagtgaagcagtttgcaggtctgcatgatttttctcaagattatcatgattaatgaggtaaatccgaacgaaagctgtataagtttaatcaaaatatttcattgcttggaaactggaattttatcaattaacgcctatgttcatcattagccatggcagtgaatggcattgaaagaaatgttgtttccagttgaaaatga

SEQ ID NO: 27498 - DNA, 301 bp, Gossypium hirsutum
  Clone ID: LIB3166-050-P1-K1-G6
gtctgcctctcgaggaccaactcctataccatccaattatgaggaggatggtacaggcttttgtaaaccaaggttccattaccacgcacaaggtggcgcaggtgcagcccattatccggctcctaatccgggtatgttctctcccaatgggtctaaagctaatacaaagaagcctaacgatcaggctcagcaaaaggctgaagatggtggtagggatctccatatgtttgtttggagttcaagtgcttcttcttgtttccgaccgtctttggtgtgtggtgggtggccattgaaattatgg

SEQ ID NO: 27499 - DNA, 143 bp, Gossypium hirsutum
  Clone ID: LIB3166-050-P1-K1-G8
aagcccttaaactattgcgatactttaaatcgggaggacgaggcttaaaagggggggatggtagcctgggctgtcgctgttcatggtgtcactggtgtcttccctaattcatcctaaggttagacaagacgaggtttatagac

SEQ ID NO: 27500 - DNA, 149 bp, Gossypium hirsutum
  Clone ID: LIB3166-050-P1-K1-H10
ttcttcttcttctactagtacgactacgcgttctttagcatattattctcatccgctgcccaaaccgccagctgggtttgtggttgacgacactggtagggttctcatggcctcaaaccaagagaaattgccacccatcggttggattt

SEQ ID NO: 27501 - DNA, 160 bp, Gossypium hirsutum
  Clone ID: LIB3166-050-P1-K1-H4
cggacgcgtgggtgaagatggaggcagctaaagtccattggtcctcaatcttgaatgggcttatggtgatcactttcctcgccgggatagtcctcgtgatcttcttaaggactgccaagcggtatctgactccgtctgaggagcttgataaggaggcgca

SEQ ID NO: 27502 - DNA, 143 bp, Gossypium hirsutum
  Clone ID: LIB3166-050-P1-K1-H8
acgtccacttggtggattgcaatttttggcacggcttacaatggccatgggggagacaagcccgtgcatgacggcccgaaagaaccgctccactacggcttttcgacgttggaccgctatggccagacagacgttgctcgctg

SEQ ID NO: 27503 - DNA, 286 bp, Gossypium hirsutum
  Clone ID: LIB3166-050-P1-K1-H9
cggacgcgtgggttctgatactgtcatttttatgggttttaaaggcattcgtggaggtgggttgcacccttggaagtgctttttttgtaaccatcttacttatacgggggatatggactggggtaacattcatgcatgaaagccttgtccaccgtaggattaatgttccctttgatgacccactcttatggaatggtgtacaacctgtcattttgaaacagggttatttacacatttacagacttaaactgcattttcaaagaattttcttcagccttgaatatga

SEQ ID NO: 27504 - DNA, 397 bp, Gossypium hirsutum
  Clone ID: LIB3166-051-P1-K1-A1
gaggatgcaaacatgaagggaggtaaatccaattctgttgccatgagcgccaagctctccatgcataagaaatcaaccacgaaagctggcaagaaatctgtgaaggcagctaaagatccaaacaagctaaagagggctgctcgcgactggattaatttgatggaggatgtccctgagcactacacgaaggagctccctacaaacaagtccgctggtgctgatgacaaagccaggggagataaatggagcatcctctttgaagctgaaaagcgaccttattttgatatggccgataaacgaaaggtcttgtatgaaaagaacatgaacgcctacaataagagacaggcctaggtgcctcaagaagatggggaggaacttgtcaagtttgtgtatgcag

SEQ ID NO: 27505 - DNA, 280 bp, Gossypium hirsutum
  Clone ID: LIB3166-051-P1-K1-A12
tgccaatatcagtacaaccatcctttttgataaaatctcacctataatctgtgggggatgttcatattttggtccctctgataattttgctaaacctaaaaaggttcaaactgctgcactttttggactgtgtgccttaggtcttgcctctatctaggaacaaggatttgtggtgcttatcaattcatctttgttgttgtgaaccccatattattttaatactctatttattttgattttacagaatttgttaattccaatacactactacatgtcattt

SEQ ID NO: 27506 - DNA, 191 bp, Gossypium hirsutum
  Clone ID: LIB3166-051-P1-K1-A3
cttttcttacactcaaagccctttattttctaaggagggataaaaaatgagctggacaggaggtgattggatgtgtgcatcattcctacaccataatttcaaaaagagaagaagcttgtcaactcatcggttattctaagcttggtggtcctgacttatctacttacttgtacaataggaccgaattcttt

SEQ ID NO: 27507 - DNA, 367 bp, Gossypium hirsutum
  Clone ID: LIB3166-051-P1-K1-A5
tttcgtcacatccgtttcttccttcgtttttttccaacacccttcttcttctatcaagttagttttcaaaattgcttgccacaacaatcccaactctttttttcatcatttcaacaacacccaaaattcctcttccattgctgattcttactataatcttttttattgctccgattcttataagcttaaatcttgctactttaccaaattctctaaatcccattcttcttacttacttaactactctttcttaatcatctccttttattcacaatcacaattttttcaccctttctttttaaatctaattttgtttcctcaatctcaaatcacttattcatttctagcatattttttcaaaattcat

SEQ ID NO: 27508 - DNA, 174 bp, Gossypium hirsutum
  Clone ID: LIB3166-051-P1-K1-A7
ccgggagtcgaccggtcgccccacgcgttgcgtcacgcgtccggccacgcgtccgttttacgcgttcgggctacttcagtggcttcggtgaaagcttttccctgtttttgtgtggttattaaacattgtttactttcactttagctctgatttctccttcaccaacaacaaaaa

SEQ ID NO: 27509 - DNA, 247 bp, Gossypium hirsutum
  Clone ID: LIB3166-051-P1-K1-B12
cccacgcgtccggtcggcgtgtatgtgtctgtggtacgaacagattctacagggtggggcatttaattcagtgtgtggtgggagaatttgttgactcggattactttccgtggatgtggtggctgaatcagatgtatggcacggaaacttgagtagaaaagatcttctatttacttgacatgtagtactatctatctatttcctctcatttttctccgacatgaactaattctattcattaagacat

SEQ ID NO: 27510 - DNA, 302 bp, Gossypium hirsutum
  Clone ID: LIB3166-051-P1-K1-B3
cccacccttccggctgaaatggctggcatgagccatagaatacgagagagaactgttgcggttgattctgcagggaacaccactgttgctattgaaaagggttttgccattggttcagcagccctggtgttccttgccctttttggtgctttttgtgagccgtgctgcattttcaacagttgttgtattgacccctaaagtttttattggttcgcttgttggtgcaatgcttccttactgatctctgttatgaccattaatagtgtggtaatatgcacttttttatatttgtttgaggaaag

SEQ ID NO: 27511 - DNA, 234 bp, Gossypium hirsutum
  Clone ID: LIB3166-051-P1-K1-B6
cttccaaaactttctagcgtatcccactttatttttatcatgttatcctcataacaatgtttttcgtgattttataacttaggtgtttcgactcatgtctatgtcttctgctgtattgtaagagagaactactagcttacatcatatattgtccatattttgtagtgttcttcaatttgtcatgttaaaaaatggggtgcttgatggtcaagcatttctatttatataataaaa

SEQ ID NO: 27512 - DNA, 388 bp, Gossypium hirsutum
  Clone ID: LIB3166-051-P1-K1-B8
cccacgcgtccgcccacgcgtccggctatattttagccttcgttcacgacgagaggacttgtaaatcggaactgcaaattgtgaacgccatggacttaaagctagaagccacggttcaacttccgtctcgagttccatacggttttcatggaacattcataagctcaaaggacttggaaaaacaggcctaatttcatcagccattttgtaaaaaagggagaggttttaccagagggatgctttgcatggattgtccccggaatctcttcctctgttttaaaccctgttttttttttagtccctacacttttaaaaatctccttttttggtcactattgtaaagtgaaaaaggttttggggataccagcttgtagcttttgctttagct

SEQ ID NO: 27513 - DNA, 369 bp, Gossypium hirsutum
  Clone ID: LIB3166-051-P1-K1-C10
acgttcgctgatgctactttcttcttttcttttattgccatctccatggttcaaacgctggttttataatcacatggacatccatatcaccattattataacaaactttattgacctgaaagtctcaatccttaccaatgtccatctcagtgcacaattatttttatccatacacattaccttaaaccatacatgttcttttttcacaaattattcataacattccttttttttcctccatattattatgttaacaatcaattattccctatttacaactactttaaaaccaataaattactccctaaattcctttaaattactcaaaataaaacctcttttttatttttttaacatttttatccctta

SEQ ID NO: 27514 - DNA, 385 bp, Gossypium hirsutum
  unsure (1)..(385): unsure at all n locations
  Clone ID: LIB3166-051-P1-K1-C11
ggggaaaccgtacaagttactaatgccagaaggtctggatgttcagaaaggaagtgttttgtccaaggttgccttggtgcatctgcattgcagggagcttgtacttccaaatattgcaaagttccttccactgttgagtaataatgcagaaaccctttctcctggactaagtggcaagcctgatctcctgcgctttgtagcatcaatgcctaaacacatgaaaattagttggaacttgatgtcatcctatttagtgtaaatatccaagatttcaactttgatggtctcatctttacattcattgattttatcttctgctgcgacttcaattttgttaagatcattacaaatttggatctaggttgnttttgttcttttttcagtg

SEQ ID NO: 27515 - DNA, 348 bp, Gossypium hirsutum
  unsure (1)..(348): unsure at all n locations
  Clone ID: LIB3166-051-P1-K1-C2
aaccacgcgtccgcccacgcttccgaaagaatttcgccactgtctgtcaaaaaaaagcatgaacatttgcaaactggggaggatcaactgcnaccgaggtgttatgcttgctgatgggaaaaccagatttttcatcaacggcaagcctatctaccactttgttggaacctcgacctttagccaatatactgtcgtccatgttggccaggttgccaagatcagtccaaccgcccctcttgataaagtctgtcccattagctgtgggatatgtacaggttttggggccactgtgaatgttgctaaacccaaaaagggtcaaactgttgcagtttttggactgtgtgccgt

SEQ ID NO: 27516 - DNA, 216 bp, Gossypium hirsutum
  unsure (1)..(216): unsure at all n locations
  Clone ID: LIB3166-051-P1-K1-C4
tggacgcgtgtgcgcaanttttgttgttaattaatcgcgatagattttgctctaggtaggtacgctgatatggagtggagatcttaagtttttttgaatttgagatgatttgagccgtaagaggccttaggtttttaatttttcagtcatcaatttttggggaaattcttgcactttactgattctaatgaattttatagatcggtggtttgttct

SEQ ID NO: 27517 - DNA, 363 bp, Gossypium hirsutum
  Clone ID: LIB3166-051-P1-K1-D10
cccacgctttcttccactctttttttgcattgataagcctttaaaaaaggggggttcatatatttggcgggggagcttgaaacattcaaattgtttaatttattatataattaaatcccttatcccaatggaaaaatgcaatgtataaatgattattgatgtgtgtacccatatggtatatacgatagaaaagtttctttcatttttttatttgcagatttttttattataaaataatcattttaaattttatgttattgttttttagatgatcacctatatttatttttatttatttttttttttactcttactttaaatttttttcatattctttttctctttaatattttttatttttta

SEQ ID NO: 27518 - DNA, 285 bp, Gossypium hirsutum
  Clone ID: LIB3166-051-P1-K1-D11
ccagattgtaaactttatttttgcttgtagatttagtagccagattttggttgggaaaaattgctataaggggggcagcaaagcataagctctagtaattctatcaaaaacttataatagtttgtaggcgctacgtaccgaggattcgcccgaagcttcggccctcacgtgaggaaattattgtgaggtgctagtgctaagggaatacgaaggatttttgcagcatcttctactgggaagctcaagagcaaagatggtccaagtttgatatgggaaaagagaaag

SEQ ID NO: 27519 - DNA, 295 bp, Gossypium hirsutum
  Clone ID: LIB3166-051-P1-K1-D12
cccacgcgtacgactcactcttcattcccatttccaatctccatctcccgctgggtttttccgatcagagagacatagcaattggccggcccgaagaggcgactcaccccgatgctctcaaggcagctttggctgagttcatctcaaccttgatcttcgtttactctgagatcgggctcatgaatggtttttaacaagtagaccgacaacggatcatcaaccccggccggtctcgtagccgtcgctctagctcatggcttcggtcttttcgtctctgtcttcgttggcgccaaca

SEQ ID NO: 27520 - DNA, 256 bp, Gossypium hirsutum
  Clone ID: LIB3166-051-P1-K1-D4
cggacgcgtgggtttttttactgatagttgtttcccctccttatatctatagaggaggtgtttccataatggatggtgtaggaatcatttgttgcatttttttcgttatttattgcatcacgttaatggcttgcttgagtttttccaaggttcttattagttatatcaatttttggttattatttcttgtttgaagctggttatttattattgtatcatgttgatcattatatgtatgctttctcttatcaaatct

SEQ ID NO: 27521 - DNA, 130 bp, Gossypium hirsutum
  Clone ID: LIB3166-051-P1-K1-D5
gtgacctatactattcaggcttgttttcttatgcgcttaactaaaacattgtatgacggaggtaacaatcgacgcggcgaactgttaccatgccagacactgagccgatcgagcattgaacccaaccatc

SEQ ID NO: 27522 - DNA, 196 bp, Gossypium hirsutum
  Clone ID: LIB3166-051-P1-K1-D9
tttttaaaatataataaatattttctttcgcaatgagcactgctgctcaggggtttctttgcaaagcgtgcggaggcatcacacgtctttaatccactattcttagaataagtggtagtggcaccaccccaaaagcttgaagaccgtattaagattctctctcactgctttattcctcactgacttatacttctgt

SEQ ID NO: 27523 - DNA, 387 bp, Gossypium hirsutum
  Clone ID: LIB3166-051-P1-K1-E12
agtagagataggcagaagcaaagtgtaagattgaaaccatgttggactctgtggaagcaaacaactttgaggcattgccacttctgtcattgaatcatgtctcattgttgtgtagatcagtctgggattcagtgcggttctatgaagatgttttgggctttgtttccatcaaacgcccttcttctttcaagttcaatggagcttggtaaccttactgctctacccttgtttagtaaaatccagtgttgaatgaaacaggatactaactgaacaactgatgcaggttgtataattatggcattgggatacacttaattgagaatccatcaatcgatgatttcgacactatcgttgaaccttgaccgatttatccaaaggataatcaca

SEQ ID NO: 27524 - DNA, 185 bp, Gossypium hirsutum
  Clone ID: LIB3166-051-P1-K1-E6
tcgcccacgcttccgcccactcgtccgttcacttgtattgttcaacacaattggttgggggggctatgcttccttgatgtccgcaatgatcaccgtttttgttaacgtaggtgcatcattggtttcaatctatggtgtttgattagtggtgaaggaagttccttttactagatggttggtttata

SEQ ID NO: 27525 - DNA, 386 bp, Gossypium hirsutum
  Clone ID: LIB3166-051-P1-K1-E8
gctgctgttattatacaaaagcagattaaaggcatgaaagctaagaaaacattcgggaacattagagatgcatcaattgtgatacaatcagcaattcgtggctggtcagtcagaagatgctctgtagatattggattcaagtctggggtccctaaggtggatgaaccagacgaggtgctggtcaagtcatcatttcttgctgaactacagcgccgagttcttaaagccgaggctgctctgcgggagaaagaagaggagaatgatatcctccaccagcggctcctacaatatgaaaaccgttggtccgaatacgagctaaaaatgaagtccatggaagaagtttggcagaaacaaatgaggtcactacaatccagcctctccattgc

SEQ ID NO: 27526 - DNA, 290 bp, Gossypium hirsutum
  Clone ID: LIB3166-051-P1-K1-F10
gcgtccggaaaacaaggcatctcccatttattatctatctaggtattatctcttttggtaggtttttacattggacgtactgtccactacttccttttgcagcagaattcaaacttaacattgtgtgtaaccattccacactctctagtcacaacttccattattatctttagactgcaacaactaatgtaatgttattaaatatttattcaaacactggtgatcctcaagatgttttggacacagatcacttcttgacttatatttagtaatcaaccatctttattata

SEQ ID NO: 27527 - DNA, 197 bp, Gossypium hirsutum
  Clone ID: LIB3166-051-P1-K1-F4
aaaacaaaaaaacaaaacctttgtttgctatggcttgtcttccagaaaccttccaatctccaaacttagggggagtctggatggccgattgaatgcggatcggcgcgtttagatgactttttgcctcacgctattaaatcggttcagtaggtattatcactaccaccgatgttttacactaaccgtatgtaaacgct

SEQ ID NO: 27528 - DNA, 259 bp, Gossypium hirsutum
  Clone ID: LIB3166-051-P1-K1-G2
caagattaaacctgcattagagcactatgggtgtttggttgatctactagcccgggcagggtttattgtaggagcggttgaccttgtatcaacgatgcctatgagacctgatgcagtcatctggagaagtcttcttgatgcttcttctaagaagaattcaagtgttgagctaagtgaagagttggccatggcaagtcgttgaatcggaaggagacattgacatgttggttttaatgtgctgatatcaagagtttatgca

SEQ ID NO: 27529 - DNA, 249 bp, Gossypium hirsutum
  Clone ID: LIB3166-051-P1-K1-G8
ggcattgaagatgtggtttgcctaatcaagaattccgctaccttatctagggggtgttatacctgggatggctctcaaatcctcattgatattcctactttgactgataatgataaagaggttataaacatttggggcgttcaaaacaatatatacatcctttctttgtcatatacctaacattcaaaagatattctttaagcactttcttatctttccaaactgggtaagctcaaccagactcaaatt

SEQ ID NO: 27530 - DNA, 185 bp, Gossypium hirsutum
  Clone ID: LIB3166-051-P1-K1-H10
cagcagccagactcattgttatcgatttcagttagcctcgaccccaccatggatgccatttttagattcacaaccggtctttccaccaggtcaaccgccagacaacgcgaaaacaagcacctacgcgacgtcgtcttcgttgacggatccgatcgcatcaaattcgcaggaagtagcccccatcc

SEQ ID NO: 27531 - DNA, 260 bp, Gossypium hirsutum
  Clone ID: LIB3166-051-P1-K1-H11
acgcttaccttctcttggccaattataatctttgaaacctcacttcaattattgactgtagttttaatattcggggatgactactaccgtaatgtcaaatctacaactaatctatctcaatctccttgaaatgctaaatttttgagaaatattacaagatgtgtatcgaactggtaatgtctcaatttattacaccttttccatacttctacacattaactaacccatataaataattgtccaaaactttattatcctta

SEQ ID NO: 27532 - DNA, 257 bp, Gossypium hirsutum
  Clone ID: LIB3166-051-P1-K1-H6
caaacgggccgtgtgtaaaatcctcatggatattcatgtcatccgagcatgcatcagcagcaccatggcacggtggttggccaataatcaaccactcttgttcctgcaatcatcacctcaggtgactctcgtggagatgatggcaaataatgactatctcccctaccatctttcaaggctaactatccctccttaagggacgggacttttgccaacaaaaaaagccctactggggagggtttttgcaaatggaaaaa

SEQ ID NO: 27533 - DNA, 380 bp, Gossypium hirsutum
  Clone ID: LIB3166-051-P1-K1-H9
cggacgcgtgggcggacgcgtgggtttttctttctccgtctctgcgaatgggaagaaagaaattcctaaaattttctctttgtttttcagtgaagataatgcggtctttttgagtattttgttttacaatatctctttctgctccttttttttcccaattgagagttattaatttcacgctgtaaagctgctgttagaagggaggtttctagatttggattttcgagttgactgagatacttgaatgacatttctataaaatttgttttcctctatagtgcttggtaatgggaaacaacgatgaatgtatgtttaagtctgacaagttatctttcaccattgccattcgtatcaggccaatattcatgtctttcctgatt

SEQ ID NO: 27534 - DNA, 360 bp, Gossypium hirsutum
  Clone ID: LIB3166-052-P1-K1-A10
cccactcgtccggcacctccacctccacctcaccattcgacctccctctttcaagtgcactataggaacttacagcatcatggatttgtgccagagttattgacttacaatattcttgttagtggattatgcaagatcggtagattaaggtcagcaaggagggttcttaaagaaatgcttctttaggaagaagaagtttgaagagagaattgagctattgttggaaatgaagagtaaaaggtatacatttgttggttttgcttattgcacagttattggtgctctaattaagataggtaaggcgaaacaagtgaccgcattcatggtggacatgactgaaattggtatcgagcttgatat

SEQ ID NO: 27535 - DNA, 313 bp, Gossypium hirsutum
  Clone ID: LIB3166-052-P1-K1-A11
cccttcccatctctctctcattcttctctaacctgactgtccctttccctaaagacgattttaaaacatatttcaccccccccacatcgttctaatacctaatctaccctctctgtaacatcaatcccacagttttgctatacttaacctctatccttatctacactcttactaccaccaaacacacaatgatttcaaagccttttccaaaatataaacatctaccccttcatttattatatctactcacaataatcaaactcaaacattaaactaaatccaattcaagtaaataaactttactcaaattcac

SEQ ID NO: 27536 - DNA, 227 bp, Gossypium hirsutum
  unsure (1)..(227): unsure at all n locations
  Clone ID: LIB3166-052-P1-K1-A2
ggctnnnaagcgattcttgttcgtatatatatatattttttattgtcttacatgggtgcaaatttggggagatgtgtataannnnnaactatttttctctggatccttatatattttgccttacattaatttcttatacgttttgagtattggactctggaaagaatctaataaatgttaattgcccttgaaatcttatgcctttctaataaaaaaaaaaagggctg

SEQ ID NO: 27537 - DNA, 335 bp, Gossypium hirsutum
  Clone ID: LIB3166-052-P1-K1-A3
cccacgcgtccgcccacgcgtccgcgaaaaccaaaaggaaactaaaaaacaaaatgcccggaaagctttcgccaattgacaagcgggagggcgtgagattcatccatcttctaaagcaaaaataatctttacatttaatacaaaacaggggttagggttttttattttattctttgattttaccctcacgttagctagaattggaagacctctagaaggccaatctttcctagtgtttcggttccttttattttctcgtgatttgcaaagataaagtgttagggttaggggtttttaattagcttacaaagtaggacgcctgttcggggggagga

SEQ ID NO: 27538 - DNA, 366 bp, Gossypium hirsutum
  Clone ID: LIB3166-052-P1-K1-A4
cggacgcgtgggtgcatattgggcacgtagctttttgcaggatcttgagagggcgtggccgggatcatttaaggaagcggtgctggggaattggttttggtttagggttccgagtagtagctatggatccaaatttcaggaagctttctgttgagcacattgttgcagcttacaagagaaccaagaaccgagcaattcttttggattacgatagcaccttgctgctgactagttcattaagtactatccccaatgtagaggcttgtggaatcttgaacaatctgtgtagagatcccaagaatgttttttttcctggtcagtgcaaaagattgaaagactctaactgaatgggtttcctgttttgag

SEQ ID NO: 27539 - DNA, 351 bp, Gossypium hirsutum
  Clone ID: LIB3166-052-P1-K1-A9
ttcacgttttaaattaatttaacatttcaaggaatataacaatattaaatctgggagcgattatcaataaggattatataatacatacatgattgcgctttaaatagctttgatccgattaccagtatacgtgcacaaaaagaaaaaaaagcttcatccaccactctaaacaatggaaaagattcagcacaaccatgtacaagcttaaggacttaagcttcatgttgcccagattggaactggtccccaagtggtggcattcttgcattggtttcccgaaatttgggatttatgggggcaccacatgggtgcggtgggttatgctggctatcgagctattttcattgattt

SEQ ID NO: 27540 - DNA, 373 bp, Gossypium hirsutum
  Clone ID: LIB3166-052-P1-K1-B2
ttccttaaccgaatcaaggtgcgatggatgtttcagcaaaagcaatcttaagagagctcatcttgtcatgttgtttggtattgtgtgagctcatgtcagaaactggaatggaagttgcatcggctcgagtgtcagttactcgctaagcttgacaaagaaaggagaaaatctgttacgcctaccatccgaatgatggtgaaactttaccttaggagaaagttgcaaaatgagaatgtcatccctgttacagctatggacaattacaatttggtggaggctttggtttctcacatgtcggatattgatgagaagcagctattgttatatgcgcagatggctaaccttgttaacttgattcttcagctccccaaca

SEQ ID NO: 27541 - DNA, 364 bp, Gossypium hirsutum
  Clone ID: LIB3166-052-P1-K1-C1
ccgctggcctggtttgccaccagctccatttcttcgacgcccactcaattaatgactcagaagcttattcccttcggaggggctccgatggtaccggagatgatggcttctcatctcaatcgatacctgaaacacctccgatctacagtagcggtggtggaaactctgctttctcatcggagcagaacggaaaaggattgaacggagagttcggaggatcggatgggccaatcttgccaccgcctgctgagatggggccagaagaaggctctggtttgagagagtggcgcaggcagaacgtgattccactggaggagaaggaaaagaaagagaaagagactctggagcaaataataaaggaagc

SEQ ID NO: 27542 - DNA, 207 bp, Gossypium hirsutum
  Clone ID: LIB3166-052-P1-K1-C2
aaatttttatttatatatttaagtcatttggggaagaagttatagaaaattttgctaaatattatcatacgacttgtaaaagtacatgaactcttttatacaagtctgagaaattgtatagatacttggagcaagttttaccgatattcgggaacttttacccatataagtctttttctaccgataaaatatatttttacttataca

SEQ ID NO: 27543 - DNA, 374 bp, Gossypium hirsutum
  Clone ID: LIB3166-052-P1-K1-C4
cccacgcgtccgcccatttgtctgttctccttcatatttactttttctaaagagtgatagcttaacaataatcaccacggtatactctaatactgctgttttcattcactcctctctctatagaattgcctcctgaggttactattagctcttattgtttagtgcctacaagtacaactatctttaatcatggatggatgtagtccacttgaagcagacgttgcaccttttcttctgtcgttaaatgcatgatccttaattaaccgtacgttcaaatgcttcaggatggtcctctggttatggccttcaatcattgtaacattataaagtaaaacatattcctcttcttccactggcatgttaaatgtttcaat

SEQ ID NO: 27544 - DNA, 136 bp, Gossypium hirsutum
  Clone ID: LIB3166-052-P1-K1-D11
ccaacacctcttgcctccgagcataggctctttccagagggataggaacgcgtgattgaaaggccccttctccaatgtcacgagcaccggcggcgcttccctttccggcaacgctggctatataaagctacgccct

SEQ ID NO: 27545 - DNA, 372 bp, Gossypium hirsutum
  Clone ID: LIB3166-052-P1-K1-D5
ctttggttccagttgttgcaacaagttagaaagagtggtttacgggctaatttgggcgggaacatgataagaaagtgtgctgcttgggccttacctcacttcttgcacttcctggtgaccagattggcggggaggctcttgggcgtgtattcagggctgcccttgatctcctggttgcttacaaggatcaagttgcagaagctgcaaaggaggaagaggctgaagatgatgatgatatggatggtttccagactgatgatgacgaggatgatggttctgacaaggaaatgggagtcgatgcggaggacgaagatgaagctgatagcatgatgcttcaaaaattagctgcccaggctaaagctttccgcacaa

SEQ ID NO: 27546 - DNA, 367 bp, Gossypium hirsutum
  Clone ID: LIB3166-052-P1-K1-D7
ctgatttgcattccccatcccacttcctattcggactgctctccaacaagccactgcttcaatggcgaatgaatgcaaaccccaccaaattaaccaactctgccagggtttgtttgttcaaaaacccaaggcactctcggaaaatattggcaatggtttcggttctgccttacaatcgagggcaagttgggatgtttaaaagctttctgtgctgcatattcacttttgtagcgcaagaaatcacaagaatatccatattgtgattgcacttttagctggtagatttaggctccaaagttttttgttgaatatcctataaataaatagttacgcataagcgctaggaacttcattccaactctgtaat

SEQ ID NO: 27547 - DNA, 370 bp, Gossypium hirsutum
  Clone ID: LIB3166-052-P1-K1-D9
aagatgtgttgttaggagggaattgtagttacggattggggttggggaaagaagaagaaattttctgctttgaacatattcctggcaaccaaacatcagataccaataatctagttgatggagatcatcgggttagttcttcttcacaaacttcaatggctccaccattaccccattccagtggtccgtcggctatgggtcgccggaagagacgtctatccaccaaggctccaaaaaacaaggaagagatggagaaccagagaatgactcacatcacagttgagcgcaatagaagaaagcaaatgaatcaatatctttcccttcttcgatctttaatgcctccatcttatgctcaaaggggggatcaagt

SEQ ID NO: 27548 - DNA, 382 bp, Gossypium hirsutum
  Clone ID: LIB3166-052-P1-K1-E12
cccacgcgtccgcttatatgctaaaagtacattgttagtaatgagtctaccagatatgaaagcgctctgtgaatcatcaatacattcatgcaaagccttttgaagtcgattagcaatggtttttgcaattatcttataaataactgtgcataaactgataaggcgaaatttttttaaattaataggattagccattttggggattattaccaattgggttttgttaatatcctccaaaggtttaccattattaagaatatctaaaaaaacaccactaacatccttaccaaaaatatgccagtacttttggtaaaaagatagccgaaaaaccatcaacacccgaggcttttgtaggcccgattcctgtcagttcctcaataat

SEQ ID NO: 27549 - DNA, 224 bp, Gossypium hirsutum
  Clone ID: LIB3166-052-P1-K1-E2
aagcttgttaggctcttccggttcaccatcagagggtgcactatcttcatgtgagtgtccatgggtctcaaccttacattcagatacaagatggcaacttcactttaatatttgtaatgagagcccaaagctttatggttataagatttatcagttgtctggtgtggaccatgcaagtttatggaacctgttttgaatgtaatggttgctaaattcactgatgt

SEQ ID NO: 27550 - DNA, 321 bp, Gossypium hirsutum
  Clone ID: LIB3166-052-P1-K1-E3
tccttgtccaattacattttctctcctattatgctccagcctgcatatgtggagccgattaatttaaagctgctattcattatcaaaaatatgcaaggcaaataaggttgtccatgcacacaacctttggtttgacatccttaaattacatattgaaactttcacccctttacatgctatttaaggttacctgctataaaaaaagtcacccgcaaaatcttgccaccattaaatctttaaaatttcttacttaaatactctaagacacacctccactgcaaacaacttttttcaatcttgcttctattgcacttcctattt

SEQ ID NO: 27551 - DNA, 367 bp, Gossypium hirsutum
  Clone ID: LIB3166-052-P1-K1-F1
cccacgcgtccgccctagcaatctctccaaactcagtttcattaattccaacagtgcaaagctattcaaaaccagaaatcctaacactgtatcatccctgaaaagcttcgcgaagatgggaaaataaacagcactgtaaagatcgaatgttcatgacgaagacggaccggggcgacggcgcttaatctaaagaaaatgggacaattttcaaacgccgtttgtaggaattttatgattcaaggtggtgattcaactgttgctggcagaggaagtgaatccatgtggttaaagtcttttgaaaatggactttaagttgttcactcaggaaaagtgttgttagtatgtaaacagtgaccttcacacaaat

SEQ ID NO: 27552 - DNA, 281 bp, Gossypium hirsutum
  Clone ID: LIB3166-052-P1-K1-F10
cccacgcgtccgggaaaaattagtaatcttcgtagagtgacatacttggttcgagatgaagctgacagaatgtttgatatgggttttgaacctcaaattactcgaattgttcaaaatattcgacctgatcgccaaactgtactattttctgctactttccctcgccaggttgagattttggcacggaaagtgttgaataaacctgttgaaatacaggttggtgggagaagtgttgtgaacaaggacataacccaattggttgagatgaggccagaaagtga

SEQ ID NO: 27553 - DNA, 379 bp, Gossypium hirsutum
  Clone ID: LIB3166-052-P1-K1-F4
aatcaagaaggggggcaagctcaaaattttggggaggaaatgcactcattctcgggtacacacaaattattgtaaataaagaagaagaaaaaaatcgaggctgcctgccatcaatccatcccctaaacaacaactcagtggcacttgatttctatgcaattcttcaagcaagttgtccaaggttttaattgctgcggtgattttagtttacggttcgcggggttgagacgacgctctcttgtttcttttgagtttcgttgattccaactctagggttttgattcgttatggaatttcggctttgtttagtggggtttctatcaactactaaagtggagtttgatctttagggttttggttctgcaaaaatgagatttgg

SEQ ID NO: 27554 - DNA, 383 bp, Gossypium hirsutum
  Clone ID: LIB3166-052-P1-K1-F6
cccacgcgtgcgctgacgcctgttttgcttcctcctgaaataggcaacctgacgctggcttcactcaacttgtcatccaatcaacttgttggaaggattcccaagcagctaaataaccttgtatatgaaagcagttctcctgaaaaatgctgatttatgtgcagatcatccaattctgatgcttccagactgctattccgaactccatcagcccaagagactgtcgtctaaataccttgccatgattgtagcacttgccatcattgcttccacagttatccttatattgaccttcttcctagttcaagactataagatgagtaagcgtcaagagtttctagcaacatggaaagtgtcctcattccatatattggactccacaa

SEQ ID NO: 27555 - DNA, 385 bp, Gossypium hirsutum
  Clone ID: LIB3166-052-P1-K1-G4
ctccagctaggtcttctagccatagtccatggcccagcccatacccgcacggggggtgtgccagtccgcttcctcctggtgtatcgccttctccggcgagagcttcaaggggttcgacgccaaggagattcttccggcggccgtttccacccccttctccggcgaaacacataaaggcctcactagtgaagcgtcttggcggtaagccaaaggaaggaccgatcccctaggatcgtggaactgagccggagcaagctttggataaaaactttggttatggcaagaattttggagctaagtatgagcttggaaaggaagttgggaggggacatcttggtcatacttgctctgccaaaggtgaacagggtgagctcaaggatcaacc

SEQ ID NO: 27556 - DNA, 334 bp, Gossypium hirsutum
  Clone ID: LIB3166-052-P1-K1-G7
cccactcgttcggccaggcagaacaaataaagggcggtgactgcgggcgcggaggagcctttggtggggatggtgggagagcaagggactggcatgtcagagaaggcgatggttgttcttagtagcttggcgggaattaaagaaggaaaggaagctattgtggaagaaggtgggattgcagcactggtggaggcgattgaagatggttccgtgaaggggaaggatttcgcggtgttgtcactgttgcattttgtgccctgataacattataaaaccttattttttgtttgtttagtagaatgatcttacaccttccctctttgtgggttctttt

SEQ ID NO: 27557 - DNA, 179 bp, Gossypium hirsutum
  Clone ID: LIB3166-052-P1-K1-H3
ggattgtcgggctttccaataatcacaccccatcccatgctccaatgagtattgaggaccactcacccacacctgtgctgattcattaaaggctccataaatcatccctgattctgaatcttggtaatttcatatgggatcccatttccaaatgccaaccaaccattatcatttgaacc

SEQ ID NO: 27558 - DNA, 387 bp, Gossypium hirsutum
  Clone ID: LIB3166-052-P1-K1-H4
cccacgcgtccgcccacgcgtccgccaaaccaggatgttttgcattgtcattaagagtacctcaagaatttcatcctctaggaatcgctcattatttaattctcagaacgaacaaaggatttaaaattaagggttttacgaaggaattcacaacgttaaccgcattaataacacatcattcagtaatgccagaactactgccttgtcccttatctctgagccgatacaatccaacatttgtaaaatctgattctaatcaggactttgccgatattgatgcagatccagattataatacacttgcagactttagaaaaatgatggctgatttaaatgtataaacttttaacattttaatgaaacaaagcagtattataataatttaaa

SEQ ID NO: 27559 - DNA, 385 bp, Gossypium hirsutum
  Clone ID: LIB3166-052-P1-K1-H7
ttcccggggcggccaattcatcctttattaactgagcatctttcaccttttctttcaatctcttacaactaaatagaggacttttttaatagaaagaaacacacctctattaacgcttctttctcatttaagaattatctcaacctttcatccaccaatctccgcatagttctaccaatatcctccgacacgttatataaaaaccaaactccatcttactcttataacaacaacatattaaccttacccgaaaaatctatttttactaatgccacagcttccaaaaactgttaccaactatctgtttcactgctcaatgcacaattttataagagcttccacctatcacattttacataaaaaaactactttcatcctaacaaaa

SEQ ID NO: 27560 - DNA, 367 bp, Gossypium hirsutum
  Clone ID: LIB3166-052-P1-K1-H9
cccacgcgtccgctattctccatatttgccaaaggcttctctcaaagaaatttgtctatcaactcttgctaaagttagcatctcccagttggagtggaaaacatgtttttattccactgactgtagtgagattgggcttgtacttctaagagacacagaaaatatgcttagtttgaagaggttttcaaagcagaagatcaaaaaactaggaaaagaagcacaagttttaaaggagaaggatctgatcaagagtatgagttctgcagcttgtgtgcctgatgtgctatgcacttgtgctgatcaaatgcatgctgcaattctattgaatacatgccttgcttgccctttggctttaatacttcacact

SEQ ID NO: 27561 - DNA, 390 bp, Gossypium hirsutum
  Clone ID: LIB3166-053-P1-K1-A12
cccacgcgtccgcttttttgttgaaggattttagtggaattggtttttagagggtctagtttcttaacattttctacagggtagacaaatacaatgtcgatcgccagtgtagcctttagctcagcaattgaagagtttgcttgtttccctgaaaattttgcccatagatatggtcagactttgagcaactcaatcttaatttttctctctgttggggggtctatcattcccatgcgtgtaatggagtatgattcaattgcctctgtgaagctaaggattcagacttcaaaagggttttttctgaggaagcagaagttagttttcaaaggtagagaactggctcagaatgattctcgtgtccaggactatggtgttgctgatgggaatgta

SEQ ID NO: 27562 - DNA, 335 bp, Gossypium hirsutum
  Clone ID: LIB3166-053-P1-K1-A5
cccacccgtccgtttttctaaggtaagaaaccttgttttttaaaagttaagggggaggaaggttctgagaatcgactcaactggaaattcgaatctaagtctgtactctgcctctcaactctatccaccgagaactaggtgccttgtttgaagttcattggtcgagtttctcctatacataccaaaagccgaattaaaaagcccagtttttttcttacatatcactttgcttcccttaagtcaagctctctctcgcccttttcagatctcaaagccatttgcattgtccttcaacaaccaccttatggatcgaccaccccacaattatgcagctg

SEQ ID NO: 27563 - DNA, 382 bp, Gossypium hirsutum
  Clone ID: LIB3166-053-P1-K1-A6
cgtttttccagtccacggtggacctgatagagatggttctagggaaggcggaggttgcaatagccaagcattacgatgaagtgctagtgtccgagagcaggcgggaacttggagcggaacttaggagggaactgatgatgacagaaaagcatgtattggtagtgagtggacatgagaaattgtcagagaacaacaagagcttgagaaggctgatagagagcagactctcatatctgaatccaatgaatatgttgcaggtggaggttctgaggaggcttagacgtgatgatgaaaacaacaaactcagagatgctttgctaattactataaatggaatcgctgcggggatgaaggacaccggttaatgttagattagaggatc

SEQ ID NO: 27564 - DNA, 360 bp, Gossypium hirsutum
  Clone ID: LIB3166-053-P1-K1-A9
tatgtagttcacttttacatgccccaaaaatttcaaaggaaccctcccctatcggctgaagcacagccagtggagttgcctcaacacaaatatgcagctgtgaggagatttggaggtttcatggatgactccaacatctctgttcaattatcagccttgaagaaaagcctcaaaggcactggtagggataaatcatcagccttcaattaacacagtggccgctctctgttgtacagagctgctggatacaactctccctttgaacattgaaatcgtgtaaatgaagtgatgttatggttcgattagctttcattaaattttaagacagcaaaaatattttgtaaatgatgataaaaggaa

SEQ ID NO: 27565 - DNA, 317 bp, Gossypium hirsutum
  Clone ID: LIB3166-053-P1-K1-B1
agccaactttgtacgtacaagtgaagtgatccacaatcttgatacaataatacggctgctagttttcaacatacttgttttgagtttaaaggttgtagataaacaaaaaatggctgacgagcataccaaggttggtggtcaggaatcaggagagagcaaggatcgactgaatctatacttattcgcgaagaaagaaaattagaaaccacaacctcaataagaggtggaccccacccagtttgagaatgtcaagatagaagaggactcatagggaatattataagaaacacagtctcctggacaagctttacctattc

SEQ ID NO: 27566 - DNA, 297 bp, Gossypium hirsutum
  unsure (1)..(297): unsure at all n locations
  Clone ID: LIB3166-053-P1-K1-B11
cgtcctattaagaaactataacatttttatctactctaaaacctaattctagagcggtgaattttaaaacacttgatccacctacacatncaattcctgctccataatcaaatgcttatcatcataaccaacctttatatactacctccaataacacattcaaattccaaaatcaatatttataaatttccaccttcacaccaacattgaactcttagttattctatcattactccacattctatttattcctgtttattatccaccccttaataccttttaatacatatattttta

SEQ ID NO: 27567 - DNA, 200 bp, Gossypium hirsutum
  Clone ID: LIB3166-053-P1-K1-B12
cccacgcgtccggtaaactcgagcaaatccgaagacaaagctatgctgttgatgtttggaacaggcaaagcaaggatgttagagttgaagaaggtagcattgttcatcatattatatcagattgttgtattttttgcaatatttcaacatcaagtttgtaagtatagatttttatataataaggttcaatttgtctcatt

SEQ ID NO: 27568 - DNA, 194 bp, Gossypium hirsutum
  Clone ID: LIB3166-053-P1-K1-B2
cgaacccgtgggcggactcttggtataatgtctaccacacacttgctaatattgctagttggattggtggctctacccactacctctattggtacctattaatttcctaacttttataagccctttactaccgttaattaaccttttaacggataaaccttcaccttatgaacatccttcatataaaccttcta

SEQ ID NO: 27569 - DNA, 285 bp, Gossypium hirsutum
  Clone ID: LIB3166-053-P1-K1-B3
cctaaaggttccttggaagaggactgtgtgacatactgttctacatatggaggaggagatgtaacaagggtggatacaccacttaaaaatcctaggctcactgatcatatctcggcccatacttagttatatataaattattgagagccaatcggagaggctgtcattgcagaattagatgctagatctggggatcaagcacatctacatgctcattaacaccacgattcacacgaaccattacgcgagccagttctcgaagttgatcaagattcagctaaatga

SEQ ID NO: 27570 - DNA, 437 bp, Gossypium hirsutum
  unsure (1)..(437): unsure at all n locations
  Clone ID: LIB3166-053-P1-K1-B5
gaaatccccgggcggaccaacccttccgccacaccctccggcaattaacttgatttttaaccaataaaaaccttcccaaanccgtagttttcttgttgaggaaagtaatactaattcatcaagggaaacaagtagtgatggtagtaatagtgattatggagaaccaagaaaagctaacaacattgtcccaggttcttggaatcagttggatattgcatatccaaatatttagaaattgaatacactgtcacttaaaaataaacccttttgggggtttatcatattgattaaaagttattattttttactcctttgtgttaagattgatttttagaatactttttataatttatctaactcattttttttttttattcctatgttctcacaatattctcttgattttttaaatatcaattttcttattactttattta

SEQ ID NO: 27571 - DNA, 345 bp, Gossypium hirsutum
  Clone ID: LIB3166-053-P1-K1-B8
ggaagccaatgtaatagtagaaggggggtcgtcaaacagttggttggcggggggtgtctctatagtgaaaataagaagcaaggtggctgaatttccagggaaaatgaagaaagttgcaaaagatgatcctagaagaattgttcattcgtttaaagtatgattagccatcaccctcgtctcactcttttactattttgatcatttatatgttggctttggcagctcattcaatgtgggctgttttaactgtcattgtcttcattgagttctctgtatgagcaactcttggtaaatgctaaaacattgtattgtcaacattttttagctggaacacttgacttttta

SEQ ID NO: 27572 - DNA, 179 bp, Gossypium hirsutum
  Clone ID: LIB3166-053-P1-K1-B9
gaccctgacagaaacattagattcctcgcaatcatcatcttgttcagaggggcggctgttttaggacttgtgatccaaaataattaatgtccatgctccggagttagtgcctactatctcatcgcctcattatcaacaacaacatcagcaaagtatgaggaagatgattcattttcctt

SEQ ID NO: 27573 - DNA, 388 bp, Gossypium hirsutum
  Clone ID: LIB3166-053-P1-K1-C2
cggacgcgtgggcggacgcgtgggcagttctcactttccagacccaaagggagagggagagctgctgttctatgttctttacttaacaccagatttgttatgttgaagttgggataaatttatgctgctctcaatgcaatatgggtgtttgaaaagtagccaagccttgcagtttcggtgacaaaggtacgagtgatgtcgttttacgcttgagaaacagcgaaggaaggcctgaatggttctactcccactcatctgttctcgtaagtaaaagcaggttctttgcggatcagctctttaatcctggctcgggctcctgcatcgagattcattgctcggactccacttatgatcatcatgttaaccttttgagattactgtatctccc

SEQ ID NO: 27574 - DNA, 351 bp, Gossypium hirsutum
  unsure (1)..(351): unsure at all n locations
  Clone ID: LIB3166-053-P1-K1-C5
ggaaatncccgggcggaccaacccttccgccaacccttccgcccacccttccgttaaatctgaatctaataaatacgtataatggtttggttggattaagatattataattaattaattccattcaatatagattatttgctggtttttttttgggggagaaatattatatttgatgttaatgaatgttaggtaatcttagtgctgcatgttttctggagcttcttttcatggggaaaaacatgagattcaaagaagaaaaaggagttacaaacaagaagaattagtagtaaaagtgaaaaatagagccacaaacgaaggaaaaacagtaaaacagagcatgctcttttca

SEQ ID NO: 27575 - DNA, 272 bp, Gossypium hirsutum
  Clone ID: LIB3166-053-P1-K1-D11
cccacgcgttcggttgaaggtttttatgcgaaagcaagccagcatccggggggggaataagcatatgcgagggggtggaatgaatagcttcagtttccattccagtccgtggatgattcctcacattttcaaaccagaagttcaatttgttgagctttcaattgaacaatttgttctcttcgtggaagaaaatgtaagatgatcatgttatggtgacacctccttttagataaaaacttattgttgcagagactgattttattgccaagtat

SEQ ID NO: 27576 - DNA, 390 bp, Gossypium hirsutum
  Clone ID: LIB3166-053-P1-K1-D2
agttgctattggagtctatatctggaagtacagatacatacaaaagaaaagacgagggtcaaatgattcagaaaaatttgtgaaactccttcatgatagcaacttaaacttcaagtactctacactcgatcgtgctacgggatctttcaatgatgccaacaagcttgggcaaggaggattcgggacggtttataagggagttctacctgatggaagagagattgctgtcaaaaggttgttctctaacaatcgacatagggcagccgatttctacaatgaagtcaaacttataagcagtgtggagcataaaaacctggtcagattgttgggatgtagttgttcgggacctgaaagtcttctcggctatgagttccttccaaacaagagctt

SEQ ID NO: 27577 - DNA, 191 bp, Gossypium hirsutum
  Clone ID: LIB3166-053-P1-K1-E10
gggaaccatttagaaattcatctttttttgggctggaaaaggtactacgttgatggcaactaccggttctgacggtccagccatttcagctattagtgttggtccaagtaagagaccttaaacttatgaattctcatgttatatatgtttcacatgtctatctttggtattctatttctaatacatctatt

SEQ ID NO: 27578 - DNA, 261 bp, Gossypium hirsutum
  Clone ID: LIB3166-053-P1-K1-E6
ctccgtcttatggtggaatcaactttaattttttatggctggattatttttcggcttttcaaagaaattttactccaaatcattaactagtatctcattataacaaatctcattctaccatctattcttttgcttttataaatatatcaatttattgtttgctttcttaaaatatatttttatttttattttttatatttttttatattttatctttattttattttatttttttttttttaacatatttttattattttt

SEQ ID NO: 27579 - DNA, 371 bp, Gossypium hirsutum
  Clone ID: LIB3166-053-P1-K1-E8
cggacgcgtgggcggacgcgtgggtccgatcaaagctgaccttgagggagacggataactgctgcaaagctccacacttccataagagattatcagaatcctccgggatttctttacagagagggcaagccacatctgctgaaagacgcctgtggaaaaggttaacaaaatgtggtacatagttattaaggagtctccaggcatggattttaattttagtcgggatctgtgactcccaaagaagtttctagaaatctttgtatttgctatcattgtaaccaatatagctaatggtctttagttgatctgtaatcaaaaccctgtacccgctcttcactgagtaaatcccagaggcttcaaatttccagacc

SEQ ID NO: 27580 - DNA, 369 bp, Gossypium hirsutum
  Clone ID: LIB3166-053-P1-K1-E9
cccacgcgtccgtccacgcgttcttaaatggtacaggctatttatcaaagttgcagaacatttcggtcattagatatgtcttttctcaaggaaagcttctagatgtactatttggcatattcaatatttcctattcttctctgatatgttagtaaaaagttggcaggtacttgaacttgaatatcttgactaaaattttggcaccgaagtatgcttttaattgcctttaagaaccagctacgtttcatgtctgaatgctggtgtttttctcaattcgtgcattaccattgaaccattaggtttttggttagaaaatccttttttagttggcatgtacatttaaaatataatctgcccaaacatgcatta

SEQ ID NO: 27581 - DNA, 332 bp, Gossypium hirsutum
  Clone ID: LIB3166-053-P1-K1-F10
cccacacgtacgcaaaaaggccgactaaggcctagggcgacaaggttaagtacggcggctagaaacagggcacaggacctgtgcaacattgatcagttcaacttgtcctacggcgccaggattctgctgcaccacgccaacatgcccctgaagcgccgccaccgttacggtctgtgtgggcgtaacggatcgggcaagtagaccctcatgaacgccatcatcaacaatcaggtcgacggattacctcctcccaccgaggtccgcacgttctacgtccatcacgacattgacgggtgctaggccgagatttccatcattgactgactgctctc

SEQ ID NO: 27582 - DNA, 201 bp, Gossypium hirsutum
  Clone ID: LIB3166-053-P1-K1-F12
aaaaaactttactctcggtttgtaaattaataggattttgagtaccctccggtgatagtttgtaggcgctccgaaccgaaaatttgccagagggttcttctctccagacttggaaatcttcatttgctgtcgtttccaatggaatttgtaagatctttttaacaacttccgcattgaaggtaaaagaaattatatcagctt

SEQ ID NO: 27583 - DNA, 270 bp, Gossypium hirsutum
  Clone ID: LIB3166-053-P1-K1-F4
cgcacgcgtgggagagcctttaatttatgtcgaaccacaacgcttaagaagggggaggctgaaccagaagattgacgccctgactgcggcggttcttaacgtgtcgacaatggataaagcattggtccagtgggatgctgtctcatatattaacgagctcagggcgaagatacacagggcccatttggagagagaggtgatgcagagcccaatcaaggcatggcagaaagatttgtcaagtgaagcttcaccaccacctgatcaagacct

SEQ ID NO: 27584 - DNA, 371 bp, Gossypium hirsutum
  Clone ID: LIB3166-053-P1-K1-F6
cccacgcgtccggcctaacctaaacataattccaactaatctttttcaggtccggggaattgggaaccgcgttcatattcatggtttttgactcagtatcggtggtgcagcaaagcataggcccccatttctgaaccttctttctttcttccttccaaatctccatttatttagcactccctttaacaacaccaaagcttgtattttctcttctcctatttaagtaattaccaccactacttttttgttcttaatttcaggaaacccaaattaatattctgtcttcaatacagattgcattctttttgctgttttgctctgtgagaatataaaaaatgaagggggtgttgctgtggtactgttcgtgggta

SEQ ID NO: 27585 - DNA, 373 bp, Gossypium hirsutum
  Clone ID: LIB3166-053-P1-K1-G10
aataaccggggcttccatttcaaatgcatatcccatttttgcgcagcaggggtatgaaaatccacgagaagcaacttggcgtattgtatgtgccaattgccatttagcgaataaacccgtggatattgaggttccacaagcggtacttcctgatactgtatttgaagcggttgttagaattccttatgatatgcaactgaaacaagttcttgctaatggtaagaaaggggctttgaatgtgggtgctgttcttattttaccagaggggtttgagttagccccgcctgatcgtatttcgcccgagatgaaagaaaagataggcaatctgtcttttcagaactaccgccccactaagaaaaatattcttgtgata

SEQ ID NO: 27586 - DNA, 192 bp, Gossypium hirsutum
  Clone ID: LIB3166-053-P1-K1-G11
cccacgcgtccgctgtctttcatgttggccaggtagccaagatcagcccgggcgtccctattgatgaagggtgtcctattagctgtgggatatgtacaggcttaggggccactgtgaatgtggttaaacccaaaaagggtcaaactgttgcagtacttggtctgattgccgttggtcttgccgcccctgaat

SEQ ID NO: 27587 - DNA, 302 bp, Gossypium hirsutum
  Clone ID: LIB3166-053-P1-K1-H5
gattatgactggacatcaagataattctgaattttccacatcattcaatggtcgtggactaaaatgtcagtaagttttttatcacaaattatgatttgactccttatgattatatgataccattgcatgattttcaagcatttgcttagctgcctgaaattgtaagaggtctttttcactctgtataaaaaccaaggttgcctgcttaagatcatgcttttttatccatttttgaatattatcattttgttgatcaagctaaccaatttaatttttctaaaattcctatgttcccaccattt

SEQ ID NO: 27588 - DNA, 351 bp, Gossypium hirsutum
  Clone ID: LIB3166-053-P1-K1-H7
aatgcaaggaacacggaccaaggacgactcattttgtcgaagatcacatgcaaggttaggtgggaactaagcgtcagacgacaacaaatatcgtccccaaacaaagatcacatgcaagctaaacaattctcagtcgacacttcccttaatttcaactgctatatctctgttccttcaccgctaaattacaccttggttagttatttgcattaacatatatattcttcatctgcaatggaaaatttcgttgtaattttagaggcagtagtacgcataatctttattttgaacaccaaatgccgttctaaccttggtttaaagattccttttgcctttctttctagttttttt

SEQ ID NO: 27589 - DNA, 197 bp, Gossypium hirsutum
  Clone ID: LIB3166-053-P1-K1-H9
ctttcttgttctttttaagtatcagagcaaaattgaggaacttcgggttagcagggacacagagctttgacagtcttttcaccatggaagatactgaggtcgccaatatcctgttagagctttcccgtctcatataacgcccttctcgcttttcttgtactttggggctgccggaggaagagttctgttttcacatt

SEQ ID NO: 27590 - DNA, 200 bp, Gossypium hirsutum
  Clone ID: LIB3166-054-P1-K1-A1
acgacacttcccttaaaaggaatgcttttgacaggaatgattttcatttagaatggcacgggtatcctggctgagtgtcttactcgtcaactatccatcaacactaaacggaaactgaacatggctgggggcgccggattctgggagggtggctgctgacctgaaagcaatgtgtgcattgttatactgcacgcgccatg

SEQ ID NO: 27591 - DNA, 169 bp, Gossypium hirsutum
  unsure (1)..(169): unsure at all n locations
  Clone ID: LIB3166-054-P1-K1-A10
ccggggcgacccactcgtcctcccactcgtgctataacttgttttttttcaagaactgcttatnactgaccgcgattatttatcttcacattgcgaatataattttctgcttgttttcttttaagcttaccatctccacataattgtttatatttctaatatacacttc

SEQ ID NO: 27592 - DNA, 293 bp, Gossypium hirsutum
  Clone ID: LIB3166-054-P1-K1-A4
cccacgcgtccgcccacgcgtccgattttcccaaaatctgtctacttccataaagagtttccctttcaaaaatgaaggtgtggattgctgtgttgattgtatcatgggcttattggatatccatagttgaaccatcgtgttgcattgctgtaacagaaaatgagcacaagctcaagatttacacagtgagattcaccactgaaagagccaccaggaactcttatctgatgtttatgaaggatctgtacaatgcattgacagagcgtgcagatagaagcggagacataccgata

SEQ ID NO: 27593 - DNA, 207 bp, Gossypium hirsutum
  unsure (1)..(207): unsure at all n locations
  Clone ID: LIB3166-054-P1-K1-A6
attacatctttaatggtctntgagattttaatgtttagtgtagtaatcctacagggggtgtgactagataccaattgtagtggactgttgatattgtctatgaacatttttggaacctgtaaaagaatggagaggatagctttgaggaattacaggaattgtttgaagacatgtttcaagttgacatttattcattctggtattaat

SEQ ID NO: 27594 - DNA, 332 bp, Gossypium hirsutum
  unsure (1)..(332): unsure at all n locations
  Clone ID: LIB3166-054-P1-K1-A7
gcgtgcggccaccggaagaacttatcgattttttggaagattggggccaacaataactagcngttttaccggtgtaggaggcgcgataaggttgggaaacctaaaaaaaggttggttaagaaaggaggttctacgggaaaagagagtatggttgcccctgtgttgtaagatgaagacgaagggtccaaatttgggagggaaggatcggaatctgatgcgaataatagcaagaagaatgtttggtggctcaaggagatattttttggtggatgtttcattataaagataattgtttaaaaagttgtgggtattttcttattttattttaattt

SEQ ID NO: 27595 - DNA, 392 bp, Gossypium hirsutum
  Clone ID: LIB3166-054-P1-K1-A9
gcaaaaccgacttggtttgcttgataatgggaagtaccggagagtatgagagccagcgccgggtaccggttcctccttcgaaaccatttctcaagtctttacaagcaagactcaaggagactttctttcctgatgacccttttaggcagttcaagaatcagcctatttccaacaagttcttgctcggattacaatattttgtaccaattattgaatgggctcctctttacactttcgacttctttaaggctgatttgattgccggtatcaccgttgccagccttgccgttcctcaagggataagctatgcaagtttggctagcattccaccaattcttggactttactcaagctttgttccgccgctgctatatgccatgttgggggagctc

SEQ ID NO: 27596 - DNA, 371 bp, Gossypium hirsutum
  Clone ID: LIB3166-054-P1-K1-B1
cccacgcatccgtggacgcgtgggataaatctgtgaccaacacgtgaggttctgtactatcactgaaagtgtatgtaaaaccctcaaagcttgtctcttatcttatccattcaagcaaatatgatttaaaaaaaaaaccccttttttctggcagaagaacgccctggtctaccttgtcacaaatgggcccactttatgatacaggcctaaagggattgatatcaataaccgcttcttgtgatgtgattgcttcaagactacgggcttactcgaatatcttattgacgaactgctatttgaggactcgtcaccgttgaggagggatagcctcgccatttgctccaatggaagctgcctagctacaggtggtc

SEQ ID NO: 27597 - DNA, 393 bp, Gossypium hirsutum
  unsure (1)..(393): unsure at all n locations
  Clone ID: LIB3166-054-P1-K1-B11
aggagatcagagagataaatcaactgaagaggaagttattatcagggaagtgggggcggatcaaccgtccacgtgtcccgagaatgaactggatgaccgtgaactcgacggtagcgaatcgaagccgccattgaacacaagcgacatcttgaaagcagtggaggtagttgaaagagactctcgggctatcgccgatagcttctcttctctcttcgcttcgcttcgtttggctctctctgaggtcactagcggctcagttgatcatatgcngtgtttggagatacagcttggcgtcttaaagaatctggtaatgaataataaaacatggtcctcacttgggccgaatttgttggttaaatcaatatggggaatttttttttaatgtaacctttt

SEQ ID NO: 27598 - DNA, 305 bp, Gossypium hirsutum
  Clone ID: LIB3166-054-P1-K1-B12
ggaggataagaaggatgaggatatttaagttgaggatgtaaatgacgaaaaggagaggttttagaagaaaaagacgaccattaatgagctctcgcatgagtggtcattggtgaataatcaaaagccgattttgatgatcaaaccacatgagataaccaatgaagaatattctgcattctacaagagccttacaaattatttgtattatctattttctgtcaaacacttttcagtttacggtcagcttgagttcaaatgctattcctcttccttacctaaaaaggccaccccttttatcttttttt

SEQ ID NO: 27599 - DNA, 370 bp, Gossypium hirsutum
  unsure (1)..(370): unsure at all n locations
  Clone ID: LIB3166-054-P1-K1-B2
cccacgcgtccgctaacatcaatttcaagggagatcagttcccaaactggttggtgggagaacaacaagaaattagagttactatatctagtcaatagctctctatcgggacattttcagctaccatcgacttctcgtaggggtttatcagggttggatgtttccagtaattccctcgatggcaacatcccaaatgaaatcggagcaaaactaccgtcattgtgggttctcaacatgtcgaataatttttttggcggtggtattccgatttcgattggtgatatgatttcccttcaaatattggacttctccaacaataaattgagtggtggaataccgaggcacttgcccatggngttgtatatattcg

SEQ ID NO: 27600 - DNA, 361 bp, Gossypium hirsutum
  Clone ID: LIB3166-054-P1-K1-B4
cccacgcgtccgattgtttaccaaaaatcacaaccttgaaatcaaatttctaggggttgttttgctagcagtcgagccaccattgttttggtgatcaacaatatgcaaacagtacccatcctccccgttgaaggcgctcgatcatgcctagaaaaatttagaacggccgtacggaggagcgaccctggtgacgtggaggccgagtgtggggatttctcgtgagaagctgaccctttagtgccattcttgcttaatacagaagctttttgctgcttagaatttttttgggtgtattgggcctttggttttggtttattaaaattagattttagatttatttaattggggtcaatttttatta

SEQ ID NO: 27601 - DNA, 201 bp, Gossypium hirsutum
  Clone ID: LIB3166-054-P1-K1-B5
aaagttccatcttagcggcacttacacatttgttactcgatcctaatatacgggggtgtccctttttacagcgcgtccacctctagcttctaaaggtaatctttttaaaattcctgaacctctactcagcagttgactgcaactttagtgattccttaaactctctcttcctcctcattaagatgtatctttttcttttta

SEQ ID NO: 27602 - DNA, 293 bp, Gossypium hirsutum
  unsure (1)..(293): unsure at all n locations
  Clone ID: LIB3166-054-P1-K1-B6
cgcgtgtcaaaaccgatcatctgcacttcgaaactttggagttttcaggacgagcttagtatggtagccgggcaatggaatcagtttggagaatggatttcgagatgatcatgtctgtcatatccaacactcttgcaattgtcttcgtagtacttcaaatctttcatgtgaggaggctccctgctgtttgtccttcggtttcatttctaatgcttgtcatcctagccctgggacacttgatgcctntggttctaaatctcgaagcaatgttcaatcaagatagtgaaacgact

SEQ ID NO: 27603 - DNA, 299 bp, Gossypium hirsutum
  Clone ID: LIB3166-054-P1-K1-B7
tcccacccgttcaattattttttttatttgtaatctaaacaatctacattcccgtgaatttactaaacaagtgctactactaatatatccaaattctttatcttaactaaatctttattttacgtactttctttaaatcccccatcagtctgatctttttatcttttttaccatctgtatctattatcttatcttttcccactcctaattaatttatttaatattttcctttcaaacattataacattttacacaaacttcattatcaatattctttacaatatctcatcttacttttt

SEQ ID NO: 27604 - DNA, 309 bp, Gossypium hirsutum
  Clone ID: LIB3166-054-P1-K1-C7
cgcactcgtggcttcaacttactacttattcttacatattctattcatgctggggggcaaacacatgaggctgatcagtttcccctcattggctctgactacttcatttctacagtacctaattaattatctacctaccgttcaatctacacaacttcattaatggctgactctcaacattcctattgtgtggaaactttatgtcaaccctcaagactatagttcattggacgaaacaagtgcttaattaaagcttctattctctgtacatgatgaaacacttattagtagcactgtttatctggttgg

SEQ ID NO: 27605 - DNA, 234 bp, Gossypium hirsutum
  unsure (1)..(234): unsure at all n locations
  Clone ID: LIB3166-054-P1-K1-D11
cgaagttggatgaaccgatcgnatattagccattgatcctggagtaacatgggggggactattgaattggattgagggactgtggtcgagctgtgggaatgaaaggatcattatcttcacgacgaatcacaaagagaagttggaccctgctctgttgcggccagggcgcatggatgtgcatattcatatgggatattgtactccaacaggattcaaaaaacttgcaactacata

SEQ ID NO: 27606 - DNA, 158 bp, Gossypium hirsutum
  Clone ID: LIB3166-054-P1-K1-D4
ccctaattacccatggattttctctctttttttatatccatatcataaaattagcctgtcaatatttaaaagttgtgcgccatacccaaaatgtaaacaaattttcacaccctacacttttgcactgtttattatatcacactcataaaaattgcttt

SEQ ID NO: 27607 - DNA, 312 bp, Gossypium hirsutum
  Clone ID: LIB3166-054-P1-K1-D5
cccacgcgtccgcccacgcgtccggttgaagcaaggtccattagatttcagtaggttagcacatttgaaagtgttggatttgagtggaaacagattgtattcacacttaccaacaattccaaaaggtttgattatggtttccctcaatagaaactccttcaatggtgaaatcccaacacaatatacccttttaacacaccttcaacaccttgatatctcattcaatagcctcatccgtatacctccagcttcacttttctcattttcaaacatcagttccttgaatttgcattcaaatatgtgagtgggatc

SEQ ID NO: 27608 - DNA, 351 bp, Gossypium hirsutum
  Clone ID: LIB3166-054-P1-K1-D7
ggtaaatctcttcgcagaaagagaaccattgctcctttgtatcacatactcgggggcgttccccaggttccctattgactgagctcatcggagattcaaatcaagtcacctctttctccggactcagaaattccgatacaactacctctgtcccctcagccaattctcatttgatccctctgagtgactggttcgaccgctgtcgaggtttcttccacctagaaagtcgacgattcacatcttcttccccatgctgccatcgcatgtgccgcttcatttgctccccgagctttttaacgatcgttagtgaatctccttcaataatggccgtttcaaaccccaagtcttttg

SEQ ID NO: 27609 - DNA, 331 bp, Gossypium hirsutum
  Clone ID: LIB3166-054-P1-K1-E5
gtttccaactcctctctacagacatatatagaaagagagttcaaaattaacaacggctggtctctttctccaacatgaaatttattaactagtgggttggcctcacacttgcatggaatatggaggaaccctttcattttctctctgcttagcttcataattcgcttcctctcaatcttccaagtctcaaaagaaagaatcatggagagtaagggatacagaaaactaaacctcacccacaaatctcacttgcttttctgtttctcagtttgggtattgggtagcatcatcaccactgcaaccacatgccaacgaggtaatgctcttttcc

SEQ ID NO: 27610 - DNA, 300 bp, Gossypium hirsutum
  Clone ID: LIB3166-054-P1-K1-E8
cgcaagggttgatcggtgggtgtattaaaggttctagacggattgtttcacggtggctagtatctattgaatcctgaggcaaccatgttgggagccaatcagttcaaattgcaagctggtttggtagctccgatttccggcattgaatacgataattcttgtggttgttggtgcatgatcgcttgcttacgaactctgagcgacaacgacgacaaatgactgattatggctcttgctttatctgtgggcagcatgaggaaactgtagtccatgttattcgagattgcccagtccgcggtc

SEQ ID NO: 27611 - DNA, 372 bp, Gossypium hirsutum
  unsure (1)..(372): unsure at all n locations
  Clone ID: LIB3166-054-P1-K1-F1
cgctgatcccattgtcttcctcttcacgttccaacttctattagggtttttctggctaaatctcgatcgatccaagacgaaaagaaaaaaaaatagggtcttttttctcacacaattaggggggtttcggagagcataggaagagaatatgccttcgttaccctttgaatcgattttgctccctttgatcccttcttccactcattctcatgttggtttatgtttatgttcccatcgtttgaaacatcttcgaaagagcgatcgtcgtggtaatcttagttaacatnttcccatcaattttagtttttcccccccttttctttatttccatttcctctctattttctggcttcttctcgattcttctgtttt

SEQ ID NO: 27612 - DNA, 404 bp, Gossypium hirsutum
  Clone ID: LIB3166-054-P1-K1-F12
caacagtccctcctcatggctgctgctggaaatatgcaacaacctccatccgcgcagcactagtgtacccactcaagcttggcccaacattggttatcaaatacctggaatgatgatgccagttggtgcacaggctgatctgcagaaactcatgcagacaatgcaaataggacagactcaacaagcaggaaacaatgttgcatcatccagcttttatgcattggggcaagctaccccagcaagcagtgttgcaactaatggagcaagcaagcctcaatcggcttctccagtttcaataacgaattctttacaagcaggaaaggattatgatttttcatcaatgacacaagggatgttcacgaaacgcttagttgcaaccaggggatgattttggctttttgttt

SEQ ID NO: 27613 - DNA, 315 bp, Gossypium hirsutum
  unsure (1)..(315): unsure at all n locations
  Clone ID: LIB3166-054-P1-K1-F2
cccacgcgtncgaaagcacctcttttccgtccacgcggtttttgcctattttttccggggaaattatcaggaaaaaagattaaaaatttaatctttgtcttccgcccaggccgctccttagattgtcttactcttgggatctattttcgtctgcttcaatatagaagtaggaacgtccccccttatctatctctccctttttctctttctttgtttcttttacaggaaccctaactttcctgattctttttttttctaagaaaacttacggtcgagaaaaatggtggtcttaatgnccgatgatggattactttt

SEQ ID NO: 27614 - DNA, 297 bp, Gossypium hirsutum
  unsure (1)..(297): unsure at all n locations
  Clone ID: LIB3166-054-P1-K1-F3
ggcaaaacttacatgtgcaggatctcaaatgttggattatccacttccctcaattttaggatccatggtcataagatgaagctagtcnaggttgaaggatctcacgtaattcagaacttatatgactctcttgatgtacatgttggtcaatccataaccatcttagtaaccttggaccagccaccaaagaactactacattgttgcatccacacgatttactaagactgttctcaccgcaactgcagtgttgcattacgccaactctaacgctccagtttctggaccggttccagct

SEQ ID NO: 27615 - DNA, 179 bp, Gossypium hirsutum
  Clone ID: LIB3166-054-P1-K1-F4
gccaaaacccaagacctgtggagtacagctaatattcaggctacagatcaccgggtagagaacactaaacccaccgacagaagtcatacccatgagctaaaaccttgtcgaaacttatgtctacgactaaggcacacagggagctccactgatgcaacatgtagaagttacttagatct

SEQ ID NO: 27616 - DNA, 335 bp, Gossypium hirsutum
  unsure (1)..(335): unsure at all n locations
  Clone ID: LIB3166-054-P1-K1-F5
atttgaaggagagcttccggtattttgtttgggggtttcaaaagagaaatggaaggagagcggtgaggagtccataattatnagctacaagtttctttctcaactccacaacctatcaacgaaatggggtttgtacagtttgaagaaaaccaggttttgagtttattggctcttgcacactcttctcatcatcatcaaatatctcagcctcttaatactaccaccaccaccaccaattccactgccatgggcttcaccacgcataacaacaaccaggtagtaaatactgaagatccccaagctgcaaacgatgagaacaactgttctaagtaagc

SEQ ID NO: 27617 - DNA, 292 bp, Gossypium hirsutum
  Clone ID: LIB3166-054-P1-K1-F6
gggaaaatcaacttcaatcaatggtttcaatggtcagtggctcagcggagcctctctgtgcatcgggtcggagctcagagaagctgagcctcccatccctccaatccaaaatgaaaactgatccggaaggctatgaaacggagctccatctcatccgcaatcaattctattccgctcttgagctatttcaacagcaagcggctctgaatttctcctccatcagtggcgtcggtgctgacccaactgtggctaaggacctcagtgaccgtgccatgttcttggcccatgtcac

SEQ ID NO: 27618 - DNA, 263 bp, Gossypium hirsutum
  Clone ID: LIB3166-054-P1-K1-F7
ggattatgttaacagtttgtattatttttggatccatcgattagtgtctagggggggattctacgtgagggctatgaatcatttgccatgtattgctttggaagataccttgttgcttgcttgggtggggaagagcggactattgaatttatggagagactaggatatgcaagttctaaaactccattattgggactcgattgtgaaaagggaactgttaagcaccccttttcttatgaattatatcctaagaccatgtaaac

SEQ ID NO: 27619 - DNA, 215 bp, Gossypium hirsutum
  Clone ID: LIB3166-054-P1-K1-F8
agaaagctgcatgacactaaagctgttaaagtccctgagagcgctgctattaaggaggacttgataaaagctgcggtcaaatccatgcctgctcaaaaacaaaaaactgttgagtataaagagactgctactataactatcaagaacacgaacatggaaaatactaaagagactgtatttcaacgtttatatcctaacaccgacacgatcgttat

SEQ ID NO: 27620 - DNA, 408 bp, Gossypium hirsutum
  Clone ID: LIB3166-054-P1-K1-G2
ctttgaagttgaacatttatatcattacgccaagctagacacagcccacctctagtgccctctgaactaacatcaataccgttaaaaaacccataacttactctaattttttcaatctgtctgctgtttatttttgtctccataaagaagaccatttggggattatacgaacggtatgtaaccagttttccttgctctttgttcccaatatttacaaatatatttactttaaatacctttaatttgacataatttggtacatgtcattagtctaaatactttaatccaattaaaatggggatgtgaatttttaaaaattattaaccccaaaattttttatttaaatccaagtcttttttaatgtcaattttttggtacatgtataccaagtgattttttttttaattt

SEQ ID NO: 27621 - DNA, 235 bp, Gossypium hirsutum
  Clone ID: LIB3166-054-P1-K1-G7
tctacactttcataacacacccactttttttctaaattcccaacaccacagtgaggtttttttaaatccatatccccatctcaaatcaccatttctgcactttttctacccttttaattaaaacctatacatcctcaccttttaatctccccatctattaattacttctatccttattaaccccaatttctcttctatgctattatttttactttcctcaatatttttttcaaac

SEQ ID NO: 27622 - DNA, 360 bp, Gossypium hirsutum
  Clone ID: LIB3166-054-P1-K1-H10
aaaagtaatctttccaacggaacacctcttggctgtaaattttaccatggaaatggcaaacgccacggagaacggttcggcccatactcagcctcccaccaccaccgcccaaaacccttcagaagcagctccccttaatcctgcaatagagaagtggcccggatggccaggccactgcgtgtttcggctgattgtgccagttttgaaagtggggagcataattggccgcaaaggggagctcatttagaagatgtgcgaggaaacccgcgctcgcattcccgttcttgatggcgctcttggcacttgctgtcccattgtgctaggattctggaaggaagaaccagaggcactttttttccc

SEQ ID NO: 27623 - DNA, 204 bp, Gossypium hirsutum
  unsure (1)..(204): unsure at all n locations
  Clone ID: LIB3166-054-P1-K1-H6
cgctttttcaacctttctctttcttctcttttgttttaaaagaaggggcttcggagttttagcgcgagagagaaacatctcatggctaaaccttgtttgctaccctttcttcttgggcttctcaattgccanntctccatggttcaaaaccttttggnnntatggcatcactattggacattggttggttcaccattattgata

SEQ ID NO: 27624 - DNA, 274 bp, Gossypium hirsutum
  Clone ID: LIB3166-054-P1-K1-H9
atcaactttactgtttttgctccaaaaaagtcttaaagctgctggttcaagtggcgcatctccaagtcggaagccaactgctgcaacctctctgtttggaaggatgacaatgggtttccgctcatctccttcttccaacaatcttgctgctgctgctgcacttgcagtagttcgccaagtagaggccaaatatcctgctttacttttcaagcagcaacttgcagcatatgtggaaaaaatctatggaatcattagggacaacttgaagaaagag

SEQ ID NO: 27625 - DNA, 309 bp, Gossypium hirsutum
  Clone ID: LIB3166-055-P1-K1-A11
gcagacactgttatttgttgaagggattaatacacttttacaaacactatgtggagctcgattacctactgttattggagggtcttatgccttcatggttcccattatatcaataatccatgatactactttgctaagcattgaggataaccatatgagatttctatatactatgagagctgtccaaggtgcactaatagtagcatcaagcatacaaattatcttggggtatagtcagatgtgggccatttgcaccaggttctttagcccccttggaatgattccggttattgcactagtcggcttttg

SEQ ID NO: 27626 - DNA, 312 bp, Gossypium hirsutum
  unsure (1)..(312): unsure at all n locations
  Clone ID: LIB3166-055-P1-K1-A3
atcactctgaacaaagtaatcatggcttgcaaagaaccagatcacaccctcaggggcgacactatatttttgttctccttaacctcattttangacacctgctttatcttttaacagatgtgcctccccagccaaacttcccacctgacaatttcttccgcccgtatctgccggcctaagccttccttgttttcaaaaagaggtgccgtgccccgctcttctattcacggaataagtaaaataacgtttaaagttgtggtattataatttctccccaaagctcccacttatcctacaccttttaagtcattt

SEQ ID NO: 27627 - DNA, 383 bp, Gossypium hirsutum
  unsure (1)..(383): unsure at all n locations
  Clone ID: LIB3166-055-P1-K1-B11
gtctctatcagtggggaaccggtccagcgtcttggtgcttacatggtgggagggtgggtggcaaggaaggaagcatcanggtctagcatatatcgtgcccttcattgcagagagcctgaaggcaaggacttgctgtcctacatgcaagtcctgtatgaaatctgcccatacttaaagtttgggcacatggcagccaatggagccattgctgaagcatgccgaaccgaagatcgcattcacattattgatttccagattgctcagggaacacaatggatgactctcttgcaggcacttgcagctagaccaggtggagctcctcatgtccggattacaggaattgatgatcctatttctaaatatgctcggggtggtggattgga

SEQ ID NO: 27628 - DNA, 263 bp, Gossypium hirsutum
  Clone ID: LIB3166-055-P1-K1-B2
cgtctacccacacgtccgccgatttttaatgcgtccatgatgattggcgtgtttgtgtgctggggtgtatgtccaaaaaataccctccatacaaaactcaaacaattaatctactaaaacaccagacccttattggtgcctatcatgtcaactataaaccactcactgctaatcctatggttgtctacacatatttaaacactttccatttagctttataatttacaatattcatcacacactcctgttccttttcatctatc

SEQ ID NO: 27629 - DNA, 394 bp, Gossypium hirsutum
  Clone ID: LIB3166-055-P1-K1-B4
catttcgatcactgtttcattgctaaggattattctctttgtggcgaggcccagaacgatggttttaggcaatattccaaactctgggatctatagaagtatggaccaataccaaatcgcgaacagtgttccagggattctcatactgcaaatagacgcccctgttttctttgccaatgcaatctatctaagagaaaggatctcgagatggatttatgaagaggaagacgggttaaaatctgcaggggaagcaagcttacactatgtcatattagatttgagtgcggtaggtagcattgatactagtggaattagcatgctcgaagaactcatgaagaatgtccatagaaaaggtctacagcttgtcttggctaacccgcaaagcgaggtgatg

SEQ ID NO: 27630 - DNA, 277 bp, Gossypium hirsutum
  unsure (1)..(277): unsure at all n locations
  Clone ID: LIB3166-055-P1-K1-B7
atagctctctcatccaatggctcaatttcactttacatttgctttaactgtaatggttgctttaatatcaaattcagcatctcanatcccatcggcatcacccacaatgccaccgtcaagcggcggagcttcaccacccaccaccactatgacaccagctatgactccaacttcttcaccctccccaaccgtggttccaactcccccaaccccataattggccccaccccaataaataacctaataacttccttaacaattgcttcttcacccaccc

SEQ ID NO: 27631 - DNA, 382 bp, Gossypium hirsutum
  Clone ID: LIB3166-055-P1-K1-B9
gatgctccttctccattgctttctcttacggaacttgggatgtctccttccaaggggtgaccttcacccctttttaatgcttcattggctatgaaatgggcaaaatagtttcctgtctttggaataaaacgaaatcgaagatcttgaaaatggtttttcgtactctgaatatctcttatgattgcctcgatcatcgatcagtcttgttctgcactctgacattttataatcaccaatcttgaatctattactatttctagaacctgtaaacccaagtcgatccttaactttgttgtaatcacggagacgccacatcgtaatgaagcaccgacttgtatgccaaaatgttgcccaccacatctcgtactactagccttgatgc

SEQ ID NO: 27632 - DNA, 373 bp, Gossypium hirsutum
  Clone ID: LIB3166-055-P1-K1-C3
cttttgctctgctctgctcttactttcattcttttcactaagacaaaaaaggaagtagatgtgatgaacaaagttgattcaaagaacttgaaatcatgttggtgggatagtcatctcaatcctgaaaattctgaatggctagctgaaaattcaaaagaaatggacttgaatgttaaacaaataatgaaattggtggaagacaacagtgaagatgtgactaaatccgaggtgattgtccaagttcaagaactctaccgtatttatcgaaatttggccgaacggtttgatcgtttgaccggggaactgtctaaaactcaaggccctgatagtggtttggatcaaatctctccaatggttacacctgataagcctg

SEQ ID NO: 27633 - DNA, 378 bp, Gossypium hirsutum
  unsure (1)..(378): unsure at all n locations
  Clone ID: LIB3166-055-P1-K1-C5
gcccacccttccaatttaagcaaaggcttgttcccgagcaactgaagacgaattcaccaggatatttggctgctgtgatactagaaacttgattgtgttgcagcttgacttgtgtggatcatgtataccggattatgttctacaagataccttagctcattcatcgaaaagtcttnctgttttagttaccttgtcttgaatggtgcatatcgcttgacggacccaaggctaaatgcactcgcattgtctgcacctgctctgcagtcattaaatctgagccagtgctcccttctcacatcatctggcatcaaatgattagctaactgctttgaatccaccttaagagagctttatttagatgaatgtcataatatagaa

SEQ ID NO: 27634 - DNA, 209 bp, Gossypium hirsutum
  Clone ID: LIB3166-055-P1-K1-C9
atcgcacgcaatggatttggtaggatcggacgttagtttgctagagtggggctggaaagctatcatattgagctccttgctcttaactctcccttcatcaccactgaatacatgacctacatttttaagtacgacagggttctcggtcaacggatgcatcacgagcttaaggtgaaggactcagagaccctgctctttggggataagcc

SEQ ID NO: 27635 - DNA, 197 bp, Gossypium hirsutum
  Clone ID: LIB3166-055-P1-K1-D1
tagccatcaatttctgggctttggagtaaaactgctttgaagaaaagctgggacaggcaggtcacacttgttcaggcttccatggctgaactaggcaatctggtagacagggtgagataatcagactaatgggtgggtttaacaggagatggtgcgatgagccaagcaagctgtgctggacgcaggaagatgaacac

SEQ ID NO: 27636 - DNA, 389 bp, Gossypium hirsutum
  Clone ID: LIB3166-055-P1-K1-D10
gcctcttcatccatatagactttttgttactgaaacatttaaagacttgccttctgctgctgtaagtctcatggacaccttgctttcaatcgatcctgttcatcgaagaactgcagcttttgctctgaagagtgagttctttacaacacaaccttttgcatgtgatccttcaagtttacccaaatatcctcctagtaaggagattgacgctaaattgcgggacaaagaagctagaaggcaaagagcagttgggagcaggggttcaagggttgacatggaaaggagggggcagaaggaaccaatttctaatgctgaacagaccgcatcatcgcagagaagacaacctcatcctaattttgaagagcaggagttagatgttgaactctcgt

SEQ ID NO: 27637 - DNA, 320 bp, Gossypium hirsutum
  unsure (1)..(320): unsure at all n locations
  Clone ID: LIB3166-055-P1-K1-D2
cccacgcgtncgattctttgctcttagctatgatgttattcaaaaaccgcatctcaagtagtttaaaatttcacccgatggtaagaaatcacccgatgttgaaatcccagttgatggtccaaccatgatgcatgatttcgccatcactgaaaattttgtggtgataccagaccaacaagttgttttcaaattgggtgaaatgattcatggtggttcacccgttgtgtatgataagaacaaggtatcaaggttcggtgtattgaacaagaatgccattgatgcttttgggattaaatggattgaaccacctgtttgctttt

SEQ ID NO: 27638 - DNA, 392 bp, Gossypium hirsutum
  Clone ID: LIB3166-055-P1-K1-D3
aacgatctttgcttttgaatcagtttcagccgtccgattgcaagctattaactcggtagtgcgactcagcgagtcagtcctgtcgttgttgacggatttcgagtctacaatccataaggactcctccaaatcgatgactccaggcagtggtctgcatcgtttaacgatgtactcgatggattacctcactctccttgccgattattgtaacatcctcactgacattatctcggactggccaccaccagcgaagtcatcgttaccggaatctttcttcaacagtccggtttccgacgattctccgaggcctgcgatctccgtccgcatagcgtggctaatcctcgtcctactctgcaaactcgactgcaaatcaaagcattacaaagacgtct

SEQ ID NO: 27639 - DNA, 278 bp, Gossypium hirsutum
  Clone ID: LIB3166-055-P1-K1-D5
cagccttccgaaataccatgtggattgcagatgttcatcctttcgcgaaggctaacctaaacttcgcctgtcaaatttcattaatgtggggcctgccttgtgtttaaagatcgtctttatcttattgggggccagtatgtctattctatggctaaacctgtatctcctattatcaaatgctactgaatgaacgaacctgtcttaccggttggccacatgtttgatgactgagcgtatatttattacatatcctcctattctcaagccagtttcacatc

SEQ ID NO: 27640 - DNA, 388 bp, Gossypium hirsutum
  Clone ID: LIB3166-055-P1-K1-E11
cggacgcgtgggcaaatatttattacagtaaaaaaaatggcaacaaacgctgggggtctgatttgtttattgatcatagctttggatattactgctgggatacttggcattgaggctgaaaaagctgaaaacaaggctatgcatttgggggcggggcatgttgagtgtagaaacaccagttctcaagcttacaggctaggttttgcagcattggtactacttagccttgctcatgttattgggaccttacttggtgggtgtgtctgtatttggagaaagggaaattcaaacaaagcatctgtcatcaaatatttagcggtggctttccttattatctcatggatcatattagtggtgggattaataatgctgattatagggacattgt

SEQ ID NO: 27641 - DNA, 346 bp, Gossypium hirsutum
  Clone ID: LIB3166-055-P1-K1-E3
aagaaaatctaaggcaaatcagtattgtcagttttattttgctcgcctcttctatgagcatgaagttcaaagtttgaatccaatatcggttttgttattgctttctctgagctctatttttggataataatggcgagcgaagtggagaagaaggcggttttcgatatacattccgcgaaggaagcggttcaggagttgagagctagcttcgtagcgggaaagacgaaagactactaatggagaagaactcagttgaaagccatgttgaaaatgatggacgagaacgagccgcaaattgtcgccgctcttcgcgacgatcttttcaagcccggactcgaatccttca

SEQ ID NO: 27642 - DNA, 205 bp, Gossypium hirsutum
  Clone ID: LIB3166-055-P1-K1-E6
aaatcaccaaaaaaccctttgaaccctcatctatgatggccaattgttatcctcgccatttcaagaatatatcttgctgttagacatacctttctgatattatgcccaatgatgtcaattcttctgttttcaccatcaattcccacacaactatttaattccttaacttgttccctactcgcttcaagtttatttataactacca

SEQ ID NO: 27643 - DNA, 388 bp, Gossypium hirsutum
  Clone ID: LIB3166-055-P1-K1-E7
caaagcttgcttcacatgcctccgccacaacaatggcattctctcccggcggacgccacccccacccccacctcctcttcttcactctcctctctctcttcctcatctcccatgcaaggctaactctccaccattcagacttgaaagctctttccaccattgttaaaaaccttggcatcaacgctcaaccattcccttccactaatccttgtaccgcggccggagttttctgtgagcgaaggctcacccacaacgaaacttacgttcttaaaatcaccaggcttgtgttcaaatccaaagggttggatgggtttctgtcgcctgaaatcgggaagcttactgagctcaaagagctaactgtttctcacaacaatattgtttatcaaat

SEQ ID NO: 27644 - DNA, 393 bp, Gossypium hirsutum
  Clone ID: LIB3166-055-P1-K1-F11
caaaatgcgcgagtgtttgatgctagaaaacgaagacttgaagaagcgaatggaacagctccaggaagatagatgcgccgatgctgaagaactagtgtatctccgatggataaacgcttgcttgcggtatgagctgagaaattttacacccattcctggtaaaacagttgctaaagacctaaacaaaagtttaagccataagtcggaggagaaagccaaacaactaatacttgaatacgctcgcgctgaaggaatggatagcatggattttgattgtgatcaatggtcctgctcccaagccttctatagtaccgacaacggagaagcagatgatttttcattcgggaattcatccgctaagaaaaccccgaattcaagaaggattaagttttt

SEQ ID NO: 27645 - DNA, 242 bp, Gossypium hirsutum
  Clone ID: LIB3166-055-P1-K1-F8
tcgaaatctctgccgtcaagtattttcattttctggatggagaatatggaggagaggggtgaggagtacaaccaaaataactgttatccaaactatgtgtttgaaaacgaataatatttgtaggtcggtaatgttgttgtccagctgaatttggttctggtctattaatccttacttagcaattatttatatgtcgaatttaaatgaacctacttgtcattggatgaattgtctgataatga

SEQ ID NO: 27646 - DNA, 173 bp, Gossypium hirsutum
  unsure (1)..(173): unsure at all n locations
  Clone ID: LIB3166-055-P1-K1-G1
ctgagacgaacggccagacgaacatcaactgttggaaagacagggacacatgtgggcggggtgatactatcaatccctctnactgatataattatgcatatagagattaagaacactggaacatcattgatggagcagcaagaaagaatatctgatacgctggatgctaactc

SEQ ID NO: 27647 - DNA, 298 bp, Gossypium hirsutum
  Clone ID: LIB3166-055-P1-K1-G11
cactatgcttctgcgacctcttcctcaacatcgatcaaagcgagaactcggaggatcctgttccccaatgagcccccaaagaagatctagatgtattccactaacttatacactacttgcacctctctctgtattctaagattgggtctaactcacatgacgcgtactcctattgacctcctcaagcataatatgcaaactgaccctgcaaagtacaaaagtatttcatcacggattcggtgttctattcaacgagcaaggagtgatgggcttaatgcacagacacatggctaccctt

SEQ ID NO: 27648 - DNA, 206 bp, Gossypium hirsutum
  Clone ID: LIB3166-055-P1-K1-G5
ccggaacgccagtgtcgaccaacccttccgtgaccccttgggctttgacaaaaaaaacaggcttccggcattataatgtcactgcgtaggtgctagtcatacacgtaccaacctctcacggacagccccattggatgcactgcacaataatttacattcagcttaatcacttccacagctttcttaaagacatttttttctcgttc

SEQ ID NO: 27649 - DNA, 104 bp, Gossypium hirsutum
  Clone ID: LIB3166-055-P1-K1-G7
tgcacacaaaggagtttacgtgtccctttaggaaggtacacccaacttgtgaggggtgctccgatctgttggcaaatacctcccatccaatatttcctttgacc

SEQ ID NO: 27650 - DNA, 319 bp, Gossypium hirsutum
  Clone ID: LIB3166-055-P1-K1-G9
ctgaaaactttctctcttccaaactccatctctcgatgcttccctaatgtggttcgctcagctaatcatgccgggcttgggtctctgcataatcaggaccgcccatttccaggtaaaattcctttccttttttaagcatttttgttgcagggttatgtccagggttgttggcaaacctgggggtgtgaagaaatctgatattttaaacttctagaatttccgtgggtataacataaatatatgcccctaccatggatctgacaagaccctttttgtcgcatttctagattatggcgaggaaatctctttaaaaaatgag

SEQ ID NO: 27651 - DNA, 230 bp, Gossypium hirsutum
  Clone ID: LIB3166-055-P1-K1-H4
ccgggtcgacccacctcgggctgaagcagtggatgctattgttcatatctaccaattgatcgtttcaagtgcatttcgtcatttcttctaattgaaccttcattgatttgtgattgtatgacaaacactgtttagatttgacttgtgtattttattttccctttaacttgatgagaggggtacatagacgaagcttcttgctgtccaaatggcagccggcgttgattatt

SEQ ID NO: 27652 - DNA, 208 bp, Gossypium hirsutum
  Clone ID: LIB3166-055-P1-K1-H6
gagggacttcagataacatctatgtataacataatccatccagactcaaggtgcagtgggggctccttgtctatgattctttccagacactccctcctactgtgttccctatacaaacttgctcggctagtcccttacaaataaaacgctttatacaatgctatcatattggcagttctgccttgccataactaaattcaatggatga

SEQ ID NO: 27653 - DNA, 177 bp, Gossypium hirsutum
  unsure (1)..(177): unsure at all n locations
  Clone ID: LIB3166-056-P1-K1-A4
tccttctttcccaagccaattccctttctttagattcccaagncatagaatgcgttgttggcttaccagnaattctcctcaaaaggccaggctccgacctttcccttccttctatcctcttaaactctcacatggacgagggtccattcgaaccttcgaaaatgacccatccgcctc

SEQ ID NO: 27654 - DNA, 253 bp, Gossypium hirsutum
  unsure (1)..(253): unsure at all n locations
  Clone ID: LIB3166-056-P1-K1-A7
ctccattttttnctcaacctagtactgtggcaccgatccacttccagnccnncaccgatccaccttnggncctccacagctccacccatttcccccatttcctgtttcccttcttccacaaatccctaaccccttacccgactgccctcctcccttttttctcaacctccacctncgatcctccacagctccactcatttccagaattagagatacaagctattgactattgaggcaaaaaaaacagcaagcc

SEQ ID NO: 27655 - DNA, 339 bp, Gossypium hirsutum
  unsure (1)..(339): unsure at all n locations
  Clone ID: LIB3166-056-P1-K1-B11
gctgcttcatacataaacatacttagagacagtttttacaactagggcctgtaccactcaatgtttccatcgccttatggcttcccccaagtctacgacaatgtcatttgatatctcttgtagtcactcaaaagggtttttgagaattttcatggaaatgaaatcgntgcattttgatcttccattacatggagatggagtgttaggatcaattaaaggagcttctttccttcaaaggaatgcagattttggaagcaacttgatgactngcattatcgntggggctacatcttttcaaaaaagcaatacgttttcatcatcggctatttgctctctacg

SEQ ID NO: 27656 - DNA, 246 bp, Gossypium hirsutum
  unsure (1)..(246): unsure at all n locations
  Clone ID: LIB3166-056-P1-K1-B4
ttcttttgattgnattttcctctgctggttgtcttttttttcctgatgttttcctttnctgnaagtcttttgattggntattcgagcagaggaggagccttttctgtttgtacttctgntacatgtgcggcaactttatctattgagttcgctgntttttgactttttcccttttctgctcggctcttttattcctttctctgtttccccttacccttattttctgctctctctttcctcttattt

SEQ ID NO: 27657 - DNA, 289 bp, Gossypium hirsutum
  unsure (1)..(289): unsure at all n locations
  Clone ID: LIB3166-056-P1-K1-B8
tttttctttttatttaannataaactatgtatgtatgtgtactgnacataaccgnacccagcgtttnccggagtccaatttcacttgacgagatgatatctccggttagcctttgtacgggcgttaccttcgatcgttcctgcatccttttatggctcgtatctggtcacgacacctgtccagccaccatgcaagttcttccctccatggatttcatccctaaccttactctccatagnctaattaatctctggatccagncttcttctctccggcctggctcttactc

SEQ ID NO: 27658 - DNA, 278 bp, Gossypium hirsutum
  unsure (1)..(278): unsure at all n locations
  Clone ID: LIB3166-056-P1-K1-C11
gaggcacttcaaagcagcatgaggctaaagactatgcgaaaagactattgataggctacgatgaggctgcaaaggaggncgaaacatcgcttgcctctataacaaggtcctcttcaaatacagacagagggaacaaagagaccaagtttcagcagtgcctgcttctgaatataagttattgtccttcgtcagatgtagatctgtcatgcggaaaaaatctggaggttgttgtctacaatccttagggatggaaaagggaggatattatacgaatcccg

SEQ ID NO: 27659 - DNA, 290 bp, Gossypium hirsutum
  unsure (1)..(290): unsure at all n locations
  Clone ID: LIB3166-056-P1-K1-C6
cccacgcagtccgctcaagctatgccgaccaaacaagnncaggncctctcagcgcaagcaaaggggcgccagacaccagccacgaccaccacaaccgnaggaggnccgaggaacaaccagagncaaggagggggaaggnccaaaggacacgaggctaaccttagccaaccaaccagcaacatcaacactgccgaggaatacttaaaggaagctgntaaaccacctgctcccaggtaagaaggatatcctaacaccattgacagcaaggaagctgaaagaaaatatggcga

SEQ ID NO: 27660 - DNA, 328 bp, Gossypium hirsutum
  unsure (1)..(328): unsure at all n locations
  Clone ID: LIB3166-056-P1-K1-D4
cggtcgcgtggggttgtttttgttttccttttttggtggtttggggcaaatgttgttgtttgggttagagtagnaggagnnaagnacgncagnagtagatctttttgtggggtttgggtatgtgttgccgctcttctgaggcctcctagtttgtgctccatacactctttttctttgcctgcctgtattcgtgttttgatgnntttgtttatgtgcgtagccggcttcttcccccatctcctctccctcctactcatttgctgnttctataggctncttttttctctttgctttcatccggggcaactttgttgctgctgtgtttttg

SEQ ID NO: 27661 - DNA, 232 bp, Gossypium hirsutum
  unsure (1)..(232): unsure at all n locations
  Clone ID: LIB3166-056-P1-K1-D7
tccggtttgattgttattttgtgatttttatttccttgctttctttgggccgtttcggtatgcatgtactacaccgaagtcaaatgaccgacaactttccgggaatctctgccctccgatctatctatgatgctattccggtcaccgtcattgattatctcctatccgnttattttctgcaccctggcctcctgtctcggctcttccttgccactttcggccgccttttctt

SEQ ID NO: 27662 - DNA, 227 bp, Gossypium hirsutum
  unsure (1)..(227): unsure at all n locations
  Clone ID: LIB3166-056-P1-K1-E1
cgtccgcccacgcgtccgcccacgcttccgttgaattgtccgttggcggactggacaaagctagctgttgtgtccgcaagaggattgtcgaccanggcagngncactcatatgccctctagggggaagactaggctttcgatactcggagttnttgactaggccggntagaacccaaagcccccagagttctggctgcttccttctttccttcctatgcatcctgct

SEQ ID NO: 27663 - DNA, 272 bp, Gossypium hirsutum
  unsure (1)..(272): unsure at all n locations
  Clone ID: LIB3166-056-P1-K1-E10
ctagctctggttagagtcttttatccatataatcgatgagctctttttgatgtgctggtcgncatttatgcccttacatcaggcattgctgggtacactgcatcttctttctattgccagctagaaagaacaaatagggagagaaacttattactaaccggaatctagnttagcagacctctttttgtcacattttgctttcttaatactgncgcaattgcttataaatccacatcagcattgccattaggaaccatagaggagatttttct

SEQ ID NO: 27664 - DNA, 250 bp, Gossypium hirsutum
  unsure (1)..(250): unsure at all n locations
  Clone ID: LIB3166-056-P1-K1-F1
ccaaatttagctagaagggaaaaaaggaactgagctgagataactnagaggggctgaatgttgcttggaccggcaaagatgctgggttcgntgagtcttctcgcagcaacgccttttgcttttcgttctttctcaccttcacctaacaacaatcgctttttgagttcagcaattaatcatcaaatagctaaacaactagccactgaatccggacgaggatcccaaaaattgcttcggcgacatgtatttc

SEQ ID NO: 27665 - DNA, 273 bp, Gossypium hirsutum
  Clone ID: LIB3166-056-P1-K1-F12
tgcgtcctgttctctctatcctcgaacgtcttcctccataagcaagataggacacggtttttcccgtttttcttcttcttcttcttattgttcttgttcatataatttaatattaaagattaaaaggtaaagacttcgaaacttggattctgttggatatctgatctccatatactgatagtctgatacgaaaaatggtttttaataggcggctaagtcggtatctatctttgaatttgccgagaaattgcttcttgaactttggaatctgcc

SEQ ID NO: 27666 - DNA, 111 bp, Gossypium hirsutum
  unsure (1)..(111): unsure at all n locations
  Clone ID: LIB3166-056-P1-K1-F4
gcagaatttataggattttttnntttgtttccaggctactaggcatgctcgttgggtctttgtaggagggctttctcctacagccaaagaactgnctgttgcgatattctt

SEQ ID NO: 27667 - DNA, 319 bp, Gossypium hirsutum
  unsure (1)..(319): unsure at all n locations
  Clone ID: LIB3166-056-P1-K1-F8
cccacgcgtccgcccacgcgtcctgttggtagtgtcggnctgagagaataggagaggatattttaaaggtagagataggatgtaaggatctgcctttttcctcgtgataagggggctgagtgtcactgggttggagactcccagggagctcagctgatcagaagtcggttatgctgcagtaaattatataaattatcaccagtatttttactttgttcattcaattttaaaatatttttcatttatattatcagaaatttaatattttagtcattcattataatattaaattttggcttcattatcaaataaataataa

SEQ ID NO: 27668 - DNA, 199 bp, Gossypium hirsutum
  unsure (1)..(199): unsure at all n locations
  Clone ID: LIB3166-056-P1-K1-G9
aaaaaacaccctttagtttatactcaaagccagagtatccacgcgcgttggatggtcccatgtcaagacactcccgcggcgagaatccgntactctgctttgctcaaagtccctcgggagttatccgccgttatgtccgcccgccatgtcgataggatgtcaccggtttccggagaatgacattcgcatttgttgcccg

SEQ ID NO: 27669 - DNA, 244 bp, Gossypium hirsutum
  unsure (1)..(244): unsure at all n locations
  Clone ID: LIB3166-056-P1-K1-H1
ccctcgcgtccgggcttcccggactatcccgcgtggttaaagtncaagaaaatgtgtcctggattcgtcccctgattagggtttccaaaagctcccctcccccagttctatttctacatcatcggctactactctaatatcaaggagggttcatttcttttttggcttttgatgccaaaaccttcgacccgtctaccttagacaggtctttggtgctccattagtctgcaaaagtcgcttggga

SEQ ID NO: 27670 - DNA, 188 bp, Gossypium hirsutum
  unsure (1)..(188): unsure at all n locations
  Clone ID: LIB3166-056-P1-K1-H5
gcgattcactttgcacatccagtcgtcggttattcttccgcttcgcgaagattagctccctttcgcaagcccctagcttcagccacaaacgcatcagcatcttcagaaaagtgttaagtttctgccccttatatctcaccctgagaatttctggctatatctgctggaacagcatgcatctnctcctt

SEQ ID NO: 27671 - DNA, 321 bp, Gossypium hirsutum
  unsure (1)..(321): unsure at all n locations
  Clone ID: LIB3166-056-P1-K1-H6
tccatccttttttcctcccgcagcaccttctcccaagttgtttggtcctgtaactccagggccggcgcactccccctttcaccatggncctgttgcaatgccaccctctggttcatctccggttcctgctctggctcctgagcctttagcaatgcctccctctggatcatctccggntcctgctctggctcctaggccttttgcatagtctccttcagcattaactccaggtccagcacagnctccttatcaccatggccccatatctaatccccccactgcatcatcacctgcaccttattcaagcccagagctctctcc

SEQ ID NO: 27672 - DNA, 344 bp, Gossypium hirsutum
  Clone ID: LIB3166-057-P1-K1-A3
gtgtaattgcatatccggccatactttttaatgacataccgaacatggcttcgggtgatgtacagtaccagtgcttcatatgaggaatcgaatggaccataaaccacacgccttttgaagaagcctaaagggcttacggagagatcagtgcattgagctatcattaacgaacgtgagactggacgatccagaggctatggcttacatactctgcgtgatgagaaatcgatgagagatgctattgaaggaatgaacggccagagtattgatggacggaatataaccgacaacggaccacaatctcgtcaaatccaacacctaagtggtggaagaagatttggagg

SEQ ID NO: 27673 - DNA, 389 bp, Gossypium hirsutum
  unsure (1)..(389): unsure at all n locations
  Clone ID: LIB3166-057-P1-K1-A8
ccgggtcggacccacgcggtccgcttttccttaagggttgggggaatattttttatcaaaaaaaatgtcttggcagtaaaatacaggttttaatttacatanttccttgacattgttctatagcggttagcacatagcttctggctatttatttatttattattgacatgctcaatatctatttgcatattgttctttgataggcagtccatcaagaagcttttacatacttggatggtcagaaggaatttgctcagatagaccctaatgatttatatccttatcttcttgttaacatcgggtctggtgttagcatgataaaggtggatggagatggcaagtttgagcgagttagtggaactagccttggaggtggcaccttttggggt

SEQ ID NO: 27674 - DNA, 362 bp, Gossypium hirsutum
  Clone ID: LIB3166-057-P1-K1-B10
taataacccataatgacaatgtcagtaaaaataaaccgacttgctaaatggacatgtcatcttctaatccccaattctatgcaatcttcccatttaatctgtgtcccccgcaatctttccaactccaaaaagtcttacatctaacctgttccttgatcatattaatatctgtcgccgtgaagtccactatatctctcaatctagataaagttaggcactctaggctagtggaagaattactgcaagtagagccttcttgatgaacctattgagttcagcaatagatattaatgggaagatatttctttagtaggacaaaaagggaacaattctaaaaagatctccttaatatgatcttctca

SEQ ID NO: 27675 - DNA, 357 bp, Gossypium hirsutum
  Clone ID: LIB3166-057-P1-K1-B3
gtggtgaggtcctggacctctcatggtcaaagaataagcatattctatcatccgctgttgataagacagtacgattgtggcaagttggatatgaagaatgcctaaaagtattttctcacaataattatgtaacatgcgttcagtttaatccagtggatgatgattacttcataagtggttccttagatgggaaagtgcgtatctgggcaattcctggtcgtcaagttgttgattggactgacatgacagatattgttacagctgtgtgttaccgtcccaatggaaagggtgcagttgttggctcaatgaatggcaattgccacttttatgatgcatcagataactgtctgcaactta

SEQ ID NO: 27676 - DNA, 186 bp, Gossypium hirsutum
  Clone ID: LIB3166-057-P1-K1-C1
gaccggcaattcccgtcgacccactcgtgatccctaatgctttttcatttgatgagcaagatgggggataacatactacgttgttcctaaatcctaactctgttacatttgctgtgcttgtttgtgaccctgtataaacctgcctgatcacttaaaggcataaacttattggggcctggaactgtt

SEQ ID NO: 27677 - DNA, 352 bp, Gossypium hirsutum
  Clone ID: LIB3166-057-P1-K1-C12
gtcagttagatgaatattaatgttatgttcctttatttcgtgatcttgaaggtggggtttttttttatttgcctatcaagttatattctttgtgagatttgtccttagtgatagaaatctgtttgtttagtttgatgagctgggtatttcgggattttgtcactggtttgtttggtagctggaaatgttttgcaagtgaaaaacaaataaatgtttctttttttatggcggcgaggggttgagcgtttgcatcccatataggaacaagtaacagtagggttaaaagtaaataagttgattgaatgacatataattgacagcttaatacaagtaatggacggcaatttatcac

SEQ ID NO: 27678 - DNA, 358 bp, Gossypium hirsutum
  Clone ID: LIB3166-057-P1-K1-D1
cccacgcgtccggtggatatttcattgggaatgctagttagccctccaggctggataaactcaccaccttctgatgattcaccagataattcagatgtagatacactatggacttacacttaaaatagaaaaattcactgtaaaagtgatgaatgagagagagtataaagtacaatgaaatgtagaagaagaagcatggtttgaaaactagggtctagatgctactgatgattcagtaatatgaaatgcagaaggtactgtcatttgtccttttttttccctctgtcccttctggtttttatctcttttaggggttgttccattgctggaaaaacatatgaacaaatcagaagccaat

SEQ ID NO: 27679 - DNA, 358 bp, Gossypium hirsutum
  Clone ID: LIB3166-057-P1-K1-D12
cgaaaaagggtctcttttcttttctgcttaaaaagttcagatcacgtcaccgggttggaaacaatcttggacggcggtgtcggattttgggttttgggtgtttttttgacgagagatgtctgatgctctggggattgatgaatctgttctcgctctgctggaagccattcgggcctgacggggaaaatcacgagacaaacggcgttcttggcggcggcggcggtactactggtggttcaagagaaggtaaagacggcttgctttggtttcgggatataggaaaatatggttccggggaattttccatggcagtggtccaagcaaatcaggtgcttgaggatcaaagccagatcgagtc

SEQ ID NO: 27680 - DNA, 354 bp, Gossypium hirsutum
  Clone ID: LIB3166-057-P1-K1-D3
ggcatctactgacccaaacctttttgtgtggcccataatggaatatggtggtcctatgcagagtcctggtggaagtgtgttgtggaatgggataagtacaggggctagagtaaaaaatacaagttcagattggtggtatgaggatgcatcaactttaagttttcctcgctataagagattgattgcagtcatggaatctcgtggtatcagacaggagatcattgctgggtctcttactttttatgcaaaaaagtatctacctggtttgaacaggtgcctgggtgctactgatactaattctagtacctgtgtggcacccgtggccttagaggctcctccgtcagaagaagatca

SEQ ID NO: 27681 - DNA, 361 bp, Gossypium hirsutum
  Clone ID: LIB3166-057-P1-K1-D4
ttctttccttccttttcttttttttacacacactttcctcccccacaactgggggaattaaaagggaaaagggtaaataatgccgggctttggtggtgtaggacttcaactagaaactcccaatagggacggtccaactcgagatttgcgtgaccacctcccttctttaatgtcttcttcttatcctatcactctcaagttcatcgacgtgtgttacaaggtgaagatacagcaaaccaacactcgaggtcggagcattaaacgcatgctcacccatggatccacaccttctgatcagatatcaaccatccaagagaaaactatcttgaaaaatatcacgggcgtggtttcaccaggggaa

SEQ ID NO: 27682 - DNA, 360 bp, Gossypium hirsutum
  Clone ID: LIB3166-057-P1-K1-E10
cgaaaaagaccaactaatatattgttggatcggggaaggacttttggacgagcgtacgaatttgagcagtgccagaaaccagggacatttcattataggttctcttattgacgcatgcttattggagaaaggacctaataatgattatgtaaagatgcacgatgtgattcgcgacatggctttgtggattgctggtgaatctgaaaagaagttttttgtaaaagcaggtactcagttaaaggaacaaccagaagctgaaaagttggaagaggtaattagaatgtcgctgatggataatcgaattgaaaatctaactaagatattggcatgccccaatctccaaactttatttcttggatg

SEQ ID NO: 27683 - DNA, 361 bp, Gossypium hirsutum
  Clone ID: LIB3166-057-P1-K1-E4
gaggtactcgtgctttcacaaattaaccataggaatgtggttaagctattagggtgttgtttagagacagaggtgcctttactcgtctatgaattcattacaaatggaactctggcagaccatctacatgataaactatctgcatcatcactaccatgggaaatgcgtctgaaagttgctgcagagactgccggagcgctagcttacttgcactcggcaacgtctatgccgataattcacagggatgtcaagacttccaacatattgctagacaacagttacacaaccaaagtgtcggatttcggtgcatcaaggttggttccactggatcaaacgcagttaaccacattggtgcaaggga

SEQ ID NO: 27684 - DNA, 440 bp, Gossypium hirsutum
  unsure (1)..(440): unsure at all n locations
  Clone ID: LIB3166-057-P1-K1-F10
tctgtctcannatctcgacccaatttctttctttatttttatatagctgttganngtttctttttcttgttttggttttctttttttgggaagatcgagtctctaccaatnngttcaagggttttacactgatctctgggtcttttttgcgccanncctcttgcantggctttcaagctctcannacttctcctcccaacccagcttnncaccttcagactcactccnnaacctcctcacacacacgcgcggctgggcgactttccaacacncnnttccccagacactcgtctacaagaccgtccatccccatgcttccttcannactgttcctacccccatcancccaccactttgcccatncgcgtttcaccaacaacttcttcaccttctccttcaatctgctgctctcctgctctcaccccagaaggcgcatctac

SEQ ID NO: 27685 - DNA, 360 bp, Gossypium hirsutum
  Clone ID: LIB3166-057-P1-K1-F3
cggacgcgtgggtttagttaatgttaattgagagagaaccattacagctttgatgtctgtctgtctgtttgcttaagcacaaaatctgcagatggcttgaaaaactatcctcgacatgccactgcagccaagctccaaatgcaaaaaatgctggaaatggagcaactagccaacgttcagggtctgccaacagagaggaatacactcaataagctgatggcattgcatcctggaataaacaatcaaacaggcaacaaccataacatagtcggtcggggagctttaagcagttcagcacaaactgctttaatacttactaactaccagaatctgcttgttaggcagaattcgatgaattca

SEQ ID NO: 27686 - DNA, 505 bp, Gossypium hirsutum
  unsure (1)..(505): unsure at all n locations
  Clone ID: LIB3166-057-P1-K1-G11
ttcccggggtcgaccccacgcccgtccgctccaccgccgtnnccgcccaccgccgtcccgttggtacgtctgtgggaannaaatgcnntttgagtgtacgcgtctggggagaatcaatcacncnntttcccanntcgctgcccatntnnctcttnnttcttacananntttaatangnntgatcantnnctccctnnntgcaaannatatgctnnnttgaaaccccanannaatagagnnngattgtntnnttattggttnnngttcganntttggcaaggttnnnttctctttcacannnttgaatnggtgtgtcnnaccaccacnnctattgttnnngaggagccccaagtagtcaccgaaccaccnnncattcacaagnngtggttaagagccatctnnncattcaattgtgatgcccatgtggcactttagggaaactatgntttcttatatttttgcttttcacatgtaannnctaatggtcccataagggannatgtat

SEQ ID NO: 27687 - DNA, 274 bp, Gossypium hirsutum
  Clone ID: LIB3166-057-P1-K1-G12
aataaacatgcaaatcttgatgcatatcttttccgagacgaccatcaccctgacggtggcgagttaagacacgagctacaacactaacgacaacattcaggacaaggtacggatcccggcaggcctacaaccagtcatacaacgcgtaatacagctcggaaatcacctgacatatggccattccatcatcgataacgagatcaacatggatttcaccctccatctacttcttggcatacatatcttcatgcaaatcttgaccgaaacgatcatc

SEQ ID NO: 27688 - DNA, 362 bp, Gossypium hirsutum
  Clone ID: LIB3166-057-P1-K1-G2
tgaaagtttatctgcattgaacttcaacgcttttccgaactcaatgacagtggcgttctggaaaaaatgctgaagtttgtgaaaccaaagaatcttcttcggaacagaagatgaatgccccggatgtacaaataagtagtcagcaagtgggcataatcgactcatctcagagagaagaaagagagtcaagaaaaagacctgaatttgatctcaactgttctcttcaagaaaaacaagaatattttgcagatcatgtggaggctgatgatgctaatgacggcaagagattaaagagttgttttggtggaatggctgtagataggaataggataaaagatataataaatgatagatgttcccta

SEQ ID NO: 27689 - DNA, 367 bp, Gossypium hirsutum
  Clone ID: LIB3166-057-P1-K1-H5
cttttgcttcatctccgttgctggttaatttatatcagtcagctgagttatctaaagcatcaaagccttttgcatttaaacacaatatccctacctcagcccctgatgttttatacagatggcatttgccagagccatctgccattgatgtttctgggaactctgattgttcgacagctaagtctcgcacagctgtagtcttattaggatggttggggtctaagcagaaacatctcaagaaatatgcagattggtatacctccagacgctatcatgtcattaccttcacctttccaatgattgatattatcaattatcaagatggtgggaaagctgagaaggacgtcgacatgcttgttaatcactt

SEQ ID NO: 27690 - DNA, 362 bp, Gossypium hirsutum
  Clone ID: LIB3166-057-P1-K1-H9
cccacgcgtccgcccacgcgtccgattttactttacagaattattggtgttgaaaggacgagaggatgaatatggtcacacactaggacttgttactagtatagacctttcagctaacagtcttataggagagatccccaaagaaattggtagtcttgttggactattgtctttaaatttttcacgaaatttcctgacaggacgtataccagacaacattggcaacatggagctaatggaatctcttgatttgtccatgaatcggctaaatggtgaaatccctccaagtttctccaaattgaatttcttgaatcacttcaatttgtcgtacaacaacttgacaggacaaatcctaacaagca

SEQ ID NO: 27691 - DNA, 256 bp, Gossypium hirsutum
  Clone ID: LIB3166-058-P1-K1-A10
tccttgcaaactttgcttaacaactttaaaaaccacaaaccaaatactaacacctttaaatctattgcaaaaactagcattaattttatacacagttcaaaactaatgaaaacaaagttgagggcttaattactaaaaacaaacctctctctattttaacagatagtccggaaggcctatccaagaagatttgagggtatctacttattttgcatacctttttgggcttcaacacagcttgacaccttcaaggaat

SEQ ID NO: 27692 - DNA, 228 bp, Gossypium hirsutum
  Clone ID: LIB3166-058-P1-K1-A7
aaccaaaaccacccgggcggggttaatttatatcttacctaccacccacaaagggtcttcaacccttaatacatcacgacggtggtcattgaagtctaaatcctctaaggagtgtgcaacaacttacctgccaaatcaactagtcccatacattgatggcgcttaaacgcgcgacctatgccaagccgtcggggcaagggccaggcacccctcagtaggagggctcgg

SEQ ID NO: 27693 - DNA, 310 bp, Gossypium hirsutum
  unsure (1)..(310): unsure at all n locations
  Clone ID: LIB3166-058-P1-K1-B10
aatggnaccacctttgtttcccaatggtcccnnccaagcattggtggctttaacatttncactaacccccaaatanggcntcagggtcaggtatattgctcttctggacgttgcggtggtggttggaacaatataattggttgttggaatacgagagaaagggaagtaaatccatttgattataattatgaagctgatgttaatgaccaagcatttgatgaacaagaaaattccgtgatcaaatttctatgcttactaagacattctctgtggaaatgtagtggttaaaaatttttcccaccacctttta

SEQ ID NO: 27694 - DNA, 291 bp, Gossypium hirsutum
  unsure (1)..(291): unsure at all n locations
  Clone ID: LIB3166-058-P1-K1-B12
ggaaatgtccnaacagatacgaagagatgcaatggttttctttctcccagattcaacaaccagcaacccactgccattgttgtctttgaaccatgtnttcttttgtctgcaaatctgtgagcaaatccgtgaggttttacgagcaagttttgggatttgttctcatcaaacgcccttcttctttcaactttgaaggagcttggttgttcaactacggtatcggcatccatttgttagaatccgagagcgttccaacaaagaaagagaaaataaatcccaaagacaaccata

SEQ ID NO: 27695 - DNA, 324 bp, Gossypium hirsutum
  Clone ID: LIB3166-058-P1-K1-B4
ttttccaatggtccaccccaagcattgttggcttttactaatttactaacccccaaatactgcgtcagggtcaagtatattgctcttctggacctggcggttgtggttggaacaataaaattgtttgtttgaatatgagagaaagggaagttaatccatttgactattatgattaatcttattttaatgaccaaacatttgatgaacaatataattctttgaacaatttcaattcttactaggacattccggtggaaattagtggtgaaaatgtgccaccacctttaaaaacatttgttgatttatatttatccgagcttttta

SEQ ID NO: 27696 - DNA, 294 bp, Gossypium hirsutum
  unsure (1)..(294): unsure at all n locations
  Clone ID: LIB3166-058-P1-K1-B9
cccgggcgacccacacgtccccnacccatnctttctacttttaatgctacctggccacaacggtctccgcgacgtctttatcaacatcactccacacctcctaaaaccaccaaatattgtgcacccattctccctcttcctaatgataaatattaacatcaaatactacacacatcctaactattaattcgattcttagactccaaacaaacatctctcccaccataaatccattcataataaccaacacaacccacttatcataaccaccactctacttttctataaactaat

SEQ ID NO: 27697 - DNA, 360 bp, Gossypium hirsutum
  unsure (1)..(360): unsure at all n locations
  Clone ID: LIB3166-058-P1-K1-C11
gtacttatggatcgtaaagctgaatttttgtcttaggtgttatgtgaccataccgtggggtataattctnaaattgattatctactcctcccatcaaattatgtgggccagagtcctctgattgattggttgtcagttacttctgtcacattttcttatgaaaaggcctgcaagaatcatgtgaactgcaatgctgatatgatacagatcaaaagcggtctggtgtgcacttgcatgatccaaaattctttggtctctactcctcataatggtcatgcttatattatcagtggtcttttaactaatataaatgcaaattcacttttgaggttgagtgatggacgcttaatgacttacaag

SEQ ID NO: 27698 - DNA, 355 bp, Gossypium hirsutum
  Clone ID: LIB3166-058-P1-K1-C3
ccgggccggccacgcgtccggcccacttccaaaaaacaaaaacttttttatccaaagaagaccggatgggagctcggggtatatccttcgtacaccacccgccttcacacgcgcctgcctatgggccactggatcttacaaactcctcaaatacaaatatcaatctgtcaagatccaaaccaagaaaccatacatcatctcaaacacattaacattttactgaaactgccatatctactggcataaaagataaactcaacgtcgctaacttatcaccatgggaactgattgcattcaaacccaataaaggtgactgcaaactcgaaataaaagatacaaaacctgaccaacataa

SEQ ID NO: 27699 - DNA, 352 bp, Gossypium hirsutum
  unsure (1)..(352): unsure at all n locations
  Clone ID: LIB3166-058-P1-K1-C9
cggactcgtgggcggaaaccaatatgtatggttgcaaagcttcctgcatnagtaattgttcttgcatggttgcgttctatgacaacagctcgaggaactgtttcctttttgaccaggttggcagcttccaaaactctaatcagccgtctaatttagttgcttttgtcaaaatgtcgagcaatgcaaatggtgtagggaatggaggcggcaacaaaagcttcccatatgttgcgattatagtagtttctacggttcttgttattttgggcttactctttgtgtcatatcgatactacaagaaaaagaaaaaagttccaggatctcctgttgattcttcagaagaggatatctt

SEQ ID NO: 27700 - DNA, 209 bp, Gossypium hirsutum
  Clone ID: LIB3166-058-P1-K1-D8
gggtatggtttctggttgggtatcttaaactgcacattaaaggttctatggttgttgtttatgtcatgtcatgtaatgtaatagggaaaaaaaaattctacattgttattacatctgtgtatcatgtcttattgttgtttgaactttgcagaagtttatttgagggttgtaaatgaacctagtttgaatgaatggattttgttcgtgta

SEQ ID NO: 27701 - DNA, 274 bp, Gossypium hirsutum
  Clone ID: LIB3166-058-P1-K1-E10
ttagaaaaattcttattttttaggccaggcaacttgtaggttcaactttattggcagaggaagaagatagaccacatttggaaaaaggtgaattctatactcgtgatcttgttggaatgagagccattctcaaggtaatgtacttatttgctcatcagcccttaatattccatatacaggtgtaactgagttgagctgagcctgaatactagcaagcttgactcaaaattcgaagctcaatacttagctttagcttgattaagctagtttatca

SEQ ID NO: 27702 - DNA, 374 bp, Gossypium hirsutum
  Clone ID: LIB3166-058-P1-K1-E2
ccgggccggccgacgcgtccgcccacgcgtccgctacgccgctcttctttttcttaaatcgttatctaaaggtgagtcgagcgaaccttggctcaacacccatggtgatttcaaccgagttttccttataggtgatagctcaggagggaacatcgtgcatgaagtagctacacgtagtgggttcattgatttgaacccactaagactcgctggtgttatccctatccacccagggttcgttcgggctcagcgaagcaagtccgagttagaacaacccgagtcacctttcttaaccttagacatggtggatacgttcttagccttagcattgccgaatgggtgcaccaaggaccatcccattacttgtcctatgg

SEQ ID NO: 27703 - DNA, 139 bp, Gossypium hirsutum
  unsure (1)..(139): unsure at all n locations
  Clone ID: LIB3166-058-P1-K1-E3
gggccggccgacgcgntccgaaagaaatagtttacatgagtagaaatgttaaattttatagggggaatcataaagatgttatttcttctcaacgattgaactataccaaaatttataaaacaaactgggaccttgtttt

SEQ ID NO: 27704 - DNA, 357 bp, Gossypium hirsutum
  Clone ID: LIB3166-058-P1-K1-E4
cgatttgatatattaatatgatgttattgaattaaatagtagcatgtaattgaaggtaatttatttagattttcttttaggaatttttaataatgtgtttaattcaataacaaggtaatatacataatccgtgtatatatcttttttttatttataaaactattaacaacaaagtatttaaattttgaaatatggaagcatgcaaggaaaatgacacattaagtatttctaacaggtattctcaaaaagaaattccataattaattgacttaaacgtattttaagtataaaaatgcataaacggttaattttcaaatttaattttatacatttttctcaataatatttcagtcgagg

SEQ ID NO: 27705 - DNA, 355 bp, Gossypium hirsutum
  Clone ID: LIB3166-058-P1-K1-E5
aagagactcatgttggaaggaaaatctgcggaggcagataacctcatgctacgagttgttgagcgtggacacctttcacctcaatgtgaatgacattttgaagccatattccaaattttccgacactggagctttcccttttaagttcaatggcttgaaaatgttaattctggacataacatgattaagagatttggagatagatccttggaaacaatactatggatctgcaatcaatagtttgtatatggagcgtatttcctgatactgcaataacctctgctacttgaggtgccatctcacactacaaattttctgcattgctgctgctgtggactgtggacttaaatgacat

SEQ ID NO: 27706 - DNA, 358 bp, Gossypium hirsutum
  Clone ID: LIB3166-058-P1-K1-E6
gggacagccacaaagcaaaccaagttaaccaaggtttcctcagccaggggatcagatctactgtgaaagaaagggaggtctctatgatcaccatggaatatatgtgggggacgacatggtgattcatctccggggagcagccaagaaacttggggagctacctgcatgccataaatgtggagacaagcgagtcgaaaatggtgaaatagcaaaagtatgcatagattgtttccttgatggtgcaacgctccagatctttgactatggagttccccttttagagttcattgcaagaaaacgtggtacttgctgccaacgcgattccaagcctccccatgaagttattagcaccgcaact

SEQ ID NO: 27707 - DNA, 362 bp, Gossypium hirsutum
  unsure (1)..(362): unsure at all n locations
  Clone ID: LIB3166-058-P1-K1-F12
cggccaattaaaaatgggtccgggattggtttggagttcgcggtgttgacactggggcgggtgtgtgctgataacattagaaaccntggtttgcttgttagagaaggtgggatacctcctcttgtggcgctttctcagactgggagtgtaagggctaagcataaggctgaaacactacttgggtatctgagagaaccaagacaagatgcttcatcatctagtccttagagaagagaagtataattactcatgtagaggtagttatacctgggtgttctatttattttttgtatataaggagtgttatgatggtttgtacagtgtggttgagaaattatcgtacaagttaaaaaaaaggaaca

SEQ ID NO: 27708 - DNA, 325 bp, Gossypium hirsutum
  Clone ID: LIB3166-058-P1-K1-F5
accctcctacgaaatttttaagcctaaaaggccactccaaaaaaaatcaaaagtggggtagtattttcgagaggtaggcctgatatcaaaaagggcgatggatgtatcaatcaacgcgaacagggtagaagctaagcatatcgaggctgcacatttatgccatggctaagaaaggaggtcagagagggcataggtgtctcatttccaaagaaatagagagacgtactggcatccactatactcatgaacccataccaaccatcatgttcttgggttcttgcacccacacctagctagcctccctactataagccttatgataatc

SEQ ID NO: 27709 - DNA, 350 bp, Gossypium hirsutum
  unsure (1)..(350): unsure at all n locations
  Clone ID: LIB3166-058-P1-K1-F7
gcnnaatttgccggtctgcttttatgattaaagaggttcatcggcggtgtccggagggtgataatgctctgtggagccctactttctaatctgccgctttcatgtgcttcctaactcaggaagacaatatggtggagcgttgagcatgcgcaagcagactttcaaaatctttctttttcgtagtctaatgagtacataaaatgttatatctagagagagcgcattgaaacggggcctttgctattttagtgtggaaggttattgtcactgttactgtcaccgtagcagccctaaatgaaagctgctgtcatcactcaccacccactcattctttcggacatgaaagccta

SEQ ID NO: 27710 - DNA, 359 bp, Gossypium hirsutum
  Clone ID: LIB3166-058-P1-K1-G4
aaatgatatcattggtgtatgctttgtgggtcaagatatcacatctgagaaaggcgtgctggataagttcatccgtttgcaaggagattatagggctatcatacaaagtcttagccctttgatccctccgatatttgcttctgatgagaatacttgctgttctgaatggaatgcagccatggaaaaactgactggctacagcagaaatgaggtcataggtaaaatgctagctggagaaatctttggaggtttatgtcagctcaaaggccaggactcgatgactcgatttatgatcatgttgtatcaaggaattagtggtcggaatgctgagaagtttcccttcagctttttcgatagaa

SEQ ID NO: 27711 - DNA, 353 bp, Gossypium hirsutum
  Clone ID: LIB3166-058-P1-K1-G7
cggacgcgtgggtcaggagccattgtagctcttgtcagcacctccattttgtgcgcacttgatacttgtaaaaccaagtatcaagctgaagttagagctcaccatcaacaaaaatacaggaacactgctgatgttttgtgggaagctatagctaacggtcaagttctttcattgtaccaaggtcttgggaccaaaaatttgcagtcttttatttcacagttcatctatttttatggatatagcttctttaaaaggctgtacttgaagaaaactggaaacaatactattgggactaaagcaaatttgattgttggtgttgctgctggggcatgtactgttataattacacagcc

SEQ ID NO: 27712 - DNA, 356 bp, Gossypium hirsutum
  Clone ID: LIB3166-058-P1-K1-H1
cggacgcgtgggctagaacttagctcatttagtttatgcagttatttataggagtgaggatttagctggttttgggtttgaatcttatcatgtgccacccatccatggcttcaaattatagacttgtaaccctgagactagcttaattgattcaagtaggcattttaagaaacgatgtttaaaaacaattttgatattcgaatgccagcatctgcaatcctttttatcccaaaccacaacttctttggtaccaaagaaacaaaaatggtaaaacataagagactacgactactttcaatccattagagctagagatttggaatctgagattgtcaaatgcccgagtgaatttgtgt

SEQ ID NO: 27713 - DNA, 315 bp, Gossypium hirsutum
  Clone ID: LIB3166-058-P1-K1-H4
gcggatttacagcagaaattaacataacgaaacaattcaataaatattctgaaggctcctattaagggaagtcgagttgtgttgctcttcgacaccccagtgccttaaccaccaaaagtggttaatggatctctgagcatgctaagagaaccttgccttcactatttctgaccataatccctagtgctgaatgacaaaatctcccatcatatgctgcatcaaagttgatcttcacaaactaatcgatcctcttacccttcttggccctctaacggtcctatcttcccatattggccattaaacgccaccaaaaat

SEQ ID NO: 27714 - DNA, 323 bp, Gossypium hirsutum
  Clone ID: LIB3166-058-P1-K1-H5
gctttctttataatttgttttaatttcttaagatttcgcctcaaaatttgatagtttttctttttctcttgtttctttttcttagaaaatcaaacccctaaatccgttacatttccagttaaaagaaaatcaaaaaattttcaatggctgatcggagtaggttttttccattgaccatctaccgccgcatcttattttggaaattttaacgtccggtaaacggttaagtgccggtgacctagtgtcgcttgagctgacttcgagaacattcggagggtgtcacgatgtttgtcccaccaaatgcaagtcgcttgttgatttaa

SEQ ID NO: 27715 - DNA, 328 bp, Gossypium hirsutum
  Clone ID: LIB3166-058-P1-K1-H6
cggggcctcattttaggtcagtgacggtgtttttgtcgtaagcttctttttctcgtgacagtatttgtcctacgttcgcaaattaattttccagttccttattaacttttccagtcaagttcaatttgtttcagtttcccaacatgtttcctttatctcttgttttacttttttttttacaagtcttgaaacttttttcgtcatggatcagttacctttctatacttgcatatgtttacacactcctttttatttcctttgaagtcaagctgtaatgctcaaaactaggtgaagcagccatctgtaaagtgtcatggatgtcatcatg

SEQ ID NO: 27716 - DNA, 353 bp, Gossypium hirsutum
  Clone ID: LIB3166-058-P1-K1-H8
tccacacctttgattgcaccaaacatcaatgtgggtgtggatggcatggtgatgaacttggctagcctctttgcggggactgttaccaacccttttggaaattgttactaccagggcccagctgaggcgccattggaagcttcatcagcatgtcctggaatatacggcaaaggggcttatccaggctatgctggaaacctacttgtagacccttcaactggtgctagctacaatgctcatggtgagaatggaaggaaatacttgcttcctgctttgtatgatcctgctacatcatcttgctcaaccttggtctgagagtgacaacaaccttaaccattcttttatttgttaat

SEQ ID NO: 27717 - DNA, 221 bp, Gossypium hirsutum
  Clone ID: LIB3166-059-P1-K1-A3
cccacgcgttcggctttattgccctgtatcttggtgtctcttataactcaaatgaatttcccagtggttatcatcgccaagatgccaaggagctatttaatcaacgacactttttgctgcgaaatgctactgatcgtatttttggggcctagaaggaaaggttccctattttgatgtcggcttcttcctacccattgcaaacacatgtgaaattgggttgt

SEQ ID NO: 27718 - DNA, 199 bp, Gossypium hirsutum
  Clone ID: LIB3166-059-P1-K1-A9
tctcccactctttcggattgtactagcttttgcctccggtatgatttgtggggacggtatatggactttgccaaggtcattacttgctctagcctgggtttaaccaccaatctgcatgatatatttttcgagggctacaaactttagggtttttaatttttataactcaaaaagtttaatgctttctttcataatctta

SEQ ID NO: 27719 - DNA, 313 bp, Gossypium hirsutum
  unsure (1)..(313): unsure at all n locations
  Clone ID: LIB3166-059-P1-K1-B1
atcctgactgaagagaatgttactatattcgagaaaaaagtcacagaattgtgtttagctgaatttctttgttatggaccccagaaagaaacagggaaagaagggaaatgtttatataggaaaacaaaggatgggaaattcgttaaatggaatgttgaaactgatgattcactttgtacattacaagatgctttccagaaagtggaaccttctntaggtttcaatattgagttgaaatttgatgactctgctgtttatcagcaagaccatctccttcatattcttcaagttatcttacaggtggtgtttgagt

SEQ ID NO: 27720 - DNA, 302 bp, Gossypium hirsutum
  Clone ID: LIB3166-059-P1-K1-B12
gaaaaatggacgaaatgggaaaattaatgggaaaggatactatatttatgagaaaggaagcaagccaaaacctgatccttctatattacctattattgaggagtgtcgacggcaaaccaagcttatgcctgccggaaagcctataacaatttctgataaagaaatcctagagatggtgctgttcccagtagttaatgaggcatgtcgagttctggatgaagaagtagtggttcgagcatcagaccttgatactacatctgttcttggaatgagcttcccatctcaccgtgggggaatagtgt

SEQ ID NO: 27721 - DNA, 173 bp, Gossypium hirsutum
  Clone ID: LIB3166-059-P1-K1-B3
tgatatctcttcctcctactcgcaatttttctagcaaatacactatcaagagagagagataaagagagatattatgtgacgtataaaaaaacaaggcaatggacttaggttggatgttatgtagggatttgtacgtataatttcatgtataatcatcattatgactatcattt

SEQ ID NO: 27722 - DNA, 286 bp, Gossypium hirsutum
  Clone ID: LIB3166-059-P1-K1-C12
ggccgctcccctagaaatacgcctaaccggaaacagggcggatttccggatcctaccaagaagtagaatctaacaagcagtaaggtaagtgagtctaggagcaggcgccggaattccaaccatggaagttagtaacgctctaaaacgaatgcgatacgactgctacaatctcatggaggcggaggtggacctttccctcctggaagctcgctagaaattccaaaacaccgtctaattacttgaccttcgtaccctcaagaagcttagtctttttttttagtgccgt

SEQ ID NO: 27723 - DNA, 377 bp, Gossypium hirsutum
  Clone ID: LIB3166-059-P1-K1-F10
aaaaaaaaaggaaagatattttgaggtttgcaaatgtcgttaacaataatatctgcagtttatgaagtttgcagtgatgcagctggtattgcaggtaacatctttgcttttgggctgttcttgtcacctataccaacatttaggagaataatcagaaatggatcaacagaacaattttcagggatgccatacatatatgctcttttgaactgtttgatttgcctctggtatgggttccccattatatctcctggtattatcttggtggcaactgtcaattccattggagctatttttcagttgatttacatcatcatttttcattgcatatgctacaaaacccaatgagcttgagatgttgggttcttggtatcggt

SEQ ID NO: 27724 - DNA, 369 bp, Gossypium hirsutum
  Clone ID: LIB3166-059-P1-K1-G10
gaataatagtactagtaggggaaatttcttgtacgcatctcaagttcttgcatcaaatggttcttcatatggtagaacaagtagtgggtcaataccgccagttttaacctcttttcatcttcaaccgagtgatcaacacccaattgtgaaaactgaagctagtacctcacaacatgcccaaaaattccattacaacaacaacaacaataaccctttgttgagagggcatcaaccaattcattaccaacaagaagggaatgaaagctctagtgaagtggaagctattaaagccaagatcatagcttcatcctagtactcaaatcttcttgaagcttacatggattggcaaaaagttggagctccacctga

SEQ ID NO: 27725 - DNA, 395 bp, Gossypium hirsutum
  Clone ID: LIB3166-059-P1-K1-G5
tcggagcctggcagaagaaacaatctttctctgacttatgtccccttcccctttcgctgtttttctttttgtagttgtcatggcggttatttctgggtgtaatggaaaccatgaagtatttttgaatgttaatggtgtaaccagtcattatcatcctcctactttattagcttcaataagaaaagattctgacctgggtatttttgtaccctttattcaaaagcttatggcagtggtgtttaggcacgttctttcttaatatattgtggtttggctttttgtgtgtgttgaattgtaatacaatgttgataagttgttattattttcccatgggtatttttattattattatggtttttattttgttaaaaggttatttggttgttatttctttt

SEQ ID NO: 27726 - DNA, 295 bp, Gossypium hirsutum
  unsure (1)..(295): unsure at all n locations
  Clone ID: LIB3166-059-P1-K1-G7
tcgaagtccaaagattggaagatgttcttcaaatgtatgagatcacttatattggcacctacacctgtacggattcattcagggctccccaaatcattcctgagtcttaatcttgggaatctcaaatgttatcccttttccaaatcctaactcnnncattatcttattgaacccagctgcatttccatccttaaagcaagtggccaaggaagcatctgcttgttatattacatacatggtattgtattgttttgaaagagataatgggttgtggttgttgttttttatttctttt

SEQ ID NO: 27727 - DNA, 270 bp, Gossypium hirsutum
  Clone ID: LIB3166-059-P1-K1-H1
aattcaaccaaactatccctttctttcttctcgtaatcaccaaatttctacattctttgactgagaaattttttgggttggtcatttgtttcttttcttcttgcttgtttcctaataaaatgcaaaaataactccatgaaaccatgtgtggttttctatatttctagatttgaggattcgattaagattagaccttctctcaccaaacccatattggagttgaaatgagtacttgaaagcgattgaagaaagaagcagttgatattggac

SEQ ID NO: 27728 - DNA, 393 bp, Gossypium hirsutum
  Clone ID: LIB3189-001-P1-K1-E11
accgttgtttaatatacttgggagacctagcgaggtacaaaggactatacggagatggagattctaaatcacgcgagtatgcagctgcttcaaattactacttgcaagctgcatcaatttggccatcaagtgggaatccgcatcatcagcttgctatattagcttcatattcaggagatgagctggtggccatttatcggtatttccggagtttagctgttgataaccctttttcaactgcgagggataacttgattgtagcatttgagaagaatcgccataattactcgcagctccatggggatgttaagggccccttcaaggagcctgttgtgcggctatcggggaaaggcagggggaaattggaagcaaagcttgcatctaaagatgcca

SEQ ID NO: 27729 - DNA, 367 bp, Gossypium hirsutum
  Clone ID: LIB3189-001-P1-K1-F4
gatatacatgccagaaacctacactttttttttttgtaagtatgaacaaaaacaaactgggaaacttcaaaaggctcaggcaatcaattatttaccggaagctagcatttaatgcttgtacacccatatgaacaatcgctctaaaactttcagcaaaacgttgaaaaactcaacgtttacaccaattatattaatcaacttaaatagcttaaaccataaatcatcatgtgcttaatgcctcgccaagaatttactgctgatttgccggcccgctattactcaaaataaaccctgtatccctactccaacagatgtttggtagctatcatcttgtgaacgatcacctcaatgaatcataagcattcct

SEQ ID NO: 27730 - DNA, 166 bp, Gossypium hirsutum
  unsure (1)..(166): unsure at all n locations
  Clone ID: LIB3189-002-P1-K1-A7
ccgggcgacccacacgtcctctttcacatacatttccatctttcttgtttcacactttttttatataatgtccgttttataatatagtggcttgctatacacccaacnnnacttaactctcctcccttcttctaataaataacatcacttcacacttccctaacct

SEQ ID NO: 27731 - DNA, 346 bp, Gossypium hirsutum
  Clone ID: LIB3189-002-P1-K1-B5
tcgtaaaaataaattataaaaaataacattttttcaaacacaaacataaaaaaaaaatagaaaatttaaataaaaaaaaacgagatggaatatttcctcccctttttaaaaccccattttacctccccctatctccaacttcacactttttatatattttcccctaaattcaatttactgcccctcgttcttacaacgtactaacttgaaaaaccctacctttcccccatttaaatccctttaattacattcccctttctccctctttcttaatattaaaaattccctaacctatctcccttcccaacatttcctcatcctttatctccaatttaccccccctttt

SEQ ID NO: 27732 - DNA, 372 bp, Gossypium hirsutum
  Clone ID: LIB3189-002-P1-K1-B6
gacaaatgttacaactcaagttcgtgggacaatgggccacatagcaccagagtgcttgtccaccggaaagtcatgagaaaggacagatgtttttggttacgggattatgcttctagagcttgtaacaggtcaacgtgcaattgatttttcacgcttggaagacgaagatgatgttttgctgcttgatcatgtcaagaagctggaaagggagaaaatgctcgatgctattgttgatcgtaatcttaataaaaattacatcatgcaagaggtagaggcaatgatccaagttgcactgctttgtacccaatcttcaccagaggaccgtccggcaatgtcggaggtagtgaggatgttggaaggagaggggctggc

SEQ ID NO: 27733 - DNA, 245 bp, Gossypium hirsutum
  Clone ID: LIB3189-002-P1-K1-C10
gagtaatatcatattaataaataatgaaaaaaggaaaatgtatgggagaggtgggcttgtttgattcaaagcaggtcaatccttggaacccttctctgtatacctgaattctttttcccccaaaacctcacccaaagctgttcaagttcaacaacattcacatattcaaaatgcaattgctcatcctcatcacgctgcggatgtttaatccaatccatccacttaatgtagagcccttcaatcca

SEQ ID NO: 27734 - DNA, 341 bp, Gossypium hirsutum
  unsure (1)..(341): unsure at all n locations
  Clone ID: LIB3189-002-P1-K1-D6
acaagnngaggaataaagtgccgcaaaattcacaattacaatggggaaataaaacataactaagaaaatttcaaaacaaaaataaatgaaatcaacaagacaaactcaaaattcaatctttatacagaacataaattttttaaatgataattattgaaaaaataaaaaaacacttgccatcttgatcaccatcaaaatcactgtcttcttattttctccattttcatggacacaaagaaagtgcaataactagagcagtatctccaaacaaaccaacattttgcaaggtggccgatttggagttatcagctggggtaacatgggtgctattataaaccgtg

SEQ ID NO: 27735 - DNA, 370 bp, Gossypium hirsutum
  Clone ID: LIB3189-002-P1-K1-E12
caccactctataaaactgaagtcgttcttttcataaccaattcaaaccagataaagtcattttagttttgttatttttctctacttaaaacatttttccctgttcgtttgtctatttcttccttttccattttcaggtctatcggtcttccttccttgtctttcaagattctccttcttattatttataaaatacttttgtttttgaagatccgattcttgtttaaagaaaaattagataatggcgaggattagatcatcgtcgtcttcgagtaaatttagatactgtaatccatcgtattatttgaaaagaccgaagcgtttggctttgcttttgattggttttgtttcagctacttttttcgtttggg

SEQ ID NO: 27736 - DNA, 376 bp, Gossypium hirsutum
  Clone ID: LIB3189-002-P1-K1-F1
tgcacttgatgattccacctcaaaggcaaaatgtgcacgtgatgcagtcactccccttgctcatatgccttatagtgatcaattggagcacaagaagaattctgtcatgcagatgctcaaaaaacttacgagaaatgcacgtaaagcatgtcctaacggtgtttcacttcctcagtgggttcttcatctagggaaagaggcggtcttccatgtgaagtagaaggtataattgaatcaccagttgtaaatggataccgtaataagtgtgagttttctgttggatattctcaacagggaaaaccaactgtggggttcatgcttgggaattttagggagggtgtgacagctgttgaagaacctgtggactgcccaaatg

SEQ ID NO: 27737 - DNA, 267 bp, Gossypium hirsutum
  Clone ID: LIB3189-002-P1-K1-G8
gtggattttttaacgtgaaaaaaatggggctgctttcaccaactattgagcgctatttgccaaagggagatccatactgatggtgggcttgatgctgctggtaaaaccaccattctttacagctgagtggagagatgtactctttccaccatggttaatgtggaccgtgatcaaacatacttactgtggagtggcgcagcagaccgaccatggggcctttccaacaccggctatttcgggtgtgcatgacggccggggtgagctaga

SEQ ID NO: 27738 - DNA, 339 bp, Gossypium hirsutum
  Clone ID: LIB3189-003-P1-K1-B2
cacgattctatcacaaatctgcgtgagtttcctttcttttttatttgaatttctctgcttctgatttccattggtaaaactagcacattgcaagttgttgcttttttcttactcgcaaaaccgtactaaagaaatcgcctaagatttgagatagggctttgaaaagaaacccgctaatgtacaaccagaatcatactgtccacctctagaggatctggcaccattggttacattcagagctacaaattttctgttgagcccaagacgaactgtttcaccgtttccaccaatccttttgatgcagcattcaagctccccatgtctcaccaccatgaaacc

SEQ ID NO: 27739 - DNA, 188 bp, Gossypium hirsutum
  Clone ID: LIB3189-003-P1-K1-B4
cttcctgagaagcggttatatttgggttttggatatttggacctggatttggaaaagcacatgggttcatgggcagaattccgggaagatcccagaataattaaaacattcccttattaaattctccgtggcattgcttattggcactctcatagggttctttcaccgagaacttaaacccccaaaat

SEQ ID NO: 27740 - DNA, 255 bp, Gossypium hirsutum
  Clone ID: LIB3189-003-P1-K1-B6
gcagactacaagcgggatttgtagggtttttgttccattcctcttccgcatatccgtagcctttcaatatgacaaagagaaccaagaaggccggtattgttgggaaatatgggacccgttatggagctagtctgcgcaagcagattaaaaagatggaagtcagtcaactcagcaagtacctctgtgaattctgtggaaagtttgcgtggattagaaaagctgtcggtttttggtgttgcaaagactgtggataag

SEQ ID NO: 27741 - DNA, 191 bp, Gossypium hirsutum
  Clone ID: LIB3189-003-P1-K1-C12
cccacgcgtccgcttactatagccccacattttcttcctatagcctcacttctcctgggggcaggctaacctcaccaagttgcagtcccacatcaccaagctatagccctacctcttcatagtacaaccctctgtcagccatggtctgtcctgtctttggcatacacaccaagtagtccatagggtggctt

SEQ ID NO: 27742 - DNA, 248 bp, Gossypium hirsutum
  Clone ID: LIB3189-003-P1-K1-C6
cccaaatcaaaattccaacccatctctacattgccgaacccgaccatctgctgcatcgccgtcgacttgaccatctgctatgttgccgtcgcacttctctgccgcaaccaatcggtacgcaagacacagcgagattaacccaaaaccctcactcagctctttttgccatcttcttctcagttttcattcgccttttttggtggaatatcttattggttcgaggggttgttgttcagtttcaaggtttc

SEQ ID NO: 27743 - DNA, 145 bp, Gossypium hirsutum
  unsure (1)..(145): unsure at all n locations
  Clone ID: LIB3189-003-P1-K1-C7
aaaaggaaaaatgccgatcgctcaggtgtttatttcctatggcttncggtacagctctaagaaaatagcccaatgtcacatacaatcggtatcatcagttgataccattattgcatcatattttttatcacgtatactcgtgaac

SEQ ID NO: 27744 - DNA, 184 bp, Gossypium hirsutum
  Clone ID: LIB3189-003-P1-K1-C9
gcggtaagtttctggatttcatacctcggtttgtttaccctccgcaaaaggagtcgctgagggaggggcatcggaaccgatcacgcagagctcatatatattgaacactggtcggtgtttgtgtattttcagtcccgatatcaaaactgtgacttggtgtatgagtacacatcactgctgatca

SEQ ID NO: 27745 - DNA, 330 bp, Gossypium hirsutum
  Clone ID: LIB3189-003-P1-K1-D3
gaaaaaaagaaaagggagggggaggatgtctctctgggcaatccattttcgacgttcggaccaccatgcatgcgtcaccagtgacagacaggcacagctttctgaggtgcaaaaaatggcccattttaatactttctctttccccacctcatatatgagtctcaaacactcgaaaaatcccacgaccgttgaaagaaatcgagaaaaccattcagtttccttttttccgatcgcccaataaggcaaaaataataggtatctttatataactatactttgtttgtatattatatccggtgtatagacgtgaaaatcagtggaaatggtccg

SEQ ID NO: 27746 - DNA, 189 bp, Gossypium hirsutum
  Clone ID: LIB3189-003-P1-K1-D5
ttatcttcaacaactattctttaatagcagccgggaatcactctcatctactgtttgacaaagatatgaaccctacattcgcactgaatttaatagaatcattcattcattttagtaacacaaatttttctgtagaaccccatatatgggctagtgacataaagttaatgccttgtttgattttcttgc

SEQ ID NO: 27747 - DNA, 172 bp, Gossypium hirsutum
  Clone ID: LIB3189-003-P1-K1-D8
cttagaaggtgtcttaataaacgccttctttcttcttcttcttattccttgattgctcggtagcagtctctcttaatcgaaaatgagagagtgcattctgatccacatcggtcaagccggtatacaggtcggaaacgcttgctgggagcttttctgtcttagcgcttggaat

SEQ ID NO: 27748 - DNA, 220 bp, Gossypium hirsutum
  Clone ID: LIB3189-003-P1-K1-D9
gggagagagaattttcttgcattttctcttcttttcccttttttttgtaattttctctgaaaattgctcattttattcaattaaatggacggccgtttgatcgactgatcttcgtgtgtcgtgatttaaaggttgcaagagaagaggctatttgtctagcatcttccaacttttagacaagtggaagttcaaaggctttgggacaatgagctttgttttt

SEQ ID NO: 27749 - DNA, 243 bp, Gossypium hirsutum
  unsure (1)..(243): unsure at all n locations
  Clone ID: LIB3189-003-P1-K1-E2
acnacaacagccgnngcngcnggnccgaggccaagaggaaggccaaaaggcacngacanggcggcagcaggcccagcggacccgggaaaggagagagagcccaccacccaagagaaggggaggcggagagaagcccaacaaacccaaaaaagcaaccgaaaagccngaaggccaccccaagaagacaacagaagggagcagcaggcaaaggagaacaaaagagaaaaccagaagagaagcaaa

SEQ ID NO: 27750 - DNA, 455 bp, Gossypium hirsutum
  Clone ID: LIB3189-003-P1-K1-E5
gaaaccagtgcttcaatgccagcttcttcttcaaggtcttcttcagctgggagaagctcaaagagatgggtttttttgaaagattttttaaggagcaaaagtgaaggaagaagcaacaatcataagttctggtcaaccatttcattctctccggcaaaagagaagaaacctgggagaaaagagaagctaagcaataatgtgtcaaatgggggatcagagaatcaatgaagcaacaagaacaataataataagcctatgaacgggatatctaagaggagggttccaccatctccacatgatttgcattacactgcaaatagagcactagcttaataatattagtgagaagactttttttccttcaagcagacttgcttggttgcttggtagtttatttaaatgtatttgttcctttatgttttttgtttacttttttccattattttatttatatt

SEQ ID NO: 27751 - DNA, 248 bp, Gossypium hirsutum
  Clone ID: LIB3189-003-P1-K1-F12
gtttgacaataaatatttcataacttcttctaaatcgttgcactctctttagatctgaagcttggggccttccttttctcatctcctggcattcccttgtctgggacgcgcaaccaatcaaatcttctttgatctttggcatacttaagacctacatttgtaggtaaaccttttcttaccttcttaagggtattttatacaagaatatgtcggatatgtttgagtgcattcattggggttagtacaaa

SEQ ID NO: 27752 - DNA, 406 bp, Gossypium hirsutum
  Clone ID: LIB3189-003-P1-K1-F2
cccacgcgtccgcttcatggacatttggggtgaagtggtcaccaagtgggaatactttggcttatgtaggtcataattctatgatttacttcgttgatgatattggtccttcccctttggcccagaatgttgcattccgtaatttgcctcttcgtgatgtccaatttttttcagagaaaatggtcataggcgtgggatttgactgcaacccaatgatttttgcagcagataaatcaggattatggagctttatcagattcttaggtgaaaggaaagaattcttgtcaggtccaaaatctggttctcagttttctgaagcatttggcaaattatatggtcaagcaaagcatggattgagcaatgattcggttgaaccttcaaaaatacagggagctggtcatgacaa

SEQ ID NO: 27753 - DNA, 135 bp, Gossypium hirsutum
  Clone ID: LIB3189-003-P1-K1-F9
gaacaaactatgctcctgccctgcatgaagcagatattggactagcaatgggcatttgtggaacggaggtggccaatgagagtgcctatgtcataattctagatgacattttctcaacaattgtaacagttgcca

SEQ ID NO: 27754 - DNA, 243 bp, Gossypium hirsutum
  Clone ID: LIB3189-003-P1-K1-G12
ttttgtttcactttctttagttctgaagctttgtttcttggctttcctcatcttgtggcatatccttgtcaggggcgcgcaacccatcatatcttcttttatctttggcatactcaagacccccacgcctaggggaaccccctctttccccctaagggcctctattgctagaatatgtctgcaacaatttgccgatctctggatagggaccaaaactggcgtaagctgaacacaaaaattggg

SEQ ID NO: 27755 - DNA, 326 bp, Gossypium hirsutum
  Clone ID: LIB3189-003-P1-K1-G4
cggacgcgtgggcggacgcgtggggtgtgtccacaatacgctccattagaacggatactcacattcaaacgtaatacttcttatccgcgtcatacccttgtatttcaaatgctttatcattagtatcttttatttctgacactctttattaatatctaattcacaaactttttaatataattaattaataacaatttatttttatttttaattttaaattttcttttttttttttttttttcttttatttaatttttttatttttattattgataattaattatttatgaatttaatttttaatattcaatttcttaatcttttta

SEQ ID NO: 27756 - DNA, 300 bp, Gossypium hirsutum
  Clone ID: LIB3189-003-P1-K1-H10
agataatatcatcaatgttttttagcgcttcatatttagaacactttttggtagaattcttttgggaaggtttcccataaattagttggcaatcaatgctgtggcgcatctatgcacatggactatattagaacgattgcattccgggccttagttatagcgccgcttagcacaaatgagctgtccttcacccaagcggccttggctatcgcaccgcttccgccgccgttctacctcacggtcacggcgagcaccataaggatgggtctatggattcgatcactgactagatccacggcc

SEQ ID NO: 27757 - DNA, 263 bp, Gossypium hirsutum
  Clone ID: LIB3189-004-P1-K1-A1
gatttccggttgaacacgccttccgaggcggccgttgcgaaccataaacttgggggctcttaattctttcaattttgggctctctttcagaactcaaaagtgttttccttaagggaggagatccaccaagattagggttcctgacccaccaaattttaaggggctttttggccaggcatcctttgttttggggaatcccaagcaaagtctgaaaagggcccttaaaatttcttttttaataaccattccaatttgttgttttt

SEQ ID NO: 27758 - DNA, 364 bp, Gossypium hirsutum
  Clone ID: LIB3189-004-P1-K1-A2
cctgcgaaaacaccaaggtcccatgtgtgataactggccccacaatccttagggttcgttctctcggcaaagtcattaatcgatttattggggaatgttggaatggtatgaatcttcgttatgttaaagaagcaaagcaccactgttcgcttcttcttcaacaaagacttttaccataacgacagttttcggctacggcgttttcagcccgtaatgatccattttccatgcaactccacgcttttcccggcgaccaacgccgttgctttcagtccatcgggaaattagacgcgctcggaaactacaatgccggcgtcggtgccgccttaaactgtaaagaaccctcttccggcttaaattttga

SEQ ID NO: 27759 - DNA, 219 bp, Gossypium hirsutum
  Clone ID: LIB3189-004-P1-K1-A3
aatgaaccttgcctttgttattttccttcacattctttaatatttttcccgagaaagtgacactcggatcacataaaaaaaattcattaaatgtggtggagatccgcttcttttattcctcgctgactgctagagccattctccagctatcccccatatcctgatttgcttttgctcttttttccacctgctttcttggccaatttctttcataaccct

SEQ ID NO: 27760 - DNA, 455 bp, Gossypium hirsutum
  Clone ID: LIB3189-004-P1-K1-A5
caaaaattgatttttggttacccgctcattactcttcttctcatctcagtcgtgcgccctaaatccccaaagaaaagtttgtttttcttcagctgaaatcccccaaatttctcatttccagcaacaccagtcaatacacctacaccaatcacacttctttttccttttcatttcactgcactgaattcagtcaccatagctactccttttctttcgatctgttagggtttcttttaattttaggctttcaatagagtttccttttaattttactggtgatttctatggtgacagaaaccttagatgagaagaaatcggaggaagaggagttgaaagataaaggaaacgaagagggggagtaaggctgttcgctgaaataaagagataaaaaaaaggttgaagatggtacaagaagctcctaagctcagtggatcttacaaaggacctctttttca

SEQ ID NO: 27761 - DNA, 454 bp, Gossypium hirsutum
  unsure (1)..(454): unsure at all n locations
  Clone ID: LIB3189-004-P1-K1-A7
gcgaaaacaacaaggtctcatgtgtggtaactggcagaacaatcggggatggagaaacgcgaggggtagacagaggtcaaattttgcatatgaacgaccacctgtggagccgagacagttgaataccgtggattattgtggttgggccatttaaccatatgatgaatttggaggcaagttttgtaagtacaaagttattagcatatatatagagagtagtatataatgctttgtagattttagggctcaatattattttatttgttctgtgttggagtggatagtacaaaaaaattaggatcacagcagcttggcaaagggccctattgtgttctgtttatgtctacagttttgtagtntggttttttataaggtttctgtcgtaagttttgaatattatatttctagtcttcttgagagtgattgttgctttaatatattttatgagattttt

SEQ ID NO: 27762 - DNA, 286 bp, Gossypium hirsutum
  Clone ID: LIB3189-004-P1-K1-A8
cccacgcgtccgcccacgcgtccgttcaaagtagcatctcatcgaagtcctagcccgagacagaggcaactgtcaaagtctttgttttcacgaccacgctgttagcccagacatttgaataccatggattattgtgggtgggccatttaaccatatgattaatctggaggcatgttttgtaagtacaaagttattatcatatatatagagagtagtatataattctttggagattttagggctcaatattattttatttgttcttggttgaaatgtttatttcaaa

SEQ ID NO: 27763 - DNA, 400 bp, Gossypium hirsutum
  Clone ID: LIB3189-004-P1-K1-B12
cgcacgcgtggattaagatgactcataaaggatttctcttcaaggggcataaacagcagaggggagtccctcccaatctgccatggaaaaattcctcacattcgcaaaggtaagagagtgttcaaaccatcgaatatgacataagagatggtcgctgatcaattgtttgaccaacttcatatttcactgcaatttgatataagctttctccgtcgctaacatggatggaggccatctaaatattgtgattccacccccattatctctcagttattgtaaggaatagttttgttgctgtgtcttatatggctcctttttctaacgcaatatccttcatcattttttttaagagatttttttccccaaatttttctacctaatctctatgttataatttctt

SEQ ID NO: 27764 - DNA, 357 bp, Gossypium hirsutum
  Clone ID: LIB3189-004-P1-K1-B2
gccgaattcccgttcgaccacgcgtcctcgtactcgtgggcggacgcgtggtctgacgcgtggtcggagctcgtagcatgcaccatagcaacagtgatcctcaatggtgcatgataacaaaccatacccagcacagctaaccacatctgtcattatatctatgctttatttagtgacaagggcggttagtgaaatcaagcacgataacacatgtacttatccaaacctgccaccaccaacatcctctaatatcggatgctgatttgacacattgtcacaaacaccttcagcttgtttcttaccacccttctaaacagaatcatacttttgacctacagggaactttctatattacta

SEQ ID NO: 27765 - DNA, 253 bp, Gossypium hirsutum
  Clone ID: LIB3189-004-P1-K1-B8
agttctagatcgcgagcggccgctcgcagatcggacccgtggtctccggtatccttcttggatctggggtccacagattcttcaagcaacggaaacccccatggaggaagacgtggcctgcgtgtgggcgcacattaaagcctatgcacgccggggacgccgagtaggagccagatctagctcgctacctgtactacacaatcctatataactcctttctttagcgctccctcgacttccacctttgctacaa

SEQ ID NO: 27766 - DNA, 201 bp, Gossypium hirsutum
  Clone ID: LIB3189-004-P1-K1-C10
cccacgcgtccgcccacgcgtccggtttacgagtctactgagctgaatggcaagaacgtcggggggtatacgacttcttgcccaacctaatttcgcttccacatcttctcggacatcatttatcagaaagccatttttattggaacagtttgttgagcataacatttgactctgttttatgctttgctttcctttaccacc

SEQ ID NO: 27767 - DNA, 457 bp, Gossypium hirsutum
  Clone ID: LIB3189-004-P1-K1-D6
atctctccttgacgttgccagataacgtcttcaaggaagcaaaaaatcttaaagtcttagatttgactggcgtgcatttttcttctttaccttcatcaattggtctcctaactagcctcagtacattgtgcctagatcactgcaagttgggagataacctaaccattattggagtgctcaagaacttaaatgtgcttagccttttgcaatctgatatcaaaattgtacccaaggaaattgggcacttgttgaagctaaagttgttagatgtaagtggttgtactaaactcgaaaaaatttcagctgacgtgttgccacgtttgtcaaaattagaagaattatatatgggtggcacttctattcaatggggacaacccaatgctagtcttgctgaactgaacacactgtctcatttgtccactttagaagttcaaattccggacgccaagtctgcccc

SEQ ID NO: 27768 - DNA, 472 bp, Gossypium hirsutum
  Clone ID: LIB3189-004-P1-K1-E11
ataaccttaaaatttttcaagtttctttaacatagcagcttaaaaaaccgaaaaaagaaaagtaactagaagaaggtattctggaatttgggtttttaatgggttttaagaaaagaagcactaaatctgaggaagaagttcttgagggtcaaactgatttagctgcggataatacggtttcagctccttccagtaagaaaattaagatggatggcaaaaaagatgcagacatgggagatggggttgcttcctcttcttctgttgcaaattccgttaaaccattggagagaataatgaagagaaaacatgttgactaggtgaggctgctttcgttttttgaaaatgaggtatcttagctgaaacatctgatttttgaaccttaaggaatagatgcctcagagcctgtggcagcttagtcttgtattatgttgccttggtttcatatcattgttttttaggactttggctttcg

SEQ ID NO: 27769 - DNA, 392 bp, Gossypium hirsutum
  Clone ID: LIB3189-004-P1-K1-E2
gcgtggccttgcttgtgagaaagagatatctgctgcctttgagaagtcccttaaatgcacattttcaacccttgaggagtacctcgatttgttcctcacccgagtagatggcttgagacgtagaatttcatcagctagtggagatggtgtgttgaactattcaatgattagggaatcttttcagcaagcagcggattacttatcaccacacatgaagaacactgatggtttactgcatttgcatgcctattgggcccgtttagagctgaaattgggcaacgatttaattgcagctcgtggtgtttgggagagcttgcttaaaacttgtggttcaatgttggaagcatggaaaagttatatagcaatggaaattgaattagatcatataaatg

SEQ ID NO: 27770 - DNA, 360 bp, Gossypium hirsutum
  Clone ID: LIB3189-004-P1-K1-E6
gttcaatagagactgctttgacttatgttatgaatcagtataggttgacctcttctactttcttcgaccctgctcttcaatagagtcttgaggctaagtcagctctcttcttctttttctttctctgacattctgagagaaagattgatccacctggaaacccctcttggcctacttaacctactcttcatttaggcaataatagcagactttgctattacatcctccgattcggcaaaataaacttctctcgtggtcaagcatccggctttccttcctacaagcatataaacctcgagcttcaaacacttccatttgtgaccatccaactctccaatgagcctgcactctcaaaatcat

SEQ ID NO: 27771 - DNA, 449 bp, Gossypium hirsutum
  Clone ID: LIB3189-004-P1-K1-F1
ccggtcgaccacacgcgtccgccattttcttttcagcattgcgtttcttgcttctcacttgttgctttcaagaatggccattgctatgttgcaacaaacagttggaggaactcttcagcttctcagcaattctggaactcactgcaatgtcgggaaccgtcggtacggttgcttcccaaagggtttaagttggaagttgagttcccaaagagagcgattatagttcggaaagaggaaattaaacgttattaagcgtaacatctaaacctttgttgtggtcctctttagcttcctcaagtgtgacacccttgatttcacatgtaaccaattaggtagctttgattctgtttcgccatgtttaatccttatggtttgtgaaagaaccttttttcaggttgtgtttattttccaattatttttttatagatttttttgtggtattttttttt

SEQ ID NO: 27772 - DNA, 459 bp, Gossypium hirsutum
  unsure (1)..(459): unsure at all n locations
  Clone ID: LIB3189-004-P1-K1-F2
accaaaaagacggtggagatcaacccaaagcaaggatcagcattgaccgcaatcctgctcctattttggtacacccacctaggtcgtcttgttctttcccggctcctccaccaatggctacggcagctaagggaggtggcggctgtgggcctatggctaaagggtatgagtcgtttgttctcacgcgctgtaagtcggagccgaggaggtcatcgactaagcttgcacccgatgcttgcttttggaagaataggaagctcgagccggctgcacttgaagttggcgcggctggagttggtttttaagccaggttcgctagaaagcagntaaaagtaaaagaaaagaaaagaaaagaaagatatttgtgggaaaaccttgaagttttttatgagtaaaaaaatcaggaaatggtggaagttttagtccttttgaatagtgaaaaaaaaaaactttgggggt

SEQ ID NO: 27773 - DNA, 311 bp, Gossypium hirsutum
  Clone ID: LIB3189-004-P1-K1-F9
tgttactaaaagagttgtcttgttatctttactttgttttaatgtgtttttagtgaatgcgattgttaaaaatgtggtgaatatgaaagcggaggaagagaagaaattaatatagggaaatggctttggagcttgggacaagggtaggttctatggtgggcatggtgtagctagagatggtattggtggaactggaaatggagttggttttggtggaactataccttcatccaaacctgtatcaagagcagtcacgccaactcgtcgtccatcaagtgctgttaatgtattccgctcctacaatcatatca

SEQ ID NO: 27774 - DNA, 171 bp, Gossypium hirsutum
  Clone ID: LIB3189-004-P1-K1-G4
tacctggattccacatagctactgtgtacgatccagcgaaacctctattatatgaacagcctttgtggattcatcagagaaagaagacccgggcgagcgtgtctcttgttccactctgtgatacgacttgcaaggagcgggataagtgggtgctctcgggcgaaaatgaaa

SEQ ID NO: 27775 - DNA, 306 bp, Gossypium hirsutum
  Clone ID: LIB3189-004-P1-K1-H10
gtttggttcatttttttattaccgaatcattatttcatgtaagcctctattatgggtgagcactgaataaccattctgtaaatagggctctgaattggctattctttgttgtccgtaatagccttctacttttgaagataaaagtctcttttcatctaccttcttcattttctctagatgcgcctgttacagtgagtaacaaagttagaggcataatctactttcattatcggatttagtactttccaacaagctgggtttgtatgatttggaaaatcaatccattggattggagcacaattagca

SEQ ID NO: 27776 - DNA, 229 bp, Gossypium hirsutum
  Clone ID: LIB3189-004-P1-K1-H12
gttcggttctagatcgcagagcagccgcccttattattatctttttacgcaactaaaaacctgaaatttgcgaactttattcaaggaaatcgctaaactgaatatataaaaaaaatagtaactgcatatcaagaacttacattcttctctgccgccgttatcatttgccaacacagaagtgtatttattcttcttattatctgaagttaaaaaaaaaaaatttgtcttc

SEQ ID NO: 27777 - DNA, 309 bp, Gossypium hirsutum
  Clone ID: LIB3189-004-P1-K1-H7
aaggacaagaaatcacattttcattacagagaaattaaaatgtcatgaaagctacattaagcaaattcccaaattacatttacatccacaatacgtagattgttaccaattaccctttttttaaagggccacataaacatggataaccaaaagatctatgtgcaagtcccacattgaagcttttttgattccaacacacttcttgcagctttctatcactacttgcccgtccacatattgtctgcggcataccggcatgtaaacttttggtccaccgatcaactcccgttttgttttatcggtctttct

SEQ ID NO: 27778 - DNA, 347 bp, Gossypium hirsutum
  Clone ID: LIB3189-004-P1-K1-H8
attggattatggatacagataattctattgtaatatcaaccggaccagagcatagatattggaagcaaggggttaagcttttgagcaagccagttgcagttgggattaatggatgtaatagcaatagtgaatatggttcaaccatagtggaagccttattagagccatcaagtagtgaactcatccttaagcatgcttttctgtgacacttgtatcatttggtttgttggtttttgggttaaattctgccattagtctatgtatcttacgtgagttgggaatttaattatgtataatttggtttttggatataggatttttaaagtgttaaaattgtaagataattt

SEQ ID NO: 27779 - DNA, 308 bp, Gossypium hirsutum
  Clone ID: LIB3189-005-P1-K1-E11
cagaagttgagttaatttccacgatggctgaaaagagattttggatgagaccaccaattcagatggaatttgaggtgcctaaatagattgctatcttactgctcaatcatgttgaatcaattttgctttggttttaatttctcttgaaaaatatagaaaaaatgttgttcttgaaactattctcctagttttttgatgtacttattaaccttattatctgtaatctttatcattgatgctgtagattcctttttacccttcacaaaaaaaaaaaataaaaaaaaaaaaaattaaaaaaaaaagggcag

SEQ ID NO: 27780 - DNA, 415 bp, Gossypium hirsutum
  Clone ID: LIB3189-005-P1-K1-E6
caagaaactcaccttcaaagcagaagttgaggttcaagcttgtgggagctcagaaggatagatggaagctcaatgacattgacaccaatactgtgcaagaaagaataaattcatggctgacaaagacccagcattttttaagtgagataactttgccactagtgaaaactggtcaaactggtcaaagtggacctggaaagcttgatcctcgaaatgaagatgaagttgataatcaagaaatggaagacattttcatggcagaagggattattcctagtgttttgcctaatggaaatctttttatagctgctattgtatctattgagcagtttatcaggatgaatggattgagtggaaagaatttgtatattatatttagatctcttattccctaaatcgagttcgattatgcttt

SEQ ID NO: 27781 - DNA, 222 bp, Gossypium hirsutum
  Clone ID: LIB3189-005-P1-K1-G12
acaatctagcttctaacttcgcctctttttttttcttttcatgtgcaaaattggtccttgatgtctgatgctagagagtgggggtattatatttaaattagctagaaggggtttcgtgttttgggatttccatttcgggggaacacccaggaaaggaaaattgtggacatcacggctatacacaaactttactcgcctattcttattcattctcgatctgtt

SEQ ID NO: 27782 - DNA, 252 bp, Gossypium hirsutum
  Clone ID: LIB3189-006-P1-K1-A11
catgggtgggtaactccgccaagctttgcccaggtgtatgcgcttacccttttgccgtacgtgaatacatgccgatgttgtagccggtaaagtcacccaacggtgacgttggatttgacggtatgattagtgtgatcggacacgaaattgttttattagcaaccaacccactggttaacgtttggtacgcctgttattgacccatggtttttgaggaaatttcggatctatgtgtgtgtatatatggatctt

SEQ ID NO: 27783 - DNA, 246 bp, Gossypium hirsutum
  Clone ID: LIB3189-006-P1-K1-A7
aacctggaactgttaattattcaatgactgcctccaacgtcggcatgggcttttcattgcttttagatggcaaatgcaaaggtggcgattatcttcctgatagaggcagttccaatggtgtgagacatatattgacggtagcaacctgtcaagttttatgaatgaaatggattattcatctgatgctgttccgaccacagaaccaagccagacctcattatgaataggcaatcgtaattttgggaa

SEQ ID NO: 27784 - DNA, 197 bp, Gossypium hirsutum
  Clone ID: LIB3189-006-P1-K1-A8
gacaggcctttttacagtacgtgcaccatactgaatcccaggtaatcggcctagcacgtgggcggtgtattttccacactagttggatgcttcagggcagatgtactttaactctcagagtgtggagaccagtcggaactatcctcttgtactgttctgaactctaacttctctttttacatcctgatctcgaacaa

SEQ ID NO: 27785 - DNA, 261 bp, Gossypium hirsutum
  Clone ID: LIB3189-006-P1-K1-B1
cccactcgttcgagagtgcgttagcaaattccctttagttaacatcaatgatgaaagagacatcgtccagagagcaaaagcacgagaccttctctccccagaccacccaaatgccagaagaacaagagccaaggttcattcctgaaacccataatggttttggcctttactgccacgtgtcattctcaagcctgtctagtttcaccaccaaagaaacctattaaccctatgtcaccccttttattagccaccttgtttagc

SEQ ID NO: 27786 - DNA, 218 bp, Gossypium hirsutum
  Clone ID: LIB3189-006-P1-K1-B9
gttacctacaagtgtgagagctgcactgagggcatggctaaaaccatatgcaaagagcttaacttcatcagttttagatacagagcttgctgaagactggactgaggcaatggctgctaaaatagagtggtttgcagccactagctcatttcaagattagatggccatctgttcggagtacttaacatcagcacgttgtttatgagactaattctctt

SEQ ID NO: 27787 - DNA, 444 bp, Gossypium hirsutum
  Clone ID: LIB3189-006-P1-K1-C2
attttctgattcccccctcccctaccaaatttccaattttcctccccaaaccctaaccctaatccttcctcgtttttgattcctctctctaattaaaccttaagtcccttcaaaaattgattagtcgtttcaatttcttgttgtgaattccccaaactttcttttttaaattattgaatttttacatggctggtgttgttgaagaaattatacaatgattgggttattggggtttggtttcaattttatggggtttacgaaatgcctctggttggaaaaggagttagtagacgtcgcgccacgttagctcaaccgcaacaagggggaaaacagacgaggcggagcatccgaggtcggaaacgtgcggctgatggagaggtaggttggccgaggactagattggctgcttaaaggactaaggtggaggattaagttcaggtgggg

SEQ ID NO: 27788 - DNA, 245 bp, Gossypium hirsutum
  Clone ID: LIB3189-006-P1-K1-C7
tgtcaaactgaatggttcgaatttggtgaagactgatggttatagtccttcagtcttactaaagatttgtgctgagaccgtgatctaattaaaccataagtccctccaaatattgattagtcgtttctatttctggttgtgtattccccaaacttttttttttaaattattgaactcagtacttttttggggctgatgatactagatatacattgattgggttattggggtttggtttcaatttt

SEQ ID NO: 27789 - DNA, 183 bp, Gossypium hirsutum
  Clone ID: LIB3189-006-P1-K1-E8
cgcgttcgaaaaaacaagtgttgactatcttcataagaatcaatgtatggatgggtcggatcagcttgaggggacttctcagcgaagggcaagttctctatagtcatattgttgcctagatggagacaattctcctacagtgagactgtgttctacattataagttctattttgtttttttat

SEQ ID NO: 27790 - DNA, 321 bp, Gossypium hirsutum
  Clone ID: LIB3189-006-P1-K1-F7
atcgacttgtgatctcgaatatgtccaacatgtttgtgcctaaagggtagaccgcacttcaaagatgcggaaatctgtggacactgtggacacgtcatatactaacataatcttgttcgagcttgtgaaatatgcacatgctgtaatattcaggcatcatctgtcaggaaaacatgtgaatggcatagatttttctcacataatgtgttattaaagcagtaatgctacagaaaatatctatcactgggcttgtgggaggccaacatctctacacgaccgaaccagagacagtgttgttgatgatttccatgaaaggtatta

SEQ ID NO: 27791 - DNA, 124 bp, Gossypium hirsutum
  Clone ID: LIB3189-006-P1-K1-F9
ctcactggcaaattctattggtaatgccaatttcaacattgtctctcgaagactttagatggggggtgtatcaaaacagcagtgattccacacccatagtcaaacatattttgtctttcgcgaa

SEQ ID NO: 27792 - DNA, 233 bp, Gossypium hirsutum
  Clone ID: LIB3189-006-P1-K1-G10
gcttttgatcaatactatttttttgtgcgtctttttgcttctctggctcatattttctcgagattttccttcttagattgcttgaattatggcttcaaccttgctactggttctggattttgtgattgaacttattgctttcgcccttgctgttgctactgagcattgttgaagtactgccactgttggcatttttgggaaagaatgtctttagagttatgttgaggatattg

SEQ ID NO: 27793 - DNA, 179 bp, Gossypium hirsutum
  Clone ID: LIB3189-006-P1-K1-G2
cggacgcgtgggcgagatgttatatagccctttcattcttcatctctactggcgcactaagggtggctactagactaacgccctacaagcacaatccatccctcatcaaattacggatcccagtagctatatttgagggaatgggcatgcagcactgcttcatcattgtgagcgcatgt

SEQ ID NO: 27794 - DNA, 210 bp, Gossypium hirsutum
  Clone ID: LIB3189-006-P1-K1-G4
cacttggtactcgaaaactgaatgatgcaattccgaacttcggtgttcaaacgccattctttaaaaaaggagcttatggtttgatcgaattttagtgtaataaaaggggtgataaatactatgcttgctttacaatattacaggtatgggggaggtgtctgttgttttgtagtatgatgtagttgctgttgctcatatctatttaaaagt

SEQ ID NO: 27795 - DNA, 265 bp, Gossypium hirsutum
  unsure (1)..(265): unsure at all n locations
  Clone ID: LIB3189-006-P1-K1-H4
ctaaaagccatcaaaggagtagggaaggtactttgcgaaaatactctcttttcaatccctcgtgtccactgttttcatcgattcagtataaaatttcccaaaagttttcgattcatagaaggaaaacccaaaaaaccagaaacatcaaccacaaagcgaaacgatgaaggtcatccctttaattttgatgggttgaggaggagnntnacnccaactacttcatctcatttgtttctgcaaatcattttactccaagcttggtttt

SEQ ID NO: 27796 - DNA, 357 bp, Gossypium hirsutum
  Clone ID: LIB3189-006-P1-K1-H8
cccacgcgtccgctttgcactttcccgataatcaccaaaccaaacccaaagcttggactttacttcaagaatatcattaatatgctttttgtttgattgttttctttctttttcttttttcctaatggattcagctactctccttgatcgtgctttgtttcaactcactccaactcgaactagatttaatctggtgctattctacataggaaagaatgagtatgcttgcttctgggctttttgaacccttcatttgtcacctcaaatttgcaagagatcatatctccaaaggtgggtattcgatttctctgcagccacctgctccctctacacctttggtcaccaaggcttcttttg

SEQ ID NO: 27797 - DNA, 230 bp, Gossypium hirsutum
  unsure (1)..(230): unsure at all n locations
  Clone ID: LIB3189-007-P1-K1-A10
gcggtggcacacgcggtcagtccactgtcacagcttgttcatagcgtgtatgctattagggcatcattggtgaggcttgaaaaacagatcggagtgtaagtaactttgaccccataacgtacagccctggacgtatgacatatgtgtattcttttcgctttaggcctttttggtacagttttggtaatctcgacacatacatctatttanaatattaatattttatatat

SEQ ID NO: 27798 - DNA, 357 bp, Gossypium hirsutum
  Clone ID: LIB3189-007-P1-K1-A8
ggtaaaaaacatgaaacatgaggggattctctaatgaaaattacaagacaagtaacagttgttcataatcttcaaactctgaataaataaataaatacctatattattcaaatcaccacaaatggttaacacttaatgactggccgattgatcagtcagcaatttaagtgatttctttaaactctcaactgtctttctcacttttttttattctaatgccctaatcctatttcctaacatctttgtctccacatctttttttttcatttcattcacttttttttattcaattatatatttttaataatttttttttactatctttctattatttttatctattttactttctttatt

SEQ ID NO: 27799 - DNA, 252 bp, Gossypium hirsutum
  Clone ID: LIB3189-007-P1-K1-B3
ctgagggaagatgtgagtgtggaagtggaacttttgtcagtgaagaaaattcctctattttttgtgacgcctttaagttctggaagggggactaatgaccatgaaaatgacacagaaaaaagtagcattgcatcgaatttatcgtcagatgaaaatgatgatcaccaccaaagtaaccttgaagatttacctctgtcagttttctttccttcttctgaaggtgtacctttaatatctccttatgagaatgaa

SEQ ID NO: 27800 - DNA, 395 bp, Gossypium hirsutum
  Clone ID: LIB3189-007-P1-K1-B7
cccacgcgtccgcggacgcgtgggcaatgccactaccaacagctgccctctctgttcctgcagtgttcttctccatctgtctggccgctttcttccttctcttcctccaataatccccatgtcagcagcttctgccccgcccccaccgctctccccaaattcccttccctctccaagcccaaaacccctcttcgcaacctcacccctctctccgccgtttccatcgagaaagaaaccctcatctccgagcgcccccacactttcctccgtgaagccgacggaggagatgactgttccgtcaggtctcgctttcagcgcatgatattggaggcccaggaaagcgtgtgctctgccctcgaggctgttgacggagctggcaagttcaaggaagactc

SEQ ID NO: 27801 - DNA, 186 bp, Gossypium hirsutum
  Clone ID: LIB3189-007-P1-K1-C11
aacttccctccaccccccagtttcgctgttcatttacaatggcgattgtgaatatggagatggctgtggttatcatggcagcgacgctcctacggaaattggcagcatcacaagtacaccatgtggacgtaggtgaccgtgtgaggaaccttacgtctgacctgtcatgttcagtccttccgtagg

SEQ ID NO: 27802 - DNA, 362 bp, Gossypium hirsutum
  Clone ID: LIB3189-007-P1-K1-D11
accgtccgattcccgtcgacccacctccgatcctgatgatgatggagctggaatgcattatttaatgattcaaactatgagggtgatcaaatgtctgtgataggacatgactgcagctatagaaagtcgccaagagatcaaggcaaactaaaacttcagcacagaatgtggctttggtatgtgtttgacgtgttgcaagacatgaggtgctcgaattcctaatagtttaagtatatagcatggattatagaaatcataatgatatttggtaatctttgcggagtgctcttttctaagtgggtttggtttttgttgaggatgtctttccagttcggttgaataagattgaattttttgtcttt

SEQ ID NO: 27803 - DNA, 417 bp, Gossypium hirsutum
  Clone ID: LIB3189-007-P1-K1-D12
cggacgcgtggggtaggtagtagaatcaatctgaaatcaaatctttcagttttagaactctttgtctctgaaaagctatgtagtatggagtctagtctagataggcacataactcaaatacacctttctttctcgattcattcattgggcgggcggccgaataaaccaaaacccaatcaggaaaacataataaaagaaaggggctgttgagatttgagaaagcgaagcagtcaacaaagctaaaaagaaaaagaaaaactcagaggaagaagaagttaaaaggaaggggtaggtcgggcatcttgatttggtttcctccacctcaagccttccatgctcccctcagccaacaacagccctaccggaatccaccactttggcggcggcggaggaggattctggtccgctgtacccatg

SEQ ID NO: 27804 - DNA, 311 bp, Gossypium hirsutum
  Clone ID: LIB3189-007-P1-K1-D4
agacaagagaggtatggcgatttcaaccacagagtcgaagaacccatcacattcgatccgtgagaggggactcccaagaaaagtaaggctgctaaaatactataacatgcacataatacttcttaaatagaaacctctttaatatccataagccacaatataaaaacactaaaaagtcagatcctctaatttggtttctcagcttcattctccaatggcagagcacaaaatgtatattattcaaacagagcttgtaaaccacaaaataccacgagaactatggatctctatacagggaaagatctacaatg

SEQ ID NO: 27805 - DNA, 387 bp, Gossypium hirsutum
  unsure (1)..(387): unsure at all n locations
  Clone ID: LIB3189-007-P1-K1-D5
cgtccgcatgatcacagagagtcctacactgcgtctgagatacaactcttttcagcgttaaacaaataatggaggtttctctgtatatgcacgagcctagaagaagagtgtgagaagtaaggggaaaaggttnnctctctgcaggaatttggctcgaaggggggcactggttaggtatacccgagnnntttgggtcttaattacctgcaagggatctctcaaagcaannatggttggtctaactnnnaagctcttgatctaaagatcttgaaccaaatctgcttggaaaggaggaaatctggagagcataatntgaggggaacctcctatgctctttacaaagagaaaaaccttcttatagctttcggggtgtgggagatgatctac

SEQ ID NO: 27806 - DNA, 352 bp, Gossypium hirsutum
  Clone ID: LIB3189-007-P1-K1-D7
cccacgcgtccgatggttttggaagtagcaaacatttataccatatttgcctgaaactctcaggctttagataggtactacttggggtgcagtaaaagaagggggaaaaaacaaatggcggagcagtttttcgtgcctgctcttgatcatgtgctttgcatgcgagttattatgatgggtatcgagtcttgttcttgttgtggcagtttttcgaatgtaaaatatctttgtatttatgattactttatttatgttattttttgattatatttgatatttatttttaattttttttataatattaattttttatgtttatttttattatttgtttattttattttttttttta

SEQ ID NO: 27807 - DNA, 272 bp, Gossypium hirsutum
  Clone ID: LIB3189-007-P1-K1-D8
cgtccgattcccggtcgacccacctccgatcattaaagatgcaacagtagtaatacatttgaggggaacgatttggatagaatcttgcaggccactagcagagacgggcgtgctatatgtcatctggcagggagccctcagtcgttcactttacctatcatccaagtttacatttccataattctactgctacaagaattaacaaagctgccaaagtctaccacccactttgcacctgggactgttgctatggccatttctaatgtaaaatt

SEQ ID NO: 27808 - DNA, 265 bp, Gossypium hirsutum
  Clone ID: LIB3189-007-P1-K1-E3
gttgcattttatcaacaacaagaaggccgccggtcagcgttgaacccatcgcctgtagattcagaaatgaattgaattcgattcgattaggtcagatcggatctcccaacacaagcatagacttgatccgctgctacgtttctctttctctacgtagaagctggtttctggttaaggggatcgaatttataaactatgggagattgggtcattggagcattcatcaacctctttggcaggattggcaataactttgggacaaacc

SEQ ID NO: 27809 - DNA, 303 bp, Gossypium hirsutum
  Clone ID: LIB3189-007-P1-K1-E6
cggacgcgtgggcggacgcgtgggctgaatgattattttgagaaagcacttgacgatattttgaatgttattcctcgggataggcacacgtatttgttttcagcaaccatgaccaaaaaggtgaagaagctgcaaagggcatgtctgagaaatcctgtgaagattgaagctgcctcaaaatattctactgttgacacattgaagcagcaataccggtttatacctgcgaagtacaaggattgctatcttgtttatattttgactgagatgtctggatgtacatatatggttttcaaattaact

SEQ ID NO: 27810 - DNA, 274 bp, Gossypium hirsutum
  Clone ID: LIB3189-007-P1-K1-E7
tccaaacaaattttcgcgagaaaatgattcaatctctgtgatttttttttacaaaactctaacggggcaagacacagtacgatgaggtcgacctacgacctcctcttgaacttacaaaatcgaaagctttcctcatttctttcatggaaaatccagaacaacgagaccaagacaaaaccctaatttgcgacccgacgcaaatcaatgcaacacatgaaaatgagaaaataatctaatgggaagatttcgggcttgagcttgctagattgtggag

SEQ ID NO: 27811 - DNA, 299 bp, Gossypium hirsutum
  unsure (1)..(299): unsure at all n locations
  Clone ID: LIB3189-007-P1-K1-F11
gcatgcatgattngtagatatgcacatgagcatagtgtgccagcgggaaatagagttacgaaacaatgatggcaaggggacagcatatggagaagccttccggacattacctgtactcttatgttagcgagctgcgatgcataaaggtgtcctttaaactattattgcttggagagtttttcgtttcacttctctgatactcgccctttttgtaatctgtctactattagctatcttatacatattaagtttctctatttgtacttctcttggtcatgccatctttgttgagttttatt

SEQ ID NO: 27812 - DNA, 411 bp, Gossypium hirsutum
  Clone ID: LIB3189-007-P1-K1-F5
aaagacctgggatacctccttcacaccccaacatccctactgcttcattgccttattcgcaacgagatgattggttctcgtcccagtgctcaacatggagcacccagtcattctaagtctttatctcagcccaccttcttctcccttgatagattgccgccatggtgccctcccccttatcgagatcctcctgtctcgtctgcctcagatcctgcttcaaatgatgtttctatggaagaaaggtttgccaattctaatgctaggtcctcacttccttcacctgttgctggaggatgtaatgaatttcgcattggcgagagttcaagtctacctccgcgtaaaggacataggcggtctatcaacgatgttccattaggattcttactatgattcaatctttgcctaatctat

SEQ ID NO: 27813 - DNA, 397 bp, Gossypium hirsutum
  Clone ID: LIB3189-007-P1-K1-F9
gcccaccgtcgcgttttggccccgtttatctttctggacccatggaactctggatccaagtctcaaaatatgcgaatgggggtgcccatgatgtgatctggtgtcttgaaaaaggtaatgatgcagatgcgctgttgtactgttaaggtcaagttcattttttttttctatttatttatctattttttcttttatctatctcttatttatatgtatctttctttttttttttccatctttatttttttattttactattttatcatccttaattttatttttttatgttttttatattattttttattatctttattatgtaaattataattaatttttatatatttttttatttcatttattttaattttatttttttttttattattttttatta

SEQ ID NO: 27814 - DNA, 161 bp, Gossypium hirsutum
  Clone ID: LIB3189-007-P1-K1-G5
gtctcgtgaagctcgagcacaagcagatataaagtttacttatgttgtttcatgtcaaaatttatgggtcaaacaaaaacaagaatagaaaccctgaggctgttgatattgcacttttgctacagagggaatgaaagcccttcgagttgcattcatacatg

SEQ ID NO: 27815 - DNA, 473 bp, Gossypium hirsutum
  Clone ID: LIB3189-007-P1-K1-G9
cgaggaaaaaaagagaaagaaatcgagtttccgagaaaccaaacggagcctgaagggttttcttttttgttgctaggaagatgcaaagcttaggacctttacgacctcgaagcacagtgctggtgaagcgtccttggcttactaaaccatttaactggagagcactctcgtctattcctcctcctgattactccaaccagtctcgcggtggcctgcctcgcttcttctctgaaactcttccttcttccaaggcaaaatcttctctttattcaggtattcatctcttaaccaccactcgaaatcttttttccaattgtttgcaaatttataaatgcagggcggtgttattcgcgttcaaggagatgaattttgcatatgactaaagtttaagattgaaactgacgaaggtgctgcttgcaatattccatgaacaatttaattttcatccaatttgaactgtgttttttttttat

SEQ ID NO: 27816 - DNA, 358 bp, Gossypium hirsutum
  Clone ID: LIB3189-007-P1-K1-H2
attaatattactctaaccatacaatgtgggaaatactttgtattatggatctttctattttttggatatatcaacaaaaaccttttattggtaaaatggtttatggtataaactaatatatttattggtaaaaatggtactattaaaccttattcaaataaaatattaaaaaatataatttaattattaaaataatatttgaaatattaaaatattttttattaaaatagtatattagtattaaattatattaaataaatttattattaattattgaagtttttgtttaaatatattgaaaattgttatattaaaagtaattttacattaatgttttaatatttcaaatgttttaaac

SEQ ID NO: 27817 - DNA, 161 bp, Gossypium hirsutum
  Clone ID: LIB3189-007-P1-K1-H4
gtccgtctagatcgcgagcggccgctcgcgatctacgcttattcatcttcactagatggtgctcttcgggcggggaggaatttaagccccaagggctttcctaaactttgatttcaacgaaaaaaggagaagaaatccatggcctgttcgcacggttcggt

SEQ ID NO: 27818 - DNA, 124 bp, Gossypium hirsutum
  Clone ID: LIB3189-007-P1-K1-H6
agctctgcattcatttaatttcttctgctgttcaaagatgtcgtttatccgaaagtctttgccgattatcagtcggtctcaaaagctctcctccaatcattcgaggttcaatatcaaatacggg

SEQ ID NO: 27819 - DNA, 406 bp, Gossypium hirsutum
  Clone ID: LIB3189-008-P1-K1-A11
attttcttcttaagtgaaacaagttttttattcaaaagatccaactgatgagggttggtacgttgtactccgaaacacccctagagacttgtttgacatgggcaatggaagtaaagatgacatcgtcgaaagatcagaaacttttccttttccagaacaaaacttaaatgaaaatatctctagtactagtacacaatttcaatgggttcgccaggatgtggatgaagatatttacgaattatgatgtaaaaaaatgcctagaagaagattacgagatccaaatattgttcagaatactccaaattcaaaagaaacaaatagtgaacaatagactgctattggatctttgaatgttctggaaacacctgatatgcctgtagaaattcaaactgaaaggtgtgggatg

SEQ ID NO: 27820 - DNA, 210 bp, Gossypium hirsutum
  Clone ID: LIB3189-008-P1-K1-A2
ctggaggcaatgcgccatcctctgaagaagcattcaatgatacatctactagaattaagcaatgatgctttcctgcggcagtggaagctgcagttaagcctggaccttacattcataacccatacagtgagatagagcatgctggtatcggccacctagtcaggcaccagtgcaccggttactcaggttgcctctagcgacgatgattct

SEQ ID NO: 27821 - DNA, 229 bp, Gossypium hirsutum
  Clone ID: LIB3189-008-P1-K1-B10
gtactgactgggaacgggtggcttttaggccttgggggggcgacgaacattttattcataactgttacagacaatgggaattctactgtttaatttaaacaaatcattgtgattggtccctgttgattctcacgcattttgatttctgtccagagctctaaatgttaaagggaatgatagacaaccaaactttggtaaactgtttttttatactattattttctaaagg

SEQ ID NO: 27822 - DNA, 145 bp, Gossypium hirsutum
  Clone ID: LIB3189-008-P1-K1-B2
gaataaccgttcacccaccgtcgcggaccgtgggctttaaagaaccaaatatctcttcttaatgccagaggacctacaatagactggttttttagaccgagcagacgcgctttgaaaagactggcacagtctccaaccaattctt

SEQ ID NO: 27823 - DNA, 306 bp, Gossypium hirsutum
  Clone ID: LIB3189-008-P1-K1-B8
ttcagattctttctccattataccttgttagaataaagaaatgggaggcaaagaagaggatgtttggctgggagcaaacaagtggtcataaaggcaacctatagggacaacagcacagacagacaaggactacaatgagccaccaccagcttccacttatcgaacatggtgagctctacttatggtcttattgtagagctagtattgcttaaaatgaatcaatttattatttctagtggtactaataatatttatcctttttgttaggatataattaaacaatttcaacggtttaattgagcgaaa

SEQ ID NO: 27824 - DNA, 284 bp, Gossypium hirsutum
  Clone ID: LIB3189-008-P1-K1-C10
cggacgcgtgggcggacgcgtggggtccttacgctgtgtctgaagcatgcatttgcctgcaagagaacaacataccgtacgacgtggtcatctccgattgtggaatacggatctttcttcttccacagtgatatgctgagaaacaagctcttggggatgtgagtgcagagctttctaacacctatgcagaccccactcagtagcaaaataaggcacacctagggttatacccttatgaggtctatgaaactatgtggtgacgttattcctgcaaagggtgcttt

SEQ ID NO: 27825 - DNA, 417 bp, Gossypium hirsutum
  Clone ID: LIB3189-008-P1-K1-C12
gagttatcagtgaacttcatatcggcagtttctgaagaagtttcttctgatctgcatgctcgagttatgaaagcagctcgtggaggtatgctagatgaaataatcagcactatgatctcagagtttgttgctgcaaaaaaatctcagagacctctaatggttgaatcatacaaccaggatgctaaaagttctgatgggaaactgattaaaaataccacggaaagaagtatacattgtacttccaagtttggcacagcgacctccgatggtgtatctaatatttctatcctagaatctacaaattttgatgcaagtctaaaatctgttggaagccttgaaaacttttggggttcttatacagttgttcttaaaatgctttttgagtattgcttcaagtttacgtggaatgctgtcttt

SEQ ID NO: 27826 - DNA, 338 bp, Gossypium hirsutum
  unsure (1)..(338): unsure at all n locations
  Clone ID: LIB3189-008-P1-K1-D2
attctttcctgggtcaatctttgcttctcatttcaatggtgtccatcactcaaaatggtacctcaaatggccatttgcagagcttttgcagcgccacaaatggtggtgttggtgttgcggnagaccctttaatctgcggggtcgccgccaccgtcaccaccgcatattcttacatccatggcaccgattccacatctgattgtggcctatccggaggggacgtgattccagttcccatccgtcttgatgtctacggtaacggtaagattttcgacatctgccataggtacaccgtctacatgccttcttgggaatccatggtcggcttgggacaattt

SEQ ID NO: 27827 - DNA, 412 bp, Gossypium hirsutum
  Clone ID: LIB3189-008-P1-K1-D5
aaactcgtgtggtcttatgcaaggccacaacgtgttagacaatttctttggctggttttcaaggaacgcttactaactaatgcagaacgttgcagaagaggtatgccaaattcttcttcttgtaagctttgcggatgcgttaatgaatctattcttcattctttaacgggttgtcgtaaggtaagagatatttgggaacaagtcattcctttaagattaatgcatcgcattcctttaagattaatgcatcgtttcttctcttactcgctaaaggactggctaagggtcaacttgggtaatgtatttggcttagttttttatgaacttgattggaggtctctgttcggtatactttatttgaagatttggaaagaaagattttcgtatgtgtttctaggatgttcaattcttt

SEQ ID NO: 27828 - DNA, 466 bp, Gossypium hirsutum
  Clone ID: LIB3189-008-P1-K1-D6
cttgcatgttgagtgctatttggatcacttttctacaagtgagtgcttcggctgcgaaggcggagagaactctatggtgaatctctgtgcatgacaggaggacgaaaccttttctgtttctgactactatcccagaagccgattgttggttgcgctcattatatgctccgtcaaagtttattttcactatttgaccaggtgggcgtttccatttagtattctccttagaaactatagaaatagtgctctctaaaccatccatttcttctaagtagctatgaacaaagcatgcaatttcctgactagatctgtttgttttatcatgtattcgagcatttctgtccccccatatggcccataatgtacaacaaaatagtctataaaaggaggttggctggtcaacgaggaccctggtaagccactgttcgaactctaaatttgtttcctgtaaaatgttaacagccga

SEQ ID NO: 27829 - DNA, 332 bp, Gossypium hirsutum
  Clone ID: LIB3189-008-P1-K1-E10
gctttacatccttctttctgcaggaaaatacggtcaaagatgaccctccctatcttcctcaggattgtcattctcggtttcctcgagccagtgcttgaccagaatttatactttttgggaatgaagtacacatcagcaacatatgcgtcggctttccttaacatagttcctgccgttaccttcataatggcaatgatttttaggttagagaaaatcaacgtggagaagatacgaagtgtggcaaaaactattgggactgctatcacagtcatgggagccacggtgatgactttcatcaaaggtcccattattgactttttcaagcacggtgg

SEQ ID NO: 27830 - DNA, 417 bp, Gossypium hirsutum
  Clone ID: LIB3189-008-P1-K1-E11
ccccaacgagaaaccggtcctcttctctcacgttaaacctacatttgccaacccgaaagccttcccttttggctttttcttcttatataaaccacattgcaattccctcacctctttgcttcactcagataaactcgggtcttcttaaacgaaggaggaggatgcatgtggtttcttatgctctgtttttagttgctctgtttcaatgtagattcttggcttttgcaattttagacccaattgattttttggctttacaatctattagaaagggtttcccatgatttggctggctctaattttttggcttgcttgggatttatcttccgattcttggtacttttttcgacgtatctctgtgctttctgatatatgtatatgttcttaatctttctacgcccctttttctcgtttttt

SEQ ID NO: 27831 - DNA, 194 bp, Gossypium hirsutum
  Clone ID: LIB3189-008-P1-K1-E12
ttttatctacatttgccatcccttaaggcgggcctttttgttttggggggtggtaaaccacattgctgcatttttacccacatgcttactcagataaactcgggtcttctcaaacgaaggaggaggatgcatgtggttccttatgcactgcttttagccgctctgtttttttgaaatttttggataatgcatta

SEQ ID NO: 27832 - DNA, 468 bp, Gossypium hirsutum
  Clone ID: LIB3189-008-P1-K1-E8
tggggattaaacatgtaaaaggcatgctgctttatggacctcctggtactggcaaaactctcatggctcgtcaaattggaaagatgttgaacggaaaggaaccaaagatcattaacggtcctgaagtcctgagcaagtttgttggtgaaactgagaagaatgttatggacctatttgcagatgctgagaatgatcaaaaggacttgtggtgactaaagtgatctgcatgtcataatgcttgatgtttttggtgctttttgtaagtatattttttaaacttgtttttgtaacaaattttttacacagttttttttctatattttttttctttaaaatctttttttatcccctctttttttcgattttctttttcttctatttttgtcgtctagatttatttttctaccattgattttactgaaattaattttttattgacataattttttcaaactaattttttttttc

SEQ ID NO: 27833 - DNA, 497 bp, Gossypium hirsutum
  Clone ID: LIB3189-008-P1-K1-F7
atcaatcctgattgacacttttcaagaatcttttgtatgtgcgagtgcaagatatccacattagtatctttcctaccaagagtggttgccttttttaccactattcctatcaaaatctaatttttcttctttctttcttactaattttttttcacatccctttttttatatttttttttttagcattatttttaataattttttttatcctatattttatgtaacttctttttttttattttttttcatcttttttatattctataattttctattttatacctttccccttttttcatttacatttatccttcactatctttttcaatttatttcattagttttttctctaataacctttttttacttttatattttttttttatatatttttctatccctcttttatttatttatttatttatttatttttactattataaaaattttatatttatataatttttttttcaaaattttttttatttaataatttt

SEQ ID NO: 27834 - DNA, 386 bp, Gossypium hirsutum
  unsure (1)..(386): unsure at all n locations
  Clone ID: LIB3189-008-P1-K1-G2
anggacttattctcatatatttgatattatgaagagccgaacaagtgtgatatagctagaggcatatctgtaattgggatagatgggagaggaccctcattttccctggaagctcagagtgcctcaggaccttccgttgagcctctttttcccttcctttatatcacaccgcccaattcncttcgccagaccgcttctcaaatggacccttccacttcctgtcgctccagttgttccccccatttcgagctcagcagnccggggaccgattatccccgaaagaaggaagatgagcgaagatgcttttgaaagtaaaaggaatgggaagttggaatgttccaatacgaagtcgcagctagtcaaggtttaagaatacggccacggcc

SEQ ID NO: 27835 - DNA, 289 bp, Gossypium hirsutum
  Clone ID: LIB3189-008-P1-K1-G8
ccttcaccgcatttaggagggggtctatttccacgacagggagtgtatccgtccaagattattttttggaacttttccaacccctgtcgaaccaccacacagtttccaagatttttttccagaaacatttgaagttcaatgttttcaatcataattttttacaattttacaacacctacttcaatgacaaaccttatataaggtaaataccaaaagtttctttttatgtctccaacccccaaatttatttatgctctacccttatttttcatggattaaatcattcact

SEQ ID NO: 27836 - DNA, 294 bp, Gossypium hirsutum
  Clone ID: LIB3189-008-P1-K1-H11
gtttacttttgcttaaattatagagagaaaattcgattcctaaagatcgaaccctgttttgagtttcttatggggttgggaagcctacacaaattttctgggaaatgaaagataagataggaaaaatagtcacaaatgtgcagctttatccatatgaccttgctagaggccaaactactgatctgaataccatagacaatattaaattagtcccttgaggcaatgctgactttcttggagactaacacgattgggagaatggagaagttgaatgctacttaaattctatacata

SEQ ID NO: 27837 - DNA, 174 bp, Gossypium hirsutum
  Clone ID: LIB3189-008-P1-K1-H4
gcgtccgcccacgcgtccgaaaatggatggttattgtagcagaagggtaatcatgtaatcggagacagcattggcatcaataaacagaggggatggtcacgaatcaaccactcttgttcctgcaatcatcacctttggcgactcttgaggagatgtaggcaataatgactatct

SEQ ID NO: 27838 - DNA, 395 bp, Gossypium hirsutum
  Clone ID: LIB3189-010-P1-K1-A12
ctctacgatgatgttctgtcgtcttctcaccagttttttccatttccgttttctgcctcttctttgctccaaattcctgccatgttcttccttctctcaaccccatgcactttacctcgtccgtttcctctcaaccaacaacaatgacaataggaaagatcagtcattttccaatccctggaatttttccgaagaagctaacggcaaattcgggaatcttttccccgatgaatcgcaaaagaagagcggggaaggggattggttcgttggagaggaagacaaagcgtggagctttggagaagaagacaaagatgatggcgtgtttgattttaaagaagaagctgtacaagatgttggtctaaccattgatggtaccggtattgctttgggtgctg

SEQ ID NO: 27839 - DNA, 461 bp, Gossypium hirsutum
  unsure (1)..(461): unsure at all n locations
  Clone ID: LIB3189-010-P1-K1-A5
taatccccgaaattctctgttttctaatccctggcttcttctcagtttacatccgttttatttttgacgccctaatttgccctctgtttcctgggtctgtctctctttatctccttcaatgcttgcttcgccttcggccagtagccccaatttcttgtcgagcatgccatagagaaaggcaagaagagagctgcttctggttttctttctttggtttctggaacagacccagaagttttaacccagaagccccaaattcttctcctttctttctttggtttctgtaacagacccagagactttagattgacgaggttgncggaagctgtagatgcaacaactccctctcaagcttttaaccgaagatggcagagagttacctctttctcttctcttctatctgatgagggcatttttcccgtcaatgcaatcccgccacaccatgctctctgcccaatctt

SEQ ID NO: 27840 - DNA, 301 bp, Gossypium hirsutum
  Clone ID: LIB3189-010-P1-K1-B11
gtcgtctatcataactccgcggtgcagagccttggtgctttcaaaaggcgtaaattacaaaggggtgggctttttaaagtactaccaacaccacccacgatcgcacaattctcaaatggcaagggacctggaccaaatgctcgcattggctacattgatggggcattctatctctttcatgctgggcatgtggagatcctcaagaaggcaaggcagctcgtagactttttgctagttggtatctaccctgactatatcgtgagtgagcagaggggtttgcccctcccagttatgcatttac

SEQ ID NO: 27841 - DNA, 220 bp, Gossypium hirsutum
  Clone ID: LIB3189-010-P1-K1-B5
tcctttttttttttttcggttaacaaaccgaaaattaagaacccttttcttttacattctgggggaatttaactaaaagctggatcttatgggggcttctttgggttttccgtgcccaacttttttctttatcagggacaagaaagaattggggggctctggttttcctttaacatctcaaatcggcattcaaaaatggaagaaacaagcctcgaagaaa

SEQ ID NO: 27842 - DNA, 469 bp, Gossypium hirsutum
  Clone ID: LIB3189-010-P1-K1-B6
gtttcagaccccaaaacacctttggaacaaccaagacccatccctacgaaacaacaactacaatgttacccgaaagacaaggcggaggtgcaccccatggaataatactagctgtggtggtgggcatcgtggtcttagccccattcttgttcggcgatcaaggcgaagccataactgaagccatttccgagctcttgactcccctcggtctcctcctcttgcccatcatcctactcctcacaatccagttcctttcctcagatcgcggctccttcgtcttcgccgtcttttccaccggcgaacccgacaccatccaccgcgtcagcggctctccctttggggtcgccttgttccttctcctcatcttgttcttgctttacaatcgtgtttccattttcggcggcgatgacgatttcgacgattgactgcttcgatctacggaggacttttttccctttcctttttcttt

SEQ ID NO: 27843 - DNA, 199 bp, Gossypium hirsutum
  Clone ID: LIB3189-010-P1-K1-E10
gtcagccaattgtttgagctagctagctctttccctaatggcaaccaaaacgatgatgttgcaaagtattttcacttttcttctttttgttcagtatctgcaactccattttccttggtgctaatggagatgacaatggtggttgtcaaactgcccatgccatcttttacagcggtgctataactacctgcacaacgac

SEQ ID NO: 27844 - DNA, 455 bp, Gossypium hirsutum
  Clone ID: LIB3189-010-P1-K1-E12
cggacgcgtgggttaaaattcaattatggtgaaacctagtgaaaatgggtctcagtcaatagcaccctttctaaaaaaatgttatgaaatggtggatgatgagtctactgatgcgataatttcatggagtcaaaataacgatagttttataatttgggatatgactgaattttcagttcatttgctccctaagttcttcaagcacagcaatttttcctctttcatcaggcaactcaatatttatggttttagaaaaattgatacagaccgttgggaatttgcaaatgatggattcgtcagaggtcaaaaggacttgcttaagaatattgctagacggaaacactccccaggatctgagcagcgtaaaccattgcagcagcagccactacagcagctggagaacactgttggatcatgcgaaaacaatgaaacactggactgtggaaggaagttga

SEQ ID NO: 27845 - DNA, 383 bp, Gossypium hirsutum
  unsure (1)..(383): unsure at all n locations
  Clone ID: LIB3189-010-P1-K1-E3
gacccacgcgtccgaagactcttgggcccacacttctgctgactcttgagagccncccataaactggtagggtttctaagaccaccctaaccctcgagaaggctcccaccaccgggctaccgagacagacgctgattacccgcaatagcgccgacgcccacggcggctggaaaataaaaagggaacactgttgggtgacgtcggctcccctagcgtaaaggcatcttacatcggagatgacagacctaggccactcacggtggcagaagacgagaagacaggtgagattaccgcccccttatgtaccataacatgcgtattcttgaaaaaaacgcaagttaaaaaaataaagaatcaagaatgaaggaatgataggacccacc

SEQ ID NO: 27846 - DNA, 221 bp, Gossypium hirsutum
  Clone ID: LIB3189-010-P1-K1-E9
gttattgctcatgtggaccacggtaaagcaatcctgagctctattcgtctagaagctgctgataggatgtacgtgttcatgtaagcatgcataggtgatgcgtccccacgacaacataccgcgtgctagatgaggcgtgaactggtgtattacaagtcaagttctactggtgatctctactttattatgaacatgcctgaggactgctttgcaagagctac

SEQ ID NO: 27847 - DNA, 178 bp, Gossypium hirsutum
  Clone ID: LIB3189-010-P1-K1-F4
cttcaacgaatcgatctcccgagagtgaagaagatacttattgtctgactagatcgaggacttccgagcacgcgcttctaaaagaatgttgatgtgagatggggatgatgaggctacccaagacgggtgttcttgggggtaaaattgcgagcgtgttataattagggatatgactgaa

SEQ ID NO: 27848 - DNA, 394 bp, Gossypium hirsutum
  Clone ID: LIB3189-010-P1-K1-G12
attgcgcttcttttttatgtgtatcttttgtagtttgttgttaggccatagggaaaaacaagggaggggatgggcaacctattttgttagtgtccaagtagaccaatcaaccggagcgataaaggaacgatttggcaagtttgatgaagttctagagcctggacgccattgcttaccttggcgtattgtgagacagcttgccgggcatatgactctgcgattacagcagatagaagtgcgttgtgagaccaagactattgacactgtatttgccaacgttgcggcatacatacattgtcagcgccctgactgagaaggctaatgatgctctatacatacttagcaacccctacgtactaaactgaagcctatgagcttgatgatattatggcat

SEQ ID NO: 27849 - DNA, 237 bp, Gossypium hirsutum
  Clone ID: LIB3189-010-P1-K1-G4
gcaaaatccaaaaagaaatacacaattttctttgttttctgttttgtcttcctcttcccagtaatagatggtaaggggagggaaggttggtccaagaagcaattttaaaagaagggtcagatcaaaagatgaggcttcggatgattcaaatgaagattatgtcgtttcactggagggaaatgatgaatctgaggacgatgtgaaacattattgttcttccttagatgagcgcccatc

SEQ ID NO: 27850 - DNA, 319 bp, Gossypium hirsutum
  Clone ID: LIB3189-011-P1-K1-A1
ctcgagaaggagttctactaaaatgaccaaactgttggaactgttgcaagctacatcaatactagtgtctctgatcagaaagctgtactggagactgcacataaaatcactgatgagaaggtgacgagaaatgatacacaagagacaaatggtacaagagcattccagattcaagatgtgctttccctggaaaatgaagattctgatgagacgacaaccttgcttgataaaaaggataatgtgtgtgtaatgtcaaatagacaatccatgtatccagtgctccaagttgattcgagattgatatcagatttggtgttgt

SEQ ID NO: 27851 - DNA, 259 bp, Gossypium hirsutum
  Clone ID: LIB3189-011-P1-K1-A10
tcgttctaccacggagttcaatctatttcaatttcatccgggaaggctatgaagcttgggtcattgtataattttctttctctctgctgggcatgggttggaggaccaggatcagctatactcaacttgagtggcatagtaataaagccaacttgctatatgctgacatgaatgcatccttctatgccttaagatggaagatctacaccgagatgcaagaaaagaccagagcagctattaaatctgaatctcaatctaa

SEQ ID NO: 27852 - DNA, 330 bp, Gossypium hirsutum
  Clone ID: LIB3189-011-P1-K1-A4
ctgcatcaacctatgttttgggtctgaggtatctttattgccggatcttcgttgtcaatcatattgggattgtcaagagcagatgctgatgtgggagtcatggtttctttcagaacatcatttggtttccgatttaacccgaattcgaataccatagaatatgcaaaccgagattccgtgttcttagccattctttgacatctattgttaccatgctaggaatattcataacatatgtatctattacaaccaatatgttatgccaaggtcctgctcacctattaccctgatgatacccactctactagaatcatcaatggaggtggaaag

SEQ ID NO: 27853 - DNA, 380 bp, Gossypium hirsutum
  Clone ID: LIB3189-011-P1-K1-A8
cccacgcgtccggaaagagaaagaaaacgcaacaatatttcactgaaaaccatgaatactggcttggcaaattacgaattctgcgactgcttttgatccaatccgtctttcgactatacccttgagatgacccatactcattactaatggcacctctatcgctaaacaacaggacagtttccagacaccacggatagaacagctacatacaagtggcgaatatgaccaggaaagtcctcaactaccaatctgtcattctttcacagccaagtcaaaccttgcccatctgtcgaatcgactctatcgatcgtcgccttggtctcggtttcaaagaaaacgaagccgctgcttatctccttaaatttcccacgttttcgtaa

SEQ ID NO: 27854 - DNA, 400 bp, Gossypium hirsutum
  Clone ID: LIB3189-011-P1-K1-B10
aaaccctaacggctacactcttctctcactttctaaactaacaaaagaaaacaatcacggaaatggagttttctcaagctgacttcgatcgccttttactctccgaacacactcgtaaaatctctgaagttaactacgccaaggaccctcttgatgctgagagaaaaggcgtgctgaggcttccagaatcaggcgaaaataccctgacagaattccagtctgaccaaggtgcttatttgcttttaccatcatatgtcatccggacacatgggataaaacaacagcgtgaaactgttaaaagaactccaaggaagcaattagagcttgttcttgaggccctggatacactgggaaacaccaaatggaggataaattgtaggattcttggagtactaaacac

SEQ ID NO: 27855 - DNA, 163 bp, Gossypium hirsutum
  Clone ID: LIB3189-011-P1-K1-B8
tgcctccgtccgatcccgtcgacccacctccgctagatctcagtaaacctgctaagggtgttgttatacttccttttatctccgcggggatctcctatctaaggggagtatatctactaagcatctttcttctggatcattcgttgaacctccctttcttgga

SEQ ID NO: 27856 - DNA, 207 bp, Gossypium hirsutum
  Clone ID: LIB3189-011-P1-K1-C8
gcttttgttgcctgtgctttctccccatttcaaactctgtttctctttgggaattttgggttctgctcattttatccactttcaaggccttcttcttttgattgctattctaattactttcatctgaaaaaaaaaagaaaaataaatttcttcctcaactgcccaaattcatgttcttggtgatatctggtttccctacctcaataa

SEQ ID NO: 27857 - DNA, 421 bp, Gossypium hirsutum
  Clone ID: LIB3189-011-P1-K1-D10
atctcatgtttgtatatttctgggtttttttttcttttgcggttgggttcatatgattttgcgtgttaattatcttgttggatgaaggcttgatcttttgttgtagcatgagctaatgtacttataatttagtttttgatctggattttatctgattattggttttttccgttatagttgatcatttatttagaatatatacatatatttttgcaattctactgtttgttcactcttttgatctgatcaatgagaatactagctaaaggaatggctttagattgcaccatttcaaattgtattggttacacttttctttaaatattatttatttttaatatatattggattatacatgtctatcaggtgtctgggtttaaaatttttattttatgaatgtaatattattttatcttaattt

SEQ ID NO: 27858 - DNA, 405 bp, Gossypium hirsutum
  Clone ID: LIB3189-011-P1-K1-D8
ggcaatggcatcaaatgtgagagcaaatatgggtatcctttccaaagccctaacgagactgcggcgcactggggccttgtattcccgtcccaaccaatccctccccccgccaaagcattgggtaccatcttcttccttctccaccgctgctgctgttgcttcatcccaatctcttcatgataaagagaaaggatcaaaatggtcaagatggtttcttttccttcctggagctatcactttcggccttggaacttggcagattttcagaaggcaagacaagatagagatgctggattacagacagaagaggttgcaaatggaacctttgaaactaaatgacatgcctccttcaagtgaaatattggacactttagagtttaggcgagtcgggtgcaaaggaagttt

SEQ ID NO: 27859 - DNA, 367 bp, Gossypium hirsutum
  Clone ID: LIB3189-011-P1-K1-E1
ggtcctagctggagtacaacttctagtctagtgggtaattcacaaattgctgaaatatttgttgaatggggtggacattcttccactccagcaaaaccatctgcataggggtgacactcaaatcttgagcccgtatactcatttaaaccatctatcatggcaagcgatcatgctgctgctccaacttcacgaagcgaccaattgactcattcgtactgcccggatcctgctcataatgcatttgcttgtgatccaattgttcccgaacctaatgagggtgatgaatcagtttcagatctcttggctgaagttgaagcaatggagtctcttaatggcttgacttcacctacataaattatgcattgtg

SEQ ID NO: 27860 - DNA, 462 bp, Gossypium hirsutum
  unsure (1)..(462): unsure at all n locations
  Clone ID: LIB3189-011-P1-K1-E2
attgatcagcatgtcaccttgcctcaatttcattacgggaaactcgtcgaccccgtctcaacaatgctgcgacacagcttgccagtgtcgtgcgttcgtcaccccaatgcttgtgtgaggtccttaatggtggtggttcgtcgctggggatcaacgtcaaccggactcaagctttggccttacctggcgcatgcaatgttcagactccacccatcagtgcctgtaatggtgcttctccagcgcctgcagactctccagttggatcaccagaatctgggagtacaatccccacaggtggatctaaaactgtaccatcctcagaggaagatggatcaccatcatcatcatcgagtggaagcaccatgaccaaattgacactctcattattgttcttcctcattgtggccatatcacattgaatcttctatcctatttggaaaacattntatgatattattgatt

SEQ ID NO: 27861 - DNA, 133 bp, Gossypium hirsutum
  Clone ID: LIB3189-011-P1-K1-F1
ccacgcggtccgggttggagttggactaatgcgattccctacttgccctcaatttgcattgctgctgcagaaggacgttggtgaggccaaggattttcgtgaaacagaagggggttgatgttgggtccgattg

SEQ ID NO: 27862 - DNA, 268 bp, Gossypium hirsutum
  Clone ID: LIB3189-011-P1-K1-F11
gattttcaacaaatatgttcatcggatcttttttgaatgatgagcggaagaaacaggtgcgctggtgactgcatattagcatgaagagctcaaacatcaaactctaatattcaagtacatgatctgagacatccctataccacctgatctactgttgaccatcaacagaagctgctcggatacctgactttcttcaaggctctgctgttaccaaaccaaacatatcggatggatctgcatcaagctgagatcgccaagatacataaac

SEQ ID NO: 27863 - DNA, 227 bp, Gossypium hirsutum
  Clone ID: LIB3189-011-P1-K1-F2
cccaacattcggattctatggatttgttctaacaatatgaaaaatttgccaaaataatatatcacaaacaaataacaaaaggtccattacaacatatacacactattctcactcttatccaatgaagtccatttcaaaaagctcaaacaattcaatacacccattttatgtagaaaccccacctgttaagactccaacaccaatcatttacatataaatcaagcatt

SEQ ID NO: 27864 - DNA, 116 bp, Gossypium hirsutum
  unsure (1)..(116): unsure at all n locations
  Clone ID: LIB3189-011-P1-K1-F4
aactatgggggaggtttatacagaaatagggacggcccaatacccaanaagagaacattcaataatcttaacttccaaggtgaataattaaatactctcatttatatatccattta

SEQ ID NO: 27865 - DNA, 301 bp, Gossypium hirsutum
  Clone ID: LIB3189-011-P1-K1-G10
acgcgtccggcaatagtactactactccaagcaagcattttccttacaagtttgtttttcttgtgattaatcgatatggctagctcaatgtcccttaagcttgcatgtgtggcggtgttgtgcatggtggtgggtgcacccctggctcaagagtcctggacgctgtcaaaagcttacacaaagtcgatccttccacggtgacacctgatgttcatttgcagaaagatttagggttagatagcttgcacaatgtggagattgtcatggctttagaggaagagttcaagctggaaattccaga

SEQ ID NO: 27866 - DNA, 236 bp, Gossypium hirsutum
  Clone ID: LIB3189-011-P1-K1-G11
gcagcttgcattttgattacccttttttttcttcaaccttatttaaacccattcgctagaaaggcactgtttcttccagtgtgcttccgattcgagttactgcactgctcgtgaactccctaagtgggtaccgccatggcgacgtataccaacaggtacacttaatgttcagcgctctaaatattggagggctcatcggagtgtatccgtggacaatatcataagagtccaggctt

SEQ ID NO: 27867 - DNA, 308 bp, Gossypium hirsutum
  Clone ID: LIB3189-011-P1-K1-G7
attcccggtccaccacgcgtccgcttgggttgagtgtagagatgaggaaaatcatcgtttccaaagctcttttcttctatgctgggctgtccttttcagctggcgcggcggttgcacagaatgaggaagaccaatgtctcgccatgaacttctacaaggcttcttgtgaccacgctgaagacattatcaacgatcaagttaagctactgtacaagctacacaaaaacactgctttttcttgcctgaaaaacattttccatgactgttctatccagtcatgtgatgcttcactgctgctggacttccac

SEQ ID NO: 27868 - DNA, 132 bp, Gossypium hirsutum
  Clone ID: LIB3189-011-P1-K1-H12
gccccactctgttccaccgccgtcgcaacttttactcctcctaaatcaccggaagatccactgtcgaatgatcaacccaatctttccaccccttctgagttcaactctacccccacctgcgacgattactgc

SEQ ID NO: 27869 - DNA, 322 bp, Gossypium hirsutum
  unsure (1)..(322): unsure at all n locations
  Clone ID: LIB3189-011-P1-K1-H3
cgccccttgcaggtttttttgttcttaaatccaactattgctaccaaaatggctgcttaaaacaatgtgtaggaaggctctcaagtggtgggaaagtactaantgaggaggaaaaagctgctgaaaatgtctacatcaagaaaactgagaaagagaaattggagaaacttgcacgcatggtaccgaaaccagatgagaaaccagctgttggttcaaggggttctgtgactgatgcttaccctagtatttgtacattaacatcaagagctttatttaccgagaaagtattgaccgataagtactaaaaactatgcaattttta

SEQ ID NO: 27870 - DNA, 312 bp, Gossypium hirsutum
  Clone ID: LIB3189-011-P1-K1-H6
agagaatgctgcttactgtactagaagcgttactttctcaataaaccctgattttctttttttggagcatggtcccgagaatttttgaagcatcaacaagaaagaaatacccggaaagtctacttattcagaaggtatgttcaagaaccaattgcaagagttggctcaaagaagttgctttaatctaccatcttattcgtgcatccgggaaggccctgatcacgctcctcggtttaaagctactgtaaactttaatggagagacctttgaaagccccatgttttgctctactttgagacaagcggaacacgc

SEQ ID NO: 27871 - DNA, 344 bp, Gossypium hirsutum
  Clone ID: LIB3189-011-P1-K1-H7
gcgagcggcctctcacgatctatagtgttacagtctataccgaatctgctctgactttggaaaggtgttctttaactccagaggaggctacaagtaaatagatacctgtgacactctcaaataagtctgataaaccaccacagttcacaaaacaaagcaaggcaaaatccattcttccgccacttcataaccgtggtaagagaaggatgcatcatttgatgttggtccttgttacatccctgatagattcggccttgcactttgactcgaaaactattacttatattttaacttatgtcttgctcaaaattttaactattatacacacacatatttatatacat

SEQ ID NO: 27872 - DNA, 135 bp, Gossypium hirsutum
  unsure (1)..(135): unsure at all n locations
  Clone ID: LIB3189-012-P1-K1-A2
gcgtccgatcggatgtgatgaggttttcacagatggtgatgtgctgagaataccgncagcatccacccattgtgggggtctaccacaaggacgggggggataaggctcggcgctcggtaatacaaggctaagcaa

SEQ ID NO: 27873 - DNA, 131 bp, Gossypium hirsutum
  Clone ID: LIB3189-012-P1-K1-A5
gctgatttggaatctgctctctctgggttgaatgctcggatcgagacctacttcgctgatcttacgcactaaggcatacatgaccctggtgggattgaagggtgttaccgcttacggtttggatttggttc

SEQ ID NO: 27874 - DNA, 159 bp, Gossypium hirsutum
  Clone ID: LIB3189-012-P1-K1-A6
caaaaaccaagatgttgaccttagtatgtacaaagtaaattctcttcttgaagataatgaattttgtggatgttgacgcactgatggaaattatacccagttgactgacctttacaacatatacaaggaccaaggtctggagattttggcattctcatg

SEQ ID NO: 27875 - DNA, 404 bp, Gossypium hirsutum
  unsure (1)..(404): unsure at all n locations
  Clone ID: LIB3189-012-P1-K1-A7
cccacgcgtccgcccacgcgttcggcggtcgtgttcatttcctttccctttcaccagcctctgtattcgatcgaaaaacaatggcctcttcttcctctctcaccctatctcaagccctccttgcccgagccatctcttcccatggctccgcccaaccctctgatcaccgcgtctctctctctgccctctctattcccactttctccggccttaaatctgctgccccacgcccttccacttnccgtcngccgccttccacgcgctctacctggaatcaccaagtccgttctgccgctgtcgagacgattggtactgccgccgagacttcattgatcgagaaatcggtcaacacgatcagattcttggccattgatgctgtcgagaaagccaattcaaggcattct

SEQ ID NO: 27876 - DNA, 282 bp, Gossypium hirsutum
  Clone ID: LIB3189-012-P1-K1-B5
tcggacgcgtgggtttactccgtctttcttggaggctcgttcagcagagatccacccaacacatctgcgctttttaaaaagccaagggtggacctctttgtttttatacttttaacgactcccccaattcttcaccatcccccctcttaatttcttccactgcttttcatcgcttcccctctttactccttaaaggcactgtcatcttttaactctttagatccaacccgatttcaatggcagctcttcagccaacttctctttcaaaccatcctttatcaa

SEQ ID NO: 27877 - DNA, 189 bp, Gossypium hirsutum
  unsure (1)..(189): unsure at all n locations
  Clone ID: LIB3189-012-P1-K1-B6
cccacgcgtccgttgactcgtgggaccnactctaatttttttttnncccaaataccataatcttgtgcggattattgtacaaagaagaggaaatggccgatcatcttaccgaccaacagatctctgagttcaaggaggcttttagcctcttctacaaggatggcttaagggtgcattactaccatagta

SEQ ID NO: 27878 - DNA, 384 bp, Gossypium hirsutum
  Clone ID: LIB3189-012-P1-K1-C2
ctcgccgaccctgcttgggtccttgctttaaggtcttccgatttcagcccttacacctcatcccgacttcgattaaagtgaaggagacgaggattccggcggttcatgcgtataggtaacccctttgctcccttttacccctttttatgctcgaaatgacagtatgtgcaaccaaacaataagaaaagaagatgaaaacaaacagaaaagaagggccaaagccgaataatcaccttttcaaggttttgatttcttttctttgtattcaatatgcaaaaatgtgcgtgtattcctctgaaaaaaactttacaatcaaagatagtaggcttttatagccgtatgttccaaaaaaaagttaaaaatacaatttttccttttagtatt

SEQ ID NO: 27879 - DNA, 268 bp, Gossypium hirsutum
  Clone ID: LIB3189-012-P1-K1-C4
aatcgacttaattattttgttatcgagttttcgatatgcttgcaattttttactttttactgaaccagtctgatgtaagaacgtcagtgatttttagttagatctctgctaatgcttttattttcagaatcggggagaagaatctatggattcgaaggaaaatccagagagatataaggtgggagacgacgcccgatcttcttatcgatcaatctgtttggaccctactttctcttcttgtttgatttttttcaggtcttacttcatt

SEQ ID NO: 27880 - DNA, 460 bp, Gossypium hirsutum
  unsure (1)..(460): unsure at all n locations
  Clone ID: LIB3189-012-P1-K1-C5
cgccgtccgctttttttaccatttcattagcattatgcagcttagntccatcnctcactnacccaccatccatttggctgtttgtgagatcatccgaaaaaggaatgggggagcgcgtcggaagatagttcgttaagggctcaaacccgtgcccaatggcgcctgctcacncgttgtttggccaatcgggcaccatcaaacncccgccctanatttggtgttgatcatgagcgacatatccctgacgtactatttttccgtatcacaaaatatgtgaggcacaataaccccgagttgataagagtaagtttcaaggcgcgatgtgtggaaaatatcgatgattcaagaaggcgatacattgtacccttacatgaagaagatttttgaaaagagaatatcccaatgtttgttgtaatacatgggctcctttcaactgtgacgctaaggcaaagatattggt

SEQ ID NO: 27881 - DNA, 408 bp, Gossypium hirsutum
  Clone ID: LIB3189-012-P1-K1-D1
agtaccagtattttctcggattctttcttctttttttgatcaattttactttggtttcggctgagattaatggatcggtgcttaaaatgagaggaggaacttcttctgttcaatttgatcccacttctgttactcaactctcatggcgccctagggcttttatttacaaaggatttttatcaagtgaggaaagtgatcaccttatttttcgggctaaggataagttagagaagtcaatggtggcagatgatgtatcaggccagagtattgaaagtgaagttcgaaccagctccggcatgtttcttgagaaagctctggatgaagtagttgctgatattgaagccaggattgcagcatggaccttccttccagtagagaatggggaggcactacaaaaactgcactatc

SEQ ID NO: 27882 - DNA, 283 bp, Gossypium hirsutum
  unsure (1)..(283): unsure at all n locations
  Clone ID: LIB3189-012-P1-K1-E2
acnaaanaacaaanaaattgttgctttatttgcaagaaggggggtgctttaaccaaattatatccaatttttggtaaatgatcttcatcatgcactatttttatcctacctaaaagtacattttaattggttcatccctttttcaattttagtctaatcatcatttttttcatctttattgtactataacaagttctttactattataattacatatatattattaatatagttatttcaattttattattattatctattttttattatttaattcatattt

SEQ ID NO: 27883 - DNA, 473 bp, Gossypium hirsutum
  Clone ID: LIB3189-012-P1-K1-F11
cttgaccatcttccctccaagtcggaaggatgcctattcaactcctctcccactaggtaagagatctctcctctatctagagtattctttgcgaatctgtgtgcttgcgagttccctgatctatgaatatgctgaaaggtaatctcttgaaaataaaatttcttgttctgaatgtcttttatgatcctcgaatctctgatttatctattgaagatgtttgacattttttgattattgttctagaatcccccatgattttaaccgattgtatacccattgatatccctaactttatgccttccaaacatgcaaacgcttctgctgcgaacggggaagaaacattattgtgaagggtcgttttttaaaccagtatctcgcccgttaggccctaaaccaccaagcctgttgcttattaaagtttcgattgtctaacgctgcatcaaactttatcgttttctcgtcttgtgctcctg

SEQ ID NO: 27884 - DNA, 271 bp, Gossypium hirsutum
  Clone ID: LIB3189-012-P1-K1-F2
atttccatggagtttactatcatcaaatctagtctctatgtccattcttttgcttctccttgtgtgactttccatacactattgtgggaacaggtagcttcgatgtttcggaaaaagaagtttatgagattgattatagaggtccagaaacacacactttgatccctccacctggtcacggtcaccgcagttcgggtcaccaacttactgatttaccaactcatgaattaagaaggggaaattaaattgatgggtgaaataagacagattt

SEQ ID NO: 27885 - DNA, 300 bp, Gossypium hirsutum
  Clone ID: LIB3189-012-P1-K1-G10
cccacgcgtccgcaagaacctgcttctcaagcggtacaatggcaggaagaagatcaggaaactgagagatgcagactggcaagaagctagtctggaccataacgagttgatggatggtcgtaatgaagaagcctctgacatgaatcatgaggacggtgagagtgaaaatggaggttatgatgatatgcaagaagcccctgatgcacaacgtgaggatggtggcttgcacgacactagacaaaattgtgtggaaggatctttcaatctacaatctggcactcattgtaagaactgactcat

SEQ ID NO: 27886 - DNA, 464 bp, Gossypium hirsutum
  Clone ID: LIB3189-012-P1-K1-H1
acattgtttaaatttataaatgaaactgaaaatgtttatatatgttgcttaaattcaaaatgctagtcgtcattttcattgtaagagaagcttcctgatttagttgtcagcattctttcttttgcaattaaatggattgtccttgtttttccaattattgcttctttcttttgtctgattgtttttcttttctttctgatgagttggctaatttcataatctacagcgcatggagaagttcttcaaattctccactatgaatttggacataaatatgaaccacatcatgattacttctgcttatctgttctgctcttacaaattacactaaatactttctatcatctttacacacttatccatgattggaatgatatgtcatcaattcttaatacttatcgtagttcctttaaatctctttttttatgtgtctcttttatatcttcatatctatattttatttc

SEQ ID NO: 27887 - DNA, 189 bp, Gossypium hirsutum
  Clone ID: LIB3189-012-P1-K1-H4
cgtttgcttccatcactctctatttcggtcttcacctccatctgctgcaaggagcagaaggaaaaaggataaaagcatcggtggggtggggcgtctttttcaaccttggctcttcgtccttgaaccttcctattttgttccttttttatacaagattgtaaaatattgccgattctgatgattttcatc

SEQ ID NO: 27888 - DNA, 450 bp, Gossypium hirsutum
  Clone ID: LIB3189-013-P1-K1-A2
gttaggaaaggttatctgctcaaaatgcggaccaaacttttatgtatgcccaatgaggggagaatgcagacattttgtcagtgcgtgtgcctgtacatggcttgccttgacagggccagaggagaaaagcattgtcagcgcatctgataacacaaaacccggtcataaccatgctgtcattattgatcaaaaggccctgcccctactccagccaattgaacaatcagatacgaactgtcagcctgaagcaaaccagcaattacaagcaaagtcctgggtcaataactgtagtcataaccatgctgtcattattgatcaggccctgcccttactccagccaatggaacaatcagataggtactgtcagtctgaagcaaaccggcaattacaagcaaaattcagggtcaataactgtgaccctattattggagagccagcgagcccagaacc

SEQ ID NO: 27889 - DNA, 273 bp, Gossypium hirsutum
  unsure (1)..(273): unsure at all n locations
  Clone ID: LIB3189-013-P1-K1-B4
ccaaaaagaggtaacaatggtggtgttttctagntaacctgtccttccccaannacaagaaaataatctgaaagattcactagaagaagcagctgaagataaatcactttcaaaatcacaaaacattgatccatcatcattaaatcaagatggttccaatggacggtcaagatcattagctagacttcattctcaaaatgatttcttgaatgctacttctcttgtttcataccgtatttttttctcataatatataatttcattcttttaatt

SEQ ID NO: 27890 - DNA, 248 bp, Gossypium hirsutum
  unsure (1)..(248): unsure at all n locations
  Clone ID: LIB3189-013-P1-K1-B6
tctttttcgtaaatttaacgactatcatttttcattaggggaaaaaaaaaaaaagtttganacttagtactgggattaagatttttttttctgagaacaaaaaaatgttgtgtcgtaaaaattcaagctgcgaggaaacaggatctgtaccagtgtatctcaatgtgtatgatctaacaccaattaatggatttgctcattgattttgtctgactgaaaattaaatattttattatgatcattatttt

SEQ ID NO: 27891 - DNA, 383 bp, Gossypium hirsutum
  Clone ID: LIB3189-013-P1-K1-C1
agggccaacttaagagttgctatgcttctttcatataaactacaaaagaaaggaaaggagacaagcaacggaacaacaaatatgacacacctacaaaactcaaatcgaccacaccaggcctaatactagcaacatatatatattccacactcctcaaagctctgctaacacaagaataaatccaatgaatgtattgagtttacaggaaaactgacctcacagaacctaaacttgagagccatctatatatttctttttctttgttcatttttgttcctctttagtccgaagagcaaaacaaattaataatgaaaagcccatcagaaaaagctcaccagcaaaaacagttaacctaatattttcaagctgtgctgaattgatct

SEQ ID NO: 27892 - DNA, 239 bp, Gossypium hirsutum
  unsure (1)..(239): unsure at all n locations
  Clone ID: LIB3189-013-P1-K1-C10
gntcagccaattgtttgagctatctagctctttcttaaatggcaaccaaaacgatgatgttgcggatattttcacttttcttgttgtggttcaaagtctncaactccattttccttggtgctaatggagatgacaatggtggttggcaaactgcccatgccaccttctactgttgtgcttatgctaccggcacaatagggggagcttgtgtttatataaactctttctattaatgttat

SEQ ID NO: 27893 - DNA, 296 bp, Gossypium hirsutum
  unsure (1)..(296): unsure at all n locations
  Clone ID: LIB3189-013-P1-K1-C11
gtaaaaagaaaattttatttcttacaaaggatagtggttaatcgaaattaaaaaaaaaaaagataganaatttaaagagaaagggaggtgaaagtcgccgttgatgttcgatgccgaaaatgaagcatctgttgaggaaactccacatcggcagtggattaaatgagcagcaactattggcggaggcacagcccgtgatcagctcgatcccgagcccgagtcccattcctaactttaactttaccagcgttacgggaatggaaacgactactttttcttcatcttcttggggtagt

SEQ ID NO: 27894 - DNA, 197 bp, Gossypium hirsutum
  unsure (1)..(197): unsure at all n locations
  Clone ID: LIB3189-013-P1-K1-C6
actcccggaatctgaaaatgtcggtgggacgatttctaagtgggttagaggggggacctatcaaaaccaacgtcggttttcgggttaaagctatgggtagtgatcggaatccttttcggtactttcatagttctaactatgctncttatctattaaaccattgtcactctctttctcatttggacgtgcccttcaac

SEQ ID NO: 27895 - DNA, 275 bp, Gossypium hirsutum
  unsure (1)..(275): unsure at all n locations
  Clone ID: LIB3189-013-P1-K1-C8
agatctactttctattcantagtatatacaatcttaattagcttggcttctctccaacagaaagtncttctttttccttccatcagtagaaaattttcctctataactccttcattctccttgtctctaccctgtattatctctttatcttaataggctactctttccattctttttntnaattccatattaattatttttttacttcttattttttatacttattacttatttttttttttttcttttttttttattttattttttttatctta

SEQ ID NO: 27896 - DNA, 211 bp, Gossypium hirsutum
  Clone ID: LIB3189-013-P1-K1-D2
cgtcccttattccctttttctaacgcgacaaaacaggttttaggagaacatttgtatagctgcatggcttatctagcagcgggctgcacttgacccttgcaaacaggtcaatgttacaagaagctgaagagaggtcggtcagtttgtctggaggactcgtgaactgcaaaagcaggagacaatcggggagcaatttggtttgataacgttt

SEQ ID NO: 27897 - DNA, 175 bp, Gossypium hirsutum
  unsure (1)..(175): unsure at all n locations
  Clone ID: LIB3189-013-P1-K1-D5
tttcgcgttnctttcttaaactagagtcttgtaaaataaaacccaaagccttaaaaactgtcaaattttgttcaaaagctcgcttaccntactccccatanctattctaccaaatccaatcaacaccctttccttaaaaccccccgttggaaatttatctatcaaactacttaga

SEQ ID NO: 27898 - DNA, 230 bp, Gossypium hirsutum
  Clone ID: LIB3189-013-P1-K1-E2
attttgcatatatgtttttaagttagtacttggtctttcttttgttcggaactctgttttttttagtgaattaacatctggttgttgattaagaaagaaaataaggttgtgttctttctttgaagtttgaatatttcatgtgagtgcattgttattgtggaattttttttcattgactatatgctattttacttaatttaataattttatgatattcattttttttgttg

SEQ ID NO: 27899 - DNA, 177 bp, Gossypium hirsutum
  Clone ID: LIB3189-013-P1-K1-F8
agatggcaaaatagtctagttcatggcatttattttatgttgttgataaagaggtccatgaatgtgtattttcagttgatgaggggctcaacaaaatcatactaatagtatgactattattcattgcaagatttaatgaatacttgctacaaccctgatgatgactgcaactacaat

SEQ ID NO: 27900 - DNA, 302 bp, Gossypium hirsutum
  Clone ID: LIB3189-013-P1-K1-G1
cccacgcgtccgcgtggagccttttaaaacaattgataaaggattgttcctttccatggttagtggtgggcgattttaccgaaatggtatattcatttgagaaacaagggggacgagtgcgggatgaatagagcatgtagaattttcatgatgtattgaaagaatgtgagcttagcgatttgggtttcttcagtcaatggtttacttggaaaagagggcagctaccagaaaataatgtgtgtgcgcgactagatagggggtggctggttcaacttggtgggagctatttttttcattttttt

SEQ ID NO: 27901 - DNA, 175 bp, Gossypium hirsutum
  Clone ID: LIB3189-013-P1-K1-G3
cattttccgactcatcgttgtatttttttttaaatttctcaccgatggcgaccgctatggtaggagattctatcttcgtagaaggccgtgcggctttcatgactaccaatgatatcttcctagctttccattattttcataacaagattcttattcttaatgaggagatgccaag

SEQ ID NO: 27902 - DNA, 399 bp, Gossypium hirsutum
  Clone ID: LIB3189-013-P1-K1-G7
cccacgcgtccgcacggcgtcacccaaccgcttttcgccactgcaccgtctccgcctgccgcgggctcgttgctttacccaacaggaaaattagaaaatggaggaagatgatgattacgttgagtatattccggtagcgaaacgccgcgctatggaagctcaaaaaatcctacagagaaaaggcaaggcttctgcgcttgaagatgaaactgaaaaagccaatgtggccgaagtaaaacctagtttacttataaaagcaactcagcttaaaaaggatcaacccgagatcagtcaaatggaacaaattgtacaacaagaaaaagagatgattgaacatttatttgataggaaaaccctcatgtctgttcgggaattggcaaaagggattacctatactga

SEQ ID NO: 27903 - DNA, 281 bp, Gossypium hirsutum
  unsure (1)..(281): unsure at all n locations
  Clone ID: LIB3189-013-P1-K1-H2
gtggaatgtcatggttccacctctttatctttggagtcgttctgatttttcagcaaagaacaagagcatagctgaaaagcatggtcaggtacctagggaaccagcgagttcaaatcaggaaatgaatattgatgaaacacgcagatctgattttgaactgccattggaggatgatggncttcgtgatgatgctactgagttgaaagatcatatgcaaaattatgaaattgaggaatgtaaaaaaagagaaatctttggtggtgatccctaatgagtgctct

SEQ ID NO: 27904 - DNA, 293 bp, Gossypium hirsutum
  unsure (1)..(293): unsure at all n locations
  Clone ID: LIB3189-013-P1-K1-H5
atctctttgagtgacttcttttagttctctcttcgtttcacctccgtgcacttcgaaaaatggtttctcacattgttggatatgcccgcatggcacctaagagagagcttaaatttgctttggaatctttctgggacaacaagagcagtgccgaggatttgcaaaaggttgcagctgatctcangtcatccatctggcaacatatggctgttgctgggatcaagtacatcccgagcaacactttttcttattacgaccaggtgctttatgcaacatttatgcttggagctgtt

SEQ ID NO: 27905 - DNA, 253 bp, Gossypium hirsutum
  unsure (1)..(253): unsure at all n locations
  Clone ID: LIB3189-013-P1-K1-H6
ggactgcctcaaacaaggaagtcaacgagcggtatctgatgatatgccactaggacgcagaagtccgttttgggattcattagaagcatgggcggctctcgccatacaagatcgccatcaactatgagggcttgaagacacaggaaggggatcgaacacttttttacttcgaatacttgggtcctttgancctctaccctgtctactactacttccctgcatacaagtactctggttacgaagaaaagcgtgt

SEQ ID NO: 27906 - DNA, 366 bp, Gossypium hirsutum
  unsure (1)..(366): unsure at all n locations
  Clone ID: LIB3189-013-P1-K1-H7
ctctttgngccaaactagttttactctcgaattcttccgtcacctataattcatctccggccggcggatcttatacgccgccggtgccgcgtcttcttggcattcattctagtttccgataagttcttgagtgtttctgttattttcatcggagaaggattgattttataggtaagacgatgtctttattgaactatggattaattttgcctttttttttttttttttacatacttatgctcattttttttattcctattttgtatatagtttaatagcttatttttttatttatctatttatattaactatattattttcttcttttaatattttatttattttatttcatttattttatgtttt

SEQ ID NO: 27907 - DNA, 413 bp, Gossypium hirsutum
  Clone ID: LIB3189-014-P1-K1-B11
ctaaagtaaaaaagtaaatattgtgttgaaatatggaagaacaattgatatttgcgtgggcaatgatattctgcatcgccatagcgcccgtctatggggaatactattccaagactgttacacctagttcaaaggcggaaaaagtgaccaatcttcacttcttcctccacgataccctcagtggagaaaaccctagtgcagttctggtagcccatgctaacctcaccaggaaagaccattccccagttccgtttggcagcttgtttgctatcgatgatccgctcagagtagggcctgaaccaacatccaagataatcggcaacgcccaaggactgtacctatcatccagtcaagatgcttccaagtttacaatagttttgtacgctgattttgcgtttacgactggcaagttt

SEQ ID NO: 27908 - DNA, 400 bp, Gossypium hirsutum
  Clone ID: LIB3189-014-P1-K1-B4
cttcgtaaaggcatcccactgctccgccttcggctgcaacgatacaaccttcttgcagctggaatcccatcgtctcctcgtcggcgttggtgcgctgctgcagagtcgactgggctcgaagaggaggtgtcctccgcggagaagagtagtgcggtgcctagcgtgagggacccgaagaagtaccatatgttggatgatcctgattacaggaaatggaaggataaggaggaagagattcttcgtgacatccatcctatcatttctctcgctagagagaatcttcactctaattggtataaggatggggaacggatgtactgttacaatttaaggaatcttttctttagatgcttattctttataactgctctccaagctggtaacttgagtattcttactc

SEQ ID NO: 27909 - DNA, 269 bp, Gossypium hirsutum
  Clone ID: LIB3189-014-P1-K1-B5
gtttattttaggctttgataaaccaaaattgaattacaatggtggtggtgcatccaaggataatgacgtatatcaagtggtgaaaggggatctgcattaaacaaataaataattatattattaatttgttagtgggaaaggtcatattcagcccgattccatcatctctgtatcgttaaatactgaatctatcaaccgcctacataaaaatttctagttatttaagaatctaaacatctaattttgtttgcatatcattttttttttaa

SEQ ID NO: 27910 - DNA, 299 bp, Gossypium hirsutum
  unsure (1)..(299): unsure at all n locations
  Clone ID: LIB3189-014-P1-K1-B6
agaagagtaaaataccaataactttcaactaacgtttaataaccacaancagcaacaacctaaagaaggctttcaaacgagcgaagagggccacctcaagcnanccaccataatatgcattatacaccaccaggggaaaccccacaaggttctcctcaaggatatcttcattcttctcatcatccataactacaacctcaaggtatacatgtcacaccaccatctttaaaatgagaaatcacctcctctcatagaaccccatcacataaatgttgttaccacccttcaccatcaccata

SEQ ID NO: 27911 - DNA, 322 bp, Gossypium hirsutum
  Clone ID: LIB3189-014-P1-K1-C5
gattctatggccctgaagctcttctgggtcagactcacgttgttcttcggcttttgggttgttgctgtgctgtgatcaagatgggtgcttgagcttatcttgtggtggagcaaagagttatgtagattcatctaagataaaatgggtgtcagatgatacattcataaccacaggcaacacaactaccgttgagtatgctgaaagtaccttctcctcggccagcattgcacttcgattttttccggaacctctaggccccaattgctataagttaccggtagagaatatgtcctccaattgttcttgtgagggctcaatttag

SEQ ID NO: 27912 - DNA, 297 bp, Gossypium hirsutum
  Clone ID: LIB3189-014-P1-K1-D12
cccatgcaaaatatgtataaaaggaaaaggatgatggaagaccactctaatgtggtaaaagtggctaaaaattggaatcgaggagaggctaatagtagtggagacattgccaaaggatccatcaaaaatgaaggatgaaaagaactttgttcttatttaacttgaaatgccaaatggtaatccgcttgttgttgaaaaagcagagaacatagaagcttcagtttgcaatcaaaatagggtggaaatatcaacaggaaaacctaatcatggaagaaacattactgccttaatcgaaat

SEQ ID NO: 27913 - DNA, 362 bp, Gossypium hirsutum
  Clone ID: LIB3189-014-P1-K1-D8
tcccgtcgacccacctccgcggaccgtgggttcagagtagatattctctcttttttctttcgtcgaactcccggaggaacgctcatattgccgaggcgtgagaatgggctgtctttcacaaactgtcaccgctttttgcctgaagagatgcgtttttgaagttgtactttttgcttttgttattccaccattctttctcctcatttttaatatttttccacaattcctctttttttttattatttactattttttcatttctttccttaattttttttatttattcttagtggtgattttttttttttcctttttatttcattttttttttttttatcttttaatttccttattttattttt

SEQ ID NO: 27914 - DNA, 185 bp, Gossypium hirsutum
  unsure (1)..(185): unsure at all n locations
  Clone ID: LIB3189-014-P1-K1-E11
atcagtagctagcatctccgtcggttattttagtttttttcatgctgagaagctggtctccgattagtacggtttctaatggatagaagaaagctcctaancnnnttaagattgttatatcaaaaattcctgtatatttaattatcaatatgtaacaagttatgtagtttatttcttttttttta

SEQ ID NO: 27915 - DNA, 135 bp, Gossypium hirsutum
  unsure (1)..(135): unsure at all n locations
  Clone ID: LIB3189-014-P1-K1-E4
gaattcccccactccatttctgcaaaactagtgtttttttttcccgtcacattcttcancaataaganaatttttacatcagagatgtagatcctaaaagtnnaatgataatcacatcaaactgtcagctttatc

SEQ ID NO: 27916 - DNA, 351 bp, Gossypium hirsutum
  Clone ID: LIB3189-014-P1-K1-F1
gttaatgtttggcatggagattgggtgtttcggtcattcttcgctcttattcaaaaaggtacatgaatgtgtatattgaggatagcgaattaagagtcaaatggagatttacaggtttttatgggtccccgtatgcacaagacaggaatgattcgtgggatgttttgagaattttaaaagttgttggtaatatcccttggtttatttgtggggattttaatgaaataatgtatggatctgaaaaaaaaaagagagagagatacctagggatgaaaggagaatggatctatttcgaaaaactctggaagattgtcaaatgtctgatgtatgattattctggtagattgttca

SEQ ID NO: 27917 - DNA, 367 bp, Gossypium hirsutum
  Clone ID: LIB3189-014-P1-K1-F2
caaagccataaaacatgggttttcagaaagaaagaaatggggtataatagcttatacaaatctatgaagctatctatagattatgagctctttttttcactcttatattacatgttggtttccatagctttgattcttggctagctctttttacttgatttaacccatcatggtttaacaaagtgctttgaattgttcacttttttccaagatgaattttgaaactcgaccgagtctgtatacaagaaaccagattaagtgccacattcaccataccaaactttgtcacacaaccaatccctttcataaacagcgtcaaaatttcctaaggccttgaatctacacctttcttaagaaaacccatacc

SEQ ID NO: 27918 - DNA, 230 bp, Gossypium hirsutum
  unsure (1)..(230): unsure at all n locations
  Clone ID: LIB3189-014-P1-K1-F3
tcccacgcgtccgctcaaacctctctcagctttttttattttcctcctttttttctatcaaaaacagaatgtcttctatccttactcgaagtgtcctcaaacttttcctcctcatctctttgtttcaaatctctntggccggtaggaagctcatcgaagtggtgcaagaccagtcttatctcttgacataccacaatgttccccttctttctagcaaaattactattaat

SEQ ID NO: 27919 - DNA, 334 bp, Gossypium hirsutum
  Clone ID: LIB3189-014-P1-K1-F5
aaaaaaaaaaaaaaaaaaaaaaaaaaaaaaaaaatttttttataaaaaaaaaaaaaaaaaaaaaaaaagaaaatttttaaaaaaaaaaaaaagaaaaaaaaaaaaaaaaaaaagggcccccccttttaaaaaatccaaccttacttccccttccttccaacttaataccttttctatttgttcaccaaaatcaaattaactgcccctctttttacaacccttttactggaaaaaccctgcctttcccaaatttattcccttttaaaaatatcccctttttcccatttttcttattatcaaaaatccccccaccttttgccctttctaacattta

SEQ ID NO: 27920 - DNA, 422 bp, Gossypium hirsutum
  Clone ID: LIB3189-014-P1-K1-F6
gcacgttggtgctgttcaacctggtgaacgtgtttttgtaattgatgatttggttgcaacggaagaaactctgtcaggtgccatgagagtcttagaacgcgttggtgctcaagtggtcgagtgtgcatgtgttattggactccgcgaggtcaaggggcaacgtagacttaatggaaagccactttatattcttgtggagccacgtgagatagatggatgttattaagagaaaagtgattcatgagcaacctttgttggtttacgtttcttggccaatgtcatttggtttcctttttggctttttttggatgaggcttttttcttatttagaagtcttttattatttttttaacacttatttttattttttttcttttatttttttttttttttaattttaatatatttaattatttatcatt

SEQ ID NO: 27921 - DNA, 150 bp, Gossypium hirsutum
  Clone ID: LIB3189-014-P1-K1-F9
gagagacagaatcatccctgcatttttgaaacttttccaaaaacccgtaaactctctcagatgactgttttctttaactaacaagaactactctctatactttcataaaagggtgtgcatcacgtctggactctttgtgcttatccaaca

SEQ ID NO: 27922 - DNA, 399 bp, Gossypium hirsutum
  unsure (1)..(399): unsure at all n locations
  Clone ID: LIB3189-014-P1-K1-G1
cctctattctctttgctttattgattgccattgttctctcatccctgggtcgtcttcacttttattaatttccatatctagagtgaatagaaaataaaagagaaaagacattgttgtatcaatattagtttagtaagtgagtaagagactgatcttcctttctcttcttacagccatcattttcctaatttccaagggagacattgagtcaacacacactttgccttgttcctctccttttctttttgttttctcttctttcccagttgaccctagacttatgagaacaataggatgggagataattcaaagtctaggtggttctattgttgactctnntatttttttcatttagccttcccatcatcaatccaaatctgccttactctctgatagata

SEQ ID NO: 27923 - DNA, 349 bp, Gossypium hirsutum
  Clone ID: LIB3189-014-P1-K1-G5
gggaaatcggcttctgctgcccatcattatcatactatccaaaaggccgagctccggttacatgatgacgaggccgaatacgaggcggatatgatctggtaaagaatccacgtgcgataccgttcgtttcagataagttcagattccctcctgttgcaatctatcgatgatttttggcttgtttcgttgtattcatgtcttatcagtagtttcctgttagatattcgaaaaggaacatgaaaaacacgaacactaacacgattgtcaaagatctctgtttcatgttctggccctgtactagcaaacatagtttatcgatcaagttatccatttgctttttatccttgtt

SEQ ID NO: 27924 - DNA, 297 bp, Gossypium hirsutum
  Clone ID: LIB3189-014-P1-K1-H1
ctaagtgcaatatcaatcaactgtagaaacatagtttgtattggatcatgtccagcaaaacggaagatggtttacgtagtcagaaaatggagttcagagacggccaaaaggcaaaggggagactagaaggaatgggattgaacattgtggatccacagctatctgtaaagtgacatactacgacctgagttacattcttactgacggagctaaacaacagcgaagaacagtgagtaatcaacagccgagcatctgaagtggagaacgacaagaagaaaggtatgaatggcacagtaa

SEQ ID NO: 27925 - DNA, 429 bp, Gossypium hirsutum
  Clone ID: LIB3189-014-P1-K1-H11
atctactaccagattccacccctccccctacttttttcttctattattataattaagaccaaatggatttgggcgactctctataatgatattttttctatttaccatagattttctgaagggcctatatgatttatttttcgtcgttttgcttgttttcttctccaagccgaaacgtggcggtggactgactggaaagtgcaaacatattcaacaatctactgaatctgcgcttttggatttgcaactcctttttcttttttttaattacaccaatagttactcaattttggatagttaataaaataatcactcaaaattcaatttagtcactcaactttcgtaatataacaaaacatgcgccactattccattttcgtttgacacaacaaatctaccggttttcgttgatctacattttccattctc

SEQ ID NO: 27926 - DNA, 211 bp, Gossypium hirsutum
  Clone ID: LIB3189-015-P1-K1-E6
gcagactcttggctccccgaaccttctcctcaagtacaatatctctcctctttcaagcgtattctgtgcaagtctgtgaccttttgagtgtttctgatatatgaatatgctgaaaatgaatttctcgaaagcaccttttcatattctatatatctttgatgatcgctccgattattgatttgctaatgatgttgattggcactctttgatt

SEQ ID NO: 27927 - DNA, 457 bp, Gossypium hirsutum
  Clone ID: LIB3189-015-P1-K1-F12
gccctgctgacgatctctatgctaatgctattatgaactgccatcctgagggtcctctatatgcgtggatgatcaaagatgatgccgcgctaattcctaaggtcagcatcttactcgcattaatgtcattattgtctatgcacctacattgttcaacacaataggtttcggtgactactctttcctcatgtacacaaagatcaccggtatagagaacgtacgtacaacattggtttcaatctaatagtatcataagacagtaatggacctttcttatataaaataatttatcactttttttttttttcattagtttttttaaattttttttttatttattttttttttttatatattcctattttttttcatttttattttttttttatctatttatttattctttttctttttaatttaattatttttttttttatttgttttattattttttatt

SEQ ID NO: 27928 - DNA, 360 bp, Gossypium hirsutum
  unsure (1)..(360): unsure at all n locations
  Clone ID: LIB3189-015-P1-K1-F5
gatcnttcctaatcgcctaataataaaatttgtcctatttaccaccctgttgcgggtattccatttaattctanagcttcatggttgaaaccttctttaactccgtcctttctaccacttccactctctaggctccatctctcttaataacctaaaataccatcttttcactcttatcatatccttatttttaattactaatcttccatataaacctaattcttttttctttttactatttttctccttatacttctatttttattacctataatattttttaaatcttttatcatctagctttttctcttttttaatctatattttcttcaaatattttattttttttcattatttatt

SEQ ID NO: 27929 - DNA, 169 bp, Gossypium hirsutum
  unsure (1)..(169): unsure at all n locations
  Clone ID: LIB3189-015-P1-K1-H4
caacaaaccatttcacaggaagtattccagctagcattgcttcatgtgagaaattgtcactttgaatgtaangaataaccgattgaccggagatattccggaatcgattgctatgatgcctactttggctgttgtcgatttgtctaacaactttctaacaggtgctata

SEQ ID NO: 27930 - DNA, 373 bp, Gossypium hirsutum
  Clone ID: LIB3189-015-P1-K1-H6
ctgcctcgaccgacgcgtccgttttgattttgacaagtttttgaagtgagttgtgttattcattcaattgaattgagccccctggtggtggcgacaaagcaaatttattgtggaaaacaaaatttgatgttagattgagtaggataaggagatttgtgcttgtgaaaattcagtgctcaagtgaaaacagtttgtgaagaaatcatagtactataagaaggatgaggggaagatctgatggaagccaaaagaagagattaatcacctgtgtttttgcctttgtcattctttcttggttttattatagtatttttaaggatctttttatataaaattttataataatatgtccttttattatcttaatttattt

SEQ ID NO: 27931 - DNA, 420 bp, Gossypium hirsutum
  Clone ID: LIB3189-016-P1-K1-A10
agcattgttgcctgagttcaccccaaatcccgttctggagcgtttttatcgtcatctagagttgaaagcaaagcagccagatgcagctgtacctccacttgatgaaactctaaagaatatcgttgaaccagacccggagcttgttgctgaaaacaagtctgtttttgatgcattacatagacactttgaactcaggcaaaatcctaagctgaagaaatcatccaggcagtggtatcaagagaaacaatcaggatcaaatgcacatgtatccagtggtcaggctgtcaatttcattgaaaatcaaccaccagttaagattgagaaaattggagatttaactcctgtccaagattttgaagccatgatgtctcaaaaagataacccagaatgggttgggaaagccatcaaggaattaagaga

SEQ ID NO: 27932 - DNA, 458 bp, Gossypium hirsutum
  Clone ID: LIB3189-016-P1-K1-A6
gtttgaaactcaattcgaatttggttcgttttgaatttattgattttgaaatccaatcatatcaggtttagatagattatttgattgaattatatttaattagaattttattgagatataaaaataaataatatttaaatacaaaagagatattatgtttagttttgttttttgtgatttcctctggtatttatttattttcttatattctctttccgactggtcttgcagtggctggctggctggcaggctttcatgccagcaactatgcgacttcctgtctcacccacccaccctcccttcttccccttgtctcttccaaattcagtccttaaagggcatatttgaaaattgcattatttttttggttgttcagtgttgcatgggatatatcgtcctcggtatcactaaagaatagctattacaggagggctctagatagggaagaaatggccttt

SEQ ID NO: 27933 - DNA, 307 bp, Gossypium hirsutum
  Clone ID: LIB3189-016-P1-K1-B6
cttacgtggaggattactgaccgagctacattgttttttttcaccaaaggaaatttacattggtggcgagcgaacactttgacaacgttggggctgtacagaacaccaactcagaagggccgcccgcgattatggttgctcgggcctcctttaagggccttgcaaggttgttcggttacagtgactgcgggtacgctgacgacgatgtgtacaggacggatgatgacttgtctgaacatactctaagcactgtcatgaccatggtggtaagcactaggctgagtacgatacggggctgtggtgtgaa

SEQ ID NO: 27934 - DNA, 242 bp, Gossypium hirsutum
  Clone ID: LIB3189-016-P1-K1-C10
ctgcctttaatttatttggctgctaactctggtgcccgtattggggtagctgaagaagtcaaagcctgttttaaagttggttggtctaatgaatccagccctgagcgtggttttcagtatgtctacttaactcctgaggattatactaagattggatcatcagtcattgcacatgagatgaagctggccagtggagagagcagatgggtgatagataccattgttgggaaagaggatggttt

SEQ ID NO: 27935 - DNA, 410 bp, Gossypium hirsutum
  Clone ID: LIB3189-016-P1-K1-C12
ggcaaacctatgaatggcattatcaaccttgtttgaggtggacgaataaaaaagcactgtggtgacatcatttactagcacaggcagagcactgactgtgacagagtccagcgaagccccgagctgcatagaacaccagctcgcggaagtcatagttgcgattgtttcagcatacataaggatgcagacaataccaaatagcagtaaggcaagtgtgctagctgacgcgagaaagacatattgacgactatggtacttgaacagtctccaagaatgttctatttaggggtatatacctagaggtgcatgaattgcgagaccaccagcaagcaggatgagaaattgattaagcattctaaaggctaggacagggtcatctttgctcagattgatgcttgtgctaatgaaca

SEQ ID NO: 27936 - DNA, 438 bp, Gossypium hirsutum
  Clone ID: LIB3189-016-P1-K1-C4
gagcttttgagctctctccctctctcaaacccccactcctgctcggcctagggtttcggccgtaagtgccgccgtagcgccaccgtgaccgatggccgacgttgcgcaaaagaggcgtttcaaccccgatttccagtgcgctcaaagatccaaccttctttggcctaaaaaaccaggagagggcacccctagccccccttttaggtctaattccgacaacgggaaaagggccttcgacgaccggacttgaggggctattctaggtagcagaggcgtggcagaggctgtgagacgcgatgatagaggcgtacggtcaatggtagaggacccaggcgcagcgcctagggttagcaactttgttttttctgctaaaattttttagcttgtgggctttgggcttcttaggttaggtttgggcttggggtgttgtttttaatt

SEQ ID NO: 27937 - DNA, 453 bp, Gossypium hirsutum
  Clone ID: LIB3189-016-P1-K1-C7
tttgtattcctattggtatcattgttagctattgttgaccaaactcggaaccctgcctatgttgaccaggtggtacttgcccatgacgtcccacaacaaccacctgctgcagcagttgtgaaagaaccacctcaagctgaaactgatgaagaatccgtaaatcagaagccggtcgagaaggctttagtggaagagtatttgtcaaaacccaagtgtgataatcagggaaatgttcttcagtcgggttctttcaaggaagagagcacgagggtggttgatcttcttgataatgaaaagaaagcgttacaacaacttaagcaacttgttcaagaagcgcttaacaagcatgagtttggtgggcaacaaccagaagcgcctaaagaggatgacgagaaaaaatcagccaaagaggaggcaaaggacgaagcggttatttgtgacgaaccaccaaaa

SEQ ID NO: 27938 - DNA, 318 bp, Gossypium hirsutum
  Clone ID: LIB3189-016-P1-K1-D3
ctttctctttatattcatcactcgaagcaaaagtaaaagggaaaggtaaaggagggttttgaggagggtgaaagatggctggttacagggcaaaagatgactaccactttcttttcaagggggtgcttatcggggatttgggaggaggcaaggctaacctttttttaagggtcaccaagaaccaggttaaccttgagttcaaaggcactattggcggtgaggtcgcttcttggagcttggatggtgaaggtgagggcattaaggcttaaatttgggacactggtgggcaaaaaagggaccggggtattaccaggggct

SEQ ID NO: 27939 - DNA, 413 bp, Gossypium hirsutum
  Clone ID: LIB3189-016-P1-K1-D9
gaggattcgacccaaggagaagaggggacagaaggaaacaaaggtcaagggcaagtagttgttcaagtagtcgaagaagaagaagaggaagaaaaagaagaagaagaagagtacttttacgaatcccttgatcgcattgcttcttctaattcttgttcttgttccaactcaactactccttcgtctgactcggattccgacccagttacccgttccagcaatgcccgccacccatttcccgtcccgaaattccccatggccgtttccaagttcgacatctggatctcagaacccgccttcgtttccgagagaagaactcggctgcaccgtgaaatgggtcttagccgcgaccccggtctttcccggtcaatacccggctcagaaacggaactgggtctgggacgggaaatggg

SEQ ID NO: 27940 - DNA, 121 bp, Gossypium hirsutum
  unsure (1)..(121): unsure at all n locations
  Clone ID: LIB3189-016-P1-K1-E1
gnccaaagagatactgacttccaaaacttactttgatttttttataacgccaaaacaccaatttcgcgctgtttaaccaaactggtcgcgaggctttaacttttaggccccatcaccccct

SEQ ID NO: 27941 - DNA, 449 bp, Gossypium hirsutum
  unsure (1)..(449): unsure at all n locations
  Clone ID: LIB3189-016-P1-K1-E12
gagaagtcggccttattactctctaaagactactgaacaaccttcagaaaagaagaaaggatttggtgattggatgaacttgatgaagcctggcaccgaggagaaagatcattgggtccctgatgaagctgtttcaaagtgtactgcatgtggaactgattttggagcttttgtgcgcaagcaccactgcaggaactgtggggatattttctgtgacaaatgtactcaaggtagaatcgctctaactgctgatgagaatgctcaaccagttagggtttgcgaccgatgcatggctgaagtgactcagaggctgagtattgctaaggaaacagcaagtaaacctgctgctttacagagtcatgaggatcttgctaggaagctngaggagatggaaaaaaattgcagagcatcatcaggttccaagtcagatggatctggtagacggatga

SEQ ID NO: 27942 - DNA, 308 bp, Gossypium hirsutum
  Clone ID: LIB3189-016-P1-K1-E8
ggctcagaaattggatggcaatgccacaaggtgtgactctcagtcatctctgtctgtttcaagccctcctgattctccagttcatctatctcatgatgatttggatgaatctggaggttctacagtgttatcagctgaagagaataaagaggtcaacttgtcaaggccagaaatagaaccgctagtgttacctactgaagctgggaaacaggatgtccggactgcatcaagttctatttctgctggtgatgatgaggaatggactgttgataacaatgaacagctgcaggagcaagtagaatatgacg

SEQ ID NO: 27943 - DNA, 433 bp, Gossypium hirsutum
  Clone ID: LIB3189-016-P1-K1-F5
ctactctccacaaccgaagaggagggggggaaaaagccatggctgtggacaaagataagcttcaagaagaagcttccattgttcgtttttgtaaaattattcttggctgggactattttcgcctcctcaaattatctaaaaaaaataacaaagatgaggcgacgtcggctttaaaagaagtgaaggatagctacaaagacgttgatgattatttggctactttcgaaccgcttttgtttgaggaagtcaaagctcagattgttcagagaaaagatgaggaggaagtggctgattggaagctaaagctggttatggaatgcaatgaggctgatggattttacttacctgcgattacttatgaagctgaggaggaagaatcgatatcacagaatggccttttgctgctttcaaaagaggacttttaaggggttgt

SEQ ID NO: 27944 - DNA, 186 bp, Gossypium hirsutum
  unsure (1)..(186): unsure at all n locations
  Clone ID: LIB3189-016-P1-K1-F9
cccacgcgtccgcgctaggttcagggccgtngttgacaagtgtggtgctctgttgttgtgtgatatggctcacattagtggcctgggtgctgctcatgaggcaaacaatccgtttgagttctgtgacattgttacaaccatcatccacaagagcttgtggtgtcctagggctgcaattatttttta

SEQ ID NO: 27945 - DNA, 223 bp, Gossypium hirsutum
  Clone ID: LIB3189-016-P1-K1-G11
ttttgtttttagcttaatctttgggtggggaaacaattaaacccgggcgttccaaacatattcttgcatcagatatatccaaatgcgggttaaaaaagggggtacatttttactacattccattcaaacgaccaagtttggtgcttgggcaggctcttaatttataacctcgtaaaaccaaatatttaacctactggctggttaaggttgaaactgttacttc

SEQ ID NO: 27946 - DNA, 329 bp, Gossypium hirsutum
  Clone ID: LIB3189-016-P1-K1-G3
ctgcaatcttcctttgcttcactgcttcagccatctctaaatcagcacgttttctatcttcaacagccttcttcttagtttctttagcaatcttcctctgcttctctgctttagccatctccaaatcagcacattttctttcatcaacagcctttttcttagtttcttctgcactcttcctcaactcgcttgctttagccatctccaaatcgacaagttttctttctttaactgccttctttttcttttcttgtagcttcttaaattcctcgtcaagatttgacttctctgaatccaacttggactctgctttactaacatctctcctt

SEQ ID NO: 27947 - DNA, 466 bp, Gossypium hirsutum
  Clone ID: LIB3189-016-P1-K1-G6
caaaaaccctgaataattctcatttcccctctatttcccaaattgttattagtattttcttttcacatgatccagacattaagatgacacaaccgtcggtcatactagcaaccgccagctatgatcacactattcgattttgggaggcaaaaagcggccgctgttaccgtactattcaataccccgattctcaagttaatcggcttgaaataaccccagacaagcgctacttggctgcagctggtaatcctcacattcgtttgttcgatattaattccagcagccctcaacctgtaatgagctatgattcgcatacaaataatgttatggctgtaggatttcaatgtgatggaaagtggatgtattctggttctgaggatggcactgtaaagatttgggatttaagagctcctggttgccaaagggaatatgaaagtcgtggtgcagttaacacccgtgtcttaca

SEQ ID NO: 27948 - DNA, 264 bp, Gossypium hirsutum
  unsure (1)..(264): unsure at all n locations
  Clone ID: LIB3189-016-P1-K1-H7
ccgctccaatcgaagctcgcaactcgaggaagggaagctagaagtgcaaggcanataatgaagacccatnttnctttcttcaagagacccaatgganctatcccnntgatgggnngttgatattannaggtgannaggctcaagattgattcgnnaggttgannaggtcctcaggnnggtaagctcaatctcgtaactttcaaagcaccttcacacctcgtattttcattcttatcaagggactgaggagaggcggcaacacgc

SEQ ID NO: 27949 - DNA, 255 bp, Gossypium hirsutum
  Clone ID: LIB3189-017-P1-K1-A12
gacccacctctatgctgttaaagattaagccatgcatgtttagttgaacaaatcagactggaactgaatggctattaaatagtatagtgtgaggattgtctgataaccgagtattctagagctatcggcacacccgctttgaaggagcatttttgaaaaggtgcgcggcttgccgtgttgtgtcatgatactgacgacgacggcttggccgcaccatattaaatttgcctataactttatgtggaagggcactat

SEQ ID NO: 27950 - DNA, 173 bp, Gossypium hirsutum
  Clone ID: LIB3189-017-P1-K1-B10
ccacgcgtccgtgcaggagatttgggaaccatgttcgtgaaaagggatcatgttcgagaagctcgctgtggaacgccgtcttcgtttaatccaccggccttagcgggggtgagcccaattagagcaaggggagatgaaatggacgttgatgaggaagaggaggatgtaggtga

SEQ ID NO: 27951 - DNA, 389 bp, Gossypium hirsutum
  Clone ID: LIB3189-017-P1-K1-C1
gagacgagtggcgatggaccacacatcacaagccgttctagcctctgtaaacgaggaaagaagtgaggaatcgattgtggaaagaagctacgaagtgagtaatcgatcttgctgaagaaatgccgaggcatccggattctgcacaatcgagcctttcggcgatggcacaaattgcggtggagcaggaaccgttccatccaaaaaaccagtaggctcataaccttcaactattaacctaacatgttgcttccactgaacaaacgtgcctacatttagtttaacagtctcatgacgcggaaacgagtgaatgagtctggcactagtaaacaccggacctcaatgttcgacggaagtagaatcaaaagccgtggtggtcatgatcacaggtc

SEQ ID NO: 27952 - DNA, 262 bp, Gossypium hirsutum
  Clone ID: LIB3189-017-P1-K1-D7
aaaaaagaagagagagagcgaagaaccaaatgagcagtggtaaaggaggggagctgatcccatcaagctccgaattggacttggatcgacccaacattgaagattatctcccttccggatcctccattcacgaggccctcggcaagcttcgcctatgcgatttactcgatatttctcctactttaactgaagctgctggtgccatagttgatgattcgttcacgcgatgttttaagtcgaatccttccgaaccgtggaactg

SEQ ID NO: 27953 - DNA, 168 bp, Gossypium hirsutum
  Clone ID: LIB3189-017-P1-K1-E1
tttttaggccttatactactgataattcagtgtatgttgccagaccatactgcatcttcttttctgcttgagaccctcatactgattatcaagaaatggaacctcaatacacaccttttaagattgcccgttttgtatgactacgggattggacgtacaaacatggag

SEQ ID NO: 27954 - DNA, 372 bp, Gossypium hirsutum
  Clone ID: LIB3189-017-P1-K1-F3
aacaacactaaaagaactacttcctgcaataataaatgggggaaacaagttagaccatattttgagagttctactctctcatatcttaggctctgctcagcgttgcccacctctttctggtgttgaagggtctgcggagtcccaccttcgtgttttaggtgaacaagagcgttggaatcttgatgtttcattaagaatgctggctaaattgcttccttttattcatcagaaagcaattgagacttgcccattttcctctgtttcggactcaaatcggacattgttgtccagctccatacttgaactggatgcagggggacatgttgaatggcctgcatttgaatgggtgcatgtcgattgctttcttggttg

SEQ ID NO: 27955 - DNA, 439 bp, Gossypium hirsutum
  Clone ID: LIB3189-017-P1-K1-G3
agataagtgagtggcgaaacaagggtgttgaaggtatgtttgaggacatacatgagatggacactgccagtattgaggattctcatctagcttctattgactttaagggccatttgggcatgaggcttggcaaccatggagcgtcatcctcaactgggagcatgacatcactatcctctacgaatactccaagaggaagtcactttgattctttctggttggagcgtaacaatccttctgaactagaggatttgcaacagatggttgaccttgcaaatatagctcgttgtgtagcagacacagacttgttgaaagaagggtctcatgagttcttgcttgcatgcatgcaagacttgcaggatgttttacggcatagtaagcttaaagctcttgtaatagatacttttggaggccgaatagaaactcttctgagggagaa

SEQ ID NO: 27956 - DNA, 270 bp, Gossypium hirsutum
  unsure (1)..(270): unsure at all n locations
  Clone ID: LIB3189-017-P1-K1-H8
acccacgcgaccgcccacgcgnccgcggaaaaagacacagcgngcatacgnngcaacgccaagaanncaagagcgggggcanncccaagccgaagagcacaaagcagcagcgggcgccaccagaagccacgcaaagaagaacgagccgccggggaacacaccagcagaaggagaggacaacaccgcaaaggccacccaaaaaaagaaaaagaaaaagcagaggaaggcagaacgagcgaagaagaggcagaggagaaaaaaggaggaaca

SEQ ID NO: 27957 - DNA, 219 bp, Gossypium hirsutum
  Clone ID: LIB3189-018-P1-K1-A1
atttgaagccttcttcgaatttcctaatccatgatgcaaattttcgccaagaccctaaccggaaagactttcacattggaggtggagagttctgatactattgacaatgtaaaggccaagattcaggacagggaaggcatccccccagaccagcaaaggttgatcttcgctggtaagcaatttgaggatggccgaacgttgcttgatacaacattcata

SEQ ID NO: 27958 - DNA, 382 bp, Gossypium hirsutum
  Clone ID: LIB3189-018-P1-K1-A11
cccacgcgtccggtggatgacgatgatgaggcacatgaggaggaagatgggctcgggctctttgatgggaatgatgaagaggatgaagatgacttggaaaatgccagatatgaagattttttcagtagaaaaaagaacaagagttccaaggagaaagccaaatctagagacatgttggaagaagattcaggatcagatgattaacaagatgtggataagagaaagaatggcccttttaagcatgtaaaagaacttgacatacttagatctaaaatagaggaaatggagaaggccaacttggatccaaatgtttggacattgtttggtgagtgtaactcatcatttaggctaaatattagtgtaattataaagttattttatt

SEQ ID NO: 27959 - DNA, 492 bp, Gossypium hirsutum
  Clone ID: LIB3189-018-P1-K1-B5
cattgcccatggttagatctaaactaaaaaaaattccaccctgttgtatatttgacaaaaagacccatcaaagaaaaaaaaacaaaaaaaggggaagatttgctgctcaaaacaggtatctgacacctccccaaagacataggggtgttagaatctggtctggaaaatcaaacaaagtttaccctgtccatttttttcttcgatgaatcctagaatgcaaagcaattattattaagtctttcattaattgcctcaaaagaaccattactgaattcatcaaaggaaaaaaggggtgacatatggataggttccctgatgttctgtgtggttggagctgggaggagaacaagttgtttgagctggctttagcagtggtcgatgaacaacaccctgatcgttgggaagtggtagccgccatggttggagggaaaaaaactgcagaagatgtgcataaacattatgtcatacttttggaggatttgcagtttatcg

SEQ ID NO: 27960 - DNA, 244 bp, Gossypium hirsutum
  unsure (1)..(244): unsure at all n locations
  Clone ID: LIB3189-018-P1-K1-C3
tattttttattatgnacaaacaatagcagagtgatataaaagatgattaatttcaggtgtttggtaagaacagtacaaacagccaaataaaaacatacattccaaaagtttacaattacccttcttattttgtcgagcaagcactaaatttgccaaacaatctcataattgatcatagactctacgtaggcaatgaatagcagtctgaacatgttgtgatttaaacaaaactaactccaatttt

SEQ ID NO: 27961 - DNA, 444 bp, Gossypium hirsutum
  Clone ID: LIB3189-018-P1-K1-C6
ataaactatttaaacataaagaatagaatttggttttattttaacaattaggttatttaacttctgaactgaaatttgaactaactgaatttaacaacctaaccaaaagcaaaccgaagagaacactactgtttgaatcagttttcagttttctgctagcctagaacagagtagtaggaggttcaacaatggttgcagactataagcacttcatccaaataagaatggcataaaatgaaattttaaaaataaataagcattttcatgtagttgtaaccttacattcaaatttagtttctttaccttcagctgataattttttcacttgacacataacattatattaaagcactgacagtttgttatccttattttattatcacataatagactttttttttcttgttttgttagtctgttcgttcggttttttaataggaactt

SEQ ID NO: 27962 - DNA, 214 bp, Gossypium hirsutum
  Clone ID: LIB3189-018-P1-K1-D12
cccactcgagcaccaacgcgaacgcccacattatctcactcgccaacgtggctatttgagggggttggatttttgtgacgggcggggggagtaaaaacatattatgcaccatctccattgccaaagacaacaactgtgtcttcggcgaaagcacccaccacttattcaagaacttcaaacacatctttctctaaatctacatcaacattaccta

SEQ ID NO: 27963 - DNA, 405 bp, Gossypium hirsutum
  Clone ID: LIB3189-018-P1-K1-D5
gggatttctgtgcagttaaagaactttctgatatataactttagggttaaataaaaggaaaacaaattacgcattgtaaagggatggaagaaattgctttcttttagtgtgacagacaaattcttagttcaaaagcttgaagatttgcttgctttcacggcaacacaaggggagattgtacctctgtatatgtttgctgtaataaaaatgttagagaaattaggcgttattttgttttaacaatgttatctagtgtttttatgtttcgttcaattgtcacctactatatgaatattactatttttttttattatctttcttataatatgttattctactattagggcttgctccttctattgttccaatattactttcttcttttttcattcttcttttttactt

SEQ ID NO: 27964 - DNA, 336 bp, Gossypium hirsutum
  Clone ID: LIB3189-018-P1-K1-D8
cccacgcgtccgaattaatgcaggggacttggcatgtacaatccagacaatcgcatttctcgctgctgtatatggaaaagacgaggaatatggtgactccagattactgaaggaaaaccagattggacagaaaggacctgtattaataatctgtcccacttctgtcatctgcaattggaagtgtgaattctccagatgggcaccctttaatgtctctctttaccatgggtcaagccgtgaactcattcttgagaagctacaagctaatggagttgaagttcttggtaccagttttgacacattctgaatttatggaaatcttttgtcaggtatcaa

SEQ ID NO: 27965 - DNA, 496 bp, Gossypium hirsutum
  Clone ID: LIB3189-018-P1-K1-F10
gtgctacaacagctgctggaagattggtggcttctcatggatttcttgaggctgtttggccttacagtggtcattatctaccaactgaagacaatttcaaggaattcattattttccttgaagaacacaatgtggatttaaccaacgttaagagatgtgcagtagatgagggctacacctcaaacaaagttgtcggctatgagtccaagcatggggtaattaaagatacaatggaaacagaaaaatcgagagattcaaagactgtagaggtcgatgatgagcccgcaaatgatgagtgcatcagaactgaaagtcttgaagttagcatagacagcagtgcagcacaagcattcaacatggccaaacctttgtcttgcaagtggacaagtgggattggtcctcgaattggctgtgtcagagagtacccaaaagaactgcaattccaagctctggaacaagttaacctgtctcccagagtcacccctggtcgctttgg

SEQ ID NO: 27966 - DNA, 243 bp, Gossypium hirsutum
  Clone ID: LIB3189-018-P1-K1-F3
tttcatcaagggctattatttctatagtccaattctgaactgctttgtactttatattcaagcgggtcgtaggactacgtggccaagcatctgacatttatagtgcaacagctgtcagtttacattagttactaaaatccatccaacatctagtttatcagctagcatttgcaactaatgttccaataggatggtgactttgttaatgtcaatgttgaggaacatacaactgtgcaatatacc

SEQ ID NO: 27967 - DNA, 502 bp, Gossypium hirsutum
  Clone ID: LIB3189-018-P1-K1-F5
ctaatcttgccgctgtgtctgcaatacaaggtgaacttgagcgggcccaccattttgtgacacaagcgttgtccctggtaccaaacagcagcaaagccactatgactgcaatttacgtcgatctcatgctcggtaagtcacaagaagctctgcccaagttaaaacattgtagtcacgtcagattccttcccagcagtctacagttgaataaatcctcttaattgttgtgtgggtggttacaaattcgaccgggagtggaccaccacacggtagttagccagatagatcatcaatccttttagaggatttgtatcatatataatatagttcaaattcagataataagttttttggctttttcttcttccttttaaattttccacatctagggttcatttttcagtgatgggggctgattttccacctgtgaatttgagattatgtagtagtttccattcaggcttattttgggttctagtggctaaatcctctttgtatttta

SEQ ID NO: 27968 - DNA, 446 bp, Gossypium hirsutum
  Clone ID: LIB3189-018-P1-K1-F6
atcatccttgagcgtgtgtcaaagctcataactttaattttttgcacaaccagatgtagactcagaatggataccagttagggcaacaattcctccagcttgatctttcatgagacgttggtagaggtctcaacctgttacagggcgttttttgttatgctactatatttccgctacgtaggacttcttctgagctgactacatttccatcgaccctgtcaattgctgcatgtccgtactcggactaggactgttatttacctaactacaatatatattctcatatcttgtcagtcttatacttttttgctttcttatgattattgtttatgttacatattctttaattagttttactaattttttattatttacattttaggtttttttttaatagttttatttatattttttctttttttatttcttttttctttttaactttt

SEQ ID NO: 27969 - DNA, 246 bp, Gossypium hirsutum
  Clone ID: LIB3189-018-P1-K1-G10
cccacgcgtacgctaatcggagcggccgctttttttttatatggcggaaaaaataaagtatgagtagtaatataaaaagtgtgtgaagatatatatgtaaacactagtaatattcaaaacttctcaatattcaggttgtcttttatctgaattctagactcaaagttcaactgtgttaggccgaaattttggtgcgttacaaagaaagcagactgtaaattgaagattggtagaggcaaattttat

SEQ ID NO: 27970 - DNA, 153 bp, Gossypium hirsutum
  Clone ID: LIB3189-022-P1-K1-A10
gacccacgcgtccgctcatcctggacttctttatttgcatctggtgccaaacatgataattgagctcttgcagctgcatgttcaggttcctttattgttggaaaaaacgcatccaagtccagtttctgtccttgataccttggtttatagaga

SEQ ID NO: 27971 - DNA, 156 bp, Gossypium hirsutum
  Clone ID: LIB3189-022-P1-K1-A7
caaccttatttcttgtacaacttacccaaaatcactgggtgttatttataaaacacaagcgcccccaacaatactaaaaaataccgaagacctattgcctaactcaccctttcatactaattacctaattaattctacaacgttaacatccttttc

SEQ ID NO: 27972 - DNA, 287 bp, Gossypium hirsutum
  unsure (1)..(287): unsure at all n locations
  Clone ID: LIB3189-022-P1-K1-B6
catacgcgatcgagtgctactactccaagcaagggtgntacttacacgttagttaaacatgcgcttaaatgatatggctagcgcagtgtcctttaaaaaagaacaggtggaaggattgtttttgtgttgcttctctcccatgatcacaaaaatggcttgatttgcgggtgatcctgcaaataatcgtatttcgttctcttttttaacagagatgtagtgatcaataaattaccatcatctttataaatttataaacgctttaacgaggcctttgctttactattgat

SEQ ID NO: 27973 - DNA, 341 bp, Gossypium hirsutum
  Clone ID: LIB3189-022-P1-K1-C12
accacgcgtccgaccgactcattaggcatatcaaccggccccttcttgtttttctctaaaccaccacaacccgttgaaggccaaccttgcatgggcggccatcctgataaggcaccttatgttccttctcagacctatccaccaaacctgcgcctgccaccctcttagtaacccaatgggccttctttcttccaacagtattttgggaatccacctcaaatgcatgagccaccatttagaaagcctggtctaggatatttttctgaatatgtcccacaattcttggtcctattgacaatattcttatggtggattacctttacagtatggtatggtcttcc

SEQ ID NO: 27974 - DNA, 217 bp, Gossypium hirsutum
  unsure (1)..(217): unsure at all n locations
  Clone ID: LIB3189-022-P1-K1-D1
cccacgcgtccgcttgaatcagttgatgatgangataactatgatcagggttttaaaagtgatacaaaagttgatgaattggaagagtgaattggagaaagtttttggatcagcttctaaattcattgaacaagaatgagatttgggtatagggaatgatgtttaaatggaactatatggacttcacatgggtgcaacataatggccttgtcatgaa

SEQ ID NO: 27975 - DNA, 265 bp, Gossypium hirsutum
  unsure (1)..(265): unsure at all n locations
  Clone ID: LIB3189-022-P1-K1-D6
tcctctttcaattaaaggtggtagcaaattgctgngttcnttcaatcttttctgccttgggaacgtgtgagttgttacatgcgattctgtgcaccaattgtttgtacaatctccgtgcttaagggtgctagatttgggcatgaataattcatgtgataatttgctttccatgatttcaagtaaattatgagatttgattcatttatagcatcttatcttatttttgatgtaagaatattcatttatctacctttatatctatatt

SEQ ID NO: 27976 - DNA, 210 bp, Gossypium hirsutum
  unsure (1)..(210): unsure at all n locations
  Clone ID: LIB3189-022-P1-K1-D7
cnagnacnagaacgcgagcggccgcncgctttttgnccggccaccaccaccacnaccacgagggccnagaccaccaagcgccgccgccgacacaacgcccgggcaaacgccacccacgacggaccaagccggaggacgacgcccgggcaccaggaacgacccaacgggcaccaacgcaacaggaccccaccgccgccaggccaaccccga

SEQ ID NO: 27977 - DNA, 235 bp, Gossypium hirsutum
  Clone ID: LIB3189-022-P1-K1-E12
acaaagtcaaggtcaacggttatcatcagtgactgataaaggcttcagaagcacacgatcacggatgattatgatgcatcaggcggaatcacaggaatctgtaggttgagcagagatcagagcctgtaatttatctcccacactaactcatatgtaggtattttataaaatatctcatgggtacctgtactcctttgatatttaagatatagtcttcggtctttaaaattgtatc

SEQ ID NO: 27978 - DNA, 465 bp, Gossypium hirsutum
  Clone ID: LIB3189-022-P1-K1-E6
cctatttttaccagcgccactttctctgtacatatattgctttgctctttttttctaactacagatcaagaaccaaaaaggataaaactatggctgcggctgtcctccggaaccctaattcgaggcgccttttgtcattctcttccccgatttactggtcctgtcgtggctttatctctgcttccaacttctcagtttccgatcttctctctggaaatgaggaggcggcagctcacgctaacgctaacccttggtggagatccatggctactttcactcgcacaaaacctcatgttaatgtaggaacaattgggcatgttgatcatggaaagaccacactgactgcagcaatcacaaaggttctggctgaagaaggaaaagccaaggctattgcctttgatgaaattgacaaggctcctgaggagaagaagagaggaattacaattgccacggctcacgtggagt

SEQ ID NO: 27979 - DNA, 350 bp, Gossypium hirsutum
  Clone ID: LIB3189-022-P1-K1-F10
tcttctctcaactccgcgccgtttcgacgattcttctttcaagatccaccacacttctctggggctcctatgactacggagtgggcgaaggttcggccaccaggtaactcgtttctttctttctattctttctctcttttccaagaactaaagaacataaaaaaaccagaaaagaaacgggtaaccaacaaaatggaaaagaacccaaaaaacctttttgtttttcaattatcttttgtattctgaatgactatgtgtgttttgcattcaatctttgtgtaaaaagaaaaaaaaggtcctcaaacaatacagaaaatggggttttattgccccataattacatcaatttt

SEQ ID NO: 27980 - DNA, 179 bp, Gossypium hirsutum
  unsure (1)..(179): unsure at all n locations
  Clone ID: LIB3189-022-P1-K1-G10
cttaaccttctccgtagcttaattgaagggtttgtgnctgtctcaaaccctcaaacagctgtggtgtctctaactaacgttaatgggagtagaaaagccaacggggtgttaaggaaaccgatgatgcttatgagattgacggtgagagctgtttccaaagaggatatctatcgggggtg

SEQ ID NO: 27981 - DNA, 398 bp, Gossypium hirsutum
  Clone ID: LIB3189-022-P1-K1-G5
aattgttgcgagggaatctccctaatttttgactgattgccatccccgatcgactccgatttggactgctctccaacaagctattgcttcagcggcgaatgcagagagcgcagcagaataaacgactttgacaaggattgagttgttcaaatacccagggcactctcgaaaaagatggtccaatgtttcagctcgtgcttcacaacggggacatgttgtgatgtttgaaagcttcctgtgctgcatattcacttttgtaggcaagaagttccatgataacctccatattgtaattacaattttagctggtagatttaggctccaaagttttttgtagaatttcctataagataagggtaatgcataagcactagggtcttcattcgaactctggaata

SEQ ID NO: 27982 - DNA, 260 bp, Gossypium hirsutum
  Clone ID: LIB3189-022-P1-K1-G6
catacgcgaaggggcgagagaacatcccacaatactcgtattgcgcacggaagccgatcgactgtgtgttttactgatgtacaacaggcgatccctaaaatggcgaatacggagagcgcaacagaataaacgacttgaacacggagtgagtagaccaaatacccagggcacttttaaaaaagatggctcaatgtgtgaactcgcgcttcacaacggggacatgctgggaagtgtaaaagctatctgggctgtatatttac

SEQ ID NO: 27983 - DNA, 200 bp, Gossypium hirsutum
  Clone ID: LIB3189-022-P1-K1-G8
atcaaaacaagggcacaatcttgtgggtttttttaacagaaacagggggacattatgcaatcccaaaaaaatactcacacgaccaaaccatacacagacttaacttatcaatgcaagagaacaaaaggaaatggaaaataaagcttcattttaaaagcagaaacgccaattgaaacaaacacaccctctctcccctcaca

SEQ ID NO: 27984 - DNA, 176 bp, Gossypium hirsutum
  Clone ID: LIB3189-022-P1-K1-H9
cccacgcgtccgcccacgcgtccgcccacgcgttcggttccgtcgccaggctccaaagcttctttctatcttggagaatttttaaggtttctgttgaatcggtattctttcagggcactagacaagtgcttcggttctatttaattcattttccaagatcagtgtttatgtgctac

SEQ ID NO: 27985 - DNA, 419 bp, Gossypium hirsutum
  Clone ID: LIB3189-023-P1-K1-A10
cggacgcgtgggtttttgcagaaaaagcttctgcttctcctatatatattttttatgatgcctagcgtcaacccagaccaatccgacaaggatcccgagcccttcgtggaggtcgatccgaccggtcgttacggtcggtacaccgaacttctaggatccggagccgtcaaaaaagtttaccgggcattcgatcaagaagaaggaattgaagttgcatggaaccaagtcaagctaaggaatttctccgacgatccggcgatgatcgatcggctttattcggaggttcgagtgataaggtcatgaaccaacaacaacataatctccttgcacaggacttggcgtgacgaggaacataacacactgaatgtcataaccgctgtatgtacttttggaaatttgatggtatataggaagaaaca

SEQ ID NO: 27986 - DNA, 464 bp, Gossypium hirsutum
  unsure (1)..(464): unsure at all n locations
  Clone ID: LIB3189-023-P1-K1-A9
gtcttctcttatttctttcgatacaatagaatagaatagaatagcaggcaaagcatggccatggcttttgcgaccttcaatctatctccttctctaagatttgttagcaacaacaaaggctttttcgattctcaattatccaacttttttttatcatcacatttgttccttgggacttcttctttctcggtgccaactctcagtttctccaccattcatcaaacctcgtgtcgcccccacatcaacgcctcaccatgctcctctacttccttcagatgctttgcccagaaatcaccggttgatggcctcggcagtaacggcgcttccgagagactggttgtgctagttattggtggaggaggaagagaacatgcactttgctatgcattgcagcgctctccttcttgtgatgccgtcttctgtgcaccaggcaatgctggtatttncagctctgggaatgcaac

SEQ ID NO: 27987 - DNA, 183 bp, Gossypium hirsutum
  Clone ID: LIB3189-023-P1-K1-B3
tcaactctcaaaccttcaagtctcatttctttctctttctctttctctcactagagaatccaaggttctgtttggcccaagggaaaataattaacgatggtcggaaacggtcaagatctgggcctaagtctaacttgacatattctcaaatattcctgcgtagctaactatgcctttcctccc

SEQ ID NO: 27988 - DNA, 273 bp, Gossypium hirsutum
  Clone ID: LIB3189-023-P1-K1-B4
gtcgctttccaaaacaaaaaacctatacacatataggcagttggtcatccaaggccaaaaccagcagtggcattttgtagtctcagttcagtgtgtcttaggagctaaccagattggcttcacccttctctattctatagaaaaagcctcaccttccgcaacttcattcaaatttaacccaaaaagcagaccaactttttagggactgctctgtcactttatgatgatttgatcacttggtttgtgacttgaactctcttcataactggttgt

SEQ ID NO: 27989 - DNA, 232 bp, Gossypium hirsutum
  Clone ID: LIB3189-023-P1-K1-C7
ttaatgttctcttggtttagccctgcaagattcttacaggaaagtgattgggggactgtttttacaataattctctaatttgtcctgttttgtgttccatactcccacttttctttgcaattctcattccttggacaatagacattctatattttaaccctgctttagtatttaagttttgggtaattattttgtttgtcttcttatattcttggtctggttttttctaaaa

SEQ ID NO: 27990 - DNA, 106 bp, Gossypium hirsutum
  Clone ID: LIB3189-023-P1-K1-C9
cccacccttcgggactgataaccagaagcttacgattaagcttatccctatacctacaggacatgtttttaaatgagatagagctaacgtatacatatatggattc

SEQ ID NO: 27991 - DNA, 162 bp, Gossypium hirsutum
  Clone ID: LIB3189-023-P1-K1-D1
caaccgtgcccttcaaagttaacatttatttccctgttgatcattctgggtggtgctgttgggtatgttgccactgattcagcatttaccttgactgcatattcatgggcgttcgcatatttggtgacaattactactgaaatggtgtatattaagcatatg

SEQ ID NO: 27992 - DNA, 139 bp, Gossypium hirsutum
  Clone ID: LIB3189-023-P1-K1-D10
ctcactcgtgcggccagtcgtcagaggtagctagccttcactaagatggcagccatgccgaagaagtcgcgaatatgcaccatacagatatttgtggccattgaatggcacaatcgtttggcttgatgctaatgaagat

SEQ ID NO: 27993 - DNA, 212 bp, Gossypium hirsutum
  Clone ID: LIB3189-023-P1-K1-D5
aggcgtccgcgtacgcttggtaaacgattgactgttctggttctcattagtggaaaaaaacctttgaaagtaaatggggctggccttcctggggaatcgtttgccaaaattcttaaagtaccgaaacgtggaacttgaaaagcatgaacttttcttcagctttgtttctaaagggtttttctcatacaatggaggcctttataagatctatg

SEQ ID NO: 27994 - DNA, 237 bp, Gossypium hirsutum
  Clone ID: LIB3189-023-P1-K1-E10
cggacgcgtgggtggttgtctaaaagaaaaggccttaccaaagggaaagaaattttggggataggggttttttagaacatggaatcaattacttgcttttattttacctaattgttcctaaggagtaatgtttggggtggtaagttttgctgggaccggtttccaacatggttagttttgtttgaaccttttttcgtatagtgtttactttgtacctctcaacggaaattattgttt

SEQ ID NO: 27995 - DNA, 241 bp, Gossypium hirsutum
  Clone ID: LIB3189-023-P1-K1-E12
gtctcttcctccttcactttcagatcatcaaaaccttcaacaatggcctttgtttagggtgaaggggccatttcttacttgaagcgtttttagttctattgaagagtagcgtattgagttagctttggtctatcaaagacattgtatattttgtgtatgtgtaggtcactgtttttgtgtgtctgtaacaaataaatattttttcttatttccttagataatgatttgtatgttttatgtt

SEQ ID NO: 27996 - DNA, 280 bp, Gossypium hirsutum
  Clone ID: LIB3189-023-P1-K1-E4
taaatacagaaaaacgaaatcaacggaaataaaatctctgaaaggggaaaaaaactcagaatcagcagatcgaagtgaaaatggagtgtgtgttcggtttagtgggcaacttctttgccatagtttcggctgccactgtgtcttttttacttcattctttgctttcttattctttctttcacaatttaccttgttccttatattctttctactcttcttctttctccttccgtgattatcttgtttctttcgtttctttcctactctttttttttttctt

SEQ ID NO: 27997 - DNA, 337 bp, Gossypium hirsutum
  Clone ID: LIB3189-023-P1-K1-E5
caatgctcaactataactggatctctctccgtttttcgtggagtctaaacatttttttgctgtatgcaggagttggctctatgggcttgatgacttctgtgttgttgtcatctgatgggaagacactagaagctgaggcagctcatgggactgtaactcgacatttcaggctttatcaaatgggacaagaaaccagttcatactgttttgcctctatatttccatggacaagaggactggagcatacggccaaactagataaaaatggaaggttgctggactttgttcacaagttggaggctgcttgcattgagacagttgatgcaggaaaaatgac

SEQ ID NO: 27998 - DNA, 256 bp, Gossypium hirsutum
  Clone ID: LIB3189-023-P1-K1-F10
tccgtgcccaaaacacccatcttcatttacatccatacaccaaatatatgtgtcatttttgtttgtaaatcgaaggtttctctgtcatttgcatcctcacctcctcactaaactctaaaaaagaaaaaaatcgaggtgagagggaatctttttaaaatttctcttttcatataagctcccttgtttctgctttgtttcctttgttgttgcttatttcataccttactcctcttttttttactttcgtatcctatta

SEQ ID NO: 27999 - DNA, 223 bp, Gossypium hirsutum
  Clone ID: LIB3189-023-P1-K1-G5
taccgtccgaatcccgtgtcgaccacgcgtcgccacgcgtcgaagttttcaatggttctacatcagctttaggatatataatctttatccaagatacttcggtcactggttccgggaagcagatcttttgagcaagaggtacttcaggacctatttaggagtgcggatcttgttataatcggcagcttctgagtggggtattccatgatctcaatttattctt

SEQ ID NO: 28000 - DNA, 278 bp, Gossypium hirsutum
  Clone ID: LIB3189-023-P1-K1-H10
gaactgtcaacaaattatatatactatggtttggtctttatgaaataaagccaaaaggcaaaccagaacccgataaacaaagcatatcaaagtctcacatcacgttatcacaatatatcgatattacttcaaagatatttacattttcaatattttcctttcatttttcttttcccgtctaaaatctaatttcattgtttctcttttggatttttttattacaatctccatgtgcggtggttgggacaagtttatactgacacatctgaatgcctggc

SEQ ID NO: 28001 - DNA, 350 bp, Gossypium hirsutum
  Clone ID: LIB3189-023-P1-K1-H12
gccacgcgtccgctattcggatccaccaaaatactccaagagagataccgtcttatgatcccggcatagacttcccaaaagtctcctcacatttcgagatatcactcccacattcgatttttaattccagtctcctaatccgaccattgatccagcctaaaattgatataggttgctctcctccaccctttctctgtcttcaaccgttcggattgataagcggagctccgacgccctaactgctgaaaaacccgaaagatgggttctcttctctttttatttatttatttatttggttgaatactgacttgtttggtttgcaaggtgtcactgttgagcttctctttctt

SEQ ID NO: 28002 - DNA, 383 bp, Gossypium hirsutum
  Clone ID: LIB3189-023-P1-K1-H4
cccacgcgtccgcccacgcgtccgcccacgcgtccgtccacgcgttcgtagaaacagaaaaaatgtactagaatcggacactttgaattcatattgatcttgtgttgaaagcaggaattgaattctatgagaagtaacctcccattgttccccagtagctcagcttgtttgaggctttggcatggttaaaacagacaaatgccaaacatgttacctatgccattcttttttaaagaatctgtcattagtttgtttactcaagtgtttggtgatgatatatactcttgcttttggcagtcattatgaaagatttcacgtgtagtgttacttggtggggcttcctttcattcttaccttttagggaattacacaaccccacaaga

SEQ ID NO: 28003 - DNA, 249 bp, Gossypium hirsutum
  Clone ID: LIB3189-023-P1-K1-H7
ctgacgcttgatctgactcatcagttaattttaaaacttctttttttacccttgatcattcacggtacattttaacaacaacaataattatcaaaacccatatttttaaacccatctttcaccatttaaaattaaaaataactagagttgtatcatttttcacatttttgaaagaattcgatcgatattaatgtttttttatatattattccattattccctgattttacatcctatattcatagtttc

SEQ ID NO: 28004 - DNA, 296 bp, Gossypium hirsutum
  Clone ID: LIB3189-024-P1-K1-B11
ctttttctaacttcccttcgtttttccctttgtattttgtttcaagaacccccaaggttgtgtttttcacccatttttgggtttatattacaacaagatcagagagaaatcaaacaggatttctgggtttcgttgagttttcacgagaatataaacaattcgagtgattgaaggatttctttcttttttttgtttgaaaaatggtggtgaagatgatgaggtggagaccatggccgtctttggtttcaaaaaagtacgaggtttagttaattgtaagaagattagaagggtgggat

SEQ ID NO: 28005 - DNA, 374 bp, Gossypium hirsutum
  Clone ID: LIB3189-024-P1-K1-C3
tttttatttttccgacacaatccatccactgaatccattagaatgttttatcaaaacaagtttctcatacatacaacataacattacacaactttttgttatcccaatcattcctgatcaaaaccaccactacaattggaatttctaactttatcttatattaaaactgttaccctttttatattcttttcaaacattacatcctcattatatttattctttattcaataatttttttttttttttttttattacttctccattttaattctttttaaattatatttttttaattcattttttatttcctttatttattatattatttatttaattatttcttattcattattttatttctatacatttttttt

SEQ ID NO: 28006 - DNA, 274 bp, Gossypium hirsutum
  Clone ID: LIB3189-024-P1-K1-E4
acataataaattctcaccttttttattctcttcaaagtttctttttcttattccaaagagaaatggagagccaaagaactgtaaacaaagaacccaaaaatctatcaccatgtagcagtggaagaagaagcagtacgagcagtcattcaagttcacccgaattcgagttctggatggttagaaacccgtcttttcctcaacccgatctaatcttcgccgatgaactcttcgttaacggagtgcttcgttcttttcattttttattctgcaaaca

SEQ ID NO: 28007 - DNA, 247 bp, Gossypium hirsutum
  Clone ID: LIB3189-024-P1-K1-F11
aaaataaaaaccaaataaggtccaaggtaaatcagtccaaatattccacttacaaccttcaataaatccaaatgctaaatttattaccaaccaaaatacaaaacatttaccgatacccaaattaaaacccaaaatataacataaacttattgacctatttcccataacaccccaacttaatccctatcccaagttacaacaatccacttttaaaatatccatattttcccaacatttataatttacc

SEQ ID NO: 28008 - DNA, 207 bp, Gossypium hirsutum
  Clone ID: LIB3189-024-P1-K1-F12
agtggagccaattgtggtttggacgtttcattagtaggaggaggccgaaaattattgcaagaacggtaaatagaagatgagggacctctttttgatcttaatgggtagaataatggataatttcccgcctttacataattatggtttggatcatcatatttagcgtattttattcatttgtgtattattttgtctttgtttattttt

SEQ ID NO: 28009 - DNA, 198 bp, Gossypium hirsutum
  Clone ID: LIB3189-024-P1-K1-F4
cccacgcgttcgcccacgcgtccgaaattacttttagaggaaaatggggaaacagccggtgaagatgaggtgctgtggtatacgctttgtctccttttcaacataagattatgtatttttcctttggacaagattctatcaatatgatgatttttaacaatttttttttatttaaatttaatttattttctttttctt

SEQ ID NO: 28010 - DNA, 158 bp, Gossypium hirsutum
  Clone ID: LIB3189-024-P1-K1-F8
tcttccttttctctcatctctaaactattcttatccctctttctaacattatctcatctccatcacagaattttttcttttaattctactcatctaacctcttaaacttatctattatctatatctctaattctcctatcttatcctaattttaaaca

SEQ ID NO: 28011 - DNA, 433 bp, Gossypium hirsutum
  Clone ID: LIB3189-024-P1-K1-G2
gaagctttgaagcaacaaactttctcttcttctttaaagatggggctggaatctcctgaattcgccgaaatactttcaaccaaagaacactgcaaacctcaatgacactttgtatttaagaattgaagagagcaaattttctaagcatggaagtagtctcgctgcattcccctccatgctgtcatttaaacaggagattattagtaaagaaaagatcaagtggacagcaagtaaaaatccctttgtgtagaaaacgaagaattttgtgtagcaaggttcattacagaactgagtcacgggcattatctaataaagatcactctttgctgaatgggaaagttacaaggccatccaagcctgttgaaaggttcagtgaggattctaatggttacgtgattggtagtgaaaatgaaacttggaagcttgctatgaa

SEQ ID NO: 28012 - DNA, 133 bp, Gossypium hirsutum
  Clone ID: LIB3189-024-P1-K1-G5
cacattaactccctcgttccttggttttttatctaatgaacaccaacctgtaagagctgatcatgattaaccattttaggggctttccattaaccatcagtcaactgttctcataacaaattttactttgact

SEQ ID NO: 28013 - DNA, 186 bp, Gossypium hirsutum
  Clone ID: LIB3189-024-P1-K1-G8
cggacgcctagcatcttttatctttttcttacaaacttatataacaaggggcattacaacgagggcgatctttattatacccatgcgcatatctacatcaacctctgcagatatatcacattaattttctgcttttttatacacatgaatttattccattttattaccccaatctccatcccaatt

SEQ ID NO: 28014 - DNA, 289 bp, Gossypium hirsutum
  unsure (1)..(289): unsure at all n locations
  Clone ID: LIB3189-024-P1-K1-H11
accgtccgaattcccggnnggnnnnnnnnnnnnaccaagattagtgcttatatcggctcctttctaatccaaccatgcatgggacggatttaatttgcatgaatcatttgaactggacatgcaattatgcttgcctgagtgcagctgccagtgttcgagtgagtaatgagctaggggcaggccatccaaggtgcaaaattttcatgtttgtagcgaacgggcatgcatattgatacgattgattcagtgcaatcgtctgatattccgaatggattggcaaagcatttca

SEQ ID NO: 28015 - DNA, 418 bp, Gossypium hirsutum
  Clone ID: LIB3189-024-P1-K1-H2
gccaaccaacccgtccgaactaaaaaaaaaaaatgggaggcccttcacggtatttttaacgtagccaccaaactcattggaagaacatttctccaacgagtgaaatgcccctcctatctaaagcttgtttgaatacacaaaaaggtgctaactttgaaaaacaaatttccctacacttatctttacgctttttaatttgtcaaacaaatttattaccataaattttataaaattttataattcgctctttgtttgatcccttcttattattaatatagtttatcctattcttatattcattactcttacccttattttactttattttatattaatttttattatttatcttctctctactagttttcaataataatctttctctaattaattccaatatttttatattatttacgtg

SEQ ID NO: 28016 - DNA, 286 bp, Gossypium hirsutum
  Clone ID: LIB3189-024-P1-K1-H4
actcttgttcggacacgtttgttttcatgttattaatacataatctaagtaagtctttatattactaacattatgtataaatgacacgaaaaaaatttattgaaatatcattaaataattaaaaagtgactataaataatgtgatgagaagagttcataaaataatttttcctgttactttaatttcaattaaacatcatgttttaaattgaaatgtgtttattaatgctaactttttttaattaaaaattagaataatttggaaaatttaaatcaatttaaaatc

SEQ ID NO: 28017 - DNA, 403 bp, Gossypium hirsutum
  Clone ID: LIB3189-024-P1-K1-H7
cggacgcgtgggatctttgagctttttcttccaaacttatagaagaaggggaaatccaacctggcgatcctcatttgagtcggctgcgtaacgaagtcaacctctgaagatatccacaggattgtctgtaggttgaaaaacatgaaattattgcctaattttgtccacatatccttcatcggtcatttgtcattagtgtcttttctcttcaacttgtccccatgtgccgttgcttcttcaaccaaatgatcttccatacattgttagtccctacactattttgttattaatccattccaagcttccggctttcattatctaaaagaatcacaaaaggatcgaagctcaaagatcaggttttgatggagaaatctgggtatggaagagatgggatttacaggtc

SEQ ID NO: 28018 - DNA, 125 bp, Gossypium hirsutum
  unsure (1)..(125): unsure at all n locations
  Clone ID: LIB3189-025-P1-K1-A11
tagtttgcagttgagaggatggtgagagnatctttttgaatgatgcactgaacagcatgtgcggtttttttaatacggtcaaaccacacgttatgatcaagcctttcttcaaagtgattatttta

SEQ ID NO: 28019 - DNA, 255 bp, Gossypium hirsutum
  Clone ID: LIB3189-025-P1-K1-B1
gaaggaaatatctaatacatgtacaaatgtgttgatcagatattacctcagttgctttattacttgtcgctgaagaatgatgcggaatctctcgattgggcaacgatagcagtatacacatgtgaagcctcttgtgaaggtgttggatacaaacaggaatttgcctgggtacaacttggtactgctattaattgcccttcatagttgctttgatttgatcatcgtctccattttaatctatattccactttcctt

SEQ ID NO: 28020 - DNA, 372 bp, Gossypium hirsutum
  Clone ID: LIB3189-025-P1-K1-B11
ggagcttcagaaacagtacgatgatgataaagctcgagtaaaggatgcagtgaagttgagagagatttgtttggcatcaacttggactctagaagacttgaaggctgccattttggaggatattagctctccacctatatctgatgttaacttgaagctgatttttgaggaattacttgaaagggtcaaggagaaggaggagaaagaagctaagaagcgtaaacgtcttgctgatgacttctttgatttattgcattctatgaaggagattacatcatcttcagcatgggaggattgcaaacatcttcttgaaagtagtcaggaattcagttccattggggatgaagacatctgcaagggggattttgatga

SEQ ID NO: 28021 - DNA, 289 bp, Gossypium hirsutum
  Clone ID: LIB3189-025-P1-K1-C8
gcccagagctctagaggttgaggactgttgtgaaagggcaaagagaactttatgtcatgggtaaacacatctaattgactcctttatgaggtatcattttctctccattccctaccaattttaaaactttcattttctatttaaaagttttttaaccttttttatatcttttttctttcttttttctttattttattttctatctttttttttctttttttatttttcttttatctttttctctttatttttttttttttttttatttctttttttttttatttttttc

SEQ ID NO: 28022 - DNA, 445 bp, Gossypium hirsutum
  Clone ID: LIB3189-025-P1-K1-F10
tgaaggctcatatcccataatcatattatgttggatatgaatactttacaagaaacaaaaagtgcggagtgcattgtatgcccacaatgaagtacagtacaaagacttgaaattgagtgcattcactacttgttttttgactagggtttactcatttttatttttagttattattttttgttttcttttaatattttgcttttattctttttttttttattaggttcttatttttcattatcttttttttttattatttttctgttttactttttatctttttcttttttttttttattgtttgtttttattattttttttttttatttctttttttgattttgtatcttgttgttaattattgttttcttttacatttttttttgtatttttattttttatttctttattttttttttctctttattagatatttatttctctt

SEQ ID NO: 28023 - DNA, 302 bp, Gossypium hirsutum
  Clone ID: LIB3189-025-P1-K1-F3
caaaaattttcaactcctcccatttcattcactatctcttttatctctgcaaacttccactcttcaatgtatttctctttgcattccatttgtttcagtggatccattcctttcttctttgcctcatggctcttgaaacatggctcataaaactcaaaaaaaccatatccaacacccttgatactgcaagatcttcaaatcataaagccaacgttggggttttatcctttgaaatcgctggacatatgtcaaagcttctacagctctggaattgtctttcatattcgactatattttcattt

SEQ ID NO: 28024 - DNA, 175 bp, Gossypium hirsutum
  Clone ID: LIB3189-027-P1-K1-D12
ctatcaaatcttggaaacaacttgcattgcggatagatgaaatattatagacaatatagccaaacaaatgttccacactagactattaacgactaatacttgtgtcgaggatattacacctttttaaatctaaaaataaaatatcaatttgtacatattacgatcaagaaaacaa

SEQ ID NO: 28025 - DNA, 448 bp, Gossypium hirsutum
  unsure (1)..(448): unsure at all n locations
  Clone ID: LIB3189-027-P1-K1-D4
cnagaacgcgagcggccgcccnnnnnnnnnnttttttttaaanagacaaggccacaacgcatgcacaagcgggagaaagaagccagaggaaaaaacacaacaaaagggaaccangacggagggaagcgcaggacaaaagcaaaacaagcaaagacacaaggaaagagggcaacagagaaaggaccnagacacacagccaacggacgaagaaggaacgacaccggggagccgcaaacagagancaacgcgcgcgacaacaaccaggacaagggnccncgaaggcggccccaacagaacaggagaccacccggaacggagaccgcgggaaacgaggcgcgcgccagaaagccggnggcaagaaaccaaaaggcgacagaagacaggcaaaggggggccggacaaagagaccaagaagaggggaggaaccccccggagaagcgaagacaac

SEQ ID NO: 28026 - DNA, 178 bp, Gossypium hirsutum
  unsure (1)..(178): unsure at all n locations
  Clone ID: LIB3189-027-P1-K1-E2
acggaanaccgggccgacccacgacgccgaagaaaacaagaaggagcgcgcaaaacacaccattgctttccaccattgaagaaactacaaaggatgggtatctcatatgtgctagagggcgaaaaagatgaagaaaactataaggattgcgcaaaactttccaaggcgttcgaacaag

SEQ ID NO: 28027 - DNA, 370 bp, Gossypium hirsutum
  Clone ID: LIB3189-027-P1-K1-F7
atttttatggtagccttcctgattcaatgaggaagcttggtacatgtagttcaatcagtttaggaggaaactctttgaggggacaagttccagattggattggagaattgacaagccttgaaagtttggatctttctgcaaataatttctctggtaaagttccatcttctctgggaaatctgcagttactgagagaattgaatctgtcaatgaaccagtttactggtgcattgcctgaatcgatggctaattgttataacctattggctatagatgtcagccagaatttgttaaccggcaatgttccatcatggatgtttaagatgggagtgcaggttgtcctgttttctgggaataaacttattggaaa

SEQ ID NO: 28028 - DNA, 453 bp, Gossypium hirsutum
  Clone ID: LIB3189-027-P1-K1-F8
cgcaaattccctttccttttcgctttctcatttcttctcatttccgtcaccatcctcctcttttcctactcctcctcttccccttccctcctcctctccaccaatttccaagtttccgatcctcttcctccaccgccgcgtccgttaccctcacgatctccgaacaatgtccccgtctcctccacgaaaccggttcccaagaccaccgccgcagcttctgacgtggacttgaatgtgagtttggatataaaatgggagaactgtcagttaggtccgttggcggtggattatataccgtgcttggataattggaaagcgattaaagaattgaaatccaggaagcggatggagcatagggaaaggcattgtccgaagcccaatccgagatgtttggcgcctttgccgattggttataaaggtccggttcattggcctaaaagcaggggacatgat

SEQ ID NO: 28029 - DNA, 449 bp, Gossypium hirsutum
  Clone ID: LIB3189-027-P1-K1-G6
cccacgcgtccgcgaatacatggtcgactctcttctttataggccaaccactgaggacaaacgtgcagtggctgaatgttgtgggaatgtggaactctgtaggctcagtgagatatacaaagagtggagattgaagagaattgagcaaacatgggatcttttccaccaaaaactcaacaaggatgagtcagggaaggcttatcttccagcaatatataaccttatccaagaggaatatatgaaggaattgttccatgacacacttggttttggtattgctaagatgataaggagaattggtggtgttgaccatgttgaggactttgaatcaattagagaaggtagcataagagcagatagtgaggcaaaggcacttgaattagccaactctcatctcaaggagaagcaacaattcttggccattggtgaaggtatatcacccatcatgc

SEQ ID NO: 28030 - DNA, 212 bp, Gossypium hirsutum
  Clone ID: LIB3189-027-P1-K1-G8
gcagtttagtccaacttcacacccaccacttttttttgtttgtaatcatgctaaaaagattggtgaccgttaaagaagtgagtggggccttaacgtcccaacgaccagacacacgtgaaggccatctagacatgaaccgctcctaactttgttgatcataacacataccctgactactacttccatatgacaaattgtgtgctccatcacca

SEQ ID NO: 28031 - DNA, 210 bp, Gossypium hirsutum
  Clone ID: LIB3189-027-P1-K1-H1
aaaaattgatataacagcaatttcctttgtattgaaactagagaaacaaatatattacaatatttatgaacaaccactctgctaaaactttataaaataaataatactttagttttacactcatgtcgtaagccaccatgcctacgtacatttaccaaggcattgcaaaactcacatatcggtctacattttttaacatcatatttagag

SEQ ID NO: 28032 - DNA, 422 bp, Gossypium hirsutum
  unsure (1)..(422): unsure at all n locations
  Clone ID: LIB3189-027-P1-K1-H11
gccacgtgttcggaacttgctaaattaatactagtgcctaaaaaacatgcacaccaaggagagaaaacctacgatttctatgaaaacacccaacatacacaccatccttttatttgctcttctctcgctatttagaaagatcagtccactgccttattctacaaccaaacttgttcaaccaactcttctgcgaaatccggaacaccatttgaccagaaaaactccagtttcagtttaagcccttcactcgccaactggtgcgccactccatttgcggatcgccgaacatgcatgaagggaatccccttcaactcttaatctccttaaacccagatctaagcacaacttcatggncactgtgcaagccacttcttccgtggcaaaaagcgatgggatactctcatgatagtcgcgcacatgta

SEQ ID NO: 28033 - DNA, 254 bp, Gossypium hirsutum
  Clone ID: LIB3189-028-P1-K1-A7
aaagtggtagatcgatctcagccgttttttattgttcgctaaggcgactattgatacggggggaggagcatatgctgggcttcaagatcccaccaaagtcggactcgttcatgtcaacagcgattatgcggatttggatgtggccgcatttaaagctaccaaccatgtcgagtgtcctccaatagaaaggcatcctagaaaaataatcattgcgacatcagctattcggcctcgagcagatgttgcttattgaa

SEQ ID NO: 28034 - DNA, 181 bp, Gossypium hirsutum
  Clone ID: LIB3189-028-P1-K1-A8
tcgatgacccgagataataaataacactttttttttttttgggttgtccgagttatgaatctttgtcgcttgtagaggatgtgatgggcaacccagtatcaaaatctagctagtgcatgttgacttgtgcaggtgtttatatagaatcttgccaacggatcagaaactcgacctgggatta

SEQ ID NO: 28035 - DNA, 361 bp, Gossypium hirsutum
  unsure (1)..(361): unsure at all n locations
  Clone ID: LIB3189-028-P1-K1-B2
caaagccaacaaccaaagcagcaaggagaaccgtctagggaggcgaaagagcaggaaggagaaaaacanggaggcnccagagcagcagaacaagaccagagncgcgaagaacgacncngnngaaccccgggaccgcaacacnaaccaagcgacaaaacaaggcggcccaagcgaccgacacgagacagcagcaaggcggacgccgacagagaccaggaaccccgaccgcaaagaacgggccccagcaggacaagaggcccagggccacaccgcagaaggagaacgaagagaaaggaggagcaacgaggacggaggggaaaggcaaagcccacaagcccacggaggaaagggaggaaccgca

SEQ ID NO: 28036 - DNA, 298 bp, Gossypium hirsutum
  Clone ID: LIB3189-028-P1-K1-C10
catgtcttgacctcatccatcaaaaactttcattttttcattctacatgaaagatcaaacaatcataccaacaaatccctgaatcaaacttgaaaaaccctccaaaaaatccaacccaaatccaaaatgcccactttcaacttcaaattcatcttcatcagcatcttcctatcccttctctttctccatacctgtaaatctggctcgattttagacctcaatagtgcactggcaagcagtgaaatcgatgcaagggcaagaagggtttgcaccaaaaagctagaagattgtttagaaa

SEQ ID NO: 28037 - DNA, 196 bp, Gossypium hirsutum
  Clone ID: LIB3189-028-P1-K1-C3
aaagacaaggaggttataatttcttggggagttcaaaacaaaagggagtggctctcactatgatacacacgacatgcagaagatgggcgccaagctcgggagtgcctttgaaaggtgggtgaccgctataagacacaaatatttgccaagatcgagaacatagaggggtgaaaccattatggtgagattctgtagg

SEQ ID NO: 28038 - DNA, 298 bp, Gossypium hirsutum
  Clone ID: LIB3189-028-P1-K1-C6
acaatccaactaaaatgttggaggaaaccccatttttattccccctataggcagcagcgccgacggttccaacctataccacggtgacggactccaaatcacctgttggtttataaaaactagacctttcgccgccgtatcatttaccaatgtgggcctgttccctgataccagaaactctttctacgaactattgcctttaataggaagagcagtgctcctccacgcggaacccggcggcattggaacctgatccatcggataaagggtcagggaatgaggatctttcttagactcc

SEQ ID NO: 28039 - DNA, 413 bp, Gossypium hirsutum
  Clone ID: LIB3189-028-P1-K1-D10
gttgagacttggagatcccaaggaattaccaaaccatggaattcttaggctatacaaactttgcctttgttgttttcctcgtctcttttcactctctgtcggcttgctctcaatccgagtctgaggatcatgaatttaactatgacgaagaaacaaggaggggtccatcgcgttggggcacactcaaacccgaatggagaacctgcagcgacggacgaaagcaatctcctattgatattggaacagtccaagtcaattctgagttgggagagttgcaaaggaactatacatcagctcaagctattttgaggaataggactgaagatgttgcggtggtatggtcaggggatgctggaaacatcaccatctatggaacaacttatagagtggttaactgtcactggcattcacct

SEQ ID NO: 28040 - DNA, 361 bp, Gossypium hirsutum
  Clone ID: LIB3189-028-P1-K1-D12
cttgtacggccaaagattccctaccagcataaaatcggaaagaaagacaaaacatggggatgccgactgccacgtgcgcctacgcctcttcctcctacatcggcaactcttctacgatcggtggcgctggcggaggaggaggagagatcatgctcattggaggcagaggggaggcagattgcctgtggcaatgagggcgtgtggacagccgagtttagtacgagcagcctaatgagtcgaacacgcattacaacacgcgcgccagagagcaaagccatggtagcctgaccgctggttacgcctgcggagacaagccaatcctactgctctggaatagagagcgcaaagagggagcccgtgg

SEQ ID NO: 28041 - DNA, 154 bp, Gossypium hirsutum
  Clone ID: LIB3189-028-P1-K1-E10
gtgtagcgattctcagttaggctttgctttaagctcacagctgctctccacagccctataatgggtaaggagaaggttcacatcacccttgtcgtcattggccatgtcgactcttgcacgtcgaccaccactggtcatttcagcttcaatgcta

SEQ ID NO: 28042 - DNA, 130 bp, Gossypium hirsutum
  Clone ID: LIB3189-028-P1-K1-E11
tccaaccttacttttattactaagtgatagaagatgtattatgagtgcaggggtgtctgtcctgactatgctattccttgagcggggtatacttttctactgctttcatgaatgtttatccagccctgtg

SEQ ID NO: 28043 - DNA, 131 bp, Gossypium hirsutum
  Clone ID: LIB3189-028-P1-K1-E7
agagggtgcgcacgataaagctattcattattgtttcaacatgaaggttcgcaatataaaattgtgtctatcaaaattgcatcatgtctcttgatcatgaagctgacggtcaagatcacttgtcaatcctt

SEQ ID NO: 28044 - DNA, 405 bp, Gossypium hirsutum
  Clone ID: LIB3189-028-P1-K1-E8
ctttctttctatctttttattttatttttaattttttgcattatctctttcttcttcttctccatggagaaacttaacaatggcagactgcaaacatggcgatgaagagttcgacacccaatccaatgaggaaacagcataggcctaaaaatatggaggactggcgccaaagaagaaacccttaatcttcaaaggaccatgaacgtgctttctttgattcatcagattgggcattatgcaagcaaggttcgggagttaatcaaaaattaacttgggctatcgagacttttagaccaaagcttcagagaacacgctattaactattaccacctaaggagactacattgtcatctgggccagataacttggggcagatgaattgatgaattgttgcgagaatttgtt

SEQ ID NO: 28045 - DNA, 174 bp, Gossypium hirsutum
  Clone ID: LIB3189-028-P1-K1-F10
aatataagcggtttgcatattgcagtattttctctttcttcaaatgcaccaccggtttgaccgtgatccaccttcaatgcttgaagctgatacaagccttcaagctcaggacacaaggtttcgcacaggattagaacataccggatgggtagaagctcaaacaagtttgctttt

SEQ ID NO: 28046 - DNA, 173 bp, Gossypium hirsutum
  Clone ID: LIB3189-028-P1-K1-F5
gccacgcgtcgccacgcgtcggaaactagatcctttttatctcgctcataccccaaatccccataccctttgttaacagcaagatggcaactggcagtaccttctcttgatcgtcaagcttcatcccaaccgattgagatgttctactccgattcatttttgttggattgttt

SEQ ID NO: 28047 - DNA, 174 bp, Gossypium hirsutum
  Clone ID: LIB3189-028-P1-K1-G12
atataaaactcgagaagcaaccactcatatgtaatagcgggtatcgatctatggatctatctataaagtatgaaaaaccagataaaaaaattgggggtgggcctaggtgctacatgaaaacaagggaggcatgcttccaaaccaacagagggtaagcttcgccggaaaacaatc

SEQ ID NO: 28048 - DNA, 342 bp, Gossypium hirsutum
  Clone ID: LIB3189-028-P1-K1-H7
gttttaccttgtaagaaaacttaaggaatcggacataattgaggccttcgaactggaaattggtcctcacagattctcttaccaagaactcaaaaaagcaacaatgggtttcagggacaaagagctacttggatttggtggattcggtagagtttacaaaggaactttgcagagtacaaacactcaagttgctgtcaaacggatttctcatgaatcaaagcaaggtctaagagaattcgtgtcagagattgcgagtatcggccgtcttcgccatcggaatcttgttccgctccttggatggtgtcggggccggggtgatctgcttatttgctatgattatat

SEQ ID NO: 28049 - DNA, 395 bp, Gossypium hirsutum
  unsure (1)..(395): unsure at all n locations
  Clone ID: LIB3189-030-P1-K1-A12
gtgatgggcttaaagaattgccaaagaagattgaaaaattggtgaatcttacccatcttgagtgtgaacattgtattagtttaactcatatgccacgtggaatagggaagctgacttcacttgagacgtttaagcatgtttgtagtggataaagatgggtcccatggcggtgcagatctaagtgaattgagactgcttaacaacttaaggggacgtctagaaataagaaatttgggattcgtaaaaaatgcaaaagagaagtttgaggctgctaatttgaaagagaagcaacatttgagatcgttggttttagaatggngcggtggtaaccatgatgatgagaagtcacttgaagacctccaaccccatcctaatctcaaggagctctgtattgg

SEQ ID NO: 28050 - DNA, 269 bp, Gossypium hirsutum
  Clone ID: LIB3189-030-P1-K1-C6
ccctcgtccgcggacacttgttcaaagcctttatttagcatatgataaaaatagtaagaaaactataattctgggagtgttttaaacattagcacgactcatcaaagaacccactcccttgactttacgataatgcctctatacatgccttatatccacatttaaccttccttacatcttgaacccatctatctttccatttataaacacaatttttatgacccacttattgtcttttacacttttaagcttttatttttttaatttac

SEQ ID NO: 28051 - DNA, 385 bp, Gossypium hirsutum
  Clone ID: LIB3189-030-P1-K1-D2
ggattagaaggccattttcgtgatccgaaaccgaacatagcttacatgagatcagctttggacattctaggaacaatggggttacctatatggcttacggaagtcgatgtcggtggaggaccagatcaggcacacaacttggaagatatactaagggagggctattctcatcctgcagtcgaagggattatcattttcggtggtccgatagccgccggattcaagtgtttgacgctagcaaattatgatttcgaacctacgcctgtcggagaagttgtagacaagttgattaatgagtggaaatctgggaggagacaagttagaacagatagtagaggaatgtctgcaattttactctttcatggtgattacagggtagaagtga

SEQ ID NO: 28052 - DNA, 232 bp, Gossypium hirsutum
  Clone ID: LIB3189-030-P1-K1-D7
ctcaccgtcaatcgccttcctcccaaaaggaaaacataaaaaaatctcggccaccgctgctgctgccgccattggagtcttctttgacggccgcttcctcgaaatttctcctgcaaacatcttcacttacctgaagatggtgttgtagacacggtcaatttgcctttcaattcaactccttcaaggccttatacatttcatataccgtggttttgcagatgtgcactttttt

SEQ ID NO: 28053 - DNA, 299 bp, Gossypium hirsutum
  unsure (1)..(299): unsure at all n locations
  Clone ID: LIB3189-030-P1-K1-E9
ggaaacccggggcgcgccagcggncgacaaaaccaaaaaaaaacacgcgcaaagagcagaacccggcaaaaccccaccgggggaccacaccccgaggggagagcccgacaccacgacacggaaggcaaaaccaagaaaggaaggcacccgaccagaccagcagcgacgcaagacgccggaaaacagcacgggacggccgacccaggccgagacaacagccagaaggaagcacccgccaccaggggcagcgacacacaggggggaagcagagcacgcgaaaaccgaaaccggaaagacca

SEQ ID NO: 28054 - DNA, 304 bp, Gossypium hirsutum
  Clone ID: LIB3189-030-P1-K1-F7
ctttggcaaagaaaacacaggtgtacctcactagttttcacttatggagttctcgagaaaatcccttgtgatcaagatgttgatctcagcaatatttctattgggattatcgagttcgagtgtagcggagtttcgactcgccagacatgcgacgacgagtacgacgatcgagtatccggcgttaaactgtcggaaacacagtgcggttctgacggaattcggtggtgttggtgacggcaaaacatccaacacggaggcgtttaaagctgctatagcaattctcagccagctcgcggaagatggt

SEQ ID NO: 28055 - DNA, 318 bp, Gossypium hirsutum
  Clone ID: LIB3189-030-P1-K1-F9
tagaaaattcttaggatagagatctgagagacagagaaacaaaacagagtgagcggttttcgggatttggtaacggcgattcaagttatactgtgaggtgtttgttggagagcgaaagaagggggatgcaaaataaaacatcagcttcactcttacattacagctgcttcgccaacaaaggttaagcggtatttggagaccagacaaaagtagaaggcggtttcgtaacagaaacagagcaggccaaagtttattaaaataaatataaaaaaaaaaatatataatataaaaataaaaattaaaaaaaaaaaatataag

SEQ ID NO: 28056 - DNA, 442 bp, Gossypium hirsutum
  Clone ID: LIB3189-030-P1-K1-G9
cggacgcgtggggttgaattttacctgtaatttttttttgttttttcattgattaaagcttggaatttcctttttccttcggtgaaacgtttggttttgttcatttttcgtgacgctttttttccccgattcttgctttggcagtaatagcgttggcaatcacctcttaattcctttgccggtcccggataatcccgactttcagtcatattttccaaatcgaagcgccgattctaagaagtttgagcttccaggctcgaagctgaagttgtaaaatttggaaatattttgagcttttctgtttgttgacttcggttgaactttggggactagagaaaagggtcataaaactgtagacccaaaaagaaatccttttggttggatcataaacttgtttgggttttgattatttttaagcaaaaaaaatctatacagaagacag

SEQ ID NO: 28057 - DNA, 348 bp, Gossypium hirsutum
  Clone ID: LIB3189-030-P1-K1-H1
cacatatccaatggcttcgatcgctgtcggagacgtgttaccggacggtactctgtcctactgagacgccgacgattatctgcagcctgtgtgcgtacattccctggctgacggttaaaaggttatcatcactggcgttgccagggcctgtacccctacttgcagtttgaagcatgtctctggactatagagaaagcaggggagctgaaatccatcggcggtgatgtaatcatgtgcatcagcgcgaacgatccctttgcgatgaaggcatggaccacaacttaccctgagaacagagatgggacgtatccagctgatgggctagctacatacacccacgcccttggt

SEQ ID NO: 28058 - DNA, 222 bp, Gossypium hirsutum
  Clone ID: LIB3189-030-P1-K1-H10
ggtagtgtaaagatcacatctttgacacatcctgtgatagttttcgcctactttttattgtatcaaagcaccatagatcgatggggagaatcatgatgccctacttgatggtcttctcgtacctgtatgccaactgttccttaacattatagaaggttgcatctgttataaacactccttgaggttggactgtttagactaaaggagggacttcttttgttc

SEQ ID NO: 28059 - DNA, 443 bp, Gossypium hirsutum
  unsure (1)..(443): unsure at all n locations
  Clone ID: LIB3189-030-P1-K1-H12
caaaaggaagatagtcagccatggatgttcttagagcttcttcttctacccttgttcattcaccatacatttcaacaacaacaagaagaaacaaaacccaatttcttaaacccatctttcaccatttaaagttaaaattaactgtgtttgattcatctttcacattgtttgaaagaaatggatcgaaattgaggttgtttatgacgttaccatcgtccccggcatcgacaacggaatccatcgagccacctatgctggaacttgaggctgatggttgcgagaaagagagattcgattggtactcacattggtacccggtgatgccaatatgtgatttggataagagggtgccccatgctaagaaagtattgngacttgacctagtggtgtggtgggataggaatgagaatgaatggaaagtgtttgatgatacttgtccccat

SEQ ID NO: 28060 - DNA, 295 bp, Gossypium hirsutum
  Clone ID: LIB3189-030-P1-K1-H5
gtaagtgtaaagatcacatataagacacatactgtgatagtttccgcctacttttttatgtagggagacacataagatcgaaggggagaaacataaatgcacctacaatgatagggtttgcaccaatagcctaatatagaccaacatattgcacttaacattgataagaaaggctttgccaatcttgtttataacagaactaccaataaagtcgatgagactgttgtaagagcttataagggcggagaacttcctgtttatggtttccaacatcctgaagcccgagttgagtcaa

SEQ ID NO: 28061 - DNA, 295 bp, Gossypium hirsutum
  Clone ID: LIB3189-030-P1-K1-H7
gggattttctctaatggcacctggaactttgatgatcacaaaccttcatctacctttcttgcattgccatttcaccaagattatacttacaacttcaatccaatctactgtccctttggtgatgaattctttttacaaagcaacacatttgatacaccctcattcccacttctacaacaacatgtatgaccaagaatccaaattccttgacatcaacttcactagttggatgtttatagctcctgcaaaaccgagcctgttcaattacctcaccctgacaatccatctaataagt

SEQ ID NO: 28062 - DNA, 296 bp, Gossypium hirsutum
  Clone ID: LIB3189-032-P1-K1-F4
gctcgagctgctcccgcggcgagagcgggtcgccgcgtgccggccgggggacggacttgtaacggcatggtatgatatctttctcgggctccctctcttttgtctagtatcttaaatgtcctttcatgttcaccacttgttgttctgtcattaaattttaattcaagttttattcctacatttacttatgttctttaatgtataatactctttttatactcctatttattttccttttgtttaatatatcttttttttacttatgactttattcttctttagttttctttaaattt

SEQ ID NO: 28063 - DNA, 150 bp, Gossypium hirsutum
  Clone ID: LIB3189-032-P1-K1-G4
cagaaacaacaagggctgacatggctcctttatagggtgctaacagaacaagagccatagcagtagcagggggccactcagatccatcaacatggatccataagcatttggcttttcaagttctacaatgagaaccaggaaccataactg

SEQ ID NO: 28064 - DNA, 489 bp, Gossypium hirsutum
  Clone ID: LIB3189-032-P1-K1-G5
cccacgcgtccgctgatttgctatggattccttcacatgttaaaagcctctgctttaaaaatccaggtagagtttttttttcactgaattgctgtttcaaattttcaaagttcatctctttattagtaaagtgagttctggttgtaattcaatctataaatgcacactatgtactctaatttgacaaagaaccaagcttttccaattgttattaggttttcttcacaaacctcaaaaacccatctttggtcaattaggtattctccaaaaccctccttaaactccttatttggtgtttagcaccccataaaggtttccacttttcaccatataggtttttaaaacctagaaagtgttttaaggttagttttaggatttttaagtgcctttctatgtatttttcttttgttttgagtcttttactttttttctagtcttattttattttttggttttcatcgatttattggttttttttttcattctttt

SEQ ID NO: 28065 - DNA, 335 bp, Gossypium hirsutum
  Clone ID: LIB3189-032-P1-K1-H12
ggaggaggcttcggatcaacctccgatgcctccccataaaaacatatggagagcactaatggtggcacagcttgcaggtagtaataaagcgagatcatatagttgagcggttaatgctcgaagaacatgctttgtagatgttctacacaaagagcatccgattcataagcatgctggtggcgggaccgacttttgtccatttaaagttttcaaggataaaattgtggaaccccattttatccacgactacaatacccttagcaatgcacatttggatgagtcaaagcataagcctgaaaccagtaagttatcacacctgttccgttggatctttc

SEQ ID NO: 28066 - DNA, 275 bp, Gossypium hirsutum
  Clone ID: LIB3189-033-P1-K1-D11
aactattaaatattcaacatcattagaccgggggctatgctctcccattctcatcctcagagggtgtcatcttaaaagatgggtgccacaccaaggtcactgctttattagatctaacaccttagcattcatgggtgcagctactctaaacattatggctcgagtcatactaacaaatagctttgattacattcctttcactttatcattttatctcacattcaatgcaataatattgcttgtttatggactatttattaatgttctttttgtat

SEQ ID NO: 28067 - DNA, 299 bp, Gossypium hirsutum
  Clone ID: LIB3189-033-P1-K1-E2
caaatctctccatcttcttgtggtcaagcccatatcaaaagacttcccttttagcacacagggcgtgtgtcgagtactataatgtgtagggagaacgttcacatcaacattatggacattggccatgtcgactctggtaagactacaaccactgttcatctgaactacaagcttggtggtatcgacaagctgttgattgaagctttgagcacgaggcttcttttattaacaaaatgtcatttaactattcatgcgtgcttgacaagctttaggccgcgcgtgaacgttgccttaccatg

SEQ ID NO: 28068 - DNA, 362 bp, Gossypium hirsutum
  Clone ID: LIB3189-033-P1-K1-E4
gctcaagaagctaaggaagaaaatggaaatgccaccaaccaagtaataacagagttgggaactgtgaaatacaagcgctggatttgcatattgctctgtataatctttctcctctgcggccaatcagtagccgcattgctgggaagactttactttgacaaaggtggaaaaagcaaatggctatcaacactaattcaatttgcaggtttccctattctagtccctttctattgcatttctcggcccaaaatgctcactgccaatcattgtagcattggaagtaataaccaaccatcaattatgatgctgggtttgggctatgtaaccttcggcttgatgtcagcttggaatggctttcttta

SEQ ID NO: 28069 - DNA, 411 bp, Gossypium hirsutum
  unsure (1)..(411): unsure at all n locations
  Clone ID: LIB3189-033-P1-K1-E6
gggaagccctatcaagacgtcaagcgctccgccgattcaatgtaccttccgtttgatgtagttggagattctagaggcgctgccaagattcgagtttcgagcgatgttagttactccgttgaggagttgttggggatgattttgaagtacgcgtcgaatttggcggagtttcattctaaagtgacggttaaagatgcggtgatttcggtgccgccgtattttggacaggcggagaggaaagggttgttgaaggcggcggaaatggccggaataaacgtcatttcgctgataaacgagcattctgnggcggcattacagtatgggatcgataaaaatttctcgaatgagtcgagacatgtgattttgtatgatatgggttcgagtaggacttatgcagctcttattttttat

SEQ ID NO: 28070 - DNA, 206 bp, Gossypium hirsutum
  Clone ID: LIB3189-033-P1-K1-E8
gaggaaaaccaacccatcaatccattaacatttttaggggtgatacaaactaaaactttacaacaattaccaaacaaaacaacccttattatttggggctacatataaaagggcatatatttatatattggttggcacttcccttaaaaaaataacacttatgattggaaggtgtttcccaatttaaaacgacccaaattttgaaa

SEQ ID NO: 28071 - DNA, 270 bp, Gossypium hirsutum
  Clone ID: LIB3189-033-P1-K1-F11
gtcagtcttcccaaacaccttctttccgaaaatttattaaaaaaaaaaaaaaaaaaaaaaaaaggaaaattaaaaaaaaaagaaaggcacttcaaaaaaaataaaactaacaaacccatgcttacaaaatatattacatttctttcgtcgctctattaattcaatttactcctcccctttctaataactttttacttattttaaccctttttttaccctacttaatcttccttgaatccacccccctctctccaatgttattctttgctt

SEQ ID NO: 28072 - DNA, 235 bp, Gossypium hirsutum
  Clone ID: LIB3189-033-P1-K1-F4
cctccacatacaaaaaaaaccatctatttttattttcttatcaacgacaacaccaattgctggcgtgaggaaatgtcactgctgggagtgtcacacaggctatgctcctgaatatcactttaattgttgctgctgatatgtgaagttctttaacaatcttctacccatgaatcattatggacgtgaagtagatctttcaaaagatggagatatttcttacattgtcttaaatttt

SEQ ID NO: 28073 - DNA, 433 bp, Gossypium hirsutum
  unsure (1)..(433): unsure at all n locations
  Clone ID: LIB3189-033-P1-K1-G1
cacgccgtnctcggtaagttctcgacagcatcttcagctcttgtatttggcagtnncaggtgaacgaatgcaatcgttggttgtttcgaagagtgagtgagtagtaggaaacactgggcgcccatatctcttttacaatatgtattctctggcattcgctgtagggtattcttgcagcattccacttatggtagagccgtaagctcttgaaattctcaagtcatgattcatcactgcaggaactgttcatttgtatcaactgtagggtcctatgaactctttcgaaacttgtgtaggtattgtggctggcatgatgtatctaagctttactgagtcttgcttcttatatccttttcttttaatttattgtcttgcagatttatcatgctgatgacaggtttcgccccacccaaattgctgctgttttaaatgc

SEQ ID NO: 28074 - DNA, 229 bp, Gossypium hirsutum
  Clone ID: LIB3189-033-P1-K1-G10
cggacgcgtggtctgactcgtgtacccaagatggtaattattggtctacaaagaaacagagttgtaggtgttatttgaggatatgcggcttcactcacaagcgctgtcttctagccttcctagtgaatactctatagaggaacatgacattgacgcatttctttctgaggaaagggtgtaggatatccttcaacagtctaaagaaaagcatcggacagtgcaccgtaac

SEQ ID NO: 28075 - DNA, 260 bp, Gossypium hirsutum
  Clone ID: LIB3189-033-P1-K1-G2
gtaagttccgaagcatttagctttgtatcgcagtcatgtgaacatgaatgttggtcagattgaagatgatgagatttttaaacatgggccccattctcttttacaattgtatttctggcatcgctggaattatcttgcacatttcattattgtgagacgcactcctttaaattctcaagtcatgactcaacactgtatgaactgtttcaattcatcaactataggtgaccatatatctttttcaaacatcttcaagtttt

SEQ ID NO: 28076 - DNA, 365 bp, Gossypium hirsutum
  Clone ID: LIB3189-033-P1-K1-G8
cccacgcgtccggtcaacagtctacgatatatggttggctgaggtctaaaaagggctcctcttaaaaggaaggtaggaagaaacacagaaagcaagcaaagaagcttttattttttttccaccttgccttgtcgattttgctctcttcaagccaaacccaccttcggaaaaaggacatcatatccaaaatcttgctaccctattaccacctactgccatcttttcttgctaccctattaccacctactgccatcttttttgatcttcatcgatttccctttttttccattaagaggaaataaagccaaaaagagaagattgaaagaaagaaaggtctgggttttactcttgtttgatgggagttt

SEQ ID NO: 28077 - DNA, 177 bp, Gossypium hirsutum
  Clone ID: LIB3189-033-P1-K1-H5
cccacgcgtccgttttgattttatcttgtgtggttacactatccctctcagttttggggctacgggccacttttcttgtagattgtagaatcacttggtctgattctcatattacgcaaatcgatggagtgagagccatccaacttgatttcgactcaagattaagctgatgaattt

SEQ ID NO: 28078 - DNA, 308 bp, Gossypium hirsutum
  Clone ID: LIB3189-034-P1-K1-A10
gtgaataaaaaaacaaactacaccaccttccaacaaacaaatatccaaaaagtgaaagttagggggtccactttccttcttctttttcattattttccctcctgattttcttttcccccaaacactactattcgacggatacggtttttctatccgaagatatttttttgtcgattgttctcgctatcagacgattcgttttctttcgaagaagaagattgataaaattagaaacaaataaggccttgaattttcttctttagagggttattttccccggaaaaatggcctcctttattttcccagct

SEQ ID NO: 28079 - DNA, 483 bp, Gossypium hirsutum
  Clone ID: LIB3189-034-P1-K1-D11
cccacgcgtccgcttaacccagtcaccatccaaatcctatattaaaaaacagccattttcctctcctaccacaatactgattttaaaacacctcatgcaaaggttagtgttagttcttacagtattgggttccttaatcatgttttagttcaatattttctctctttttgggtttgagtttctggtatgggtacttgggtattagtattacagtaccaaaacaagaggttcatcctcattctcatgaacatttcattcctcttggtggcatctgttttcctgatgatgtgttccagttcttcacaagttgttttagggagcaatggttctaaatttcgcaatagccagcaagattgtaaagccctggaggatttagatgattataaagccaagtgttcttatctcaagtctaataataacccatgtgtttatcaaggctatgttgattatctttaccatttttattgcaattttggaagattt

SEQ ID NO: 28080 - DNA, 492 bp, Gossypium hirsutum
  Clone ID: LIB3189-034-P1-K1-D6
atacgctagggttttaaaggtgaagttgcagcatacgagactcgagctttgtaaatttgtagccttttgaatatgggtttatcatcgggttccgttcataaaacagaggaagaatggcgggcgattctttccccagaacagtttcggatcctacgtcaaaaaggaaccgagttacgaggaactggagagtacgacaaagttttccaggaaggtgtttacaattgtgccggttgtggtacaccactttacaagtccacaaccaaatttaactccggctgcggttggcctgcattctacgagggtttccctggagccataaaccgaacccctgatcctgatgggagaagaaccgagattacttgtgcagcttgtgggggacacttgggtcatgtttttaaaggggaaggattttcggtgccgactgatgaacgccactgtgtcaacagcgtttcaatcaagtttgtcccagccgttgcaactccttcactatga

SEQ ID NO: 28081 - DNA, 339 bp, Gossypium hirsutum
  Clone ID: LIB3189-034-P1-K1-F11
aaagatgctcccaatgtagctgagaaagtttgtggggcaatctattaccttgttcaaggctatgacgatgcagggcctagtgcctctcttttgtcaccatatctcactgacatatttagttttctgattttaactgctgatcgtactgatggtgttgtctttatgtttatgtcttttgtcttattttactttattctatttcttacttttttattttttatttttattttttttttttcttttttttttattttctttgtctttttgttatttttttagttatttttatttcttgctctggtgttttttattttttcttttttttttttttctattttt

SEQ ID NO: 28082 - DNA, 395 bp, Gossypium hirsutum
  Clone ID: LIB3189-034-P1-K1-G11
ggcggttgggatatgctcaaaatctttctttttttccctttcttttatggtttatgttattcagtgtggtatatcgttatgctttgttatgatgtttggggtttggctgcaaatttgattccttgttgtgattcttttagggactttatgtgtttgtgtctaccaaatgatcttgttttctttaaacttcgtatgtgttatttttttgttcttttctgtgttgcttttatttgatatagaaaaagacctaactttttttttcccaaaaaagaaccttgggtttcacttcaatctaatcttctcttttcaacggccaattatggaacaattgttcatctcttacatccctgtggttttgattgaatttttaattgctctcattcaatttgtgttga

SEQ ID NO: 28083 - DNA, 126 bp, Gossypium hirsutum
  Clone ID: LIB3189-034-P1-K1-H1
tgctttataattgaagctaattgcatgtttcaggggaggcgattctttatttagagacaatggacatccttgtatgagttgctattaatgtgaaggccaagatgatcgaggttgaaggtcccagag

SEQ ID NO: 28084 - DNA, 473 bp, Gossypium hirsutum
  Clone ID: LIB3189-034-P1-K1-H2
gacccacgcgtccgttcttttgagcctttgagagagaaccctctctttggtccctcttcctccacattgaagaagttgggagctcttgaatggaccgaagttgtggttaaacatcaaggatggaggcttattacttgcatttggctgcatgccggtgttattcatcttctagccaacatgctgagcctggccttcattggtatacgccttgaacaacagtttgggtttgtgcgggttggaattatttatctcttgtcaggatttggcgcaagtgtggtttcttctctatttatccgaaacaacatctctgttggtgcctctggtgctctttttgggcttcttggtgcaatgctttctgaacttattaccaactggaccatatacacaaacaaggcagcagctttttttactcttctggtcatcattgccattaaccttgcaataggaattttgccccatgttgataactttgc

SEQ ID NO: 28085 - DNA, 237 bp, Gossypium hirsutum
  unsure (1)..(237): unsure at all n locations
  Clone ID: LIB3189-034-P1-K1-H6
caganncaaaaagaacaaaaggnagaagaagcaanggccacncnnacagngcccacgacagnnccggcaggggcngaaganngngaacaacnaacaaaagccnccncaggacggggaacnaacgagggccnaancaaagagagaaggggccacagaaacgcggagcaacgaaacgagaagcgaaaaacccacgcagaaaccgaaggagaggaacncaccaaggcaccagacaaggaa

SEQ ID NO: 28086 - DNA, 290 bp, Gossypium hirsutum
  Clone ID: LIB3189-035-P1-K1-A8
gttgcctcatgacttttgatttacttttgttctttccttttccatttcatattctatagggctgtcctgaaactcgatctctgttactaaaacttcagttaaaactctttgatgatgacacatagtcgattggagatgttgtttacagcctccttcttcgtctgattcagttacaaactgttcatttatagatgtttttttgtcagcccctgtttaaagttgtcgtttgtatgcctggtgttagcatctgtatgcctgtccattttcatagccctgatgccagggtatgt

SEQ ID NO: 28087 - DNA, 272 bp, Gossypium hirsutum
  Clone ID: LIB3189-035-P1-K1-B1
gaaagaggttatacaggagcttatcctaagggggctccgtaagtgagtcacagagaaacaccctaccatgggacgctatgttcacaatgctggcatatttctctggaagatattaacatctctgtcaccatgagacaacatgtctccatagcacgcttgatccccacattggtggaaagaatctagacctctcatacccttatcacgatcaatcgcacatagtcatcttttacaccgattctgagcaagcacttccggctagctaccacagt

SEQ ID NO: 28088 - DNA, 422 bp, Gossypium hirsutum
  Clone ID: LIB3189-035-P1-K1-C1
ggagatcttataatggcagcacagttggtgacacctgaagctatggcatttatcgtgaagcatggaaccgggatagtttgtgtgagcatgaaagaggaggatctagagaggttgaatcttcctttaatggtgaaccaaagggaaaatgaagagaaactctgtactgcattcacggttacagtggatgcaaaacatggcactacaactggtgtgtcagcacatgatagagcaacgacgatattggccctagcttctaaagattccaaacccgaggatttcaaccgcccatgtcacattttcccactgaagtacagagaaagtggtgttctaaaaagagctggtcataccgaagcttcagttgatcttgcaatgctagccggactggaccctgttgcgattctctgtgagatcgtagatgatga

SEQ ID NO: 28089 - DNA, 320 bp, Gossypium hirsutum
  unsure (1)..(320): unsure at all n locations
  Clone ID: LIB3189-035-P1-K1-C11
cggtcgaccacgcgtccgggaaaaaccaataaaatggcgaaaccccatcttttatttctattttacttttcccttctcggacggatatctantttccgccgtcgattcctccatcatagacgacttacgtgtagccggttccagttttccgtcggttcatgcaaagaatctgattagggaggtgaatttgttttctaaaggggaagttaatgtctttgacgatcatcgggatttttttcgcgggggttccaaaccggcggagaagcggtacaagttcccaacctttggaagtgcccggtggagttttcgttgaggatttt

SEQ ID NO: 28090 - DNA, 328 bp, Gossypium hirsutum
  Clone ID: LIB3189-035-P1-K1-C2
atcgggggcgcaacgcccgcgacctatgctcaaactttgaataggtaggacggcgcggcttcttcgttgtgccattctacagagtgaacagctcggagtgggccttctttggtgagcagaactcgggtctctggattaaccgaaagtcatgttacaggggccaactggacgctatcctatgacccagatagggtgtctgtcgatgctgacagccagacggtggggatcgtagtggagattctctcaagagtgtgctagctctcacctgacgattcaactagcctctataattgctggtgctgaaccgcgcaaggtataccctgtcatg

SEQ ID NO: 28091 - DNA, 341 bp, Gossypium hirsutum
  Clone ID: LIB3189-035-P1-K1-C5
ctttgactggtgagggcttgctggaattctgcaatgctgtgcaggaaaaactaaaggattccatggttccggtggaagctttagtcccatttgacaaaggggaacttctgagtaccatacatcaggttggaatggtgggagaaaactgaatataccgaaaacgggacatttgtcaaggcatttgtccctcttcgttttgctaggctgcttaccccaatgaggcaactgtgtaaatcataactttcaactctcttgaatgtaacctttcaatagtttgtattaaattcgatgagttttcaagagcaagagggcgatttgggaggacagcagcagcacatttt

SEQ ID NO: 28092 - DNA, 442 bp, Gossypium hirsutum
  Clone ID: LIB3189-035-P1-K1-D2
gcatgttcaagaatgatacgggaacggatgtcggatgctccggcgggtttaatgatggtcttacaaggagtactaaattagccatagtgtttggtgtgggagtacccttctcgttcatcctcggccttgtaatttacctccgtggcaaggtcgaggatcatcaaaatctgaacttgactgcatcttcggtcatggttgtcaaaggtcttgatgggcaaatcctcgaatcatatccgataacgttgttaggtgaaagtcgacgattaacacggccgagtgataatatttgctctatttgtcttagtgaatatcacgctaaagagatattacgaactattccagactgcaaccattacttccatgccgcttgtattgatgagtggttgaaattaaatgttgtgtgtcctttatgttgtagttctccgaaacttatttcgaatat

SEQ ID NO: 28093 - DNA, 404 bp, Gossypium hirsutum
  Clone ID: LIB3189-035-P1-K1-D5
cagacgcgtgggtgggtttttttggaagtgaatcaaaagagaacatagttccctggacttgtggttgacttaactagagaagatggataggcacacagtgaagatttttgtcaaaggtggagttgctgcttaagatgggacgaggtaagagagccatcaagaggatcgagaaccaatctacacgggtcgttaccttctcgtagcgccgagctgggctttggaagaagactcacgagctctccgttgtctgcgatgctcatatcggccttatcatgttctcaagcaccggcaagatatgccagtattgcgcttaaccttatagaatggagcagatcattgaatggtaccagaaggtcactgagactcgcattctctgagcatgacaatttgggaaacatttgtac

SEQ ID NO: 28094 - DNA, 443 bp, Gossypium hirsutum
  Clone ID: LIB3189-035-P1-K1-D6
cccacgcgtccgctccatacgccgtatgtctgatgcatttcacgcaagggaggaaatcaaggcaatgaagctgcagagacagaatagggaagatgaacctgtagaggctgtgaagattccaaaagccacatggatggctgatggaactcattggcctgggacttggttaaatccagctaatgagcactcccggggtgaccatgctggtataatacaggtgatgctgaaaccacccagtgatgaaccattacacggaactgctgatgataggctcattgatctaactggatgtgatattcgtctccctttgctagtctatgtttctcgtgagaagcgcccatgctatgaccacaacaagaaggcaggtgccatgaatgcccttgttcgggcatctgcaattattttaatggcccattcattctgaaccttgactgcgatcactt

SEQ ID NO: 28095 - DNA, 187 bp, Gossypium hirsutum
  unsure (1)..(187): unsure at all n locations
  Clone ID: LIB3189-035-P1-K1-D7
atcccctntttctctgcagcctttagcataatctggagtattgtcgaaccaaaaaaaaggggggatatctacaaggaaactgagactgagatatcatgaattcatagaaacttctgagtattcatctcctatctctttgtgtttaattattaactttaggaatatttatatttaatttaatttgttt

SEQ ID NO: 28096 - DNA, 316 bp, Gossypium hirsutum
  Clone ID: LIB3189-035-P1-K1-E2
ctagctaaggcttttcgctacactgctaaagctatttcatgaagtatacctacttctccggcgcgtttggtcatatttcctagctatgcacatgggaaagaaatcatggcaggtgacataacacgcgcctggattataccctctaatgcatcataatctctcaacagacgggcgcaaaaaactcattctcatagccacatccctatcgagtggaattttgatggaggttaagactcggtgctctaagtgagtaaggaggcttatacacagttccacacgcctaaccccattgcagtggacatagatggtaacacca

SEQ ID NO: 28097 - DNA, 293 bp, Gossypium hirsutum
  Clone ID: LIB3189-035-P1-K1-E7
tgcggtgggtttggcggatgatatggaggaggatttggaggctgaagctcaataccgttagtggagtaccttttaatctaacgaccgacatttttactttgaatttatataacttttttttatcatgttatattttttttataaaattttattttcattactatttctacttgtttttcactattcttattttttttaacattaatttttctaaaattttattttctgcaacaatttttcaaatgtaataaatttctcttctttttttcaatcatattttttaatatatattt

SEQ ID NO: 28098 - DNA, 373 bp, Gossypium hirsutum
  Clone ID: LIB3189-035-P1-K1-E9
gcgccataccagaaaacgggaaaggattcacctcaatggattccaccacagctcaacgtcgggtgaactccattcatgcccaccttgtctcagtcgttgactccgccttttctcattcccacctccgctcttccccaaccgctgctgagttcctctctgaacagaattacagtgttgtgctgccagagaaattgctgacaggaaaatggaatgtttacagatctgctcgctctccggtgtagcttggatcgggatttcccaatcattctgatattggtacattgcacgacaattttttactcgcccgtgatttctttggggaataccattattttggtaccagtattcgagtcgattggaccggtggtgtgtt

SEQ ID NO: 28099 - DNA, 421 bp, Gossypium hirsutum
  Clone ID: LIB3189-035-P1-K1-F1
gtccggcaaaaccgctcagcagctcccaaggcaatagccatgagtttcatggccgtctctttctcttcactcctctctatccctccacctccccattccctcattccacttcgccttgcttcttgccatcgttttcccactttcactcccggaccaagaatacaaatccaatgcgccaccaaagacaacaaggaagcaactccacccgctgcagcatcgatggggagcttcgatcccaagaaaggagtggcgctttacaagcctaagtcatacgatgttctcgtaaccgatgccgctaagtcccttgcttatgctattcaagatggcaaaacccgtctcgagattgatttcccgcccttgccaagcaacatttcttcatataagggatcttcagatgagttcattgatgccaacattcaac

SEQ ID NO: 28100 - DNA, 124 bp, Gossypium hirsutum
  Clone ID: LIB3189-035-P1-K1-F6
gttcaatgaattggataggaccctcctttaaaatcagcagactctattttgttgacgaagctgggggcaggatatctaccttgattgcggcggcttagggttgccgattcttgcattgttgcgg

SEQ ID NO: 28101 - DNA, 107 bp, Gossypium hirsutum
  Clone ID: LIB3189-035-P1-K1-F7
gtcatcttaacgctagatcgaccacctatcatataacctgattttgactccgaagacactctggataactaatatttgccaagaaacgagaatcatgacttggatga

SEQ ID NO: 28102 - DNA, 150 bp, Gossypium hirsutum
  Clone ID: LIB3189-035-P1-K1-F9
agtttttcattctgctgatttctctaaaggaatttcgcatcagctaatatttcctagagtggcttcattttagctttccagatctccttaatcccatttatcaacattttttccataatctaattttagtccatcatgttaccaaatatt

SEQ ID NO: 28103 - DNA, 244 bp, Gossypium hirsutum
  Clone ID: LIB3189-035-P1-K1-G4
aacggatcgcctagatcctagatggtgacgcagtcacgaaagttactgtaactaaccccattttggcgacacaatgacggaaattgatccactactaccaagacacatgcctaggaaactttgtaaaggcactacataacttgatggacatattaatgctgctgtttgagctatgaactacgtaagagatggctgaacaacctagggcctatatgagatctacacattgatcatctgggctgag

SEQ ID NO: 28104 - DNA, 481 bp, Gossypium hirsutum
  Clone ID: LIB3189-035-P1-K1-H5
gtttggaagccttatgcataggtcaacctgcacacaggttcctcaaaaacttgaaacatctggaagttagagaatgttgtaagttgcaagtggtgggtgagctccttcatgacgtggaacaaaatcatgagcacccactttctaatgtacaatctttgaagctctatcaattaccagcattgagatggatatccaaatgttcaccccattctttcaccctccatattatcaaggctgtattcataaatggatgcgcaaaattgaaatcccttttggcaccttttcttatttaaagactattgcttttagaacaatcagagatacaacattgctacgaatttttaactctttttcctgatccagaaattgttttgtgaaaatatatttaatgcccctcttccttctctctctgtctgcccaaattgaaaacctctttcataaaaaagctgtgcaaatctggaaattttttggcaaaaccttt

SEQ ID NO: 28105 - DNA, 299 bp, Gossypium hirsutum
  Clone ID: LIB3189-036-P1-K1-A4
ggaaccattaaaaattactccaaattcttattttataaaaaaataaactttattcacttcaaagacaatccataattggttaataccatcatcaagttttaaagcttaggaacaaacttacttcaaaaataaactttaaacatttgttataactgaaacacatgaaaaagattactcatttgattcccatttttgatccaaagattacttttttttgtttttgggaatcataaaatagcaaaatttgagatcaatcacccttttttctgaaagagcattcttcaaggaggttagctttt

SEQ ID NO: 28106 - DNA, 114 bp, Gossypium hirsutum
  Clone ID: LIB3189-036-P1-K1-A9
gtggggagccgtcaaggtgtaccgcctccgaagtattctgtggctttaggttacccatactatcaccagatatataatggattaagaggaggcttacattaacctatcccgtat

SEQ ID NO: 28107 - DNA, 245 bp, Gossypium hirsutum
  Clone ID: LIB3189-036-P1-K1-B10
gaaaaacacaagtaattctacaactatttgtcgccagagttttttcaaagcaacaacaggtcggcaacagtgattgccggcggaaacatatttgcatcaagagtcgccactgtttaaatcagcacatgaaacccatgccattaatagcagccaccgacttctccgtccatatattttcaatcaaaaccctctacgcagttcattaaatcaaaacaaaggattaaatttttagctattaaatactt

SEQ ID NO: 28108 - DNA, 396 bp, Gossypium hirsutum
  Clone ID: LIB3189-036-P1-K1-B12
attaatgcaatgcaaaaccaggatattgcctagatatacataaaataaattctttctttctggatttgttattatattctaaaggtatgttcatcattggtgtttgttattttgtttggttagggttgaacggggatctaaaaaaggcaatgaaagatggaaagccagtaataatcgagggaatacatctggacccaagcatctatttaatgaatgacgagcttaaagctccaacctctgtagatggaccatcccagcagtccgtggcatcggatgataattcttcagttcaaaaggaaaataattttattactacatctcaaagtaacacagaaaatggtaaaaaccatcctgtgcgtttatctgaaggcgtgtcagcttgcaatgtgaacaaag

SEQ ID NO: 28109 - DNA, 419 bp, Gossypium hirsutum
  unsure (1)..(419): unsure at all n locations
  Clone ID: LIB3189-036-P1-K1-B2
ctttntttttggttatttttgggaaaatcttaagatttgcattttcgtaacattgaattttaactcttcactttttgttttctcgtacgaatttttattattttttcaatcaattttgatctccgttttctattgtttttcttggtcgttcaacttgacgacttaggggaaaaaagggaaaggaaaaaaaaatacaattttgtttaattagggtttgatatggctgcaaatattaacacggctaatttcaatacctccgcggcggtgaccgctgttaatcactcttccagttgccctaaccaatcacattctgtcacgaattctggtttttcgcaacggaatcaagttgtttgtggagaattggagccgatcgctgcgggttctttatcgtcttcgtcggattcttcatcattcaccac

SEQ ID NO: 28110 - DNA, 106 bp, Gossypium hirsutum
  Clone ID: LIB3189-036-P1-K1-C12
aaataattgaggaagctgttcaatacaaagatgagtttaacaacatcagggaggttatctttaataaaccttacataccaattatctcaaactataataatattta

SEQ ID NO: 28111 - DNA, 425 bp, Gossypium hirsutum
  Clone ID: LIB3189-036-P1-K1-C9
gtgattttgcagggtcaagttgatatagttcaatcttcaaagttccagaatacatggaaggtgaaccagttaatgttaatgagttccaagaattagctaggcaggcccttcccaaaatatactatgactattatagtggtggagctgaggatgagtacacactaaaacaaaatgtggaagcatttcaaggaattacgatccggccaagaatacttgttgatgtcagcagaatcgatttgtcaacaactgttctcggctaccaaatctcagtgcccattttgattgctccaagtgctaagcataagtgggcacaccctgaaagtgaggttggcacagccagaacaactgctgtttgtgatacaataatgaatttatcctacaggtctacctgtactattgaggaggtcgcttcaagcttgaatgct

SEQ ID NO: 28112 - DNA, 430 bp, Gossypium hirsutum
  Clone ID: LIB3189-036-P1-K1-D4
cggacgcgtggggttcaactcaattttacccttagaatttctcaagaaacaaatacccatttgaaggaagagggaaaaaaacccaaagaaaaaatttcccaaaatgcatgattttgcttcacaatcccttatggattgattcttgtggctggaggagttattgggtatttgaagaaaggtagcatggcatcacttggtgggggtgtaggcactggattgattctcattcttgctgcaaatttgagccttaaagcttttgagaagagaaagaactcatattttgctttggtacttgagactgttgcattgtggaatttaagaatcagtttggacattgtagatccagtgcggtgctattagctatttctcttgcaaaaactatattgctgctgtgctaacatgggtcatgggacaacgttactaccaaaca

SEQ ID NO: 28113 - DNA, 292 bp, Gossypium hirsutum
  Clone ID: LIB3189-036-P1-K1-E10
gcttagtgatgctgaacttgatgagttaaagagaagtcgctatggtgacgctagaggccgacagttaaatttggcagagagcccatcacagttattgcttgaagctgatttagcaaagcaaactactatcaaaaaagtagctttggacgttcaggagagtcagatacctgtaaaaccttctgatgagttggggctcacaaacaaaagttctgagccttagaatattgatgggaagaaaagtgtgcttgctgctagtgatggattaaataatacaatgtgctttgcacggttt

SEQ ID NO: 28114 - DNA, 192 bp, Gossypium hirsutum
  Clone ID: LIB3189-036-P1-K1-E5
aaaatgggaaatggggaccagtgatttttatttgtagataaagttaatttttccttgtcgctttaagcgggtttttacacaacccacaacttttgaattttaacatccattttttttttgtggcttttgttattttggctttcacttgctggtgaacttttcatgccaaaactttattttaccctttttcaa

SEQ ID NO: 28115 - DNA, 417 bp, Gossypium hirsutum
  Clone ID: LIB3189-036-P1-K1-G3
cttttggcgcacgcctatttaaccaatggcgagtggtggttgcctggttggttaagtcattcatatcattcggggtgtgtgtacgttgctttgggcttcaaaatttttctttctgggtctgtgtttcattgcttccttttcctttttttcttctcaaaaactatgaattatttgggtgttggtattagtcctgggaatgtccccgtataccatggcactaatccgatggtaattgaaagaagagtgagcattgcagagttgctcttaaggtgtttgatatgtgtcctcagtgtactcacagctatcctagtgggaaacgatagccaggtcaaagaaatcttttcgattcagaagaaagctcggtttacagacatgaaagctcttgtgtttttggtcgtagctaatggggtagctgct

SEQ ID NO: 28116 - DNA, 201 bp, Gossypium hirsutum
  Clone ID: LIB3189-036-P1-K1-G7
cgacccacgcgttcggaaaatttgaagaaataaattcatcaccgatctaagtgcctcaaattctggtatatcgccggcgaaattttgattctggtaatctaaaaatgtctttcacattcagcggcgatgaaactgctccttattttggcttcctcggtgccgctgctgcctctcgttttttactgtatgggagctgtttat

SEQ ID NO: 28117 - DNA, 370 bp, Gossypium hirsutum
  Clone ID: LIB3189-036-P1-K1-G8
tgaatattagagatgtcttgacagcatttagtccttctttggactatttggctattagttctggagatggtcgtattaagatttgggacactttgaagggtcaaattcaaactgaatttgcagacattatatcaagtgaggcaacaaacatatatgctaaggcagaaagagggcatttttcaattgattacaaatgtatgaagtggttgtcttttgacaaaaagaagaaaatgaaacttggaagttctttgctcattattgtgaacaggaagtggtgatgtcttagcactcgatgtgtttgctggtcagctgaagtggaaagtcattgattgccattctgggggtgtcagtgccattgcatttgctacaa

SEQ ID NO: 28118 - DNA, 359 bp, Gossypium hirsutum
  unsure (1)..(359): unsure at all n locations
  Clone ID: LIB3189-036-P1-K1-G9
gacccacgcgnncgaccctancncccncnccncaacaacagncgccaggccaacacccnnccggggcgcnancncggggcgcnccgncnccaancaggaanncgaggagacggnccccagccaggcanccccggccncganccgaacccanccggaaannccncaaaccagncgcccnagcncgccnacgggacccgagaancagcgccagancgcaccgcnccaccncccncnnncagagcacnccggccanacagccancnaacggcgggcaggcanacaccacagccaaggacggcnnnccaggcnnagngccaacaccgacagacnacgggccccgngggccccagaggaagaag

SEQ ID NO: 28119 - DNA, 438 bp, Gossypium hirsutum
  unsure (1)..(438): unsure at all n locations
  Clone ID: LIB3189-036-P1-K1-H10
aaagcatcaacaaccatagccatggcttcctcaccaaaactcttgtctatgtgctatcctctgacggantgcccctcctccatgcaaatccatgctggagagtacttcagcaaagtcccaagagttaacaccaatgcgaaagagacaacagccagagagcatgagcacgagaccttcgtgccccagaccacccaaaagccataagagcatgagccaaggttcatccctgaaacccaaaatggttatggcctgtacggccacgagttatgcttaagctcaagctcaggcttaagccggtccagcatgaccacctaagaaacctatgaaccctatgtcacccctgatagattccaccctgatgaaccctataacagcatccccgtatgcttcaacattaaagacacttactgctacaacaagaatgcctacaagttcact

SEQ ID NO: 28120 - DNA, 145 bp, Gossypium hirsutum
  Clone ID: LIB3189-036-P1-K1-H5
ggcagttttctgaatgtggtcctaccattcattcaatgcaccatagattttactatcaaagttgtcagtgttccttttgcaggagatccatattccattctgaactctcacagagactatacatgtgtggtggctagagaaaccc

SEQ ID NO: 28121 - DNA, 264 bp, Gossypium hirsutum
  Clone ID: LIB3189-036-P1-K1-H7
atccggaggtggcctagtcttatagagagtacaagtttaagtagactgaaaattgatgaaacaactagatgaagtaagaagaacaagataggaagttaaggtagaaaaagagtcattgtcaaaccctttacaagcatcagcagctttagcccttttgttcttagtgggggcaatggttccattgttgctgcattatttataaaggagtttaaggtgagattaggtgtagtggtcggtgcagtgagtttggttttggcggtgttt

SEQ ID NO: 28122 - DNA, 222 bp, Gossypium hirsutum
  Clone ID: LIB3189-037-P1-K1-A6
tccacgcgtaggtccactcgttcgggaagcgaatgtttatctctttccccctatgaagctgacctaccaacacctgctaagggaatcctacccacaactactactagtctactacccagcactagtagcaagtactaggccgtcatggttgaagcaggcgttgtcgtatgcataggaactggtctcaaggaatgcatcctcagcagggttctttctgtggac

SEQ ID NO: 28123 - DNA, 127 bp, Gossypium hirsutum
  Clone ID: LIB3189-037-P1-K1-A8
gtcacgcgtgcgcttaaatgcaaatgcaaatggatagggcgtgccatggcaggctgggcgctaaatgcgactggtgggaaggctccaaggtagcatctcgctaccatagctgcccgtaaatctgccc

SEQ ID NO: 28124 - DNA, 346 bp, Gossypium hirsutum
  Clone ID: LIB3189-037-P1-K1-B12
tggatacaaagtggctgatttctgtatcgaagccgagtggcggccttgttattgctcctccgctaaagaggccatcactagcagcggcaagatcttagtctccgaacaaggggaatccaagattgtttccctgaattcaagcaagttgcaactggaggatatatcggataccctttattcacgtccttcgttagtggccgaggtctcgaaactcaccgttaacgagctgaagaagttcaagttagacggtaccgccgagacgaagaaagggtcgacgagatcgacatttaccatcaactccatcattgtagaaatgcttcaaggcaagatggtcggtagacaactg

SEQ ID NO: 28125 - DNA, 220 bp, Gossypium hirsutum
  unsure (1)..(220): unsure at all n locations
  Clone ID: LIB3189-037-P1-K1-C11
agataaatcacaaagntcccagaagggactacaaattacattacccatctcttccatttctattagtgaaaacaatacaaatttatacttatctcctatttccatgtattttacaaaaacttattttataccatcacattgtcattttggccaccatcttgataacattacattttcaccctaaatgtttaagccttaccaattttcatcttaattctca

SEQ ID NO: 28126 - DNA, 242 bp, Gossypium hirsutum
  unsure (1)..(242): unsure at all n locations
  Clone ID: LIB3189-037-P1-K1-C4
cggaannnnagggtcgacgccacgacgtacgcgtactcgtagaattcatgttctccaaccattcttttacattcatccatagaaccaatatattagacgagtgggatgcttttttacccatccaaatttctaatccaatcatcatcaccctcatagtttatatttccatgttattactttgttcacacccaaaaatagcttaacgaaccattattagacttttgcgtattcatcaaatgaca

SEQ ID NO: 28127 - DNA, 144 bp, Gossypium hirsutum
  Clone ID: LIB3189-037-P1-K1-F7
acgcatagccaaattatcatcaatgcaatcagcactaatgcacaatgacgagaatgaataaaagaaacggcttttaattatggtggtttctgccaacttggttttttttttacacacaaaatcccatcttaattatgaagcctg

SEQ ID NO: 28128 - DNA, 138 bp, Gossypium hirsutum
  Clone ID: LIB3189-037-P1-K1-G3
gcgcccacgcgtacgctgtagatgtttgaaaaggtacttctaccacttccatagatacaatagcaacagacagcgggcagtttctgttgattcggaaaataataacttacccgttgcattttctcacattattttttt

SEQ ID NO: 28129 - DNA, 459 bp, Gossypium hirsutum
  Clone ID: LIB3189-037-P1-K1-G7
ctaaatcgcgagctgtcgcgcttttttttgtttttttttcattaaaaaagttataatctcttggagatatatatcccaagaaagagcgtaacagtattccttacaaagcaacaatctaaggcatgaattcagcggtgcagtaattaaaagggttagggagattttatctacctaatatatttgtgagacccattttgtaggtcgtaccatattcctttttgtgaacaatgctttacataaacaacctaaggggttgatcgtgggattttgtaagaattgatcttgtcctttccagtcgtgatttaggcttgcctagttgattatgttagctaatttttttatcttattatgggatgtcaattcttgttgcctataattagtaatatggacttttgccaatgtgttttttatggagagaggcgcttttaatttcctttttgcgttttaaaatattttttt

SEQ ID NO: 28130 - DNA, 246 bp, Gossypium hirsutum
  Clone ID: LIB3189-037-P1-K1-H3
acgcataaatggatagcacaaaagttaagaatggatgtagaaaggatccgccaacaaaggctcctaaaatttgagcaaagctcccagcaggtgcaaaagaattgctcacctgctactcctcatgtaccgatatctgaaaccactatgactccaattgcacagaggatctgatctaaaacatgctccatgaccgctcctcgcatgtaatggactctaacgccatgtcccagaacaagaggtacatca

SEQ ID NO: 28131 - DNA, 192 bp, Gossypium hirsutum
  Clone ID: LIB3189-037-P1-K1-H7
ctttaccctccatctctctctccaaaaagattttattattgggaaagcaacattgcgagaatcagttagcttattgttgtttcacactttcaagctctcatggctgccattattgaatctgtgtggccgcatctgatcacgcatttcagtggactgcaactagcatatttatgaagtgtccattttcacata

SEQ ID NO: 28132 - DNA, 345 bp, Gossypium hirsutum
  unsure (1)..(345): unsure at all n locations
  Clone ID: LIB3189-039-P1-K1-A2
cgcgtacgcggacgcccacgcgtccgttgcattttacttctattgattttattttctcttgtttgaattggatgcctgagtgactatatccctcgcgggtgcacctactaccgaccttgatcttttgagaagggtacgagagagagcatgcctgtcgggacccgtaagatggtgaacaatgcctgaccttggcgtggacacaggaaactctgagagtgggattcttctagactggtggagctgcngatcgaccgactcggggataggggcgaaagactgatcgggccccttaggggctggtttctccgctaagtttctttatgactattggagcctttttctaga

SEQ ID NO: 28133 - DNA, 113 bp, Gossypium hirsutum
  Clone ID: LIB3189-040-P1-K1-F12
agagcgggggcatggaatacgctgattacttgcaacattatattctatagcccgagcaaggaaactttcgcacgtcagaagcttgcagatatcacactaaatgacttcttggt

SEQ ID NO: 28134 - DNA, 456 bp, Gossypium hirsutum
  Clone ID: LIB3189-040-P1-K1-G11
tatcttaaccttttcttcttctttttttccctaaatgtcttactcctcattatggttgcagacatatgaagagtacctagaagcccatggcagaaccagcaaacaactatgccgccctgtgatgataccatctccgacagtacaagagtcaacaagtggaaagcatggagatgattcaaactcaagtttggtaaccgaccggcgccattctcgtaagaggacacataactcgtcctagattgtttccagctccagtgcttgagagatcgtggtttttttttctcctgtccattatcatctggtggagctcaaatttacctcaaggtggttattaagtgtaagtaaaaattgttaattgaatacgatacttgagaattgagatacaatttagacacataattttgtcatgctgtacacatttatgtactctattctatgaactgattgtagtatttt

SEQ ID NO: 28135 - DNA, 340 bp, Gossypium hirsutum
  Clone ID: LIB3189-041-P1-K1-A10
gttgaggcaaggtctctggaggatatacataaagctgttcgacaacttccggaatctaatccaggtgagccgccgcattcttcaggcttaaggaatgaatcatcaacagatacgaatactgagactaatgtggtgcttccagttcttgaaacaaggtcagcagaagatattgatttggcttttaagcaacttcatgaaggagtcaatgttccgagtatgattgagaaactgccagatcttggagataacaaatcaaaattacctgttgttgaggcaagatctctggaggatttaaaccaaatctattcaacaacttgcgaaacctaatccagcatattct

SEQ ID NO: 28136 - DNA, 264 bp, Gossypium hirsutum
  Clone ID: LIB3189-041-P1-K1-A12
cggacgcgtgggaaaatattcttacgacgatctctttgatcatcactttcatgtctttcaagcggctttcacaaaacgctctcttaagcaacgcttatcgctaacccccaaaacgccattgctgcttcttcttcttctttttcatctgcaaatcatcaatgacgaaagcaaagtcccaagccgtggctggttctatagacccaaacaaaaacgggcttcattaccaccatcaagacggtgacgacgtcgcttttgacccttcat

SEQ ID NO: 28137 - DNA, 264 bp, Gossypium hirsutum
  Clone ID: LIB3189-041-P1-K1-A4
ggaacgaggggcagaaaatgatgttgaaagtgaaaagacccagattagcaatggtagtgttacactctcggaggcagagaaaaagcatgaattttatgtttcaagccctgaaaagccaaatgaagttatgccagaagcttttgtgctccaggaaaaaaataatattccaaagttttacgcttcagcaaattcaaaagacaatggaatttctggtggatgtcaattttcagcgacatctataatatttgcaccttctttcatttt

SEQ ID NO: 28138 - DNA, 426 bp, Gossypium hirsutum
  Clone ID: LIB3189-041-P1-K1-A9
atccaatatgttttcttctctacttcaaaaattgttggtatgcttcacccctatccccgggcagtatctgcttctgtgacggtctcatcaactagtttgtaaataagataccttgctccagaggcctccattctgcaattgtcggactaaagatagcccagatggtacagagaaaggatcgacaaatatccatactactgttcaaaacgatccagtttacctctccaagtcagaaagtcatcctgtggaacgagagcaagcaggatttgaaggattctctgggcatcttcttcggagaaggtatctttaatcaattatgttttccatgatctagttgtactatcaatcaggtctactaccttcgataaattctggatactcactgttttatcttaaatccattatttatgttatactgtcctgctt

SEQ ID NO: 28139 - DNA, 287 bp, Gossypium hirsutum
  Clone ID: LIB3189-041-P1-K1-B10
acgcgtccaacaaaatgtaaagcaaatatctctcaaacttttctttcacaaccctttaaattacaaactgggcgtcaattctgggaagatggggggcttccacaaaacaaatcccactctctatgcatcatacttctcacaagctctcatggtgagagtctccctgacacctatttaaatcttaaactgatgaagtttgtacacacgcaagcctataattaattgactattagatgatggaatcattttcctttatgccttcaacttgcacaattcatacttcttgt

SEQ ID NO: 28140 - DNA, 208 bp, Gossypium hirsutum
  Clone ID: LIB3189-041-P1-K1-B3
tccgcgccccggtccggtgttggaccgggagaggccggtcctccattcggttcgggccttgacccacgcggggtgtggcggggggccaaggcccggccttttatacccccgtggggacctcgtcgccttgatcgggggatttaacacgcgccccctttgggtggttttggacctgggtgcttcgggggttgggcttggggcttcccat

SEQ ID NO: 28141 - DNA, 199 bp, Gossypium hirsutum
  Clone ID: LIB3189-041-P1-K1-B4
cttccggccaaccattggggatttcttccatttctgaaaccctttgccaaaaccctttttcttataaacttgggctcagccctgttaagctcttttggtttcctttctcaaatcccagtctctattcagcattcttcttacaagctctcatggggagaggcttccttacacctatttgaaagggaaacttatgtggttt

SEQ ID NO: 28142 - DNA, 179 bp, Gossypium hirsutum
  unsure (1)..(179): unsure at all n locations
  Clone ID: LIB3189-041-P1-K1-B8
gcgccacgcgnntccgattcttaactcgtgtttaattgtgtatttccaatatagtaacnctggcgaaggcgcaatcnncaacaaaatagcacagggngnnaatataatgcgctgtggtgcgttcacacaannaaagaagacagcaagaagcagggctgagccccatctggnntagcttt

SEQ ID NO: 28143 - DNA, 309 bp, Gossypium hirsutum
  Clone ID: LIB3189-041-P1-K1-C3
ccaacccttccgcggttttccacaaatggcgacccaatccctctctcgctatctcctctccaaaggcagatccctaacctccttgctcttcccttcatgccgccctttctctttcttttcccctgccgccgccgctttccccgtcaaaaccctaataacctcatcgccattccctttcctctcttttcttcggcggcttcgtgccccactttgctactcgctacttctgcgcgacttacttttccccactatcaaatcggtcttcactcgagcaggcaaggccttccttaatgacccgaattctaacta

SEQ ID NO: 28144 - DNA, 233 bp, Gossypium hirsutum
  unsure (1)..(233): unsure at all n locations
  Clone ID: LIB3189-041-P1-K1-D11
gataatgtctcacagtcgcctctccggtctctatcgtttactggttagagaagactcaccattgtcattcttctttattgttgcttagtttntttccagaaaaaaaggaaataaaattgctttttttgattgtcaaagtgtattaacaaattgtgatttggggattaatgggtttgtcttgggtttaaanttgattcttttggttttgatggattgtgagatatatttagagg

SEQ ID NO: 28145 - DNA, 283 bp, Gossypium hirsutum
  Clone ID: LIB3189-041-P1-K1-D2
aatttttacatttttttctcactctttctcttttctttttctttcatttccggcatctccgaggtgtgaagctacacccactgttaagagagacaaaaattaaaggtgacaagaggtttcgagttttattcgctgttttattagaaataaacgacgacaatgaagaacgctgaaagactcgccaatttggctttagcagggttgacaatggcaccactagttgtgaaggtagaccccaacttgaatgttgttttgactgcatgcctaacagtatatgtgggtt

SEQ ID NO: 28146 - DNA, 469 bp, Gossypium hirsutum
  unsure (1)..(469): unsure at all n locations
  Clone ID: LIB3189-041-P1-K1-D4
gcgcccacacgcttcgcatatagcgttcttacaatcctggttccaatattttcctagttttgggttacgggagggtccacttacaagacctgacaattttcttcagttaactctgcaaacttaatatctaattactctcctccagctttttcacatgggtgcagaaactattgaaggttgtgctataatggagaagtccaatggcaaagtgtccctgcttagtgtgaagcaaggagagccgaccctggtttgtcccgctgaagacacggaaaagggtctttactttctctccaaccttgaccaaaacattgcagtgattgttcgcaccatatattgctttaagtcagacgagaaagggaatggaaatgctgctcaagtgatcaaggatgctttaaaggaaggttctttcccattactatccnctngctgggcggctaacaatcagctcggagggaaactgattgtgact

SEQ ID NO: 28147 - DNA, 231 bp, Gossypium hirsutum
  Clone ID: LIB3189-041-P1-K1-D5
gtcggaaaaaaaacacaaaaaattggttttttttttgaaatttacacaaccggaatggttcttgttaaggaacaggattaccaattttcattttggttttctttattcaaacccttaatttcaactaaaagattcacttcaatggcttctgttgctacttcttaaactcttggcattttttaaaccttctctaaactgaaaaatcaaagcaaaattgcatttattccctac

SEQ ID NO: 28148 - DNA, 291 bp, Gossypium hirsutum
  Clone ID: LIB3189-041-P1-K1-E2
accaactctcaaaccatcaactcatcgccttacactaacaaccacttcattaaagatccgcatcattataagcgtcagcgatcaattgaactccattgcttcacaaaatcttgactacactacttctcttacaagattaccatctgctttcatacctgtccaccatcatcttgatcatttattgttcaaaatggctcctactggtgtaagaacacatgagtgtatccaaagaaactcaaagtgatttgagatattctttaagctattgatgcctcaacccatagttaaaat

SEQ ID NO: 28149 - DNA, 467 bp, Gossypium hirsutum
  Clone ID: LIB3189-041-P1-K1-E4
aaaaaaaaaaaaaacctgtatcaaaaagttgaaatcttcacaagaaaagctcttttttttccactgcaaaaggaatttttttttgggtggttgaagtttgggtccgggttgaactaaaattcggatcaagaaagcatgtcaatagaatcaaggtctgggtcagctgatcatggtatcaaaggagtagcaactcatggtggaggctatattaagtacaatgtttatggtagcctttttgaagtttccagaaaatatgttcctcctattcgccccgtcggtcgtggcgctaatggtattgtctgtgccgccgtgaattcagagacaccaaatgacgttgctatcaacaaaatcagcaatgcattcgacaacaggatcgatgccaagaggacattgcgagaaatcaagcttcttcgtcacatggatcatgagaatgtgatcgccattaaagacatcatccggcctccata

SEQ ID NO: 28150 - DNA, 291 bp, Gossypium hirsutum
  unsure (1)..(291): unsure at all n locations
  Clone ID: LIB3189-041-P1-K1-E5
tctaaatcgcaaccgtcccccctttttttttttttgtatttaagacaggnattnnannaaacgcacgccatatttatacagtttttaaaaactaaaaataaattttatccatcattcaagactaaattcaaaatcttggatcaattccaccacaaagaaattctcctacttttttttttacttaattataaattaaaaccccatatacttcatattcaaaattataaatccatctttaccaacttttttctataatatatttatttaaatctataatttcttgtacccctt

SEQ ID NO: 28151 - DNA, 303 bp, Gossypium hirsutum
  Clone ID: LIB3189-041-P1-K1-F2
cacgcggccgattatttcacataaagtcactagaagaaaccatctcccgttttcttactctctattatctttccaaccgataaatcactaaagaaatgttctctttaaacaaaaaaacataaaacgaaatactattcactgtctctcaagacatctcaacttacttacagtcgcttactattcttccttcttcatattctcacacaatctctttacccatttaccaactcacatagtgcttcttaaatgccatttccatctatagccatcaacaactccccgttcaccaatcccaacactccc

SEQ ID NO: 28152 - DNA, 173 bp, Gossypium hirsutum
  unsure (1)..(173): unsure at all n locations
  Clone ID: LIB3189-041-P1-K1-F3
ttactgatggatcacctctccctccaccgacttcttcaccggcgcaatcattactcnanaaactcaactactaccgccaagaacacgttttcccccttttgcacaatctttctcctcatgaacgcctccacctcttctattatatccaccattataatctttccagaatatat

SEQ ID NO: 28153 - DNA, 449 bp, Gossypium hirsutum
  unsure (1)..(449): unsure at all n locations
  Clone ID: LIB3189-042-P1-K1-H6
tgccttgaaactacagctatggtctccagttcataaatttgcaggtgaacaggggccatggaaaaatgccagaggcgtttacgaataatatgctgaagaatcttctcctcaatgacaatcaattggaaggatcactgcctcgatcattggccaactgtacttncttggaagttctaaacttggggaacaacaacttaactgatacatttccccattggttagcttcacttccaagtctccaagttcttatcctgagatccaatagattccatggttccatctccaattctatagcttcatcgaacttctccgcactgcaaatcatcgatttctctcaaaacgaactcagtggccctttgcctgcaaattttttccgtaatttgagagcaatgaaagatgcacccaaagagaaactttcagggtcatatttattcaagactgatgctcga

SEQ ID NO: 28154 - DNA, 138 bp, Gossypium hirsutum
  Clone ID: LIB3189-043-P1-K1-A1
caaacgtgtgtgggccacagtagaacgcgcgcatatgggtatccatttgcgcccagatcaagacttgaagctgtgtaagatgagacgcggaaggccgccatgggcaaaatgagtgcggggtgtactatacccaactaa

SEQ ID NO: 28155 - DNA, 107 bp, Gossypium hirsutum
  Clone ID: LIB3189-043-P1-K1-B12
ctttttcatgtatgttttacagaggaaagttttgataccccattcagagggtattgttaacatttaccatactaagagaattgttttagtttcttgacacttaagtt

SEQ ID NO: 28156 - DNA, 462 bp, Gossypium hirsutum
  Clone ID: LIB3189-043-P1-K1-B5
ccacaggttccttttttaagttttcagaggaaaggtaactgaagtgatttttacaggctttgaaagctttgaattattattgggttaatgtaatctttagtccttgaacttgtcaactattccactttgatacttgaacttgaaaaatataaaagtttgacggaatccaaatttagggataagaacggatatagttgttatgttcaggtatcaaagttgaccccaaaaaagacataagataccaaagtaaatcaaattgccaaattcaaggactaaacatcatattaaccctattattattccataacgatttcatctttgattattggttaaatgagttttaaaaataattcaagactggaaggaccggagctgatgggatttgtgagatatgatacaggaagatgcaaatgatataatttatataaccaaatttcacatatatattatctctttatatat

SEQ ID NO: 28157 - DNA, 405 bp, Gossypium hirsutum
  Clone ID: LIB3189-043-P1-K1-B6
ccacgcgtgcggggggaatcctattatcccaccaactacctgcttgtattaaatatccatcctgtaactgagccgagaaagttgttgagtttttacatttcagagttctcaaacaatggtgcaatcaaaccaaaagccccatcttgtattactatccgcccctgctcatctccaacctgttattgagctcgggaaacgccttgtcacttgccaggatgttaaggcaacaattatagttgcctcttttgtccaatcggctccagcggaatcgcgtatggtccaagctgcgttggctacaaaactcttcgatgtcatccacctcccaccagctgacatatgcaacctcgttgaacctggtgataagggaatcacatgactttctgcggacatgcatgtcgtcaagcc

SEQ ID NO: 28158 - DNA, 465 bp, Gossypium hirsutum
  Clone ID: LIB3189-043-P1-K1-C12
attagaagatgcagtatcaaatggagtgttaagtgatatgattgaggaatccatgcatgttttatgggaattccttcgagccgacaaagacaacacgaatgcgacctcaaagactccccagcaagcgcaggttgctccacatgaccctattgacttggaacttttgatggatgttagaactgaacttcaaaaaaaggagaaaaggctaaaggaaatccagagaaatacaaactgcataataaagaggctccaaaggcaacatcagagaaatctattagatcatacattgttcatcgctcaagttgagctgaaattggtttcgagagttttaaacatgttgaaaataagcacagatcagttaatttggtgtcatgagaaattacaaaggattaattttggtagtaggaatacagagatagagccctcatttacactgttcccttgttgacattagtggtgaccgac

SEQ ID NO: 28159 - DNA, 432 bp, Gossypium hirsutum
  Clone ID: LIB3189-043-P1-K1-C2
ggcgccctgagaatgatcacatctaccactctgagctttttacactgacaaagaagatggctagagcagaatctcagaagctttcctttaccgtaccaatatttgaaccacatcctcctcagtactacattcgtgctgtttctgattcttggttgtatgctgaggctttctacactatatcattccaaaatctaagactgccagaggcttgtaccactcttacagagcttattgatttgaagcctctgcctgtaacttcactcggcaacagcacttatgaatcattgtatagcttttcacattttaatccgatacaaacgcagatctttcatgtcctgtatcacacagataacaatgttctattaggagctcctacgggtagcgggaaaactatatcggctgaacttgctatgctgcacctcttcaataccc

SEQ ID NO: 28160 - DNA, 375 bp, Gossypium hirsutum
  Clone ID: LIB3189-043-P1-K1-D11
caaagctggtttggtcacaattcaaggcgcgtatttgtctataacttcgttcccagatcaagcggagaagctgcttcagatgagtcttgcaaggtagccattgcaaaatgagtccgggttatactttacccaactaacatccgaggcagtccaaaatgattataccaccaagatttgaccaccaagatgatttcttacaaaattgctttagtcatcaagctgtcaaatgattttatcggctctctaggacaccagctcgtgaatagagtatggtgtgtctaatatcatttagcaatttctttctaatcgaaggtttgtttttaccactattcttttattaaaatttccttattatctcttttattttttgctttt

SEQ ID NO: 28161 - DNA, 404 bp, Gossypium hirsutum
  Clone ID: LIB3189-043-P1-K1-D3
cgtagtttggatttatggaaggatgttcctggagtttgtgagcaagtctccaccacttctcaatccgactcatcttcaatagataatggtagcgttggatgctttacttcagtttccaaaggtatgaatgatgttggttttagaactccccaatcaaaaaaagttgtccctacgagcaggtcccctccttctgatgcctcggctgcgtccactgccaagaaagagacatccctgaaaagtaataatagcaacagtaacactcgtaggctggaccgctcaaaatcttctgattggaagattgaaactgttcaaccgaagtctttgttttctgaggcctctggtaattacaatatcaaaaggagtgtatcctttggcaaggcccatgacgaaaaagtgcaaaaatt

SEQ ID NO: 28162 - DNA, 326 bp, Gossypium hirsutum
  unsure (1)..(326): unsure at all n locations
  Clone ID: LIB3189-043-P1-K1-E2
tgtcaatggttttaacggcgtctacatcaattgaccaacgtctttttatttgagggatgctgatgcttagttggttggatcaatttacttgccccattcttcattacgttgtacggtatttagacacaaataaagcttctttcaccaacgtatggagctgccccattanntttgttcgaaatacttacgtctttaattggtgagggaaaaataaaccaatgaaaaataacctacancacttgagaacgaacatgatatgctatcaactcacanagtatatattgtgttccctttcacaataatgaatctatattttacaaacaaaa

SEQ ID NO: 28163 - DNA, 297 bp, Gossypium hirsutum
  unsure (1)..(297): unsure at all n locations
  Clone ID: LIB3189-043-P1-K1-F2
aaagaaaaaaaaacacaaaataccctctccccaacttgtttatccgacgaatcagattccttcatcgcccgctgtaccaccaccgtactcgatggccgacggtgcgcgaagataggcttttcaaccccggtgtcagacgcgtggaaggccggtggttggtgccccgagcggtggtggcgcgcgtgaggaggctggtggcttaagagcggcggctgaaatgatgggggctagggttgctgaaatgttttgggttggtggggttagggttgatgtaatgggtcatttggttttggnttt

SEQ ID NO: 28164 - DNA, 477 bp, Gossypium hirsutum
  unsure (1)..(477): unsure at all n locations
  Clone ID: LIB3189-043-P1-K1-F4
aaaaaaaaaaaaaaataaaaaaaaaaaaaaaaaaattaaattaaaagaaaaaaaaaaaaaaaaaaaaaaagggaaaaaaaaaaaaagggggggggggacaaaacaatgggaagaaaaaaaaaaaaaaaaaaaaaaaaaanggggggggcccttttaaagaacccaagtttacttccccgtgattgcaaagtaatagtttttttttggggccccctaaattaaattccctggccggggtttaaaaacgtggggattggaaaaaccctggggttaccaaatttaatcgctttgaaaaaaatccccttttccccagttggggaaaaaacaaaaaggccccaaccgatcgcctttccaaaaatttgcccaccctaaatggcaaatggacccccccttttaccggccatttaagcccggggggtggttggttacccccaatggaacctttacttttgccagggccttaacccccgttttttt

SEQ ID NO: 28165 - DNA, 391 bp, Gossypium hirsutum
  unsure (1)..(391): unsure at all n locations
  Clone ID: LIB3189-043-P1-K1-G11
atataaaattttgatggcttattaataaaggagtgagggggcatnaaaagtaaaaacatatgggctattaccaatgcaccccaccatcttaactacacaactaaccccaaaaccatgttaaattcccacaaattcaacaggacgaacccacttatcacaatcacgcctgacacaaagttaaaaaaccccgtttgtcgcaatattccccaatttaccacccaaaaagtggaaaaatccctctctcgacttcaaaaatattttccatttaccaccgcgctttcccaccaaatttcaaaaaaaaattcccctggcattttaccccaaccctccatttagttgctggccccatccaccaactgcaaatccccatcagccccattaacttgaccct

SEQ ID NO: 28166 - DNA, 456 bp, Gossypium hirsutum
  Clone ID: LIB3189-043-P1-K1-G6
catcgacatgcctactttgataagatgcaggtgctggctgttatatttgctcttttgcagatgatgtcttttttgttatggccatcttattcattgtctttgttgaaataagaactgtgtcctagttccttggacattgttgatttcaaatggcacctagaatgtattcaattaaaaaaaaatgctaacagattcattatacctattataggtttgggactatactggtttaagttacgcaaaatacaatgctagggatgcagacaaagaagtactcgggtgcgttgtggaaaatacggtgctacttagttctctgctgtcacgtgtgcaggaaacagatttgccgaagaaaatatacccatcaagattgaattcaatgtctatactaccaaattcttcatccttcggagttgacagcacattatcgatgacagcattgtttactcaatggcgttt

SEQ ID NO: 28167 - DNA, 400 bp, Gossypium hirsutum
  unsure (1)..(400): unsure at all n locations
  Clone ID: LIB3189-043-P1-K1-H1
agagcaatgctttctttgcaaaaggagattgttacctgggaaagatatttatatgtacaaaggggataagggtttttgcagtgtggagtgtaggtgcaagcaaattttcatggatgaagaagagagtttaaagaaagatagttgttctttggatgccattgttaaaccttcttcaacttctgtagcttcaacttcgtcttcttcctcagccgctcgtcaccaccggaaacctgagagaaaccgtgccggtggctttgcttattgactcaaaaaaaggaaaacggttttttatttttattttatataagttattattattgaattttggtttaaggtttttntaaggagtatatgatcctagctggttctttttaatgacnaatccgatcgtttttgcttc

SEQ ID NO: 28168 - DNA, 398 bp, Gossypium hirsutum
  Clone ID: LIB3189-044-P1-K1-A10
aaaaataaaaaataaattaaaaataaaattttatttttataaaaaaaaaaaaaaaaaacagagaacaaagcctttatgctagcggggggggggattcaggggccgccttttttttggatccaacatttctctcacgctaatgctaggtattaccttttttttatggccacctaattcaaatgaaatgacccgtacttttacacaatgaagcattggcaaaactctgggttttcccaacttataatgatggtatgacattcctatttcaccaggtttcgtaacagagagttgctgctctcttatacaccttattactgatggcatatcttgaatgtcctactgccatggccctatgcggactcttatagcacttgagattgctagctttcgcatatgag

SEQ ID NO: 28169 - DNA, 396 bp, Gossypium hirsutum
  Clone ID: LIB3189-044-P1-K1-A12
acccgagccacccgccacgcgtccggagggggttagattagatctacttgctatttcactgcacggtgtgtttcgaggtcattgaactaactgatcacaatggctcccacttcctaccctggacctgctcaggttggttcatacttcgttggacaatactatcaggtacttcaacagcagcctgatctagttcatcagttgtattcagatgacagtaccatgatttgggtcgatggagattcctctgactctgcttcggcgatgctgcaaattcatgccatggtaatgtcactaaattttactgcaatcgagatcaagacaattaattctcttgattcttggaatggaggtgttctggtgatggtttctggttccgttaaaatcaaggatttcagt

SEQ ID NO: 28170 - DNA, 132 bp, Gossypium hirsutum
  Clone ID: LIB3189-044-P1-K1-A7
aaaacgggggtaaaaataaattgtggtttgtgggacttacggttttcatgttgtgatcaacaagcttgttagtttgattatcaacactttctacagcaacaaggagatctttcttcgtgagcttatagtaac

SEQ ID NO: 28171 - DNA, 217 bp, Gossypium hirsutum
  Clone ID: LIB3189-044-P1-K1-B4
gcttactctggaggtgagattacaagcatttttattcttctggcctgcgtctcaccatcgttgtgcattgaatggttacgtaggcactcatctctggcttttggacacttgttacggctactggagagaggtccagcctgaatatcatcctgtaatactgctcatgcataatgaattgctccagaacactgccatggattcagcttagagtccacac

SEQ ID NO: 28172 - DNA, 260 bp, Gossypium hirsutum
  Clone ID: LIB3189-044-P1-K1-B6
agattaaataaaaaaagaaagaaaaaatattttttttaaaaagagtatatttttggtggagattctcagaggaattcatccatggcaaccaaagtgtatattgtctactattccatgcacggacacgtagaaaaacttgccgaggacatatggcaaggggctgcatctgctgaaggtgaacaagccaaatcatggccagcctctgagactacataggatgaagctcctatcacgcatagcacacctcccgaatgtgtttg

SEQ ID NO: 28173 - DNA, 452 bp, Gossypium hirsutum
  Clone ID: LIB3189-044-P1-K1-B7
gatttcctcctgaaagatctttcctccgtggtcctcctctgccacaacaacgtcctcatcctgtgttgttggaggaagaacttgaaatgcagcatgcagaaattcggaggcttttgactgataacagcaggctggtagaagatcgaatagctatacgacaagagcttggtgctgcgaaagaggaaattcatcgtttaaatcttttcattggtgacgttcgtgctgagcaagagctgtactcaaggggacttattgacaaaggcttgaagctggaagcagatctgcgtgcaactgagccaattaaaaaagaggttgtgcaacttcgtgaagaagttcagaaactgaataataataagcaggaactaactggtcaagttcaggctctcaaacaagatgttggcaggctgcaagctgataatcaacagatacctgttctgagagcagaaattgat

SEQ ID NO: 28174 - DNA, 263 bp, Gossypium hirsutum
  Clone ID: LIB3189-044-P1-K1-C10
catggatcgtcctgggaaagcgtatttggttcttccctaacatccttgctgaggaagcaacgctgcgagaattgttccggtttttgcccaaaaaagatgaagaagaacgtccaaaatggacagcaagactgttttatgcaattgtggctgtcttggctatattgctgctgatgcatcatgcttctgatgaggctggtagagcaagatatcataaacggatgttgaacataatcgacgacgtccttaaagggtctactagccta

SEQ ID NO: 28175 - DNA, 158 bp, Gossypium hirsutum
  Clone ID: LIB3189-044-P1-K1-C2
ccttccgttctggctttgttaaaggccaaatttgcaaagttacaaaaagaactccttacaccttattaaaagggaggaggtggtgcaggtgaaggttttgatgttaccaaaagtggagatgcaagagttggtctagtaggttttccttcgtgggggaa

SEQ ID NO: 28176 - DNA, 400 bp, Gossypium hirsutum
  Clone ID: LIB3189-044-P1-K1-C6
cactgtcgtcggggtcgtcaactacggcggatgagattgaagccgggaacctaatgggagaagaagataggattgcactgcagatgatagaagaattactcaattggaattgtcccgtgacttcttcaacttctctaattggagtttaagtgtgttatagctacttaaaacatatatgatattgtgaacagcgcagtggtgaagtcccattgctagatataaaaaggaatctctactcaaaagtccttctagcattttaccctttcaaggtcataaatcattgttctaccatccccgcatgtaaaactggtgcagtatgttgctaatagtgaaattttacaatatgaaagctaatgtagatcaccacctacataactgtttaaccttgtaatttaatcca

SEQ ID NO: 28177 - DNA, 259 bp, Gossypium hirsutum
  Clone ID: LIB3189-044-P1-K1-D4
tcacccacgcgtccactcaacaaacaccactctacctatttttaaccgttttttttttttatccccaacccatcattcacttgggttatttttaaacagagggacgagcccaatcatcattaccgtatatatattcacaccaatagctttcattggtctcataaattataaccattctcccttactaaatttcctctatgacaatgcaaagagtttaaaccccaactctcaaaatgattctaaattttctctcatctat

SEQ ID NO: 28178 - DNA, 303 bp, Gossypium hirsutum
  unsure (1)..(303): unsure at all n locations
  Clone ID: LIB3189-044-P1-K1-E1
tagatagcggtctactaggtttacatttccatgcctttttcgccaccggtcaagccattacacggttgtgcgacgacgccccgaccttcgatcagaacagangtggaccgatttgacaggttctggtgaagactttttttggaatagagcttcgtttaaggggtcgtaacgcaggtgactagattttattttttagcaatttatggttttttcagggatacctggtgtttgcctttttttattcctgtcactttctattttttttttgtttttctaattcatatgttatatattctaaatatt

SEQ ID NO: 28179 - DNA, 449 bp, Gossypium hirsutum
  Clone ID: LIB3189-044-P1-K1-E12
cccacgcgtccgattcagatgaaaatagcaataagaatgaagatatccctcctaatgaggtaccatcaaacccttctcatgaaactcctaatcgaagaaaggaaacacttggggttgtatacggcaaaggaaaaaaatcaagttcaagtagaaaatcatcaagaatttcattagctaatcatattgagaaattgtgtgagagtatggctagtccaaggaagtcagtgaatgaaattatttttcctcactctgaatattctatttcaaatgcaatggacgctttgcgtgatttggaagatgaaattccaaaaaaagatgaactgtactgttttgccatcaaaatgttccaaataccggtaaaatgagaagtgtttttgaacttagatccagatgttagagtttggtggcttcgacgtgagtatgctgaacaaaatccaattgcatcattt

SEQ ID NO: 28180 - DNA, 230 bp, Gossypium hirsutum
  Clone ID: LIB3189-044-P1-K1-F1
tcggctttttttggttgggtggtttaacccaatcggaggttgggttttggcgggaggttttaaacggccatggccacctttggttccaacttcggaggagaatccggtcttcccggaggtcggtttaagggccgccctttttggggttgtggccggccctggggtgggggacccgaaggggccaggctttggattggaagcccaggagggattggggaggggaggagggt

SEQ ID NO: 28181 - DNA, 371 bp, Gossypium hirsutum
  Clone ID: LIB3189-044-P1-K1-F10
cttcttcttatctttctttataatctccacaacattgactttagccggcgccgccgacaacaccatgagggtctccctttataagtagccggagccttaataattccattcttaccaaattctcaacaacgttattcacttcttttgttgcaagagcccaccaccttaaacaccccaaaatcaaggtcgataatactaccttttcttttttcagggctttcctatttcctaacagttattgaggctacactatctcccttaaatttggaacttccactcaaaaccttccttttaatatttgacactgggagcagtcttttctgttttcctttgaacctttcgatacactttgttcccaattcgcttttccc

SEQ ID NO: 28182 - DNA, 425 bp, Gossypium hirsutum
  Clone ID: LIB3189-044-P1-K1-F11
cttgggcagaaaaattttgacatgaccatagtgttcaaggacttcaagaaagatgtactaaggattgattccatcccttcaacctcacttgatggcatcaaggaatggcttgatacaacagacatcaagtattacgagagcaggctgaatctgaactggcggcagattctgaagacaatcactgacgatccacagagcttcatagagaatgggggctgggaatttttgaacttggaagctagtgattcagattctgagcagtcagaggaatcagatcagggttacgagccatctgatgtggagcctgaatctgagtcggaggatgatgactccgatagtgagtctctggttgagtctgaggatgaagaggaggaagaatctgatgatgactccgaggaagagaaaggaaagacatgggaggagct

SEQ ID NO: 28183 - DNA, 399 bp, Gossypium hirsutum
  Clone ID: LIB3189-044-P1-K1-F5
aaaaaaaaaaaaaaaataaaaaataaaatttaaatttaaaaaaaaaaaaaaaaaaaaaaaaaaaaagaaaaaaataaaaaaaaaaaaaagggaaaaaaaaaaaataaaataaaaaaaaacaaaaaaaaaaaaaaaaaaaaaaaaaggggggggccgttttaagggatcaaagtttacttacggttgtttgcaacgtaatagtttttttttgggggcacctaattaaatttaatgggcgggggttttaaaacttggggattggaaaaaccctgggttacccaaattaattggctttgaagaaaatcccctttttgcaagttgggttaataaaaaaaaggcccgaacctttcgcctttccaaaaatttgccaacccttattgggaattggaaccccccttt

SEQ ID NO: 28184 - DNA, 516 bp, Gossypium hirsutum
  unsure (1)..(516): unsure at all n locations
  Clone ID: LIB3189-044-P1-K1-G10
gcgcaacgcgtcccgattttcttttaagtggcaccctgggacactttgatgaatcatcaaacctttcattctanncctttcttccatttgccagtttcaaaccaagatnntatacttacgaacgnttcaatcncanatctaactngggtcccttttgtttgatggaaaattcctcttcacaaaagcaaacaaacatttgataccaccctttcattcccacttccaacaaacaaacatgattgaccaaagaatccaagaattccttgtacaatcaacttcacaaagttggatgttaaaagctacttgcaaaaccgagcctgttcaatcacctcaccctgacaatccagctaaaaagttggaaaggcagccttcaaagaatctgatggctgaaagaaagagacgaaaaaggctaaacgatcgccttttgatgttaagatccattgtgcctaagataagcaagatggaccgtacatccatacttggagataccatagattataccaacgaactcttgga

SEQ ID NO: 28185 - DNA, 295 bp, Gossypium hirsutum
  Clone ID: LIB3189-044-P1-K1-G3
tcccttaccaccggttctattattattccattacttttcttccggtggttttatttcttccttcatggtcaacccaaggtggggcggtggggggacccaagaccaattgtggccaaccgggggtcgggggaaccgggttagccgcttgggttttaattttttccaaaaaccccgcggtttaaaattttaaaaaggccctcacaaggttcaaaatttccaatccaatttttaggtttggcctcaatataaggcctactgccaaaagttactctttggttacctccccctccccttt

SEQ ID NO: 28186 - DNA, 420 bp, Gossypium hirsutum
  Clone ID: LIB3189-044-P1-K1-G8
agttttaccagggttaggggaaattgtatacatgttacacaaaagacttcttgcacggaaatcaatcattgagaaaagaaaggaagaacaagagcgtcaattattggaaatggaacgtgaggaggagtcaaagaggcagaatttgctgaagaaaactgaagaagcataatagtagaggattgcttgttttttttgatcaatatcgatcttctaataatatccaaagtaattatttactatagtatgctgtctcataattttttaatattaatctgacaataattatattttttttatatacttatttcacttctctttttttttattattaatggtgtttttaacctttttttaaaattttgtaaataaccttaataaataaaccaaaaaaattttacaccccttatatttttttttttg

SEQ ID NO: 28187 - DNA, 427 bp, Gossypium hirsutum
  unsure (1)..(427): unsure at all n locations
  Clone ID: LIB3189-044-P1-K1-H11
gaaaactcttgaggttggatggaagaagagagaattggttatctgattgaaaaatgcccagatacacgcgtcatccgtcaaatccacgcgcatgttctcactcgcctccttcctatctccgccgtatccttcctcctctcgaaaatagttgggttttgtgctctttctcgccatggagatatcaatcatgctcgcaaagttttcgctcaaacccccaaccctaacatcttcacttggaattcccttattcggggttattatcttgtcggaagcccatcgaaagtgcccctttttttatataaaaaattggtcagaaaagggtatccttctgctaatacgtttaccctggctttcgtgcttaaggcnttgctccaatattttggctttcgatgagggaaaacaggttcatgcccgtgtgtttcgatct

SEQ ID NO: 28188 - DNA, 286 bp, Gossypium hirsutum
  unsure (1)..(286): unsure at all n locations
  Clone ID: LIB3189-044-P1-K1-H12
cggacgcgtgggttttttttttttttnntatgattttagaatttcctacccgancaaaaaatacggatattcgacaccattataggcggaggctggcccatgatctcactcctcttcttcctatctcctccgtatactttcttctttcgaaaatacatgggctttgtgctctttcttcgccatttcaatattaatcattctcgcaaatccttttctaaatcccaccaccttcacatctatacttataattcccttaatcattgttattaatctttatgaagaccat

SEQ ID NO: 28189 - DNA, 455 bp, Gossypium hirsutum
  Clone ID: LIB3189-044-P1-K1-H2
attctatcctttactaaccggattcaatttcttcatttatcaacggttgtttggggcaaaattcataatccccattgttgcccaatctctgaaacatcatggaaatagcatttgccgcttcagtatacccgacaaatgtgaagagagtaatctacgagataagacctcacagctcaaaactcgttaccaacaagagacggtcttttcacaacaagtttctatgctcagtagctgttgctcctgacaggaatcgggttctaattcttgtgtcgcttacctttatttctctactcatcctgttttagaacatgttttctccttattagcatttgcggtagtgatgggatttgcttttctggatattaggtatccgaggttgagttggaaaacaagaaacacaatcttctcctggctgttcaagacacacaacggggacttgctgcaactgctgatca

SEQ ID NO: 28190 - DNA, 105 bp, Gossypium hirsutum
  Clone ID: LIB3189-044-P1-K1-H3
cccacgcgtccggaacctcttactttgtgcctcattcttttatccgtatctttcccgcatcagtcacgtcggcttttacaagagatgaaacggaaaacttaagaa

SEQ ID NO: 28191 - DNA, 158 bp, Gossypium hirsutum
  Clone ID: LIB3189-045-P1-K1-A7
atggagagaagggggggggaaaaaggcgcaattggcatttgaaaattatttgaaatgattaggatattgctcattgagaaagaagaagattttgaataagcattcgaatgaggacagccatgagcaactggtcttttttcaaacatgaaagaaaacat

SEQ ID NO: 28192 - DNA, 434 bp, Gossypium hirsutum
  unsure (1)..(434): unsure at all n locations
  Clone ID: LIB3189-045-P1-K1-B1
cgtcaaactctgcaaaagacagagagagagagacccagctttaaggcatgacagtttcattctttatttgccatattacccctctcacagggttttgtttccttctcctatcctcctcctccgccgctgatctcaacataaccttcatcctctccttcttccaaaacctaacctacttcttcttcctcctcacctcctcatcagtcgcctctgacctcacgcgtcgccaagaccccatcactttactcgccgtccccaactcttacctctccattccttctgcttgcgacctgacgcgccggcttccaccgtactgactcggcgacatgcttcgctaccacgtactgctacattatttattctggaccgacctgctccagatcccgccgtgcggcgtgatngtatccaccctcctccaaacaactagccgggcc

SEQ ID NO: 28193 - DNA, 232 bp, Gossypium hirsutum
  Clone ID: LIB3189-045-P1-K1-C1
accctcatgcagatgcatgcgtcttaccaaagggatacatgtgcgtaatgatgcaagtttgtaaatttgttcgacttaaatagacaacttaggtaccgtttagttcctgccaaatttcctcattattccagactacaaggcgaaaatgctgataatatataaagcttaatgagcgttttggtagtatacgtagattacaaaaagattaaccctaaaaatctacctgaataac

SEQ ID NO: 28194 - DNA, 230 bp, Gossypium hirsutum
  Clone ID: LIB3189-045-P1-K1-C2
ctcacgcctacataaaaactccatgtctaaactttttcttttctgcacttgcaacttcctcattgcgcgaagtttacatccctagaggaggcccattctctctcttcttattgccatgtctgtctgtcacagacatgtagctataccaactgaatatctcatcttctggagccattggtcagttcctaaagcactcattccaaaatctgccacttcgatctacttcttct

SEQ ID NO: 28195 - DNA, 464 bp, Gossypium hirsutum
  Clone ID: LIB3189-045-P1-K1-C8
gcgagggatttggcttcggttgcggcggtgatgcggagagtgagaaagacaagtgaagacaacactggaagcggccagaaacatgtagatgaaaccaaaaaaatctgaggggagcgtgatgttctattttccaatatagttttcaatctgaatttcgatggctgctcgtgtttcttcttcttctccctcttcgctttcccttaatcaacttggccttccctcaatgcctccttcctggaccttgtgatgtttggcttttcatagctctgaaggttcaattttcttcttctgtcatccttccctcctttttctgattttctaattccaatttggtttccttttttatttcattttgtgggtgtgttaaagcttctttagtcgctagctatgtttgcttcatttttttagctaatcgcaaaatccaataatcttagtttaaatcaaggtttgaactgttttaatat

SEQ ID NO: 28196 - DNA, 193 bp, Gossypium hirsutum
  Clone ID: LIB3189-045-P1-K1-D1
tcgcggacgcctggggttttccggttctttttggtgggattttggcttcaagaactcaagtcttaaaatggagcgcccttttttattaaggccagggttttgtctttgcttgcgggaaaaccaaccaaaattgcccttaaggacccaattgtggcgaaaattaggggggggcaggcaaaaagggtgggaaatt

SEQ ID NO: 28197 - DNA, 366 bp, Gossypium hirsutum
  Clone ID: LIB3189-045-P1-K1-E1
cggacgcgtgggcggccccgtgggggggaaatcatatcctcggttgtcagctgctaaatccttgacaattctgatgctcatgagaggtgcaacctttaagggagctggtcaaaggccaaccaaaaaaattttttttcatatgcttggtccaggggggggctaaggatatacacttgccttaaaaccgaaaaaccggtgataagactgacactgggagcgataaaagattggggacaataatttgatcaataatgaggttgaacaaccagcatcgttgcatgaagtctatcaggtctaaacgaagaaccggatgagttctttgatgtacctgaagaatctgaattttcagattacgatcacttggag

SEQ ID NO: 28198 - DNA, 283 bp, Gossypium hirsutum
  Clone ID: LIB3189-045-P1-K1-E7
gccaagtcaagaggtgtgaaaataactgggagagtaggaaatttgattaagtttggcaaaattaggcctgaagcttctgaattgaggtccaaatttggtgtagcaaacagttctgatggatatggaattggtccactcaaacacacacgaattccctcgggcaaaggaagcatagatggaaataggcttgctgctgctccttcaggtgaggtctccaccctaagagggggtaaggtggtgtcaggaaagcagttggaagacagagctaatatgtatggtgaaa

SEQ ID NO: 28199 - DNA, 228 bp, Gossypium hirsutum
  unsure (1)..(228): unsure at all n locations
  Clone ID: LIB3189-045-P1-K1-E8
cggacgcgtgggtccggacgctttggcaacaaagtttttgaacgtgtatggcccagcctttgtggctccatttcgagtgatggcgggccttattgaaaagganattgaattccatactgttcctgntgatttgcttaaaggagagcacaaagaccctgtatttcttaagcttcattcttttggaacattttctattactcaatatggagattattttttatatgaatt

SEQ ID NO: 28200 - DNA, 149 bp, Gossypium hirsutum
  Clone ID: LIB3189-046-P1-K1-A1
tgaaaaaaaaatgggttgtgtttcttcaaaactggttaagaaagagatgaaacgagaaatggttctcaacaatggcggcgacttcgcccatcacgtggtttctctcaagtcaagcacttacggggtcctgaaacttgacaacgatgaac

SEQ ID NO: 28201 - DNA, 536 bp, Gossypium hirsutum
  unsure (1)..(536): unsure at all n locations
  Clone ID: LIB3189-046-P1-K1-B3
agcgcacgacgctcacgcccacccagtacgtagacgcgtgcgaaaatacgcttgaccttttgctgtagctcacattnntttggttttaacacgtaagcggttcttcattgaagaaagcgcctggcacaatgagttcacacaaatggtcctcaactcgatgccattgaccgcttctaagactactttgctattgcaagtaaccaattataagttgtttgctgttctctgaaaggattacccattggcacgttacacttgaagcctggccctttgcacatgaaaccaattaaatggatgaaaaggggcactggtcaaggcattctctctgcattgtgaagacaaattgggttcttgctaagttgcattctgcacttgacaaagacaagggacacttaaccacanaaccaatatggtnagttaataaagatatgggatattgtgagaaaattaagtaacattgggtgataatgagaacaagaacattgatgagctggagatacaataaagtgttttcagtatctttctgcgttctattt

SEQ ID NO: 28202 - DNA, 266 bp, Gossypium hirsutum
  unsure (1)..(266): unsure at all n locations
  Clone ID: LIB3189-046-P1-K1-B9
atattaaacacaaaaagcatacttggagtccgcgcgattttaaaacagcccccagcactaaatatacaaacatcatattcattttcataacctccanatatccactcttccaaatcacaaactcaacatccaaatatcctccaactctcctctcaatcccattcccaaaaaaaaaacacaaacctnttctcaccttcttaaatatccaacactttctttccaattccaaccacttacaaaccttttttaattcacacatcacttta

SEQ ID NO: 28203 - DNA, 281 bp, Gossypium hirsutum
  unsure (1)..(281): unsure at all n locations
  Clone ID: LIB3189-046-P1-K1-D4
acgcatggctgaactccaatccgaacccaccaccacccatatcctttaatcccacccggtttaacccaagacgagttccatgagttaaccgcggagtggaactcantaccacacctacactttaggtcaaggcaaatgctcttctttattagctcaacgtatcaactcaccaagcgacctcgtttggtcgatcgtccgccgtttctatcaaccacaaacgtataagcacttcataaaatgctgtgccgtcaaagacatttttcaaatggtcgtgggttgca

SEQ ID NO: 28204 - DNA, 351 bp, Gossypium hirsutum
  unsure (1)..(351): unsure at all n locations
  Clone ID: LIB3189-046-P1-K1-D9
gttcgttactctctcttcttctcatgtacttaattctttttcccttttataatctcaaaattccatgagttcctttgccccaacatctgggaataccgttcaaatcactaaaccttttctctttctctccatgaatttatatatatatgcatataacaaatgattcattgatttggggttttgtttctctctaaatcaggacaaaagggtttttcgatctataccaaaagaccacagggattgatctatggaattcctttttcagcagtgtattttctttttcctntttcagttttattcgatttttttacttattttctttctctctccactgcttcgaagtcagctttt

SEQ ID NO: 28205 - DNA, 466 bp, Gossypium hirsutum
  Clone ID: LIB3189-046-P1-K1-E5
taataataacaaaataaattcgattatttatacttctcacaaactagttaaaaaaatttccattgaattcacaaactactcgaatcaaacattgaaatattcaaattggattcgctccttactttaagcttagctccacaatgaaacttgagaagaaattcaagggaactgctgtattttaatcagtcctgatatcggtaggcattggagtaatcttcaagtagtagctaacaataaaataatcagcaacgtttgagtttgagttgttatgaattaggtgatgcacgcttgtcgattccattactataatattattcatacaaggtccactttaaatttcggatttgcaagaaaaagggtaagttccactcgccaagtacggtcaacgtgtcaaatatctgctagtcgtcaacctgtttgataaaagatctgaaagaatcagtatggaagggcaaaggcccagtgt

SEQ ID NO: 28206 - DNA, 439 bp, Gossypium hirsutum
  Clone ID: LIB3189-046-P1-K1-E6
gtttgaggtcgggggaattccactggttcggaatccatataatcgacggaaaaaactgtaaacaaggggaaggggtcccaagcctcgaatgttcggagcgcattcccacaccgctcctttatgcactcgcactcaccagatcgccgctctcatcctcgtaaccgccactttcttcttcactcgtctcttcgaccaatccttccctccgtctccctgctacctcgatcgccacctcaatcttcacgtcgccaaaaccaatgacggccggccacctattgtggcccgaccgagggtacggctcccacctttttctcaagatctatgtctacgacgagaacgagatcgacggcttaaaagaccttttgtacggtagagccggctccatttcctccaatgcctgtctcaaaggccagtggggttctcaggttaaaatccacag

SEQ ID NO: 28207 - DNA, 400 bp, Gossypium hirsutum
  unsure (1)..(400): unsure at all n locations
  Clone ID: LIB3189-046-P1-K1-E8
aaaggaccacccacgcattcgaataattcatatacccaaacctacnttttccccttttttttttttattccactcataaaacccaatcantcatgagcctgctaactatacaagaataggaggcgttcgcggtttatatattattttannnnaaaaaatattatcatttttaactaaaatcctatccatatttttccttaattctcaaaccctgaaactattcctttctttcaatcccttacttcattataaacaacccttcattgtctccatataccattattcccataaaattacactgccaccctccttgtctctccccaaacccaaaaattcctcttttctttcttctacttaacttatcaccaactcttttcctttaataaatcaaaattttatc

SEQ ID NO: 28208 - DNA, 224 bp, Gossypium hirsutum
  Clone ID: LIB3189-046-P1-K1-F10
gggaaagaagagagaaagagaggcgacgaaaagaccgaattgacctcggctttcttttgaaattaccctttcttcttcttcttcctcgtcggcgtcgtcgacggcgttgttcctcagcgtcttagggatgaacttcgaactatatgtatcgctcgccggaggatacttttcatttcttaaacatgcacgcggaggccagtgttaccaaagagcctaacgccaga

SEQ ID NO: 28209 - DNA, 422 bp, Gossypium hirsutum
  unsure (1)..(422): unsure at all n locations
  Clone ID: LIB3189-046-P1-K1-F3
ttttactattattattctaataactaaactacacgctgctatgagtacgggntacaaggacaggcgggggggcgcattatttgcaacccaacacaacctgggccctactggtgttggcaatactcgtataaaccttttggatttcatttttttccaaaatctctacctttcacatcttaaaaaatcccttctcaaggttcttatattccattccaatattaattattcctctttattattgatctactgtcaacatatacttcttcatttcccttctctccccttttatttaaatttagcaccttaaacaattctacaacttgtcaaatctttgaaaacaaccaaaacatttcacccctttatttgattctctaacacgagcttaaacaaaacgctcgcgttagttcttcatgtaccaccaa

SEQ ID NO: 28210 - DNA, 456 bp, Gossypium hirsutum
  Clone ID: LIB3189-046-P1-K1-G9
ttctctcaaaatatctgctttttcttagttatcctttttgtcccttgcacattagatactgaccagtcatggtcgtcgttgatgtacgaggacggcgctacagcctgagggaataccatggacgaccgacgaccgatcactctaacaacactttagtgcaggagggtgaacaacgctgatcgaatgggctgatgttccacatgaacgagctgatatatgacatgatacgacgcgatgtgggcgcgactgccatatcagccgtgatccttggagcgtgacaagcgatctatgcagtagagacaacatggtcgttacaaagggagcaatgaagcgatacttgtgcaatgaagcatatatgacgctggggcggtaggggacataccctgctgatcaggtgttaaggatcttgaaagaaagcttgcctttgtgatctatgacagcaagactggaaaccgg

SEQ ID NO: 28211 - DNA, 196 bp, Gossypium hirsutum
  Clone ID: LIB3189-046-P1-K1-H1
accacgcgtatcggtttttatttccactcttacacaaataccgagaacgactaggcatccatgcgctactatatttacaccttactctccggccagtggtgactataccgatgcaactctagtactctaccgaccacagttgcacccaattacaacatttaatgattaaccctgttctaagaacattaatctcacg

SEQ ID NO: 28212 - DNA, 443 bp, Gossypium hirsutum
  Clone ID: LIB3189-046-P1-K1-H10
gcaccgcgtttttacagtcgaaacgatttgtttaggtttggaccggccggcacttgacgtactctgggaaaatacccttcttttttttggttttgcttttcttaattgctggtaaaaggggaagatatataaaaatttcgagggaaaggaggtgggcaaccatttcccttggcaaaactagaatcgtctgattttagggggattacttatgtttacctggattggtattaagctcaagtgcattgaatactgtggttttacttataaaatatatctattggttattgttttggatattaattattagagacggctttaattcccaatagttttttaccttatgattttattgaatttactaattttttgtgttgtattcattgtctaataacttgatgtaatggtgagatttttaatttttttattttaaatctttttttttt

SEQ ID NO: 28213 - DNA, 425 bp, Gossypium hirsutum
  unsure (1)..(425): unsure at all n locations
  Clone ID: LIB3189-046-P1-K1-H12
gtctccttcggctttcaatgcaatacagaaactattcagacttcatagctattttgctaatcccaaaatgtattgggttgatcttctattgcttggactctctttcatttaattgtacccctaagattggaaattgagaataaataggttttttacatagagagagagagagagagagagagagagagagagagagagagagagatggggcgtggaaaattggaatttggagttagagtttggaaatttatggtggtatcagttaaaacaagttatagattgntttggaatcatccaatatttgttggtttggttggttttattatatatttggatagatcttttcctttcatgttttcaattttggtgactgcatctcctgttttggtttgcacttgtgttttgcttggtcttcttttgagttt

SEQ ID NO: 28214 - DNA, 395 bp, Gossypium hirsutum
  Clone ID: LIB3189-046-P1-K1-H8
actatactacagaagctatcaggacggcatacatatccaactagaggggagcaattaacattacctagcaaaacttttactaaactgtggttagtggaccctattctcaacatttaataactaatccttgtttaaatacattactttaacgactgacgtagaccatccttaaggaattatctcagcgtatggcatggttataactcattcattgaactggcattggcaatactgacattttaacggatgcttatttttggatccgtaaaaacattttcctatttcaaagttaattacatttctatacttgcaattgttcttggtttgtcacttttattttatctttttttaactcctttgtttttctttggacttttttgtcgattagctttttt

SEQ ID NO: 28215 - DNA, 208 bp, Gossypium hirsutum
  unsure (1)..(208): unsure at all n locations
  Clone ID: LIB3189-047-P1-K1-A5
aatacaactgagagggatttaacaagagggggggggactantaaaattataataatattttatattaattatttaaaaacattattctaatttatnttactatcacccataaccttctaaccctacatacttcaccaatatcctataaaaaaccattcaattcaccctcttcattcgtcttctaaagtccactcaattcttcaaccat

SEQ ID NO: 28216 - DNA, 184 bp, Gossypium hirsutum
  Clone ID: LIB3189-047-P1-K1-C11
ctcgcactaccggtccttaattcccttctcgacgccacgcttccgtcttaataaacaccttctttcttcttcttcttatttttttattgctttctaaaacttttcttaatgtgaaattttagagtgcgattgcggtccacatcactcactccctcttccatttcctaaacactttcttatacct

SEQ ID NO: 28217 - DNA, 463 bp, Gossypium hirsutum
  Clone ID: LIB3189-047-P1-K1-C12
ctggaacagtgttgcataggccatcagggccagatcctacatcagagttcgagcattcctccattgcagcaacacttaagaagattttgaatctcaaagaatttctaacaaagcgtgatgcgtgggctggttcctttgatattgttgtcaatcgaagcaccccaagaacagactgtccagaaaaactggcagagccagtgaaaatgagagacagtgatgcaaaagaaacagcaaaactaagcgattttcaagaagagctagtgcaagcagcagcagcattgaaaggagatccattcaatcttgtcgaaaacatgacagtttcatctggtctcaagtacgttgaagatgccttcaaaaaattctatgatgacggccagaaagctaaggaaatcaatgaagttgaagatactgtttcagctgatgcatcaactaggaggacaacagcttccaaaactttcatgca

SEQ ID NO: 28218 - DNA, 315 bp, Gossypium hirsutum
  Clone ID: LIB3189-047-P1-K1-C5
tcactaccggtcctaattccctttccaccacgcgtccccccatgtttactaccactttacattaaattcaaattattttttactaccatacacaattaatatactctttgcatctattcttacggcgcgcggcattaatctatcaactctctccccatattacaaaactttttatttcatccttacttctctcatcatagaatccaacctattactcacattccaattaacaaaactctccaatgaagttattattcttttaacaccctttttcatttaaactctaccttttaatcacttccctcttcccttctt

SEQ ID NO: 28219 - DNA, 469 bp, Gossypium hirsutum
  Clone ID: LIB3189-047-P1-K1-D4
cttatctctccaatttccctggaagataattaaacttaagagcaatccccatggctatctcctttttcggcttcctctctctgctttggaggcctttctcctccccctcatcagacggtccagaaaacttcatcatccacgtgtccaaatcacacaagccgccccttttctcctctcaccatcactggtactcttctatcctcgcttccctccctccttcccctcaccccatcaagctcctctacacctacgaacgtgtaatcaatggcttctccgctcgccttacggccgctcaggcagataagctcaggggacttcccggaatcctttcagtgattccggaccaggttcgtcagatccacactactcgaacccctcactttttaggcctttccgatggtgttggtctttggcaaaactcctattatggcgacggtgttataatcggagttttagataccggaatatg

SEQ ID NO: 28220 - DNA, 379 bp, Gossypium hirsutum
  Clone ID: LIB3189-047-P1-K1-D5
atagtggatggtcttctcgtaccagggctgttgccaagtatctccagaatttattcgaggatgaagctggacatggacgtaaggcactttctatggacagtctattggctcgtaaaacacgtaaagaagcatcgaggatgtttttcgaaacactggttcttaagacaaaagattacatccatgtagaacaggggaaacccttcgatgatatctgtataaagcctcgattgaagctcttaaaatcagatttctgatccctttgcataggaaaaaatagcagatacagtggaaattgccttgttggtgttgctttcatgctcagcctgcggtgctgattattttgcttcaatcaaaatgtcttcatattatttttactata

SEQ ID NO: 28221 - DNA, 422 bp, Gossypium hirsutum
  Clone ID: LIB3189-047-P1-K1-E12
ggaacacaacttgcagcattcaacccatttctctcttcatctaaaccaccccttcctccatgtgggaggtatctttgagaacgcctatgtgaggttcacgcggtttatcctcaaaggacaacgctttcctcaggggccaatttaacaacagccggtttatgaatttttatgctagccgtgctcccagaaagcaaagaggtctcgttgtttcaccaagttgtgtccttccactaacggaggagaatgttgagaaggttttggatgaggtacgtcctggcttgatggccgatggagggaatgtgggtttgcatgaaatagatgggtttgccgtggtcttgaagttgcatggagcatgtggttcatgttccaactcatccatgacccctaagatggggattgatacttgggttcgaggtaaaatt

SEQ ID NO: 28222 - DNA, 361 bp, Gossypium hirsutum
  Clone ID: LIB3189-047-P1-K1-E6
gcaaccaaaagcttcccactttaacagggcagcaataaaacttggttggctttataaacaaaggacttaaaagcaaataactcaaaacaccattttcaagcaaaatggaaaactgcaactttgatcattagtctttcatgctatcgtcaccatcttcctcttcgctcaactcgagatcagcaagcagctcttccaacggaactgaaggcacatcatcgccatctgacacagatgccatttctgatggttggtaatctttgttgcggtacagcgataagtttaaccgtaattcagggttctcttctaaatctttcaagaactcttcatacttcgtggtcatcttttctttgtaacctctacc

SEQ ID NO: 28223 - DNA, 218 bp, Gossypium hirsutum
  unsure (1)..(218): unsure at all n locations
  Clone ID: LIB3189-047-P1-K1-E9
aggataagccaaaatgctaaattacacaaaacagtgtcttttantcatagaggggtagtacaaatcatacttaattaacacaccgatctacctaaattctcaccttccacgcatttaactatgccatcagctgtttccaaagagaatttattacctgcccagcgattatataatacattcttttcattcgatcaacatctacccataatacatttctt

SEQ ID NO: 28224 - DNA, 228 bp, Gossypium hirsutum
  Clone ID: LIB3189-047-P1-K1-F11
tttcctcccactttcaaactattctcttcgccctttttatagagtctgacattgctactaatagcagcccaaccactcgtgctggtgaggtgcttaaagcctttattataccctacatcttcaccttcgtccacgacaatatatccaaaaacattcattaaccctattacgtctacaaactcgcttatcaccaaacttcatctgaatcctggggtacctttcgatccg

SEQ ID NO: 28225 - DNA, 433 bp, Gossypium hirsutum
  Clone ID: LIB3189-047-P1-K1-F3
tcccacgcgtccgcttttattttgtgtcttctcatggggtaaatatgctttcaaattacaccctggcatgagtcaaaattacatagatatgtggatgatgtcaccctttaagattttagctcacaatgtattttgactccaacattccttcacatctatatctaatatatactagctcaccaaaatacatttgtattttagcatgtatcttgattgaatgtttcatgtgatttatgtgaatgtaacatatttagtcatgccagtcttaaaaccatttgaacagatataggttgaaacaacttatccaatcaaggggccgttcttttatattttccactaccacaccagtttctattatctcttcttagtcattttgtaatacttgattatttcactttgacttatttcttgtgtttttaatttttactatttt

SEQ ID NO: 28226 - DNA, 226 bp, Gossypium hirsutum
  Clone ID: LIB3189-047-P1-K1-F4
gcgagcggtcaccgaatcaaacatcaaccgggtccaggaaatctgttcgttggagcgccgagttaggtagtgaatcgcctgcgtgcggatgcacagcgtcaccatgtccgctgttaacggatccaatccttacattgctcagtctcctgctccggaatcattttcgacttccttcaaagagaaaatggacactgtgaaggatgtcttggggagatgggggagaaaa

SEQ ID NO: 28227 - DNA, 360 bp, Gossypium hirsutum
  Clone ID: LIB3189-047-P1-K1-F5
gtgagctctcaccaatggctttcaaagctctgctgctgttactattggccacttttctgcttgtttgaacgacagttgcttccaatgaagggggagtgaaaacttgaattaaatatgccgctcctggtccaatgaaagcacctattccttgttcacccggtaaggcttccaccaattcggtgtccggcgtacaagggttcaacttcaagacccccaacttaaggccccacttcatattaaacccctaccaagggccccacttcaacctttaaaccaacaacccagggttctaactcaacatataaacccccaagttcttgaacaacaaacaaaggctctacttcaacattttaagccccc

SEQ ID NO: 28228 - DNA, 320 bp, Gossypium hirsutum
  Clone ID: LIB3189-047-P1-K1-F8
cggacgcgtgggagaacgtctggaaagggaggccgccgaagctgagcagaaacggaaggaagaaggggaagctcatgaaagagcaggaggggaagctgctgaaaaagaggctgcccgggctagaatgcgagaacaaaaagccttatcacttggtgatgaacctgagaaaggaccaagtgttacacaggtattggtacggtttcccacgggtgaacgcaaagaaaggagatttcacagcacggcaacaatccaatcagtttatgactatgttgattcattgggttgcttagaagttgaggactacatccttttgttcaact

SEQ ID NO: 28229 - DNA, 277 bp, Gossypium hirsutum
  Clone ID: LIB3189-047-P1-K1-G12
gaagatcctctcattttcatctgtatcttctgaggcacaaactgagacatctgaaatgggtgcaccctcaatgtttgttgagtcaagtgataaggaacctgaagggcatggtgaaacaagagaacagggtacttctagttttcaagagatgcatgcagcatccttggatttgtttgaaaacgaaccaagggtaagggatctaccagagatcagtgtgcatgatggtatatatgctggttcatcaaggttttcttccacttttttcgatcataatgta

SEQ ID NO: 28230 - DNA, 487 bp, Gossypium hirsutum
  Clone ID: LIB3189-047-P1-K1-G2
gcgtccgcccacgcgtccgatagagagcacctatagactctctctcgccctctttttctccggcgagctagcgcgggggctccgccatagctccgtcggtgcgcgaaaaatataaacaattcgggacaccttctcccctttttaaaaacaagtttagatctacttgcaatcttttgaaataaataaaaaaacgaatagaatttggcccttgcactttacccgtttcatattcctcttctccgaagcttattcgaaaccttagggtttcttatggctttcatgaacgaaaaagggcttccaatggtggcgaggcgcgaagaacaggtgatttctcttttatttctttatatttgcttcgagtttcaagaaaataagagaaagggactacctttggaaatctttgtatttctttttagtattgattgtgtgtgtaaaaaattacaaaaacggattccttcggctttataaccgaatatatttttacaat

SEQ ID NO: 28231 - DNA, 474 bp, Gossypium hirsutum
  Clone ID: LIB3189-047-P1-K1-G6
accacgcgtccgcaaaatttgcatcagccaggtgtttattctcagattcagcaacagcagcaacaacgacaaatattgacaagcaatgggcagtcaactcaaaccacccttcctgctaataaggcttcatatcctttgacatcgttagctcaagatacacagattcagcaacaggtggaacagcaacctaacctcgtacagagccaacagcaacagacacagttgcagcaaaatctgtcccagaggtcacaacagcagccacaaattcaacaactggcacagcatggcctctcagagcaacaattccaattattacagaaattgcagcaacagcagcagtcgtctcaacaattactctcacctactggatcactgtcgcagtctccagtggtgcaacaacagccaatgcatcaacaaaaccaaccaatgcagcaagtgcctctttctcagagccaacagacacttggcagcaat

SEQ ID NO: 28232 - DNA, 189 bp, Gossypium hirsutum
  Clone ID: LIB3189-048-P1-K1-C12
cggacgcgtgggctagatcgcacacataacttatttttaaaaaaattaacctttgaacaaacgccagggattaccattttgttcggctcgggctcatccaccaattgaatcatgttctgaagtatttaatatgctatatcttactattttttttcctggtgctaggcacattttttttttattttaccc

SEQ ID NO: 28233 - DNA, 221 bp, Gossypium hirsutum
  Clone ID: LIB3189-048-P1-K1-C3
aagaaaatgggcacaggatatctttctgcatttccattttaactttttgatcgcttcaaaacaatatggcctgtctgggctccgtgctacgccattcacaagatcttggcacgtctcttacatcaatatacatttgctaatgatgctcaaactttacttattacaacatccatggtcaaatacttctataatctttttcagaatacgctcagaacactcac

SEQ ID NO: 28234 - DNA, 424 bp, Gossypium hirsutum
  Clone ID: LIB3189-048-P1-K1-C8
aagaaaatgggcacaggatatctttctgcatttccatcggaactttttgatcgcttcgaagcaataaaacctgtctgggctccatactacaccattcacaagatcttggcaggtctcttagatcaatatacatttgctaatgatgctcaagctttagttatgacaacatggatggtcgaatacttctataatcgtgttcagaatgtgataagaacgcacactgtggagagacattggttgtctcttaatgaagaaactggtggtatgaatgatgtcctctacaggttgtttgccataacggggaacccaaagcatttgttcttggctcaccttttcgacaaaccctgttttctaggattgcttgcagttcaagctgatgatatatcggggttccatgccaatacgcacattcctatggttattg

SEQ ID NO: 28235 - DNA, 302 bp, Gossypium hirsutum
  Clone ID: LIB3189-048-P1-K1-D2
atctcccaccatcagatgaggaggaggatgagtacccttccggggaagaacaaactcagtctaacagacaagaaaggcagagcttgaagccacttgatacctccataagtgaaaaggaattgaagaagcgtgagaaaaaggaaatgcttgctacccatgctgctgagctggcaaaacaagaggcccttaaagatgatcatgatgctttcactgtggttatcggtagtcgggcttctgtccttgatgggtgagatgatgcggatgctaatgtcaaagatataaccatagacaatttctctgta

SEQ ID NO: 28236 - DNA, 284 bp, Gossypium hirsutum
  Clone ID: LIB3189-048-P1-K1-D5
ctttaactctatacttatctgtccaacccatgcgagtctcactctacacaaaccactactcactattcgcacacgtgagattatataaagcggattcgacaatccatctaaaaagataaactcatctcattatatgatttactaccctgggtttctttacgattcggcggggaaattatttatcgtttttttccctttatctatcatcatcaacgcattctcattttaactttacttttaattttccttttaatgccttatttttattcctttccttttaaatt

SEQ ID NO: 28237 - DNA, 235 bp, Gossypium hirsutum
  Clone ID: LIB3189-048-P1-K1-D6
gcgcccacgcgtccgcccacgcgtccgcccacgcgtccggtggatcaataagtgatgagcagagaaagaatggtatggttaactcatgccctggagcaggagcctgtggggggatgtatactgcaaacaccatggcttctgcaattgaagctatgggaatgtcacttgcttacgggtgttcaatacctgctgaagacccattgaaattggatgaatgcctgttggctgagaagta

SEQ ID NO: 28238 - DNA, 310 bp, Gossypium hirsutum
  unsure (1)..(310): unsure at all n locations
  Clone ID: LIB3189-048-P1-K1-D8
aacaatttctcgtcggttttgggttttgcttctatttctgcagatgttgacaattcaagtgcagcggtaaaaactgctaaacgcggcgggttnnaannnnaaacaaccaaatcanaatcaaangaattcaatgttcaaaaccatatttatattttcacataggtgaaccctttctccaaattaatttttcccatcatatataacttcataatcactaccataaaatcacataattctaatcacgttccttttaagcaatcaactttcaattataattttttcaacacaatttctacaaataaccttaacc

SEQ ID NO: 28239 - DNA, 293 bp, Gossypium hirsutum
  Clone ID: LIB3189-048-P1-K1-E3
acgcttactatgaaaccaaataaattattgttcttgatcttgctccttataccctaaacattaaaacttttgactgggtaataaccaagttggtgcctggggacacttatatcccaaccaaaaattcacaagttttcaccacttatcaggaccagcatactaccctcttcattcaggtcttttaaggtgaaatgattctcacaaaagattttatattattactaaaatcaattcttattcgaatcactacaacctcaatactaattccttaaattctaaaaacatttaaaatt

SEQ ID NO: 28240 - DNA, 270 bp, Gossypium hirsutum
  Clone ID: LIB3189-048-P1-K1-E4
cttcttcccaactcttcacgccaaaaccccttcccctttaacttcgatttggacaaaacgaaacaaacgatgccgacggcgcgcctctggtggtacgggcatcgtgcgaagctaccagacgtgggtgagacgacgtgggcagtttctatgcgttcatgcgtgaagacgattgctgcaacgtgggggcgagggtgacgccgatccgctacttattgccaaaggtttctactgttcatttttttgtgttgtaggctagtgggttagggattg

SEQ ID NO: 28241 - DNA, 162 bp, Gossypium hirsutum
  Clone ID: LIB3189-048-P1-K1-E5
atagctttggagtgtgggatacttagttctgcacaagatgttactgagcccactatcattgaaggaacggtgtgttcgtgccttaactggggtagagggagaacaagtggccaggaaaataatggtaatggggagatcttctctaaatgacatgctttttct

SEQ ID NO: 28242 - DNA, 115 bp, Gossypium hirsutum
  unsure (1)..(115): unsure at all n locations
  Clone ID: LIB3189-048-P1-K1-E9
aggacgcgtgggatcattcaataattcccatcaacgttgtaaaaacggaagagaggattaggggtcggaatggccaggcccagagggagggganaaagcttgtgggaacttactg

SEQ ID NO: 28243 - DNA, 329 bp, Gossypium hirsutum
  unsure (1)..(329): unsure at all n locations
  Clone ID: LIB3189-048-P1-K1-F8
aagcgaaaacaaataaaaaattgtatatggtcacaaatataggcgggggtcgcgtncatcaaaaatcaatcaattactttccttttatagactaatgcactttcacaattaatcttttggtttacatttacatctattatattaatattgcaaagattatatataaatcaataccttctacaatcaataatagccaacctaaattaatttcttacttaataatttttaaaagctttaaacaaattactattctattatttacaaatctattcatcattctaatatcaactaaattatcacattatctttttattatatttcaaaatttt

SEQ ID NO: 28244 - DNA, 276 bp, Gossypium hirsutum
  unsure (1)..(276): unsure at all n locations
  Clone ID: LIB3189-048-P1-K1-G2
gcgcccactcnaactatataaaacacttatacacaccatctttcccttttttactccagcaaaataacacgtaaactggtaaatatataaaacctgcctgggaataaaacatactaacctttttcactttttaaaacatctttacatctactaccattcttttaaaatatatattactacctattcaattttccctttcacttacccaaaaatattctttttctacaatcttattcaaaccttaccacttcttaacttttataatctaaatatact

SEQ ID NO: 28245 - DNA, 304 bp, Gossypium hirsutum
  Clone ID: LIB3189-048-P1-K1-G4
cccacgcgtccggatcagttccataagaaagaaagaaagaaatcaaatatgagttccatttccaagaggtgccttctccttgcccttttagctgctgctgttcttctcatttcatcggaagtgacagctcgagaccttgctgaaaccaccactgaaaagaacaatggtgaggtggctactgaaacaaccgaggctgaggctgaggtagaagagtccaaatatggatatggtggatacgggagccgtcgaggttatggaggatacggaaggcgcggtgggtacggaggatacggaaggcgtggtg

SEQ ID NO: 28246 - DNA, 168 bp, Gossypium hirsutum
  Clone ID: LIB3189-048-P1-K1-H6
ccagctggtcacgggtgacgttctcgaacaagggatttggtcgccaaaccctttaaaaagaaagggtacattcccttggctacttaccttaagacctacaagatcggcgactacgtcgaacgtaaggtaaaccgggccggtcacaaagggatgccccacaagatctac

SEQ ID NO: 28247 - DNA, 251 bp, Gossypium hirsutum
  Clone ID: LIB3189-049-P1-K1-B7
cacgaaccgtaaattactgaataatatttggatagaacacgtatttatgtcggggcatattgctgaacgggcacgggtatacatcataaaaatgatcaatgaatgaacagaacattgctagggactgataaaaccaatcatagagctcatgcaccatccttggtcaacgggggatgccaagcatcctacttctaacagtccagtaattttacttagatcgagccttcttcatctccgacggcttttccacc

SEQ ID NO: 28248 - DNA, 253 bp, Gossypium hirsutum
  Clone ID: LIB3189-049-P1-K1-D2
cccacgcgtccggtgaaatccctcctgagttgggacaggcttgtggagctctcgaggagcttgatctgtcatctaacaaactcacaggtggatcgccttcaggtcctacataatgctgctgtttgctactgttgaacctaggaaacaatctactttcaggagatttcctcagtgcaggtggcagcagattacgcaactggagaggcatctatggaccactccactgttgtaccagctgtgaccacgttgcctt

SEQ ID NO: 28249 - DNA, 293 bp, Gossypium hirsutum
  unsure (1)..(293): unsure at all n locations
  Clone ID: LIB3189-049-P1-K1-D3
aatctaaanctcatgtatatgattagaaggtgctatatatacaaaataataataataataataacgccataatatgattagaaaacaggcaaactatccatggctttttttttttcaattcacaaatagaaagcaggaaaggattgtgctacatgcatataacattatcatctagggtcgtaccatactgcaaatcattttacatcttacccattcatattccaacaccaaatagaatacctgaaatctgcaattactttctaacaccaaaataatacattgtctcctttaaa

SEQ ID NO: 28250 - DNA, 185 bp, Gossypium hirsutum
  Clone ID: LIB3189-049-P1-K1-G7
ccgtccgattccggtcgacccaccgtcgaatttaaaggaaacctaagagaggattccatatttcacggcacgacactgttgggtttatttgtgtataaacccacacaagagtcagaacaatcttaccctttgttttctaatgtatgaaacctttattttcacaacattctctattcgctcgatta

SEQ ID NO: 28251 - DNA, 139 bp, Gossypium hirsutum
  Clone ID: LIB3189-049-P1-K1-G8
gggttcacccacgcgtccgtcaaaatgtgtctttgacctaattcaaccccctccctcgttttattcaacgaacaccccacttttgtacggtttcttaaatgatccaaccaaccacaccaccacagcagccatgtttaaa

SEQ ID NO: 28252 - DNA, 230 bp, Gossypium hirsutum
  Clone ID: LIB3189-050-P1-K1-A1
agaaaatattacaagggactttcaatctcatacaattcactcagatggaacctccacttcatctatgagttcaccaagcaatagcccaaacccttcggcaagtcaaaagaaaggagattgcatcagttaccatactggttgcttgcagtttggtaattgcgggagtggaggattgaactgtatttaccccagcgacttaattccattcacacgaagaccactttttataa

SEQ ID NO: 28253 - DNA, 454 bp, Gossypium hirsutum
  Clone ID: LIB3189-050-P1-K1-A5
aagctctatcattcaaccacttagcagccaacgcgaaaacaaagaaatttcaaaagcacgaataaaaaaatcccaataagtcaaataaaaaaggaaatctgggaggtttttattgaagagcctgttgtattttttttttatacgttatcaaacaaactcattgaactcatagccctctcaacttccctttttttatattcttctttttgttctttgcttttctcgctcaaatctcaaaagggtccttttctttatttctctccaagtttcttaaatctattcttctttggattctcactgttgggtttctttctttgatcgttacagtatagaatttgaatgctgcttatgcattcaaattccggagctatcaatttctgagtttgatgggttcaagatgagatacgacatgacatgatccgcctgtttcatacgatgacccttttccgtatgg

SEQ ID NO: 28254 - DNA, 184 bp, Gossypium hirsutum
  Clone ID: LIB3189-050-P1-K1-A8
gaaaaaatgaagctagggacgttgttcaaagtagggtcgtttgtgggtgtaattgctataggcagagcactatggaggtgcatgggggtgtcgaccaatacgccgctcttcgctatttccaccaatggtcggatcgattggggatttgggccatccctctttacgtagtcgtccacaccctcac

SEQ ID NO: 28255 - DNA, 419 bp, Gossypium hirsutum
  Clone ID: LIB3189-050-P1-K1-A9
gtcctttcttttactctttgcccctcaaatccttcctctcgggaaacaccggcaagttccgatctctgcccaggatgaactcgacgatctccatctcttccgtgaagctatcacggcggcatcatctcgtggtggctcttccaaggtttcccatctgggtactattaaccccaagcccaaaatcgctttccttttcctcacgaactcggatctcgtgttcgcccctttatgggaacgtttctttgaatcgaacgatggtctcttcaatgtctacatccatgccgatccatctaccaagctaaaccccctacagtggtcaataaaagccaacttcatcgctttcagaagaacagcacgcgcctccccgacgctaatcttcgccgcccggagactcctcgctaacgccatcatcgacgatc

SEQ ID NO: 28256 - DNA, 308 bp, Gossypium hirsutum
  Clone ID: LIB3189-050-P1-K1-B8
gtctccttcaccttgactgcaccgtattctcacattgtcaccagctctaaccctctccccgtgttgccctccatagctcaactactgattggatattttgaatcttttaaaaggaaaaaacgggaacccagtatgtgttcatggactgcagctgaatcagacatggtagtgaagaaccggttggtagggttcctactatggcaatcgatcctaagtagcttgattttcttggccttcactataacgatcgtcttctggcgctccgccactgcaatcttcgtctcctttttcagctttcatctgtccca

SEQ ID NO: 28257 - DNA, 446 bp, Gossypium hirsutum
  Clone ID: LIB3189-050-P1-K1-D3
ctttcaacagattcacaaaatatggaactatggttgttcatggttagactcggctcaatcacttatgggacgtacgtaaggctcttggtagagtcgagacactaccaacaattctgggttggatttggatgtgtagatttcattcatagatatatctaacttttccctgtttcttcaaatttcctatattgttaaaatcttgtttctttttaattagaatgcttcaatgaattctgtcaatgggaaagaaaaggagctggtttagttgggtgaaaaagatttttgcttctaatgcacaaccaaaaacacagaagaaatcaaggaggtggagatggattttcggaaaactaaagctcaagcaatgccgccctgcattaccggcgataccccaacagaaatcgttatgtcaagcaatcgaggataaaaaaagcatgctttgaatcttg

SEQ ID NO: 28258 - DNA, 391 bp, Gossypium hirsutum
  Clone ID: LIB3189-050-P1-K1-D8
gaataaatagaaaagtgcaaggactcaaatggggcgaaattaaaatacaaagacgtaaatttacaactttcgcagtggtgaataaccgcagaatttaaccgaaacaaaacttatggaccttctattgaaactggaaataatgatgccatttgctataaagaatgattacagtttttataatcgagttcgtgagaagctggggacgtagaaataaaaatcttacaaagccaaatatgatggaactgtttgaagatcttacaagcttcgcattagggaaaaggaacattgtttcaataagagggtaccttttcccaaatcgtgagcaaagtccacaagcttatcgcacaaaaatgtggacgatcgcccacaaataaccagccagctgtttcag

SEQ ID NO: 28259 - DNA, 235 bp, Gossypium hirsutum
  unsure (1)..(235): unsure at all n locations
  Clone ID: LIB3189-050-P1-K1-E8
caaggacttcaaggtggttaatttnatcacctaggggggaaaaccaataattgaataccaccatgagaactgtccagaccattcttcggtttgtgcctatgtctttaggggttgcttcacttgttttcatgctcaaaaacttacattccaatgacttagtcttcgttacatacttagatcttgatgctttcaagtacttttttcatgcttatattttttgtacatgcttttctct

SEQ ID NO: 28260 - DNA, 285 bp, Gossypium hirsutum
  Clone ID: LIB3189-050-P1-K1-F9
cccacgcgtccgattagtggttatcaagggtttttcctctctgggttaagaccagcttggtttatggggtttaggcaacgccttggcggtcatccacagatatgtgatggatctattgtagctttcactgttcttcataatgtaaactgtaatcatgggttcatatatgttacatcacagggtattctgaagatctgccaaaagccatctacatcgaactatgacaactattggcctgtgcaaaagaattcactgaggtgcactccacatcaagttacttacttt

SEQ ID NO: 28261 - DNA, 196 bp, Gossypium hirsutum
  unsure (1)..(196): unsure at all n locations
  Clone ID: LIB3189-051-P1-K1-B11
gtaaattccaaaggnctgcactgtattccaaaaggttaacacataatacaaagagaaggtcaaggtgaacatacaccatatgaacgaagggacttaccatctgaaccacatgtagcatgatcactctttaaagcgaatggtaaaggaaaactggtaaagatcatgaagcctaatctataccaatgactattaaaat

SEQ ID NO: 28262 - DNA, 385 bp, Gossypium hirsutum
  Clone ID: LIB3189-051-P1-K1-B2
cccacgcgtccgaaagaaagtagttacgtggtttcagatactaaccattgtgatcaaaatggctgaggagaggaattatataataaaggtagaggaagggaaggccgccaccgatgaaagaccgtcgatcggccccgtttatcgcagttgttttgccgagaatggtttccctgctccgattcctggaatggagagttgttgggacatcttccgaatgtcagttgagaaatatcctaaccaccatatgctcggtcaccggcagattgtggatgggaaagctggaaaatatgtgtggcaaacttacaaacaagtttacgacattgtaatgaaagtaggaaattccattcggagttgtggtgttgaggagggaggaaaatgtggtata

SEQ ID NO: 28263 - DNA, 370 bp, Gossypium hirsutum
  Clone ID: LIB3189-051-P1-K1-G10
agaagtagcagcctccatgggacttcttcgatacggtagctaaatagcatttctcatggcaggaatgtcaagtcctccttttacgattcttccaagcacccatttgccagagccatcccttcactaagtttcaaatcttgtcatttctgtgttcgttgcgctgtcagttttcgaccttgcattgatattcacaaggggaaagtgaaacaaattgttgggtcaactcttagagattccaaggaggatggatcaacccttgtaaccaattttgaatcggataagtcggcagctgagtttgctaacttgtacaaaaaagatgggctaaagggaggtcatgtaatcatgcttggagctgatcctctaagccaag

SEQ ID NO: 28264 - DNA, 161 bp, Gossypium hirsutum
  Clone ID: LIB3189-051-P1-K1-G12
tggcggctcaagccgaagtatgttccgcgagctgtggttgaccgacaccaacgtgtcaacgcgtccattcaggatcagagtatgctatcccttgaatgggtcctttctactcaccaaatatttatctaaacacatccagacataaaattaacttacacata

SEQ ID NO: 28265 - DNA, 162 bp, Gossypium hirsutum
  Clone ID: LIB3189-051-P1-K1-H5
caataattctctttctgtttctctggttttaacatgggtatgggtttaaggaatggatttcttttgggtgtatcttgtgttgctacaggctcgctctcaattttttggcgacctgaccctattcttaaaaattttagaatcactttggtctgacaccatatt

SEQ ID NO: 28266 - DNA, 405 bp, Gossypium hirsutum
  Clone ID: LIB3189-052-P1-K1-C3
ggatattattaataattaaacaagaagaagaagaagatgatgatgataaaatggtgaaatagcggtgacgtgcactgctgttctctggtagcttaaagtgttgattttgttacacaaagcggccaagcaacaaatattatcagaagaaagggaagaaaagtagaaaaaggcatcaacccaaaggcaaaagcaatagaattgttacaatcaagaagctacatttttcttttgataaagagaaaaaaaagggaggaactttacgtgtgtggctgtgttgttgtaagttaccggaaatgaggagaagaacagagattctggtgttgcttatttgtttggtaatagtaacgacgtcgtttgcatccaccgtcacgtacgatcaccgagcgattgtcatcgacgggaaac

SEQ ID NO: 28267 - DNA, 299 bp, Gossypium hirsutum
  unsure (1)..(299): unsure at all n locations
  Clone ID: LIB3189-052-P1-K1-D1
gttgcatttgacagcagaaggcaatgcagtagtgttcgaggaagttgtgaaggttttcaaggaaggatggcttgacgcctccggaaggcgcatatgattttcctcaccactccgaaattgatgggaagaacccagagaaggcttttcagcagaaatgcttgtagtttccttcactttttttgcttcatttattaaaaccacattattctaagggttttacatatgttcatgaaaaataattacaaatgttacattatttttgaaatccaagtcttcaatatttgtattatgacttngga

SEQ ID NO: 28268 - DNA, 497 bp, Gossypium hirsutum
  unsure (1)..(497): unsure at all n locations
  Clone ID: LIB3189-052-P1-K1-D2
cccacgcgtccggtttgccatgacgttggatgatttttctactaatgatgatatcgttctgagggtagagagagcagatctcggagaacaagtctcgtctaagcaacggtcaattattagatgtgcgctcagctgtacatgttctaaattcaattgttcaagacgccatggaagctctccgactggtgattcaaaagattcgaggaactgttcgatatgttaaaagttcccaatcaatacaagggaagttcaaggagatggtcttgcaaactggaatcaatagccagaagaacttggttcttgattgtcctatccaatggaattcaacatacctaatgctcgagactgctatagaatacaggnaatgcttctgtcagttgccggagcttgatcttgaccttgctttaagcgatgaagagtgggaatgggcaagttccattaccggctatttgaaactatntatcgaaatcatcaatgtcttctccagcaacaaatgt

SEQ ID NO: 28269 - DNA, 353 bp, Gossypium hirsutum
  Clone ID: LIB3189-052-P1-K1-E2
cccacgcgtccggatactcaagacaaagttgttggagaattgtgtctcaaattctgttaaatttagtgggctaaggtttggcaggtggaacatgaggaattcgagtctaccattcagtgcgatgatggcagtgagcttaaggcgagcttaatcgtagatgctagcggtttcagtagcagtttcgtagagtatgataaacctaggaactacgggtatcaaattgctcatggtatttttgctgagggtgatagtcatccttttgacttggataagatggttctcatggattggggagattcccatttaggaaacgaaccttatttacggggtaacaactccaagttagcaacgtt

SEQ ID NO: 28270 - DNA, 165 bp, Gossypium hirsutum
  unsure (1)..(165): unsure at all n locations
  Clone ID: LIB3189-052-P1-K1-E7
gagatgtcttgcttagcttcttgctgtgctgcgttcacatgcggcctttgctcaacggtnncgtctgggatctccagaggagggggcaggcttgcttattgtggtctctttgggctttcccttatcgtctcatggattcttcgagaagttgatgcgcctgttttg

SEQ ID NO: 28271 - DNA, 450 bp, Gossypium hirsutum
  Clone ID: LIB3189-052-P1-K1-G1
aaccgccgtgctcgttgggagagtagcagctggagagagagtgtggtgtccttaaagccaattatagtgctcttaagcttgactacaacaatcttgaacaagagaaacaagctttaactgcagagttgagggaactgaaagctaagctagaagagaattcagagagcagccactctgttaaagaagattctccaaaatcttcccagcaggtcaaagaccaaggtttcttcgacaacgatgatgattccaacgagattgtcaaagaagaaagcaatggaaatgctcagttactaatttcaccatcatcatcttcttcaattcagttcaatgggtattcttcatcttcagattcatcaaatcatctctggtttcaaccatttgactcgagtttgattctgggtaacatgtatcagccccagttagtgaaagtggaagagcaatgtgtgttta

SEQ ID NO: 28272 - DNA, 202 bp, Gossypium hirsutum
  Clone ID: LIB3189-052-P1-K1-G7
gtttcccggttccatgatattaagatatagatttattcattgttcatgattccatacattgcagcaggaatacttagtaggttggacggagagagagaaaaaaaggcacgactagctcttataaagaaaaacagcaaaaccaatggcgcacctaacaggaggaggaagacaacaagtgatcagaacgggggatatggagaag

SEQ ID NO: 28273 - DNA, 353 bp, Gossypium hirsutum
  Clone ID: LIB3189-052-P1-K1-G9
cccacgcgtccgcggacgcgtgggattgcgagtttccttttttttttttgacaaacaatatgtctttttttcttcgggctggggtacagtgaaaaaagagatttcaaaaatgattcaacctcagacccatttgaatgtaacagataacagcggggcccgagaattgatgtgtattctagtcataggagctacgaatccccgatatgctcatattggtgacgttattcttgctgcgatcaaggcagccataccaaatacacctctagaaagatcagaagcgctcagagctgcaattgtacatactcgttaagtactcacacacaataacttgatgataatactatataattaca

SEQ ID NO: 28274 - DNA, 228 bp, Gossypium hirsutum
  unsure (1)..(228): unsure at all n locations
  Clone ID: LIB3189-052-P1-K1-H7
canaatggttctttgaaagtcagttacaacgacctttctaaagaatctgtttaaacctggctttgccaaataaaaatggcagtggagtgtcttaaaccttataatattttcacaagaactctgattcacacacacctcatatagatataaagagatctaatatacttctcgatttcaactttaaagctcaactatatgactcttgcctctctgtgactactctatctc

SEQ ID NO: 28275 - DNA, 383 bp, Gossypium hirsutum
  Clone ID: LIB3189-053-P1-K1-F5
ctgaattgggataatactttgatttcaaaacacgagccatcaatgaatttgggtaattaacaaggtgcgatccttgtttcgctaataaaggaatattaaacttcataaaatatcgaaatccaagaccactattttcttttaataagcacagattttcccaggtacaccaatgaacactttttttattccatctattccgccaccagaaattagcaacaattcttttcaggtctgaccatagagtcttgggtagtagaaaacatgccattgaatacgttgttatagcttgttagaccgatttaattaaaactttatttgactctttggtattgataccttgaccttcaattattaatatctttggttgtgtattgttatttaaa

SEQ ID NO: 28276 - DNA, 266 bp, Gossypium hirsutum
  Clone ID: LIB3189-053-P1-K1-H12
acaatttccgtgtctcgtgatactctaaaaccttataaactccaaaaagctaaagaccctcccttgtacacaacaaacaacgcgcctgccccttcttcttcctcctcttctagcattcctgtctatcacttaaaaaaaccatagctttgttgttggttttgttttttttttttatctaaaaacaaaaaaatgcatgcaaaaacggattcaaaaaggacgagtatcgatgcgtcatggccgtcaaggtcgccttgaaggcctgtata

SEQ ID NO: 28277 - DNA, 218 bp, Gossypium hirsutum
  unsure (1)..(218): unsure at all n locations
  Clone ID: LIB3189-053-P1-K1-H4
gcgagaaagngagaggncgagagagaaanaaanncgcagggaannagcgagagccngcaannngggggggggnccccnncggaaggggggggggcnancnnancnanccgncancangacaacancaaggcgncnngcagaaagaaaggnggagaagnnccaaaagaacanaacaaagagaggagcngngccngaaacaaccacaaagaaggggaagg

SEQ ID NO: 28278 - DNA, 423 bp, Gossypium hirsutum
  unsure (1)..(423): unsure at all n locations
  Clone ID: LIB3196-001-P1-M1-C11
atcttttgtgggggattttttttcctatctggagtgtatccaagtggtgagaatgtccagttcacacggagtttgatgtcgtataaagagctgtatcaaaatttgtttgatgcacacgttgtctcatttttttatgtgaaacgtctacaacctccatactctaactggtatgatacgaacgtacaatgtgactaccatgcgggaattacggggcactcaatagagaattgcactgccttcaaaaagcaagttgaaagactcatcaacatgggtattgttaagcttgatcgctcatctagtgcagaaagcccgctacccaatcatgattgataatgaagtgaatacagtgtattaaaaggtgttggaagtgtccacattaatgacatatttgaagacangaatgaaaagggaccttgctagata

SEQ ID NO: 28279 - DNA, 162 bp, Gossypium hirsutum
  Clone ID: LIB3196-001-P1-M1-C5
gcttggccagccattcctggggacacaatggggaaggggagggtcgaattcaacgaatttggtcgatttggccccctggtaaccagggttgttttaacttttgttaaagggatattggtggccttaaatacccctttaattaccttaaattccttggttaca

SEQ ID NO: 28280 - DNA, 274 bp, Gossypium hirsutum
  Clone ID: LIB3196-001-P1-M1-D3
ttctgctgcttacttgaagggtggcgcgaagaacgttatcattcactgatctcagtgacgattctcccatatgtgttgtgggtgtcaatgtgaacgacatctatgcactgactcttacatatgaatccaatgctagttgataccaacaactgtatagatcaatttgctaatgagatcaacggttactgagctattgatgtgggacatatgaccaccgaccattctattactgatactcaatataatgactatagggcttacctgaacgactcgc

SEQ ID NO: 28281 - DNA, 403 bp, Gossypium hirsutum
  Clone ID: LIB3196-001-P1-M1-E1
atgtcgtttctgtcgccgtccccgtctcctgccaggcgcggagccctgcgggccgctggtgggccccaggcgcgcaaacatgggcggccccaccaaagcgcgctgggctgccgcggcgctgggcgtcgcggggctgctgtgcgcggtgctgggcgctgtcatgatcgtgatggtgccctcgctcatcaagcagcaggtcctcaagaacgtgcgcatcgaccccagcagcctgtcctttaacatgtggaaggagatcccaatccccttctatctctccgtctacttctttaacgtgatgaaccccagcgagatcctgaagggcgagaagccgcatgtgcaagagcgcgggccctacgtgtacagggagttcaggcacaagaccaacattacctttaacaacaat

SEQ ID NO: 28282 - DNA, 409 bp, Gossypium hirsutum
  Clone ID: LIB3196-001-P1-M1-E2
caaaaaagcaggctggtaccgatccgcaattatctcaatacgaattgcagttagaattcctataatcacctacattacaagggttgctctactttgaaagggatagtttctatatattataaatacttgtgctctgccttcttgcatatacttgttttgggcctttgtttgataaaaactatcttattagccagttatgacatacatgaccttatgctggatgtagtatatacaaaggtttgtacaagacaacccctgaacacaaggaggttctagtctgggaggagactggtaggagacaaagttctttcctgtccaagaaatcttaatatgtaatgtttttctgctttgtttgcatagtgatggaagaagctttttacacttttcaagcttgctgctaacttaattt

SEQ ID NO: 28283 - DNA, 402 bp, Gossypium hirsutum
  unsure (1)..(402): unsure at all n locations
  Clone ID: LIB3196-001-P1-M1-E7
atgcccgagtttgccaaagaaccgccgcagagagacaggtaccggctggacgatggccgccgcgtgcgggacctggaccgagtgctcatgggctaccagacctacccacaggccctcaccctcgtctttgatgatgtgcaaggtcatgacctcatgggcagtgtcaccctggaccactttggggaggtgccaggtggcccagctagagccggccagggccgtgaagtccagtggcaggtgtttgtccccagtgccgagagccgagagaagctcatctcgctgctggctcgccagtgggaggccctgtgtggccgtgagctgcctgtcgagctcaccggctagcccaagccacaggcagccatcaccgnctgccgtgtctagcctggtgcctactggggcagg

SEQ ID NO: 28284 - DNA, 117 bp, Gossypium hirsutum
  Clone ID: LIB3196-001-P1-M1-G9
atctttttgcgtttgagccccccgcctgtgagaagcattagcgcggtgaacttgtctgagaacaggagtgttatcattctgccacctgactacttggaatgcttgtccatgggggca

SEQ ID NO: 28285 - DNA, 421 bp, Gossypium hirsutum
  Clone ID: LIB3196-001-P1-M1-H2
atgtgacagagcaagactctgtctcaaaaaaaaaaaaaaaaaaaaaagaggggcagttggataatgggtagggaatgatagaaaagctatgacaggaattctcagcctgttggagggagttgggtatgacgtttgtgaaagggaggagaggaaatagtgtacgtcataatactctcagaatatacaattttccatactcagagctgtcctgatggtgttttgttactgagacaaggcaggactcaaactcccagccttaaggaacgcctctgccttgactgctcaaagagctaggattacagttgttagccaccatacttcgtctgataactttagaatcctttaggtcccacacattttaaaatggctaatatagatgaaatttttgttaatcctggaactttacatatttaaaatatca

SEQ ID NO: 28286 - DNA, 413 bp, Gossypium hirsutum
  Clone ID: LIB3196-001-P1-M1-H7
attgctgtaaacggagctggcttggagccttagccctctgcctggctctcctcttccatcttttggtaggaatcttgggttctcctcttctctctgggaagccagagcccaagtgctccattcccagggagggagtgccctctagggccagggagagtgaaggccggaggaggcaccagctggagaagaagggcagggcctggagaccaagtctcaaagggaaggagctgctggccaatcaggggcgagccgactgcaccctgacctgctgggctgggacagcacagaacctacagttttcctgaatgaatggaatcctggatgttatctgctaagtggttgcttgtcctgacccaggaagcttctacatgctctactcttcagatgtggttttaaaatttttccatctgggg

SEQ ID NO: 28287 - DNA, 414 bp, Gossypium hirsutum
  Clone ID: LIB3196-001-P1-M1-H8
atctgccaacaaggatccttaccccacaggggcccttctcccaggctgtgctgggcatattcaccgtgccgcttcacttctgcccagatttttaacttcacccggggtctctgcttgcacaaggactatgtggctgacagagagtttgtggcctggaaagacagacacccagacgcctcccccaaccatctcacccccatgcgggactgcctgtacctggtggacggaggctttgccatcaactctccgttcccactggctctgcggcctcagagagccgtggacctcattctgtccttcgactattccttggaagctccttttgaggtgtggagcgacaaacagctgaggagaaggcctttggggactttgtcatcaacaggccagacaccccctatggcatgatgaacttca

SEQ ID NO: 28288 - DNA, 402 bp, Gossypium hirsutum
  Clone ID: LIB3196-002-P1-M1-B11
atcctccctcagaatacaagttaatgcatgttactcagtcgcccagtatgtgaaagaagatgtgagggagacaaatgagttgatggtttgaattatatgatttttgccacgttaccttgatgcaaatttgccaaatctgatactgtgaaaagatttgataacttttctaatgcctgactagtaagttttaaaacatcattctttaaaaaaataatttaatatttttggttattccaatcttcagtgttaacccaaacgattctgagataaaaattatgtgtcatctgaacttcagtttacagacaaattagaactttgctttatttggagaagggggatgcattcatttggttttgatttttattttgcttttaattcattggagatgatgggatacctagc

SEQ ID NO: 28289 - DNA, 371 bp, Gossypium hirsutum
  Clone ID: LIB3196-002-P1-M1-B12
tcggtctaaaacataaagttttaatttattcaaattcgtttaaatacataattttataaactattattatatttaggagatataattatgggttaatcattctattatgctgaaatttaagatttaatcccttaactttaatttggcatgattcaatctctttacttttataatgttattaggaggtccagattgataacactgatagtagttgttgttaagtgatgatgtggattaatttttgcgattactcaatcacacaatcaagggcatgttgtaatgccattaaacatattcaacatatgattagtttacacgtaagttgaatgactaagattatataaaataaataatatttcatcactttaacg

SEQ ID NO: 28290 - DNA, 406 bp, Gossypium hirsutum
  Clone ID: LIB3196-002-P1-M1-B6
atatcagggctcctatgctcagtagtagctctggcttagacaccagctggagtgatcaactcttagggaccctgcctatcccacttcacaggtgaggcatggcaattctgggagctgattaaaacacacgtaaaccaaaaccaaacaacaggcccttgggtgaaaggtgctatataattgtgaagtattaagcatactatatttcagccatgataagaacagagtgcctgcattcccaggaaaatgagaaaatcccatgagataaataaaaatctaggtgatgggcagatcttttctttaaaatagaaaaggaaaaactcttgtagtacctagtcagatggtagatgagctgcctgcagctgcaggagcacctctatatagtacttagaagtagtatgttattcct

SEQ ID NO: 28291 - DNA, 411 bp, Gossypium hirsutum
  Clone ID: LIB3196-002-P1-M1-C4
atgtgagaggaacgtggttttctcctctctccgccatggcgtgtggtcgcccactgatatcggtgtgctccgaaaagggggagtcatctggcaaaaatgtcactttgcctgctgtattcaaggctcctattcgaccagatattgtgaactttgttcacaccaacctgcgcaaaaacaacagacagccctacgctgtcagtgaattagcaggtcatcagaccagtgctgagtcttggggtactggcagagctgtggctcgaattcccagagttcgaggtggtgggactcaccggtctggccagggtgcttttggaaacatgtgtcgtggaggccgaatgtgtttaccaaccaaaacctggcgccgttgcatcgtatagtgaacacaacccaaaaacgatatgccctctgttc

SEQ ID NO: 28292 - DNA, 418 bp, Gossypium hirsutum
  Clone ID: LIB3196-002-P1-M1-C9
atgtgaaactggtcgatccaagggatatggatttattacattttctgattcagaatgtgccaaaaaggctttggaacaacttaatggatttgaactagcaggaaggccaatgaaagttggtcatgttactgaacgtactgatgcttcgagtgctagttcatttttggacagtgatgaactggaaaggactggaattgatttgggaacaactggtcgtcttcagttaatggcaagacttgcagagggtacaggtttgcagattccaccagcagcacagcaagctctacagatgagtggctctttggcatttggtgctgtggcagaattctcttttgttatagatttgcaaacaagactttcccagcagactgaagcttcagctttagctgcagctgcctctgttcagccacttgcaaca

SEQ ID NO: 28293 - DNA, 423 bp, Gossypium hirsutum
  Clone ID: LIB3196-002-P1-M1-D1
atgcgaggggcccaccctttctccagaaccaggctcatcgaacctgctctgcacccaggacgcaacagtgcggtgcagaaagcgcatgtcagagacagagccatctggggacaaccttctttcttcaaaactagagcgaccatctgggggttctaagcctttccacaggtcaaggccaggaagacctcagagcctaatcttattcagtcctcctttccccattatggaccacctgcccccctcatccacagtgacagattccaaggtcctgctgtcccctatcagaagtcccacccagacagtttcccctggccttctttgtggagagttggcagaaaacacatgggtcacaccagaaggggttacacttaggaataaaatgaccatccctaagaatggccagagactagagacctcaactag

SEQ ID NO: 28294 - DNA, 352 bp, Gossypium hirsutum
  Clone ID: LIB3196-002-P1-M1-D2
ataccacccctccttattccttaacgaacagcctgacacatacgcaccgggccgcctcccctagtaggtgggcttgtacatgcgcagtgtcctagtgcccatcgtctgttttcctggccttgcccccgcctgccccatgccgtggacatctgggcccactcatcgccccttcaggcccccggcgccccaccccctagagtgctctgtgtatgcggatgatttagagttgtcatttctctttactggatgtttatttataaagatcttgcctgttcccgcgtctgcggagcggccctcgtctcccagctttctattaccttagctagagtgtctccttgtgggttcctgttgc

SEQ ID NO: 28295 - DNA, 328 bp, Gossypium hirsutum
  Clone ID: LIB3196-002-P1-M1-D7
atgcttaatccagacaactctccaatcccaaatgaagttgtccaggtgcatctgaaggacaaagtggtgggcaactacaccacagatgcaaatggcatcgctcagtttttcttggacacatctacgtttacatacccaaatatcactttgaaagcagcctataaggccaatgaaaattgcgaggctcatggctgggtgttgcctcaataccctcagcccgagtactttgcataccgattttactccaagactaacagcttcctaaagattgtccaagagatggaagaactgagatgcaaccagcaaaagaaggtgctagtgcactaca

SEQ ID NO: 28296 - DNA, 336 bp, Gossypium hirsutum
  Clone ID: LIB3196-002-P1-M1-D9
atgaactgatctgctcacactcgctggcttgtgcatcaggactggctttttctcctgactcacagggcaaaggagctctctgtgaacgttaagtccgtccccagcgcttggaatcctacggcctcctcagccggatcccctcagccttccaggtcctcaacctccgcggacgctgagcgatggcctccatggggctacaggtgacgggcatcgcgctggccgtcctgggctggctggccgacatgctgtgctgcgcgctgcccatgtggcgcgtgacggccttcatcggcagcaacatcttcacctcgcagaccatctgggacggcctgtgtatga

SEQ ID NO: 28297 - DNA, 366 bp, Gossypium hirsutum
  Clone ID: LIB3196-002-P1-M1-G7
atgccattcctagagtagaggcgatgggcccatttgtttggtgctggcaccaactcgggaactggccgaacaggtgcagcaagtagctgctgaatattgtagagcatgtcgcttgaagtctacttgtatctatggtggtgctcccaagggaccacaaatacgtgatttggagagaggtgtggaaatctgtattgcaactcctggaagactgattgactttttagagtgtgggaaaaccaatctgagaagaacaacctatcttgtccttgatgaagcagacagaatgcttgatatgggttttgaaccccaaataaggaagattgtggatcaaataagacctgataggcaaactctaatgtggagtgc

SEQ ID NO: 28298 - DNA, 404 bp, Gossypium hirsutum
  Clone ID: LIB3196-002-P1-M1-G8
atgggatgaccccaatgttaaccccttttcttccacctcaaaaatgcacgagtctcccaaactgcggcaacaatcatacagactttgacccagacacctgtgatgagtccgctgacccctttaagacatactgtaggacccccagctcaccttctaaattctcagactcctttgagatcccagccagagctatcgaagccaatggagtggacggggatgggctaaacaagcccgacaagaagaagaagacgcccctaaagacggtgaaaaagtcgcacaaaacggtctcctgtctctgatccacctttccaggaccccaccgcagctgctacaccagaaacaccaccagtgatctctgcagtggtccacgccacagatgaggaaaagctggcggtcaccaacca

SEQ ID NO: 28299 - DNA, 416 bp, Gossypium hirsutum
  Clone ID: LIB3196-002-P1-M1-G9
atgtcatgcttaagagtttactttcgttctcagagcaatgggaaggaattgcagagctttgagccgggaacggaaagacaggtactaggccgcatcctcagtggaattaggtaggtatggtgtggaacctgtgaagttcctggcatgttccactagacctagttgtaacatgacgttctgactgaagtgcagaccacaacaactatagtgcttcacttagaaggatatggccatgaggaacttgtctgactaaacaatgctataaattaaaagctcttgcaaaacattaaccatggtaatggttatttgcaccataaaatggtggcatccagcttaagtggcccacataccaacaatttaaaatgaagatagaatccagacgttaactctttttgtctctccataggtgtggtcac

SEQ ID NO: 28300 - DNA, 323 bp, Gossypium hirsutum
  Clone ID: LIB3196-002-P1-M1-H1
atgttcccttaccctctcacagggcatgcagtgggggtgtgactcacttgttcagtgccccgcgggtcaaacccctagggtgagcacgcggacgggcaggtcgtggggaggatggattaccaccccacagcatcatctagggttgagggtgtacagctgctggagacccagagggtgagtgttgcagtgcactgcttcagcttaagtcaagtggaccctgtcttatacgaaggacagagggctctatgtatcctgggttcttggcctagtgtactgaaaaaatcaggtcatgtgggcttggagaatgcatgcaggatttattg

SEQ ID NO: 28301 - DNA, 368 bp, Gossypium hirsutum
  Clone ID: LIB3197-001-P1-M1-D8
gaaagatgaagaaaacccaaaaaacaaacaaagagaaagaatcaaacaccaaaacccgaaccaaagaatcggagatatttgcttcgtgttcattctccagtcttggcctccactccactctgtctgaacaactacaagaaaggttgggttttgaagctccaactcttgtccaagctcaagctattcctgttatactctctggtcgtcatgtacttgttaatgcagaaacggggtctggcaaaacaatagcatatttggctccaatcattcattacttgcagggttacaatccccgaattgagcgttctcacggtacttttgcgttggtccttgtaccaacgcgtgagttatgtttgcaggtgtatgag

SEQ ID NO: 28302 - DNA, 464 bp, Gossypium hirsutum
  Clone ID: LIB3197-001-P1-M1-D9
tccacgcgtccggtttttccaatcgacctccggaccttcagatccgaccaacgttgcaccaccgccatgttatcctccgtccgctctttctctctttccgccttcattttcttcgtcttcttctcctctctcgccttcgcttccgagtcagatcataagtatcagccggatgatccaattaccctatgggtaaataaagttggaccatataacaatccacaagaaacttataactattacatccttccgttttgtcatccgggtgtcaatcctgcgcacaaatggggtggccttggtgaggtccttggtggaaatgaactgattgatagccagattgatataaagtttcaaaagaatgtggacaaaggtaccatttgccaactggaacttgatgaagctaaagtcaagcagttcaacgatgctatcgagaacaattattggtttgaattctttgtggatgatct

SEQ ID NO: 28303 - DNA, 429 bp, Gossypium hirsutum
  Clone ID: LIB3197-001-P1-M1-E8
cacattccatcctttgtttttgttttgttttcttttctcttaaaagaagataaaaaaaataaaaggaaaaagggaaaatttaaaggaaatgaaagattcttgaaggcatggcttcggattcttcgttgattgattaagtttattttattttttaaagttatgatcttttattaaaggagggctttgtttggattcgaaggggcaatcttgataaacagatgggtggtgttactgttgatgtcatgtggtctcttttcttttctgctgtttggcaaaacgaaaggcgagctctctttcttcttttcttcttcttcttcttctttttgctgtttaaatttgggttggactcgattttactgtcatttccagagtttatggattggttttctaggtaaatttagtctcttttggtttttttttaatttttaa

SEQ ID NO: 28304 - DNA, 237 bp, Gossypium hirsutum
  Clone ID: LIB3197-001-P1-M1-F2
ctcttatttgttattcttttatcccaatcaatccctattgatattattcaaacccggtgcgtgtctaaacctaagacttcatgccgatcgatcttctctgagtttaatattatctaagacttcttctggaggaaagcacgctattttcttcttaagaactcttcagtgctttattgacacctctgttcctttccttccctcacaagctctcaaaatctcccttccatcattcaattc

SEQ ID NO: 28305 - DNA, 428 bp, Gossypium hirsutum
  Clone ID: LIB3197-001-P1-M1-F5
gccgccggcggtcccggccggatttcccggtcgcccaacccttccagtggaggcagccgttcttccttttttttcttaaccaagattggtttcccaaattaagtttgctgtggtggtgaaaatattgggaaggcccggttcaggaggtcaagtgacccaagtgagagtgaagtttttggatgatcagaaccggttcattatggggaacgtgaagggaccggtcgtgaggagatatcctacatgctgagtctgagagagaacaaggagcttcgtgagggtattttatacttttgggttgtgctgttgaatgctccgattctttgattcgttagtagatcgatatggctgcattggagatgtgttctaactgatttatgtattgtgatgaaaaaaaaaaaaaaaaaaaaaaaaaaaggcgcgttaagtca

SEQ ID NO: 28306 - DNA, 409 bp, Gossypium hirsutum
  Clone ID: LIB3197-001-P1-M1-F8
gcaatgatccctacctttacagtaccaacaattttctgggaagacaaacgtgggagttcgatccaagagcaggtacagctgaagaacgagctgaggttgaagaagctcgtcttaacttctacaacaatcggtacaatgttcagcccagttctgatctcctctggcaaatgcagtttctaagagagaagaagacgcaacaaaccattccccaaccaaagatagaggatggtgaagaagtgacatatgaagttactactgcagcagtgaagagagatgtccacttgttttcagcactacaatcaagacatggccattggccagctgaaaattctggccccatgtattatattcctcctttggtcatgtctctctatatcacaggacatctcaatactatattctctagaga

SEQ ID NO: 28307 - DNA, 443 bp, Gossypium hirsutum
  unsure (1)..(443): unsure at all n locations
  Clone ID: LIB3197-001-P1-M1-G10
tgtgtggaaagagttgtanggcttcggtggatgaactatttaagaccggatattaagagaggtaacataacacccgaggaagacgaccttatcatccgattacattcacttctcggcaaccgatggtcactcatcgccggcagacttcccggtcgaaccgataacgagataaaaaactactggaactgccatctcagtaaacggcttttaaaccaaggaaccgaccccaacacccgtaagaaactatcacaacaagccacgaacacgagaaagaacatcagtgacacaagcaaaacattttccgagagacccaaaattcatctcccgaaacccattagggttaccagatcttctttcccaagaaaccaaagcttcgaattggacaaccaccaatgcaatgcgaacacccaagcaggaggaaacccttcgtcggactatgccta

SEQ ID NO: 28308 - DNA, 430 bp, Gossypium hirsutum
  unsure (1)..(430): unsure at all n locations
  Clone ID: LIB3197-001-P1-M1-G2
cggacgcgtgggcggngttccccttgatccacgttagaatgtagtcggtgcgggtcagatccgtttttccgccattgttatcgagctttgacaagcttaaacccaagcattccacatctgctatttttcatctcatctcgtccctccttttttttttttttggttcttagccaaatctgttcttaattttgaacgctcaagattaccgtacaaatccatttataaaaagcagtggataacatgtttttgaacgccgggaaaaaagataaagcaatggaagatccaagccaccgaaaagagcggagaatcatcaatacgattcgtcttttataatttcctataaattaatctcatttccccccctaaaattcaatctccattctcatctctggttactttctcaatcatctcagcaaaaagatatggatac

SEQ ID NO: 28309 - DNA, 268 bp, Gossypium hirsutum
  unsure (1)..(268): unsure at all n locations
  Clone ID: LIB3197-001-P1-M1-H10
tgnttgattacacgtccaataccaaactttgggatagtatcttacccaaatgttgtcttctacaatattttagattctaatgacaaacactagcctttgtgtttctcattgattttcactgcacatctccaaatcttattcctacattctttttttccacatccaaattccaatatcaatttcgtcatttttaacatattggaaaaagattgaggcatngcctgacgactcaacctgaatttgactatttgattaagttgttactaat

SEQ ID NO: 28310 - DNA, 378 bp, Gossypium hirsutum
  Clone ID: LIB3197-001-P1-M1-H5
ttttgaaggagaatccctacctacacttgagtttcatttcctagccttctctttttctaaggtttatatataaacagatgacaaaaccaggtttgggttttgttggtatacatggagcgctaccctcatcagttcatatatgataaagtgttgccttgcctattgcagtttgtggtatagggacaatgaatcttgggtggtggtggaggctttttgcaggtgccttagctggatttctcttctttcatggctttgctgccactgaaacaagctcgaactactcgttcatgtacgatgcaacatcagcttcaacattatcatattacgactacatcattgtcggtggtggcacccgccgatgtccattagctgccacat

SEQ ID NO: 28311 - DNA, 374 bp, Gossypium hirsutum
  Clone ID: LIB3197-002-P1-M1-A4
gaaacctcacccttccaaaaaatggcgttccttaacaagcggtttaaccaccattcccaacttaaccaccaccaccaccggtaaaaaggtttaaggaccatgtccccattcaaccttaaggtttggccacaactggttaataccaatccgcttaattaccaggattcttttaagaatcctccatatatccttcctttcaatgtggggggtttgacccgggtccggttccgtgacagatgggagtgatggggagctgagatcaatgaacaatggggtgagctaaagggagaagtaaggacagatttttgagacattacaatattttgtgctttttagccagcagctgcaggtagttgactgcatacatatatgat

SEQ ID NO: 28312 - DNA, 271 bp, Gossypium hirsutum
  Clone ID: LIB3197-002-P1-M1-A9
cgtctgttctagacttttaagcaatgtcgagacacatttctatactgcaagccattggtaccaattgacggtacctttatgtttggtaaatatacccattggctattgctagcagtggcacaggatagaagtgggagaattcttccaattgcatttgcaataacatcgggggagtcaactaatgactgagatttctttctatttaggttaaggaggcatgtgtgcccctaacctgatatttgcgttatttcagatcggagcaaccgaatac

SEQ ID NO: 28313 - DNA, 327 bp, Gossypium hirsutum
  Clone ID: LIB3197-002-P1-M1-B7
ccacattcccaaaaataattatcatatcccgatgagaccattcaatgcttccaaagacagaccccagctcacagcatcctctccatcggttatgttcctcccaatccctcagtcaggctccctctctctttgtctggtaaggtccgtagaatccaccgcataatgaggcactagtctttccaggtacaattcttctccacgttttaaactctcttttgcgattaaatgtgtcgtctgattcgctgatctttggatatacttgaatcgtatggtttgagaatttgttgcgaactgcttgatatctctgatgtatgcccccgatttcta

SEQ ID NO: 28314 - DNA, 334 bp, Gossypium hirsutum
  Clone ID: LIB3197-002-P1-M1-C11
cagagaatcagactatcaaattattatcaaaattcataggcatagtttaaactatttcataatcttgagcatagaataaaaccctctttgtttctaaagccttaacaaaagttaaagaaaaaaaaattcagatcaagacagcaatgtgcacgcaaactgcaatggcaattcctttcccctctactcctacagctgcaaagatgaaaaataaaaaataaaaagagaaatggagatcctttgaagagcacttttgcggcgctttatctataccagattgaccttacagctcatcatgtacgtttttttcaacactgtctttgcttgcgtctgattt

SEQ ID NO: 28315 - DNA, 419 bp, Gossypium hirsutum
  unsure (1)..(419): unsure at all n locations
  Clone ID: LIB3197-002-P1-M1-C6
gaactggtaagatccaacaggaaattccaaagtcttcaaattattatgttgctgtggggaatttgaacactaaggaggttgagatacagttgaacttctcagtgaaggctctaagttatgacacaagtcaagcgtattacacatgttctntgggggatcatttgtgtgatttggagctgtatcttctacgtcccaatgttgctgtcttgtcttcacctggtcgtaatgaggtaaaaagaacactcttacaaagtcctcaatattagtgagaattgccattaggtatttaggtcctcacatatgaaattatggcagcttgaactagaaacttgttttcttcaatgtttttcttaagttaataaatattttttttcacgatcaagggaattatntataacaaaacctaatgtcttttgtaa

SEQ ID NO: 28316 - DNA, 410 bp, Gossypium hirsutum
  Clone ID: LIB3197-002-P1-M1-C7
tcgccctaccaaattcacgtcccatctgaggcgccacaccgaagtcaccaactgcatctttgttaggtgacggcgaataaccattagcacaaccagactgccgccacttagccacagaaatggaccttcaaaatcgcagttgtagcaataaaaatagtgttgagctatgtgcccaaaccgaccgcaaatttgacactggattcgagagcgaaacccacgatcgcgcccaccatgtaaacgaccacctcgagctgagtctaccaccaccggtgacggtacagatttcgtaaggttagcctgaattgaaacttcttgaatcatccacgattgtcgatttttatactctagaagcacgttcacaagacattgaagaggcaatggtttagctagaaatgacaccaaaagtacca

SEQ ID NO: 28317 - DNA, 383 bp, Gossypium hirsutum
  Clone ID: LIB3197-002-P1-M1-D5
cgtctcgaaactattattccttgtggcttggtgcctgggtattggctcggatcacattgcagtaatggaaattcttaaaacaataagagcttccaatggattttctgttgctataattttaaagcctttcacctttgaggggcaaagacgtcttgatgaggtcaaggatttggcaggaaaacttcaagagcttacaaatttttgtattgaaattgacactgactccttgctaaaaaacgaattggtgactctagacgaggctttgaaaactgccaataatgctgttttccttgccataaatgctatatcagttgtcataagtgaggtgcaaataaaacttattgatgcagttcatgataatatgaaagaactaggagtttcag

SEQ ID NO: 28318 - DNA, 319 bp, Gossypium hirsutum
  Clone ID: LIB3197-002-P1-M1-D6
gatttctgcgattgtcctgatggcaccgatgaacctggtacatccgcttgccctactgcaaaattctactgcagaaatgctggacatgtttcactgttcttgttttcttccagagtcaatgatgggatctgcgattgttgtgatgggagtgatgagtatgatggtagagtgaagtgtcccaatacatgttgggaggctggtaaagtggcttgagataggctggtgaaaaaaattaatacttataaggtgggggttacattgagaactaatgaaatcgaacaggctaagatagtatttgcttaagatgaagcagttctta

SEQ ID NO: 28319 - DNA, 326 bp, Gossypium hirsutum
  Clone ID: LIB3197-002-P1-M1-D9
tcgagatagataaaaagtaaagggcgagagaaactgctgcgcctaactcttcttcttatcattagaaagtgacgaccctttttgttttcgattataattttgataaaattaggtttttggtgagcaacaataagaaacaatgaatgaaaaactgatcggttagggctttcgaattgtgatgaattagggtcttggaacggattaattggctatggttctgttattgaaacattagtttttttattcaaccaggttaagattaaggtttatttaaggtggatacaccgtttggccttgaagtagataaaggttgtcttgggtgagtt

SEQ ID NO: 28320 - DNA, 386 bp, Gossypium hirsutum
  Clone ID: LIB3197-002-P1-M1-E11
cccacgcgtccggttaagtttttgaggcttgcaaataggctcgggcagactccccataatgttgttgtggcacaggttttgtacagactaggattagctgagcagctccgggggagaaatgggggccgggttggtgccttcagctttgaccgtgcaagtgctatggctgaacagcttgaggcagctggaaatgaaccccttgatttctcctgtacaattatggtccttgggaagaccggagttggtaaaagtgctactattaattcaatatttgatgaagtcaagtttggcaccgatgctttccagactggtaccaaaaaggttcaggatgttgtgggtactgtgcatggtattaaagttcgtgtaattgacacaccaggccttct

SEQ ID NO: 28321 - DNA, 407 bp, Gossypium hirsutum
  unsure (1)..(407): unsure at all n locations
  Clone ID: LIB3197-002-P1-M1-E4
tcgtgcaaatccaagcacaatcaagacaaaagaagaagaacaaagcaccagtggagtactgagctcagctaattaatggagttctgaaatcaccaatctcctcgtcctcctcctctttccgaaaaataaagatatcatcagacagactatttgctcgaatcccatccgtgagaatcttgttttgtttagttatgcatactttgatgggctgcttttgcttgaagaaactaggacacaagcctgggtatgaagcgcctatcaatcttgcttccgaaacaccttttacggtgaacgaagtagaagctttatatgatctgttcaagaagttaagcagctccataattgacgatggtctgattcacaaggaagaatttcagcttgcactctntaaaaacagcaataagcat

SEQ ID NO: 28322 - DNA, 287 bp, Gossypium hirsutum
  Clone ID: LIB3197-002-P1-M1-E8
ccatgaaaatgttcctttcctgtctgttaccatttaatgacaaagtacaacagttgatcctttttctcttagaataaaacaagcaattaataaaagtcccatcaaaaatttttcaaccgcttaaaattttgttattactggaaaaaaaggtccttttttttgaactattttctggccaactaacaacaatggggcattgcctggacattcctggctattttggagatgctggtagtagagaggtccttcacaaagttggtgctgaaagagcttgtactgacaaaata

SEQ ID NO: 28323 - DNA, 311 bp, Gossypium hirsutum
  Clone ID: LIB3197-002-P1-M1-F11
ccgaaggagaaactctttcccaaagcatttttgaactttctttcatggcggatatacttgcttctttgaggtctttaatggcctctcaatctcctcctctcgatgccttacttgtcgcttctgaagattatcatcagagcgaatatgtttctgctcgtgacaaaaggcgcgagtttgtttctggattcaccggaagtgcaagattggcacttataacaaaaaatgaagcaaggctatggaccgacggccgatatttcttgcaagcaacgcagcagcttagtgatcagcggaaactaatgcgtatcggagaa

SEQ ID NO: 28324 - DNA, 203 bp, Gossypium hirsutum
  unsure (1)..(203): unsure at all n locations
  Clone ID: LIB3197-002-P1-M1-F3
tcgctttttagagttgtcaagccttttttctttaactgcaatgtaacaagcttttcttttcttaaaggtacttgaaaaaggtgaagatttttctgttctttttttctgaggggtgggggagggggcttttgtgtagtttagactttagaatttntgggttttngagtagtttgattggatgagagtggaggaaaattggagtg

SEQ ID NO: 28325 - DNA, 181 bp, Gossypium hirsutum
  Clone ID: LIB3197-002-P1-M1-F5
ctgagccaaatggttacatcagcgagcacatcgacagtggtcgtgtggaaggtcctacttcatctgctgggcatccaaaagaggctcaagctcaaaagatggaaaagcaacgtgctgaatatggaatgtgaccaactcttcgagagatagctagcgcgtctctagaggagcatgctagatt

SEQ ID NO: 28326 - DNA, 224 bp, Gossypium hirsutum
  Clone ID: LIB3197-002-P1-M1-G11
tcgcggacgcgtgggttcaaagaaaaaaaaagagctttatttttttttcctcttctatttttttggtgggttttttttttgtttggcttcgatcaaaccctaggttcctgccgattatacgcatgtggacgggcctaggctatgcgggtttccgcatctaaattatggatttagaagattcataccttgctcaagagattgcaattgccctttaaacaagatac

SEQ ID NO: 28327 - DNA, 228 bp, Gossypium hirsutum
  Clone ID: LIB3197-002-P1-M1-H10
acgatatgacggacctacagagaattcagaggatttatcgaaacagattggacattctctcagcagattgacttgattttaattttaacaagatttagacgcgagagaggtgcatgtggttaatacacaagataaagctaaatgcgtcacgcttgaagaatgtaagctggttgagaagcatatggcgaactatataatgaaactggctaaaaaaggtcaagagaggca

SEQ ID NO: 28328 - DNA, 197 bp, Gossypium hirsutum
  Clone ID: LIB3197-002-P1-M1-H4
acgcgtgcgaattaaatcgagcgcacaagagaatgggaagtgatatgtgcggaacacggcatatattcaacggagcgtgacaatggagataatgttctacgactcaagaggatgagatgtttactacaatgaatacagttgaggtagggtcgttcctcgtgctgttcttatggatcgtgagccagggaccattgata

SEQ ID NO: 28329 - DNA, 111 bp, Gossypium hirsutum
  unsure (1)..(111): unsure at all n locations
  Clone ID: LIB3197-002-P1-M1-H8
ctatagggggaaaggctggggtacgcctggcaggtactcggtcttcggaattctctcgggttgacctcacgtcgtcttcggtcgnnaaatccgcttaagggagggtgtgta

SEQ ID NO: 28330 - DNA, 344 bp, Gossypium hirsutum
  Clone ID: LIB3197-003-P1-M1-A8
cccacgcgtccggctcgatgtcctggaataggagaacggaaggtaaaacgtttgcgcgatacttttcatgaacccttcaagcgcatagtttccagtaacccttctgttccggaaactcctgtatgcaaagatgctgaaccaagctcagcaagtgaaatcatagaagcagacaaggatactgaagatacgagcaaacgtaggaagaaagaaaatgaaattaacattaaatcggctctaactgctgcatttgccaagtatgctggtaaaaatagtaaaatgaacaataaatccgagggtaataagggaggaggaacccttgctgctgcagtaccagaaccagcaac

SEQ ID NO: 28331 - DNA, 287 bp, Gossypium hirsutum
  Clone ID: LIB3197-003-P1-M1-F5
ctcaaaacaatttcccattctctgtcatcctctcttcttaccacacaactccatgcttctccagagagcaaaaagattttttgtgtgttttacaaggccaacaattactttacgaataatcccaacttttttttttgtgtggagggagccttcgtgttgcacccatagctgtaatcacatgggcatcattatatttttacctactacaaagaatgaccttactgcgaactttaaaaacatatccctgatctccatgtgctcatatctaccccattccacctctctta

SEQ ID NO: 28332 - DNA, 383 bp, Gossypium hirsutum
  Clone ID: LIB3197-003-P1-M1-G3
cggacgcgtgggcgaaggtattacatatgattactaggaattcatgggaaacagagccgttactgtcagaaggtaagtttagttctatggataatgatgagattgtgagttcacagaacctgtcttctactctgaggaaactgtgtatgtgggaaaagaagctctatgatgaagtcaaggctgaggaaaagctgcgcatgattcattcaaagaagcgtagccagatgaggattttggatcacaggggtgctgatgctcaccgagttgactccacacgaacttcaattagggccttatctactaaaatgagagttgcagttcaagttattgacaacatagcaattactataaataaggtgatggatgaagagttggggcacaga

SEQ ID NO: 28333 - DNA, 394 bp, Gossypium hirsutum
  Clone ID: LIB3197-003-P1-M1-H6
gagttctccctttctctctggaaaaatcccagatcccggccaggaggagttgccggaccaccgcagggtcaccgctggccaccgcgcggtgctggagttctgaagtcttagactgtccacattgattttttcttgtgtgttatttgccttttttttcgatttttgtttctttttattctttcttgtgttttgaatttttttgtatttttattttttttttaatttttgactttttttaatatttcttttttttattttttcttttttttgtatatttttttatgttttttttttttatttattttattgtttttttattttattctattatttttttttcttttatcgttttttctatgtttagttatgtattctattcatctttttttttttt

SEQ ID NO: 28334 - DNA, 265 bp, Gossypium hirsutum
  Clone ID: LIB3197-004-P1-M1-A1
agaaaatgggttggatggggaagttgaagcgaagggccttcgatcaagttaccgccgacttttccgttttttggttttcgtggccggccaccagaattggccggtgggaggctgattggcccccattaatgggggagaactccttcctgtgaattacaaaaagggccttggtctcttttacccaaacccactttttctttatgacacacactcccttgtgtttccctccttttaccctctccttctctttgagtctcacctcctc

SEQ ID NO: 28335 - DNA, 366 bp, Gossypium hirsutum
  Clone ID: LIB3197-004-P1-M1-A4
ttcaaagtgaagaactgtctatcagactattgccatgcgttagggatacatactggagggatccctaatttttgagggagttttatttcatttaatgaaggcattccagtgtggttttcttgatgctctggaatttcttatttaatgtttttggctgacttatttttgtttgttcggttcaaatccaatttatgaccacttccatgatgataaatagggagttacttttcatgatgacaagaaattggttaagttgcttggactttcgggtgcattattctgaacttacatgggcgtgctatcttaagccacaaagcaaatgtttaaggaagttttcatggattttgatacatgcctcttttttta

SEQ ID NO: 28336 - DNA, 142 bp, Gossypium hirsutum
  Clone ID: LIB3197-004-P1-M1-A8
tcataaaagctagcgcttgaatatggctgagagacccattaaaatggctgtgggggattctatcaaactacctgtttattactttctccctctagtaaagcaacttattgataaataatacctacatcgtccatatgcacaa

SEQ ID NO: 28337 - DNA, 164 bp, Gossypium hirsutum
  Clone ID: LIB3197-004-P1-M1-B10
ttaaaactatgcagctttcttcagcacaaatccacgggctgtttcagaccagtggtggctattaccgtcctttattgagcggctgcttcctgtacttcgagtcactattttggatattacgcgtctacctttattgcaaaagacttggctcagatcttcaataa

SEQ ID NO: 28338 - DNA, 313 bp, Gossypium hirsutum
  unsure (1)..(313): unsure at all n locations
  Clone ID: LIB3197-004-P1-M1-B11
ggggacgcggcgcngcngaccggccgaatcccggtcaccacgcgtccgactagagatccaaattaccaaaacggctccgcgctctgtgttgatcgcgctagactgatttcagcctatcttatcgagtctcaaagcgccaaaaggcggagcgtgtacttgatatagaaagctctggtccagaggaatccaatcgagaggacaaagactaataaacttgttgcgagccatcatccttatgacaagaagacactagcctacattctgaaagagcatcacaattgactgagcatggatcttaacactgatctatgtt

SEQ ID NO: 28339 - DNA, 211 bp, Gossypium hirsutum
  Clone ID: LIB3197-004-P1-M1-C10
tgtttataaaaaaccggctcttttcatgcggtgggtaaacataggggcgggagcgactagctaatcttcattttctaacgcacataaagtaaccttaggcatatcatcatatccaccttaatttttctatttgccggttcagcatcaggcattgatatgaatacttttatacacttgttctgcaacatcaattcactgttattatttgccc

SEQ ID NO: 28340 - DNA, 292 bp, Gossypium hirsutum
  Clone ID: LIB3197-004-P1-M1-C5
agctgtttattaaggaaactgggaagaccaagtacagaaaaaaaagggaagatgagcgagattgaagctaggtatccaatttcaaccatgcgtttgcccatgatacatatcgctggtgttaaatatctgcaaagtacgaaatggttcgagagcgaatgacttaaatgcggatgggaaagagttggagtatcattaatccagctgtgactccgctattatatcatttgatgacattttgctctacttgtacaatccatggtgcggatactgataacgtcttgtcacccagtta

SEQ ID NO: 28341 - DNA, 239 bp, Gossypium hirsutum
  Clone ID: LIB3197-004-P1-M1-C7
gtcaccgaaatgggacgtctggtttccgaagggtatgttttaaccggtttagcgcccaaccaccaagcaattgccaatctaaccacggaccaatttaaccaaaccagcccccccgaaccaaatcatatttcacctattaatccacaagtcccacacgggggaaagtattccaatgctgagaggatattttgaaaagtgtcttacgatacattgaggttgccgcataaagtgttggctca

SEQ ID NO: 28342 - DNA, 449 bp, Gossypium hirsutum
  Clone ID: LIB3197-004-P1-M1-D2
aaaagaaaaagaagaaaaaataagtcaaaaatgattacagtggacagaaaagaagcataaggactataacaaaagtaaaagggaggagaaaacatgtgtcataagaaaaaaagaaataaaagattatcgaaaaaaaaagcaaaaatataaaaatataaaacatatggcaaaaatattcaaagaaggataaccatttaacaaggatcagagaaggttagaaataacaaagaaatgaaaacaaaaagaatagaaataacaaagggaactaacgaaaactgaagaaaaatagtacaagaacgcatatagttacccagagagaagaaagagaggaataagaacccattgaaaacttaaaaaaatcgtaagaaacaaaagggaaaaaaagttgtactaaagaaaaaaaaaatttaaaggcgaaaaaccagaatgaaaattaacaagaagacaaa

SEQ ID NO: 28343 - DNA, 344 bp, Gossypium hirsutum
  Clone ID: LIB3197-004-P1-M1-D5
cggacgcgtgggtgcgtcttcgacttcgcttgtctaattttcgagaacactggaatatactgatccttcagttttgtcagagtaaccatgggttgagatgctgatatggaagattatggattcgagtactctgatgaggagcctgaggagcaagacgttgatattgagaatcagtattacaattccaaaggtgtggtagaaacagaccctgaaggagcacttgttggttcttctgaagtagttatgcatggatgctgaaaaggctgagtgggagatgctaacatacatcaaatcagcagtgacacgaaactacagtgaagaatgtatgaacaatattatggact

SEQ ID NO: 28344 - DNA, 358 bp, Gossypium hirsutum
  Clone ID: LIB3197-004-P1-M1-D7
aatacattctacttctttcttcatgcgggtcttcaattataactgacggggtgcaagaaccttaattaaatatatattctatgaaagggaaatgcctatcacttcttttttgaatcaatgacctcaaggcacttatgttatcattattcttatgtgaatacatctatcattcaagctcatattaaatacccattattcatatttccgtttatttaacaaattatctacttttcaacttacactgcttaagacatgtatttccatattcatttttatctatcactctcactttagacacccacctttttatgctatgcttcttaaatccttattatctaatattattctcaacttattt

SEQ ID NO: 28345 - DNA, 236 bp, Gossypium hirsutum
  Clone ID: LIB3197-004-P1-M1-F10
tcttatatctctgacaccttataacattgggggggggttataactggaggggtgtgggcctcatcctccacctttaaatacttctccaaattatatcataatagacgatttacaaagactttatcttcattaccttaataaattcttttatcattacctaaaccttcattataacctctcccgacatttaaattatttatataatattctttttaatcttcaacccatttttcata

SEQ ID NO: 28346 - DNA, 239 bp, Gossypium hirsutum
  unsure (1)..(239): unsure at all n locations
  Clone ID: LIB3197-004-P1-M1-F12
tcgttttttccaatctgttgaaaaacccagagccgagtactatcagctgaggggttatggcaaaaactttaattcactttatacacanttcaaaactaangataacaaatttgatggctttgtttctcatgtttgggtgaaggcttatctccataaagatactaatgtcgattaccaagctcattctcattatgatttaactaatttactcactacttttcttattaatttattgtctg

SEQ ID NO: 28347 - DNA, 237 bp, Gossypium hirsutum
  unsure (1)..(237): unsure at all n locations
  Clone ID: LIB3197-004-P1-M1-F3
ggccggccggaatcccgntcgacccaccgtccgtttattcctcctacggtacaatctgaggggcttttatagctgcgcgtcttcanattctataatcacaaggagacagtacatcaaccttgtgccattgcctgccactcttcaagtcaccactactgtcattcatctacaactggtgtattacaagctgcattgaaggctcaaagcagctctcaatgaacaaaagtcatcaatctc

SEQ ID NO: 28348 - DNA, 345 bp, Gossypium hirsutum
  Clone ID: LIB3197-004-P1-M1-F4
gatatccctatttgctagggttttggtgcaggggaggggccccattgagctgtgagtgcaccctcataatcggtgatccctatctccataaagtcaaggctcgaggcttattctcacttaaaggtccccatcttaaactccgatttcaacggaggagacaaagaccccgatggtgcatccccgaaagtaaacctctctcctatctctttttattctcatacgaaaagatttggtgcaaaagcgacaataaaaataaatcaaaacatgagaaaatgaaagctgcaatcaccttctatttttatggttgcttttggattcttgatttcagatgcctatcgtaatttt

SEQ ID NO: 28349 - DNA, 367 bp, Gossypium hirsutum
  unsure (1)..(367): unsure at all n locations
  Clone ID: LIB3197-004-P1-M1-F8
tcgtttatactgtgacaccttataacattnaggggttgaaataactggtggaatgtgggcctcatcctccacacttaaaaactggtgcaaagtatatcataagatatgatggacaaagactttatcttcgttacctgaacaaaagcatttatcatcacctatagcttggttataaggtggagcgacatttaaatgatggagattatgttctttttaatcgtcaacccagtctccataaaatgtcaatcatgggccatagaatcctaattatgccatactctacctttcgcctaaatttgtcttttacttcaccatacaattctgattttgatcgtgatgaaatgaatatgcattttcctcaatcatt

SEQ ID NO: 28350 - DNA, 333 bp, Gossypium hirsutum
  Clone ID: LIB3197-004-P1-M1-F9
tcgttttactgtgacaccttataacattaaaggggtgaaatatcttatggggtatgggcctcatcctacaccattaaatactctttcaaaatatatcatattatatgattgacaaacactttatcttcgttaccttaataaaatctttcttcatcacctaaatctacattataattcttgacccactattaaatgatgcatattattttcctttttaatcttcaacccaatctccataaaatttcaattattatctatataattccaattattccatactctactttttccctaaatctttacttttacttcaccatacaattcctcattatt

SEQ ID NO: 28351 - DNA, 336 bp, Gossypium hirsutum
  Clone ID: LIB3197-004-P1-M1-G11
atgcggggactgcgcgcggactgactgggccaggagctggtcgccggcgcgtgactgcccgaagacgcggacggggcgctactgacgattggcgccgcgctggccaaacatcatctgttgatgtggattacaatgcttgttgtcgatgagatctatcttcaaatatttattgatctgtcacaatggcctttatatagaggtctcactgatttatgtattactgctctactactaaaacatatattgcaacggactttcttgtgtgacatctatggctacacaatagtactgtacatctatgctttggtaatttcatagaaacacacaggagctgta

SEQ ID NO: 28352 - DNA, 202 bp, Gossypium hirsutum
  Clone ID: LIB3197-004-P1-M1-G12
tcgttttttttgaaccataccctactctcgggtggggttcaatttgtcaagggggacgtgtaccatacttcatactccgccactccactcaaataatcttattccgatacatcttgcttgatatacccttattctaactgtacaacctatccttgattctatattccccacggttcttccctttaaatctcccataattgaa

SEQ ID NO: 28353 - DNA, 165 bp, Gossypium hirsutum
  Clone ID: LIB3197-004-P1-M1-G2
aaaatacgtttcctactatttaaatctgatggtaaaaataagttgaaaagggtcatgaggctagtttgtggggatttctagtgcaagctcttatacaaaaagtttagcctaagcttttacccatttaatgtaacaagtcattacaaaatgaaatattatattatt

SEQ ID NO: 28354 - DNA, 294 bp, Gossypium hirsutum
  Clone ID: LIB3197-004-P1-M1-G8
atcgccggggctgtgggaataagatggcggggaagaagaatgttctgtcggctcttgcagtttacgcggaagagtcatagcccgagtctgatggcgagactggaatcgaggcgatgggcagcgcggctgaggagaaaggcggattggtatctgatgcctatggggaggatgacttttctcgtctagggggtgacgaagatggctatgaaaaaaaagaggatgagaacagtggacagtctgaagatgacgattcagagactgaaaaacctgaggcttattacccaaacgagaagc

SEQ ID NO: 28355 - DNA, 182 bp, Gossypium hirsutum
  Clone ID: LIB3197-004-P1-M1-H11
atcataatgaacacaaggtaccggactcaacgggcctcctttttctagaaaagcgcggacacacattccggcctcatactccctcaccaaatgcaaaattctacagctccatctcaatgtaccaatctatatacatcagatgtaacttacctgcacaaggctcttgctcactcccacaggga

SEQ ID NO: 28356 - DNA, 378 bp, Gossypium hirsutum
  Clone ID: LIB3197-005-P1-M1-A10
tcttttagaccttcgctcttttaatctccacgggcgatcttcaaacaggagggagagtggcttcattatttaatttgcagagaatctgatgttgatgttaatggatgacccaaatgatagggatagaaaattcaaataacacctttacactattaaggatcgttgctcaaaaaccaacgagatgtttatttatccactgcagccttattggttctggacattttatccccacattactcagctccgttgatatcctcaaattaaccaagtccccctccgctaggatccttattatcaccttcttcaagacatttatgcctcctccaccaaactaaactgagaatccattaacatattgtttagaactttatctacaaa

SEQ ID NO: 28357 - DNA, 279 bp, Gossypium hirsutum
  Clone ID: LIB3197-005-P1-M1-A6
atctgttctctaacacacactaattatctttcactgcgttcaacttatacaggccgtcgaggcctattaaaatttttcctagattatgtcttgattctcttctccttgagcgtctctcttataactatatacataaatccaaccttagtttcacatgtctttccttcacctcaagtttttacgtcttgttgtagatccttttcatcattgttctttcccacactttaactcctttatcacactgattttcctgtacttctcgacaattaatcaatttat

SEQ ID NO: 28358 - DNA, 411 bp, Gossypium hirsutum
  Clone ID: LIB3197-005-P1-M1-A9
cccacgcgtccgattgtgaacaaggatttatatgatagaagagaattatgtttgtttctttgttcatttacagggtggatttcgtaagaaaatgatgaagtttctttccaaagttgttcggttttttataaaatgcatgcattgtgttctatcggttggtccaatcccttcccacatcggcttcgtgatggacggcaatagaagatacgcaaggcaaaataagctgaaacaagtggccggccatgaagctagttacttttctctcatgtccatgcttatttactgctatggactggggatcaaatatatgacggcctacgctttcagcatcgataatttcatgtgcaggcccgaagaagttcaatccatcatggatctcatgaccgagaagtttgagctcttgtgtcgaaa

SEQ ID NO: 28359 - DNA, 181 bp, Gossypium hirsutum
  Clone ID: LIB3197-005-P1-M1-B8
gagaaagggacgtcactctggatatggtgggcgcaagggtacaggggaggggtggttgcccacatagatcttgtggatgagaaggattcgtgttcttagactcctactcctcaagtacagggaatcaaataatattgacaagctcatgttcctttacatgtacatgattgtcatgggttat

SEQ ID NO: 28360 - DNA, 336 bp, Gossypium hirsutum
  Clone ID: LIB3197-005-P1-M1-C10
gttaattccataagccccattctgccaggggggggatacaatcgctgtgggggggcaagaaagtcggatcagcctcgatcataggaggttatttttaccggtccaacaccgatccttgtatgtatggaaggtacttgaacgcatattagtatgccggtgcaatatgggcagcaaccgaagaccctgaaaacagtggctacttatcaactaacactattccttttggttgtgcaagagactcccctctagaatgcatcaccgagccatcaagcactattgcagcattgggttacattgactcattcagtcatgacaatagcaaagatactatacttg

SEQ ID NO: 28361 - DNA, 391 bp, Gossypium hirsutum
  unsure (1)..(391): unsure at all n locations
  Clone ID: LIB3197-005-P1-M1-C11
agagaagtcagataaagaggatgatgtagaagatgccaaagagaaggagaagaagaagaagaagaaagataataaggataaggagaaaaagaaagaccagaagtgtgataaagaggatgaggaagaataaggacgaagagtgtaaaaatgatgtagcggaaaagctcgaggttagtgaagttggtgagacaacgaataaagaagagaaaaagaaaaacaaggatccagaggtggtagaagaaggtgacaatgttgagacggaagagaagaaaaacaaaaagaaggataagaaaaaagatgaggtagaaaaatttgaaaagaagaagaaaaagaaagacaaggaaaaggaaaaggagcacgaggttgaagaagatgaanggacgggaaagaa

SEQ ID NO: 28362 - DNA, 363 bp, Gossypium hirsutum
  Clone ID: LIB3197-005-P1-M1-C12
atagatgtcagattatgaggaggaagatggagagaccaaagctagggtatggggactagacatcatgttgcttacggttatgcgatcaagaaagaccagtttcgtttaacattggtctacgttgaataaggtcatatcgatataaaagcggattcggcttggcactcggcctgtgactcctgatactcatcttaataggctgagagttggatactcatactgccaatactgcgacaccaaagcatctcatgttgctctgtgcttatgagaaccacatctagtgcataccttcggccgtgtgccaatgcatgaaagcctttctgctaaacatggctgtgaactggtcactgacccccctgaaca

SEQ ID NO: 28363 - DNA, 144 bp, Gossypium hirsutum
  Clone ID: LIB3197-005-P1-M1-C9
tcttcaaatgaggcctttcctgatgacgtcggaaaagctaaaaatggaaggggggcgccattgaatgatattgaaaagtttatgaggcaattcgctgcttaacctgcactttcccaaccacaagctcattttgacaatatattg

SEQ ID NO: 28364 - DNA, 357 bp, Gossypium hirsutum
  unsure (1)..(357): unsure at all n locations
  Clone ID: LIB3197-005-P1-M1-D2
tgattttatccgttttcttggtcgtgaaatttgaataccatagtccatgggattaaaattctgtcatccttatcgtgattcatgaatcttggttataaatggagaagggtgatcaaggaaaagaggattctaaggatcggattagtgaattaactgatgaaattctatttataattctttcctttttgacccttaaagaggcagcaaacatatgctttctttccaggaggttgaaaattttgtggccacacattgttgctttgaactttgatgcttcaaatacattangcgagcttcggaggaatgggcgattaaggaaaaaaaagagaacttggtacataaactgggttaaccacg

SEQ ID NO: 28365 - DNA, 279 bp, Gossypium hirsutum
  Clone ID: LIB3197-005-P1-M1-D5
gtctttgaggggacaggtcccatgtgaacaggccgtgcacatgtcatagtcaacactaggagacaaagtaagccggtacgacagcggatgcagctcaagctggtaaaggaaatctggttacaatgcctaagccgactcccactttcttaccaaagcgttacggatcgcggattacgtagcaggcacctctaaaatagtcacaaggttcaccaaacacgatgccaaccctgaatacaactcaaccatgaggcagggagcaccgttctgaaaagcagaatg

SEQ ID NO: 28366 - DNA, 147 bp, Gossypium hirsutum
  Clone ID: LIB3197-005-P1-M1-D9
gtatttgttcactaccgcatagataagaggaggcaaacaaagttgaactgggcttgcagtataagcgactacgaaaagaaatatgcaagagtgcatgacagcccaaattggtctggcctgaattgccgcgggtaactcaacatgaaa

SEQ ID NO: 28367 - DNA, 393 bp, Gossypium hirsutum
  Clone ID: LIB3197-005-P1-M1-E1
caacccgccacacttgcggtcaacatcactaatcctttcctttcatttgtttgtctctccgaacttaatttttcaaaaccttcgaaaattaataaaatttcaaaaaaaaaaaaaaaacagaggacgaattggagtcaatactcgactgacatggctgcacttcggcctcctagatcggtctcctcccgagacagttctgatggtagcgagaggttggacggtgctggtagctgggacgcccttgaatggaccaaaattgagccggttacaagatctgtttcccatgttaattcggagtttctgcttgaagctgagcgagttatagaggagggccatggagttgttcttggtaatagaaatgaggccggaaacttgttcgttaccaactttcga

SEQ ID NO: 28368 - DNA, 194 bp, Gossypium hirsutum
  Clone ID: LIB3197-005-P1-M1-E3
cgcttaatagggaaatactttgaggagatcagtcaagatactgtgaaggacggttcaagcacaacttaaaccatcactgccgaataaacgcttctctttactacagtcgtcaacaccatgcggtggccgggggtgaaaagtgtggggttgttggtggtttctattacaatactggcggtagactatttacacat

SEQ ID NO: 28369 - DNA, 355 bp, Gossypium hirsutum
  Clone ID: LIB3197-005-P1-M1-E6
gactcacgcgttcgttttaaaaagggaaaagaaaatcaaagtgattgggtctttcaattgagcccttcatttctctctcattttctttcttcccatacaacaattactgatgtaactgccacttcaccgatgaccatctgtttaccgtggacgtgggcgaagtggctgttgatgacgtcacttcctctgcttatttaattagattctgatcctgtgatccaacttctgcctactctcaatctacattctctactgctattcctgttgataacggaaatggtaccaatggattttatcttggatacaatggcatatccactttttgatttgtaccggtgctttcttccttctactg

SEQ ID NO: 28370 - DNA, 310 bp, Gossypium hirsutum
  Clone ID: LIB3197-005-P1-M1-F1
tctgaacgtgcgtcaagaaacgccttggatttacctgggtttcgcatcgactgctctgttgctacgtgtatgaataactagtgagcgaaaccgagagagtgcattacagcccacatcagtcaggctgatattcaagtcggtaatgcctgctgggaacactactggcttgatcacggaattcagactgatggccagatgccacgagacatgaccgtcaccagaggtgacgatgctgttaacaccgttttcagtgaaactgctgctaggaagcacgaccctcgtgctgactgatgggatcttgagcctactg

SEQ ID NO: 28371 - DNA, 290 bp, Gossypium hirsutum
  Clone ID: LIB3197-005-P1-M1-F11
ttctgtctcatccgcatacccgtggatatggttgggcctttccaggggtgtggaggctgttccctcttattcagttcttttattcttttattctcataattattattctaaaatattcctttccgtatttttttactttcttttcatacccatacactgctttttttttttatggttgctttcttcttcacaactactattcttttctatgctctactaaacacgtttgcttttaattgcttatttcaatttctctttttcatccttttttgccatttcctctctatctt

SEQ ID NO: 28372 - DNA, 326 bp, Gossypium hirsutum
  Clone ID: LIB3197-005-P1-M1-F6
aaaaataaaaaaaaaaaaaaaaaaaaaaaaaaaaaggaaaaaaaaaaaaaagaggaagaaaaaaaaaaaaaaaaaaaaaaaaaaaaaaaaaaaaaaaaaaaaaaaaaaaaaaataaaaaaaaaaaaaaaaggggggggccgttttaaggaatcaaattttaataccgcgtgcttggaactttataatttttttttagggtacctaaatttaatttaacgggccttttttttaaaacgtgtggattggaaaaaccttgggtttaccaaattaattcgctttgaaaaaaatccccttttggcaaggttgggttaaaaccaaaaaggcc

SEQ ID NO: 28373 - DNA, 241 bp, Gossypium hirsutum
  Clone ID: LIB3197-005-P1-M1-G12
gcgctactggcaaccctttgagcacgccttttgggacttctactatgcgcctgacagcgacttatacctccccactgatgacgacagacgcgggcagctgctacaaaaaagcatcgacatggcatccatgcacgcgcaactcgttaaaaacgaccgtgacgtgatgtatcataagactgatttcggaccatccactctgccattggcatgagggaaatggcacaatgacccaaccaacact

SEQ ID NO: 28374 - DNA, 125 bp, Gossypium hirsutum
  Clone ID: LIB3197-005-P1-M1-G9
gagagacagtgtttccttcagcaaaggggaacatcaatgctgtgccttggtgggatggattatctgaatggggaaagggaagactttctgtgagacccaaaattggtgattccttactttttttg

SEQ ID NO: 28375 - DNA, 240 bp, Gossypium hirsutum
  Clone ID: LIB3197-005-P1-M1-H3
agcaaaattaaaaaaattggctaagcctgcaggtgtgattgccctagcattggtggtgggtgttcacgtgagtgaatcagaagacggggtaaattctaatacaaaccatcggttgcgtctgtctgttgtcatgcacctgatccgtgtgaatctatggattggaaacataggggacgctgcacatgttcttcaaaatggcagctcgtagatcacgcacattctatcagttgtgagctctgc

SEQ ID NO: 28376 - DNA, 278 bp, Gossypium hirsutum
  Clone ID: LIB3197-005-P1-M1-H5
ttcacatcgtccgcacttactccctccgttcaggccatctttcaatgtgatggaggcaccgccctcttctttctgctacctttttcttaacacctcataagtctctattagtctttacaacatgactctctaatctatccaattcctaccctataactacaattaccgtaaggccatttaaagctgaacgcgccaccaaatcgaattttgccaagaggatatatattgcaaatgattaaccatgcatgagcttcgatttcggtcaaagagctcatcta

SEQ ID NO: 28377 - DNA, 254 bp, Gossypium hirsutum
  unsure (1)..(254): unsure at all n locations
  Clone ID: LIB3197-006-P1-M1-A11
nacggaatggcacangcacaaggagaagacgagccggagagacgggggaagcccgggcgagagcgcaaccagcgcgagcaccgaaagggaaacgggacaaaacacccgaaccgggacgcggcggcagacggcaaacgaagggagcccggagacgncggcgggggccaaaggaagagacaacgaacaaggacaacggacagcccacccgggaaacggcgcaaccggagggaggggacaacgggcggaagagcacc

SEQ ID NO: 28378 - DNA, 448 bp, Gossypium hirsutum
  Clone ID: LIB3197-006-P1-M1-A12
aggcaacctacggctggtcggaggagatggatgggaaagctcatcttttactgttcttgctcagcagtacgtacgcatgaagaagacacatggtgggaaagttgttccaggagtaatggacacagctagcgcaaagcatttgtctcatgcctatgggaccttagcggaacgagtagccaccatagctcagaatgaaacgctgggtaagaggcttgcccatggttacccatatctggaggccgaggttgcatactgtgctcgaaacgagtactgtgaatctgctattgatttcatcgccaggagatctcgccttgctttccttgacaccgatgcagcaggccgtgcattgccacgaattatcgaaatacttgctaaggagcacaattgggaccggtcgaggcagaagcaagaaatgcagaaggctagagaatttttggaaactttcaag

SEQ ID NO: 28379 - DNA, 294 bp, Gossypium hirsutum
  Clone ID: LIB3197-006-P1-M1-A9
cccacgcgtccgcaacaatacaccaatatactactcatgattttcaggtgagcaattcaaaattcgccacgtcatcacatagtccctgtttttcaaagtatcgtccttggataaatttatccaaaaagaaaagacttattttatataaaaaagtagaaattaataaaaaaaaaccaaccggctagcacttgctataataaagaaaccagagggagattcaaacagaggaagatgaagatgatgaagagagaaaaaaaaatgaagtctcagatctgtttagctctttggaactct

SEQ ID NO: 28380 - DNA, 212 bp, Gossypium hirsutum
  Clone ID: LIB3197-006-P1-M1-B5
caacccccataataattctgggaaatatcgcttacgaggcgggggacttccaatccccaaaaaatggcagatcttatccacattactccaagaagcaatcgtactcatatagactgactatttctcattaagatccatcactgttataattacttatatccaaatatcaaggactactatcattatccttctaccataatctccatattaaa

SEQ ID NO: 28381 - DNA, 450 bp, Gossypium hirsutum
  Clone ID: LIB3197-006-P1-M1-C4
ccctactcgcaatttgaagaagaacttaaacagatgtttctgaaatgcaaaactttgaggttacatgggaatatgaagcaggaagatagaagaaccaccttcagtgccttcaaaacagaaaaatcggcacttcttgtctctacagatgttgctgctaggggcttagattttccaaaagttagatgtatcatacagtatgattccccaggggaggcctctgaatatgtgcatagagtaggtaggacggctcgactgggtgaaagaggagaatccttgctatttctacaaccaatagaagtggattacttgcaggatctagagaaacatggtgtgtcattgacagagtatccactcctcaaaataatagattctttcccattgcacagtcaaatgcatcgtgtcaagaagtttgtttctttagaatcacatccatgggttgtatctcttcag

SEQ ID NO: 28382 - DNA, 449 bp, Gossypium hirsutum
  Clone ID: LIB3197-006-P1-M1-D6
cggacgcgtgggaaatatggatcaacgttttctcatgttaatttgctatgaaatagcctgtagttttgtgttaggctcgaggttaggacctttcatttctctgtagcttctagtcaggctggcttgggcttttgagatgttgagcagttaaataggtgacaatcaaagataatgtgttgccctttctgttaacactagctgatatctgatatttgatcaacattaagtgaaacgtgataacaaaataacaaatgttttaattagaaaagcatgaaaatcttcagctatgattatagtgtttgtttgcaaaactataatctgaggttgaaagttttagctttttaaccttttagtttgatttctatttgcaaatgttaatttatgttattgttttctgtatgaatcatgcattcacctcgtcagttgcatgcgagaatgagctagtttta

SEQ ID NO: 28383 - DNA, 354 bp, Gossypium hirsutum
  Clone ID: LIB3197-006-P1-M1-D7
ctacgcttttttttttggatacaaaatttcctccttccgagaaagggccacctttattttgcgggggaatacaagccagccttcttatgaatattgggatattaacttgccttatatttcctatatcatctcttcttattataagcgctactatacactttataccaaaatctttcaaaagctgtttagatagatcctgtttaaccgcttcgccttttcttcatgctgaatataaaaaactccttttccgcttagcttatttattaatgcctagattattatcctatttaccactacttcactttttatcaaagcattatggtttacactttctctatgctatttttatttttt

SEQ ID NO: 28384 - DNA, 326 bp, Gossypium hirsutum
  Clone ID: LIB3197-006-P1-M1-E7
ttgattctggtgggagtggctaaatccagtggggtgtctaaagtatctagttggggaatatcattatgtatagtgcacttcatctttaatcctggcactagttcttttcaagaaactatacccagggcatagagaacaagagattgaaaattgcatcataaaagctgcaaagtacattgaagatatacgatatcccgattgttcttgttatgtaaattggtgaatttgcttcttttatgggacatggtttgcactcttatgtcttaaagcttctgtgaagaacttctaaatttgtttggccattcttaaaggagaatattgtttgc

SEQ ID NO: 28385 - DNA, 240 bp, Gossypium hirsutum
  Clone ID: LIB3197-007-P1-M1-A10
aaactatcaccattttcaactattacttatatcaaaatctaccaaatccttcttcttattatttcattccatctatctataaaattcttttactattcctatcatcaaccaacttcctttatacctaaatcaatttatcaacataaatactacatctttttattcatacttatcatttcttattcacattaatcacaattattatcctctataacatatcattatattcttctaactata

SEQ ID NO: 28386 - DNA, 270 bp, Gossypium hirsutum
  Clone ID: LIB3197-007-P1-M1-A5
gcccgcacctacccctccggaattactctatcgacccacttctacattttgttatctattcccctccgtgaggaaagggacacacttttttggtgtttaggaggacacaatttttttcttacacacacaacaaaaatccactacatacccttcatttctctaaatttttgcttaccaaaatactttatacttattaaccaatacatcatatttctatccaatttaattttgaaccatactacaaccttgattagtctaacttaattgacg

SEQ ID NO: 28387 - DNA, 433 bp, Gossypium hirsutum
  unsure (1)..(433): unsure at all n locations
  Clone ID: LIB3197-007-P1-M1-B11
gtggaaattgatattagggaagagtgtggagcatcattgactgcgcgaaaatgagattanagaatgtaaggagaagttagaaaattgtgaagtggagttaaggcacttgcagagtaaaaaggaggagttgcagaaagaagcagatagattgaatgaggttgcagagaaagcacagatggatgcattgaaagctgaggaagaagttgcaaacatcatgcttttagctgagcaagctgttgcttttgaattggaagctacacagcatgtgaatgatgcagagatagctctgcaaaaagctgaaaagtctctttctaatttgattgttgagactgttgagcagcaggtttcggccgaagagactgttattgatgaggagaccagtcccgggggtcctaatgatgnttttgttgaaagagaaagggatgctttgatt

SEQ ID NO: 28388 - DNA, 154 bp, Gossypium hirsutum
  Clone ID: LIB3197-007-P1-M1-B7
tattcgtccttttaaaatatgtctctattgagtgaaaatatgcaaaggcggcgcgggggaaatggtaccattgatattacatatttcaagatatattaaagtttctgctggaggaaatgggcatgcccattggacttttgccccttaaatacat

SEQ ID NO: 28389 - DNA, 176 bp, Gossypium hirsutum
  Clone ID: LIB3197-007-P1-M1-D8
ttacttctatacaacactgatcgggaaccagttactaagcgaacgtggccatcaccttttaaacatgattttgaaaatttatgatgtcatttttacatcgaactactgaagaataatcaatctcctgcataaacattaaggttacagttcattaattgaacaaggatcctcactat

SEQ ID NO: 28390 - DNA, 400 bp, Gossypium hirsutum
  unsure (1)..(400): unsure at all n locations
  Clone ID: LIB3197-007-P1-M1-F1
gatttcattgcctgtaaatgcttcctcaatgtacggacaatctcagccaatgaacattccacctcagatcgccggctccggcgctgacatcgacgacgatgtttcagcctccgtatccgtcgataaccaccacatcgttacttacgaggctccctccctcgacgacggtggtggagtagacgacgtagccacccaatcctttctacgccactgccgccgctacttccgcctctggcttggatgttgttccacgaggcgatggtgccagccaactcactctatcgtttcgtggtcaggtctatgtgtttgatgctattactcctgagaagtttcatgcagtggtgttactggtgggtggatgtgaactgacttcangcccccatggtgttgaaatgtcatc

SEQ ID NO: 28391 - DNA, 237 bp, Gossypium hirsutum
  Clone ID: LIB3197-007-P1-M1-G2
actttcacgcgtttgtgtttcttccgcattctggatacagggagttttgaagagggaactgttgattgtcaatacattgtgccgtagaaaggtggaaaggtggctgtgcccgcctagatgaaacaagagaaggttgtcaatcctttatttgagaagcgttcaatgcatctttgcatttggtaggggctttacctcctaagtaaggattagcatcgacttgtgaagtggcctatggtt

SEQ ID NO: 28392 - DNA, 410 bp, Gossypium hirsutum
  Clone ID: LIB3197-007-P1-M1-H10
cggacgcgtgggcggacgcgtgggcggacgcgtgggcagggatatacagagggctcttctctgtcactaagagatacaacaaaaaaaaaaaatatagccaaaaaaaaaacacacacatagattctctctttcaaaaaaagaagaagaaggaaattagggttttttcttttgtggggttttgattttttgggggaattttgggggtttttttgggtgggggaagagagatgtatataggttccatgcgaaagtctttcaaggactctcttaaagtacttgaagctgatattcaacatgccaatactctggcttctgattttccaagggaatatgacggtgaatgccttcaaatgagaatgtcatacagtccgggtgcacaccttttcctatttttgggcaagggactgact

SEQ ID NO: 28393 - DNA, 365 bp, Gossypium hirsutum
  Clone ID: LIB3197-008-P1-M1-A11
tctatctaatcactaagacaatatcctattatcacgactccatcttccaaaaaagaaggatgtaaacttacaccacatatatgaaatgaactattcttctcttcaaatatcatactttcgtaatactgatctaactgttaaagctctcagtcctaaaagtataaactacacaacctcagacctatacttccttactacacaacaaacatgtctaccttccactaaaatactcgacataatcctcaaaatgctccattataccctgatactgactatacacttttaacaccaatgcagacataaccctctgcttaacaagttcctgcttatgatccaaatttacatgctaaaccatcctatgtatc

SEQ ID NO: 28394 - DNA, 229 bp, Gossypium hirsutum
  Clone ID: LIB3197-008-P1-M1-A2
ctctcatattgatcagatcacaacccttctggctaaggagcagaatattatatcagaaggggaacatgatcttgcaaacagcaagtcggaactcaccgagaaagataaaacccaaaacgatattttgcagcaagaggcaaatttaaagtcagacattgagaagcagaagaagcttgttgctcaatttaagaggagagctgagagtctcgcaaaggaaaaggagcaattg

SEQ ID NO: 28395 - DNA, 447 bp, Gossypium hirsutum
  Clone ID: LIB3197-008-P1-M1-B1
cggacgcgtgggtttcatttcatagaagtcagctattccgaatcaaattgctatactgaaagaaaaggagcgaaaggcggcgataccgtccaagctgtttttcagtttttggcccttggaaaagactttggaggagaggagtggatccgctggtccgtcttgggctggctttgttcatctaacaacggctctaaggagagaaccttgtgaaaaaattagaaggggcaaagagtgtatgcaggcttttcctaaattcttgattgcatccccttcatttcacggtggtcgtggtgccctaccttcagctggtgggcatcccgcggatcttacttaccttgctggtggtgggtgctgatacaagcatctgtaagctgtgaatggagctatagtgttttattgttggtttaggaattaggactacttttatacagatggttactgtgaaat

SEQ ID NO: 28396 - DNA, 351 bp, Gossypium hirsutum
  Clone ID: LIB3197-008-P1-M1-B8
ggtgaagcgggtgcgcgtgccggtaccgaattgcaatttcggcccagacctacgcttctttgttgatcaagtgcgcatacctataggatacagatatggagaggcaaagaagcaagcacgtttgtttgttgatgtgggttttggatgctgacctttttctcccacaatacggatattgcaaagacctccactggccttggtgagcacaaaaactactattcagcttctgaccctcatgctggaactcccacttaaagttcacatggcacaccaccatcttcaggaggtggatcaccttcctcttattggaacccgtcacatgtaggtgggttccaccctttagcaacacca

SEQ ID NO: 28397 - DNA, 252 bp, Gossypium hirsutum
  unsure (1)..(252): unsure at all n locations
  Clone ID: LIB3197-008-P1-M1-C10
ttcttttatatgatacttccccctaaaaccagaggtgctcttctattatcagaaaatgcgnccccacccatacaattactccaatcttacacaatttaacttatttataccctaccccccactctttattaaacataaaaaaaacacctcttattatctttcctaataaattcccatccaacactagatatttcaaatccaatctaatttctttacacattaattatacattacatcaaatcctactttttt

SEQ ID NO: 28398 - DNA, 333 bp, Gossypium hirsutum
  Clone ID: LIB3197-008-P1-M1-C11
taataacatccctcttttttattcctaaaggaaacgtatagctgttattattacttatatgactggccaactaatgctgcttaagaagcttttgataaagcctattttaccaaaacccataatactaatgctcgaacttaaacttatataacaatgtttgacaactattattttttttacaaatttgttcaaaaccttcacttttttttttccggatgtgtaaattaaaaccataacatttttgccacaattctccaatgatttttttatgcttattgacctcctcttataagcacttatgacataaagaatcattgttatcctgtatcttat

SEQ ID NO: 28399 - DNA, 348 bp, Gossypium hirsutum
  Clone ID: LIB3197-008-P1-M1-C2
ggtctatccatctatatcttatttatccaacccatatttcatctcgtctttttttatttttttttgggaaccaaatctatctttagggttttaattcaatcattcattgttatttcacaaaggaatgacgactgctaaaaaaaacatgttacctcctggtttggttaacaatctccaggaagttcttcttagcagaaaaggcggaaactccaacaccaataacgatgaacaacaacaaaaacccgacgccattactgattctactgagacatctacttctgcttctgatgaaaacgacaactccaagcctgtcgttttggttaccaacggtgaagggattgattcact

SEQ ID NO: 28400 - DNA, 360 bp, Gossypium hirsutum
  unsure (1)..(360): unsure at all n locations
  Clone ID: LIB3197-008-P1-M1-C8
cttttatttttctatattttattttacaatgcggttgctttttctacatgggagatgagtttttnaatccacatctaaaccttgaaatatcattcaatcattcatttttatttcacatatgaatcgacaactcctaaaaaaaacattttaactcctgtgttgacttacaatctccagcaagttcctcttatcataaaaagcagaaacttctacaccaataacgatgaacaacaacacaaaaacacccaccattataccttcttctcctacttatactgtatgatatgattaaaacaccaccttcacacctattgatacagttaccaactttcccacaatacattcacatggtcctgttta

SEQ ID NO: 28401 - DNA, 423 bp, Gossypium hirsutum
  unsure (1)..(423): unsure at all n locations
  Clone ID: LIB3197-008-P1-M1-D10
ggaaagcggccgcctgcatgtcctttcctaatttccggtcaacccacccgttctctttattcttccaagcatcactcctttgggggggttgttcacatggtggggttaaacaatttaaaatattcanctctncccttttctaatgctatgatttaaacttcaccttacccaaatttgaacaaatccttaaattgttctttttcttcattgctttcccaaaatttagtattcatgtacgctccatattattgcctcttcttatacttttttccgaacaatttctttttatttctaaggcttcagacttttcttccacccaccatatcccgaaaaaacaaattttataaccctttccaccattttttttcccttctttcctttttaggaatcaattaaagtttttctttttgggaaaaatttttt

SEQ ID NO: 28402 - DNA, 304 bp, Gossypium hirsutum
  Clone ID: LIB3197-008-P1-M1-D3
ccatatgtcatatgatcgtgatttggcactagatcgttggtgggtttactctcttttttcgctttattttatcggatctgaaggttttcttatggctgttttgtattgaaacaaaaattctatctgttcttttataattcatcaaaatattgccggtgatatgccccttatttgtttattcctaaaagggtatgattttctttctgggaaacttaattttttgaagtgaggggtttaccatgatttggtttgctatctcttaacaataatgatggtggcaggtgggaccactgtgattgggggg

SEQ ID NO: 28403 - DNA, 449 bp, Gossypium hirsutum
  Clone ID: LIB3197-008-P1-M1-D5
ccatgcgtactggctagtgtagctagcccagcttcttttccaggcttgaaaagcaaggacccaggcttatgattcactaaaagtacggatcttgtgaggatatgtgatttgagaaggaccaagactggttgaacacgaatctctgtgattcggaatcacaatcccagtcacgatactgctcaacttcatgctggatccaaatgaatccctttgctaatgccgaggcacaagcattgggaatccatacacaaaactgcgaggtgtacaaccacgacccggatgcccaaaaatcgaactcttggtagcgagcatccaataaggattcaaacaatgactacgaccgacactaaggatgtggctgggacagttgaacaggtgatgagaatagcagacaagggagcggatattgtccggataactgttcaagggaagatagaggcagatgcatg

SEQ ID NO: 28404 - DNA, 228 bp, Gossypium hirsutum
  Clone ID: LIB3197-008-P1-M1-D6
agttgctctaactacctccgcctgtctttcaacgagaggtgaacaagaaaagagactaagaaatgtcacgcaagaaaatcacagagtacgactccaagagattgcattatcatcactcaatttatctgaacagctactattggaggagggttctgagcactggatctagttagaccatttctttcatctctgcctgaaggtgacagggcttacatgaaaattactttt

SEQ ID NO: 28405 - DNA, 168 bp, Gossypium hirsutum
  Clone ID: LIB3197-008-P1-M1-E1
ctgcatttgtttgctatctgctctattatgaatataaatgtataactggaaaaaggatagacttttttcacttaaccaaacctcagcctcatcaattcaccatattggtacgcagtatacctgtttctgctggaagtaatgttagtgagagtgttgaaagatttttca

SEQ ID NO: 28406 - DNA, 346 bp, Gossypium hirsutum
  Clone ID: LIB3197-008-P1-M1-E10
cttggtttggccaccttgatgggcaataggaaagaagaagcatcaacttagagacgttgattcacaccgaaagggtgatggaactgagcattcataaaatataatcctcgattacgctaaacatcgatatggtgatgaccactacaactgggataattgaggaggattatcaagcagatgtcatcgtctacgatcaaaagaaagctgatttcaaggatgagcgagctcttgatggattgctgtatatcactatattggctgctgcttactatctacttcaactatgatgcacttcattctcagcttgttacaaacgaacctgactaccatcgtacgcatatctggc

SEQ ID NO: 28407 - DNA, 407 bp, Gossypium hirsutum
  Clone ID: LIB3197-008-P1-M1-E2
aattccctcccctaactctctgccctctcactgggactcaatcacttcatgcagaacaaaaaccgaaaacaacaaaaggaaaaggagaaataaataaataaataaatgagctccagcaattaaataaaaaaaaacaattaaaaaatttctatcattttagctttcgttcatacttcataaggcctttctctttccctctcttggctgcgactttgagctttttgttacctgaaaagctaaaaaagaattgggatttgttgctttaaagctctttttttaacgaggagattcgtcattgctctaagcgtttaatgattttatctctctctctttttcacctctgatcctctgttatttcgttaagtttcttcgtatttcactgttcaatgtgctgccgaacgaggttc

SEQ ID NO: 28408 - DNA, 434 bp, Gossypium hirsutum
  Clone ID: LIB3197-008-P1-M1-E8
tctaaagtcacacctgctacacgacagatggggcatgaccttccacgaacatggcgcggtcacccttggttggacacaccacatggccatgcagctctccggcgtgtgcttgtggggtattcttttcgtgattctgatgtggggtactgtcaggggttaaactacgtcgcggcattgttattgcttgtaatgaaaacggaggaagatgcattttggatgcttgctgtactccttgaaaatgtcctagttaacgactgctatacaaataacttatccggatgccatgttgagcaaagggtttttaaagatttgctttctaagaagtgtccaaggattgctgctcatttggaatcgttagatttcgatgtcttcctcgttactacagagtggtttctatgcctttttgttaaatgcttgccttccgagacaactct

SEQ ID NO: 28409 - DNA, 337 bp, Gossypium hirsutum
  Clone ID: LIB3197-008-P1-M1-E9
ccaatttccacccacacccacgcattcttttttttatcctacaaatcacaaacaaggcgaggatttcacaaagatcaagaagggggccttcttccaataataaaatacatttatttataacacaaccatatacttcttctaaaaacaccattttttacaatctcatattagtataaataattaccacaaaaacaaccactatttttaatatttttacataggaatacaaaaacatcatcttttctattttttattctattctccaaaacaatattttaccattagcaaatacttttatttcaaaacacacaaaaaactcatttttattatttaatat

SEQ ID NO: 28410 - DNA, 404 bp, Gossypium hirsutum
  Clone ID: LIB3197-008-P1-M1-F2
ctctttttcccctaattgggtcatccttcttttatatatctgtcttggggataaatggttgatatatttggtgtttatgttattacttattaggtcataacatagaggaaatgcttatggtttgaaagttgctgcattttgataagagaaaaggaatggcttcttcaatcggttttattataatttttcctatatagtttctgttcagaatgaggcattgttaccacctcaatatggaatttcattgaccatttgtaggctaattaatatatgaattcaatggcaagagtaaaatgtaaattcagaattcagatgatgaactgcaatggtgtgtatatggatttcatgacagttctgctatctatttatatgatagttcaatcattgaaaataaagttctcttg

SEQ ID NO: 28411 - DNA, 381 bp, Gossypium hirsutum
  Clone ID: LIB3197-008-P1-M1-F4
ggaaatgccttgggaaacaatggaactaattggggttcttctgccatttccggtcaaggtggaagggataacatttctggcaatagtgtgaattttggcaatggaaatggtgataacaactttgggttaggaacagcagggtatgagagaaacattgggaccaatgtggtaccagcatcatcatatacagcatcgaacggtggttatgatatatcctttgcaaaccttcctgcaagtgcttccatttatggggataccacttggcaatcatcaacatctgtgcgagacagttctggtactttcggctatggacttgatagtgccacttctgatgttacgcgtaaaagttctcctggttttgtggtggttataatgttaata

SEQ ID NO: 28412 - DNA, 389 bp, Gossypium hirsutum
  unsure (1)..(389): unsure at all n locations
  Clone ID: LIB3197-008-P1-M1-F7
gaaaagtctgtattcgtcttgtcatttcatctggcattgctttggaaagacggttgcagatttccaaggaaaggattntgctccatgcctattgatcttttttctttttcctttcctttttccttccttgcttcattctgttctcaatctgattttcgctcttcttttccattttaaaagattttgtaaaatcatgtatgtttcctgatgtagagatcgccttctccttctttagcattgcagatggtgatgattctatttccagatgtttcatctccattcccgatctattttcgcttcagtaataccctttccaacgtatacaggagcaacggatgtatttttgtctattttaacccttctgatgcccgattgtgtggctgctacat

SEQ ID NO: 28413 - DNA, 206 bp, Gossypium hirsutum
  unsure (1)..(206): unsure at all n locations
  Clone ID: LIB3197-008-P1-M1-F9
ggtaaaactcgtacgcctgccgtaccaatccccactttccacccacacccacgcattctattctctaaaagaattaaattntttttcagaaattttccattaattatctaggaatccccacatatatttcctttaatcttttctcaattaacttaaaaccctctttcttcaaccaaaaaaaaaatctatcatatgatcggacttcc

SEQ ID NO: 28414 - DNA, 457 bp, Gossypium hirsutum
  unsure (1)..(457): unsure at all n locations
  Clone ID: LIB3197-008-P1-M1-G2
cccacgcgtccgctttcttttacaaattccaagctcccaattagggttcttcatttctcaaaggtttaacgtggttaatttttaagatactttgtggtggacaaaaagttgatagaaagctatgttactaaacctaagcattatctaataagaatgccgggcattcctttagtggctcgtgaaacctcctcttattttagaagcacagatcagatgtgccgagaagattcccgcctgcatttatctgcagaagaggaaattgctgctgaagagagtttatctatttattgcaagcctgtagaactctataacattcttcaaagacgtgctgtaagaaatccttcgtttcttcaaagatgtttgcgatacaaaattcaggcgaaacacanaatgagaatacaaatgtcagtgtccatatcaaggattgtgaatgagggtgtactgactcaaagtcttt

SEQ ID NO: 28415 - DNA, 413 bp, Gossypium hirsutum
  Clone ID: LIB3197-008-P1-M1-G4
cttggaaggaaaaaggcgatgttgatgttgccattcggtactatatgattgcaattgagcttcgccctaactttgctgatgcatggtcaaatttagctagtgcttacatgcgaaaaagaagatttaatgaggccgcacagtgttgccgtcaggctctgcaattaaatcctctattggtggatgctcatagtaaccttggaaatctaatgaaggcacaaggtctggctcaagaagcatacagttgttatcttgaggctcttcggatacagccaacttttgccattgcatggtcaaaccttgccggtcttttcatggattcaggtgacttaaatcgagcccttcagtattacaaggaagctgttaaactcaaacctgcgtttcctgaggcttatttaaatcttgggaatatttac

SEQ ID NO: 28416 - DNA, 318 bp, Gossypium hirsutum
  unsure (1)..(318): unsure at all n locations
  Clone ID: LIB3197-008-P1-M1-G8
cttccttttacaaattcccagggcagaaatacttttctatagataagtaaaacctttaccttttctttttttaaaaaactttctntttgaccaaaattttattaaaaactttttttcttaaccccaaccttaatctaataaaattacatacccttcctttatacttcataaacctccacttaattttataatacatctcatattctcccataaaattcccacctacctttattcttcataaaaaaaaatatctccttcataaaattatctatttatttcaaacctgtaaaactctattacattcttcaaaaaccttct

SEQ ID NO: 28417 - DNA, 304 bp, Gossypium hirsutum
  unsure (1)..(304): unsure at all n locations
  Clone ID: LIB3197-008-P1-M1-G9
acctcccattttcttttctacccaaacttgtttccttcaagagccattccttccttcgactaagatttcccanccttcttcatttcctgctccggcagctcttccttctctaaaactccgccccatttctttccaatgctccctgtcttcctccccctctgttgcggtgacagcctccaaagagtgcaaaagtgaaatctgtcaaagctagtcagatcattgacaccatgtgtaatcccacgttccaagtttatatgatcaccgaccgtctttatcgatcaaccgttccttaattcgcatctac

SEQ ID NO: 28418 - DNA, 307 bp, Gossypium hirsutum
  Clone ID: LIB3197-008-P1-M1-H11
ccacaatgctggacagagccttctccgctcgccgcactcaacctcactccctcttcgacgtccccacctcctccgccgtttccgatgtctctcccgacgccgaatccgctgacttactcgctgacgagtccaaaaccaagaaaccacacctctacgtcttggcctccaattatatgtcgggcttgggactcgtcaaatcgccgtgcctctgcctctcactctgtcttcttttgatcgttttcatacttttctctttgatgcttaactctcgctccttcgtttgcctttcgtcctatgacccgatatc

SEQ ID NO: 28419 - DNA, 222 bp, Gossypium hirsutum
  unsure (1)..(222): unsure at all n locations
  Clone ID: LIB3197-008-P1-M1-H4
gaatgatccaacttatgttgtttgtaggtcttaagagactagaagaatacagggaattccgaccctattgcaataaatgagtgtttttaatttgtttattttatgttattctgactcaagtatgaatgtcgaatatgcgaatatattcaattttttaaaagttattttatttaanaaaaaanaaaaaaaaaaaaaaaaaaaaaaaaaaaataaaaattaaaa

SEQ ID NO: 28420 - DNA, 409 bp, Gossypium hirsutum
  Clone ID: LIB3197-008-P1-M1-H5
aagagactgagatgtgggttccaggccaatgaaccatgctacaagttttggtttccatacaagccctgattctgaatgctaaacccttctttaacgagcctggtttcgagatttcgtatgttggggccgaaggtgaaaagaggtccaggaagtacaatgaggatgcatttgctctatccttgaagacaatgatttacactctaagaaggccgccgctgcatttcgaggactttgtcgccggtcattttcgctcccatgcacgtgacattatcatggcttgtgaagcatataaagagggtgctgctatcggctccgttctggttaaagattgcgtaacagaccctaataaaaccgaaaacagtagctccgagagatttaaaagaacaatgacgaagatgatcgatgcaat

SEQ ID NO: 28421 - DNA, 308 bp, Gossypium hirsutum
  Clone ID: LIB3197-010-P1-M1-A1
agcagctgtaccacaactacagagaagagaggaaaggggaaaaaaagcgtgcggtgggcttgcttcttcttctacttcgctctctctctttctccgaagttcctccttcgttcttttatttattcagtattgtaaaagatggccgacggtgaggatattcaacccctcgtctgtgataatggaactggaatggtgaaggccggttttgctggggatgatgctccaagggcaatttttcccagtattggtggtcggtcccggaacactggtgttaatggtgggatgggtcaaaaagattccctatgtag

SEQ ID NO: 28422 - DNA, 422 bp, Gossypium hirsutum
  unsure (1)..(422): unsure at all n locations
  Clone ID: LIB3197-010-P1-M1-A11
accctcctctgtgcgccgctctgcgttctgagagcattcgaacggtcttcgatgtcagccccttctccgatgatgacggagagaaccaggatcgcgccatcaggtaactcctttctctaattttactttcacttttattttacactagctataaacaaaagaataaaaggaaaatagaaaaaaaaacgaagagaaacttaaaaaaaaaactttgcgaaacttagttttctttgaatcttttttccttgtttctgtattcaatctgtgtaaaaaaggaagaaaaggcccctgttacagaaaatgaatcggctntttatagccaaagccaaaagaaaagaaaaatacataataaaaaaacaaaaatcccttctcctctctattcttttttttttctttttgctctttttttttgttttcttttt

SEQ ID NO: 28423 - DNA, 399 bp, Gossypium hirsutum
  Clone ID: LIB3197-010-P1-M1-A4
gagattttgaggggaaatccaagtggagattatagatgaggtagatttactaacgattgctaacaaattaaaaaaagtttagatgtggattttcagtgtattaaatgttgaatgtatgaaccttttttcttctttttatcttttgttgatgtacagggtgggttgttttttaagtgtattgtgtgagttgtaatggttgttgctccctttagaggaaagaaactgatggaaatggaaaatgggggtcatcattgctagaaaatgaatgattgaatttgtgggtttttttggcaaaatctagtgaaaaaatttggtagaaaaaagatatttttgtagctaaaaatatagttaggggggggaattataaagtacttcggatgcttaaaaccctaaacttga

SEQ ID NO: 28424 - DNA, 292 bp, Gossypium hirsutum
  Clone ID: LIB3197-010-P1-M1-A7
agcaattccaatcttgtgatcagagtaacagttttcacagacaaggtgaatggggcgaatttgacgctgctcaaagtgctctactgttaaatgaatcagaattgcatggtcatcagttgaaggtacatttgattctgtaggtacaactaaattgcaagatgttggcaaagctggtttggtcacaattcaaggcaagaattcagccgagcttggaactgcacacatttgttagcgattcaatagccataaaaaacttcccgtgaagggctttatctcttttagtctaacctca

SEQ ID NO: 28425 - DNA, 324 bp, Gossypium hirsutum
  Clone ID: LIB3197-010-P1-M1-A9
tctgaatcttattcttttgtcctctagagttggaatggaaaacccctcaggatgtggcagctgacaactatatgatgtctatgggtccttcaacctataacccttactggactggtatgcagccaggaatggatgggtttatgggtccttatgctggtgcgatgccttatatggggggctatggactaagtccattggacatgccatttggaggtgtaatgcctccagatccttttggcgctcaagggtacatgtttcctcctgtcctgcctcagaaagatcttgccgacttcggaatgggtatgaatgtcgccccaccaatca

SEQ ID NO: 28426 - DNA, 263 bp, Gossypium hirsutum
  Clone ID: LIB3197-010-P1-M1-B7
ttcctaattcaattaaacatcatttttcttgtggcatcttctcaatgtgaggggcgcttggttgggaactgttacaatgtaccgacctgtggctacagctgcagccacggggggagtcccaactgacaatggggactatgttttgactttggatcaattcccacggtggaatgatgcacaaattattgtctccttgtgagtttagaatgaaaatccttcatgttcaaaatcctttttataagacctctttaaccttttcttgg

SEQ ID NO: 28427 - DNA, 366 bp, Gossypium hirsutum
  Clone ID: LIB3197-010-P1-M1-B9
ttcaggatatggctgagagaaagagaaggaagcttaagttgttagccgaaacgggaaatttggatgaaaaaattgcaaccgaggaggaggagagttttaagctacaaacgtggtctgatcttcctgtggatcttttgtatattattctttgcctcctaacactattgttcattgtgtccagcgttttcttcataaagtattgtggcttaagttttttagtttacttttttttttggacttttttttctttatattttttttttttaaatttttttttcttaatttttttttctcactattatttttttttctaatttttttttcattaaaattatttttcttacattttttatttttgtcaacctt

SEQ ID NO: 28428 - DNA, 317 bp, Gossypium hirsutum
  Clone ID: LIB3197-010-P1-M1-C8
agtccccaaatggattctccgtgtccgttcaaatggcgaccccgcccctttcatcccctacttatcttaccaccaatataggcgtcggctacgccatcgtcgtcgccctcggctttctcctactcctctccactctcctcctcgcttcctacatttgctctacagttttctcaccccttccacctcgggccatttacccaaaccccattttaacacccaccggcgccaacttcgacagtattcgccttcccatgattgtttttatcggcgaagaagaccatgaaaaccacgaggaaaaccgtcgcgtcttttggctt

SEQ ID NO: 28429 - DNA, 210 bp, Gossypium hirsutum
  Clone ID: LIB3197-010-P1-M1-D4
cgctctttctctcaattttctctatcttttgatggtttctctttcatttctctgggaattattattatttccttcagatctctcaatctcttattctattctttccttaaatacccttttaatcggattaccatttacctaatctgttcttctgggctgtggtcctaaaaatattattgaccaacctggtccaggtattgtaacaccccc

SEQ ID NO: 28430 - DNA, 193 bp, Gossypium hirsutum
  Clone ID: LIB3197-010-P1-M1-D5
attttatttacttagagctacagagtgagagaggtggtcaaatccgtgaccaggatgaataagtctggttccatactcaaaacctaacatacataatcaaaatccctgcctgctactgcttaatgtaatagaaagtaaagagattgtattttggggggggttttttttctcatttgtttagaaaaaaattatt

SEQ ID NO: 28431 - DNA, 257 bp, Gossypium hirsutum
  Clone ID: LIB3197-010-P1-M1-D9
tgttaagctttctttcttcctttctttccctggaacatattcccccactctcggggatggaccctcgaggcggtgatgccatccccgacggcgaaaccaacgattttagatccttcgaccatcccgatgatgacaagtcttacccttacaccggggatggagctagtccttgctaaaattttgtatgatgtttatcgagtgagacaagatctgtactatttcttgagcattttggttaatatggtgatattacggat

SEQ ID NO: 28432 - DNA, 346 bp, Gossypium hirsutum
  Clone ID: LIB3197-010-P1-M1-E11
ctttctaggaattgctacgaggattcgatgaagagactgcagctgttgtaatggcaagagtaacttccctgaaaatggagactgaggtaaattaaagtcttcttttcagttatctcccatttgtatttctttttgaatgtatgcaccatctgatttggatgataccttctgctagttcattatgctatcatttatggaataatttccattctcattctgtttccttattatagaatatggatcagagctctctcttagtgctttgccctagtttttagcgcttctctctgcttgctttcctcttagccctgacaattttggtcctgctctcttttatctattatct

SEQ ID NO: 28433 - DNA, 236 bp, Gossypium hirsutum
  Clone ID: LIB3197-010-P1-M1-E2
attctaagaaccccgaataaattgagggaaagagagatttaaaaaggatataagagtggtgccttaaactttttatagatctgtgttttatctaacattttgcataaacaagaattcctgttttttcctgtttttcttttcgtatcctattagaagttaacgaagtcatctaaatgggatactgcaagcttatttcttgttgcttcattgcttgcattttgttcctcggcgtttat

SEQ ID NO: 28434 - DNA, 302 bp, Gossypium hirsutum
  Clone ID: LIB3197-010-P1-M1-E5
gaagggttgtcttttaaccacttcttcttttgtttccattgctttgaatatactgatagagatgcaagtttctcacatgctaagctccttcatcaccattcttgtactccactgtcttcttctttcaacatttgtttcctgctcatcccatggggagattactgcatccaccaatcacaaaaacattaaaggaaatgcacataagcttagttctcaaatgatatcttatatggctgttcatggccttctgctatggagttccatgggattcttaatgcctgtaggcatacttactgttagaa

SEQ ID NO: 28435 - DNA, 330 bp, Gossypium hirsutum
  unsure (1)..(330): unsure at all n locations
  Clone ID: LIB3197-010-P1-M1-E6
gcgggatgcatttaatatgcggagtgaaggtttccaatcatttccaccaaactatgttgcatccgatgattataatatcggtgggaatacttttatggaaacgagaagaagtgtaccggatgaacaaccgaatgaagaagcggcggagttctacacgttacttggtgaaatgaatgaagaactttatgagggatcaaaattntaaaaaatgtcattctgtattcgccttttccacataaaatgtttgggagggtggaccggaaactctttgacaatgctgttagagcttttgagagaaatgttcccgtttgcaaaaatccctcatcatgt

SEQ ID NO: 28436 - DNA, 364 bp, Gossypium hirsutum
  unsure (1)..(364): unsure at all n locations
  Clone ID: LIB3197-010-P1-M1-E9
attcatatctttcgtcaaatcaaataaactgtgcatatctcancgtattctgggtcttctccctttttcattccaactttttatccgcgaatatttggtttccgcgcttattttaacctatttctgttatattttttgccgtcataacttttaacattctttttttttctttttttttgtgcgcttttttttttttttcctttatttttgtcaatttttttcttaatttttttattttttatttttttttggtaaaattttttatttttttttatattttttggttttttttatttatttttcttttttttatttttttttatttttttattttattttttttttcctttttttttattttttt

SEQ ID NO: 28437 - DNA, 235 bp, Gossypium hirsutum
  Clone ID: LIB3197-010-P1-M1-F4
gttaattgcaatactttttgctgaaattaaagggggtggaattctttatgggacggggctttgtttcctatatatttactgctttccaacaagctggttttgtatgatttggaaaatcataccattggattgactgagtacatttgtgactatagtgttacttttcatttcaccaatggtgtatataagttcgactacatggtttaaatcttactgtattatcatttggttcttt

SEQ ID NO: 28438 - DNA, 316 bp, Gossypium hirsutum
  Clone ID: LIB3197-010-P1-M1-F5
ctaatgtatgtttgctacgaagattggaataataatttgattcttgctgagatacaattattgaaaagatttatatgagatataaagaatatctagattttcttataaagaattttgtgaaagaccaatttcatacccgtggtattcaggctcgatgcttagcgaatgtagtgccagtgaattaattcagactttaagtctagcaggctacgtgccggtgatctgaatcagattataaacctatcaagctacgtgccggtgatctgaatcaggcaataagcctaacaggctaaatgccggggaatatgttaaaata

SEQ ID NO: 28439 - DNA, 194 bp, Gossypium hirsutum
  Clone ID: LIB3197-010-P1-M1-F7
tttaaaaagtgattccaaaatactctactaagcatttactctgcaaagacatgggaccaaaatacccactcaaaagattaaattttatcactatacacactcttcctacccatcactcatcaaaagatatagcaaaaccaatacttattacaaccattttataaacaacttactactttcatactattattgaa

SEQ ID NO: 28440 - DNA, 365 bp, Gossypium hirsutum
  Clone ID: LIB3197-010-P1-M1-G10
gtcgaatttcactcttctttagaagcaagcaaaattttcagaaacgtgtaaggggtggtatttcaggctttggggtttccggagtttctatcaatccagcgctatcggtattatcttttaagttctcagagaggtgatttaaagccacctttgaagaaagaaggagtagaaggaatgacgattaaaccggcggttaggatctccgagaggaaattagtggtaaaggagcggacaatcctgaccggagttcccgaaaatgtgatcgcaacttccggtacagcagcccggtcggtggaggagggttttcctttggtgcgggttttgatgaaaaaaacagcaaggcatttggtgcccattcgggactt

SEQ ID NO: 28441 - DNA, 367 bp, Gossypium hirsutum
  Clone ID: LIB3197-010-P1-M1-G11
gaaagatacgagaaactgctatagataattttgagcccatgaaatccaaaggtggggagactagtgagcacattctatcaatgctcaaggcggagaaggaagaactagaatcatcattcaataatgagaaattgctgtctctccagctaaagcaagaactagcagatgctgaagctcgaaacacagacctatacaaggagctccaatctgtacgtggtcaacttgcgttcgagcagtcaagatgtttcaaattatagggtgatgtatcagaactacgacagaaactacagacaatggaaacactacaaagggaacttgaactcttgctgcgacaaaaagccacatctcgaacaagttggcattaaat

SEQ ID NO: 28442 - DNA, 264 bp, Gossypium hirsutum
  unsure (1)..(264): unsure at all n locations
  Clone ID: LIB3197-010-P1-M1-G3
gttctaatgaacattagccatcagctgcatgggggaanaatgcatgttgattagtggcaagatccttcangtctaccggattgctcatgatcaagatttgaagaaatcgcatcctaagcttgccatgaagtggcatcccaacaagaatcctcattccaataaagaagctgaagccaattttaatcaaatcttccaaccttactatgtttccagcgatcctcaaaagcgtgccgttttcgatcatttacgggatataaggattaa

SEQ ID NO: 28443 - DNA, 245 bp, Gossypium hirsutum
  Clone ID: LIB3197-010-P1-M1-G6
aacttattatccacctgggaggtgcaaccaagagtcaacaatatgccgtggtctgggcgtttatcggaatcaatactttattagataacagatcatacagtatctcatttggggagaatttccatgacctgagtaataatgacgatattcaatccattcaacacatcgacctttgatatcaataatatttccattggagaaccgtgtaaatgaacattggcagataccataaagagatatatatc

SEQ ID NO: 28444 - DNA, 335 bp, Gossypium hirsutum
  Clone ID: LIB3197-010-P1-M1-G7
ctaacttgatgcagagcttaaagtataatagttagatggttccgaagatgcatgtcatacagtaattttaaggataaacatgcagaaaggaataattatggatgatacttatttacttgcagtttgcaagaagcacagaagagaatgaagataaagaagcctcctcacatcctggttatccatttgaagcggttcaagtacattgagcagcttggacgatacaagaagctctcctatcgtgttgtatttccacttgagctgaagctgaacaataccgtggaagatgcagatttggagtattccttattggctgtagttgttcatgtgggaagtgg

SEQ ID NO: 28445 - DNA, 219 bp, Gossypium hirsutum
  Clone ID: LIB3197-010-P1-M1-G8
ggcgtttgaagttggtatgggaaggactggggcttggagaaagaattgcagtgggaaactggagcagggtcgggctggaccggctgaaataagaaaatctctatgggatggaaaacaaaaggacctagtagaagaagtcaaagaactagaaaaattggaaagtgttttcattccacctaaattttgcattagtttaatttcgattaaccacatactctg

SEQ ID NO: 28446 - DNA, 360 bp, Gossypium hirsutum
  Clone ID: LIB3197-010-P1-M1-H10
gtcaaggaaaaaaacacaacgggaacataaatgagagccgccatttacagactggaccactgagcccatatctgaagtcaagctaccctcggcattaccgcctgatcataggtatttcctccactctcccttctctttcacttttctatatctccgttttcttttccccttcttttccggtgatttaatatcgttgaaatcattggtaaaatgttttttttttttcaagttttgggtagttttactagggttaacgttatatgaagatttggggtgtttgagcaatttgggtaatgataatataacatgaattctgggtttgaactccggatagtatatagcttggtggaattttcatga

SEQ ID NO: 28447 - DNA, 218 bp, Gossypium hirsutum
  Clone ID: LIB3197-010-P1-M1-H4
tttctagagcatttgaaaatgggaattattactggcctacttttctctcttttaggggcgccatacaaatacattgtacttaaaaagggatgtaacgtaaccattgatttcaattttcttgactcgaaaacattgtcagattaataatacaaattataattattcatttcaaaataaaaaaaaaactaatttttctaaaaatattttttaaatattat

SEQ ID NO: 28448 - DNA, 390 bp, Gossypium hirsutum
  unsure (1)..(390): unsure at all n locations
  Clone ID: LIB3197-011-P1-M1-C10
tctatcccccaaaaatggcaanttccagggtctccttcatcatcatcatggtcagcaccntcctttntccatccctctcttcacagctgtccgatctctttccttccaacaaccctccgcccttcctctgcaaacattctcacccaatcaaacaacccaaccaccaccaacaataccattattataacccgtatttttcccaaccgttagaccacttcatcttctttgacctccccaggttcccacaactttaccttattaacacttaacacttggtctgccctttcccttcctgcccaatcttcctttacttcggcaaccaaagttacatccaaatgttcccccttaacacccgttttttatttgacatctctccccccttcggtgcca

SEQ ID NO: 28449 - DNA, 431 bp, Gossypium hirsutum
  unsure (1)..(431): unsure at all n locations
  Clone ID: LIB3197-011-P1-M1-D2
cttactctttgtaatagtcttttatgctttggtttcttttcgtttctctccgggatggtcttttcattcacaactggaaaaaagtcagcgccgccgtcctttcctcctctcgtgcctgtgcgtttccttttccgatcgtttgctcaacaaaataaacagctgtattcggtgtttggtaactttctacgttgattttgggagtaactgaaaatggctgcaggggactgggatctatatgcggtggtgaggagttgtacgtncgccaccaacacatncacctncgccgtatcaggcaactatttctcgaatgggaataatgatagttggcgggaagaccctttagcttgcttagcttcgttgacgtttgaggaagaagatgatcccgttacatttcctaatcttaaaaaaagtggttctttacaagattctta

SEQ ID NO: 28450 - DNA, 434 bp, Gossypium hirsutum
  Clone ID: LIB3197-011-P1-M1-D9
cctgcaaatacacaaccataattccctattctacccactcttttcttttttctctcgttcatcttattaggtaatagtttatatacattagcggaaacttattaaaaacatttttttcatatttttaatctcactttttattaacattctttttttttataacttaaaccaattaatctataattacatcatcatcatcaatatactataccttttattttttttctaaatttttctcatcttcactactatactcataatattatactcaaaaaatctaatttttttctcatactatttatatctcatttattattacattaacttaacctatatttaatttctttttttcctatattttcctaacctttatttaattattttctactctttttatttacttaatttattataccactttctatcataattta

SEQ ID NO: 28451 - DNA, 203 bp, Gossypium hirsutum
  Clone ID: LIB3197-011-P1-M1-E1
atactttcttggtcttcatatgttttcctgctgaacgaacatcagagatgatgagttcatccctcaacgaataaacttgaagtgaaacaattaagagaagatgtcgtggccagcacatgtcgatgatcactttatgcgcgatatccacgtcaaccatctatatcgcgccgctatcattgaccacaacggcatcgtttggtgcc

SEQ ID NO: 28452 - DNA, 430 bp, Gossypium hirsutum
  unsure (1)..(430): unsure at all n locations
  Clone ID: LIB3197-011-P1-M1-E3
aagaaaccaaatttgggttttcagttnttattgacgtgcantgcatggagctgcgactgggactcnctcttccacctccttttaattcccatcgaaaccttcgacctaaacagctatggtaattacgagactagagaggctttgggttccaatgctttgagttggcctctgctaaaactaggaccagctgacaatgacattaacaacatccaccaccacaacagcagcagcagcagcagcagcagctctagcggcggcggagctggctgcaaaaaaacgcagctttgatgaagcaccattcttcgatgagaagagaaatgttcccaaaacgctgcatcttttgctttggactaaccaaccaaatgatgaagacgacgaccctaacaatgtccttcacgaaaattcttcttctggcattttcaagaatgat

SEQ ID NO: 28453 - DNA, 313 bp, Gossypium hirsutum
  Clone ID: LIB3197-011-P1-M1-E7
catccccattcccatcccccaccccccccttatttttttttactccaagaattactgcgtaaatcacatcacagaagaggtgcatatcaaaataacaaccctactttttcctttcattcatataatttcctccctttaaaccaaaacctcctgccccctcacatccctcttctaatctactccctctaacataatcaatcacagccactttctcttccttccttatatccccaattatatatctttcacaaattaaacctctcattctccccatttttaataaattttactcaacatctttacacattatttt

SEQ ID NO: 28454 - DNA, 401 bp, Gossypium hirsutum
  unsure (1)..(401): unsure at all n locations
  Clone ID: LIB3197-011-P1-M1-F8
caaacaggacagatgaacanaattggagaacgagttacttggattgcggagtggagaaatctattgtatgttgattcttcanaaatgcctacaaagctctattcttcaatcttcccatctatcttctttctttccctcattttcctcttcctttactccactttccttcctctttataccaataacgactcctcttcattgcccactaataagttccttccttcatcctctcctccttgtaaccttttcaagggccattgggttttaaactccaccaaaggcaagcctttctacgatgacacttgcccctttcatcgaaacgcctggaattgtcttaagaacaagagggacaacatggggatcatcaattcctggaaatgggtacccaaagattgcaaatt

SEQ ID NO: 28455 - DNA, 230 bp, Gossypium hirsutum
  Clone ID: LIB3197-011-P1-M1-G2
ggccggtgtgcttggcagcctcaaaaaaaggtggaggagagtctcggtaatcagagattggtgtgcttatcctcctcgtcatcttctatgtcatcggctgtgccgctttccgaaacaataaaaagattggtaacgatgaaccgtacggcgaggcaaggatgacgaaagcgcaaccaagtcggatccatttatagaagaccaagacatgttatgggagctttatttttctt

SEQ ID NO: 28456 - DNA, 402 bp, Gossypium hirsutum
  unsure (1)..(402): unsure at all n locations
  Clone ID: LIB3197-011-P1-M1-G3
cggacgcgtggggtcctatttaaaactacacaaatcttgaagttcatacttcgtgacagggcaaggcacanctgtttagacatagacaaagagtcggtgacaaaattcattattggtttcatctttttttagtttccgcgtttgagcaaatacaagtccttttccttgtattcaaatccgaagaaaggattttctttgaagtatagaaaatcaatccatggttttccggaaatgcttacctgtagtccaccacactataaataaaactcatcaaccctatctttctttacttgtcacttacatttctcaattcaacaaaaaatatggctcagcctcactttctttgcatgttattggtccttggcttggcttcagctactgcttgtgatcgatgtgtgcacc

SEQ ID NO: 28457 - DNA, 435 bp, Gossypium hirsutum
  unsure (1)..(435): unsure at all n locations
  Clone ID: LIB3197-011-P1-M1-H1
gtgattttttatctgtgctttatcgcatcctggatttctgtttgtagttattgggcatttccgtatcctaacttcgtttattccagtgaaatgggtgcaggcctttttacatctgcattaggtgtttgatagttgcttcgtgactggaaactaataatataaaatatcatatgactatattgcacatttagtgatccattcatattgttactggaaccaaagccacatcatgtctaacaagttgtttcttcagctttggcaattcatgatagttctttttccaggtatagtcttatagggcatgtagtttaatttcaagcttgtttaaatgagttttatttctaaaatgactgaatagaatatcaaattttctgcatttctgatggactaataagngctgntctttggtctcttttcaatctgttcaactacttt

SEQ ID NO: 28458 - DNA, 164 bp, Gossypium hirsutum
  unsure (1)..(164): unsure at all n locations
  Clone ID: LIB3197-011-P1-M1-H7
attaccctctaagtttaagcgtatcatttttctgaggaaaatgaacttaccaaaatttccctaataacatctacctaacctttaaaaacccaccttgataatctntctccatcggcgtccgaattgtagtctttataatcgtcctcagctacagaccaatccca

SEQ ID NO: 28459 - DNA, 408 bp, Gossypium hirsutum
  Clone ID: LIB3197-012-P1-M1-A4
gtttcgcttgtggtattggtggaaggggtgtgagagagaagttgctgatgctgccaagggtagttcggaggaacagaagagcgaaagcattatgcgactttcatgggcgcttgttcactctaggcaagctgaagatgtgcagcgtgggatagctatgcttgaagcatcattggccaatagcagctctccgttgcagcagagggagaaaatttaccttctagccgttggatattacagaactggtgaattctcaaggagtcgacaacttgtggggcagtgtctggagattgcacctgattggaggcaagctctagtccttaagaaagcagttgaggagcgcattgctaaagatggtgttattggaattggtatcactgctactgctctggggcttatcgccggtggaat

SEQ ID NO: 28460 - DNA, 396 bp, Gossypium hirsutum
  Clone ID: LIB3197-012-P1-M1-A6
ccgattaggagggttacaagtaggtgaaatggaacgtgattgtctaattgcttatggggccagtatgttgatttttgagcgcctgatggtatccagcgatccttttgaagtccaggtctgcagaaaatgtggattgttaggatactacagccataagctgaaaacagggatttgttcttcatgtaaaaatggagatgatgtttcaaccatgcaactaccatacgcttgcaagcttttaatccaggaactccagtcaatgaatatcgttccgcgtttgaaattatcggaagcgaattaatggtatgttcagattatttggtgttaatggtgtatctgaaaatttggtagctatagagcagatggttgggatgtttttgggaggaagaattctgcacc

SEQ ID NO: 28461 - DNA, 417 bp, Gossypium hirsutum
  Clone ID: LIB3197-012-P1-M1-D5
caggtcttggtgacattggttaattcatattgggtaatcatatcaagtctttatgcggccaggaggctgcacgatgccatgcttacttccatacttagagctccaatgaccttcttccacaccaacccacttggacgaattattaatagatttgcaaaggatttaggtgacattgatcgaaatgtcgctccattcgtcaatatgtttttgggtcaagtgtctcagctcctttctacttttgtcttgataggagttgtgagcactatgtcattgtggtccataatgccacttttggttttgttttatgctgcttatttatactaccagagtactgcacgtgaagtgaagcgcttagattctgtaactagatcacctgtatatgcacaatttggagaagcactgaatggtctgtctact

SEQ ID NO: 28462 - DNA, 309 bp, Gossypium hirsutum
  Clone ID: LIB3197-012-P1-M1-D6
gaaaaatggcgactgtacttgttcatgaacgaagagattctaatataggtgtgaagcggattctacaagctgttcatggcgagctctttaaggtactaccggtataaaatctgaagacatacgctacctttgacgtcataataaggaattacagcaacgtaaagggtactcaaagctcgagtttactgatctgacacatgctctatacatggcttgtaaatgctcagaaaaaagcaacgcaaggctttcttgcatatcagtgcaacaaatatggtgaaaacataccatgctctggagctagtaagaatc

SEQ ID NO: 28463 - DNA, 435 bp, Gossypium hirsutum
  Clone ID: LIB3197-012-P1-M1-F11
atcagattcagaaggggctgctcgctctcggcgactacatgaatgtccagtgccatgcctgcattggaggcaccaatgttggggaggacatcaggaagctggattatggacagcatgttgtcgcgggcactccagggcgtgtttttgatatgattcgtcgcagaagcttaaggacacgtgctatcaaaatgttggttttggatgaagctgatgaaatgttgaataaaggtttcaaagagcagatctatgacgtgtacaggtacctgcctccagccacacaggtggtgctcatcagtgccacgctgccacacgagattctggagatgaccaacaagttcatgaccgacccaatccgcatcttggtgaaacgtgatgaattgactctggaaggcatcaagcaattttttgtggcagtggagagggaagagtggaaat

SEQ ID NO: 28464 - DNA, 209 bp, Gossypium hirsutum
  Clone ID: LIB3197-012-P1-M1-G11
tctttttacacctggaaaaaaaaccaaccactggtgaatttatttaagttggatggggttatttaaacattacatacaataaaagatttatttgcaaatacacaatactaataatcccgatgattttcaagacatcctccctaacaataatattcatttccatctcaccagctcatatttaattatcatccacctttcctattttttta

SEQ ID NO: 28465 - DNA, 418 bp, Gossypium hirsutum
  Clone ID: LIB3197-012-P1-M1-G12
tctttttcaatttgttttcgtttgttttatgggtggcaacagaaatgaaaattgggagggaagaaatttgttatttatgttcattttaatctttgtctgattatttccttttttaaacatgaaaccaaacatcatggcaaagcaaatttaaccaaaaattcccctccaaaacaatttcttttacctcattatgcaagtcttttaacattacaacatacaaatcccacacatttaatctaactgccattgtcaggctcatttaccgtaccagcaatacaaggccactagtagctgcaatcacctgactgagttacaacatagagccaatacagcattcccgtcccaacaaagtgaagaaaaaacttaatacaggccgggttgtgcccgggcttggcatgtatatttctgggtgggttta

SEQ ID NO: 28466 - DNA, 412 bp, Gossypium hirsutum
  Clone ID: LIB3197-012-P1-M1-G7
aatataatactgcagtgtttcagccaatgactgcttttccacagtcatcaaggtcagtaaacccatttgatcttggtggcgaaggacctcctgttcaaactcaaacattcccttcaatggcatccttacagggtgctctaccaattatgccacgtcctggtctagtgcacacttctaacctcagtcctccatcgtcagcatggatgccacctcagtctttaccctatgcatcacggccaccttacccaggagcacaattacctagcaacttgccaccttccagccatcaaaatgggggcattggcaatgaggcatcgtttggttttgtaaataccgatcaacagatgggtggtagattctcagcagcacctaccccacagcctttcccttctgttggttggggcaacccgtt

SEQ ID NO: 28467 - DNA, 419 bp, Gossypium hirsutum
  Clone ID: LIB3197-012-P1-M1-H5
gaacattctaggcaccggaggttttggcaatgtctacaagggaaagttaggagatgatactcttgtggcagtgaagcggctaaaagacttgacgggaagttttggggaatcacaattcaggactgagttggagatgatcagcttggcagttcaccgcaatctgcttcgtttaattggatattgtgctacttctaatgagagacttcttgtttacccttacatgtctaatggcagtgtggcatccaggctcagaggaaaaccagctctagactggaatacgaggaagaggattgcaattggagctgcgaggggacttctttatttacatgagcaatgtgatccaaaaataatccacagagatgtgaaggcagctaatgttcttctggatgattattgtgaagccatcgttggtgactttg

SEQ ID NO: 28468 - DNA, 391 bp, Gossypium hirsutum
  unsure (1)..(391): unsure at all n locations
  Clone ID: LIB3197-013-P1-M1-A2
atcaccattgttcaggagaccttttaaccactacatgactgccanaagctcgtgagaccacggagtcaacactgcggcttacttaatccgatactgttagattatcatgctgtttgatattctaataagacaatgagaaactgtggagctctaccaaaaatgcctcgcacattcaattatacagcttaccataagtacctttactggttgatgtgccttgattatttgctcagctcaataactcaactcttatcataatgaacgaccccattctttaacctagaactactacatatctgccaccagtactcttataatatccaatgttaccacctggacgcatcattgtacgatggtgtaaagtggatgacgactttacagcccaacatta

SEQ ID NO: 28469 - DNA, 349 bp, Gossypium hirsutum
  unsure (1)..(349): unsure at all n locations
  Clone ID: LIB3197-013-P1-M1-A3
gacaaaaggctggaagagtctaccgtagcggactaaatacttttcccaggacatggggattattccgatattattaccgtatattcataaatatacgggtaatcttgccttttgaggccaaagctttgtggttgaacataagcgagcaactcggaggtatgaattagtttgttttcgtttttggtgcaacagaataaaagaaactacgttaagggatgtcaatgttgtgagatggtggtgattgtttttgttttttggcaaagagaaaaatgatgtgctcatgtgtcatgctcanggacattaaagaaggggaaaatattatattggtgatcttacatggtattttggt

SEQ ID NO: 28470 - DNA, 389 bp, Gossypium hirsutum
  unsure (1)..(389): unsure at all n locations
  Clone ID: LIB3197-013-P1-M1-B12
aattaattaatacttaaaaataattaatttaatagtttgaaatttataaaatggcttctcaggataaaaaaatattttttgaaaaaaaaaagaaacagaaattagattagtttggggctaagtaagtgttgtcatctgcatttactgtaaaattcagatctgaagctgaaccgagtgggtccaccattatctcaacgggtatgatttcggacaaacttttttagttgtttgtttgttgccaaagttgtaatgaagcatatactttcgtacttagaagagccatttgaattcatttcaaaaaattttgaatttttttggttaaagtaacagcaaagtttctgtggtatggcagattgtattctggtatttttattagtagnctttatact

SEQ ID NO: 28471 - DNA, 337 bp, Gossypium hirsutum
  unsure (1)..(337): unsure at all n locations
  Clone ID: LIB3197-013-P1-M1-C11
tcgtttactcgtgggcggacgcatgggaagaagggtcttatatgtttggactgcaggatggttnctccacgggaactggagagggcaaataggactcttttaatgagacacgaatcagaaataaagtgaaatgcatattggctaggattgttggctcacctacaatcttcttctgttcctagaaaggacatatcatgcgtcaaagagcttacttctctatatgaggccggttctattgaggacatctaccttgcttacgaccagctttatgtggacgaagattttttttactcatgttttggaattgcaggtgttaatgccgtgtatagtgctatgg

SEQ ID NO: 28472 - DNA, 457 bp, Gossypium hirsutum
  Clone ID: LIB3197-013-P1-M1-C8
aagcggtccgccgctctaccgtcctaattcccgtcacccaccgtctttttattacccacaaatcttttgtggattattatgggtgcaccgaatcatcttttttgattattccttaaaggacatatctacttattattttcctctatgtttatgataaatctaccatcgttattttattatatatctatatcttctaattcctttctcttattctctccacgtttatttctccaaacattctccttctttctttccttctcatcaatccttcctctagaccttttacaaatattttcttatcttcgccttataaaagttcattaccttcttgtttattctattttctatttctttcactttttatctttcactccagtttattacacttattttttttcctcttctatttctttcttaataattttcttccttattttttttcttccaaaattttttt

SEQ ID NO: 28473 - DNA, 283 bp, Gossypium hirsutum
  Clone ID: LIB3197-013-P1-M1-D1
ccgtttaagggcctataaaccctctggtgctctttatccttatggtttttaaatttctatcaaatgaagagtgcattcgatccacatcgtcagccgttccaggtcgataccttgctggacttctgctcagctgaatcacctgtggtcaatccagtgacaactgtcgagagtgtatctttaacaccttttcaggactgtgctgggaagcacgtcctggcctcttctggatctgacccactgtattgatgaatggaacgggctaccgcagctcttcacccaaaca

SEQ ID NO: 28474 - DNA, 287 bp, Gossypium hirsutum
  Clone ID: LIB3197-013-P1-M1-D5
ctaacccttatccatctgaaaacactgggtatccttcggaagagaaatgaggattaatattcaaatgaggatctttactctctagatacttttgccgaaattctatccaaaagactcatatggttgggcactaatgtcatatattactatgatgagttatctccaaactctattttaagaaaagcattgcatttattttattgaaaagtttaaatccaagatttatttatttttactatttttttcataaaatgttttttcttaaaaatttatgttaatacttgttt

SEQ ID NO: 28475 - DNA, 401 bp, Gossypium hirsutum
  unsure (1)..(401): unsure at all n locations
  Clone ID: LIB3197-013-P1-M1-E1
tttcgtccggttttttttctccttctaaagctaaaagaaagtgtgttcctttccatgtgaagggaataagccaaaagctaancataagaagggtttatggtctcctgaagaagattttaagctctaaatctatgtccttaaacatgaccatttttattgtagctctgttcccatcaatgcatggttgcagaggaatgggaagagttgcagattaaggtggattaattacttgagaccgttgctaaaacgatgcacttttacgccgcaagaggaggagacgattctcacccttccatcatttgttaggcaacaagtggtcacaaattgcacaaaatttgcctgggagaacagataatgagataaagaactattggcattcatatctgaaaaaaagaattgct

SEQ ID NO: 28476 - DNA, 340 bp, Gossypium hirsutum
  unsure (1)..(340): unsure at all n locations
  Clone ID: LIB3197-013-P1-M1-F1
tgaaaaaatatgggtttccaaaaaaccatatggggtttccttttctggatatgggcttaactaacaagccttttttttagccttcctagtgaatactccataggggaacatgaaattgacccatttctttcgaaggaaagggtgttggagatctttccacagtgggaaagaaaagcatcggaaaagtgtaccggcccccccgaggaggctgaaaaaaaggtttgaaaaatttcaagggggattntgaagtatatccctagagaggaaggcaaagagaaaagcaaacaaatgggaacatcatgtgggattgaacaagtttgctgatatgagccatgaggag

SEQ ID NO: 28477 - DNA, 385 bp, Gossypium hirsutum
  Clone ID: LIB3197-013-P1-M1-G2
cggtctcgtgggatttgaataaaccaaaggcgggactacagtggaaatattaggggttttgcaatgcatatattttgcttatataagattgttataaggtaaggtcaaaggtgcggctgaagagtgaggatccttaacctaaatcgaaggctgaaacgccaatgaaaactagaaagccaacaacatcagcagcaaggggatcctcttcttcttcacctccttcccaaactctttcctttattttccaatatgccccgaaaatcttctcttttcaaacacacccttattgctaccgtcttcttcctcctcgccatctatgccttcttctccactttcttccacactcctcttcccccctccgattccaactccgattcttcttctt

SEQ ID NO: 28478 - DNA, 286 bp, Gossypium hirsutum
  Clone ID: LIB3197-013-P1-M1-H10
ctatccaaggatgatactctagatggggatgtcttgatccttggggggcacattctccctatgaccgaagggtttacatgttggaactattcttgcctgatgaatatcccatggctgctcccatggttcctattcttacaatcatatatcatcctaacatctgtctgctttgtagaacatgcctcgttattctcaaggacaaatgtagtccagctctgcagatccgaactgttcttttaagcatcctgtcactcttgagcgctccatattttttttacccactctc

SEQ ID NO: 28479 - DNA, 253 bp, Gossypium hirsutum
  unsure (1)..(253): unsure at all n locations
  Clone ID: LIB3197-014-P1-M1-A2
cttgnttggggaggtgaggggggggcanctcacgtggcacatataactgcctgggctaagctgacctgcctgtttctacctcacgaagaggggagaggggggtggctcaaacnnnatctggagcacagataagacgacggagacctgtgcgggggnngagggaagtggggggggggcaatanaattaaacatattccacgggagtactttgccagatgcaccaaaatttgggaaggaccttggaggacagctt

SEQ ID NO: 28480 - DNA, 259 bp, Gossypium hirsutum
  Clone ID: LIB3197-014-P1-M1-B11
ctcttatttttgctcctgttagtttacgattgagatcttgcctcaagtgaaataggcagtgcatagcgcaggcggattcattgtcttgttccttggcgatgccatctctgacgccgagagcattatgttaccgcgccggatttcagcctattcgcgtgtcgtacggtttggccgctcctgaacggctatgaacactgcgagcctatgcctaatagagcgtggcggatgtatagctgctcgtccttgccgactagggcct

SEQ ID NO: 28481 - DNA, 329 bp, Gossypium hirsutum
  unsure (1)..(329): unsure at all n locations
  Clone ID: LIB3197-014-P1-M1-B12
atgcaattaaaatcnnnaatgggagacttttgaagtcggtgttcatataaaataagcatattataatccgtggaaaaaattagtgcttgtatcgtatcangcncatgtttcttctatttgtatacaaaatggtgactgatnggttaaccatgagggtggggtcaggggggatggtataattatattatactatatcagtcgaaaaattatatacaagtttttataattttgcataatgatgtatataactattaacagatgctcatctcacttcataaagtatcaagatcattactgtacattagcaacttgagcattatttatttgca

SEQ ID NO: 28482 - DNA, 332 bp, Gossypium hirsutum
  unsure (1)..(332): unsure at all n locations
  Clone ID: LIB3197-014-P1-M1-B5
cttcttcatcttctttctcgagagagggnctgaaaatcactgcgaaaaaaacatacattgtccaagtgaaacatcaagataagccttctttttaaagtgatgatgattggcacagntggagtttacaatcactcaccgattccccacccgagtcactgcnaagtgtacatatactgaagcgtgttaatggcttcgctgcttctcttaatgaagaacaagctgagtctcttagcaaatcggaatcgattctgggtgtttatgannaggcggctacactctccatactactcgttcacctcaattcctcggccttgacgccgattttgggcttt

SEQ ID NO: 28483 - DNA, 222 bp, Gossypium hirsutum
  unsure (1)..(222): unsure at all n locations
  Clone ID: LIB3197-014-P1-M1-B9
ggaacctcttttgattctttgtggggctccgtgaaagctgctgttgtgctgatccaagttattttttattttgttnatnancnnntnnnnatttgattttttcaacaatagcttcattattgtttgtnctgttttttagatgttgttnanngctnaatgatnaatcaaatcgtgaaactccaacttttgtgtgctttgtggagagcagagatttattgttct

SEQ ID NO: 28484 - DNA, 144 bp, Gossypium hirsutum
  unsure (1)..(144): unsure at all n locations
  Clone ID: LIB3197-014-P1-M1-C1
cggacgcgtggggtttttgaaaagaaatctcgagaacctctcttcattctctggttcctccgtgaaagctgctgttgtgctgntccangtgatataccagtgttgagatgancnntgttggatttgattttggcacgagagctg

SEQ ID NO: 28485 - DNA, 419 bp, Gossypium hirsutum
  unsure (1)..(419): unsure at all n locations
  Clone ID: LIB3197-014-P1-M1-C12
caccgactaaagttnaaacccacacctttgaatcttcatgaaactgctcgaactaaccgaacacctacacccagcctatgtgttattgggtgtgtggcttccaanctacaatcatcgatctccgaggctcgaaactaaccaatccgnnntcactgcggcgggtaggtggnagccaatccacaagcatctggcagccatggcagaagatggagtcgtaacactctacaacaacacggacatcaccgnctccaagaaaaagccagtctcgatcaaagtgggcctggcacaaatgctccgtggcggagccattctcgaagtttccaacaccaaccaagccaaaatcgccgaagaagcatgcgcctgggngtaaccntcnctggacccaaccgccacggcatttcacgcatgccggatcctgc

SEQ ID NO: 28486 - DNA, 323 bp, Gossypium hirsutum
  unsure (1)..(323): unsure at all n locations
  Clone ID: LIB3197-014-P1-M1-C6
gtcgtncccatcggcgctgtggagggggtcaggctctggctgggcaattccgcctacatttactggtccgtttccttcatccagatgctggggcagtgggtgggggtcgncgngnattccatcggcgtcctttttaaaaaagaagggtacaggagccctcggtgggggcgtgttggggatctcttttggggtcgccatcgcagcatatggggaagctaaattcgacacttggggagtgattttgcagttgggagctgnagcttttcaggcgtccaggttggtcatgatccaaatcttgcttacttctaaagggatcaccttga

SEQ ID NO: 28487 - DNA, 246 bp, Gossypium hirsutum
  unsure (1)..(246): unsure at all n locations
  Clone ID: LIB3197-014-P1-M1-C7
actctctacacttgcactngggcctttctgtgacttcctcactctctctatacactttcccatctacctaagcctatctggtgtgggaggcagagctggtcccanatttctgcatattaaggcgagccgtgagcgtgaatttcggggggattttactatggagcaggggttcaatagatcaaaccaattggccagatacatagttacaagatctcaacttggggggactgggatccttgatgctac

SEQ ID NO: 28488 - DNA, 263 bp, Gossypium hirsutum
  unsure (1)..(263): unsure at all n locations
  Clone ID: LIB3197-014-P1-M1-D7
acttccnctttgtcacgagagaggggnggagcttntcttaaaccaaaagctggagaaattcaaatataaaaaagagattctttttccatatatgtgagagtgagacagtattaananacaattaagtggaaatcgagtgcattttatttctcttttaaggggcaaggaagaaggatgacagaagaangaaaactttcgatcgaaccatccaagcttttgatttttgttatataaaaccattatattgcaagtataaataatcc

SEQ ID NO: 28489 - DNA, 260 bp, Gossypium hirsutum
  unsure (1)..(260): unsure at all n locations
  Clone ID: LIB3197-014-P1-M1-E4
gtggtntagaanactgnccctggctggaantgggttggcttttggctcattctcggccccatcttgtggggtttgccttgcttgtgcctttggatgtggtggtgtggntcgttccnnntgcttgccgcggctgcttttcgcttcaggcttttgcgtgggtcaggtgtttgtgttggttggtganatcatgtgcaccaagaagccatatcatttttgactattcgcgcaataccattcctatcattcactttcacctgcaa

SEQ ID NO: 28490 - DNA, 344 bp, Gossypium hirsutum
  unsure (1)..(344): unsure at all n locations
  Clone ID: LIB3197-014-P1-M1-F6
cggacgcgtnggggagaacaaaagtnngataaagatacctacgtgaagccacgccgagggagtactgcaagtgagagccaagcaaattctagagacgagtgtagagntnatggcnncaaggatccaaaaaatacctacgtgaagccacgccgagggtgtncttgaagtgagagtgaaggaagattccacaaaggagcctagacgtcatggcagcaaggatccaaaaaataaattatctgcgaagttgagtgaagatgataaatatagtcaaatgagcaagtgcccctacaaataaatttgaagccgacgatgatgattttgatgatttcgatcccaggggagct

SEQ ID NO: 28491 - DNA, 298 bp, Gossypium hirsutum
  unsure (1)..(298): unsure at all n locations
  Clone ID: LIB3197-014-P1-M1-F7
aagctggcacgcctgcaagtacccggcccgacccacccgtccgacccacgccagccgctaaacaagaaagcntgtgggaacaataccaggaggcagaaggtgggaaactggccctcctcctagccaacgccgaagcacatgtgagggtgttgaaatnannctcggagctcaacataactgacacactctcaaccggtggtgttnnagagtatatgagagcttgggagattgcgagtgcccttccctccaaaaatcctgacccaccggcgctacttgatcgaatgctacgcctgttggc

SEQ ID NO: 28492 - DNA, 336 bp, Gossypium hirsutum
  unsure (1)..(336): unsure at all n locations
  Clone ID: LIB3197-014-P1-M1-G9
ggagattgcaaaggctgtaatgcatcttgacaagttcaagcagaaacatacgaaagtggaggatccaaaattgaaaatggttcgtggtgatcttgagantngaatagacatcttaagaaatcaagctgatacctatgatgacaaatgncctattatagatgctgttgtatggcatgatggagaagtatggagggttgctctcgatacacagagccttgaggatgatactaaatctgggaaactggctgannttgtgcccttaactaattacaggattgaacgaaaatatggcgtttttagcaaattaaatgcttgtacatttgttgttaatgtgta

SEQ ID NO: 28493 - DNA, 261 bp, Gossypium hirsutum
  unsure (1)..(261): unsure at all n locations
  Clone ID: LIB3197-014-P1-M1-H6
cccacgcgtncgcccacgcgttggtagctcaaaaccctaaatctcagagtagttagttgacgaaagttcttttctttaaatttttggcgagaggggtagggggatggggaagatgannccgattttgatgaaaggtcatgaaaggccattgacgnttgtgggggngtgagggagttggagaggggtngnnntcatgcgctaaggaccatacccctaccgtttggttcgccgacaatggcgagcgtctcggcacttatcggg

SEQ ID NO: 28494 - DNA, 228 bp, Gossypium hirsutum
  Clone ID: LIB3197-015-P1-M1-A1
gccaagaaacaaaactgagttttattcttattgaagaaacatcttttttcccttgctttgccgtactccgtaacccttcccgctcgctattcggactctaccgagtattcaagagtttgattattactcaactctaactgccattaagaccagaggctggagccggagaagaaaaagataatctatgggggaagacgcatgaagaggttcataatgcccgaagcttat

SEQ ID NO: 28495 - DNA, 264 bp, Gossypium hirsutum
  Clone ID: LIB3197-015-P1-M1-A10
atttgtgcaagcgaggaaatgttgggcatgcaatgcagttagtggaaaaaatggaggctcatggttatccaactaatactgttacttataactctttagttagaggtctttgtatgcatggaaacttgaagcaaagcttgcagcttttggataggttaatacaaaaaggactagttcccaatgaattcacttattctttcttgcttgaagctgcttataaggaaaaaggtgtaaatgaagcaacgaagcttttggatgagatca

SEQ ID NO: 28496 - DNA, 433 bp, Gossypium hirsutum
  unsure (1)..(433): unsure at all n locations
  Clone ID: LIB3197-015-P1-M1-A9
atcctggagccagctaccctgctgcaggaccacggtggacccacgggagaagctggaggtgctggagaggacatacggggaaattgagggcacggtgtcgcgggtgctgggccgggagtacaaactgcccatggacgacctgctgccgcttctcatctatgtggtgtcgcgcgcccggtgaagcagacaggctgggaactgggggtgcagggcaggggcagggttctacccccaccatgatatcctctgacacctctgaaccccagggttgtttatggatgcagcttctctcagtacagatggggaagctaaggcccagaaaagggagggtcccagccagggtgctggggtgctagaggcagagtgagaaccacgccccaggtgtccagccatcctggccagggctccttccccagctgcctgtncatgacag

SEQ ID NO: 28497 - DNA, 319 bp, Gossypium hirsutum
  unsure (1)..(319): unsure at all n locations
  Clone ID: LIB3197-015-P1-M1-B11
ttacgcatttttttacacgtccggaaccagnggaagcnnngnggggtgcctttgaaaggagtggattcgaccgcttcaagctttggcggtatgtttgagaaattcagatcagatgcacccaactacaaagccaatttcatccttttcttggccgataaagacccctctacctctcttagttggtgtcctgactgtgtaagagctgaacctgtgatatacaagaaattggaagcgtcgccagaggatgtgacactgctgagagcatatgttggtgacatgcccacatggaagaatccacagcatccttggcggcttgact

SEQ ID NO: 28498 - DNA, 352 bp, Gossypium hirsutum
  unsure (1)..(352): unsure at all n locations
  Clone ID: LIB3197-015-P1-M1-B6
aaccagttcattatttggaaaagaacaacanggtattggaaaagtggtgtttctggtaaattcattggccctgatgggatgccttcagccatgccatcagcaatttctttctttttgtcaaattttaccaccgttgtactccacaacgagtccatgccacatcttacctcctcattatacagcgacacaaggatgactatcagtttctccggtcaaattcagtatttcaagtgggattcttggaagatctggtccttgattngngctgagcctagagataaatgcagtatctacaatgcatgtggaaaattcggtagctgcaacagtaacaatgacttgatgtgtaaatgtc

SEQ ID NO: 28499 - DNA, 390 bp, Gossypium hirsutum
  Clone ID: LIB3197-015-P1-M1-B7
tcggtttattatcgaaaacattcaccaccccagatgatatctttttctgcgtggtgtcactctcttcccataactccagctttttggtgaatgaatgagcattgaaaaagcttccatcttttcgagtttctgatatatgttttttttactatttacaaagggggtaaacttttatgatgattacttgctagatatagatgtttgagccctttcctcttttagaattatggattctgggagtaggatttacacggctgatgagttcaaattggatgctaaatggttgattgatccaaagcatctctttgttggtccaagaatcggagaaggagctcatgccaaggtctataagggaaaatataaaaaccagactgttgcaattaaaatact

SEQ ID NO: 28500 - DNA, 362 bp, Gossypium hirsutum
  unsure (1)..(362): unsure at all n locations
  Clone ID: LIB3197-015-P1-M1-C2
agaatattgaaaagaactcacccggaagtcaaattctcaaaggttacctaatggccacccttttttatgaaccttcaactagaactaggctttcattcgagtcggccatgaaacgattgggtggtgaagttttaacaactgaaaatgctcgagaattttcttcggcagccaaaggagagacccttgaagatactattagaactgttgaagggtattccgatataattgtgatgcgacactttgaaagcggtgctgctaaacgagcggcagctactgcaggcattcccatcattaatgctggtgatggtccgggtcaacatcctactcangcccttttagatgtctacaccatagaaagagag

SEQ ID NO: 28501 - DNA, 303 bp, Gossypium hirsutum
  unsure (1)..(303): unsure at all n locations
  Clone ID: LIB3197-015-P1-M1-C5
cggtcgcgtgggttctcttgtagctgctttcttgtggattgctagatttgagctccgaaagtattgcatttacagggtatttgcagtttcacgggatcttcatgtaatgggaaaatctcccggaaaatggattaagactgtgctttttggaaagaaaccttccaaatctagttatcctaaaggaagggagaaggttgacaatgacagccaggtattggttgcagccagngcatcagaaagtgatttggctgtggcttcctccttctcttcacagctcaatnctcatactactgagagagatga

SEQ ID NO: 28502 - DNA, 348 bp, Gossypium hirsutum
  unsure (1)..(348): unsure at all n locations
  Clone ID: LIB3197-015-P1-M1-C6
caaggcctgtaagggctggccccctggtgaattgtcccatgccctatgtatctgtgagtcctgcagagatgacaaatcangggacgggatcatgtctagtcaccgtctgggaaaatgctccaggagtgaacacatttcaggctcttgacgatgtacctncaaactcttcngatgggtggccagcccgcatgtctgtgccgcctctgccagtgagtcagagccagcacacagcagctgacttgtaaagtgagagcanactgctctgtcagctgcttcttggactctaagcacatctttatgttagcatgcgtcttgagatgtgtacatctgtgtgtatggtcagcttca

SEQ ID NO: 28503 - DNA, 173 bp, Gossypium hirsutum
  Clone ID: LIB3197-015-P1-M1-E10
atggccgggccagaccaacgcgtttgttttaatcgaaggggcccactttaccctggcatccaaactctgatttgcctttcaatcctcaaagggcgggggaccaccagcctttatcggagaaaaaaaaaagaatgccaggttcgtgtgtcaaattgggtaaagagaggaaaaag

SEQ ID NO: 28504 - DNA, 341 bp, Gossypium hirsutum
  Clone ID: LIB3197-015-P1-M1-E6
gaacaactttcacttccttttgatgccattgggtgcgtgcatttgtttaagaggtcttgtaatggtctggtgccatgatttcatgaagaagttataatctgaatttatttataattatatatatgtatactttttaagaatagataaggtttctgattgtgttaaatttgaaatatggcctctgttatagaccaaaaggataaaagaaatgatctgtcaaagactaagagagttgcctgccagtgttatttgagaaatgtcaattttttttttttttcgctaataaggcgctaaagaaacggcatttaattgaagaaagagctcatgctactgcttatatt

SEQ ID NO: 28505 - DNA, 244 bp, Gossypium hirsutum
  Clone ID: LIB3197-015-P1-M1-F10
cttagggagacattccgggtgtctgttcttgttctcaaatttgtgtttcaaagaaaataagacaaatttccatgtgcagtggtccgaagaggaagccaactcaaacttgtttaacgatggagggtgagtctcgtaaagaagatgaggttcctcaaaagttctcggttttgctggagttgtcggcttcaaaatgatttgattggctttaaaattgctgttgaagaagggggtcatgatatggatg

SEQ ID NO: 28506 - DNA, 391 bp, Gossypium hirsutum
  unsure (1)..(391): unsure at all n locations
  Clone ID: LIB3197-015-P1-M1-F11
ttacaagggccagacggggagaccaaatgttaatcttttnaaactgatacaattgggtcttactttctctgatgccaaagggaatttgcctacttgaggaactgataaatactgtgttagtcaattcaatttccgcaaattccatcctaatgaggatgtctattctaattactccattgagcttttgtctcaaaatggcattcattttcataagaacaaacaaaaggtcattacttctcatgacttcactgaattggcaatgatatctgggattggctccaatgataatgcgcattggtcgactatccataccgacttctatttttagtatttccttaagttgctcacttgcaataattcttctgaacacagacaggtttctttaatttga

SEQ ID NO: 28507 - DNA, 278 bp, Gossypium hirsutum
  unsure (1)..(278): unsure at all n locations
  Clone ID: LIB3197-015-P1-M1-F7
tcgcccacgcgtncgattgagacctcgggataccattcacatgatgcaacctggtcacagtccagagaaccagaggcaaatggtggtacctgagctccaactgcacattcaagagaacagccagggaattgctgccttcaatgggttgacttctgcttaccctaatcaatcaaccccatcacctgttcagtcatatccaggtcaaccccagaagtcccatgggctgaacaactctcttcagggttctaatgggtcacagcagcaagcatatgccatgc

SEQ ID NO: 28508 - DNA, 458 bp, Gossypium hirsutum
  Clone ID: LIB3197-015-P1-M1-G11
caaacatgaagctcgtgaggtttttaatgaagttaaataacgagactgtctccatcgagctcaagaacggaactgttgtccatggcaccatcacaggggttgatgttagcatgaatacacatttgaagacggtgaaactaacgctcaagggaaaaaaccccgttactcttgaccatctgagtgtccggggtaacaccattcgttattatattctccctgacagcttgaatctggaaactttgcttgtggaggagacaccaagagttaagcctaagaagccagctgcaggacggcctttgggacgtggtcggggtagggggcgtggacgtggtcgtggcagaggtcactaattggctctctgcaattttccttcattgggtaccttactattttagtgtgctcgagcagaatttaagggagcgaagttttgagtatacagtaaagaatctgtctattta

SEQ ID NO: 28509 - DNA, 394 bp, Gossypium hirsutum
  unsure (1)..(394): unsure at all n locations
  Clone ID: LIB3197-015-P1-M1-H5
cagtattttctcattacacatttggcagatctttcgttgtgccgtcctttcgctggcctaagtgagctctcattnntcctctttgtcaagacaccganntttccaaatcttctcttctccttcccaatcgcttgtcttggtggtcttggcattctttcttcaacacacattacacttctttcttgtgtagtcgataattccagatcggtacccttcttaaactcgtaacttgcttcttttgtaagttcatgtgctaccccatcccaaatctaaacactttcttgaactgacattcttcaaatactctgcttaatgtttttatgtcatgtatatataagcataaaattattgatcctcatttgctgtttggacccgtctgataatactgagagca

SEQ ID NO: 28510 - DNA, 454 bp, Gossypium hirsutum
  unsure (1)..(454): unsure at all n locations
  Clone ID: LIB3197-016-P1-M1-A10
gctggttaaaccttagccgaagctgtagaactctcgcatcgctccctcttcgccataaaaaatctttaaaaactttcaagttaaaactgaaataccaaaactaaaactaaatctaaattagcttgtaagtaatttgtttcttgaaagttaggggagagaaatgttgtcgacaccgtacgagtccgaagcgacggagcagcacgacgatacctccgcatcaaccatgaaattcggaactcccgaggcagtcgactacgtccgatccctcaccgacgtgggggccatgacgcgcctccttcacgagtgcatcgcctaccaacgcgccctcgatgtggacctagacaccctnctcttccagcgcaccgacctcgacaagagcctaaacaacctccaaagatctgccgacgttctcgacattgtcaaggctgaatctgaccacatgctctctaacgtt

SEQ ID NO: 28511 - DNA, 412 bp, Gossypium hirsutum
  Clone ID: LIB3197-016-P1-M1-A6
cccacgcgtacgggaaaatattatcttgtggattcaggatatccacaaatggtagggtttctacgtccatatagggggaacgatatcatttacctgattttcgtcgaggtaatcatcaagtatctggaaaaaaaaatctttaatcatgcccattattcgctacgctctgtgattgaacgaacatttggagtgtggaaaaaaaatgaccaatattaaaggatattccaagttatttattcaacaagcaagttctaatagttattgcaacaatggttttgcataattacattcgaagacatgattggtcagatgatgatgattttcaaaaagtggagaatatacccgacatgccagtctctttaagctagtttgacagaggtgaatcgagttcttgtacatagaaagtgacctt

SEQ ID NO: 28512 - DNA, 363 bp, Gossypium hirsutum
  Clone ID: LIB3197-016-P1-M1-B12
gatcacttgtccaatttttaccttcaatggtgtggatgggatggtcgacagattagcaggggacgttaaacatgtcatacaccaccacccaattgttcagaaaatttcttttgttgatcattcatcgtgaggacttatatcaagatatgccattgcacgactttttgaacaatatcttactcaagaaaattctcaaacaaacggacacagtatagctgatcaattgtaagattcatggcttgaagggatcttcaaatgtcaaatgtgctggactagagcccgtcaatttcataacacttgcaagtccacaccttgtgtctccatcgcattagcaggttccactgtttcttggctcccattttc

SEQ ID NO: 28513 - DNA, 165 bp, Gossypium hirsutum
  Clone ID: LIB3197-016-P1-M1-B2
ctgactcgtggggcaaaatatggtcaaaaatgggtgcgaacaatgacaatcatcgagtagcttttcacccaagtggaatgagcagtatacatgggaggtttttgatccttgtactgtcataactattggggtgtttgataattgtcatttacatggaggagataa

SEQ ID NO: 28514 - DNA, 166 bp, Gossypium hirsutum
  Clone ID: LIB3197-016-P1-M1-B7
tatttattccacccatccccaaaaatctgtgagtgtcttttccacattatatagtgccaaaccatttctcccctacccagattatatttatcttgcccccaatttccccaaattggcaaccctctacatctcctcaaagggttgtagcagaaggaagtctcgaact

SEQ ID NO: 28515 - DNA, 449 bp, Gossypium hirsutum
  Clone ID: LIB3197-016-P1-M1-C10
aacagcttcaaatttgttctcctcttgtttcctgctatagaatagaagtgaagtgaaggagaaagcttcagagaactaaatagcactggaaaatggaggagaagatttcgatgtctttgaagaatcatgattttcgtttctttatttcgtcttgattgctctttttgtttgttattttgatttggaaaaagaaaaagaaaaagtaaagagttaaaagcaatggagtctcgaatggatcattacgagatcatggaacagatcggccgtggtgctttcggcgctgccattctcgttcaccacaaatccgagaataagaagtatgtactgaagaagatcagattggcgcggcaaacggagcgttgcaggagatcggcacatcaagaaatggcacttatatcacgggtccagcatccttacaattgtgaatttaaagaagcttgggttgagaa

SEQ ID NO: 28516 - DNA, 431 bp, Gossypium hirsutum
  unsure (1)..(431): unsure at all n locations
  Clone ID: LIB3197-016-P1-M1-C12
gtttattttcttcttgttttgaaatttcctctctttgggtcttcttctccttagactcgggtagtctggctcgcttaccgcatcatacctagtttgatcttcagcgtactcaggaactcccatttccaggtatgtntcttctcctctttttaacgtttctgttgcaagaatgtgtgcaaggccccccgtttttctgggtgtatgttgaaatctaatattactaagatcatttttttcctcttgtattttttcccccgattttcttataattattttcttttctctgtgttttattttgtttatttatcatgttttttttttttatatttaactgttttctattattattttttttaagttctttctgcaatttttttcgcaacttttcttccttcctttttactccaattttttctcctagtttttttttt

SEQ ID NO: 28517 - DNA, 218 bp, Gossypium hirsutum
  Clone ID: LIB3197-016-P1-M1-D4
tcccacccgccggtgtttgttgttctgaggaaccgacgcactagggaggagtccaatgtggcggaggagccggaggcctaagtactctacaccgagtgcatctagcggaacgggtaggtggggctgtatgtcatggccatagtgttcattaccctcctgattggattccacgccctgcgtgcttacctagataagctgacctccctctctgaccgtta

SEQ ID NO: 28518 - DNA, 195 bp, Gossypium hirsutum
  Clone ID: LIB3197-016-P1-M1-D6
gctctttctttctatagaattagtcactcctgttctagatgaaagttctctccccaattggtgcttgcctaacgcttgcttgggtgggaaaccatgctgctctttcacctgagcaatattggagctattagctggcaaatacttcaatgccaaaggctgtaaagaaattctacatccagaactgatggaggagaa

SEQ ID NO: 28519 - DNA, 275 bp, Gossypium hirsutum
  Clone ID: LIB3197-016-P1-M1-E6
gttccttatcggaagtcttatccggctataccggacagtcattatgatatttcgaacccgaaagcagttattgaagagttggataggattgaggagtttctcaattgggtcagctacattttccctgatggaagcttgtatgaaggcacggtttgggatgatttggctcatggcaaaggtgtttatgttgcagaacaggggctggtcaggtatgaatgttaatggttgcaaaacaatatggaaggtcatggggttgttgatgtcgttacatctgt

SEQ ID NO: 28520 - DNA, 264 bp, Gossypium hirsutum
  Clone ID: LIB3197-016-P1-M1-G4
gcaactttttggacttagtgaattccctgatgctgaggatctgctcaaaccagcggccgcagccatgatggattaatcagcggatgttcgcaaagcagcacatagatgcgtcactgaaattttaagagttagcgcgcaagaagcaattgataagaatcttagagatttacaagggccagctttagctcttatccctgagcgggtaaaaccttataggtcttttcaagaattagatgaaccatcaaaaggtggttctattggact

SEQ ID NO: 28521 - DNA, 251 bp, Gossypium hirsutum
  Clone ID: LIB3197-016-P1-M1-G5
tcctccatgttcgactcaaccctcccgtcctatttctcttgggccgatagcgaaccgggaaaaggccatcttgagaatcggtcgtgatctccatccgaatcgtattctagacaaactttctcagcgactgacccgacccatgttccctgctaaggggcgcaccacagcgtgagagcccattcgttcccggaccctgttgcaccaagaggcgctgtctacaattcctgttgtttgggaatgcagccctaatc

SEQ ID NO: 28522 - DNA, 255 bp, Gossypium hirsutum
  Clone ID: LIB3197-017-P1-M1-E12
tcggtttcagaagaaaaggaaagttctaaggccagcgatgaatgtaagaagtggccctggtttccgttttatagtcctagtccagctcactacttgttctccaagaagtctccggcgagatctttggccaattccactccgaaacggttttttagggagccgttccctccgccttctccggccaagcatattatggcagttcttgctcgacggcacgggtctgtgatgccgaatgagtccgccatacctgaagga

SEQ ID NO: 28523 - DNA, 290 bp, Gossypium hirsutum
  Clone ID: LIB3197-017-P1-M1-F5
accctcgctttcttttattttactgaatttctttaaaaacttcgcggttatataactttgctgcagtgatttacttcttctataatttatacctaaatgatctctagtattcttttatttattcaacgatcccttctcacccatgctaaatataatccttatctcatccttattaccaacgcctacagtcattttaatcacgaacattggaaactcattatccaccagttccaaaatgaaacaacagcttcactctttttacatgaccaataattcgtattctcaatttt

SEQ ID NO: 28524 - DNA, 219 bp, Gossypium hirsutum
  Clone ID: LIB3197-017-P1-M1-F6
ctttccctactttctctcacttcaaggaacgactttagtctcatttccttaggcttcaagtgattgaatcagatctccagcagtgacacttttctgtgtttgccaagaaatggcaggctggggtggtctgtcttgagatctatcagttaaagagctgttttttggagcatttttagaggattcggaattctgggttttttagaataggtccgataaaat

SEQ ID NO: 28525 - DNA, 202 bp, Gossypium hirsutum
  Clone ID: LIB3197-017-P1-M1-H5
agcagcttgagtttatcgaccccctcttggaatctccttaatgctagtcctcctgatcagccgaatacaagagttgggcttggtatgagaggagtaattagtgatgcgtttccatctaccttaagaagagcaaatccaggaaaccaacaaggacctttaccccatagtttatcatcaactggggttgccgggcattctagtt

SEQ ID NO: 28526 - DNA, 392 bp, Gossypium hirsutum
  Clone ID: LIB3197-019-Q1-M1-A8
gtcaaacaaagctgaaaacaagctctaacccacactgtagtctcttcttcctttcatctaaccccccatttttctttctcattttttcagaagaaatggcaaatgaaaagaaaacccaaactggggtttggccaaaaatcaaaccttttgttaatggtggtacctctggtatgttagccacatgtgtcattcaacccattgatatgatcaaggtgaggattcaattgggtcagggatcagctgctactgtcaccaagaccatgcttagaaatgagggtattggtgccttttacaaggggctatcagctggattgctccggcaagctacatacactactgcccgactcggatcattcaaaatgttgacaaccaaagcaatcgaagccaacgat

SEQ ID NO: 28527 - DNA, 406 bp, Gossypium hirsutum
  Clone ID: LIB3197-019-Q1-M1-B1
gcgaaaaacacacacgctatagtaggaagagagttttcgggggagagaaaccctaagttttctctggcgtttctggtttttgtgatttttgaaattcgctgcttcaacggagactcatttcaggtatcaatctcttttttagtttcagctccatgctttttcacttgtatttcagtgggttttttcttagtgtttttggttttcagctttagaaatcactgtttcattccgtctttcaaatctacagatgtcggtcttgctcttcatttttgtttgtttatcgtctagtacacgttcttctttatttttggattgattgtttccctctgtttaatattataacttttgggttattttctatttcttctaaatctttgcttagcacaatactaattgcctaaacaaa

SEQ ID NO: 28528 - DNA, 364 bp, Gossypium hirsutum
  Clone ID: LIB3197-019-Q1-M1-B4
cccacgcgtccgcggacgcgtgggtcaaatctcagtagcagcactgtacagctctaggcaattcatttcttgtgaaaataagggatacccatggagttttcccctggtatcagctatgatcaattgtggattcatttcttagtaggagttacgatgcctagaccatccttattctggttctaccatgaatttccattcgggtagaaaagatgcgcagaagcatgcagttgataaatcatgcatctattgcaacaaagtatttgacgactatctagctcttagtggccaccttaggattcatgaggaggagacattgagggccctgaattttcctggtcgttctagtaattccatcgacattact

SEQ ID NO: 28529 - DNA, 282 bp, Gossypium hirsutum
  Clone ID: LIB3197-019-Q1-M1-B7
tctaaagctttggaaggtattggtttatatgggaaatttagatccgttttattatacgaagtttaattaagagcgaattggggatgagtttcccgtgcgataatgatgaaagtcgggatctcaagaagccctttttacataccggaagatggtcttggatgacgtctatgcagcccagggttatgagagcttctgttcaagtccttcgcgatggatcaattttcgtagatctttgggtactcatagatgccttgggccctatccaatttggctttacctggg

SEQ ID NO: 28530 - DNA, 404 bp, Gossypium hirsutum
  unsure (1)..(404): unsure at all n locations
  Clone ID: LIB3197-019-Q1-M1-C10
aatttccccccttgaaacccccaactttacaaacataccgtcctttaaaatttttaactccatgcccattgctatcttttcttcctcaaccccaattcttaaacgcccaaaaatctctcttcctccatggaagctgcttcgaggaatttattgagcttcatttccatgctaccgacatgttttctctttctcaaatctcctttttctttttgttttctcttgcaatctgcttatgttcggatttgaattagcttattattattttttgttctctctagggttttagtggatccattatagatgttttagaaatttaatgaatacggtttcgctcttttccttttttcccttttggttctcattacggnttcattctttatcctatttatttttcctaaaacttt

SEQ ID NO: 28531 - DNA, 284 bp, Gossypium hirsutum
  Clone ID: LIB3197-019-Q1-M1-C4
cggacgcgtgggaaaaaaaaaaaaaacataggggaaataaagacatagggagatacaaaaaaaacttaaaaacgcacatgtcgggcgatattagttattttaatcctaccaattgctgtttcctcatttgatgatgttatataatggcacgtccttcaaattccctggctatatctaaacaattctttttttggtgcaagatccttttgaccgtttggtttagttttaagacatttgtccctatccgcacttttgcattattcatagctttcatgacgggtggc

SEQ ID NO: 28532 - DNA, 377 bp, Gossypium hirsutum
  Clone ID: LIB3197-019-Q1-M1-D1
cttctctaaaacatttcccgatgtccaccgtaacagtcgtcagatccccctaacgagccgctgagtctcttgactgtttttttttattgaaatcagtgttagatttttgttccgtacatggcggaggaagacgtcgttcccaaaaccttccgagctctcgtcgagagcgcggaccgtaaattcgcacgagtccgggacttaccgtcgtacggacgagcacaaggccaacactatttccagaaagtcttcaaagcctatatgcggttatggaagtaccagcaagagcaccgacccgagcttgtcaaagccggtttgaaccgttgggagattggcgaaatcgccggtcggatcggccagctgtatttcggccagtacat

SEQ ID NO: 28533 - DNA, 295 bp, Gossypium hirsutum
  Clone ID: LIB3197-019-Q1-M1-D5
atgtgagccatcacacccagcggggagtttttaataagggtattggactaatagctccatcttttttgtgttgcatcagccaccttgagcaatatagcagtctcctgattgatctccttacatttcttaatataagtgataaattgtgacttgtagatctaacaaaaattaggtgccctcgttgcagctgccacggaaagctggtctaatatcaaagcaaactatccttcttctcgagcagagtttttaaggtaggagtgtgtgtatattgacattttcctagcagttgctgaag

SEQ ID NO: 28534 - DNA, 414 bp, Gossypium hirsutum
  Clone ID: LIB3197-019-Q1-M1-E10
ctttaatttcttgttgttttagcatgttgtgtgtttgtcgatcagtccttaattataatcgtcaattgcctaagtgcatgcccactgttctgcttcattgaatgcatgttaagcatgttgttattttatgtatctcttgtttgcacgattgtaaagcaaaccactgttttgatcattgatcgcgtgatcatggcatgcttctatattatattggatctgattctactattctgatataatgacattactcactgcgtttggcttgattggagacaaaggagatctatggagttttggtggtcaattcgcaattaatggagttctggcggtaaatctacaattttagaattatgtttggagttctggtgatttgctcgcatattgttctggcgattgattcgcaacactgttctg

SEQ ID NO: 28535 - DNA, 423 bp, Gossypium hirsutum
  Clone ID: LIB3197-019-Q1-M1-E12
cggacgcgtgggaaaagattaaaagaacacttcagacaaaatggactttcgaaggccagttgaatttattggtattattcttgaatattgcatcattgtacaacctccactccaactagtttactgagaaagtattttggaccgtaaaagagtatttatttttgacttgctatggatctaacctttacatccaagaatatgctgcatctacctcattatatgatctgctgcctggtgatcatggtgcatttactaaaagccctgataacttcatggtactctacatacatatatttatgagattcttcatctgattggttattaatgtggtggtattacgcttcagtactttgatttgggtagctgttaatgtattagcttagtttgatattatctagcatctttggttatgatgtttttatt

SEQ ID NO: 28536 - DNA, 243 bp, Gossypium hirsutum
  Clone ID: LIB3197-019-Q1-M1-E7
ccgacgcttacgctttctcgtagggtataaagcacctttgcagtgcgctactctctacatttctagaatacagcacttctagtctacatgacggatatggttcgaatccttaaatgcctatctctcgctggatacgtagccacacggatctctcaacggatctatatcccaactctaagctatcaaacactcacaatgccaatggctgccttacaaattctacattcagaactgctggatgag

SEQ ID NO: 28537 - DNA, 278 bp, Gossypium hirsutum
  Clone ID: LIB3197-019-Q1-M1-F3
ctgaaatggagaaattacacgttgtggttatgcctaattcaggctagggtcttgttattacttatatggtaacatatgtctaaacttatctaacacgaggcttaaaaatcagctttgtttactcagagttgaataataggaaggaactgggtgcattaccaaagaacgaggacaaaaatggtttattttatctactgggaatagaccaatggagctaaaagatggggaagataggaataaaggctggaagttaactgatagttaatgcctgcattgtg

SEQ ID NO: 28538 - DNA, 376 bp, Gossypium hirsutum
  Clone ID: LIB3197-019-Q1-M1-F4
cttgttattacttgtgatggtctctatgatcttagtaaggagctttctaatgtagatttcgtgttgacattattctataaattgattgatgtgagtggaaatgctgttccttgttcgctaacaaacccgttaatgctaaggctaatatatcagaaatgttgaatatgaacaagccgacattcttttataaagtaaattaacatgactaaagaaaactcgattcggatatgttgtttatgaatagtataacagaaatgctattgagacactgttttattgattctttcgagcatcttatacctgtcgacctttttcttcttttaatatcagtatgaaatgtcttgataaaataatgttgatgtgttcatatttcacg

SEQ ID NO: 28539 - DNA, 400 bp, Gossypium hirsutum
  Clone ID: LIB3197-019-Q1-M1-G11
aattgagacagctaagctccatcctccacttttcactcccaccagatcgcgtcttcttcctccactattggtgctgttgttgtttcagagttaagtgtttgctggacaaaagcaggagaataaaaacatgtctaacttttacaatcagacgagagcagcctcgtctctgatgagacgccttaaacgaagcctcatcaatccaactgctgtcagtcgcgctagatgtttcaccaccgccgagggccaccgacctagccttgtccacaagcgcagcctcgatatcctccacgatccatggttcaacaagggaacagcattttccatgacggaacgagatcgtctggatcttcgtggcctgcttcctccaaatgtaatgtcttccgagcagcaaattgaacgc

SEQ ID NO: 28540 - DNA, 348 bp, Gossypium hirsutum
  Clone ID: LIB3197-019-Q1-M1-G2
gcggcattagcaaccatagccatggattgctcaccgaaactctggggtatgtctatcctgtggctttttgccctcttctccatgcaaaaccgtgctagagaggactttagcaaattcccaagagttaacatcgctgagaaagagacagcctcccgagagcagaagcgcgagaccttagtttcccagaccacccagaagccccaagaacaagagccaagggtcattcctgaaacccaaaatggttatggtctttacggccacgagtcaaggtcaagccgggccaggttcaccaccaaagaaacctatgaaccctatgtcacccctcgtagattccaccctgatgagccc

SEQ ID NO: 28541 - DNA, 287 bp, Gossypium hirsutum
  unsure (1)..(287): unsure at all n locations
  Clone ID: LIB3197-019-Q1-M1-H1
cgcaacaacactgaaagccaatggcttcctgtctgaacagcgcctgactgtttgacggtggttcgnttcttcaactttgtcctcttgcttcgacgccgttagactattgtctgcgtccactacgctttctttctattcttgtatacaaatccctcggtttctctactctgtctcgccacaagaggggatcgggtgtgagtatgtcgagcaccggacgggttaactatgtagccagtcctaaatgcgctgctgcggatcctgatcagttgaagagtgcttgagaagat

SEQ ID NO: 28542 - DNA, 309 bp, Gossypium hirsutum
  unsure (1)..(309): unsure at all n locations
  Clone ID: LIB3197-019-Q1-M1-H10
cccacgcgtccgtgaagatgtcacgaggtcccgctcaggctcttcgtgtttcattggtgttctctctctgcctatatcccttgcactccctatgatgaagagttgaaatttttgccatgtatgattgcatatgtagattttcattttatttattaagtacggagggaatatagattatgaaaaaaaaaacaaaaaaagaaaaaacaaatcaataaaaaaataaaaaataaacaaacaaactncgctggcttttggggggtctgaccctgatcgcctttcggatcgaggcgacccacgtactgtatccca

SEQ ID NO: 28543 - DNA, 445 bp, Gossypium hirsutum
  Clone ID: LIB3197-020-Q1-M1-A12
cccacgcgtccgaaaaaagaagaagcagtgagagagtagcgaagcgcctccctccgcctccaggttgaaggtataatgaaggagatagtgtcgccgggatatcattagaagatagcggctgtgatcaatttgttgagcacaaatttacctgctcgacacaagccaatcaccgtaagaatagttgtaaaggctggttatgaagaaataaagtcctgctcattttatagggagttgtcttttgttggaggtgtcatagtgttaggagagagatatagccagaatgttacctggggattcctcgcatcattcgacatctgatagcgggccttctagaaattctcaagataagcaagaggaagtccgtcgttggtatttttcaagaaaagaaatagaagaaaattccccatcaagaatggatggtattgatttgaagaaagagacatac

SEQ ID NO: 28544 - DNA, 193 bp, Gossypium hirsutum
  Clone ID: LIB3197-020-Q1-M1-A6
tacttggggtaattggctttaacggggcccaatggttaatggtaaaggcattcttggtattgacaacatacttgaaaaaaattaacccggaataacaccattagaattaatccgatgggaactggttccgtgaagccttgggaacgtccgcccggaatattgggaattaaaacaaggttttccttaccttaac

SEQ ID NO: 28545 - DNA, 195 bp, Gossypium hirsutum
  Clone ID: LIB3197-020-Q1-M1-C5
cgaatttccgggttgaaccaacccgtccgttcttttaattttccttaaaaatccatttccattcgttattcgtaattcgctatttcgcccatgcctaaaactaaaagggttctttgaaagttctttgttaatggaccatgcttcaaaggggaaaatggtaagttttttcatgattggaaggatcccccaaataat

SEQ ID NO: 28546 - DNA, 175 bp, Gossypium hirsutum
  Clone ID: LIB3197-020-Q1-M1-D10
attcacttcagctactaattttcaagttttctggaacatccaagacacctgggattggtagaacctaacctaaccaaggtgtaccaagcctttgcattgtttgcttaaggaacaatgaataatggggctggaagacagatcaatggttcttccggagaagatgatgatgaaaata

SEQ ID NO: 28547 - DNA, 443 bp, Gossypium hirsutum
  Clone ID: LIB3197-020-Q1-M1-D5
gaatgaggttgagaacgaggaccttgtttttactctggggaccatagttgacaagtttggggaggaaatggcgccatatgctcttggattgtgtcagaatctggcagctgcattttggaggtgtatgaacaccacagaagctgatgatgaagctgatgatcccggtgcccttgctgcagtcggctgtttgcgtgccataagcacaatacttgaatcagttagcaggcttcctcacttgtttgttcaggttgagccaactttgcttccaatcatgcaaagaatgctgacaactgatggacaagaggtttttgaagaagtctttggagattgtttcatatatgacattcttttctccggctatatccttggaaatgtggagcctttggcctttgatgattgaagcattagctgattgggcaattgacttctttccaaatattttg

SEQ ID NO: 28548 - DNA, 175 bp, Gossypium hirsutum
  Clone ID: LIB3197-020-Q1-M1-D6
aaaaaataagtggttggtggttatttggaaccggaacgaaaaccttaatgggggtttccggaagtcattcccgagtttttaaggggaatcgttaaagttggtgagaaccttccgcctttattggctttgaaaaactggcctctaatattgcttgcttaaccggggaccaatcccg

SEQ ID NO: 28549 - DNA, 334 bp, Gossypium hirsutum
  unsure (1)..(334): unsure at all n locations
  Clone ID: LIB3197-020-Q1-M1-H11
attttccttatagattgtaaaaagttgggtaaagcaattaacacgtcaaaaagggctacacagatcaaatggtggaagaagcaaatgctgtcattttcacttttggatcttaccggttaagggtgcatggacctggggctgacataaacaccctgtgtgttgggccatcttatgtgaaccgtgaggaagatttcttcatcattttgcgtgatattttggctgaaatggaagaagttactgaacttcaacccgttccagatgctcatgtcccagtaatgaaatttaagttccaagggatatcaatngatcttctttatgctagtatttctctttt

SEQ ID NO: 28550 - DNA, 206 bp, Gossypium hirsutum
  Clone ID: LIB3197-020-Q1-M1-H7
cggacgcgtgggcttggaggaaaggaggattaaggaccttgtgaagaagcactctgaattcattagctatccgatatacctctggaccgagaagacaaccgagaaagaaattaatgacgatgaggaagatgaacccaaaaaagatgaggaaggaaatgtctaggatgttgaagaggatgagtcgaaatccgagaagaagaagaaga

SEQ ID NO: 28551 - DNA, 158 bp, Gossypium hirsutum
  Clone ID: LIB3197-021-Q1-M1-A3
acgcatgttttagttcaccaactcaccctaggtgagtttagatacgctcatgcaggaattgacgtagaatggaaggcggaggatcaccatatgctgcagactccttggaggcctaggctgatcctttactaccttatcaatattcagttcgggaaact

SEQ ID NO: 28552 - DNA, 408 bp, Gossypium hirsutum
  Clone ID: LIB3197-021-Q1-M1-A7
ggggtcatgacgaaatcaaagttaaacacttcaactacgataaagcatttccatgttttgcttatcagcgtctaaaaactcgccaccatatctttcattgaggtctacactattcttgttaccaaacaaccccgctaatcggcggttatccccgccactgatcgctccgccggttctttgcttgcggtgacgcctcggaagcggttctctctatctgttggtcgtcgaatttcgaaacttcttcaccatggctggcgctgaggattttgttaaaggaaatgtctatcccaacggcgtcgcaatcattactctcgaccgtcccaaagccctcaacgccatgaatttagatatggatgtcaagtacaaacaaattcttgaagaatgggaatcggatccaaaggtcaaatg

SEQ ID NO: 28553 - DNA, 378 bp, Gossypium hirsutum
  Clone ID: LIB3197-021-Q1-M1-A9
aaagtaggtaattggagagtagtgcataggctcaggcaatcatggccatctcaagtgtttgtccaactgaggatgctgttcaagcatttttggagcacttggttgatcctttgctaccttctaaatattcagttcgggaaactccatcgttagctactcaggaattagtagccaaacaggtacatgctgttgtgttactatacaactatttcctaaggaaaagacatccggacttaaggtatctagattttgagaatttttgcaagtgggctttagttttgaagccaaatttgaagtcacatatgaagctcatggtaaggactgatgatactgagttgagtgaagttgaaagtcagttttcactccttgagaaagcca

SEQ ID NO: 28554 - DNA, 274 bp, Gossypium hirsutum
  Clone ID: LIB3197-021-Q1-M1-C3
acgtttaacatgcacgttacagtaatattaacccaatagcaagatggcataattgggaaggttcaattaataacaatgctttatcccatgatggggcatacttagcaactgattaaagacatagccatctgcggagaatagacacattcaaaaaacggctattatggagcaactgcagatatttgggcttgtggagtaattcttcttgaactgcttgctggctacttaccatttgatgatcgtaaaattgtgtgtttatacaaaaaggtttgca

SEQ ID NO: 28555 - DNA, 143 bp, Gossypium hirsutum
  Clone ID: LIB3197-021-Q1-M1-C5
ctttaacattcaccatataagcataggtaaaccaaaggtggaagacataggaggtggggagaattaaacagcacttattctggacatgagagccggatcatcagacactattgaaaaagattgatctctgataccttaagact

SEQ ID NO: 28556 - DNA, 399 bp, Gossypium hirsutum
  Clone ID: LIB3197-021-Q1-M1-C9
cggacgcgtggggttctaaactgtttaaattaacaagagaacaaaagttcgtagagaattatagaccaacagctaactgttctttaacaaagcaatcttaccagattaggctctgattcattttttggtaatagctacttgcaaataagggctatgatggagcaactgctgatatttggtcttgtggtgtcatcctttttgaactgcttgctggctacttaccatttgatgatcgtaatcttgttgttttatacaagaaggtttgcatgtgcatatagaagaataaccttcatcaggtacaataaggtacctttcactgatgtttctacttctgtgaagatatctggagcagaatacacatgtccgccatggtttacaggacctcagaggaagctgatt

SEQ ID NO: 28557 - DNA, 407 bp, Gossypium hirsutum
  Clone ID: LIB3197-021-Q1-M1-D12
tactcattaggtcgctcatgcttaataacaataagggtggttccagttcaaaggatgtgaaagctgcagctgagggtcctagaaagaggaaataagcttttggggatcagtatacaacacatattatgcatatgggcacttaaagaagagcaaagggaagatcatagtcatagcatctacaacttgatcctaaaatgcgtgacgttgaaatcaattggaatcagcctctgagtgtgggaaggcaatagtagaaggggcctgccgttgatacgagtggaccaaactgtggaaggtgttttgccttggcatcatggatcggtggattggcttcctattaatgccttgtaattcccacaatgaagtacccaccaagaagttaacgcattttgttaatggactaacccaat

SEQ ID NO: 28558 - DNA, 408 bp, Gossypium hirsutum
  Clone ID: LIB3197-021-Q1-M1-D5
cccacgcgtccggtgatagttcaaaaggagacagagtgggatttgcttcccagttgcatcttttggttaatgcattggggatgtcatttgaagctccatttatagaggattttgtgtcagttgaaaatcctggttcagacaatttggagtctactatggttataccaccacctaccgtccttgaccgtgtgcttaaagatctctttcttgaggatccccagttacctgattttgctaaagatgaacataagagttctcgagctattaaaggagcacctgttgagtctctttttgcgcagttttgtttacactcactatggtttggcaattgtaacatacgtgccattgctgtgctctggatagagtttgttcaagaaattcgctggcattgggaagagtcacagccat

SEQ ID NO: 28559 - DNA, 406 bp, Gossypium hirsutum
  Clone ID: LIB3197-021-Q1-M1-D6
cggacgcgtgggcgtaatggacaaccaacagaccgggggtgctggtgccgccaccaccggttcttccacaagcagcgacccagcaataaccagcccaatcaacagatgccttttccgaaatttggactctttggttctctcatttatggacgctgctctctctactcacgttcattccattcgtcaagctcaccaccaacaatttttccgtggaaactccgtcgtggactaaagggttcttggcggatattcggatcctattcgctatcaacttaggcttctcaagcaaggctcagggtccaagagaatgtcacgcgctatgctcggaattatgctacactctttatactgttcttctcttgatatctgtatcagctgaaacttgcacttgttgggaagatatcaa

SEQ ID NO: 28560 - DNA, 268 bp, Gossypium hirsutum
  Clone ID: LIB3197-021-Q1-M1-F11
aaaaaaatggttgggctgtttaggggggtgagtgggtgtccgggaccaagtggctttggttcagcctccaccgcccaagaggttaccgaagggattgatggaaccaacttgactgctctagttaccggtcatcgcctctctcttcttcatttctttgcaattttcacatcatctcctctctagcttccatgcttttacttttttgtttttttttcccttcttaattaccactttttctcacacacatatagactgtcattttgctaaa

SEQ ID NO: 28561 - DNA, 408 bp, Gossypium hirsutum
  Clone ID: LIB3197-021-Q1-M1-F2
tccatcgtataaaggagttgcaattcgtgaacataggcgtctttgtgctttcatccctcaaaacttttagatgagaagaaaggagaaagaaatacagaaacagcttaaatgccatttttaacgatcataacttaatggcctatgcataaagtgtttattagagcagcatgccattagtttctacctccccgaataagtgagtgcctgaagttgaataaaagagatgctggttttatagtgccgtaatttgtctagaaaacctttgtagtcagccgcaagcagcatatcatacacacacacacatatatatattttccttaccatgaatctgcagtaaatgggatgtggttacacttattttcagttcatgtatatgtgcaattgttggtggtggatttgcttttgttt

SEQ ID NO: 28562 - DNA, 354 bp, Gossypium hirsutum
  unsure (1)..(354): unsure at all n locations
  Clone ID: LIB3197-021-Q1-M1-F4
tttggatatgttgctcccgagtatgctatgacggggcatctacttgttaagagtgatgtttacagttttggggttgtgcttcttgagcttttaaccggaaggaaacctgtggatatgtcccaacctcagggacaggaaaatctcgtaacttgggcacggccactactaagcagtcgggaaggtgtataacagttggtagatccttccttggctgggacatataactttgacgacatggctaaggtggcagccatatcgtacatgtgtgttcaccctgaggtgactcacagacctnttatgggtgaagttgttcaggctctgaagcttatatacaacgacactgacgaaactggc

SEQ ID NO: 28563 - DNA, 213 bp, Gossypium hirsutum
  Clone ID: LIB3197-021-Q1-M1-F5
cccacgcgtccgtgatcttgttaatgaagtcgtgaataaatatcgtttgatatttgtgagtagtgctggtaatagtgggccagcattgagcacagttggtgctccaggtggtacctcttcaagcatcataggagttggtgcatatgtctctcctgcaatggctgcaggtgctcattctgtagttgaacctccacccgaaaggcttgagtacac

SEQ ID NO: 28564 - DNA, 398 bp, Gossypium hirsutum
  Clone ID: LIB3197-021-Q1-M1-F8
aaaaaaactaagctttctcctctcaactccgcgccgtttcgacgaatcgtcgtccaagatccaccacacttctctgcaactccgatgactacggagtgagcaaaggttcggccaccaggtacagtcgtacggaggtcagagacgtagcacgtacgaaggccagctgtacgggggcgtgcgtggtgtgggagaacggcgctggaggttgctgttgcagcgctctagggttttctgttaactgtcttgaggtgctgggccattgggccattgggtgtttaggctagttgggctaggggtttttggattttggatgtaaatggacattaagtggacattttatttattttatatattattattatttttttaaaaaaaaaaaaaaaaaaaaaaaataaaaa

SEQ ID NO: 28565 - DNA, 408 bp, Gossypium hirsutum
  Clone ID: LIB3197-021-Q1-M1-G5
aaatggatccttccatagctttcctttgatacatcctcctcctccttcttcaaacccacacttcgtttcttctttacacttcatattttccattatttttgacccttttgaatcctttctttgttttccccatttatttaaagctttagttatggcgctggatcttaacttgactgttatttccgatggtgatgacaattcaatggccggaggtttttccggttataataacaaccaaatggatagttccggcgggagctttggttcctccgtcgtcaacgccgacacagcgacaaccgccggcgacgatgactcctttttcaacgccgctgccaccgacactttcggttactccttcgacatcctcaaagccagccgagaagaagaacaggataaatacaacaaccg

SEQ ID NO: 28566 - DNA, 405 bp, Gossypium hirsutum
  Clone ID: LIB3197-021-Q1-M1-G9
ggataacaacatgaagagcatacttaaatatgcaatgcttatggaaaaccataagccttacattgcaatgctctttgtacagtttatatatgcaggcatggccttgttttcaaaagcagcaatttccaaaggaatgaacccttatgtgtttgtggtgtatcggcaagcctttgccacgatcacgttagcaccattcgctttcttccttgaaagtaagcagacatctctatcatacaatttaatcatcaagatcttcttgatttcgttatgcgggctcaccttgagtttaaatttctactctgttgcaataaaatacaccactgcaacatttgctgctgccacaaccaacaccattcctgttcttaccttaatcattgctgtttgcttaaggatggaaagcatatc

SEQ ID NO: 28567 - DNA, 408 bp, Gossypium hirsutum
  Clone ID: LIB3197-021-Q1-M1-H1
ccatgtcttccaagatcaacggccacgtttcgcctcagccgtgtcctcacctcctcgtcttccgttcccgcaacggccccaagccctttcgcgccctacaggattgtatccgcgtcaagccgcccggcggtcgcgccgccataaggagggaacctactgaggtcccacgatgcggcacgtgcgaggaatcttcccgttcgagactctacgcgtgccgtcgcatgtgccgcagtgttctgccacgcgcctcttcttcactcccacgcgtctgatcactcgctttccatccccggtcatgagatcgccgttgacgtcgacagagctgagctattttgcttggcgtgcggtgaccaggtatacgatcgcgacttcgacgctgccgtcgtccttgcacagactgtcaacgct

SEQ ID NO: 28568 - DNA, 416 bp, Gossypium hirsutum
  Clone ID: LIB3197-021-Q1-M1-H5
gaattaccagtggacaaacaaaagcttactgctccaataaaatcaactgctgacaagtttcagcttctccctgagtttttaaaggttagagggttaatgaagcagcaattggattcttttgattgtttggttaatactgggattaagaagattgttcgtgtcaatgacaggattgtatctgatattgatccgagtatttacctcaggtactctgcaccgatattcgtcaacggagagtacattcaagttagatatgggcagaaaactagactagaaaaggtatacagcagatgcttctttgatgtgtgtacgatgcagaatgataggtgctttggatgtaatgcaacatctgttcctagcagaataatcttgttattgcaaaaatgcccatcatgttaaagagttaactctgtgtg

SEQ ID NO: 28569 - DNA, 395 bp, Gossypium hirsutum
  Clone ID: LIB3197-021-Q1-M1-H6
caaatcatctttttacaaccttcaatcctttgtggaattgatagaagggttaatcgtaaaacttcaattgatttgggcaaaccgaaggagttgtgaaaaggttgaaaggtatgatttagacttaagttaacacaattaaggagttgtgaaaaggttgaaaggtatgatttagacttaagttaacactatttgttaagggttctttcatagttaatatatatgtagaatctaatgtatgtaacttttggcaggttgtgggttcttgaaattttatattgagaaggtagaacacacctttttaagagggaagtttctttgtttgactcgagattattagtctggtgacaaaaagccaaaaaaatgtaccatttgctttgaagttatttatgaatatg

SEQ ID NO: 28570 - DNA, 377 bp, Gossypium hirsutum
  Clone ID: LIB3197-022-Q1-M1-A11
aagaagtgttattggccttgtccttggatacgtaacaagcttagtagtagatcttgcaatattaatagaggcaaaggaagaggcagaattgccagagtacatattgggcactgtccgactgaaccgagtgaagcctgaatctgctgtaccactgaacgcttgaagttaaccactgtggctaagccggtccttaaccatcttgtactggttggtatgaatatgagtaggctccaagtttaaaagttttatttgataatagtattaaatgatggatgagttaggttggatttgcacccagcttttcaattgtttcagtttacgatttgagaagactagcgttgggttcatagttgatcttcgaattgggggttgatctt

SEQ ID NO: 28571 - DNA, 258 bp, Gossypium hirsutum
  Clone ID: LIB3197-022-Q1-M1-A12
aggaaatggattgggaaatttaatatcaaaatgttggcccttgattttaaaccgttaatgaccaaggggtgtttttacttggcctatttttttttaaaaaaaaaatgcttacaaaaaccccccctttgtccctaccgaccccctttttacaagctttatttggaatatttttggtcataaaacctcaacttccaaagtggattaaacccttttttaatatgaatgggggacttgccccaacttataaaaaaacccttc

SEQ ID NO: 28572 - DNA, 307 bp, Gossypium hirsutum
  unsure (1)..(307): unsure at all n locations
  Clone ID: LIB3197-022-Q1-M1-A9
atcgccccttcaccaagaagttccgcagtgccggccatggccgtgacagtgacaagcggccgtccctggggctggcacccgggggcctggccgtggtcggccgcagtgccgggggggagccagggcctgaggctggccgggcagccgacagtggtgagcggcctctggcagccagcccgccaggcaccgtgaaggctgaggagcaccagcggcagaacatcaacaaattcgaacgccgacaagcccgccctccagatgcctncgcagcccggggaggcgaggacaccaatgacctacagcagaagct

SEQ ID NO: 28573 - DNA, 417 bp, Gossypium hirsutum
  unsure (1)..(417): unsure at all n locations
  Clone ID: LIB3197-022-Q1-M1-B6
tgatttggttcagttcaacttgctagtataaaaaggtggtttatatgttcatgttcgcattggaccttatatttgtggagaatggaactttgggggttttcctgtttggttgaaatatgttcctggaattagtttcagaacagataatgagccttttaagaaagcaatggctaaattcacccagaaaatagttcatatgatgaaggatgaaaacttgtttgagtctcaaggtggccccatcatcctctctcagattgaaaatgaatatgaaccanaaagccagttatatggaccttcttgtaaagcttatgttaaatgggctgcaaaaattgcttttgggctaaacactggggttccatgggttatgtgcaaggaatatgatgccccagatcctgtgataaacacatgcaatggttt

SEQ ID NO: 28574 - DNA, 265 bp, Gossypium hirsutum
  Clone ID: LIB3197-022-Q1-M1-B7
gagacacccgtacaactccgtccacgtgcgatgcgtgagctcaacgctcaaatgatcttcgctatgttcgatgcgcacaccttcttcatatatatgtcccttgtccatattctaaacaaaggcactttgagcttcagattccatacacctatgataggcatgagttctatgtatgtaaatccgatggaaagacagcggatcacgtgacgcgtccaaagattgtcagcttctaccagagtgagtcaaataagacacggttggaatg

SEQ ID NO: 28575 - DNA, 237 bp, Gossypium hirsutum
  Clone ID: LIB3197-022-Q1-M1-C4
cggacgcgtgggctagcgttgagctgaagcaaataacaaaaaatttcctgatttccaagcacaagacttagatatcacatcaagcctgatcgattcaaactccaactatctttcaccagaattctgctactgcatctgctccaactacacaaaagagtcgagaccagtgctaatttggtagatctaaccggtaagtctacctgtcttcttcgtatctttggctcaaaaagttagcta

SEQ ID NO: 28576 - DNA, 422 bp, Gossypium hirsutum
  unsure (1)..(422): unsure at all n locations
  Clone ID: LIB3197-022-Q1-M1-D11
ctcaaagaccaagaaaaagcgcgcgaaaggtggtaaaaccctagcgaggcaatgccggagcttccagaggtagaggcagcaagaagagcgatagaagagaactgcttggggaagaagatcaagagagcgattatagccaatgactctaaagtcatcgaaggagtctcctccttggacttcgagtccgctctcttaggcaagaccatcgtctctgctcaccggaagggcaagaacctctggctccaccttgattcccctccttttccctctttccagttcggcatggccggtgctatttatataaaaggcgttgctgttacaaaatataagaggtctgctgtaaaagacaatgatgaatggccttccaaatattcaaagttcctttgttgaactagatgatggttnggagctatctttcactg

SEQ ID NO: 28577 - DNA, 242 bp, Gossypium hirsutum
  Clone ID: LIB3197-022-Q1-M1-D2
cggacgcgtgggttgctttcagcacaggcagttatgtggtcttaaaaccttcccacggacttgccattgtttcatatctcatatgccctgccttctttttcgttctgcatttgactatttgtgattactatattactaagatattatttcatcgttgattacaatatttttccaattcctaatgtcaatgttacctctttgaagaaatattactttaatattaataatctccatttaattgt

SEQ ID NO: 28578 - DNA, 421 bp, Gossypium hirsutum
  Clone ID: LIB3197-022-Q1-M1-D3
tcgcggacgcctgggatttattccctatattatcgcgggacctgttgctttttaatagcgcccggtatttatccattttattattggggaattgaaatcacttgcttcatccataaattttggggtttttgccccaagaaatattggttcgggtcggctttttaaatttattgatgtcggggtgggtggtcttgttggatgctttgggaaaaaaagaaaatcttgttctggtaaaattcaccagccactggctttcttttacaaggcaactacttattattcatattctttattacattgattcatagacaagctattcccttcatcgtattgcatgcaggttcacacgaatatattcttgctgtttctttaggtcttagcttttagggacatagctccccaggctcctatgcacatttta

SEQ ID NO: 28579 - DNA, 156 bp, Gossypium hirsutum
  Clone ID: LIB3197-022-Q1-M1-E1
acggtctagtctaacttccctatatttgcaggccaatcagctgtctgggacgctagatgttctacaagatctttccctaaaagatttgaacataaaaaataatcttttcaatggacccattcctgagaagatgcttagcattccaagctctaaaaa

SEQ ID NO: 28580 - DNA, 148 bp, Gossypium hirsutum
  Clone ID: LIB3197-022-Q1-M1-E4
acgctgacgcgcagcgtgctggagattttttattcgttgggttttgccccctcaagagcttccaaacaatatcatgatcaagtgtttcccaactgatagcgtgatataccccagtcaacttcaaaggccaagagtcatcttaatggct

SEQ ID NO: 28581 - DNA, 332 bp, Gossypium hirsutum
  Clone ID: LIB3197-022-Q1-M1-E6
acaggctttgaggtattggctggattcagaaaggggaatcaaattagaacagattatttttagtcaagaattagtaaaagagaacaatcaaagtaaaatcttaattttataatctatgtgagcataaagaaaaataatgtacaggtttttcgttccctcccccatttttaccctctcttatgggattcatgttgtaagaattgacgccttaattattcttgcctaaagaataagatacaagggaatagattatttactgaaaataataaccatccacccaatctggtacggacggtggcaaaaaatacggaaagaaaatcatccgtgagttc

SEQ ID NO: 28582 - DNA, 358 bp, Gossypium hirsutum
  Clone ID: LIB3197-022-Q1-M1-E7
cttgagactgagcctgagcttccacctcgtagcaattgcgtaacccttaatattgtttcttcattcaaataaacaaaaacatgaaaacactttgaaatttttcttcttctttcattcttttacatttcatttccattcaaatccgatttttaaacgctttccatttttaccccttttttatttcattcttattccgacacaaaaacccaagggcttgctctggtttttagcctcgcaattcttcgtatagtcgatctaagtcatagagggagcttaagtgggatttgatgtgcccggcaaggtggaaacaagcttattggaggtttcaagggaacatatcacttggagcgttcgtgat

SEQ ID NO: 28583 - DNA, 422 bp, Gossypium hirsutum
  Clone ID: LIB3197-022-Q1-M1-E9
cttcttccttcaatttccttctctctttctctctctctgggcaacttctcgttagggtttttgtgggttggtgttttccttcaacaaagagaacatcttttactgcttcgtctttttatttctcggtaccgatgatgatttgcctccttcacagccaactagagttccaataaggggtaatattgctggaaatggaagatctattgtaggttctgcttcatattttaggatgcattctgacatggaatcccaaatacatctacttgagcaagaagcttactgtgctgttctgcgtgcttttaaagctcaatccgatgccattacttgggaaaaggaaggcctgataacagaacttaggaaagaactgagggtgtcagatgatgagcatagagagcttctgactaaggttaatgctgatgata

SEQ ID NO: 28584 - DNA, 427 bp, Gossypium hirsutum
  Clone ID: LIB3197-022-Q1-M1-F2
ctctcctttatctctttcattgcttgcttcgccttcggccagtagccccaatttcttgcttcgcctttcgtgcttagttttgctgcaaaaatggaatacttttgactttaaatccgttcctaaatagtagaaggaaaataccagttcaaacactcgactaaactgcatcaaatttcggatcctccatttctttaaaagaattttctcagttactgttctattccattttgatcttatttatttcccaccaatttttctcacaaacttccgcgttgctgttgcaagcagtaccggaaattcccctctctttttatctttaatcggtttccacagttatttttcttcgattatttgaatgaagctgaggtagctgttttaggaacaaaggcgatttgaaacatttttgaaagaaaggattgatggatag

SEQ ID NO: 28585 - DNA, 408 bp, Gossypium hirsutum
  Clone ID: LIB3197-022-Q1-M1-F8
cccacgcgtccgcttgaacattgttcctcgggatagtcacatgtttgttttctgcgaccatgaccagaaaacgtataactgggaaacaaatattttatgtattctataagaaacatgtccatatactattttctgtgtcacattggaagtggattaaaactacaaaaaagagacttttaagatctctgtagctgaaccttgtaatcaaaggcttagtttgatcttggttattgttagtaaatatctttgcaaaaagaaggaattagtgcattggctgctctttattgctatagtacttgtatgcatatgatttgttattaggacctaaaaattatctaatacattatacaatttgatcatgtggttatggatgttgttgttttctcccctcattgttgtatttagtct

SEQ ID NO: 28586 - DNA, 142 bp, Gossypium hirsutum
  Clone ID: LIB3197-022-Q1-M1-G6
acggcaaaggcatcacagacagttcctctgattcatctcagcttttcccttaaacaacaagcttaaccctcacaacaatggccttcatgctggaaacccaaaatatttgttcgaatgaaaggactgcctcatcccaagggaa

SEQ ID NO: 28587 - DNA, 422 bp, Gossypium hirsutum
  Clone ID: LIB3197-022-Q1-M1-G8
gttccagatgcatatgcatcaaatatatctcaatatgttagtgttaaagatcgaagactatattcgctaaaatcacatgactatcacatcttaatgcaatatttactgccagttactctacgatgttgtatttcgaagaaggtgacatcttgtataattgaactatccaatataatgaaagccatttatggcaaagttttggatgttcaagaacttcagaaggtacaggatcgagccgatttgactttatgcaacatggagaaaattttcccaccttccttcttcacaattatggttcacttgataatccatctcccgaatgaagcaattcttggcagacctgttttctatcgatggatgtatcccatagaaatgtgttaattaaaatttttaaaattttccttcattcacctatagtacat

SEQ ID NO: 28588 - DNA, 265 bp, Gossypium hirsutum
  Clone ID: LIB3197-022-Q1-M1-G9
aaaaaaaaagaaagagaaaagtccccacgccgagccaaccgtatcatttcttctttgtagttttactttattggtagttcctcctcagcttcgccggcgcttgactctaccgttcgtctctgatcaactgcccacttaacggccaattacgtgtccatccctcttttttgctttctctagctccgccatgacaaaacctcaatttttagatctctaaattctaaattctaaatctgaatctagatttaaattcattttttttaaa

SEQ ID NO: 28589 - DNA, 187 bp, Gossypium hirsutum
  Clone ID: LIB3197-022-Q1-M1-H4
gagctacaaggtattaacctatgttgcttagattcttccattttttggagtatacatgtccaatccatattttgaagtataaatatctatacccaatgctcagatttgagttctgtaggtatcaggtcaggtgtactattttttgtattttgataggtgaaatttttttggcttttaacactcttga

SEQ ID NO: 28590 - DNA, 416 bp, Gossypium hirsutum
  Clone ID: LIB3197-022-Q1-M1-H6
attgtaaatgacaaaatctccttcccgtatcagaactcaacacattgtgactggtgagaacacctttcagcccattaatctactcttaaattcgactttaactaagcaagaggagatccacggcgtgcttatagggtaaacatccacttttaccttttttatacatgcctctcgtgtggaaacaacaaatcaacaaaagatccagcccgaaaaaatagaacgccccgagatttcagtcggaaaatcacctttaagaatcggctgtttttttattgcttctggttttgcatgcgtatttctatgtttatgtggcgttcgagtgtgtaatatgcgtgtgtatattgcattccgaaagaagaagaattttcaatcgaaaataaaaggctttatagcccgataacacaaaaaaaaacaac

SEQ ID NO: 28591 - DNA, 345 bp, Gossypium hirsutum
  Clone ID: LIB3197-023-Q1-M1-A11
cggacccgtggccttcatttcctttttgctcaaaggctcccatttttccacttttttttcttttttctaatccccaagggccgtccttttttcaaatttccaccccgagtctggtcttaagctcttaatgaactttctttttgaaatctacattttttggaataactgccaagatgactaaagttatgctgtgttgaaaaccctgtgatcttccaagtagcagggataatttgtttccactgcgcactcctgcaactgtgcgtggttgtgcaactgtcactatctgtaactgagtgaatatacacactgattatcgtataacaagagatagaggtcaagaaggac

SEQ ID NO: 28592 - DNA, 209 bp, Gossypium hirsutum
  Clone ID: LIB3197-023-Q1-M1-A2
aagctgaaagactaatttaaaaacgctcccacacaccacaagcaagccacacccaattacaccgaatcaactatgaagctatcgggcctcggcttcttctgttcttcttcgctcccttctctgcaggtccatctgaaacacatgtaagactgaccaaacatgctacaccccacaagaagtggactttatgatcctttgtgaccatatca

SEQ ID NO: 28593 - DNA, 428 bp, Gossypium hirsutum
  Clone ID: LIB3197-023-Q1-M1-B1
ctaaagtcaaacacagtacgcggccttggatattaaatttcagagtatatttgtaaatgtagaatctattataatcggtgagtgtgggattcggttcctcctctgatttaaggcacaggattccaatgattaattaacttttttgaggggaacaaagaaataaagaaaatggagaggttagtagcagcggtgctggcagcaggttttctgcaggtattgctagcaaccgccgacgatcattatctgctttctcgtattgctttcggatcttgtgccaaccaaagtgctcctcagcccatctgggacgccatcaacaagtttgatccccaagtattcatatggctgggtgacaacatatatggagacattagacgtcctttcatctttctgggaaaggaaagggacgatggtccctggcagaaatgctc

SEQ ID NO: 28594 - DNA, 448 bp, Gossypium hirsutum
  Clone ID: LIB3197-023-Q1-M1-B4
caaaaaaagaagaaaagaaaaacaggaaagctttgattctaagccattttctttgctccattccatagaaagatctaaaagctcaagctttcctagcaaaattttctcgccatttttttaagctacgaagagagggaaaggaaaagggactaatttagagaaagaaaaggtaaagatggataaatttaagaatatgttgaaacccaagccgaatccacaacaactactaagagattggcaaagaaagcttcgtcaagagtgccgtaacattgaacgccaaatcagagatgttcagagagaggagaaaggtgtgcagaaggcaattcgagaagccgctaagagaaatgacatgggttctgctaaggcactcgcaaaagaaattgtaatgtcgagaaaagctgtgaaccgtctatatgagaataaagcgcagcttaattcaatatcaatg

SEQ ID NO: 28595 - DNA, 442 bp, Gossypium hirsutum
  Clone ID: LIB3197-023-Q1-M1-C3
aaataaggaagccagccactaagaaatgaagcttctctctcctttgttataggatttatgaataaccttaattccggcaataaaactccaccgtttctttctatcttcgtttgttgggttttggctcagatcgactcccggaacgaaggtttctcttttgtggacgtcggccattcatatcaacccaaggactttgcaactgttgttttctgacagataggtttggacatgtctttgattcaatttcgtcttaccctgtctttctctaccagcagtatggcgaatttgccctccttttcaactgaagaattttattggctagcatcattcttttgggggcatcatcacctgcaaactacatgggcgtctctctacctccttctattctcagatctttttgacaaggattccagtaatgacttgatagttaatagaagctcta

SEQ ID NO: 28596 - DNA, 170 bp, Gossypium hirsutum
  Clone ID: LIB3197-023-Q1-M1-C8
cacaggtgtacgtggacacccaggttgagatgtccactgaccctgtctagtatacaacgcatccaaacccaactgaacgggcttggtataatcaacggcgaaagaagaccttgttgagctagactctaccccaactttgggaactgacttgataggagaaggattagtgg

SEQ ID NO: 28597 - DNA, 212 bp, Gossypium hirsutum
  Clone ID: LIB3197-023-Q1-M1-D1
acccacccgttcatcattatgagattctaaagtttcccgtggcgactcactatgctttggagaagaatgaagacaacaacactttggtttttattgatgacattcgtgctgttataaaaaagattaaagatgctgtgtaaaagatgtattattttcatgccaagaaagttaacacctttatcaggcctgatggaacaaaaaaagcatacgtt

SEQ ID NO: 28598 - DNA, 435 bp, Gossypium hirsutum
  Clone ID: LIB3197-023-Q1-M1-E3
catttatcggtttctcctcttcctatatttcttttaatcttcttcctccttcatgctttgttaaaattctcttcttttatttttgatacaatcttttttttcccctattttaaagattctttagctctgtttaacatgtctttagccacttctcagatccttcagttttctccatattttctctaaatttggattcttcacgggttaatgaatccaaagtatttgttgttaaggagcacaagacgctccagatacctctttgcatccactttgaatgttctaataaaaggattttatcctagagatgttgtcagatacgctggcaactaagctttcacaaagttgaggtctgtgttgttgtgttgatgctttataagatggaccgagaagatacatcagggtttgtaagtggagggggagcgtcatcggaatttc

SEQ ID NO: 28599 - DNA, 353 bp, Gossypium hirsutum
  Clone ID: LIB3197-023-Q1-M1-F3
attttctcttattctttttctttaatccaaacaaacaaaaagaaaaaaagggaaatgaagagattaagaagctattacatgcagtttcgacacaacaacaatcaagcaatggagcgtaaatggatcttcccattagctgttggctccattgtttctttatttttactcttcttaacaaccttaacctctttcgatggctccccttttcttttcttctaccgttcctccgccgtaaccggcggttcctctcctttcgtggaaaaccaactaaaacccatccctatttccaccctccctccgtctccccgcttcgcctacctcatctctggctctgccggcgacggtcggatgct

SEQ ID NO: 28600 - DNA, 171 bp, Gossypium hirsutum
  Clone ID: LIB3197-023-Q1-M1-G3
atttctcttttcttctcaaattatcaggcggcgatctttctgagggggggtggagatctcaaactgatttattacgcattaatataggttgtgatggtttcgaccactctaatctgaaatacccagccatggaaggactagaaggctaatactgaggatattaacaaaact

SEQ ID NO: 28601 - DNA, 440 bp, Gossypium hirsutum
  Clone ID: LIB3197-023-Q1-M1-H3
gactcttgacatgacttgtttgaactgtggagtttatccttcagatatcctaccttatcagttacagacttctgccactgggaccgaaaatctagcactctcagctgaaattaaagcagcagttgggaaccttagatctggatattcgaggattataaggatctgtaggtgtgtttcccaggtgattcaatcttcaggcaggtgatgagggtttctagcatcttaaagaagacaggagggacatcaacaatttgttggagtcctttcaatatttgcttgtgtgagcatgaagtttctctgtaaattgtattctgcatgttacaacttgccctgacatccttagtaagtcatgattacatttctttctcaaatttgtggaacaattttttgtggttgtgtaaatctttatcctggggcacgttaaagtagcctgtttacct

SEQ ID NO: 28602 - DNA, 219 bp, Gossypium hirsutum
  Clone ID: LIB3197-023-Q1-M1-H9
ccttccggtggtgggcataatttcaatcctttcttcccttcccttggcctcccttccttggtttcccccctttttgtgcctttgggaataaaggtgccagcctcttttaaaaaaggggccgggggcccttttattgaggttgacctcaggggggtttacttggtttggcaggacctaccgggggggttgccaacttttggtaataaaccaaccaaaagg

SEQ ID NO: 28603 - DNA, 361 bp, Gossypium hirsutum
  Clone ID: LIB3197-024-Q1-M1-A3
cccacgcgtccgcccacgcgtccggagatggagtaggttatggagctggaggtggaactggtggagctagaggagttggtggtgatggaactggaactggtagtggaattggaactggaactggaactggaactggtggtgaaactggagctggtggtggtggaactggagctggaactggtggtggtggtggtggaactggaactagagctggaactggtggaattggaactggaattggtggtggtggaattggaactggtggtagtggagctggagctggaactggaattggaattggtggtggttttggagctagttttggttttcgtcgtaatggaattagagctagtttcggagc

SEQ ID NO: 28604 - DNA, 209 bp, Gossypium hirsutum
  Clone ID: LIB3197-024-Q1-M1-B3
tcacttatcaaccagaacttggtaaatccttccctttgggcccactgaccatctcgggtgcgaatcacagtttgcgtgacataatccgaaggaaaacactgatgggttccctggggcagatcggagggatcaccaaagcttcgattaccctcttgagaaggatcttaacagggtcaggggcactttatactttacttccaaaaatgagg

SEQ ID NO: 28605 - DNA, 320 bp, Gossypium hirsutum
  Clone ID: LIB3197-024-Q1-M1-B7
cggacgcgtgggttccaaaacagatttcaaacccccccccttttttttttactcctcaacccctctgccttctcagacgactgttgggtttcaccggcgcataatacgcctccaccaccaccgaggctctaataggatccgcaaggatccgatcgtcttcggaccggagaagcaaacgatcagcaacaccaaagcaaggtagaaatcctccccttttacgtatttatgcgatagattcaaaaattaaaaaaaaaacagcccatgaacaaaaaatgagacaccttttccaatgtttctttggctaatcgactctgtatata

SEQ ID NO: 28606 - DNA, 148 bp, Gossypium hirsutum
  Clone ID: LIB3197-024-Q1-M1-C2
aggtggatggctatatatctgatgagaagaattgtatagtcaatgcttgaaatcctccactttatcggcagtcaacccagttttccaattcgagacctgtgtctgaaaataatatgaaccaatcattgcaggcacatagctggttaag

SEQ ID NO: 28607 - DNA, 440 bp, Gossypium hirsutum
  unsure (1)..(440): unsure at all n locations
  Clone ID: LIB3197-024-Q1-M1-D3
atagattagtaaatatttatcaataaaaataaacattttgtttttctaatatcttaacatatcctcccctttaggaggaagaacgtgcaaaacgtgaggagctagagcgaatactggaagagaataaccgaaaaattgcagaagcacaagccaaactggccgaagaacagttgagaattgttgaagaacaaagaaagattcatgaggaaaggatgaaactagaacaagaacggcaacgtcaacaaaaagaagaacaaaaaattatcctgggcaaggggaagtccaggccaaaactgtccttctcattaaaaacccaggattaaattgcaaactctgaactttttacaaagaaaaatggaaaaacttcgtatggtagcttcatgttgaagnggntttttgggtttgttttggtttcgttttttaatttgaaaatctggaaa

SEQ ID NO: 28608 - DNA, 263 bp, Gossypium hirsutum
  Clone ID: LIB3197-024-Q1-M1-F3
ataatttcttacgttgatctttgttagagattagcttggtaatttttcattatgggaaagatcatgatcggaatcaatggatttggaaggatcgggcgtttggttgcgagagttgctctccaaagcgatgatattgatctcgaggcgggtaacgatcctttcataaccactgaatacatgacgtacttgtttaaccacgacagtgttcacggtcaatggaagcaatgtgtgcttgaagcgaatgactcaaagacccctctttt

SEQ ID NO: 28609 - DNA, 359 bp, Gossypium hirsutum
  Clone ID: LIB3197-024-Q1-M1-F7
cgataattgctgatattttatttcaaatattggatatttttacttactttagatgtgatgcattcagttcttgggcaacaaacattggaaagatgcttcaagaatgtttgtgagcttgacattgtgttcaattacagcaaggttgtgtatcctctgatcacttatatatatagatagatatatatgtatagatttagtgccatggaaggttagattctacatgtaaacgagatctactgtcttcattggaataataaacataaagtacaagaggatggcacctaggtaaataggagttgatgttggaatatataaatatatgtggggggtatacttcaagattttacattttaattgat

SEQ ID NO: 28610 - DNA, 419 bp, Gossypium hirsutum
  Clone ID: LIB3197-024-Q1-M1-G12
cctccatcacccatcccaaccgccaccggctcacgatccgctgccaacgagatcttaaccgactttctcgagaagtcgttacagatccccgacctaacgctacccgagtgccagacactccgccaccacggcctacccgataaggtcgatttccaatcccttggtttaagggaggtggggtcggtcgagcggtttatgcgatctgcacggaagtatggagtggtggcgatagggctgcatgggatcgatgcgggggaggaggtaagggcgacggtgaaagaggcggcgagagtgttcggtgtgttggaagagagagatacgggatacaggaggaattcggcgggaaagagggagggagatgtgtggattgattgcaaagaccagaggatggagtgggctcgccaatatatcggcgttca

SEQ ID NO: 28611 - DNA, 363 bp, Gossypium hirsutum
  Clone ID: LIB3197-024-Q1-M1-G2
ggcaggcaggcctatatttcttggtttcaataggactccttacgagcgttgattctatctactattatctaaaaataatcaagttattaatgactggacgaaaccaagaaataacctctcacgtgcgaaattatagaatatcccctttaagatcaaacaatttcatcgaattgagtatgattgtatgtgtgatagcatctactatacctggaatatcaatgaacccgattattgtaattgctcaagatacccttttttagtttagcttttagttagcttctagaatctatttcttagttcaaggtccctctttactaactggaatcaaagaattagtagatctgttctgcccaaaatgggaat

SEQ ID NO: 28612 - DNA, 204 bp, Gossypium hirsutum
  Clone ID: LIB3197-024-Q1-M1-G3
cccagccacccgttggtagacgcttttccccccccgcggcggcggtttagctttgatgggattattcctttcccaaacctaaatcatgtgctggccccggaaccaaatcttccttataggtctatagaaaccgaccggtggatgttttcccgcacatcactccaataagctgattagggagttgcatttgtttcctaaagggga

SEQ ID NO: 28613 - DNA, 390 bp, Gossypium hirsutum
  Clone ID: LIB3197-024-Q1-M1-G6
ttctcaccggaaatcatttccgcttcttgcaagcagccgatcaaaactaacagcttaatacagcagcatttccccctcatttttcaattaaaatcccaaaatggtaataaattttgtctgtgtttttttagtttcagttctggtactgagtttgggagtaagctcggaaccagttgaagacaagcaagctctccttgctttcctttcacagaccaaacacgagaaccgggttcaatggaactcatccacctcagcctgcgactgggtcggtgtcgaatgcgatgccaaccgctctttcgtctacactcttcgtctcccaggtgtgggcctcatcggttctattcctgccaacacagtcggtaggttaaaccaactccgagtttaagtcta

SEQ ID NO: 28614 - DNA, 412 bp, Gossypium hirsutum
  unsure (1)..(412): unsure at all n locations
  Clone ID: LIB3197-024-Q1-M1-H10
tagctatctatttattccattagatcaagacttttacttaattgcaaacctttgatgcctagctatctatttgttcgtaattttgattaaaatattattccctctcttgtttatgaggatgggaaaatgggttttcgaaggggaaggtagcgaccatctgtttcactccatgtctgttccttgtgagcttattcactgttcattattgtcctctttagtaaatgagttttgagatttttgttagaatttgtttaacacggctcactaagtcaatagagaatagattcctattatacattaggtctagactttacttagttgcaaacctttgatacctagctntatctttgttcataaaagatgtgccttgtttaagtgtcttttttttttctacttttgatgatgtgtgcac

SEQ ID NO: 28615 - DNA, 436 bp, Gossypium hirsutum
  Clone ID: LIB3197-025-Q1-M1-B4
cggacgcgtggggtttatttttaatattaatattaatttttttactataaataagatttttgaaggttggccaggacattggcggtgttgtgattaatattattgaacctttttaaatctcattatataaattttattattgttaattgttaatttcgtagaatgaaccaagaattcttaacttcagaggtcatagtcataagcttatatatatattaatgttggcattatttagagttaggaggaaggaaagcagtgaactgagggtccatttgataacccgatgaagagtttttagttggtccattctcatgctgtgaacctggcattattttttttaagggtaatgagttttgtgatggcacaaaaaatccattgggcacgtaaattgttctaaaaaaatatggtggttagcttatcttagccgagtaagaaa

SEQ ID NO: 28616 - DNA, 431 bp, Gossypium hirsutum
  Clone ID: LIB3197-025-Q1-M1-C8
taatcagctaaccccttgtcaatgctgcctcttctgctgtgcattctgggccatatggggagactgaaataaatgaatacatgagaaaacagttagtactgggaaggacattacaaagttcatcaatagttacatacatgaacttaacggtatcgaagaaagaaaggtagaaaaaacaacagaacccaatagatgggaacacccaactggcgaagtcataaaaattaaaggtggggttgattggaataaaacattttccggaaaaaggtttcaaccttttcccggggttggttggctgaaaatattttccccatgtaaaatcaattacaaacacgggaaaaagaagtgttaaattttggaaaatgacttaccgtttctaattcggtaagacattttcaggaaaattttagacaccgatcttccctttccct

SEQ ID NO: 28617 - DNA, 415 bp, Gossypium hirsutum
  Clone ID: LIB3197-025-Q1-M1-E5
ctcgttttgtgaggaaagaatgaaccttgggagtggaaattgctgaaatgggtcattgtgcccaagtcttccacaatagaaacaaaataaagataagcgctcatatttaaaatgttcatacgtcaattttaaatatgagcgcttatctttaaaattgacgtatgaacattttccaccaaaagaaattttcttcctccttttcaaaggacgccttatgtcgatctgtactctaattctactcataaaattcctattcccttttcccaatgaagagacatcatgctccatgaaatttcccaagaaatttcctaacgggacagccagaatatcagaaaagagaccagtaggaatgttataaatctggacccaaaaaggtgtcagaactagagggatctgtaaaggatcttcccccaat

SEQ ID NO: 28618 - DNA, 409 bp, Gossypium hirsutum
  unsure (1)..(409): unsure at all n locations
  Clone ID: LIB3197-026-Q1-M1-B5
cccacgcgtccgctcactttcacttcaaaaaaattaaaaaggaaaaaaaatcggttgattatctccggtgagttcaagccgggaagtcttaccggcgatctctccggaaaaggtgttttggagggtgaaagaagcttggtttttgattgagtgaagacgagtctgattgtaaggttggcgagaaatgttgcttttcgttgtttcagcatcatcattgtgcacaagcttctacaaggaaacagcaaaatctgtatggttaataactcatttcaatgagtgacactgttttcgtcttgggctcctagtctaatatgggttacacttgcagttgtatcactttgctgccttgttcggattacatgttaagataaaattaaaaagatgtcactgttgaatgncacaggacatg

SEQ ID NO: 28619 - DNA, 428 bp, Gossypium hirsutum
  Clone ID: LIB3197-026-Q1-M1-C4
attcccaagggcctgccatctttgataggaactttggacaagtactctgttatttttaacatgaaaccatttttcccccggagataaatggatctgatgagaaattggcatgagtttaattagcagtcctatgtatagaaactttacatgaagaaaagtctgcatcaccctagtactcatgagtcagttatgagtcccagctcacccctgacatgactaatgccttccttttttcttttatcacgagggtgtgagaacaagaaataaacttcaggctactactgtacagtgaagtgccccgcaagcacgtatgatcttaaaatagcaacaagggcagcagcaccatgacaacaaaagtaataatggcaaagagaagcagaaccctaatgtttttgggttcgccactagatacccttttaatcctgatt

SEQ ID NO: 28620 - DNA, 253 bp, Gossypium hirsutum
  Clone ID: LIB3197-026-Q1-M1-C7
gaaaaaagagaatataacgcgctttttacttcgctgttgactggaaaactcccatcattacttcgatccgatcattattctgagacgaagatcgaattggatgacgtctactttgcaggacaaggaggtttgctccaatgagcacacatttggattggtgaagggttgctttatgaggaacaaccagttgtgaaatgtctgaagcggagtggcctttgttgaacccaatgaggatgccagagactcagctggg

SEQ ID NO: 28621 - DNA, 341 bp, Gossypium hirsutum
  Clone ID: LIB3197-026-Q1-M1-C8
gttttctctgtttgccattcgcctgaatggtcttcctctttctttaaaacttgttcctatttaattccgaccaaactctcactcgattccatggctactggacgggttgtttcagggataacggcgttccatgaagagaaacctgaataagaggtcaagggggaataaatttcaacaacacaggttttggctgttgctcctgcaccaaaacctgttggtgaagaaccaaagggatccgtgcctgaagcatcattccaaaaaccccaagctccagaaactgaagccacagttgaaactgaatccaaggagggggtcaaagagcccaatgctgtgactgaaga

SEQ ID NO: 28622 - DNA, 363 bp, Gossypium hirsutum
  Clone ID: LIB3197-026-Q1-M1-D5
tgcagtgcatgcggaaaaaatggatcaaaatatgaactcaaccaaggaaggtcttatctcagggtcaggggcgattcaacacaaagcttacgctcgtgttggattgcttggcaacccaagcgatgtttacttcggcaaaaccatctcttttagccttgccaatttctgggcttccgttactttggagccttctcctcatctcatcatcaaccctcaccccattcatgatcttgttcagtttgattcccttgatcacctcgttaatcggttgcaaagtgaaagttattatggaggtgtgcgactgcttatgtcaatttgtaaactctttcataagcattgcaaggataataacataaatctctc

SEQ ID NO: 28623 - DNA, 232 bp, Gossypium hirsutum
  Clone ID: LIB3197-026-Q1-M1-D7
cttcgaattaacaacgcaaaccaatattttaaaaaaatgggggttccattaaaaaattaatttttttaagtcatttttttgaacccaaggcattggcggccattcatgaatttggatagggaaataaaaagctagcctttccctttgccattgagtttgtctctctcgtggtcactgttttaaggattaattaaaccctttcaaccacctatcttgtctccaccattaaagc

SEQ ID NO: 28624 - DNA, 420 bp, Gossypium hirsutum
  Clone ID: LIB3197-026-Q1-M1-E12
gaagtgatcaaataggaaaatatatgctattatagtaaggtaaattagatacaattatacaatgaggaaatgcgcatcattcgttgttttggtggatttatccacatggacatacacatggcatcaatgtgtcaaatttgataaagattttagttttgactgataaaggatgtaagaatgtaacatggttgtgcatatgaagatttaggtcagaaggatgaaatgaaacatttcttaaagattatgaaatgtggatgaaatttctgtttcacagctttgcatgtcaaattcagcagttctcatccatatattacaagcgcttttattacacatatgttgatttgcctcctttatattgaagttatatctttcatggtttaaatttgtattttaaatgttttgatttagattccaaacatg

SEQ ID NO: 28625 - DNA, 420 bp, Gossypium hirsutum
  Clone ID: LIB3197-026-Q1-M1-E3
gcgggatgttggggttgctctgcttgataggtttggtgctccctgtgttcaagggggtcgcttcttcttcgtcttatagacatcccttttgagcatgctacaagatatcatgtatggttgggacatcttaccatgatgctctttacactacatggattgttctatgtaattggatgggcaatgaatggaactcttgtgaaggaattattggagtggaaaagggttggtattgctaatttaccaggagttatcagcctcttaacctgtttgtttatgtgggttacatcgggttatccaatgaggaaagactacttcgagttgatcttctatacccatcaactatatgggagcttcggcaactttttggcattggacgggagggattttggtattagcataattgccggcgcgatatttatt

SEQ ID NO: 28626 - DNA, 432 bp, Gossypium hirsutum
  unsure (1)..(432): unsure at all n locations
  Clone ID: LIB3197-026-Q1-M1-E5
cgactttaactcgtaggaatccagattctgcgcccaaattgaatcgcttgtacgcacgcgagagcttctgctgcaaatgttgttggtatgtgttcatttctgtaaatttttgtttttaaggcttgacctaaagagtttcttataacaatccctatacacgatctattgttctgtttttcaaatgcaacatcaaaattgattttgacattcatctcatttggtggcctccaattctcattagcaattatgttgacaggtatcattctatatacccattcaatttcttgtatatagtctaaaatgaattgggcaactctcgcttctgtttgtgccttattcttatgtattagcaaatttcttgctgaccataagcccaatacagtacatataatgcttttaatctgtctgtttcattnttttgaataaataact

SEQ ID NO: 28627 - DNA, 175 bp, Gossypium hirsutum
  Clone ID: LIB3197-026-Q1-M1-F12
gagagttgtttaggtttgtcttcaaaaattaaaaagatgtaatgtattgacattaagatttgtcttgtactctctatctgactcgaaatcttgtgtggttctgattggttggtttagctgtcattgttgccaaacggctaatttattacaattatacaaagcattcttatttccg

SEQ ID NO: 28628 - DNA, 363 bp, Gossypium hirsutum
  Clone ID: LIB3197-026-Q1-M1-F6
cataataaccccagtcgaagtttaacactgtgtggggcgtctatcgagattcctttataatcttcaaactcttagttacgcttatagaaatactgtgggaaaataatgtatgatcacaaagacaatcactatgaatcgttgatggagaagatatcatataagaacacatgccatgatatatcttactccttctcggattcctatgtcgactagccatttaaatcctccatgaaagccaaagtctttcatctgttatgaatataaaggcccggtcactacggtacaggagaacgcaaacaagataatattttcctggggaggaacaaaaagattactgctagaacactacgtggcgtaactgtg

SEQ ID NO: 28629 - DNA, 416 bp, Gossypium hirsutum
  Clone ID: LIB3197-026-Q1-M1-G10
caaaaataatactcaatagtaaagtctctcaaaaagaattaggtttttgttggtagattgaaaggaaataggaggaaggcgtaaaccggagattccgactgcggatgaagatttgattcaagtttcagctgaacctcagtcttagcctcaggcaggaatttatacgaaaaatctcttcagcgaaagaaagaaagaaagagaaagaaaatggaccctggtcgctaccctgttcaacaaggacatggatgggataataacagcgctcttgagggttttcctgctgctcttgaccacaattaccgggtcggtggttcatatgatgagaggagatatctagatgaaagatactcgagggataatgtgtatccaagaagtaactaccacagagattttctggagagggataaccaaccccc

SEQ ID NO: 28630 - DNA, 368 bp, Gossypium hirsutum
  Clone ID: LIB3197-026-Q1-M1-G11
gtttaccctgtcctgttttttaatcccattttctggggttttctgaaggtctacagaagggaaagataagtattttgattttttgtctgtctttggccttttgggttttgttttgcgtatttggaaaagatgatgctgcattatcttcagcccgctaagctccaatccaagaagattgtttttgaggatgtgttctctgcgcgtgatcctgccacacttgaacatctcaaggagttgagctctaggcgcagtgtaattgaggagtccattaatcagagtagcttcattactgaggctattgcaagagaaatgtctggaggcttaacttctcattgtctaagggaccttcagaagctggagcaatacct

SEQ ID NO: 28631 - DNA, 170 bp, Gossypium hirsutum
  Clone ID: LIB3197-026-Q1-M1-G9
ccacggcgtacgcccactcatatcttgtactcctgcgcccatgaagcacattcaacatggcctctacttcaagacttgaaaggaaatgtctacaaagctaacctacccgagacacgccgagcgctacgaacagatgggtatgctcatacaaaccgtcgggccctccgaag

SEQ ID NO: 28632 - DNA, 421 bp, Gossypium hirsutum
  Clone ID: LIB3197-026-Q1-M1-H12
acgccccactcttgcctctgcgaatcaatttacattcataggtgatatttgtgatggcgggagggaagatgaagaaagataagcaaaaagggccgagagccccctccaatcactaccaaggtggtgtcactttccacaaatccaaaggccagcacatccttaagaaccctttgttggtcgacgctattgtccaaaaggccggcatcaaacccaccgataccatcctcgaaatcggtcccggtactggtaaccttaccaagaagcttcttgaagccggcaaaatggtcatcgccgtcgaactcgatcctcgtatggtcctcgaacttcaacgccgctttcaaggcacccgtttctctagtcgcttaaaggttattcaaggtgatgttctgaagacggatttgccctattttgatatatgtgt

SEQ ID NO: 28633 - DNA, 406 bp, Gossypium hirsutum
  Clone ID: LIB3197-026-Q1-M1-H4
gagcacgcctcccattaactcaattgggtgcacaacagaacgcgatatactgtcatctccctctttctgtcttttctgagtttctcctttttatgatcctctgttttttcattacctcaatggcctaccgctaaaattcgtggtctcccccatcatatcgaacccgaattcagtgatccaacacaatccaatcatcaactctcgaggttcagcacccaattttagtaacaaagaggcacacctcgtagccctcgcacttttcccatcttcaacttatcctcaacattcttccattttcctctgcggaattgagtcaacggttgaattgcaaaaaaaaggtttactgattgggtatttgcgaatctgggtttcttccgaatttccaaaattttgataagattgagca

SEQ ID NO: 28634 - DNA, 437 bp, Gossypium hirsutum
  Clone ID: LIB3197-026-Q1-M1-H5
ccacgcgtacgcgaagatgaagttgacgatggaaagaaaaaagtcagggtcttcttcggtactcaaaccggcaccgccagaagacttggacaaggtgtagcctgctaggcaaaaacccgctatgatgcgcgactttaaagctagaattaaaatgcaaatgccatccatgatgatgaatacgaggagaagatgaagaaagaaagtttggcctttttcttcttggccacatatggagatggtgagccgactgataatgcagattgaccctttcaatgggacacttacgcaaacgaacggggagaacggcttcaaaacatgaaatatggacgttttggccttggtaacagacagtatgaacattttaacaaggttgcgaaagttgttgatgaaatccttactgagcagggagcaaaacgcctagttcctgtgggtcttgg

SEQ ID NO: 28635 - DNA, 135 bp, Gossypium hirsutum
  Clone ID: LIB3197-026-Q1-M1-H6
tttttcgccacgccctccgcatatgaacgactgttgatattatatcggtcatggtgacgggacgagagcaactagtttacttggctaggcttcctgagctaaccaaaaactacgattagatattttctgccatca

SEQ ID NO: 28636 - DNA, 170 bp, Gossypium hirsutum
  Clone ID: LIB3197-026-Q1-M1-H8
gtgtatttcgattcacattgttcaggccggaattcaagtaggaaatgcttggtgacaactttactgtctcgagcatggaattcagtctgatggccaaatgcctagagacaagactgttggtggaggagacgaatctttcaacagctttattagcgaaaccggtgccggaa

SEQ ID NO: 28637 - DNA, 241 bp, Gossypium hirsutum
  Clone ID: LIB3197-027-Q1-M1-A2
cccacgcgtccggttttttttgagagtcaatcctattcaaaaaatcaaaatcccttcgtccatggatctttggatcttttaaaaactttttttcttggtggggggtctttgggttggccttcgtatgggcgttggttttaaaacccaaggccaaggagccttctttggttgaccatttgaacctcgccttgaatttttattcgcaggcattcgaattaaaccttaaaagggccgactttta

SEQ ID NO: 28638 - DNA, 221 bp, Gossypium hirsutum
  Clone ID: LIB3197-027-Q1-M1-B2
acatcgcctgtgttagactatcaaatgaaagagtgatgggcgtaatcgcacatgggggatcacaatatgaggctcgcatatacaacagctaaatgaacgactcgaatgctgatgatggatatgactactttactacttacgatgaggtctaccagagctatgataaaatgggttagcaagaaaacatgctaagacgcatctatgcttacaggtccgagaag

SEQ ID NO: 28639 - DNA, 454 bp, Gossypium hirsutum
  Clone ID: LIB3197-027-Q1-M1-B3
cccacgcgtccggaaaaatattatgtaaataaataattacatcactaataaaaattcatattacacattattacttaattaaaaattataaattaacatatttttaataatttttaaaaatgatataacttaaaagttttattatatgctaattttagcttaatgtccttaacaataatttttcatccttatttagttgcatttgaattcaaacatatataataattggcctctctattgaatttaactggcccaaaaataacatgtttgtattattgtgaacaagcattgcatgatactttttgagcatgagcccttttttacttgcagactgcagttgtttttattaatcattcatcccattatagtacttccatttgtccttgaacactcattatttgcatcttctatcatattgagttatgatatgctgcttgtaaaaatataaatatag

SEQ ID NO: 28640 - DNA, 440 bp, Gossypium hirsutum
  Clone ID: LIB3197-027-Q1-M1-C1
cggacgcgtggggttcgatcgacatcaactggaaggtgatcaatgtctcttcgtgcagcaccacctgtaccgccgcccaataaaacatcactgaggactgctgtatctctaccttctgagtctccgaaaaaccgacaaccagagaaaagattcacatcagacattgggtttaacttgaaagatacaggagattaccgtgaggcttctgcacttcgagatgaactagatatgctgcaggaagaaaacgagaatgtcatagataagctcagacttgaggaagaaaggtgccaggaagtggaggctaaagtcaaagagcttgagaaacaggttgctgctcttggtgaaggggtatctttggaagccaaactgttaagcagaaaagaggctgcattgcgtcaaagagagggttggccttatggatgcaaaacaaacttaggatg

SEQ ID NO: 28641 - DNA, 456 bp, Gossypium hirsutum
  Clone ID: LIB3197-027-Q1-M1-C4
cccacgcgtccgctgaaagtcagttactatggcgaacatctttacttgaataatcagcaagtgatgttattttattcctaccttgttttctttatttggatttgcccaacactgatgccaagttgagtagaagaagtaggggaaagagatagaataggcagaaacagttagggaggaacaaaggaaattgagagacaaagaactagcggaggaagcctgaaagatttaatggtaattaaatcctataaaatggaaacagaggagttagaattttttagcaacgtctttgagatctgaaggtaaaagattttggagtaaatgaggtgaaaagtgagaggagtatagataacaagccttctctaccttatttgggaatggagagtagagtagagtaaagctaggagggggttacgtgcctaatatgttgtatataaaccgtaactaaaataagttttc

SEQ ID NO: 28642 - DNA, 451 bp, Gossypium hirsutum
  Clone ID: LIB3197-027-Q1-M1-D12
gttccatttctattagcatgtctttgcatcaaacaagcttttgcttcgtctgtagtcacttaacatccgggcaaaaggagggtgatgagctgcgaagaaactccgatgttatggagatcctaaggaagacaaggtttcccagggttcatggtatgggagacgaaacttctcccgaaacgattctcgagcatgatcgtattatatggcttggggatttgaattatcgtatagctctgtcataccgctctgccaaagctctggttgagatgcgcaaattggaaggcactgttagagaacgaccagcttcggatagagcagaggcaaggccgtgtttttgaggggtggcgtgaaagaaagatatatttcccccctacatacaagtattctaataattcagacagatatgctggggaggacagacatccaaagaagaagagaagaactcctgcat

SEQ ID NO: 28643 - DNA, 376 bp, Gossypium hirsutum
  Clone ID: LIB3197-027-Q1-M1-E9
attatacattattggcttgaaattgggggcggtgctaaaagggggctggggctgtgccttttctagctctttgctcttgctctttctctaccatcaattacagctagaaggagacagtttccattaagaacagctatggcgggttccactagcggaaccacttcttccaatccatcattgaacccttctgctcccaaaatcctattatccaagccatcagctgggctgtttcctggttaatttggacgctgaggttgtgattatgaaacggctcctgatagggcccgtttccctcccgttggttcccttaaccttctttctgattcctgggaattccacatcgatcgtattttgccttttttgactgagaatactg

SEQ ID NO: 28644 - DNA, 440 bp, Gossypium hirsutum
  Clone ID: LIB3197-027-Q1-M1-F2
gaactttcatcggattccgacggcgaacctagttggtgagtctcttcccgccacgccccctcgtcggaggagtagacccagggcggcggtggtcaaggattacgctagtgaaaacgaagctcagagaccgagagggcggcggagcaaggatttgaggaagaggagagttataaagggaagatggattgataaagaaatgggttgtaaacatgaagggaagaacaaaagtgggttgtactacaattacagccatagcaattacagtgggagttttagtggtgaaagtgaagggggtgtagtggtgattactagacctaaaggtggaaaacgatcgttgtgtatggatatggaggaagggaaagcatgtacggacttagggttggaattggagatgcctggtcgtgtctcattatcaggttccgccattgataatactagta

SEQ ID NO: 28645 - DNA, 451 bp, Gossypium hirsutum
  Clone ID: LIB3197-027-Q1-M1-F4
gtcaacttgtatgaaggatgttccctctatgctcttgcagatgttggaggaagagttcaattttctaatcaataaaaaggatcagatgaacattgaaacaaagatcaggaatattaggtttattggagaactttgtaagttcaaaatttcatcacctggccttgtcttcagttgtctgaagacttgtttagatgatttcactcatcataacattgatgtcgcttgcaatcttcttgagacgtgcggtcgttttctgtatcgttctcctgaaactaccataagaatggctaacatgttggagatcttgatgcgcttgaaaaatgtaaaaaatttggatcctcggcacagcacacttgtggaaaatgcttactacctatgcaaaccacctgaaagatctgcacggatctccaaagtccgtcctccattgcaccagtacattacgaaattgcta

SEQ ID NO: 28646 - DNA, 358 bp, Gossypium hirsutum
  Clone ID: LIB3197-027-Q1-M1-G11
agtttctgcaccacaactacataggggagagtgaacactaaaaaacgggacacaaaattggcaattatcttactgacttgcatgtcttattaataaaggaggctttcactcttttagacactgacggttatggaaagatcgttccatatgagtttatgatactaatgaggtgtatctacggtaaccgaatccaatctaatgtcattatctattatttgttaatagaatctcacggtgccctttgacttgcttcatttttttgattcattgtacaagcttatgaattggtgggccgcatttataggaatgttacactatgcttttaaggtttctgtatattgacaatactggtcttagt

SEQ ID NO: 28647 - DNA, 387 bp, Gossypium hirsutum
  Clone ID: LIB3197-027-Q1-M1-G7
atggttactaagcatgcagcggaaaatccagggaaatacaacattcttggcacaaatactattatggataaaatgatggtggcaggttttaagaagcaaatggcagatactggaaaactgaacacactgttgcagagagccccacagtgtcttgggaaatttattgagattgctgcccgaaagaagcgaaatttcattctggatcagacaaatgtgtctgctgctgcccagaggagaaaaatgtgcctgttcgcaagcttccaacgaaaaagctgttgagtgtgcccaaaagatgaagactataagcaaagaacacagaagaaagcagaagtagaggggaaagacttaccagaacatgcggtcctcaaaatgaaaggaaactttacc

SEQ ID NO: 28648 - DNA, 274 bp, Gossypium hirsutum
  Clone ID: LIB3197-028-Q1-M1-A11
gaaggttcgagatacacatggggcgcgcgcctgggagaggataaaaatggttttgggaccaaatggaccctgttgtgagagcacggcaccaccaacccattggcgatactagagcctgttggtgagctttgaaagtacaacctttttatgcagccgggggaaatatttgggggaaatgggcgctctgtgtctttaactttgaaatacactcaactcttgggtggcgtttaccaaaaatgatctggggtgataaacaaacatctcccttttccgc

SEQ ID NO: 28649 - DNA, 354 bp, Gossypium hirsutum
  unsure (1)..(354): unsure at all n locations
  Clone ID: LIB3197-028-Q1-M1-B1
attagattgaactttttttcctgttgatttagaagttaaattcagtttgaattgaatcttaattaaatggaaacagggaaaaaaattagtgagttcttaagttntattgagtgcttaaatagagagttttctttctttattcgtttggacttatatgatattatgaatgctgcgataatgtccttatataataaggattntattatgtttatttacttagagagttctttcattcaactgtagtcttaaatgtcaatgcggtttgaatggttgctattcatacatttgatcggtaaacaagaaagattcgaaaatggattgaaatggggaaaatggtaaattctttttttaaaa

SEQ ID NO: 28650 - DNA, 377 bp, Gossypium hirsutum
  Clone ID: LIB3197-028-Q1-M1-B11
cccacgcgtccgcttccaaatcatacgctcctcatatcatccgccaacattctaggaatcatcaaaaccaaacctcccccacaccataacacaaaacaccgtttcccttctttcccattctgttatggccacggtggcgcgtgtaattcgctgtgaactactgtccactaaacctggagcgaacactaggagggaacagggtgatcaggttcaggttcagagagtgaaagcgggtgaacccgagaatggaaagatagtgttgcagccgaggttatgtacgttaaggtcgtacggttcggatcgagtaggggtgatgaagaccagaagggaagaaaacgatgacgtttcaccctttttcgagactttatcggagtata

SEQ ID NO: 28651 - DNA, 421 bp, Gossypium hirsutum
  Clone ID: LIB3197-028-Q1-M1-B2
attggattgaacataacatcctgttgatatagacttgggtttcagatcaaatggaatattacttaaatggaacacagggaaaaaaattagcgagttcttaaattttattgagggcttaaatagagagttttctttctttatgcagctggactgacatgatcttatgaatgatgcgataagagtgctgatataatgacagatctgatgagtgtaataaaagatactgagaccattattttaactgaaattggaaaaggaaaacaggttcgaaaggttgcgtttgagaatttggaacgtactgcaaacaataaagttaggattggaacttaccaacaacttttctaccttaaacaggttatttttggcaaagaagatgctggcaataattttgccaaaggccgtaatacaattgggaaggaaa

SEQ ID NO: 28652 - DNA, 298 bp, Gossypium hirsutum
  Clone ID: LIB3197-028-Q1-M1-B6
cgggctcgtgggtttagttggatcttgaaaatgctggcttggctcatgtgtcgacgatgactcaacatccgataagctatccgttactcttgtaaggcctcttgatattgtgacactgccctgaactataattttgataccccagataataaacccgaccttgcatgggaattttcggaggcgaacaaacatacggtcacggagatagtgaatcatgatccatacaactacaagcatgatgctgctattactgagatagatgtggctcagccaccagatgtacgatggcttacaatgt

SEQ ID NO: 28653 - DNA, 352 bp, Gossypium hirsutum
  Clone ID: LIB3197-028-Q1-M1-B7
cgaccactccacacgtgactggcactcgttcgcgtgtcgatgtagaacttaattttacctggctcggaatcttatttaattggatactggaaaaaaaatctagcgcagacttaagtttcagtgatcagcataaagaaagagagggaggaatatattcggaagcactcatatgatatgatgaatgctgcgataatgtccgtagataataaggatgggactatgtttattgacatagagagaacttggattcaactgaaggcacacaagtcaatgcggggtgaatgggtgctatggatacatccgatcggaaaacaggaaaaggcgcaatggatgaaacgtgaaaaagaaaact

SEQ ID NO: 28654 - DNA, 423 bp, Gossypium hirsutum
  Clone ID: LIB3197-028-Q1-M1-B9
aaaaagccaagtgccgcaaacagtgaaacacctgcccatatacagtgaggatcaaatattcattcattatcaaaacaaattacaactggattaacatttataaagaatctaaactaagtgattatcctgaatcatggtacatcaacagagcaccaaagttactcaacagttaactacaaaaaatctactaaaaacaccaaaaagacttacctgcaaagaacattttagatagaatgactaaaactgggatatatttccaccacaatatcagccacattgcaatctgaaatcaagtacacccagcctcatgttaaaaaaactttattaacatcttgtcaaaagcaatgatcccaaaggaaatcagtatgccacaacacttaccaaagtgacaaaatcacttaacttggttgattagaaaaaata

SEQ ID NO: 28655 - DNA, 345 bp, Gossypium hirsutum
  Clone ID: LIB3197-028-Q1-M1-C2
atgcgcagctggccgcggcgctccgctttcccagcgcccgcagctgaatcgcagtccgcagcccgcagcccggcgcggactcccatcgccgcagtcgccctccggcgccatgtcgcaaaacggagcgcccgggatgcaggaggagagcctgcagggctcctgggtggaattgcactttagcaataatggaaacggcagcagcgttccagcctcggtttctatttataatggtgacatggaaaaaatactgctggacgcacagcatgagtctggacggagtagctcccagagttctcactgtgacagcccacctcgctcacagacaccacaagatactaacagagc

SEQ ID NO: 28656 - DNA, 367 bp, Gossypium hirsutum
  Clone ID: LIB3197-028-Q1-M1-D7
aacatttaaaatgaggttttccatgaaattgataattttctgatgtgcttatctctattcctgcagaaacatgggttccaagagctatccaatgatgactatttttcaaagaataatgagtttgctacatggctgaaagaagagaaacgtgtgtttttctctgatctttcatccgagtctgctcgggatttatttgcagactttgttaaagactggaataaccagaaactcggatctcaatactatgaacgccttgcaagtgggccacggactgcacataactgggaaaatcaacttgtaggaaggagaaaaaacctttttccacttggacccctactttttttttcttggttggccctcctttatt

SEQ ID NO: 28657 - DNA, 370 bp, Gossypium hirsutum
  Clone ID: LIB3197-028-Q1-M1-E1
gggaggtttcagaatgggaaatttcatgggaggatcttcaaattggtgaacgcattggtattggatcatatggtgaggtctatcgagcagattggaatggcacagaggttgctgtgaagaagtttctagatcaagacttctctggtgatgcattggttcaatttaaatgtgaagttgaaatcatgttaaggttgagacatccaaatgttgttcttttcatgggagctgttactcactccccgcatttctctatactcacagagtttctccccaggggaagtatgtataagctactgcatagacccaatcaacaacttgatgagaagagacgaatgcgaatggctcttgatgtggctaaaggaatgaatta

SEQ ID NO: 28658 - DNA, 414 bp, Gossypium hirsutum
  Clone ID: LIB3197-028-Q1-M1-E12
aacatatagaaggacctaccactttgggcaaaatacatagatactgagcatagtgaggtctactggccctcttattaatcataaatgatgagaaggtggctgtctttgattgttgaaattgatgcattcatacgtaaagacataccgtattgcttattccaaattctgactgggaaagggctcactaacctatatcagtgacaatttagcttcttgagcttgaataacattgtatccatctcatttgggaggcagggcatatctggggttcttacacgacttattgataacataattggtaaagatagtgcctcccatagtgggggtcctttccttcattcaaagcttcttctgcgacggtgatgttgaaatgagagcatctatctgtgcgctatgagctgaagtatgaaacat

SEQ ID NO: 28659 - DNA, 342 bp, Gossypium hirsutum
  Clone ID: LIB3197-028-Q1-M1-E2
attgccctgtattcttcctcacacaatcagccgatctctccttttttgtttgaaacaaaacggaatctacattgggtggcacatgttttgcgagagagtaaagaggagagcattggcaaatttcatttgggtctcttagttttccatgttataaaaaaaaaaagaaaaaaaacgccattgccgacacccgtgttgttggtttcttattttgtttttttgatctactattgaatggaatagagggaggcgtttgttcaaatttaaccgaagctgatgatcccgatgtctgttcaagtgtttaagagataacatcacggtccaactgaggatgatattgggagc

SEQ ID NO: 28660 - DNA, 318 bp, Gossypium hirsutum
  Clone ID: LIB3197-028-Q1-M1-F11
gcacacatgcgtaaatactgctgggaagccggagacgcgtgaagtgaggcgaattgcattctgggtggaacacaatggggatatcgaggatcggtacactcgtggttactagctaaatgctggcatgtccggcactttccgatatggttctatgcaaagtcgatcgacgtatttatttgacatccaacatggttcgaatatcttatactttagaggtggaaaaggcacgtacaaaaactgactctaaggttttgagggcttttactgaccttaaaacataaaacttggaatatgtgaatacttcctatcatgaagcca

SEQ ID NO: 28661 - DNA, 237 bp, Gossypium hirsutum
  Clone ID: LIB3197-028-Q1-M1-F2
cccacgcgttcggtaaaagatggccgacggtgagggtagtcaacccctcatgtgggatggtggaactggaatggtgaaggccggttttgctgttgataatgctccaagggcagtttttcccagtatcgttggtcctcctcgacacactggtgttatggttgggatggctcatgatagatgcctatgtatgagataaagcacaatctaaaataggtatccttactttgaaatatctta

SEQ ID NO: 28662 - DNA, 387 bp, Gossypium hirsutum
  Clone ID: LIB3197-028-Q1-M1-G9
ggaccaccacgggggagggaacatgatcgctgttgtctgctgaggagtgcttaaacaaactcaatttcatatggggcaaccgccctttacttttatactgaccgtgtctaggatcataattgcgctaggccctatctgggattgctaccgcgatatctgatgaaactagctgcggatatgatactgttaacattgttcaaggcactggcgtaaattgctgtacatcatactcatccgaaacaatgcgattgatcttacggcaaacttacagggatcataatcaaactgtggactagaaactcaaactttgcgagctgatgctcaacttgatgatacgaatgatattcgactatacatattacggggactataacactggcggcatcg

SEQ ID NO: 28663 - DNA, 447 bp, Gossypium hirsutum
  unsure (1)..(447): unsure at all n locations
  Clone ID: LIB3197-028-Q1-M1-H10
cccacgcgtccgaatcacttgtttatcacgggagaaagtgcagaaaggtttctgggtttttcctttgcttactcaaggggatgaattagtctctaattttcaataatttgaaagaaatagcctttattcagagatgggacatactggtaactgcagatatttaagagaacaacttgtttttgctaagaattagtaccagctggattacattaacttgggatgagaacatataaggcgaagaccaatatagaagttaatggacaaaagggtgatggaggaatcaagaaccatggagttaatgatttcatggctcggaagaatccgatacaaggagcatcgtatatggcaagtcctagtgaagtagaaagacgaaaggaagaaaacaaagctcataatatgagcgagacctttttggcatctgatgcgccgganctggttgtatttatt

SEQ ID NO: 28664 - DNA, 427 bp, Gossypium hirsutum
  Clone ID: LIB3197-028-Q1-M1-H3
gaaagtggaccgctgggggtccgggtcggaattccgggttggaccaaggcttcggccaacgcgtccgaaagctccttttaacattccttacgtgcttgcttgcatataggttgatatatatatatatcaccagtgaagtggtatgttggaggatttgggaaacttttgttttaagattaaggatcataaaggatcgttgggccttattgttaagaagggatctatataatccttgtcaagggttgttaggttattgatgatttttgttgattaacttgtggttggatataggatgtattatatatttgggttctaaaaacatgttagggttgctatgattttggggccggtgggcaatatactataacttttgaaccggtccattcgaatgatagttctgttttgtgtaacctaaattaattatttg

SEQ ID NO: 28665 - DNA, 312 bp, Gossypium hirsutum
  Clone ID: LIB3197-028-Q1-M1-H9
ttcgggatgtaactttattcaaaattaccctattcaagtggcatagctgtagctgcaaaaattctgttttgtggaatgacataaacaaatatagctatatgaggattaaagcatgactaaagcctcttttgaaattaattcatatttttaaaactatacgtaaagatactggggaatgactccttaacagagtttaagaaacatattgtggacttaattgactgtctcagttagggggcggatgtgtgagacacaccttttttgcgcttaatgtacataagtcatgaaagcaatgcttggatctttttttaa

SEQ ID NO: 28666 - DNA, 164 bp, Gossypium hirsutum
  Clone ID: LIB3197-029-Q1-M1-A9
tcgaaagaaacacaatgactttgtcattagccagctatgaagaatcgcatattacttggatttcttcatctaattgtacgcaacaaagctggtgatcgtggagttgaaggtgccaacgacacctattgatgggccaaagccagacacttgtggacttggataaa

SEQ ID NO: 28667 - DNA, 414 bp, Gossypium hirsutum
  unsure (1)..(414): unsure at all n locations
  Clone ID: LIB3197-029-Q1-M1-B1
ggataacggaagatagattgcagttgttggtcaatgttactggagcatttagaccgggtgtgcttacggctttggtcggtgtcagtggtgctggtaaaactacactcatggatgttttagctggtcgaaaaaccggagggctcatagaagggagcatacatatatcaggttatcccaaaaggcaagaaacttttgcaagaatttcaggttactgtgagcagaatgatatccattctccctgtttgactgttctggaatctcttttattctctgcttggcttcggttaccatcagatgttggcttggagacacanagggcgtttgtcgaggaggtgatggaacttgtggagcttactccattaagtggggcattgattggtctgccangagttgatggcttgtncactgaacaac

SEQ ID NO: 28668 - DNA, 346 bp, Gossypium hirsutum
  Clone ID: LIB3197-029-Q1-M1-B2
acgaaaatggcgtcaactgaaaacaattatgaccgctcttctgctaaatgacattgggattgaggggctggaaaggagtctatgctttgagcttacaaattgaaatcacaaggtttacatgttacggggtacgaatctgactgaatagctggtggaaagttaagaagtgtttcgagggatggtttgatatgggatgaaggagcaaatacaatgactgaaagtgagattgaagtgagaagtttgtttgatgatcttggtattcaagataagcaacaagttccaattgcacagaacaagcgggatattatgaaaaatggcgtgcctgtattgatacccttaaatcctt

SEQ ID NO: 28669 - DNA, 340 bp, Gossypium hirsutum
  Clone ID: LIB3197-029-Q1-M1-B7
caggaaaagccttaaagcctattggggatgccctgcaacaggtttacattggtattgaggggctggaaaggagtctaggctttgacccaaatgatcccgttgtcccttttttccttctcactggcacctcagccactttatgggtgttttaccgggtatgggcatacggtggttactatggggatttatctcctcaactaactttggagctcttgtctggaaaggagaatgttttacttattgatgtccggcctgaagtcttaagggagaaagacggcattcctgatcttcggcgagcagctcggtctcgttacgctagtgtatcttttacctgaaggtc

SEQ ID NO: 28670 - DNA, 150 bp, Gossypium hirsutum
  Clone ID: LIB3197-029-Q1-M1-C2
cttcttcttcttctgcatattcctcttctttggatcagacactttcttgcttgatcccctccccaccaacaccaactttttataccattgtacctgacacccaaacaggctgttttacttgtttcaaacaacacttagcaggttacagga

SEQ ID NO: 28671 - DNA, 394 bp, Gossypium hirsutum
  Clone ID: LIB3197-029-Q1-M1-C3
aagaagtccaactttctttcaattctactactcaaaactctcttcttcttttttatttctgaattgcttgtttcaaaatggtttggttttgggtacttgttttattcactgccaatttaaagttgggtttgactcacatccatggaggagagcaaccgttggctaaaatcaatatcctccaaacaaccgtcgcccttcacgaatccgcttctatttcagctgaacctgttcttcttggtttgaagggggaggatactgaatggataactgtgaatttcgttaatccgaagccgtctttggatgactgggttggagtcttttctccggcaaagttcgacccatcggcctgtccgccggtgaatgaacggaaaaaacagcttccatatatatgttc

SEQ ID NO: 28672 - DNA, 270 bp, Gossypium hirsutum
  unsure (1)..(270): unsure at all n locations
  Clone ID: LIB3197-029-Q1-M1-D1
cccacgcgtccggatgagatatcaaagtttggcgaggtttatgataaattctgcaaagaaaaaattgcccatttgcaagccttgaaaggttatgagcagaatggatttggaaaagaagcaattgagttgttttatttgatgcaagatttgggagttaaaccggattcctcaacatttgttagtttgttatctgcttgtgctcangtaggtgcaattggtttaagctgttgggtgcatgagtatattgctagaaactggtttgatctgaat

SEQ ID NO: 28673 - DNA, 440 bp, Gossypium hirsutum
  Clone ID: LIB3197-029-Q1-M1-D12
gtttgcagtcgatgcttgtactctaatggcgatcataacagaagaggtagagcccgaatcacccaaaacgagagtagacaagaaaactcccccaaaacctacttttaatcctaacccagtctcctcaaaatccgaccctaattcccaaactcaaaatccttttgccttctggttctatttcaccctcaccatcgctctcatcactttcctcttcgtctccttttcatctttgtccccacaagaccccaaatcctggttcctttctttgcccaactccctccgtcaacactactcaaatggtagaatcattaaggttcagacatctccaaaccaatcgccaattgaggtttttgtttctgaaaatggtcagttttcttcatctgagaatgttttggtcgttcatgggctggggctgagttcttattcttatagagaaatga

SEQ ID NO: 28674 - DNA, 422 bp, Gossypium hirsutum
  Clone ID: LIB3197-029-Q1-M1-E5
ccggaaacgatccgcaaaaatggtgcacagcgcctatgattccttccagctcatcaccgattgtcccactaagatcgacgccatcgaatcctacggctggaagctgctgctgggctgctccgatggttctcttcgaatctacgtttctgattcctccggcgctgaccgatctccaccgtccgacccgcacgcgttgcggaaggagccttacgcgctggagagaaccgttgcagggttttcaaagaagcctctgatttcaatggaagtactggaatcgagagagctactgttatcactctctgaatcgatcgcgtttcatcggctccccaatttagagaccattgctgtgatcaccaaagctaaaggcgctaatgtctactcttgggatgaccgtagaggttttctttgctttgctaggcaaa

SEQ ID NO: 28675 - DNA, 310 bp, Gossypium hirsutum
  Clone ID: LIB3197-029-Q1-M1-E7
gcgaatgtgggggatcaaatactgtttcacacacaggagcgaatatatgtaattaattaacacagcttgttttcgacgttgatgaaaaagcttatgtatttttttgatagatggagtgagcaatggctaacaatgtgggaattatagctatggaaatctacattaacgtgctaccggtgttaaacaggaaacaacacaagctcatgatggtgcttgattggggaaatacaccattagacttggacaagattgcatagtctttcgtacaaaactggaaaacgtgatatctatgagtttaacacttgttact

SEQ ID NO: 28676 - DNA, 438 bp, Gossypium hirsutum
  Clone ID: LIB3197-029-Q1-M1-E8
ggttatacgtttttctcatccactttctcaaaggaaatgggcgcttactgtgatgaaaatctctctttctctccggcttgtaatttgtctccttctcacgacctccggctctccaaacacgtccacgacaacgttcacggcaacatttatctcgatcctctctctttgaagtttattgacaccgagcaatttcaaaggctccgtgagctgaaacaacttggattggcacacctggtttatccaggggctgtacattccaggtttgagcattctcttggtgtgtattggcttgcgggtgaagctatgcaaaagctcaaaacttatcagggtttggagcttggtattgatcgatttgatgttcaagcagtgaaagttgcaggacttctacatgatgtaggccacggaccttttaaccacttggttgaacgggaatttttc

SEQ ID NO: 28677 - DNA, 408 bp, Gossypium hirsutum
  unsure (1)..(408): unsure at all n locations
  Clone ID: LIB3197-029-Q1-M1-E9
atcgccttctatcaagacatcttccaaaaggtttctaatttagttattggtcctagtgttaaaatatgttaggattaggactcttttctctatttaagttcagttctttagttaataataatagaacagttttattaaaagctctcttgaaaactttcacctagcatgcacttcaaattactttatgcagtagcttttccatttttcatttattttgatcttctgtaaacatgataacagctttaataattagtcctattgtttaaaaagataaatgcttacttcagaaagtggcatgctagaaaaccttgttatattgttgctggtgccatgtttttacacattttcctttattttccatttcagaaaagggatgtggctgatggttacctaactcancatattttc

SEQ ID NO: 28678 - DNA, 379 bp, Gossypium hirsutum
  Clone ID: LIB3197-029-Q1-M1-F11
gttttacgtttatttgtgctgacggatctttaactatttgatccttgatctagatctggatttatgtttcccctgggatcttgatttctacgtaatatagcatattactagtattagaattcatattgaatctattattttttctacaatatctgcttgttttgtttgatcagggttatatttctatcatttgatatgatatgatgttctagctaattccgatcctgtgtataaattgttcttatctctgaaaacggatggtttatattatatgttaccatttatatgtcaaattggttttggtccttttttttttcattttattaatcgggcgaataagctgggatggaccctttttgggtgggtgtgtttttttttc

SEQ ID NO: 28679 - DNA, 458 bp, Gossypium hirsutum
  Clone ID: LIB3197-029-Q1-M1-F4
cagaatgatacctaagatgccttttttcgctgataaatttaacttttgcccagttgtctcttcattttgacaatgactataaataattctgtaggtattcagacgtctggcgatgctaaacattttgcaatatccgcaaagatccctgagtttacaaataagaacaggacattggtcatccagtattccataaggtttgagcaggacattgaatgcggtggcggttacatgaagcttctctccggatttgtcaatcaaaagaaatttggaggggacacaccatatagcttaatgtttgggccagatatctgtgggacacaaacaaagaagctccatgttatactttcttaccagggccagaattaccctattaagaaggaattggaatgtgaaacagacaagttgactcatttctacacattcattcttaggccagatgcaagttatagtatcctcat

SEQ ID NO: 28680 - DNA, 322 bp, Gossypium hirsutum
  unsure (1)..(322): unsure at all n locations
  Clone ID: LIB3197-029-Q1-M1-F7
cccacgcgtccgtgttattgcccttgatcacctaaaaaattatatttatatcgaagcagacaaggaagcccatgtgagggaggctatcaaaggtatacgcaatatatttggagcaaagataatgcttgttccaataagggaaatgactgatgttttatcagttgaaagcaaagcgattgatctttcaagagatacctgggtcagaatgaagattgggacatataagggtgatcttgctcaagtagttgatgtggataatgttcggcaaaaagtcactgtgaaattgatccctanngatgacttacaagtcctagcgaataaa

SEQ ID NO: 28681 - DNA, 421 bp, Gossypium hirsutum
  Clone ID: LIB3197-029-Q1-M1-G2
ggagaatccatccacctgtcaatacgctattggagaaaacaacaggtagcttaacttcattggccagttttctcgagaacacgtcgcaaaagattaatccccaaagtcaagtcgtttgatgcctcaagcttcgcttcgttttcctttcgtgtttgctgttgctttggttttgtttaaatgttttaaacaacgattcccagtttcgatttccaagtactccaactgaaaaaaaaaaaaaagaaaaaaagcacacgatccatttgagaaattaaattataaaagcagcgccaaagcttaggaacccatcacctattctctctcgaaatatcaaccttttttatttctggtgttgaaattgaagatccgataaaaaaattgtaaacatttcttaagttctggagagatccaatttctctcctga

SEQ ID NO: 28682 - DNA, 459 bp, Gossypium hirsutum
  Clone ID: LIB3197-029-Q1-M1-G3
atcagcctcaaggcctcctcccacaaagactgatggctccgtgactctggacaatggcatcatccgagtgaagctggacccgactggccgcctgacatccttggtcctggtggcctctggcagggaggccattgctgagggtgccgtggggaaccagtttgtgctgtttgatgatgtccccttgtactgggatgcatgggacgtcatggactaccacctggagacacggaagcctgtgctgggccaggcagggaccctggcagtgggcaccgagggtggcctgcggggcagcgcctggttcttgctgcagattagccccaacagtcgacttaaccaggaggtcgtgctggatgttggctgcccctatgtccgcttccacaccgaggtacactggcatgaagcccacaagttcctgaaggtggagttccctgctcgcgtgcggagttcccaggctaccta

SEQ ID NO: 28683 - DNA, 325 bp, Gossypium hirsutum
  Clone ID: LIB3197-030-Q1-M1-A11
gagggtgttttattaaacgctgtagactgactttgggtttacattaactattttatgcttacgtggatgaatttgaagtctgcgaacttgaaacaatgcatgttagggtacatcggtcagggtgtattacaagatcgaaatgcgtggttggagctatagtgccttgaacaatggaattcagactgatggccatatgccatgagacatgactggctgaggaagagattatgcttataacacctttttcagtgaaactggtgctggaaagcacgttcgtcgagctgattgtgtggatctagagcctactgatatcgatgaggtgagg

SEQ ID NO: 28684 - DNA, 162 bp, Gossypium hirsutum
  Clone ID: LIB3197-030-Q1-M1-A2
atgacaaaacgttcggagacctaagctgcaaaggttgaacaaaaatgacaatgagagaagctctgcttggaatttctattttgttaaaatttattgcttatttcatcgaaatttcgtctgctatcgatggatttgaggcctttttcattttctttcccgacc

SEQ ID NO: 28685 - DNA, 414 bp, Gossypium hirsutum
  Clone ID: LIB3197-030-Q1-M1-A4
gctactgctacgaacttatggttacctggggatgtagctggtgtgaaagcgtggagacccggtggtgtgactcgctgaatcgtcaccaactcggtagaaacgggtttgtctttagggaaagttgctttgtaaacgcttatccactggtcttcacttctcctatggaagtatagagttgagtcatcaacccaacacggccacccaccgtgttcaacaaccttgactcggtgagtcccatcacgagtcaagaaaacataaatatcagtactcagttcttccacttccccaccccacccttctttcccatacgaagccacagctgtccaaaccccagacggagatacggcggggctaaagtcggcgattccggaaggagtgagtcgtcgagtcaacccgttcctaaatgagtcgagt

SEQ ID NO: 28686 - DNA, 367 bp, Gossypium hirsutum
  Clone ID: LIB3197-030-Q1-M1-A5
cccacgcgtacggaggaaggtagctaggtgtagttaaggttttcttatttgccatctgaaggcatgctgatccatggcactcaataagttgtaaatgtcagatttctgtttccacaggcctgatttgtaatttttagctcactcactcctgaatttcatttggtttatttaactacaatgtcagttgttgccgacttgccaccctctgctgctgaatgaaagattgaggaaaatagataaatttctcaacttgaagagagctggaaaaagcttcaatgctgaagttcggaataggaaggattataggaaccctgacttcttgctgcatgctgtgaggtatcaagatattgatcagatagggtcttgc

SEQ ID NO: 28687 - DNA, 262 bp, Gossypium hirsutum
  Clone ID: LIB3197-030-Q1-M1-B4
accatattctctatctttaaatgcgttcaaaacataatatagggggtgtgtcctacggggggaagtgtgaaaaaatgcccatatctaagttgaaagtgaaaaactcaagcttagggttgtacaggctcgaaacaagggtctatgacgggatttatcttttcagagggcactaataatataggttacagaggagctcaagaaggaaaattttcacttttgctggctttgccggatggctttttttttcaaagccgtttgggag

SEQ ID NO: 28688 - DNA, 412 bp, Gossypium hirsutum
  Clone ID: LIB3197-030-Q1-M1-C12
gtttgtgatgtaatagtttgatgctttgtttcccgctcgtttgtgctgattttggacatgaatttgtacttgcaagactctaagcttacaaacctaggaaaaataatggaaattcatggtccaaagcttttagggacttcatacaaggatcccattgctagtttcaatctcttccgggagtacaccgtccgccatcccgaggtatattggtcaatcattctaaaagagctatcagttacatttcatgaacctcccaagtgcattctggatactactgacaaatcaagaccaggaggaacttggcttcccggttcggttttgaatattgctgagtgttgcttattaccctcaattcatcccagaaaaagagatgatagttgtgcaattgtatggagagatgaaggtgatgatg

SEQ ID NO: 28689 - DNA, 232 bp, Gossypium hirsutum
  Clone ID: LIB3197-030-Q1-M1-C2
caagcacctgtttgatctatctagttcatactcaaatatgggtcaaaccactcataatcccaatacccaaccttggaaggactttgaacgctcatacggaggatatcaagaaaactgatcttggagattagtgagacgctaagaacgatgcccatgcaacattgtacagtggtactgaatgtactgggacaactcaaggcgttggtccactttggaaaccatgcataaactg

SEQ ID NO: 28690 - DNA, 283 bp, Gossypium hirsutum
  Clone ID: LIB3197-030-Q1-M1-C7
gctacacatcaagctgaggggcaacctaaggagatcgataacgctgctatcattgccacctaccttgctgatctgattgaagaggtgctgctgacttcttcagaagcagcattgtgagcagtaccatctccttgacctgctgaaactcacatgctttaggatagaccaaagagtcattaccatacacgcagattgtttggaggtagtcatatgctaactaaacccaggaatagttagtgttatgctaggcaaacagggttggacatgggtatctgaattacat

SEQ ID NO: 28691 - DNA, 318 bp, Gossypium hirsutum
  Clone ID: LIB3197-030-Q1-M1-E12
gatgtgtgtagttttttcgggggagtttaatagaggggaggggctgctgagacactttataatatgcctagtctaaaccttgtacccatcggcaatttcgacagcgaatacaccttggccatcttttccgaaaccacctattccgtcgcttaactcattggcaaacctgatgcctatgcgatgattgtgttgaagggttttaatcccatgctatatggtggtactgatcattcacctgcctatggtgaactgctatcaattgggggccttagtccatatgtgaagatgaatctgattactgcaatctgccaaatttct

SEQ ID NO: 28692 - DNA, 400 bp, Gossypium hirsutum
  Clone ID: LIB3197-030-Q1-M1-E5
attcagagaaggatctgactgagcttggggagtgtccatatgatcaaggtgggtatttcattatcaatgggagtgaaaaagttctaattgcccaagagaagatgagcacaaatcatgtctatgtattcaaaaagaggcaaccaaacaaatacgcctatgtagcagaagttcgatccatggcagagacccaaaataggccaccaagtaccatgtttgtgcggatgctttcgcggacgagtgccaaagggggctcttcaggccagtacattcgtgctactcttccatatattcgtactgaaattcctatcataattgtgttccgggctttgggatttgttgctgacaaggatatattaaagcatatatgctatgacttctctgatacccagatgatggagct

SEQ ID NO: 28693 - DNA, 332 bp, Gossypium hirsutum
  unsure (1)..(332): unsure at all n locations
  Clone ID: LIB3197-030-Q1-M1-F4
tttgcgtttaggtttttgttctttgaatactttagagctgcattcatgctgtgtgggttgtgcagacgagaagtgtggttaaggtgtgtgagtacttcaaatgaggtacactttgtattgtagggttcttttctttccttttttttttaatgtaatttaatttattgaagatcctataatgacaacagaacaatgttggaatatttgtttgttccctgttagttgttgaaagtaatatcaacttgggccgattgagcctttgcttgttcggcnnngaaaaagngtgagatgtgcatattaattaaaaatgctaacaatatttctgttaataa

SEQ ID NO: 28694 - DNA, 416 bp, Gossypium hirsutum
  unsure (1)..(416): unsure at all n locations
  Clone ID: LIB3197-030-Q1-M1-H12
agagagccgaagggtgggtaggtgtgatactgacnnnannnnctncancagcatgnnnttttnntntttttttnnttttttattattttttattttttactttaaggctccacaatgatcttaccagtggcatgaccatcaatgctcttagcccatgcttcctcagccttacttaggggatactttgaatcgattaccgtcttaagcttcccgtctttcaataagttaaccagataatcgaggttctcctttttaggtgacataaagagtggtaccagcttcttctttgagaaggtaagcttttttatagcacaagttaggaaagcactaagagcattgatggtcatgccactggtaagatcattgtggagccttaatgtacgaaattttactttatacttactgcagtgatgctt

SEQ ID NO: 28695 - DNA, 367 bp, Gossypium hirsutum
  Clone ID: LIB3197-031-Q1-M1-A11
ggcatggcttgacatcgcgtgagcccgatgaaggcatctatatcgttttcacagatatcacagcttggcttgacaaacaactcttataaactttaagcaataaagggttcggaaaactcactaatacgagcattgaaacctggttgcagaacccaatggaatgggttcgttgacatcactaacccacttatcctgatagtaacatattagctactgactctgtatattttctctacattaatagaattaaaagatatgaaattgcttcaatactgcaatgtttgaggatctgattaatttgtttcattgcaaatgctttggtgctgtttttattaagaagagacattgaagttaaaatcgatttatg

SEQ ID NO: 28696 - DNA, 381 bp, Gossypium hirsutum
  unsure (1)..(381): unsure at all n locations
  Clone ID: LIB3197-031-Q1-M1-A12
ctttgcaagaagccacgctttccttctcccttgtgttctctgattaattacaatggtcccagcagacatttaacatcacaattattccaaataatagataaatttccaattcattagttcacatcgttagaattcgagagaaacagaaaggattttagctttttgttatatatgattaatggctgcgagtgcgaatccgacggggaatcatcaggaaggttcgtcgaaccagaacgtaacgccttctcctcctccaactgccaatggtcttgccgtcaattcgaacaatagtgggggcaatacatcgaccgccgncgccgccgtctcggctgacacgcagtccgcgttgaagcacaaccctggcatctccctagactggac

SEQ ID NO: 28697 - DNA, 413 bp, Gossypium hirsutum
  Clone ID: LIB3197-031-Q1-M1-B10
gaaactcccgccacttccctcccacccaaatccgtaaaacgttccattttcaccaattctcccggaaattcacatctcattttctccatcccaaacaaaacctttaccgttgttattgttctacctagactaccgaaaccctaacatttcaaattcaaaggaagggaaccccaaaccatgccgtctttgacttctccaggaaaaatacttcgcctagagcttgagaacttcaagtcctataagggtcttcaaactatcggtcccttctccgacttcaccgccattattggaccgaatggggcgggcaagtccaatctcatggatgcaatcagcttcgttcttggagtccgaactggtcagctacgtgggggccaactcagagacctaatatatgctttcgacgaccgtgaaaa

SEQ ID NO: 28698 - DNA, 461 bp, Gossypium hirsutum
  Clone ID: LIB3197-031-Q1-M1-B4
atgcgctgatgcctcgtgtttctgatctattctctacagatgaatcaaatagaaaatccttctggacttcattgtaatcaaaaggcagcaatttcgcattcttctgaggatacccatttgtccaacattcgaaacaacatcttttttttttttgtgggggggggggtgaatggaaccccatgaccatgccttcttatacataacaggaggataacttgatcaaatgctcaatctctatgagagctataggactgtgaatactaataacagctattcttttcctatggactgttcattacagaagaggattggctctcatctctgataacaaagatctcatctttaatgtccatcctgttttaatggtcattggattagtgctcttaaatggtgaagccattctggcatacaagactgtttcttggacaaaaatcttcaaaaagttagttcatcttacagat

SEQ ID NO: 28699 - DNA, 410 bp, Gossypium hirsutum
  Clone ID: LIB3197-031-Q1-M1-B5
gtgatctctgctctatagtcggacattcttctgttaaattttgttcaggctaattaataagttttgggggtgttaaccaggtgtcaaaattaataacaacattcttcacaacttcttttaagtataatggcttaacccgggtcttcctctttctttgccagagaggttcaaatagcaccacaggttgccacagatataactttatttatagggccaacccaatcactgagcccttcagagtcacttaacactacaacaagtctctttatgggtcaaaccccgctcagggtttttgctgctgtttccacattggctgcaatctgtgttatggcaacaagttcccaaaccattgttctatttggattcaccattagagctcattatagctactcatctgctacgaggtttta

SEQ ID NO: 28700 - DNA, 462 bp, Gossypium hirsutum
  Clone ID: LIB3197-031-Q1-M1-C4
gtatcctcaaaatacctaagtgattctctctgcgccgaccgtttcatcatcatctgcccctctctccctctttttgcatacctttcagaagggctcacaccttcaaaacacagggagggacaatctcaaaagataatggaagatttgataacaaaatttcaaaatgaaatattcttttttccccttctttttcccaaaatcgattccccccacttttttttcccaaaccctttctcccctaccccgattccctttatttttccccccaatttccccaaatcggcagcccttcttttatttttcccaaaccatttctcccctaccccgattccctttgtcacctcctttctccgaccacccaaccttcgcctcatctctccgcttccaacgttactttctccttttctattccctcgcctcagtgtttggaggattatggtctgtgtacagagagtttgagct

SEQ ID NO: 28701 - DNA, 264 bp, Gossypium hirsutum
  Clone ID: LIB3197-031-Q1-M1-C8
gtgggaggaaatattgatcaagatattgcatggggatttcaaaactatacctagggtgatgggttgtatgaaaatgttgatctgaaaggggaaaaggctgacatggagcattcttgtgtggaacagatatgcgaagatgaagatgagatctgaaacattagcttaaagaagaaccttgttttgagttcacagaacatggcatgtcaagatgctgtgcataatgctgactggaaagatcaaaattgttgagagaagtgtgatcaa

SEQ ID NO: 28702 - DNA, 456 bp, Gossypium hirsutum
  Clone ID: LIB3197-031-Q1-M1-E10
gttgaaataaagagtcaccactcaccatgtccagtatagttggaatctatttgcatctgatctaattgttggtggatacacacacacatacatgtagcttttagctttgaaatgtctactggagttcaacatcaagagagagtaccaatgaacctaaagaaacaacttgctcttgctgtgaggaacattcaatggagttatgcaattttctggtccatttcaactagacaaccagcggtgttagaatggggagatggttattacaatggagatataaagacaaggaaaacagttcaagctgtagaactcaacactgaccaattgagtttacagagaagtgagcaactgagacagctttatgagtctctttcagctggtgaaagcagtcctcaagctaaaagaccttcagcagcattatctcctgaagatcttactgatactgaatggtattacttg

SEQ ID NO: 28703 - DNA, 467 bp, Gossypium hirsutum
  Clone ID: LIB3197-031-Q1-M1-F1
gaggatggaaaatttttaaatccagtgctgatgctatataaagtgtgaaggaggttatgaaagttgtcattgggttgaaaaggtttccatcctccttaccaatcaaggcactgtgcttgtagccgaagtaatttcttttcttctccttttgtgctgaactcctctgggtagagttatgtcagggtctgaattgtttcttaatgcagtaacttgatgcaaaagagcattactatagttccactctgagatacgcaaaagttgacttgtatccaggactttgtgcattctcccctagtttggagggttgcttcttggctcttcctgccaccacggccaaaagagctgtattagtgtacaatgtcatggagcttcagttgcattgtgagatgctcaccggtctcctttggctgcaattgccttatcttccaatgggaaatacattgcaacagcatctgaacaaggaacta

SEQ ID NO: 28704 - DNA, 417 bp, Gossypium hirsutum
  unsure (1)..(417): unsure at all n locations
  Clone ID: LIB3197-031-Q1-M1-G3
cttactcttgggcttttcttcagaaagaaatggcgggggattatccagttgtcatgggccattttacttttgggtgttggaattgcaactgtgactgatatgcagctcaatatcctgggttctatcctttctctgctgggcagtgtttacaactngcatagctcaaattatgactaatacaattcagaagaagttcaaagtatcttcaacccaacttctctaccagtcttgcccttaccaggcattaactctgttcatcattggcccattcctggatgggcttttgactaacaagaatgtttttgctttcaagtatacccctcaagtgctgttcttcattgttctttcctgcctgatttcggtctctgtcaactttagtacatttctggtaattggaaagacatcccctgtgacata

SEQ ID NO: 28705 - DNA, 383 bp, Gossypium hirsutum
  unsure (1)..(383): unsure at all n locations
  Clone ID: LIB3197-031-Q1-M1-G4
cttactcgttcgcatgggataccagtcctggggtgggcacatcaaggggactaagtgagcaatgctnangtgatagangcaggtggatgggggctttgtatgaagagctgggggtggggatcgaaccatttggtgaagggtgttgatattgtggacaaaatcaaggagctgatggggaaccaaaggatgaaaatggaatgtgcaaggatcagtgaagtggcaaaacaaaggtcaaaggctggtgagggttgtgagaatatgctgaagacacttttccagagcttgacgaagagctgaagaagggaattttgtacgaggactggttaattaattgattatctgttgaatttttctgttttaagatgaataagtaaaatgcttct

SEQ ID NO: 28706 - DNA, 460 bp, Gossypium hirsutum
  Clone ID: LIB3197-031-Q1-M1-G5
ctttcattagcggcaaccatataacttactcggccgggtgtgatgcacttagacaggtgaatttgactggtctttctcatggattaagtttccaagagacgaaagatctgtgggtccaagccgatgctgatggaaatggtgttgtagactatgaagaatttaagagaatttgggatgctacatggttacaacatatggatgaagactgcagcttagaggacttgaatgaaggcattgcagaagacgaagctatcggttttgcggtaaagaaagcagttctcttcccccatgaagtggagaagggaatatggcctgaaaactactccctttctgatcatgcccgactcactgctgtattctcacctgttagattacggtgttcgaagcaaagcttgtagaataaaatggtgatagcttcacagaaaacaagttctgttacacatttaaaaggaaaaataca

SEQ ID NO: 28707 - DNA, 152 bp, Gossypium hirsutum
  Clone ID: LIB3197-031-Q1-M1-H5
cttgtcttggctccctccttttggagcgtttgtgtgtggattattgcaagaaatccaaggtgggtttcactgtctttccattaccccaagtcttcacatttgttggtgagccctacaacagtgttctcttaacttacttcctttttgagcac

SEQ ID NO: 28708 - DNA, 474 bp, Gossypium hirsutum
  Clone ID: LIB3197-031-Q1-M1-H8
atgaggcagtgcggatccggcgttgtccagtgagtttttcaaaggctgcggagagatggcggcggcttttcgaaaggcggctaagtcccggcagcgggaacaccgagagcgaagccagcctggctttcgaaaacatctgggcttgctggagaaaaagaaagattataaacttcgtgcagatgactaccgtaaaaaacaggaatacctcagagctctccgtaagaaggctcttgaaaaaaatccagatgaattctactacaaaatgactcgggttaaactccaggatggagtacatattattaaggagactaaggaagaagtaaccccagaacaactaaagctgatgagaactcaggacatcaaatatatagaaatgaagagggttgcagaagcttagaaaatttgaagactaaaatcagagctccatctgctggatttccaggggaagcaacagaacaagcatgtgttcttttt

SEQ ID NO: 28709 - DNA, 463 bp, Gossypium hirsutum
  Clone ID: LIB3197-031-Q1-M1-H9
tctatacccattaagtttcaattttgtaacggtaggaatcattatttctctgaattactatatctccttcccctgttttcaacccaatggagaaaaccccttttctaatttagtggatatacaaataatgtatcaatttgaagtgatctaaagaaatcctatgtttgtataagaaaatgtaataaaataaatcaagacatatttttagaattcgaaatacttttttgaagtatggtacaattatgacaggaatcgaaacgcttttcatataacgtaacgggtacaacccaatatctaagtggtttgataaatccttaaaacaaacgcaaaatgctaacgattaatacaaaaattacataaatcttttgaaatcgttgggtgttgtgctgaaattgtgatctctaaaaatcataatttttcattcatttattcaatccattaataaacatttttttataacttt

SEQ ID NO: 28710 - DNA, 185 bp, Gossypium hirsutum
  Clone ID: LIB3197-033-Q1-M1-A2
gctgctgcgcgctgcaggtaccgaattcccagtttccggctccacccacgcgatcgtcaagttctttctactcttcctccatggcaccctgctacttttacactctgcaggctcaacacatatctccttgaaatgtccttttcactttcttaacgtttcacagtcttgaagatttgactacactt

SEQ ID NO: 28711 - DNA, 245 bp, Gossypium hirsutum
  Clone ID: LIB3197-033-Q1-M1-A3
acctacgctttttctttggcagtcgatgagtaagggaccgggactgttcataaatatcggattgagagccaaacatcttttgaccaaagattatacgtcggatcaaaagttaacggtttacacttatactgtcgctggagtggacataacatcaactattgtaataaaaagaggactatgtactgatgatggctcttttctatacctataccataacactcaatatgatgtcatagacaataccg

SEQ ID NO: 28712 - DNA, 225 bp, Gossypium hirsutum
  Clone ID: LIB3197-033-Q1-M1-B1
tagctgaagcccctgcgcgtgccggtaccgaatcgcagtttccgcctacacccacgcgtacgcgtttttttttatctaaatgctctctgacacagacaccaattgcgaagctgtggatagcacctcttcccgtgcttgccagacggagcttatgaccggttggtgatcaaaatgcaccggactagtgttgaagggagagtagctctcctttcaagacatcgagaa

SEQ ID NO: 28713 - DNA, 350 bp, Gossypium hirsutum
  Clone ID: LIB3197-033-Q1-M1-B12
atggctagtcaatagcttatagaatataataatcattattttattataataaaatagagattagagtttatgaaaaccacactttgtcaaatacacagcctgttaatttgttctgcatctttgagatctagagttttatttggaatagtatttaatgtatgccacttacatttttttccccagaaaataagcagatgtactttccatatttttacagccaagttgcatcttaatggagggcttagagtataaaaaccagtgaagagattatcttatctactcaaaattactttgaaaaaccccttcaataggcagaatctaggttttctgctgtgctttaactttgagac

SEQ ID NO: 28714 - DNA, 289 bp, Gossypium hirsutum
  Clone ID: LIB3197-033-Q1-M1-B3
aaaccataaacccgaataacatgattaatgaatggttaataataaccagaaattacgctttcacaatacaaagttttgaccaaacttgctgttaacatttccaaaatggaactttgtttttttcaaagattgaacatttaatccatggaaattaggtgacaaaacaaaccaacggacaaaaaaaaagaaactcgaactcgaaacttaagaacctcaagagaaggttttctgaatgaatacacttggattaaggattactacagcggttgacacaaacaattattacgga

SEQ ID NO: 28715 - DNA, 378 bp, Gossypium hirsutum
  Clone ID: LIB3197-033-Q1-M1-C11
aattcactctaatttcaggtacatctcataatttcattcgatcagagcttgttgattcgcattttcgcttcacgttgcgtttgctttcctgtaattttccatttttcttctatcaatcaacctattttacgttttaattttgtttctttctttcatgttacctgttccgatataatctttaacttggctattcatttccattgcatgatgatctttttgttgactttctgtctttattattcttttggttttacgggaagctcttgtgtaaccgaatatgccggtagggttttcaaatttacgttgtttatgtcatttacaacacgtgaaacgtctttcagttccgatttatctattagaaccgcttgaatttatgct

SEQ ID NO: 28716 - DNA, 404 bp, Gossypium hirsutum
  Clone ID: LIB3197-033-Q1-M1-C3
cggacgcgtgggtttcttgctgtgccgcgtcaagcctcaaaattctgcaacaccggcctccctctctccctccctccctccctctctctctctctctgcaaccatgactgccacgatgggtccaccgcctcccagtaaccctaacccctcgaccgaacccgagtcgatagcccaagaagaatccgaacccagaacagccaaaaccacgatgggtcctccgccacctcttcccataaaccctaaccccgcgaccgaacccgagtcgatagccctagaagaatccgaactcataaaagccaaaaccacgatgggtcctccgccacctcttcccataaaccctaaccttgcaaatcccctagacgaagaagaaccatcgaactcaaagtcagaacccaaatcaactg

SEQ ID NO: 28717 - DNA, 456 bp, Gossypium hirsutum
  unsure (1)..(456): unsure at all n locations
  Clone ID: LIB3197-033-Q1-M1-C5
cggacgcgtggggttaaagaagctgtttctaagtttggaggaattgttgattggaaagctcatagaatgcaaactttggagagacgcaagcttgtggaacaagagtttgtaaaagtacaggaagagatgcctgaatataaaaaacggtcagaggatgctgaagaggcaaaaatgaaagtattaaaggagctcgatagcacaaagagactaatagaagagctcaagctaaacctggagagagcacanactgaagaaaatcangcaaaacaagactctgaactagccaagcttanggtggaggagatggaacaagggattgctgatgaggctagtgttgcagcaaagacacagcttgaggttgctaaagccaggcatgcagctgcagtttcggaactgaaaaatcgtaaagaagagttggaaacattaaaaaaagaatatgcttctttgatgaatgac

SEQ ID NO: 28718 - DNA, 304 bp, Gossypium hirsutum
  Clone ID: LIB3197-033-Q1-M1-C7
ggaggatggttaccaggaagctataggtgctgctgatgtaatgaggttagatccattggagcgtgctgaaattgctgctgacttgttggaggtgaagtggtctactaatattatatctaatagatcaaatactaatggttctggattaccttccacgaatgatgcattggataataaaagctactaagagcatacactgattactcgtgaagaaaaccacgttcaatcttcagtacatgatgaggaaggaaataataaatgtgaagaaaaccaattttactctgcaatgtttcatgaggaaaat

SEQ ID NO: 28719 - DNA, 367 bp, Gossypium hirsutum
  Clone ID: LIB3197-033-Q1-M1-D10
atggattacaggcgtaagccaccgcactcagccagacagatactatttttaaatgatctttctaacagtattccgttaaatgactaaattaatgtttctgaaatcttgaaatttttaaattaaaattttacaggattggggtttatattcttgtatatttaaaagcaaaatttccttttgtcatctgtgttgcagctctaaaccaccttatgctaaatttatcacttgtttagctgatctcttttttgttttaatgctctaatatacatgaaagattgtggaaaaaaaaaattttttttaagttggggaactataccgagggtatatatgcaatttaatccagaccaaaaaagtatgacagtgagga

SEQ ID NO: 28720 - DNA, 253 bp, Gossypium hirsutum
  Clone ID: LIB3197-033-Q1-M1-D12
gaggtgcgcgacgaggtggcggcgatgaagccgccggccttcaaccgcttccagcacaccttctcgcacatcttcgccggcggctatgcggcgggctactacagctacaagtgggccgagctgctcagcgccgacgcctggagcgccttcgaggaggaaggcgtgctcaaccccgagaccggccggcgctaccgccgcgagatcctggaggcgggcggcgcgcgcgacgcgatcgacaacttcaaggccttcc

SEQ ID NO: 28721 - DNA, 440 bp, Gossypium hirsutum
  unsure (1)..(440): unsure at all n locations
  Clone ID: LIB3197-033-Q1-M1-D7
cacgccgnntccggcttttttcttctcantttgnngtttctgcgagattggagggcgattcaaaaatcangggaagtttaaccagtgtcccatcctctggctttcctaatgaagtttagtcgttcggatcgcggatannaatgaagctcgaagtcggaagttgttcttgtttgtatcaaattagtttgatttggattcagcaaagccctttgtgatgaattttctaatacatcgggtgtaagcaactggacatgcacatgctcttccggaaaccagagctatatccttaaatctaactgttctaggtcctgtgattgcaatccagttgaatcaagtggagataggtggacatgtgtatgtgccactaatgggtttcccgaagtagcagtcgacaatcatgatactacctgttntacagcctgcaactgcactgctgggtc

SEQ ID NO: 28722 - DNA, 274 bp, Gossypium hirsutum
  Clone ID: LIB3197-033-Q1-M1-D9
ccgagaagtaaacagaaaaaggaagaattttggtgaccggtgattcgtgagtattgtaaacagcaacagcagcaatggagctgttctacttcgtggtgttcggggcattgggagcgggggtggcagcattagagctcagccagaacagccaagatcgaatcaacacattctctgctttcaatttctttaagaacaaatatcttgtcgcttattctctcatgatagctggagactcgctgcaggggccgcatgtttactatctttacagaacata

SEQ ID NO: 28723 - DNA, 107 bp, Gossypium hirsutum
  Clone ID: LIB3197-033-Q1-M1-E11
tatagggaaagctggaacgcctgcgcgtacccgtaccggaattcaatttccgacccaacccacccgtttcaacaacatcattgttactaacacactggcggtgattc

SEQ ID NO: 28724 - DNA, 449 bp, Gossypium hirsutum
  Clone ID: LIB3197-033-Q1-M1-F1
cccacgcgtccgatttatcagcaacaaagcatcagtgtcaaagaaaggcaggttaccgttacaagacaaaagctggtgtggtgttacaggcaagtttctcagtcctccgacatgtatgaatccttgtaatttcagtttgttatgctagaagaaagcccgaatctaaaccagtaaaaccccacgagaagaaaaaaggaaaaaacaatggcaccacctataatcagatctctaatcgcattctctctgaataaatcatgccgttctcagaaacccatttctggttactccatctcttctattttcttctcatcttcacccacccaggaatcaagagcttcccttcctttagcggatcacttggttgagaaacacagcttttcccctgaacttgccgtcaagactgcatcttccctaacctatgtgaaggatcctcgtagtgtgatactata

SEQ ID NO: 28725 - DNA, 440 bp, Gossypium hirsutum
  Clone ID: LIB3197-033-Q1-M1-F11
ttctttaataaataaattatcttcttagcagatccaaatgtaaaagagactcccatcaaagcaacccttctttgtttgtcaattcccagtccaaatctttcaacatctcacgacctcttcgcattgcttcattattagtagatccctatctcttgtttctctcctcttaaactctatttttttttccgtccagattgttctagaattttagatctttgtttctttttttttttcagaacaattttccatcaaattttgggtactttccagatatgggaaaagtttcagccattatatacattgctgtggctcttctaatcctcttcctcatctcgcattcccctaagaaacaccccaaccacagccgccatcgccgcctaaagctccgctcttctttcagcttcagcaaccccacccaccacgagcccgtggcttttgat

SEQ ID NO: 28726 - DNA, 485 bp, Gossypium hirsutum
  unsure (1)..(485): unsure at all n locations
  Clone ID: LIB3197-033-Q1-M1-F12
cggaccgccgtgggcggacgccgtgggatcatgctcatgaatcttcccgcctctcaccaaactgnntgttcagctttccttcgaatcccttattgggaaaagaagaacatnnctgctgctgaatgaaccgtagagggcattttgtttaatattcatatacccacccttttggaatgctatgataaaatgcaagcagtgtgccatttttggattctatagaacagcttaagcatcaccaatggaggaagctgtactgtctggtcgatgaaagtatgatacggaaaatagctaaaaccagggggaggggggtggngggttgaggtcagtaccagcagcatgctgtaatgacagttgctaacctctttttgagcctcgaaattnttgtatgtcgtacaaggattcaagtgttgttcattcattataaacatatttgtanggaggagagctaaccttaaatcaagtgaatagatatattttgggaaaaa

SEQ ID NO: 28727 - DNA, 308 bp, Gossypium hirsutum
  Clone ID: LIB3197-033-Q1-M1-F2
cctcgtgtttttgtgcttcttatggtcatttgatacctagtgtttatgtcattgatctgctttttggtggtgtagtaactagtttattagctgatttatatggatatgctactatggagatgctagatttaatgttgtagagctatgtcgtgaatgtttaagcccaaagcagttattttatgcctattaagctcgaaaaaaatcaaccagggatgtttgttcttctttcaagtagttcacctaagtcagagtgggagatatctgcaaattaaactcaaagattggctctgggagatagtaacatggac

SEQ ID NO: 28728 - DNA, 433 bp, Gossypium hirsutum
  Clone ID: LIB3197-033-Q1-M1-F8
gcttgcttaaaacctgtggttcaatgttggaagcatggcaaggttatatagcaatggaaattgctttaggccatataaatgaagccagggccatatacaagagatgctacagcaaaagatttagtggaacaggttcggaggatatctgccatgcttggttgcgctttgagagggagtttggaacattggatgatcttgaccatgctgtgcaaaaggttatgcctcgtcttgaggagctgcaattgtttaggttagagcaagaatctaaatctttaactgaagtgacagataaaagggagcggccccttaagaaaactgctagtgaaaagaggaaatcgggttcaatcacaattgatgaacagtctccagctaagcggcagaaaagtactcaaaatcagaagaaattgcatgagaaagagaacacacgagggct

SEQ ID NO: 28729 - DNA, 456 bp, Gossypium hirsutum
  Clone ID: LIB3197-033-Q1-M1-F9
aaaaccattaaaaaacccaagtcaaaaagttgcttactaacagtttccccacatcaaattcaacataaaattataattatatccaaaaaaaaacaataaacccagatccaaaaacacacacttaagatctgggtttatctagaatcattgaatcaacactaccttcaatcagtattttgttcctttccaatggcaaatccccacaaatccaggttctttcttttcttcttcttcatttgtcatttcattttcgtttctacaccttttcccactgttttagcaaactctaagcacgaatttaatgatccccatgaagttttattgcacaaacttgaagaattagtgaagaatcttagtgaagtagtttctagattagaaacgaaggttttaaaggaatctacaaaaattgatgatggggttggaagtaaagatgaaactagtttaataaaatatgat

SEQ ID NO: 28730 - DNA, 112 bp, Gossypium hirsutum
  Clone ID: LIB3197-033-Q1-M1-G2
gtggtttgttttcaccaacgccagacaagccattccttgtttcccaaccgccgcaggaggaatccccaattcctgcccatttccattacaaccttggttacaaccccaccat

SEQ ID NO: 28731 - DNA, 339 bp, Gossypium hirsutum
  Clone ID: LIB3197-033-Q1-M1-H11
cgccagaccaaatctccgccatatcgaaaaacagagatatgcagaagagagagcagggcaaatcaggtggctcggggggtggcaacgccgcacctccgccgaagagaggccgaccatttggaagcacagctgctagcgtagcctccgcctccgctgctgattcagtggctccgtccactctcctcggcccttctcttcaaatccacaactccttctctgagcagaacaataaaaggatagttctagcacttcaaagtgggttgaagagtgagttaacttgggctctgaatactctcacattgctctcttttaaagagaaagatgatatgcgtaaagatg

SEQ ID NO: 28732 - DNA, 449 bp, Gossypium hirsutum
  unsure (1)..(449): unsure at all n locations
  Clone ID: LIB3197-033-Q1-M1-H4
gcagattgcaaattttggttcttagggaagataaatctggatgaaacagtaagaagtattatgtcatgctctttacttctagatagaataggctgtttttagtttaacttttatgggatgatgttcttgaaatgtgatttactttattttgaaaagtgattattttactttaaactcttgaatcagtgtcttgctttatttgtttgctgattagaatttgttttctcagatccgttctgattctgatctttatatttaaagtcctagctgtttggttcctactcctttaccaaaaagagttcttagcctagttccaatataatgataatggcttgtgacagttgttggttaaattgttgataattactaagcaaacaaagcttgcagttaaatacataagactgatgactaaattgagaaaagggaatnnnttcgcttttgccatattt

SEQ ID NO: 28733 - DNA, 429 bp, Gossypium hirsutum
  unsure (1)..(429): unsure at all n locations
  Clone ID: LIB3197-033-Q1-M1-H9
gactgtcgcacctttagcaagtacagaaatcagttctgttggtgttaatttgaaacaggcatctcatgaggcccttcaggtggatgccatagaaagtgagaaaattacacagagtaaagctgaactcgatgattgggaagatgctgctgacatatctgcaccaaacatggaaacttcagacactgacgaacaggctcatgggggattagcaagtcatgaggaagatggaagtgggaatataaagaagaagtattccagagattttcttcttaagtttgcaggacaatatactgatcttccacagggatttgagattgcttctgatattgcagcggccttgatggcatcaaatgtcaatgcatctcatgctngtgatcatgattcataccctagtcctggaagaaaattggataggcaatctaatggatc

SEQ ID NO: 28734 - DNA, 143 bp, Gossypium hirsutum
  Clone ID: LIB3197-034-Q1-M1-A1
tcgctctttttcgattgtgcttcggtgaatttgaaggctcttaatcgaaaaatatggcgtctgtttctttcgcgacaagagttcttttcgcttcagtatttgtcctctctgcttggcaagagttcaatgaatttgatgttgat

SEQ ID NO: 28735 - DNA, 250 bp, Gossypium hirsutum
  Clone ID: LIB3197-034-Q1-M1-A4
tttgtacaaaaaagcaggctggtcccgtcccggatttcccgggttcttaagccggggcgacagattaagactgtctcaaatccaaaacgaaaaaaactaaccattttactttataggcgggcccctcaaactatagttttttaactaaaaaaaaaaaccccttttttttagttaaaaaaagtttatttagcctgatcagtttaccagatgtcttttcagtgacttttgctcttcataaatccatctcaaa

SEQ ID NO: 28736 - DNA, 452 bp, Gossypium hirsutum
  Clone ID: LIB3197-034-Q1-M1-B10
cctaagtcacttttcattttttttttctgaaaacacaacagcagactcagcccctgctctaccctgtccgccgcctcaaaggatttgaagccccttcaactccgatctgatcggggcaaataaggctccgtcttcctcctcgcaggtgcgacgtgcgcgaacgtgcggggagagtgacaaccactggcacacacgcacggtgagggcccgatggttgcggcgccgctgaaactgctactaggaaaacgaaggtttctcttttgtggacgtcggccattcatatcaacccaaggcccgaaagaattcaaagacactatattgtgattctctctaccgtttctgtttttgggatttttggactcccttgcttaatcagtattgtgtccaattcaaaaggatgaagatagcagtggaagggtgcatgcatggagatctcgacaaggtctacgaca

SEQ ID NO: 28737 - DNA, 426 bp, Gossypium hirsutum
  Clone ID: LIB3197-034-Q1-M1-B9
attttattatatattctaaatattttatatatttttatatttatatatgagtattatttttatatttatatattattattatatatatatttatttctattttttgtatacattatatacaatacaaaaaaacaaaaaagtaaagtatggatattgatccaattcatctcattaatatttgtagtacaatccttcagtcgatttcgcttcatttagttcagttttaatttcggtttatgaaatttcaataaaattcaaattaataaggagtccttatgtcacgttaccgagggcctcgtttcaaaaaaatacgccgtctgggggctttaccgggactaactagtaaaaggcctagagccggaagcgatcttagaaaccaatcgcgccccggtaaaaaatctcaataccgtattcgtttagaagaaa

SEQ ID NO: 28738 - DNA, 451 bp, Gossypium hirsutum
  Clone ID: LIB3197-034-Q1-M1-C10
ctctggttcggagtttggaagcgcaaggcgtgccatcaaaacaagcggaggcaataacatcagcaatcacggaagtattgaacgacagcttggagaatgtgtcccagtcctttgtttcaaaggcagaaatgcagaaatctgagatgcttcaagaagccaatttgtccaaagtttaaatcggaagtaaaaagttcccaggagcatcatttttctatgttgcaacgtgaaactgagaaacttcgaggtgacattgagaagatgcgaagtgaactaaggtatgaaattgataaggtcactgcagggcagcgtctggatttaaatcttgaaagagggcgcatacgtgatgaactggccaatcagaatgcagaaactaccaacctgacaaacaagctagatagggaaattcatgcattaagagcccaattagaagctgcgaaatatgatgtaatta

SEQ ID NO: 28739 - DNA, 189 bp, Gossypium hirsutum
  Clone ID: LIB3197-034-Q1-M1-D3
gaaattccaaggaatcaactttctttccgttttaaaccggcccaaaaattacggtttcatttggccaggtggcaggaatttttaaccaggttttaagggaacccggatcaactgaagcgggagttattgaaaaccccatttaagggtgccaaccggccacggttggagggaaaggaaaattttggggca

SEQ ID NO: 28740 - DNA, 442 bp, Gossypium hirsutum
  Clone ID: LIB3197-034-Q1-M1-D5
atttcctgaagccttcgagcctgtgagagtcccatttcagaagggacttggccagagattccagcagcctcctgggacaggaattgacttaggtttctttgaattggatgatctctcgaaaccatcaccaggggaggatgttttccctcttgtaatttctgctgaaacatgtatgctgccgcattcatctgatgaacatgttggtgatcccacacaaagtacatcagcccacatgcaaattactcaagccattttagagaagaacggtaactctttccaagcaaaagtgatacggcagatattatgggttgatggagtccgctatgaactacgcgagatttatggaataggaagctcagcagcagcggaaggctttgatgatagtgacccggggaaagagtgtgttatctgcatgaccgaacccaaggatactgcggtccta

SEQ ID NO: 28741 - DNA, 144 bp, Gossypium hirsutum
  Clone ID: LIB3197-034-Q1-M1-E1
aaaccctaaccaattcttcattatttctttctaattcgtcgctttccgatgatttatttcgaggtttattttcagatctgatccacctcaaattggattcattttgaggaatggatgatgatagtgcagatggataaaatgtct

SEQ ID NO: 28742 - DNA, 439 bp, Gossypium hirsutum
  Clone ID: LIB3197-034-Q1-M1-E11
tgtttttgctctttacggactcatcttcggtatgatcctttcttctcgggccgggcaatccctatcttaatacattacattattccaagactcgttatattacaagttctcattacttttattcttctttttatatctttctttccttcttgcttatatatatagagcttaagcctgttctggtttgctttaaaccactataaaaatggcttattaactctcttttttataccccataatctcttcttttttgaaaacaaaccatcaatacctaaactcacaagggttctttgtttctttctacaactttaaatttcaactacaaaacttgcttttcatttttatctttaatccgcgtaccttcattttaatctccttagtgtccttaatattgttaacaaacttcttttttctctttccattaacattttatactatt

SEQ ID NO: 28743 - DNA, 145 bp, Gossypium hirsutum
  Clone ID: LIB3197-034-Q1-M1-E12
aggatgttgaaattaatagtttaatctttctttcttatcctccataagcaaaaagaaatctacttctttgtttacgtatatttgtttgaattggaccgacccaattttcattaagaattgaataataagtttttgacttgaatcg

SEQ ID NO: 28744 - DNA, 250 bp, Gossypium hirsutum
  Clone ID: LIB3197-034-Q1-M1-E3
acccttccgccaaacccaaaccctaactggttttcctttggttttttggctgccactgactaatggagtccaaaattccaccagctccttccttattaagccatgagccgtttaagggtaactgacattttggacccttactttccctttttttgggttaaagaaacctcaattttggctaacaaggcccttaccttttccctaatttttgaaagcagaacatgaactaagttccgccctcgacctactg

SEQ ID NO: 28745 - DNA, 449 bp, Gossypium hirsutum
  Clone ID: LIB3197-034-Q1-M1-E5
attttctcttctttttcttttttccctttttgtgatcttttctttttcttctttattttttcctataagatctttgatctttacctttttctttcaaaataaagatatgggtatcttgtattttgtgatttaatgtttgattttcactttcttttgtttctgggtattggctttttagccatttttattgcatttgaatttgttttgaggaaaaacatgtaatttttgagtgactatttaagcttgaaaatatctacttgtttatgtagatcttttcttcttttctttttttggtacttcagttttagtaaaacaaaaataggaatttactgttttctatttggttatttggtgacaaattagccatttttaatatccaatttcattgttttaagcttgaaagtatctaattgtttgcataggttttttttccttttaatctattttag

SEQ ID NO: 28746 - DNA, 358 bp, Gossypium hirsutum
  Clone ID: LIB3197-034-Q1-M1-F5
tgttcttttcaccaaaactggatgccgaaaatcaagagggcttcattaaaaacattgggggggcaaccaattttttcctttcaaaatttaatgaccttacatttttcgtaggagagagcatgcatgatgatggatgcttggtgtttgcttactacaaggattgtgctgttgacccaacatttttgtactttgcatatacattgaacgatgtcaagttctaatgtttgcatcaaaaaacctaactttttcaactgttaaaacaactaattcatctaatacagctcttatcttggtcttaaccatgggaggaagtaccgcataatttgtggcttagtacaggcctggcatacccatttta

SEQ ID NO: 28747 - DNA, 430 bp, Gossypium hirsutum
  Clone ID: LIB3197-034-Q1-M1-F7
ctcctcgaaccaaaaaaacagagctctcaaaatctcaccaaactagtatttgcaaaaactcgctaaaatcttttttgtatagtagtattttcaacatttaatttttttgctttactaaaaaattagttgacatgacttcctttgttcgccgtttaacggtcggttcaacgataccctacgttccggttcatcatcagaaggtttaaaccaacgattgagattcctgccttccctctgttgcctcacaataaccaacggccgttaggaatcgctctgagatcgagaaagtattggagagtggaggcagtggggccggttggaagatcggagggcggagatggcacgaagaaggcatgagggggaccaggaccaggcccatgctcgtattcattgggggaccggacgaccgaggtagagaggagagagagaa

SEQ ID NO: 28748 - DNA, 297 bp, Gossypium hirsutum
  Clone ID: LIB3197-034-Q1-M1-G4
acaatagttctccatgcattctatagactgattgattttattggcctacaatacgactaacaagttccggaaacccgagtaaaccgccacgacaaccaaatgtttgactctgctgcattaatttgaaacataattcatcttcataggtgtaataggggtgtgtcagtgtcaccccccaattgcttatttcaagtataaaataaagtaagtctgggtttcctctcgtttctggaacttgttagtcgtattgtaggccaattaaatcaatcagtctatagaatgcatggagaactattt

SEQ ID NO: 28749 - DNA, 405 bp, Gossypium hirsutum
  Clone ID: LIB3197-034-Q1-M1-G8
cactccttgtgcaccgggttcctatgaagttagtccagagaatgcaccttgcaagtctcctaacttacatatttgtatgccctgcagcattggttgccctgctgaaatgtaccaaaaatcgggatgtactttgaagtcagatcgagtttgtgattacaattgttctagttgtaactcagtggaatgcgtctcaaattgttcttcgaattctgaagctactaatggaagtaagaatgaaaggttttggtcactgcaattgccgatcattgtcgcggagattgcttttgctgtgttactgctgatcatcgtgtccttaactgcagttttatatgtccgatacaggttgcagaactgtcgctgcaaagcaaaagagtcgaagtccaagaaagctaatgagattgcttc

SEQ ID NO: 28750 - DNA, 162 bp, Gossypium hirsutum
  Clone ID: LIB3197-034-Q1-M1-H3
gctggaagaaaaaatatgttttccaaacaaagatggagaggcaaccatccatgcaggttggtttgatgaacaggcttttgtttgctcctttttattccaacatcagggtcgtatcatgaacttgccccgtccttgtggagaaaaaaacctactatcaacttc

SEQ ID NO: 28751 - DNA, 237 bp, Gossypium hirsutum
  Clone ID: LIB3197-034-Q1-M1-H8
gtactttgtcactctacgagacagggattggtattggagagcttttcttggtgagggttaacacagagaccatcctgcacgtaatccatttgttcccatcggtataagttttgaaggaatcaaatttccaaagagtacaggtgtggtttcaggctttgccaacaaacgttgttgtctatcggttttcatcttgtgtatttacgtggtttccctgattacaacattcaaaatgaattc

SEQ ID NO: 28752 - DNA, 341 bp, Gossypium hirsutum
  Clone ID: LIB3197-035-Q1-M1-A12
tgaggttcctcctgctgcaaacccttactgctgattttctgtatcatttggctgccaagatggacttgaaaatggaaattttttcccttggtgatctgtcaaaaacaattgggaagattttgacagacatgtcaagtctctatgatgtagggcgtcgaaaacggacggtggggttattacttgttgaccgtacccttgaccttcttactccatgctgtcatggtgattcacttgtagatcgtatcttttcaactctgcctcgtaaggaaagaacatctgcctgtgcatgtatcaaatgctcacaggcccaacttaaacctggtccttctagcctagcacgt

SEQ ID NO: 28753 - DNA, 173 bp, Gossypium hirsutum
  Clone ID: LIB3197-035-Q1-M1-A8
gcttaaccttagacttacgctgctcttatgttcgagaacatagaaattgactgatgctacatttttgacagagtaaccatggatatatatgcggatatggaagagtattgatgagagtactctgattaagagcctcgtgagcaaggacgttatattgataactaatattacaa

SEQ ID NO: 28754 - DNA, 417 bp, Gossypium hirsutum
  unsure (1)..(417): unsure at all n locations
  Clone ID: LIB3197-035-Q1-M1-B4
aactacttcttcagttcagaggagcggctgtcttggcaccatggttctcaagactgaaccatgccgcttcagcggtggcaagatataccctggtaagggtatcagatttattcgctcagattctcaggtgttcctctttgcaaactccaaatgcaagaggtacttccacaaccgtctcaagccatccaagcttacttggactgcaatgtacagaaagcagcataagaaggatattgcagcagaagcagttaagaagaggcgccgcaccacgaaaaagccctactcaaggtccattgttggtgctacactagaggtgattcagaagagaagaagtgagaaacctgaagtccgagatgcttgcgcggaagctgctctgcgtgaaantaaagagaggattaagaaaactaaggatgaaaa

SEQ ID NO: 28755 - DNA, 266 bp, Gossypium hirsutum
  Clone ID: LIB3197-035-Q1-M1-B5
atttagagtaacgccaaacgtgctagtatcagatgcaagagcagatagcgttcgaactatggagcagatgaaattacaacctgacattgtactaatttaacctaaacaagcaacgctgtcgattcaatcgtgacttacacgattgtgggccaggaagactagtgcaaacagactaactaacctagagatcgctaatttgttgacgcctaagcttgtgcacgaagaggatcatcttctagctgccctcactgatgtaatgcgcacaa

SEQ ID NO: 28756 - DNA, 289 bp, Gossypium hirsutum
  Clone ID: LIB3197-035-Q1-M1-B7
aacaacgttgccctcaagatgactgtgatattcccaagccccttatgaagaagtcagctgaatcagcaaatggtgaggataataatgttcatgtatccaccagtcggtgagaacatcgaggaccagaaattcatgtggcttcaatcaatgggtactgttatcatcagtatggtttctggatgtgtactgaaattaagatgtatctgcaaacattctgtacatatcaaacaaaccttttcttttgtgtttgtcaaactgtttcttttatatgagatgcaatcttttcatc

SEQ ID NO: 28757 - DNA, 329 bp, Gossypium hirsutum
  Clone ID: LIB3197-035-Q1-M1-C10
tgactggtctccacacagtggctgatgtctactgctgtgattgccgtgaagtgttgggttggaaatacgagcgggcttatgaggaaactcagaagtacaaggaagggaaattcattcttgagaagtcgaaaattgtcaaagagaactggtagggttatccatgaatgttttctggatgattctcctcattaaccaagtgtatggatgatatctttctgtgtttttcttcccaatcgaaaatattttatgcattgttcttccctgtgcattcttgctatgttccttgattggatgttattcgttttgttaataaaatagtgaatgatttg

SEQ ID NO: 28758 - DNA, 419 bp, Gossypium hirsutum
  Clone ID: LIB3197-035-Q1-M1-D12
aaaacctacaacttcagcaaaaacagaagtagaacgactcccattaacaagatagcccattccttggacgatctctttccaccagctccacggcgtaatcagaaacttgcatatctagaaatcccgacttaactgtaaacagtctttaatgatagcaccgatctccaatttatcttcccctttcatttgtagttttttttattttttttattactgatagagcatccccctctacctctatagccattacccccaaatccatccccatttgaagcctttgaacacatgcaatagcctctgcaacaaaaatcgaaggagcacacacattttaataaccctagaccccaaaatcttcccctttgaatcccgtacaacgatcccagagcaagacctatgttcctccttattgtatgcgacat

SEQ ID NO: 28759 - DNA, 426 bp, Gossypium hirsutum
  Clone ID: LIB3197-035-Q1-M1-D5
agagactgcaagtgctgtatacagaaatagaatcagtccagatccaatatttttaacctctgaagctacatcagcgggagggttttatgccatcaacaggcgagggcaggtgttgctggctactgtaaatgaagcaacaatagtgccatttgttagcggtcaattgaacaatttggagcttgctgtcaatctagctaaaagaggaaaccttcctggtgcagagaacctggttgttcaacgttttcaagaattgtttgctcaaacgaagtataaagaagctgctgagcttgctgcagagtctccacaaaggatccttcgtacacctgatacagttgccaagtttcagagtgttcccgtgcaagctgggcaaactccaccgctgttgcagtactttggtacgcttttaactagagggaagctcaatgc

SEQ ID NO: 28760 - DNA, 228 bp, Gossypium hirsutum
  Clone ID: LIB3197-035-Q1-M1-D7
cggacgcgtgggtgaagctagagtggtcttaagttgatctggaatagcggatctgtattctagaatcttctccgccattttcttcacatctgattccaactcctccaagtcctcttcggagtcaggctccgactcagctcgtcgactgtcgacgccggtctcaagggacatggaatcaaaggcgaccggaaagaacaccttgatggagcttcttctggaaagacgtta

SEQ ID NO: 28761 - DNA, 416 bp, Gossypium hirsutum
  unsure (1)..(416): unsure at all n locations
  Clone ID: LIB3197-035-Q1-M1-E10
tcgcccacgcgtccgattctcaacatttcttctctctccttttctctccgttcccctaaaagacgcaaacgaagaaaattttcacatttaagttcccttttctttttttttttaaatttaattttacctttaaagtttcgatctttgttaatcatcataataatagagaatccaatcttcctatttagccttccattgtaatttagtagatatagccgtatatatttatgggcagatcattcaaatgatttgtttagcagcgtatttcatcccaactttcttttactggcattcacggtgattacttttgatagcaacatgaactccctgtgctttggtgcttgctggtatggaggccagaagatctgtgctagtcattatcgntggatagttaagttgtgtttggctttctcaat

SEQ ID NO: 28762 - DNA, 307 bp, Gossypium hirsutum
  unsure (1)..(307): unsure at all n locations
  Clone ID: LIB3197-035-Q1-M1-E7
aacaaatactatcaantttcaacaaatcattttccaatatcccacattctcttaatgctccacataaccctcanactttttctacttttaaaaattacttcttacctaatcactttacctctttttatcccatttctttttccatcaatcttctctcttcttattttatgactttattctctttaaaaacagaacccacttcttcccatacttttttcctttgtatattacatattctgctttttttcaatccacattgacaatatttcctttttttaaacaacaatatttctttaacaaaacatca

SEQ ID NO: 28763 - DNA, 344 bp, Gossypium hirsutum
  Clone ID: LIB3197-035-Q1-M1-F7
ctcaaatgatatggatttctacttttgtgtttttttcaacttgtattggatcgaagttttttgggattaatttttgtcgtatgcctaggcacaagagggtgttgattctctaataaaatgtaccacacagaatcttggattcagccaagaaaagcctgttgcagcatttacaatatacaaatgccttgttcactggagaacattagaagctgaaaggacaagtgtatttgataatcttattcagatgattggctcttcactagagaaacaagatgacaatgatcacatggcttaattggctgtcgaacacatctgctttgttgtttttgcttcaaagtagtttg

SEQ ID NO: 28764 - DNA, 315 bp, Gossypium hirsutum
  Clone ID: LIB3197-035-Q1-M1-G3
ttttctttttcaataatttattcccatcatcgtggggatatattagctgtggaggtggttataaatacacaaaaatcaatatctcaatcaatggattcttaacgatcggacattacattgatacatttgctctccaaaacaatgatattgatctcgttgctgttaactatcctttcatcaccactgaatacataacttacatgtttaattactactatattaactctcaatttaatcattattatcttaaagtgaaggactcaaatacccttcttttttttaaaaagccttgtcacatttttctctatcataaac

SEQ ID NO: 28765 - DNA, 339 bp, Gossypium hirsutum
  Clone ID: LIB3197-035-Q1-M1-H9
cccacgcgtccggtttctgtatataggttggacccaaagacctaacagagaaaaaccaaggagtaaattacagggcattaggtgatttgtttgttttagcagaaaaaagaaaggataacttccgctatgatgttgctgttcaaatgattgaaatttataatgagcaagtcagggatctccttgttatctacggaagtaacaaaagatatccttctgttcacttgattttatttcttacaaggttataaaactattgactgatcaaaagttggtcatttggtgtggaacctcttttatatagggttaaatagttgccacttgccggttaattttcgatcg

SEQ ID NO: 28766 - DNA, 390 bp, Gossypium hirsutum
  unsure (1)..(390): unsure at all n locations
  Clone ID: LIB3197-037-Q1-M1-A6
gagagatgtccctattctggtggaccaaaaccacatatttttgcacattggggagatgccnaagtgtaattatagttcctggctatccagccttaacaaagacaacaccagtgtggaagttgcacacttccatggcttacaagaagcattggacaaaacttgctgtgggaaaacaccagactacctcaaacatatcgcgacccaaatcgaacagatcgtggaaaggctactaagtttggccataaaaatattgaaattctggtttgtgccgcaatcaaagagatgaaagactggcttacaaataaggattccngctgtaaccagttgaaaaagtgggctgcgacgctcaatatgggtaaggaacaagattttgaagtgaaatttgctgat

SEQ ID NO: 28767 - DNA, 421 bp, Gossypium hirsutum
  Clone ID: LIB3197-037-Q1-M1-B12
attcactctttggtctttttatctcaaatgcaatatgcccagtttggaaaaaacggtcatattcataaggcacaatgctggttggagatggatcgtcatccccttcagaaatcaaaactaagattggtggttttgtgttagttttagcaagatggtcgaatgctccgcgagcgatttcgagtaatccgtggtctacgaataggatcttagcttctgaatgtgcgagtaggactgaaaccatggccgagtcgagccgggaattaagcgtacaaagaacagctccggccataggaaccgcgaaatgcagctcgtacattgctggaacattgggagccagagttgaaacctgcttaatacaatttattagagaactcaaaatggaaaatttccaatttgattctttaattcaacatggcacctg

SEQ ID NO: 28768 - DNA, 335 bp, Gossypium hirsutum
  unsure (1)..(335): unsure at all n locations
  Clone ID: LIB3197-037-Q1-M1-B2
cccacgcgtacgatttgtattccttgtatatagctatggttcttagctgacttttattttctcctctacaacgaatctaaaccgaaggacccatttgtctaaattataagtgcccttatttaatatatatgatacagcgaacatgaagatatgatgaagaaataaaggacgagtgtagagtggaagaatagagaatcgtttgtgatattgttctttagaagcttctcattgaatatatagatatctcccttntaatccattgcaaaaatcataacgtaccaggttactgaccgacaagttatgcccacctattctgaaatctcactaatgctata

SEQ ID NO: 28769 - DNA, 364 bp, Gossypium hirsutum
  Clone ID: LIB3197-037-Q1-M1-B7
gggtaatgtagcttttatatctggctatcttggttgttgttaactggagaacctggatagtgcgctgcataccactactcaattcgaggcagtaacaagcaagatggaaaatagttcaaagcaatggcgtttcgaagggaacaaaaggccgaactcggcatcagcaatcagtgtgcgaggagttcttgatctggtaattggaaatctcagcaccgatgatctgagacccaccattcccctaggcaacggcgatccctctcaatttgcatgctttaggacttccacaacagcggaagaagccatatttgatgccgtccattcacccaagtacaatggttatgcacctactgttggagttctctct

SEQ ID NO: 28770 - DNA, 422 bp, Gossypium hirsutum
  unsure (1)..(422): unsure at all n locations
  Clone ID: LIB3197-037-Q1-M1-B8
caggatttgcttactcatcttctaaggagccttgcaagccgtactggtgaacaaggggggaaaaacatgtctgggcttttgccagaagcttgtgatttagaagctgtttcagctttattttcgaatggccaaggccctcctcggcctttcaagcaccacataactggaactgcatcagagattccacatacaggaagaaaatcttgtgatactaaaggtgctgaagtgccaagcaatacagctggagccagcaagataaataattttgatttgaatgacatatacattgactcagatgatgagacagatggcataaagaggtcacccgcacctgtgaatgcanggactggctcccttgattgcccttcatgggtccagcaagattctcatcaatcaagtccaccccagaccagtcggaattc

SEQ ID NO: 28771 - DNA, 444 bp, Gossypium hirsutum
  Clone ID: LIB3197-037-Q1-M1-C2
ctcaaactcaaaacacactaaaagtctccggcatcaatccgatcaacgcttgccctttccgtcttttgtttcttccttctagttttcttctccactctcctcgccgtcttctccttctcttttttgcccctctttggcgtcacaactggacttagaacaccgatcagaaaccaccctccatctcacgttttccgttcctctccgccggcgaaactggtgaagtttttactgttgtgtccatgggaaccggtaaagaagatacagtcattttcctggatcgtgcttctcgatcaaccagagggagaaggatgacgaagttgctggacgaggaatttgaagaggacgagttgttttggaatcaagaagcttttaaagaggaggagaatgatgtcaattacgaagaagagccggaggttgctgatggtttgatagtgacttcgatga

SEQ ID NO: 28772 - DNA, 176 bp, Gossypium hirsutum
  Clone ID: LIB3197-037-Q1-M1-D2
taaatcaggggaaatttgctcagtttatagcagatatgaatatagggattggggctcattttgacaacctttctatgtgatctgttaactgtcaaaaccttgaatgtaaagaatctattgcaaaacttagttatgggaggaaatgttcgattaaactctgtttctacaattacatc

SEQ ID NO: 28773 - DNA, 395 bp, Gossypium hirsutum
  Clone ID: LIB3197-037-Q1-M1-D9
ttttaaactttaaatctaaataaataataaacgaaaacaaaggggccggagcaatgaaagaaaattttcaaaagaaagaaaaaaaaaagttcttggctatttagttttgggttgttacttgattactagttttgtttttaaaggtacaatctttaattaaagaagggctttgtttgaaaagaaacagagatgggtggtgttgttgctgtcgatggcttgttgtctctttgctttttttctctttggaaaaacaaaagatcttggatagtggtgaaacactatgaggagcaacataaggattaaaaagccgagacgaggcggagtttggcgggatttggggcagaaaatgaagtgtttatgcgccggagagaaattaatcaaagtggaacagatga

SEQ ID NO: 28774 - DNA, 269 bp, Gossypium hirsutum
  Clone ID: LIB3197-037-Q1-M1-E1
acccttccggccatttaaaaattttattatccaaagtgccaggggtggaccttattaccagggtggccacttctacttgcaagaacattccgatctcatcaatgatattcctaacctgcctgcacctcgagtggatcacacccctgtcggtgacattattaaaaaagcctgtcatcttcgtcttgtgaaacccttcattggtggtggtcaaaacaaccacctgttaaccagtaattagggctttgattagaattattgggggggaaaaa

SEQ ID NO: 28775 - DNA, 174 bp, Gossypium hirsutum
  Clone ID: LIB3197-037-Q1-M1-E2
cgcttcttctactatttccaaattcccaatgccgtggcacaagacgtagcttggaagttcttagatcttcgcttcaatttgagttgctccctggaaatatgtcaaaaaatctccatcttattcatttttacaatatcatgctgcctttgaagttaattcataatggttgatagc

SEQ ID NO: 28776 - DNA, 447 bp, Gossypium hirsutum
  Clone ID: LIB3197-037-Q1-M1-E3
gaaagaagagaaaatgagttagaaaaagaaacagaagaaaaagacgaggaaaggctagtgaggaatgtttccactaaccaagatatgaatttttcttgtgttgctacttttaaggttcctgaaagatcgaaagataactttcaacttcaatacctctcaaatgaaagacgctttcatacgatcaacttaggcaaagatgaaatcacactacatgatcccgaaggtaagcgaggtaaggaaattttagaaaccgagtccagtgcagatttgaaaattattgataaaacttttggtgacttagttcttaaaagatcccctcattttgatccgattaattgttactcttcgattgtggttgataaagtcattacgaaacagagcgtgatttgttattctcttaatttaccttgtgtaaaatcctcgaatttgtccaaatctgttttggag

SEQ ID NO: 28777 - DNA, 261 bp, Gossypium hirsutum
  Clone ID: LIB3197-037-Q1-M1-E9
atggcgcagcgaacgagcagtgaccgcgctcttacctagctctgctccacgagcgcccacctgtctgcggccctgggccccacgcccggctttgcctaacagccacgatgatgttctcgggcttcaacgcagactacgaggcgtcatcctcgcgctgcagcagcgcgtccccggccggggatagcctctcctactaccactcacccgccgattccttctccagcatgggctcgcctgtcaacgcgcaggacttctgcacgg

SEQ ID NO: 28778 - DNA, 354 bp, Gossypium hirsutum
  Clone ID: LIB3197-037-Q1-M1-F2
aaacagataaacgaggaaccggcagacaaacccgaggttgaacaaaatgcctatgaggttaccaaggctgtcatcttgtctgaagaggtggaagactacagttccgtctcaaaagaatgtctgaaggaaggagaatcaaaggaacaggtagaggcgaaaaacttggagtttgaagatcattcaatcaaggaccaagaagcatccgtcatcgtagaatcggaagataggagacaggatcaagagtctggagacccttgaagtacaggcaccaaagatgcagaatcagaagaaaaaatttagggacattgttgatgaatccaagcatgattgtcaaggacaagagtcacgaaattt

SEQ ID NO: 28779 - DNA, 312 bp, Gossypium hirsutum
  Clone ID: LIB3197-037-Q1-M1-F8
atgcatgagaaaggatagcaagtctctgaggtgacctcagggtggaattctctgttaagtccaccctgccccagggtgctcctaccctcttggtctttttagccaaggtgtgatttaagcacctgactgtcccgtttaccttaacaactttgggaatccatgtgatgattttgatacttcttcctcatttgggacattcagcaggagcatttgggcttctggggcccctgagaccaaagaagatgggccaagtgccctgggaaatcagctgaaggtcaacaagaaaactggttgtgagttgcacctgtcctg

SEQ ID NO: 28780 - DNA, 193 bp, Gossypium hirsutum
  Clone ID: LIB3197-037-Q1-M1-G1
ccattacattttctgcttttttttaacttcccctggtgggattttttcgaattaggtggagttggccggccaaggaaaaaaccttgggggcagccttggacctgttccaaaaattgccgcctcgtacttaaaaaacaggcctttccgtttttttaacccttttgcctaaaaattcctccaatctcctttttaa

SEQ ID NO: 28781 - DNA, 352 bp, Gossypium hirsutum
  Clone ID: LIB3197-038-Q1-M1-H10
cggacgcgtgggcggacgcgtgggcgataaaatacttttacatccagcccaatccctgaccaaagtcagtgacgcctgaggtaggcctttttctctcaattccgttgttgttatttgcccccagtcctttctcctctcgtcactcggagaactgctttgttttcactaataaggtttgtttctatttacgcttttcattccgttgtactgatatataggttgattgcgcatagaatctgtttgataaaatgcttaagggaaaagtttctccctttttcccaaaccgttttctttttaaccgatccggcagttttttggttggtgacgtggggcttcccataaaatgaaaaat

SEQ ID NO: 28782 - DNA, 169 bp, Gossypium hirsutum
  Clone ID: LIB3197-039-Q1-M1-A2
agtattgtttaattatttagtgagttgctactgttgagatgggcgtgtcaaaaatcattagaagctgaaagtgtgtactatgtcattcatacatatctattcttatatgtagatgagatatgtattaaattgcttgttttatggctataattggagttattcttctgtt

SEQ ID NO: 28783 - DNA, 352 bp, Gossypium hirsutum
  Clone ID: LIB3197-039-Q1-M1-A4
tcgcccacgcgttcgggatataagatatgatcgtagaattgttgaagcctggattgtctagtttcatgcttttagattaagtttcttgattaaatgaaacatggtaatgtataacatggcagtttgaaccaaaacattttaggtctgctaaaagtaatttttatgctagttggatcttcctatgctaaatgggggatgttattaagtagatgaaatatgatagaaaatatcactgaactggttggtttaagtattttttctaccctaattgtatatgatttatatttttgcagataggagacagaatttatatggcgaaagtacctttggtcaaattttaaaaagccgggat

SEQ ID NO: 28784 - DNA, 297 bp, Gossypium hirsutum
  Clone ID: LIB3197-039-Q1-M1-A5
aggtttcccatcatgaaaagagctcaaaatcggactaattagtcgctcttacaagcgtcaactctgttgcagttacagattcttttctagaagaagcatggcgtcaaatcatgagcaacctgggctttcctctctaggaaaggagggaaggtcttctggtgagactggtccataacatgaaccccttattaacgggattcacacttgtgaaagctattatgcttacactgctatccttccatttctctctccccctctagcatgacttctatatgaggtatgatgttggtgctacat

SEQ ID NO: 28785 - DNA, 411 bp, Gossypium hirsutum
  Clone ID: LIB3197-039-Q1-M1-A6
taagaatgtcattatgacgaatgaatatcagtccacaaggctgtgtgaggcactatataccaaatgtgaggacagaatggaccagcttcaagttcttagacttcctactatggcaaaatttgatgcaggtttacagcaatgtaaccaaagctttgagcaggagtgtgttgggccttcgaaagccaattacgagcaacgaataatgaagatgctgggaaagtcgcgttctctgtttatcaaggaatacaatcaaaggctcttcaattggttggtggccttctcccttgtcatgggggtgggtgggcggttcatcataaaattcattttggtcgaaatggcggcatggatactatttatattcttagagacatatacgaagatgttctggtcagcggagtctctttactacaa

SEQ ID NO: 28786 - DNA, 363 bp, Gossypium hirsutum
  Clone ID: LIB3197-039-Q1-M1-B1
cccacgcgtccgcggacgcgtgggcaaagaagccggctattgaggttgagatagacagtcaatcttttgtgttagatttcttgcatatgtttcgattggagctgaaaactggcatgagacaccccattgcttggattgatgaagcaggtggctgtttctttcctgagatttttactggtgaggatgaagcatacccgtgctgcaaagatgaatgtgcgaatgaccaagaattcatgtttagtgaatcttatgcccctcgtgagatcaagctacatcttgagattggcattaatggtgttgagcagccaaagttggaatgtagtggggagtcgagttcttttgtgagacattttcaaattgctc

SEQ ID NO: 28787 - DNA, 451 bp, Gossypium hirsutum
  Clone ID: LIB3197-039-Q1-M1-B3
gtttaaatcataattgcttgctaagatgcaaaattcattcaagtaaaataaaaagaacaagagaaaattctgctggttccatacttggtgttgtgcctgtcattgttttcagaaccggctgctagcaatgaactacataaatgaaggagatgatgataaactttttgaggctcacagggattggggaaggcgatttatgaggttatatccacaatacgattcgtgggacaaccctaaagatccagaacgacctcttgttattggatacatttctccagattattttacacattctgtctcttatttcattgaagcccctcttatttatcatgactatgggaaataccaggtggttgtttattcagcagtagtaaaggctgatgcaaaaactaatagatttagggaaagagtcgttaaaaagggtgggctatggagagatatatatggtatc

SEQ ID NO: 28788 - DNA, 455 bp, Gossypium hirsutum
  Clone ID: LIB3197-039-Q1-M1-B4
atccgaaggtggagtcgccgcacctgccggaacggatgaatgtttggacaaagcaaccaaccaagaattagccagtaataatggggttgaagccttgaatgctgtctctcaagggaatccagaaatatccaagggtgaaagtttttcaatgtcacctgaggtttctgagatctgtgaaatgccagatcataacacgattgatgacactccattgaaagctgataagataccggagaatgatggaaagatgtcgaagagtgaggcaactgcagaccatgattcttcttcggaagagaaatgtgggagtattgtagaagaaacaagccaaaatgctgatgttgagtccaataaacaagaggctaacttagaactcaagaaacaagctttgagtgataaccatgatctgataattgaaagctcgaatgaggcctatgaaatagttagcaaggacgatc

SEQ ID NO: 28789 - DNA, 441 bp, Gossypium hirsutum
  Clone ID: LIB3197-039-Q1-M1-B9
gccttgttccggacgagggttcgaccgattcttcgtcggcttctaagatccggtattctccgggaagtttatcacccgtcatggatttcacgacgatctccaacggtcattcaccctcgagtttcactaagttcaactctgcactcactgcgggtcttttaaacccgcattctccgccgcctccgccggacaagtcacgatctagtccaacccttttcgagatgatggctagcgaacccgatgtccacccaaggacccaaacccagatccaagtacccatttcaggtcctagacaaaaccaacccccaccagtcattgacaaacaggcgttgacaatgcagcggatttcaaaccttttgtcaacccggagccccggaaaccagttcaacgatccggattcgagtgatataaagctaacgttgagttccaaggatgggatta

SEQ ID NO: 28790 - DNA, 416 bp, Gossypium hirsutum
  Clone ID: LIB3197-039-Q1-M1-C10
aaaatctttgtgggatttagatgttaacaagcatcacaactctgcaaattattctcaaaatttattgctttaaataagaattcaagctatttgccttagattatgtatatgccctcactatcattcttagtgcaatctgcatctgtggttacaagttacagcaaacaaataaagctggcattctgatccataaacttagtttgtctgtcgattgacatgacatcatgaatcattcgcatttcgttagcgaattgtgatattctataagtttcagagtcacgcctttagtaataatgctaaagctggatgaacagacaccaactatggattcctatatccatttgtttaaaatggtgtattagccctagacaagaatcctttctgaatgaaaaaatcttaatcaagaaacatgagat

SEQ ID NO: 28791 - DNA, 182 bp, Gossypium hirsutum
  Clone ID: LIB3197-039-Q1-M1-D2
gagcagtctgtctttggcattggctatgcggagcggcgtctaactcaagtgacatgttcataactagacaacaactatgatttacctgatggacaaatgataaccgtcggttcttaccgtgccaaacgcccccatgtgcttttccaaccatgctgtatctgcttggaagcttctaacgtcaa

SEQ ID NO: 28792 - DNA, 421 bp, Gossypium hirsutum
  Clone ID: LIB3197-039-Q1-M1-D4
cccacgcgtccggtcgttggataagcttgttccacgagccgattcgtcaagaagagaggatagtgttggatcatcttcatcctggttcaggaagggtgttgaatagtataaaaggtgaacaggttgcagcagggtggccttcttggcttgttgctgtggctagtgatgctctcaagggatggataccccgacgggccaacaccttcgaaaagttggataaaattggccaaggaacttatagtagtgtgtacaaggcacgtgatgtcgttcataataaactcgtggctttgaaaaaagtgcggtttgataatcatgaccctgagagtgtgaagtttatggcaagggagattaatctcttacgaagactcaatcatccaaatgttataaaattgggaagcttgatcacatcccatacgtcatg

SEQ ID NO: 28793 - DNA, 447 bp, Gossypium hirsutum
  Clone ID: LIB3197-039-Q1-M1-D5
caagtagcaatggcgagttctctgctagtgaatggcttaaaagctctcttcttagttctgtggtgcttgatggtaaccactctcatttacaccatctccattgatggcctccctttccgctgggaaattcttactccgtggatggctgcaacgttggttgatttctacattaatgttgtacctttcgcggtttgggtttcctacaaggaatcaagtttgattgctgcaacactttgggtaattctgcttgtatgtcttggaagtattacaacatctggctacctttttattcaatttttcaacttgtctcctcaagaatctctggaagatcccatttatcatgttctattggaaccaagcgagcaaggatggtacaaaacctaaagggaaacattcctctgttgcgattgcaagaatactctttatcgttttgggttgcttgatgct

SEQ ID NO: 28794 - DNA, 433 bp, Gossypium hirsutum
  unsure (1)..(433): unsure at all n locations
  Clone ID: LIB3197-039-Q1-M1-D8
ttcaaatctgcagcatttcctttctgttttctcctctgtattcaggttaagataataaaaaaaacccatcggtgctttgggattttcggcttggacggtattaacacattggaccaattttctgctttgagatggctggactatttgcttatggcagccttgcaccaaagactaagaatatggtagtcgcggggggtttgacagcatttgtatttggtgtatatttctatactatgagagctgttggaggtacagatgagcttcaggtggctatagataagttcgaggagctgaaaaagcaagaggggaagtgaagcatgggatcaaagccttgatctcattagcctttttttgtgacaatgcagtcaaaaactaggtaaaaggtcatttatatgacagacanaataatgtgttaaaatctgtgttttgaaaa

SEQ ID NO: 28795 - DNA, 441 bp, Gossypium hirsutum
  Clone ID: LIB3197-039-Q1-M1-E12
ctcattcattctcagtcttttcatcatatcattggctttggctttggagtttgcaaaaccaaagaagggttttcaattttcaagctgcctcccacttgtaatatctttctcctaggtttttcagttttcttttgtctatggctgcttctgattctgacgatgtgaaccttgcctatgacgatactgctgacgacgattacttctatctcgacgatacggatgaggacttacatccaccccaagccagcgacagccttgatgacgatcaactccaaggcagcgacagccgtaatgacgatgatgacgatctactccaaagcagcgacaggcatgatgacggtgatcatgattgtgacgacaacgatgatggtgatgagaatgcacttgaaaaagatgatcatgattccccaatatctggccaaaactttagtgttttaactg

SEQ ID NO: 28796 - DNA, 420 bp, Gossypium hirsutum
  Clone ID: LIB3197-039-Q1-M1-G4
gcaagtataaataatcgggaaggggagagagagttgggagatgaacggaatggggagacaggggaagagatctggtgcggcagggttgcaggttcaccatcagagacaatactcggataacttcttggaaacgacatccaatggaaggtggcttcagtctgctggccttcagcatcttcactcttctaacaactctattcctcctcttcaggattatgcattttatggcggtggagatgggggaggacaagggtctagaatgtataggaatatacagagggaattcagtatggggaatgactttttcacggagcctacaactcctccggttggttcacggccgtcaagccagaggatgaatggtgatcagtcacccaatgagttcagtccaggcctcttagatctgcattcttttgatac

SEQ ID NO: 28797 - DNA, 195 bp, Gossypium hirsutum
  Clone ID: LIB3197-039-Q1-M1-H6
gttccatgtggccacgcctatggacttctagtacctggaccctgataatgaccttataaatcgaacgaccagtggcgagctaaatatgccgtaagctcgtgccatagactgaactgtttaatgtttacgatcggatcactaccctgatcaattgtttaagcaccatcgattattcattcttgctggaagaaattg

SEQ ID NO: 28798 - DNA, 459 bp, Gossypium hirsutum
  Clone ID: LIB3197-040-Q1-M1-A11
cggacgcgtgggtggcgtagccctcgtcctccatcaccctctttggcagctcaacgcttgatacgggaacagcaagatgatgagtattatgcatcattgcaagctgacagagaaaaagagttgaaagcaattgaagaagccaaagctcgccgtttagaggaagaagcagctagaaaagctgctcttgaagaagaacagcgaaaagaggaagagcttcgcaggaaagtggaggaggagcaggaatgtgagagacaattagctgctaaagaagcttctctgcctcaagagccagcagccaatgagcaaaacgcagtaacccttcttgtgcgaatgccagatggcagtcgcaggggccgccggtttctcaagtctgatagactgcagtctctatatgacttcatcgatattggtagaggagtgaagccaggcacttatagactggtgaggccatacccaagg

SEQ ID NO: 28799 - DNA, 224 bp, Gossypium hirsutum
  Clone ID: LIB3197-040-Q1-M1-A12
tcgcggacgcgtggggaaacctatgaaccgtatgtcacacctgttaaataccaccctgattaaccctacaatcgcatcccagcgtccaattccaactacaaggactcttacttttatagcaagactaatgcgttcggaaacactgatacttaaagtttagacgggtaaaatgataaaggatggactatcgaggaaaccaacatctacaatggcaacttttacaa

SEQ ID NO: 28800 - DNA, 358 bp, Gossypium hirsutum
  Clone ID: LIB3197-040-Q1-M1-A4
gtgatacattgtaccagtgcgtgaacaactatatatctgctaaaaacaggatctctgtccacgctactgctgtaggtacaattggaacctgcggtttagactcgtggagtttaggcaacgacacttactggcttagagagaataatccgacaatctacgtccatcggcaccacgtattctggcaaggttgcattcaggaactgtgtgcatctggagctattacgcacagaccatggataagacgcttgaacgcactggcttaactgaattgctatgcacatttagatgacccaaacgatgggatggtgctggagctgactacatgtctatctccgtttacgattccatctcggtggat

SEQ ID NO: 28801 - DNA, 306 bp, Gossypium hirsutum
  unsure (1)..(306): unsure at all n locations
  Clone ID: LIB3197-040-Q1-M1-A7
aagaccccatagtaaaattccacaaccggaccataaaaagtcactagaaagtaaaaacatcagtgcattgtattccacgagagatctccattattttcattttccatttataatttttaataattttcaacacctaaaaaattgcttcaaaccctagctatgggttttgtttcacaaaaaatgtaacagaaccttgcagatctgaccccccagattttgnccttcttctgtnttgtttcttgaacttgctttttctttttgctgatgaatgtcttttttgatcatcaattgcactgttttatactg

SEQ ID NO: 28802 - DNA, 452 bp, Gossypium hirsutum
  Clone ID: LIB3197-040-Q1-M1-B6
cccacgcgtccgcccacgcgtccgtgatttactggggaatggtactcctaggggaaagaaagatgctgctacagccttgtttaatctgtcaatatttcacgaaaataaggcccgaattgtgcaagctggtgctgttagacaccttgtggagttgatggacccagctgctggaatggttgataaggctgttgctgttttagcaaatcttgctacgattcctgaagggaggacttcaattgggcaggagcaagggattcctgtgctggttgaggtcgttgaattgggttcagcaaggggaaaggaaaatgccgcggctgctcttttacagctctgcacaaacagtaataggttttgcagtctggttctccaagaaggtgctgtcccaccgctagttgccttgtcccagtctggtacacccagggctagagagaaggcacagacacttctgagtg

SEQ ID NO: 28803 - DNA, 336 bp, Gossypium hirsutum
  Clone ID: LIB3197-040-Q1-M1-C1
aaaatgcaggcgcatgtgtaattcatatgacacgtgaacttcttcagctttctccatcttcggaacttacgaaggagacttctagcgatctttcctttatgattacatgcgaaaaaccaaatccaagccaaggaacacctgcatcactgaaacgaattatggctttgaacttccacaggatactacgatgccatagttactataattgaaacaagcatgcagcatgaggaacttgtccgattgctcactacataacacttacgggaggcaacgccatatgcaatttttcatgcatgatgggcagcacgtttaccatttgcaaattagcctatttga

SEQ ID NO: 28804 - DNA, 455 bp, Gossypium hirsutum
  Clone ID: LIB3197-040-Q1-M1-C6
ttcttctctactcttcgcattttctctcgctttccttcttatacctcaacccaaaatccaaacaagccttaaccatcaagagtagaataaagttttaaaataaagtatctgtctgcagtacctgattcttcaccagaaccaagaacaaccaaaacctaattccatactgcttattcggtgtttacagatccacctttgattcctcagatatatatattttttcaatccttgatccggttttgtggagatggcggacacagaccattgttgctcgacacaattgatcgatggagatggagagttcaatgtggttggacttgacaacttcatgcggactactaaattctctaactgtggcctctcttatgctgtcgtcgccatcatgggccctcaaagtagcgggaagagcaccctgttaaatcatcttttccaaacaaatttcagggagatggatg

SEQ ID NO: 28805 - DNA, 171 bp, Gossypium hirsutum
  Clone ID: LIB3197-040-Q1-M1-D6
ttttggggggagggtattacttctggtgagaatggttagggagaaaattgaaacttcaattgggaggagaaaaggttcccttgttaaatgggaaaaaattaaagaaaacgggaaaggtcttgggattgggggtttttcggatgatgatttggaaagatttgaaaagggttt

SEQ ID NO: 28806 - DNA, 399 bp, Gossypium hirsutum
  Clone ID: LIB3197-040-Q1-M1-D8
ctgagattttaggacagaacagccctaatcgtatttagcttcagttatatctcaccacgtcgtgcagtaattttcagattttcttttccctaatttccttcgtcttccacatccttgcgactcgaactgatttactcacaacagcactaaaaaaaaacaaaaacaaagaatctgtctgtaactgtcttttgcgtttctagcagttgaattgaaagttgagtggtcgactatgattctccggtcggtcataatggtggttgtggttgtggggattttatcctctgcgtcgcaagcattgcgattcgagctgcaatcgggacacaccaagtgcatctccgaagacatcaaaagcaattccatgacggtcggaaagtaccacgttgtcaacccaaacgaagc

SEQ ID NO: 28807 - DNA, 459 bp, Gossypium hirsutum
  unsure (1)..(459): unsure at all n locations
  Clone ID: LIB3197-040-Q1-M1-E12
cagacgctttaaatgatagtgcaaagcccacgaaggaaaaattcagccatatgttttccaagatgaaatgcacatgcattgatttgaatcagttttcaagattcatcaaagacatgaaagcactcttggttgacaaggtttatgttgtcaatgttttaggttattgtgcatacaactttgttttaggtgcttattcttattggggacctaaggctggttacaaaatttataatatgagtgatgcagacctgatatttggaggaataaccattgtctgtggaatattgggcacactagcaggaggctatgttctggatttgatgaaatccacaatccccaatgctttcaaagtagcttctctctgtaacaaacatttttggggcaatcttttgtttcactgccttttgttttcagaacatgtatgctttcttagcttttttctncagtggtgaactactg

SEQ ID NO: 28808 - DNA, 344 bp, Gossypium hirsutum
  Clone ID: LIB3197-040-Q1-M1-E8
cccactcgtagctggactcattttccgggggggaagtaacgactaggctggtattgctctcaatggactgcaccacctgctggaagaaactagtgcgatttaccctgggcaagcattcgttgctggcgccggaccgggaaggttcgattagtgtagccatctatgcggggatagacactagggtgaggctaatgtacatggctaacgagggggatctggaggggatttatgagcttttggactctggcaccaatgttaacttcaatgattttcacggtaggacgggccgttatgtattcgtctgacagggccttactgatgtgaaccggttgctcctttgatcg

SEQ ID NO: 28809 - DNA, 442 bp, Gossypium hirsutum
  Clone ID: LIB3197-040-Q1-M1-F4
gaaagctagaaaccagagagtaaaaaaccgcttgcaatttgtggggataaatcaacacatatagaatatcaaacactagcattttcagatctctaggatctcagaatttcaggggggataaatcaggaacttgttgcttgtttctcgataaaattctctttttctcttttagctcttttgtcttagctcatccgctccttcattctgttacttttacttgcctttcgattcatatttgtatgaaagcaagtcatttttaggatctgggtattgatcaaaaacaacaagttttgattttgtttttcaagtgaaaaaggttaaaaaggaaaggaatttcctttaaaagtaatggtggtttcagttcttgtggtactgaaagggacaccttttgctgggataagggtagaaaaaagactttagcttcatgtgaaggatggtggca

SEQ ID NO: 28810 - DNA, 378 bp, Gossypium hirsutum
  Clone ID: LIB3197-041-Q1-M1-A1
gtttcaaatatagtaaaaaaattcatacgcaatgagcactgctggtcagggtatgggttgcaaaactgcggtgacatgggaggcggggaagccactattgatagaagaagtggtagtggtaccaccccaaaagcatgaagtccgtattaagattgtcttcactgctttatgtcacactgatggatactactgggagtgtaagggttacactcctatagcttctcgtatacttggccatgaagcctcagggatcgatgacagtgggggtgagggtgttaatgatattgaaccagcagatcatgtgctccctatattcaccggagaaggcaaagaatgtagccacttgctgtcagaagaaatcaataacgtgagccaact

SEQ ID NO: 28811 - DNA, 305 bp, Gossypium hirsutum
  Clone ID: LIB3197-041-Q1-M1-A5
gtcaattggaagggggaaacattacacggtgtcaagaatttaacatacagcgacatggacaagctgccaatatcaaatgttccagacggatcaaaaaggatgtgggagcatattgctatcacatatgtatctgcactttggacatcatatgcgctatatgatcaatacacaaaattatctggtatgaaggtacgatatctaacgtcagacaatatgccaacctgatcaatgcactggtatttagagaaatgctgctactgactctgatgaaacagcatgagcgcacatcgaacattgtgttcaag

SEQ ID NO: 28812 - DNA, 352 bp, Gossypium hirsutum
  Clone ID: LIB3197-041-Q1-M1-B1
atttgctgatatgtaggtaccgccacccatgcttgcaggaatgtacggttctggtggtcaggtgcgctttaataatgcaatgattactatgaagcatctgaattgtggtgtaatcaatgataaaagaccggatcatgttgttcatgtgggatataggaaaacatatactatcttgatttagatacacggtttaacttgtgaaaatatacagatagatagcattgatcaatacaacagataatacagattccatctgatgaaacggaaggtgctcaaattcatatttaccctctatgactaagaaagatggacacccattgggcactatgcgaagttgtgttaacaggaattc

SEQ ID NO: 28813 - DNA, 439 bp, Gossypium hirsutum
  Clone ID: LIB3197-041-Q1-M1-B12
gtcgtcgtcttaaatgtaagatttgtttgtttgttgttgttattgcttttaagtttggaaagagatgaatcctctgtgctgcattgctccggtttccatcgatcgtgaccgagctaacccggtggttaccaaatcgggtccgcaatgtcagctaagcatcgaaccttccgtcagaacagttaactattcgaaaccgagtttctcctcacaagtctcctcagtcaacgccgacactgacagatcctcgccgtcggtaatgaatcacacctccatggcaatattcgacgaacctattatcagagaggttaacgccgcccacggcgtcgcccggatcctgtacaaatgggtgaattatggaaagggatggaggtcgcggtggttcgttttggaagacggagttctctcgtttataagattcacggacctgataggatttgat

SEQ ID NO: 28814 - DNA, 230 bp, Gossypium hirsutum
  Clone ID: LIB3197-041-Q1-M1-B2
aagctgaccctgcggccggccgatcattcgacaacaccgacggattgctgactgttgatacttataggtcaattcacggcgctgtggttctttcattaactatgaacaaatcacatatttgatgacatctccatcttagacataaaatcgatctactgcgcctataaccatttgttttaacacctaaaatcctaataactatataggggactcactaggtcatatataag

SEQ ID NO: 28815 - DNA, 376 bp, Gossypium hirsutum
  Clone ID: LIB3197-041-Q1-M1-B4
gtccatttacctacaatcacaaatgctacctttttgccaatcaaaaacttagccggcatttcacgtcattcaatttcaggctccaaagcaggaaaaattctacttctgatgctaaggagttcgacgaatcggcatttgaagctgagaggttgagactggacgcaaaggctcgagaatcaatggcccagatttccaaaacaatgacggaaacgactgcagaagccgaagctgatcccaaagcttggaaatgggtcattcgtaaaaggatttgggatttaatggaggcgcagaatattgcacagaacccaagacccgttcatcatcggatcccaaacttcgtcggtgcctcatctgctgccaaaaaaatgagtgagct

SEQ ID NO: 28816 - DNA, 442 bp, Gossypium hirsutum
  Clone ID: LIB3197-041-Q1-M1-D11
tgctttgccgtctctttctcctttctagttttccttctccttttcttctacattttcccagaaaaaaaaacccaataagactttgtagtgatggttgaattgatgcatgtaacagcagcagtggtaatcattgttattgttttgatccttttggtagtgtttatacttaagtggtgtcttcataaagagagtactgaaggtaaagacatggttgctgatcaccactatgttttccgacgtggggtgtcggcaaagccattgtttagttggtctgatcatccatctctcatcacagatgcagttgaaaatggatggtctagatttggtttcacaccctacaacatatcatcatcaacaaggtcatcaagcttgttgggattatgtgcagctgttgattttctaagagggaatgatgttgaattaagttgggaagtatgtcaag

SEQ ID NO: 28817 - DNA, 350 bp, Gossypium hirsutum
  Clone ID: LIB3197-041-Q1-M1-D7
gaagaggccaaaatcatccacctaaaacacctgttcgagagaagcaacaaaatcacaaggtctctcctgttcatggggcagatgctgctgctgctgctgttggccatctcgaaaccgatactaaaatgatagatttaaatatgaagcctcatcgaatacatgggcaagcctcaaacaatcaggttagaactacttttaaactattttctatacctatataaacatgcttatctttttctttcactgcatttgaaacacatggtgtaattgttctttcaacatgtttaggggtaatatctgcaattatttattaaggagtgtgactaagaggctgtcttggttggaacttg

SEQ ID NO: 28818 - DNA, 452 bp, Gossypium hirsutum
  Clone ID: LIB3197-041-Q1-M1-E4
ttaaattcctacagataatcgattaactcaggcaaagtaggatttggctgtggattggcttgggcggcctcatcagtcagcagggtagaggacgccaaagcgcaaccatccccaaacccacctatttcctgaaaaaccctaaacgccttcacacatttccatggcgaaaccataatattattgagaaacaaagttagcccggattttgtttacgaaaaaaagtgaacccagataataaaaaaggagaaaagaatttgttttttagctttttttggttgtcgggtttttgggagatgtcggagatcgaggtggttgaagaagttttgccattgaagcaatccggtgacgttgtagcgaatggaaatggatacaggggagggaataatggggttaataggtttctcatgatgagaacttgaggaacgatgtctacaccgctgctacttatgggg

SEQ ID NO: 28819 - DNA, 421 bp, Gossypium hirsutum
  unsure (1)..(421): unsure at all n locations
  Clone ID: LIB3197-041-Q1-M1-F11
ctgaacatgttgctctcgagattgcaaaccgcgtanaagctgcaatatatgtatggcgtcnaagatctcattcgaagcctcctattaacccaaaccgatccactgcaaaatcatcatgggaaatggtgaaggaccttatggttgatggagacaagagagaatttctagcagaaagagctgaaactctcttgctttgcttgaagcaacgatttccgggtttgactcaaactacattagataccagcaaaatccaatgcaacaaggatgttggaaagtccattcttgaaagctattcaagagttttggaaagcattgcatacaacatcgttgcacgtattgacgatttgctatatgtagacgacttaacgaagcattctgacaagttatcatcagttcctacggttagtgtaatcgcacacaa

SEQ ID NO: 28820 - DNA, 402 bp, Gossypium hirsutum
  Clone ID: LIB3197-041-Q1-M1-F5
cccacgcgtccgctcactgcctctctattataaaaaaagaaagcgaagatttagacttttatcatagtgttgaagtaattgaaggggaaaaaatggcaatggtgaatgtaataagcgttttgatctttatctcttcaatgtggatgatgggtgaagctagaatcccaggagtttactctggtggagcatggcaaaatgcccatgccacgttctacggcggtgctgatgcttcgggcaccatgggcggagcttgtggctatgggaacttgtacggccaagggtacggagtcagcacggcggcactgagcacggcattgttcaacaacgggttaagctgcggtgcttgcttcgagataaagtgtgccagtgacccaaagtggtgtcattcggggagcccatcca

SEQ ID NO: 28821 - DNA, 375 bp, Gossypium hirsutum
  Clone ID: LIB3197-041-Q1-M1-G10
gactcaccatatgttgatggtgttgctggaggacctccttgtgcctaaaaattatttgatgcaccttttcctattgttaataaaaggcgttatgggcattaagtgcccaaggacgtaaattttataagttatgtaaaaggaaaagttacatgtatggtggatgacattagtgacactgatggaacaataccaaaaggtgcatctcttttatatcaagaggggtctaggaaagtgtatgcgtgcaatacacatgctgatcataggactactgcaataaaaagattgtgaagtggtcttgttcaaaatgtgatcatatcggacacaataccagtgttatagcatgactatgtatctaaccagactgatcgcattgag

SEQ ID NO: 28822 - DNA, 447 bp, Gossypium hirsutum
  unsure (1)..(447): unsure at all n locations
  Clone ID: LIB3197-041-Q1-M1-G11
caatgctcgaattaatccactaccagtagccccatgagcgactccaatatctcttcctcttcctcttcatcttcctccgattctgcttccatcgctaccgtcgatcagaatgtaaggaggaatgggagaatgatagatgatggcgacacgttttctccaaaggtgcgtcgttggcgtgatgttttctggttagcaatattcatgcttcatttaattgcgttgggatttgtgctcgtgcttcttggactcaataggtttaagaaatcagataggctaaacatcgatagatatacgaatcgagtttgggagcataataatggattgacggagaattattggcccaattatgctgttgccggtggggttggggccgcccttggatggatntgggtgtttttgcttgggtctcattctaacctaatgatgaanggttcagttcacattttg

SEQ ID NO: 28823 - DNA, 244 bp, Gossypium hirsutum
  Clone ID: LIB3197-041-Q1-M1-G4
ccacgcgtccgcgaagaagtgttcaaaaagttcgatgcgaatggagacggtaagatctccgcctccgaactgggttccattatgaaatcactcgggtcaacacccctccgatgaagaactccacaacatgatcaaagaattcgacgccgacggtgatgggttcataaatttcaacgagttcatcgagttgaacaccaaaggagtcgactcggaagaggttttggagaacttgaaggacgctttt

SEQ ID NO: 28824 - DNA, 409 bp, Gossypium hirsutum
  unsure (1)..(409): unsure at all n locations
  Clone ID: LIB3197-041-Q1-M1-G5
cgaaactcagttagtttccccacctgttttctcgggtttccccactgaaccttcaactgcaccatttacacctcctcccgagtcagttcacttgactacaccatcctcgcctgaggtgccatttgcccagttccttggccccaacctccagtatggagagcagcgattcccattatcccactatgaatttcagtcttatcatcttcaacctgggagccctgtaggccaattgatctccccaagctcaggaatctccggttctggcacctcatctcctttcctcgatggtgattatactactggtctacgctttcccgagttccaactggtttacccttccaagctcttgaaccttgataagctttccaaccgtgaatggngatcatatcatggttctggtcctttaacc

SEQ ID NO: 28825 - DNA, 416 bp, Gossypium hirsutum
  Clone ID: LIB3197-041-Q1-M1-G8
tgaacttgttttaagttttctgggggcattggtcaatatatttggggtaaatgcatgaaaccacgatatcaaagattggtttagctgcatatattttactttatcattcatcgatcatattagtcagcattatctgtgattattcctcataattggcctttcttcagaggaattaattactgatgtttgttaccaaaaatctttatctaatgatttttaaattgatactcacgataagcgattacaaattttttgataaagttaaacaagaataatcctattagtgtgaaaatttatgagtattctcctaatcaaattggtcaggggctcttaaaaaaaacatcggtgactattactaatttagtcatgaccagttataattagcttttttttttacctaaaagagaatgggttcc

SEQ ID NO: 28826 - DNA, 138 bp, Gossypium hirsutum
  Clone ID: LIB3197-041-Q1-M1-H4
gtgatgataagctaaattggcgtccacgtttaacggatatcaagctggaccagactgcggattcttaggaaccgctgctgctgtataaggatcttgtaccaaagaagtttacggaacatgcataatcagggacatgat

SEQ ID NO: 28827 - DNA, 360 bp, Gossypium hirsutum
  Clone ID: LIB3197-041-Q1-M1-H7
cttctttttgatgattggatttttgttgagggacatcggacatgttgtcgatgaacaacggagtgaccatctctagggattccacctacggaggcagtgtcgtcgatcgtactgatgttatttccgacgctccggcactggcttccggcaaagcttccatttatggggcgaaacatgagccggcttcatcccttggtattgtgcctcatagaggacctgattcacttgaagttgatgaagatatgcagttggctctagctcatcaattgtacaaatctggaaactacaaacaagcattggatcatagcaatgctgtttacgaccagaattcgcttcgtactgataatctacttcttttgg

SEQ ID NO: 28828 - DNA, 459 bp, Gossypium hirsutum
  Clone ID: LIB3197-042-Q1-M1-A1
agcgaagctacggaccccaaaaacctcagaggtaaaatttattagcatcgtcgttcgtctccttccaaaccctagaatacgtgaggagtgagttgagtagaagaagagaaaaggaacttcgaatttttgtgctttgctttcccgtgatctgaaaaaagtaacacggcgaacttgcgatttcatttttgagctgatgatgatacatatttcatgaatcattaactcatggatcctgaaggcaagaaatttggaggaggaccgagggaacttagcggtgctgttgatcttataagtcactataagttattgcctcaccatgacttcttctgcaagagacctcttccagtatcaatctcagatacacattatcttcataatgtggtgggagatactgaaattagaaaaggagaagggatgcagctggaccaacttattcagaatacatgtcataacagagac

SEQ ID NO: 28829 - DNA, 352 bp, Gossypium hirsutum
  Clone ID: LIB3197-042-Q1-M1-B2
acccacgcgtccggcccgggctcttcttctttgactcgtcgtctgcctgtgctcttctatccgattcagaagcttcgtcgttgccgcctcttctttttctaatgacaaccgagaatttgtgatcgttggaggaggcaatgctgctgggtatgcagccaggactttcgtcgaacacgggatggccgatggcaagctgtgtattgtgtccaaggaggcatatgcaccgtatgagagaccggctttgacaaaaggctacttgtttccactagataagaaaccagctcgattacctggttttcatacttgtgttggatctggtggtgaaaggcaaactcctgaatggtacaaagag

SEQ ID NO: 28830 - DNA, 360 bp, Gossypium hirsutum
  Clone ID: LIB3197-042-Q1-M1-C3
gtttttcaatgcgagaatgatttcaaatgtgagggatgtaagtacgcagaaaatgtttctttcagtaataattttattcactcattttccactagcatcttcaattgcgatcagggattacatctaacaagacagcgagatcaatttaaatccctgtttgtaacagcatctttggtagcatctgccatgctcctctctgtgtagtttagtgcttaattgtctcccatttcagattcacactctttgtacgtaaactgtggtggcgatgatgtgtcaataaaatggcaaacttatataggagatagaacgtttggatctggtggtgctgcaacattatatcggaatggtgataactgggga

SEQ ID NO: 28831 - DNA, 386 bp, Gossypium hirsutum
  Clone ID: LIB3197-042-Q1-M1-C8
ctggagctttttcttaattcttgaagtttgtagttttgccttccagttttgagtggatttgtttttttcttttatttctgttgaagttaagtcaaaaggttttatctttctgttttatatttgtactgagcaaaacaagtagtcaaattttgggtataggatgattggtaagagcaagagtgtttgctttggtagatgcttttggggtttttcaaaatttcatcctgatagaggtttctacttctgggatagtttatagggttttcctctctgattttggagttaaagttcccttctcttaatggactaagttatgctgtagaggaaaattgaataagggttggttcattgtggatttggttctttattttgatttgaaaatgatc

SEQ ID NO: 28832 - DNA, 311 bp, Gossypium hirsutum
  Clone ID: LIB3197-042-Q1-M1-D7
cccacgcgtccgcctgcctgtttctcttttgaatttcagtgaaagaaaaaaaatggctcagttcaaagccatttcactctcttcgtccattaatcttgcaagttacggtcccaaaagaaatacattgttacattccgataatttgatctgttctaggaagttatccactttccatgagttaagtggaaaatctagttcgcttcatggtaatgctattgtaagcaacaatgtgtgtatgactctaacacctaagaatcaaggtattcaagctgttctttccagcaactcagggacggatgtttccacagtta

SEQ ID NO: 28833 - DNA, 418 bp, Gossypium hirsutum
  Clone ID: LIB3197-042-Q1-M1-F10
ggatttggtgctctaatgctcacaactgggagcagttatttatctcatgcacagatatgggcgttgcaagatgggacaacagtaatcgttggagggaagactaaccgagccaaggctgaatttccagatgagatgaatcgcttgcttgatcaggttcctgaaatagtcgagtcatccatttccaagaaaccagataacattggtggctagttttcaaggtgccggaaaggcaaaaatacgagcattcaagctagccacagttttgtagtttctggtacactcaagatattgttcaatctcaattacagtcaaaccaaagaaggcaacaacgcattcaactgagatgttaagaaccctagtcatggacaataccaaatccacaacttggcagcaaaggagcaaaatttgtttatgaaat

SEQ ID NO: 28834 - DNA, 352 bp, Gossypium hirsutum
  unsure (1)..(352): unsure at all n locations
  Clone ID: LIB3197-042-Q1-M1-F5
aatttctcttggggcgttggtccatctcatagagggtggaggacaccagttcagtgagagttactgtnacatgttgtttaatagcataatatatgcatcatacacaacacaaccgcttgagctacttaatgcattgggactagagaatccaatgaacccctctattttaagagatttaaaggttcattacatatgtttatcaatttaattctacggataatgggaacatttcaccacttgcatccctttataacaacacaaagaatactaatgcatttgttttacaagatcacagtcaagatttttcattacaacctatttcatatggatctgaaggtgttcccttaccttc

SEQ ID NO: 28835 - DNA, 256 bp, Gossypium hirsutum
  Clone ID: LIB3197-042-Q1-M1-F6
gtgaaccgcactggcacattaatttcacgagcctaataaactccggaggggcggtgccttatctctttcaaccttagcttataattggatatccggataatgattagatggcctttacgttcacatttgatcacgctgttatccaattcggaaatgcctgctgggagctttactggctttaacattgaatccaacctgatgcccaattccaatgacaagactgtcggaggaggtgatgatgcttttaacacctttt

SEQ ID NO: 28836 - DNA, 447 bp, Gossypium hirsutum
  Clone ID: LIB3197-042-Q1-M1-H4
attatctctagtgatggtgtttgggatgctttaacagctgaagaagctcttgattgttgtcgtggaatgcctccagatgcagcagctgcccagattgtgaaagaagctgtaaagccaaagggtcttcgagatgatacaacctgcattgttgttgatatcttaccacaagagaagccagctgctctgccaccaccaaagaagcctgtcaaaggtatgttaaaagccatgtttcgcaagaagaattctggatcatcttctcaagataaagattacatggaaccggatgtggtggaggaattatttgaggagggatctgcttggctttcggaaaggttggacactaaatatccactatgcaacatgtttaagctgttcatgtgtgcagtctgtcaattggagatgaagcccggagagggcatttctattcatgttggcacatctaatccg

SEQ ID NO: 28837 - DNA, 463 bp, Gossypium hirsutum
  Clone ID: LIB3197-043-Q1-M1-A10
tttctgaagtggagcccaatccagttacaataataaatatcctctcgtcatgcacccatcttgctcatttgcctcagggtcgttgtttgcatgcttacatgatacggagggaatcctctttaggtcacaatttgtctcttcaaaatgcttttataacaatgtatgcaaggtgtggaagcatgagaaatgctgaaaaaatctttgaaaccttaacaaggagaaatattatctcgtggaatgctatcataatgggttacggaatgcacggtcatggttatgatgctattcttgccttctcgcaaatgctagaggatggtttccaaccaaatgaagtaactttcatatctattttatcagcttgcagccattctggtatgatagaggaaagactgcagctttttgattcaatggttcatgattttaacatcacccctcagcttgctcactatggatgtgtagttga

SEQ ID NO: 28838 - DNA, 383 bp, Gossypium hirsutum
  Clone ID: LIB3197-043-Q1-M1-B4
aaaggactctgtttcctttatcctttctttcccatcagctgccgcaagctttccatcctcacggtggtccgctccttcatctggcaaccttctcccgttggctcgtccatacccttggccactatctacctccacttttatgtcgatctttggtctacacttagtttacttgtctctttacctcttccttacgtcatcttcgatgcttgctcttgcgtctttgctgctttatactcccttcactggactctcttaggtatatatgatctttacttatctttgatacgctttcagtactaattttacttctttgtttacaagtttgcttcgaatttgagcaaatttaaggtatttatttctacgagcccctaactagttttctt

SEQ ID NO: 28839 - DNA, 395 bp, Gossypium hirsutum
  unsure (1)..(395): unsure at all n locations
  Clone ID: LIB3197-043-Q1-M1-G8
gattttatccgtaacaatcgactcatcaatggggggaaagatcttcctcgagagtacttgtctgagcttttcctctctatctgtgagaacgaaattcaaatgatcccagaccaagatgctggtgtcccagtaatgacatcaagccgctggattaatgtggtgaataaatccaaaggaagcaccccttttattgcctgcgattccagagcactccttgaccatgatatgtttactatcctttccggtcccacaattgcagctttgtccgtggttttcgatcaagtggaacaagaagatgtcttaccaaatgtgcattgatggattcttggccattgccaaactttcagcgcactatcactntggtgatgtattggatgattttggtgtgtctcttt

SEQ ID NO: 28840 - DNA, 396 bp, Gossypium hirsutum
  Clone ID: LIB3197-044-Q1-M1-A10
cggacgcgtgggtgatgatggaagcaatccatcattgaacagtactggttcacctgtgacatactgcaaagaaaccaatataatccgctttgctaacagttcagttgatgctaatagtcttagaaatatggtagtattggctattcacactggaagaatctactgcatcattgaagctgtgagtgataaaactgctgaaagttctttcgctgaaactgttgatacggtctcatcagagtttgctaccttctatgaatacttctacaaaaagtacaatattgtgctgaaacatccaagacagcctttgatgctgttaaagcagagccataacccgcacaacttgcttgtgaattttaatgatgaaggtgtatcagctaaagcatcacaagctggcgt

SEQ ID NO: 28841 - DNA, 329 bp, Gossypium hirsutum
  Clone ID: LIB3197-044-Q1-M1-A3
gttaattgacctggcagtgtcacttttgcctggtttagatgagccagcattaaatctcttattcattgcaataaaacctgcattgcaggatgtggatggcttgattcagaagaaagcgtacaaagttctttcaatagttctcaggaaccaaaaaggatttctatctgccaaactggaggaattgcttaaacttatgattgaagtattgccatcattgcacttttctgccaaacgtcacagactcgactgtttgtatgagctgataacccatgcctctaaggtggatccgaacctgaagagacatgagattcttagttcttttctgactg

SEQ ID NO: 28842 - DNA, 371 bp, Gossypium hirsutum
  Clone ID: LIB3197-044-Q1-M1-A6
ctgacgggtccttaaaaaacgcctactatctacctcaggccgacacctacgccgacgccgactcggttcaggcgctcactcacctacagcatgtgacttggcgtagtagtccaacaatgtatatatggtattcgagtctgataatgcgatgcttgaactttacggcctcgaccatggtatccagcccgatggccagacgccaatgtgacaagactgtaggacgaggtgatgatgcttataacacctttttcactgaaactggtgctggaaagcacgatcttcttacaatcgttgcggatcttgggcctactgcaatcaatgaaatgaggactgggtcatacagacttctcttacactatgggcaactcatc

SEQ ID NO: 28843 - DNA, 367 bp, Gossypium hirsutum
  Clone ID: LIB3197-044-Q1-M1-B5
agggatcgaaaaatgatgagggtcctttgtaaccgtgggcggatggaaattatgttctctaaatgtgctcccaacagtatcatctgtcggtgtacaaatatcctatgcactaatggtggctccaccattccaaatgatactacgcttttgtctgagctgcactcaagactcaacagttgtgcaggacaagaaacactgcgatgactggctttaacattgaagataatgcccatgggtcatcagacactcttctttgatgatgagaaagatcttacctttattgaacaggttgggatgctagatccaccaccacaggaagtgaggaatgctatgaggtcatgcatgacacgtcggtatacgtgttatt

SEQ ID NO: 28844 - DNA, 313 bp, Gossypium hirsutum
  Clone ID: LIB3197-044-Q1-M1-B8
ggccatcctatcaacccagaactattcttagggttggaacaaaccaaagcaagctctttgctatcaaagccggatcatgagaagttgcatcggaagcttatatttgattctgctaatgagattcttgttggaaagttagctcaagtcagagcttctccggagccttggttaaatcctggaaagctcacaacgaagaccctcaatgcacaaaagcttctaaaggaactatgcatggagatagagcaacttcaaccgaagaaatcagacaacaacatggaggaagaagatggtctgaaaaacatattgtgggaaa

SEQ ID NO: 28845 - DNA, 420 bp, Gossypium hirsutum
  Clone ID: LIB3197-044-Q1-M1-D8
gttctacctattctgcttctccttctgaggcggctgccaaagttattctttccattgacccgcgtgtttccagtgatgataatgactcctcttctgctcagttcaccatggaattggttggcacagaaaccggggatgtaccgaagcgctattccatggatatgaccaaagactctgctccaatgtctgtgttgtctgagactctccaaagaaagcttgacggtgacggaaaaatactgaacaagtttgacatgagacctcatgatgaaaacatcgaaaactatgggaaactttgacgtgaaaagacaaatcagtctatgaacaaatccagacagatacaggtcatcgacaatgatcatgggactcacatgagggctatgcccagggttattaatggtgctgtattcaataatatattta

SEQ ID NO: 28846 - DNA, 383 bp, Gossypium hirsutum
  Clone ID: LIB3197-044-Q1-M1-D9
gtgattttggagtatcaaacaccggtcaacagctcgaaaccggatgaatgtgatgttgcttggaggtttcggaataaaaaggaaagatcttggagaaagtacagagattttagaaggttcgagttcgggatcggagtgaattgtacttacagagtgatccatacaggccgttggcattcgggaatcaacgctcgacgaccttggattcggcctaacccaaagttcactcaaccgatacgtgatgaagagataaacgatacaatcccgactttaccggaaacgaactttaggaaaaggaagtatttgtattatgcaagaggaagagattattgtaagggaatgaaccattacttaatgagtttcttatgtggtttaagggaagc

SEQ ID NO: 28847 - DNA, 411 bp, Gossypium hirsutum
  Clone ID: LIB3197-044-Q1-M1-E2
gaagagccctatcacaagcctctgaacaatcatggagatcattccatgactgattctgcgcaaagcttggagactcaaggtgaaattgctgatgaccccgatgaatactgcaaagaggtccaatgtattgacacggaaggatcaggcagggataataataattctgaatctcttgccgtaccaaatggtgaaagtgaaggacgattggcattgacattaaatggagttggagatgtggctggccaggaaacaatgtctaccccaatgaatggagatagagaagcaaatcgtattcaaaatagcctgaagttgagtaggagctggagttgtagagatgatgtcacgggtggtacatcttctccatatatggacggagaacataatgaaagcaccccgcctaatgggttagag

SEQ ID NO: 28848 - DNA, 411 bp, Gossypium hirsutum
  Clone ID: LIB3197-044-Q1-M1-E6
gataaatcgttcctctattggccctttgccttcttgttactctccatccttgaaaacacttatcaagggcatgctaagaaagaatccagagcaccgaccaagtgcatcagagcttttgaagcacccttatctgcagccgtatgttgatcagtatcgttcatccttcagctacccttcaacaaattgctccttggataagcatatttccactggtcgtgaatctcgtgataataggaaaaatatggccgagagtcacagcagtaatagctcatgcagtgataaagatagtttactttcaagtgacagaaacactgccacaatggtttcaaatagcaatagtaaggccactgacagagattcaatttctaatgatgaggaaggaagcactgagcagcacctgccaagtaaaag

SEQ ID NO: 28849 - DNA, 380 bp, Gossypium hirsutum
  Clone ID: LIB3197-044-Q1-M1-F1
ctcgaagctcgttagggttttcgccgatctatcgcggaattactcggatctcattaacaaaccatcttatcgggctctgtttgaaactgattcactgtccatcgatgagtcggtgctccggcaattcgagaaagaagtgaaagagcgaatcaaggctacgcgccaaatgatttcggaagccaaggaatcttttgataaccaactcaagatccagaaattgaaagatacgatcttcgctgtcaacgagcagctgacaaaagcgaaaaagcaaggtgcgttttccagcctcatcgcggccaaatcaatccctaagagcttacattgtttggcaatgaggttgatggaggaacgtatcgcacatccagagaagtataccgatg

SEQ ID NO: 28850 - DNA, 355 bp, Gossypium hirsutum
  unsure (1)..(355): unsure at all n locations
  Clone ID: LIB3197-044-Q1-M1-F12
gaaagaagagagagcctgcacaattgaggatttttaatttggggaatacttcgcctgtacctgtgagtaggctggttagtatattggagaagattttaaaggtgaaggctaagaagaaagtagtgccactaccaagaaatggggatgtggagtttacacacgccaatattaccttagcaatgacggagctcggttacaagccaacgactgatttggaggcagggttgaagaagtttgtgagatggtacctcagtttttattcggggtcaaagaagaagagttcttggtgaaactttctcaatctttttttttattattattatttctctcattttagntcatattgattacttct

SEQ ID NO: 28851 - DNA, 374 bp, Gossypium hirsutum
  Clone ID: LIB3197-044-Q1-M1-F3
cggacgcgtgggttgaatttgaaaagaaaagagggagaaaaagaagaagaagagagtttgataatctgattgtttcagagcaaaaataaagaaggttgtatacaatatataatataaccttccgggctcttttttcctttttctgtttggatagaaggaaagtaagatgatggtatacaaaaagagagaggcggttgaagaagtggcaatatatggaggattgataggggtgcaatttgtttatgcaggcaactcaattttacttggttatcttatgtcccttggccttagccttttcaccattgttattttcttcacttttgccaccttcattattgtctctccttttgctctttatttcgagaggagcaatt

SEQ ID NO: 28852 - DNA, 279 bp, Gossypium hirsutum
  Clone ID: LIB3197-044-Q1-M1-F6
aaaaagctttatgctaaagcgatgaccgcatcttaggggcctaaatggatcttctcaaagaagagcttctcaagaagcggcatagcttatctcaggaaaccggcggcaggcgcgtatttaaacgctcctagattgaacaaaatcaaattctgaagcttacccagcactatattacctttttttaatctgtattttgtttttaatctacctcttttttttattcattcgttctataattccgtgtaaatagtaccttacctattttttttatttctaatt

SEQ ID NO: 28853 - DNA, 193 bp, Gossypium hirsutum
  Clone ID: LIB3197-044-Q1-M1-G1
gtgagcatatagagttacatgttatagttacagcttgtgtgagcatttcccaagcatctgatgttatttcattaggttcaacaggtggtaaaggtttaaaaaaatatgtacatatatgaaatgttatatggtcaagatatgtgaattggaagatgttgataaaaatacttgaaataataaactatgtttatcg

SEQ ID NO: 28854 - DNA, 147 bp, Gossypium hirsutum
  Clone ID: LIB3197-044-Q1-M1-G8
acaatatacctgctcctgcaggtcattgcaggtgcttaacattcgctctgtctagctctatgcattataacaccatgtggactcgatattacatagcgggaacctcctatgtgcttattgtatagttatctactcacacacaccctt

SEQ ID NO: 28855 - DNA, 426 bp, Gossypium hirsutum
  Clone ID: LIB3197-044-Q1-M1-H3
tctatctgtcatttttccccccttcttcgtgtcgtcttttgaccttagattcttttttattcaaattgatgggattttttttgtttctaggattcgatttgggggattgagttttcgatattgatatgacatttttcttttccttttcggcaatttgtcattgtatgcgagtgattcaaccgttgggtctttgttgagctgaaatgaacaataaagttatacaagttacagaacaaacaagtttgacacaagttacagtgtgtgatgatgggaggaggaatttctattttcatatttgaatttgttttgggtttttggtaaagccaaaatttgagtgagataggtgggaaaaagaaagaaacggaaaatttgaccacagaatcgaacactgggtttcatcatgtggatgatttaacttctattatg

SEQ ID NO: 28856 - DNA, 374 bp, Gossypium hirsutum
  Clone ID: LIB3197-044-Q1-M1-H4
agcactgtcacaacagatgaggagagctcgaaggagtccatcaatggggggacaagatgagtggcttgatcgttggatgcctgctaaaccatggaatatcagaggaagagcttcactggatcaaagagataatgtcaaaactgtgcgaaatggacacttgacagccttattcatatgtagcaccaaattatagaagagcaacttgaaaccattatcaccaatggcctagttcacctctccatagggctcaacacaatgcacaagctttccacccttctgcacttacaccctgtccatcaaaaacacgtgcggttcaagtacggtctgcgagccctcgatgcgttatggtataccgaacctcgttttgatcatca

SEQ ID NO: 28857 - DNA, 422 bp, Gossypium hirsutum
  Clone ID: LIB3197-044-Q1-M1-H7
atggaccctttggtattgaacaaggaactagtttctcaatgaacaaaggcaagatcgttggattccgtggcaggagtggttggtatttggatgcaattggagtgtattcaaagccagtactaaaactaaacccttcaaagcctattgttaatgcccaaagtttagctgctactgggcctgaaaaaagtggctattcagtgatccagggaagtgttggagaaagctacgacattgttctagctgtgaggcagagggatggatttgtgaatccccagccaagggaactcataaggcaaaattctagctctagtagctctgacgattcgagtgatgtagaagccaaaagcagggttccatttcggactcctatgaaagtccctccaaagttaccggaaggagtgttaacttatggaccctggggt

SEQ ID NO: 28858 - DNA, 360 bp, Gossypium hirsutum
  Clone ID: LIB3197-044-Q1-M1-H8
cttttctcccccaaaaactgttcttccctctgattttttgcctgaaatatcaagttctttgcttttgtttcttttcctctggttctttgttcctcttccgccggtgattcgcaagctcgattgttcaccctctctctattgaatttgcttctgggttccgaaccccaacgcatggattttgttaaaactgctttgtttaagaggcacagtaattacagcatttcagttgatgaaattggtatgaaattggatttcgtttgggcaccttatgtattgaatttaacccatttgttgacggatttcaagactaaaaagaaataccctaatgttatggtaatgggggctggtctatggcatatg

SEQ ID NO: 28859 - DNA, 432 bp, Gossypium hirsutum
  Clone ID: LIB3197-045-Q1-M1-A12
gattgttttgagggtcaaacaaggagacaacccaacatttggcttcttaatgcctgatcatcgactgcatccctactttaggtttcttgttgatcaccaagaacttttaagcagcaattccattgatgaagagagcaaagccgacagttctcttgatcaggcaagtagtggtagagggggtggcgctttatctttgcttggcactgtctatggttccggagaagacgaggatggtgaaacggagaatgctaccaaagctaagagaatggaatctggggaatctggggttgctatcaataaaaagtcaactgacggatcagatcagaaagaatcttctttaagtgttagtagaaaagatgatactgtaactaaacatttggcccctttgaaggaaaaggcttctctaataaaacgaaatcaatctataacatc

SEQ ID NO: 28860 - DNA, 428 bp, Gossypium hirsutum
  Clone ID: LIB3197-045-Q1-M1-A4
cccacgcgtccgcacaaagattgagtttcggtgaattcccatttactgatcccatcttttacggaatcgatcccctacaagaatatgtggagctcggcatgtctggaagcacaggagaacgttcttttgctgatattattaccagtattcgatactgggtcattcatagtattactataccttccctattcatcgcgggttggttattcgtcagcacaggtttagcttatgatgtgtttggaagccctcgtccaaacgagtattttacagagagccgacaaggaattccattaataactggccgttttgattctttggaacaactcgatgaatttagtagatctttttaggaggacccaatgaccatagatcgaacctatccaattttacagtgcgatggttggctgttcacggactagctgtaccta

SEQ ID NO: 28861 - DNA, 328 bp, Gossypium hirsutum
  Clone ID: LIB3197-045-Q1-M1-B1
gctgtgtggatttttcttttccaagggaggactatgaactctcttggaagttgaaatatctgtcattcagtatacaccggcaattgatatttggagcattggctgcatctttgccgaggtattgatagggaagcctctatttcctggaaaaagtgtcgttcatcaattggatttgatcactgatcttttggggacgccttcacctgaaactatttctggagtccgaaatgataaagcacgaaaacacttgacagaaatgcggataaaacaacctgtgcctttctcacagaagttcccaaatgcagacccgttagcagtgcggctattg

SEQ ID NO: 28862 - DNA, 352 bp, Gossypium hirsutum
  Clone ID: LIB3197-045-Q1-M1-B7
gatggcggagaagtgagagattaaaagagtttatagaagcatctcctccgagtggaagtgatttataagttggcaactcccgaggtgtctctttcacaaaacaggtgaaaaaaaagcaaagaaacagaatactactgttactgttagtattaaagaaagaaagaagcttttaaagtccagagatagaaatcaagtccaaggagaacaacgcactacagacaaattccaattatattattaataatcaaatacctataatatttatatataggaaaaccccacccttactcaataaagcttcagactgggttttctatgtgaagtttaagatttttttttctttgtgatggat

SEQ ID NO: 28863 - DNA, 305 bp, Gossypium hirsutum
  Clone ID: LIB3197-045-Q1-M1-B8
gagcaacgagcttggagttatcgagggaaagaggctaaccgtcgaggataccgaaccggagaagacagaggcggaagcactgaggaaagctttattcatcactcgacaaatgtagtgcgctgagcagagtactaccgggagtgtctagcatgactacaccggttgataatagagtgtctttcacgagatcaccgtcagtcacatcttttactttcgacaatacctcatatatatcggttgaaccacctggtgattctagccatactacagggaatttagcttcatcaatgttgattaaatgctat

SEQ ID NO: 28864 - DNA, 419 bp, Gossypium hirsutum
  Clone ID: LIB3197-045-Q1-M1-C4
tcatgcttaaaaccctatatgaaatttaaaatgttatagcaatttctctcattttcattgtcacaggaactatcaaatcgcaaaaattcctttttaacttggactctgtgtatttttgtcttgaggaggtcctcattgagttccattgtcatcgcctaaattttctgtattttattttaatacctaaatttttccgtcgtttaattcaccgtctccactctccaacgccaaaccctagttttaattgacttgtatatacatctctgaatgcatttctttgtctatcggtagtttttggtatcaaaagaatatttcttcaatcattttgtttaaatcttctctttccctttccccccctcctggtgtggtcctcgaggggtcaagttttgaaaatggatatcgagcaaaatcaagctgag

SEQ ID NO: 28865 - DNA, 262 bp, Gossypium hirsutum
  unsure (1)..(262): unsure at all n locations
  Clone ID: LIB3197-045-Q1-M1-C7
gcacaattacagatgaagacattgatagaatcattgccaaaggagaagcagcaacagctgaacttgatgccaagatgaagaaatttacagaggatgctattaaatttaagatggatgatactgctgaattgtatgattttgatgatgaaaaggatgaaaacaagtttgacttcaagaaaattgcaactgaaaattggattgagcctccaaaaagagagcgaaagcggaattactcanaatctgagtactttaaacaaaccct

SEQ ID NO: 28866 - DNA, 430 bp, Gossypium hirsutum
  Clone ID: LIB3197-045-Q1-M1-D10
atggggagcactgcacttgaggagtcctccgtcctttgctacagtactaaaacatctacagattatcgggaaaaatggtggtgaagacactcttgctcactggcctactgcatcaggcatgatgaccatagatgatgctacttatgaagttttgaaatatttggataaaatatggggctccctctcttcttcagatatagcaaagctgcaaggagtggcatttctgcctgctgcaaatggaacacgcctggtgccagctaactctctttttgcacgtttgaccattaatttggctccattttcttttgagcttccttctctctatcttcctttcatgaagattcttaaggatttgggacttcaggacatgctatcagttgcttctgcaaaagagcttctgttaaatctacagaaagcatgtggatatcag

SEQ ID NO: 28867 - DNA, 350 bp, Gossypium hirsutum
  Clone ID: LIB3197-045-Q1-M1-D2
gctataagtagggcggcattccaagcacctcatttgcaagaggtctttactcttcagctgtttttcagtccccaatagaaaagcttaaaacagaactcagcatttgtttgtctgctatttctctccatattgctagcatttgttttagctgagaggcaaaacttcggaacagcaaaagaatacagtttgtttctaaaaaattcccaaggacagagaaagcagagtagctgtgttagggaaagaaaagatggttgcacctctgtcagcttggtcctgggagaacttcggagttttcaagtatctgctatacggtcctttagctgcaaaagtattgtattcatggatctatg

SEQ ID NO: 28868 - DNA, 428 bp, Gossypium hirsutum
  Clone ID: LIB3197-045-Q1-M1-D9
gctgctacatttttctacagggcacctgagtgccgggacatccggaaatcatcgactcaaccggctgatgtttacagcctcggtgttcttctcttggagctcttaacaggcaaaactccattccaagaccttgttcaggagcacggttcggacatccctagatgggtaaaatcagtccgggaagaagaaaccgagtctggcgatgatcctaattcgggtaatgaagcatccgaagggaagcttcaagctcttttgaacattgcaatggcttgtgttgcaatcgcaccggataaccggcctgcaatgagagaagttttgaagatgattagagatgtgagggccgaggctcaagtatcgtcaaacagtagcgatcattcgccagggcgatggtctgacacggttcagagtttgcctagagaagaacatct

SEQ ID NO: 28869 - DNA, 411 bp, Gossypium hirsutum
  unsure (1)..(411): unsure at all n locations
  Clone ID: LIB3197-045-Q1-M1-E4
gttttagttccttcattttcattatcattatcatcccgatattcattcatatctctatttttctttttctccctttctatcttcttcatctctaagaagggggaaaaaccgtagaaagaaaaaaaaaaagaaaagaaacctaaaagcccatgattgttgatttgatggatctgtagatctaacgctttgagggaaaaaaaaaaaaccaacacgtatccgctccgtttcttttgatctccgttgttttcacctgctatgattcagtagctgaaaaccaaacagcttaatttctactgagaccgctctgattatttattggtttaagtatcttttggtcggtattttgcatccaatttggatgtttatggggaattggaggctggctcangtgagatgagggatgttatcaag

SEQ ID NO: 28870 - DNA, 401 bp, Gossypium hirsutum
  unsure (1)..(401): unsure at all n locations
  Clone ID: LIB3197-045-Q1-M1-F2
cccacgcgtccgcatggttggactttgccatttctccgagcttgcagatgatcacattgagaacatccaaactaactatgctgcaggggagaaggttaaagcaaagatattaaagttggacgaggaaagacaccggatttcccttggcatgaaaaattcatattttaccgatgatattgacttccaaataactgaacaagaagagtctgatgaagacattgaagagactggtgtagcagatgatgaggcacgatcaatactgttgacagacagaactgggatggatatcgagtacagaagtggagtgagcgatgttcttgctcaagcagaatctagagcttcaattcctncacttgatgtcactcttgatgacatttgacactctgacatggaaaatttta

SEQ ID NO: 28871 - DNA, 146 bp, Gossypium hirsutum
  Clone ID: LIB3197-045-Q1-M1-G12
atcgcagctaatatacagaggccatgatactgggcttgctggagattcatggctaatcctgtgatcacatccgtgcacagtcttcgtgagcgtttagatgacaccctccttgcccacaggaacgtgattttgggcttgctctcaat

SEQ ID NO: 28872 - DNA, 420 bp, Gossypium hirsutum
  Clone ID: LIB3197-045-Q1-M1-G7
ccagtattagtctctgtgtatatatatctcacctcccatcccatctttgtctgctaaatttggctctcttactgaaatcaaataaaatgatgccccctcagcaagactagcaatatcaccacccataatactcctgcccccatcatgctcacaaccagccggatgacggagaatttcatttctgttcacgctcagccatcggcttcttcatccaccaacgtcgtcccatgttctccgcagcatcccatcccatcccaacaggacacgctaactccacttccattttcagtttcgtgtcaatctttacgtcctgtaactctcaagtttgaagaagtggcatacaccatccattccagtgtcacaagcgcaagttgtttctcctcgcataaaccccaacagagaacaaatgtactgaacggg

SEQ ID NO: 28873 - DNA, 428 bp, Gossypium hirsutum
  Clone ID: LIB3197-045-Q1-M1-G8
attttccttctgaagtacgaaaaaaaaaagagtacgaaatacgcttcaattttgacgatctctccaaatttctttcttgttttcctgatccatacgctatgttttcctccactatataaaagcagacgggttttgaactgggaagtgagaagttggtaataataggccaggaacgattgaaaatggaagcgaaaacgaacggaccgagtgtgaatgcgggtcgggttatggacgggccgacgaatccgatggtcactcctcttttaaccgatctttatcagttcaccatggcttacgcttattggaaagctggcaaacacaacgaccgagccgtgttcgatctatattttcgaaagaatccatttggtggtgaatttacagtgtttgctggtttggaagaatgcataaagctcattgctaatttcgag

SEQ ID NO: 28874 - DNA, 162 bp, Gossypium hirsutum
  Clone ID: LIB3197-045-Q1-M1-H12
ttttgactctgctaactgctgattgagtgccggccgtttcttaaacagatctttttaatcgctctttaatcttaaatttctttggctctcccattcgattttgaaagggcggaatcaaagtctttgaggaaacctgtttttaccaaggtggaccaactccgc

SEQ ID NO: 28875 - DNA, 339 bp, Gossypium hirsutum
  Clone ID: LIB3197-045-Q1-M1-H3
ggttgctcatctttcaatgacaaagttttcaagtatgaatttagtccagtatagtgcaaaagaggctttaagccatgattttgctaatactggatcaccattgtacactagaataaataagaggctatggagtgctgtgaggtctatggagtccttgctaccacatgcaaaccccagaagcagctatgctgttacagatgaaaacactaatggtttcatctatgcaaaaatatttggtggattcgagaagataagatcttcgatctgtgatcttgtcaccatatccaggcttctaaatgctactcttgtaattccagagatacaacaaagtacccgctc

SEQ ID NO: 28876 - DNA, 394 bp, Gossypium hirsutum
  Clone ID: LIB3197-046-Q1-M1-A10
cggacgcgtgggatttaattttctgcgtaaaaattaaaagaaaatatagggaaaaagaacaggagaaaccctaaccatgcgattagggtttgggattgaaattgaagcgaagcgaagggattgttgaaattcggattattggaaattggggaattcgacagaaatgggaagcgaagacgctgacagtgataagagtaagcaatggtcgtctccaaacagggcttataaagggaaggaggaagaccccaaactttggggacttttcctctttggtttaattggcgccactgccaccactttcgctgttagtcaactgaagaaatcttgtgattggatgtttgctcagttagccaggtctcaattatctcaaaggggaggttcttttcgaacattc

SEQ ID NO: 28877 - DNA, 386 bp, Gossypium hirsutum
  Clone ID: LIB3197-046-Q1-M1-A8
gttttaccagctctagcctccatgtgactgcgctcacagggaaaaaaaaaccctcttatttggctctgtcaaaattaagaatcctcaataaatctcaaagaaaaaatggaagacagcgcagagttggagtcgatcctgccctatctaccgttagtaattggatcttcgaggcgactgttatggccatcgaaagtggttgaggctctggaggcgatgtccagaggtcctgatcacagcctagtcaactgtggcgaagtcctctccatcgccatttccgacatgagagcttctctttccctcgctgaccctctcgctctctctgcccccctaggctatgccctcttctttgatgagctcatgtcccggggccgactccagaaaaatgg

SEQ ID NO: 28878 - DNA, 218 bp, Gossypium hirsutum
  Clone ID: LIB3197-046-Q1-M1-A9
gtccggtgcgcccccggcgggccttgaaaatgcggaggaccgagtgccgttcgcgcccggtcgtactcataaccggattaagggttcaaggggaacaacctttggtcaatggaacaatgttagccagggaaggtcgcaaaatggatcccgaaccttcggaaaaggattgggttttaaggcctggcaccgggggtccaatccccaaccccgtgggtggc

SEQ ID NO: 28879 - DNA, 417 bp, Gossypium hirsutum
  Clone ID: LIB3197-046-Q1-M1-B1
gcggggacacctgggcttctttacatgcaccatgagtattcaccaggggcagggaaatctatacttcattcgaacagacaccatactgagtggaaaggttcgatgcaagctttgtttttgatgtgccattactttgcagcgaaagagatctataatgctatccaagttttcattgcggattatgtgtggatgactggatctgggaacttctcatattatcatgtaggcgaagattccatgcttgctaggtttcgcacagatgatatgaccactaaatttcttttttttgctgtgccagaactcaataatacttatatgttgtgctatatatgcccaatgcatactctggtctgttatggtttttggagcactcggtatataaaatgacgacaactagaaagggtcagtcatggctct

SEQ ID NO: 28880 - DNA, 204 bp, Gossypium hirsutum
  Clone ID: LIB3197-046-Q1-M1-C3
gtccacgccgcattctaaaagagacctgctcgaataatatacatagtgcgaacaaggcggaaagaagcatttacattatctaaacgcggatctaaacagaaagagcaaagaccatggtacattatcactctgtaagagagaaggtaccatttctaagaaggaaataccctgcaactcaactcatattacgcatcccccatccta

SEQ ID NO: 28881 - DNA, 335 bp, Gossypium hirsutum
  Clone ID: LIB3197-046-Q1-M1-C5
cccacgcgtccggaaaaagtgaacaagataaaataaacaaattccctcacttttcacactcacagttcctactttccaatttccttaataatacaaacaaaaacataccaaactattttcctctgaatttctcatctttccctgcaccgatctgcctttacttagtttctacatttccttctctcttttatttttttctcgggttttcttggtagttcactgaggtccttttaatagtcattcgtttttttttgtgtgtgtgtggggaaagaattggtacgcatttgagaagaagctgaaatggaaactgggtcgaactcagattcactagcaaa

SEQ ID NO: 28882 - DNA, 444 bp, Gossypium hirsutum
  Clone ID: LIB3197-046-Q1-M1-D1
gcgggcctacgcattcagtttctcgcccactaaatcgagaatggaattaccggaagagtgctgggaatgaatattcagtttcttagaacgccatcgctacttggagcctctttctttagtcctgccaagattcttttccatcaccaatcatctacgtagcagactcaccatcaccgaccctacccttgaatccctacctcatctccttctacggtttaccaatctgaccaccatggcttttcgtgatttccacggcaatctcgattccgggctttccctcatttgtcagcctgggctggccttgacctccctcgacgtgttctgacacaagtgtttccctttactgggtttgaaatgcttggcttccaaaattaggattgtgacggaattgaattgctccaacattgggtctttgaaagactctgatttgattgagatcgggaa

SEQ ID NO: 28883 - DNA, 360 bp, Gossypium hirsutum
  Clone ID: LIB3197-046-Q1-M1-D9
cccacgcgtccggccttaccatttgaatctgaagccctccagaatctcaatccattttcatttcttcactacaacccaagatccaacccaagatttaaacaatgcgccacctcaacagcaagaacaacatgttcccaacaatcgcagaaccccgcgaggtaagactcggaaccctgagaaagttgaggatatcatttgtagaatgatggagaaccgggcttggaccacccgcttacagaactccatccgtgctttagtccctgaatttgaccatgctttagtttataacgttctccatggtgctaagaactccgatcatgccctccagttcttccggggggttgaacgggctggattgat

SEQ ID NO: 28884 - DNA, 442 bp, Gossypium hirsutum
  Clone ID: LIB3197-046-Q1-M1-F11
caacgacatcgtttcggagcagtagatccgaaatggaagcctcacagtcgcaggcatcagcgaacgcagccctgaaccctcaccctaaccctaacagcaattacacaaacaatagcaattctatactgtcatcgacgccggtgtggcccacaatcgacggtccgttgggcctgtcggaggaagaatcgttagcctacgctcggaggttctacaagttcggctacgcgcttctgccttttctttgggccatcaattgcttctacttctggcctgttctccgtcactctcgctccttccctcgccttcgcccctatgttgtgttatcagcaattgggttttcagtgttttcagttattttgtcttcatgggcattgacatttgccataggagggagaacatctcttggttctaccctggatcaactggtaatataaaacgttgc

SEQ ID NO: 28885 - DNA, 194 bp, Gossypium hirsutum
  Clone ID: LIB3197-046-Q1-M1-F3
gaacaatctgatccctttttttacatgtatatgattatcccaagggatgacatatgtcggcgctactgcgattctactgttagcttcgatagaccaaaattgtcataatccgttaaacatgtacaccggagacatactgccggtaccttaatacgctaacaacttcttgcatctgggcaacaattatcattttt

SEQ ID NO: 28886 - DNA, 360 bp, Gossypium hirsutum
  Clone ID: LIB3197-046-Q1-M1-G1
gattctacttacattaaaaggctaattggtgaggctgcaattaaccaggcagttgtcaacgcaaacagaaccatctgtgatgttaagagactcattggcagaaagtctgatgatacagttgtccatgttgacattaaacttgttccctacattattgttaacagttatatgtagccttatattcaagtgaagattaaagatgaggagacctaggtttttagtcctgaagagataatttctatggctctaatgaagaccaactaaacagatgtagcttaactcgtgacgaaattaaatgatgcagtactgactatgtctgcttacttcaatgtttctcatagacaagcctcctttgatgct

SEQ ID NO: 28887 - DNA, 436 bp, Gossypium hirsutum
  Clone ID: LIB3197-046-Q1-M1-G10
ggtaatagcgttgatgtcagaaatcatgagatgaggcttcatgagattaatacacttgaatgggatgagcttctggtgacatatgatagcaatgactcatctatatctataagagacaataattcttggtttcatcaactgaaccaaacaacaggaaatggcttcttaaattatggtggccctatcttagctgataatttatcaacggaaatctgtatgcttggtaatctagttgagccagctgctcagagtaataatacttacttcaacagcccaacgactgtctgtaatacgatatctagtacccaaatgaatcctaatgtgcaacagaaagactctattgccacacgggccggtgatgcattggacctgtcgatcaatgatggctgaaatagtcagggcagtttttgaaacggggtgaactacactatcactg

SEQ ID NO: 28888 - DNA, 348 bp, Gossypium hirsutum
  Clone ID: LIB3197-046-Q1-M1-G11
ggtgggttcatcaggaattttaaactgataaaattctacccacattgtgtgtttaatccaaaatggggtcctcttattagttttagaaagttgaaggaaatcccatttttgcagtatagaaacagatttggttttcactctcttgaaatttgatttttagtgtctttctgattactgtgaatacatggagaaatcaatgtcaatggctcctctgcttttaatggtactctgtcttccttttgcattgggttggcatgactataaccaagctctcagtaagagcattctcttctttgaagctcagagatctggttatcttcctcataaccagagagtcacatggcgagc

SEQ ID NO: 28889 - DNA, 201 bp, Gossypium hirsutum
  unsure (1)..(201): unsure at all n locations
  Clone ID: LIB3197-046-Q1-M1-G3
ttttagtattttaagttgtaaaaattcaatctttgaattcagtttggtgtggtctgtagttgttggtattgttatcgaggagctatcattgaaacctctcactcttcgtaaatttgaaggctccccaatttaattnttatattatttattctgggaaatttgtttggtgggacaaaatttcgggttgtagaaccatttttt

SEQ ID NO: 28890 - DNA, 368 bp, Gossypium hirsutum
  Clone ID: LIB3197-046-Q1-M1-G6
cggacgcgtgggcgattttctgtccgattggataaggtgaatgtgccggattctgttcctccggttgtgacggtggcacaggaagttgttgcgaaggatgtaacggcgggatcagactgtggatcggaggaccagcatttgatcacggacccaatggtatctccagcagagatccagaggcaaatccatgaattacagaggatgcatattgctgctacacaagaacaaggcattttgcagagaaaaatcgatgaatcaaatgctagagcttacaatactcaagattattcaaaaatgttggataaaattgccacttcaccggcaccagtatcaactccgctgcaaatgccaattcaaaacgggtattt

SEQ ID NO: 28891 - DNA, 351 bp, Gossypium hirsutum
  Clone ID: LIB3197-047-Q1-M1-A10
ctggcattgctgcataagttcttaaatgcatgggaatcaatcttaaagatgcacgtgtataagtggagaagataattggaaggggaagtggatttgtcgctgtggagattccttttactcctcgcgcaaaacgtgttctggaactctcgttggaagaagctcgccagcttggccataattatattggatcagagcatcttcttcttgggttgcttcgtgaaggtgaatgtgtagcatcccgtgtttttgagaatttaagtgctgacccaagttatatccgctcccatgttatccgtatggatggtgagggcaataaactttagattgttactggaggatcaagtggaaaca

SEQ ID NO: 28892 - DNA, 476 bp, Gossypium hirsutum
  Clone ID: LIB3197-047-Q1-M1-A5
tttgaagtacctaagccttagggactgaaaatgaaaggtaagaagaaatatttaaaatatatgtttggtagtaaggacacatagaagaacaaaactgggtgagtgttaatgccaattgcatgagattctaaaacgtgaaaacttcaataaatccaaatctcaggtcaagtctgcatcacagaaacgtagttgttgagagtagattaagttattgaaaatatcgttaaaatattcaatatttatttaggcagcctccgtagttgaaatttcagtattttattattcgtattgtttgcttaattggctgtgctctcgcttgttcagaatcaatcctgctatttttatactagtagttcgaatttgcgggtgccgagacatacaatcaatttactacctctatcatcgcaaattctgaaagataagggatccgatctgatctgctgcaaatgggggagaatgggcgttgataaaacggg

SEQ ID NO: 28893 - DNA, 223 bp, Gossypium hirsutum
  Clone ID: LIB3197-047-Q1-M1-A8
ctcggaccaatgagtccgacaagtgtgggagggagcgctctaataagcgggaaaggctcattgaagctgattggcggcatccctcgggggtgcaccgacgaccgaccttgattttcagagaagggttcgagtgagagcatgcctgtaagaacccgtaagatggggaactatgcctaatcggggcttactcagaggaaactcttgtggaggcccgcagcgatac

SEQ ID NO: 28894 - DNA, 347 bp, Gossypium hirsutum
  Clone ID: LIB3197-047-Q1-M1-A9
gccacacgtgctgcttggtactgtggggcctacagtaccaaatgcggatgtacgcctagaatctgatgctgaaatgggatatgatgcccttgcacgcacaccacgaggtgaaattggtctcaagggatcaacattgttctcaggggactccaaacgtgaatacctgaccatggaggtcatgattgaagggtgggttcacacaggcgatatcggcgagaggcgaccatatggagagatgaaagtcaatgatcgaaagaagaacatctttaagctgtcacaaagagaatatgttgctggcgacaacctgtacaatgtttatgggtgagattctgaccttgaatcgacat

SEQ ID NO: 28895 - DNA, 452 bp, Gossypium hirsutum
  unsure (1)..(452): unsure at all n locations
  Clone ID: LIB3197-047-Q1-M1-C11
cggacgcgtgggcttttaaattccgaatcatgctttaattccataaaggtaaagaaaaaaaattgaaaaaagaaaagattaccccttccttaaggaaataaaatcaaagaaaaaaaaaccaccttttttctgtactaaacagttaatgtccatagtcaaataatagtaatttgttctgttatttcctatgaaagagcaatgggaaatatttctaggttttgtcttttataggtatatatgtgtgtttctttctttttatggtgcaggatcttcaaactctgagagaagaaattcaatccaaaaaaagaaaaagaaccccataagatgaggattaatgggagttgggagttgattttttattgattntttcaagtgatattgttatatagtaaaaaaagatgaattcaaaaaatcaagtggagtcaactctcaaggaaatactcgaagtggtc

SEQ ID NO: 28896 - DNA, 456 bp, Gossypium hirsutum
  Clone ID: LIB3197-047-Q1-M1-D10
gcgttggtcacaacattcaatgttgagatagggattactggtgccattttgacaaagctagatggggattctcgaggtggtgcagccttgagtgttaaagaggtgtctgggaagccaatcaagcttgtaggacgtggagagcgcatggaggacctagagcctttctatccagaccgcatggctggacgtattttaggaatgggtgacgttctctcatttgttgagaaagcacaagaagtcatgcgccaagaagatgctgaagagttgcaaaagaagataatgagtgcgaagtttgatttcaatgatttcctaaagcagacccgtgctgttgcgcggatgggttccatgacccgtgttattggaatgatccctggaatggggaaggttacgccagcccaagttcgagaggcagagaagaatttaaagttaatggaggcaatgattgaagccatgaca

SEQ ID NO: 28897 - DNA, 186 bp, Gossypium hirsutum
  Clone ID: LIB3197-047-Q1-M1-D6
ctactcaacaccagagcctttttctttctgaggggagagagatatcagggaaggtgatggctttcaaaaagcgtcaatttactatcgttgaaaggcttacctctctttacactattgtccgaccatttgtaaccggtgaaaagcacccaagccacttccttgtgattcatggcttacccagtgaca

SEQ ID NO: 28898 - DNA, 174 bp, Gossypium hirsutum
  unsure (1)..(174): unsure at all n locations
  Clone ID: LIB3197-047-Q1-M1-D9
cggacgcgtggggtttgcttgaggctttaacagtgccggatattacttgattttatgaggaatgcccttcattatactgattgtggccattgctttttccaaatcaacttccttgtactcaaatgccccagtgaaacaaataaattgtaccattgacatactgtgcataacana

SEQ ID NO: 28899 - DNA, 229 bp, Gossypium hirsutum
  Clone ID: LIB3197-047-Q1-M1-E10
atcgaatcatttacttgccatgccttcttatgaggagcattcattgaaagaagttgttgctttctgcatattcctttcgcctccgcacatttcaccatgttccttgacacctatatgtattagatcgaaatcccatttccctttacttgcagttcttctcttgaccttcatacttgttccattcttttcaattaattcaacattccacaaaatccataaaagcccgaat

SEQ ID NO: 28900 - DNA, 416 bp, Gossypium hirsutum
  Clone ID: LIB3197-047-Q1-M1-E8
gctaaaacactgtaaaaggagggggggcaaaagttggcgccaaaattttgcttcttaaggtgctttttaccgctatcgcaacgtcttctctctctccctcccacgttctgaaaatgcagcgccaaaaatcgatactctcgttatggcaaaaaccttcgccggcgagccaaaacggcgctgtcggtgaggtaaaaggtcaaggagcttctctgtttccttctaaacagaacctgaatggcgacgtttgtggctcctctttagaagtcacaggcactgatactccaccggagaaggtgcctcgtaaggttttaccggtaaacttcgcatcgaatgccgaggctaggggttcctcttctctggtttctagtatcatgcacaagtttgtgaaggctgacgacagagaaaatggaagtcag

SEQ ID NO: 28901 - DNA, 464 bp, Gossypium hirsutum
  Clone ID: LIB3197-047-Q1-M1-E9
tatactttagctcgagttggaagggccagagatatcatcacactatctagtcattatgtgagttgagaagattgtatatcatcatggtttaaggcatgtataggatagactataggtagaatgatatttcgactttgtatacattacagccatgcgaagatggcttgctcattttgtttagagaagccttataattgaactaatgtggtgaaatgttttagttataacttgatagtagttaatttgttattagatattcggttatgttttgatagtgagtcattttagaaatttataagagctcttatggaaaatcaatgatacatgtttgcattgttgataatttatgtctggtaagtatctttgaccttatataagttttttcagtcaagtaataccttataaccttattccggcaacggatacaagttaagagtgttacagaaaaataaaattatatttgc

SEQ ID NO: 28902 - DNA, 385 bp, Gossypium hirsutum
  Clone ID: LIB3197-047-Q1-M1-G10
agatgcgagaactgaagtactggggcctcctccactgggtccgaatgagggggagaccccgcccctggattctggaagacctcaccatgggacgcccccgacctcgtgcagccaatacgtggatgttcctgctcttgctgggggaagcctgggcaggacactccattgcacaggaagacaaggtgctggggggtcaagagtgccgaccccattcgcagccttggcaagcagccttgttccatggcaagcaactactctgtggcggagtccttataggtggcaactggatccttacagctgcccactgtaaaaaaccgaaatacacagtacgcctgggagaccaacacctacataaaaaagattggccagagcaagatatacctgt

SEQ ID NO: 28903 - DNA, 357 bp, Gossypium hirsutum
  Clone ID: LIB3197-047-Q1-M1-G4
aaacattcctatctaattctctcccaaacaatggtgaatttttttttatagatgatctgtttgcctttaaagaaaacgaagcaaaacccacatatgtttttcatgaaattcgattcacttttaatatataagtcttgcccatatatatatacatatatatatattggcttgaatttttttcaattttgattgccctttgatattctaacaaaggtcgaacatggggaatttcaatgccaccgacttgaacgagcgacggaggaactccatccggcagatctacactacgcaagctcaacacccaccacattcctctcgttaaccgcaaacggggttcaacgccgacccttactccta

SEQ ID NO: 28904 - DNA, 370 bp, Gossypium hirsutum
  Clone ID: LIB3197-047-Q1-M1-G5
ggccaacgtacaaggagggtgtcgggtcggctgccaagagttttggtcttggctccgactcgggagttagccaaacaagtggagaaagaaattaaggagtcggcgtcttatttgaacacggttagcgtttatggaggggtttcttataatttgcagcgaaatgctctttcccgtggggttgatgtagtggtcggaactcctggtcgaatcattgatctgatcgaaagtaaagacctcagattgggggaagttgaatatctggtccttgatgaagctgatcagatgcttgctgttggatttgaggaggctgttgaagagattttagaaaatctaccatcaaagaggcagagcatgcttttctctgcaacca

SEQ ID NO: 28905 - DNA, 354 bp, Gossypium hirsutum
  unsure (1)..(354): unsure at all n locations
  Clone ID: LIB3197-047-Q1-M1-H5
aagagattaaaggtggactttcagctttgcgaaatgtgggaaaacctacaaacaatggtgccctaggaactgctagtgctcctatccacatggtgtcttcagaatcagggaattttaaagatcaattgtggcgtatttttcgcagtcttgcacttggcttcttgttgatttctggtattggtgcacttattgaagatagagggattagtaaaggacttggtctacacgaagaggtgcaagtggtggaatctaacacanaatttaatgatgtcaaaagcgttgatgacgcgaacgcagaattaaaagaaaatgttcactaccttcgagatcctaaagcgtttactcgtcttggag

SEQ ID NO: 28906 - DNA, 387 bp, Gossypium hirsutum
  Clone ID: LIB3197-048-Q1-M1-A12
cggacgcgtggggattgatttgcgtttgtccttgaaggaagagacactaaaagcgaaaagagagaagaggagaaaatcagccgccgccgccgccattgccattgccttcgccgacgccgacgcccattttccattagcatcggcagctgtgatttactgtctatatataatataaccataatctatgccagtcccagccttcgggtattcttttatttccttatgaacgccttggacaagccgtgttgctcctcttcctcctcctcttccaatctcagccgcttcattgccggcctcttaatctcccttctcttccattcattccagctgatttctaatttcctcactcctatacacccgtaattcttcgtttctaatccatggatc

SEQ ID NO: 28907 - DNA, 317 bp, Gossypium hirsutum
  Clone ID: LIB3197-048-Q1-M1-B12
gaaaaaagcacagaagataaaaatgggggagaatacaaataaatagaagaaaacaaaatgtataataacatatgaaaaaataatagaaaacgtctcaaaataaaaactaaaaaaatatgacgaaagggacaaaacatgttaaaaaaaagtcaatcaatagaataataaaaagtgctaaaaacgaatgaaagcaacaagaaggagaatgatatatcgaatacatgcctacacgtgaggagcttatgaaaacaaaacgaaatgctgtgaggaaaaattgcaaacagataatgccataaaaaaaaaaaattaaacgaaaa

SEQ ID NO: 28908 - DNA, 342 bp, Gossypium hirsutum
  Clone ID: LIB3197-048-Q1-M1-B5
cacaagttcattggggaagaaaccactgctgcttggggggcatcaaagctgactggtgagcctacctggataggtgatccccttgatgggaccaccaattttggtcatggggtcccccttggggggggctcccatgggcctaccattgggaaaggttctaccaatgggggtggttaccaatccattatgggagaaccctttactgtgttgaccttgaaaaagggcctttcttaaccgggcccccattagaagtttattttcaaaccgaccttgggaggcttttccttccaccaaaggtgggaccaaaccaaattaggttaccgggggtggttcctccaaccc

SEQ ID NO: 28909 - DNA, 325 bp, Gossypium hirsutum
  Clone ID: LIB3197-048-Q1-M1-H2
ctttgtgaccattaaggttgtgatctaaattagccctatgaatatagcagttcattgttaaccttgatacatgttccttcttcacccaatgatcgtctctcaattttagatcaggcatggcaattgtggacctactgaatctctagaaatccaaagacaacttggtgctcgatcacctgttttttatcggttggaacaagttagtaacagccccagttctgttgggtatatgaggctaaaggagttcaatgcattggctagaaaagatctggtcatgggtaattttatttttattttagtggatctcacctgatggctatttatg

SEQ ID NO: 28910 - DNA, 445 bp, Gossypium hirsutum
  Clone ID: LIB3197-048-Q1-M1-H3
aaaataccattcaatcaaatgaaatctcttagggaatcatgctacaagatgttaaacctaaatgttgaatagctagaaggtttccagggtctcaccctgtttcactcaacagggataatttgcaacttttgaggcaacattactattatgctacatggaaagctgatgggactcggtatatgatgctaataactgtcgatggatgttatttgatcgatagacattttaatttccgaagagttcagataaggttcccatgcagttacggaaatagtactcaccattataccttgcttgatggagagatggtgattggtactttgccatgttctcaaaacaaggaaagaagattcttggttttcgatatcattgcttgtaatggaaataatctgatggagaaaccattctctgaaagatggaatatggtggagaaagaaatgatcga

SEQ ID NO: 28911 - DNA, 430 bp, Gossypium hirsutum
  Clone ID: LIB3197-049-Q1-M1-A1
aaagataagaaagtaaaacatggaattcgaatagctggcagtgtaatcacagcaggacttgctcttgctgcaaggggtaagaatcctatgagtcgatctgaagatccattctccgctttgtctgcgtggacaccatctctatgtgtaaatcctgcagaccacctatgctccgagtacattggttattttgagcaccgaaaaaagatggaagagattggagctggggctattgagaggttagcaacccaccattcattgggaggcctatttatgagtgtcggacgaaagggtgtggaagccgcggaaccactgcatctgcttccttctgcaaatctgacagggaatctgagtccttccaatgatttcaagcacgcccatgggatccacccatggtggagacctgacctgagcttgaagtgcagtctttaca

SEQ ID NO: 28912 - DNA, 235 bp, Gossypium hirsutum
  Clone ID: LIB3197-049-Q1-M1-A10
gggagctggtgcttggggaagtgtgttcgcagctttgctgcaagatagctacgggcagtttcgagacaaggttcaaatcagaatatggaggaggcctggaagagcagttgatagagctaccgcagaacatctctttgaagtgatcaattccagggaagatgtattgaggaggttgatacgacgttgtgcctatttgaagtatgttgaagctagactaagcgatcgaacactattt

SEQ ID NO: 28913 - DNA, 262 bp, Gossypium hirsutum
  Clone ID: LIB3197-049-Q1-M1-A5
aaatcgcctgaagtcatctctctcaaacgatggaaaatttcaaggggcaacctcgtcttccaaaattcgcggtacctaagcgctacgatctccagctgaagcctgacctctcggcctgcaaattcgccggttccatctcgatcgacgttgacatcgtcgccgaaactcgcttcatcgtcctcaatgccgccgaactctctatcaaccctggatctgtctctttctcccctcgtaactcttctaaagtatttgatccgaaaaa

SEQ ID NO: 28914 - DNA, 226 bp, Gossypium hirsutum
  Clone ID: LIB3197-049-Q1-M1-A6
ctgagaaagagatgggcaggacgaaaggagtggcggagttcgaagaaacggcgccggttgacttggacccggacgatccctacaaagaccctgtggccatgcttgagatgagggagcatataggtcgagagatatggattgacattgtgaaagccaagatcctgcgtgacatggtcaggtggtgctaccgcatctattgggtcaaccatgtgcagaagtgccggca

SEQ ID NO: 28915 - DNA, 456 bp, Gossypium hirsutum
  Clone ID: LIB3197-049-Q1-M1-A7
cccacgcgtccgatgctatccttttttctttaatttccaagtacatttcttcattctttttttattgcccataaacatgccaaaattttcctcaccctcttcctatttcttgctcttctcgcttgctctttgtttctactccagttccaatgccggtagcagccatgaatttccggtaaatgtgccacctgctgagtttgcaggctctctaaggaccaccattgatgctataagaaaagtgatccccatcgtttcccagtttggcagcttttttggtgattttcgactttctaatgccatttctgattgccttgatctcttggatttttctgctgatcagctaagctggtctctgtctgcttcccagaatccaaatggtaaacacaacagcaccggtgatgtagcttctgatttaaggacatggttgagtgctgcaatggcaaatcaggagacatg

SEQ ID NO: 28916 - DNA, 319 bp, Gossypium hirsutum
  Clone ID: LIB3197-049-Q1-M1-B11
cccacgcgtccgcagcatgaaagtgtattggttatattaagagcaaatcttggatgagtatccaaaagttcagtcattatcagcatttacaatcatagtggcatattggaatgcaagctaccactgtaagtctgctcttaaactttcataactgattcttatgaatttctatatttctatctctatcttgtccagcccccttatgttttatgtagcaggaactcaagttgatatcttaactttgatttgttttctctttgaattagtgggaagggaaatttttcttatcaattggtcttttaagatctttcctttcttt

SEQ ID NO: 28917 - DNA, 365 bp, Gossypium hirsutum
  unsure (1)..(365): unsure at all n locations
  Clone ID: LIB3197-049-Q1-M1-B12
gctagatgatgcaattctggcatttgtgtacacaaacggataccgattccaaccatccaaatggagaaagactgatgaaatcccttttgatttcatgagaagaagagtatcggttattctggaaacagaatctaatccagaaggcagaaatatccaacccttttacagattcataataaccaaaggagcacttgaagatgtgctcaaagtttgttcttatgtggagaatgtagatatgggtgagataacagctgtctctgcagaacaccattcataggatcctaaatgtggtggaagaaactanaaatgagggattaaggattataggagttgcaataaagaacctgcagcaaacaaaattaagt

SEQ ID NO: 28918 - DNA, 427 bp, Gossypium hirsutum
  Clone ID: LIB3197-049-Q1-M1-B3
gttcccgtgggtgaagacatagcgacatttgaactggatctggctgacaaacaatgtgaggttgatggagatacaggctcactttggcatattgctaaagccattcacaagcttgagtctacttttggagttataccaaatgatgcgtgcaaaatgcaaagcatctgatcttggatcatatattatggatcgcatgcacacagaggagcccatgaattcatgtgatatggctatatcagagattaacactctcatcctcatagatagggaggtggatattggtactcctatgagttcacagctgacatatgaagggctacttgatgagttcttgcgcatcaataatgggtctgtggagcttgattcatctataatgggtgttcaacatgatggaaaaaagatgaacgtcccacttaattcaagtgac

SEQ ID NO: 28919 - DNA, 282 bp, Gossypium hirsutum
  Clone ID: LIB3197-049-Q1-M1-B6
atcccagagggcttctcccacagcagtgatgccataaccaaagaggagattcagagcatctctgagaagatctacagggcagacaccaacaaagcccagaaggaagatatcattctcaatagccaaaactgcatctccccgtcagagaccagagaccaaagggatcgctgcccaaagccactcttcacttatgtcaatgagaagctgttctccaagcccacctatgcagccttcatcaacctcctcaacaactaccagcgggcgacaggtcatggggagcac

SEQ ID NO: 28920 - DNA, 457 bp, Gossypium hirsutum
  Clone ID: LIB3197-049-Q1-M1-B7
ggctttgtgtgcaatagtagttctccgagttcagtaaaggcaaaattttcaggaccattgaaatttggggtggctgaagaaagatgtgttttcagaaatatttataagtagaaagattataggagcatgtcattttcttcaggaattctcttaagattatttaggtgttcctccaatgtaaaactagaagttagattatcttttttctttaggacgtgttgttaaggaaagcattcaaagaacttgcaggagaaaaaagatacttgtgagtgtcaggaataagaaaagcgtaagttatttttatacttccaaggtatgatttgtggcactaacaacatattcagtggaagaaactcctcacaagttataatggtcatgtaatgtctaggttatgttatgtgttgtcactcaattcgatatttatttgcttggatttgtttcattattaagctgtctg

SEQ ID NO: 28921 - DNA, 390 bp, Gossypium hirsutum
  unsure (1)..(390): unsure at all n locations
  Clone ID: LIB3197-049-Q1-M1-C2
caaggttgcacagttgccattcataatagttagaaaagcacatacataaaagcattgttagcaagctgatgaatgacacatacagcatttaaagcatgtcaattaactattttttggttgcggagacctttctaaggaaatctgtgatcaaataatgatggaaaactgattgaaggcagaggctgaaatgtaagccgacagtttcccatgttgccatttatgtttgaagtttcttttgtgctaataaaagttgctaaatcagggttgactganaaaaaaaaaaaaaaaaaaaaaaaaaaaaaaaaaaaaaaaaaaaaaaaaattntaaaaaataaataaaaaaatggggggccccttttaaagatccaaatttaactaccccttctttcc

SEQ ID NO: 28922 - DNA, 369 bp, Gossypium hirsutum
  Clone ID: LIB3197-049-Q1-M1-C3
gtattattacatttacatgtgatgttacttgcaaaaaagaaaaaactgagagctgcttttccttttcatccatgtttcaagcaaagaacaactctgccatatgtcttaatcaaagtaccttaaacgatgtctcgtcggtgctgtcgccgtcgataataaggtgtctcagcgatatatcggagatggacacggttcatctcagtgtcgatctagtgtcggcggcgagacgaactgttgggttcttgagaagtgttaatgaatgtcagtggcttcatcagagaccaactattattgaagcaataaggaggtatgataaggtatggatgccattgatttctaatctgacggtggtggggtcaacgcctcctt

SEQ ID NO: 28923 - DNA, 308 bp, Gossypium hirsutum
  Clone ID: LIB3197-049-Q1-M1-C4
tgatgaaccacttattctctttttgaaagcaggatgtataacgctatcgccagaatctagctcctctatcctggaaatacactctttcattcgattcacgaggactggcattgccgaaatgttacttgaaattttttctttaagcagctgtatcttctctttcgtccttttctcagtatctaattctctatcttctgaatctataaaaatcaaaatcttagtcaattatcaagagagattattcaatcccgatttcacaaacccctaaaaagtttagggccctacctggattacgctctccggatgat

SEQ ID NO: 28924 - DNA, 422 bp, Gossypium hirsutum
  Clone ID: LIB3197-049-Q1-M1-C8
tgtagatgctgataatggctccaagaatactgaggaagaaacaatacagtttaaaactatgacagttgagacatgtgaccaagcaataaaaatccatttatcagtacattcagagtctaatgagattgaggatgataaagttcttgatacaccaacctctctggatggtatccaccagttgcacaagaagttgctattgctcgaaaaaagagaaccgggaacggaagattcattggatggaagtgtttttagtgacattgagtgtggtgatggactactgactgttgagaagttgaaatcagcattaaaagctgaaaggaaggctttaaatgatttgtataccgaactcgaggaagagaggagtgcttctgctgtagcagcacaccagacgatggcaatgataaataggcttcaagaagaaa

SEQ ID NO: 28925 - DNA, 384 bp, Gossypium hirsutum
  Clone ID: LIB3197-049-Q1-M1-D11
cggacgcgtgggcacaattgaaaatgttgaagagctgcagaagaaaaacccttctgtttgcataaacggaggtgaaactgtaaatgctggggtagaggtagctaattcggaagttgaatatattgagtctgagaacttgggtgatctagaagatgttaatacctgtcttgagaagctcttacctggacttgaatccaaagattgggttctggttgttgaaactctcaacaatgttcgccgattatcaatattccatagggaagcaatgcatagtatgctgggtgatttgatcccacttgtagtcaaatccttgaagaatccaagaagtgctgtttggtaaacttgcaatatgacattcgcagacatcttcagtgcatataatga

SEQ ID NO: 28926 - DNA, 414 bp, Gossypium hirsutum
  Clone ID: LIB3197-049-Q1-M1-D7
ggaaggtttccggtgctggtcgacagctggaattgaacaccgcaacagggacctcactctgctttggccaacttttattagccacgtccccataaccaaaacctcatcttcagctttaggattggtagcggtcgattcattaaagaaaaaaaaacgaatatttctttgttttgcagttggtcacgtgcttgtcagatataaatgttaaagagtttaaattataatatttagatgactataaaatgttgattttttgatctccactaataatatatcacgtcatttattttaaaaaatttcctaattaatgccatgtactccaactctaattattctaataatatcggtaaagcaagattatggttcaaagttttttaatgcacaagtttttaagtttagtgcttaacgttaatg

SEQ ID NO: 28927 - DNA, 237 bp, Gossypium hirsutum
  Clone ID: LIB3197-049-Q1-M1-E3
aatacggacatcatggtgaggaatgtgaactgagggttgcttacatagcacctactcgacctacttcacctgctaaagaatgatccatagtaggctcttcaccttgggcttgcgcctcagacaatggtctctacaacactgcagatttggcatctaaaatggctctcatttcctagctgtatgaagagaaaaacgcctcccttctggagaataacatgctccagcatgaactggaac

SEQ ID NO: 28928 - DNA, 369 bp, Gossypium hirsutum
  Clone ID: LIB3197-049-Q1-M1-E4
atttggtagtgttcatgaaaagcttcccgagacagggagcacgcgtagtatgctttttccgaattttggaagcatgtttagtacagcagagcctcatgctagaaatgaacaatgggatgaggagagcttgcagagagaaggtgaggactatgcatcagatgctgcaggaggagactcggatgacaatttgcatagcccattaatctcacgtcaaacaacaagcttggaaaaggacatggttcccccagcttcccatatcagttctctaagcatgagacgccatagcactcttgtgcaagatgttacagaatcagttggtggtacagggattggaggtggttggcaagttgcattgaaatggtctgagcg

SEQ ID NO: 28929 - DNA, 267 bp, Gossypium hirsutum
  Clone ID: LIB3197-049-Q1-M1-E9
cttgggtttcctgtttcactacccaatcccgatcaactgtacgagaagtgccgcgatgcagtgtttaaatgtgggaatatctccattggatatcctttctctggaggtgatcgagatccagaatgcggacatcctggtttggcgcttcactgtgacgtttttactaataccactaagattgaaatttttcgtgtaaagtatgaggtgctggacatccatcatgaaaatcaaattctaaggattgcgagggaggacttcatcaagaat

SEQ ID NO: 28930 - DNA, 313 bp, Gossypium hirsutum
  Clone ID: LIB3197-049-Q1-M1-F1
aaataatacacaagtcattttgaagctttcgcttgaaaattcccaatagctttaccagtacaaagtcagatctgtggagaatttttgtttctgcttggtttaatcggtcgtttggtttaaggatataaactttagtaaatacatcaaaatgagccatcctcaagaaccacaacgctctttcttccattttggaaatcctttccgttcaccaaagggttctcatttgccttctgggactctttctttattgggataagttgagaaaaccttgtcagagaggctgcagaaacttgtgcctaaagacaagagtgac

SEQ ID NO: 28931 - DNA, 348 bp, Gossypium hirsutum
  Clone ID: LIB3197-049-Q1-M1-G4
aaaataaaaaatattcttttcagtttatccctctttctctttcaattttcttcgaaaataaacaaatgggtctttttggtttgcttagttccatcaactgggactctgagttttacccacagctcactgatttcgtttacctccctttctttgctcttttcttcctttttgtcaggcttttcctagacaaatttatctttgagaatttagctaggagactggtccttggtaaaggccacaccttacatgatgttcagaagcatgataacaggaagaaactcaataaattcaaagagtcagcatggaaatgtatctattttttttcctcagagttattatctatatatg

SEQ ID NO: 28932 - DNA, 447 bp, Gossypium hirsutum
  unsure (1)..(447): unsure at all n locations
  Clone ID: LIB3197-049-Q1-M1-G5
agatagttgaattctgtatccatgtgaaaactcctgctgaaaagatcggtctcatgaagcagaggataatgagctacattgagcacaagagtgaccactggtatcaagatacgatgattatattcaaggagcttgaagagttgaatcgagtaaggatagcaatatgggtgacacatagaatgaaccaccaagacatgggagagaggtatataagaagggctctcttgatcgaagagctagttaagattttcaacgatttggatattaaataccgtctgtaccctatcaacatcaacgtctgtagcatgccccccgcaacatcggaccgacttcctncgaattggagtggacctgccagcttgacaaagtcnttttggtattgggatatggttaggctacagggagaggatgtttcaantagatgattagatgccaattagtatatat

SEQ ID NO: 28933 - DNA, 239 bp, Gossypium hirsutum
  Clone ID: LIB3197-049-Q1-M1-G7
cttcaatgtgcaccttcttagtgttctttcacactcccaagctaatgcttcaactactttcttcctcatctaccttcatttcctcaatggccaattaattttatttcattttccttttttttattctcaaacagctcaagtccaagtttaaagggctttatttcctggtttttgattgaaagagttttgctttgctttggtgaaaatgtttagcttttctcgtatacgcatgaaacttg

SEQ ID NO: 28934 - DNA, 133 bp, Gossypium hirsutum
  Clone ID: LIB3197-049-Q1-M1-H1
cggacgcgtgggttgagttcttattaacggaatcatgcctgcggagatggtgataatgccccaatatccctagatcatctacattatggagatggcggttgcgctttcgacttacgttaagctgactttggat

SEQ ID NO: 28935 - DNA, 318 bp, Gossypium hirsutum
  Clone ID: LIB3197-049-Q1-M1-H11
aaaacatgtaaaattaagactaaccatttgaatcaaaccaattgaagttaaaaatacatattttggcgaagatcagcaaattgcgtcccaaaagattgaagaaccgttgaaacccccgtccagatatatataattccctgcattcaaaggaaaataaatagaaggggagaagaacattctattgagattctttcttttcttttcttttcttttaacgatgaacgctcaccatgcttccctatgtcgacggacgctggaggagattcgtcaaaagagagccggcgaaagaatcagcaaagcttcttgcggatcggatct

SEQ ID NO: 28936 - DNA, 309 bp, Gossypium hirsutum
  Clone ID: LIB3197-049-Q1-M1-H5
gctcttgccactttcatttcttttatatatatacaagtaatcatcttttcttttgcaaacccagaattgaaatttcttcatctcttttttttttttgggggggggtcttgcaaaggcttttctccaagttaaatggacgagtcttggcgaatgtgcatgggaatgtcaactactcatcatcttcctcgacggaaatctatggaaaattccattttttcgttgaaccatgtcactatggtggtgccagatcataatcttgacgtggatgacttttccgatgtcttcggcggtcctccgcggagtgtgctt

SEQ ID NO: 28937 - DNA, 409 bp, Gossypium hirsutum
  unsure (1)..(409): unsure at all n locations
  Clone ID: LIB3197-050-Q1-M1-A1
gtccgatgatgacccctcgatcaacttgatatggtcagaggcatttctccatgacttgtcggagaacttccatggcactgattcttggtggaaagaatatagtgaaattgggacatcttcaaaggaggagacctgtttttcatggttggtgggggatgctggtgacgatgatgggaacttgggatttagtggtttcagtgaaatattagggatgaatttgccttgacatgggtggcaagttttagcatgcaccaattagggactgccctgcctttgtgcacgcatgtgaacaatgaaaagaggcattatgtgttcgttaatagacctcattaagctntatgtctagattaattatttatgattacaggggatcaataaaagtgaaaagacttaagaaagctttcatgtc

SEQ ID NO: 28938 - DNA, 377 bp, Gossypium hirsutum
  Clone ID: LIB3197-050-Q1-M1-A3
atcccaagccaaaaaggatggctaaatgctcctgggagtcgggcgcagcctcacaccagctgcctcctccactcagcattccatggaccgaattgtgccctgggtggcctcagacttttgggtattgataagcagatggatttgagtttttctaaagaatattcgtattacctccttcttctaacttgccctatttgcaaaagcacttttgtagtaacaactattgagtcctgtcagacctccacggacagcaaagtggttttaatgcaagcccaaggatcctttgggtcttatctcaagagctctgggaggtggaagcatggggtgtgatcggtggaccaaggtgataagcgtctgtgcatctgcctgtccctata

SEQ ID NO: 28939 - DNA, 398 bp, Gossypium hirsutum
  Clone ID: LIB3197-050-Q1-M1-A4
aaagaagcagccttattcatttctctcaatttcccccttttcattttttgaatttgcaaattttatcaatcttgtttgaaaattcgcttcgatttctcgaattccaaggtattgccatttggaatttaatctatttccttatttggttattgatattctctttcgatttcgaaattttcgtaatcaaattagggttctccttaattgccgattcgaatttacgagaattcgatcgataaaaccctgattcagctcctacccatttcaattccgaccaaaacacggaaaacctggttttcgatttctaaaaggaaaaagaacactcgcacttcaaaaatctcggttaccttttccgaaaaccctttttctggttctaattcccaattaatcccaaagaa

SEQ ID NO: 28940 - DNA, 374 bp, Gossypium hirsutum
  Clone ID: LIB3197-050-Q1-M1-A6
tcccgggatccaagaaacaagtggccttggagaaacgcagagcagcccagaaccagtggcaactacaacaggagaagcatctgcagcatctggcaaaagtttctgcagaggtgagggagcgtaagacagggactcagcaggagcttgagggggtgtttcagaaacttggaaacctgaagcagcaggcagaacaggagcaggacaagctgcagaggtaccagaccttcctccagcttctgtataccctgcagggtaagctgttgttccctgaggctgaagctgaggcagagaatcttccagatgataaaccccagcagctgactcgaccccaggagcagagtacaggagacactatggggagagatgctggtgtg

SEQ ID NO: 28941 - DNA, 261 bp, Gossypium hirsutum
  Clone ID: LIB3197-050-Q1-M1-A7
gcggaaagagaccttccatctttcctctgtgatgcttattctacggattctgtatgcatctcccaattttcaaaaacctaatgataatgtgagagagcgcaatacaagtactcaacaggagcttggcgatggcaacaaaaattgccatcctagaatcatcaaggaaacacgaccactacatagtgaacatgctccagaaattactgcattaccatcagaggataatatgcaacatttcaatgcgataatccttggtcccac

SEQ ID NO: 28942 - DNA, 401 bp, Gossypium hirsutum
  Clone ID: LIB3197-050-Q1-M1-A9
ctaatatacacatttctaattttctctcaagcttcttgctggtgtgcgggctatggagagttgataaatccgttggttttcttctttgtttctcaatccaacttcatcaagcttcgttttcctgcaaattcatacgctttcgatctccattatctctaaatccaagttctaaattttgttgctgactggtgaagcttcaggtatgtgggcaggtggctttcgagtcgactttaagactgatatagtcctttacctacaaatttttgtttgagaatttggggtaaaaattgctttaagtaaaagtaattacatgggaattcagacaatggggtctcaaagtgatagtggtagtaatggaaaacagttgcaattccagcagttaactcagcaaaattcgatgt

SEQ ID NO: 28943 - DNA, 425 bp, Gossypium hirsutum
  Clone ID: LIB3197-050-Q1-M1-B2
gacttttgcaaggataagaagaatgaaatgaacatctttgttcacacgtacatgcaaaagacaacttatgttacatatcacatcaaggatgtcaaactacagtttcctgttttcaaagaggcaatggtgcgccaggaagatctatttatggaccttaagttggtccgtggaattggtcctgcatatagagcatgtcttgctgaaatagttagaagaaaggcttctatgaagctttacatgggcatggctggtcatctggccgaaaggctggcaacaaagagagaagttgaggtcaggagacgagaggagtttttaaaggcacatggtttgtatataccgaaagatgtactggcttccatggggctatatgatacccctaaccagtgtgatgtcaatatagctccttttgacacttcattgctcga

SEQ ID NO: 28944 - DNA, 217 bp, Gossypium hirsutum
  Clone ID: LIB3197-050-Q1-M1-B4
atgcatactagtttatcaggtcgtgtaatttacatgctttctaatataaaaacatatataaagttcgtattggattgcatttgtcaatgtttttatttcattaccctcaaacacaaacatagacacacttgcactgcatttattattactggataagggtgtatcatgggcgtttttaactttatgtatatttatgggcatgtcttgtttcaatttc

SEQ ID NO: 28945 - DNA, 435 bp, Gossypium hirsutum
  Clone ID: LIB3197-050-Q1-M1-B5
cggacgcgtgggttgagaaggaaaaaacagattcaaaaccctaaaccatacacatgtgaaagaacaaataccaatattacgacgaacttcgtcatcattttataaggggaaattggggataaccccaatattatgattgattaaaaatatatataaaaggggggggggtcacagactcacagttagtgcagactgctctgtcctgagtttcgtgtttaaattgaaatgctcgtttggtgtattaaaaggcagattgctttagccaacgccaaaaatctgattctgagtctcacttgtttctcatcacaacttactcgcagtgcaggtatgtcttcgatggcagagaagaaagatgtggacaaagataaacccatcactcgtgttcttttttgcggaccacattttccagcttcacaaatttataccagagagtac

SEQ ID NO: 28946 - DNA, 322 bp, Gossypium hirsutum
  Clone ID: LIB3197-050-Q1-M1-C2
ctttgacgtcaaggcattaccactccttctttgagctgaagaagatggcatttttaacgactatgggcgaattagacaaagctctgtggagctattaggagatcgaacagttaacgttgccggaacttgcgcaaaaggctatacgtggagggtggcaacgatgaggagcgtgcttgcactgaaggacagctgcagactatcatggaagttcggagaaggggtaaggacattctacggcttagtgcggtaacaaaggatccaactgtagtgaggaatactggacacgatgctgacatagatggaaagaagaatgttgctaaag

SEQ ID NO: 28947 - DNA, 208 bp, Gossypium hirsutum
  Clone ID: LIB3197-050-Q1-M1-C3
tgcacaactaaaggagtataggggtaagattgaagctgagcttagcaagatctgtgatgggattttgagccttcttgaatctacctattccttggctatctgctgagtcaaggctaccttaagataagggtatacagttgtggttaactggctgaggagaccaaccttgtgctcagtgtcagatgttgtactgtcatacatagggtgt

SEQ ID NO: 28948 - DNA, 432 bp, Gossypium hirsutum
  Clone ID: LIB3197-050-Q1-M1-C4
atcaaaggaaatcaattttccgtatcccctggggttgactctgcttcacatggtcttctcgtctgttttatgtttcttactcactaaagtcttcaagattttgaaagttgaagaaggaatgacgttagaaatatacacgacatctgtgatcccaattggtgccatgtttgcaatgactctttggctgggaaacactgcctacttgtatatatcagtggcatttgcacaaatgctgaaggcaattatgccagtagctgtattcatccttggagtagcagcaggactggaggtaatgagctgcaggatgcttttaataatgtcagtgattagctttggtgttctggtggcttcttatggagaaataaatattagctggattggagttgtttaccaaatgggtggtgttgtcggagaatctttaagacttatatt

SEQ ID NO: 28949 - DNA, 255 bp, Gossypium hirsutum
  Clone ID: LIB3197-050-Q1-M1-D11
ttgcaattcaatgagttcatgtgccactaggagtagcgcttccaacttcatctaaatttcatcgctaattgagcggaacctagtgcagaacaccctcgtgggtatgaatctctctcatggacttatccctatcgacggatgcgccaaccaatgtctctaactgatggataaactctttaacttttctgaagctgccattgtcttgatcacgtaaaaagtaggactctatgacacacatgcaactattctaaacca

SEQ ID NO: 28950 - DNA, 431 bp, Gossypium hirsutum
  Clone ID: LIB3197-050-Q1-M1-D6
cccaaatgtcacaacggttttaacaacgcactaaatagcgttcaactctcaaagaaccaagtcgtcaactttcacggtgcaagccattgcccatgtttctttttccttaccaaatagcccatagcttataattcacaacatcctttggcaagtcaaagcttattagcaaagatggggaagaagagggttatggtgccggccaaggacctggacttgtccaccgtcaaatacgagcatgaagtgatcaaagctcctcatttgacgggtttgatgctgaagttgtttgtgaggatggttgaagctcctgttttaggctctttgatcatgtcttttttgaaaaaacagaacaaaatggttgagatgtcgcagaacactgtgataccagaagcacccatgtttaaacctgaatttactcctcaagatgcacaacc

SEQ ID NO: 28951 - DNA, 433 bp, Gossypium hirsutum
  Clone ID: LIB3197-050-Q1-M1-F6
tgaccatttctttcttcttgttatctcatccactcccatgggaatttgttggcctaaacctgctaagtgcggtcatgcttcttccactaacttttcaggtggttcaaagactcatacaccagtttccagcaatctcaatgttgatacatctgtttctagcaatctcaaggcttttagctattctgatcttaaaactgccgccaaaagcttccggtcggagactcttctcggagagggaggattcggatgcgttttcaaaggttggcttgatgagaacactttggctcctaccaagcccggaactggaattgttgtagctatcaaaagacttgcggcagaaagctttcaaggccacaaggaatggcttgcagaagttaactatttgggtcagcttcaccatgaaaatcttgtgaagctcattggctattgtgca

SEQ ID NO: 28952 - DNA, 356 bp, Gossypium hirsutum
  Clone ID: LIB3197-050-Q1-M1-F8
gtgatggcgatgattctgctgagaaaaccagattgcctgggaacgtggtatcagttgatcatgatgatcagacaaggctgcatacgaggaagaaagccagaggccatgcaaaagggtcacccaagagacgcgcatcatttgaccaatggcaaccaagtctagcaagcattactgaaactgaagaatagggaaatcacacacacatacgtatatgttcttaccttttgaaagaagagtatatgtatatattcttgttgaagattctctctatatctgcttgataaacataaaatgctcaaatattcaaaatttctgaaaaaaattaatatatatatatatatcaatttggctttttt

SEQ ID NO: 28953 - DNA, 327 bp, Gossypium hirsutum
  Clone ID: LIB3197-050-Q1-M1-H10
aaaagacatcaggactgataatcttggagccgggtggataaccgctatggctcacataggtcttcgggttaacttattgattgatttcccattgatgacgaatcacgtatgtgacatcgaacagaggcaatttgtaggatggaggcactgaatgtggatgagatagctgctggttttgatagctagcttgaccgcttagatactcacaaactttgccgaatccttgtccttgatcggaagacaagtgcgctgtacgtaggagtttgtattggctactatattgcatttgttggtgttcaagggagaagtggatgggaaaggatggac

SEQ ID NO: 28954 - DNA, 346 bp, Gossypium hirsutum
  Clone ID: LIB3197-050-Q1-M1-H4
gatttttctttcctttaaaaaaaaaacacctcggtttattaattggtcgtgtaaatatatcttgatacctacactgttaacaatctggtactcagagaatgcagaggcagacgcggtatacgacgaggactgccagtatggtaagagggaaacggagtttggaaggagatgaacaccagcacgcggagccaaaacgtgctgctttagctagtgagaatgatgaagctcttaaggtggacagcttgcacaaactttgttcatctttggaacccattcttcgtagagttgtaagtgaagaggtggaaagagctttggcaaaattagccccccctaggcttaatggaag

SEQ ID NO: 28955 - DNA, 389 bp, Gossypium hirsutum
  Clone ID: LIB3197-050-Q1-M1-H6
gatttatcccatcaattcatcaccatctcaactaagttcattccctcgtcctcttcatctctaatcgccaaactctgggttcgccttcttttactgtattcttcttattagatcaccaacttgcctttgctctatagctttcttgtctttcattttgaagctggatcggatcgttttcactcttccttaattctacctttataaaaacatttcaagcatgtaagtttcgactttccctgtttaaatcctattcaaaagaaaaagaaaaaaaaaacccagatattttgtttctatgcaactggctgaagctttgcgtttatctatctaactaggtgtagtttgtaatctggctacctacatacgtactatttcttaaccaagcatttaaa

SEQ ID NO: 28956 - DNA, 419 bp, Gossypium hirsutum
  Clone ID: LIB3197-051-Q1-M1-A12
gtttaggcttgtttaactgagcttttccagaaggtctgtgcacttaaaggaatagagcaggataaggttcgcatttgggattacttcaacaagagaaagtatgcacagttgtctgtttcaaacaaaaccctagaagaatcaaacttgcagatggatcaagatattcttctggagctagttgatggacatctatcgtcaaaaattggcatggattctacaggaaatgacctagctttggtttccttggaaccttcaagatcacccttgacaattgctgggggcccaaccttgtccaatggccactcaggttacagatcaaatctgtatccaggaagttccttaggctcaggattaacagatatggatgatggttttgatgcatgtaactctgctagaaaaagagagaaggggggcttggc

SEQ ID NO: 28957 - DNA, 185 bp, Gossypium hirsutum
  Clone ID: LIB3197-051-Q1-M1-A9
ctttccccctttttttcaaaccctaacgttccaattggttccccaatttcaaatttctccaggattatcaaatcgatcttcaatttcaatcttgtctcccacattaacggctcagattctaatatttctctctgattccttcaccaatagtagcatacagctttcactgagtttcaactatggct

SEQ ID NO: 28958 - DNA, 373 bp, Gossypium hirsutum
  Clone ID: LIB3197-051-Q1-M1-C11
cggacgcgtgggctcctctaaatatgttttgacggtgtccgcgatctcctcctctgctcagattatagagccttcgatttttctttgcttccttctgacttttaacgattcgcttcactgcctttcggatctatctataagcaccaatatgcgcttcagatcgcatagaaaattggcctgattaatacaatcacatgatctccaatcccatgcggatgccaagacttgcgtatattgccctcaagctaatcctgactgggcgtcgaattcctaccgaatcttcatgtgcctggagtgttactgtgaacaccttggtgtaggcgtacacatctcgatctaacgagctgctcctatggattcatggactgggatc

SEQ ID NO: 28959 - DNA, 456 bp, Gossypium hirsutum
  Clone ID: LIB3197-051-Q1-M1-D11
gaaaattgatatttgagcgaagaatcttttctgcaactctagttagcaaaaaagaagaaaaggtgaaaaacaatcatatcgaattgactcataaagtacaaattggcgacttgaagctgacatttggataatactcttgtttttgaaacttaaagactttagggttgtcaaaattatataaatttaggcattcttaatctccagttgtatgatcccagttaccccactaactgtttccagtgtttgatggatcgtctacgcccaagacagaggccggtcttctctgggtttacaaaagctgaggtttctcagcatgggaacatgtgatattatcattagtagttgtctttatgaatgaatagtttcagaaatcccggtccaaaatatggtgtctaaattgcggaaccaaaggtgccatggaattatttcatatattcagatttctcagtgtggaaa

SEQ ID NO: 28960 - DNA, 176 bp, Gossypium hirsutum
  Clone ID: LIB3197-051-Q1-M1-D12
gaaaattgatatttgagcgaagaatcttttctgcaactctagttagcaaaaaagaagaaaaggtgaaaaacaatcatatagaattgaatcaaaaactacaaaaaggcgcttaaactggcattggatatactctgtttatgaaacttaaagactttagggttttcaaaattatataa

SEQ ID NO: 28961 - DNA, 173 bp, Gossypium hirsutum
  Clone ID: LIB3197-051-Q1-M1-D3
cgaagaaccagagcctgccggaagaaacaagccttctctgtcttttgtccccttcccctgcccctgtttttctttatggtgttgccatggcggagatctctgggtgtaatggaaaccatgaagtagatgcgaatgttaatggtgaaaccagtcatcatcatgctcctccttca

SEQ ID NO: 28962 - DNA, 328 bp, Gossypium hirsutum
  Clone ID: LIB3197-051-Q1-M1-E1
gccccaatgaaaatcaatttgctattcttggtgaaaaataatcttgaccggcttttgattttctttccagaaccacttttcacagaagcctgatgaaaaaatgcctcacatggaccaaattttttacctgagcaacctgtggatgggaaccctaaatttatttacgggcctatgccccatttgtgcgacaccccgattgagcgcatattttccactcctatagagaccactttgatgtttgcatgtaacgcgaagcacattgtgttggctaagatagttcaaggatacattcttccatcttctgatggtcactatatatcaacaaaaa

SEQ ID NO: 28963 - DNA, 432 bp, Gossypium hirsutum
  Clone ID: LIB3197-051-Q1-M1-E6
gagagaacgaatcaaattcaaacggagacagtagcagaataagaacaacacagctgaactgaaagaattttgaaagaaagaaaaagaataaaaaataggttcgtgtgattctccttctcttcgacgactgaaaatgtccggtcgccacgaaaaagagaaaggcgtcaacgtgcaagtcctccttcgttgcaggccgtttagcgaagaggagttacggaataatgcgccgcaagtggtgaagtgtaatgagtaccaacgagaagtcgccgtttctcagaacatcgccggaaaacattttgatagagttttcactttcgataaggtatttgggccattagcacatcaaaaagatctatatgagcaagcagtggtttcaattgtaaatgaagttttagaagggtttaactgtactaattttgctatggttaaact

SEQ ID NO: 28964 - DNA, 345 bp, Gossypium hirsutum
  Clone ID: LIB3197-051-Q1-M1-F2
gttttcttcttttatttatattccgtgtgtaaaattcgtgtcttcgttagtaaacgacagaacccagcatctcttgtaacctttctctcttctcagatccaacccttttatctgtctccccacctgtttggtgagacttggcgttaatggagtggagcttcaacatgaatcataatcggtacctctaatgctatgctgagacttggctagtttatatctataagtttagactgcgatgattcaataagtagttaatggtcctatcaggcaaaactgatttagttttgtttaaaataggagctttttaatagatagatttgataaagaaaaaggacacagttttag

SEQ ID NO: 28965 - DNA, 447 bp, Gossypium hirsutum
  Clone ID: LIB3197-051-Q1-M1-F4
aaaaaaacctaatggaaatgggtgatcagtacggcctgcctgatttccagcggcttttaacgaggagaacccattttccggcatccctgctgccccaaccttctgactcgccttaccttgctcatcataggaacatggctctatcaccacctccttaccatgaaccaccctacgtgttgagcaatgggaatattgcaatgcctagtggtttgcttaggtttaacactactggtgccactgattttactgctgctgcttcagcttctgctgctgttggtggtggaggatggagtttgggaaatatcgacggcggaaacagccggtggccgaggcaagagactcttactcttcttgagatcagatctagacttgattccaagttcaaagaggctagccagaaaggacccttatgggatgaagtgtctaggtatataaatatattactat

SEQ ID NO: 28966 - DNA, 200 bp, Gossypium hirsutum
  Clone ID: LIB3197-051-Q1-M1-G1
cggacgcgtgggctggatcagatcttcccccagttgcccatcttcttccttcaatcattccattatttcagggttttaatctctccttactttttaaacctacgcattaaaaaaaatacacttgaagggaccacatcatcaaacccttaatgctactgccatagtgctggatacgactatggagatttaatgattacata

SEQ ID NO: 28967 - DNA, 409 bp, Gossypium hirsutum
  Clone ID: LIB3197-051-Q1-M1-G2
atggggcttctgggagacctgctgtagcccgtgtcaccccctgctgcagacccacccactttcagcttaggtcaaaagctgttttctaactcatttccgagaataacggaagggctggagttgcagttgagccagctgtctgaaccagatgaggaaacaagcccagcagggtaaaatgattggtccaaggttgcagccatctgacagctgggtcacttctcctcccactataactgctgcctccatgtgacttgaaacttagagctaaagagaggcccaggggctgccaggtctgatggccaatgggcctggtgcctctgcccacgtcagcctggtcttgggcttctgggacagggtcacccacatcttgaacatggcccgggagattgacaacttctaccctgagcgc

SEQ ID NO: 28968 - DNA, 340 bp, Gossypium hirsutum
  Clone ID: LIB3197-051-Q1-M1-G6
gacgggaggcgtccaggcgacgcgaccgaccgcattatttattattattatgacttactttgttttttcaagatcataattatcttggattgtttgattgcattagtgattacatcgaatgatcattgatgcatgtcgaaaccgcctgctgctagctttactgtgttgagcatggacttaatactgatgttcagatgtctagtgacaggattgttaaatgtgctgattatgcttcatacacctttttcagtgaaactggtgctgggaagcacgtccctcgtgccgtttttggggatcttgaacccactggtattgttgaagtgagaacttgtgcttaccg

SEQ ID NO: 28969 - DNA, 331 bp, Gossypium hirsutum
  Clone ID: LIB3197-051-Q1-M1-G7
tccacgcgttcggatatctctgagggtgtcttaataaacgccttcgatttactttcggtttctatttacttattatatttctactgttttaaaatattagtaatcgtaatagtgagagtgcattttagatcacatatggcatgctggtatacaagatagaaatgcctgctgagagctttaccgtcttgaacatggaatccagtctgatggtcatatgccaagtgacatgactgttcgaggtggagatgatgcttttaacaaccttttcagtgtaactggtgctggaagtacgatcttattgctgtctttgaggatctaagcctattgttat

SEQ ID NO: 28970 - DNA, 421 bp, Gossypium hirsutum
  Clone ID: LIB3197-051-Q1-M1-G9
cccacgcgtccgccctgttgaatttgaaactcacagcaaaacaatttcttcagaaaacactcccacctaactcttcatttcccctccttcttgactctctcgcctcctccgtccaccgcttatcttcagccaccatctccgcaacaccagaagggactagattcaacagataagtagaatctcctttcttaattccttcagatgctagaaaatgggctaccttgttagcctccctgttagtaaagagaaatacacataaactgaaacttaaactcagcttcaaagcctcattgatataaactgagatctcagaactatcattcatctttttttgcagcttccggattaccgactgagagtctccctcaacctccacctctctcaaaccaagttgtaccccaagatcagagcctgaacacac

SEQ ID NO: 28971 - DNA, 289 bp, Gossypium hirsutum
  Clone ID: LIB3197-051-Q1-M1-H1
atttgccagtaaaaaaggttcagccgacggcagcacagatcgcccgatacgaccatccaatggcggcagctgtggaaacttcaccagttttagagattttagttccgagaaccggatggatattctatctggaatggacctccattcacgaataataatcaacctgagattaagcttgaaaagttccttgcagtctgctaagtatagggaggatgagttcaaggattatggtgacaaaaactgactctgctattggatttatgattccaccacttgaaagagataagat

SEQ ID NO: 28972 - DNA, 266 bp, Gossypium hirsutum
  Clone ID: LIB3197-051-Q1-M1-H11
acggttctggtacaagctagatcgtactttcaaactatctcgggcaaatacatattttcggattaatctaaaaggggcataccgtactttgaagagttgtttgttgactgaactttatattcacctccttaaggatgagctcaatgagattatattttatgccagtattgccaagctagaaacttcagtggcaatgtctgatgacaagttatagctgatgctttatggattcattgataagcttcctgtttatcttgagaaaaatt

SEQ ID NO: 28973 - DNA, 258 bp, Gossypium hirsutum
  Clone ID: LIB3197-051-Q1-M1-H7
atcgcattaccgatcagtgaacaagatactgctttctgactacaatgaggggcattgattaaatcttcaaattgatattgtctggagcgaatggtgaatggtgaccaaaaaggtctaacttgcggattacatatggagcaacatctgtaaatgttcttctatgcacgtagttttttgactatgactgaaattacacatttatggtggtctaaaagatgaagaccgaatatttaccaacttatatgtgttgcatgatcc

SEQ ID NO: 28974 - DNA, 431 bp, Gossypium hirsutum
  unsure (1)..(431): unsure at all n locations
  Clone ID: LIB3197-052-Q1-M1-A9
ccaaacctgtaaactgtgattgccaggtatcatctactaatcaatgacatcaggaatgacttccaacttgatagatttaccttttgactagttttatgtatgtcttaaaatttaacctcagactcattgtttctggtagtactttggtgctgctttaattggaataaagtttccttgcaggatgtgtcctagtgcagatgcaactacttcagtgttggcaggtgacctgctcttgtcgttgttgtcagcttgaagttatttaatcaaacaggaaatgatattattatgtagaggtattggtgggttgtctcactctttctgtggcatcagatgtaactgtataagggatttttatgattggttttctttttttgaaagatttcccaaaagaaaagcanaattgaagtgtgaaaacttgtacgtgataaact

SEQ ID NO: 28975 - DNA, 453 bp, Gossypium hirsutum
  Clone ID: LIB3197-052-Q1-M1-B11
ctcatggtcaaaggatagaagtcagaaatttaaatctgattatgtggatgaaatgcaaggtcgtacgcctttatgtaaggtaaaacctaagaatggcagaaataattttcaggagaggcttggagttaagtctaatggaagtgagaatagatctgttgatgataacaaagaatctatgggaaaactatccagtgagagtagtaaaagagaaaatcaaagaaatgttggtcagtcagatgctaaacctgatgaaactggaggtcaagatgtaatgtgcactgtgaagaagagtatcatgcaggatggcaatgttaaaaaatatatgaaaagattccattctgacaaatctgatcatgcggaaattgcttctgggagagggaactcaccatcattaccacccttcggaggaactcaaaatgagatactgactcattgcccccaccctaatgggtc

SEQ ID NO: 28976 - DNA, 400 bp, Gossypium hirsutum
  Clone ID: LIB3197-052-Q1-M1-B2
cccacgcgttcgggagaaaagagcaagcgagaggttttcatttttctacgaacacaaaaaaacctcgtaattagctcaaattgattcgaattaaaagactcagttgctgcattgttacacgattattgaaatcgtaggttcaaatctttcatttcgctgaaaattccaggttgaaatagttctagttcagatcaaagcagttaaacaagtggagaagatctctccgagcagtattttgtcgaattttctcgaggaaattttctggaatctgaagtcgattgtttgataagctttcggaatttgaatgctatgttaatgtggctccgatctcagctcgaggcccgaaattttcccgtgggaaatcactttctcaaagtgtagtggatctgataaaagcata

SEQ ID NO: 28977 - DNA, 418 bp, Gossypium hirsutum
  Clone ID: LIB3197-052-Q1-M1-B3
ccctgcttatacactacttggaaagctggacgcctgctgaccgcccggtttcgcgggacgccaccgacgcgcgcttacgaatgcacagatcaaaacgctgactgggatacgaacatggtgtccttcgttcagatccggctcacagaattcattctgagccgatcgatcacttcaaccgtcttaccgattctcttatccctttagtcttgaacaagatcggtgacgttactgctctcggccgatgctgcgacggatagcgtcgataccgcaccctagctcctcaagtcatgaacgtcctacatcggatcaactgtgttatctctgacgacgattgttccccttcttcgtgttcctacgatgagatacgcgcgcgcggtccgatttctaacatcgttacgatccttcttggaggcattgt

SEQ ID NO: 28978 - DNA, 203 bp, Gossypium hirsutum
  Clone ID: LIB3197-052-Q1-M1-B7
tacacttatagctgaaacagacaaggggggggcttctgtttaattaaaacaaaccattgagatggtccctgcggatgctcacgcaatgtgatatatgtccagtgcccgtgtttgtgcaagagtatagatataaccaggcccgatttatcattttgagtaacaatgactgttttaaaatttccaaatgccatctcatctaatta

SEQ ID NO: 28979 - DNA, 338 bp, Gossypium hirsutum
  Clone ID: LIB3197-052-Q1-M1-C3
ccgggtcgacgccacgcgcgcgacctttgctatttttattatctccctcttgtctttccctgcttcgattggatcaaatacaccgccatgcgagacaacgaagttgttagagtgagaacatatgctcttgtatacgttttaatagggatcaatacaggtgtattagttgttaacgatccagcttgatacatgctttgctgctttgactatccgaagctagccggagtttttccatggatggaaattgttattccatctttttctccgtttaaaaataacatgaaactgtagatctttatgatccttctggacgtgaccgaccatatgatgtgtatgaa

SEQ ID NO: 28980 - DNA, 171 bp, Gossypium hirsutum
  Clone ID: LIB3197-052-Q1-M1-C7
ggcatttaatacaagtatagcataagtgggggttgtccaattgacagttcgcagttgctttatttgcgaagaccccacatcggaacaagataaagatgtgcccagcgctatcactctgcactaaaactaactggatgacctattcacctaatagagggtaactgttacttc

SEQ ID NO: 28981 - DNA, 407 bp, Gossypium hirsutum
  Clone ID: LIB3197-052-Q1-M1-D3
gtgcgcacccagtgggcttcacctggttgccttcattctccacgtttctcgacaaggtcagttaagattgcagtttgcgtgaaatttcctgcaactataaaaactctcttactcaaacaaagctttgccttaactcgccttctcaacccgccccactcgctttcaatgtctttctctagctccagctgcatggatggatcttatgctgagattgtggtggtgcgacatggagaaaccgagtggaatgctgatggaagaattcaggggcacctggatgtggaattaaatgaagctgggaaacagcaagcagctttagtggctgatcgtttatcaaaagagcctaagatatccgctgtatattcatctgatttaaagcgagcccttgtgacagctgagacaattgcagc

SEQ ID NO: 28982 - DNA, 473 bp, Gossypium hirsutum
  unsure (1)..(473): unsure at all n locations
  Clone ID: LIB3197-052-Q1-M1-D7
cgggagtgttaactacatcatcagagatactattgaagtgtgatgcaggaatataactgtatcatatatgagataatgctttaacttgtttggaagtatttatatagcatatataaggggaaacatcatctctggcctatcaataatggccagagacaaagaaagaatattcttggtggaaagaaagctcacgaaaagctgagaaagaaaaggatgtattttgccaacagaaaattatctagatgtgctgagtgtttaggttgtgataagggaaggaacgatgacagaagaaaacttaaaaacctgcttgcagaatggaaatagaggcaggtcaaagtgagccctgaatgtcgttattttaaaatttgaatgtttaaaaattgagagccatgaacatatttganaagtggaacaacttttctaatctgtaattgagaaataacttangaagcatttaagggatatattaaagg

SEQ ID NO: 28983 - DNA, 332 bp, Gossypium hirsutum
  Clone ID: LIB3197-052-Q1-M1-D8
gtcactcgtttgttcttctccgtttcacttgtgggcttcaaacagtctgaaatctaactttccccagttcaattcctttccggtttcaaatagagagatactgaatatttgtcaacgcttgactttgtacggatcaaaaaggggggggggcatagagattagtgttgatcgaagaaccgagtttatttgtttaaggggcaagggaacaattggtaatatatctatctgatggtggcaaataattaagtcaatcatcataacctgacaaattctagggacaagagtgctcattgtttccggacagtttacaaagtgggtccatacacgaggtt

SEQ ID NO: 28984 - DNA, 425 bp, Gossypium hirsutum
  Clone ID: LIB3197-052-Q1-M1-F12
gaaaactcgggggcgatgcttgagtggagattccgagtttcactccatcatctagtcaccggttacgctggccttgtttcagcaaggaaaatagtgcttcctcttacttgcatccaaccaaaagggcttgagagcttaaagcggtcagtgcatacttcgaacgacgatggtgattttgcggaattaggcttaccggtggaaagggttggaggtgtaattgcgaaactgatgacagaaaggcctcaacattttgtgaaaatcaatggtactaaaaagaagttaaatgggtcaccatttaaggaagacagctgccttaacatcaaggatgtatcacttaaagttgggaactcttttgttccttctctagatcttgagaacaatgatagtggaagatctactttcagaacttcaagttctgttacgat

SEQ ID NO: 28985 - DNA, 331 bp, Gossypium hirsutum
  Clone ID: LIB3197-052-Q1-M1-F4
tttactccttgccgtactggacaagctgaaatgggatttggagatacaggatatcgtaccattatatccagaaattttgccactctacactcaatctctaccacgccattcactgacatgtggcgagcttacttacttaactccatcaatgacctaaaagatttcgacatgactaatctctacaactattatggctctgacgccaacgataacaagactggctatgcgtacgtcaacgaatccagaatcgacgattgagaataccaacttctatacgccaagagccttaatgctataagaactgatctcgagaatccagaggaccagctcc

SEQ ID NO: 28986 - DNA, 440 bp, Gossypium hirsutum
  unsure (1)..(440): unsure at all n locations
  Clone ID: LIB3197-052-Q1-M1-G1
attaggtccaaaatactccactttacgttttcttcaatcttcttacaagcccattgaggttgttgccgcgatctcttcttcttcgtccttctcttcgcgccgctaggttttaccaaattcaaagcaaagtgaatgaaggtttttcgggcaaatatgaaaacgcgtgccacctttgactgttaattagaaagggatacatccatgagaaaatgcattcaacagcttcttcttcttcctcttcgtcgtcttcctattctattattcagcgtcttcgctctttagcgtcttcaaagctacgtttctttacctttatttctctatatctccatgtccagatttttgacatttgccaatattaggaaagctgcgcaatatgctatttcgaatccaacaacgagccattcggaattangaagtatggaaaacagtgtactatcggg

SEQ ID NO: 28987 - DNA, 261 bp, Gossypium hirsutum
  Clone ID: LIB3197-052-Q1-M1-G11
gccacgcctacgacctgctacttttgtttaaaaccaatctgaatacaaactcgaaaacgattctacaatattcaaccacactaaagacgctctctcattcggacattgatggcggaaatactttctgctttgatgtctataatggcctttcactctcactgtctccatgccttaatgcagcattctgagtattatcatcacagcggatgtgtggctgatcgggacaaatggcgcgaatttgctagtcgattgactgcaagt

SEQ ID NO: 28988 - DNA, 371 bp, Gossypium hirsutum
  Clone ID: LIB3197-052-Q1-M1-G12
gctctgtgaaggtatatgatgtggtcaactatgacatgatggttatgattcgcctaccttatgttcctggtgctgttgaatgggtctacaagcaaggcgatgtcaaagctaagcttgccattagtgatagaaattcatcattggtccatatatatgatgcacgagctggttcaaatgaacccatcatctctagagagatacacctgggcccagtgaaagtaatgaggtacaattctgcattcgacattgtaatatctggtgatgagcaaggaattattgagtactggagccctgccacacttcagtttccagaaagcgaggtccattttagattgaaaagtgatactaatctctttgaaattgcaaaatgc

SEQ ID NO: 28989 - DNA, 301 bp, Gossypium hirsutum
  Clone ID: LIB3197-052-Q1-M1-G3
ggtttcaaataatcctcttacaatgttaaaggagttgtttataggcataactgaagttccatttagatgtacagaacaagtctctttgtgggctttggctgcaatgaaagatgttggaattgggctcttaatagaagtctgctgtgatgctatcagctttgattttgccatgagagctgtgaaaggacaaacgactgaaactagattgttcaatggggctggacttgtagctgctgcaggagcaatcacagccgttcaaatgcctgaattattggctgatggggagttattatcacaagtg

SEQ ID NO: 28990 - DNA, 235 bp, Gossypium hirsutum
  Clone ID: LIB3197-052-Q1-M1-G6
ctctctctatacgatattgcatatctttggagattttaatgctatgtgtccacgaaggcaacgaaccgcggagtatcttaactgtacccatgtgcacgatcatacatgccgctctgcaaagagcacgtctgtgatgatgcgtctgactgggatgtttgacacgacatttaaaccgcctgtctgagtccttgctcacactttggatttattccatacctgtgggaagcttctattg

SEQ ID NO: 28991 - DNA, 422 bp, Gossypium hirsutum
  Clone ID: LIB3197-052-Q1-M1-G9
ataagaaaaaaactctctatctcaatagccacacgttcatctccctcaacagtctcaaagctttgaacttattttaaattttattttaaaatatggaaaccccaccttttccctgttcttctcttctttacactctatttttcctttgattctgccgaattctttagattctttcttcaatttcaaaattagaaagaaaaaccttttatttcctctcaagcccatcaagttcagaaccctaattttactctttttgaaactcagacagtacaaatttcgcggattccttttggacaaaaatactcacaatcatatatatatttcaacaacaaaaataaaatcgaaatcttagagtctgaataataaatccattgccttctttaagtttaaaaatgcttttaaattgaagattttaattatct

SEQ ID NO: 28992 - DNA, 314 bp, Gossypium hirsutum
  Clone ID: LIB3197-052-Q1-M1-H10
ctgactatgattgttatttatctagttttgggtcacggaaggccaattaaagaacaaacaccggatgacggctcgctaagagatacctgcgccgacgaggctggacgtgttatcacaattaatgcttctggggtgactgagttctaatatatgaatgtagaactccgagaaaagctcaagggaaagtaggaggggtttgaggacagcgacaaatggatggaactgcttgatcacggattgatttcatgggattgctgcagttcagattcaaagatatcagaaagcgccccagagttacttggctccagcgcttg

SEQ ID NO: 28993 - DNA, 418 bp, Gossypium hirsutum
  unsure (1)..(418): unsure at all n locations
  Clone ID: LIB3197-052-Q1-M1-H12
cttgagatcatcggagtcatggagttatcgtcggctccccactcatacagctacctttccagttatcatcaatagtgaagatgaggatagtgaaagtgaggttctaaggacccgtaacaacaacaagaataagaatcctttggaaaatggagacagattggactcctttctgcaaccgaaagatgatcctaatcttggtatttctaaacaagttcgagctttatggaagaagttgcagcagatcgaggtgcttgaagagaagcagttgagtggatgcatccttgatgaccagcaaattgcaaagctgcaaacaagaccagctcttgaaaattctcttgctgagnctggtgtaccagttgaaagatctcatttgaaaggatcatgttcaattctctctgatggaaaaggaaataaaaag

SEQ ID NO: 28994 - DNA, 369 bp, Gossypium hirsutum
  Clone ID: LIB3197-052-Q1-M1-H3
ggatcacccgatcctacaaagcttctctcctgctcccggtatgatttccgcttggtttggttgttttggccatcgtgggtcttcttctctcccttcttctttcacaccctttctattctgattttcccacgcaataaacaaacctcccgattcagatccgtcctaaaaggtttcacaattggaaagtacatataatagctattgaacaccttttttttccccgtttgagatcaaggacctgtggagtaaataactacgtagacgaagatgtttggtacaactaatccttttgggcaatcatcaagtagcccatttgcatcccaatctgtttttgggcagaccagtgcaagtagcaatccatttgcacct

SEQ ID NO: 28995 - DNA, 246 bp, Gossypium hirsutum
  Clone ID: LIB3197-052-Q1-M1-H5
cttcctctaattttttttttctaagtttgggtcacggaatgcccaaaaaagaaaaaacaccgaaagacgctacactagggtttctctgccggttttggtttttgtgattttttgaaattctctgcttcgtcggtgactgatttcagatatatttatttatcactccaaaaaaaagctcaaaggaaagtaggaaggttttgaggatagtgaaaaatgggtggtactgcttcatcggagattgatttc

SEQ ID NO: 28996 - DNA, 254 bp, Gossypium hirsutum
  Clone ID: LIB3197-052-Q1-M1-H7
tagaagtggatgctctagaaaagattaaggatcaccaagccactagtgcagaggtggcgcccatggatattatgtctgcaaaaccaggtatggatcatccaccctacagatctagatagatagtcatggacagggattgaaatcgtgacatatttctaaaatatcgaggcaacgatccttgatatggacctgcatcctgatgaccaagaattgagctatctggaatgaagcatgatgactgagtaaatgtcaaa

SEQ ID NO: 28997 - DNA, 446 bp, Gossypium hirsutum
  Clone ID: LIB3197-053-Q1-M1-A12
atgaaacactagttagataaatattagcctaagcattaaagtcttggagcctcattagaaggctgccctcgagtgtgtgtatcatggggtcattatggagatggaactctgtgttttacataagtaaagtccttggtccaaggttcaagacagtgtagctttctgaccaatttcactaaagtgcaagtagtgtcatggtgaagaaagcaatggtaacaggcattctcagctgctgatgtgaaaattttctcttctccctggcctgtgtctactcataggaagcagttgcttccttttgtagcttggacaatttgtggctattatacctttatgttcttccacaggaccttatttgatagtcatgatagatgggttgagaaatcaccttaattaaatagttggtcattttatatgctcaattaactgtgccatctcattgtctctga

SEQ ID NO: 28998 - DNA, 219 bp, Gossypium hirsutum
  unsure (1)..(219): unsure at all n locations
  Clone ID: LIB3197-053-Q1-M1-A7
nacccacgcgtacgagaggaatatttccatatgcgtaacaagtgaaagacaattctgataagcccaggatcataatgtcaaacactaagcgctccttatggcgcgttaattaaaaatatcataagatgaagtttatattcatcttgataatcattaccttataaaaaagtacgctgacttggtgggagaggtatcaaacctgtattacagagaaaagaa

SEQ ID NO: 28999 - DNA, 304 bp, Gossypium hirsutum
  Clone ID: LIB3197-053-Q1-M1-B7
gacgcctttgtcttgtctctctcacggttcctggaccaaatcaagctaccgaaggccaggctataaacagtacaccccgacgttgagtgttttattttttgattcaccgatcaaagctcttaacaatggcttccaccatcttcattcaaactccgtttcaatccaaatctttgaacaaatccttgaatacccattttgttccttcctttaaactccctgtttccctctctttcaaaccccggaccgctgccttctccaaacgcgtccatatccgagctggtttgatcgaaccggacggtgggaa

SEQ ID NO: 29000 - DNA, 107 bp, Gossypium hirsutum
  Clone ID: LIB3197-053-Q1-M1-C1
accctcccgaaattggtaaaccggaccaacctttggaggcagcctttggtaagcttggggaatttaccaaaatgggccttaatgaccttttgccaaatgggcccttt

SEQ ID NO: 29001 - DNA, 363 bp, Gossypium hirsutum
  Clone ID: LIB3197-053-Q1-M1-C10
gtaacaaatgagtcgaatgtcaccagctgaggggtgcaggatccaacaacagatgatgtctaatactgacttgatgagaatggcctcaaaaagcatgaagaacatgacgccaagaaacttgttacaagctgcagatacagttaaagcacactaggtctgatgatatggcggagattggtgagaaaatggccaatgcatcaactgaaaggatagctgcattgcgagcacggactgatgctcatatcagttattaattaagtgcaacttgagatgtctaagaattaagggaatgaggttcataaacaaagtaaatataataacgtctttgaaaaaatatatgcttgcaaataaaaacctgaaagg

SEQ ID NO: 29002 - DNA, 306 bp, Gossypium hirsutum
  Clone ID: LIB3197-053-Q1-M1-C6
agttggagaaggttatgcgtgttaccgagtccgacagagttccaaatctttatattaagtgtcttgttatgttggaagatttcttggctgaagctttggctaataaggaagccaaaaagaaaatgagtagcagtaatcacaaggctttgaacgcaatgaaacagaagctcaagaagaataataagcagtatgaggaattgattaacaagtatagggagaatcctgagagtgaagaggagaagcttgaagacgaggacgaagacgaggatgaagatgaatctggctctgagttggaggacccgcaca

SEQ ID NO: 29003 - DNA, 438 bp, Gossypium hirsutum
  Clone ID: LIB3197-053-Q1-M1-C7
aacagaggagacgattcaaaaagaagcggcagtcatgatctcacagttcttcgtgctttctcagcgaggcgataacatagtgtttcgcgattattgcggcgaattagcaaaggcgtagtgcatagatattctttcgtaaagctaagttttggaaagaggatggtcaagaggaggcgccctctgactttaatgtggatggtgtgaactacttccatgtgaaggttcgttgggctgctgtttgttgcatccacacgagttaatgtgtccccgtctataggcctgtaacttttgcaaaggatagctcgcgtaattaaggattatttatgggttttaagatgaagattcacttacgtaaaaactttgtacttggatattaagtcgctggatgaaatcatttgtcttttggttattttgctgacgtcattcttacttatagat

SEQ ID NO: 29004 - DNA, 382 bp, Gossypium hirsutum
  Clone ID: LIB3197-053-Q1-M1-C9
gttgccagggttgtcaaggtgtgcgccatgtgggttatcattatccaacaaaaaacgcctcaagacacttccaggctaggtccatttgatcaggtgcatgcctgatgcgcctagccatgccttcttgtagggctataggcataattttctgatttttcattttatatatctctaatagtaagaaatttatccatctcaaactcaatatttgagcattcaacatcatggaccataaaggaataatgcatattgactaataaagaaatagcatgtttcatggataaactagacagcactttagagactgtatatcctaaactttattatgcagacacacatgactttcaaaaactcatacactttcatgaggggtgggctttgt

SEQ ID NO: 29005 - DNA, 163 bp, Gossypium hirsutum
  Clone ID: LIB3197-053-Q1-M1-D1
gattggtattgggtaaattggcggtataaatcgaattggcatttgtaagtcaaatttgaggactgcaactggtgaacaaaccactgatttgggcctaacaaggcttaaacagtgttaggatcaggaaattgtaatccccgaactctcgtaaaccctttttttt

SEQ ID NO: 29006 - DNA, 236 bp, Gossypium hirsutum
  Clone ID: LIB3197-053-Q1-M1-E10
attcattatttacgttaaggtgctctgggggggggcccttctttagtttgttgcttcttttctttagtttagtgtagttttaatattcgatcctctgtgctttttttagctttagttcattgatctatagctaaactttgaacctttttactgatgaagaaattgacttcattcccatgacgctattcttaatcggtcttcaggggttctgatgtttaggcattttgctacctgaa

SEQ ID NO: 29007 - DNA, 310 bp, Gossypium hirsutum
  Clone ID: LIB3197-053-Q1-M1-E11
cggacgcgtgggaaaaacaaggatcgtcattaagcaaaatcttacacgatgggtgaagaaacacaatcaaagaccacttctggtcccttcaagaataaagcctttcagcttgctcaggacacattttctcctcctaaagtgacgaagggggttatggatgattttaatgcaactgtttcatggctggcgagtcaagaggaaacgccagagccccaggagatacagcaagtagctggacaagggatcttaacttgtttacaagatgccatacattgtcttgcgcaaaagcatgatgtgcagcatattactg

SEQ ID NO: 29008 - DNA, 245 bp, Gossypium hirsutum
  Clone ID: LIB3197-053-Q1-M1-E12
agcaggagctatagatgcattgttggatcttgtaagatctcaccaatgtgaagaagcttccggaagactgcttgaagctttatttaacaatgtaagggtacgagagatgaaggtttctaagtatgccattgcacccttagcacagtatttgttagacccacagacaagatctgagtctgggaggctccttgcaactttagctcttggagacctctcccagcatgaaggacatgctagagcgagtg

SEQ ID NO: 29009 - DNA, 228 bp, Gossypium hirsutum
  Clone ID: LIB3197-053-Q1-M1-E2
ccgaattccgggtcgccacgcgtcgcaactggcgctgcctggaactcacaaggggtgggtcacttagacccgcgaccgacctcattctattcaaaatgcgctaaggagtatcatgcacctcacctaccgaatcaactggacccatgcctgatggggcttaagcccgcgaactctacccgggcggcccggcacggtcctggcctccataactatcacgtcactggggtc

SEQ ID NO: 29010 - DNA, 185 bp, Gossypium hirsutum
  Clone ID: LIB3197-053-Q1-M1-E5
aggaaactcactctctgagattctctgaggcgcggcacgctatgaataaccacaccaaaagaatttgcacgcccatgttcttatttattcagatacgccttgggcacctggtatcaccaccgttggtccatttcatctcatataacgtgcggcggcgatccgctggatcgaagatgccgggggct

SEQ ID NO: 29011 - DNA, 204 bp, Gossypium hirsutum
  Clone ID: LIB3197-053-Q1-M1-E8
accacgcgtacgtgctcatctaagatcctacggagctcactctgaaactgtttagggagtttaagctttggtttctggagtcctcttgcataaacaaaggaagtctgaagcttgggagcttgtcgaacagcttgagctaggaacttcaaaaaacaaaaaagtcggaagccagattctgatttacactacggctaagcagaatgc

SEQ ID NO: 29012 - DNA, 247 bp, Gossypium hirsutum
  Clone ID: LIB3197-053-Q1-M1-E9
agcacgctaacgggctcatttcagatcctacgaggctcactctgaaacggtttagggagtttaatcattgattcctgggtccctcttgcataaaccaaggtggtctgagccttgggggcgttgccgcccagcttgaccttggagctggaccaaacaaaaaagtcggtagccagtttcgtgtttacactacggctaggcagaatgcataggtgtacgaggctcatgcaagctagctcactcaattgaa

SEQ ID NO: 29013 - DNA, 309 bp, Gossypium hirsutum
  Clone ID: LIB3197-053-Q1-M1-F1
cgagaagttggtgcacctcttttggagaagttaccttggataaacagttctactcagacaaaaacatggtatcaagaacaggcagtacttcgtgtcagcttggggaatttcccgttttttgctatactagctctaataatgattggtgtcaaggaccaaaatgacagacgtgattcatggcatcatggtggatggattgcaaagatggtgatctggattatgcttgtgatccttatgttcttccttcccaatgttgtcatcacagtctatgaaatactatcaaaatttggtgctggcgtgtttttattg

SEQ ID NO: 29014 - DNA, 359 bp, Gossypium hirsutum
  Clone ID: LIB3197-053-Q1-M1-F3
cttttctaaaaggaatgaagaagggtctccattcctgagaagatttcaccgattagaaagtcctttcctccaaatggaaaagttaaaaatttcactatttctttagccaaaggtgcttttgctgataatttccatttttaacctgtcttctccccaaaaaaaaggtctttcctctgattctttgcctgagatatcaagttctttgtccgaaaaaacgttctttccgctggaaaatttcgaatcatgattccggtgaacgctctcccactcccgcgacggggcgctgtcaatcagctgtgcttcacggtcgaaggaaagcacatggaagaatttcactgtctgcattgctcgatctccac

SEQ ID NO: 29015 - DNA, 200 bp, Gossypium hirsutum
  Clone ID: LIB3197-053-Q1-M1-G10
catgcattgtgcttatttagctttttggggtgccctctaatctatatttgttttcagtcctttgtggtggtgcattcaagaaaaaaaaaccagtgaaaaattaataactcaaagcggctatttgttattagatggaaattttcaaaacaactattgtaatcacaacatgtataatgctgtagaggttatgcaggcactac

SEQ ID NO: 29016 - DNA, 184 bp, Gossypium hirsutum
  Clone ID: LIB3197-053-Q1-M1-G11
catgcgtccgcaccaaagtcttgctcgaactggaatcgctgcatatgtacggacgctgagcactgcaggcaatgctatctcacaagagaaggggctgctagtacaccctacattaacagaagctgctaatgctacactccccaacaactctttcattgctagatgggatatcatagctggaaac

SEQ ID NO: 29017 - DNA, 409 bp, Gossypium hirsutum
  Clone ID: LIB3197-053-Q1-M1-G5
ctctagaattcctctagagggagaaaacaaattgatgtcgaatgatcaatcttttgtaaaaagattttccctctcacccttcccttaattcaaatctcttatcctttttctcattttcttttcgtttcattccattcccagttttcttgtttacatcccaaaattttctcgagaaaatattgtttttatgcttttttctctgttttaaatcccaagatctctgcaacccagttcttcttttcacctgattaatccaatttcccatctgggtatctttagttctattttttttccttgtgaagtttaatttttcttttgttttttttttttttggggggggggggacgggtaatttattaaattaatttcatggtccttctttcctatcccaatttttaaggatttaatc

SEQ ID NO: 29018 - DNA, 213 bp, Gossypium hirsutum
  Clone ID: LIB3197-053-Q1-M1-G7
tttcatggtggattcaaagttttagccatcatcgagatctttcggtattcgctttcacggcaaggattggttaatgtcgggaagagattgtttcccgatgttccctcctctgaaaatggtgtttagttaatgatattcatttgacatttcattttgtttactgtccttatatccaaacttgttgtcgggatcttcggttggtactgttatctc

SEQ ID NO: 29019 - DNA, 364 bp, Gossypium hirsutum
  Clone ID: LIB3197-053-Q1-M1-G9
gattcattttggattacataacatatgacggcgggacagttaccctgattgcgacaatctacactaactgttcactaaaagatataacagaatgaagtctttagtcaatcctaaccaacatatatggagagaggttacacttacacattattagtattggcgatattatactatattggcagagggggatgcatgcaccagactattcgtatccacaggggtagcggagctcactgtgacatctgcgcatggctaccaccaattagagatttcttagctattgaagctgaacatacagatttctgatcaaccctaatgacactagctagagcgttcccagcgaccaaaattctcttggcacggg

SEQ ID NO: 29020 - DNA, 344 bp, Gossypium hirsutum
  Clone ID: LIB3197-053-Q1-M1-H4
ccagcatctaccggacagggtttgcgaatcagtgcacgggtagctcgacaagatggtcaaatattttacagtttaatgtttgagagtatctcacagatcacacttgatggattcatgattcagatcaacacgatattcgtctggtctggcagctgatggacctcttcaggttcccccattggcaccgggagcagcagccaggacactgctccctatggtattgttccagaatatgtctcctggtcctcctagctcacttttgcacgttggtgtgaaaaataatcagcagcctgtctgttactttaatgatacaatcttgatgcatgtgctgctttccgagggat

SEQ ID NO: 29021 - DNA, 362 bp, Gossypium hirsutum
  Clone ID: LIB3197-053-Q1-M1-H7
cttattcttgctctcttttataaataaacagaagggtcaaaattgccggatctgtttccaccgaactttacacaccatggatattgtttattattgaatgatcaacaaacttgcctcttcttgcaaagaaaaggccttcaggatgaacaaaaagtatgatctaggaaggcaatctgataacacaaagctgttacacaactaaacaagtatgaggaatatggattgaggtgggaatgagaaattgagtactctgaggctcaacaccggaaactaactcatggtgaagtaaggctgtgactcgtaagaccaagattttggaatgtgtgtacaaagcattcaacaataaactggttctcactcaa

SEQ ID NO: 29022 - DNA, 230 bp, Gossypium hirsutum
  Clone ID: LIB3197-053-Q1-M1-H9
actcaatagcctgtacgccattatcattggcggctgttcatgtcaaaacatgaagtctgtccaaatgataacactttccaaaatatctatttatatttgctaccttaaccggctcatttcaccgtccacatgttcagaccgaatattgtggtcatcactattcaggaggatgtgcattgcgtttcaacgcctatccctccagaaacaatacatcccaatgattaatctat

SEQ ID NO: 29023 - DNA, 151 bp, Gossypium hirsutum
  Clone ID: LIB3197-054-Q1-M1-A1
tcgacgattttctttagagtgttatatttgatcgttctctttcaaaatcaattcctaagcgagagtattatcccacctataaaatggctaattctaatgacctcaactttgacatgcaccatgtatcgagactattttatgaacaaacaaa

SEQ ID NO: 29024 - DNA, 270 bp, Gossypium hirsutum
  Clone ID: LIB3197-054-Q1-M1-A2
gatcgggcggacaacccccgcagacgctatgatcaagaagctgacatgacatctgctgccgaggcaagcatggtgaaccctgctttctgcgtttcctgattccttgctctacttaaatactacgatgacgccgacgacctcaagcatttaagcgaggagatgcatggtgacactgacgggatatactttgacattggcgatgaccacaagggtcgtttctcgaaggggtctgatgcatatgagaacacaaaccacatggccgttgttgtt

SEQ ID NO: 29025 - DNA, 430 bp, Gossypium hirsutum
  Clone ID: LIB3197-054-Q1-M1-A3
gcttgttccattagaaggagttagaagacaattccaaaaatacagcagaaagcaaatcgaccccatagagccatctgcaactgactctaaaactgcatcttccattgaggatgtagttgttggaccacagtctcttgaaattcaagagggtactgatggcatctctcttaaaccaattgccaacaccgataattgtgagtcagacacgggatctggaaagttgaccgataaaaacaatggtagtggagacaacaagagatggcatagtgtgccttctttaccttcatatgtaccatttggacagatctatctcttggagaattcgtcagtggaatcactctcaggtgcagagtactcaaaagtgacatcggtcagatctgtcattgttgaattaagagagagacttcaatctcattcaatgaagtcatat

SEQ ID NO: 29026 - DNA, 300 bp, Gossypium hirsutum
  Clone ID: LIB3197-054-Q1-M1-A4
cgaaattcagaaagaaatttcccagtgtcatcttaaatcgtgcgctccatttattctccttaatttcccgatcgtttgatctgaaagtgatggcggacgtgcatatgggatcagagtcggagaccttcgcattccaggcggagatcaaccagctcttgagcttgatcatcaacactttctacagtaacaaagagatcttccttcgcgagctcatcagcaatgctcctgatgcattggataagattagacttgagggcttaacatacaagagcaagcttgatgctcagtcggaacttttta

SEQ ID NO: 29027 - DNA, 449 bp, Gossypium hirsutum
  Clone ID: LIB3197-054-Q1-M1-A5
cccacgcgtccgatcaaatctttttcattttcagggttttgcctcgctcggactctctgctgccttcagtacgctttgggtttatggccgatttcgagggcaataatcgagaaacattggaagatgacttctgtctacttgaagattcagatttagagggggatgttgatgaacgtttttatgagcttccaattctctcacccaaggctaaagctaagattccggtggattacaataaagccctcaaatatgtagacaggaaggaagcagggttagaagatgtcttgagggaccatgctcttcatttactccctgcaaaaacactctttaggttcaaaactgtttccagaagatgggatcactggataagcagcccgctgtttgcccaccggcaaactacttacttcaaaaacgtatctggtctcttttgtcaagttgctgatcacagt

SEQ ID NO: 29028 - DNA, 204 bp, Gossypium hirsutum
  Clone ID: LIB3197-054-Q1-M1-B11
tcttttttcttaaaaacccttttgactctactgtcctcaattatgataatgagaatgataatgataaggaattttctctactttatggataaaatatgcggaagctgctataatggatacgttatggacatggactttaacattaacgtgaacactgtgctttataaacttatattttaagtctttttttgattatacattcta

SEQ ID NO: 29029 - DNA, 427 bp, Gossypium hirsutum
  Clone ID: LIB3197-054-Q1-M1-B8
ccctttagtttgggttttggcctcaaccttggagcgccaccgcaccaccatcggacttggtggccgactacgcgcagaagggacacgatgagaggctggaggtaagtattattctccctttcattctcttttgaaactgattttcttttttgatttctttttcgtgtttgataccatatttttttcccctttctccctttggagttcgaaatcgacgagggagggaggagttccagcgacgtgattcggtaaatccctttcctctccctttttatttttcgtatttatgtaaaaaacaaaaataaaaaaaataaacttaagattaaataaataatacgaaaatcactttaaaactttaaatcttttgcttttctattcccaattttcggaagaaaaaccagagagcccctctttatacaatcgattt

SEQ ID NO: 29030 - DNA, 156 bp, Gossypium hirsutum
  Clone ID: LIB3197-054-Q1-M1-C12
gaggtttttaattgatgtcctaaaatttaatgaactggttttcacttcccagttcatgtttctcaatcttgaatttaataaccaatccctgagttgtttgtccctaaaacctaaaccccaacttgaaagaaagaaatgaggaaagaggcagaaaag

SEQ ID NO: 29031 - DNA, 442 bp, Gossypium hirsutum
  Clone ID: LIB3197-054-Q1-M1-C2
cagagattgaaacagtgtttatctgtttttttcgagcattatgcttctctctcagaaaatcacaagaagtgtttgtctaaggctttcattcctgtcatgcgttctatgtggcctggaatagatgacaatcctggtggttcttcttatacggtctccaacatgcgtaagcatgccatacaagcttcaagattcatgctacagatgatgcaaactcccctatatgcaaaggggactgaagcagaggatgataatggttgtaatggatcaccagaaatcatagatggcccttcacagccttcagtagaatgcggagaagagggacttgcaattcgcatagccacagaggtgttgaggtttccagcaaagaagacacctgcagagaggtcatatgttgcggctctttgcagaatacttgcctctctccatttctgtttatcagaac

SEQ ID NO: 29032 - DNA, 303 bp, Gossypium hirsutum
  Clone ID: LIB3197-054-Q1-M1-C7
gcccacgcgtcgggacctgggttatcctaaagacggtggaagcccgtccagagcgctttcagcgcgagctttgaaagggaatcgggttaaaattgctgaaccgggacgcggtggctgacggcaacgatagggagttcggagacgtcggcgggggcctcgagaagagttatcttttctgtgaaacggcctggccaccctggaaacgggttaaccggaggcagggtccaacgtctgaaaaagcaccgtacgtgccgtggggtccggtgcgccctcggcgggcttcgaaaatccggaggaccgatt

SEQ ID NO: 29033 - DNA, 453 bp, Gossypium hirsutum
  Clone ID: LIB3197-054-Q1-M1-D1
gttgagattaatggatatgaagagtatagtggtatggagtatcggtctgctggatgtacagaggaatacaatgtcatgcagagagatcttgagcatgcaggagaagaggaatccgttctgttagaaggtgatattggtggcggtttggttcttcagcggcagataaccgttccgaaagataatccaaaagttttgcgcattgaatccagtattttagctcgcaaagttggtgctggatctggcggattttcaaggctggtttgcttgagagttcatccaactttctctctcttgcacccaacagaaacttttgtggcatttacctctgttgatggcactaagcaggaagtttggcctgaaactggagaaaaagtttaccaagggaatcttttgcctaacggtgaatggaagctcgttgacaaatgtctcggtttagtgctcatcaatcgattt

SEQ ID NO: 29034 - DNA, 440 bp, Gossypium hirsutum
  unsure (1)..(440): unsure at all n locations
  Clone ID: LIB3197-054-Q1-M1-D5
gaaaatagatgttgtcttttttggggcaaaattggcacggagaagggctggagcttgcgtctaaaggcgtgtacgagtacgagtgctgcaactgcaagcaatcctttcatcctctgcaaccttctactattctacgagaatggcgagaacagaaaatttgaataacttcattgttggggatttgccaacattgttctacatccctgacttcatcacagattctgagcaagctcggctcctaaataatatttaccaagcacctatatcaaagtggaaatctttgaagaataggagactccagaattggggcggtgttgttcatgaaaagggtcttctgtcacaagatttgccaccttggctagctaagattacaaaaagaatatgtgaagaatcaggactttntccttcagcaatcaaccatgttcttatcaatgaatacc

SEQ ID NO: 29035 - DNA, 388 bp, Gossypium hirsutum
  Clone ID: LIB3197-054-Q1-M1-E3
ttttgctttctcttgctctgcttttgcatctttcttgttttgatcatctcataccataacttgcatatttttactgctcagggagtcaaattaagatcatctttcatacccagatctctatttttaaggttttggaagggaattggagttggctatggagaataaccagcaatctttttggcattatagtgatcaacttaggatccaaaattccaatctgtctaaagtatttattacctattgtatatggagcatcagatatgtctctataatgcctgatgaaaggaggaattttgatatctgaatctgtggtgaagttaattctggtatcaactttaaacccaaaggcttttattttaatcctttcaacaatgatggtaggaaaatt

SEQ ID NO: 29036 - DNA, 335 bp, Gossypium hirsutum
  Clone ID: LIB3197-054-Q1-M1-F2
acgcatgtgtctcaaattatagtccggttacaccgcaaagcgaagagaagagtaatgaccgtcgaaggagaaggtccagcgactgggatagatctcggagacaacttattcttgcgttggcagaaggcatcatgatcgtgttgagatcatcgccaatgatcaatgtaacgaaataatgccgatttatgttgactgcactgatactgagcgatagatcggtgacattgcataaaaccttgttgacatgaacacacttgaacaccttatttgatgcatagaaagtgattgtctcgattatatcagcgattgctgcttgttccacagtgaatattaaa

SEQ ID NO: 29037 - DNA, 445 bp, Gossypium hirsutum
  Clone ID: LIB3197-054-Q1-M1-F4
gccagcagtagaatcaaaaaagagacccgacaaaagcgggtcaagtaatccaggaaacatttaccgagtttttagattctttatttgtttcatttaactcagtgactcactcgtcaccctacactcttttctttttccacatccaacgctttctttctctctctaccattgaagttctttcttactcagatccaggtgacatattgttttaattagggttgtgaaagtgtggatggtacaacaactcagtgtgcagttatcagccagtctcatcccttaattattaaagtgggggcactaggaagtttcccatagcatttgccagagatatttctacaattggaatttagaaggtttagaaatcaggagtgagcaatggaagaaatacagtctcaatcggacaattataggtcttcttcctcctcagccagtagtcctgcaagta

SEQ ID NO: 29038 - DNA, 440 bp, Gossypium hirsutum
  Clone ID: LIB3197-054-Q1-M1-F7
gtccaagtttcatttttgttttttcgttaggcttatattcttcaactgttcaactttgatcgaatactttgttttgttttgtttttcatgtaataaatctgccctcgttgctctatagctcccaaagtttgatttttttttctccttgtttgttttcatgaattactgtgtctcttcttcactgtctcttagtataccacaaatctaaaatctatttttttaaaattatttgatgcaagacttgaagtgggtatttgaagaaaccaccattgttgctcaagtgaagctgcttttatagtagttgaggttatctgctccagtgcagcagcacccaaatatctgcaatgagaaagaagttagcttcagtgcttcttttgtctcttgttacaagggtttttagcaccactgactcttgtgaccttgatgttttaatgcaattc

SEQ ID NO: 29039 - DNA, 379 bp, Gossypium hirsutum
  Clone ID: LIB3197-054-Q1-M1-F9
cccccatagattcaaaatcttcctagtgttcatattactctaaatgagtatacctgtttttaaacactagttttcgatccgatgctggaatcctatactccctcgaaaacgtttctcggcagttcgtatttgactttactgcttttgatcccgttaacgaacaaaatagtcgagtaaagctaattatcggtggcagctttggtgtctgtcagaatagtcagagttgcactcatgtaattgttgataagattgtctacgatgatcactgatggttagctgctcgaaacgattgcttaacattagttactgggttatgggtttgatcatagttttgatattggaatgcctgttgatgctacttcgattatgtacagaccta

SEQ ID NO: 29040 - DNA, 299 bp, Gossypium hirsutum
  Clone ID: LIB3197-054-Q1-M1-G7
aaatatattagtgttgcaagtttttagtgaatagcaccctaagtaatcttcttgcttgttcaaatgcaatctctaatctcagcatagtaaatctgatctcctcagcgattcatacaacgctcttaactgatacctgttatttttatcccctgatttaatcaacttataaggttttattatttactatatgtagaaacttatttctgtttgtggatactatgcatatgtcttcatttaattgtgtctaactttttatatcttttatcttatcacttattgttcattgtatttttctttat

SEQ ID NO: 29041 - DNA, 415 bp, Gossypium hirsutum
  Clone ID: LIB3197-054-Q1-M1-H5
gtggtggtgagatattgaatatcgcacatttgagtagtattgattgatcgagtagttgaatgatgaggagctggaaagtgttgagtgcatccaggtgcttgagagcacgagggcaactaacgttgcggcaagatgcacttgaccataatcccctctttttttccggcgctttgcattttaaccgtgttccaaccccaacaggcggcggtagcagctctttttttgggaaaagtcccactttcatcacctgcaaccctagaaatgcatgctcatggaatctcgtcaaaagatatactaatgttaacgcctgcgttaacaattcttccttcttccccctgtccacgccctgccagcagccggattcgatactaaatgggcgcttatcattctcatcttcaaccttaagtaacaatga

SEQ ID NO: 29042 - DNA, 277 bp, Gossypium hirsutum
  Clone ID: LIB3197-054-Q1-M1-H8
gtctaatttcattagaataagaaaggtacaagactaattccgacagtatacggagcactatttactacgtatgatgatttatagtaagagagtgaactttgatctattctaaaggttttaagaccagtattagttgcacatggaatggctagttcaaccttgtatgtattagtacgtgttggtcatcacattataattgttgaaagattctgggaggaatgagactatttttcattacatttttactaataaacgtccgatttgattgttctaaaat

SEQ ID NO: 29043 - DNA, 440 bp, Gossypium hirsutum
  Clone ID: LIB3197-055-Q1-M1-A5
attgcaaatgtatgttttaaacacaccaaaacagattatgccaaatgagtagcctgtcaaaggctggagggcaggaggagggcctgggtttgggttccttcctcccggcctttgtacggtgccttgggcccctcagccccagcgccagggcctcccagctgaggccacaggacaagcacttatttatgatgtactaaaagaagccacagtatgtggcaactgcaaaaggatcaggaatttagggtgtgatctcagacacgtgtcctgggtgctgaggggaaaggaagcgggcacagtgattgtagacaatgagggggtttctcttgatgtaatgaaatgcaattttatggtttggtgcaaaaactcctattttccagtaaattaactttatttctaaagcatattttgatttaccatcaagagcaataaagcattaaatc

SEQ ID NO: 29044 - DNA, 414 bp, Gossypium hirsutum
  Clone ID: LIB3197-055-Q1-M1-A6
gagaaccttctggtggcagagatatacaaccaccgaattatacgttatcttgaagagctttctgattcgttatccttgattagagacgatgacacgctggttgcttatcgattaaataaagacattgagaaagctcctttagttgtgtttatgcatcagcagatggaggagcagtatatgcttgggaaactgacttcaagttggaaaacatttggaattcctcttgtagcaaggctttctaatgttgtcactgggtctgacatccatggtctatatctcaaattactaaattcatttcagacacaggctgaagatgtcttagaagacaatgatacctctgagagtactgcagttgaagccatttctctgaaagagcatgatgcatcattctcgacttcaaacggcattgaaaag

SEQ ID NO: 29045 - DNA, 429 bp, Gossypium hirsutum
  Clone ID: LIB3197-055-Q1-M1-B5
cccacgcgtccgatttgtctgtattttgaataaagcatcgcagatttttctcagattgagattccttagaatctcacccatccctttaacgccctggcctaatttccgtttctggttagggtttatatcacgatttatccgttccttttctcagaaagccggcccacctccttccttcacacctgcataatccaaatcctcagaaaaagaacaacaaatcgaagaaaatggtggtcaaaggcgaagaatctgacagaatcttagagctcttcttaaagattggtttagacgaacgaactgctcgcaacaccatcgctaacaacaaggtcactgctaatctcactgccgtcgttcacgaggctgctttggctaacggatgtgaccgtgcaattggaaatcttttatatacggttgccacgaagtaccctg

SEQ ID NO: 29046 - DNA, 423 bp, Gossypium hirsutum
  Clone ID: LIB3197-055-Q1-M1-C4
cccacgcgtccgcatctttgtactagttcttgtaaagttcattcatttatgatattatcatcaaatttagaatctgggtttcttgtattttctcattttttttaggttgtttttaccttagtttgatcttagtaaagcattggtctttatctaggatctggttttttaaaaattcaatctttttttgtttgtcttacagaagagtagattttgatccttgggggggacttttgaaagagaagaggtaaacaatttagtccctgtgagattccatggctgatgcattggatttggtccttttttactttaacatcctcttagttctataaagccgccaacattatattttgttttccttggtcaaagcaacttggttcaggtctaggttagcttagaatttgggggtgtttttagggttggaac

SEQ ID NO: 29047 - DNA, 408 bp, Gossypium hirsutum
  Clone ID: LIB3197-055-Q1-M1-D5
aagcgtccggttcgaccggctattgtgccaaagaaagctcgagccacaagcttacattctcaaattccatgctgtctagtttatggttgcaacaaggaccttagctctttgaacgatttccacaagaggcacaaagtttgtgaggctcactctaagactgccaaggtaatggtcattggaattgaacaagggttttgtaagcatcgcagcatgtttcatttactgcctgaatgtgttgagggtaagcgcagttgtcgtaaacgcctagcagggcataatgagcgcagaaggaagcttcatttcaataccttttctggaaaatcacatatggaggcctcattcatttcaaggtaccaaatttactggaacctccataccgaaacaaatgcctttgtgtatacctaacat

SEQ ID NO: 29048 - DNA, 386 bp, Gossypium hirsutum
  Clone ID: LIB3197-055-Q1-M1-E11
tttttcatttttttcttctatgttattagttaaaagttgttaactttatcctcaaaatcttgaagtagctgaatattgagtgttgtttgaacttggaacttttgctctcaagctatttctttgggcgatttttggaatttggtcttggcattacttgacctttaatattttgtgatcttttgatttgggttttaactgcaaagtgaacttggtttctactattactttgggggcttcctgtttgatgccaattgttttgtttccaaagttttgatgctaagatgcagcctgatcagagaagaaagtcagctgcggatgtagattttttcactgaatatggtgagggaagcaggtatagaatagaggaagtaattggaaaaggaagc

SEQ ID NO: 29049 - DNA, 425 bp, Gossypium hirsutum
  Clone ID: LIB3197-055-Q1-M1-F4
ctaggtttacttttcagggaatccaggctcgtcctacgtctttgaaaaactcttatataagacctttcctggattgggtgcaatgatcaccaagaaaatagcaacaccggaaagaagaaagatctagtttcaattaggagctagaatggcggacatgcaactagttagggccagcaagagagtagagccgcagtacgtggagatgatggtgcctttgtattcttacgggtgcgaaaggaaagtcaaaaagactttgtcccatctcaaaggtatacctaattattttcttagctaagacccttgtcacttaattcaatgttatccctatgttttctgctactccattcttagattattggcccaaagcccagtgatattgtcaaaggacttggaattgtaaatctattgagtgaatttgggccatt

SEQ ID NO: 29050 - DNA, 410 bp, Gossypium hirsutum
  Clone ID: LIB3197-055-Q1-M1-G12
cccacgcgtccgaaaagacccaagcggttcctccgtttggtgatggttaatgcttttatccgcgttaccgatagggagaagaagaagaagcaaaagggaaggcaaaattcaaatcgagatttcagcttggacttaaccgtcgttttcccgtacatcgccattttcatgctatttttctcaaccggcgacggcattgaaggtttacggaaatggatcttattcgcggaagctagcggcggcggcggcggcggcggcggcggtggcttctggtcttattactctgtggtttcgccttctggcatagccatcgccgtcactgccatggccggaatccgctctcgctgctaccatcgtttattctcgaaggggtagcctgaaatcaccctgcgcccctagaaaagaaaaatgcc

SEQ ID NO: 29051 - DNA, 290 bp, Gossypium hirsutum
  Clone ID: LIB3197-055-Q1-M1-G3
ccttgggcttcattttcaaaagggtggttgcaaaaatggtatctacagttcagagcataggctttggaatctatttatgttacagtgttttcttatttggccttggttccggttatgcttgacccaaacgacctgaacttgatccgatttcattaattccaaggccacccacggggggggtttcacaagaatcaggctatatgaacaggaaggaaatacatgggccagctgtactttactgggtcactgaagctactaacaggtctgagaagaaacctcttgttttttgg

SEQ ID NO: 29052 - DNA, 196 bp, Gossypium hirsutum
  Clone ID: LIB3197-055-Q1-M1-G6
tatctaatgattcaatgttgtttgaggagcaagtagagtcaaatgcctcataactcggtattccaccgtcagttgtcaccacaagaacgaatgtgatcttcgtcactacaacttcgcaatgtatagtataacataccttttaaattctgcccatgcttttttcacaaaacatgccaaaagttacccatgaaatgaa

SEQ ID NO: 29053 - DNA, 365 bp, Gossypium hirsutum
  Clone ID: LIB3197-055-Q1-M1-H9
caaaaatggatggttattagtagaagagggatcatgttgtttgtggtggcattttccgcaataatcagcaggagttgtcgacaattaaccactctttttggtgcaagcattaaccaccttgactgactctgagatatatgcgggcattaatgactatcctccctacctttttgaaggctatcctttcttatggacgggactttgcctacaaaaaacctactgggaggtgttgctatggaaaattaaccactgacatcactgctgaaactctgggggttacaactaatacaccaccttaccttatcccagaagcattatggaagaaccttctgcttggagccaatattgcttcatctggctctggc

SEQ ID NO: 29054 - DNA, 277 bp, Gossypium hirsutum
  Clone ID: LIB3197-056-Q1-M1-A1
gttaaagattcaaaccccaagcttgtcgtcaccgtccctgaattgtttgacaaagtcaaggatttcaaccttcccgtcatcttgcttggtcctaaacgaaaccgacaaccgttcgacgttaaaaatgtcccaaagatcctgtcttttcacgatcttctcgatttagctggtgatgtaaaagagtttcctcgtgtttctgtcaaacaaaccgatacggcagctcttttgtactcttcaagcacgacggggatcagtaaaggtgtcgttttgacacatg

SEQ ID NO: 29055 - DNA, 294 bp, Gossypium hirsutum
  Clone ID: LIB3197-056-Q1-M1-A2
agcaggttaaggctgaacatcaggtatcttcggggttgcttcagccaatcactataccggaatggaaatgggaaagaatcactatggattttgtatctgggttaccgttatctccgaggaagaaagatgccatttgggtaattgtcgaccgattgacaaagtccgcgcactttatcccagtatgtatggattattctttagataaattggctggattgtatatatctgagattgttagactacatggagtgcctgtctgcattatatcagacagagatccccgatttacgtctc

SEQ ID NO: 29056 - DNA, 268 bp, Gossypium hirsutum
  Clone ID: LIB3197-056-Q1-M1-A8
gcttccccacctttttatccatcggggtcttgcaacaaagacactgctttaactcagaagaaagatgtgcatgctgaaagtgtgagcaggaatctttgcccttctgttacggatgagaatttttctgcttcacaatctagttcattacgagggaagaacgtgcttgattctctcagcatggcaaagctttatattgatgatcccagcatgtcagcttctgcgaagcctttgaccaatgtgcagatggtacctttctggatcttcattg

SEQ ID NO: 29057 - DNA, 374 bp, Gossypium hirsutum
  Clone ID: LIB3197-056-Q1-M1-B2
cctttatacgcacatctaaggtgatatccgatttataaggagagctttcatcaataataaatctgctttcaacacaagcaacattaattcatggtttggctgagggggttcatatagattcattgtctcccatagtttctgaaggtcctaatgctaatagtttgttaaatattgaagatatagaaccctcagatctcgagaaatggtcagcagaattccctgatcacctggatgttttgttagctgagaagagagtagatgaagctctagcagcccttgatgaaagagagcaggcacctgctgaagcaaaggaaacaaattcattgagtcctgcagcacttacatatttacagactgctatcgtagagcggaag

SEQ ID NO: 29058 - DNA, 246 bp, Gossypium hirsutum
  Clone ID: LIB3197-056-Q1-M1-B4
cccacgcgtccgttgacgcatgaacgtacgcgggggacggccatgattgatatgaatggagtgtatcgctaagcctgtccacataaatttaaaacgtacacttggcggacggcatatgcatatcagcggccatattatatgcaaggtctacactaattgagtggtgcgctggcacaaggatatacctctcataatgactcttacgatgctcccatttttactggctgacgtgacatatgtgcaaga

SEQ ID NO: 29059 - DNA, 373 bp, Gossypium hirsutum
  Clone ID: LIB3197-056-Q1-M1-B5
cccacgcgtccggaagaatgaagatgagcaaccaaaagatgacaagtgaagatgtgctgaagaagggccagagactttaaattatggtatcaatcctaatctaccttcctattgctataatggttgatgtgtttgtcgatttttaactcggtaaagagttatgttacttcacacacacacctacacacaaaacaggcacttgaaatagacgagtttgttaaaacctttgcagtggactcggttgaacattttcctttttttttttttctggtctaaagcactcgaaagatcgagtgtaggattaatatgttgacattcatgtctctattttcatttcattcaaagcggggaaaagaaaacggatgtgttggtg

SEQ ID NO: 29060 - DNA, 293 bp, Gossypium hirsutum
  Clone ID: LIB3197-056-Q1-M1-B7
ctttctccatttctctctgaaaaaggtttgagagtggccataaggggttcaatggctcacagtcgtagccccgtcatggctccgccgtgaaccgcgattgagggtgcacggatccggctcccttctaggacctttccaaaccttttcccctttaaaaatctaaaaagaaaactagatctaggggatgtaaaacagttttaagagaaaaagatgtaaatcatggaagaagcgccttcgttttcgtggcttctctgaccctcgtcagaacccgaacagggttcatgacgtttggg

SEQ ID NO: 29061 - DNA, 196 bp, Gossypium hirsutum
  Clone ID: LIB3197-056-Q1-M1-B8
ctctctcgattgctggctggattaaggaagtcagcagtcgtaaaggaagtaaagcttcacactcttgcccaatatactgaatgctttagaaccgctgaatgaagcgaactttatccacgtgcatgttaatatctcttcaaaagaatacattgtttaaggactcttgagagaaaaccgaatataagggatgtccacc

SEQ ID NO: 29062 - DNA, 420 bp, Gossypium hirsutum
  Clone ID: LIB3197-056-Q1-M1-C1
aacgatgttcggagctcaagcttccacttctgccttcggcactccttcttccacccctgcctttggcactccttcttccacccctgcctttggcactccttcttccaccccggcctttggaactcctccttcaactccggcttttggggctacttcttccacaccggcatttggcactccgtcttcgacaccggcgtttggcactccatcttcgacaccggcgtttggcactccgtcttcgacaccttcgtttggggctccgtcttcgacaccggcatttggaactccgtcctcgacaccggcttttggaactccatcaacgccgtctttcgctacgggctttggcggctcctctcttttctccaccccattctcttctcaaacgcaacagcaacagacttcattgtttcagcaaccaca

SEQ ID NO: 29063 - DNA, 368 bp, Gossypium hirsutum
  Clone ID: LIB3197-056-Q1-M1-C12
cggacgcgtgggtttccttttgtgccccaaaatttctaaagttgaaaacaaaagcaagcaattatgaaatcaacacaaatgaatggttcatatccaaatgagtcaaaggccggtcagactgtagttatcggttcaagtgggttcataggtcggttcattaccgaggcctgtctagactcaagccggccaacgtatatcttaatccgctctagttcaaactcttccttcaaagctttcaccattaagtttcttcaagacaaaggagccatcggtatatatggttctatcaccgaccaagaattcatggagaaagttctgagagaatataagatagaagttgttatatctgctgtaagaggggagagcat

SEQ ID NO: 29064 - DNA, 428 bp, Gossypium hirsutum
  Clone ID: LIB3197-056-Q1-M1-C5
cggacgcgtgggagaagagatctccacgcaaaaaatttacttttaatttcttcttgttcttcttctctagatctactgttttatttctaaaaacttaatttttcttgttattattattaatattatttattcatgattgacaagtaaaaaacgctgattcctttacacgtaattcgattatagccgtctgattcttttcccccagaatcaaaagccatttatctgagaaaaagaggactgacatctccgtatttattttaggaatttgaagaccagaagcctgaagattgggatgacaagggatacatacctgctcctgaagacagaaagcctgatggttatgatgacatttcaaaagacattcctgatcctgatgcgaataagcctgaataatgggatgatgaagaagatggtgaatggacaccctc

SEQ ID NO: 29065 - DNA, 231 bp, Gossypium hirsutum
  Clone ID: LIB3197-056-Q1-M1-C7
cccacgcgtacgaaatagattccatgaccactctatttcacttattcaaagaatcattccagttttctgctgtgagtgctgatcgtatgagctctaatggaccatgtggctccttcacgcacaccgctcattgacgtggctctgagcgagctttgaagtcttaacagagctgtaatagccgaatgtatgagacctatgctttccgtagacagcgccatactcaccgctggg

SEQ ID NO: 29066 - DNA, 329 bp, Gossypium hirsutum
  Clone ID: LIB3197-056-Q1-M1-D10
gatgaacacgagcattccataggtgggtcgtcgaaatcctctcaatgacagtcacgatctattcaagaggggactgtaaactgcagcagtgattgccggatacgctgatattatgaaaaatacagagaatgcagacggttggagatcgctaggaataacccatgctgaaaatgatgatgaccatcacgttggagagcaaagctcgacctgctagaatgttgtgaatgggttaagatacggatggatgacataccgaccaaacctggactgatttctcaaacaggtccaccttacaaacgctatgattcttactttactttggaaataaa

SEQ ID NO: 29067 - DNA, 390 bp, Gossypium hirsutum
  Clone ID: LIB3197-056-Q1-M1-D12
gctcctttatggccgccaccatggatgatagccgtttcaaagacgccacctgctaatatgcttgcttctattactttcgatattgaggtcttagagccgggacccttaagtcatgctgctccactaacaatcctagcgatggccttatccgacgactcagcgtcttccatctgatcctactcggagtgggcggacatatcggtgccggcttattcgttgagaccggaaccgtcgctcgtgatgccggtccaggagtgacatattagtggcatactagcgggagcatcatgtgagctgaacgcattgtgctacgcccagttagctacacgggttccctgcgtagtcagaggcgcgtacttgtacacgtacacggtcttcaatgaaataacg

SEQ ID NO: 29068 - DNA, 179 bp, Gossypium hirsutum
  Clone ID: LIB3197-056-Q1-M1-D3
aagaaaaaaacatgaaaaaaaaaaaaaaaaaaaaaaaaatctaaaatattaaaactacaccaagcgcagactacttacgtgtatgaggactaggggtggccctgttggccgctgcaggctatttttgggggaagacagtcaccgaagatgactgcggtgtctccggacttctatgggct

SEQ ID NO: 29069 - DNA, 401 bp, Gossypium hirsutum
  Clone ID: LIB3197-056-Q1-M1-D8
gttgatttcaagtctttttaaaaatatctttctaaacaaaaccatttttattttttaatttaaaaacaaggtgctgcaaattggatttgcgaaacctggatctccaaaccttttgtttagtttcaaatcctgatccttccgttcaagattctgtcattcaatgtcgcacaaggctctcccgccattcagtagatgcttgcgccttccagctccattcgtggagacctttccacctccagcaagctctagactcctccgatccccaacttactcctcctaagctttcctcctccaatggcttccatcccaagcgtccttgcctctccgatcgtaccacttctttttctattgatctctccaagctaaccctcctcgacgatgataacaacaacaaccctata

SEQ ID NO: 29070 - DNA, 357 bp, Gossypium hirsutum
  Clone ID: LIB3197-056-Q1-M1-E10
ccgacccatggcatccatctccaacgctttctccctttccctcccttgcaaccgcattgccaactcctcatctgacttcaaccccatcacctccggcctttccggtttggataccggtgagttcagaccgggacgagttgctgtgtctaaaccgagtggaatcagggggaggatttgcagccaatgcaactcccgtgatggatcaaccagtcggtgaaaagagctccagagctaccactattgtcgaggtggattggagaaatcggagctacccaatctacattgggtccggattgtttgatcaacccgaactacttcaaaagtgactttattcactaagattagtgtttagatttt

SEQ ID NO: 29071 - DNA, 335 bp, Gossypium hirsutum
  Clone ID: LIB3197-056-Q1-M1-E11
atcaaaaatctttgtttattaaaaaacactggttcaggctgtatattactgacgcataaacggatggctgtgaggaccatattactagttcacttgatgaatgctgtttcttatatggggaatgctggaccacaaacatgcactgtagatgattagagaaaatggggtgaagatggataatgggaagggtgattattggatgtagtttgcaagagtaactatgtaggaacttctagcaagaatacacttacatacaaggggtacaacgcataagaagcgtaattagggacgaaaatgtatgacaggctgagatttaaaggagcatatcggcatac

SEQ ID NO: 29072 - DNA, 428 bp, Gossypium hirsutum
  Clone ID: LIB3197-056-Q1-M1-E12
gaaaacatgggacaatgggtggattattggcttaactatggtgctgaacccaaggaacctcaaacttgggaagctcagaatcagaaccagaatgtgtttgcttcaaactttgttcccttgtggattgatttgttcaactcagatactcctctggtggaaaaggtaacaagaagtcttcaaagttcaggcctgctttgtgctgctgggattgcaacctctttgacaaattcgggacaccaatgggacttcccaaatggttgggctccaattcagcacatgatagttgaaggcttgtggagatctgcatcgatagaagcaaggaaagtagcgagagacataactgaaagatggatcagaggcaactacgtggcctacaagaaaacagggacaatgcatgagaaatataacgtggaaaagtgtggcgaata

SEQ ID NO: 29073 - DNA, 161 bp, Gossypium hirsutum
  Clone ID: LIB3197-056-Q1-M1-E4
aacttactaggtgtctttcttctcgcgactgacagcttacatacacctgtaacagccacatagaactcgactgattgattgggacaaagcggcgcgatggaacgtgcatatgctcacgcattgtgtaatctgccgagcgctctataggtgctagtgatgaa

SEQ ID NO: 29074 - DNA, 193 bp, Gossypium hirsutum
  Clone ID: LIB3197-056-Q1-M1-E6
gtgtcgactgcactgaccagtttttctgcttggagggactactatacccatgccggccttaggtgcacgttaggctctgaaacatcacgcgccccagacgaccgtatgcaagcatcgcacagtgtgatgccatccgcagggctccatgaaacctcgtacaactctatcataaggagagaagtccataacagga

SEQ ID NO: 29075 - DNA, 364 bp, Gossypium hirsutum
  Clone ID: LIB3197-056-Q1-M1-E8
cctttatttaatgaacttctttttacttttgtttttcccgttgcctttgtatgaatcttccttgcaattctttggtttatgtattgctattattgggcctttagagtaatcaatatcgatttatgccttatttctcattcatatgtaataatttatgaagtgcggtggcagtggaggtagagatggtaaaaggctttgaaattgggtgttagaatcgtctattgagaaacagattttaagctatcagtttggggaaataaaattggacatatgcatttcgagattctcgtgagatacatccccacggttaaatgcttcgcagattttaacatctataaattgttatcatctcttgtcctgaaaa

SEQ ID NO: 29076 - DNA, 418 bp, Gossypium hirsutum
  Clone ID: LIB3197-056-Q1-M1-E9
cgtttagctcctttaacattgcataccgccaccaaacacagtcctacatttttggaacttctcttctcttctctttccaaaaagtaaaaaccagagagagatccaaaaaataatggtgcacggatttattaatccatggagaagggtgttatcggaaactacatattctctgcgacgggggcaatttggtcgacgacgctgcttctctctggtggctcacaaagctgagcttgataaaaacaatatcgattctgttcctaaattgccgtactttgattactctacgcctccttatacacggtcttccgccgttgacattctttacaaacgcaaggagtatctcagccctttcatgttgtactgttaccacagaccctttgaacgtatggatgggaggatgcagtatttgttcgatgag

SEQ ID NO: 29077 - DNA, 425 bp, Gossypium hirsutum
  Clone ID: LIB3197-056-Q1-M1-F10
catatctaaacccccatcctgttatttttcaccgccaaaagaagtcactatgaggaaacgcacactttacgtatggggagtcgccattctatgtttcgtagtgttgatgatcgtcactcccgctatccctcagtctcaagagtaccacaatttctctgatcaacgccaattcttaggtatacccaatacgttaaatgtcatttctaattttaccttcttagtgattggtgttataggtcttgtactgtgtttgtataataataatttcatgttcaattggcaaggtgaactatggggatggacttgttttttcattggtgtggctgatgtttgggatggctcctcatactataatcttgacccaaatgattcccggcttgtgtgggatatattgccgatgacaattgcattcacatcaatcatgg

SEQ ID NO: 29078 - DNA, 371 bp, Gossypium hirsutum
  Clone ID: LIB3197-056-Q1-M1-F11
agaaaatgtaactggagtttgactgtcgcaggatgtaacttgaattaggaacatttaaaaaaaaaaaaagaatcaggcaagctcatgtttgaaagtcagacggcaatcgcttcttctcacagtcctcaccttcggaaacctggctccaaatctgtttcttctgacctaggggctggtgaacctggaaatagtgttcaagagggttacgtgtttcctttgacggtaggtgaaatgaaggcttctaattcacccatgcacaccacatccataatgccttctcccatctttctatggagatttaaggttatatggtttctgatatgggccttcacttgttgcaagattggatgggattcagtcatgagaatgag

SEQ ID NO: 29079 - DNA, 162 bp, Gossypium hirsutum
  Clone ID: LIB3197-056-Q1-M1-F8
ctcttcgccggttcattccgaacaaaatagtcaacgatcgttaattaggccgagaatccttctacgctgaggaaagatggtatgcatagtaccgtactactgttagggcagacattgctaaaaatttaacctgatatatcagagctccgaagctactcatca

SEQ ID NO: 29080 - DNA, 385 bp, Gossypium hirsutum
  Clone ID: LIB3197-056-Q1-M1-G11
aattcctttaacagaagaaatggcgtgtacgagcatggcagcaatttctttaaatttccaacattttcgaaatcatagggtctctttcagtagctgttgctgcttcaacagaaaaatcaagttacatgaaaaccaacaaattcttagtcgcaagtacaggaggaagccaatatctgcacttgcctcgggtttggaggcatctatttcagatgcagatgacaaattgatagccttgaaagaagctaagatcgttgttgaatctaaagacgaaaacaagatccagcttcgagtggatgttactggaattgagacacaaaaggtatttaacaaggttttgacggatttggctcgtcaagcgccaacaattcctggttttcgtagagag

SEQ ID NO: 29081 - DNA, 415 bp, Gossypium hirsutum
  Clone ID: LIB3197-056-Q1-M1-G2
tgattattgaatttctttgggggggttgtttttggaagttatcggaatttgaagattctgttaggttagttttttgtttgcaacataaaaaagaaaaagaagttgttgttgtcggtgcaaatcaacctgcattgatggaatttggaaggagcggagcggtgtcctattgacggtgtatatgaggagagtggagattgaggttgttactggaaatgtgcaatgttgaagggatagggaaaaagggaggtatgagaatcggggtaataaaaggcggcggacgcggagcaagctgatgagagagagtggataagttgaaaaagagttcgagaatgaaggtcttgatcatacgcgccaccacatcggtgttgctgcggacttgcatagcacagttaacgaccttgggggagacatgggg

SEQ ID NO: 29082 - DNA, 424 bp, Gossypium hirsutum
  Clone ID: LIB3197-056-Q1-M1-G4
cagatttcattggccgtctacctggtgcttattcggttaaccagaagctaaattctgcggttaagaacaatttaagtgcaggttcctccttgactggtactggtgataggcaaagttcaaatagagcaggaaatcaagggtctgacctcctttctccacttgtagatcctcgttttatccaatacttacaaagaacttcttatgggacaactgcggctagtcctgattctttgcttgctgggaaccatggtggtactttgcatggggatttggatggccttcaaaaggcatacattgaggcaatactagctcagcagaagcagcagtatgaattgtcgcttttaggtaaagctggtggtctaaatcagggctattatgggaattcttcatatggtcttggcatgccatatgctggaaacccact

SEQ ID NO: 29083 - DNA, 366 bp, Gossypium hirsutum
  Clone ID: LIB3197-056-Q1-M1-H3
aaagaaactcattgagacgaatgagttacctgctcctgctcctatagaacaacgatggacagctcgcagccagagcccgatgagtcctgcatcaagctcagcagaagatgatatattctcatgggttggtataatcatgtaccttcctacaatggatgcccgccaaagaaaggaaataacagaagaattcttccactacaggcatcttacgcagtcacagttgtgggataaatattctgcctatgaacattgggctaagattgaggtcccaaaggacaaggaagaacttgaagctcttcaagcgagactcaaaagcccgtttccagtcgatgcatataacaaagcaaggagggaattggattccaa

SEQ ID NO: 29084 - DNA, 420 bp, Gossypium hirsutum
  Clone ID: LIB3197-057-Q1-M1-A12
caaattttgacattaaaaaaatgagaaactttgacaggaaaagtacgaagaacctaacaatggcgtaagtcttaaataattacagttgtctgtattatgttatgctcctaattgtttttattaacattttattattcttagaaaaagaagaatagccattagaaaactttgcactaaaggaaacatagggtgtctatctcaatcaaaaaactgaaattttatattaaaaaaagattcccaactttggatatgatgttcacgttcacctattattttatatgaatttaatctataaattacattaggaatcagtataaacatttttaataatacatatttaaatttaagttaaaattttaaaaaataatttttaaaatttaaaattcttagttccgtcattaaaaattgaaggattttttt

SEQ ID NO: 29085 - DNA, 410 bp, Gossypium hirsutum
  Clone ID: LIB3197-057-Q1-M1-A3
cacgcgtgcgattttcacactaataccaatctaccttctctgcgtcctttggacacattcaacataccgaagttcttttctgaaagacccatgttcgatttgcttgttagtagaaaaaaggatccatcaaagcaaacataatagaaccttaaacgaagcgtgcaataaagattgcatttggtgatatgaagattactttgatgtgggtatcatggacatgaatgtttggtttatttacttcttggatagccaccgacattggagtgcaagccatttcttgggctcatattgttatcatcaccttcattagtttacgtttcattgacatcattaatattatgggaggatttattgggggggctagctttaaacctaatggaactgcttccttctatgctgccggggtcggt

SEQ ID NO: 29086 - DNA, 408 bp, Gossypium hirsutum
  Clone ID: LIB3197-057-Q1-M1-A4
gtggaatcctctctcatgggttatggaagctgctgctatcatggccattgctcttgcaaatggaggaggaaagccaccagattggcaagactttgttggtatcataactctgcttgtcatcaactccaccatcagttttatcgaggaaaataatgctggtaatgctgccgccgcattaatggctcgtcttgcccctaaagcaaaggttcttcgagatggaaggtggaacgagcaagatgctgctattttggttcccggagacataataagtatcaaactaggtgatattattcctgctgatgcccgattacttgagggtgatccgcttaaaattgatcagtctgcactaacgggagagtcccttcctgtaactaaaagacctggtgatgggatttactctgtttctac

SEQ ID NO: 29087 - DNA, 398 bp, Gossypium hirsutum
  unsure (1)..(398): unsure at all n locations
  Clone ID: LIB3197-057-Q1-M1-A5
caaggattctcctggtacaagagattcttatggagaaccccttgtgacaagttacaacaggcgcttctcgggcacggttgattacatatggcgttctgaaggtcttcagactgtcagggtgcttgctccaattccaaaacatgctatgcaatcgactccagggtttccaacaaagaaatggggtagtgatcatattgcattggcagcagagttggcattcacaaaaagcttgaccaatcaagaccccaagagttaagtggctagaaaggggttttttttatggtggttacttgcggggttttctaatctcacttgttgtattattgctgntatatgtcgatctgttttaccgactacaattagatattttaattcatcaggtactaattggggatgag

SEQ ID NO: 29088 - DNA, 381 bp, Gossypium hirsutum
  Clone ID: LIB3197-057-Q1-M1-A7
cacaatcaatgagtgcataggaccctctgacacgactcattggacttccattgtaggatgtctacaagaccggtggtctaggaactgagccggggggtcggcattgaacctgtaccgataggcctggaacgtgaggtacattacgacaccttggattgaccactgatgttaagattagatggaagcatcttgaacctatatagaaagcgctttctgttgacagagtcttgtttaatgtgctagaactggaggtaataaggtatttaaatcgttgatatgttgcctccaactacaaggatgatctctgacagggctgcggcctatttcacctgccaagttttcattattaaccatccaggacggagtggacattgttatgca

SEQ ID NO: 29089 - DNA, 424 bp, Gossypium hirsutum
  Clone ID: LIB3197-057-Q1-M1-B1
gacttctttagtgtggaggtcactgctttatcaagctatgaagacaaagaggagttattcaaagagcaggttgctcaactaaggcagcgttttttcaattctatttctccaggaggacttgctggtgacagacggggtgttgtccctgcctctggattttcttttagcgcacaacagatatggagagttataaaagagaacaaggatctggatcttcctgctcacaaggtaatggatgccacagttcgttgtgaaaagattgcaaatgagaagtactgtcgcttatcatctgatgaggattggttagcattggaagaagctgttcaatctgggtcagcatctggttttgggagaaggctgagctctatcctagaaacctactcttcagaatatgactcggaggcaacctacttcgatgaagatg

SEQ ID NO: 29090 - DNA, 390 bp, Gossypium hirsutum
  Clone ID: LIB3197-057-Q1-M1-B2
agtatttattctattaaagtctatactctatccttgttttagaactgaattgtgcttatgggacaaccctggttatttatactggatcgaattgaggatggagcttaaagcacacacatacgttaagtccaataatctactgtgcagccacgatagataaacaaattcccgaaaaagcgttggaagatcacagactgaaacacaggaaatccagctctttaaaggcagcccaaacatacgttgctctatgtcccaataatcaatcatatttatactactgtatccatagaaaccaaaaccaaaatgttctaattgaaagaaattgaatgtaatagctcatccatgggaagagagtgaagagaaaacattaaagctgaaaactatacttgt

SEQ ID NO: 29091 - DNA, 179 bp, Gossypium hirsutum
  Clone ID: LIB3197-057-Q1-M1-B5
tactgatgtatacatcacacttgctagtattcctacttggagcgtagactttgaccacttgcatattgattacctatgactcaccgagtattggtaaacccggtattaccatattgatgcatatgaacgtgatgccaccactatatgaaccttttggcacccataggtgaaccgatcaa

SEQ ID NO: 29092 - DNA, 334 bp, Gossypium hirsutum
  Clone ID: LIB3197-057-Q1-M1-B6
cactgatgtatacaacacactttctattattcgtacttggagcggagactctcaccacttccatatttggtacctatgaaccaccaaattattttaaacctcctactgcttttaccaaaccagacaaggtgaaaccaccactatatgaacctaagccaactcagtttgtaactctctgaaaagaataagcctgggcccattcatgttgaatatgctcatttaaagaagactaacttggactgttactcatggttagtaaaacgttcagttaacggttgcctaagttggaatcacttagatcggaactcgctgatatagaagagagagaagctta

SEQ ID NO: 29093 - DNA, 322 bp, Gossypium hirsutum
  Clone ID: LIB3197-057-Q1-M1-C1
cccacgcgtccgcaactaaatacaccacagccattgacatttgttctagcctctgtttgctggtgagagtggagtaaaccagacttcaacaactacaaaatggataggacttggatggaatttctcaagggcaagcaacgagtatcaaaatggagtgcaatcttttttagattttgcatttcacaattaaagccaagagaatatgattctttgcctgtgtaagaggtgtggcaatatctattggcattatcgtgaaagtgtctacgaacatctaattgttgatggcttcatttcggggtataaaaaatggattttccataga

SEQ ID NO: 29094 - DNA, 286 bp, Gossypium hirsutum
  Clone ID: LIB3197-057-Q1-M1-C4
atcattcgtctctctcaccttaagcattgctcaaagcttacttggaactttgttcgccggtagaccaccaaccaatagtggtaaagggttggtcaggcctcagcttattcttgaaggataagccattgagatgaacccgacgcagaagaataacccctttggaggcctttttagaggtattatggatcagatctctctcctgagcggtgctaaaaagagataggtgcgggcatttgacggccgtgatgtaacttgctactggcgaaagtatgttgctgtaactatg

SEQ ID NO: 29095 - DNA, 303 bp, Gossypium hirsutum
  Clone ID: LIB3197-057-Q1-M1-C7
atactgtatttattattatttgtgttttataaaacattttattatctatgactagataaactcaggccggccaacgtaatattattacgcaaaatttaaaactatacatacaaagctatcatcattaagtacataaaaacaaaagaaccatggtatatatggttctaaaagagaacaaaaataaacggaaaaagttttgagagaacaataagatagaagcttgtaaatacagctgaatgaaagaaaaccatcctgaaccatctaagtctaatagaggctattaagaatgtaaacactgagaaa

SEQ ID NO: 29096 - DNA, 367 bp, Gossypium hirsutum
  Clone ID: LIB3197-057-Q1-M1-C9
aaaggaacaaatctcgagggaaaaaaaaaaaaacagaatgtaaaataatatggagacacagattattaagtagctcagaaaaggattctaaaaaattaatggaaaaatgatcaatctattcgattagaatatgcggtcaacaaaacataaggtgaagggttctgaatacgtggatattttaatttgaatagagatataattccgtacaaagctttcttgttttctttttgatttttactgaattctgcgatctttatataatggatcacttcctctgttatgtaaacgttgattggcgtcacaccaccaggtatgatatgtggttaaggctaaatggaaggggctttattgaaatactgattggttg

SEQ ID NO: 29097 - DNA, 183 bp, Gossypium hirsutum
  Clone ID: LIB3197-057-Q1-M1-D10
cttaaacgatcaaggaccagttggttcatagcataataattggatatatttgccatatcattacattcaaatacattcgattttgaggtggcaaaatgtgttccctactttcataatgcttaatcagctattcttacattgtttaacaacattacactaatgtctttctctgtaccatgtact

SEQ ID NO: 29098 - DNA, 355 bp, Gossypium hirsutum
  Clone ID: LIB3197-057-Q1-M1-D3
tccacacgagcgtgcaagcttaatatggcatgcttcttttgcttcccacgcagagcccctgctgtagcgcaatacggacaacatcgtcggatcacagcagctctcgattctcagatccatgcgatagacaatatcatggtcctcgaatcttacctacttatgctcaccaccgtggaatccgttgaccgatagctattcaaggggtgtatacggaaacttgttcactcgtcttgtttacttataactgttatcttaataactggaatctttgtcagttccactacaggcgatattgcactgcattgatgagaacccattcttgagaagcttattgctgctgggtagcacatgaagg

SEQ ID NO: 29099 - DNA, 351 bp, Gossypium hirsutum
  Clone ID: LIB3197-057-Q1-M1-D4
gttggccaacaagaattatctgctgttaactcctactcatgcttgtgcaaaagggtatactaacaactttagagtttcgaatttaccttccattgttgtaagaaaagagggttctgttcgatcgcaaggttttgtagcaatgcaggagaagggtggttcaacattgagcgatgattcgaggacgaaaaccccacatgttttgactgttgctggctctgattcgggtgctggggctggaattcaagctgatctcaaggcttgcgctgctcgtggagtctattgttctactgttatcactgcgctcactgctcagaacactgttggggttcagggtgcaagtaacgtaccgga

SEQ ID NO: 29100 - DNA, 354 bp, Gossypium hirsutum
  Clone ID: LIB3197-057-Q1-M1-D5
gccgcgcgtccggcaagatcagatgctcacttctactgatggaggcccgcagcggcaccttccatgacccagaattgttccatgctcccttgctgcaccaccctcggaggaggagcggcagacccttaaggggtttcgcagtgatatatgagggcggcgattcacctactctaactggccataacaatcactcaccaaggcccgaatgcattagcatgtgaccccagtgctggaactgaagctgaggctgattccatggcttgccctgctagaggaatagatggatgtactgcagccactgcacacccatctcttaatgacgaagttgtgtataattgaacaaacgctactggt

SEQ ID NO: 29101 - DNA, 445 bp, Gossypium hirsutum
  Clone ID: LIB3197-057-Q1-M1-D7
ctcaaaacaccaatacgtgattgtgatgtacctcatatctttgattttttttctttttcttttgaagcggggagatttgattttcatgtttcataatcatccaccaacttttctaatttggatgttgaagacgaatttggattgaaaaaatagaaatacgaatacaatgtttcctcttttctttctcttttttttttgaaatagcgatcccaacttaaacgctataatcgctattttaatttcgattcttttcatcatttatactcatcatcatagtaaattagtaatggctgtcaaagaaacggcatgagaggacggagaggagataaacccggaaaaggaatcaaaatccgaggttgcggagagaagtgaatcattaaaacaaaatgaggagtcgtcatcgataagggaaccggacatttccgccgtccggtgattggattcc

SEQ ID NO: 29102 - DNA, 441 bp, Gossypium hirsutum
  Clone ID: LIB3197-057-Q1-M1-E12
gtgatttaatgcacctcattaataaggaagaaaaaacagtctcaagtgatcacagaaaagttgactttgtagagcagcaatatgtggaagctggagatagctgaaggcaatggtccatggctgcttagcactaacaatttcgtcggcagacagatttggaagttcgacaatgaagcttccccagtatcaaatggacaaggagcccaaacccaatattttcatcccaatttcaactcacatcggcatcatgttagaccaagcagcgacggacttaagaattttcagctgattaaagaaaacaacgtagatttaagcattggaccagtgagatttgaagaagatgaagaagtgaaaaatgaaaaagtcgaaattgctttaaggaaagcatttcgattcctttcagctacccaagcttcggatggacattggccttcagaaaat

SEQ ID NO: 29103 - DNA, 244 bp, Gossypium hirsutum
  Clone ID: LIB3197-057-Q1-M1-E8
aacacgcgtccttacacttttccttttcattaaccatatgcttaataacaaactcaattaactatcccagtaactctaatcgaaaatcacctgttaatataccatatatttaagcgacgcgatcaacgagctgctcaatgactgactttgataaagccactgctttggttctgatagtgactctgcttgtgaatgttgctgctaagggtgatgatgatggtgatgatgatgtcaagatacatgt

SEQ ID NO: 29104 - DNA, 230 bp, Gossypium hirsutum
  Clone ID: LIB3197-057-Q1-M1-E9
gacggcatcatactatcatagcagttggttttctaatatgcttgaatactatcccattgaaacactgcagaaacactcatataaaaacaccttgtgacataattcaattttgacctagggaagcgtgattagctctgttaccgtcttactgatgaccgcagctgtgcctgctatcgtgactgtgaatgttaattttgctcgtcaggttgatgatgatagtaataatctat

SEQ ID NO: 29105 - DNA, 347 bp, Gossypium hirsutum
  Clone ID: LIB3197-057-Q1-M1-F3
ggagtgacaaatccataaacataaagagactctaacctgggactgcaccagatgactgctatggcctaagatataacacgagtttgcataattccgctgttcgaagaaaggagcacagaagcccctaaagaagctaaacataactcatgatgctgaaaatactagaactgtggctgcagatcccggctgcgcgcagacacatgatgagagctactcttccaaccacgtgaacggtttgactccagaaatgaaacagggaacacgatgagggctcatgtatacactcaatgggcggaataaccacgtatcacacatggatcgttgggaaggatgaggggactgaccca

SEQ ID NO: 29106 - DNA, 348 bp, Gossypium hirsutum
  Clone ID: LIB3197-057-Q1-M1-F5
cgcagacccacgagtactgactcatgggaacagtactttgaagccgcgggccttagttgttcagggtatggacctttaatttaaacggtctgtgactatccaaaggctggagcgacaattaccatatcaacagcggagcctccctagattgcgaagtagacaaccggggattcatcttcaactcgttggaaccacccgagccccatctctgtgttggtcggaccttatagctatgagcctgcactctccttgctggaatgacaaagaggtgccaacccggttgatcttgttgtgcggccacgcaacccattgtcagtggagttgagaccaggactctcgggaaacatt

SEQ ID NO: 29107 - DNA, 456 bp, Gossypium hirsutum
  Clone ID: LIB3197-057-Q1-M1-F6
gggtaccaaggattaaattgaactattaaatttattattgttaattagcacgtatatccttttaggcgaaggaaatttagtaaataaagcagtgatctacaattaaagagaagggtgagaagaatctaacaagatatagaaaaccccaaaaaagaaaagaaagggggctataattaaggtgtaatcaagattgaatatgggaccattttgaaaagaaaaaaaagatcataattgagtatgataaggaatctttacctaattcaaagaaggctttgaaacatacgtaattttgaaatgtttagctactcctgttgatctataaattgggattttttggagcttgaaaaaatttatgtttaaattttattttatatttatataaagaagtaagtgtaattgggaagacagagggtgatggtgagcacagtatgaaataattaacaagaaaataaaagc

SEQ ID NO: 29108 - DNA, 284 bp, Gossypium hirsutum
  Clone ID: LIB3197-057-Q1-M1-F7
aaacaatcaatcaatagttagaaaagaaaagacaacagcggccgttttacttcaattcttctgccggcgactttgagtgacgatttctaggcggctgttggttttatcttccaagtgcggtttaaggcttcagtgtgtgcggagaatgggagggagtcggggttattcggcgaatcctagcgactacaagcttctagaagagattggttatggcgccagtgctactgtatatagagcgatctatcttccttttaacgacgttgtagctatcaagtgtttggatc

SEQ ID NO: 29109 - DNA, 255 bp, Gossypium hirsutum
  Clone ID: LIB3197-057-Q1-M1-F9
acgaaagtgtcatgcttgatatcgatgcgtaacaataaaatctttatttagtagcacatatttaaaccaaaaaattcgttcgcctttttctatattagactggcatctgtctctatgtatccaattaatgcatatatatgggctgatctgagaatatagtgtctgtgatttgtgccaatttagctaaaactagcgcttagatagaataggataaggctctatatgtactgtaaatggatctacctattttcaata

SEQ ID NO: 29110 - DNA, 376 bp, Gossypium hirsutum
  unsure (1)..(376): unsure at all n locations
  Clone ID: LIB3197-057-Q1-M1-G1
cattcaaataatgggttctttctttgaatttgttgtgatacaataagttttttttattgtaattgtattgaaacaaaaaaaatggataacaatggaatgaataagacaggaggcggtccgcaaattttcacttattctatttctatggttttatctgagaatttcgtgtcttttttttattccaatttttgctaatttcgtgttttgattgcctagtgcaattccatttttttattccgattgtatctacatattctaattttttgaggtaaggaggatgaataaggataaatgagaaggaattaaagaaatggggngaaagaagaaaagacaatttaaacagagaaagaaggggaaaaaaaaaaatatcgggggg

SEQ ID NO: 29111 - DNA, 270 bp, Gossypium hirsutum
  Clone ID: LIB3197-057-Q1-M1-G12
acgatgaagcgtgggaaaaaaaaattatttggacacagaggagatatcaactacgattaccttacatctaaaacacctggtctcacatccactaaatttaccatgtgtactactttcagcggagatgaaacggctctcttcttggggttactcggtgccgacgacgatctcgatcttctcctgaatgggagctgaatacgggacgcttaatagcggagagggtgttgctttaatgtgagcgatgaggactgacttggagatgaaatgtat

SEQ ID NO: 29112 - DNA, 358 bp, Gossypium hirsutum
  Clone ID: LIB3197-057-Q1-M1-G7
ctagaacagcctatccgagtcaggctttcggctttcggcaaacctcggggaatatttcatcggcccagagctcgagcaattgatccaatagttagccgaaaatgatccgaaccggtacgggaccccaccagcatcgaagtcggccatcgattcgctaccatcggtgaagataacaaaggatcacttgagttcaaagtccaagcagtgcgcagtttgcatggatgatttcgaggaagggattcaagcgaagcggatgccctgcaggcatctttatcataagaattgcatattgccgtggctggagcttcataattcgtgccctgtgtgccgtcacgagttgcctacggatgaccctgat

SEQ ID NO: 29113 - DNA, 335 bp, Gossypium hirsutum
  Clone ID: LIB3197-057-Q1-M1-G9
gtccttcgtccgaaatgagcaaccctgattcggcgcttgctaccagattgccttgtccatcaccgatgagctcgcggatcttgagcaggctggtgtcgatggtatcccaatccatcacggtgctttgccagaatggttgcctctcatgaagtccgtgcatgccttctaccaaacgatggatgagcactgcttaaggatcacgcactgtggcgttcactacattaagcagatgcagacggccctaggctactacaagtacaagggtgctgtgcactctatcaaacacatggttgccgccctcgtaacccattgcgactgccctatatatgagaaag

SEQ ID NO: 29114 - DNA, 246 bp, Gossypium hirsutum
  unsure (1)..(246): unsure at all n locations
  Clone ID: LIB3197-057-Q1-M1-H2
cggacgcgtgggtnacttaacaaacaactcaactgaatcgtgaaggcagtcgagtctgggcccatacttcaacaggacccggagcaaaaaagcgcatgctagtactagtctcgctccaaaataagaaggggggaggtgttggagctccaaagattccgtagaaagtctagcccaagccatctcctttaatggaggatgcctaataagataacctgggcgagatatttttacaaagcaaattataaa

SEQ ID NO: 29115 - DNA, 265 bp, Gossypium hirsutum
  Clone ID: LIB3197-057-Q1-M1-H9
aagaaaaggaaaatctttctttcttcaacgttttgctggaactgggctcaacttttcgggttttttattaactatgggatcttttttgttgggttaggctctctattgttctatttctcttatgagtcactctggatttctcatggtgatcccgttttgcctcaattaggcgaatatctcttttcttgagattttggcgtttacggcttggtaattaaggacgacgtcgctcaatcacaatgagagagaggaagaccaccgacct

SEQ ID NO: 29116 - DNA, 419 bp, Gossypium hirsutum
  Clone ID: LIB3197-058-Q1-M1-B3
attgataaaaaaaatataaacattgtagaattaaatttattattatgctaataaaacgtcacggcaatattctgttagtaatttaacggataaataaataaaatatttaattttaataacattaataattaaaatagatttttttaaaaatttaggtgagtacgacaataactgaattactatttatagtttacattctattcagctattgactgaagtccaaagattatttagacgataagtttataaatagcataagtcaattttgggggaagaaatataaaaacaaccttcaccaaaacatgggtgtctttctttcttgcttctctttttaaatgatcagtaaaaaaactaggtttgttatttgaaaattttggttgatttggatggaaatattgatccttatatgattaaaaata

SEQ ID NO: 29117 - DNA, 433 bp, Gossypium hirsutum
  Clone ID: LIB3197-058-Q1-M1-B7
aaattaaaagaaacatttaattaattcatattatataaaaaaatatttatacataatttaatttagagcttttatttataaaagacttacacataatatatttgaccattgcatgccagggtcttagtacaggataaaaaaacttatttagtactggatgccaacgttgtcctagtactatattagaatcaacacaaacatttagtactagatgatgtaacacctcaaaaatcattacattatgaaagtagtgaaaaattgagaatttgtccttgataaagagagataaggaaataacagtgacaaaaagagaaagttgagtaatgttaaagaaaattttaattaagaagtatgttgaaatacattaatttaaagtaaggactaaatcataaatgtgagaaaagtgtgggttcaagcataaatattcaattag

SEQ ID NO: 29118 - DNA, 424 bp, Gossypium hirsutum
  unsure (1)..(424): unsure at all n locations
  Clone ID: LIB3197-058-Q1-M1-B8
caacaaaacccctagaattaaggcctaaaccttccctcacattaaccgagttaccatgtttgacacctgcccaattttcttcactgcacgacgacccatccactgtccgtaaccaccatgctccgacacctagccaccgcacgcaacgataaatcccatccaacgactatttttgaggaatcaatagttagccgaagaggacagtagctctccccatgccccaactttccataaataaaacaaaacaaacttaacttctcgtatttgaaccgagcataaacaaccatagacttcccaaccataactttctttttgcgcttcaatggggcagcaacatttaaacaaacacgaatatgtaaataattttgaatccgcaaagtcgaaatggatgtatcatactcaagaaactttccacanaaatcac

SEQ ID NO: 29119 - DNA, 427 bp, Gossypium hirsutum
  Clone ID: LIB3197-058-Q1-M1-C8
aaagaacactgttagtttgagtatacatactgttgagttgtctttgatgcaatcttttttttcctcattttgatacttgtgcactatgatattcaactagtctttggtgtatcttccaaagctaagtcattattctttattaagaaaagctcactttagatcttggaaattctactgaaaagcaagttattcttcatataatatttcctttcttatttttctgcgtttctttgtgcctcctagactggaataagttacccttcctttcacgcttcccatttttattatctgcatttgttcgtagcatcatctttaaccttttgtcaatagtggatgtctgccttctagaatgaaatttgttcctcgtcttataaagggacccaattatggtccggcagtaccagcattcaataattctgatctcaat

SEQ ID NO: 29120 - DNA, 362 bp, Gossypium hirsutum
  Clone ID: LIB3197-058-Q1-M1-D7
aattctcaatttgattaaagcatagaacaaattgcagaatatgacctcagcaataattctaattaaaaggtgaatttttttcgacaaaaaatgtttttgtacatgcagtacttttttgtgctttctctccgagaaaaagatgagatgaggtgaggtgaggtgaggtgaggtgtgcaaccgtagtgccagagatacgggaaaacaagaagaaggcggtttcggctggctggctgctgagacttgagagagagagagagaggactaaacaacagaatagaagaaaagagcttgcattttcctgcattatttacacacatttgctctgaaattttagtgtgatcaaagtgatagtgttaaacgtg

SEQ ID NO: 29121 - DNA, 318 bp, Gossypium hirsutum
  unsure (1)..(318): unsure at all n locations
  Clone ID: LIB3197-058-Q1-M1-E1
cggacgcgtgggcgtcagcgtcagcgtcagcgtcggagaagaagcagaagcagacgcaggcgatccgnctgggtcttctccatctaaaccttctgatcaaccctcgattcatcggaggaatataccaaatggatcgcctgcatgatattctgaaagctcatcggcgcctgcgcttgcacgttcatccccatcataacaaaactcctggttcgtccgaagctttcaaggccgtttccaaagcgcttccttgcctaaactatgattaaaataagaaaaactacgatttatttggttcattgaacatgattattaaactat

SEQ ID NO: 29122 - DNA, 228 bp, Gossypium hirsutum
  Clone ID: LIB3197-058-Q1-M1-E2
gtcgacatagtgaacatagtggtgtttcagaggatgtgagtgtgagtgtgagtgagaatgagtttgtaaaatggttaccagatcgatttggattgcagaatgggagtgaggattcaagtaattttgattgtgaacattcatctgatttgggggaagttgaaagggaaagggtaagacaaatatttcacgagtggatgaacagtggtggaaagggatgtacatctaatg

SEQ ID NO: 29123 - DNA, 387 bp, Gossypium hirsutum
  Clone ID: LIB3197-058-Q1-M1-F2
gaactatcaggtatacctcttccccttttgtaagtgcatcttttgcgagagtatgagcttggccattttctgttctttgaataaatctgaaagcaattttctggaaatgagatctattactctgaatatcatgaataatcatcccgataacagatttgtcccttgttgttgattgacatttgtgaataactgttttcggatcccccataatcgtgactgagtctatccccatgctgatacctaacttggttgcctccaaacatgcatatgcttcggcaacaaatggagatgaaatgttgaagtgcaaagttgactttaagggctctaatcacaccatcttgatcccgaacaataattcctgacgctgattctaaagttcctgatatc

SEQ ID NO: 29124 - DNA, 342 bp, Gossypium hirsutum
  Clone ID: LIB3197-058-Q1-M1-F3
acgggaaggattccctatcaactcaagagtttaatggaactgatgaatggcaggaagcaactcgatcttctgaattttttagaactgataagtcaagaatgggtttcaagcagacaaacaatgaggaagttttggtccagtgtacgaaatctcatgagcttcggcataaagccaaaaaggcgagcatcagagaattggagcatcaactaaaaagtggtatgaaagtagaagctgtcagggaagaccatgaactagagaaagctgagaaagatatgaaaacagctaaagaaagtcatggaagaggggagtttccttgcaataacgaaaccagctaaagaagct

SEQ ID NO: 29125 - DNA, 383 bp, Gossypium hirsutum
  Clone ID: LIB3197-058-Q1-M1-F8
aaaaaataaataaagattgaacctttaatatagctgaatcagaatcttgtctcttctataaataaaatttatttttcttcagtccttctcacaatcccccccttctctttgatccacagtttcagtttttctcattagcagtttttaagaaaaaggctaaagttccaatctttacgtgagatatggcgagtactagtaattcaaacaagatgcaaaaattagcttccattgatgcacagttacgactattggttccttctaaagtaagtgaagatgataaattagttgaatacgatgctttgcttttaagatcgattccttgatattcttcaagatttacatggcgaagatcttaaagaaactgttcaagactgttatgaact

SEQ ID NO: 29126 - DNA, 298 bp, Gossypium hirsutum
  Clone ID: LIB3197-058-Q1-M1-G3
cggacgcgtggagcctatgggaattttgttttggctaatgtttggctgcatgctcaagtaatagctatgaatatgcaagatgactccgatgagaacgtgatgcctgatactgagataagaacaaccggttcacctttatcttggctttatcattacaacctctcatgcaaccctgcctttaggatgattgaacgaactggaatacaccatgaacctgggcttggtggttctacaattcatactactgctgccgcaactgagttatgactcaacagagatgtggggacgtataaactac

SEQ ID NO: 29127 - DNA, 363 bp, Gossypium hirsutum
  Clone ID: LIB3197-058-Q1-M1-G8
cggacgcgtgggtgaacctttggtaaaaggacataaaagggtatttgaggttttttccaacccaattaattccttgccacctgattttccaaactcaaccgaaatttaattgcctttccccacaaacggatttgaaactgttggaaaacaaaggaataccttttttgttaagtgcttaaaaaaactggtttttttaagttccaatactagaagttggggtgtccttgataataaaccatggaacttaactgaacctcaactcgaatggttcaatgtggcaaatttcaagtccttaaaagaaaaccaatcttacggttgggtttaacattcttttttccacaagttagccttggaatttttgaa

SEQ ID NO: 29128 - DNA, 362 bp, Gossypium hirsutum
  Clone ID: LIB3197-058-Q1-M1-H2
gttgcaattaccttattcccatttcttcttgtcattgtagctatctgttttagcttttgtgatgccaattccaatgtgctttgcattgaaagtgagagaaatgcccttctgaagttcaagaatgatctcgttgacccttcaaacaggttgtcttcttgggtcgaaggtggggattgttgtaaatggctcggtgtcgtgtgccataactcaacgggccatatcaaccaactgcacttggctgctcctcttccagttccccattttgatgcaccagttgctgaatgggaagcttaccatcgatcaaagaacaattccccgctaaaaagggaaaataatttcttcattgctggagttgaaacatc

SEQ ID NO: 29129 - DNA, 399 bp, Gossypium hirsutum
  Clone ID: LIB3197-058-Q1-M1-H3
gttgtaattattcgatactcatcctttgtcgtgcttgaacccaaccgtaaggaacatgagaaacacgatgagtatgcacgatctttaaacggggttcgatacgccacaccctaataataacttgaattctttacaccataagctgaggcgagaaatatgagacacttgtgcttatcagtgtagaaggggtcgggattttgaaatataaaactgctcttttggtctatgatcggctcgttaattctcttgctacccctaaagacacctttgaattacgcgatgagtggcacacgacacggctacatattgggcagctggtgatagagacttcagctaaactaacggtagcaagtgaaactgatcaaaatgcacaacacttaaagaagatcgctgatgcta

SEQ ID NO: 29130 - DNA, 471 bp, Gossypium hirsutum
  unsure (1)..(471): unsure at all n locations
  Clone ID: LIB3197-059-Q1-M1-A4
ccgtccgcacttctnngctgattctgcnnatgtaatcgnngtttcccctttttctggattaccagcnnttcttcgctcagtcgcaccctgtgnnnccggatttnncttcatttaccagcnnatctagcttnntgtgggtatttcttcctttttgttttgccccatattctatcnnntcctcatttnnatggctcnncagttccatgttcnngctttccttgnngaagccaatgttnngaaaatatagtttggaattttcttccttctggtnntcctcattaggaagaaccctcatcagcaanttgtgtctacctactttaagnctctccttgttcttcttttggcaagcgtacctcttctattctctttgtgtcagaagaatcttctcggctctcatgttttacttcagcatccttgtggatctcttcttcaatattctcaatcaggtttgcaattctgatattttcaccc

SEQ ID NO: 29131 - DNA, 441 bp, Gossypium hirsutum
  Clone ID: LIB3197-059-Q1-M1-B2
caccagaccacctcttcattttgttcagtatctatctgtctcagattcaatattgtgttccaagcggggtatgcatgtttcaagttttccaatacaatagcataggagatccttacggacattcataccagttcaaagcaagattgctgcaatcttatgctaatactactaaagcagaatatcttgtaaatagaagaggaaaggaaaattttgagaaatgaaaatagccctctctctccttataaacagattctattgtggttgtcagactctgcatttttagtggagaaagagaccaacagaatactggggtaaaaattttgaccacggaggaaaaccaaaatggaaaaacagattcaaaaattccatccactaaggattgtgtgatttgggtagcatattgtagctaaaggagagtgaaagaaagacttggaaaggtgc

SEQ ID NO: 29132 - DNA, 370 bp, Gossypium hirsutum
  Clone ID: LIB3197-059-Q1-M1-C2
cggaccggaatctcccttctcgacccatacctccccttttttttatacacacatcaactgatttccacgggacattcatcattccctggggggagggcatccaaaaacttccatttcaatacatttcctgttccactgctagccctttatgctactacatgaataaccaaactctctcttattaaccagatatttaattttatctaaaccgcattccttcagattattcctctccttaaatccaccttacatcgcatatatccatattaattcagagaccaactattctacttttcctttaaaaattaaccaattctattcattatcatctgccatacattctaaatcttaaccaaacaactggaccttt

SEQ ID NO: 29133 - DNA, 436 bp, Gossypium hirsutum
  Clone ID: LIB3197-059-Q1-M1-C7
gctatcctccgtggctaagaattttactccttcttcaatacaagagctctcacaggttgctcagaaatgcaacgccattaaccttgctgagggcttccctgatttccctgctcctccttgtatcaaagaagctgctgtttcagccattaataacgatttcaaccagtataggcgtgtgcaaggaatttgcgatcaattggctcttaaaatgaaaaaaacgcatggtttaaacgttaaccctttgactgatatagctatatgctgtggacaatctgaagcatttgctgccgcaattttctccattataaaccaaggagatgaagtgttgttgtttgatccttgttatgaaacttatgaaggatgtataaccctggcaggaggaattcctgtatatgtggcgcttgaaccgcctcaatggaccttggaccctgaaaaa

SEQ ID NO: 29134 - DNA, 399 bp, Gossypium hirsutum
  Clone ID: LIB3197-059-Q1-M1-D1
cgactccttatttctcttctcctaaagattcttctcaattgaatctttggcgttatcggttttacacagcttttggtttggaattacgggtcgatcataggatggttgactgaatcggcttccaaattgggtttttgttttgtgttgtaagcaattgagtgaattgggattataaatgcataaatggggtttggattgctttgtctttgttgtttcagaaagtgatttgtttgaatttatacttttggttggtttaaaatagtttaactattttggagtggcatagggattgttatagtttattttaaatgaaataaaacacaggtcatcctgctctactcaattactataaatttagggagacaagatgtttgggagtatgatccagtacttttcaac

SEQ ID NO: 29135 - DNA, 435 bp, Gossypium hirsutum
  Clone ID: LIB3197-059-Q1-M1-G12
cggacgcgtgggatcattgcccttcttaacaattttgcactctctccgatcaatttgaaacattcctgtattctctgcagaacctccccattcttcttcttctctctattgtaaagtaggcattagttaaggtgttactgtacaggccgcccgaatccgtatgatggagttgtacagtcgcatccagccacggaatgggtctcaatcgggttaccagtccgaatggagccccgctggtcctgagactggcctggaagagtcaatgtggccattgtcgttggggggcactgaatcctacccggaaccggcccgggtacctgactgtgtttactacatgcgaaccgggttctgtggatatggtaataggtgccgctacaatcattctcgtaaccctgccctggttgaggctgctgtaagagctacaggggtgtatcc

SEQ ID NO: 29136 - DNA, 403 bp, Gossypium hirsutum
  unsure (1)..(403): unsure at all n locations
  Clone ID: LIB3197-059-Q1-M1-G2
cccacgcgtacgaaatcgccgggtttttgaaccttgcagaaaccagaaaactttgattctgttctctcttttccagaagctaattgttatacttgggttgtaagaaaaattggaggatatgtcaagtagctcaaggggagatggagaaaactccattgatgttgaggaactcttggagatcgaaacaagatgcagagagctacggaaagaaaaagacatgttgaaagaatcacaacctcagggctttgaactgatcaggggactagaactacatgtgaagtctctatcagaagcttgtacccaagacaaaaaacatattcaaaaattggaaagagagctaaaaaattgctctcaaganattggtaatggttctttttttcctttgaaatattgctggggggtg

SEQ ID NO: 29137 - DNA, 375 bp, Gossypium hirsutum
  Clone ID: LIB3197-059-Q1-M1-H7
ggacatatttctgaaaaccgataaaattgtagacgatcttttctacttcaaggacatgctttctgttggcgaatctcgtctaagtagagttgtcacccaaaaccttctgagtttacttatactccccttgttgcttccactactgaagttaggagagaataaaggtagctacaacatctcagcagtcacttctttgtacatagtttctcgccttcttcaagttgttggtggaaaacacttgataaatggagtggctggtcttcttttgtatcattatatggcattatgtcagagagatgctattgctacaaatggggatattgctggtagcataggtgatgcaagtcctcttctccactcgttgaatgatataaa

SEQ ID NO: 29138 - DNA, 444 bp, Gossypium hirsutum
  Clone ID: LIB3197-060-Q1-M1-A11
attgattggacgtagattcagtgatgcttctgtgtcagagtgacactaaattgtggccgttcaaggtcattcctgggcctggtgacaagccaatgatttgtgttacatacaagggtgaagagaagcaatttgctgctgaggagatctcttcaatggtgctcattaagatgcgtgaaattgctgaggcttaccttgggtctacaattaaaaacgccgtagttaccgtccctgcttacttcaatgactctcagcgtcaagcaacaaaggatgctggtgtcattgctggacttaatgtcatgcgtattatcaacgagcccacggctgctgccattgcttatggtctcgacaagaaagctaccagtgtcggcgaaaagaatgtcttgatctttgatcttggtggtggtacttttgatgtctctcttcttaccattgaagagggtatat

SEQ ID NO: 29139 - DNA, 214 bp, Gossypium hirsutum
  Clone ID: LIB3197-060-Q1-M1-A6
aattacaatagatctgacacctgtaaagagaaacaggttacaccacgagggagatcgaattagctgcagtgaaatgtggtccaacattcatctgatcggcatactaaacttcttaacatttttgctattagcagacatcctgggtgtgtgaatatgcgctaagcatgatgagcaacaacatcgatatgctaaaggtgttacagtggccattgat

SEQ ID NO: 29140 - DNA, 434 bp, Gossypium hirsutum
  Clone ID: LIB3197-060-Q1-M1-B10
ctttggtccctttgggggtggattctttctttcaacaacagagatatcatcttctttgtttttctaaccaaaaaagaaacaccatgaaatgctatctgttctgtaaagatttgatcttgtttgtgtttcaactgtttgctttcttctacttagcttcagggaacttggcttctgagaaaagaatcctgttggagttcaaaagctctgtttttgatccttccggggttctttcaagctggaactcttcaaacaaccctaatcactgctcctggtttggagtttcatgcaattcaaggtctcaggtcatctccatcaccattcctggtggttgtcgtgaagtttctgaaggtaactttgctcaaccttgttcttgttcttcaaagctgtctaagttcccgttttatggttttggattgagaagaagtgcatgttct

SEQ ID NO: 29141 - DNA, 441 bp, Gossypium hirsutum
  Clone ID: LIB3197-060-Q1-M1-B11
aaaagaaaaacagaatccatgaagaaacagcgacgaatatcagaagaaggtgttggtggcaagaatccagtggccatcgcgccattcaagatgatgtctcaatcgagaaacggggtaagcaatctcgtctctggtagtttcaaaataaacccaatatttagatccctgtctcccagtgatcttccccacccaccaaccatcgttgtcgaaagcatccaccgagtccagataatggaaaacctgagtagcttttgtgaaggttactggaggtggcactggtcggacctcgtcggctgaaactatctcaaccagaggccgagtctgatcttcttcttcaaccaggttcttgtactgcactctataaagagtattgtcgttcaacggggataatatcttagcttggtagtaagaacccaagaacccttcttccttgctgcatac

SEQ ID NO: 29142 - DNA, 312 bp, Gossypium hirsutum
  Clone ID: LIB3197-060-Q1-M1-B4
gtctggtatcactgccaatctgtggttttatcgataaccccgacgtgcgaagaggttgactatccggggctatttcacatggctacgataactgatcttatcctacggccagttaacccccctaccatgtacctgatcgcttccatcagctaaatccactccaaactctacaagaaatggatgtaaacaacaccggacactgtgctcaccttggacaattacaatgacttgactatgctatcactcttacctaactctgttaataatcatagacatactcagtgacaccgactcaacattaagcacgatgat

SEQ ID NO: 29143 - DNA, 442 bp, Gossypium hirsutum
  Clone ID: LIB3197-060-Q1-M1-C4
ggaaattatgatgaagctcttgatttagaagccgttgtttgcaaactctcaaccatgcaccccaatatacctgttattcaagcattggctcaagaagttaggcaaacaacacaatctcttctctctcagcttctccaaaagcttcgttcaaatattcagttaccagaatgccttcggattattggatatttacgccgaataggagtatttagtgagtatgaaatgcggttgcagtttttgagatgccgagagacgtggctcactggaattcttgaggacttggatcagagaaacgcgtatgagtatctaaaagggatgataagctgtcacagaatgcatcttttcgatgttgttaaccaatatcgagcaatatttgctgatgatacatctggaagtgaagaaaattatgatggcgggcttctttttagttgggccatgcatc

SEQ ID NO: 29144 - DNA, 144 bp, Gossypium hirsutum
  Clone ID: LIB3197-060-Q1-M1-D1
agacaatgtcatggctatattccaagacaaaggagggatccattctgaccaggaagggctcatctttgcctgtaaacacctcgcggatgggcgtactctttccgactaccatactcaaaatgagttcacccttcacctagtact

SEQ ID NO: 29145 - DNA, 154 bp, Gossypium hirsutum
  Clone ID: LIB3197-060-Q1-M1-D10
cccacgcgtccgctttgatttgccccataaaatgttttagaggctctctttgttggttcatggaatttgctgctaacaaagaaaaggtacaacccttattttcctttattagcagcaaattccatgaaaataagggttgtaccttttctttgtt

SEQ ID NO: 29146 - DNA, 368 bp, Gossypium hirsutum
  Clone ID: LIB3197-060-Q1-M1-D2
cccaaatttgcagcataaggtctttaggtttttttaaatttgatggcggatcggacctcagctgctccaaagcctatatggatgaaacaagctgaagaggccaagctgaaaagtgaggctgaaaaagctgccgctgctaaagcggctttcgaagccacattcaaagatgttgataagggccgtaacaaggatgtggtggcagcttcatcggatagtgagtctgaggacaccaatgacttggtggacaaaccggttggatctgtggatcctgctaagtgcatggcagcaggaccaggaatagctggtggcacggcatgtgcagcctccacctttatggtggtaacaaaggatgcaaatgggaggaaagt

SEQ ID NO: 29147 - DNA, 443 bp, Gossypium hirsutum
  Clone ID: LIB3197-060-Q1-M1-E10
cgcacactgaaacacagcgttttccatttccgttcacggcatgatcttcgagaaccattcccaaaatttagaccccaaaatgcgaaaacccaaaccctgaactcactgttttttttcccctttatagtactactgtcttgatctcttatatatatatattttctctcatggcggaggaggtcatctctggtagtggatcttcgggaagagaaggagagatcgatataagagtaggattaacctcgagggattcgttagattctcggtgggtgttcccaggtgaagacgactctgagatcgaagaaaatggcgacggcgacgatgatttaccgcatcgagctgcggtggactccgaagacgaggataatcaggaacaccatttgatccgcactgaaccacgcgtggattcctttgacgtcgaagcactcgaagtccatggcgca

SEQ ID NO: 29148 - DNA, 341 bp, Gossypium hirsutum
  Clone ID: LIB3197-060-Q1-M1-E5
ctctttctaagttactctgccttcttctccttgagaactacatcgcgatctatgaatctcattcttgtgcacataacaatgccaccaaagctcaatctcatatcataccagaagaagctcatttgcctctgtatcatgagtcgctatgtacatatatgcgcggagatgcatagcaggctaactcgtgaaggacttcaaccctgaacatctcagtagtatcaacctcaggctagtcacatggagcaatgctcagtatgtgaaacctaataagaccatcatttggcagcacgtggaagatgaatgttaccttaacactatacatgcctgcgccatcagcatat

SEQ ID NO: 29149 - DNA, 439 bp, Gossypium hirsutum
  Clone ID: LIB3197-060-Q1-M1-E7
caagactcttgccaatttctgttactctgtacatctctctgtctctgtttcttactaaatccttcttcacaaaatcgaaaaaatagaaaaagaaaaaactaacaacaaattctagaacagaaggagtgctgatttttcaacaattaaaaagttagagagaagaaaagccagggacaggcacctcctcctggctactttgttcgactagaaaattccgacaatttgtatttgaagaaacgaacaagaatgcgtcgatggctttgctgttcgtgtctggttgaggatacttaccaatcacatgaaaatgagcacttgaggagccccaactataatacagaagggaatcaaaagaactcaaaggcggcagcccctcccaaggccgaagtgcaaaaatcagcaccacctatcgaagtgcctgcattatcattggaagaattga

SEQ ID NO: 29150 - DNA, 227 bp, Gossypium hirsutum
  Clone ID: LIB3197-060-Q1-M1-E9
cccacacgttcggtctttatgtacactttttcgattctcaagatggggtaatctgcgaaaagtattcgcaaaggggagtccaacaggcagcgcatggattgcagcacatgctgttggagcgtgacaagcatttgtcaaccatggactatgctgatggaactacactgatgcgtgagatgtacatcatgccatgaaccatactagatcaggtcctgaaggcatgaacc

SEQ ID NO: 29151 - DNA, 425 bp, Gossypium hirsutum
  unsure (1)..(425): unsure at all n locations
  Clone ID: LIB3197-060-Q1-M1-F10
gttatcagcaaggttgctaccgagaagaatcctgcagatatgttaactaaggtgagccctgcatataagttcaagcattgcttggacttgataggtattcgggattgattagcgccagagaggcgtttggaagaggtgatccagttcgaggaattcactatgatgttcagcttggtaaatttcaagccaaggtggagatttgttaagaaatggcttaaaattggtagtggattgttgttgttggtagtgggttgttggtggtagtggattantggatggttgttggtgtccattttcaaccacaaatctttgccaaagttgtggacaattatgtccttgaactctcttataaacagagaggttcattagccatattcatcatgccaaaccaagagagagcacagcttgttctttgaaagctagga

SEQ ID NO: 29152 - DNA, 449 bp, Gossypium hirsutum
  Clone ID: LIB3197-060-Q1-M1-F3
gcagagctccaaaaacaaatcacttccttcaaaaagaattcaccttttcttttttaccatagcctttttgtatataataagttaacctactgatgaaaatataaactaaaaatcctcgtttgtctccaatctctgattcccatttgcctcctctctctcttacttttatttttttcccttatttgattcctcttttttcacattcaggattccttcttttgactcgcttatttcaagttttctttccttgggttcatttaaattcgtttgttttgaaaattttgaagtgaatgaaagaaaaaaaaaaacatgggtggtgttaacaaggtggaagtgataaacagcaaaggttgttcaaagttgtttgttgggttctcatcttcggtgccatcatttagaagtttccaatcgtttgaaccaatgtcccctgcttctacttctcttgggtc

SEQ ID NO: 29153 - DNA, 428 bp, Gossypium hirsutum
  Clone ID: LIB3197-060-Q1-M1-G12
aagaatgatcttcaacatcgtattgcaaaagaggctagaggaaatgcaatcttacaagctagcttggaaagaagaaaacaagcattgcatgaacgtcgcttggcacttgagcaagatgtctgtagattgcaagagcagctgcaagctgaaagggatcttagagctgcccttgaagttggattgagcatgtcagcaggacaatttcctaactcccgcggaatagattccaagacgagggctgagcttgaggagattgctcttgccgaagctgatgtggctagattgaagcagaaagttgcagaactccaccagcagctgaatcagcaacggcagcatcattatggttccatatctgatgcatgtgaccattaccaacatgtccaaaatcataattctcaacagagatttcttcagcaagattttgatac

SEQ ID NO: 29154 - DNA, 389 bp, Gossypium hirsutum
  Clone ID: LIB3197-060-Q1-M1-G5
aatcaaaatttatataaataaaaactatatatatttttttaaacacacaattacaaaatgataaaatacaaaacgtgtcataattataccctgtcttatttatcacaagctatagtatttgagtatcatagtcatattgttgtgggaaaaaaaattataccctgttacttggaaagtccagcatgaagggctttaagcattgacttcgaaattttcttgcaaaaacttgtaaagctcctcggccaccatggaagggtactcttcatgtggtaaaagagcaccagcaaccttaacaaacttgctgactcctcttgcttccctgagagcttccatctctgcttttgatctcttcggagacccctcagttgacacgaccagaatggggattt

SEQ ID NO: 29155 - DNA, 423 bp, Gossypium hirsutum
  Clone ID: LIB3197-060-Q1-M1-G6
cccacgcgtccggcaaaaactacctttatcaccgtaccccaatcccggttgtttctattctgttttacgccttcatccgatttgattccttgattcattgctttacttttctgccgatttggtcccagcttattttcttgcattttactttgttttctttcgttttccctcttaccaaacactaaatatctttccattttcctctcccccaaagtgaaaccccccattgaaaccatcgaaaaggttgtcatttaatcaaatcccctataaagggattattattattttttaaacacgatgatgatgatgttaccgtccctttccaggccgctcgaacgttgtcttggcgttagagctggtggggatgctctcatgtggacgcttcagcacaccctccctcttttacccttccccgatcccctt

SEQ ID NO: 29156 - DNA, 354 bp, Gossypium hirsutum
  Clone ID: LIB3197-060-Q1-M1-H3
gttcgatttatgatgctatggacatagacgtagcaagctgttacgcatatggctaccatagcgcgaatcatgaggatgacctcacgggtgtttacttggtttggcatagactcttactagcggtgtggacacactttgcgtatatacacaccatgcagtggattcattgacctaaaggatatgctgagcctgccataatcatgggcattatgactcattcagcacgagtggcacccaatatcgttctttaccatttatggagaggtggcacacatgtggtcatgactggaaatatccttttaaatggtaagaagaagagactagagtatggtgctgatgcttatgtaactcaag

SEQ ID NO: 29157 - DNA, 295 bp, Gossypium hirsutum
  Clone ID: LIB3197-060-Q1-M1-H4
cccacgcgtccgcgaaaaagatgactctggtgacgtgaaggccgagcgtggggatcccacgtgggaagtcgaccctctggtgctattccagtgtatgccagaagcttctagagctctcggtctgctgaactttgggttctttttgggttccaaatttgggccatctgaagttgggaaattgggtttaaaaaatgtatctgggttggtataaacttagcttttaacttagtttattatttgggcctgatggtttgtaaagacttggactttaaggaattattatttatttattttt

SEQ ID NO: 29158 - DNA, 226 bp, Gossypium hirsutum
  Clone ID: LIB3083-001-Q1-L1-A10
caatagccaagacattgactgatctgctggggctaaactgaagacgggagcaggtctctgatacttcataaacccaactcctagctaccagtctcagtgcgctctcatggcagcgctcacatctggagatcagcatacctcatcaactactaacgcctaactactagaccatacattgagaccctgctgaggtagtcacctaaaatagaggcccggattctctata

SEQ ID NO: 29159 - DNA, 217 bp, Gossypium hirsutum
  Clone ID: LIB3083-001-Q1-L1-A11
tcatgattatgaacccgaagcgttgtaacctctgcctcaattacaaatctacttgggggataatacattagcgcaaataactccatctccgaagataaaggtgtacaacattacctccatcctcgaagaacgtggccaattcaccggcgtcatcatgctatggaaagccacacaggctgctgatcaactaatcaaccacctaaactcaccgcaccct

SEQ ID NO: 29160 - DNA, 229 bp, Gossypium hirsutum
  Clone ID: LIB3083-001-Q1-L1-B10
cggcgccgatgggcatgatttaatggaggctgttggccctgatttctactgtgtccggcagatctttgatggtgagggtgctccaggagctcacgattgaattgtaacacggtgttaaatctagaatcgcagatgtgacgggggaaattttacggaaaagaagggctgggaaaataccacgtgtcacaacttctgtgctatagaacatctggaggcaccactctcagtg

SEQ ID NO: 29161 - DNA, 162 bp, Gossypium hirsutum
  Clone ID: LIB3083-001-Q1-L1-B9
tagaaatggatattgcaacataagcaccggaaactcctttgacaagtgaaaggaatgttatagctgaccttgatgatataattcgctagaccctatgtggaatggtcattgtttcacttgatgggtgtgccatacacatggtacagtaccaggacactactt

SEQ ID NO: 29162 - DNA, 286 bp, Gossypium hirsutum
  Clone ID: LIB3083-001-Q1-L1-C12
gacgattcttgttttcttcattgtaagggcttatggggactacatcatatctagtggtggtcgtttcttacccagagctgttttaatggaccttgaaccatgaaccatggatagcttgcttactggtccgtacggacaactttttagacctgattactacatttttggtcaaaatggatctaggaataactcgggctaagggtcattacactgaatgagctccatcgattgattcggttcttgatgttgttcttaaagaaactaagaattgtgattgcttacaaag

SEQ ID NO: 29163 - DNA, 337 bp, Gossypium hirsutum
  Clone ID: LIB3083-001-Q1-L1-D10
aattcgagacgagttgcgactgagttctggaccacattcttctggaagcgcgactactcttcaactatgtacattccacgagataaggataccgatagaccctaatgatctgactttcgttgaatacgaagccgaggacgtgggcgcttacgctatgcagatgaatgttggccatcatactacatataaccgaaccttgcaagccacgatgctcatgcaagagatgtctatggaaatccctggcaattcatccatgttttctgcagagacacactacagagcaaggttttaccagggtgtagtgaacatcatagctaacctagaggagctgaagaag

SEQ ID NO: 29164 - DNA, 345 bp, Gossypium hirsutum
  Clone ID: LIB3083-001-Q1-L1-D12
tcctgttcctaatcaagatgagaacactgtgtacggggagccttctgcgcctcaaccaccacggttccatgtgcattccttttgcatgaccctcactgtctcagattcatgcacccatggtgggttttcggcgctcatgcggcatgcagattaatgtgttccaccattggacatgtcactgcaacctacaacccaggagttggttgcttaggatatgcatggcatagagtggcgattccagcatattttcaggggtgaaccactattgcacttgcttcaaagcggatggagtgttcatgttagctcctccaggctatgttctagggatgctttaatatattttag

SEQ ID NO: 29165 - DNA, 233 bp, Gossypium hirsutum
  Clone ID: LIB3083-001-Q1-L1-D9
tggctgtagatctagaactagcggatccctggatctgttcgaatccagcacgcttatgcacttagttagaagaaacgtgacgggggaagtccaatggatttggaaactgtgaataaatacttggagaaaggattttgggctgacgggaattacatgaactccttacccatcaatggacttccttcattattcttcgaaaacttcatcatgcatggtctctatgtagaccaaat

SEQ ID NO: 29166 - DNA, 327 bp, Gossypium hirsutum
  Clone ID: LIB3083-001-Q1-L1-E12
cgacattggtgacaatccctatctttgtcctaaagggcctccttttcctctccagctcctcggctacaccaaatagcgatgcacatcactacctgttcctatcatcatgtgtccactccagctatccaagcctttgttttcgcaccctttcatcctactccggcccatccaacaccctacgatagttagccctatccgccgttaaagtcatcctgtcccgtgcccgttaagagtctaactacttgtctactagtgtgacatagtacaacatgagggaactagtcgcactgattgactgcgtggagcaaatagattagtctatggatg

SEQ ID NO: 29167 - DNA, 209 bp, Gossypium hirsutum
  Clone ID: LIB3083-001-Q1-L1-E9
ctcatttgctttgtatatctactcatattcggtggtgtctacttacgctagaatatttgtaatacatcatgatgtcctaaacgcctacaacggatgaagaatcactatgctggcatttattataagaaaatattgatcacacagacattttcatgataattctcctgggaaaaaactgtcttctgattgattaaaaatacactaaggtt

SEQ ID NO: 29168 - DNA, 200 bp, Gossypium hirsutum
  Clone ID: LIB3083-001-Q1-L1-F9
gttacataatgcatgtcataatgtatgatgtactcgggaatctcatgagagttacatattgcatgactcttttaattgcaaaacgcattacgcatgtgacggtaactagatgcagggcaatattgccaactgttacctaccgttgcgtgccgtataccagacctgactctaagctgtcttcctaattgggctttccactc

SEQ ID NO: 29169 - DNA, 158 bp, Gossypium hirsutum
  Clone ID: LIB3083-001-Q1-L1-G11
cgcgtgtcagctgcgagacttcttgtgattatagaggggcaatcgtgtgaccatctgcttgcgtcatatgctacatcaacagattcattaccaacgaatcgtacgtagatgagaacgacatacactgctacccttgcactcttcgagtatattaccat

SEQ ID NO: 29170 - DNA, 383 bp, Gossypium hirsutum
  Clone ID: LIB3083-001-Q1-L1-G12
caactaataaatcataaaatgacattcaaatcagtaaactttttctattgctcattcggattccaatcaagaacaaaactccatattgcaaaaaaaaaatataactgggaccaaacgaaaagcaataaaagaattctagtttttgcattctggatttgaaaacttcgaaacttcaaattgataatcacacactaatatcttacatcacgaggctttcgtggtgaaactatcccgcggctgtactttgatcgcgattatgctcttactcaccatttccaatatccttgccggtcttttttctatttccgaggccgaaaaatcaggactgcggtgacaaatagccttgtggagcggcatctcaattgtcataaaatgatctcgtc

SEQ ID NO: 29171 - DNA, 367 bp, Gossypium hirsutum
  Clone ID: LIB3083-001-Q1-L1-H10
ctgaatacatcttggcagcttttgacgatgccattgctgatggagttgatcttataacagcttcattaggatcattcttcgtgtttgaattctacagtgactctgtagctataggtgctttccatgctgccgagaaaggtgtacttgatgtacaatctgcaggaaatagtggtctagcagggtttcaatcggtggcaagtgtagcaccatggatacttagcgttgccacatgcgcaatggaccggcattttgtcaacaaggtagttcttgggaatgggaagacactaactgggctgtcaataaacactattagtattaatagagcaatggttccattggttaatgggatgcatgcatcatccgattg

SEQ ID NO: 29172 - DNA, 245 bp, Gossypium hirsutum
  Clone ID: LIB3083-001-Q1-L1-H11
caaaagcattctaggaccctattacaaagggcaggacctttgagctggacgggtgcactgcttgcacttttacaccagtcctagcggctgtgcatggcatgtgtacagcactgcttctatcagcgtagacatggagtccatgaaaatgaatgccctgagtgtgctccagagttcagaattatctgggaaatgatccgtgactaaaaggagacttctgctgatcaagttcaagaatgcctagaagt

SEQ ID NO: 29173 - DNA, 275 bp, Gossypium hirsutum
  Clone ID: LIB3083-001-Q1-L1-H9
cacgaggcaaagaaatttatgacactacttcaaatgggagggtgtttcacctgcaggagtgcacgccttgcacagagaccctggtctttgctggggaacactgatgtgttttgccctactgcatcggcgtgtgaccgcgtgctagcgaaatcgactgccctctttgcgcgacacaatgcagatatgcagtggagctaaaaagaagcttgtaacaggtttcatctcatcatgaactctatttccaacaagtctttatccaaaaggataagattttt

SEQ ID NO: 29174 - DNA, 393 bp, Gossypium hirsutum
  Clone ID: LIB3083-001-Q1-L2-B6
tagaaggagtccaatctctctatggatcaaaccctaattttacatttggttctttgttggaatctgacacttcagcaaatcaagccattggtttgagatttgaaccatctttttgggcggccatgttcttggcagcttctttcttctgcatctagcttccttttttgttttaaatttagaaggtgattggcttttgattatctgatctccataataggagctagcattccagacccttgaaatagggtaaaattttacagtcatacgaggaaactccctgatcaaatggagaagatttatgactctatatccctatatagaggcgtttgtgtccccatttaatataatgggacggccctttgagagcataacatgacttagtttttaaattat

SEQ ID NO: 29175 - DNA, 173 bp, Gossypium hirsutum
  Clone ID: LIB3083-001-Q1-L2-C2
ctgtctccatggacattgttaatggggatggcaagtccaaggtggcgttttaatttttataccagatgggataaggagctttcggtgctgctaatttggtccttcttaacctggaaaaaacaacttatgggttgaacataattttcttggccaaactacctgatattttcaaa

SEQ ID NO: 29176 - DNA, 412 bp, Gossypium hirsutum
  unsure (1)..(412): unsure at all n locations
  Clone ID: LIB3083-001-Q1-L2-C8
gatttgcgggactttatcaaataggtttgtgtttttatgctgttatctccttacagtcctcggtgtttggtcaagaggctgtaaatttaacatgcctggcatgggagaagagatggctttaaaagaaattattattgtaagagctgggaagaatgccctagcatgcacagaggaagacaaagagctgaagatggtgatggcaccatccatatttgtggtttagttatatctgcttttcctacagttttgtaaagatgaggtagatgatgatcgtgatgtaataatatgtaagtggtggtattggtacgcaagtctggtgacacctcatccagtctcggtgtttgttgtgaacttcgattgatttgattttgcgatgaagaanatcatgcatgttttctcataaaaaaaataa

SEQ ID NO: 29177 - DNA, 410 bp, Gossypium hirsutum
  Clone ID: LIB3083-001-Q1-L2-D5
gttaacagctgcccaggttctaagtcatccatggattaaagaagatggtgaagcacctgatacaccacttgataatgcagtgctaagcaggctcaaacagttcaaagcaatgaaccaattcaagaaagttgctttgaaggtgattgcagggtgtttatcagaggaagaaataaggggattgaaagaaatgtttaaggcaatggacacagataacagtggaaccataacacttgaagaactcaggcaaggtctagctaaacaaggcactaaattatctgaatatgaagttaaacaactcatggaagctgctgatgcagatggtaatggaacaattgactatgatgaggtcataacaggcacattgcctatgaacagaatggatagagaagaaccatctttccatgcttttc

SEQ ID NO: 29178 - DNA, 138 bp, Gossypium hirsutum
  Clone ID: LIB3083-001-Q1-L2-D7
ctcattctttttttttgtacatcattaaatcttggggtaaggataataatcccatgacaatcgagaattatccataccactttactatacccttacaaattttagaacacacccatgattcctaccgatgccatgcat

SEQ ID NO: 29179 - DNA, 344 bp, Gossypium hirsutum
  Clone ID: LIB3083-001-Q1-L2-E3
gggctaaaaaaataattttaaggggaggagggcttttgttaggtggcacctataggaggagtgcttttgtcatgcgacaccactgttggcagtttaatcgcctacaacggacgtgatcggacaatcacgagatatccaaatgggatatttgattagataaaataatcacacaataaatacgattaatgtactgggttagtaccacgtattgagggcccgagtcaatggtttgggctatcggctagatgaacatcttatgccatacttggaggcattcggattcggatcagtggcattgatctgcatgttcgatttgagatgcgacttgatattccctttggtcg

SEQ ID NO: 29180 - DNA, 400 bp, Gossypium hirsutum
  Clone ID: LIB3083-001-Q1-L2-E8
gagtttcatgttgtcggttcttctgaaaaagcacattatagctgaagttaacattacagcttgaaactgcataatgagagtctgtacaactgtttgataattacaaagccaacaaatagtggatcgactgtccggaagatctctgcaggttcatgtgcaagatacttgacagattatcaatctagaaacatctaggtgagttttcccagattgattctaccacgatcaaccatctaatgtaatatattactctgttatcacctccatattttatacattctttgactctgtagctatcgcctcagattcgcatatggggcattcattcttaacagccatccacttcttcaagcaacctgactgattctcgaggtcacaatccagagtcccgattttctct

SEQ ID NO: 29181 - DNA, 319 bp, Gossypium hirsutum
  Clone ID: LIB3083-001-Q1-L2-F7
cttaagtggattggaaacctgatttgaaagctgagaaataagcagtttatgcaacggtaatagcctatagaaagcaacagttgagggaaaaaaaacgccgattggagatgcaaaggcttgagaaggaaagacaagcagatttaataagctacaagggtctgatggtctctgaaatgatgacattagacaatcaaattgcatctgacaagctagtctttccaggaagtagaaaaggatgttatgtgaaacttgctacccgtcaaattatggtggtttctttttacttttttgtcattgctagcttaagttatttgccttg

SEQ ID NO: 29182 - DNA, 186 bp, Gossypium hirsutum
  Clone ID: LIB3083-001-Q1-L2-F8
cagatgcatgccataggtacctcgttgatccttgccattaatgtcaatgactctggaactaagagcaagctcgataactagtatggatgccgcatctaactttccgatggatagatgagagctactgatgagatgattgccggcaaggtcgccgatgactgaggtatatcggtgatgtctaaaagg

SEQ ID NO: 29183 - DNA, 309 bp, Gossypium hirsutum
  Clone ID: LIB3083-001-Q1-L2-G1
ccagatggcattggaaacagcatctcggccggctactccaagtgcccaagttgttggaaatgctttcactgaacagtattaccacattctttacaactctcctgaatgggctcatagattctatcatgattcaagtgtgattagccgaccggattccagtggtgtgatgacatcagtgacaaccatgcaaggtattaatgagaagattctttccttcgattacacatatcataaggctgagattaataccgatgatgctcagaaatcttatcacgaaggtagtactatattaggaactgggtgtctaac

SEQ ID NO: 29184 - DNA, 272 bp, Gossypium hirsutum
  Clone ID: LIB3083-001-Q1-L2-G6
aaggcatcctattctccgttttgagtttcttttgttttggaatcgtcttgtcttcttttaaaaaagatcttctcccttgttcttccctcttcctatgatcttgacctgcaaagtgatttccgaaagctcccactattactaaaaaactcccaataggccacgtagccgcttatattataataaagtaagtaggaaggagcgaaagctactcgaccagactggagaggcgaccaaaggaagctggttcaccttctcttctccggtacaacata

SEQ ID NO: 29185 - DNA, 368 bp, Gossypium hirsutum
  Clone ID: LIB3083-001-Q1-L2-G7
aaaaaacacgttcacagaaatgattgaaggcatatgcatcactaataaaagagaatcaagcatggagctcaccttgagtgtcaatgccttctcaaagatgaaaaaattgagattgctcaaagtgcttatgcctctcaaattgtgatgatctcaaatatctctctaatgaactacgacttttagatcggaaaggatgccctttacgatcgttgccctcaagcttccaaccagacaaccttgtcgcactttttataccatatagtaacattaaacatctatggaagggaaatagacccttgtataagttgacaatgatgaaccttgaatggtcccaatacctgatcaagacaccaaacttcacaacagta

SEQ ID NO: 29186 - DNA, 287 bp, Gossypium hirsutum
  Clone ID: LIB3083-001-Q1-L2-H1
aaaatctcaagtttcttcgagcattgttcttttccctggttgcttttttgaagagaagcagccgcccaatatgtcgttgagaccgagcaccagaaccgaggtccgccgcaaccgctacaaggtggcggttgacgcggaggaaggccgccgcaggagggaagacaacatggtggagatccgcaaaagcaagcgcgaagagagcttacagaagaagcgtcgcgaaggccttcaggctcaacagttgtccgcttctcttcaatcctccaacgtcgaaaaaaaattagaga

SEQ ID NO: 29187 - DNA, 266 bp, Gossypium hirsutum
  Clone ID: LIB3083-001-Q1-L2-H5
ctttgctcaatctgatggaacaaaacaaccgtttgcctcacatttgatgtcataagtttgatatgcatgatccaatcgctaatgtctgacttgattgtttagtcttacatgggctgttgtctcatatgggactgtaatactgtacatgtatgatagcctacatgacatgaccactatatggaatgctttgagacattagtcatatgttattacctgttgaagacactctcccttgaatgataacgaatttaccggacatgccggat

SEQ ID NO: 29188 - DNA, 192 bp, Gossypium hirsutum
  Clone ID: LIB3083-001-Q1-L2-H6
ctgtactcaatctgatggaaccatacatcccttggcctcgccttttatgtcatatgtttcatatgtatgatccattcgctaatgtctgactcgattgattagtcttacatgtgctgtagtctaatcagggactgttatactgcacatgtatgagagccggcatgaactggccactactatggaatgtcttga

SEQ ID NO: 29189 - DNA, 322 bp, Gossypium hirsutum
  Clone ID: LIB3083-001-Q1-L2-H7
cggatctgaattttaaaccaagcgagggagttaaggggtgacgatagaaggatcagaggaattgatataaacactagaatatattgaatcgaagttttttgatggttctgataactaatcgtgaagatttccatttataatgtacaagtttttcaaaacctacgcatttgataaatataagatctacttcggtgagaaaatttatctgaactcatctacgaataagcagatcacttgctgacttttttaaaccttataaccttgatatcaatctacttgagatgttcttcattaataggcaagaaaagttatttatttttgt

SEQ ID NO: 29190 - DNA, 247 bp, Gossypium hirsutum
  Clone ID: LIB3083-001-Q1-L2-H8
ttccggaccagccgcaacccattctaagggttcccaaacttgctcagattcgcgcgcaattcccctaataagaccaacaccgcgaccgctcaaggccggaccgtccccatccagaacactggaatcttcatccacatctacacatgttcagtagcttacaatctgaagccagtgcccaacttggagaaaacatatctacggtggccatcgatacactatgagatgacggtttgcatgaaaaccaatc

SEQ ID NO: 29191 - DNA, 303 bp, Gossypium hirsutum
  Clone ID: LIB3083-002-Q1-L1-A4
gtcaaaccggatagacacatcgatagtcatagtgcagtgtaagtgatgaactcgagcggtggctcaagtgttaaatgtgcggcctgtgataagactgcttatccaattgcaagggatactgtgaatggggcaatgtaccacacgagctgatttaagtgtacccatcgagggctgtcagattagcccatcaaactatataatcccatgaaggaaaactttactgcgaacatctccatcttcagctgtttaaggtgcaaggtaactacagccaactagggaccgaactacacgaacaagccatga

SEQ ID NO: 29192 - DNA, 307 bp, Gossypium hirsutum
  Clone ID: LIB3083-002-Q1-L1-A8
acttatcgattccttcgacatagagctggatcgcggtacctatatactcgtatagtgtgtcgtattacattgaactggctgtcgttggacaacgtcctgactgggatatcgctctcgtcacccagctcattcgccttgcagacatcaacatgtagccagctggcatcatagctaacaatcccggacacatcgcgacttccgaacaactgcgcattctcaatcgctaatcgcaaaatctgagcctctgtatatagtcaagacgctcttaacattaccgatacttcagctcatgctataaccaatatgc

SEQ ID NO: 29193 - DNA, 239 bp, Gossypium hirsutum
  Clone ID: LIB3083-002-Q1-L1-C10
gttcagtcagccagctacaagtgagaagaaggatatcaggttccaaagactcatcacaaatatcgtaagtgatatccgaaagcgctgatgttaggattaaggaagtagactagaatctctgaaccaagctcaacgcggcatgttccggtactgccaatacaatcttgtccagaaattatgaattaggactgtaagtaagtgatcagtaacgagaagctatcctaaagaaaaaaaacacg

SEQ ID NO: 29194 - DNA, 396 bp, Gossypium hirsutum
  Clone ID: LIB3083-002-Q1-L1-C11
tttgaattcagctgtttttagtgatgggtcgttttgttacattccaaaggatacgaaatgcccgatgccaatttcgacttatttccggattaatgcattggaaactgggcagtttgagaggactttgattgttgctgatgagggaagctttgtggagtatttagaaggatgtacggcgccttcttatgataggaatcagcttcatgctgctgttgttgagttgtattgtgctaagggtgcagagattaaatactccactgtacagaactggtatgccggtgatgaggaaggaaaaggaaggatttataattttgttactaagcgtggactttgtgctggagatcgttcgaagatatcctggacccaagtggagactgggtctgcaattacttggaa

SEQ ID NO: 29195 - DNA, 222 bp, Gossypium hirsutum
  Clone ID: LIB3083-002-Q1-L1-D1
tcgagttttttttcttttttatatctatttgttagggattctccctatcgttcttggattttacttctaatggcctttttcttaagaataccttcccgaggtcgagtatatatttacacggcttgggcgatgactatggttcccaccatattatcgctttgcaaaatcgtcgtgaagttttttgatgttcggaaggagggatcccatacatgataatcacaa

SEQ ID NO: 29196 - DNA, 395 bp, Gossypium hirsutum
  Clone ID: LIB3083-002-Q1-L1-D12
tcctgagcctaatcaagatgagaacactgtgaacaaggagcctcctgcgcctcaaccaccacggttccatgtgcattccttttgcaagaccctcactgcctcagatacaagcacccatggtgggttttcggtgctcaggcggcatgcagatgaatgtcttccaccattggacatgtcacggcaacctccaacccaggagttggttgctaaggatttgcatggaaatgagtggcgattccggcatattttcaggggtcaaccacgaaggcacttgcttcaaagtggatggagtgttcatgttagctccaagaggcttgttgcaggggatgcttttatatttttaagaggcgagaatggagaattacgtgttggtgtacgacgtgcaatgaggcatc

SEQ ID NO: 29197 - DNA, 314 bp, Gossypium hirsutum
  Clone ID: LIB3083-002-Q1-L1-D6
gaaacttcctgattatgtattggccagtcctcagcggatacgtggccttgtccggctgaggctgatcactatcactttactcttgtctacctaatattaggcttgatcaatggcgatgcagcctactccaactcctcctgggacaccatttgctcccttgtcagctcgtacggacaactgagtggacgagcgtgttcaatccaacttagcaacctatgcaccaatggtattgtctctgaagtcatcgtcagcgcctctacctagctctggtactgtctatgactgcaaatccgacacggatggtgatggcatgc

SEQ ID NO: 29198 - DNA, 395 bp, Gossypium hirsutum
  Clone ID: LIB3083-002-Q1-L1-F11
gaaagataaggcagaaaaaagtgatcttttggagaaagaaactgtgggagagaagggtgaaaaagatgttcttttggagaataaggatcaagttgttgttgagaaggcaaatgaaaacaatcccgttgagaaagtaaagggtaatgttgatgaatcaagtagtggcaatatagtaactgagaaagttaatttggagaagaatgaggaggtatgcaaggatgattcaatggcgaaatctgttgagaaagtagcttctgaagctaaagacggagagaataaagagcctagcaatggcaaaggtaaagacagtgacatttcagtggcgtcaagccatccatcaatggttgaggaggaggaagaggaggatcttgggtgggatgaaattgaggatctca

SEQ ID NO: 29199 - DNA, 412 bp, Gossypium hirsutum
  Clone ID: LIB3083-002-Q1-L1-F2
ttcatttcgttttggttattcccgatcatcgactcttaattcccaacaggatccaccttcacgccacacttgataacccaatatcgttctttcagcccacctacatcccttatatagttacctttgcaaacctcttcaaacctacccctacactagaagacctagtgatagggggttgcgcatggaccaagatcgagttgtcaagtcacgggaaactcctacgaaaactctaaacgcttggatctgaaacgaaacagaaaattctgtttagaatcaattagatctgaaacgaaaatacccaaatcaataaaagatcaaccaagaattaaaaacacttatgaatagctaatcttggaagccaagaacacggaatttaattcaagataggttttgaacaactgaatctgatacg

SEQ ID NO: 29200 - DNA, 132 bp, Gossypium hirsutum
  Clone ID: LIB3083-002-Q1-L1-F6
aaggcaaattgcaaagagcttacctgacaccacattgtgccactcttacctgaaattacgccttaaccaacatccatacatacatttacatcttatgacacatttaacttgccaaaatctcatacacataat

SEQ ID NO: 29201 - DNA, 342 bp, Gossypium hirsutum
  Clone ID: LIB3083-002-Q1-L1-F8
gagaactagtctctaaattcctttttactctaagcgtaaattttatttatttatcggttcacacattaaatccaaaaatgtaataccaagaaaacggtaactaaaaacatggaataattctcaactggtaccaaccctcatgtgccagctgacaagccagactctaagccatcttccttcgagggagttccactcgaatctgcctacgttgctgtttcagaatatgccgtggtggataaggacttgctgtgtccgataagtatgcatataattaatgacgccttaatcacattttgctgacacagctattgctacatttatttaattacccatcttcgaaac

SEQ ID NO: 29202 - DNA, 169 bp, Gossypium hirsutum
  Clone ID: LIB3083-002-Q1-L1-G12
gtcgttgcttacttcctctcatgattaaaaaaggcggggctatgtatagatgttgttgcattcatgagtatgatcttgataacgaaatgattcgccatagatctgaaatatatctgtagcggggccgttcgtcaataatctatatacactcctgttttacactctctat

SEQ ID NO: 29203 - DNA, 295 bp, Gossypium hirsutum
  Clone ID: LIB3083-002-Q1-L1-G3
caggccttcctacgctcccgctagctataccgtataacggctattcttgctcacgcgacgatgcacgtaccatttcggactatcatcaaagttgctaccattgttatcgaatgctgtattgcaaaggtttggatcatgcgatacttcatgcgcttatacactttactagctgccattgacatcgagtggacctgcatacgatcagtcataatgagagatggttctacttgaattagaacatgaatgtctggaggtctacctcagaaaagctgaccgagcaaatatgtcaagatct

SEQ ID NO: 29204 - DNA, 279 bp, Gossypium hirsutum
  Clone ID: LIB3083-002-Q1-L1-G4
gagtttttgttcttatcagctatgtacggcattgcggtacctggcgtttcaggccaagctactgctactcctagtaatccattggacatggactccggcagccatcgacttcacccgtttccacacctgcacctactacttaaccacctcctacacccaccactgcttatccgacaccagttatgtttacttctactacttcatgaccaccaccagcttccactaatcctccaacgactacgaacacctttagctctcgactagcagattctacttaca

SEQ ID NO: 29205 - DNA, 403 bp, Gossypium hirsutum
  Clone ID: LIB3083-002-Q1-L1-G5
gagaattagggattttagggcataaactcagagcatatttggttggaggccttatgaatagattccagtttgatttggcaggctcaccactgaacattaatttagttggttgtaatgctattacagcccgaatctatttagggtgtattacaggaaaatgttgaatagccattcccttccctcaccactgaatagccattcatttcggtgcgaagtaaaatttttttctccctcttcaatttttgccctcacctctacctagagaatgaagaagcactagaatatcatcttctccctcggttcatggttagagtcatcaaaatggaatcaagagatatcagaatagggaaatctgggacttcgagcacaaagtggcggtggcaacgaacttgctggttatttt

SEQ ID NO: 29206 - DNA, 351 bp, Gossypium hirsutum
  Clone ID: LIB3083-002-Q1-L1-G6
tttaagttctgcatatggactgtcatctctccacgaagattgtcatcctacgatcattcaccgtgatattcacgccggtaatatgctgttggatcccaagttcgaatcaccggttggcgatccgggacttgctaaaattgctttcgatgtcaacactctctttttcaccagtgtgatgtgtacgaatccggtatttagccccctgagtatgcttcaagtggaaagctcactgattaatcagatgttgccttctccagggccatgcttttggagttgattaccggtcacagaccggatctctcttcatttatggatgacattccggtggatcgagctacgccttagctcaca

SEQ ID NO: 29207 - DNA, 280 bp, Gossypium hirsutum
  Clone ID: LIB3083-002-Q1-L1-G7
cttatagtccaagtcgttctagtccaaagtcatccagctggtttagcagtattcaagtcatcccagctgtagtacatcacagtgtatacattaaaggatggagatcgttccaagcgcctacgtggaatgagaagtctctgcattgttagaaacttcatcgtggatatttactctcaagagttagcagatgatatgtgaatgaagttgcagaacgatcagttcagaaagacgagaagggttctacgtagaacttagaacagtgaatgctctggaaggtcta

SEQ ID NO: 29208 - DNA, 175 bp, Gossypium hirsutum
  Clone ID: LIB3083-002-Q1-L1-H12
ccaacttcgtctctgattatcattctcggggcagtgcgatcctcctgctgggatcattgcctgcgatcaacatccaagtcagctgctgttaaacgctctaaagatcgcgcctgtcttctctgctccacatcaaaagctgctgatactgaccatgccgtactcactggtctatcag

SEQ ID NO: 29209 - DNA, 350 bp, Gossypium hirsutum
  Clone ID: LIB3083-002-Q1-L1-H3
ccggccgtttaaaacctggggattccccgggcctgaaggattccggaccaggttaaaccctgttgcgagcctattcaaggtcacagggtgcatggacatcgtaatgtatgtgatgcgggccaagatggtagtctgatgctttgtaaccctgtgctgcttgcgcctgacgatactcattggtatggatgctcgttacagaggtcgtggcaacttacagatgaatgttcatataagccgacctcattacgattcctgtgacaactgatccatccgaaaatctacgctaaggggatcatctgccttgatagactacaaagtaactggtgccctagttttgaatgtacatctat

SEQ ID NO: 29210 - DNA, 322 bp, Gossypium hirsutum
  Clone ID: LIB3083-002-Q1-L1-H7
ttaaacgcttatgagagactactcgaggtcacagggggatccacctgctagtgttagtgaggctggccaagatgatagtctcatgctttggaacgctgttctgcttgcgcctgactatactccttgggatggatgctcgttacagtggtcgttgcaactcacagattagtattcatataagccgtcatcatgccgattcctgtcacgactgttcgatcctaatatctactgcttaaggatcatttgtctggatagactacaaagtcactggtgctctatgtatgaagttgcagctatactcgcatgtacccagtaaatactt

SEQ ID NO: 29211 - DNA, 179 bp, Gossypium hirsutum
  Clone ID: LIB3083-002-Q1-L1-H8
caagtgtcctatgtgtgtcttcttatcgttaaagggggaatctagtgctgctatcaatgccgctaatctagattatggtctgatgctgtgggaccctgtatttctcatctcctgaatataatccttgggatcgcagccgatcagacataagcattaagcttcacttattacaataacca

SEQ ID NO: 29212 - DNA, 347 bp, Gossypium hirsutum
  Clone ID: LIB3083-002-Q1-L1-H9
cgagattcagctttgttaatttttaggctttgattattatatttttgtgcaattctgttgttgtgatctgattgatttacgtgtcaatcaacgagatttggtggtgaacttgagtgaaatttaaggtatcgtagggatttttcgtggatattatgattctcttttcgagagttaatcaaatgagagatctgagctaaaaaagagatgttgaaaaatgacgaatactgcggtagctatgaaagggaattgtgtgaactgaatacgaggagagtgcttctcttctggctatagtgagccaaatgatggtcggaataccttggatgggctcaatggtcattctactcgtc

SEQ ID NO: 29213 - DNA, 336 bp, Gossypium hirsutum
  Clone ID: LIB3083-006-Q1-L1-A2
gttttctgagtcaggatgttatgatttaaccacaacttccgatgtgatggaattattagacaacctcaaaagcctatcaaatgaagtccaaactaaagctgctctaaaattgcgccttcttgcaaacaacaacatgtagaatcgtataattattggtcgctgtggtgctattgcaccattactatctctactgtactcagaagtgaagctaacccatgagcatgctgttacagcccttttaaatctttcaatcagtgaagataataacgctattattgcaaaatcatgagcattataccactgattcatgttataaagtctgaaatgatggatccc

SEQ ID NO: 29214 - DNA, 252 bp, Gossypium hirsutum
  Clone ID: LIB3083-006-Q1-L1-A8
cttatgctgaaagtgtgctaatagttactaggcatctacgtcagattatacatgacagacatccaaggtggccaatatgaccaatgtcttaactaccaacattaacagcaatggaagcatgtgtgctaatatcactgaaataacaacggatgcctggaataaccatttccaaggttctgatctcaatctggtcaatgctgaccaatccaaagcttgatgaccctgttgttccccagattgctcacatgtata

SEQ ID NO: 29215 - DNA, 230 bp, Gossypium hirsutum
  unsure (1)..(230): unsure at all n locations
  Clone ID: LIB3083-006-Q1-L1-C10
gctgcaggttgaagagccgctcgtctctgattaaatatccagggacttgctttcttcataaagtancggctcttcaattatcagagatgatgaacatgttgacatatatcaatctcgtcatgaaaaacacaatccttgatagcttcaaacaggattcatcggaagtggaccaacagcctttttctccataatcatctccatcatactcatctcacatgaaaaatatttaa

SEQ ID NO: 29216 - DNA, 161 bp, Gossypium hirsutum
  Clone ID: LIB3083-006-Q1-L1-C2
tctaaatcattactaaaactccattttcaaagcgatttttgaacatctttgtaacaatccagttgaatcttacaaagatgcagtttgcggctttcaaaaatcaactacttattcttaaagctgcttttaaaaatatgtcgaccccaaataagctaaaacta

SEQ ID NO: 29217 - DNA, 317 bp, Gossypium hirsutum
  Clone ID: LIB3083-006-Q1-L1-C4
cagatcttcacagaagtgaacatcgatctaggtccagtgcctggatcttgaataaaggagtctatgaagtcatccacccgttctgcgtttcggcctggagtagttggggaccaaaatgtctaccgtgggttttgcgggatattgcaattgagcgatgaggtattgtctctcaagatactatcacgattgactccaagagatattgcatctgttggttctgtctgtagacggctatatgacctgacaaaaaacgaggacctttggctgatggtctgtcaaaatgcatggggttacgagactactcgtgttttagagac

SEQ ID NO: 29218 - DNA, 398 bp, Gossypium hirsutum
  Clone ID: LIB3083-006-Q1-L1-D11
agaaccacgtggacttattgagccttggtgcagagacaacgcttgccattgatgaaggaatgggtgaggtggtggattcttcacctgaggaacaacagcatcaaaggcaccccaatgaatcttcagaggctaacatctgggaggagcataaaaaggaatctgaaatggatcaaacccaagcgccattttctgattcaaagaccaatacaggttgtgatgagggagttccttcaaactctagccatcaagatatgtcttctagagaaagtccttcatcagaatcagagaaacaactgttgtttggtaaagatgaactgcctgttgatgaacatgataaactcgaggaaccatctataattgcaaccgagtctacaagggtagcagacattgtcaacact

SEQ ID NO: 29219 - DNA, 313 bp, Gossypium hirsutum
  Clone ID: LIB3083-006-Q1-L1-D7
agaactagtggatgcacgaatctggaagaatgcagcacgagttcaattttttattatcatgaatagagatacaaggatttaagggtgtaaaaaagtgtgttctggatatcacatgacatattgtatggttattattactcccaaaagtatatttgcagtaagtagaaccacaatgtataaatgtttcttttagacactgtactgcttgctatatagtgtttatttaaaaaccctttaacctaactactgattcgacatagccctttaatgaagtatagttgcctcaaacttgaaacattatgtcagactattt

SEQ ID NO: 29220 - DNA, 327 bp, Gossypium hirsutum
  Clone ID: LIB3083-006-Q1-L1-D8
agggccatggtatatacatttactcatcagcaaacctcaaggcatactcgaagatttataacgccgtcattcatggatccaaacaatccctcatggagattgaatttgttggaacaatggatagcagcatcaccacattagggtcgtcatacaacaataaaggcacagatcgaccagccatccataacgagtgcacgcatcatctttagacgagaaatcaccaaagcttatactctctaccaactcaatttggataaacacttcccaaagactggccagaaacacaaccaaactacaagactgctatccgtgtcaactcctaagaca

SEQ ID NO: 29221 - DNA, 422 bp, Gossypium hirsutum
  unsure (1)..(422): unsure at all n locations
  Clone ID: LIB3083-006-Q1-L1-D9
gttaccgccttatcttcttcatcattctgaagatgaaggagaaggcttcaccatttttgcaagagatgtatgcanaaaagacactagagcatcttgataaaaggccttccttcaggaaggtaccatctctggcttcttccaagcgccaccagcctctccactctctttcatctcaagagggtcttaactctccattacactaaattcttttttataatcataaggcatcggaaatatgccattgctatacatatgaattcatgattattaattattgtgttgaatgctgatgtttgtgtagcttaccaaatgcatgcttatacaaggggaaaatagagagagtatgtgttgaaattttatatgattacaatgaaataaggggattttcaataaactttgcgatcgaagttaaaacaggccat

SEQ ID NO: 29222 - DNA, 122 bp, Gossypium hirsutum
  Clone ID: LIB3083-006-Q1-L1-E3
cagttgcaccttgaagcctctccttgctagcttggcccaggactgacctggggatttcatccgtagtgcccatatcgcccttttctaacccggttggtgctttccttagaaacggctttaga

SEQ ID NO: 29223 - DNA, 363 bp, Gossypium hirsutum
  Clone ID: LIB3083-006-Q1-L1-E5
aggagcagtatgtacgtggggagggatttgcctagcatgggggaaagaggttcaggttaatcttagaactttctcaatgaaccatattgatgtgctaatcaaagaagaagatgttgatgaagaatggagatttacaggtttttatggatcaccttattcacagaataaaaaggcctcatgggatctattaagatttttggggtacgaacaagatctttctttgttagtgagtggagactttaatgaaataatttactcatttgagaaaaggggaggtcaaccgagggaggagaagataatggaagagtttcgcgatgtcctaaacgaatgccaacttattgatgtgggctactcgggaacatg

SEQ ID NO: 29224 - DNA, 311 bp, Gossypium hirsutum
  unsure (1)..(311): unsure at all n locations
  Clone ID: LIB3083-006-Q1-L1-E6
ccgtataaatcatatatatctttgcatgtgataattcgaaagctttgaagtcgtatagataaaagcataatatttgtttattgtcgaagaatattatctaaaatacaattgaatgatgagaaaaacttactggtggtaatttctcctccggccaagacaaaaggaacccattgtagccaatcccatgcaaactatgttaataaagttaaagcaatctctcaaaggtctagttggacttgcatagctgcaacatacaacctatgctactcaaactctntttttttcttttaaaatatcacgtctaacattca

SEQ ID NO: 29225 - DNA, 113 bp, Gossypium hirsutum
  unsure (1)..(113): unsure at all n locations
  Clone ID: LIB3083-006-Q1-L1-E9
gtaaaaatcctatgatggctcttctttctttggtaaaactttcaggaattcaaaagtnaagatattggtcaaatttcattacttgaattagtgtataccatacataatatata

SEQ ID NO: 29226 - DNA, 300 bp, Gossypium hirsutum
  Clone ID: LIB3083-006-Q1-L1-F7
tgttacttcaatgtgctatacattcgaaattagcttcttaagagtcctctctttacatgagagcattatacctttctgtatccgaaaaatcaaactcatcactacatacttgcctttaaacaatcaaaccaattctcaatataaaaaagacactgcaacctgttaaataaacaggaagctctatcgcctttatactaaccactactccttatgtaatgataacttcttcaagcatttctctttaactagatattgatcctacatacaaacgagtcctgcataacactgcttccttgatca

SEQ ID NO: 29227 - DNA, 258 bp, Gossypium hirsutum
  Clone ID: LIB3083-006-Q1-L1-G12
catcttttccctagttttttcactttacttttttttctgtgtgttgagcaacttcattttgtgttcagcaatcttctattgaacaactcctatcttgacttgatacagacttataactctgatgacgtcttgataccttctctctgagggcacctagaaaacagaactatgcaaatcacatgcatctatgcaagacaatacatcaacaaccacaccatgtcatggacccactacttactcagctgaacacaaatccat

SEQ ID NO: 29228 - DNA, 367 bp, Gossypium hirsutum
  Clone ID: LIB3083-006-Q1-L1-G4
agaaaaagcactcaaaaaaatccaaaattttcttacatttgaaaagtctggaccaaagcacaagttataatcataaatttcttgctttgaagttagatcccactaaatgaagacttaagcatagatagaaaggcataggaagaagctgtgttgagaagtctacaacatgtctttgtcttcctaccttggcagcaacacccgccgtggaggaggatgggctcagtcattactcccttcttcatcacccaccgtcaaatcaaccctcaaagtccaccccactcgaaagtcacggaagcgtacggttctgatcaacttcctcctgaccaacttcttcaccatagctctttccctttccttcatcttcttc

SEQ ID NO: 29229 - DNA, 292 bp, Gossypium hirsutum
  Clone ID: LIB3083-006-Q1-L1-G6
tgaacataaacccttcagaacttcgaccgcgactctatagggcctgcatgggatcacgcaacgtatctagctcattcggtaatgggccttcgctgaagtgattcattattaaatgaacacatgcgcgtgaccaatggagcattggccacattattgagcgtgcctggtatctataccggaccccagatccggtctataattgcctgacgacaaacattgtaggacacttttcgacttcaagtttagacctaaggtggctctcgttgccgatagctctatagatatagtcatt

SEQ ID NO: 29230 - DNA, 227 bp, Gossypium hirsutum
  Clone ID: LIB3083-007-Q1-L1-A1
cttttctttagctgattcaataataacaacccgaaggggtacttctactttcgatatgggaacctcccaaaaacctggcctatgaccatacttatctacataatatacccctaatacctcccatggatcgatatctggatatacaagggcaacgccttgatcatgctcttaatggcaaagttaagctctacactggcgtcaagcctttcattctattacttaccgta

SEQ ID NO: 29231 - DNA, 140 bp, Gossypium hirsutum
  Clone ID: LIB3083-007-Q1-L1-A12
attacgagcttgattatattataaaacaatcgtttttaggggggacaacataacataagtgggcgatcgttccacaaatataacctgcatatttctttacacttttgaatatattcaaatagaaggctccttgctcaaac

SEQ ID NO: 29232 - DNA, 350 bp, Gossypium hirsutum
  Clone ID: LIB3083-007-Q1-L1-A7
tggtattgaaagctgaaaacattttctggccggtcagcatcgactaccgagaaggaaccccgatagagatgcagaaattgggtgattttaagcttccccactttttcaattaccctccatacttcactttgcagccagtgagggagactcgcgagaagcaaatacaactttggaaggaactgattctggattactgcagaactcagaagatattcatagttaggcttgaggaagaatttcctctgttctcaaattctgtgatagaacgcacgctcagtcatgaagctagggaagcattcctctcagcgttggttgcaaaaaggcgcgcaaaatggttggataaaagacgt

SEQ ID NO: 29233 - DNA, 375 bp, Gossypium hirsutum
  Clone ID: LIB3083-007-Q1-L1-A8
aattcccacgagtggttttgtagctcatcgtctaccatgggtgtgattttatgacggtgtgtggttctgaagaactagagtctaataaggatcgtttacttgatgaagctgtcgatgctttatatgaaaagaggggttctacaccggagaaggccttggctgcgattattgacgctttcaatatcaatttgcaacatggccagcagttcgcgtagaggaaatttgctacattactgcatcacagtttgaattctatcaaaaagggttccaacaaagagatttctttggcattccattccattgggtttctggccttaactggttttccaagagatcattcactgtaaatttttggaagaatcaatgattcctttt

SEQ ID NO: 29234 - DNA, 307 bp, Gossypium hirsutum
  Clone ID: LIB3083-007-Q1-L1-B11
cccaattcaactcttcagtctgcaacaaagggcgcatcggtgcaaggtctgtcaataaaggtttgattgccaacaatcctagtatcaccatctcaatgaattctccacgggacactgcaggacatgggactcatacatcatcaactgcagctggaacatatgtgggagatgcttcatactttggatatgcccagggaaatgctagaggaatggctccaggggctcgagttgccatgtataaagctctttgggatgaaggctcatatacgaccgatgtaattgctgcaattgatcaagcgattaatga

SEQ ID NO: 29235 - DNA, 300 bp, Gossypium hirsutum
  Clone ID: LIB3083-007-Q1-L1-B12
cttgctttccacctccacggagttgtcgaggtggaaaagatatgcaccatgaaagtcatcggaataccgataagagtcgatgtgccgaccagcgtccgtgaataagcacgagcacctaagactttcatcggtcgggaacgggattcgtacctacacggacggaaagattcggattcaagacatcatgtctaaacctttaaaattatgcattacaagggctaccaataccaattaacatatgtcgtcttgactgggatatgacgtgtgtatgtatggatgtatatagcaattttatgggct

SEQ ID NO: 29236 - DNA, 180 bp, Gossypium hirsutum
  Clone ID: LIB3083-007-Q1-L1-C2
gttttatctaccttcccttacgtatttgctgagatggagttcatacagggtgggactttagatcttgaaggttcgattatttataatattgatcagtaaccatactaaattacattctattatggtaccattgaagttgctcatagctctttgtatcctcatcgatgagtacgtcatcct

SEQ ID NO: 29237 - DNA, 363 bp, Gossypium hirsutum
  Clone ID: LIB3083-007-Q1-L1-C6
tcttttaccttccggttactgatctctttggccgagctttaacattggaggcacggaatgccccaaacaagctacagatgtcaccgccgacacatccaacccttcttttccaaccacttaagcacaacaatactgagaccatcgccctgactaccatacacaacccgaacaccaccgctaccgtcattcttgctgatcatgctacctttcaaccaccatagctatacacgatctcatacatatagccgctcgagcttctgctatactgtacgttctttaccgacactaccactctacttttactgattactatctcaaaatctctgcactaaacgtaacctcagcttccaagcttaacaccaa

SEQ ID NO: 29238 - DNA, 138 bp, Gossypium hirsutum
  Clone ID: LIB3083-007-Q1-L1-D3
cccaagccaaatgggccgacacattaacactgaatatttcaaatgttgggattactaaaacccgagattccttaaaattttcaacatcaaagaacaaactcaacatcatcacatggtcttttaaggccaagttttcat

SEQ ID NO: 29239 - DNA, 323 bp, Gossypium hirsutum
  Clone ID: LIB3083-007-Q1-L1-D6
ccttagacgtattttccagggatgctttttaacatagaacggcggattcatagcgaaatttggataaatgctatataaaccattaaaatttctaaaaccaatgtttctataaaatgcactatctacctactgaatacgacatataatgctaccacaccaaagaatgtggtctcaggctgtgctccaacattaaaaccccatggtgcctatgctagtctcataccatcatacagatttgcccaaaggacatcacttctaaaagcctgttctataactaccaaattaccttacaactatcattcttttgctcactatgattaaac

SEQ ID NO: 29240 - DNA, 298 bp, Gossypium hirsutum
  Clone ID: LIB3083-007-Q1-L1-D9
gaattcattacgacgtgttccaggccttttaagtttatcaatgggtggttaaagaacgttggttgtgcccgcttgattgataaagaatgtactaatatggattgtttgaattgccaagtgctttgaaagttgagaaagcttaatggggtctagagaaagtgcattagtaatcactgtcatatgcttgaagataattttgctgattgcgaatcaaggattaatgtgtttgatgatactacgtgaacatgtacatattgtatgagtgctgaaacggaggaactaaataaattgaattccc

SEQ ID NO: 29241 - DNA, 264 bp, Gossypium hirsutum
  Clone ID: LIB3083-007-Q1-L1-E11
gcgaggttgtggtgcagctgcagagaacagagtaggggcgaaaaaaagcgccggcgttactgcttcttcttctacttcgctctctctccttctgcgaagttcctctttcgatctttcatttattcaggatcgtaaaagatggccgactgtgaggatattcaacccctcggctctgatcatggaaccggaacggtcaacgctgcttttgatggtgatgatgctccaacggcagattttcccagtattgatggtggtcgccggcac

SEQ ID NO: 29242 - DNA, 267 bp, Gossypium hirsutum
  Clone ID: LIB3083-007-Q1-L1-E4
ggcttttattcattcccttgttcacttcacgggggggctttttcatggccgtgtgatcttttctcttcgttatatccaagcactgttattaccactcataaaaactcagggtggttaccgtccactattcagttacgctgccaggtctgccacctacaggcttgctttacaccataacgcatctgtaacgggttcactaaccgtccggtcatcgcaccaagatgatacgatagtactgtatacatggtgtgaacttacgaggctcta

SEQ ID NO: 29243 - DNA, 365 bp, Gossypium hirsutum
  unsure (1)..(365): unsure at all n locations
  Clone ID: LIB3083-007-Q1-L1-E6
cggtacgagcttttatagatcgttaaaaggggggtcttgaaggaaaatatttgcaattaagctgctaaaaagacaaaactcaacaaggtatatgaagaaggagtgagagcctaggtgattcaatcagaatggattcttgcaactgtattgagccgcaatggccaccagatgatctgttaatgaaatatcaatatatttccgacttcttcattgcgcttgcttatttctcaattcctttagagcttatatactttgtgaagaaatctgccgtgtttccatatagatgggtacttgtgcaatttggtgcctttatagtactctgtggtgcaacgcatcttattaactngtgggactttacaatgcat

SEQ ID NO: 29244 - DNA, 376 bp, Gossypium hirsutum
  Clone ID: LIB3083-007-Q1-L1-E8
tgcttgtatcggcgtacgttagctctcttccatcgcttaaactctccaagcgaggacatgatctgcttcccaggctagacccttgaaactcctctccggcacccctgccacaatccgttattccatcagatcctctgacatggacccactctttgaccgaatcaacgtacgcgatcttctctccggtcacgacctctcggacccttcgacgccactattcacaccggatctccgcctcatcatcagccgcctcgaataccactctcttcatatcaaatcaaaagtccgttcttacctgctttctcaccgcgaagactttgactcactcttcttccagtgcaactatgccgatctcaagactagcgaaatctctgac

SEQ ID NO: 29245 - DNA, 292 bp, Gossypium hirsutum
  Clone ID: LIB3083-007-Q1-L1-E9
tcattttcttcttgatcagctgcaacttcggtgggctgaaagttgtttttgcaaatcttttgatgatgtcttatcttttgacatttctcacactattgatctggcttttgccaacatttgaatggtggatgacctttctttccacaatgcttgctaggaaaaagaaattccgtttccctattgattttaggagaatcaaaacctgagttgtccttctagtaattcctttttcttttatcctttgtctccatggcttgattgaactcttttaccaaatcatcttacttctcgc

SEQ ID NO: 29246 - DNA, 368 bp, Gossypium hirsutum
  Clone ID: LIB3083-007-Q1-L1-G1
caattaatctccacttagttcatcgagtatatgatcgaggcatggtattggatgacgatacttaatcgtgattttgttcacggcgcgacagattacgcacattcgccaagtcccatcctttttcggcaccaacaagactggaatagtgcacagactaaggctctcgcgaatgaatcccttttcaaggagttcgttcacttgtttttccagctccttgatctccttgggattgctacgataagccggtcggtttggtatagacgcgccagaaatgaagtcgatttgatgttctattccctgaataagtggtaagccactcggaacttcgtcgggaaatacatcttcgaattcctacaagagagagacaa

SEQ ID NO: 29247 - DNA, 306 bp, Gossypium hirsutum
  Clone ID: LIB3083-007-Q1-L1-G12
aattcgggaactcgtattccaaacaggtacgttcaactgaaagaatagattttagaaatctaatcattaagagcaaaatcttaggattcccaaagtactggctttacaataagtggacatataactgtacgggcttacaactttgatctagtatgactatgtggcaccgtgatatgcttatgcttggtgcgcgtgcatgcatatacgatttgtgttctcttttcatgttgggtgattgtgctttggctgctcgatactaggaacgttagagattgaattggaaagataatttttgggaagaaaaat

SEQ ID NO: 29248 - DNA, 231 bp, Gossypium hirsutum
  Clone ID: LIB3083-007-Q1-L1-G9
cctgtttctcttctctatcattctcattcggacgcactctatgatggtaagctcgactcccattcaaattcttgtctggatttgcgttgccatgtctgtatgcgcctctgcagcacccattaacatcatggtaagagtttttcgcacttatagcgattagttcatgcctcgcaccttatcatttgttctcacattgagtgcacaactctcgtttgcttatgcactatttat

SEQ ID NO: 29249 - DNA, 238 bp, Gossypium hirsutum
  Clone ID: LIB3083-007-Q1-L1-H2
caatctacagccagctgaaccaaccggctgcattaattcatcacgaacttttttttcttttaccaatcctccaaattggctgttttcattaaatcgttgactcaaacatttacccaccccatcattatccaccacatccaatccacacacaccaacttactaactaccaacacacaaacatttaccttcataaaccaatttactcacatattaaccaataccacacacacacactcta

SEQ ID NO: 29250 - DNA, 345 bp, Gossypium hirsutum
  Clone ID: LIB3083-008-Q1-L1-A12
ggaaagcagaaacggcttccacaaaagttggtaatttatgtaaaaaggatcctccaacaaaggccctaaaatctgttaaaaattcccaaaaggtacaaaagagtcctcagccagctacaatgaaggaaacagtaaaagaaaccacaaaagcttcaagtgcaaagaggatctcatctagaacatccccattgcctgctactcgtaagtcatggccttcaacgccatcaccaagaacaagaggaacatcaccagctaaaatttctgctggaatctcttcttctggcactgtgccaacaagtcggaaacctcagtcagcacaattagtacctcgactgagtcctaaag

SEQ ID NO: 29251 - DNA, 302 bp, Gossypium hirsutum
  Clone ID: LIB3083-008-Q1-L1-B12
ttatgacggaagctgataaccacgaccgagctccgatatggacagtgaactctcttgcgatcgcttcagttatcagacttacggatgcattctacgataaatcactttagatcacctgcataaggagccggaactctatcgagttgacgcgcaaaggatgaagatgctaatgcaggaaggagctgaaggtaatcaccaaactttaattaatggcggctatgcgtagcatgctatcatagaggaactatcttgtatctataagcatctaaaatctctgatatactgatatcccgatcctgaca

SEQ ID NO: 29252 - DNA, 360 bp, Gossypium hirsutum
  Clone ID: LIB3083-008-Q1-L1-D9
tgaagaattatataatagggttctatgttggttttattattttaaataacaataataaaagaaaatattggcagatcgaatcgaattggaagttggaacctcctccttcttcttcatctttttgtccatctctctattcacagatcatcgaagaaaaaagatgttgaaattcctgaaaggagtggtaggcggatctggagcagggctcaaggatctaccttacaacattggagatccttacccttctgcttggggctcttggtctcactttcgcggcacctccaaggacgatggatctccggtttctatattttctctttccggaagtaatccgcaagacggccatttagctgctggtcg

SEQ ID NO: 29253 - DNA, 360 bp, Gossypium hirsutum
  Clone ID: LIB3083-008-Q1-L1-E12
gttatttcccataccttgctcctcttgctagtccacctctcttcctcctccgccgctactcaccaccaccaccaccaccaccaccaccaccgttcactgtctccaaacccaaagctccaacaagcttacacagctctccaggctttcaaaaaagtcatctactccgacccaaacaatatcaccacaaactgggttggccccgacgtatgcaaatacacaggcgtgtactgtgcaccacaccctcacgacaaaaccatcaaagtcgtcgccggtattgacctaaacggagacgacatcgccggttaccttcccgatgaactcggtcttctcaccgatcttgctcttatccaccttaacagc

SEQ ID NO: 29254 - DNA, 270 bp, Gossypium hirsutum
  Clone ID: LIB3083-008-Q1-L1-F11
gtttcgagtatggttattattttgtgaggaatgcatataacatgtttgatggcagacgccaaaaattttatatttaaacccacacacccatttaacatgaaaaagcttaacataccttaaaccatttcaaatctttaacaagatctagatcatcttatcttagcgtaacacagtagccatttgcaatcaaacacctcatacgaaacctcaataacatgtgcttattctgactaatgatattaaacctcatcaccctgagacgacttatct

SEQ ID NO: 29255 - DNA, 368 bp, Gossypium hirsutum
  Clone ID: LIB3083-008-Q1-L1-F9
gaagttttgaacctttataaggccccgctgtgtgtagggggttgggatgaagcacttcatgaaatatgcaggttgtcacatgaaacaatcctttcaccacagaatgcgacatcgcttttaaatgctgttgaagagatgccggtattggtcattgctggtgctgaagattcccatatttctcttaaatcttctcaggccatggcttcaaaacttgtaaattctaggctggttgcaatatccgggtgcggccatcttccgcatgaggaatgccccaaggcattacttgcagctatttcacctttcataagcagattgctaatccaaaccagaattgcaaagagtcagtaggacacctttttaacttacgt

SEQ ID NO: 29256 - DNA, 253 bp, Gossypium hirsutum
  unsure (1)..(253): unsure at all n locations
  Clone ID: LIB3083-009-Q1-L1-D10
tacaactggtggatccccacatactgcattaattctgcactagcaaaatttttccaatactcgacaaaacacaaattctgacgtacattatacaaatgctgaaggcattnaaaatcattcttctcaaccatttcattttaatcataccaacaatataccataatttaacatttctattccttcttcaatttaatgatcatcacacgaaattcatataccttattacaatctcattcaattaattctacccact

SEQ ID NO: 29257 - DNA, 262 bp, Gossypium hirsutum
  Clone ID: LIB3083-009-Q1-L1-D11
tagcttaattgtttctatacggtattaatcccttcttctgattgcctatattctaacctggctgtttattacatactctctttgattttctagatcttttcctttcctttttttcaatttgcttctttaaagctttatcttcttaataacatcaaacccttttatatatagcaccaccaattcaaactccaaccaatttctttttcttttaccactctttacatccttcttttaatgaaatgtttctttcatctattaacat

SEQ ID NO: 29258 - DNA, 335 bp, Gossypium hirsutum
  Clone ID: LIB3083-009-Q1-L1-E5
tttgaagtttttttaaacggaagctgacaaacccagcctggtctctttccttccgtcggaggggaagccgtaacggcaaacaaccaaacgtagaagcgctgattttgaattgtttggcgcgtgcagtgcagagaagtgaataggaactctcatcgatggtttttagacaaggtttgagcttgtgttggtcttaatcggcatggcggagtccacaatgaatcccaaaatgtcgccttctcctcctctctttgtctcctcgaatctgccgccctttcagtctttgctcataaccgatctctcctttctcttttacctctcagtttgggggcgacctg

SEQ ID NO: 29259 - DNA, 256 bp, Gossypium hirsutum
  Clone ID: LIB3083-009-Q1-L1-F12
attcacaccactgaccttttttataaatagcgcccaaaacactggtgttggttatactatggtggtatggccacaaaattcccccaaatactcacattcttaagcaacttaccatcgccactatcaccatctagcgttctcaaatggtctctaatttttttcaacttatactacataatttatttttccactatatataataacaccaactacactattttttcatccactactaaattcataattcccgattaaa

SEQ ID NO: 29260 - DNA, 289 bp, Gossypium hirsutum
  Clone ID: LIB3083-009-Q1-L1-G10
actaaataaataccaccccaccgccctcgtttaaacgcggcaaccaaaacaaacctgttgggttatatatagaactcaggccacaaaacaaacacaaaaacttcatcgttttaactcatcaaatacactataatctaatctaaacataaatactattacttttttaattctctttatttcattcataacaattctttccttaaataattcaaatttccaccatttcattttcaacttcactactacctctataattatacaataccaaatactttcacaccattataac

SEQ ID NO: 29261 - DNA, 346 bp, Gossypium hirsutum
  unsure (1)..(346): unsure at all n locations
  Clone ID: LIB3083-009-Q1-L1-G11
ccccggcttcantttttttttctangtttttatttaaactccataaaattaaatgcgtatgtttataagcatgttgtaacacacaataacattcttttataataacacacattaacatatatatgaaaaaaaatggcgtctaaaaatcacagaaaattaataaccctatatttccccccctttcaacataaaattataacctttcagaaaaaaataaccattcatccacctaataatgccaaaaccaactcaattcaaattccctattttatcattatcctaatatatcattaaccctaaaacgaaggctttttttatttaaccatttttttttaaatttgcttct

SEQ ID NO: 29262 - DNA, 168 bp, Gossypium hirsutum
  Clone ID: LIB3083-009-Q1-L1-H5
caactactcttttttttcgtctcccaaccaaattctcccggtattgattttatttacaagatagcttccttcctcaaacaacttcttctctctaaaaactcatacattacccaacataattttctttctcctcattattatcttctaaatttactttatcatttatac

SEQ ID NO: 29263 - DNA, 307 bp, Gossypium hirsutum
  Clone ID: LIB3083-009-Q1-L1-H6
tgggttttcctatgggtgttttcctgaaaccaaaggatttaccaggaaaaaaaaaggtttgtttggggggttttggacttaattaaagcatggtagagctcgaaaattcgtcggcgatgactgtttctacagcttctggagaagccactgcatcttctctaggtaatcagattcaagacaatcaactcacaggcggatgaccaccgaaaaagaaaagaaatcttccagggatgccagatccagatgctgaggtgattgctatatttcccaaaaccctactggcgaccaaccgattcgtttgtgagat

SEQ ID NO: 29264 - DNA, 224 bp, Gossypium hirsutum
  Clone ID: LIB3083-010-Q1-L1-A9
cgtccggcacttacactatcacactgcaaacttctcactcaacaacaatgatagccccagcgacaaccttcatagtcaacaccgatgtaagacgacaatacaactactacgttttctctgtactagctaatcaccatcagactgctgcccacgccacctgagatcacctcttctccgacggtgtctcgtataactctaacgcacaattcattaaccccactaac

SEQ ID NO: 29265 - DNA, 299 bp, Gossypium hirsutum
  Clone ID: LIB3083-010-Q1-L1-B3
atgaattcgctgcgagcattctgtgcttgttcgaattttttttaagcgagaatgggggggtgcattaggattcacatcgttcaggccagtatccaattctgaaacgcctgctgggagctgtaactgtctagagcatggaatctagccttatggtcatatgccaaatgacaaaactgtctgaggaggtgctgatgcttcttacacctacttcattgatactggtgcctggaagcacgtgcctcgtgcctgttttgtggatcttgaacctcctgtaattgatgaagtgaggactggtgctt

SEQ ID NO: 29266 - DNA, 403 bp, Gossypium hirsutum
  Clone ID: LIB3083-010-Q1-L1-B4
ttgtgcaggctgctttccttcatgccctcatgggagtaaccatggtttgtgcatctttttttgtggtcttcacccattttccatcggcattcatttcaaatctcctaccatgggtgtttgctctccttgttgctctatttcccttgacttacctattacaatgtcaagtgagtattaatagcttccttgcttaaaactaatttgttgacaccatataggtatacatgatgcttacaactctactgtctgtttatggttccttgacatctgttcttattctgtatgcatcaatctttattcttatagctttttaaataaaatattaactttccttacttattctggtaaagtctttttacatggtttcatttttacacaattaatctggttaaatttattcttt

SEQ ID NO: 29267 - DNA, 296 bp, Gossypium hirsutum
  unsure (1)..(296): unsure at all n locations
  Clone ID: LIB3083-010-Q1-L1-B6
gtcgatccttcaccggcaccgctcatcgacatggctgagagcgagctttggtctttatacagagctctcatcgtcgaattcatcgatactctggtcttcctatacgtcaccatagccaccgtcatcggccacatgatacaacacgatgcatgcgatggtgttggtctattgggcatcgcttgggcttttggtggcatgattctcattctcgtatactgcaccatcggtatctcacgtggtcacattaacccggcggtgacattngggttggtaccggctatgaaggcgtccttaat

SEQ ID NO: 29268 - DNA, 150 bp, Gossypium hirsutum
  Clone ID: LIB3083-010-Q1-L1-B8
taaacagtggatccccctgctgcaagattctcaccaggcttttatccttttaatcttatttcaaaccgtctgcttagcgttatcgacctggcaaaaataggagtcaattggcaacttcatctactccattaactacacattctatatact

SEQ ID NO: 29269 - DNA, 211 bp, Gossypium hirsutum
  Clone ID: LIB3083-010-Q1-L1-B9
gatcactcaaaccgggtacaacagatccctttttgcaactacgccataatcacacaaccgcgcagactcgcgatcttcaccgcagacgacggacaccgataatctcaaaaccgaccaaaccgtcgagaatccttccgtcctctcaaacaactctcttaataacctttcaaatcaacatatgttttatactaagaaagcccataacaaagcc

SEQ ID NO: 29270 - DNA, 258 bp, Gossypium hirsutum
  Clone ID: LIB3083-010-Q1-L1-C7
ggctttaccatcagaaatggctttaagactcttgttacccgtacttatgggggcaagattgctgcataaggactcttacacagactgcttgatgttatactgggtgatcttcaatgatgtggtgaggatcatactgtcatctagattcagttgttagctgaacatgttctaggaaaaaatgttttgaccaaattctggataatgaattttacgactgatatgcttatgtctttgtttttcaaattgttaatttttatc

SEQ ID NO: 29271 - DNA, 280 bp, Gossypium hirsutum
  Clone ID: LIB3083-010-Q1-L1-C9
tccgtcgggctgcacgaatggggcactagcgaagaagattatccttttacttatatctaccataagaagcataaatgcaaattttcaaaggatatccggacagctcttgtaggtacatctttttgatgcaattgctgctgaacataattactgatgtggtacctaatgattgagacaatactccaaactaagaaagcattgtctatgtctatgatcattattgtgatgatttgattgctaaagctttgtcaggacagaataattccaatactgataaaaa

SEQ ID NO: 29272 - DNA, 274 bp, Gossypium hirsutum
  Clone ID: LIB3083-010-Q1-L1-D1
tagcaattcctgttgctttttgttatcaccactaaatcatcgagacaaatagctcatctttcagctttcctactctcctatggctctcaatctatgtcagaaacaaacagaatgtataattcgaatgtttaatctgaaccagcctgtgaattcctctggaactgttaattaagatgtttacaagatcttgatatatgacaaattttgtcaaaatatactgtccctcttgatccatgttaatgatctacgtaaacatggtgtttccctgttactt

SEQ ID NO: 29273 - DNA, 105 bp, Gossypium hirsutum
  Clone ID: LIB3083-010-Q1-L1-D11
tagcacaatcattttatacctttccaacactttctttctgtcgggctactgtcgattcaagcagggaacaggcattctaacttacaacgtttatgccctttaaat

SEQ ID NO: 29274 - DNA, 158 bp, Gossypium hirsutum
  Clone ID: LIB3083-010-Q1-L1-D12
gagaaagcttctagcctttgccttacttttcttcttcttgtgctattgaacattatctcaattagcttcatctctctctataatagtggacaacatcactttcatcctttaaatatgtgtccatttcactcacttcatcaatctatataaatccacac

SEQ ID NO: 29275 - DNA, 373 bp, Gossypium hirsutum
  Clone ID: LIB3083-010-Q1-L1-E11
tagagaaaatccattctgctttctgtcggagttgactgctaacaaaaattgatcccattcccccgcttacgaagatttctaagcttctcctataaaacatccacatcaaactcccccaaaacaatatccctattagagaaaaaaaaatgatgtaagattgtcatgaatcaagctattaaaaatctttatgcttttcctctctctaatgaacatttgctgcataatactcattctttatcattagtgtccatctatggtttaattataattaccactcttttctttcactaacttacctattatctttctacatacacttttcatcatatttctttatactttaaacctttattaacacttttcatttcacatt

SEQ ID NO: 29276 - DNA, 281 bp, Gossypium hirsutum
  Clone ID: LIB3083-010-Q1-L1-E3
ctggacagattttaagaagggaggagattctcgaacttggagaatgtcctaatgacttctggggaattgaacgtggagccgtttgaggtgaaaatctcatgttccgatctgttgattaggcaattagggtgacttatactataatttttccactatcactctcatataatctaacattgtcttacgtaaatacttcagatttctaattacttattgttttgatattactgttaatataccttttattgttccttttttactataactatctatctttctta

SEQ ID NO: 29277 - DNA, 410 bp, Gossypium hirsutum
  Clone ID: LIB3083-010-Q1-L1-E5
gtgaaatattatgaagtggaactaacaggatatacccctgccatgataaaaggatctcccgatgatacttcatgagatcttctacaagatactgattcatccgatacgcaagctcaaaagcctgataacttaatgcataatgatcgtattacaggtgataccagcagcttcaatattcatatgacatctaatgctgattatcatgcaacagatgaaactatgatggataaatatccgctcccggtaagcaattcatatttgtttgatcccaattatggtgaaattgactccaaagtcttttcaccactaatgaactctcaacctttttgaagatcctgtctttctcgtagattctccttatccaaagattttggtcatgatccaaatggatttcaatttcatgaatggac

SEQ ID NO: 29278 - DNA, 135 bp, Gossypium hirsutum
  Clone ID: LIB3083-010-Q1-L1-F11
ttcactagctctgactctttggatcatttcccgagcttatatatctgatggttctggagaatctaatatggctagaactcgcatttagtactaatggtcttccaacaaataattatatacattttcgaatcataa

SEQ ID NO: 29279 - DNA, 400 bp, Gossypium hirsutum
  Clone ID: LIB3083-010-Q1-L1-G10
gaaactgcttttagtgttttctataggcacaaacagttgagtcttcgatcactttgtattggtggctgaagttcacagtttgctgatatatttcgaagagctttcgcctctcgtgtttttcctccacatgtgactaacaagttgttaattaattcatgtttaagggattctacttttataccttctgtatctggcaaaactctcattgctagtcaaattgttaagattttgaattgaatggtactacatatttgttaatggcttctaaatttcttatcttattttttggataaactgataataatgtcatagaccttttttgcttattctttaaattaccaatggacttttgattattatagttattttcattcttttatatttttgttgaaatttattc

SEQ ID NO: 29280 - DNA, 329 bp, Gossypium hirsutum
  Clone ID: LIB3083-010-Q1-L1-G11
gctctttaactagtagatccagcggactccacgacttcgacacatgaacacgaggttccatggttcaaactcacaaaattcccttcattctcaggcaaattctcctctgctgaggtcgccagtattatatccatgctcaaattctttcaaagatgataagtcctttattatttttttttctattcctccttttttaattttttttctcctattattttacattttttttttttagctttctgctgatataccttcactattgtagtttaagcgtttctactattaactgattattatgtattactatcatttcaattactacctttaaa

SEQ ID NO: 29281 - DNA, 183 bp, Gossypium hirsutum
  Clone ID: LIB3083-010-Q1-L1-G2
tacaccagacattatgttgcgtattgatcttctccttttactagctgtggcttcattgggggccctttgcttatccattgatgactatactgtcttttatgactcatgatattaaccttatgactgtccatcgatcgagtcctataaagattattacaaacgcttatggaaacatttcttaga

SEQ ID NO: 29282 - DNA, 183 bp, Gossypium hirsutum
  Clone ID: LIB3083-010-Q1-L1-G3
cccacttgtctcatcgatttcatcgacctctcattggatctcttttaggcgattcttctttagatccttaacaatcctacccttcatcaaaactttacaacatctgatctccatacacaccatattgtcacaaagcacaatgtgatgctttacccatttatgcatgttcatgaacacaatctt

SEQ ID NO: 29283 - DNA, 388 bp, Gossypium hirsutum
  Clone ID: LIB3083-010-Q1-L1-G4
tttccctccaattttctaaatataaaagttttaattttcgtgtctcgatcttcacactttcaaagctttagaaacgagtagatcggttctagaatttgagtgggaaaaaaatgggtgagcacgaagagaagcacgaggaatcgctgatggtgaagctagctgagaagatccacggccatgattcttcctctgattccgacatcgatgagccatcagaatcgtcgatcaatgccaaagtttttcgtctcttcgggagacaaaggtccgtacaccacgtttttggtggaggcaaatcggctgatacatttctttggaggaacaaaaagatttttgctggagtgctcggtgtgcgactgtgatatgggttttgtttgaattgctggagtac

SEQ ID NO: 29284 - DNA, 287 bp, Gossypium hirsutum
  Clone ID: LIB3083-010-Q1-L1-G5
tctaatgtattgataatccactcaaaaggaatctcataggaatgttttgagccgatcaaacgtcatcatagtcacttgctaactctaaatttcataggcgattgcattgatagttgcacgtaaatgataaatcgtaatgataatgttgccactctacttatccagcttcgtcatagttctctattacaacaacaacatcatgaataaacaatgatggggtcaatgatagatggcatctatatgacctaatttcaacttacatgacttcattggtactactaattcaa

SEQ ID NO: 29285 - DNA, 411 bp, Gossypium hirsutum
  Clone ID: LIB3083-010-Q1-L1-G9
taggagaagcagtatcggggatgaaatcctcagaggcaagaaagacttcggtggcgtttacgaaagccaagtatgatccttgggaaggtatgaagcagatcctaaatctttttcattgatggtgaccaaaaattctttgatgacattttttctaatactgttcctgattttattgtttgataatagccattttttttaatttgttacattttttttagctgtggctacattagaatcagatgattttacaaagatattgtgacgtacaaagttggtactgttctcattatatacaaacttttaaaatgaatgtcgtctatagattcttgcggattgatagaagtgagattaggattgattttgatgaaggacatggctactttgtcctacaaataatgaaacaccataatt

SEQ ID NO: 29286 - DNA, 256 bp, Gossypium hirsutum
  Clone ID: LIB3083-010-Q1-L1-H11
aatcgatcgtttcctgcttttcatatcgttaataaatcttaggacccagatgctataacaggcaatgattggagttggtaagataaagcaatactcaaacatcctttataagccccttatcaagggcaaacaatatgttatcttgagtgcctatacatttttgctctctgagcttgttcattacaatcaaactctgtttgacaacattgctttattataaagaatgctgtatgattcattgtattcttttataact

SEQ ID NO: 29287 - DNA, 198 bp, Gossypium hirsutum
  Clone ID: LIB3083-010-Q1-L1-H2
aaaaatgaacaagtcttctcattttacttcgtcaaccagggtgtattgttgaggcaattctactaatgttaatgatcttgtaccagatacatcaacttgctcggtaaatttgtgctctatttcattttcttctgcttctagatgtgtttttacataatactgtttgcattgatatcgattcttatagtatcttatact

SEQ ID NO: 29288 - DNA, 259 bp, Gossypium hirsutum
  Clone ID: LIB3083-010-Q1-L1-H3
ggaaatgcatggattgttcaatacgaaagtggattaaatggcgatgtgcagaagctcttaacaacgtgttacattttgggtttcaacatgtttgtagtttgaattagagtatagattatgggttatatgggtatgcagattctcttaaaagtattcccatgtgggtagagagattgatagacattaatattattccttaatcatgtggtttatgtattccatatatattttataaattaattatatggttgttatcaat

SEQ ID NO: 29289 - DNA, 396 bp, Gossypium hirsutum
  Clone ID: LIB3083-011-Q1-L1-A11
ctcggaagggacatcctcggtaaagaaagggaccggttttgctggaagtaatgtccatgaatcgcgtggtgctgcttctggctggcaggctgaatttcagtctgatgatcacggttctattagcaccatgtttgctgaacactcttttgcatcagtatactgaacttattgtccgtcctgctcctatgccttattggtccttttgattctattagttcctatatggtttcaaatactgtttttaccttttttttttttttgttgtttctttaattttatctttttttttttagttttttttttattttattttttttcttttttttatttttttttttttattctttttcttttttttttttttttttttctttgttattatatttcttttttttt

SEQ ID NO: 29290 - DNA, 197 bp, Gossypium hirsutum
  Clone ID: LIB3083-011-Q1-L1-A6
tcgagtttactagttttatctttattaggaaatcagagttccaaaaattcattatggcaaatataaataatattgcaatcctactctacttttattgacatgtttatttacattgctactcttatcgcttaaaactaatatttcttattcctttattgattcccttattttaaagctttaactatgcattatatatt

SEQ ID NO: 29291 - DNA, 402 bp, Gossypium hirsutum
  Clone ID: LIB3083-011-Q1-L1-C10
gaaaaaaaatactaaagattttgtgcagaaatatttgtgggatagcctgtatgaagaaattttcaaaaaaaaaaaaaggagagaagctttggattatacatgaaaatcaataataattattaaaatagagagtttctatggaattttaaagcacctgtgtttatatggagtgatattagtaactataaaaaagagttgatttgttgtatgttaggttttgaaataagcaaattgagtgatcattttgttgtatgctttgactgttttacgtatcttttatgttgtttattttttttttaactttatgttttttgacttttttattttatatttttttttttatttttttttttttttttattttttattttttatttatattttttattttttttattattt

SEQ ID NO: 29292 - DNA, 250 bp, Gossypium hirsutum
  Clone ID: LIB3083-011-Q1-L1-C2
ccttatagcacccgtaagccttaagagcaggacccaaagttcagtcctgaagcccagagtggttatgagcacttacgggcacgagtcatgacaacgctcaggctgaggctaaggctcaagcacgcacagtattagcaccgcagaaacttatgaactcgacagcacccgtgttagactccaggctgatgagcattataacagcatacagtagtgcagcatcaatggcgacactcactactgcagcaagaat

SEQ ID NO: 29293 - DNA, 418 bp, Gossypium hirsutum
  Clone ID: LIB3083-011-Q1-L1-C3
caacaccacatttaattaccaagctggaggatttgaagtctggtaagaatgctccccaaactcccacaactcctcaagttcaatctacaggatcaaagacactgttcgttggaaacttacctttccaagtagaacaagctgatataaagaatttctttaaagatgctggtgaggtcgtggatattcgtttatccactgattttgaagggaactttaaggggtatggacattgttaatttgctactgcatatgctgcacatattgctttatagttgaatggttaatttttgatgtaattttcccttagacttgattagtctctttaaatggtgtccttttcatctattcatttcttttttttattttttttttttattgttttttttttattttttttatctttttttttatatttttt

SEQ ID NO: 29294 - DNA, 312 bp, Gossypium hirsutum
  Clone ID: LIB3083-011-Q1-L1-C4
ctcgtgccgattcgcacgagtcatcatccagaaggagtccagtcttcaccggtaccttttcctccgcagctggatgcaaattttcttgcaaaccctgacttgatagaccatcttcctttacgatctatgcttttatactatttatttctctttctcttttttccttttttcttttttttttttcttttattcttcttcctaatttttatttcttattattttttatttttcatcttatatttatatttcttttttttattattttctttatttctcttattattttcttttattttctttttttattattct

SEQ ID NO: 29295 - DNA, 191 bp, Gossypium hirsutum
  Clone ID: LIB3083-011-Q1-L1-C6
gatatctaaaattctacgtacgatcaactaaagggtcctcaggggcacttttaactacaaactcaataacccgaaatacatcaattacattgaattacatgataattttatattacatatttcattgatatgtacatatattcacacctttcataagttctttattagttttagtttcttattcctatttt

SEQ ID NO: 29296 - DNA, 435 bp, Gossypium hirsutum
  Clone ID: LIB3083-011-Q1-L1-C9
cgcaggtcgagccggcgcgggtccggccggtcgtaaagagtcatgtgcgacacgaattcctggccggcgcccaggctgctgcccgggtgcgagccgggccgctgaccggcggcgcgctgcggcaggcggtagtggaattcgtgcagctcgtcggcggcactcatcgcggcgtggcgaccttctctatgatctgcgcgaccagcgcgtttgcgatcttgtcgctggtcattttttttatctgtgtgtttttttatgtgtttttttttttttctttttctgttattttttttggtttttttatttttattatattttattttctttttttcttatcttttattttttcttattcctttctttgttattttatttttttctttttttttattattttttttttttttttatttatttttttttatttttttatttttt

SEQ ID NO: 29297 - DNA, 164 bp, Gossypium hirsutum
  Clone ID: LIB3083-011-Q1-L1-D11
ctacagttctatcccgtgggtatggaaatgtaacatttagattctttgacaatgcgaaaaatcatctaacaagccaacattgtacagtttacagagttcctaatgtaaaaaacatgactctagcataaggtatctgaacatacatttataaaggatccagatta

SEQ ID NO: 29298 - DNA, 140 bp, Gossypium hirsutum
  Clone ID: LIB3083-011-Q1-L1-E2
atttcaaagacatggattatgtgaatgttccatcaatatactgggaatacagcacactacaggtcttgacaatggagtatgttcctgtgatcaaaataaacaagattcaagctttagaccagctgtgagttgatcggata

SEQ ID NO: 29299 - DNA, 427 bp, Gossypium hirsutum
  Clone ID: LIB3083-011-Q1-L1-G10
tggaggaggtagacgaggacaaagaaaagaagtcgaagaggaagaatgttaaggaggtgagccatgagtggcaacttattaacaagcagaaaccaatttggttgagaaagccggaggagattacaaaggaggaatattcctcgttctataaaagtattacaaacgattgggaggaccaccttgccgtgaagcacttttctgtcgagggacatctagagtttaaggctttcctttttgtacctatgagagccccgtttgatctttttgtctcatggattaagttgatcaatattaatcttaactttatgatggtttttttttttttcttctgttttatacttattttttgtatatattttctttttttaaatcttttttttattttttttttttttttttttttatttttttttttttttttcttttt

SEQ ID NO: 29300 - DNA, 181 bp, Gossypium hirsutum
  Clone ID: LIB3083-011-Q1-L1-G5
cttcaatctgagtttctcgacaatctctcctctcgtttgccctgaaaaacaagtgaatctaactcctctagattgtccagaccgcacaacaaaagagaccatattggttactggtacccatggtcaagacccaagacattttctgaaaacattgttgctatcttctttcacatttcgacac

SEQ ID NO: 29301 - DNA, 361 bp, Gossypium hirsutum
  Clone ID: LIB3083-012-Q1-L1-A11
gctcaatctaatctccttgttttaaaacctctcgggtgtcctaaaacaatgacaaccagcatccacgtcactgctttagacagcgtcgtgaacgtaaactcccttttcacactcgccgttttcatcggtttagcttggaacccatacgatcccagcaacacactcgtagacccaaacagccgatgtgccccaacatcaaaaatcgccgaggatttgattaaattccatgtctactccttcagttctttccttttctccagccttgtagctttagctatcaagcaagcaatcaagctttccaaatcccatacttttaacatccatgttactttccgtggatccgagtttttggacatgttga

SEQ ID NO: 29302 - DNA, 122 bp, Gossypium hirsutum
  Clone ID: LIB3083-012-Q1-L1-A12
ccatattttttcctccttgtatcaaaacctcctggcctttttataacatttacatcggcaattcatatcacagttttatacagttttaattactttaactctctattcacacttactatatt

SEQ ID NO: 29303 - DNA, 219 bp, Gossypium hirsutum
  Clone ID: LIB3083-012-Q1-L1-A5
gtcaagcgttagagctagctagctattactcagctggcggcgattacgatgatggagcatacatctccactcaagagctttacgaacaacggctgcgagtacattttccttgatgcttatggagatgacgatggtggttggcaaactgctcatgccaccttctacggaggtgctgatgctaccgtctcaatgcggggagcatgcggatatggaaacatg

SEQ ID NO: 29304 - DNA, 299 bp, Gossypium hirsutum
  Clone ID: LIB3083-012-Q1-L1-A9
ccacaagacctccctggggtgtccacagttctctgacggggtgtatcttcagcttcatgagatgcaaaacaacgttccactgatttgaatggctgtaatgctcccttcgagcgacctacttatggatcgagggacgatctgattccaagatatggaacatatagatctgcattgtctgctacattatgaccaccagccctctcgatagtgcggtcagcattttcgacattggggtgatcataactgctccgatagacattgctcagttcatgctcgaagccaacacatcaaattcactc

SEQ ID NO: 29305 - DNA, 317 bp, Gossypium hirsutum
  Clone ID: LIB3083-012-Q1-L1-B1
tcccgccccaccggcgcaactggccgcaaaagccgcacccgtgaaggaccaacctccacaacagccccagcaaacggcggcgccaaaaaaacccacctttacaaccccacgtcacgcccaacttaccgttcacaaccccatcacgtaaccgtccgcggcggaactactgttgctggaccaccctcaaaatactcatactcattcttttagccgccataaccggcaccgtcctttacgtacgtttaccgcctcaccgaccttgtttcaccctcgcttcattccgcatccaccgcctgaacctaactaccagtgcggac

SEQ ID NO: 29306 - DNA, 273 bp, Gossypium hirsutum
  Clone ID: LIB3083-012-Q1-L1-B9
ggattccattttcgcggtgctttctctaaaaagggccctgtcaaattttacagtagtggtgcttacattcttagacaagcttccaaaatcataatatctaatttgcttgccctaatgttcatcgtacaagtctcttattctattgatttacctgagcccttgtctttctttgtatacagttatgtaactttaaatatttctgacaaataaatcctccaaattgttaagtataacttttattttatgccctgtataatcaccatcaacctttat

SEQ ID NO: 29307 - DNA, 168 bp, Gossypium hirsutum
  Clone ID: LIB3083-012-Q1-L1-C12
ttattaaatatacccccacattttattatcataggcgagggctataggatattgctgattgagaatgaacaataattcaaaaatcatgccattcagttccggcctgatcaactggtctatatttaaacatgacataaaacattactatcttccatccaagaatcaaac

SEQ ID NO: 29308 - DNA, 455 bp, Gossypium hirsutum
  unsure (1)..(455): unsure at all n locations
  Clone ID: LIB3083-012-Q1-L1-C3
gcggccggctctagaaacctagtgnganntcccccgggcctgcagggannattcggcaccgaggaataccagcncactcanntcaattcaaatctgatggatcaaagatcccatcgtactgtcaagannaaagctgaaggggtgagttctcgtgctcggatggcctaagaaggggagggctaacaagggggatggaagggtcggatcaacaattgtctgcacaacacatatnntactttcctgtgaattggggcacgcttgcaannngaagaatttctcgggccagattactctnntctgggtganaggaagggttttggcccgagttgtataatagggcgtattggaagaagcactaatcaaagttggtgnngcaatcaagcangtctttgatcgtaatggacctgcaaggggaacccgggaaattcctttgttgaaagtatnttgatgttgag

SEQ ID NO: 29309 - DNA, 293 bp, Gossypium hirsutum
  Clone ID: LIB3083-012-Q1-L1-C7
gagcaaatcaatggttatctgtcagtaataagatatatgtactaataactgatatcgttcagaacatagctaaggcttcttagtgcattattgcaggtcatgtatattatgtgtttttatgcagagcacacacccaactctccccctttcagcctgaaactacgaccccactaaagcagaagcttagttgccagaagcagagaccccattttgagacaataacaaagttaccaccataatttcatatggtacaatatacaagcattaatttgtggtgccagtaccctcaactt

SEQ ID NO: 29310 - DNA, 344 bp, Gossypium hirsutum
  Clone ID: LIB3083-012-Q1-L1-C9
tcttcacattgtttacttgcattgcctacatcggtatctgatatggagaagactttatatgcattttcagacagctagaaccgttttccaaacgagctatctctagaccagcgaagaaaagggagaagttggtattcgccatagggaagactgaagagaaatgtgatgctttcaaaggcaggtggctgaggcacgagtagacccgtccgctgtatcaagaatcggagtgtccgtacatacaaccacagttgacgtgtcacgaacatggaacacctgatactgagtatcacagatggagatggccaccttcatgctgtgatcttcctatttacaatgctacattt

SEQ ID NO: 29311 - DNA, 308 bp, Gossypium hirsutum
  Clone ID: LIB3083-012-Q1-L1-D11
gagagaactagtgtcgagtttatgatggaagctggttcggacgcatggagagggacagaaaacctcacagaaaataaagcttgaatataaaggagtgcttcattcagatgttgggtctgatcgggttcagttgggtttggttggttgagcctcgatgggaagatttgatttgtgaacttataattgaattttaatttgtgttcatgatttcgaatgtataatggtagaaacaaatgtatctgcctattcattcatgtttcacatatttattctatttcttataaaaataagtatgaattaccatagtc

SEQ ID NO: 29312 - DNA, 194 bp, Gossypium hirsutum
  Clone ID: LIB3083-012-Q1-L1-D2
gaaggattccgcgccagggaaaccaccaccgatttcagatccttcttcccagctctggagaaaggactgggtgccgaaagggaagaacaaccatggggcttgcatttacaaagctctttatcccgcttttttgccagaaagagaagcctattttaatgggggggcttgatgccactggtaaaaccaccattttg

SEQ ID NO: 29313 - DNA, 387 bp, Gossypium hirsutum
  Clone ID: LIB3083-012-Q1-L1-D8
ccatattcaatctactaggaaagccatgggagaggggggggcagattcaccagggacatgcaaaggtgaaacaccaaggctaatgatactcgaccaagctttgaggcaacaaaggtcttatcatcaaatgaacatgatggaatcacatccatggagaccccaaagaggcttgcccgaaagatcagtctcggttcttcgagcttggttatttgagcattttctacacccgtatccaagcgatgttgataaacatatcttagcccagcaaaccggtctctcaagaagccaggtatacaattggttcattaatgcaagagtgagactatggaaaccaatggtagaagacatgtattttgaagaaacaaaggaacatgaaaacaaccacat

SEQ ID NO: 29314 - DNA, 299 bp, Gossypium hirsutum
  Clone ID: LIB3083-012-Q1-L1-D9
cccataagctaaccacaaaggaaagcctggagagagagcgataaacaacgcttacagatggtagccaaaaacgacacgaccgctaggactatatctaccctccaccgacccctttaaatgacatggctgaactcaacgtcatggtctcttaacagaaccctaatacatagtacacagccactctattcattacctatgtcactaatgctactgttattatctacatgaaacaacaagacgcatgtaatatgcttcatctcttgggtatgccatgcgctttgggtggcatcatctatata

SEQ ID NO: 29315 - DNA, 190 bp, Gossypium hirsutum
  Clone ID: LIB3083-012-Q1-L1-E10
tttactgatatgtaccaagaaagatataaagatgtggagatgaatagttctaagaagagactaatggaattgaaagccatagggagaatagaacgtgatttacattgaacatacatcaatgtcatcagcatagccctttttctttactgatatttacagatttgatgttaatgggttttttaaaaaatat

SEQ ID NO: 29316 - DNA, 293 bp, Gossypium hirsutum
  Clone ID: LIB3083-012-Q1-L1-E12
gcttgatcttgaattcttattggaagacctcgagaccgtgaaagttatcggcaatggccgtggaggtccggtacaacttgctcgccatatatgggatggaaaattatatgccttgaaggttataaaaatgaacttacaaaaagaggaggttcttaaacaattcgtgcagtatcttaaaataaacaaggcatcaaaatgttcgaatgtcgtgtcttgcaaccattcattctatcacagaggagacgtatttcttgtattagactacatggaccggggatctttgatcgaagtgc

SEQ ID NO: 29317 - DNA, 304 bp, Gossypium hirsutum
  Clone ID: LIB3083-012-Q1-L1-E8
gttttttatatcctactcgcatattgaagacagtcgttggctgattttctataaatcggttctctttacttaactatggccaagaacgacatatctgaccaataaaatacaatgcaactccatgaagtatctatagccaattcaaccatacacactcaatctccacaacccttacaactactacaaccaagaagacaactagagacaacatgaatatgataataaatgattcatagatgatcatgtggaggatgaacatgtagatgaagctgaatagacggaatacttccatcaccataatctg

SEQ ID NO: 29318 - DNA, 299 bp, Gossypium hirsutum
  Clone ID: LIB3083-012-Q1-L1-F12
ctcttgccgcgaaacaagcatataacagttacgcgctctgaaataatgaaatagaatcacgttatttttttaatttttttaattctttttaaattttcacagggaattcttgaattaatttccaatccaggtttcgatcaacagattctctcaactcgtgatggtgttggattctaatgtaatgagtaacaagtagtgttatatgggctgcagacagaaaggaaaggaatgggtggttgttgctgctgttgctcttctagaggagttgaaataagtagtgcaccagcatattattatta

SEQ ID NO: 29319 - DNA, 170 bp, Gossypium hirsutum
  Clone ID: LIB3083-012-Q1-L1-G11
gttcaagatatggactctctgttggtgcaaattgtgtgtggctcgtgcgtattctgatgataatttgttatcccatcgcttaccctattggaaaggttctggatgctgtgcttggccatagtgatgctttgtttagacgggctcagttaaaagccctagtcttcattcac

SEQ ID NO: 29320 - DNA, 303 bp, Gossypium hirsutum
  Clone ID: LIB3083-012-Q1-L1-G12
atacttccgagccatatctaacaagcccttttcgatcaaggcatcaatcagagcattgtatgcaaactcattcgggctacttcctagttcttccatcttcttccaaaccataaaaaccagtcgaagaaatccccatctcccaaacttcctcataagcatcacatatgtgtccatccttggctgaaccccattcctaatcatcaaatcaaacaacttaaggatctctctaagcttctcaagagacccaaaaaaagcaatggtatgtaatcacatcaggtgcacaatcattctttagcatttgat

SEQ ID NO: 29321 - DNA, 277 bp, Gossypium hirsutum
  Clone ID: LIB3083-012-Q1-L1-G2
cagggttatttttttttttttttttttggcacaaccttaaaactttagtgaacattgaaaggttacctcttaaggggacaaaaagcaatccttcttaacaatatacttaaaacacccactcaaggtatatagccagtgaaagtacaaaaagatttcaaggaatgaaatacggagactagtttacaacaataaaaatatggctgatgaagtaaaatgaaattttgaggaacatgggggatcattgactgcgactgctgatttcttgtaatatggatct

SEQ ID NO: 29322 - DNA, 237 bp, Gossypium hirsutum
  Clone ID: LIB3083-012-Q1-L1-G7
gaagtgattgttactatgcacaatctgaaacccgaagctgtccttgaaatgcttgagagatctacaagccactctaccccaaaataagcaccaaacccagagacctaaacttaactataacccttatagacgaaaaaacctataaccgaacgctgacacccattcccgcaccctgttattgggcatcaaaacccgctacattagtaccctgatacgggaactgacccaccgagacta

SEQ ID NO: 29323 - DNA, 262 bp, Gossypium hirsutum
  Clone ID: LIB3083-012-Q1-L1-G9
tcgaatgttactaataagaaatggcaactgaacaggcaaggccttaaaatgaagacataaatatggatcaattcgaagatgacaataaattttaagaatatgaaatcgatggagagtgggatgacaaggaacaaagcaaggaagtgacacagcagtaggaagatgaatgggatgactatgatgtcagtgacgacttctcactgcaacttatgaaggaactctagaatcacaccaagaactgaaccagagttgtgcttctata

SEQ ID NO: 29324 - DNA, 275 bp, Gossypium hirsutum
  Clone ID: LIB3083-012-Q1-L1-H10
cggcacgagtttttgtttggatgcctttgtggctatctagtgatgtatggacaccattgtggctatcttatgaagtaaggacacccttgcggctttctatttttttatggacacctttgtggctatctagtgctcctgaatgtttttatagctactaagtcaaaggaggacatctaaagtgaagagtatgcctttgtggcgcagtctatgaaatgaccttgggataacaattcaaaggaaaagccaagcaggtgaactttgaatggaactgcagc

SEQ ID NO: 29325 - DNA, 382 bp, Gossypium hirsutum
  Clone ID: LIB3083-013-Q1-L1-C3
ctgatatttaacctaccttgctcttttctatgaaatccgcttcggtcaatacaaaatggggctacatttttccattattgatacatttccaacaattaaacttcctttagtacaaattttcttgctcagctttttttttcatatttttttttccttattgttcttttaatattttttatatttttttcttcttatatattattattcatattttcttttttttcttttatttttttttttcttttattttttttttttctattattttttttttttaatattttttttttttttttattctatttttatattttcaatttttttaattttttttatttttatttttataatttatttttattatttattttttttttctttt

SEQ ID NO: 29326 - DNA, 274 bp, Gossypium hirsutum
  Clone ID: LIB3083-013-Q1-L1-C7
gttggttgctgcacacttaaagtaggaaatgtggagtagattccaccaaataaattgaagtttgacttccttggtaaagattcgattcaatatgtgaacacagtggaggttgagcttcctgtctacaatgcaattggacagtttcacacttggaaaagcaaaagtgatgatctttttgacaagcttgatacaagtaaactaaatgcacattttaaggagctcatgccagggcttacatcaaaagtctttcgtacctacaatgcttccattacat

SEQ ID NO: 29327 - DNA, 305 bp, Gossypium hirsutum
  Clone ID: LIB3083-013-Q1-L1-E7
ggaaccttgtgagctgtatcattgtgtgcttgagagcagttcatttcttgaaaagatgaccgtccttgaacatacaattcctttctttctgccaatacgagaagtataaaatgatcttctttcttctaatgccatgagatttatagatcatattggagaattattgcaagcttatgttgacagactggaacaggttctgctcgttaaagaattttattgaaattaaatttgatagctttattattatctttcctaccacatttattaatttttcctttaagatttttatatcaattttctttatc

SEQ ID NO: 29328 - DNA, 217 bp, Gossypium hirsutum
  Clone ID: LIB3083-013-Q1-L1-F5
aggatgaccagtgaggtaaagatcattaaccaagacaaattcacacatatggcaactataggctataaacatgtacaagatgcaatatacgtagtgagtgaaagttgactttcacagaatgtgtttattaaacatacaaactttaaaaaaaacaaaataacaaaatggggtcagcatatacatatacagatatactcttgctctatcaagtccttta

SEQ ID NO: 29329 - DNA, 229 bp, Gossypium hirsutum
  Clone ID: LIB3083-013-Q1-L1-G3
gccgtatgcatcatgggttaagaacgagacactgcgattgtagattaaccgcgatcctggcgcaagaagaagtggatgagcttaaagataaaggcagagggatgggcagaatccaaccggtgaaatcaagcggaggggaggtggacttgatccaagggttcgatttcgcggagtggtttattaacactgttacagatagcgattttttagttattaattttgatttttt

SEQ ID NO: 29330 - DNA, 354 bp, Gossypium hirsutum
  unsure (1)..(354): unsure at all n locations
  Clone ID: LIB3083-014-Q1-L1-A10
tttttttttttttttttactctgaaatgaactcttgatataaataagaggaagaaataagtacccaaaatatcaattatttatatagtttgtacaaaaaagtaggctggctcttctccatatcaagcaatcacaatgtactttgcatgcaagctttgcatctaatttaaagttcttaaattacaaaccacagcgaattcggataaagaaccgagtacttggcccttctgatgatgtaaccttctgatgatgtaaaagccgtaacagcctacaaccattaagatcaaactccatttgtcagagggatgcacctcaaaaccacaagatgtgatgcttccatctacccngtggagtc

SEQ ID NO: 29331 - DNA, 304 bp, Gossypium hirsutum
  Clone ID: LIB3083-014-Q1-L1-A5
ctattcactatttttttttttttttttttaacataataagtgccagataatatatatgaatcgaataaacccaaccaaacatattccaaacaaaataaacaatacattccttcaaatacaaaaaaagagtgtcctcaaaaggtaaaaaaataataatgtctcaaagaatacaatataatggtaaagctactctccctcttcctcctaaattccttcatcagattaagctacaacttttttatattattttcccaacgcagcacggcccttacgagcctattagaatttttcttactttatgcct

SEQ ID NO: 29332 - DNA, 358 bp, Gossypium hirsutum
  unsure (1)..(358): unsure at all n locations
  Clone ID: LIB3083-014-Q1-L1-B10
gagtttcattttataatacgatgaccaanttaccttcttggtttctttttttgactgtggtgtctntttttgtttgtgggtttggaaaaaggataccaattctttcattttatgaagggtatagtcagttgtttggagattattatctagttctccacaganatngtaaagctgttcacttgtctttgaatgagaaaacacggtctggatttttgtctcaagacctttacttgcattgtttcttcagtgcttcaataaaattaccttctgattatactgcttgagttgtggttgctttctatatgttaaattgttattttttctaaaataaccaccattaaataaatttttaattctt

SEQ ID NO: 29333 - DNA, 391 bp, Gossypium hirsutum
  unsure (1)..(391): unsure at all n locations
  Clone ID: LIB3083-014-Q1-L1-C10
tcanatatgggagtatgtagcaccggtaaaaggagcttttatagtcgagtcttgtggacatgctcgaacggtggagcaactgtatattcaagtccactttgcaccgagttttggggaatggtcaggagagatattctattgcatactttgttgagccgagtcatgactgtcttgtcgaatgtttacccacttgcaagtccgaaaacaatcctcccaagtttccaccgatctattgtgcaacgtacctgagccaacgatacaaggacactcatgctgagttaagcgtatacgagaaacatcaaacttgaagtcctcctggattatgtctaggtataaggttaccttataattttcgtatcataggctcattatcaatttcaatgtgctaata

SEQ ID NO: 29334 - DNA, 237 bp, Gossypium hirsutum
  Clone ID: LIB3083-014-Q1-L1-C12
ccgccccaagttttttttttttttttttaaatttgcttttaaggacctgggggtccaaaaaaagattcattaactataccaaaaactaaagacctaaacttaaccactgtcgggatcttgtatccatgatcctcttcactacatcttttacaaaagaatcgaaacaagttaagcaacaacctttcattaagctcgcctgtccagctgccactctttcaatgtgcacacaatttgatg

SEQ ID NO: 29335 - DNA, 237 bp, Gossypium hirsutum
  Clone ID: LIB3083-014-Q1-L1-D8
tttttcgagatttttacacaaaaactatgtgcatataccaacgtagcgggtatatatttataaacgagcagtcaaaacttgaatacacaagacactgtgttgtacaaaatacccccttcaaaaaaaaaaccaaggagataagctctgtacactctctttgccattatttttcctttcattctgcggcacccagttctatgacagtgtatatacacgatcgcaaaatgggggaaatta

SEQ ID NO: 29336 - DNA, 336 bp, Gossypium hirsutum
  Clone ID: LIB3083-014-Q1-L1-E11
cttttaacaatgaccatttagccttcaacggtaaactctatctcatcttcgttatcggaaagattgttaatctcttcttcattcttgtctatttcctcctccgattctatttcaccattagggagtatcaccattgtgttgcgatttgggcgttggctcgctatgtgccctctcccttgacacttaaaacacttaatatcacgtgttcgggattgagtattttcaatggcccttcctttgctagattcggccacagacttgttggacttcatgggcaccacagtttcttttgattgattcgttgaaacattcttacttgcccccttgttccactta

SEQ ID NO: 29337 - DNA, 117 bp, Gossypium hirsutum
  Clone ID: LIB3083-014-Q1-L1-E4
catcactttttaaccgactactgattgacaaaaaaaaaactttgtatttgaaccctctattctgctaaactgtttaaacacacacatctcaccttctattgaaggaaaacccctcat

SEQ ID NO: 29338 - DNA, 321 bp, Gossypium hirsutum
  unsure (1)..(321): unsure at all n locations
  Clone ID: LIB3083-014-Q1-L1-E6
acagnggagcccgcgggctgcaagaagtattcaacaaagccaattttttattttaatacaaaaaaacataacaatcgtgtcgcttgtaaaaaccatctaagtccaccactcaacaaaatatataaagaactcactatcatcattgcataaaacgagtgacgaaacctcttcaatcaattattattttgttgcttagcttacacctcgtcctcttaatcctagagcggtgtcatcttcttcttcaattccttactcttactgatctaatcaacataccttgctacctgggaaccatgttccaatacatctcatgacatcata

SEQ ID NO: 29339 - DNA, 192 bp, Gossypium hirsutum
  unsure (1)..(192): unsure at all n locations
  Clone ID: LIB3083-014-Q1-L1-F10
aacttttgataacaacccacccccatcccaaccatgtagtgtcaattaagacgggtcgcattccacaaaattaaaccaccctaanacatcctaatcatcaaccaactaagatatacaatccagcgaatacctctgaacattcttctataaaatacctatcaaatgaaaataattccaaattacaagacaatc

SEQ ID NO: 29340 - DNA, 282 bp, Gossypium hirsutum
  Clone ID: LIB3083-014-Q1-L1-F11
gttgttttttcaatcttgattttccttttccttggctcggtagagcgtttcagttcaaagagccagccttgcacgtacggcaaatctaagatttgcaagcctgctctagccacagctgcattcagcaccatatctttcttgcttggtgccatcacttcagttgtttctggatttctcgggatgaaaatcgctacctatgcaaacgctagaaccaccctcgaggcaaggaagggagttggaaaggcatttataaccgcgtttagatctggtgctgtcatgggc

SEQ ID NO: 29341 - DNA, 212 bp, Gossypium hirsutum
  Clone ID: LIB3083-014-Q1-L1-F12
gtttttattttaatttacattcaacctttccattgcatgttctaatatttcaaatacacttgcctaccttccatcatattttaaatctcaaaaattgcacgactagcataccaccaactcccttcagtaccatatctaccttacttcttaaccttccttcaattgcatctacatttctttgtatgaaaatatcttcctatacaaacactata

SEQ ID NO: 29342 - DNA, 169 bp, Gossypium hirsutum
  unsure (1)..(169): unsure at all n locations
  Clone ID: LIB3083-014-Q1-L1-G8
aaattatatatattcttcattttcaangttggcgatgtggtaaccaaagcggatgctggttgtgggaagttcatttcgatcagcaccacatatatcctactactatgtacattggattcttgcatctgcagtttgagcatttttatttttactattacgaggcttcata

SEQ ID NO: 29343 - DNA, 213 bp, Gossypium hirsutum
  Clone ID: LIB3083-014-Q1-L1-H11
ttttaatttcaatcatccgctgatgaaactatcggcgatgtaattgagctcgatttgctttttttttcccgaatagtttaaacgcttccatttagattcattacgaaagcgatcttcaaagataaatcagatgaattatatgttgtattggtggttttggaatatgccatggtgatagcgatttgttcttctatggtatacttcccatttgct

SEQ ID NO: 29344 - DNA, 218 bp, Gossypium hirsutum
  unsure (1)..(218): unsure at all n locations
  Clone ID: LIB3083-014-Q1-L1-H2
ccatcggngcccttcccgggggtggataaaattgctgtgcgcgaggttcnnngggaaatccatgggcactttcttccaaacctgttgatcacaacagccacttccactcccatggcctccccttactctatatatcgccacctttcaatctctgcctcattcaaaagccaggtgaaagaactaccagaagaaaatatcatgttccatacttagcaaaa

SEQ ID NO: 29345 - DNA, 219 bp, Gossypium hirsutum
  Clone ID: LIB3083-014-Q1-L1-H5
tcgaattttttttttttttttttttttaacaacataacaggtctacgccaaataaaaaaactgaataaccatacctatattaattctcttaaaatttacagtaaaaaatatattggcactcaatttaactctgattctatacatcgattttttgcagcaatctaagcttctgtatattacacttgcacctgtatcaatctttgtatgttacttcaaaac

SEQ ID NO: 29346 - DNA, 286 bp, Gossypium hirsutum
  Clone ID: LIB3083-014-Q1-L1-H7
aatttatacttaattttaatcaaaaaaaaaaatgggggtcgttattttattacgaaggcatagactgctaccaaagtttatatattatactattccatatataaacatttagaaaaactatcacatgtaataaagaaaggttctttttattttcaaagtaccaaatcctaactcttgcaagcactcaacactatgctatattatattctaacataaaataactcaccacctataaattattttccaaacatttcaccacattaccatacagaagctaatactttta

SEQ ID NO: 29347 - DNA, 162 bp, Gossypium hirsutum
  Clone ID: LIB3083-015-Q1-L1-C11
tgaagtgaaagccactgctggtgacactcatcttgagggtgaggttttgattaccggatggggaaccaatttggtcaagaatttaaaaggaaggaccaggagggcctttatggttaacccaaaacctttaagaaggttaagacctgttggtaaaaggccaaa

SEQ ID NO: 29348 - DNA, 392 bp, Gossypium hirsutum
  unsure (1)..(392): unsure at all n locations
  Clone ID: LIB3083-015-Q1-L1-D10
ctgaagctttctgactggcaagattttgttggcattatgggctctttttattaggaatgcagcaataagtttcatacaagagaacaatgctggcaatgcagctgctgctttaatggctcgtcttgctcctaaagctaaggtttttcgagatgggaagtggtctgaagaagaggcctctattcttgttccaggtgatatcatcagcattaaactcggtgacattattccagcagatgctcgactcctcgatggtgatccactcanaatcgatcagtcttcattaactggtgagtctttttcggtaacgaaaggccctggtgacagtatttactcgggttctacatgcaaacaaggagagattgaagctgtcgtgatcgccaccggtgttcata

SEQ ID NO: 29349 - DNA, 438 bp, Gossypium hirsutum
  unsure (1)..(438): unsure at all n locations
  Clone ID: LIB3083-015-Q1-L1-D3
cttcaaggtcaagttccgaccacgttctttgggcttgcacatttgcaggctgtggaactagaaagcaaccaacttaatggtacattggtaatcggcacgagttttaccaaccaactacaactcgtagatttgcagaacaataagatttcggaattcaatgatgccggatacaattttgaaatagtacttgtagataacccggtgtgtatggagactggaaaaaccgacaagtattgccaactaccttcacgaaagtccttgtattcaacacctcaaaagaactgtgtatcgggttcatgtcgttcgagtcaaatcacgagcccaacatgtacatgtgcatatccatataccggaacactacttgttagaggctataccttcacggagataggaaacacagctncgtatctttctcttgagcaaagcttgatgaagttc

SEQ ID NO: 29350 - DNA, 431 bp, Gossypium hirsutum
  Clone ID: LIB3083-015-Q1-L1-D5
aacacgtcctacagggtacattttcacttagctaaaaattacttttttcttcttttttcttgcagttgaaaattagaattttgtagatttatttttatttgtgtttgagatagacaagtgatacaaactcgcctcggtgatgattcgagttgtttgttgcccgatcgttaaaatgaagaagtatcgttcttgaacagaataatggttgaatttggctaagtaagactttaaacaaaggttggctagatggttcagaggttataattgtgttggggatggtttggttaagtataatgatgatggaaaaatggttaaatgaatgaggattatggaaattcggctaatcaaagaaacaagataaataagttggataatgtggatgggaaaacgatcttaagcccaaggaagaaccaacactatatcaagtgttg

SEQ ID NO: 29351 - DNA, 244 bp, Gossypium hirsutum
  Clone ID: LIB3083-015-Q1-L1-F2
cagaatcacttttctttcactcttcctactctgggccgggttttacatactatcgatccctttaatcccaaattcaacattcttaaccctgcctctaatacccacatatacttaccttacacctaacataatcccatatttaaccatttccatacttatatccaacaccttctatacatcaaatttgataatgaacaacacttatgtccactcaatgaccgcaacatgccaattttctcacaat

SEQ ID NO: 29352 - DNA, 239 bp, Gossypium hirsutum
  Clone ID: LIB3083-015-Q1-L1-F8
tgttcgagcttggaattccttctgtcaaacaccgcttttattggggggcatctcacttgagtcaggtttcccaaagatgaacggtcaaatccatggcttggatgtgcatccttctaggtcaactctcgggaccataaaagctttgcttaaaccttctacaagacgagtttcccttgctgaaacaaagaatgatgcccataccgatcaatggctccagaatttcaataacatagtatcca

SEQ ID NO: 29353 - DNA, 470 bp, Gossypium hirsutum
  Clone ID: LIB3083-015-Q1-L1-G1
agcagtttggttgggtttttttgttttggttttgcttagtgtgaacagtgaagggtcgaggcacggcggtgaactgagccatagtgatgttttacggcagcaagaagcggacagggtggtggagcttccaggacaaccggcggtggagttcaagcaatatgcagggtacgtgacggtgaacgagagtcatggtcgagccctgttttattggttctttgaagccaccagcaaacctgagaaaaagcccctcttactatggctcaatggaggtcctggatgttcatccattggatatggagaagcagaggagttgggacctttcttcactcagaaagatgaacaaaccctaaagcttaatccacataggtgggataaagctgccaacttattggttcttgaatctccggttggtgttgggttttcttataccaacacaagcagtgatatccatcaactgggtgataaaatca

SEQ ID NO: 29354 - DNA, 498 bp, Gossypium hirsutum
  Clone ID: LIB3083-015-Q1-L1-G7
tgagcatttgacttgaacctcacaggatctctgatcgagtggtagagccagaaataaaatcataggtcgaagcatttagaacatcagtgtagcatatcaatattgacatgttccgtttatatatgacatgggactcgattactacaaatgtatacacgacgaactgaaacgcaataatgctgacgactcgggtttgagaagagaggatgaatgggtactcttatgataatgcagcagatgggtgcaataaaaagggagatattacggatgaagtcataggagacattgcgaaagaagcatttatgacgaacgaatgtcagcctaaccttcaggaacggctactcgtcgctactgtcgagacgagttcacccactgtgactctggccaccatgtatctactggtcaacccataggctttgcaacacttatcagcggatcatgaagaaattgtgatgaacagagaatatgccatttctggactagtatggtaggaataca

SEQ ID NO: 29355 - DNA, 345 bp, Gossypium hirsutum
  Clone ID: LIB3083-015-Q1-L2-B5
ggattttcaagtctggttcgcttgagagttcatcggacttgctctctattgcacccaacataaacgtctgaggcatgtacatctgtggatggcactaaccacgaagggtggcccaatacagcagaagtttgctactcatgcttcaaatgttcgagcttataattgcaagcactgtcaatgcgttccgtccggtacttactggaacaaacacaagtgtccattgtacatatataaagtaaaccacattgtcaaacccaaatgcccttgaaaatgaaatctattctaagttccggatttaatcaatcttaaatatctaagactaataagccatatatatatatatat

SEQ ID NO: 29356 - DNA, 223 bp, Gossypium hirsutum
  Clone ID: LIB3083-015-Q1-L2-D3
aacaaattcaattaccaattatgaagctagacaccaacagacgagaagggtccactccagactgggaagctcccatgaaactagaagacacatttaaccctgacaaacgcgatcaagcttgcacacacaacaaaaaagcatccaatgcaaaaaaaagcaatccagatttgcaaaccaagcaatgggaccaccacacgagagatcatatgtaaagaagaacaca

SEQ ID NO: 29357 - DNA, 335 bp, Gossypium hirsutum
  Clone ID: LIB3083-015-Q1-L2-D6
ctgtaccgcatatccctttagcagatggacaacgtggggaagagggatgtttgcagtagtaggtgcgcacatgttacggcagtaatcgctgaagattcgtcctgcaatataggtgttacaaagttactcatcagcagcggaacagatgacagcgagagaggcattgaaatctgctcttgatgacgaaatgtcagctgatccgaaagactttttaatgagtgaagaacttgtagaatatcacggggcatacaagatatccacggggctcttggagaaaaatagacctgagagggttctcgatactccaagtacaaaggctggatttgctgggataa

SEQ ID NO: 29358 - DNA, 250 bp, Gossypium hirsutum
  Clone ID: LIB3083-015-Q1-L2-E10
agatctctttaacagaaaacctattctcttaaccggactgatatccaaccacagaagagcaagactagtgttaatacacaatattggacaagacactaatttattcaatgaagtgtctgaatcagatggtaacaaatccttatgtatccttccacttactatactacttctcttatcagatcttccgtacctatcacttataatagactcttccctcaaatcactcaactactgttttatagggaaattc

SEQ ID NO: 29359 - DNA, 516 bp, Gossypium hirsutum
  Clone ID: LIB3083-015-Q1-L2-E7
cgaacaccataaagtagcaccatccccccacaaaaaaagagaaaaaaaatactgaccccattttcccaaaggaaattcgaacaagggtttgggaaactatgagaacttcatgggcggattctgtgtcaaattctgcagctgaaattgcaatttcggacaaaaattcattaccttgtcctactcgttccacttatgtccctccccaccttcgtagcggttcaatttccgacctgtcaggtccggttaccgggaccaatggcgggtcccgttggaccggcagtgatggtggagggacaaagcctgaactcaggcgtcaaggacaggcgaatagttatgctacagccggacgagatgccgctgccggtggtggtggtggtggtggtcggaataatagaagtggaggttgggataggagagaaagggaagtaaacccatttggtaatgatgataaaatttatgatataaaacaaaattttagtgaacaagaagattccggtatcaattttgatgcatacg

SEQ ID NO: 29360 - DNA, 388 bp, Gossypium hirsutum
  Clone ID: LIB3083-015-Q1-L2-E9
gacgtaattcagctacgagcgtctagaggttctctagtctgcagattagccagcatgactcttacatcggcacaggactatcgcaacgctgatagacaacagagacacagtgtaaatatacatacataataggtcgacaaacgattctaattcaatggaactactgaatcaataatgaatatagccggattatttgtcgcattttctaacgccatactcttatgataccattcatagctacgtttctaatgtactctctccttatatcactcaactactgtccaatagtgtacatcaatcagaggtggaatgctgtaacctgactgcatacaagatagtcggagaatatacatagtacgcttgcattgatgatacatcgtgctttgga

SEQ ID NO: 29361 - DNA, 355 bp, Gossypium hirsutum
  Clone ID: LIB3083-015-Q1-L2-F10
cgtttttcgcaagcatctagaaccgagacgggatgtccaatcgtgggggtggtattcaagctaactgtggatgcaacatagggccgacgctgactgacgacctcactaacatcatccaatatgcacgattgacctagttcgagatcctctttatgctgatactgatcatcgctattatcatcactaaagatctaacgtcctgaaccgaatacatgcaacatgctactacaaatctgaccattctaaattggctgccgcactaataatgggaagtggatgctaaacgaattatgtcctgcatcatttcattcttcatgattatcttgactgctcatacatttcatatttcacttac

SEQ ID NO: 29362 - DNA, 300 bp, Gossypium hirsutum
  Clone ID: LIB3083-015-Q1-L2-F12
ggtgccgctgctgattatgttatcagctcgatcgaatctgacacctgttatgttcaactgcaccgatggggtgctcaaaaaagaaatgtataatttaatctatcttttgaacaagattcaaagatcttgcccctctcttggagaccatggagaaccaagtgcatatacaactatttgaggactcattacctactgaatgacgccatcttgctgtcagagttcatgcaagtctcatgtgctctaaagcattatctgtaaaaattttttaccctaagtatcatgaattgttacccggagacc

SEQ ID NO: 29363 - DNA, 361 bp, Gossypium hirsutum
  Clone ID: LIB3083-015-Q1-L2-F4
accgaataattttccagattcgaaagcgaggccaaacccgaggccaatgtgaaacttaccaaggaagagggccacgcacaacccaaatccaccgagcactacacatacaaagaaagagaaaccccaactcacacaaccagtgaacgaacctaaaactatacacacaatgtacgaacctatgaacaaacccccaacaacgaataaaccagaaaagaaagataaccttgaacccaaaacacccacgaatgaaccttctataaaacccaccaagaagtctccaaagaaaaaaaacctattcccaaatacacaaacactcaaagacacgacaaaaataaagccaccaattctaaaataccccaat

SEQ ID NO: 29364 - DNA, 296 bp, Gossypium hirsutum
  Clone ID: LIB3083-015-Q1-L2-F6
aaatggcgagtgccccaaattacaggaaatgaaagagcaccaacaataccaggaaaaaaaaccccaggttcccaaacagggaaaacctcaagagcacgagaaacaccaagacgaatattcggaaataccccagtaccaaggaaaagaagataagagtaagaaacatatagatgaaaagtgccacgaagtacacgaatcgaaagagcaccaagagtaccagaaagaaaaacccgattttcccaaaaggggaaaacctaaagggcgccagaaaaataaagccgcatattccaaaatac

SEQ ID NO: 29365 - DNA, 381 bp, Gossypium hirsutum
  Clone ID: LIB3083-015-Q1-L2-F9
tcggaattcccgggtcgacccactcgtccgttcatgcgttcgtcaactagcggtttatctcgcgcgggagacgtatatggctgggtggggggtcgcagcggcggtggctacaccggtgacgcctactgaggggacggttatcgcgatccacagcctggaggagtggagcatccagatcgaggaggccatcagcgccaataagctggtggtgattgacttcactgcatcatggtgtcctccgtgccgcgccatggctccaatctttgctgatatggccaataactccccaaatgttgttttcctgaaagttgatgtcgatcaaatgaagaccattgctgaacaattcagcgtagaggccatgccaacattcctgttcatgat

SEQ ID NO: 29366 - DNA, 435 bp, Gossypium hirsutum
  Clone ID: LIB3083-015-Q1-L2-G6
ctcaaaacaggtagacattttcgccaccagagagagaagaggggccgatctcctatgatgcagccaactttaactccgaggcatgccagccatatgtctcgtcagcaacggataattctgaacaacctcaaactgacagtgcagttaattccaagcggaaagagacctctaaaaaacgaactgacaccgtaaccactctagcgatcattgcacatacgtaaatagagagccacatgtctttctaacaaggcctgaaactgggaaggaacaacccaaacttctatgaaagaatgcttctggacatttggaaacagaggccaaacaatgtgattcgggcagaacggactagtaatcctgcacgtattgctgctcaaaccaaatttgacgcgttcagtttaacagccaattcccgtagatgaacccattcatcctacc

SEQ ID NO: 29367 - DNA, 516 bp, Gossypium hirsutum
  Clone ID: LIB3083-015-Q1-L2-G7
atttgattgaacctcacagatcctgatgagttataaaccagagaaaaatataggtgaagatttaaacatcatgtagcaatcaatcatgacatttcctttatatatccatgggaccgattactacatatgtatacagaagaaatgaaaagcaataaagctgacgacttgggatttagaagagaggatgaatgggtactcttatgataattcagcagatggttgcaataaaaagggagataatacggatgagagtaatatgagacattgcgaaagaagcatatttgacgaacgaattcgacgccttaccttcaggatgggctactcctacgctactgtcgagacgagatcacgcactgtcactttgggcaccatgtatctactggacaatccatcggctttgcaacacttaacagaggagcatgaggaaattgtaatgaacagagaatatgccaattctggactagtatggtaggaatacatatacatgacgttcactagatacgtgattaatgaaac

SEQ ID NO: 29368 - DNA, 145 bp, Gossypium hirsutum
  Clone ID: LIB3083-015-Q1-L2-G9
attccacggactagacgcgcacgcgtccgtctgcacttattttctacatcgccttcatacacatattatccatctgtcattaggccgggattaccaaggtcagcgttgtggatctagagtttaacatactcattatctaacatga

SEQ ID NO: 29369 - DNA, 366 bp, Gossypium hirsutum
  Clone ID: LIB3083-016-Q1-L1-B2
ctgcaagtacctacaagtatttgatcatatcgctctgcgggagaaaaggtgggaaggtagatgaagccgttaaaatcttccaagaaatgatccgttctggatacacccccgacaaagagttacttgaaatgtatcttggttgtttatgtgaagttggcaagctattggaagctagaaactgcacagaatctctcagcaagattggattctcagctccactaagttattcgctgtatattagggcactttgtcgagctgagagactcaaagaagcattggaagtattagatgatgtcaggacagaacaatcctcattggatcaacatgtttatggaagccttgtccatgcactactacgaaagggac

SEQ ID NO: 29370 - DNA, 249 bp, Gossypium hirsutum
  Clone ID: LIB3083-017-Q1-L1-A1
gcaacctggttcagcacaaaatggtgaccaattaacccggttggcaccggaaggttttcggccttttaaggttgtgaaccatttgcattggcttattatcccaatttcttaagggacttccgtttcaattggtctggttaggaagtccaagaatgcactggtgtcaaacttcttatttctcgaaccaaatgtgtgggtttgccaaaccaggctttattataaccaaaaaactgcctaggttaattggcc

SEQ ID NO: 29371 - DNA, 221 bp, Gossypium hirsutum
  Clone ID: LIB3083-017-Q1-L1-A6
ctaagctctagttttttttttttttcaaacgggcaattgagatgcaaatcttcgttgagactctgaccgtctggaccatcacattcgaagtcactagttaccacacgttcaacaaccttaacgcgataatccaagactagtgaaggatccgaccatactaacaacgcatgatctaattctgataacagctctaatattgcccgaccttggccgattacaac

SEQ ID NO: 29372 - DNA, 356 bp, Gossypium hirsutum
  Clone ID: LIB3083-017-Q1-L1-A8
atttgccgttacaataagtgcaatcttttacagtgctgggaactattacctgtggtgctacactttccaaagtggcagaacgacaacttacaccgtaagataagacgaagttagaactctatgggatggtcactaaccacattgatttggctgctatacatttagtaaacatcaacaatgacgaatcgcctgatgcttatcaagatactaatacttcatcatgaactcagcctttattttcatcataagagtctattatatatccatagtacatcaaccaacgtttatcaaaggaatgatataaagcacaatatcgatattctacaacatactctaccaacgattcggattacttt

SEQ ID NO: 29373 - DNA, 290 bp, Gossypium hirsutum
  Clone ID: LIB3083-017-Q1-L1-B1
tagctcctccttttctgtttcattattactcaagttaatacatgtgacaggggaaaatctaatttgtcactataatactttcaaatctcttcttacaaattccatatagactatgctatcaaatacacacatcacattaactcaacaacctgtatgcatcatctatctacactacaatataacatccactcttgtctcaaaattgcatgatcatagactgatacatatactcaaattaagccctgaattaaccagttccatacatacaattgttttttctcaaaataaaa

SEQ ID NO: 29374 - DNA, 248 bp, Gossypium hirsutum
  Clone ID: LIB3083-017-Q1-L1-B3
atcaaatcgtgtacagcacatgatactacctaggaaagggcacgaggtggctttcaatggagatctaagctgctggattcatgaccgtatcctaagccgaaatggatgtagcctgtgattcgctcacacgaatgcttcactgtgatcgaacttagccatgctagtcaacctgtctctgctaacactcatgctctgaattccgctgataatgcttctataagaaccagagctcctgctctatactaact

SEQ ID NO: 29375 - DNA, 201 bp, Gossypium hirsutum
  Clone ID: LIB3083-017-Q1-L1-B6
tatctaaattgaaccatatgaaacaagttcagtgccccggtgacaaccaatccagaacctaatcgaaattatggcacctggtgaaacctcctaaatagcttaaagctgaaaacccctacctagtattaccttttcaaattttaagcatgattgccacgttttaacatctggatccattatttcaacagccggtgaattcaa

SEQ ID NO: 29376 - DNA, 125 bp, Gossypium hirsutum
  Clone ID: LIB3083-017-Q1-L1-B7
ctttatcattgacaaatatcaaccgctaatgggaaccaggtaccatccaattagtcacgaatcttcattattgaccatcttgccatatgccgaaatggataaagctaataaattcatatctggaa

SEQ ID NO: 29377 - DNA, 330 bp, Gossypium hirsutum
  Clone ID: LIB3083-017-Q1-L1-B8
gtttctttttttttcatattcattttttataggactgaggaaacaattatcatgtgatagataaagcttcaaatactggagaattagccgtacttatattattgcatcactaacatgaatgcgatagcatattaattcagtcagctacctatgaagaaacaaacctttaattcacacttcataacggcatttactgtaacacaacatatcaaaaccaaaatcatttgaaccaaccatgactgtcaatatgcaacctgcaatcttttccaccgaggccaccatccgaatccggtctacattcacctagacgcctatacagtattctatcac

SEQ ID NO: 29378 - DNA, 125 bp, Gossypium hirsutum
  Clone ID: LIB3083-017-Q1-L1-C6
attaatattttctccatcaccactccttagagggaccatttcaaagtgaatcatgtcgaggaagatattacttcatgaggaaattaaccaaacgtatcatgaggaggctcattacgattcttaca

SEQ ID NO: 29379 - DNA, 339 bp, Gossypium hirsutum
  Clone ID: LIB3083-017-Q1-L1-D5
ctacaacttttcgagacatcagcctagactgacctagaggacaatgtgccattagcagcaccctcttatgagcctggacaactcatataatggtcttattacaaagctgctatagccgaacttggagccacctcattgtatctttacatcaccgagtatactgtcatgactacttatcactctaaaaccacatgtacaaccgttagcattcaatgtattacttgctcttctggcttcatgatctatgctctcgtttactctactgaccgcattgcacgaggtcttactaaccatgctgttaccttatcatttttaatagcaaataaactttcacttaca

SEQ ID NO: 29380 - DNA, 212 bp, Gossypium hirsutum
  Clone ID: LIB3083-017-Q1-L1-D6
ctataaatttctctctcgctatctcgcctaggacatgtctgcacttttcattgcgctaggattatcaacaacttcgagccttcaattaagctaaatctctgaactacaaactccacccccttaaaccccgttattgcaacaggcaaatctcatacacaaatcctacttgttaacaagctaactctattccatactcaccacttcaaactctc

SEQ ID NO: 29381 - DNA, 390 bp, Gossypium hirsutum
  Clone ID: LIB3083-017-Q1-L1-D7
gggattatttgaggtgtgtttttctgggaacgtgtctgtggagttgaatgctaacaagaagagattgaagttagtctatttaagttgaatgctaacaagaagagattgaagttagtctatttaagtgaatgcttcaagttgaactccgcaaattgtgaaagaaagaggtttcttgagttcatccttttcatttgtaggttgtatcgtttaataatagagataagagatgggttgaaatgagtaagcccatagtggtgagaaataaaaggcaaagcccactccttgggttgtcgtctacttgggattcgaatcaatttgactaggaacggatcacagaaactgagaagtgagacacccacccaatcaaccttgtgaaaattgcgacacccc

SEQ ID NO: 29382 - DNA, 337 bp, Gossypium hirsutum
  Clone ID: LIB3083-017-Q1-L1-E3
gtaatgagcttgcatttgtcaaaaaacattttccgctggctttaagccggcgatcttcagttcccgtacccgaatccaattagtgtgggtacactaatgctcgcaagagtacactgtttaatcaactacttgcaactattttaatttcacaggaccaattgacgtgctcaaattgatccatcactatgaaatgatccacatgataatcagaagtgcttgcatacttactgacactaatcgctacatacgtacgttgactcaagccacaagggctgcattcagtgatacattaggacagatatacaactggattgttttactgcatgtgagcgtcatc

SEQ ID NO: 29383 - DNA, 295 bp, Gossypium hirsutum
  Clone ID: LIB3083-017-Q1-L1-E5
ggttatacttttccactggtaattcatcctatgttcaggtagctactcatccgaaacttgccaagcatgctggtgctttctgtgaccacccacatcatggtgttcttagctttgctaatcagcttgccggggctcacgtgcttctgacccgattgagattgattttgagtcctgactatccatataatgaaatattgagttcgtttcataactaatccagcatacttatattctcattccgtccagttctcactagctctaatatgtccatcaggagtgctgattcatctaaacc

SEQ ID NO: 29384 - DNA, 270 bp, Gossypium hirsutum
  Clone ID: LIB3083-017-Q1-L1-E6
attccacatttttctaactctgtcaagcttagctatgtgaagcttgtctaccaatatctcgccaatcatattcttacacttactctcatacctgtcatggctggcgctcttatagagattcttcggttacgccctgctttcatagaacctctttggaattcccttcattccgatctcagaaacatctcatgctcttgattcaacattatatcttgatcctctcactacttcatgtatacacctataatcacataccttgttgattattca

SEQ ID NO: 29385 - DNA, 297 bp, Gossypium hirsutum
  Clone ID: LIB3083-017-Q1-L1-F1
ctagccgctagacctatattctacatccttatatgtacacgctggccggggacaaatagttgaattgccattggatcgaacccgtgatcctgtgatacggtatgaaactaatcaatctagcttttgaattcgaacctggtaacatacatcgctatgtaattgaatcatgtcaagttcctctaacatgcattcaggataatggccaacacatcaatagactaatatagcagaacctgcaacaatagcaaccactggtagttgagaacttaacgctgggtacttttatcggaccactta

SEQ ID NO: 29386 - DNA, 428 bp, Gossypium hirsutum
  Clone ID: LIB3083-017-Q1-L1-F3
tgcagggatggattccctaagcgatagagcgtcaatgatgagggaagctctccagaagagccaaaccattacggacaacgtcgtctccatcctcggctccttcgacagccgcctctccgccctcgaaaccgccatgcgacctactcagattagaactcatgctataaggaaagctcatgagaatatagacaagtctttgaagtctgcggaagttattttggcacaatttgatctatctcgtcaggcggaggctaaaatacttaagggtccccatgaggatctagaaggttatctgggagcaattgatcagctaagaagcaacattcgcttttttagcagcaacaagaactttaagaatagcgagggggtgattaaccattctaacactttacttgctaaagctatttcaaagctagaggatgagttta

SEQ ID NO: 29387 - DNA, 347 bp, Gossypium hirsutum
  Clone ID: LIB3083-017-Q1-L1-F5
gtcaaagccatttttttcatcaaatttaggaagaaacgctgtcaatcatccttgctagacctattgtacttcatatggctttcaactagttgcccttcaacaagtgcttacatcacctacaaactcgcctgcaacctcattaccttctacactattctcattgagaatctcatttagctatcttgacatagtttgtctagtctgcttaaactattttggcacaatctgatctatcttgttacgcggatgcttaaactcttaacggttcccatctggatctataacgttatctctgagccatttatcatcttataatcatcatttgcttttttagcatcaactttaac

SEQ ID NO: 29388 - DNA, 177 bp, Gossypium hirsutum
  Clone ID: LIB3083-018-Q1-L1-A5
attttaagttctaataggggtgatgttttacgggcttgggaagtattatgagtgaaggaactctttcgagagtgcactaacaaagcttagagcaagtgtggagaggaagtcagtacttcttaggggttgacttgaaccatattgtcttggctagtgttcaattattcaagattgact

SEQ ID NO: 29389 - DNA, 342 bp, Gossypium hirsutum
  Clone ID: LIB3083-018-Q1-L1-A6
atttgaagttttaataggggtgatgttttacatgcttgggaggtatgatgagtgaaggaagtcttttgagagtgcagttacaaatcttagagcaagtgttgagaggaagtcagacttcttaggggttgtcttgatccatatgggctttgcttgtgtccaattattcaatattgactaggctgtctaattgttagaagaagcacgatttatactataacaataatgcagtcgatgttatcaagattctctgtgagtatacattaatcttgtaccaacttatgatgatatgttaacggtctaatattcaatttagatattgtagattgttctaaaattactaat

SEQ ID NO: 29390 - DNA, 299 bp, Gossypium hirsutum
  Clone ID: LIB3083-018-Q1-L1-B1
gaaactttgttttctactgcacatcagatattgcctccggaacttgtgaaaatactcttacaagatgtactttctcacatattacagtagaccgtcaccgctttatttggacactcgattaacatgtataatgtcaatgctattatagctattgatgtgcatatttccttgtctgaatctctagcggatatacctattacctgatttatctgaacgtgatacactatcaattgaaaaatgtacttgcttagtcaaggcacatggttaattcactttactgcaatcatccacagaatttt

SEQ ID NO: 29391 - DNA, 283 bp, Gossypium hirsutum
  Clone ID: LIB3083-018-Q1-L1-C4
tagattgagtgtttttatgatgtctattattacctgtgtcggggcgattatgcaagctgctatgctttgaatcttgttaaatactttaaatggtttactgtatgttatgcttattcatgttttatatgtgtttgtattgaaacttgatatttttgttgtctgtatatggaagtaaatttttaatgctactttttaattcccaacatttataatttattcatattttttatatactctttgtttttactatttaactgttctattataactgtttatttttttt

SEQ ID NO: 29392 - DNA, 181 bp, Gossypium hirsutum
  Clone ID: LIB3083-018-Q1-L1-C5
atttagtgtttttatgatgtctattattacctggaactggacaattattcaagctgctaggctattaaactagataaacactcaaaatggattactgcatgtcatacttattcatgttaaatatgtgtatgcgtttaatcttgatatctatgtagattttatcttaattaaattattaatt

SEQ ID NO: 29393 - DNA, 299 bp, Gossypium hirsutum
  Clone ID: LIB3083-018-Q1-L1-C6
gtctcacgagatagatatttttccatttcttcaaaagcttcactacaaggtgtcatgttaagcataaagatttgctgcgcctatcctggaactcggtaacaaacttgctcgtagaaatcaaagcaagggaccatattttgctctacatcttctaatcgataaggatgtatgggttagaactggttgtcttccaggctttactaactaatataattatatagtccacaatgaaacgagaaggcacccttaatattttactgcaaaatcaaaccttatttaccattatagaaaacttttat

SEQ ID NO: 29394 - DNA, 288 bp, Gossypium hirsutum
  Clone ID: LIB3083-018-Q1-L1-D5
ataactgcgattctttctaaaatccacatttaattttacactctcccattaattataagaccatgtattactttaaaatacctatcgatttttatttaacattacactctccattattctatatacacaaaaatatacataacatttatcataaattaaatatttatacctttttcattttaacattctaaactcttactatatatattatacacaaaccatattttactcaatcataattaatattattttatataattttcatattactataaattatattattta

SEQ ID NO: 29395 - DNA, 147 bp, Gossypium hirsutum
  Clone ID: LIB3083-018-Q1-L1-E5
aaatcatctttataccttctatacaccttctgggtacagttatctagttaaatggccatgtcaatctcaacctctacagtgctataaaataaaactactcaatttattttatcaatgctcattcttatagttcctaacctattatac

SEQ ID NO: 29396 - DNA, 278 bp, Gossypium hirsutum
  Clone ID: LIB3083-018-Q1-L1-E6
tttaaaaaaaataataatcaccgtaattgtccaattcctaatgttcataaccttcatcattatcatctacaacaccatcttcatattactaatacttctaaaccaaatcattcatatcactatccacttccataaactccaattcatccattcattcacctatataccaattcaaaaattccttcctacttaacataacttataatttatcacaaacactccttaacatatctttaatccacttctaattccccattaatcttaatcacattaataac

SEQ ID NO: 29397 - DNA, 263 bp, Gossypium hirsutum
  Clone ID: LIB3083-018-Q1-L1-F4
tagaacagtggatccccctactgcgaggaattctcactaggattaaccttaacacacacccacacaaatccgacaggagaattccaatggcccaaacacctatattataaagcaaacaccctatatcaaataccactctactctaacctaaacaatctcacctaaactcaatcccacaacattatcttcaccaatcaacaacattactatctctattactactactacttactatataacactataaaattataataattatt

SEQ ID NO: 29398 - DNA, 224 bp, Gossypium hirsutum
  Clone ID: LIB3083-018-Q1-L1-F5
catttaccttttacacacactacacacatatccgagaatgagatattccatatgcccaaacacctatattataaagtaaatcttttatatcatataccacactgctctaacctaaccaagctcaacactactcaatcccactacattatcttcacccatcaacatccttacaaaatctatcactacaactacttattatacaacactacatatttataaatatt

SEQ ID NO: 29399 - DNA, 347 bp, Gossypium hirsutum
  Clone ID: LIB3083-018-Q1-L1-G1
ctaaaacatttatagatttcccaatcctcgtactaattgcggaatggtgtaatccatttatgaatatgaagtacatgatgattataattgatgattataactctaccaactctcattaacttctctcatcttcttcttcatctatacattaaattacacaaacttaatcatcttcaatttcatgtaatactgacttattgattcatttacatcgcactgtttcacaacttaataattatcctctgatatccacattcacctatttataacttaaattaacttacaaattataattaacgttattcctgacgttaatcattaccttctaaacattaattctcttattc

SEQ ID NO: 29400 - DNA, 254 bp, Gossypium hirsutum
  Clone ID: LIB3083-018-Q1-L1-H1
tttacctcttttcctactagtctttgactctctccaactgaacccgtacatgcacatgaaggcacatctctcactctacttaatcgccaacatccataaccgtttacccattaatcatcttctatacttgcgatccttttccaacctttggctatcctttatcgactatccctatttcatcaatcttcaccttcgtcactccctcgactccctcactaaccacaccctcatactcaaaaacaccgatcttcaca

SEQ ID NO: 29401 - DNA, 233 bp, Gossypium hirsutum
  Clone ID: LIB3083-018-Q1-L1-H4
cttttctctttaaacccaacactggcttctaggtctactgtctctttcaacttatttaacatgatctactacttccatactatcagattgaagagttataagacaatgctaataacacaccgtgaattacaacatgcaccttgaaaaaatttcttccagccaaaattgactaacttacacttacataaatcactgacattagcactaactattacacaacaatgatttactct

SEQ ID NO: 29402 - DNA, 277 bp, Gossypium hirsutum
  Clone ID: LIB3083-018-Q1-L1-H5
ctttttctttaaacccaacactagcttctaaggctactgtgtctatcaacttgttcaacatgatcgactactccctcactataagactgaagatttataagacaattcatataacatacctttaattacaacatgcacttattaacactttctttcagccaaaattgactaacttacactctatttaatcatattcaatagcactaactcttacagaacatttttttcactcttatcatcttataaattccatcttcaaacccttcaccattttttt

SEQ ID NO: 29403 - DNA, 326 bp, Gossypium hirsutum
  Clone ID: LIB3083-018-Q1-L1-H6
tttacctctattcctaccagtttttgactctatccaactgaaccggaacattcacataaaggcacatctttcactccacttaatcgccaacatcctcaaccgtctacccattaaacatcttctatactttcgatccttttccaacctttgtcaatctttgatcagcgatcccgatttcatcaatactcaccttcaccactccctcgacataccgcactaaccacaccctcattctcaaaaacaccaatcttcacaccttctatctcaccttcctcctacctttcaacaagctacaacacccttacattagctacaaccatgcactc

SEQ ID NO: 29404 - DNA, 287 bp, Gossypium hirsutum
  unsure (1)..(287): unsure at all n locations
  Clone ID: LIB3083-020-Q1-L1-A2
cacgagggatccttttctctgcttttgattccanactgggggaggcttaaaaaccggtgctgttcaaaaccattaaaatcaaaatcccaacttacatcacatttcatccaaatctgaaatgcccaaatcaaattcatccaattccttctactatgaggatgttaaagcacctaatatatttgaaagagcaaaggaagagattcgggctgtgattcatgttgggaaaatacatccttttggtaaggaaactcattggaagcgagatgatattaaaaaaaacaccccat

SEQ ID NO: 29405 - DNA, 502 bp, Gossypium hirsutum
  unsure (1)..(502): unsure at all n locations
  Clone ID: LIB3083-020-Q1-L1-C4
tagaacgtggtggatcgccccgggactgacatgaattacggcaccgagctatatattatgtgttgaacccctggannaaaaagggaaaggggatggggcgcttgggcagggtggttcgtttgtctgaggggttgctttgagtaaaatcagatgccaggaggggagccggatgagctgnngtcgtcagtcagggcttcttanngggccttttattatatanctttgaanaatttctttaaaagcttaacccttaatctaaatctaaggctataggtaagggactgccgggtgctgggtgctatgaagagactgctcttgctttttgggcttgtgaatgagaatgcttgcataaatggcagccatagtcatgcatgcgctttggttggttaccagattgagactatagctatagtgagtcaactagcctcttcgggagccctcaatcagttttgaacactgattcgaaactctttcagctaccataccccataccagtcttttg

SEQ ID NO: 29406 - DNA, 355 bp, Gossypium hirsutum
  Clone ID: LIB3083-020-Q1-L1-D7
gtcagccaagacaaatacttatattgccactgctgtttgcttgtgggatgcaggagagtatgtccaaaatttatcatgatattcatgtgaatctagcaacacttggggtgactgtagctaggcatagtaagaaaccccgagtctatatcggctgcgtgaggtcggatcctgtgctcgctcgaaagggagcgaaataccaagaacctgagtactggaaaatgggtgaggttgggaacaaatatttgcgacatgctactggacaactgtatgctatatccaaagattcggctacttacatatccatagatcagcatgtactgcatcaatatgctaaagaagaggtttatttgcgagc

SEQ ID NO: 29407 - DNA, 299 bp, Gossypium hirsutum
  unsure (1)..(299): unsure at all n locations
  Clone ID: LIB3083-020-Q1-L1-D8
gagnnnnngtttttttttttttccaaccgtgtacaatgtgacacattcggttaccaatcacatctagactatcatgaaatagttaaatcaacatttattctgtatcactttcatacatattatgacaaactaatttaacacaaaacattacagatgaactcaaactaaacttccagttccccatactctttatatttataaccatgattgattttacaatgtttattacatgtgatttgtgttgcttctttgaatttatgatatcgagcagttcacatgaacattacattctttctcta

SEQ ID NO: 29408 - DNA, 442 bp, Gossypium hirsutum
  Clone ID: LIB3083-020-Q1-L1-D9
tttagcttcagtttggtccattggacttgattatgttgcgggattcattcccttcgtttggctatggtgctttcttgaacccgaaaacaaggtaatctctgaaaactacctaaatcccaaggcttcattatgttgtcattgccactgttgttgttgctattccatttgcttcctcaagtcgatgttgacattttagcttcgatttggtccactggattttattatgttcgctatatttggtgcttgcttgaatccaaaatcagggtaatctctgaaagtacctaaatcccgaggcctcatttgttgtcatcgttctcattgttgctgctatttgcttcctcaagtcgatgttgaccattttgcttcaatttggtccggtggccggattaaattttttgccatatgatgtttgaagctgaggtctgagggctacccaataatg

SEQ ID NO: 29409 - DNA, 274 bp, Gossypium hirsutum
  Clone ID: LIB3083-020-Q1-L1-E10
tggaggggaaacacaggctgagccatttgtatatatgcaatcatagaaccaattgctagtattctaacattgttaaatatataatcacatttacatctatgacaatcaagagttttatcagggagaaaaaaaaaagacctttttaaatgttcaccatctgcgcgaattgcgtaatgatctcgacgatcctccgaaaagatccaagagcaaattttccacgtgttcgacggtatgcttgacacatttgtcgtcggtataagcaaggtttctcccg

SEQ ID NO: 29410 - DNA, 273 bp, Gossypium hirsutum
  Clone ID: LIB3083-020-Q1-L1-E6
gtcaaaccaacaattatattgttctatttccacggcaaagcgagcatataaaacaatctaactggagtcgttcggatttacatagttacaaaagcatattcccctgtgaatcataactgctctgggcatatgccaaaatcatcaaaccaagcttttgcaaattgcaaagacacaatatatttgttttacgaccattaaatatagactcaatctgggttcctcaatttactgtccaaactctattctgtctccattcccacttcatgcataata

SEQ ID NO: 29411 - DNA, 282 bp, Gossypium hirsutum
  unsure (1)..(282): unsure at all n locations
  Clone ID: LIB3083-020-Q1-L1-E7
cctgcccctaaacaaactttccacaaaaatcatctttcgtattgtctttttcttcctgttgtatacctaaaagggccctgcattacaagctgcgaaaaataaataaaaaaggaaaccctatttcggcatggccagactgacaagagcaatcggacttcataacataccgngcatcaaactgtgcattgaaagctgggacatggtggtatctcaatgcactgtaatcacatttcacgaggagatgaaacacccaggtaacgtcaactgtgttcctgtgatgac

SEQ ID NO: 29412 - DNA, 315 bp, Gossypium hirsutum
  Clone ID: LIB3083-020-Q1-L1-G12
aaaaatcttatacgaaaatagccctttaaatacacacagaaatttccaatttggtcaatgttctagtttctagctcttcattatcctaatggctttgtttgtaatttccttcaattttaaggctccttttatttatgtattgattctcacgtcaatcgtcaccctctaacctgtctaccacctttttccactatctctcaacggcaactcaaaattttcaacgaccggaaacaaacccggaaaatccggttcagttaagaaatcgaatcggttttctcgtgagagagaagaaacttttttgaaattcaaaggaaa

SEQ ID NO: 29413 - DNA, 335 bp, Gossypium hirsutum
  unsure (1)..(335): unsure at all n locations
  Clone ID: LIB3083-020-Q1-L1-G3
cagcaccatgcttttacaagtctgcaccaccaccaaaacacggtgataatccaccggcatcggcaaatctactccaccaccatcnccatctcctccaccaccatactattacaagtccccaccaccaccagttcattccccaccaccaccatactactacaagtctccaccaccaccttcttcctcaccaccttcaccatactattacaagtccccaccaccaccaaaacacttatagcagccctcatacatctacaaatctcctccaccaccatcttcatctactccaccaccatactattacaagtccccaccaccatactactacaaatctc

SEQ ID NO: 29414 - DNA, 260 bp, Gossypium hirsutum
  Clone ID: LIB3083-020-Q1-L1-H1
ttcactagttagcacctttcctaaagcgaaccatccacaaaaggttgttaatacatcaatgtgcgaagctcaacaaaataaattttaatcaccatgctcgcttgactttatctgcatctaaaatgcacttttttttgaactgccctaactaacataatgcactttctacaaaccaataataacacagttcatctttattttgatacaatatcatatgacactatcaaatgccctatatcacacaatgcacaacaaaaatc

SEQ ID NO: 29415 - DNA, 399 bp, Gossypium hirsutum
  Clone ID: LIB3083-021-Q1-L1-A2
ctacaatgaaactgatgtgattttgaatgtttatgatcgcactgctctcaataattactcttattgggttggtttcgggattttccactccggtattgaagttcatgggaaagagtatgggtttggggcccatgattttcctgttagtggagtttttgaagtggaaccaaagagctgccctggttttatctatcgatcttccatcttgttggggcgcataaacatgccttattctgaattcagagaatttatcgagaatgtagcttccgagtatcatggagatacctaccacctaatctccaagaactgtaaccattttacagatgacatggcacagagattgataggcagacatatccctgggtgggtgaaccggatggctcgactaggctctttatg

SEQ ID NO: 29416 - DNA, 307 bp, Gossypium hirsutum
  Clone ID: LIB3083-021-Q1-L1-A7
aagaaactttcatctgccgtatcgaatatcggggcttgggcttttaacgtcggcagctccgttggccttattatggcttacaaacagctcatgttccccgcccgttattccttcgttttcgcgacaacctttacacaggttccacttttgtattacactcatatactcattatagtgacaaacgccagtgttcaccacccaaaaaaaggttccattatgggaactcctctgggtctccattgtcgccaatactccaaatactctgatgaactctagccccatactctatactacaggatattatcat

SEQ ID NO: 29417 - DNA, 394 bp, Gossypium hirsutum
  Clone ID: LIB3083-021-Q1-L1-B10
tctcgagttttcattgtttttgatttttatcaaacgctgtgtgaaaattaaatggcgagcttaacttcgtaattaataatatcaagccattccgagtaatatatgccccttttccctagtctttaagaaacaaagccatgatacaaagcataaataaagatagatatggattcactgaagtagacggatatcgaacaaaaatcctagatgttcctcttcaaaatgtttttgtttttggagcctttttcttgtgttgtctcctaggcatcgagttcttcatgccaatatagaagaataaggcccctaacagagccaagttctgtgtgaattttgtgaaaagtataccgaattccttcttttccgtgtcatagttgtagaagtcgtacaatatggg

SEQ ID NO: 29418 - DNA, 414 bp, Gossypium hirsutum
  Clone ID: LIB3083-021-Q1-L1-B8
cggagagttactcaacatttcaaattttcatgtcaatggtctttgttaatccctttggaatgaggttcttccatcaaagattaaagaatttttataaagattattgtgagattttgggtgtgtttgtttggttgtatttcattttccagtgtttggtagcctgaaaaccttttccatttggaaaatattttccaaaccatgcgtaaaatcccttacattttgggaaaatgtcttaccgtttcaatttctgtaagacattttcccgtgcttctccttcatccaggcatttttctcttcctgcataaagcttttttttcgggtcttggcttaagattcaccttcttgttgctgttcgtcaagattctgttgttgtttcagccaacaaagaacctgaaacgtcagcatcgaaagaaa

SEQ ID NO: 29419 - DNA, 394 bp, Gossypium hirsutum
  Clone ID: LIB3083-021-Q1-L1-C2
gttttgtttttgttttttgtatttatctaaataagtaggatttgtcgtattaaaatttggaaatatatatatttgtgagaataacataacacaaatagatgtaaaccacaatcgcaccatttttttcctatgccaaatttgtacatgaatttacttgttatgaacataaacactctcgtgttatgaacataaatttattagaagccaaaattcatttgaacaaaaatgtggcactgcactaggcccattcccctttattgtgtatccgcaaaatctcatgaaatggaaactctgagtatgcaattctatttcttttcttgtatacccaatttgatccgatttcagcccaattcatgagcaactttcatgagctaatgtttaaagggtcatatac

SEQ ID NO: 29420 - DNA, 432 bp, Gossypium hirsutum
  Clone ID: LIB3083-021-Q1-L1-C3
gtaattatctgacgatcatcgcacagttttctccgtcgcaatggaaccaccgccaccgcaatcccctcgagactagcaccctcatactcactctcattcatccacctccatccccaccactggtacttgctgcaagtgcggtggtgccacgacccacgccccaccgtcccaatccccaacttcctggcctgacctttcctctcccccggcataccgaccgattcgagcccccgctttaaacctccctccaaacaacacccaagccataatcctaactcctgtccctcaatcccaagaagtccccaccattactcctcctttccatttccaaatcccatccaaaaaaatcacttcccctgatgatatccgcaagttccacgactcccctacttctaaaaacttcctgggtttcatcgtcgccttgtccgaatc

SEQ ID NO: 29421 - DNA, 354 bp, Gossypium hirsutum
  Clone ID: LIB3083-021-Q1-L1-C5
cctcaatgtcctccattgcttcatcatcatcatgatcgtcatcatcatcttgttcttttaccttcaccgcttccttcccattcctctctcgtcccaaacttggtacccattccttccctcctgctctcttgtcaatccctcatttgaccccaataaaaacacccaacttatccctatctctcaccactgctgcggcgacctccaagtccggctgcgaaaatgcggtcccctcgaaaaacccaatagagaccaatatagcagtacttgaagacgatgaactggaggtgcattgatgaactgccctggattcaagagaaggcatttgaccttgtttagttcactggttcttttact

SEQ ID NO: 29422 - DNA, 313 bp, Gossypium hirsutum
  Clone ID: LIB3083-021-Q1-L1-C8
atatcaaccttatcgtaaccctctacctctattgttttccgctcgcctacttcgaactgtagtcaggcgtattacaattcaatgtccctcaacctacaacatactctctatgaaaaccctcacgctacccaactcaatctccttgcacctcatccacatatcaccagctagcattaatatcgaacagatccacaccgatcttacttcccaatcattactctgacttaatatcttaaattcaaattctaagctcacatatttagataaaattcgcttaaaatactatttcaatcacatcattcattaactcata

SEQ ID NO: 29423 - DNA, 310 bp, Gossypium hirsutum
  Clone ID: LIB3083-021-Q1-L1-E4
tagattgggtttgataattttggttcgagaacatatactggattcggttatatttttgacgggcacggtccttactgtcatttggtagcaaagacggtgagagaccatcttccgttaaagctgagtgctcattgggaagctaatgtatccagtgaggatgtttttagagacttcagtttatgaagcattacctctgaaaatatgtctcttttattgttagacaaggaatctatgccttacatatattttctggaatcagaaaagcacccttatatcttctatactcttaaagagtctttccttaaggctt

SEQ ID NO: 29424 - DNA, 331 bp, Gossypium hirsutum
  Clone ID: LIB3083-021-Q1-L1-E8
tccaactttctgcattaattctacactagctttggtttttctaaatcgtaataacaaactggttccgatcattttacaaggtagccagcccacctaaattgactcatacataaaatccattgcccataaactagtctaatcaaacacacatcatcattaaatctactcttattataaacaaaatctatcatcaactcataaaaccaatattcatcgatcctaatccacacacaactctcaaacttttaattaaatcctaataaaaccatacatattccaatacaattcaatctcaacacccactataacatactttaatacctaaaaacta

SEQ ID NO: 29425 - DNA, 352 bp, Gossypium hirsutum
  Clone ID: LIB3083-021-Q1-L1-F12
tttttggtttttttcttcaaggtatatcaatttagctgggtcaattatgctcgtgaaaaccactactctaatatcatctaggagtccatcaagcacatacttctgcacatctttgataacatcatctttctcaataaacccaaacatgctgttattccaacccaagtaccacatacaatatacatctccttccttgatgtcgacatcaacctcaagcattttctgcatgtagtcttcaaactactaatcttctttcacatcctttccatatcacttaaacttatcaaaatccttgcacatttgtttaactaactcatcctaggaatctgctttgccaaaattcatgactacc

SEQ ID NO: 29426 - DNA, 300 bp, Gossypium hirsutum
  Clone ID: LIB3083-021-Q1-L1-G2
tactattttgctaaccatggctcataactaccgtcatggttgggtccttttccaactgtgactcattactggctaactaatgatcggtggccacaccatggtagtcagctgctcgacatacattccacacacaaacaacctgatcagagctgtcacaattcgcttcaaaattctattcgcgcggagagtctgaatacatacagtcaacatatcatgaatagtacccaatacatgacaagcctgctatgtgcaacgtggacaatctcataccctgctatcatcatgaacagtaccactagt

SEQ ID NO: 29427 - DNA, 396 bp, Gossypium hirsutum
  Clone ID: LIB3083-021-Q1-L1-G9
atgggggtcagtttgttggcaaacatgatggtgaggttgctgagttgtcaatgtgccaatggttgactacccgtttagcttcagcttcagtagatggcacggtgaaaatttgggaagatcgtaagcccataccacttgcagtgttgaggccacatgatggacatcctgtttactcggcaacattcttgactgccccacatcgccctgatcatattgttcttatcacaggaggcccactaaactgtgaagtgaagatatgggcctcttcaggtgaagagggctggttgttgcccagtgatggtgaatcatggcagtgtatgcagacattggaattgaggtgttctgctgagtctgaggttgacaatgcattctttaatcaagttttggcactttggc

SEQ ID NO: 29428 - DNA, 396 bp, Gossypium hirsutum
  Clone ID: LIB3083-021-Q1-L1-H12
ggctgttggagaaagcccttgctacttctgctgggatgggttcggaactagaacaaaagaagcagaaaaagaaagaagagcagcagaggcttgatgaggaaggcgctgcaattgccgaggctgttgctttacatgtcctagttggcgaagactctgatgattcgtgtacggtcatgctaaacaaagaagaggggtttaacccttgggattatgccaacaatctcaatctatttatggatgtaggtagaggtagaggttgctttcttcagcaaggtcaagcaaactggggagggcaggtctctgattcatataaagatggatgggagtgggcgatgttggaaaacagtaattggtccttaccatatggagcttatggaggtgatcttcaagcatcgg

SEQ ID NO: 29429 - DNA, 365 bp, Gossypium hirsutum
  Clone ID: LIB3083-021-Q1-L1-H4
gaaaaccacgaataataccagctagttctttccgatcagtagtgaaaaacctttagagccctaaaaaataggaaagtgaaacggtactggaagaccccaaaagagattcaacagaaccttctcccttttaccactgcctaaaacaggaaacttaacactggttgagccattcagtctggtccttctccactagcttgaaaactaggtcaggagccttctcaacccaaaagcaaggagcgggtctactacgcctatacatcgccagagcgtgcgcctgcctattaacagctcttgggacaaaaagattgagctttttgaaacctatatccaatgcaaatcgaagagctctttcacacgctcaagct

SEQ ID NO: 29430 - DNA, 420 bp, Gossypium hirsutum
  Clone ID: LIB3083-022-Q1-L1-A2
tttttgtttttttttttttgtttttttttttttttatagaaagcagtgtcatggaccaggttttactgcaagaaatcaacaattatatgcaaatgttcatatttcccaactttcataaatatgctagataaacatgtatgaactcatcaccatcaaacaagatatatgtcaaccaatagcattttactctaaaagtttcctaaatcaaggaaaaggccagaccaacacggtgaacctaaaaaagggaagaagatgtagatggcagtggtgattggtttcttgttaccatagtctcgaaaaggttatcttcttatatgcctatcaccacgtcctcgaactctgctgccgctggatggctgcaccgagcttgtatattgtggtctatgaatgactttcccattaacaaacaaattccctcca

SEQ ID NO: 29431 - DNA, 428 bp, Gossypium hirsutum
  unsure (1)..(428): unsure at all n locations
  Clone ID: LIB3083-022-Q1-L1-B1
gttgcatcccagtgctatggttctcgtggagcaaggttgcttantcgcagttgctatcttaggtatgagttatatgcattttatgaaggtgccaatgaaacctcagcttccccgaaaactcaacccacgacaagaagtggtggaagtggaaggaaaatatgggtgattatagttcttacaattggatcagcatttttggtggtagtgctaatggcttcctttgtatactgtggtgcaatgaagaaaggaactcgaaaagggaaggacgaaatcctgagaaatcatgttcaactacacaatagtggggactctgagaacccagatttccaggattttgaaggcttagatgagttaaaagcaaatgattcttatattgatttggcaaccatacactcagctactaaataactctctgattcaaacatgct

SEQ ID NO: 29432 - DNA, 414 bp, Gossypium hirsutum
  unsure (1)..(414): unsure at all n locations
  Clone ID: LIB3083-022-Q1-L1-B11
gttgctggtgctgataaagaaataaccgcagggtttttgctgaagaaaagtgctgaaactaatggatggagtcggcgatggtttgttttgaatgagaagactggaaagcttggctacaccaaaaagcaagaggaaaagcattttcgaggtgtcatcgtgttagaggaatgcagcattgaagagataccagatgaggaagaacctgccccaaaaaattcgaaggataaaaaggctaatggctcagataagcaaccgagtcttgtgttcaagataactagcaaggttccttataaaactgtcttgaaagctcacagtgctgntgtgttgaaggctgaaagtatggctgataagactgaatggttaaacaaattgtcaaaagttattcaaccttctacagggccagtgaaaggtgga

SEQ ID NO: 29433 - DNA, 330 bp, Gossypium hirsutum
  Clone ID: LIB3083-022-Q1-L1-B12
ccgagatagaatcgttgaaacgagaactcgagaaagcagagatctacaaggagaagttgatggaaaaggaagctgtcattgaacaacttaatgttgagttacaagctgcgagaatggctgaatcttatgcgcgcaatgtattagaggaatgcaaaaatagggtccaagaattagaaattccaattgaggaaaccaaaaaatttgaaccatcaagattcgaattttttgaattcggtattaaaccacttgaagaccaccaccattcacttgattaatcttaatcttaaattgcttcttttaaaaaaaaaggttgattattggaaattacca

SEQ ID NO: 29434 - DNA, 391 bp, Gossypium hirsutum
  Clone ID: LIB3083-022-Q1-L1-B5
atactgcatagcaacgtggatgggagttctgtgccaaggactaccatgatccaccacctgctccattgattgatgctgaagagttaaccaaatggtcgttttacagggcagtgattgccgagttcattgctacacttatattcctgtatgtcactgtgttgaccgtgattggttacaaggtccaaaccgaccctgctaagaacactgtttaccccgattgcagtggcattcgtattcttggtattgcttgggctttcagtggcatgatctttattcttgtttactgcaccgctggtatctctggagggcatatcaacccagctgtgacattcagtttgtttgtgcgacgcaaggtgtcactcatccgatccctgatgtacatagtggctca

SEQ ID NO: 29435 - DNA, 419 bp, Gossypium hirsutum
  Clone ID: LIB3083-022-Q1-L1-B7
ctcaaggctagcagctcctgtttgatgcacgtgaaatggttgataatgtccgttcgacagatcatgatccatctgccaatctaaatgcattacttatgctatttaactgtgcacacgatcgatccattaattaccttttgacccatgttgacagggtttccaaatggggtgaattgcttcagatggttgtgttggatctgatccgtaaggtttgcacaacaaatcgtgttgagaaagggaagtatattaagattattatatctttattaaatgccccctcaactgcagttatttatgaatgtgctggcacccttgtttctctgtcatctgctcctactgctattacagctgctgcaaacacttattgtcagcttcttttttctcaaagctattacaatgttaagcttattgtgctatat

SEQ ID NO: 29436 - DNA, 393 bp, Gossypium hirsutum
  Clone ID: LIB3083-022-Q1-L1-B8
atcacaatggtgtcgggttcgttggaatgcgctgttaggtggcaaatgctgtcatcggtggttcccgccaaagcaaccggcggaaacaaggatttggagctaacaaacatggatttagcaatgaaactccattatatcaaaggcgtgtatttcttccaacctgaagcggctcaaggtttgtcgattcatgatttgaaagagcccatgtttcagtgtctggaactttactacgctgcctcatggaggattcggagatcggaaagtggccggccgtttatcaaatgcaacgactgtggcgtccgaatcgttgaagctcagtgtgataatagtgttgatgaatggctggctatggccagaaacaatgatcatatgctccggcatgatcaaagtctt

SEQ ID NO: 29437 - DNA, 299 bp, Gossypium hirsutum
  unsure (1)..(299): unsure at all n locations
  Clone ID: LIB3083-022-Q1-L1-C11
gaacttttcagatacgagtgtagtgaagaacagaaaggggaatggangaaaagaggagaaaaagaaagtgagaagctcaaaactgagcaaaggggaggaacagtactattacaagagaaatggagaaggaagttatgcattggctcaaaagatgaaagagctggagatgatggatgttggtgatatggaacatgtattggatgttgaagaagcactccattattattctcgactaaaaagtccggtctatctttcaatcgtcgacaaattcttcatggatatgtactcagaattctctc

SEQ ID NO: 29438 - DNA, 406 bp, Gossypium hirsutum
  Clone ID: LIB3083-022-Q1-L1-C3
gggaactgatgacgaataagaagaaaaacaaactactggtgaagaagggaaaaaggaagagataaaggagaaaatgaacagtgggggaagtgggataatgagcactgagtcatttgagtccttaggattgtctgagccaacttttaaagctattaaagagatgggttttcagtatatgactcagattcaagcaagagctattccaccacttatgattggcaaagatgttcttggggctgcaagaacgggttctgggaaaacccttgctttcttggtacctgctgttgagttgctatataatgttcgattcacttctcgtaatggaacaggtgttatcgttatctgtcccacatgagagcttgccattcagactcatgcggtagcaaaggatcttcttaaataccac

SEQ ID NO: 29439 - DNA, 418 bp, Gossypium hirsutum
  Clone ID: LIB3083-022-Q1-L1-C5
gtttggtttttttttttttaacccaaattcggataatcgtcattaaaaagaagccttcaactcatttggccttcaaatctgtatacttcatctgtaggctgtctcctcctttgtacaatgtatatgtatataatgcaaagcaaattttcaggtaaatagattaatttgtcactgaatgaccctaaattcattcaggtgtcaacgcttaacaaaatacagcgtcacagcacaaacctaccatagctccattaacctggcaataaagggctaaatcttcagaagcaacctaagttccatacagtaccagtgaacatctctaccttaatgtttgatgtggaccaaagccatcattctcaagcagttacatctaatttgatctattgcttactaagtcaatgtttaaaaacacacacgcaca

SEQ ID NO: 29440 - DNA, 106 bp, Gossypium hirsutum
  Clone ID: LIB3083-022-Q1-L1-C6
ctattaattaagagcttgacttttaaagcgggatcatggcctaatttatacaaggtacctcctttaaaatttttactaaagaatataccatctacacgttcaatat

SEQ ID NO: 29441 - DNA, 386 bp, Gossypium hirsutum
  Clone ID: LIB3083-022-Q1-L1-C8
tatcaacttttggacataacctacaatttggaataatcacataattcacaaaccttaccgcaagatacatcataatcttaccatccctcatcccaacaataataatcatcatcatactaatcaaaacataataatattaataatttcccttactattaccacttatacctctttctatcaatcaaaattttctctatctaaacctctataatctcctattattttattacaacatgcatatattccaattttatctcctaaaaatcctctatcaccttcgattcccattttcacccattccatatcacttcttatcaacaaaatcctatcattttctttaactcatatactacaaactattattcaatattctttttcaaaacctc

SEQ ID NO: 29442 - DNA, 385 bp, Gossypium hirsutum
  Clone ID: LIB3083-022-Q1-L1-D10
aactagcttcaacatccagcccattccatcttacagtatgttgggaccattatgaaaaacgtgcttctgcccttctttcttcttagaggattgtgatttacggttttctcaaaaaaagaaaagaggataaaaagctgagagtatcaaattaagaaatgcacatctgcggtgtagcaactgatgtattgatagccatcccttcaacctgagccctcaatatcagacaccttcatcccaatcatttcttacttctttcttctttctttaaaaaaaggtcctaggtattcaattcaaaacttggaattggcccccaataataccgatgaagaagattcttaacctttaaaaccttgggggaatcaagtgataattcatcaaccattgc

SEQ ID NO: 29443 - DNA, 333 bp, Gossypium hirsutum
  Clone ID: LIB3083-022-Q1-L1-D12
tgctcgtaccgcgttcgtgaattctccgggtcgacccacgcgtgcaggaactcgtcacctggcaggagcctggcaaccctaccaagacggctaaagctaggtaccgtatcatggcgatcaatacaagagcacaagggacataaagagtacgctaaagcagagtaaattatttacacataaatccctgcttgaatgggaggagctatatagtctcaaagcccaaaaccacatttatttgcttgaaaaagaaaaagaagctgatgcttttatctttcatctaaatttacattattgcctgtcttttgaagtttggaccaatccatcaacttaaac

SEQ ID NO: 29444 - DNA, 206 bp, Gossypium hirsutum
  Clone ID: LIB3083-022-Q1-L1-D5
cttatgtattaacgcatattatctctttcgtgtaaaggggatctattatccggtcaacacgttactacaattaattctatatctacaaccattttaatctacttttttcactacactcattaaacaatcttgtttaaaatataataaaaaaaatcatacactattagcacttcttcacaggttattctttccaaaactgcattatc

SEQ ID NO: 29445 - DNA, 198 bp, Gossypium hirsutum
  Clone ID: LIB3083-022-Q1-L1-E12
cagtctaggggtcatatactggctagagagtaagcttcatttctctgtttgaaacgtgacagacgccaacgaatgtataacagctgcctggacagcgacaaatgcaatttatgtgccagcagcgcatcaaggcaatctcgatatgcaaagcggtatcctgaatgcagatgatactgattacaaaactgcttatagcta

SEQ ID NO: 29446 - DNA, 229 bp, Gossypium hirsutum
  Clone ID: LIB3083-022-Q1-L1-F10
caagcatggctttcgttctcgcggcattccttcttcttcttgtcaccttctaattggtcatcggcgtctactacttctttttaaaaactacccctttaattttttcttaatatttataaaccctttttctttaaacccaaaaaacaaaccactttaaacctctccaatactactcttgaaaccatttaccattttaaactacctatcttcaacttttctcttttcctct

SEQ ID NO: 29447 - DNA, 265 bp, Gossypium hirsutum
  Clone ID: LIB3083-022-Q1-L1-F4
ctcttgcctcatgttttctgctatcattgtcactactgggaccctgcaactagccattaggagtgccctaacactatcttccttaacttacactaccccaactactacaaacactcttgcactctaaacatcaccaccacctacatcctgacaatacccttattcaacaaccacattcacctacaactatagcaacatctcctttaacagcctcaacttccacttactccactattaccgcaccagctgaatcaactgcaacaac

SEQ ID NO: 29448 - DNA, 421 bp, Gossypium hirsutum
  Clone ID: LIB3083-022-Q1-L1-F6
tacgttgacccccagacatatatcatatcgctcctgagacatggttccatgttacaacgtggtgttgccggcatcggtaaccactgccacctcttacgagaagataaataagcaaaggaaaacaataatatatatatgcatatcaaatatacaaattttgacatctaatacttaaattcgtccttggaattagccatcttaaggacttccgtgctcagtctccttcaccggattaggaatccttctcttccttaattgtgtctgagctctcctcggaagctaatatctcatcattacaaacagcagactgcgggttcttgaacagatcactattttctagttcacttaatttctctttggactctcctttgagcagcttgacaacttcaaggatggtacgtcttttctcgggctgagcgtc

SEQ ID NO: 29449 - DNA, 202 bp, Gossypium hirsutum
  Clone ID: LIB3083-022-Q1-L1-G10
gcgaacaacaactacaacagcaaaagaaaggttctctagttgtgaactactgtttccctgtgcaacagctgatttaccctttttcaagcattcgggggggttttgtacatgctttgttttgcattgccttgacttatatttctagctcattcggatgctaaagtttaagggttcagtttcatgtttgcttctttgaatgctc

SEQ ID NO: 29450 - DNA, 207 bp, Gossypium hirsutum
  Clone ID: LIB3083-022-Q1-L1-G12
ctaacagtatcgctgaatagcggaccgtcactaaccttgtgactacgattcttctccgtatcaacaaccgcacaaatagcttcataattcaactctaaatctccatgcactttgaaatatagcctaaatcttcactcaacttatcgcaaaaggcggttaagtctaccacttggcatttttaaaattcgctaattaaataaagattta

SEQ ID NO: 29451 - DNA, 364 bp, Gossypium hirsutum
  Clone ID: LIB3083-022-Q1-L1-G3
agaagattcttagaagctgaagaagatggcggcggctagctacgattacaagaacgacggaaggtgggcatactattgttccaatgtattgattcctactcacatggcatctagctccgatgtggttgatcatttcaagcgcaagttctaccaacgctatatcgatcctgaccttgtggtataggctatgtcatcatcaacaccatctgcttcataatcaacatcatcatcatcagcgaatgaaagcattcgatcacgcaatgcaagctcaaccactataagtacaagggcatcagcagctgccacttcaaatacaacttctatgcgctgggatcagcaaacaatacaatgttctgtcaatgct

SEQ ID NO: 29452 - DNA, 281 bp, Gossypium hirsutum
  Clone ID: LIB3083-022-Q1-L1-G5
aagatcgattctaatggaaactcatggaacggaactgggtgaacttgtgtaggcgtcaaggattatggtgagcaacatgatgctaactaatttgaccagcatctcacggatataacatatcataacatggatatcctaggtatccttcactatatatgtaattttacaaagttttcatagtaaacaacatatcgatctataaccagaacaacatcttgctataatatcgatctgttaacagattgattcatattcctacactctgatggcatttaaatcat

SEQ ID NO: 29453 - DNA, 410 bp, Gossypium hirsutum
  Clone ID: LIB3083-022-Q1-L1-G8
aacagagcaaagcaattccgcactcttccagaatctggcttagccaacttgggctctaatctttttgatggcatgcaagcacagccgtgatcaagccatggatttccagggctttttaaatgacttgcaggactgggaactttcgctcaaggacaaaggcaaaaacaagaaaatgacatctcaggcttctggtaaagaacaattgaatatcactgagaaaggaaggccaacagggaagaggtccctgaataattcttcgtcaactactagttccgagcaatatgattatttgaagaattatgataaacggagcaatttgtcaactagctttgtgactgaagagaatatgcctgatgctgcttctgagaaagaactgggaaatgaatattttaagcagaagaaatttaaag

SEQ ID NO: 29454 - DNA, 412 bp, Gossypium hirsutum
  Clone ID: LIB3083-022-Q1-L1-H4
taagcaaccattgactttcattttattcggttcgaccacccgacacaattcccgatacaatgtgcccaacatggcaaatccccaactaagttagttgcattccttcaaatcgatgagatgtattagccccaccttaagtgtacaagatttcgatatttattgagcattcaaaaatccctgattaaccttaggatgaatgctcaggcgtattgttgtttttcaaggacagtcacgttctcttcaagctgattgaaataagcttgcaatcatttgatgtctatctggctacctttatacttgtttggcacctttctttataaatagtgagtaagctaatttcgtcccaatcgaatacggatactggccttgtaacgattggcccatcgacccataaacttagtttaaagccatg

SEQ ID NO: 29455 - DNA, 262 bp, Gossypium hirsutum
  Clone ID: LIB3083-023-Q1-L1-A10
tttttaattttttgatcaaaaacacctaatttccaacaggcaaggttcaaacatggaccggctgaaaccatgtttcctgtttataacacaataacacacacaaaaaatatatgatgaaatactctcttataagattttaactatctacaacaacattcttgttcagcttatgactttaacaaataataccaaacattatcttcataattactttactatttataacaataattatacccttactatattttatacataattc

SEQ ID NO: 29456 - DNA, 418 bp, Gossypium hirsutum
  Clone ID: LIB3083-023-Q1-L1-A6
attacttgctccatccgaaaatgttgatcagttgcttagggagcatgaccgtaagatccaagaatttgctcgaagagcaagacttgacaagataaaagctgggaaactgcaagctcaagcaaagcaagtgacagaaaattcattgtttgtcaccgctcgcagagctgaatagacatcattttatggtttttcaatctttgtggtaaagctgggaaaatcaggtaatctaaataccaagagataattagtttacaggatttaccatgtatagtgaacaagaaaaagtagatgttatttgttatatagagtatttgagcaaaagcactcatttatcttctttgatttggtaagctataaatatggcttttataggatacaattctctggctttgtaggtgattactacttgtggtttttt

SEQ ID NO: 29457 - DNA, 380 bp, Gossypium hirsutum
  Clone ID: LIB3083-023-Q1-L1-B1
aactagtggatgctggcttctgcatgaattctgtacgagctcgaattgaaaatactaatgctacaacaagcaatagcggctaggaccattaagggatcagcaatggttgcaatgctttttataatcgcaacaaatttatggacaggatctatggcacaatcaatttgcaccaatgttctcatcagcatgtctccctgcctgtattacatacaagggaactcttctaaaccctcttcttcgtgctgctcgcagcttgctaatgttgtgaggtcaaacccttagtgcctctgccaggtactgaacggttgtgcttcatcacttggtgtcagtgttaatcatactcaagcaatggctttcccaacagcttgcaatgttgaaac

SEQ ID NO: 29458 - DNA, 392 bp, Gossypium hirsutum
  Clone ID: LIB3083-023-Q1-L1-B10
ccaaatcatttgacacagcttgttcaacttacgtaaagggagcagattgaaactaggaacgttgaaagcacacattaagctgctcaagcttatgttgatgctgttcatcgctattagactacaaatgtaaaggacgctctatactgcctgaaagacgcactgtacatcttttgcgatatcataatggctcatcacctctgacaagtattataacgaaatagctcaattataatgagtcaaacagaacactgaacagaccattgatcattatgaacaggcaactgattgcttacaaaatcaagatctatcaacctctgccaaccaatgtaagcagaaagttccacaattagctgctaatatactacaataccataaagcttttgtcatctatt

SEQ ID NO: 29459 - DNA, 272 bp, Gossypium hirsutum
  unsure (1)..(272): unsure at all n locations
  Clone ID: LIB3083-023-Q1-L1-B2
cgctctagaactagtggagcttgtattctgcantaattttgcacgagtttcaatgcatggatcatgatttggctggtcttgtagcaatccgcgtagttaagattacggagccacattttaaatgttatatacatcaactactctttggacttgagcactgtcacatctctattagtgctatactgagatattaattggtctaatctttttattgatgatgaaggtctacttaatattgcctatttctgactggctacattctttgatcctaa

SEQ ID NO: 29460 - DNA, 360 bp, Gossypium hirsutum
  Clone ID: LIB3083-023-Q1-L1-B6
ttatacatttttttaagaacaatcattccaacaacaatgggttaataaaaagaaagaagcatatttgttctctacaacatcaataatttgattataacactaaaaatgataatgaatatgaaaaatgatatatatatatcttcaacttataataatttaatcttcaaatcaacacacaatgtaaacatgtaaaaaaaataaaaaataaatcatacttataataatcactaattatgacctctctttctctctactgtcttccttagatgaaaattatatggctttctgggaagaataagaagaataaacagtgtccaccttaagcacataaacaggatagtcatcaatatcatcaatcca

SEQ ID NO: 29461 - DNA, 224 bp, Gossypium hirsutum
  Clone ID: LIB3083-023-Q1-L1-B7
aaaaaggctcagcaatggcagatccagttaagaagaacgtgttgtaagaagaaatcattgcttacgcttacctcattctctacatcgctctttccagcggtcaaatcttcttcaacaaatttgttttgtcatccaatgaaatcaattttccctatcccctttggtttactcttgttcacatggacctctcttctggtttatgtttcttactcacttaaatcttt

SEQ ID NO: 29462 - DNA, 255 bp, Gossypium hirsutum
  Clone ID: LIB3083-023-Q1-L1-B9
tcatatcttttgattttgctctgtattcttaggctatggttaaaaattaagagcaggtgttttgaggtagtcatttacataaacaaaatgatgatctggcgcattggagctatttatattcatatgcctacaatggctgtgatcgcccttaaatgtcccgatacttaagtggctatcgctgatatctcattacctatgatcagtatctggaacaatgaccatattcttatctattagcctggtctctatggagtt

SEQ ID NO: 29463 - DNA, 202 bp, Gossypium hirsutum
  Clone ID: LIB3083-023-Q1-L1-C12
ctatatcctagaaacttgctttggcatttaatattaatgggatgagctaaatcaaggggggactatgatactctacatgatgacctatatcttttcattgattacatatgcatcactctctgattgagactacattgcttcatctgaccattgtttttttctttagtctcttactatacacaactccatctaaatttactta

SEQ ID NO: 29464 - DNA, 397 bp, Gossypium hirsutum
  Clone ID: LIB3083-023-Q1-L1-C3
cgctctacaactagtggatctcggtattctgcatcatattctgcacgaggaactcggcgatgcataaaatccgatctaactcaatataagccgggcttaacaaatctgagctcccacacagcattctccacaaccttaacttgcttatatatagttaccataatcaccaacattacacatcattacgtatcccaattaccttattaacctcaacagtatactactcaatgcatgacccaccttattgcaccgcaggcgacatatatattgcacccgcctaaccaacctgactctttatagccatactatcaccaccatcaaatacacgtgctgtactacctggttaactctcctgctaaaaaacctccccaatattcatcttcacttgcgaaaaact

SEQ ID NO: 29465 - DNA, 414 bp, Gossypium hirsutum
  Clone ID: LIB3083-023-Q1-L1-C4
tgatcttggggatgctatgtggtgttgtaagtgtagtggtcgcgcgcttagtttcttggtgtcacagcagcatttgagtatatcaaggagaaattaggactacctactgtaatctgtcctgctttaggtggtttaagagctggaataatagctcttaggtatcctggaattctatactggggctttacaaatgtcaatgaaatcctacatactgggaagtccgcatctgctcccggaatctggttgctaacccaactggcagcagccaaagttgttgccactgctttgtgtaaggggtctgggcttgtaagtggcctttatgcacctagtttgatgattggtgctgccgtcagtgctgtatttggatggctcagctgctgaacttattaattcagctatttcaggcaatgcttc

SEQ ID NO: 29466 - DNA, 438 bp, Gossypium hirsutum
  Clone ID: LIB3083-023-Q1-L1-C6
gtcgaaaccacgaaaccaacaagttcaattcaggcgctgatcacttaccctaacaccccgtacgattttgactacaaatccacaagaggagagcccgtacttcacgatttgccgctgccaaaatagaaatataaggctccaaccgggaatttggaaaacaaaactacagaagcgttagaacccaacttaccgaacaatcgaaagaaaatagaacaacataatacgaagctttattgatggatcgaagcaaaatagaggagtatcaaaaaaaggtgaggaataaaagaacagaggaaagcaaaagaaaatctgaggtcaattttcctggaaagagagaggaattttgaaaaaaataaaatcaaataaaaagagagataaaaagaattgaaatgtgggacttgaacccaagaccttatacatacacccagaacatttaac

SEQ ID NO: 29467 - DNA, 254 bp, Gossypium hirsutum
  Clone ID: LIB3083-023-Q1-L1-D12
ctcgtgccttgcaatcacctcagccttgcttccagcagggtgatcttattggggatccaggtaacttggagtggatgatggaagctaattgtcctgatgttgctgatatcacacattcactgcaacagccagcttgaagaaagttggatagtggtggtgttaccagtggtggtttccgtgaactcataccatgcattgcatgaactgcaatcgctgttggagaggactgtgtattcatcgaggtccattattat

SEQ ID NO: 29468 - DNA, 338 bp, Gossypium hirsutum
  Clone ID: LIB3083-023-Q1-L1-D4
aatatataaaaaaagtatagctttaaatattttgaatacagaaaagccaacttttttacattttttctcaccaatgttcaataatccattcttgataattgttcaaacttcaaagccaagcatattagaacaacgaaagggcaagggaaagggaaaagagagacaaaaaataataatagccgcaataaaaaaaggggacatttttaactcattactaggttgaccattatcaacatcatcaaagttattttgtcaacccttttaccaagggaaaatttttcaatgccgatttaacctttctaaagagaatatggtaactcaaaatgttctacagattc

SEQ ID NO: 29469 - DNA, 363 bp, Gossypium hirsutum
  Clone ID: LIB3083-023-Q1-L1-D9
ctgacaattgtgatacttacgtgaaacaagatgatggggggcaggggtttaccctagatgtgcggacacttccacttgcatgacctattgggccttggcatgtctacagaagaacgcacgtttcactgtgcctttaccaaagcataatctacatatgggtctgaacaactgcactgcttctaaggcgcatcttctttatgatctttgtacaactacttgcacttctataggcttgacttctttttcttctccttaaccaatccacaaactatgctatctacttgacacatttggccccgttgatgttggacttaaagaggaaagttcagattagaatccatgagctgtgttttagggactaaa

SEQ ID NO: 29470 - DNA, 337 bp, Gossypium hirsutum
  Clone ID: LIB3083-023-Q1-L1-E2
attgggattatagtgtgcggtcaaaggaacaaattgaggcaaggttgtttagcaaacatgaggctgccatgagaagagaaaggaccatggcgtactcatttactcatcagcaaacctggaagaatgcttagagatctatgaatccattattcatggatccaagcaatccctcatggggatggagctagatggaacggcggatgacagcgcggccatgggaggttcgtggtggcatgatacatatagaacatctcttataccaatcatcactaaagagtgcacgaagcaacttcagtggagaaatcatcaaagcttatgctcgttatcaactcaattt

SEQ ID NO: 29471 - DNA, 300 bp, Gossypium hirsutum
  Clone ID: LIB3083-023-Q1-L1-E3
ctttgccttcgctgggtttttgattctaatggaagatggagagtgtgttttggtgctggagcccgcaaagaaagacttttggaaccccacctgcatggaccttgccgacacttccaaaccgtttaaagttactaacagtggacctgccaagcactggaccgacgcaatttccatctgaaatggtcgtcttggcgccatggtgtatggcggcattgcatcggaaactcttcagctcaatgatgacacattttggacttgtgtttcaggggattacactaatcctgaagctccaatctccct

SEQ ID NO: 29472 - DNA, 220 bp, Gossypium hirsutum
  Clone ID: LIB3083-023-Q1-L1-E6
attaaccatctatggtaattgtcccaaacagggatacggctaatactgctgatggcggtgctaatggatcacctattcctccaccgacgtctttaccgtctcaatcattcttagagaatagcaaagacagcaaaatctaaacactttttctccctctacaactatctttctccttattaacaacttcaccttatcaacgatatccataatttggatcttt

SEQ ID NO: 29473 - DNA, 409 bp, Gossypium hirsutum
  unsure (1)..(409): unsure at all n locations
  Clone ID: LIB3083-023-Q1-L1-E7
ggacagagggtctttgatagattgggccaaggactatgtggaactaccggaagtgatgtctcatattgtggaccctgaactaaagcatttcacatacgatgacctcaaactcatctgtgaaatcataagcctttgcattcatccagacatttcgagacggccatccatgcaggaaataagcctcatgctcgagagcagaattgacacgtcggtatctattgagctcgagtcatcttctttggcatgggctgaacttgctctttcatcatgattaattgaagctgctaaccacactattagatcaaaatacatacagttttatcctttnttttcccttcctttcaatctttgtaaatgctgttcgccaaaagaaacatttggggttcatctaattactgaaaaattccac

SEQ ID NO: 29474 - DNA, 340 bp, Gossypium hirsutum
  Clone ID: LIB3083-023-Q1-L1-E9
gagtatggacaaaatcataaggtcgtatagcataaaaaaacaaaaaacaaaaaacacagtgattcaagtggaaataacttaaattatacttagtatagcaacaggtattgtaataccaattgaaactaatgaaatatacttccaaattctttgataatcaatcaaactgaacctttgataataataaaaaaaaaaatcaaactgaaccttgtgaacctttatttcccactttaatctcgccgtccgcaccggcgctgcctctcatttcaccgctaaccggcacaccaacgcctttatactgaggcggcaccataacaccccctggggcagtataataaac

SEQ ID NO: 29475 - DNA, 241 bp, Gossypium hirsutum
  unsure (1)..(241): unsure at all n locations
  Clone ID: LIB3083-023-Q1-L1-F1
atcaatatgcttgcagaggctccagatgcaatgttcactcacattcgtgggggggcatnatccttcatctggttcaattcattgtttacgatgttgtcctgctgaatatgccctatctccccacagtcttctgtcaattgcaatttactactcttacaattgaaaagacatggatattattaataactcttaccctaaaatccatcattccaaatgcactattttcaatggtaaaactgga

SEQ ID NO: 29476 - DNA, 217 bp, Gossypium hirsutum
  Clone ID: LIB3083-023-Q1-L1-F11
ttcactaattctacactaggtcaaaattatcattttcactcacttcaatatctataggaaacggctttattctaaggcggatatttaaaataaaatataaactgttcaatattcacatgtctaatcctctacacaacaaattcttatctattatataaataatccttaaatattacactacacttacttaaaacaaaattacctaaaatatccttat

SEQ ID NO: 29477 - DNA, 385 bp, Gossypium hirsutum
  Clone ID: LIB3083-023-Q1-L1-G10
aaaaacccttgctgccgaaagacagaatagatgagttagcaacgtttatggacaaggtggagacttggttggatgagaaggaggcagagcaaaagaagacgtctggatatagcacacctgttttcacatctgaagaagtatacgagaaggtgttcaatttgcaagacaaggctgcaagtatcaagagaattcccaagccaaaacctaaagtcgagaagcccgtaaagaatgaaactgagaccaaatcagagaacacaaccagttctgagaaggatacctctgaaaatgacaaacccgcgggggactcagatagcttgaccaatgaaaaaataaaaggaggatccgagccccacgacgaagtattatctgtttttaacacaacaag

SEQ ID NO: 29478 - DNA, 423 bp, Gossypium hirsutum
  Clone ID: LIB3083-023-Q1-L1-G11
atttggccaaaaacgctatccaattaaccaaatccaaagcctgacttatctcaaatgaagtaactcaaaatacccaaaagtttaaaccccaaaataacaaaaagaagtaacttaaaacaccctaactcggatggattcaatccaaacccaatctgtgctgcgaatgaaagattccaaacaaaagagatctaagaacaaatcatccaaagcttcctatatatcagtgcaatcatctgagtgggatgggattcataaaattaccttggctctcatggtgatgtgatgacgaaaagcttacagtcgcgggaaaaagctaaagctggtagaagatgctgcttcatcgggtttacaccattatatagataaaccctagggcttatttatgatccagctataccttctaaatgatgggctaaaatttgg

SEQ ID NO: 29479 - DNA, 296 bp, Gossypium hirsutum
  Clone ID: LIB3083-023-Q1-L1-G3
cgacaatgtaacctctaagatccacgacaaggaacggagttcaccagatcatgagaggttgactgatgctctcaaacagctactagaggtgggacaccttgcaattatcatgttcagagggagctatccctgcattcggagttacccattcgtgggggcattcacatttctgggaaaactctcactgtaaggactattactttgtacgttataagttctgacaccatcgactatggttaagctaccaaccatgacatggatcggaatccaccatatcagcagatgtagattattgc

SEQ ID NO: 29480 - DNA, 334 bp, Gossypium hirsutum
  Clone ID: LIB3083-023-Q1-L1-G9
tataactacatgaatccttgaattccatcaacatcaaaaaccttatggggacggttcactcgaataaagtgacaaccctaaacataaactatatacaacgacatgcctacactaagcatcttcatacaccttactttttcttccaaaaaaactaacctaactaaaccctttaactactttatgaaggctctactcatctttccattacttactcctatgcatctattccttatccattccattatattcatatggaattcatcaactcaatttcactaatactatgctactaatactactaattcacagcacccatatataccttattcacatt

SEQ ID NO: 29481 - DNA, 362 bp, Gossypium hirsutum
  Clone ID: LIB3083-023-Q1-L1-H1
gtggatccaaatatatatccagagctggctcttgccctgagggggtccatggaagaggagagagcaaggcaagaagctgctgccaagaaggctgccgaggaatcttctaatccagaaaaagaagaggaagtgcaaccacagtccgattcgcagcatgcaactgaacacgttactgatcccatggatgaggatgatgctttgctaaagcatgcccttgcattgtcgatgaatatcccaggatctgattcttctgccggtgatgctgagatgtctgaggctaccaatgatcaggaattggccatggcacttcagatgtcgatgcaggacagtttaaaagatccatcatcagaatcagatgtgag

SEQ ID NO: 29482 - DNA, 399 bp, Gossypium hirsutum
  Clone ID: LIB3083-023-Q1-L1-H11
gtaacaccatggaacccgttgaaaaagttcttcgtgacgccaagattgacaagggctgtggtcacgacattgtcctcgctggcggttctactcgtatccccaaggttcaaaagatggtctctgacttcttcaacggtaaggaacccaacatgtccatcaaccctgatgaagctgtcgcctacggagctgctgatcaagctgtcattctctctggtgatacctctgaaaagactcaagatctccttctcttggatgatgctcctctctccttgggtatccgaaccgttcgtggtgtcatgactgccttgattaagcgtaacacaactgtccctaccaagaagtctgaagttatcttcacttacgctgattaccaacctggtgtcttgattcaagtctttg

SEQ ID NO: 29483 - DNA, 276 bp, Gossypium hirsutum
  Clone ID: LIB3083-023-Q1-L1-H12
gtcttaataaacgccttctatataccttccatatccatgtactgctctatttctacgtgggcgaatttttagtgatcgacaatcatagagtgcatttcaatccacatcgctcaagctcatattcaattccgaaatgcctgctgggaactttactgccttgaacatcgaatccagcctcattgccaaataccaagtgacaagactttccaaacaggtgacgattctattaacacctttatcagtgaaactggatctcgaaagcacttccctcgttct

SEQ ID NO: 29484 - DNA, 256 bp, Gossypium hirsutum
  Clone ID: LIB3083-023-Q1-L1-H4
ggctgccctctagaactgtggattctacatcaattcttactaggcaacctcttctattaacacccaatacacttctatcgagtcaggtcatctactaaccaatggataaaatctcacacaacattcatcactatactactctcatactcacctttaaatcattatctaaatcagatcaataacttctaaaatgaacccccctctccaaaaaatcaactatacatcccatatcaccatacatacactttactcataa

SEQ ID NO: 29485 - DNA, 350 bp, Gossypium hirsutum
  Clone ID: LIB3083-023-Q1-L1-H5
cccattcccatgcagccaggtgttggaccgagagctttggctagacctccattctttggtccagctcctgggttcatgattggtccaggttaccctggagctttgtgctatgtgcctatcgctcctccaggctccattaggggaccgcattctccacgctttgttccataccctataaatccagagactactgtgctccctccggagatggtaactttgagggctaatataatgaaacaaatcgagtattatttcagtgatgaaaatcttcaaaatgaccattacctgatttccttgatggatgatcaaggatgggttccagtctccacaattgcagactttaaaaagag

SEQ ID NO: 29486 - DNA, 198 bp, Gossypium hirsutum
  Clone ID: LIB3083-023-Q1-L1-H7
gtttttgtttttatatattaatgtatatgaactgatttgatcttatttgaatagagtgagtaaaatacaatcaaatctttaatataggggtctcatacttttatcggtacaaatatattatgtagtaaccctaatccttagggaaaggatgaaagtagaaagaacattaaatggaaaaggtaccatacaatgattacc

SEQ ID NO: 29487 - DNA, 274 bp, Gossypium hirsutum
  Clone ID: LIB3083-024-Q1-L1-A3
ttctgatctatatacaatattattagaagattcatttcggaagcgggctcatataattgtgttattgggcttttgttttacgtttggattggttcttattttcttatatatacctcgggatttttcatttgtatttaatctggtgaattagctgtgtcattctgtagtaatttcaagtatcaaaattgaaaaaattgtttcttgaaaattaattataatacttggggggcctaggtcccaattagccctatattgagtctttttacaatttact

SEQ ID NO: 29488 - DNA, 446 bp, Gossypium hirsutum
  Clone ID: LIB3083-024-Q1-L1-A6
gctaatatgagtgattaacgcagccttgaactagaggaggtgttgcagacatctcatgggaaattggagggtactgacaaaaaggtcaatgagttggagttgttacttgaagcagagaagtacaggattcaggaactcgaggaacagataagcaatttagaaaagaaatgtggagatgcagaaggcgagtctgttatgtactctgataaggtatccaaactctcttctgaacttgaggcattccaagctagaacatcgagccttgaaattgcactacaaatggccaatgagaaggaaaaggaattgacagagtgcttaaatttggcaacagatgagaagaaaaagctagaagagacatcgcaaagctccaatgaaaagcttgcggaagctgaaaatctggtggaaatcttgagaagtgatttaaatctgacacaacagaaactggg

SEQ ID NO: 29489 - DNA, 391 bp, Gossypium hirsutum
  Clone ID: LIB3083-024-Q1-L1-A8
gttgatgggggccctaatatctcgattaatcttcctgggtctcagagattatggtataacggcacgacagtttactttaatcgtgccctttatttatcctgaatatgttactccgactgtaaagaaaatatcgactaaagaaaagatacatttgattgtgaactcctgtatcgtaactggcatcttgtgcaaggctactagccatacttttaaggaaacataacggcatgctgtgaagttatcgtttttgtatgaatctgaagttctgacttggtctaaaacggactttactttcacatatagcgtctcttccagtaacaagttcttagagtgtccttttacagtctgcacctttatatgatcatgaccaaaaggatatgttctgtgtgta

SEQ ID NO: 29490 - DNA, 418 bp, Gossypium hirsutum
  Clone ID: LIB3083-024-Q1-L1-B2
aactaattcagattagcatgtgacatagtagggtcttagggaggattagttggggttggaggttgttgaacagccagattagttctaatgtattgattgaaacaatcattcatcatttgataaaaggcttgtctagcctctccatcatggctactcgtagctggtctagagtcggatggtgctgtcccttacatgggagcaagcacattactctcgacatcgtcagctatgggtcattcaggatccatttgctatataaaaacacattatcattgtcaggattcatcacactattgttatttataaatatggcatgtatagctagactcacatatacaatgttagtcttagaatcgactaaatcgtagctctgataccaactaaatgtaacacccctaactcgtatccatcgcttaat

SEQ ID NO: 29491 - DNA, 286 bp, Gossypium hirsutum
  Clone ID: LIB3083-024-Q1-L1-B7
aactagtggattctggatcctccatcttcataattctcactagttctctgtattccaaaggatataacaagtggtgtcaagtggattaataaggggactttgcaccattttttgtctgttttcatcttcattttatacacatttattgattttttccatattgttaatatcttatctgaattcccatcttaaaaagctttcctccttatcttatgaatatccacttttattgtatcattttttaacgtttcagacatttaataatgctccactttctccttatatt

SEQ ID NO: 29492 - DNA, 183 bp, Gossypium hirsutum
  Clone ID: LIB3083-024-Q1-L1-B9
gcaagtttttacccattgctttttcatctaaggggtagggctcaaattaactgatatcatctacttaaattacataagctactttttcgtctcatgatactacccataaccactcaactatacttttcatagtgggaccaaccttcctgatacatgttacaacctacattcacctttacaaat

SEQ ID NO: 29493 - DNA, 319 bp, Gossypium hirsutum
  Clone ID: LIB3083-024-Q1-L1-C11
gtctgccacagactacaccaatgacgctcaatgtgaagggctcacccttcggtaatctaacactaactatctcatgttccttctcaacttactctctaacaaaatcacctcctttctatcttcttaatcctattcacaaactcctctaatccactatgctttattctaacatcactcaacatatatcaccatattataatacatacatacactaaatctttccttctaaagaagccattactgacaaatacatcttacacaagactaatctgcaagttaaagaaatagtttacttaaacccttctaataatgctcaatc

SEQ ID NO: 29494 - DNA, 434 bp, Gossypium hirsutum
  Clone ID: LIB3083-024-Q1-L1-C5
tatcaatcaaggcttggccttctggttacgggtaagctggattacggtacgctctctcaaattttagctccgagatgtggtatccccgacggagaatcatcatctcccacattgcatgtaaataaaaactacgtgttctttcccgggaaacctcgatgggcgcgtcccgttccaatgactctaacgtatggaatctcccccgacaatttgatccattacttgagcttatcggatataagaaaaacctttaaacgagctttctcgagatgggcatcagttattccggtcagtttcgtagaaacaaatgattatgggttcgctgatatcaaaatagggttctacaccggtgatcatggagatggggagccgtttgatggggtgttgggaatcctggcccactcgttttcacctgaaagcgggaggtttcatctcga

SEQ ID NO: 29495 - DNA, 428 bp, Gossypium hirsutum
  Clone ID: LIB3083-024-Q1-L1-C6
taggctctcaggtccctatataacatttttcagtgctgggttttgaacagcccgtttggtgcaatagaggttggttaataagattctcaaatctacaaacacatcaatgcaatggtaacgaaatcatcacacaaacacatacaaaaagaaactataaatcgaattttcttttctttttccagatttcacttcaagtcctcaacaaccaaacagaactttaagtaaattttgcagaactagaaggaaacatttagaaattcggttccaacaaaagaattacagctcctttcagttcgttctatcgagccattgtcacaatcacccgtacattgacattttcagaaattaattaacgctaagcaaccaaatccaagtaattaaaaaaaaacgcaatcgaaaacgaaaggatttaaactcacgtggaaaaa

SEQ ID NO: 29496 - DNA, 150 bp, Gossypium hirsutum
  Clone ID: LIB3083-024-Q1-L1-C7
tagcaacacgatatgaccttataaacatgttcaccttccatggctacggttactctgaaagggccgacgaaaatttactacttaatcatttatgtctccactctcattcaagatcttaacttcaactctttccacatcaacttatctaca

SEQ ID NO: 29497 - DNA, 438 bp, Gossypium hirsutum
  Clone ID: LIB3083-024-Q1-L1-C8
gtcgaatgcatttttctctaggtgctggctgcagtgctgctgcaggacctgtggggagagtgctggaagcagatcttcgagccggggatagtgggtccggcatgtgctacagttatagttgtagcaaaggggcgtttgttggtgtgtcattggaagggaacattgttgcaacaagaatggataccaacctacggttctatggtgatccgtatctcaccactgccgacatattactggggaccgtggacagaccaaaagctgctgagcccttgtatgctgcactacataacctgtactccagcctacgcttttagttccggcactatttggcgaagcagcttgtgaaacaagcaacagcttgagtgcatggtgcatttcttgccctggatgatttgtgactctatggtttatagtttatatgcatgtggatgatggatt

SEQ ID NO: 29498 - DNA, 226 bp, Gossypium hirsutum
  Clone ID: LIB3083-024-Q1-L1-C9
caacgatgtcctactactcgaagaatacctaagatgaggtttactaggatgaagaacatcacctcacccacttacacatcattgatacaatcgtcgctctatacctaacagtcggatttttgatctctgcattaagactagctactcttacgattcatcttccgatggccactttgattactcacataatgataactctatcagttacactctctaagcttatgcc

SEQ ID NO: 29499 - DNA, 373 bp, Gossypium hirsutum
  Clone ID: LIB3083-024-Q1-L1-D2
aatgttttgttttataatttcgttttgctaaacatggaataggttacttttaaaagtgagaaggttacatatctaaaccaaatttataatcctaattgtcaatcctacataaaataatccattaataaaacacaccttacattacaaaaatcctaatataatactaacaaattaattccattctaacaattatactattattctgcacattttacaaattcctaacttacctaattcttctaaaaccaataaccatccattaaaacatacccataacaactatattaaatgaattctttctacaattcatccactaaaactattcttaaatcaaaaaatttctacttaaaaaaactttcatctacaattcatt

SEQ ID NO: 29500 - DNA, 436 bp, Gossypium hirsutum
  unsure (1)..(436): unsure at all n locations
  Clone ID: LIB3083-024-Q1-L1-D4
gttttgtttttttttttttattcaaaattacagatttggcactgaataattaagtttctaactgacggttgatgtaggtataggtaaatttgcaatttagtcattcaactagtaataagtttacaagttgaatacccaatttcaaaaatttataaattggtcacagaactattaataagtttacaaatttacactttgatcactcaatctttacaccattactccctaatctaataatccaaacaatattgataataactcaaccccaaaccttaaagtcagtgtaaaccccatgcctcaatttaaactcaaccaactcgataatccttcattcttaactcactcaccatttcttcttcgaccaaaaccataattcaagaaaatccaccatcaagctattctcaaacaaaacanataaaaagcgaataaagaaaaa

SEQ ID NO: 29501 - DNA, 446 bp, Gossypium hirsutum
  Clone ID: LIB3083-024-Q1-L1-D6
gcatcctacatgatttcagaactaggaccaatctttagtttttttttttcgattcaaaattactgaattagtacacattaaataagattctaactaacaactcatccatatatatgtaaatacacaatctaatcattatatactaatcatttttattattaaacaacaatttaaataaataaataccatctaaaccactctataattcatcattcaaattcacactttctacattataattgtacttcatttcaaactcttatactaatctaatcttccaatcttttactttatccctctacacttatcctatttaaactatctattctctaactttatctccatcacatcattatctcttccttcaaaccacattcattatatcaccttcaaataacacccttattaatatttaccaccatcaatctaatcttaaacataactta

SEQ ID NO: 29502 - DNA, 305 bp, Gossypium hirsutum
  Clone ID: LIB3083-024-Q1-L1-D7
ctcctgccttgataatcagagtatgtatgctaaggaaggggatgggagttaataaggctgtattgagtcagataatcctagttggattgatcccaatccggagactcagtttaggaggaataattcatgtgattttaggtccgattcggatattgatcggtcagatgatcgtaaattaagtgatttctctttgaaaaaagacttgtagtccgcttataatgaagtttgtttacaagggattagttaaactgaagctagggctgactaattgtgtacatttaagccttatggtgccaaacttactg

SEQ ID NO: 29503 - DNA, 346 bp, Gossypium hirsutum
  Clone ID: LIB3083-024-Q1-L1-D9
ggttcgcaagctccaacaactccactccatactggtacgaccatccaccctgccagggaggatcaacatatcaaggcagaatcaactagtaaccaccgagattgtacttacaacaaaggcttaaagccaatgataactgacatcataatcatttatttcatatttgaaccatgtcaagtctcttagattactctacttctcaagcagtgtcacctataacgtacttatactatatgcttgattctcaaaataccttttgtatttctcaaaattccttatactcaaaacttattacttaataatctaattcatcgattgaatattcctttttaaaaaaaataataca

SEQ ID NO: 29504 - DNA, 282 bp, Gossypium hirsutum
  Clone ID: LIB3083-024-Q1-L1-F1
tgttgttcttgagcaaatcaagaagaatccaggtctcattttacttgacaagacggaaaaatattggccagaattcaacgacgaaaataatggtattgagcactatttacatgcttacaagaagagttacacccagtctatcaataaggtttctttctttcatcatactgatcatcttgaatttgatacatatagagacacaaagcttgctctacatgctaggaggaaaccataaatgcaacatgacccttgattctacacattcattacttgctttacatt

SEQ ID NO: 29505 - DNA, 312 bp, Gossypium hirsutum
  Clone ID: LIB3083-024-Q1-L1-F10
ctattatctactttctatgttaataactctgatgagcgggaaacttaaagggtaggctcaatgtaccaaaaccctaacctggctccatatttgataccaatgtatatcaaagattgcgctaacatctatctgagagtccaaggctacttccttgctaataaccttgccacgcctttcatagcagcctatgcatcaaaatcctctctatggtccatcttctcatacattaaacaaatctgcagcactaaattaactcaaggtaacacctgtctaccaatgatgtacgctcatcactttcatctacttacatgc

SEQ ID NO: 29506 - DNA, 321 bp, Gossypium hirsutum
  Clone ID: LIB3083-024-Q1-L1-F12
gtttttgtttttctgttgtaaaggtgtaaatggcgtaggttataatcagccgggggactcatagagctaccatattagccatctaaactaatcaactcatactagattcactatgtaccctatccacaatggcaaatcttcacatacactatctgctaacacactcacaaaccatacacctaatctgaatctgattcagattcatgatcattcggattcgctttctctcttccttcatcttccttaacaccctttccaaaagcttcaactggaatcaatcgtatatacccaactacaggataaccttttccactcttcttc

SEQ ID NO: 29507 - DNA, 347 bp, Gossypium hirsutum
  Clone ID: LIB3083-024-Q1-L1-F4
ctcgtgctttcctcttctgcatgcaaatccgggctagggagtacttgatcaagttcccaagagttaacaccaatgagaaagatacaacaaccagatatcaagagcacgataccttcattccccagaccacccaaaagccataagagcaagaaccaaggttcatacctgaaacccaaaatcgttatggactttactgacaccagtcaagatcacgctcacgctcatgcataagccagctcacttctaccaccaaagaaacctatgaaccctatgtcacccctgtcagattccaccctgattaaccctataacaacattcctgaattctccaaccatgaaaacacttac

SEQ ID NO: 29508 - DNA, 377 bp, Gossypium hirsutum
  Clone ID: LIB3083-024-Q1-L1-F7
taggttctagcttttgttttttcaacattaaacagctatcagtatcttgcttaatattacggttgcataaacctcaaaaaatcttctcggtatgatggtcttccacaattcaagagtataaaacatccaactcgaatattaaatgaaacacatccatgtaaatcgcatacatatcttgatcttaaaagataatggatggaaacctgaaactgaaagatcccatccatacatcctttctaatatacacacttcttaattaaaactacctctttctttaccaaaagattatcaatagatttccttttcagagatcactgcatattataaaaccccttattcaatattaaaatgttcatatcttcactcaccattatttc

SEQ ID NO: 29509 - DNA, 253 bp, Gossypium hirsutum
  Clone ID: LIB3083-024-Q1-L1-G12
catatagtttcttactctaaactcatgtcacagagcttggttaacaattagtgacggttcacatctcaatcattttaacatgtttaaagtgtacatactacctactacgtaatagactctaaattaacttcaaaattatattatcatacacaatatattagtaataacaatcttatcaatttacaattctttcaacttcaactattactatctactctcattaaacaacaatcactctacacaatgattcata

SEQ ID NO: 29510 - DNA, 242 bp, Gossypium hirsutum
  Clone ID: LIB3083-024-Q1-L1-G3
cactctcataaacaactccactccaaccctccttcacctcataatccacctacttatttttcaactcaacccttcctttctcctaatatctacaattaaacctccattcctttctctctcaaacatcaccctctttcttattctaatcatattcataccatttcttataattttttaatttattaattatcaacatccatcatactctatataatcatttatccttcaaataattcttcttt

SEQ ID NO: 29511 - DNA, 374 bp, Gossypium hirsutum
  unsure (1)..(374): unsure at all n locations
  Clone ID: LIB3083-024-Q1-L1-G4
atcgagtcaattgcttcttcaaagctgcagtgacaggagtgtccctcctcatgatcagatacagtagaggataagtccgatggggaatcatcggttctcgagttttctttgttcttattgaaaaccttttcaagctgccctgcaatagtcttcactatccctttggtgattttcagacatggagctttggcattaaatatgtcttgagatagtttgcaggtgcttttaaattggttgcagtcctcgtggtaaatgtcagattgtgaataaagaagatggttggttgaattctcatgcccttttccatgcaaagaaagggttagaagaatntttcctgcatttattgagaaaaatatactgtaaattcattattg

SEQ ID NO: 29512 - DNA, 411 bp, Gossypium hirsutum
  Clone ID: LIB3083-024-Q1-L1-G5
taaatgagtctcgagcttcatttgtgggaactttcgaggcatgcgtggattcagcccagattgtggcagaaacaaggtcagcgattagaaagaaaagcaagtttaggaaaaggatggagcagcttgattcctcggactgtagtgatcaaagtcagattgataagcatcctgaggaagttggccttactaacactgatcaaacgaatactgtttcaggtccaactctatcggatgaagggaatagtgaagaaaagattgattcatttgatgcaaatgaaacaagtgatgtatctcttgctattgttaaacctcctgttagtcaatcgaggaaaaagctgcttgttcttgatttgaatgggttacttgccgatataatctataatcctccaattgattacactccagatgcac

SEQ ID NO: 29513 - DNA, 376 bp, Gossypium hirsutum
  Clone ID: LIB3083-024-Q1-L1-G6
agaaaagcggcagtcatgctaatgttaataaaacatttgagaatgtgtttcactttcccgaggacatatccgtgcaggaggaaacatcattatcatggcccctttggtttcacgctgctgttcctggaagtattcctttgtacattacaatatattacgaaatggaaggtgtatcaagcatcatgaaatatcgcactctacgcatgcattataatttgcaggttttaccttcattggatgtatcgtttcaacttagtactcgcccatcaagatcgcaagagttcctcttgcgcatggatgttgtcaacaagacgacttccgaatgtttccaagttcatcagttgtcgtctgttgggcaacaatgggaaatctcatt

SEQ ID NO: 29514 - DNA, 206 bp, Gossypium hirsutum
  Clone ID: LIB3083-024-Q1-L1-H2
gatccatgtatataacatatatctagtatccgttctaggtataactgcttccattggagaccaccattcatgtgtcaatcatcactataaccctttctaaaatataattaaatacttcctctgttgggtaccatcccccattaccagcttatcatgttaaatcatccacagaattctatcattaatgatatggctcacctaattac

SEQ ID NO: 29515 - DNA, 297 bp, Gossypium hirsutum
  Clone ID: LIB3083-024-Q1-L1-H8
attgcgtggagtgaggatgccagaattgcgaagtggaggccggagatcgaaacgccttggtgatcttgagcctccgtctcagcctgttgttcaagcagagaattgggtactgcctgctcaaaacagatccaggaggagagttggtggaagaggaaggggtaatgctgtaggtgtagccaaaggaccctcaccagcggtacccacaaggccaagagctgctggtagaggccggtgcattaggttgacagattttgaccctgagctttgtcaagttcttcctgaggctgcacctttggc

SEQ ID NO: 29516 - DNA, 441 bp, Gossypium hirsutum
  Clone ID: LIB3083-027-Q1-L1-A10
gctcagatcagcgggctttttggttcgtaggaaacctggtttgaattaacgccgattccgaaaccggaaagccgacccgtacctagtttttacggaaggaagccgacgctatcggcgacggtgagaaaataaccccactcatacaccctctcgatactctattgcaatcaacccgggtacgctcccgaggaagcggtcccccatactacctgcctgagcctcagataaagctacacgactgtccgaaacgactgaaagagttacgtaacctgcctcgcaaacaggtacacacccagaccccacgccagggaaccaacgggaatcgaagccctcaacggcaatcgaagccctcaacggcaaccacaatccccagccctcaagtacaacacccgccaccgtaagacttcgccacacacacacgcgcgcgcgcgcgcccacctc

SEQ ID NO: 29517 - DNA, 460 bp, Gossypium hirsutum
  Clone ID: LIB3083-027-Q1-L1-A12
tgtctcagaatcagcggactttttgggtcgtaggaacctggtatgagggagttattcgcaaccttcgtaaccttcaaagccgcaagggaatgaccggttaaggactaaatagcccttagtctaatcccggaagagtgaatctaagagaagatcgtattcgtaaaagtcgaaacagtcaaggtcaaattcgtggtaaagcttacggaataaaagaattcgataagcaaactagaaaagttcgcgaaactcgctttcttcgtaagcggcctaattatcgtcctcagtagggacaaaaccgaagaagtagaagaaaaattgaagacaataaaggaggaagaggaaacggtcaggaaagtagaggaactgagaaaggaagaggaagtagtcaaaccaagggagtaatgctcgccggaggagacaatcaaagtcaaggaagtatcagaaaggaagaggtgaaacg

SEQ ID NO: 29518 - DNA, 392 bp, Gossypium hirsutum
  Clone ID: LIB3083-027-Q1-L1-A2
aaacacagttacaatatttataattctttatgttttctggggggccattagctttctttttcttgcagtttcaacaaacctcagattcaagggaagatagaagtattaataatctaagttttgttttttggggtatgtttgtttagggttttggagatcggattacagtgttttcttcttctgcttcttgctggtaatggagttgaagaaggacaagcttgtcaggttctactctgatggaaaacgacataaagaaacaccatggggaaagaatgacccatcattccttgagaagtcatcttctgggtacaagatttcattttcttcagtgctaaaaccggagattggaatggatggaggaagaaatagacttcctgaaatggggaaaattg

SEQ ID NO: 29519 - DNA, 205 bp, Gossypium hirsutum
  Clone ID: LIB3083-027-Q1-L1-B10
gctcagatcagcgggctttttggttcgtaggaacctggtttgagacccacggctttcagcttcggaaaccttcattcgattccgcctccaatggaacccgggcggtccagagccaaaccggccgtaaccaacgagcttgctattgagccgttaccaaacacggaggccgcttttacaagtacgaccaaccggtattcaccttcgt

SEQ ID NO: 29520 - DNA, 445 bp, Gossypium hirsutum
  unsure (1)..(445): unsure at all n locations
  Clone ID: LIB3083-027-Q1-L1-B11
tttttggttcgtaggaaccctggattgagtcgaacttattacccaaattgggacgggattcaaaaaacgcttgtccggttcctcctaaacgtatttgacggtaagcagaaaaaatctcggacttaactaaatcgttttccttaccatccccgcgatagtgcccactttggttaccatttgtaggctgctgatacctctgcctcctcttctgttatcgtcctgcattccgtaatatcggctactacgccgacagacacactgagaagagggtggttccgtccgagctagcttaagaggccgccctcgttactaggcttatcgctatcttttccaacttcaccggtaccagttaanggtccgtgcactaatactccacatttccctcttcgtaccgtcctngtnacctcctaatcggcctaaaccctgctctccgtgcctgataacg

SEQ ID NO: 29521 - DNA, 326 bp, Gossypium hirsutum
  Clone ID: LIB3083-027-Q1-L1-B2
caagcttcgcgaatcaaactcctatagccaaaacgcgcgggcggtctttgcataagctgagcctgggaccacaatagcagacatagctgctgtgtcaaccgacatctcaggcatatatgaatgctgggagcagcctgtagaggcttgctagctctaagcccaaggccttgactcagttgctagacaaacgctgacatcaaagcacaatcgcaggaatcgtacattgaatcagggtgatgccatacatacttgggaggcatgatgagtcactgaactctttcgagagtgcattcacgtacattagagcaagtaatcatgaggacata

SEQ ID NO: 29522 - DNA, 209 bp, Gossypium hirsutum
  Clone ID: LIB3083-027-Q1-L1-B9
cggatccgggataccgaccctaagcgaggtagaaccggcaagggaaagagctattccaataccgggggtaccggttattctgacctttgaaaactgattattaaccgttaatcgactcataagtccggcggcaccgataagttcgcgaccgaaagggccgagaaagaagtcgtagagacgaataagaagctacctaaacacgtccgggc

SEQ ID NO: 29523 - DNA, 416 bp, Gossypium hirsutum
  Clone ID: LIB3083-027-Q1-L1-C10
agcggactttttgggtcgtaggaacctggtatgagttacaccacccggtcttcgaggcctctaaatggaaccacgggttagaaaccgacacacggagcgtaggagctacctctcacaccccgccgcgtggggccttcttcccccgggtcgagctcgaataaggcgccgtataggtaacctcctgcgggccaacagaccctaaatgggatttacggttaaacaccctagagagcgtcaagagctcagcttgataaacgccggaattagatttaaagtcttggtccatcgtaaagtaagcgtccgagtacttccggtcttaaaatgtcaaaaaagtctttaacgcgttctccggcgacgccgccaagctaaagtccaaataacccctaacgacgaatagacctaaaagaaaagtttca

SEQ ID NO: 29524 - DNA, 448 bp, Gossypium hirsutum
  Clone ID: LIB3083-027-Q1-L1-C12
ctcagatcagcggactttttggtcgtaggaacctggtatgagtgtactagaccagcccggctctgaacgcggaacgcctccgttgaccctcccgccctagccggaccgctcgagagcccactcgcagtaacccccgcgacggacctaccgtggtagtccgtcacgaagcctccagaatgcgaggaaccggtaaatcacaacccctagaactaacccccgaggttacccgcgaccactacgtagaaaagtaatctcgtagaaacaagggaaccaacagcctgacgtaccctttagacggcttccagttgcgctatcaacgcgaaactcggacggaaaagcgcccccacggcgcctatagtcgtcgtcgtcgacgagtggaagaacaccgctccgccggtccccgagataacggaaaaaacagcgtgagaacatcccttctacacaatcg

SEQ ID NO: 29525 - DNA, 318 bp, Gossypium hirsutum
  Clone ID: LIB3083-027-Q1-L1-C2
tttattttaatgttgtagaaggtaaattgttgaattttgaaggaacagatccaccaaaaatcagctaaaatttagaccaaaaagaatgagttcgtcaaggagtgtaaggaagttggaagtggtatcaccagtgccggcagacatagatattgcaaactcagttgaaccatttcatatttctgagattgctaaggaccttaacctcagtcccaaccattatgatctttatggcaaatacaaagccaaggtgttgttatctgtactcgacgagcttgaatcctccgacaatggatactatgtcgtggttggaaggatcac

SEQ ID NO: 29526 - DNA, 373 bp, Gossypium hirsutum
  Clone ID: LIB3083-027-Q1-L1-C6
cggcacgagttggggacatctatggtggcatggatgacgctaagattggcctgtctgcatcaaccatagcttctagttttggcaaggctatttctgacaagaaggagcttcaagattacagacctgaagatatttccttgtctctcttgagaatgatttcctacaatattggacagatatcttatttaaatgcacttcggtttgggcttaagcgaatcttttttggaggatttttcataaggggtcatgcgtataccatggatacaatctcctttgctgttcatttttggtcaaaaggagaagcacaagctatgttcttgagacatgaaggatttttgggagctgtaagcgcatttatgagttatcaaaaaca

SEQ ID NO: 29527 - DNA, 458 bp, Gossypium hirsutum
  Clone ID: LIB3083-027-Q1-L1-D10
ctcagatcagcgggctttttgggtcgtaggaacctggtatgagcctaggtcaacgcctcgaacgcggccgacgctctccacggaggcgagaacggccctaattgagtaactgagtccctagtagaaacttcgctgaacgcgaaacctacataggagaagtgcccaacagggaaacatcccgaggagaccagctaagacattgggaagcacgcccctggcgcggacgatatatcgaaggttccggagacgggagtcgccgagacatccactgcacgggaaaacacggatacaaacaggcatacgccgaagaatagtgccattggcgaagccgctacaaaatacccgaataaggaataagaagtcaacacgattaatccttaggatctacttaatctagtcgacccggaggcctaagaaaagacgttatccccagagcggcccgtcagcgaacataagtg

SEQ ID NO: 29528 - DNA, 422 bp, Gossypium hirsutum
  Clone ID: LIB3083-027-Q1-L1-D11
cgcggtgcttgtctcagaatcagcgggctttttaggtcgtgaggaacctggtatgagacggtagcccccgtaatggcgactggagtatcgtcggctgccgggtattctaaacgcggcgtgaatctctcatgtaagtctttccacacgtgatacttgcgggagtattcgccggggacgggctcatgagttgcgcgtgctaattagtctgcgaaccgggatgtctagtcctaatgggattccgatatcacgtctgaaaaggttaaactcgttaatcagtgtcgtcatcccgacggagacgacgaccaacgtccctgttttactactagaaaagatacctacgtgttaagtctacgtcgctacaaattcgcctatactacgtgcagacgaccacacatcgttcgcacgtcccagaaatcatccct

SEQ ID NO: 29529 - DNA, 460 bp, Gossypium hirsutum
  Clone ID: LIB3083-027-Q1-L1-D12
gtctcagaatcagcggactttttgggtcgtaggcgcgcccggaaataagacagtcgggcattcgtccaccccgtaccggtcacccgcataacgccgcggcttccgattggcacggcggaagtctaggcacacgccattagcggtattaccgtctagcggcatcctcttaaagacgacatgaaattctattggagtacaagaagactcccgagaaacgtacccggcttcctcctcggtattactcgctcactcggaccatccgctcccgccgcctgagcggcgtgcgtcgtcgccgacagcgtaagagaagaagacgccttcgggacagcgaactccgcctcttggcgccgcgccaacgtttcatcgctcgtgacagatccctccaataagcctatcactaatcccgtggtaacaatcggtgaagtacaccgtattctcgtgaggacgatacatgagtcct

SEQ ID NO: 29530 - DNA, 394 bp, Gossypium hirsutum
  unsure (1)..(394): unsure at all n locations
  Clone ID: LIB3083-027-Q1-L1-D2
ctccatccttcctcatttttcagtgccgctatcttcttggaagaatcaaatggcgaacgaaggtgccttaaggtcggctatagtatggctatcggtgatcatggttttagttgggttattcacgttttctttgaagaaaattatggtaacttacgcgtttgggatgctcggaattagtgggatactgttgcccgactgggatttcttcgatcgtgatttttctcgctggccttatccggttactgccgacgaaagagctgctcttcaagctcgaagatctggattcaaaaggtacaggatttacccaatgagactaattatttacaccancanttatagcattggcccttacaaagtgtggattttcgtatcaagttaaatccaagaactctac

SEQ ID NO: 29531 - DNA, 435 bp, Gossypium hirsutum
  unsure (1)..(435): unsure at all n locations
  Clone ID: LIB3083-027-Q1-L1-D9
tttttgggtcgtaggaacctggtatgaggaatccgtccaaggatctccccattaagcttaatcctcggacggtacccttacacgcagtcgtcctcgaggaggaaataacggagaacccgccggccctaagccccaaggaagttcgcgtttatggcccgggagccgtcaacgccgtaaccccggaactgcgtctcacagagggcggagacccttagaaatccgtaaatccgtacctagcttacgactactcagccaaaaggacggaaaagagaataaagggggagatcgactcggccgcttcacgttacggaggtccctagctctcgaaagagtccgattaattacctttagagagcgagaccccgatcgaagctacgagcctcgcggagtaactcggggtaaaacacgtagtttcccacgcnctcgatttcccca

SEQ ID NO: 29532 - DNA, 460 bp, Gossypium hirsutum
  unsure (1)..(460): unsure at all n locations
  Clone ID: LIB3083-027-Q1-L1-E10
ttcggtgcctgtctcagatcagcgggctttttggttcgtaggaccttgttttaattaggccctccattttattaggaattctcttactcatcatgcggttcctgccctgtgggccgcttataaggataatcctccgatcgagataaggactgggtagcctgcgtagggtatgtgtgaggcgaatctggcggaggtaagccacctggcggcggacctccctgcggaaggaaaggccgctgatgtgacgaacggtgagaggagttgcggtgagtctaagcctaacacaaaggcggctgttgatgccgtgccctgacatggagggcggagaggatggtgcaggacatccacggcccggcgcgatgatgcggtgtccatcggccttcntggaaagacgattggtggccttaaaaaacgttacgccgaccgacccatcgagtacacgaacggtacctacggccaa

SEQ ID NO: 29533 - DNA, 383 bp, Gossypium hirsutum
  Clone ID: LIB3083-027-Q1-L1-E11
ccgctccgaaggaaaggccggaacgacggggggagaagtagtaataatttctggtattcccgcgccgcccgtcctggcctatttagagaccgccctccctccttccgcggataccgcgtcattcgccccatgcgcggaataaggaccgtagaagaagtcggcatccgtttaacacgctgcatgaagacgaagaaagcttggaaggcccccatagcccaaggtggccccaatttacacttgcccacgagtacgacccgcacgagacccgtccttctcgcacacgacgcaatctccggtcgattaacgaagcaaacgcaatcacaaattccggtactaagccggcgaccgactacctgaaaaaccaacaccgccctgaatttccc

SEQ ID NO: 29534 - DNA, 429 bp, Gossypium hirsutum
  Clone ID: LIB3083-027-Q1-L1-E12
ctcagatcagcgggctttttgggtcgtaggaacctggtatgagtcaattacgtcaccagggcccgggaccgaaaccgaagtggagtgaacggaccgccgaaagctggaccaccggaaaccggggaacctgatagaaacgggaagtgaagatgtcgatagcgacaagagcaagtaacggctgctcttaaatagggtccacaaagggaaggaggaagattttaaatcccggggatccccttctcccggcccaaccggtgttatcgttattatccctgtcgccagctagtcgaggaaactcgccgaccggacgcccgtctagccagttaggctctaaccactctaaaggggaggcctcccctgaatacttccctaggaggaagtacggagaaggcataattgctgaccgtaagaagagcatgaggaagaaac

SEQ ID NO: 29535 - DNA, 324 bp, Gossypium hirsutum
  Clone ID: LIB3083-027-Q1-L1-E4
tgcattaattccgaaccagcaagttatttttatccttacaagtcaatccatatggtagtttattcatatggtgagcgtgaagacacttaagcatccatgcatcttaatctcacacattgtgatttacccacccctagctcaagaacccataacccgttcttattgattagtcagctctatcaaacctccttccttttttttcaccgaatcgtactattactgatcccacatgatgctctgccatcatcataaatacctctctatctctatgcattaatccataagaacctatctaacttgtactcaccttatacttaaattcaa

SEQ ID NO: 29536 - DNA, 335 bp, Gossypium hirsutum
  Clone ID: LIB3083-027-Q1-L1-E6
gttgagcctattgcgcctgcgagttatttcaacgagaggattgattatatgaagggcaaggtccatcctaaccttgctaaagaacggagagccatcataagggaatatgaacaacttaaagtaaggatcaatgcattattctcaaaagctcatacgaaaccaaaacaaggatggttgatgcaaaatggcaccccatggtcctgaaataacactcttgatcatcctggaatgattcacgtctatctatgaagtgccggtgcactccatgtcgatcgcaaatagctgcctcgactagactatgtttctcgttagaaacgacctgattatcagcacca

SEQ ID NO: 29537 - DNA, 341 bp, Gossypium hirsutum
  Clone ID: LIB3083-027-Q1-L1-E7
gttgtctaatacgacaaatccttcacttggaaataatggctccttatctgaaacaggaaagttgaagggagattcacttgaatcattgcacgtgaagcagattaaaaagcacattagtacacctgttccgcatgattcatattcagttctttccataagcagttccggaaaatatcttgcaattgtgtggcccgatattccttatttctcaatctacaaagtcagcgattggtccattgttgattcaggaagtgcacggcttctggcttgggatacatgttctgacagatttgctatactagagtctgcattgccttctagaatgcccattcctcccaaag

SEQ ID NO: 29538 - DNA, 422 bp, Gossypium hirsutum
  Clone ID: LIB3083-027-Q1-L1-E9
ggggctttttggttcgtaagaaccttgtattaaggccccccccccccccccccccaattttttaaacccaatggggcgttatcagcccaggcccgtagttaccccattagattaaattaggcattaaaccttacgatagtccaacaacacacgcagagcttacacggccaaaacgtacttccaccaaactctacaacactataatatttcccctagacccgcctctcttaatctctctcatttaagacggagaactcctccgctacggcgggagcagggagcgggagccttctctctaactatacccggagcgaagaaaccgtgagacgttaaggtccgaacagtacctagtctcgtcttcgccattacgcccgtccttctaatttctctcactctcgtaactccagtctggagatacatat

SEQ ID NO: 29539 - DNA, 450 bp, Gossypium hirsutum
  Clone ID: LIB3083-027-Q1-L1-F11
tgtctcagaatcagcgggctttttgggtcgtaggaacatcgtatgaggagccgacccccacgacttccatatacaaacttcatcagggagtttcacccacccggttccgagaccacaaaaccgaactatatctatattaatatcccacgttaaccgccataaataacctgaacacataaccccctatcccgaaaccccaccatatgaagtaactcacgccatacgtctcgacgtaaaataaagagttcctacagagggctcacattcatagtacaaaaaaccagcaccatagaccacatacaccatcgaacgtccaggacggtacattattcgatctatcgaccaggagaatccccaattctgaagggcgctttggcatttaacctaattcacaacgagctacaccataacctatcggttccttactcataatgctacgatcgggaaaat

SEQ ID NO: 29540 - DNA, 420 bp, Gossypium hirsutum
  unsure (1)..(420): unsure at all n locations
  Clone ID: LIB3083-027-Q1-L1-F12
tcagaatcagcggagttgttgggtcgtaggaacctggtatgagcaaaagtcagtaacactccgccggacctgaagtcgtgagggagaaccgttgatcctgggcgggtaaggctcccttaggaagactagagctatactagtatcgttaccgttgggatttcaggacacacggtcttggagcattcagtttacggttagccaattgagaaagtagacgctcacagccctggngcgtccccatctgaaacagccatagggaagtaaaataataagagtaaagtaatagaacacctagatagtacagcaatagccatccggagatacccctagccagggatcgcggaggagacccacgatttaaactcaacgccatataacgataataacggtagtaatgccaggaacgaaaacnctagagtg

SEQ ID NO: 29541 - DNA, 254 bp, Gossypium hirsutum
  Clone ID: LIB3083-027-Q1-L1-F2
acatgacaatggatttcacacaccttataagtacagttgggggcaagagaggtctccaagaagtgcactgagtccacgaagtgattcccttgatttagccattgatggtgtggtggcaacctccattgagcagctttatcacaatgtttatgagatgcaaagctctgatcaatctccatcaatgtctagttacggatcttacggtgaagaatcgaggatcgattccgaattacgccatcttgtcggggatctcg

SEQ ID NO: 29542 - DNA, 244 bp, Gossypium hirsutum
  Clone ID: LIB3083-027-Q1-L1-G10
tttttggttcgaaggaccttgttttgaggaattaggcaattggccccttaccttccgaaaaggaagggttcccccgattagtaaccagattattccgaaattcctaattcctgaactaacgattaaacgccaacgcaagaaggcttcaaatttataatcgaattcgaaaacttaccgaaattcgaattattcgtaacgaaggtaccgtaaaaagtattgaccacaaacgacgccgataaattac

SEQ ID NO: 29543 - DNA, 427 bp, Gossypium hirsutum
  Clone ID: LIB3083-027-Q1-L1-G11
aacctggtatgaggaaagattaccatcccggaggccgagagcctagacattagcgataacgctaaggtcgagacttaggataaggagggcacctttttagattaatagaggccgactcccgttggcaagtaatccgaagacggttgtatctctgtcgaccataatacttaaaaggaacttatttcttatccggcgtcctgctcctgcggcggcacgtagacccccgcgaagatctccattgggaaaattactattccggaagccgagagtcttgatatcaccgataacgctaaggttaaaacttaggataaggaaggcactttcttagattaatagaggccgacccctgtgggcaagtagtccgaggacggtaggatatccgtagatcataatacctaaaaggagctgatttcctacccggcctcct

SEQ ID NO: 29544 - DNA, 227 bp, Gossypium hirsutum
  Clone ID: LIB3083-027-Q1-L1-G12
ccccccccccgtgtatttgtccccttcggacgagttcggcccccaaggccggcaggtccttccaactttaattccactttcttaaagtctgttcaattggccttcgtatagttcctccctcctaccttcaacgcggcaatccttggacggatgagcatcctactagaatccccctgtacaactttctctacccggagctcgacatgaaaatttcctatccgccgtct

SEQ ID NO: 29545 - DNA, 225 bp, Gossypium hirsutum
  Clone ID: LIB3083-027-Q1-L1-G7
aagctacatcctctccacctaaaacaaacaacttatcggtcgactttctcaaacgggagtctgtcctacacactatcccttattctacaactatcatatccaaaaccaaacaccctgttccatccacatattcagtactcaaccattattatacatcaccacttacacgccttcatatgaacacatcccttcattatcactattactcatcatacaactatctac

SEQ ID NO: 29546 - DNA, 367 bp, Gossypium hirsutum
  Clone ID: LIB3083-027-Q1-L1-G9
cgctacgggaagggactcaacacacagctggccgtgtaggcaccatagtggaggagaaaagcaaagaggtgaatggagagtagactctaaaattaccctacctacgctccaatactttaaacaacacggactgaccatcgaaagtcgtaagagtccttggcctctctaatccacttaactgactctctagagacgccttggaagagactcatagaagtccggacgtcgccggggaaggcgaaaaacggcgggaggtcgcggagtcataaaagtcaaccccggtatacaataacactgagctaccgaaggaagaagcgaggaatccattcccaccgatcgcgccgaaacgcagctataacaagtccat

SEQ ID NO: 29547 - DNA, 419 bp, Gossypium hirsutum
  Clone ID: LIB3083-027-Q1-L1-H10
ctcagatcagcggactttttgggtcgtaggaacctggtatgagttaagaaccgcctctgccctacgaaggcgtataagcatgcgaaagtcttaaccgataccgatcactaatctgacaaccaccactagaattactgaaggcacgctaaaagtagaagtgacaagtaatctccggacggttagaagcactacgatataagcctccgctagttcgcggagctgaacaataacaggttcaccgccttccgtggaccgacagtacggagcccacccaacgacatacccgaacccacctgcgagggagtagaatctaaagcgaataggaaaaataccgtgcggaagagcgacaggggttataaacctggaaagaacgcacacttccctaacccttaaaacggaattccgaccggcggcggaaa

SEQ ID NO: 29548 - DNA, 459 bp, Gossypium hirsutum
  unsure (1)..(459): unsure at all n locations
  Clone ID: LIB3083-027-Q1-L1-H11
tctcagaatcagcgggctttttgggtcgtaggaacctggtatgagctgaaattgctctctatattagtccctgctccctagtagcggttgttattatcgtaggtatccttcccaaagttgtatcttccctcatattgctgacactcctactgattaaactaattgcttctaaattatgtcccatactactactgcttctatggcacctgttgaccttaaaactatcgacagtctactacgctctcataaagattaatgttactgctgttaagacggggatagctttcctgttagccctcgagatgatactgtccgatccttacattcntgccccttagaaagaaaagactctctccgtcggctatgaagagcataccgcgagaagaggatggtacccacctttcccaccggacgacgtccccaagggaactaaatagaccggcgccaccggccggggcc

SEQ ID NO: 29549 - DNA, 392 bp, Gossypium hirsutum
  Clone ID: LIB3083-027-Q1-L1-H12
tcgtaggaacctggtatgagctcgtcttctccagccctttcccccgctttccgcccacgggacgtccttaatctacggtcgttgtcgacgctcagccttggcgtcctgctcgagggtctgtacgggttattgatcattgggtttccgaagaagttcctagcgtgcccggcgaaactgctcaactgaagactaccaacgactgcgagatcggaagactttgacgtcccagacctgccatcccttgcgatgagaaagtcacgagggatgtgactgaaggaacgaatggctaaaactccgacggaaggaatacaatcgctaatgaactttaactgtgtagaagcggacgtcgcggtcgacgacccggaggaagaaatggccgccatagttgtggc

SEQ ID NO: 29550 - DNA, 349 bp, Gossypium hirsutum
  Clone ID: LIB3083-027-Q1-L1-H6
gcgacttgccgttcctcttaatagctactctgccgcaagctattaatcgactagcgagggcaatatacataccgaaaagaaacacttctacagcagactgtgttacacaatgcaatgactcaaatgattgcacttattcgaactaaaaaaatgaaaaagaaaaatcactaaaagaatgtactgcaaacttagattaccaatagaaatatgaatatgtataaaaatctcaccaacttcaatcttgatggaatgcaaaacatgtgacctagcaaatcacactcagacatgacatgatcatgttacacaacctttgcaataatgctataaaatcatgtcctatattattatg

SEQ ID NO: 29551 - DNA, 306 bp, Gossypium hirsutum
  Clone ID: LIB3083-027-Q1-L1-H7
cccctggcttcattaattcctcactacacatatacaatatttacaattatctatattatctgtgcacctttaaaactgtggttgtcctcctattcaacaaccctcatatacaaatctcgataaaactattcacaattcacttcctataatttacactattttaatcatcttcatatactcatcttcttacaactacaactcattatccctgtcccttctaatttttcttaatactcacaacatttcttttcattacttctctagaaactctacaatgaatactaccatttttaatacttttatcca

SEQ ID NO: 29552 - DNA, 469 bp, Gossypium hirsutum
  Clone ID: LIB3083-028-Q1-L1-A10
tggcggtgcttgtctcagaatcagcggactttttgggtcgtaggaacctggtatgagggcgcaaggccaccgcgtccgaacgggttcgctgcggaagtctaagggtatcctaacgacggcaaacacctccccgaaacaacggagtcgcgacgccatacgtactaccattgccctaccgtacgcaacacaatccgaggcggggcggggcggggggtacttccaaaaagaacaggtcatccccaggttcgccccgcacccgagacgaaagaaaaccgggaaacgccgcgtagccgtggccatacgcccaagcccctaaagcatctccccctcacaaccccccccaatgaatactccgcaacggatccgcagagccgcatgctcagctcccccgctattagtcttatcagaaacgtcgcgccaaacgtaaagggacagaaaaaactaacaaacgccacccgtcccactcggc

SEQ ID NO: 29553 - DNA, 468 bp, Gossypium hirsutum
  Clone ID: LIB3083-028-Q1-L1-A11
gtctcagagatcagcggactttttgggtcgtaggaacctggtatgaggaaaaacatagaaaaagaagtacacacggtaagtgagctggtcgcggaagccgatgtgtgcactcgtggtggtgttagaggtggaagtaataataggggtagagaagtaattatacaaatctgagagaaagcggattccccggcccgacaattaactaaggttcaaataaggtgttgtccggggcattctctcatgtaaggcccatatacccgatattgcataagaaccccggcgcccgcacgactaaacacctaagtttagtaagccgtttgggaacgtcgacccttatccgcccaaggttggaaccgaatttaaacgggaagactttgagcgcgtcagcggaagaaagcggctcgctatcagtaatagaaaggtcaactctgagaacacgcggtccgaaattccgacggtaccgactgg

SEQ ID NO: 29554 - DNA, 291 bp, Gossypium hirsutum
  Clone ID: LIB3083-028-Q1-L1-A12
tggcggtccctgtctcagaatcagcggactttttgggtcgtaggaacctggtatgagaagtcataggtaagtgtcggcctcctgtttcgacccgttgagaactaattcgcaattcggcggatataccataacgcgcccgcgatccggaagacttaaagaacaaaccctccgaaacccaaagtacatccaagagattgacccagattctaggcaccttcaattcctatatcccctacctaacacttcacctcacagacataacgtccgtatccgaaactaaccgcaaacacc

SEQ ID NO: 29555 - DNA, 466 bp, Gossypium hirsutum
  Clone ID: LIB3083-028-Q1-L1-B10
tggcggtggttgtctcagaatcagcggactttttgggtcgtaggtccctgtaattagtagaatgatcgcgacttataacactataataaactggaggggtcgaccttagggtcgtttgctcagactgtagagtcccgctcctcctactcgttacacttacattagctggcggtatgcctagcacgccgtctacggaataggattacaactgatttcggtccatcctctctttggagacttccactgtccctctcgttccactcgcctgcccctgtcccctacaatctaatgtataggacataacggtaagtccccgatttgtgactaagttgctggcccacaccattctttacgttccgctttaagctcgcgcctttattagggcccgtccgcatcctgaccttatgctaaggttagtctcatgcaccaggtggcacgtgcctagatatataaatccttactaata

SEQ ID NO: 29556 - DNA, 470 bp, Gossypium hirsutum
  Clone ID: LIB3083-028-Q1-L1-B11
gcggtggttgtctcagaatcagcggactttttgggtcgtaggaacctggtatgagagaatacgccggattccccaactccggaaatttgggggagcctattacgtccgagtccgtcgaggcggcataagaaataacagatttgaacgtgaagacagagcctaggttaaatatagaagacgatttgtataagaggaagttcgacactctaagagttaaagagccatccggccggtaatttaaggctctttcttgaaagggctctttctcaacggccctagatccttgataatgcactcccggcgactataaggctggtagtagtattattattattaatgatctactactccaagacggttcacacatctcctctatagatagagtgacaaaaacacacaacggccaagaggaaaagagtccgttgccgctcccctttcaccgaaataaccaacaccacagcgcactccca

SEQ ID NO: 29557 - DNA, 232 bp, Gossypium hirsutum
  Clone ID: LIB3083-028-Q1-L1-B12
ggttgtctcataatcagcggactttttgggtcgtacgaacctggtatgagacattcctccacttatcatcaccccgtaattacggtgccgcatctaacgtacggggcggtcaccgactaatatacatataactcattttattgtataatacctactctacgccatatatcaaatactatttctacataagactgtccttaaccccaaaagcttcctaatcatcacttcgcta

SEQ ID NO: 29558 - DNA, 237 bp, Gossypium hirsutum
  Clone ID: LIB3083-028-Q1-L1-B2
gtcccccctaagagattcttcagcttgacctgcaagaagagagatagagaaagagttgagcaaaggtacttcccttttattaacaagactgcacaagaaattataaacaagagtgagagcctcagtatttacacatacgatcaagagtgctccctgtgggagcccacagttttcaagcaccctgcaacatttgagaccctggcaatggatccccaccttaaggagttcataatgaaa

SEQ ID NO: 29559 - DNA, 351 bp, Gossypium hirsutum
  Clone ID: LIB3083-028-Q1-L1-B3
gtttctttatagggtgctgacttaacaaaagccgtagcgttaccagtgtgggacacatatacatcaacatctaaccctaatcattttccttttcaagtcctataatttcaaccagtaaccattcctgtctaccatttccttcctatcaatcacattattctaaatccctaagtaaaaatccttaatagtatattcattcactataagtctcatcatattatgcattaaaacagcataaagcaatatccatttttatctatcataatactacaactcatttacttatatcatatctattcattaatcattgctctggtactacatatcattatataattctatttatcacaa

SEQ ID NO: 29560 - DNA, 384 bp, Gossypium hirsutum
  Clone ID: LIB3083-028-Q1-L1-B5
agatggctatcggtaatgcgccctggccaattggtgtcgctatggttggtatccatgaacgttcagctcgtgagaagatctataccaatagtgttgcccacataatgaacgatgagactactcgcaaatacttgcaatcagtgaaaaggctaatgaccttttgccaacgacgatatcctacccttccatctaaagcagttgagttcaacagcttggctaatggtagtgatttacagtcattgctagcagaagagagggattccagggttagttcctcagatgacaagcttaggttaatgcccacttcaacggacacctgattatcttcttatttttcctgaggttttaaattgctatattatacccgagaagttgattatgttg

SEQ ID NO: 29561 - DNA, 411 bp, Gossypium hirsutum
  Clone ID: LIB3083-028-Q1-L1-B8
caaacaaaaagttcgaatgttcatgttaaacttaaacgcatctagagatatcaattgatctttcaaagcacaaacttgtattgctttcacaccctcaaagaattcgcttgaaatttcaagcgaagtttccacaaaataatcaccaacaagtaaaagaaatttgagatttgggaaaaccactcctttaagaagttcatcggtagtgcttgaaactttcatccatcggtagtgcgtcaacagtcccaaaagaaatctcatttcttgaagatgttatccacaaagcaaattggcgaaccacatcatgcattttgacatgccattctccacaatctagtaacaaaccagggttcttgaggatctcaatcgatgcaagaacttcgcttctaacgtctttaattgagtcgatgcctt

SEQ ID NO: 29562 - DNA, 390 bp, Gossypium hirsutum
  Clone ID: LIB3083-028-Q1-L1-B9
tggcggtggttgtctcagaatcagcggactttttgggtcgtaggaacctggtatgagtggtaagttcactcattatcccgccggaattctgagtcggagttaacacatcggtggttacgccggttaggccgttaagactagcttaattgttttctccgacaaagctcgctttaccagtcgcgggacacgcataggccccggggttatcgcgaacgccgtcaaatttaaaaagggctaaatcgccgtagcccccggatcgggcgttgccggctccgttgttgtcgaaggcgtaagggcccgcggggtcctctggactactgtcgccgacgcgaattttagaagacccgaagaagtcaagaggcccgggaccatagaacccgcgaacttaaa

SEQ ID NO: 29563 - DNA, 467 bp, Gossypium hirsutum
  unsure (1)..(467): unsure at all n locations
  Clone ID: LIB3083-028-Q1-L1-C10
tggcggtgcgttgtctcagaatcagcgggctttttgggtcgtaggaacctggtatgagacctaaagtccctaaaagaatagtctttcttttgcgcgtgaaatcgaactaaaggattatcgcttattattagtcggtttagggtggtcgtgaagaaggtccctactctcgctctcaaaatcataatttatcctcctattggtgatgctacggataccttttagacttaagcttccgctccttacgggagaacacgttggcagtcttactaggaaacggcgggatcggggccggctccgggcctctcttaaaaagtttctgcctgtcaaagataccgaaacgaatgaagaagaaattaggacttccgggcgttataataaaggtagccggaggtacgcgccccataaagctagactcgagactagaaaatctgcgggactcgacaaagccggttcnttataaatccata

SEQ ID NO: 29564 - DNA, 219 bp, Gossypium hirsutum
  Clone ID: LIB3083-028-Q1-L1-C11
agcgggctttttaggtcgtacgaacctgctatcagacctaccgtccctaaaagaatagtctttctttcgggcgggacctccaactaagggatgatcgcttattattactcgatttcaagtagtcttaaacaaagtccctactctcgctctcacaatcataatctatccccctattcctcctactacttatacctattaaacctcaacttccactcttta

SEQ ID NO: 29565 - DNA, 426 bp, Gossypium hirsutum
  Clone ID: LIB3083-028-Q1-L1-C2
gaagaatcagtgagaggggaagagagttgagttttcctgaatacgggtgggttcttttcactgtgttagattatttagaacaaggaaaaacgtctttctttttgtactctccattttcaactgaagtagttcagctgccgcatttaggggaacctctcttcttcgaagtggggactttttccttagatgcaacctgccctaaatgccttatctttgtgttgggtacaaatagaaacaattgttatgtcctcctggtggttcaacatggaagattttttagttcaataatggtttcactgagcctaattctgttgttgatgctgcttatgccaaaggggttttctattgtattttcaatggaggtcaatgttgaacttaaagagtggagtggtattctaattgatcaacgatttccaggtgttctaa

SEQ ID NO: 29566 - DNA, 316 bp, Gossypium hirsutum
  Clone ID: LIB3083-028-Q1-L1-C3
agatagagatagaactagtctcgacacttgctggattgcactttgaatggggactctgaccactcccacatttggtacctatgagtcaccaaattattggaaaccccctactcctgtattcaagccttccaaagtgaaaccaccaccatattaacctaatccaccaatgtattaaccacccaaaaaagagaagccctaacctaaaccaccggtttattcaccttcaaaaaaagagaatccttgacccaaaccaccaatttattaaccttccaaaaaagaaaatccttaaccaaaaccccccatttatacaccttcc

SEQ ID NO: 29567 - DNA, 318 bp, Gossypium hirsutum
  Clone ID: LIB3083-028-Q1-L1-C4
tttctgtgtttgattttctttcaatattcaaaaactttgcaaagctagtagttggtgtgattctcttttaagattttgtgtggaaaaaaatagacaaaaatatggctgagcactaatagaataagcacgaggaatctttgatggaaaagatagctgagaacatccatggtcatgattcatcgtcatcgtcttcagattccgatgactacaagcaatcggaatcttcgatcaaggacaaggtgtttcgtctctttggaagagaaaagcccgtccaccatgtttacggtggaggcatacctgccgacattttactgtgga

SEQ ID NO: 29568 - DNA, 385 bp, Gossypium hirsutum
  Clone ID: LIB3083-028-Q1-L1-C6
atttatgattggtgcatgaagtctcaatatcatgctatgttacatttgacagtgaccaactctgtctccgatcagattctgtctgtaattcatatcaaaagataacatggaatcagatcttgctaaactcttcattggtgggatatcttgggacactgatgaggaacgtctcaaggagtatttcatgaaatatggacaagtcgtggaagcaatgatcatcagagatcggtttactggtcctgcccgtcgattcagtttcattgtctttgctgatcctgctgatgcttaaaaggtaattatggataagcatatgattgatggccacacggtttaagccaacaaagctgttcctaaggatgatcaaaacattttaaacaagaacatt

SEQ ID NO: 29569 - DNA, 419 bp, Gossypium hirsutum
  Clone ID: LIB3083-028-Q1-L1-D1
ctttcttccaaataccatggtgagggtggttggggactgtttcttcttcttcttcttcttcttctcaatttaacacggttttgaatatatatatatgtatatatgtataaaagaaaatccttctttatatttatatttttcactcttcaatttctccttcatttccttgcttaatttcccataaaaatcttttacccaaattttatttatttatttcttcttttttctccatttggttcctcgattcaattttcttgaaaatccagaagcaaggtttctatccctttcttggagagcttcttttatttgtctatttgaaaaaaacaagagttgttagatctcaaagcctggatctttgaaagcagagccttctttttcctccttttttggtctaaaagttcatcttttgattttctttt

SEQ ID NO: 29570 - DNA, 341 bp, Gossypium hirsutum
  Clone ID: LIB3083-028-Q1-L1-D10
tctcagaatcagcggactttttcggtcgtacgaacctcgtatcagactccccttcctacacaataccttccattacaatagagggtctctcaagtccgggaaggacctcgcatcccacccaagaaaactcccaataactcaactttcaattctactaacactgtcaccaatcaactacctagcttacaccaatatcaccatttcaatatcaaaacttccccttacacattaacatccacttaactaaccacacttaattcaaacatacatatactcgattaacattcatatccctcaccattcctcccacaataaacctattttccaaacccctacaatat

SEQ ID NO: 29571 - DNA, 461 bp, Gossypium hirsutum
  Clone ID: LIB3083-028-Q1-L1-D12
gcggtggttgtctcagaatcagcggactttttgggtcgtaggaacctggtatgagcctaccccagccggccctaactaagaaagaggaaggggggctaccccgccccggaagaaaaacggcgtagatttccctaccaagtagcatcccaataattctcggaaatatggtcacccacggaatagaagcaggtgggaggtggtaacccgagacaaccggaaaaggctacacgaaacacgggaccagcagataacaccctcggtacgggcacgcattaagcccccatcccaacggtaactttaacccgacgaagaaaaggaatcccggggccaaagccggccggttgcccaaaggaggcgattgggaaccgggcgtaagtctagagtgcagcgagatcgtcaacgaagacacatcgacccctcccccttaaccagatccggtcatctaagcctagtgcgtcccg

SEQ ID NO: 29572 - DNA, 185 bp, Gossypium hirsutum
  Clone ID: LIB3083-028-Q1-L1-D4
gattaggatcgtaagaaacttaaatcttcataggaaatgggcagcgtttctttgaaagtatacaaggtgtacttaaagttcctttttaaacttccggttcactaactgatcccaaactcttttgaccaaatattccattcctattggggtacctaccgaacccgaaaaatccttttccctttcca

SEQ ID NO: 29573 - DNA, 186 bp, Gossypium hirsutum
  Clone ID: LIB3083-028-Q1-L1-D7
aagctgcatattatctttgttagttccgacaaatgaatggcaagtttatataagaaatgcgatcgttttctttttgaagtctggttatagtttttggggatataaaaatgcattgattatttatgcatatcggcagttaactttatgttctagcttattactgtcaactgtagaaataaatctaat

SEQ ID NO: 29574 - DNA, 444 bp, Gossypium hirsutum
  Clone ID: LIB3083-028-Q1-L1-D9
tggcggtccttgtctcagaatcagcgggctttttgggtcgtaggaacctcgtatgagactaaaattgatacacaggaccttagatcgcgatggggggtcctccagctccgctaaaaaactcgcatcccagccacaaaaaacaagaacaactcaaccgggacgtccgccaacaccgacagcaaccgaagaactggagaaccctaattgaccagtcaaccgtcaagggcccacatccacagagcgaccgacgaaacaaacaacagttcaccgaccgacccgagcctctatccaatttgcccgttcttactactcctttctacggtcatcgagaaagcagtcgtttccgtcgtcgccattctcgacctcatcattacacccgataaaactactaataaggaaacttctatcattgctgcgcacgaagactacaagttaaatccacgc

SEQ ID NO: 29575 - DNA, 463 bp, Gossypium hirsutum
  Clone ID: LIB3083-028-Q1-L1-E10
tcgttgtctcagaatcagcggactttttgggtcgtaggaacctggtatgagtatacccaggttcttgccgctgccttcgtaatagagtagggcaccacgtaaaggagcggtaacgactaaggcctacgatccgtgatagaaactaaaaattgactccccggtctatccgaaagactctaaactcgaatccgtctcctcctctgccgtcaaagccattggcggcgtattcaataagtccctcaagacaaaggcggcgaggtcgcttaccgtctaagcctcgatcgcaactctatagaactagaatctcgtaccgagggacgtacataagaagaagaaacctccgttctctgactcttgcttcaagaacatttgagtcacttgtacaaggtccattaagtattaggtactcccgaagattgaatgggagaagaagaacgaaacgcatccattaacgaagaagcac

SEQ ID NO: 29576 - DNA, 448 bp, Gossypium hirsutum
  Clone ID: LIB3083-028-Q1-L1-E11
tggcggtccttgtctcagaatcagcgggctttttgggtcgtaggaacctggtatgagtaaatccttaaaaagcctacccgtagatagccgagcgatggtctaaaggaacggaacggcgttccgcagggtcccaaggaagacttaggcacccctaagtacacacgaaacgagggaacaacgtcatagtcacagccacacgtgacatagtcgacggaacgcaaaacaagagaaacaagactacgacaacacaatccgtagcccctctacgtagaatcaatcctctcgaatagtcggcttataaacggggataatcccctactacgaagcaatccctcaccccacagtacgaacgaaataaatttaaaacccggaaaaaaaaatccaaaccaaaaaaaaaaatctgagggggggtttggcatttaacctgtttcacagcgagctgcaccat

SEQ ID NO: 29577 - DNA, 467 bp, Gossypium hirsutum
  unsure (1)..(467): unsure at all n locations
  Clone ID: LIB3083-028-Q1-L1-E12
tggcggtcgttgtctcagaatcagcggactttttgggtcgtaggaacctggtatgagtatcccgccggagaactatccaagaccccgtgttggcaggccggaggctacgtagtggcatcaggccccgccggagtattccggatgactgttatacacacagcagagggaggcataatttgaatccacataattacaaagagcacgcgttacatagtattgaacccaccgaggatctcctccctctacccaataaaggtaacacttgaacataccacccattaagcggagctcggagtataccgtacataaacacccgacctccggggcgggtaatcattattcgatacgcgggagtaacggctaaagttccatacaatcgagaccgcgagcgcagcatgaaacaaacgtttcaaaatattcnccgcctctcataccaatggcaatggcggttcctccgaatgtacgaa

SEQ ID NO: 29578 - DNA, 299 bp, Gossypium hirsutum
  Clone ID: LIB3083-028-Q1-L1-E6
gttaagttgaagggaactgctggaaacgtctgcggtgaagacaatgagtgtggcagtcaattttttgattctccaggcttggaggatatggttagtggtaggaggtcccactacaccgagggaggaagccctgtgtttgatgattctgatcaccgcgtctgtgatcatagtcatccaacctctttatcttctgattcatttctggagggagaggtttgtaagagagtagttattagtcaagatgcctgtactggtgagacacaatcatctgattctgactcttctgaagaagatgaaaa

SEQ ID NO: 29579 - DNA, 378 bp, Gossypium hirsutum
  Clone ID: LIB3083-028-Q1-L1-E7
caagtgttctttttcccttcttttgaaggggtggtttagtggattcaacagagactttgagaaagagaagaagatttattttttttaaaggagaatttttttaaagtttgggcttttgtttttggattaaaaaattcaaatgggatcattttcagggcaaagtagtggaagctgtgatctttcattcaagatcttgttgatcggagactcgtctgttggcaagagtagtatgcttcttagctttatttcagcttctgcagaagatctagctcccactattggtgtggattttaaggtcaagttgctaagtgttgctgggaagaggttaaagctcactatttgggatactgctggacaggaaaagttcagaacacttac

SEQ ID NO: 29580 - DNA, 424 bp, Gossypium hirsutum
  Clone ID: LIB3083-028-Q1-L1-F11
tggcggtgcgttgtctcagaatcagcgggctttttgggtcgtaggccccagaggaagtcgccgcctccttctcacggacgttcgagcacccctaggggaccaggagattacggaaaggcgcctccacgcccggtttcttcggaatcggtaaaatgtcttcggtcaaagtagccgttatcgagcgtggaataatcccccctaacgccctcctcgtcatcccagttctaaagcggtacggggagagcgaatgtacggcctggcgtccgcccgactccgtaagagtccacgtatttagcataacccccaccgacgagaccgatctctcccgtaacgtttgcggggtcctcggcgagtacgagctactcatgagggccaaacttgaatcctccgcctaggcagacggcgcaaaccacatcggtataaa

SEQ ID NO: 29581 - DNA, 186 bp, Gossypium hirsutum
  Clone ID: LIB3083-028-Q1-L1-F12
gtctcagaatcagcggactttttaggtcgtaggaacctgatatgataattaccttcatcactcacgaattcgtacacatcagtaggcccacttgactgggaagtggcacctatacacatataatacgtacccattaatacaacctatcctgtacctaagtctaaacttcttctcgacttaccatcg

SEQ ID NO: 29582 - DNA, 314 bp, Gossypium hirsutum
  Clone ID: LIB3083-028-Q1-L1-F8
caatagagggatttaggcagttgctggatgaagcatcggaggatattgatcatgacaccaattatcagactttcaaaagaaaatggggaagtgatccacgatttgaggctttggaccgtaaggatcgggggcttctattaaatgaaagggttcttcttttgaagagggctgctgaagaaaaggctcgagttatacgtgctgctgctgcttctagttttaagtccatgcttaaagagaaaggagatatcaatgtaaattcccgctggtccagggtgaaggatagcttaagggatgatcctaagtacaagtgtgtt

SEQ ID NO: 29583 - DNA, 464 bp, Gossypium hirsutum
  unsure (1)..(464): unsure at all n locations
  Clone ID: LIB3083-028-Q1-L1-F9
cggtcgttgtctcagaatcagcggactttttgggtcgtaggaacctggtatgaggccccccccccccccccccataaaagaaacaggactaacggttccacacacggacgacacacaagaaaactatattaaccataccataaaactaaacccacgctatcaacgcaatacgacacacacagagacactcaaaatcccagagaaaccgaaaaccgacaatatttaaacaccactctggagaagaccagaggtcatcttttctactattagcgagagcgaaaccaagggcagttaacgctacaaagctccgaaaagtcccgaacctaacgtattaagagagtaaccaaagagattaatacggaagagtacaagaagatagtggaaattggtaaagtagaattcgtcttggcagttaccgtangagaaggagtaacacttcgcgttacggctttggatataataaa

SEQ ID NO: 29584 - DNA, 423 bp, Gossypium hirsutum
  Clone ID: LIB3083-028-Q1-L1-G1
ctcaccaaatctcttctctatgtctatcctcttcctatgtgccgtgttctacatgcagaggcatgctagagagtactttagcaaattcccaagagttaacatcaattacaaagagacatctaccagatagcaaaaatacgagaccttacttcaccagaccacccaaaaccctgaacttcaagatccaaggttcattccttaaacccaaaatggttatcgcctttactgccacaagtcatgctcaggctaaagctcaggctcaatctcaagctcgcccagtttcactacctacgtaacctattaaccctatgttacgactaacagattccactatgatgagctgtataacatcattgatcgaatccttcaacaatcaatacacttactactacaacaagaatgtctataagtccactaagcttc

SEQ ID NO: 29585 - DNA, 431 bp, Gossypium hirsutum
  Clone ID: LIB3083-028-Q1-L1-G10
tggcggtggttgtctcagaatcagcggactttttgggtcgtaggaacctggtatgagtccggcctagatacccggataatggaattacgcgggtcggaatgagggcctagctataaccttcttccacgtctttttctaaaagacgtaggtttgttagaccttatcagacatcttatggctcacccccgctcatccttgcggaccgccccacgacgcgaacaacgatttcgaaggcggtcatcatgtaagaggcgtaagggtagtcgcccgggagaatcctaagaataacttatcccctgatactcctatcgaatacttaatcatccatcatgaagatacgtaatgagtcacacctcgtccgggtttatcagggcgggtatttcggagcttgaggtcaacggaagtcgcggcacccgggcgtaccttcggta

SEQ ID NO: 29586 - DNA, 465 bp, Gossypium hirsutum
  Clone ID: LIB3083-028-Q1-L1-G11
ggcggtgcttgtctcagaatcagcgggctttttgggtcgtaggccctaacaggtaagtatcccacggtcacggcttattcctaacgttaaggcgcgttaagctacttcggctactccgtctgcgccgtcgttttggtaagaaggaattcaaagacttactagagtcacacagggacgtacaatgggaagaatccgacgtcgttactcccaattccagggaaaccgataaccacgacgagcacgaaagactaacgccgactctctaaataagtcccgagaaaatccccggtccactcctagctcctaccgaactcatatcaacggagaacggaggatcggtcgaactcgttaatttccttatatcaactaaggaagtaacctacgctactggtcgcggtcacgaggagaagatcgtacgggggaaagagaccggacggacacacggcctagctatcgaggacactc

SEQ ID NO: 29587 - DNA, 473 bp, Gossypium hirsutum
  Clone ID: LIB3083-028-Q1-L1-G12
tggcggtgcgttgtctcagaatcagcgggctttttgggtcgtaggaacctggtatgagggagccccatgctcgaccgcaccctcttagtagtggatgcgcatattaaacggttgcgcagacccgccgcggcggccagaccctaagacggcgcttgatgtaagtaagaagaaggtcgtctagaagaaggtcgtcgttgtcgtaaagagaggagggaaggttgtcgtactccttaaggtggtagtcgtagtgattgtggagaatggtgccgacaacgtcctcgacaaagccagtacgtcttagacacttgactggattcgcatcggcgcctctcgtctgtacttctcccttagagacacctgcacagagcttccactagccatcccttatggatacgactccaccgccgacctaataccggagtccaaccacggtagatgtcacggcccgtcaggaccaaacggccgcgggaaac

SEQ ID NO: 29588 - DNA, 377 bp, Gossypium hirsutum
  Clone ID: LIB3083-028-Q1-L1-G9
ggcggtgcttgtctcagaatcagcgggctttttgggtcgtaggaacctggtatgaggggaagtagcaaatatctacggccgagacggaatcgtgcgcgaacgaactagggcacgcccgccacgatcgcaggctccaaaagccgcgcatcgaccttagcagatcgacacaaaaaccccttcttacctgcgtctctaggcgtaacgaaggtaccagccggacgcaaaacaccgtacccaacccaacgggcccggccggacagcaacaccggcccgaggtcaccgcttctctctcacgaacgccccgagaacccggcaccgacgcaataaccgtcggtcccccctaagctaacgcggaaacccaaaaaacgccggcccct

SEQ ID NO: 29589 - DNA, 247 bp, Gossypium hirsutum
  Clone ID: LIB3083-028-Q1-L1-H1
tcaactcctctttgtatcatcagatggaacaatattaggtgcaggtttacacaacaatacgatatttacattacaaacagaaacaatgccaatagaggttgctactacatccaatctctttgccttcaaaattctgatgcctctcacacaacatacgcaatcttctataaattgaaacaacatatactaccttcttatgcacaatatatccttatctaaaaagtcaactacacattcattatcctta

SEQ ID NO: 29590 - DNA, 394 bp, Gossypium hirsutum
  Clone ID: LIB3083-028-Q1-L1-H10
tgtctcagaatcagcggactttttgggtcgtaggaacctggtatgaggcccccccccccccccccccccacacaaaaagtagggtagccacacatgaaagagggtccttactcaaataccacgtatacaaatctcaatcatatccggaacactaagccttggggtctcaattcgcgcattgtccaatccaagcacgctaaacgttcctcccaaattttatctctctctaaattctaccctacaccggtacaattatcctaatcgtatttataactaatcgacaacattcaactcaaataagtcgatactaataacttccggacgaatctgtattcctcaatcacacttctacgacttccgattgatacccggtatacgttaagtctctccttta

SEQ ID NO: 29591 - DNA, 432 bp, Gossypium hirsutum
  Clone ID: LIB3083-028-Q1-L1-H11
ggcggtcgctgtctcagaatcagcgggctttttgggtcgtaggaacctggtatgagtcacccatgagggccacgtttctttatacgttacctgctggtccgatccggtcggctgagattctatcgaccatccgacgaaaacctcgatcgagtgcggacaccttcctattattatagttgaatgggaaaccgcgagagatgccaaggaaaagccgctccataccgtttccgatcacgaataggagtcagagattctaaaaataagtctactagcagagaagagtcacgagccattcgacggctaggccaccattaccggcgtcgaatgccctagacgttctgaagcgtccccttaattacttccgaccggcacggaagtcgtaagtacttacgagatcatacataacctaacaacgaagcgtgacgcggacac

SEQ ID NO: 29592 - DNA, 442 bp, Gossypium hirsutum
  unsure (1)..(442): unsure at all n locations
  Clone ID: LIB3083-028-Q1-L1-H12
gtctcagaatcagcgggctttttgggtcgtaggaacctggtatgagtcaatacggattggctgacaactgttgttgcggagaagagttccaaacataagggcaaagataaaagatcttcggaagaagttccgatgtatctcctgcgttgtgaagatacgctgcatgaaacatcggagcctaccggggatgtggcgtctggtccggtcgccgtcatttaccctccttgcccggagttgtgatcgaatctcgattagtccatgtggtcttggaaaaaaagcgcaagtaataagagatcggtgtatgcggtagtcaggtacgggtccaattgtcctgctaggaggaaagatatcgtcttctccgattctaccgncaggaagcacgcangggtagccaaataaggagacgactacaaaaatccggtagccttaggcaccccggtcg

SEQ ID NO: 29593 - DNA, 426 bp, Gossypium hirsutum
  Clone ID: LIB3083-028-Q1-L1-H7
agcaaatgggtgaaaatgaccttaaagagctagggatggctatgtatccaggtgcttaccatgttacagatgagaagatttacaatttgtgtctgctaacaataaatttaggggattcgataaaatgggttgtgatcagggtgtcttctagattcaaatccataatcatctatttatgtgaatatattgtttgggccctaggaagaagacacttctggctttgctgcttgtaacagctcattttttgtgatgacagaaacagtggtttcgagaccacaatcccgatggaattttgaaggaagaatagccattgctagggtttgaaggttcgattagcttaggtgtgtgcatgtaagtgatcccgagccccatttttaatgattattatgtttatgatatagttttagcttaatctagctagcctgg

SEQ ID NO: 29594 - DNA, 468 bp, Gossypium hirsutum
  Clone ID: LIB3083-028-Q1-L1-H9
ggcggtgcttgtctcagaatcagcgggctttttgggtcgtaggcccccccccctccaatatataacaatacctcccccacaacaatatataggaagacacacacgaaagaaaacggggctcaaaaactatagaaaaccgagaattttacacgcgttttttccctaatacaaaaccacaatgctctagaaaaagagaattagttacttattcaagaacgttaaaattagtcgagcttaaacgtttgagcctacaacgacttcaggagacgacgaatttgaaaatgaaggtcccgacgaggaattagccctcctggaccccgtcgtcgacggagcgctagtcgacgggttaacattaagagttggggtaggcgtatgcgctggaggcacgctggctttgaaaacggttcttggaaagaggattccactgacccgacagatcgtgatcggtccggatgcacgcatcgtgtc

SEQ ID NO: 29595 - DNA, 235 bp, Gossypium hirsutum
  unsure (1)..(235): unsure at all n locations
  Clone ID: LIB3083-029-Q1-L1-C12
ctcagtcaancacacttattaancaanntctatttaactgaacacacactgtctcaaaaagtacacttcataccaaatttggcacacccaaatatcttttcacacacttaatttctcaaataatctatatcttcatatatatatattataataccccttccattttcaatttatatatactattctatttaacaaattaatcacccaatatcaaatccaaaaccatatcaatatt

SEQ ID NO: 29596 - DNA, 396 bp, Gossypium hirsutum
  unsure (1)..(396): unsure at all n locations
  Clone ID: LIB3083-029-Q1-L1-D4
aaatataagcnatatttcatataaatgaaaatttttttcactaatgtaatacataanaaggcagagcgtttttattaaatactagggaaaatatcatttnttttaattgctttgttagtgttttttaccaataatgactttttttctctctcttttttgttaataatttttttaattttcccaatatgttaactaagaaaatttacctaaaaaaaataaatttattgcaactcatttcatttatctttacatatatattaaccatcaatttttgattataaaatattttctatctttatattacttctcttcattattgactataacccatttttcttatcttttaatactctaatctgccatgataatccttattattcttcaccatttttaaac

SEQ ID NO: 29597 - DNA, 351 bp, Gossypium hirsutum
  Clone ID: LIB3083-029-Q1-L1-E10
cttacgaaactccccaccccccactaaaaaatttaattttttaattacacacctcactgttttttacaatgtattctcatgaaagccaaaaaaacaagctcctattgtttactttgctttctccggagttcggaagaaaactgactaagcttcattccacaaagcattcttgccttctccacaccgtccgtgaacatctttcatcctctcaacagacttgcatattccactgcaggtccaatcgaacgaaacaacacaaacgctgcctgctttaaccttccactcgcaatctgtggtgccacagcataagcttcgatcatctatatgatcgacatccaaccctataaacca

SEQ ID NO: 29598 - DNA, 398 bp, Gossypium hirsutum
  unsure (1)..(398): unsure at all n locations
  Clone ID: LIB3083-029-Q1-L1-E11
acttaataatcanaacatttttattaaactagcaaatcatgtctatttgaaaaatttttcttaacttcccctgtttttaactttcatatagcatgcaatttatcaccaatattacctaaaacctaccctacataaaaccatatcaaaaacataatatatttaacacaaacatattataacaacctcactttatatattaagagacgtgctcgtgcctaattccttcatcctcttttatccactatttctagatctgtcgccacctctttttatctccatcttttgttccctttagttagggttaatttcaagcttatcataatcatattcatagctttttcctgtttaaaattgatatcctctcacatttccacacatacatactatccttaatcata

SEQ ID NO: 29599 - DNA, 452 bp, Gossypium hirsutum
  Clone ID: LIB3083-029-Q1-L1-E4
taattttcagtttgtttgaatataaaatacaatttttttataaaaaaatattttttttaattaagtcgatctgaataagacacgctcttttttacataatgacgaaacactacatataaaatttcaagtctatcatatcatttatctaaaactattttattaatatccaaaaagaaaagtccatctctttttttaatcatacatttaagtgtactcgctttttaactgcattataaacttttcacctattattacattcttttatcacacaacttgataattcctcttaatcaaattttttcccttataaaacttttctaaattaacttcaccgccttttatattaataattttcacaacctttaatatactttattttctcccttcttaaaaacctacataattttcaataacacattttaattttctttattctcaataaactctcattt

SEQ ID NO: 29600 - DNA, 394 bp, Gossypium hirsutum
  unsure (1)..(394): unsure at all n locations
  Clone ID: LIB3083-029-Q1-L1-F11
gacaaanaaatgaattaatttaataacactccaatgtttaatccatatttagcactcaattcttatggatgttttttataatataacaagtcaaccccanaaaataaacaatttcaaacatgcaaatctatttgtttctcttggctcaaaagcatatatacatatacacaacattgttatatacatgacaacatatatatgcatttataatgatacatatttcattcaaagaaattattaaatccaccctagtaaactcaataattttaactgaaacaccatctaaataatcccatcaaattcacatatacattcactacacacatcatattccaatcaatacactatccgttcattcgtacttttagccctcttcatacaccatttttaaacc

SEQ ID NO: 29601 - DNA, 417 bp, Gossypium hirsutum
  unsure (1)..(417): unsure at all n locations
  Clone ID: LIB3083-029-Q1-L1-F5
acaaccaatacaccaanttttttatatatgcatgctctaggatctcatacaaaactttaaaaatcattcaggccacatactttanatcttataaatttttcacgtctatcatcataaatatcacctcactaataataatacacaataaatcattacataccatttattcaaaacaacactaaataattaaattaatctcccaccattaaatatgcaccaaatataaacccataactcctataaaataacataactaacctcttcactaaaaaataatatacttatccttcttccttgcttcaaatatcatattgttaccctaatttatatataccccttttatcaaaaaaaccttcttttcaaccttttccctcaacaaacaacttttcccttttcaaactttctttttaactccct

SEQ ID NO: 29602 - DNA, 375 bp, Gossypium hirsutum
  Clone ID: LIB3083-029-Q1-L1-F6
caaccaaacatatcccaatctatataaacaataaatcccttctaatccggaaaagttttaaacttaagggggcccaacacaatcctctctcaaataatacaatataacgtttaactaacctattctctctattataaaagtcccatatcataacatcatcccataaatcactataaaaacacatccttattaatccaatcaattaaacattacaaaactttttcatcaaattttaaccactctttttttttaaaccatcatattgatcaaaacccattccatatctaaccatcccataatcttttattccgtccacattttaatttcttcactcttgttatttccaactatacctccccttacatccccctaaaa

SEQ ID NO: 29603 - DNA, 374 bp, Gossypium hirsutum
  Clone ID: LIB3083-030-Q1-L1-A3
gttaatgtccatcctatatttgaccttgtgcttaaaaaagctgaaaagggggcgggtccttttcaacctggacagggttggtatgattttcgagctggattctggggtgttcttggtgggccttgtcttggcataatccctcgatttatcgaataatttaattatccaatgccagaaaactgtgccggaggaaccactggtgttttcgtaaatgggagagagctccatcagaaagatttggatttgcttgctaatataaggcttccaaccgatagagatagatcttacatcatctagatctctggcagaatcctggacgaatacacttgtgaatagctagattgccttggcaaacttgcccctacagttgataa

SEQ ID NO: 29604 - DNA, 278 bp, Gossypium hirsutum
  Clone ID: LIB3083-030-Q1-L1-B4
tttgttgcaatcaaactttccatgatacttttacctttaaaaaaagatcacatttcctggatgcgttacatccgcatagtggggaaaatatttaccaacatgatttacaaacgatacatcatataactttcgtattataatccaccaccatttatctttaaatttacatatatatacacttttttttcaaatattgttaaccttattattcgttacttacaattccattccctttctaacatttccttttcaaatctttcaaactctatatatttttt

SEQ ID NO: 29605 - DNA, 440 bp, Gossypium hirsutum
  Clone ID: LIB3083-030-Q1-L1-B5
tatgtgcttacgtggtgcgtgtgaatatgatagaagggttaggatgaaggaagggagggaagaacagggcgcgactctgaagcgcaaggggacgcggagagcctcctacgacaagggacgtacggacgaagtacttgacgtctattaactagtcttgttatgttattttgggttccggtactcttgctcctgttcctcgcactcatcctcctcgtgaataacctcataacacgtctcacgtctattacttctacctaaccctctatgctaaagttgcggacgactatgcaaattcccggacttatgtatcttaccttactactatccaacacgtccgtcaatacccctctttaattcctaacgcccagaccctacattgcgcctttccttcctttacccatcaactcccctccgtcgccttcataccccatctttcctaa

SEQ ID NO: 29606 - DNA, 225 bp, Gossypium hirsutum
  Clone ID: LIB3083-030-Q1-L1-B7
cttttggtcatcgtcatcatccatgagtaaacgacataattcagcagcttcagcagcctcaggttcagtttcttcttctgcctgagccttatagggacgtcttctcatcttgagccccttaacagcatctgctttgtcaaccttgttattgttgttaccttcttccccttcttcgaattcctctgcatcaagcaaattttctaggtcgccagcaaaggaatcaag

SEQ ID NO: 29607 - DNA, 424 bp, Gossypium hirsutum
  Clone ID: LIB3083-030-Q1-L1-B8
cataatacagatgctatttattatgaaaaaatatataaagaacaattaagaataacagatctgtcatgttctttactgcgagtacaatacgtagcagtgtttgacaaaggcactcgctccctcaatctctcaggatccaaccgttttgataaagcacatagtcttgaatgaatgataatatacaaacatataattatatgaatgaccattgcattaaccatatctactttatactgtaccatgcacattgcgtcttggaataccaccaactataataagactaatgcttacgaactgttaaccgatgaacaattcattctttggatcttattcacaagcacgttaacttgctctctgtacaatctattcacgtctacaatatcatcatagagtacctataactcctcatggcgtttacccatta

SEQ ID NO: 29608 - DNA, 454 bp, Gossypium hirsutum
  Clone ID: LIB3083-030-Q1-L1-C1
ttgagtgcaatggccttgtctagaatatctaccatggtatagcagctctacacatgagatactcatccgttggagcatcatcactgacaaaaatgcagcacaaagcaactcccatccattgactatcatttcgaacttccagaggcaaatttatcttaaaccaagactcacctctttgttgactaaaccattctgcgatttcacttccaggtagaataacatcaaacatttctcttgaatttccaaaaacctgcaaaataaaacttcgcttgtttggtaattaacaccatgaataattataagacacagagaaacagagatattaacgaacctttagatgttttttcagcaatgttaaggcaccgatgttctcagccaatctgaagcaattaacacctactatatctgaccaataacttgaccgataatttgaattgtaaacttttgatggatt

SEQ ID NO: 29609 - DNA, 369 bp, Gossypium hirsutum
  Clone ID: LIB3083-030-Q1-L1-C3
tccataatcatcccaggtaatccagattcaagtgcacaaatttcccgtccaccttgcactctgcgaacttggactggctcaactccaccttgggccagggtatcctcagtttcacctgaaatcatgtataactcctcatcttgacttggttctttatatggtttccgccaatcctgaaatccctgaattaattcccttcttatatcaaaaaaagtctccctcttattcccgcgcttcttgctttctagatagttatcaagacgaaagctttttaacaaacttggtctgtccctaacatgttctattgccattttcaatgcatcattcctcattattgtcacctttaaaatcctcatcgtaaacatcttt

SEQ ID NO: 29610 - DNA, 293 bp, Gossypium hirsutum
  unsure (1)..(293): unsure at all n locations
  Clone ID: LIB3083-030-Q1-L1-C4
cgaattcggtnggcagccnncgggggtaatccacttttagttcttagagctgtgtccgtccatccgtcggtggagcctccggggctttggtgttccncnttttagtgagggggttaatnnttcgagctttggcngnntaatcatggtcattnnngctgtttcctttgtgtnngaaattgtnntatccgctttcacaatnnntccacacctaacataccgtagccntnggaagccataaannngtgtaaagcccctgggnngtgccttaatnngagtgagcctanannctcaca

SEQ ID NO: 29611 - DNA, 383 bp, Gossypium hirsutum
  Clone ID: LIB3083-030-Q1-L1-D4
ggaaatggcaaggcatacatgtgttatggaaagaattttaagattggaaagattttgtaccgcaaaggtcggtgtaacatcatagaactacagataaatcctcctgcacagatttaatctccttgacctaacacacagacacatatgtcgccactccaacacataagttactaacagccaccagttcggacaaaacacaacttcagcactatacatctcagacagacaacaagccaaatctgcataaggagtctctcccctcatgcaacataatttccccatggcttacttacctctttcgtcgtttggcattcacctttaaatcatatactggtgaaggatgaaacccattctgagatcttttcagatcatccttaaaacat

SEQ ID NO: 29612 - DNA, 391 bp, Gossypium hirsutum
  Clone ID: LIB3083-030-Q1-L1-D6
gttcagattatgcaacgcccttatcctggtgactaactgagatagacacacactggacgcaaaactgagcctgggagactctaatggggtgcagactctaccggcacaaagacataagctcgcattaatcctaacccaggctgtcaatgctctgctacgtgcgcaaaatgaattagcactgcactttgaaacagatgctcatacttctagctctgctacgaacatagtcccaaccataatccataacgcttcatgagagtgaccataaccgtaccggtcgcctactattaatcccctaactatgcggcaaccattaaccattccgtgtggaacgatccgtccatgtaaccctttgcataagcctgaccgccattattgcatatctcagctt

SEQ ID NO: 29613 - DNA, 437 bp, Gossypium hirsutum
  Clone ID: LIB3083-030-Q1-L1-E7
cctcaagttattgatctattctgttaaataaataaaattcagtaataataataataataataaacatattcaagtattacaaatattccatcgactggcatcccaaatacatctaaaaaaagagaattttacaagaaaaataccataaaataaaaatacagtccatcttaaaaaataatattatatgaaaacaaggcacttgaaccacattagaatcaatataactcatatatatatatataacctacaaaacaatatacagttcacattaatggtaaaaagaagaccatattttcatgactcaacagagatgtttccgctactcggattcgtgatttacggagcagtaactttcattgatgtcggtaccggttatgatcgatctttcaccataccagctccgatactgctctgcccaacaacccgacccttacttt

SEQ ID NO: 29614 - DNA, 411 bp, Gossypium hirsutum
  Clone ID: LIB3083-030-Q1-L1-F1
cattcatgactgcatccatggcaaactattgcctgagatggtttctggctaccacactatccaccacactaggtatggtcataactatggccggtacaccatcaggatggatgggatgcttgcaaccctacgtgaccctagtgacgaagaaagcgagacggtcaccgacttaccttcgagctcatcttgacatctcctgcgcgagtcgtaatacattctctctctgatgaatatgttcgcatgtatcatcgaggctgatatcatggcgtagactgcggtgcaacagtaagatcttaaacgatgctacactggtaacactggctctccattaagctacattggtgactattatgggagctcggagctcctgaattcttgagtcataaatcaagaagctgctattggcacttg

SEQ ID NO: 29615 - DNA, 486 bp, Gossypium hirsutum
  Clone ID: LIB3083-030-Q1-L1-F6
ccctcaagtttttttttttttttgttttttttttttttttttaaattatatacactgtttatttacttttcctgtcgaataatctatatagtgtaaaaaattaatttcgggatattatcattgggacagatagataggaagtctttttcaactgtacctattaaaatctgggacagtttcatattcctttcagacaaatataacctgacggtccatatttcacctgatccagaattccaaattccccaccgttcgttttgtctgtagtgaatgcggtgggttcagactgttggagacctcctcaagtttcgtgggttaaactgaattttgatgcagccatggcaatatctttgatgcgttcttggcagaagctatagccaactttcaagggcttctttttgctaaagagaccgggtttaccaaagtggaggtagaaagggactctaggacggtaattgagaaaatcaaccatgaaggttttgatcc

SEQ ID NO: 29616 - DNA, 477 bp, Gossypium hirsutum
  Clone ID: LIB3083-030-Q1-L1-G2
agtttatttttttttctgtttgtttagagcatgaaagtgtaatgtatgtatttgcacttgcaatcttatcacagtagctcaaatatatagcgattgtacgaatgaaacattgctttgttttcaaatgaaagcacatatacttaatttataatacatcaacataaaatctccaaagaattatgataagaagaataaaaggattcaagaaatggaaaaggtgaattagcaaatatatgcaaccattagctaacttcaacaagcgcaccctactctctgctcaacttctgaagtagtctctgatatacctcggaaataaatgtcatgttgttcatgttcactggctagtgcagcatttgctacacataaaaatgcttcatcaacgttgtaatcctctttcgctgaagtctcacagtaaggtatatttacccttgaggcacaccaatccctagcttttttcttagaaaccattcggctatt

SEQ ID NO: 29617 - DNA, 288 bp, Gossypium hirsutum
  Clone ID: LIB3083-030-Q1-L1-G4
ctaataatagggtctgtatatacttgaataaatactttttattttccacattctgtaaccataaatgatgtgttaaattttacatcacactccccataaaacattatattatatgacctatatatatatactgcacattattttaactgatttttaattatatacatcaacatcataattctttcattcccaccttttctattaacttatcattttattccacacatctctacatcttatccactaactctaatttctaattcatcaatccttacccacatcatatat

SEQ ID NO: 29618 - DNA, 412 bp, Gossypium hirsutum
  Clone ID: LIB3083-030-Q1-L1-G7
taaacttcaaacagataatgcttgaaatctgatttatttaatcggtatatgaccttacatttggtaagtgaaaattaaaaatccaatttcacactcaaattttatcaccaaaaccatattaaaaaattcatcaatctggacaacctttataccttgtctcaaaacatccatttacatatcttgatactagagatcaaccttacattttacacccaatacattgtccgccgacgacaacttacctttcgggacaacccctttaatcccatcgcacgtaattcttatcctaactttcctcttgccaaattcctatacccctggcgatccactcattctatatacaccgccacctcgatggaactacaacttttgatccctttactgcagattaatttccagcttgccttaatca

SEQ ID NO: 29619 - DNA, 218 bp, Gossypium hirsutum
  Clone ID: LIB3083-030-Q1-L1-H5
aaacttgaccttgatcttttattgtctcttatttataaccttcctacgggtgggttgcatcagaattacgcattggccgattctacctacctagacactataagtaactattctcttgtgacaactttattacttccagtcctaactctgaataccattgcagtgaccagtttctaccaggcttaaccaccatttgctaccacatactccagatcata

SEQ ID NO: 29620 - DNA, 207 bp, Gossypium hirsutum
  unsure (1)..(207): unsure at all n locations
  Clone ID: LIB3083-031-Q1-L1-A10
aaaaaaacganatttcaaaccatcatcaatctcttttcttcctacaatattcacttaaaaacacggcggcttttataaagatagttggccacacacataaaaccatatattcttattttcaatccattactgaaacttctcccattatgaactatacaccatattacaaacctaccacacatctaataaaactcactccaatatcta

SEQ ID NO: 29621 - DNA, 386 bp, Gossypium hirsutum
  Clone ID: LIB3083-031-Q1-L1-A6
aaagtaaaaaaatctccattcaaaatcacattctaatacacacacatgacctcatacaccgcgttttcttaagaccaaaagcaggccaaccaaaccaaaccaaaacacaacataccaacttctaccagttggcatttccccctccccatctgactacaacgttagcattacctccaagcttcaaaaagctcggctctcgtatttatcagccccacaatcctcgttcccctgttcttctgaacagctcctgttacattaccaactgcctgttcgtttgccttctttgctcccttccttaaacctgaagcacctgattgatcacttctgctctttccacatttacttcccatgctgtcatttgctaaacatttcactttaaaaactaa

SEQ ID NO: 29622 - DNA, 384 bp, Gossypium hirsutum
  Clone ID: LIB3083-031-Q1-L1-B10
aagaaaaatactttattatatatctcatcttttaacactaattaaattcaatcactggttgtttttaaaaaaagcgcccccccactcaaatctctaatataaaatattttaatttttatattcattcccataacataaatcataatacaaaatatatttcatatatataacatctttattatataaaactatattcataacctattcaacaacattttataataaataatttattccaaataccttaaaacacatcccaacaccatattaccccattatcatatctaaccttcttcatctaacttctcctctcttatatatacccaactcttttcttataatatctactcccaccctaatatcctcctattctcatattatccc

SEQ ID NO: 29623 - DNA, 401 bp, Gossypium hirsutum
  unsure (1)..(401): unsure at all n locations
  Clone ID: LIB3083-031-Q1-L1-B4
aaagncgttgaatccaaattttatagaagcaatcttgaatttcagaaaccctaaaattccccaataaaaagaaatccgcctgtacaaaaacatgattgggtgtaaatgtaaaggggcccgggggtggggggtaccggggaaaaaaagaatatggaaaagggatcacatccaagctccccatccaggaaacatctgacataatctctcaggatcaatggcatattgaatcagttgctgaacctgcccgtggacacttctcatttcaccttcttcatatccatctaacttttgttttacacgcaggagagcacgtgcagcatccttattaccttcataatcatcttgggaaccttctatgcttgtatccaaatcgtaatctgtttccttttgacgctgcaaag

SEQ ID NO: 29624 - DNA, 210 bp, Gossypium hirsutum
  Clone ID: LIB3083-031-Q1-L1-B6
ttatttgtgttacttgttgctattcgatatctattaaatcattatttgtcacagaacatttttgttgtgacaaaatcaccaaagaaaagttacaagattgaaagaaatacattcccccttatcttatattctaaaactatagcctttacatcaaaagcatgcatcttcttgcccaccaaacttgtctccccacaataattctcttcaatc

SEQ ID NO: 29625 - DNA, 254 bp, Gossypium hirsutum
  unsure (1)..(254): unsure at all n locations
  Clone ID: LIB3083-031-Q1-L1-B7
aaagacaacanaacacaaacattattattttatatccactccaaaaaaaaaatacacccgctcgttttatataaacgtgactccaccaaacaaaccatacaccctatcatctatccttaactcacaactaacccatattaccatccataatacataacaacatctaccaaactcttttcctaatactaactattaaaactttcttcacccatccaacctatatactactcaaattatcccatatctttaatact

SEQ ID NO: 29626 - DNA, 358 bp, Gossypium hirsutum
  unsure (1)..(358): unsure at all n locations
  Clone ID: LIB3083-031-Q1-L1-B9
actttttcnangnttntaattatacattttatttttaggacttattgagggcttctgctgagggttatataaaaggaactgatggtatttcctataaagcagtgctagaggatgcaacaacagtggtagtgaagaggttgaaggaggttagtgttgggaagcgttagtttgagcaacaaatggaggttgttggaagcattcggcatccaaatgtcatctagctgaaagcatattactactcaaaagatgaaaggctgatggtttatgattattacagtcagggaagcgtttcttccattttacatggtaaaaaaggagagactagaacccctctaaattgggataccagaatgaaaat

SEQ ID NO: 29627 - DNA, 349 bp, Gossypium hirsutum
  Clone ID: LIB3083-031-Q1-L1-C10
aacaaacaccatttataaaccctaccaaaattaaaatatttccacaaactcttcacattcggcgggatacataagatgattggctatcgcatcataaccaacaaaacaaggcaaaccagatagccttaactatattaaatcacacaacataagctcccagtttcccaccccaatcactgaacatactaaatacacaatctcaccttctatataaaataattcaaatacttttttttttaataaaaaaaatctatttatcttatgacactcccagcctaaacctaaaatcctcccacatcacaaaaagaccctttcgcaacttcattatctgatccaaacctatcaattc

SEQ ID NO: 29628 - DNA, 371 bp, Gossypium hirsutum
  unsure (1)..(371): unsure at all n locations
  Clone ID: LIB3083-031-Q1-L1-C11
atgatanntctaccanctaaagcancattatatcttgtaccacatccaataaaaacaggacggtttctaacaagaatagatctaatgaaatctttcaggccacccaaaatcacactcttggctttggtagaacctccacgtttaagtctcccccacattgtggatactaagagattcaagttgctcattaatttctttctgcatataatactcataattgcccttatttatctcctcaacctccatctcaaaaaaatataatccacttctcactaatcatggccaaaaaagttcattgccacatattcctttttcattctcaaatttaataaaaaaaacacctccattcttaaaattaaactacttcacca

SEQ ID NO: 29629 - DNA, 282 bp, Gossypium hirsutum
  unsure (1)..(282): unsure at all n locations
  Clone ID: LIB3083-031-Q1-L1-C12
acacanaaaacggcatttattaattattaccataactttatatcttatactatatcacactttatttggcgggtttcacacaaaccagggccctcaacaataattttatccttcccaaacaactatattactccctttctacatttcactcctttactcatcctccccaactccattttcaaatccttcttctcacattcaatccaaattctcacttctcacctcataatttatcatcccaaaaccattataatattccaattcttttaattttattattca

SEQ ID NO: 29630 - DNA, 160 bp, Gossypium hirsutum
  Clone ID: LIB3083-031-Q1-L1-C3
ggttaaaaaaatcctctaccacccatacaatggatcaaaaaataaagttcatgaccatctactaaagctacaaacaactaccttcccgaacagccaatgcattgcaaaactcgaatttccttactgataaggaatctattaaattaaccaatacgcataa

SEQ ID NO: 29631 - DNA, 452 bp, Gossypium hirsutum
  unsure (1)..(452): unsure at all n locations
  Clone ID: LIB3083-031-Q1-L1-C4
gaactaacctaacgcagatcgtttacaagatcacgctgtaagttctgcaatctcgtctcatttaagatttggtcttgggaagccccatcgttgactcttttcacacctccgcgggtatcataaatatggcagagccgaacaagcagcttcaaatagcaatcaactgcataagtccttccatcacagtcccatttgacacaaggcctacaaacttccaccacttccagagctgtctctgtccagtttaatgcaccatatcctgttccatatgccaaggctccaatcactctactctccatacctgaattcttttgttcaggtaaaggtaatgacaactggaagcaactttcaacaagagttgctaccaactcctctctgaacaagcttttacttgtaacattatgaagatcatcttttacactaggatcctncaaaagagaagctatatcagt

SEQ ID NO: 29632 - DNA, 354 bp, Gossypium hirsutum
  unsure (1)..(354): unsure at all n locations
  Clone ID: LIB3083-031-Q1-L1-C9
aagaaaaaaaaatacaatcttatacccattttctttacaaaatcaattacacacaanattttcgttttttaatttcatgatggacaccaatatatattttcaaggatataacaacttttaaaagacaagttcattccatgtgtcttgaaggcctgacaaacaccaatgtacgcaatcatcataactaactgtattggctagctgctccactcttaatggactccattgcttcttataaatcgatgtctgtgcgtcttttcaataacttgacacttgactgatgtcgataaatgtgacgtgaaacttctatttactgaactcttcttcaatcaccttcattatgcttttcctact

SEQ ID NO: 29633 - DNA, 463 bp, Gossypium hirsutum
  unsure (1)..(463): unsure at all n locations
  Clone ID: LIB3083-031-Q1-L1-D12
aggaggaaaaccgtccgcccgagctgaacagaatatgctgccgatgctgatcgatttgtttgtgacttgtcaatatatgcataccgttcgttacctttccagtacagagactatccnatttgtgcaagtatgcgaccagctatcacctagtgcaagagctaattgaaaggaggcttctgtatgcttagtggtcacctgattcaataaaacaaccgccaagctgaatcttttggccaggttcattaactttaaagccattccactgaggacccgggtcctaagggccatatcatcaaaatcttggcggaaatggaatgtaacactattcacaacaatcacctttacatctttatgttctgaaaggaacttgtctaaataatttatcagggccaattgctctttataactacaaatgcggaaaataaaatattttttcaggatattcctgagcacaattttattt

SEQ ID NO: 29634 - DNA, 446 bp, Gossypium hirsutum
  unsure (1)..(446): unsure at all n locations
  Clone ID: LIB3083-031-Q1-L1-D4
gacttgttaattncaccgagtttgttgtttctgcactacatgtgaatcaaatggaagagcatgattgcaataagtggcgagatgcggttacaggctgctttcgagaaatttgatgtagatagagatggatatataactccggaggaactacgaatgcatacgggattaagaggttccatcgaccctttacttgaggaggctgacattgacaaagatggaaaaataagcctttcagaattccgacggcttttacgaactgctagcatgggttcacggaacgtatctagtccatccggtaatcggaatactcagaagttgttgattaaaaaatgaaaacgagagcaagaaaaatggagcatttccccgattnttgtgcttgcctggtatctataccggaccccgagcgtgtctacatctaccagtcaccaagcattgtaggacccttt

SEQ ID NO: 29635 - DNA, 425 bp, Gossypium hirsutum
  Clone ID: LIB3083-031-Q1-L1-D5
ttggaaaaaaaactcatttcattcatcaatcaacacaatttccatacacaagctgttaaggaggtcacccaaaaaaaaaaagtacaaattccaatacattgaagcagaattaaaaactttaccttttttctctctttctttttttctaaataaattatcaaacctttcatcctgaagtttcggttgtagtgtaatgtttcatccagcatcctcacccttccttaacgttgtaattataatgcttggaagtgcttccactgttgcttctattcttacgaggtttccctcctcaaaacaaataaaagccagccgacaaacatccccataatgtcaaacttgggaagcaacaagaatcacctcaacccttttataatacctaagaattgcatcatttgactgttttcaccagaaaaaatgaaattgtt

SEQ ID NO: 29636 - DNA, 333 bp, Gossypium hirsutum
  Clone ID: LIB3083-031-Q1-L1-D8
gaatgatatgtaagcttaatttaattcaataacaaccattgctgattttaacgaggaacggcgaggcatcatcccatctacgagcccatatatgtatttccatatgtaagcttctacacaaaacttcaagaattttaaagaaaaaatttagtacaattgaggaggcctggtgaggcagtgaatttcaaataacacttgcatcagcatcaccacggtttcaagtccccaactggtcctgctgtccagttcaaaatcttttcaccaggcttcaagtatatactcttctgatgtggcaatttacgagctagcccattcaatatttgatggaaagca

SEQ ID NO: 29637 - DNA, 335 bp, Gossypium hirsutum
  unsure (1)..(335): unsure at all n locations
  Clone ID: LIB3083-031-Q1-L1-E11
taacacagatcctatanacttataccttcacaatttatttatctttataacccttcattcaatagttggatacatttcacacgtgggtgcggcaaaatacccccttcaattaataaaacctatcagattcaccctgtacactttttttcccctttttttccctttcattctgcttccccccactctcttacagtgtatataccctatcccaacatgcacaaacttattccgaaaatataccacctatcatcctaccaaacaatagatatactaactcatcatcatataaaataacatctcttatctactctatatcttattaattaactatcata

SEQ ID NO: 29638 - DNA, 181 bp, Gossypium hirsutum
  Clone ID: LIB3083-031-Q1-L1-E12
tcctaaaaaaaataaatacaacaacaacatgcttcaaactaactttaatctcatatcatccttgctatcatctaaacttatgtgcaaccaccaattctaaacccaatcattcctctattaccatcatatactacttccaatgtctcctgctattctttcccctatatcatcacatctaaat

SEQ ID NO: 29639 - DNA, 349 bp, Gossypium hirsutum
  unsure (1)..(349): unsure at all n locations
  Clone ID: LIB3083-031-Q1-L1-E2
aagtaagnctacattccacatatgtgttaagcatgaatgttcctcaaaaaaaagtggtggatcacataaagagaagggaggaaagaaaaaggaaaagaagctgttctcaaatatacatgctagtcgatttcctcccaaaaaaacactagaacttaaacaaggttttcagattttggtatcaagactatcagtcaaatttaatatcagagataggaagagagattgagggagggaactacaatatctcaaagcatcattgtggtttgtaacacgcagtatgatcgacaaactccttttttgcgtttagcttagctcccaaaaacgccaaactaggatgaggatgatgatc

SEQ ID NO: 29640 - DNA, 328 bp, Gossypium hirsutum
  Clone ID: LIB3083-031-Q1-L1-E7
cctgctctcgctccttctgaaaaaaagaatcatagcattttttatcaatcaggttcatgatataataaccgcttatttcatatctgattggtggaggacaaaaaaaggttcaatgtcatggatctaacatcaatgatgcactgtgttccaaaaatgttatcaactcttaaaagctgacaccatactgaaatgtttaggctctcattattcagaagggtacatgtatataaagattcatcactctttgtttactgtcttgtattaagcttttgtaatctgctgcttcattttaaaaattggggcttcattactgctttacaaagttttt

SEQ ID NO: 29641 - DNA, 353 bp, Gossypium hirsutum
  Clone ID: LIB3083-031-Q1-L1-F3
acaaaaaaattttatcattgtattttattatctttaattgctcactttcatgtgctgattttttttagaacaaggaatcaataaacaaaatttttacctaaaaggatcgaaaagagaatcagatcttgaattttggcatagtagaaggactaaaaatgaaattataccttggaaaaaacctgtagaatgtggatcatataattgattttaaatcaaaaggctgatactaatcggccaccatttttcatcatcgtcttgaattcatcgaaattcaccatcccatcgccgtcgatatcaactttccgtatcatcgctttacaatcttcgatcttatcaccttcttttattcccaa

SEQ ID NO: 29642 - DNA, 390 bp, Gossypium hirsutum
  Clone ID: LIB3083-031-Q1-L1-F7
aaaaaatattaatatatatatcaaagtctatattaaacaaaacaaaatatagaaataccttaaagacgatgaaataaataaataaatataaaaacactccaatgttaaatccatttcgaacattgagtgtttatcatgttttgggttattttcaatttaacccctgaaaataaataatttaaaacatgcaagtgtatttggttctcttggctcaaaagcaagatacaatacaaaacattgttatatacatggcaatatatatatgtatatatatattgttacatatgtaatggagggagatgattaaatgcagcttgtaaactcaataatgtgactgaagcgccatctaaatgagcccataaaattgccatatacatccacacatacaca

SEQ ID NO: 29643 - DNA, 315 bp, Gossypium hirsutum
  unsure (1)..(315): unsure at all n locations
  Clone ID: LIB3083-031-Q1-L1-G11
taccttctaagctttctttantatttttttttaaaaattttacaactcaagttcagacagtattataaacttgggagcgaccacacttacaaattttcatagaaacgagggggaaaacctgaaaatcccacaaacacacctaaatgcatatcaacctttcttcctgaacaataaacaaaatttaatataccttggaggcaaaacacagccttaatctaatgcctgctttcccctgtaaagaatatgtggatctatccctcaaaagctacccgaattcccaaacccctaattctgaaatgtcatactcgtgaatgg

SEQ ID NO: 29644 - DNA, 297 bp, Gossypium hirsutum
  Clone ID: LIB3083-031-Q1-L1-G2
ttcactttcaatgatttttatgtctcagatcacaatctttcctttgtgttctggctggctccatgtttagtgtttagatagactctcttttccagtcctttcggctgttccttgcttggctgcttctgcttctctctttatacacatatgctaaccaatatatatatcctctggttttaaatcttgcttcaattgacagtcgtagaaggattgcgatctatgttaactaatttatttagtatttaaggcttcctgtaatttcttttatcaaaaaaaaaaaatgttttgaacattttt

SEQ ID NO: 29645 - DNA, 250 bp, Gossypium hirsutum
  Clone ID: LIB3083-031-Q1-L1-G6
aaaaaggcggttttattaaaacgtgccacaacacacaaatccatttttccacataactcatattttaaaagccaaccaaaacaatttttgtcaaaatcattataaaccccttttattcccaaccaataacaacatgggcccacacattaatatgaacaccattttttttttcttgatgaacttccacattccacacatcctaagttactcccacttctacttgattaccctaatttccttcttggacacc

SEQ ID NO: 29646 - DNA, 196 bp, Gossypium hirsutum
  Clone ID: LIB3083-031-Q1-L1-H10
aagcgggtgttaatcaggtgatcagatccataacatcacacgaccatgaccaaatgttaggccataatgaagctgattccgtcttcacccaacacaacgaaagaaaatattgtttaacactacataaattcgcttaaaaataaacctagacaccttactgatcacctaactgaagcagtactccattatactgaaa

SEQ ID NO: 29647 - DNA, 297 bp, Gossypium hirsutum
  Clone ID: LIB3083-031-Q1-L1-H11
aaaaaaaatccacattacattcaagaactgtcgtaccatagtacggacgagtaataatacaaaagatatgagcaaactttggcattagatcgaaaccaatgtatggttaaaaggtgtgacacacataaaatcatacatgcaatacatgaagaatttattgttttcaaacttgcacaatatgtgtcaataatcacttactatgaatcgacaatttggggtttttatagtgaatccagatcaggcagctgccttgagcttctttgggatgccagctatgtacttaccttggaggaaagc

SEQ ID NO: 29648 - DNA, 434 bp, Gossypium hirsutum
  unsure (1)..(434): unsure at all n locations
  Clone ID: LIB3083-031-Q1-L1-H2
aaggaggttgttgaggttctattggaaccgtttgttttaatcttggggaaagtgggtgataggggggtggttggaaagataaggagcaatgtctttgatgtgcttgttaagacgggaaggagattgctggagcttaagcagtccggtgatgaggttgatgaaagcgatgatgtagttgtgttcgggacgattggtttagtgatggggttctctacaaagttctatgaattgggttcttcagtagattgctgtcagggtaataaaaaggctgtgttggcattacatgaggaattcttgaagttggagaaggatttgacgtcattgngtattgatatttcgattcccgaaggtaatgaaggcaatgaagaaaatgaggtacctgaattgatacctgttggtggtgagacagatgcgaatgtttcaaatgatgtttt

SEQ ID NO: 29649 - DNA, 303 bp, Gossypium hirsutum
  Clone ID: LIB3083-031-Q1-L1-H6
aaaaaactctaaatcttatatataaatgcataattacaccatttaaatttacaaattagcgtcggttatacaattttaaataaatatctcaaattttttacatatgatattcaaatctagaaaactaaatagctatatataaactacaacaaaagcttttaaaaaaacccattcaattcaaaactgtcttatttcacccatgaattttatttccacttcttaattcatgagttggtaaatcagtttgttggtgaaccgaactgcggtggccgtgaccaggtggagggatcgaagtgtgtgttt

SEQ ID NO: 29650 - DNA, 402 bp, Gossypium hirsutum
  Clone ID: LIB3083-037-Q1-G1-A2
gagaaactcaacaacgccactattcttgaacaacttggagccaggctttcctttcgcactattacggatacgaaaataatggaaaaagttggattcaattgtcaactgctcctatcggaaatacgattgactacggattcgagccatatacacatggtttcataaaaccgtacgattctcccgatctaaatcaagcaggttttacatgaacaacgtttgcctcaacatgttctattcgatactagtatgacaagcggtattcttacaaaaatagacaaatcagaagcaagttaagatcacaccgatcagccccttcttcttgcgccaaagatcctaccatttccgaaggaactggagttacatcccttttcagtttcattcaagagttcctatgggtttcca

SEQ ID NO: 29651 - DNA, 301 bp, Gossypium hirsutum
  Clone ID: LIB3083-037-Q1-G1-A5
cttcctttttttaattccaataaccatacaagaaactctccttcgctctatcgactcgtttcctcatttgcaattacacaagggacattaggtgtctctcgagaccattactgcaagcacctgagaccgggtttaaatctttggacacctgcccagttcagtgatatggaagtatgtctgacctgttggcaacacatgatgtattaaagcagcgcactttgcatccatagatgcatttttaggggtatgatatgtttaatggcgttccactcaatcggctttaagttgctatcatacttag

SEQ ID NO: 29652 - DNA, 379 bp, Gossypium hirsutum
  Clone ID: LIB3083-037-Q1-G1-B1
ctgtagtgaagatttagagcccagtatgattgaatgtaagaaatgggaaccgtcttgggaggacatagagggtgaatactggaggatagttgagcaggggaaagatgaggttgaggtatattatggagctgacttggaaacaggaacatttggcagtggctttcctaagttgtcttctgtgttgactggaaatgatgcagataaatatgcaacgtcaggttggaacctaaataatttcccacgcctacaaggttcagtgttatcctttgaacgatgcgatatatctggagttctagtgccatggctctatgtcgggatgtgcttcccatcattttgtcggcatgtttaagaccaccatctgttttccctaaactatatg

SEQ ID NO: 29653 - DNA, 115 bp, Gossypium hirsutum
  Clone ID: LIB3083-037-Q1-G1-B9
ctgtgatcgtaattttcattggcttctactatgcgctgaagtatttgaactccattaaacaaatccacaaggataggtttctctctctctcgatatgtatcacagtcagcttttt

SEQ ID NO: 29654 - DNA, 201 bp, Gossypium hirsutum
  Clone ID: LIB3083-037-Q1-G1-C7
ttcagacctgggccatggagaataacatcatatttgccatctggaggcccatttgttcgaatggatacccatgtttatcctgattatctagggcctcggggctattattcagtacttggacagcttatcctatgggctccaaccacggaacacgcaattgaccgcatcaacacggttcttgatgacactgttattacacgg

SEQ ID NO: 29655 - DNA, 429 bp, Gossypium hirsutum
  Clone ID: LIB3083-037-Q1-G1-C8
ggcaattagcgtgtgatttcaaccaaacgtcaatgcaatccacgtggaaggcatgcgagcaaactgggagtgttcgaacgtattcattgtcgtcgaacgccaatagacatacggcacagtctttggggctgttgttgggtctattttttgaagtatagagggaaagcggcagggttttgatggcagagtcatcaagaccgtaaggggaaagagggagatcgaagggatcagaaggtggaagagagtcaaggtcggtcgtggtggatggaaggaagcgacgacggcggcggcggcggcggaagaagctcagtagacggagaattacagggacgagccgttttgagatgagacgccaatacgtaacgactaaaaatgctgcagcaactactaccaccattgcgataaacggttggctgaagtcaactggaa

SEQ ID NO: 29656 - DNA, 158 bp, Gossypium hirsutum
  Clone ID: LIB3083-037-Q1-G1-D3
ttcataatcatgttgccatttcaagaatactgtcatcctaggtctggtatccttaaccctgccgtcaacttaccataatctcttctcaaaccacacgtgggccgggaaccacatattgcctaaggggttgctcaacatcttgcaacatcggactctct

SEQ ID NO: 29657 - DNA, 347 bp, Gossypium hirsutum
  Clone ID: LIB3083-037-Q1-G1-D5
aaaaatcgagacaagtagcagagaatcagcgccacccatacaatacatagtctttgatccacctaaagcttttccttagagaccctttcatcgggccgggaaccgcgtaaaccttgtaaccagcaacccttttcttcctctgcagctccggatcattgaagctccatgattttgaagaagacccaaaagtgcttttgcttttcttcatcttaatttccttgcccagctgatttggtggttgaacagagttgggataattggcactgtagcactcgaggtcctgcatgttccctggccctccttctttagcttgatagcagtagctatccatctggatctcaccatcc

SEQ ID NO: 29658 - DNA, 418 bp, Gossypium hirsutum
  Clone ID: LIB3083-037-Q1-G1-D7
ctgatgcttcaaatgcatggagaactgctgcatgggtcagaattccgtaccctttacagtggggtgtccctatcttccatttccggacgtcggtgatgaggatcattgtgtcacttgttgcatcggtagattcggtcggaacatatcactctgcctctttgctagtcagttcgaagcctccaactcctggagtagttagcagaggcattgctttggaaggtttctgtagcctgcttgctggaatttggggttcgggtactggctcaacaactttgacagagaatacacatacgatacacataacaaagatggcaagccgaatagctttggtatttggggcacttttcttgatcctctcctcacttgtaggaaaagtgggtgcaattcgtgcttcaataccactgtccttggctgctgc

SEQ ID NO: 29659 - DNA, 220 bp, Gossypium hirsutum
  Clone ID: LIB3083-037-Q1-G1-E12
gcagagtacacatttgctgataatcatttcccattaccacaaacgcgtagtttcttcctcacgagttgtcatcctcatgctcacggaagtgcgtgtatccatgcaatatagccaggtatctatggtcaacaggcacaatcagttgctacatatgtacagtcaatcgacatagccatgtgctaatccatacggccaagctgtacatgctgatgctaacgca

SEQ ID NO: 29660 - DNA, 343 bp, Gossypium hirsutum
  Clone ID: LIB3083-037-Q1-G1-E4
attacttgactgtcacaattggtatggttagaattgttaaagcacttctttgggttggttttgcgttgctttttagaggtgtaagaaggaacatcggggatgagatcatcgccatggaagaggaagatcaagacaaggtataaacataaaactcgagatgagagatttgaattaaatttgttaaatttctttttcctaaaaggataaatcaattgaattaagacacagatgtcaagttgaagctgtcttgattctccttttctgttgtcgtctctttttcccaccaacacctgggttcgtttactgctgtcggatcaacggtgactttccccttagaccgacc

SEQ ID NO: 29661 - DNA, 246 bp, Gossypium hirsutum
  Clone ID: LIB3083-037-Q1-G1-E5
cacgagattttgtgcctatttacctcctcatcctcgcttttttttgtcctgctggtgcccttgcgttggccgttcttcatatctacacgtcatctttgggtcttgggcctctccctatttttcagagcctcctcctcctgcatcctcttcatggttctggtttatgcccttctgtcgttcccgtctcttgttctctccctccgtttcctctattctctctttccatccggtatcgctctccctctt

SEQ ID NO: 29662 - DNA, 319 bp, Gossypium hirsutum
  Clone ID: LIB3083-037-Q1-G1-F11
ggattcccggaatgctggtgttctgcacgtggctccccgtgcgctcctcttctgcctggcttgcggtgggtactttggtgttcgggatctggctggccgctggcttcggctttggttccttggcggcgatcttattatcttgcctgctggtttctaccatcggttcactctcgtcgccagcaactatgtcaagttgatgaggttgtttttgggagaatcggtttggacagtgtataatcgtgccccaggaggactaccctgcaaggaacacctccattaacggcttgactgagaaagttggcgtgcccttacctgctca

SEQ ID NO: 29663 - DNA, 172 bp, Gossypium hirsutum
  Clone ID: LIB3083-037-Q1-G1-H10
cagaattttggggagccatttttccttgttattcatgaaactgagggattacctgaagtttcagtgcgagttcacaaaagatttcaagttccatccggggaatttgcagagtgtaagtttgcacttcgatgactgcgtcgtcccaactatcatcaggacacttctattgcgt

SEQ ID NO: 29664 - DNA, 429 bp, Gossypium hirsutum
  Clone ID: LIB3083-040-Q1-G1-A4
tgaactacctcctaaaatacccagtatctcccaaaattggccttcttttcctcatgacaagatgccttccatggcaaacttctttccctccaccatcaccaaccacccttcatgggtggacgagttcctcgacttctcctccgcccgtcgcggcgctcaccgtcgttccatgagcgactccatagccttccttgaacaaccattggtggaggaagaatgcagggactccaatgccacgcccatgatgactaccacgacggtatcaaatttacatatgttcgatcgtcttgaccatgaccagctcatgtcgttattctccgacgatgtcgccgtcaccatggcagcgcctgctccaacggtatccttcgtccaatccatcgacgccgacgtctagcaacattgatgatgaaaatagcaccctcaacggat

SEQ ID NO: 29665 - DNA, 439 bp, Gossypium hirsutum
  Clone ID: LIB3083-040-Q1-G1-A5
gacccgcagcctcatcatctgaccaagtgggtggcttctattttattccgtctggtacatcaggccgtaactttcaagaggcagaaaatcctttgtcaactcggttccatccttgggaaagagatcatctttctccattttcgctaaaccaggttgacagagaatcgggttggaatacattccatcaatctgctactggtgcaccagatcccggcataagatccagcagtttccgccagaagtacgggtctgagaggatgcaatcacaacatcattcgtaccttatatcttcgccctttaaacccttattgggtgaagcgaactaccctactatgaatgaaaccaaacatgttttatgtatgctttgagagacgatatatggtgcttgagactgtcaatcttggcatgctggcaaactgagggtggccccgaatagaaa

SEQ ID NO: 29666 - DNA, 157 bp, Gossypium hirsutum
  Clone ID: LIB3083-040-Q1-G1-B5
aatgtccacaaataatctcttcttggggtggattccgacaagttaatcaactgttggacatccacattgggttggggactcacatctttacgggaacctacatcacaaagagagtttcacctgtttcggccattcaatgattttacgacgaaacatt

SEQ ID NO: 29667 - DNA, 243 bp, Gossypium hirsutum
  Clone ID: LIB3083-040-Q1-G1-C1
cagcgcatgcacagagcacattgtatggtttgcatgcacctgatactacgatgtttaccgcgcgaccccatttcacaccgctgtaccaactggctgcggaagcgaatacgacagaactcattgctaggttgagacaactgcatacaccgactagggcatgtggcacccgtggtgacattgacgaacctgtccatcgatacactccatcagggtgtacacggtgtacggtgggggaacggtatt

SEQ ID NO: 29668 - DNA, 192 bp, Gossypium hirsutum
  Clone ID: LIB3083-040-Q1-G1-D1
tcctccggaatgtacgaattctgcaacactcggtcccggctctccttgtcttaaaccgcttctgcaatccgccattttcatgtatacacggaataccccgttttgtaaccactactgtagagacgaccagatggggctggtcgaaccaagagacaacgcgtggaagtcgcctatatctcttagaacgtcaca

SEQ ID NO: 29669 - DNA, 379 bp, Gossypium hirsutum
  Clone ID: LIB3083-040-Q1-G1-D2
cacgtttatgcaccagagttgttggtaccctgttcggatatcggcgtggtcacgtcgactttgcatttcaagaaaaagcagcagtaaatccagcattttgaatccaccttgcagcaccgactagtgttttagttcgggaaagtggcttctggattgggtcgaattgccttacagtgtgaaaagaatatggggaagaaaggggtgaacttgctgaatgagcctgtttgggggacttactgcactggaaataaatgtgggttcgcaatgaggcgctagtgcggatcccatgattggcacctgttacaggcggtggagccaatttcattgggtgcgggtgtgctaccaggacattgcaatgagactggacctgggtccgaag

SEQ ID NO: 29670 - DNA, 220 bp, Gossypium hirsutum
  Clone ID: LIB3083-040-Q1-G1-D6
ctcaaagcgacaggtgtcccaagttgaatcgaaccttggaagaaatgactactgccttccaagccaaagaaaagcacctttcatcttatacggagcaggggaaggaaaactttgcgaacttactcttacgtgacgatatgttcggtggagggaagggagtttcaccagcttcagcacggtctaacggccattcacaagcttgctgctcccgtgtttggtg

SEQ ID NO: 29671 - DNA, 337 bp, Gossypium hirsutum
  Clone ID: LIB3083-040-Q1-G1-E2
ctcatgtcgctgaattccgccagctgatgagtgtgcagagcggccagggtttaagcagaacaatgttcttgggggaaaaaaaaattctgtttcccaggtgtttgatgatgaccctctcggcagtgaatttgtgcaccacatcggcacacgggcacattacatagaccacacaccaggtatcatctgcctcagcagcaccggaaacgacagtggtatacacacatatcaatgatgtacacacagtggtaggtctacaccagaagttcgtaggcaactacgagtcaactaaggttatcccacacgttccaagacgacaaacatacaacacggttgaacg

SEQ ID NO: 29672 - DNA, 409 bp, Gossypium hirsutum
  unsure (1)..(409): unsure at all n locations
  Clone ID: LIB3083-040-Q1-G1-F4
ggangataacagcatgtataccgtgttattattgtttatcacaacggcatttggcaacaggctcccatatgccatacaacaacatttaacagccaaaatctgatgaatgttataaagaagataactgggttttgcatatattacccactagcattctcaccggaggcatcattcgcctcattctcaccatgctgtagttccgcaatttcagcctgcgctctctccatgatctgcctcttctgcatttccaactccctgtgaaaatccattctcatcttctccaattccaacatctgctgccttttactattctcaattttttcatatatgtcgctgaatttctggatagaatctgcaagcaatttgactgaagaatcgtcgccagattgcctcccaaatctcctctttt

SEQ ID NO: 29673 - DNA, 245 bp, Gossypium hirsutum
  unsure (1)..(245): unsure at all n locations
  Clone ID: LIB3083-040-Q1-G1-G4
gtggccactgtttcttcttcttcttcttcccagaaagccatataattttcatcaaaggaagacagtagagagaaagagaggacataattagtgattaggagaactatgatttattttttattttttttacatgtttacttgtgtgttgatttgaagattaatttattctaagttgaagatatatatatatcatttttcattttcattttcaaannnngnnaacnngggggcgcaaaatcacggtc

SEQ ID NO: 29674 - DNA, 304 bp, Gossypium hirsutum
  Clone ID: LIB3083-040-Q1-G1-G6
gtcctctcacatccactcagatctcgaatcgtctcattggcaatctcaaaaatacacatcatgtgacataaatcttttgcccccactggaatagctttcgccgcccacataactggtgccgtgaattcattcaacggtcatcaatgggttcatctggtgagaattcacatcatctcatcatagagaacattttcccatttccacacaattaacagccctatcagaacactagccggaaatagcagcaacggttagttccctatcatcgtcacaacttcttcaaacacattggtttcaaacaagg

SEQ ID NO: 29675 - DNA, 191 bp, Gossypium hirsutum
  Clone ID: LIB3083-041-Q1-G1-A11
ttatcactggagtggttgatatcttcacggagatatttttctccagtattccatcatccatgaacaacttcacggaatacgtgctcagggaagcggtgcgaccatcacgaccagctggtttcatcagtctacttatgtgcaatgctgtggaccatacagaactgggtccgaacacagtgtggggtgatatt

SEQ ID NO: 29676 - DNA, 135 bp, Gossypium hirsutum
  Clone ID: LIB3083-041-Q1-G1-B9
ttcatcatcctcgtctgccatcatcatccactcaaaaggggcatgggttccgtctatcataccgattcacctggaactccgcccgtcaattgtctcactctactctctcacccatgcgttctttttcctattccc

SEQ ID NO: 29677 - DNA, 185 bp, Gossypium hirsutum
  Clone ID: LIB3083-041-Q1-G1-D10
caaccacgcattttccttacaactttgttcttcttgtggttaatcgatatcgctagctcaatgtcccttaagcttgtatgtctggccgtgttgtgcatggtggtgggtgtaccccttgcctcaaggggctgtaacctgtggtcatctcacaagctccttcgcaccctggcattggctacctcatc

SEQ ID NO: 29678 - DNA, 221 bp, Gossypium hirsutum
  Clone ID: LIB3083-041-Q1-G1-G10
gtcagttaattttactcttaaaaactaaaacgaaaattcccctttgcaaatctttcatttccctccttttcctctctctctcagaccgtctcggacccttttcccttcctctctgctactcgatcccacactgcaacataatttccctttcaaagagaagacaaccaaaggacgacaagtatcaccccgggttatggactgtggtgttccgtacaacccac

SEQ ID NO: 29679 - DNA, 203 bp, Gossypium hirsutum
  Clone ID: LIB3083-042-Q1-G1-A11
taacacacgagtggctgatcacttcaacgagatatttttctccagtattccatcatccacgaacaacttcacggaaaaggtgcccaccgaacgggtgctggcaacacgagcaggtggctttatgagtccaccatatggggaacgctgtggccgacacagaaatgcgtaggaagacagtgtggcgtcacactggcgctggcacc

SEQ ID NO: 29680 - DNA, 149 bp, Gossypium hirsutum
  Clone ID: LIB3083-042-Q1-G1-A8
cgaggagtcggtttgtgaaccgggttgtttcctcaatgttgaggagagtttcagggaagaggattgcgattctcggatttgctttcaagaaggagaccggtgacagtcgggagagcgcagggagcgatgtatgcaaagggctgttgggc

SEQ ID NO: 29681 - DNA, 168 bp, Gossypium hirsutum
  Clone ID: LIB3083-042-Q1-G1-B6
aattcggccggataggagtccgcatccttacataccattactgtataagatagatctcgttgtgaaggatcgattacggcaaaatttaccggtatagccgaacggtgtgaactgtacaagttaccacttaaaggaaggaatgaactccggtggatatagacgagctca

SEQ ID NO: 29682 - DNA, 278 bp, Gossypium hirsutum
  Clone ID: LIB3083-042-Q1-G1-B9
tatacgtcgagcaacgcttgtttctgagaatgcgcagggaactgatggatttacaatcagcacaactgcgggtgaaattgactcacgccatagtggtttgcttacggaatcacgtctggcagctgctgctgaacagaccgaactacatgcatttgccactgaccctgctcatgttcatcatctcactcatagatgcttgccacatgcttcacattatccactgctggaggagtctgacttcagtaaccgacagtgttaaccccgaccttgacatggca

SEQ ID NO: 29683 - DNA, 246 bp, Gossypium hirsutum
  Clone ID: LIB3083-042-Q1-G1-C9
cttccatgtcttaaggaactgtcattggattcttcccatcatgtctgcgctgctttggcttcagttgtgatgggaatggctcctgtccttgggaacgatgcatcattcgaccagcttcttccaatatttctctcccttttgaaggatgaattccctgatgtgcggatcaacataatcaccatacttgatcaagtgaatcaagttattgggattgatctattgtcccaatctttaccactacccatt

SEQ ID NO: 29684 - DNA, 141 bp, Gossypium hirsutum
  Clone ID: LIB3083-042-Q1-G1-E7
ccacgaacagatcgtcagtgatcgatgtcctccatgacaaccagcgtgacgatggagaacacctcaggggcgtcctcctcgtcgtcgcagactcaagaggccctcgtccgcgaactcggccctaggaagaagaaggtgacg

SEQ ID NO: 29685 - DNA, 341 bp, Gossypium hirsutum
  Clone ID: LIB3083-042-Q1-G1-F11
cacgaaacggccgtacagaggagtggggagaggcgcacgtgaaagaggccgtgcggggaaactgctcgtgggagcccgacccctggcactgttctggcatgttccagaagcttctggtgttctcggctgctgagattcctttcgggtttgggccttttataaattgggctagggattttgggtattgtcctggtctttgagcttaagtatatgtttgggctgttcgggtattacgccaaatgtaattgggttggatttgtttttttatatttgggttagtataagtttggtatttattgaacgttgtaagtggacgatttgggccaatttaattttgggct

SEQ ID NO: 29686 - DNA, 251 bp, Gossypium hirsutum
  Clone ID: LIB3083-042-Q1-G1-F7
ctcgtgccgtcgtggtcgagatgggctgcatacggtgtcttgcataagccagacttgaggaatatggccctcaagtttataaaacaactcggacatgcactgcattctgtggcatcaacaaggaatcccaagcaacaattgcagttggtatatgttgtaggtccaccacattcagatgcgctccagcagcattgattttggaccagctgatcttcagagcgtgagtgggtctgtggatggtttttcactta

SEQ ID NO: 29687 - DNA, 275 bp, Gossypium hirsutum
  Clone ID: LIB3083-042-Q1-G1-G11
gaactagtctccagtttttttttcttctttctttttttttctatcaaactttcctttttcatgccttcaattctcgactttctctgatgaacaggaaaagataaacaaaaattcccgactttcccgaggttttgcaactttacataatccttacacacatttacgttctgggaatctccttcaagccgcggtttcatttgacggaaccagcactgcctcatcagtccaaggaattccagttttctttacatgttctcccttgccaactgctccag

SEQ ID NO: 29688 - DNA, 245 bp, Gossypium hirsutum
  Clone ID: LIB3083-042-Q1-G1-H12
tacatcacggatgcttctcactaccaccatgaacggaactcttggttacctcgatgaagacttggtctcaaccgaccttgtcggttatagcaagtgaggcatctttgatgctaaagccggcatcgccttgcatgacacctttactaagcttgttgcgtggcatgataatcacctggggttacagttctcgagtgatcgacttggttcgaccaatggcttcttgccagctgtgtgaggttttagct

SEQ ID NO: 29689 - DNA, 373 bp, Gossypium hirsutum
  Clone ID: LIB3083-042-Q1-G1-H2
gagggaaccatcttaatctctttacccttttttttaatcttattttgtttttgtttgctaggcattctctaatttctctttctcttttcatttttcgcgcagtattatttatttatttatttatttttcgcttttgaatcgagattgtttttagggggctttaattttctttatgcttctttcctccctctttatctcgttttctcgcgctttttttttcggatctcttcaattatttcatcaattgtaagttgaaaaaaccttcggctttttttgttgttttcaattccttcgtttctgtgaccgttatttcttaagccatataatcgtaattttaaacgcattagaatctgaatagatcgtttttttgggt

SEQ ID NO: 29690 - DNA, 215 bp, Gossypium hirsutum
  Clone ID: LIB3083-042-Q1-G1-H4
aaatgcatggggagaaaatcataagcttttcattcagtggaagcacattgaagctaaggctattgcatactatcttcacggattaatcctcgaagaagggaacacatctgctggcatagctgcagctgctctgcaagcagcagaagagtatctcaaagaaagcaaaatggcctgcgattctttccatgtgacactcccttcggtgagtaatccac

SEQ ID NO: 29691 - DNA, 256 bp, Gossypium hirsutum
  Clone ID: LIB3083-042-Q1-G1-H6
ttcagcgagaatttcttgtagagtattagagtagcagtttttttgcacttctaatcatggagacgggatctatagatccagcacttaggaaggaatttaatccggttacctttgttacccaaaaggtggtgacttttatagatggtaatacttttctcgcttgggagcagcatgttcttcttagcatcaagacgcagcatcttcagtcgtagatcgatggctcaattgtggtcccaactcaggggattcttgggga

SEQ ID NO: 29692 - DNA, 198 bp, Gossypium hirsutum
  Clone ID: LIB3083-046-Q1-G1-A2
gctacgcattatggctacagcctgcttatcggattccatgttagtaatctggcatttgatgttaaagatttgttgagtgcatcatcatgacgtgcttgggagagagacatttgtcgtgagatagcttccaggcttgtgtgaagccagtaatgcaccacttacgacgttgtgattattaacatcacctgcaccgaagtt

SEQ ID NO: 29693 - DNA, 162 bp, Gossypium hirsutum
  Clone ID: LIB3083-046-Q1-G1-A4
gttatcctatgctggtgatattggttacagcagcttccctttgaaaacaccacttcggggaactccgttcatagtgtaacacgttttaaaagcaccagtgtttccggtactaatgacattgctggccagcttgctgtatatggatcgatcacattctatcac

SEQ ID NO: 29694 - DNA, 113 bp, Gossypium hirsutum
  Clone ID: LIB3083-046-Q1-G1-A5
gaagaaatcccatacaatgaagtagattcacattttaacgtgtgactgatcgccatcgtcatggcatcttaacctgacaaggatcgtgatccgcttctgattacgatgacatt

SEQ ID NO: 29695 - DNA, 182 bp, Gossypium hirsutum
  Clone ID: LIB3083-046-Q1-G1-B1
cacgaactcggcacgagcccagatcgtccccatgagcacaatctcttttcactcgcatggtctcccgacacatccacgatcatgagcacgatcatttacgccagctccaaagggagattcgagcgagaactggaccgaactccagtggaattgcaaccaccagattcacactgagatgggtc

SEQ ID NO: 29696 - DNA, 399 bp, Gossypium hirsutum
  Clone ID: LIB3083-046-Q1-G1-B11
cggggcgaccacgcgtccgaaagaaattgcattctggttgatggataaggatatgtatgatttcatggctctggacaggccttcaacgcctcgcatcgatcgtgggatagcattacataaaatgattacgcttgtcacaatgggtttaggaggtgaaggctatctaaatttcatgggaaatgagtttgggcatcctgaatggatagattttccaagaggtcctcaaagtcttccaaatggctccgtcattcctgggaataacaatagctttgataaatgccgccgtatatttgaccttggagatgcagattatcttagatatcgtggtatgcaaagagttttgaccaaagcaaattgggccagcaccttgagggaaaatataattctgacatctgatac

SEQ ID NO: 29697 - DNA, 348 bp, Gossypium hirsutum
  Clone ID: LIB3083-046-Q1-G1-B5
cttgaatctaagtctcagttggaattcatgtttgatactcaaagtcgcagatagcagcagatggttccatagggtttgcaggtaacactacgataaccaactacggtccgtcttgcacaacaaactgataatgctccttattagctgggaaaccttgaccatgacaatgcagtcataattcaaaacatttacgtctttcaatcacactctaacgggaatgaatatgctggcgaacatgttagaaatggtttgtcacacattcttgtacaccatgatccacttgccgggcaactaaccatcagctccgaagggactctcatattggactgcaccgaggaaggcgctgtt

SEQ ID NO: 29698 - DNA, 278 bp, Gossypium hirsutum
  Clone ID: LIB3083-046-Q1-G1-B7
atgataccacgcctcctgcaatcactgccattgcggcccttctgatctcagaggaattgatggctctttcgttacttgtttcatggctcgcgccatgccgtctccttgattaccgtcttcagtcagtctaatagaatctttcatgagtaagggcaagaggaatcatcagtgatttcacgaagatgattctgtgatcaggtgtgccatcactgcttgttttaatgcaactcagtgtttaacagtcaagtatcgattattacatagacaggcatattcct

SEQ ID NO: 29699 - DNA, 220 bp, Gossypium hirsutum
  Clone ID: LIB3083-046-Q1-G1-B8
aattgagttgggggtattttctttgtttacatttacgtttaacccttttgtaaggataagacatagagagggctgaatatagtggcgtgaatgttgacaattgatttacacacataactactactccaatgaagacgttagatcagttttcttgcttcattttcaagaaatcacactcttttagctgacagatcaccctcttcattcgtcttctaaaatc

SEQ ID NO: 29700 - DNA, 486 bp, Gossypium hirsutum
  unsure (1)..(486): unsure at all n locations
  Clone ID: LIB3083-046-Q1-G1-C10
tacggtccgaaaatcncgggcggccaagccggtatccaagtcggaaacgcgtgctgggagctttactgcctcgagcatggcattcaggctgatggtcagatgcccggtgacaagaccattgggggtggtgatgatgctttcaacaccttcttcagtgagactggtgctgggaagcacgtccctcgtgctgtttttgttgaccttgaaccaactgtcatcgatgaggtgaggactggcacctaccgccagctcttccaccctgagcagcttatcagtggcaaggaggatgcagccaacaacttcgcccgtggtcactacaccattggcaaggagattggttgacctgtgccctttgatcnngcatcaggannagncccctttgccgacaactgcactggtctccagggcttcctcgtcttcaacgctgttggtggaggaacaggctctggccttggttccctcctcctggagcgtctgtctgttgac

SEQ ID NO: 29701 - DNA, 493 bp, Gossypium hirsutum
  unsure (1)..(493): unsure at all n locations
  Clone ID: LIB3083-046-Q1-G1-C12
cggtcgtgacttccggggcgtgcagccgtatgttattgctgaccctgaaatcaaggaggaggtggtcgacagctccctcgaattcctcatccttgctagcgacggactctgggatgttgtcactaatgaggaagctgttgccatggtcaagcctatccaggacccccaggaagcagcaaacaagcttctcgaagaagcttcccgaaggggaagctccgataacatcacagttatcatcgtccgcttcatagacggaactaccggtgagaaatcaggcgacgacaaagagaccaccaacgaccaacactcctagctgtctcgtgtagggatccatcngtgctgtgtgttccttcctggctggttgnntaccnnttgggatgctcagagtagacactggctgctgctccgcaaggaaactgactcccccgaccgccgttcatgctcctggctggctcgctggccgcctcgacgggaacgctgccgcagaatgacg

SEQ ID NO: 29702 - DNA, 281 bp, Gossypium hirsutum
  Clone ID: LIB3083-046-Q1-G1-C3
cacgaattctgatcggcttaaaatgtcctggtgagcatgttttaggaagtcctcattcacgattcaatacccgatatcaatgttatgggaatcaacattgggggaaaaggcacacggtttcctgttcaaccccattaagccattgtttgtcccaatggttttgctcactaaagtggtattcaccaagatgggatgctcaatcacacacgttcatatcgaattaactcccccgaagatattgcccctcaccggtccaattaagcctggaatgtccttgggaa

SEQ ID NO: 29703 - DNA, 128 bp, Gossypium hirsutum
  Clone ID: LIB3083-046-Q1-G1-C5
ggaaagcttactcaatggctgccgacgaggacaccgtagactttcaccaccgctagcttcattgcccataacattaaactcgtccacaactttgtggactgcgcccttcaggcttcatgttcagcccc

SEQ ID NO: 29704 - DNA, 390 bp, Gossypium hirsutum
  Clone ID: LIB3083-046-Q1-G1-C6
tttgtgcctatcaccttccttgcatgggcggtcctagtgccggttaattacactaataaaacattggagttgcagctgaagaatgttacttcaagtgatattgataagctctcgatttcaaacgttccagatggatcggataggttttggacacatatagtaatggcttatgcttttaccttttggacatgctatgtgttgctaaaagagtatgagaaagttgcgaatatgcggttgcaatttcttgtatcagaaaaacgccggcctgatcagtttactgtgcttgtgagaaacgtaccaccagattcagatgaatctgtaagtgagactgtggagcactttttcctggttaatcaccctgaatactatcttacacatcaggtagtatgc

SEQ ID NO: 29705 - DNA, 424 bp, Gossypium hirsutum
  Clone ID: LIB3083-046-Q1-G1-C9
ccgggtcgacccacgcgtccgaaataaaccagcacatctgggccgtctatgtattgatttgtcattccagttctgatttgttctcagcattctgaagattgcccatttgctggttaaatcagtatttctccgggttggaatgcttgatcctttagtggcttactactagtacttgtagtcaataagtagctataatgtggagtagcagtatcttgcagaatgcttttattaatttctacatttagctttatctatctgtgtgctttgccatgagtggagtttcaggttccttcatctctagttataagctagagtagcttgactgcttatggacacaaatttatctaagtttgtaacccccctctattctacagatcatacattcgtgtttgatggtagtatttatgctggatattgtacctct

SEQ ID NO: 29706 - DNA, 205 bp, Gossypium hirsutum
  Clone ID: LIB3083-046-Q1-G1-D1
ccaatcgttctggccttaaaacgtcctggcgagcatggattcaggaggtcctcctaccaggaccaattcccgccacattgtcatcggcaagcaaaattggggaaggagacacaaggtttcctgttcaaccgccgaaagccactgctgggaccaatgctttcgctcatgaaagtgggcttcaccaagatggcatgctaaagcacaa

SEQ ID NO: 29707 - DNA, 123 bp, Gossypium hirsutum
  Clone ID: LIB3083-046-Q1-G1-D7
ctgccctgacatcattaaacctggggaatgcaagattggaattatgcctggatacattcacaaaccaagtcctgtaagaattggttccccattagggaccttaacataagaagcaattttcca

SEQ ID NO: 29708 - DNA, 300 bp, Gossypium hirsutum
  Clone ID: LIB3083-046-Q1-G1-D8
ctctttgctcacgtgcctcaaccactctgacattccagcaacacccaaaggcgtgccccatgttacagtttgcatccacattgttcatactggtatcatgcaggtctctgcagctgaaatcatgactggtcatacaaccaagattacgatcacaaacgacaacggtcggttgatctatgatcaaatctagaagatggttcatgaagcggcgaagtatatgtcctacgatgaagatcactcgaataaggttgaagccaaggacacattggagaattatgcctacaacatgaagaacactgt

SEQ ID NO: 29709 - DNA, 460 bp, Gossypium hirsutum
  unsure (1)..(460): unsure at all n locations
  Clone ID: LIB3083-046-Q1-G1-E10
acggtccgacaatccgggggcgatagcgcgggcggagaggggaaggagacaagtgaactcagagaagaactagcgcggcgggcgagcattgcaagccgagctgcaggggcccggagcggagaccggaggagggagacgtcgcttgcgatgtcaccggcagcatccgccgccgaaaccgccgtcgtcgtcgtcgtcgcaagcgtcccgagccagcagcagagcagccaccgcgccgcggcgccgtccgtcccgtcgtcctacgccgtctgggagaaggagcggtaaggcggctgcagctttacgacgtcgtcgtcgtcgtctgccacctgcctactggctgctgctgctgccaaggggaaaggannaaaagggaanaaaaccggaaagggggaaggcatggaggtggaggcggccaagtgcgagtgctgcgggttcacggangagtgcacgccggcgtaca

SEQ ID NO: 29710 - DNA, 282 bp, Gossypium hirsutum
  Clone ID: LIB3083-046-Q1-G1-E5
atcgcagacaattcggagcgaagttttacaatggtacaaccagtggcagtgtcaagtggccatgaatcactgaagccactcgtgaagatacctactcgcacaatactttgtaatgcacggcgcgaatgtggaaggtggtcacaattttgattgtgaccaaaccaattctgattacatccaaacttagcagcttgacaatcttttcgccatgcgtaatacatccatggcacataccgttggggtctggtattaccaatccttcattatcgcagctggtcatta

SEQ ID NO: 29711 - DNA, 392 bp, Gossypium hirsutum
  Clone ID: LIB3083-046-Q1-G1-E7
agaatatgaggactaatgatatattaaccactatatggatatgatatgtcattaatccgtagattcgtcctaaatttgatatttactaaaagagttgagtgcatatggtaacttcacgagatttcatgacgacaagctgacgcgtgtccactcgtcatccctaggcggcttcttcgacaccttacccgagatcaccacggctcatttaaacgtcacttcactttcagctgtttggtacttgagaaaataccagtaactcaacagtcccatcaaaacaactgtaagattcgtttcttactactattttctttcattccattcaatttctgcagatgatatagttagcttttcgacacaggatgttagcatcgtcatgaatcctagcgaccatc

SEQ ID NO: 29712 - DNA, 254 bp, Gossypium hirsutum
  Clone ID: LIB3083-046-Q1-G1-F1
gcgacatcgaataagcacaagcatcactccagtcaaagcctaagctcacaatccagaggtttcaaactcactgtccttctccttctcagacgtctcgagggactgagagatgattgtgactgccaaaacagttggcgttcctgtaacaattgctcacagtggatctgccactaccgtcagtgctacagagcatatgcctctatttgcaccatctgtgggaatgttccggtttaggtctttctgtaagcttcact

SEQ ID NO: 29713 - DNA, 440 bp, Gossypium hirsutum
  Clone ID: LIB3083-046-Q1-G1-F10
cacgcgtccgtgatgatcgtatgcgcagataacatgtccgaggtagacgatcgacgatgccccaaagtagcactttgaccacttcatgtggaggtcatgtgcgcggagggcgtcaaggacgagcatgaatcgacagaagggtataaggacgtcattcatgagcgtctagaacatgaccgatgcattgaagaggtcgaagggcatgacgaggaactcaatgggtgtggtgggtatgaaacaccgtcttctcgatgtcctcaagatgcatccgcacttggtgatagccgaattgcaagtctagcttggtgaagtacttagcaccaatggaggtccatccgaggaaattttcccaattgaccacaaggatggggaacttgtcatgggatgtcctgtcgtttaacatgcggtaatcaatgcagaacctccaggagccctctgcc

SEQ ID NO: 29714 - DNA, 246 bp, Gossypium hirsutum
  Clone ID: LIB3083-046-Q1-G1-F11
tgtgaatggattgcgattccaatcccttgattttaagatttcagggttccctctcatagatgcccttgttcgccattctgtggcatatcaattcggcgtttatggcgataacaaactgattccttttaacctcttggaggatatcaatcgttgtgaatatgttgatttgcccatttttatagtttaatatccagctatacccggcttttcaaattggtttgtggaccataacgggatatccgacaa

SEQ ID NO: 29715 - DNA, 366 bp, Gossypium hirsutum
  Clone ID: LIB3083-046-Q1-G1-F8
gctttttatcatttatttatttatttttatcaacgaagaactttattgactctcgcaacaggtcaagttagcagtgacaccataaacaggtcatctttaccagtgatgtcttacgctcaactcattttccgccgcatcgtgttttaattcaccagcgacatatatgcaacacatgcactcacctatcacacacattacacgtatgatttacagtcaatatactttagggaatatataccccaatcatctagcgcttgtagctataagtactcatatattcgcggatcgactctctgcactatcaatcatcccagtcaccttgatgctgacttctgccaccattcttgcacgaatcgattcatcatc

SEQ ID NO: 29716 - DNA, 192 bp, Gossypium hirsutum
  Clone ID: LIB3083-046-Q1-G1-F9
tgatttctgcactatgtgatcggattggcattccaagccgctcattttaacatttcagggttctatctcatacatccccttgtcggccattctctcgcatatcaattcgggggttaggtcgataacaaattgattccttttaagctcttccacgatgtaaatccttggtaatatgttgattttcccattttt

SEQ ID NO: 29717 - DNA, 328 bp, Gossypium hirsutum
  unsure (1)..(328): unsure at all n locations
  Clone ID: LIB3083-046-Q1-G1-G12
cggggccnccacgcgtccgcacacgcgtccgcaccgaattccctgcgattcctctcccctcgcctcctcgtctccccctaagggatcgtcggagaggaatcgcaaagagggccgtctcatccgagttaaggaagccatggagcacaaggaggctgggtgccaggcccccgagggacccatcctctgcatcaataactgtggcttcttcggcagcgcggcgaccatgaacatgtgctctaagtgccacaaggagatgataacgaagcaggatcaggccaagctggctgcctcctctatcgacagcatcgtgaacggcagcgacggccgt

SEQ ID NO: 29718 - DNA, 367 bp, Gossypium hirsutum
  Clone ID: LIB3083-046-Q1-G1-G2
atgactttcacttcttaaaactgtgtcaatggagctctccctcttctcttaccatcaaaacagcttcagtctcctccacaaacctttcttctcacttcccatttcagggaagagagttccaaagagagatccatttctattgcaatgtcactgcacgttgtcatcatcttctaatgatgatgataatataaaagcagcaattgtgtctttgcagcatgagggaagaatggtagtgcttggttctctcctcatagctgctgctgcaatgtatatctctgatgtggctgaagcagctagtacaagttgaaaagctcctaagggagctaaaataccttagactgaattcaaaactcttcccaatgggccc

SEQ ID NO: 29719 - DNA, 211 bp, Gossypium hirsutum
  Clone ID: LIB3083-046-Q1-G1-H1
aacttccagtttagctctatcatctgccactcattctgtaagtcatatgcatccgttacgggatcatagctaagctcgacgctcagacgggttgacgcatgttggatttcccatacgcactccatatcaacgtcaccatttgcttccaatggaggtaactactcctaaactacttctccggaagatctacaacgggatgctactcccgttt

SEQ ID NO: 29720 - DNA, 384 bp, Gossypium hirsutum
  Clone ID: LIB3083-046-Q1-G1-H10
cggggccgccacgcgtccgcacacacgtccgtgcaaaatgtataggtaatcgtatagtagccggcaaagtcatcaaggaaagttatggtaaacaaaaacagcaacacactttcacgattcaagtgttttggagcaaaggacctgggaaattaccacctttgcatctgttgcttgtcaaagggcgcaacctatacagaatgatgacttttcgtcagccttgggcaaatgaagcagaaaggctgaagattctagaagagaagcacaacagaggggatgatgcaaggcgtgttcgtgcattgaatagacctaattctgctggaaacactcttaaaggcaagaaaaaattgcacaaagggggaaacacagtccgatctgaaaccacgc

SEQ ID NO: 29721 - DNA, 230 bp, Gossypium hirsutum
  Clone ID: LIB3083-046-Q1-G1-H2
aatggctgtgcatgatgattgcaagttgaacttcatggacctcagggcaaacccaacccaccgcttcagtgtttgcaaaattgaggagaagcaggagcaggtgtagctgtggataagcttggcgaagcaaccggatagctatgaggatttgacgagatgtctccccgctgatgaacgtccatatgcgagtgtgcgactttgattttctaaccgccgagaatcgttccgtc

SEQ ID NO: 29722 - DNA, 254 bp, Gossypium hirsutum
  Clone ID: LIB3083-046-Q1-G1-H4
cacgaatcgtctagatttaagacattcttcctgagttatgatatgcatagcctaacaactctgtaatgggttcataaaagctctttagctacttttaatggcatctgaagtttcactgctgacgaacggtctaagatggaaagggtcgaagggcgcagttgagaaatcatctacacattgcttgccagagtggcacacatgggctatgatgaatgccataatggtgacgcactatggcttcattcctctggtga

SEQ ID NO: 29723 - DNA, 217 bp, Gossypium hirsutum
  Clone ID: LIB3083-046-Q1-G1-H5
tccatgctatatcttgagccggaaaagacataccgtatacattacatttttctatagcctatataatcagatcacccaatttgcaagcagatgagggcccgagaaggataggacacaagtttacacatcttcacaacgataccaaatggactcttagataatacagaagaaagctttttcgtctccattggttcgcttctcaaaatattcgcgtcga

SEQ ID NO: 29724 - DNA, 245 bp, Gossypium hirsutum
  Clone ID: LIB3083-046-Q1-G1-H9
ctgctcaaacctaactttcgttgctgcgtcctctggagtcttggtatactgctggttcctgaacaacacgtctaccgaggcgacaaggtggaaccatatacccatttagtttccattggcctccactaaacccatcactaacatcacggtccgcacaagttggcctaccactaaccttcttgttctcacacataacactatccacgttcccatcacttacacatctcttgaatcgcggttgacat

SEQ ID NO: 29725 - DNA, 243 bp, Gossypium hirsutum
  Clone ID: LIB3083-047-Q1-G1-A2
gaggattcgagaggtctagcgtccgccatggctggtttgcaaagatcagcggtgtctttgaggaggctacggtcttcgaggcatgtttgggagggacggtttttgtctgagttgattcaatggagatcggaggaccttcaataagaatgacacactaatcagctgcagaatcaggaaccagatgcatttgcagaatagtcgtgctccatatatctttgacgatgttaatggtgttgcccccat

SEQ ID NO: 29726 - DNA, 222 bp, Gossypium hirsutum
  Clone ID: LIB3083-047-Q1-G1-A3
attcggcactagtattatttcactcacacactctgccaaagcttcagatatcaactgtggtccatacaaccaacttcctattggcgatacttcacaatgaaacagggattcgaatgatgtcatagtatcattgccaatggaaccatcatcatcctatctgattcaactcactgacattgttcttcatctccttgctattccttattctcacactatcctact

SEQ ID NO: 29727 - DNA, 342 bp, Gossypium hirsutum
  Clone ID: LIB3083-047-Q1-G1-B1
cccggactgaaggtttaaatggaacggttgtacaaatatcctgtctcgaccaatgcttgcagccgattttagcctttccgttccggttgagttttgagtgttaggagatcctggagggttctgcttgctagtttctatacaggcaggcgccaaaggtatggctccgaaggacccgaattctacaagcctgtctggctgatccatcgagccattggcattaggggataatgctttttcagaaccagagtgacggagttctgaagacctggattttccaccaccctgatttattgactgcatttgtgccagatcacggttgcttctctctggtgaatttggctc

SEQ ID NO: 29728 - DNA, 374 bp, Gossypium hirsutum
  Clone ID: LIB3083-047-Q1-G1-E2
gaacatctatatgcaaacattccggaggctcaagagaaactccaaaagttaagagaaatcgagctagaaacacaattgacctcatctgaaattagaaaaagggaggaggaacacttgaaacttgccgcagacctcaagaagcagcccgaggtggcatctcggagatcctatattgagcggataaaagagattacaaaaaacagtggcaaactcgattctgacatagaacgaatcttaagagatactaggacactccaattagaaagcaattccattcaggagagccttcatcgcacctatgctgtcatagatgaaattgtcttcagagaagcaaagaaagacacaaaacggggacaagcttatatactgctcac

SEQ ID NO: 29729 - DNA, 207 bp, Gossypium hirsutum
  Clone ID: LIB3083-047-Q1-G1-F3
acaagaactaataacatatcatattaaaaaattaatcgtattaattacactattttactgtattcatactagttgcggacaattgaccaatgaatcatgaaatagggaattggttaagataatctacgcatacgtgaagctatatatatatccttaagtaacttggccattgattctagacttaggagagaccatgagtatctattt

SEQ ID NO: 29730 - DNA, 256 bp, Gossypium hirsutum
  Clone ID: LIB3083-047-Q1-G1-F4
ggtcggttcatctttttttaactcagaatctcgcccttcttttcctgtttttttctttgcttttttcttttccttatacaaaaaatcccaatttttgcgcgtcatcatcgtcgagtctccgaatccgagaggcgcttctttttccggcaagaagaacgcggatgcaggcagctagggctaagtcgccaatagcaagctaggatgcaacaacgctttatcctatcatcgcagtcgcttgcttggtcctcagctagag

SEQ ID NO: 29731 - DNA, 367 bp, Gossypium hirsutum
  Clone ID: LIB3083-047-Q1-G1-F7
atgaaataattctctctgaattggataccattggggacttcaatctcaggaaaactgatttaccatagggatctcatattgccaatacggaatctgcagtcttaccggaggatacgaagaccaaggccaatgttgatcagcctgttcttgaagcaagatcagtacaagatattgatttggctttcaagcaactttatgaatggatcgatgttgatgaagtaattcatccaagtatgattgacgatccacatgatcaagcagattacaatccaaaattacctgttgttgacgtaagatctctagacgatacctgtaaccttttcaacaatcccggaatccaaattagccaaaactgccataattcttc

SEQ ID NO: 29732 - DNA, 246 bp, Gossypium hirsutum
  Clone ID: LIB3083-047-Q1-G1-G1
gacccaggccggatcttttttttagtcggtgtcgaaattgaataacagagattcaataataacaacataggggtcgttcaggataaatctctcaaatcagggaggcacatcagagatgaaattcaagcaaaaagattattataaagaaaagagaaagaagtagcccatatacgagagatctagaattcgcagcagttaacgcaatcgggattcttaagcctctcaactcgctgattgaactgttcg

SEQ ID NO: 29733 - DNA, 101 bp, Gossypium hirsutum
  Clone ID: LIB3083-047-Q1-G1-G5
gcatgaattcggctctatgctgcttcatgtgtattcatggagggtgtattattaatccatcaatctatatatcatatgaacgtaaactctactgctgttat

SEQ ID NO: 29734 - DNA, 287 bp, Gossypium hirsutum
  unsure (1)..(287): unsure at all n locations
  Clone ID: LIB3083-047-Q1-G1-G6
tggataaccgaactgcaggtttttttttttttttcagtgancagatttaagactttttctcagacttgtttgccatgcataatgtataacaaaaaggtctttcaagatttttcaatctctgagcactgtaaatccattatcagatagaggtcagcaggtcaccaatcattgctctttcgccctctttcgtgccagaaatcgttctctagcggctgcaacagcattcagaactccttttatgatggtaatttttgggttgatcaattgatggttgtttctctaaattg

SEQ ID NO: 29735 - DNA, 272 bp, Gossypium hirsutum
  Clone ID: LIB3083-048-Q1-G1-A12
gttaacagaactcacaccacttgtggagtccagcatttgccacagaagtaaacattgtggacaactcagtctgtgtgctttttccttaaacaacatgtggacacttaagattgccaaagggggtgttcgatatagtgggggatggctaatgactttgaccaatcatgaacgatctcaagtctgggaattctgccctgaatcaggaaccccggaagatctttctaaggtggaaatgggtcgtcagagttttcgggataaccgtttccacaaaa

SEQ ID NO: 29736 - DNA, 314 bp, Gossypium hirsutum
  Clone ID: LIB3083-048-Q1-G1-C3
cgcttcgctccaaggataagatcaagttctcatggttcttatcacgtgggagagcgggcctgtcaatcactttggggattgaaaagggtcttgcaaacaaccggtttgggcaaaggccagagactcttgttccaaggaaagagatagtgatgaagaatgtttgcactggtaggagtaaaagacatgtcacaggtggtacttttagaggacccagctcgcaaagagaggaagcttgtggcgatgaatagcacccaaagtgtgctaaacgcctgtgaagacgttgccaaggtcaggtcacaggttgataaactctc

SEQ ID NO: 29737 - DNA, 273 bp, Gossypium hirsutum
  Clone ID: LIB3083-048-Q1-G1-C9
ccccgggcactaaaattcgggccgatgactctcatcttgtccgtgactattttgctaacagactggtgccccactttgttcaatactttaacataaacaccattaacgatattcttcctctctccacagcgctgaggaggttgaggactgcctgctcaaacggcacacagaactttatcttccactgctcaaccaaccactcatcttcgacccttgtaagacggtacccatttttactccagcattacccaagccacgttttactaacttatc

SEQ ID NO: 29738 - DNA, 157 bp, Gossypium hirsutum
  unsure (1)..(157): unsure at all n locations
  Clone ID: LIB3083-048-Q1-G1-D10
cccccgggnaancaaaattcngcacgagcatctagctgttccctttctaaattgatgattacgagacaacatttgatctcgcttttccttacttcatttctcttgtttttccatccccattgatcaataacttgaggggagggtgccgttcattctc

SEQ ID NO: 29739 - DNA, 274 bp, Gossypium hirsutum
  Clone ID: LIB3083-048-Q1-G1-D2
gtggaccctccaccggcacctctgattgatatggctgaactcacatcatggtgcttttagagagccctcatacttgactttagaggcactctcctcttcctctatgtcactgtttgcactgtaattggtcacacgaaaaaagaagatgcatctgatggtgttgggcccttgggtattgcatgggctttccgtggcatgatacttatccttgtttactgtactgccggtatcttcacgtggacacattaacctcgcggtgatctttgggttgttt

SEQ ID NO: 29740 - DNA, 360 bp, Gossypium hirsutum
  unsure (1)..(360): unsure at all n locations
  Clone ID: LIB3083-048-Q1-G1-E1
gggctgcaaaaattnacacgagtcagcattacagggggaaccttctgtattgcattatggcgtggaacacaagttgctgtgaaaagggttggggatgaagtttttaccgatgacgataaactgacggcatttcgagatgagcttgcattatttcacaaaattcgacatccaaatgtacttcaatttcttggtgcaataactcaaagtagtcctatgatgattgtgacagaatatttacccaagggagatttacgagccttcttgaagagaaaaggagccttgacaccaatgacagctctgacacttgcacttgatattgccaggggaatgaattatttacatgagaacaaaccggcacca

SEQ ID NO: 29741 - DNA, 182 bp, Gossypium hirsutum
  Clone ID: LIB3083-048-Q1-G1-E9
gagacgttttatgatggataacacatctaccatgatatttgaaccatgtcatcaccatttgtttccacatatctcacattaccatttactacacgttattggggtggcgagggcatttctctgctactattatcgagagcctttatcattcctctttttctctttctacctcatctgtagtt

SEQ ID NO: 29742 - DNA, 357 bp, Gossypium hirsutum
  unsure (1)..(357): unsure at all n locations
  Clone ID: LIB3083-048-Q1-G1-F3
acaaagcaatcaaaagcagaggaggtgatttccgctatccactttcctatggtcttttctttccttttactagtatttgctcacatctttcatcgatatatttcaaaaaaaaataaacacaagagaaggaaaagcgaaagaaatctttctttctatcagtatttaccttgcgaatccgtcttcgatcctctgtcgtttcgtcgaaatcgaagctagggggttttgaggtcnaanaacactacgccaaaacccgaaacacaaaacgtcgttctcgatggcgatttggtgtttgaggacgcactttacggtttggctaaaggaaacggataccaaagagtgggagaaggtgggtatggt

SEQ ID NO: 29743 - DNA, 154 bp, Gossypium hirsutum
  Clone ID: LIB3083-048-Q1-G1-F8
agcaagctctcttcctactttgttgagtggattcctaacaatgtgcaatcaacattttgtgatattctacgcacacgtctcaagacgggctccacatttatctgggggtcagcgtcgactcacgatatctttaggcgtgtgagtgaccagttta

SEQ ID NO: 29744 - DNA, 203 bp, Gossypium hirsutum
  Clone ID: LIB3083-048-Q1-G1-F9
gttatggtgggtaccgaggaccatgttaatctatgagcaaacaatttctcagagagatatgctattgggacatcagcctagacagacaatgactatggggaggcacgagcaccacccttctttgatctggtggactcaaatcatggtctttttacagacctggtattgccgagtttgtagccacttttttgttcctttacatc

SEQ ID NO: 29745 - DNA, 216 bp, Gossypium hirsutum
  Clone ID: LIB3083-048-Q1-G1-G11
agtatagtttaaagatgtcaaaagtcacctctctcagtcaaaatttttaacttgtgaagatatggaatctcttagcatgcatgatggatttcttctgggagcttgggtagaaagtgctaaaaacttgtacaaggtgaagaagaagagaaacagttcgagtggaatgcatgaactcaaataatcatgtggtttgacaacacagaggatgaagctagt

SEQ ID NO: 29746 - DNA, 260 bp, Gossypium hirsutum
  Clone ID: LIB3083-048-Q1-G1-G2
gaaacgctaatgttaatgagatttctaacaccatcaccgaaagatggatgaacaacatgttagcacaacgactcaaggatttcttgacccgactggttagagaccatgaaagcattgatctggaatggttaacacatgtccccgctgataaagcacaagattatcttttaagcatacggggattggggctgaacagcgtggagtgtgtacggcttttaactcttcaccatcttgcttttccacttgacacacatgttggc

SEQ ID NO: 29747 - DNA, 274 bp, Gossypium hirsutum
  Clone ID: LIB3083-048-Q1-G1-H12
gtgtgggcttctcgccacatatggatacagaatgctgcagccacgtcagctgattttgcacagcatttacgctggatgacccactgccgcttgagcattccacaacacgcactctttctgcatttaccagcctggctgaagaaaaggatgcgatgatcactgatcgggagatccacccacttgtgattgttacacagcatagtgggaaaactgagcgatcaaaggccggtgcacaacattcaaccggcatacctagtgagcttgctgctatgat

SEQ ID NO: 29748 - DNA, 256 bp, Gossypium hirsutum
  Clone ID: LIB3083-048-Q1-G1-H9
ctagtctcgagttttttttttattttttttattgaccgcacaaagcaaaaatcattgtaactcaagatgtctgtcaaaaagcatcagttaaaactgaagaccaaagatgaatcaacctaaacatgatcctctaccactcataaaaaaacatgctttccatattacaacatgctccaattttgctgccaatcctaataatacacagccgttgccaatacaaaaccaaaaagatgcacattacacatacactttcaca

SEQ ID NO: 29749 - DNA, 283 bp, Gossypium hirsutum
  Clone ID: LIB3083-049-Q1-L1-G10
caacacacaacttaatgcatgagatggccctagtccctgggcgatcgcatgggcgatagggagcatgatctttatccttaccttacattcactgccaatatctgagctcgacacattcaccctgcaagaacccttgtttcgttattggcccaagccttaatatctcattaaacacgtagcttacattgcgtcacaacccttgtgcactgtaatagcaaataggattaattaacattttcatgaagagtgcctccagttacactaattgtaagatcaccaccag

SEQ ID NO: 29750 - DNA, 242 bp, Gossypium hirsutum
  Clone ID: LIB3083-049-Q1-L1-G6
aaaccttcttattaaacgccgcgaaggacttctctctcgacagcaacatccggagcgacggcggctgctctcttccgtcgtcgggtccgagaaaaagttagaaagtcttcccgccatggttgcgggtgtttggacagatgacaggaatatgcagcttgaggcaacaactcaattcaaaaagctgctatcaatagaacgtattccttcgatcaacgaagttgcacagacaggtgttattcctc

SEQ ID NO: 29751 - DNA, 271 bp, Gossypium hirsutum
  Clone ID: LIB3083-049-Q1-L1-H10
cagtaaattgacaatccaactccatctttttactatgcgggcggtcactgcaagagcggctaaccttaccacttctttacctcaactacaacgagcataacctcccttgttacatgagactcaccacaggcgattctcatcgctttcaacttccgaagatcgaatgtgtgaatcacataattatgcgaccggctccacttcatcataatcataatcatcatccaacatggatgcctgcttctgctagtactaatattattttatgcaccgc

SEQ ID NO: 29752 - DNA, 397 bp, Gossypium hirsutum
  Clone ID: LIB3083-049-Q1-L1-H11
tcgagttttttttttttttttttaaagtctaaaaaagcatttatttgagccgggaaaacaaataaaaaattcactactacatacattccatgcatttacagaatacaaagatgatccacagcaactttaatggcaactcattcttccaagattacaatatctaggtggtgaggtgcaggaagtgttgtgacctatatagatattttgctgggattctagagcagtatcgtaataaacactatgtttacaaacattcctcaaaaccgaactcgaaacagatgaactattggaacaaacttgcataaaataatccttagtagaggaatttaaacgagtgagtgcgtcactcaggatctgcatgatggtagagtgatgccaccacagcaagcaacaatta

SEQ ID NO: 29753 - DNA, 307 bp, Gossypium hirsutum
  Clone ID: LIB3083-049-Q1-L1-H4
caactagatctttaaattttgtagccgggtaccgtcacgggaaactggactccctgctccattacctccactacaataaccataagtcctcccgttgattctaattcatcaaattcccatcaacatctccttcaacttcacaagcatcacatgttgcaacaacatcatcatcaacctgctacaactttatcaaagcaaatattatacaaccaacaccattcctacatcttctattgctactaaaatttctaccaccgctaccatatacacgcatactgttccccaaatcaaccctgctgcacaatca

SEQ ID NO: 29754 - DNA, 310 bp, Gossypium hirsutum
  Clone ID: LIB3083-050-Q1-L1-A10
tacgttgccacccggacggacgcttcgggaaccagatcaggcctctatggccgtttacccacgcgtccgaaaactcgggaaccggttctagatctacagcaaccaggggctgagacaacttcagatgacacaagcgtgattgctgaagataccatttataaccatgacaactacaatcaactatcataaatggacttatatgctcactactgacctaacctgacctagactactcaccactgcactgagctgagctgaactgttctgaactctaatgacgtggggagagctaagctgaactgagctgagc

SEQ ID NO: 29755 - DNA, 386 bp, Gossypium hirsutum
  Clone ID: LIB3083-050-Q1-L1-B11
gttcacaccttatctcattagggcgaatacagtgatctggaggacggtgctactgttcacactgaaactcagcacggtgaacacagtgatctgaattctcaacaggatagaaatcctgtcgatgggatcacagaaatggaaattgacaaagataatgctgaagctgttaatgcatcaaatcactttgctctaaatgagtttggggtgtcattcccaactaatcttggtactgagtttttgttggaagaaagtaaagccaatacatcagctgatggtagtatagcagaatgctttgcacctattgaaaatgggactaattctattgtcactttacaaactgctgagtctgtgaatggatctcaaaatgcatatgaagctgaaaatga

SEQ ID NO: 29756 - DNA, 365 bp, Gossypium hirsutum
  Clone ID: LIB3083-050-Q1-L1-B7
gttccaccgagttcggcttggtgatggttcaatgggatcactactggatctcaaaaattctgagccagaccctgaacctgaaccattagataacaagtttgatagtagccaaaactcaactggagcactgcctgtacggggggtatggaagaagggaggaagtaaaaagctctttttataacaggcaatcagccaaactcttactggagaaatggtgtttgacaacatttcttgtttagaaattatcttaatagtgccgtcaaaaagtgatcgagttttgctatgagctcgaaaagctgtcaatagatggagaagattctatatatggcctggggtttttttttgggttagccactaatacattt

SEQ ID NO: 29757 - DNA, 434 bp, Gossypium hirsutum
  Clone ID: LIB3083-050-Q1-L1-C10
tacgttgccacccgcatgaccctttgggaccagatcatgcctcgttgaccattatacgattcgtgctgaaccaccggtccaggggtccctagtctcggtgtgatttcaccatcttgctcaatcacatcgttcttggttgcatgtttgttcgctcttctgtaaacaaggtttgtattgccaaactgattgtacttgctggcgatatcaatatttagggtgaggagcaaaagatactggatgtgctttcaaatgaagactatatcaaagctttattgagcagtggcagaactcgcatccttatctcggaagacgatgaacatgctattatcgccgagccctcaaagtgcgtaaggtactgtgcatctctcaattcgctacaccggtcattcaacattgattgcattgtttatcttgaaacaatttttgggctttac

SEQ ID NO: 29758 - DNA, 302 bp, Gossypium hirsutum
  Clone ID: LIB3083-050-Q1-L1-C11
ctctggttctttaacattcatgcggtatacaccacacgaggtattgggcgatacgtactcgtgaggccattaaaacaaacccaggtcattataatgctctactcatctctaccaacttatatcattcacatgcaattatcatcgataaatctccacactgaaccgacagaacgaccaacgtcgaccctgttcaataaaccaggattatgcttctaagcatactgatactctgcttcttggccatatttacaggctcataaccactcattaggtgattaacggattgtatgcaatgaaacatt

SEQ ID NO: 29759 - DNA, 382 bp, Gossypium hirsutum
  Clone ID: LIB3083-050-Q1-L1-C12
acgaaccaggcctcgatggccgtttacccacgcgtacgggaccttcgggacagcgaggacacatggatgaacccggatattccatgaatattaacatgagttcttgcaacggaccactcccagttaaaagaggaccaccaccaagaagtgggggtcctgctactaaagatctgcacactcaggaccagttcgcattaacagaggaatgggcagaagacctgctgtatcacgtactagagatagctatggacgtccacctggacaggaaccgttgtcctctcgtacagatgtttatatgtgcccaaaagatgaagggtattactctacagacagcatattccgcagaaatgacccaagctctggagatactagagattatgca

SEQ ID NO: 29760 - DNA, 367 bp, Gossypium hirsutum
  Clone ID: LIB3083-050-Q1-L1-C4
atggaccattttaagttcatgaaatcatcattacaaacgagacgacgccatcacaacaaatgactcccataatgcaggaccaacaagaaaatctagttatcgacaccaacgctacacattccatcaccaaagctattaatggcgattatactctcaccgactctatgagcctaaatgagacaatcatgaattcatgagcactataccgagataagatcccgaagaaaattggctactctaagacaagggaaagtattgtagaggccaacttggacctaccacctaacataccatctatcaaactgattgtaaaaaagaatacccataattggcattccaactagttatcagagaacatcatgaaatg

SEQ ID NO: 29761 - DNA, 201 bp, Gossypium hirsutum
  Clone ID: LIB3083-050-Q1-L1-D10
acgttgcacccccatgacccttcgtgagccgaatcaggcctctttggccttttacccacacatccgatacatccggtacctgcgggattcatcaatcaccatggaccttcacctccttctcaaccgtattctacatattaaccgatgactccacttccactagctgctcctaacactaatcaatctccccacactaccact

SEQ ID NO: 29762 - DNA, 194 bp, Gossypium hirsutum
  Clone ID: LIB3083-050-Q1-L1-D12
taccaccgaccaggaagaacaaaattccatactctatctgaaatccaaactgtaccgatttgataaacacactaatcaatgtaaagagagacacactaatactgtaaaactcttcaaccacaaaaagaccacaaaagttcaactttttattaagcaatctaaaactctcaaaatctgcaccaatcattatatgt

SEQ ID NO: 29763 - DNA, 400 bp, Gossypium hirsutum
  Clone ID: LIB3083-050-Q1-L1-E11
ccccgactgtttgtcatttaaacaccgcatctcattcaggaggtacctgttggattcaccctgtctctgacaccaccaacgatattcagctttatgccacacttatatcatcaacccatagttttccaacatacgatctccgacgatcatggtattagagagaccacaccgaccacaacgactactcccatcaggcataacccaagaccataccctggccaatgtagcacacgaagctctctatgatacaaccatctcatggtccccattccatgacacttatgaattcattatctcatgtcatcctgttgtcactgatgaacaacccttacagttcacggttcctacaacttataccagtgccactctgacaggcctcaccagtggtgccatctacaac

SEQ ID NO: 29764 - DNA, 413 bp, Gossypium hirsutum
  Clone ID: LIB3083-050-Q1-L1-F2
ctcctctcgaggtctctctttttctcctatttctggttttgtcagcttatgtcttcaattacaatgaatctacccaaatttaaagtcgctttcttgatttgaaggtaaatgaatctttagaactggttccattggtggacgaaaagatggtgaagatgatgatgtttaatgaaagcagaagaaagttggggactttccagatatgtgctgcttgtacatgctgtggtggaccgaaaggtgtttgcttgccatccccttgttgctatgccttcaattgcaacattccaaacagaccttttggtttctgctccttcactcccaagacctgtaattgcttttgatgccatctctagtttcaaagtttattttatctatatttcgtaattttggcttggttttaactaaggagttcc

SEQ ID NO: 29765 - DNA, 340 bp, Gossypium hirsutum
  Clone ID: LIB3083-050-Q1-L1-F5
gatgatgaatgaacaaagattgaccctgttggcagaagtcgggtttttgaaaagaaggcacaagttcctgatgcaagaccaatcttcaaaaccccaagcggaacgacattttttgcaaccacaggatattgtgattagaagcaaatcaaatatgaaagcaaagaaatccactggaaagggtacatcgtcgaaccgagctatggcttttcatctgaaccaaaagggaaagacaaatagtgtaaagggaacctgtttcactcatcctgcccttatgttggacgtaaaccggaagcagcagaaaatttccagtggaaaggaagttactttgcgaagttcttta

SEQ ID NO: 29766 - DNA, 396 bp, Gossypium hirsutum
  Clone ID: LIB3083-050-Q1-L1-F8
tggaaatcggaaaccatgaaaccggtgatgctcatcctttgctgagagggggggggagaaaaactacatacacccatggtttctcttcagctcaaatccgatcacttgctgccacctgtgaagctttaatccctcctctcccacttgattcagcccaccaggcttcttcccttgatgctttctacaaagcttctggggctgagcctccacttcctgatgaggtagcagagatgatggtgaagagggtggttgaacccagggtactctcgtttgtgaaagtagtattggcagttatatcgtttagattgggcgcattgttgctttgcgggtgggattgctgtgactggaaatggccattcattcacaaagtttcggaactgccaatggagaagagag

SEQ ID NO: 29767 - DNA, 430 bp, Gossypium hirsutum
  Clone ID: LIB3083-050-Q1-L1-F9
ctttcgaaccctatcctgcatcttttaccctttaccaacgcctccgcttcaactggcccctgttgtactcaccctgactatgacactgtcaatggtattcaatttcatgccactcctgttcatcaacccagcgttgggcaacaaatgatctttgacgaacatcttcttaggctgaccacaccgtccacaactgccacccccataatgcatacgccaagaccatacccgacgcatgtacgactagaaactctctctcagacaaccatctcatatgccccattccaggacacttctgagtacatcatttcatgtcatcctgttggcactgatgaagaacccttacagttcagggttcctggaacttctaccagtgccactctgacaggcctcaccaaatgtgccacctacaacatcatattggacgcactta

SEQ ID NO: 29768 - DNA, 378 bp, Gossypium hirsutum
  Clone ID: LIB3083-050-Q1-L1-G2
ataatatcattattagccagtcaaagctatgggagattacgtttgagacaaaaaccggaagtctcaatagttggaaggttgaaggcgtccctataatgaaaaatggcctgttcccatgcttttggcgagcaccaacagacaatgacaaacggggaggtctgagcagttatcagactaagtggaaagctgcctgcattgatgagatagtttttcttactgaaagctgttctatacaaaataagacggacaatgttgtgtaaatagcggttgtttaccttggcttcatttacggcgaggatggcactatagatgagtcgaagaaagcaagagctctattcaaagttgacatgctttacacaatccatgcgtctggtgaca

SEQ ID NO: 29769 - DNA, 261 bp, Gossypium hirsutum
  Clone ID: LIB3083-050-Q1-L1-G4
gaaatggctgccatgaagagggacgctgagcattattcacgccaggagcatatggaactagagaaacgctaccgtgaactaactgacctactgtactacaagcaaacacagttagaaaccatggctagtgaaaaagctgcagctgagttccagctggagaaggaaataaagcgtcttcaagaagctcaggttgaagtagagagaagtagagttcctcgtcgcgcgtcatcttcctgggaggaagacacagatatcaaatct

SEQ ID NO: 29770 - DNA, 299 bp, Gossypium hirsutum
  Clone ID: LIB3083-050-Q1-L1-G8
aatttcatttttgaagaaaaccagtctacctcccgggagagcgcatatcgaacttcatctacgcctccggctactatacagaactactgtactcacagcgcacacaaactataaccatggaaggtgaaatagctccagctaatttccaaatcaggacagcaatagagcatattccaacacctcaggtgaaggatatcagaggtgagatcactatgcggcttaatctttccgtgagaaccactctgatgtcacatctcttaatgcatcaacacataaccaattacccctattatcagtcc

SEQ ID NO: 29771 - DNA, 151 bp, Gossypium hirsutum
  Clone ID: LIB3083-050-Q1-L1-G9
atctatcatgattaaacctttccatacttatcatacacctttgagaactgtattcttctataacacctcatgataaaacttcaacagatccatcaaaacaccaaaacacttaccatcatcatattgcattcagaggtccccacctcatata

SEQ ID NO: 29772 - DNA, 322 bp, Gossypium hirsutum
  Clone ID: LIB3083-050-Q1-L1-H11
tgacactaatcaaatcacttttaactttttcaccataacgaacttgaatagttcatggtaaaaaatctccggcattacccacaacatacatcaactaatcccaacccaccctaaacattaaacactcactccctataaaaatgcaaatatatagcatccctcttacaaaaaaacatgtaagcatagaaatcacaatatcactatatatttctctatcttaaaacactccttttaaaaaaccctgactcttaaaaataaacccatcttctaaagccatgcaaaaagatagctttaacaatccaaaaattacgacccgaataac

SEQ ID NO: 29773 - DNA, 374 bp, Gossypium hirsutum
  Clone ID: LIB3083-050-Q1-L1-H4
gaaagacgaagctttgaagaagcaattgaaaagctgcatcgagttgagggtttaacgcgttcctccttgggtgttagagttgctgctacggaagctcttgttggtctttatttgcagttgggccaggatgatacttcatcagtgctcgcagataaatgcttagattttttgcataaagatgatttaagaagtaatggtgggagcaaagaatctttgattgttcgtgctaaagcagtgaaggggctagttgagcttgtcactggtaaccttgagtcagctgaatcattttttcatggagtccaagatattgaagcttggaatggcacttgctgtttatcttatggagaatttctacatgctacacaacaagtttc

SEQ ID NO: 29774 - DNA, 379 bp, Gossypium hirsutum
  Clone ID: LIB3083-051-Q1-L1-A6
gatctatgcaaatcatgagcctgaacactgattgtacctgggcgcactagtttacggtaaaatacaaccactccataagtacgaccggatgtataatcctacaacttaataagctatatgctacacagcattacttcactccacaaccatcatgctcagaattttactgatcgccataggatgaatatccatcacctagacaacccatatataagccatcaacacacgaccaacatacacccactattcaagacatccacctatagagaatcctccatacaatgcatacatcgactaaccattccaaagcaatgatctactacaaagatgagtatatagacaaagaagaactgccatctgaagttcagacttatcattg

SEQ ID NO: 29775 - DNA, 440 bp, Gossypium hirsutum
  unsure (1)..(440): unsure at all n locations
  Clone ID: LIB3083-051-Q1-L1-B6
gaatccaaatggttgnctcctactgagtaaaagagacccttggtgccgctttcatttaaggtgttttcgtaaaggagagacgttatggattgcggaagcggcggcggcggcttaggagcgagtggttccggcggagaccatgattcctccgacctttcacgacggaaaaagccttaccatcgtcacacagctcaccagattcagaggcttgaatcgatgttcaaggaatgtccacacccagacgagaaacaaaggttacagctaagtagggaattgggattagcaccaagacagatcaagttttggtttcaaaataggaggacacaaatgaaggcacaacatgaaagagccgataactctgcacttcgtgctgagaacgataagatccgatgtgaaaacatagccatatgagaagcacttaagaatgtgatttgtccttc

SEQ ID NO: 29776 - DNA, 443 bp, Gossypium hirsutum
  Clone ID: LIB3083-051-Q1-L1-B7
aaaagtggtgctttgcgtcatgatatacactattggcttggtggagacacatcccaggatgaagcaggtgctgatgcactcaagactgttgaacttgatgctgcccttggagggcgtgctgttcaatatcgtgaagtgcaaggccatgaaactgataagttcctttcctattttaagccatgtatcataccccaggaaggtggagtatcatccggattcaaacatgttcaggaagaggaacataagatacgtatgtctgtctgtagaggcatacatgttgtccatgtaaaagaggttccttttgctcgatcctcacttaaccatgatgatatctttatactggatacaaagtctaaaatctttcaattcaatgggtccaattcatccattcaagagagggcaaaagccctagaagttgttcaatacattaaagatacttatca

SEQ ID NO: 29777 - DNA, 305 bp, Gossypium hirsutum
  Clone ID: LIB3083-051-Q1-L1-C9
gatctaatggcctgaatcttcgaattcggaggggtggtcatgactatgaaggcctatcatatgtctgttatgacccataagatggtcttgatttcaccaattatcaatcacttaagatcgatctaacgaacaaactcacatggtttcaatatggtgcactcctctatgagttacactcttaaattgctagaaaactttaatccctcgctcatcatgctgatatttgcacacactggctgcggtgatgcttacttaatcggcgaggatatggtttattggtacgaaaatatctgcttgcactggat

SEQ ID NO: 29778 - DNA, 385 bp, Gossypium hirsutum
  Clone ID: LIB3083-051-Q1-L1-D1
cggcacgagtgaatgacaggagtagtcgatctcacagctgctggagagttcacgttcaaggaaaagacctcacatcaggaaacattattcatggctgtatgcatctggttgacctggcaggaagtgaaagggtcgataaatctgaggtgatgggagatcggttaaaagaggcacagcacatcaacaaatccctttctgctttaggtgatgtaattgcggctcttgcttcaaaaggttcacatgttccctatagaaacagtaaactcactcagttgctccaagattcacttggaggacaagccaaaacacttatgtttgttcacattgctcccgagtacgaagcttctggagaaacaattagcacgcttaaaattgcagaaagggt

SEQ ID NO: 29779 - DNA, 432 bp, Gossypium hirsutum
  Clone ID: LIB3083-051-Q1-L1-D6
gaagaattgattaagtgtcgttatgtgctgaaggagaaagaggttatcatatctcagcagaaacaagcagaaaatgctttagcacatcaagcttgtgctttgaggtccgacttagagaaagctgtcaaggataatgctttgttgttcctaaaaattggaagggaagacaagctgaatgctgataatagagtagtggttaataactatcaagtagaacttgcccaacaaattggttctatttgcaacctggtgtcctcattaatgtctcagcaaaacgaacaccttgagagtgttgagaaactctgttgttcttttactgatacacatcaaaaggcaatcttggatatgaagaaaaaggtcactgccgcgaggactttgcatgtttcccagatggaggcagtccaaaatattgtgcgtttgcacaagggtagc

SEQ ID NO: 29780 - DNA, 436 bp, Gossypium hirsutum
  Clone ID: LIB3083-051-Q1-L1-E6
tcgagtttttttttttttttttttaaagcataaataatatgcgattctcattataatctatcacaaaaatatgtgagtccattacattaagatagcactaaatatttacaataccatatgggagagagaaatttcggatctcctccataatcgaaatgccagaaccaaatatggcattttgattttacattacaatattatttgtcaacatccagttgaacatgacaaacgaacgatcatcagctctctgctaacaaaacgtttcacgccaaacacaatagaccattaaacacgacatctacattaacaagcttctaaatctgctactgaaagggctcataccgacacactagaccattaaacacaacatctacattcgttaacacctaccttcgttaacgaaaatgaaaacttctaaatataccttagcaccatg

SEQ ID NO: 29781 - DNA, 285 bp, Gossypium hirsutum
  Clone ID: LIB3083-051-Q1-L1-F1
gaaaggtgaagtggtaaaggttgtttgagaactgagcatatgtgggggatagaagacaagagtacggcctaagccaaatacacacaaaggaaagaagacatatgacttggagttgcagatgcagtaaactatgattagattgcttagacaaagcaattgcatttggatgaacactaccagatgatgagtcgtttttgctctcataatgtgagagaccgaattcacgcttgtattcacgattatgatacgatccagaaacttgacgtattcattatttacattcaa

SEQ ID NO: 29782 - DNA, 293 bp, Gossypium hirsutum
  Clone ID: LIB3083-051-Q1-L1-F10
atcttgctagatttcgatctccttgtttctagtttgatgtcttttcttcaaagaatttaaaaattttgaatttttatatctactacaccgccagtcgccagagccagttggtttattctgtgccggaatggctggaaacgactggataaacagttacctggaagcaatcctggacgttggtccaggaatcgactatgctaaatcctccttgttgttgagagagagaggtaatttcagtcctactcgctacttcgtggatgaggtcattactggattctatgatactgatctac

SEQ ID NO: 29783 - DNA, 364 bp, Gossypium hirsutum
  Clone ID: LIB3083-051-Q1-L1-F11
acatcaaacccgatcatcaatggctacctattatttcattatctttgaatctgttcaacatattaatacaggatcaagtaataacttgataaagttataaaaataaataaataaataaaggaaagcttcaatctcctatgaaggataagccatctacattgacataatttgtggtccatacaaaaatggactcatcattaactcaatacattcaaatatgtaccatgaacaaaccatataggtagctttagtttgtgagcttgtcaagccaagaatccatgacttgagacacagtctccataaatgcagcttcactcatgcctggaagcaacaaatcttgagcttcatctacaatttgctcaat

SEQ ID NO: 29784 - DNA, 365 bp, Gossypium hirsutum
  Clone ID: LIB3083-051-Q1-L1-F7
accaccatcaatcattttatttattccaccatgactgctataccatgcggcgctttactacccggaccggtgagctccaacattcgcaaactcatcataagccctatacccttaactacactacatctctccatattatcatttacaccaactacctcactccttatccatcaatacaaaccctctattctccctgaacttacacagctttcaaaactagccaaaaacttgatgctaacagactatcctttacactttcaaaacctcacactatcaaaacatatttcttacaccatatatacgattcatcaactatatcatacgaacaatatccatttaatgaactctacttctattcatgaaat

SEQ ID NO: 29785 - DNA, 390 bp, Gossypium hirsutum
  Clone ID: LIB3083-051-Q1-L1-G12
gtgtgcgagatccgcagaaagttttcaacaggtgagaacacgttcactgttggaggggcttacgctgttgatcatctcacactgattaaagctaagctcaacaatcatgggaggcttggagcattgctgcagcatgaagtcataccgaagtcattgttgacagtctctggtgagcttgacaccaagtccttggacaaaagtcctcgcttaggattggcctttgctctgaaaccctaatcaattatttgcaacccaatgatgcttttacagatttgattacgattttttttttgtggtgatttaaaatgggggtgtcaataagttgctccacagacgattaatattcatttctaggttcgcattttctgtggatggatgattgatactttt

SEQ ID NO: 29786 - DNA, 405 bp, Gossypium hirsutum
  Clone ID: LIB3083-051-Q1-L1-H1
aaaatgcagtggtttactttattgatctaaaaaggtagtaattaaatcaatgaaagcatcaaacaccagacaaattgtccacccaaggaagagacacctgacaaatgaccatttcatgataaaaaagcgggactcaacaaaaacgtttctcgtgccgctcgtgccaaatcggcactaggtgttatacagttcacacataagcgtcaatcaaagaactgatcacccttgagcgacactttatcttttggattactctctctctaattttttctctttgccctttgattgattatttcatctgcggttcgcttagagaaaatgaaaggaaaatcaagtgtgaagcaaacacgtccttattaaataaaagtggtagatcgatctcaaaggttaaaaagggttcaaaat

SEQ ID NO: 29787 - DNA, 400 bp, Gossypium hirsutum
  Clone ID: LIB3083-051-Q1-L1-H2
tctaaaatgggattctctagatcatcggacagtttcctcacggtgtgcccaatcctacccatgcacgtgtcggctaccccttcatgtcctatgctcaacttacccagctgccatttcctatccatctaatctgcgtgcacgtgcatccatatcggaatgcctgatgctcagctgcgaatattcatgcaacttctacactcaattcgatctagtctccgagatcaaccggcgcatcttatctgccaggcgatacactagctacagctccctaagaataaacacgagcccatgttcgcgacgcttgtcgtcatattatcactgtcggtcttgagctcaatccaattcttactcacgctggtgcagttaatttacgcactagtcacgttcgatctatttatat

SEQ ID NO: 29788 - DNA, 439 bp, Gossypium hirsutum
  Clone ID: LIB3083-051-Q1-L1-H7
caaatcagtatcattcagaacacagattctctcacggaaacagagtaccccatcactgtttagtccaaaacccgttgtactaccaccctcaatctactagaatcaaagtcccaacgactcatcctccaactacttatccttaatctactcaatctatgacggcttaacctaaagctcggctaataaactaccatcctcaaataaaattcagcgagatatcgccctcaaatcagtcatagccctacggctcagtgcatcaaccaccatattggccttaccagagtggtactcaatggtgtagtcatagtctttaagtagctcaatccatctgcattgcctaagattaagttccttctgagtgaggagatacttgaggctcttatgatcagtgtagatgaccagtgcgaatactacaacagccaactccaagtcacacgtc

SEQ ID NO: 29789 - DNA, 237 bp, Gossypium hirsutum
  Clone ID: LIB3083-052-Q1-L1-A3
agagcccgttgcatcaacctaattacgctaatcatgcgagtaggcgacagtctcagactcgcgtttacagtattagcaagactgattacagagaacattgtgcatcaactcactgtatcaccgacacataatgatccttagccatggcctgcacagaatccaccgctaccccaaagtatgaggctgcatagaattatgcctccaccattgacaccaatcaatcggcctcatattcct

SEQ ID NO: 29790 - DNA, 418 bp, Gossypium hirsutum
  Clone ID: LIB3083-052-Q1-L1-B8
tatcaagagattgttgatgcatatggtgttgcaggatatgaggaggcaaatcctgcagtttacactgttgttacttttccttttctttttgcggtgatgtttggtgattggggtcatggaatatgcttgttattgggagcattggtccttatagctcgagaaggcaggctcagcactcagaagcttggaagttttatggaaatgctatttggggggcgatatgtactccttttaatgtcacttttttcaatttattgtgggttgatttacaacgagttcttctctgttccctttcacatatttggtggttctgcttacaaatgccgagatgttacctgcagtgatgcaaagtcagctggtttgattaaatttcgtgatccatacccatttggtgtggatccaagctggcgcggaagtc

SEQ ID NO: 29791 - DNA, 318 bp, Gossypium hirsutum
  Clone ID: LIB3083-052-Q1-L1-C12
cggctgagaattcgacgaggtcttctgttttgatatacaatgaactggggtagagtgaatgtaatttattttacagacaaatggtttaacataattttgggttttaaagcagaggttatacacacacttttttggaaaagaaaccaattagggcaaatacttcttacactgaccttattaagccttcttcaagaaccaggtatacagattaatctcatatgatagctacaaccctttgggctttggcttactgagtgttgtcttatgagatgaaacaaatggatcagacagacagactatgttatgtctgattcaagt

SEQ ID NO: 29792 - DNA, 248 bp, Gossypium hirsutum
  Clone ID: LIB3083-052-Q1-L1-C2
ccggcgccggcgttggtggagaaagaagctgttgaatagagcaaacaggtttaccgcaaatttgagattgaagagtacatgatactggatgcacgacatgaaatctcagtccacggaaccaaggattgaatccatgaaagcgatggaagctactgctgccattgcatcagctttaaatataaatattataacttagctattgactttgtggaaaggatgaaactggtgcatcagcgttcatgctatat

SEQ ID NO: 29793 - DNA, 313 bp, Gossypium hirsutum
  unsure (1)..(313): unsure at all n locations
  Clone ID: LIB3083-052-Q1-L1-D1
gtagtaaagtaataatctcttaattatgagaaataagagaccggaaagtccaagggtctctcaagggggcgtgcattatgganngtatcgaaatctgatagaccgggtgacaatatgcctgctagtggagccagtcaagtcttgacagaaatctggagggactcaagttcctcgaagggaagtcaaaataataggctttctccagagcaacccagtcattccattaagnncagagagtttttcttccagcaagttcannaagaatcacttggagctangntgcgtaattccaattggcagataactatcagaa

SEQ ID NO: 29794 - DNA, 269 bp, Gossypium hirsutum
  Clone ID: LIB3083-052-Q1-L1-D10
gctgataccattgacctgattgccgcgcatgtaggaataggaaatagatcttgacgagtttcagcccctaatgatcattattgcttaagacactctcaagacattgattatccccgtactgtatatgaatgtcatagttgctccgatcttgctgcttaaatggctgatgctttggcttctgcttacatcgattttaaagacatcaaaacatactcttaaaagcttgttcatggtgcccgaacactctttaagtttgctagtgatcaaag

SEQ ID NO: 29795 - DNA, 397 bp, Gossypium hirsutum
  Clone ID: LIB3083-052-Q1-L1-D2
attctgcaactttttttctctatttttatttattatttttttttttttttattatcacttttgttttgcttttttttttattctctacccttaacaattctcttcacaatccccctaacaaatacttcatttatcatcccaatcccatttaaaccttataccaactttacctacataaacccttttaaaacctttacctatttcaaaaacatatatacttcctctaacactaaacctacacttaatacaactcatattaaccacactatattactctatcttattttaacctaataatttttacccttatatcccttatttataactcaaaccatcttctttaatatcctttctttattaaataacatcctcactaaccttaaaaaattctcctttt

SEQ ID NO: 29796 - DNA, 359 bp, Gossypium hirsutum
  Clone ID: LIB3083-052-Q1-L1-E6
acaacaaaaaaggggaggccccataccttggttaaacaaaaaataaaaatttcatgtcaacccccataaaaaactttgggggttaatcggaaatttcaaaaaattccataacaaaaatttaaattgataaattttcatcaccacctatcactggaaaataatcccattcttaaaccaaattctttgtgatccaaaaaaaataaaaaaaaccctttccaaatttttaaaaatacagttatttttacccccaaactgttaccaaatttaacctcaaattaaattgctcaacattaactggaagaaattccaaacccgaacctggcaacaaccttttaatttttaggggccaaaacaatttt

SEQ ID NO: 29797 - DNA, 257 bp, Gossypium hirsutum
  Clone ID: LIB3083-052-Q1-L1-F11
cccagaccatccaaaagccagaagagcaagagccaagggtgatcccgtagacccaaaatggttatggcctttacggcctttagaaaaaataatactaactctcatttgaaaagggttccagtttaaccaacgcataaacctatgaaccctatgtcacccatagtagttataactttaatttaccgtgtatcaacctcacataatgcttcaataataaagacacagacccataccctggacttgtattcattactgat

SEQ ID NO: 29798 - DNA, 236 bp, Gossypium hirsutum
  Clone ID: LIB3083-052-Q1-L1-F2
cacactattacggcagcaacatcattgaccaaactccgggaatcgttactccatcgtcttgtgaccactgactgcttaactacgatatttttaccatacaatcggaatccgacgtttctagataccaacattttatacttaatctaccatgagatgatctgaaagccttgtatgaactctgaaaccggactatgatcagatcctaactgccttccatcggctgctgaccgattcaa

SEQ ID NO: 29799 - DNA, 362 bp, Gossypium hirsutum
  Clone ID: LIB3083-052-Q1-L1-F6
tggacacgcttaattagaaatgctctctcccatttgttcgtgctattctttacacaccaacccccattttcacccgattactaaatcatggactatcacacaccccacatctgctactacctcttatcatttccggatgattaatactacttgccctcaataaaacatactagaaaactatgataccaggcatctattgatagcttttgtattcatacgctgaggaggatctttagccacttacacattcttccctactactcaattgccagcatcaacatcactttaagaaactatatactacatacccacacatgggcatcctaaactatactcctataaataccgatccatataactgc

SEQ ID NO: 29800 - DNA, 119 bp, Gossypium hirsutum
  Clone ID: LIB3083-052-Q1-L1-G1
cttacaactgcgcctgatgtaacatttttgaagctatgggaatatttattcgaccattttgaatccaacgaatacttggctacgagattatatacagaacacactactccgatgtaact

SEQ ID NO: 29801 - DNA, 293 bp, Gossypium hirsutum
  Clone ID: LIB3083-052-Q1-L1-G10
actacggatcccccctcttaccctacccatacgaaccataactccatcatcttaacccactcttccaacacatcgatcttgcggccattaccatgcaaatctgatactcaaacttacctaccctacctcatgattcaaaaaactatacccactgattaagaactgtcttaagccaccgtacggagtattatacttaacaacaaagaacaactatgtcagcttcaacacagcagctagacacctcatgagcctaatacatgaacaaggcatttttggaagccatttaatccaaa

SEQ ID NO: 29802 - DNA, 282 bp, Gossypium hirsutum
  Clone ID: LIB3083-052-Q1-L1-G2
cgtgctcctgcgcctactgagatagcttttaagccctgggaatccatatgcggaaatattgaatccgttgaataatcaaaccagcatcattatacgctcattacttccacgatgcactaactttactacaacacatggaggtttgattcaaataaaccatggaaggcctcagccactgcattacgtagtcaatgcaggcttcttagccgccctatatagggatcatcctgatgctgctgatacacctggatgcgatagcggacccaatttctattcaactga

SEQ ID NO: 29803 - DNA, 294 bp, Gossypium hirsutum
  Clone ID: LIB3083-052-Q1-L1-G8
ctttaatgttcttcacatttgaaaaaagaatccagtgaagcatataacaaaaacccaactgtttttattgtggatttagtagcttcatttatttatacaatggtatttgtttcaaagattcatatcattgatctatatttcaataaaatgtttggaaatagaaataagattccaaatccatcaaattttcatttcttattgatttcaaaaagtgcaaaatctgttgatggaataatcaattacgaatttctcttctggtataaaaacctttgtaatttgtttgaaattgctttt

SEQ ID NO: 29804 - DNA, 366 bp, Gossypium hirsutum
  Clone ID: LIB3083-052-Q1-L1-H1
cataaacatgcgactgatctagtaaatttgcagatgggggaatattggtacgatagcttggaatccaaggaacacatcgatgcgagcttatagaccgaacacactgctgcaatgagactagatagggcaatggcttattcatttactcatcagcaaactttgaagacatggtcgaaatgcatgaatccgtcattcatggatatgaacaatccgtcattgggctgcagttggatacaactatggatgatcgctcgatcatcggaaggacatggcgtgacgggaaaagaacccgacaacgaccagtcatccggaaggaatgcacatttctgagtacatatcagcaaagcttactctcggtaccaactc

SEQ ID NO: 29805 - DNA, 305 bp, Gossypium hirsutum
  Clone ID: LIB3083-052-Q1-L1-H2
cttactcttgcttctactctcccatttttctatcttcggggaacttggttctaatatttcgaactctcagatgccttcccctcgcggttttatacataacgaatcatggctctgtgccaaataaagctacgtcttacctattctcttgtcaacatacgttatacgcatgaacagaatgcatgatctcgtgaatcatggactttaactttcccacggtgggtgataggaactttaaactatggttcatattgcgactatccgattgtcttggattcaagtgaatgccaatcgactatctaaactca

SEQ ID NO: 29806 - DNA, 113 bp, Gossypium hirsutum
  Clone ID: LIB3083-052-Q1-L1-H8
actatcaattcttatctcaccatccacctttcggggaagggtcgcttgaaagttaggctggatcttaacccaatggtgtggcattatatgctcaatgtgatccatttgacaag

SEQ ID NO: 29807 - DNA, 258 bp, Gossypium hirsutum
  Clone ID: LIB3083-052-Q1-L1-H9
tcaggcctgcagatccattcaccgccgcatccgatcatgggggcagggcagtcccagtatgaccaggaggccttgcatattctgaatgaacttatggtcactacgtagtattagaatgcagatatccaaacggaacttgagatatatcgcataaaggtgtattatcattatggcctagacataattatgatgctttcaagaaggaatgatgacagcattctaagtccaagatctgcctcttgcactaatgctgaggac

SEQ ID NO: 29808 - DNA, 347 bp, Gossypium hirsutum
  Clone ID: LIB3083-053-Q1-L1-A1
cagacatgctaatacaaatgctgagacaagcagggctcatggttctattatacctcttgagctttttagtgggtcaaagcgaggaacagggcatggttcatttcaacatttcccttctcaagcggggtatacgtcttcttctgggtcagatcattccccccctagcttgaactctgatgctcaggatcgtaccgggcgaataatttttaagctatttgacaaggaccccagccactttcccggtacactacggacccagatttataattggctgtcaaatagtccgtctgaaatggagagctatataaggcctggatgtgtggctctgtccgtttatgtgtcaatgc

SEQ ID NO: 29809 - DNA, 426 bp, Gossypium hirsutum
  Clone ID: LIB3083-053-Q1-L1-A8
tgtgcatcaactcatacataccatagagtttgtgctcggtgccgtttcaaatacagcctcataccttcgattatgggccctaagtcttgctcactcacaattgtcaattgtgttctacgagaaggttcttctccttgcttggggatacaacaatatggtcatcctcgttgttggcatcatcatcttcatttttgcaactgtcggtgtattgctaattatggaaaccttaagcgctttcctacatgcattgagacttcattgggtcgaattccagaacaaattctacgagggagacggttacaagttctatccattttcattcatcttgatcgatgatgaagactattgaagcaacaaagaatcgaataaaaacgatttcggcggagttgaattttgatagagatatggaagttttggtgaaaattt

SEQ ID NO: 29810 - DNA, 399 bp, Gossypium hirsutum
  Clone ID: LIB3083-053-Q1-L1-B1
cacgagcagaagctcgactgtggtggcggctacatgaagctgctcaatggcgacactgaccacaacaaatctggcggtgacaccacgtacagcgttacgttcggacctgatatgtgcggctacagcgccaatatagtgcatgccattcttacgtacaatgtgacaaatcacttgatcaaaaaggaaggtgctcgtgagactgaccaactcactcatgtttatacattcattctccgatcagatgctacctacagcatgcttatcgataatgttgacaaacaaactggtagcttatacactgactgagatattctcccaccacattagatcaacgatcctgaggccaatatgcctgacgattgcgatgacaaggaatacattccttctcctgcatacaaa

SEQ ID NO: 29811 - DNA, 425 bp, Gossypium hirsutum
  Clone ID: LIB3083-053-Q1-L1-B12
gaaggatattgaggcattggagcttttcagagagatgcagagtgcaggggtgaagccaaactctgtaacaataccttgcttgctaccagcttgtggaaatattgcagcattggtacatggaaaagcagctcatggtttttcccttagaacaggaatcattgctgatgttcatgttggtagtgcattagttgatatgtacgctaagtgtggaagaatccatttgtctcgactttgttttgatagaataccaaacaaaaactcagtctgttggaatgcgattatgggtggttatgcaatgcatggtaaggctaatgaagctattgatatttttcatttgatgcaacagaaagggcacaagcctgattttatcagctttagttgtgtattatctgcttgcagtcagggtggcctaacagaacaaggtt

SEQ ID NO: 29812 - DNA, 385 bp, Gossypium hirsutum
  Clone ID: LIB3083-053-Q1-L1-B2
ccaggtcccacctgtccgccaggaaaattggggtcctaaaaagaccatgaagtttcattcaaatgtcgaccctgagggtcatgcatgtcttcaagaaacaactgctgattgtaaactcaatcttccaaaacctagcaaggatgggaagaacaatgttggaaggagggatccttccggtcagtggtcaagtgacaatagaatggaagcccaatcaaataaaaagcatgaagttgatgcaaaaactgctgctgcatgtagcacaaaggggaagactgcccctgagaaaaatgtgattcaggattttgatggtcaaacaaggcaagtagagataagaaatggaatttcaaaatcatccttgcattgtgaaaatgaaagtcagcaagaa

SEQ ID NO: 29813 - DNA, 376 bp, Gossypium hirsutum
  unsure (1)..(376): unsure at all n locations
  Clone ID: LIB3083-053-Q1-L1-B4
caaagattgagaagcttgagaccaaatgccagtgtcagtgagcagcatgaagcggttgaaacctggcgcaatgagaaactgaaagaagccaaaaatttagcccttggaggagagagattggattcaactcttctgcgagaggaagcagggaatttagtaaaagtcttggagtcaaattgggctgcactgtcagaagagattggcctttggattcccaatgaaatcaagaatcaagaacataatgataagcctgaggacgtggaagatactgatgatccagaacaaattttagctgggaggcctcctctgccggagtgccgtactgaacttcacactgattatgatggtgattgtgttcgatggngtcttacacatc

SEQ ID NO: 29814 - DNA, 294 bp, Gossypium hirsutum
  Clone ID: LIB3083-053-Q1-L1-C1
atctggggattcatcacgttctgctgtttctgcatattcttactctttgcaaaagaacactgcttggttagcaaaaagcatttcaaataatgggttggctgaccaagattcttaaaggttcaagtaataaagggcgatatcatgagagatatggagatggtagaacttgggatgaacctcgccgttcaacagaaggctctgatggttttgacaaagatgaaattgattgtgctattgcaatttccctttcagaagttgaccaaaaaggcaagatagtcatagaagatgagtctg

SEQ ID NO: 29815 - DNA, 318 bp, Gossypium hirsutum
  Clone ID: LIB3083-053-Q1-L1-C5
tggaaaaccattctttgcgctaaaaaaaactaatgttgcgccgtggcacaataaattctttcacctctattaccatctcagtcaactatcaatgctcagggagccactgatgttaatatcaggctaattattattttctgttgattgcattgtttacatgcatgcagacacatcaatctccaagtattctgctacttatttggctaaacagcagtgttaataggaccaggcattcatgcagcaggttcacactattataagttgatgcttgacaacacatgataacatggaagcatcactacctgatctttctaggac

SEQ ID NO: 29816 - DNA, 410 bp, Gossypium hirsutum
  Clone ID: LIB3083-053-Q1-L1-C6
gcagcagctacgtggatgagagtgggaagcagttggttgcagctggtgatacaggcaactcagtagaacttgtcggtggttcagagcttgttataaccaaaagaagtgatgagggaatattgagtaaaacacttggttcccgagaatacatgcgctactatcagcagaagcctcgtccatcacctgcaaataacatggccattacagctgccttggcctcaaggtacaggagtatgggcatagcaaccgtgcagtcaagagagcaaatggtgagaatgaaagtgatgaaagcaatgaatagagggggtgtggaggcaatgcgtacaaaagttggcatgaagaataatgtcattcggaacttgcccaagaatgttccgtattagtcagcacatgggttatccttctcagca

SEQ ID NO: 29817 - DNA, 370 bp, Gossypium hirsutum
  Clone ID: LIB3083-053-Q1-L1-D11
ccccatgggatcatattgaatgtgaaggaagtacagtaacatcattggacctttcggacatcaacttgaggtcaattagtccaacgttcggtgacttgttggatcttaaaatactgaatttgcataacacatcactttcaggagcaacacaaaatctgggcagcctgcagcaccttgagaaactgaatctgagtttcaatcagcttacatcctttggttatgatataagcagcttggttaaccttcgagttctggacttgcataatatcagattacatggaattgtttcagacatcttgtgagaattataaaatctacatctactgaatctggataacaactatacttaatgtacccttcccctatcttt

SEQ ID NO: 29818 - DNA, 300 bp, Gossypium hirsutum
  Clone ID: LIB3083-053-Q1-L1-D3
caagcagacgctctccttatcttttgcaaaacctgacatttatgttcggcgaagcacctggtaagtggaactcccggcttggctctggtggtgcgactggccacgctaacaacgtatcattcacaaactctacagcgctgctcgacgtatcatcatgacatgtcttatgcgcacaacgggtacgcacgcgactccgcctgtgtatatgtatgcgcactctgtataacaacgaagctaatctcgatatcatcctaatggccgctctatgcttatgctttaaagaacgaactttaccctcct

SEQ ID NO: 29819 - DNA, 419 bp, Gossypium hirsutum
  unsure (1)..(419): unsure at all n locations
  Clone ID: LIB3083-053-Q1-L1-D5
gtataatccaatcctatcttatagtttggtgggttgaacatggagccgccgcctactggtgaagaacccacttcgtgggatgagctatataacataaatttgattccttctgagctgttcctcaagtttagaaaagaaattcaggggtttcgagttggtgtcaatttggagttcttcaatgcccctatgaatgatttccaaactaagcttgtgctgaaacctttatcccctgaacggaggtggaagtttgcatatgagcctataagacaagatgtacgccttatttccaaaaagatccctgtcacaaaatttcttaatctccaggttggcataggccacaatttcaagatgaatgcaattggntggaaaatggaagctcaccacctgttttggtggaaatggaattttttcgattcgga

SEQ ID NO: 29820 - DNA, 418 bp, Gossypium hirsutum
  Clone ID: LIB3083-053-Q1-L1-E11
attttggcgccgttgccagggatcggtaacgtacgaatcttatttttgtttcttatgaccagatctgctctaggaactcttgcgtttgattccgagactgaaaagactgcgagagctaatcgcaaggaaacaaagctaaggaaaaagcagtcagcggtggttgggactcaaagtaatccatcaccggaaatcagaatcgacgacgaagcagagtctaaggttaacgaaaaccctactcagacttttgaaggagaaaaagtagaagtcgattccccagaagaagtgcttaacgctagggttgacgtaaaccttaatttagcacctcaacctatggctcatacaattcggcaactggccgaagcgccaacagaacaaccgccactatgcatcgcgtatcctactatggatacctgatttg

SEQ ID NO: 29821 - DNA, 412 bp, Gossypium hirsutum
  Clone ID: LIB3083-053-Q1-L1-E2
ggccatcgtttttgcttaaaaaatatggggacattactaattgggtgagaagtgccatgtatttctggatcacaaaagtctcaaaaatctgatgcctcatagagacttaaatctgcgaaaaagacgttggcttgagtcgttgaaagattacgagcttgtcattgattaccacccgggaaaggctaatatggttgcggacgccttaagccggaaatcattgtttgctttacgagcgatgaatgtgcacttgtctgttctacccgacaatgtgttaatagttgaattaaaagccaaaccattattgattcatcaaattcgtgaagcccagaaagttgatgatgaattagttgcataacgggctgagtgtgctccgaacaaggaatcggagtttcaaatcgatgatgatgattgg

SEQ ID NO: 29822 - DNA, 434 bp, Gossypium hirsutum
  unsure (1)..(434): unsure at all n locations
  Clone ID: LIB3083-053-Q1-L1-E3
gaattcggagctatctacttctataacccaggggtacattggctggtcggtggcttcttccttcaatttatttatgtatttgcctctaaaataacactgagatataataaacggagcctaaataaaatctttcaatccatatttttgatagatcaataaggcttcggttttcctcagctgatccagatcttatccgttggcgatggcggcttcaactgctaatggcacgggatggtacaaagggagagtcatagcagttccatcgggggatagcttggtgataatggccttgaccagtaacaggcctggacctccacctgagaaaaccattaccttggcttctctcattgctcctagactggcccgaagaggaggtgttgatgagccatttgcctgtgacagcanagagtatttgaggaagctctgcattggaa

SEQ ID NO: 29823 - DNA, 336 bp, Gossypium hirsutum
  Clone ID: LIB3083-053-Q1-L1-F12
gtgacagccctaaagatatccatgtaaacaagtcccagcgtgtattacttacacataacgttacgtaccactcataggtagcatgctaaagaaaaagtacggagccccgtgctgagatccctattccagtctttttctatgcttacaatggcccggaacaggacttgtgtcgtaaatagtgaatggtgttgaatagcactcagaaagtgattagatcatcttttggtccttgatgcttctttgaatctcgaccccctccagatgaaccttcacctttcttaccgaaaatcatttcatagagatcgtgcatcatgtcatggttgctttcaccgcgag

SEQ ID NO: 29824 - DNA, 384 bp, Gossypium hirsutum
  Clone ID: LIB3083-053-Q1-L1-F4
gagagagatgtgaatattagtttaaacttgtgtattttttaaatgttttatttttttccatttcatttttcaagtctactaagcaaaggacagaaagaaaattactttgttctttctattttttcatctttcctaccaagcacatctatggaaagaaaaattatatttttcatctttttatttttctacccttcaattttttatcattctaatttttttctgctctaccaagcaaagatttaatgtttcaataattggaggttttattggttactatttgattgcaatataggttggaccagagtatgcaagatattgcgggatagaggcattggagcctctggggatttacttgccaggcgatcttaattacccgggaggagt

SEQ ID NO: 29825 - DNA, 379 bp, Gossypium hirsutum
  Clone ID: LIB3083-053-Q1-L1-F6
tgatcatatcagttctatatttggctttcaaaaagttcatgatctcgggatttaccttggggttcctcttttccatcagaggttgacaaatagcactacgaattttgtagttgaaaaagtttggggaagctacatagttgggactccaaaaaagtctccattgctagtcgtatttatctagctcggttggttattttatccatccctagctattttatataatcaatgatgattcttaggaaaattagtgatgagattgaaagtggtctagagtggaaaagacttcatgatcaaaacatatcctttcttttgaagctaggtatcaaaacatatcctttcttttgaagctgggtttcaacattgtttctaacaaggatgt

SEQ ID NO: 29826 - DNA, 284 bp, Gossypium hirsutum
  Clone ID: LIB3083-053-Q1-L1-F7
atcaaactgtatgggtccagcatcctgtatatatcatggggcaaataccttgctgcattctgtctcaacatatcgtatgctgtgcctttcacatctacactaactggatgtatagcaagtaatccaattgacgcgacattgggattttgagaccagcgcttcacagacatcattgcttgaagaggtgcagcaccacaacaccacttgtccacaggattctttatgttggatatagctgccatataaccatttataccagctgcaagaatatgacagccgatatg

SEQ ID NO: 29827 - DNA, 235 bp, Gossypium hirsutum
  Clone ID: LIB3083-053-Q1-L1-H3
cgctggaactaaatatgcctgattaactactttccaattaccatgaacgaaacactacagtgatgtggaccttttgcgaagagagacataacataactacttacatatgggactttcttaagctaacaataataacacgctcatccaccacctgagcaagatatgctttgacactctacatgtactagagaaaccaggtttgtatactactagagaatacttttgaaaccatata

SEQ ID NO: 29828 - DNA, 227 bp, Gossypium hirsutum
  Clone ID: LIB3083-053-Q1-L1-H4
cgcaaaaccctccttccagacatcttctgcttcttgctccaagcagtctccttagaaacgaatatggctgcctgttctgctttgatctatactataatcactccccaaacggtcttcttctcacccaaatccttctataatcttagacttcttcctacaactaacgtgcgcacggttcgcactgcgaccctagccaccggttcacagtccgccaccggcccccggac

SEQ ID NO: 29829 - DNA, 269 bp, Gossypium hirsutum
  Clone ID: LIB3083-053-Q1-L1-H7
ataaatattattggtcgaaaggtgctttatggaaacaaaaagcctttcaaacacttaaatatattcatgtgtaaatacatatccaacgctcagattaaacaacatatgaaatctggatatccatttcatacaccctcgcttctttcactgtcaccgcatttcttaccattttaaaagtcatcttccattcaaaatattaccccatattatatggaacatttatacaagaaggagccaataataaatcaatttttaaaccacacctctcg

SEQ ID NO: 29830 - DNA, 250 bp, Gossypium hirsutum
  Clone ID: LIB3083-054-Q1-L1-A12
atctcttgttatattatgccataactgttatcgacctatcgtactttttcaactattcctcgttactgcctcactacaagactgacgagacaccgtctaccgtgcggataaacatgaattccacacacaagcaacccgatacgagctgccacattactcgtacaactacgaacaacacagtgagttacaatcctaacatcatcaatatcgctaaatggacccatgacatggaaatccttaaacgcacaat

SEQ ID NO: 29831 - DNA, 212 bp, Gossypium hirsutum
  Clone ID: LIB3083-054-Q1-L1-A9
ggggattataaaaaataaactagggatgttcaatgtacctaatagccaattatcgaaacgtgacatcattggtgtataattcaaaaggtagccacaccttgctttaaaacataagtgcccacagttcacatgttcctactttttagaatgaaccaaactcatggtatacaaaaggaaaacacatgaaaaaatcgtacctatcatcatcatgt

SEQ ID NO: 29832 - DNA, 205 bp, Gossypium hirsutum
  Clone ID: LIB3083-054-Q1-L1-C9
aatacaaaagacagtatggaaccatgcatttcttacataccgaccctaaccttttctttcttatgacatgactaacaaagctctaaactaaaacactacctgatactacaaccattccactttaaaaccatacatacactgtttacacttgaataaacacacaataccatcagattcttatgtgaacttgaactcaagccttttc

SEQ ID NO: 29833 - DNA, 239 bp, Gossypium hirsutum
  Clone ID: LIB3083-054-Q1-L1-D11
tcgatctctattaccaccgtctcaaacccattaatagcggtacatagttcacatccctaaagtctttcaatgcttgcccgatatccaaactccagcccattctagaattctaaaaattcttactattgaataactctaagacgtcaaaagccctagttgagaaacatcttacttagataataccatacctatatcaactagctcattacactagatattccttctaaaaccagagatat

SEQ ID NO: 29834 - DNA, 418 bp, Gossypium hirsutum
  Clone ID: LIB3083-054-Q1-L1-E12
cggcacgagcggaagactcagttgtctcgtccacattcgttccctgtctttccccaggtaggtccattcaggcatagaactggagtttggagttctctaccaggttgattgagtgctcgaccaaagggaaagggcttgagcgtccttgattcaaagtctctatatcccaaagggaagcaactgagcttgatagctgccacctccgcatctccgataacaatatcggaacccaagatagcataggtagtaaataaacccggatccactaactcggtactcaaccacacggtgttgtggtgtgctagagtgaataatgtccaggaaccatagaaagcaagtggttgtccccgtgccgaacgccaccaaacagtaaccttctcgacgatgggaacataagtgagatttcgtgggttatcat

SEQ ID NO: 29835 - DNA, 430 bp, Gossypium hirsutum
  Clone ID: LIB3083-054-Q1-L1-F10
gtgcagtgacttccatctccactcccatttcagtggtttcggcttctaaggcagcagcagtgcgtgtcatacctgcagctcctttgcagttcgaggggactcttggatggaaaggatctgctgccacaagtgcttttcgcccagcatcacctcgacgtaactctgatggtgataagagactatcccttggagggacaagcagtagctcaaaacggaggttggattgccttgattttgatctcaatgttgctgatgctggcgatgaaaaaggtgctgaactaatgtccgggaaacaggttacagcctcatcaggtctctattctgcagaatcttcactgaaagctagtcagagaaaatccgagagacttgagctggatttaaattgtgtcagtgatgatggtgacggtccagcactagaattcagagtcaa

SEQ ID NO: 29836 - DNA, 417 bp, Gossypium hirsutum
  unsure (1)..(417): unsure at all n locations
  Clone ID: LIB3083-054-Q1-L1-F11
agatcttctagaggtaggtatcgagctcagagtaaaaatcgtggaccagatcgtggttatcgtataggaagtgggtccaaagcatttgggaaaaacaaccgccagaatatggctccaaaggtggtgagagggagaggacctaggagttatgaacctaatatgaaaatcagcagtcaagcacctccaatacagggcagactgtctggaaagcctcttgagaaaacatcacaagccaattcaggtagagcttccaccctcgcaacaaatgccggtactgtatcagatcctaatccgaaacatatatttgcgtcaagcttgagttctgcttccccacctttttatccagcggcgtcttccaacanagacactgctttaactcataagaaagatgtacatgctgaaagtgtgagcgggaat

SEQ ID NO: 29837 - DNA, 398 bp, Gossypium hirsutum
  Clone ID: LIB3083-054-Q1-L1-G10
tttcactatttcattcctttctcacaaaaaatatacattatttctatacacttactttaaaccctcttctccatgctcattcatactataaaattcttcaccttattacccaaaattaacatcaataataaatatacaacaaccataaatcaaaagcacaacacctttcatctccataccacccaaaatccataataacataaaccatctttcattccttaaacccataatgttaatatcctttactttcaccattcaatctcaatctcattcttcacctcaaactcaatcctaaccatttttaccaccaataatacctattaaccctatttcacccctttttaaattccaccctcattaaccctataacaatattcccaaattcttcaacaataaat

SEQ ID NO: 29838 - DNA, 288 bp, Gossypium hirsutum
  Clone ID: LIB3083-054-Q1-L1-G12
ccaatttgtattgccttggagatgttgtgtacgcgcctggtgtatcatgagactgtctacagccttctgttatagataaagaaagtaatagagcagtacctaatgcctaacatccgtgatgacttactgaaaacttgtgcagacgatccatgccttgctgatcactggccatatcttgtctgcaactacttcaatgagtccactgtgatcacagatatggagcttgcttctaattaatcccaacgttcaagttctcctagtatcacagatgtaacccaactcacaaca

SEQ ID NO: 29839 - DNA, 228 bp, Gossypium hirsutum
  Clone ID: LIB3083-055-Q1-L1-A1
actgtgggcaccagctaacgtatgtgacccttcaattgaattgcatgaaagcttccctttacctttggtaagcgttacccctatcttaccaaatggccggacaaaggtactggggtgaaaaaggcttagtttctagcggaattctcccttttatatataaagctctataggttcaaatgcagatgcctttcgtgcacttttagtataaagaatatataaatacccatc

SEQ ID NO: 29840 - DNA, 159 bp, Gossypium hirsutum
  Clone ID: LIB3083-055-Q1-L1-A3
aagaattccattcacttatacctactttaccaataacatagactagtggtaaatattcaaatgtcattcaaagctaaaccctacatagatcccactcctatacatatactacaaattctttataaagacatcctaagtctcaatcatatatctacaacc

SEQ ID NO: 29841 - DNA, 218 bp, Gossypium hirsutum
  Clone ID: LIB3083-055-Q1-L1-A4
acttctgagtcatgataatatacactgtcaactttgatcatcatcaaccaatcactctaaatacttaactatgaaactatattaaatctactcgctaattgatgacatatgacaaggccttaaaacattctacattcatgcttctatatccggacttagcacatatattacacagaacctcaattaaacacatcctctatacatcataagctctacac

SEQ ID NO: 29842 - DNA, 260 bp, Gossypium hirsutum
  Clone ID: LIB3083-055-Q1-L1-A5
tactttgacactgtgcgcaccagcttactgctgttaccctcctatagatatccatgaaaggtcctttttaccttggcaagattacccctatcattaccaaaagtcaggacagaggtactgctgtgaatagggctgcttttcaagcggcattctcccttttatatataaagctatatcgtttcaatggcaattgccttccgtgccttttcaatcaaaagaatatgcacctacctagccagcttatttaatcttccaaactt

SEQ ID NO: 29843 - DNA, 383 bp, Gossypium hirsutum
  Clone ID: LIB3083-055-Q1-L1-A6
ccaagcattgcaaaatgtgcatcatacctgaatgtgctaagttcggtcctcaaaacttcatggcaatgttcaatgtgcactgcacacttttattttcttcagtttggtatctaaatctaaactttgaaactcgatttgatctacacgccaattgtttacggaggacaaggtgttaatgcatactacattcaagcttatatagccggagttagtgcataaaaaaaaaagaacgtgaatcaaattcatcgacatacatgaaaagctctacacatgcatcaacagaacagttaattttagggttgagagaagaaagagttaaaacccacaacgattcctcaaccaatgtctttgccttcgccttctatcaccattctctctacacc

SEQ ID NO: 29844 - DNA, 134 bp, Gossypium hirsutum
  Clone ID: LIB3083-055-Q1-L1-A8
aaaaggttgaaattttggaacatgaacgggtttcaacctggctagacacatttggctgatgaaactaatcatggggaagggttcattacaacttattaaacttggaaaggccacaaatgtatttgtttgggaag

SEQ ID NO: 29845 - DNA, 364 bp, Gossypium hirsutum
  Clone ID: LIB3083-055-Q1-L1-B1
cccttcctcaaccttatcacgcctctatgtccttcgacccacgcatccgaaagaaaatgtcgcgtgcttcacaaacaccaactcactcacacacactcagatatctacatttagctatctacataatagaaatcacaaagaacatatataaactctttcccactccgaatacaataagcatataactacatcgcttggactcaattcctaggtgctactattcaacctcattcaaacgatgttaaataaatacttcaatctgactaccaacaatcaattatttaataaagcttaagagataatatacacaatgacatatagacttcattccgctcagaatcacttccatgtgcctttttaacta

SEQ ID NO: 29846 - DNA, 286 bp, Gossypium hirsutum
  Clone ID: LIB3083-055-Q1-L1-B10
catcagccatatcaagcctcgagttccgtcgacccactcggggcgtaattaaaggagagggatccatagaaatccccacatatgttcaacgacttcataatcgataaatatatatacaacaatccttactattttatacaaaaacaaaatcattccaattatttctttcatatatatataattattaatctttctctgatatcaatctttgtgaataacgccagtaatctcaacactttgataagctgagactatcaaatcactaggtcatgatttctaaaacatt

SEQ ID NO: 29847 - DNA, 355 bp, Gossypium hirsutum
  Clone ID: LIB3083-055-Q1-L1-B11
aaaaatccaaaatatatattgaaaaatttaaaaggacgtatacattacatttttctatatcctatacaatcaaatcacccaatttacaaacatattacctccctataaaaataactacacaactttaaaatataaaattaaaaaaacaatatcaaaaagtaataaaataaaataaacaaccaacctttttcttcttcattgtttctctttctcaaaatattctcctctatcacaaattccatttccaaatcttaattcttaaattaaccttacattttgcattaaaactttaatctttctttactcattttgcctttaatgcaaaaactataatcccttcacaaacaacccttat

SEQ ID NO: 29848 - DNA, 393 bp, Gossypium hirsutum
  Clone ID: LIB3083-055-Q1-L1-C10
taccttgctagcacgaattaccctccaggatccttatcatgccttgagggccgtctacccacccgtgcattatgacaggggggaattgcattcattctattataatcgggctaaattcaataccattattacatcgatatttacaatctagatctacgaaacgtcctgagtactactaagacaatagtcttggcattaaaactctcattattgctatacttgactaccacatttaccacagaatcccttaatctaaacatttgatttatccagtcggaaatgtcttaaaacacattctaaaaattatatgctgatttaccatgtaatactgcatgcactattgcactacataccttaaaacaactcgtttaaaatgatgccacatagcatatc

SEQ ID NO: 29849 - DNA, 221 bp, Gossypium hirsutum
  Clone ID: LIB3083-055-Q1-L1-C12
cccctcctacatttcgacccccaaaaccctccatcatccttatcatgcctcgatgtccttcgacccactcgtgcgcaccatcaatagtaactttcactaatacatattacaactctaactcttacaaaaccatcttattctccatcactactatacatttactcataaactcctagacttctcattcttcataatatttatcttacatacacctacttaat

SEQ ID NO: 29850 - DNA, 273 bp, Gossypium hirsutum
  Clone ID: LIB3083-055-Q1-L1-C5
ctaatatccactgctccacactttccatcctcctatctgggcatgggcatttctagttccatctactctgaacaatgacctcttgttaagaacaatcctcattccttactcacagctgtgaatactttaccatttaccatctctagatacgacataaaagtctttcactcttaataggacctaagttctcacgcgattaatgataactattgcctatgctctctagactcactgtccacacaatgctgtactagttcattctgtcatacctac

SEQ ID NO: 29851 - DNA, 258 bp, Gossypium hirsutum
  Clone ID: LIB3083-055-Q1-L1-C9
aaccctcttcatcttaagagctgtccttgtgctctttctaaagtaactaatctcattttacatccacaattaacaaaatctcaaaatctttcaaataaaaaaacacaattctaaatccattgccatttgtcaaaaacactggacctgatgaccgaaaaatttagatccacgaccttactgcaaaaaaaacccttcgctatattcaaaccaacatcgctgatatgcataagcaacatatcatgcttaaaacgatcactg

SEQ ID NO: 29852 - DNA, 370 bp, Gossypium hirsutum
  Clone ID: LIB3083-055-Q1-L1-D2
tcacgactggaggaccgtcgacccacgcgtacagtgcagacaactggggccaaggatccgaacatggctgcgctaaaactggctctaaaagccatggactgactcgcgattgcataaagcatacgctagaaccaaaaggccattgatagatacctgaactcctggaatgagaccctgacctgcaggttgcctgctatacctgagaatacaccagctatcgactgcgcttactacgaagccaatgtatccaacgctgtctcgatggatagaccttgacaagaagcctagatgcgctgaacgttaccgtgccataggataaacatactgggcatgaggatgccgctcaagaagaagatgcgaaatcatgtgc

SEQ ID NO: 29853 - DNA, 430 bp, Gossypium hirsutum
  Clone ID: LIB3083-055-Q1-L1-D5
gtttcaataaaaaattgcagagcaagttgctgaagcatgcggaagcggaagaagacttggctttgaagcaacagttggagttatacgtagagagaatttatgatgttgatcctgaagtccataaagtagctcttgaaagcatgaggcaagaagtccgcacctcaatcagctccatgacttatgttccaaagctattgaagtttctccgaccccattacggaaccctaaaggcattttatgagactatgcttgattcagatttgaaggtattacttgttttgctttaatgatctttcattatatcttttgtaaatgtaatttggctaagcaatgcagggaaggatgattatgatggagccattatttaatattgggactttgttggtaatatacatgaaaattatttggcttttataatattgaaaatttt

SEQ ID NO: 29854 - DNA, 268 bp, Gossypium hirsutum
  Clone ID: LIB3083-055-Q1-L1-D9
tttctacccccattaccctccatcaaccttatcaacctctatatccttctacccactcgggctcttttctaaaggtttctctcaacatactttcccccttctcctaatctctcattattacctaacttataacacaaccatcttcaataatactaaaccccaaacttcaatctctcaccctaatttatctcctatttataacatcaaaattacttacaccccctctataactttacactcacctattactattctatcaaccttcctt

SEQ ID NO: 29855 - DNA, 407 bp, Gossypium hirsutum
  Clone ID: LIB3083-055-Q1-L1-E11
ttgcgacccccaggaccctccgtcaccgtacaggcctcgaggccgtcgacccagcgtgggaaattataagggtagagctcacatgttactgattcatctctcactttaactcatactatacattcttaaagtacttgttatatgataatattattactgttcctctcatacccagtgatcagtcctcagacagcccttctgttccaccattcagtgcacttaccttatatccttcctcaattacccttagtcatcatccccacactatattcctgaccttaaggactctattgtacattgctctaaattatctaacttgttgatatgtcctatactgactaaattgaacaccttaatattggtgcaatctattaatatctgccttaatatcagtatcttactcttat

SEQ ID NO: 29856 - DNA, 421 bp, Gossypium hirsutum
  Clone ID: LIB3083-055-Q1-L1-E12
tacgttgggacgcccatataccctccgtcatccgtatcaggcctcgagtttcgtctacccactcgtgcgcatatatattggggatatagtatactgtaataatttatctgtttgaaaattactataaaacggtgttttctgatcggtttttgtttcctgcttaccatatgattgtaaattgttttatgtattaatcagttaatgctaattatttttgctgatgtcatatgttaaatagctataaattccaacaaccaactggtgtgtaaaaataatttaaaatttcctttactgaaaggtatttcccatttttgttgtgaaaagaatccaaatttattactttgtgttgtggtttttaaaatattaataaatgtctaagttattgtttgcataacaattaatattattttaaatttttaaa

SEQ ID NO: 29857 - DNA, 336 bp, Gossypium hirsutum
  Clone ID: LIB3083-055-Q1-L1-E2
gcgacccatacgacccttcgtcagcctcatcatgcctcgatggccttctacccactcattcgcatttctgagtccgggtttatatacttgtattcatatcaataagttacaacatgtgtggatcgactaaccttaccctgattactacactctctgctattcaatacacctatcagtgtaacgtgcattttaatactcaaatattgtcatgatgatctacttgaacataatacttattagtgtggtcacttattggctacagattttaaaaactacatgccgttatatatacctttactcttcaaaatttcttcatgatgcattactcttagaata

SEQ ID NO: 29858 - DNA, 309 bp, Gossypium hirsutum
  Clone ID: LIB3083-055-Q1-L1-E4
cactcaaaaactacactctagactattacttacatactaaacatacacgcacatttgcagggtaatataacttttatacacagattacatcctattctattactatcaacgtcataagtaaaaatatttacctcaatatcaaaaaatctccaacctaacagaaactgcttcaacaaaccttcttctacataactcttttgttctcaaaaaatccactaatccttctttaaatcaactgatcgaaacactgttaatcctactattccatccaatcctcatcaaaaaatactagtcccattactaattata

SEQ ID NO: 29859 - DNA, 153 bp, Gossypium hirsutum
  Clone ID: LIB3083-055-Q1-L1-E5
tatatattatctacatactattctgcagcaacatattcagaaccaaacaactatttgtcacaagggtcatacaagcctttgcatcaggctatatacttggaaccatatatctcaacgtaggaaatgatcaatgaaggatatctgtacaaaccc

SEQ ID NO: 29860 - DNA, 252 bp, Gossypium hirsutum
  Clone ID: LIB3083-055-Q1-L1-E6
ttgatacgctgaactccactcgttccatacttgcgccggggtttggtttcagactctaatcatggtatccaagcacaatccatcaggcaacaaagaaccgctcccactatctatatgtgctcctactgacactgcgagctcgcttctacattccgtatacatcgcatcacattggttttactgtaaaccatataccaaatccttggatgtcacacatcacgcatactgcaatctcttaacacatactagact

SEQ ID NO: 29861 - DNA, 395 bp, Gossypium hirsutum
  Clone ID: LIB3083-055-Q1-L1-E8
tctaggcatcggacccttgcacatccggatcaaccctctagagccttacttccacgcttaccatacacgcacagggagagggaaagagaattgttgtaacagagacagattcatatattttaacgtatcataacaattatgaccaataacaatatatcggaaacttaagcagaggcttgtttaaacacaaccacttctacttatctatttggttatcatttcaatcactaaaactaccttgaatcaactactcaaaacaaggatgagactccccttacaaacatacctaatctaaccatccgattcccattaacacacatatcacctaactcatcagcaccgtttccagcataattaccaatattaacgatttcaccatcccattatcataaaca

SEQ ID NO: 29862 - DNA, 344 bp, Gossypium hirsutum
  Clone ID: LIB3083-055-Q1-L1-E9
tacactaattccacaccatcattcttttaatttaacatatacaaattatttctacagcttatcttaacagatcgactaaccatcactactatacctccatatcaaccattaaattctctacttcctatactctctactacctcccatcccttaccatcttttaaaccattaccctcctccttcactatttcatctcctaccaactctccctatatttatacctatacaccctcctatcccatctcacttacctttacaatatcctaaacaacctacaaatatatacctacattttctacattattaattcttaaatcttacctcatactctctaatattacctc

SEQ ID NO: 29863 - DNA, 405 bp, Gossypium hirsutum
  Clone ID: LIB3083-055-Q1-L1-F10
ttgcgacccccaggacgctccgtcaccgtacaggcctcgagtttgtcgacccatcaggcgaatttaaaaggggataatgcatactgaaataacttatccatttgaaaatcactataaaaccgtgttttacaatcaccctttgctgcctacataccatataattatcaaaacttacatgtattattcacataatgctaaatatactctctgacatcatatgcataacaactataacttccaacaaccaacctgtgtgtaaaaataatttaaaatgaactttactaaaatgcattacccatttttgcggtcaaaagaaaccaaatttattactaggggcaagattctgtaaaatcttaacaaatgactaagttaatgattgcccatcaatagatattattttaaatt

SEQ ID NO: 29864 - DNA, 174 bp, Gossypium hirsutum
  Clone ID: LIB3083-055-Q1-L1-F11
cccttaaattatttctctataaaccacaattcctaacctcactctatcctacaagatccacacgatactctataatgagacttgccatcttatcacagatagcctcaacatctcttccaaactccactccatcattgtctactatcacaacccccacatggactcccacttata

SEQ ID NO: 29865 - DNA, 375 bp, Gossypium hirsutum
  Clone ID: LIB3083-055-Q1-L1-F12
ccaatgaccctccatcagccgtatcaagcatcgatggccgtcaatacacgcggggcgacaaacctgggctagaaacagtgatggctgagtggacaaacctacagcacctgttctatggacagtatgaaagcatagtcaactctgaggtactctggaagctgctccaacatggcatcaatgcagatgacaaacgagtacaggatattcgtgtgaaggcagacgagatctacagcatggatgagggcatacgaacacgtctaagtcagccaaaaaaccataacgctggacaaacattactttgctgctcaagatactaaagctgatcataaacgagatctgcaacataatagaagctaatgccagatgacaggccac

SEQ ID NO: 29866 - DNA, 225 bp, Gossypium hirsutum
  Clone ID: LIB3083-055-Q1-L1-F3
aaactaatcgatcccacccctacaaaattcatcacgactttattccttacacccacaccttcctacctcatgggaacattttttcaaactacttcatttcccatatcaatattatttaccacaatataactcctcacatatattataacttcatatataaacttcactatctattcataccttcctatcaaactacctatttatatcttctctccatctttacta

SEQ ID NO: 29867 - DNA, 401 bp, Gossypium hirsutum
  unsure (1)..(401): unsure at all n locations
  Clone ID: LIB3083-055-Q1-L1-F9
tggatccaaacgatctgcangaatttttctcttaaacaaattaacaaatttatcgaatccttcaaataaaggaattttattatagtgactctctcaaacattacaacatatcaggaacattacatatatattaaccacattataacttacacaaatatacacttaataacactataaatcatcaattctttgcaatattaacaaaacagaataaacattctttattacaatcacaaaaaaataacctaataagtttttcccttaaattacaaaactcaccataaactcaagatacgaaacttatctccaagtcaatatacccattctcctcttatgcaaccaacttacacatcttttcttctttccaaaactcatctttgaattccaaaagataaattcca

SEQ ID NO: 29868 - DNA, 381 bp, Gossypium hirsutum
  Clone ID: LIB3083-055-Q1-L1-G2
tagttctaatgatttatagttttattcagaagggaaaagctgggaatttcccacttgaaattccttcataaaccaatttacctaaaacttaataagttgcatacccaattacgtttaaacaactataatgcttcaaaaatttaacatcaaattatagagaaataagctatcaaatataagcataactaacttactattgacgaacccatctaatccattgatacccacccgttaaaatcttcttcccgatccgacacctatacctaacccgatttttagaaccgtaacagcaaccggatctaccttaacaaggccttgaatatcatccatccctataaccgaaatcatatcgagagcttccttatcgactttcatttgatc

SEQ ID NO: 29869 - DNA, 376 bp, Gossypium hirsutum
  Clone ID: LIB3083-055-Q1-L1-G7
tccaatcgaacgaaataagacaacagggggatagttcatttagggttcttgtacacttgagggcaacaagatttgtattggaatcaatttcgagcgaatggtaaaaaagaaatgaattcaaaacactatgcagcattcgtagtctccatgggaaaaggcagatcaccagcaaaacttatttttccgcaatttggcttcctcttgtctgtctaggtaagcaagcagttcttcttgcctcatcaaagcatcatgaagagccttcttggcaacaattaactctgcttcaagggcatcaactcgacatacagcagcattcaacaattcctctttatcataaagcatcacagatggctttgcttgtagtgtatcaactttc

SEQ ID NO: 29870 - DNA, 347 bp, Gossypium hirsutum
  Clone ID: LIB3083-055-Q1-L1-H3
gcctacgttgcgaccgccagggacccttcgtcagccggatcacgcctccagggccgtctacccacgcgtcctactagagattgtgcgagcaccttcttacgtaatagatgttctcgtccgacgcgcatctgtcgctgaccaacatgttcaacacaccacatatgcacctgatgcacgatggtctaatgcacatcagcatcatctacgcaaggcccacgtgccaaccgcatcgccctcgcaaactaacattcgacatcctggaacactacacttgtcaattcacgctacacgaaatataacacactgtctcactttaatcatcactttaattcatttctaacacacaa

SEQ ID NO: 29871 - DNA, 373 bp, Gossypium hirsutum
  Clone ID: LIB3083-055-Q1-L1-H4
actacgtggctacccccaggtaccctaattcagcccgatcacgcctcgagggccgttgacccacgcttcctatcagtggttgagggatcgccttcttaggtaatagatcgcctcctccgtagcgcatctcgcgcggtctaacatgttcaacactccacatatgcttttgatgcacaacggtctctgggacttttacatcagctccacaaataccacttgccagcccttgatccctcgcaactctgcttacgacaacgtcgaatagtacctttgtgaatacagcttcgcgaagtattacacactgaccatctttgatggggtcttaaaatgtcttcttactcacactagctatgaatgcatggatttattgaaa

SEQ ID NO: 29872 - DNA, 388 bp, Gossypium hirsutum
  Clone ID: LIB3083-055-Q1-L1-H6
ggcgcctactgctgcaatgctgattcttccccatctcggggaaactacttcaccggtcgttcctacttcaccgccaccggaggtaaaggcctctgctttgaaatggattgcactgggtaaaagcttttttgttcgaacaaaatctgggtctattagcaaagagtcaaaaatggaggttgaccgttgtttatgtgctgattctggcttggaaaacaggttccttgaagcctttgaactcagctggtggtaaggtaatgatcatgatccatagttgacgggtcgggcaaaggcttgcttgtaaatttatcactctaatgttggttttcattgcaccaactcttgtaattacagccaattttctagtggaaatgtaatcctcaaacttcag

SEQ ID NO: 29873 - DNA, 448 bp, Gossypium hirsutum
  unsure (1)..(448): unsure at all n locations
  Clone ID: LIB3083-056-Q1-L1-A10
ggaaattgagagctctccaattttctccagaggatgaagtggaaggggaaattatattttagcancataggttactgggcaatgcagtttcaagaaaccatgttaccgataatttagtttctagggttgctaaaagtctaccacaggaggttgaagcatcaaggataaagatatgggatactatgcttgttaatcgatatctttatgagctaagagaagcaaagaagcagggccgtaaagagagaagacataaggaggcacaggcagtgttggctgctgcaactgctgctgtagctgcttcctccaggatttcatcgagaaaagatggcttggaagattctagtcatcaagagaatgtattgaagctgaatgcttttgttggaagggccggcattaactctcagacaagagcaaaagatgcactttctaggaatgctgtctcaaggac

SEQ ID NO: 29874 - DNA, 437 bp, Gossypium hirsutum
  Clone ID: LIB3083-056-Q1-L1-B1
ctgcacgagaaaggaacgaaatctctgaacttttctctgcggtatgcgtttcttttgttaacaagcggaacagtcttcgatcatccacgctatacaccggttattctactaatcctcttctgattcagtcaaatcacttcgcttcctactttctttacttgttttactcttataactccaaccatatgattaacggttaggtcaacacgttcatcatcggcattatcatcggcgcaaatggatgcttcaggtacggactcacatgcttacggaggtgcatcttctaattcaaggagacacagaatactatcgaattcaaatataatccaagtgactgtttcatcccagttagaatactcatgcctactacgtacatcacgttctatccaccaagaatccgaccctcttatcactaatccgaacctataaaataacac

SEQ ID NO: 29875 - DNA, 469 bp, Gossypium hirsutum
  unsure (1)..(469): unsure at all n locations
  Clone ID: LIB3083-056-Q1-L1-C3
gtcaaaagataattttctatcattttaaatataaatataacgctnaagttaacataaaatgtcatctgacaaatattacaacataaaaaacaattcattaccttgaaatgctatccatgatcttatcaatcatcataaatcaaacacaagcatttctaacaactataaattaacaagcaaacattactaaatttattacatattcataattttaaaaacctcacactaataacaataaacatgataccctcacactttgaacccatcatcttcaaaataaataatattgctaacatagcataaatattcttcatatttctattcataatcttcaccttcatcaccaacttttacataatccttttcaaaagcagacatatcctaactgactttcgaaaattcaccttattacaatccctatacaacataccaatgcacaaaaactctctttaaattcattatatcaaac

SEQ ID NO: 29876 - DNA, 414 bp, Gossypium hirsutum
  Clone ID: LIB3083-056-Q1-L1-C9
cgaagagatttgcatagcccaactcttacggaagcatgacgaagattgtagacaggcttgattctgatgtgcaaaaggcggctaaccttcaaataactgtgcaggacctgaagaagaaggtacagataattgagacaggcaaaaaggggaaaggaattgaatatggtacagctaatgagcagatagaagaagctgaagaagccatcacgaagctatttgatgtcaatcacaaattgatgacacacgttgaagatggcttctggacgattgatggcaaatatgcactataaccatatgagaatggtaacatgaggatacgaaaagtatcagaacacgcaagaagagggttcgaaaagattgaacggttgcagttgtacgtgcataatatacagattttcttactgaatcatgatg

SEQ ID NO: 29877 - DNA, 224 bp, Gossypium hirsutum
  Clone ID: LIB3083-056-Q1-L1-D10
gtacaataacatgtatatgatcatttttgatacgaggttcgaaagtcgcgatcatgctttatttgttaagctcaatggtctaaatggataaagaagtatattaccacaaagctttgactacaactatggtgatcttatccccattctgacgccattcttgagagggtatttgaagttatgcaatgaagtcaaggaaatcacattgcatcttttcaaggaccaat

SEQ ID NO: 29878 - DNA, 308 bp, Gossypium hirsutum
  Clone ID: LIB3083-056-Q1-L1-D5
ggatcaaatgataaacatactttatccgatacagaggctaagcagttgatcgggaggctcatctatgctgaactgtcatagactgagctcgaattcactattgtgaggccttttaacttgattgcacccaacattgatttcattcctagtattgattgtcctagtgaatgatttcccagagatactgcatgctctattaattatctcctacatcctgaaccacttaagctcaacaattgtggccaaatctagaaaactcttatattcataaaggaatctcttgaagctcaactcttgaccattgaaaa

SEQ ID NO: 29879 - DNA, 475 bp, Gossypium hirsutum
  Clone ID: LIB3083-056-Q1-L1-D7
ctcgtgccgctctcagcgcaattgccatcaagctgaagaaatacctggagagctgagttatataagggcattcaacattttgtaaatagaagagagagaggtactggttcgtagaggtggtgggacttcttcgagcttagggtcctctctcattgcatttattttttttgttggtgcatatgtataattagaacagttgagctttaatggtgaggttttgtggagagttttaactgaagggaaaagcttaaaagataacattatgggttctgtttgttgctgcttgcgccctgaggattttgaggactatatcaatccgaacagtaatgtatatagaaattgcgtgtgcctcagttgctttgttcagaacttcgtacacgtgtataccacattgttcccaaaaggggaattgcgttctggcccttcatccatttatgggacaagatctattatctcttctgcatctctagataac

SEQ ID NO: 29880 - DNA, 288 bp, Gossypium hirsutum
  Clone ID: LIB3083-056-Q1-L1-E12
gcacgaattcttcacgataacaaatacactaatattctctatttacctacagtcgatctaacacaagaacaccaggaccaattatcacaggtcaatctcactgttattaataatcacatatataaaatcttattttggtcagcaattcccttctttccacacttgtattctaatcctatatactactaacagcttaatgattctcatattcacgatcactactatataatatgctaacttttaaaccaaatcctttttaccttaacttaacttacctctacactaacc

SEQ ID NO: 29881 - DNA, 337 bp, Gossypium hirsutum
  unsure (1)..(337): unsure at all n locations
  Clone ID: LIB3083-056-Q1-L1-E2
gtattgctgataaccatggtgttcaaaactttcctgccttttttcctgctatncgattagtgggtcaacacgcctgcaaccttgatattcctgctgttagcatgacattccctgcatatgttgcccatccgcaacttgcaacgtgaaattctgaaatgacatgactgccaatattgacacgtgcatgctccagctctataagcaacatattgtccaccttatattgcaattgatcgtttctattcatgctcatccatcagcacaaatatctttaactggaagcctaactcaaaaaaatacttctaacaagccaaataaccaattgaaacccttccca

SEQ ID NO: 29882 - DNA, 311 bp, Gossypium hirsutum
  Clone ID: LIB3083-056-Q1-L1-E3
taatactactactccaagcattcatattccttacatgtaaggttttcgtgtcattaatcgatatggctagctcaaattcccttaatctagcatgtgtcactctattatgcatacatttaattacacccctatctcacagctccgaaacctgttgtcaattcacaaactacctcacaccctgcattggttacttttcaagataatgaaactggtaccattcccccaatttgctgcggcgacattaaatctttcaactccgtctcccatacaacaccagacctattagcaatttgcatatgcataaaatatgc

SEQ ID NO: 29883 - DNA, 276 bp, Gossypium hirsutum
  Clone ID: LIB3083-056-Q1-L1-E5
aacctaaggcccaagagcacctttttatacaacttccaacaatgacaaacctttacccaaaccaccaatgtatgaacctcctaaaaaacctcctatgtatgaacctaagccaccgaaaccacccttttatacaccttcaaagaaagaaaaaccatatcccaatccatcaatgtatcaacctcccaactacccaccaatatatgagccaaaaccacctaagccaccaatttatgcaccaccaaaagaagaaaagccaatacctaaaccaccatttta

SEQ ID NO: 29884 - DNA, 349 bp, Gossypium hirsutum
  Clone ID: LIB3083-056-Q1-L1-E8
cttttctgtgcgcattgctggggtgttttatatgcacgatgatagaggtcgatacaatgttggcggtcggcataggcgaacacgtggtggaaggaatttgtgggaattcaaagatgataggaaatgggtacatgacaagtttgaggagatgactttgcaagaaaagcattatgaggtgggaagatcatctataggcacgtatcgagctcacagtaataaatcgtggaccacgtcatggttatcgtaaaggaattgggtccatagcatttgggaaaaacaaccacctgatcatggtttcaaaggatggtgagaggtatatgacctatttagtattaacttaatattaaaa

SEQ ID NO: 29885 - DNA, 366 bp, Gossypium hirsutum
  Clone ID: LIB3083-056-Q1-L1-F10
aaaatacaaagttcgataatactttattttgataaaaataaaatgccggtttctgggatcgcactctggtctccagccgaaaccggccaagctgatgcactcaaggctgctttagcctatttcatttcaacgcttatttttgatttcgccgatgaaggctctgccatagctttcaacaagttgaccgacgatggctcctctacaccagcctgattagtagctgctgtattggctaacaccttgaccttattatgccgctgtttcaatcctggctaacaatttctgcggacacctaaactccgtcgtcacgttctgagactttcggggtggccacattacattggtgaggagtattatgtattggat

SEQ ID NO: 29886 - DNA, 311 bp, Gossypium hirsutum
  Clone ID: LIB3083-056-Q1-L1-F3
cagtcttgacggaacagtcatccacatctggtgaccattcaccggttgcggcgaataataagacccaatacagttcactgaccgtcatgaaaaaacgtcatgactcggataaccctcgcttcacacaactcaatcagatttcagaacataccacatataacaacaggcctaatatcattatgacccactccgatcgtacttaccaactattactcacacctaatagcaaatttcaaactgaaacaattaatatttggaataaattagctatttatgaatagagtgacatctcattggataaccaataggca

SEQ ID NO: 29887 - DNA, 484 bp, Gossypium hirsutum
  Clone ID: LIB3083-056-Q1-L1-F6
aagcattgcagatattacaggctcacactgatgaagtatgggttttgcgattctcacataacggaaaatacttagcttcatcgtctaatgatcagtcagcaatcatttgggaggtttatgaaactggagtatctttaaaacataagctctctggtcaccagaaacctctctcttctgtttcatggagtcctgatgaccgtcaacttctgacatgtggtgcagaagaggttgtaaggcgctgggatgtctcttctggtgaatgtcttcatgtttatgaaaaaactggtcttggtatggtttcatgtggatggtctccggatggcaagtggatcttttcaggtctgaatgataagagtatctgcatgtgggaattggatgggaaagagctagagtgctggaaagggcaacgaacactaaaaatttctgatttggaaataacaggggatggaaagcagattataagtatttgtcgggaacagcaata

SEQ ID NO: 29888 - DNA, 317 bp, Gossypium hirsutum
  Clone ID: LIB3083-056-Q1-L1-F7
tagggacaatgaaaactttaccaatacgaacgaatattatgtactttataagactcagatagtattcgactacggctcacctttcccacatttactcaacacaactcctcattcaacaaccaaaacctctgtagtttataaatctatcataacaaaaacctacaaattatataagttttctactcattgacaatctaacataccactccacttctaaatctactcattttttcaataccctcaaacaccccacaaatatatcttccttagtacaaaaattcctataattaaaaacttttatactacctaactaccaa

SEQ ID NO: 29889 - DNA, 370 bp, Gossypium hirsutum
  Clone ID: LIB3083-056-Q1-L1-G11
aaataactagattttcctcagatttgtacgtgaagcggcattatcaggggcaattgtaggacacaatgctcttatggagaatgcttggcatgatactgagatgcttgccgaggctgagctccatgcacatgctcatgggcgacccacactgaagaacttggttgacgcttgtaacaaagtgttacataatgaggttgagcacaccccatctgcaaaaacagatgctactgctgcatttttggcttctcttgacgagcccaaacttacacgttagtcagaggcatggaagaaacctcctatcgaaatcctcccttcggacatgtctgctctctcagattcaattacagtttacacgaaacctgttccattg

SEQ ID NO: 29890 - DNA, 454 bp, Gossypium hirsutum
  Clone ID: LIB3083-056-Q1-L1-G3
atatcactgacgatagttcgacatcagctgagcattatacgggtgaggtgcacaataatactactatactgatgccagattgcaatcgaataaatgtgatgtgattaattggcacttgatccatatgagtacgctaaattttcatgctctatatctcatcatatgatatgtaactacatatactactaatttatgtaatcgctttgaaacaatcgtgtcaacttgtatgaaacatcaacttaagccatacgagttgttgcatgcgcaacctattcataacatgagcgataacggtctgacttggaataatcaggatatgctaacgtttagacaatggctcttcatgttcaatactggacggatatttgattttactttaaagtcttaactgtatcactatttggaaattgtactggagcatttacccccaacaatttagattccagatacttta

SEQ ID NO: 29891 - DNA, 220 bp, Gossypium hirsutum
  Clone ID: LIB3083-056-Q1-L1-G8
cttacacgccaactttaatcctaccaaaagcaccataacggtcataagtgttcatagctaatctactaactcaccatacacaatcgttaatactactccgatccacttcttacattctactacttccccaatgaaactttacccaactcaaaccttttacgtttatgatcataactagccatcaactaaggactctaacaaatattgatagccatcactt

SEQ ID NO: 29892 - DNA, 315 bp, Gossypium hirsutum
  Clone ID: LIB3083-056-Q1-L1-H10
tttttcgatttcaatctcaaaatctgcagcacttattttatatacagtaacatctcgcgtaaatgagctaattatcttctaacttaacaaccatacctaaataacataatagcatatggctcaatcaaaacctccaaacaaaataaaagcaatccttacaacattttaaacacaatctttaaaaatgattgaaaatgcttatacaagcaactaaaactttcactacatcttccttaatactatataattactcattcaaacgaacaacatgctttcattaatagttatcactttatcgaccaaattcctaaactt

SEQ ID NO: 29893 - DNA, 358 bp, Gossypium hirsutum
  Clone ID: LIB3083-056-Q1-L1-H12
ggcccgaggctcaaatcattctctgactggcttctgaagactatggggtcctacagtgtagaagccattttttcagctgctactcgtgaatatgctccattagttgaggagctgtggaagcatgcattcattcaggaaacctacatcaggagaaatgaattggaaatgttacccagtgttgctagttattacctcgagcgggttgatgagactattgaaaacagactatgaaccttctgatttagatatcctttatgctgaatgtgttacttcttccaatggtcttgcctgtgtcgacttttctattccccaatcttcacccgatgaaaatatcggcactgccgaacagcatgattca

SEQ ID NO: 29894 - DNA, 465 bp, Gossypium hirsutum
  unsure (1)..(465): unsure at all n locations
  Clone ID: LIB3083-056-Q1-L1-H3
attgaaattaatttaaaagtattattctttttataatgatgatagatantattacatatatattttttggcccagttggcatacgaaaataaacaataaatatatccatttctttaagcttctacggcattctcttcctctttatagcataaatccttttcttgttcagacaaaatatccttttcaaccctcttcaggaagctcagcatcatctctaatccactttcatcaaatcggggaatagtgaggccctttgggtgatgaatgacaacaggatctacacacgattccaacagctccaatccatatggtttcaggaaatcattctctcctaaaaagtgaagagatgggcagtggatgggagaagaataagtgttttctgccactgtttagttcttgaatttagccccttcaattattatcaaattctttatttggggaacttttgtaagcgccatacccttc

SEQ ID NO: 29895 - DNA, 222 bp, Gossypium hirsutum
  Clone ID: LIB3083-056-Q1-L1-H4
taggtaatgttatatacattgaagtttattcataactaaattaaatgatggtgcaagggtgaaaataaattcaaataaatttattttaaataagatttcattatttaattatttaaatcaaatggtatggattaatacttaatctgctatgccactttttcatattataattatcgttttcaactgctttaattcatccccaatgttttcaatcattcacat

SEQ ID NO: 29896 - DNA, 338 bp, Gossypium hirsutum
  Clone ID: LIB3083-056-Q1-L1-H5
aaaaccctaattttccctctcactcatactcacagcagacgctaaaaggggaacggtgttcaaaagaagaaagatttgtgatcaagatattcagccatggatgaagagtacgatgtgatagtgctacggacaagccttaaggaatgcattctcagtggtcttctattcgttgatggactcaaagctttgcacatggataggaatgactattatggtggagaatcgacttctcttaatcttgtgcagcttttgaaacattttacgggagatgaaaagccttccgaaaagctgggggcaagcagagaatataatggtgatatgatacctctagtcatgat

SEQ ID NO: 29897 - DNA, 305 bp, Gossypium hirsutum
  Clone ID: LIB3083-056-Q1-L1-H9
atcattacacttactaattatgccatgacggcactaattaagatattctatgtgctcccataattcaaactcaacaacttatgtacactaaaccatttactacctaatctacaataaatgcctaaaactcccatcttactatctttactacaataaccattgtaacttaattgacattgcctcattcatacactatttccataaatcctactactatttacccagcacatacaccatattcttccattatatacaacaaataccatgctatttaataccattttcttttctctgaactaccctat

SEQ ID NO: 29898 - DNA, 540 bp, Gossypium hirsutum
  unsure (1)..(540): unsure at all n locations
  Clone ID: LIB3083-057-Q1-L1-A11
ccgagttcaggnnntctatctatgtatagtgccccggtgcacctnntgatgtgggatggcaatagggagctgtcnnntcgactgtgtcttatgtggtctctcagtgacgaaaaccgacncnntggttattcaagnncatcnnataatgaaacagcccccggtgctttgagatatgcctttctggttcnngagtcttcttttgcagtgctttacctannatgtcacctncttcatannttgatatcttggattgtgaatcatttaccatttcaacaatnnagcaagtgcccatgatgggaaagccgaaatgtgccattttnttaatggaatccctnncagtttggataagaaagctnnttgttatgttcaaatttccaccagagaaatttgattggtattgatcccgtcatgatccgatattgcctaatcgaaaccgtcgtcttctttcgatatcaacatgnttgggattnagatggaccttcaaggctcctgtatatgtaggcacaagggtgttgttttcaacaggcaaggcatttgtat

SEQ ID NO: 29899 - DNA, 401 bp, Gossypium hirsutum
  Clone ID: LIB3083-057-Q1-L1-A9
gcattttgtaataaatccaaaaatgaaaaacatttttttgcccataagttaaaaaaaaaaaacaatgcgacaggtaaggccatggtatttctacagaagcaattttatccactctgtataatattccaaatgacaatgaacaccacttcccctaaagttcagcttctttatgatctttgcaaaaccacattttctaattctggtttgtcttcttctgcttcttcccaatccatccaaatcctctgctctcttctggacacgtttacccctgctgatgttggacttaaagagggaaatcctattgatgatgaagggcatggacgtgtagctcggtgtactcaacctattacatatttgcacattcacgaatgtgatggttttacgatgtgtatattctgctt

SEQ ID NO: 29900 - DNA, 267 bp, Gossypium hirsutum
  Clone ID: LIB3083-057-Q1-L1-B10
gaccaagaggatagttctagtcacaatgtcttcactaagggcagtgtgaaatggccatgtatcgacgaaccgcacattgaagatcggtaaaggccataaactatttgattaagggtgggcatgtcaagggagggcacagttttcttgtaaccaaaccagacatgattattttcgtactgatcaatcagagaaccttcttgctaaacgtatttcaccatgcgtacatgcagattcattctagacataccattcattcattacttccga

SEQ ID NO: 29901 - DNA, 422 bp, Gossypium hirsutum
  Clone ID: LIB3083-057-Q1-L1-E10
gtccaatatgctttgagacttcccggtcaatcaatctgctcctcggtggccatgctcaaactcctgtggtttcgttgatgaatggttgaagaggaataagtcggttagtcttggtagtccttggtctcagtttcatcctgtttgtctgtaattctgttgacgtgagtgtgctaccttgtcttgtttatgcgccccctactgtcgagtttgaatggtatgtgttggcttaagtttcactttgttgttgtatactgctgctcgtgttatgtgctgagtcaaaataattaattgaataatatatatatagagtggtgagagagttaattttcattggtgtagtattccatccaccttcacttagcatctacagggatatgtattttcctggtgttttcggaaattgatgggactgctaaacatgt

SEQ ID NO: 29902 - DNA, 225 bp, Gossypium hirsutum
  Clone ID: LIB3083-057-Q1-L1-E12
cttaagcctgaaaattggcttcgggattccaattttaagtgaagaagggcgaatttggggttataccacacatatgagagataggcacattctcttaacacaggttggcaacccacactatgctgtccctgagatagtgtccgcggaactatacactctgcctcaaaaggatgcacgtagatgtggagttatatagtatgcgcttctcagaggcacactttcttt

SEQ ID NO: 29903 - DNA, 359 bp, Gossypium hirsutum
  Clone ID: LIB3083-057-Q1-L1-E9
tagtcttcattgcacgttatgctgaaaagctacgttcagaacgggacattgctcatttttaaccctgagctgctcctaacatgaccccatatgatacgaaactccacaatccatatgagacttacacagctctcatataaccgatacatatctcactatactgatgctactaatgtaccttttactggtcccagctctgcgacttcggaaaactatcccacaacttattcttacataaagttattgcttcatacatcaaatgttaacattgtcccctatcttcaaagtacaaaatctcaaccactatcttataattaacatttatttctcattcaacatacttaactcttatcttaata

SEQ ID NO: 29904 - DNA, 335 bp, Gossypium hirsutum
  Clone ID: LIB3083-058-Q1-L1-B7
ctttttcaacttttaccctaaccacccaaccgatctatggcatatttaaacacaacttctctatccccaaacccctccggggaaaaccaccaactcaacctccaacttaatacaaatatcttaaaaaaaaaaccatcatttttaaagaatatttcaacttaacctactatattaagcattacaacgcccccaagaactaaaaactccagcataccacccttaatattataaaaaagcaatctccgttgcatttaataaaagcccaccttcttattaaccttattcaaagcttctccagtactcttttattaagaaagatctcacaactaaagaca

SEQ ID NO: 29905 - DNA, 355 bp, Gossypium hirsutum
  unsure (1)..(355): unsure at all n locations
  Clone ID: LIB3083-058-Q1-L1-C7
gntttttnnnnntttttttttttttaataaactcatgggggaaagggcaangttagaacgtatatacctaaatataatnncatttaaaacattacactaaaaaaccatgtttgaattattgttgtataaaagttcccccctctttccttggaattatagatacaagaagaagatgcttgaaactaattttaatctcatatcatggttgctatcaactaaacttaggtgcaaccaccagttctaaacccaatcattcgtctagtaccatcatatactacttccaatgtcttctgctgtgtgttcccgtatatcagcacatcgaaatcgttagtgtttcctgcaaatgctaggcaca

SEQ ID NO: 29906 - DNA, 191 bp, Gossypium hirsutum
  unsure (1)..(191): unsure at all n locations
  Clone ID: LIB3083-058-Q1-L1-D9
cccaattacctattccctatgacctaaaattttancatttcacccacttttaaacattccctacatctaaatatccaactatctcattatcaaatntcaaccaaattatcattnnttaatcattatttccatcacttctcctaacataaaatnattttaattttaacaccatcataatacaatttaacaca

SEQ ID NO: 29907 - DNA, 369 bp, Gossypium hirsutum
  Clone ID: LIB3083-058-Q1-L1-F8
gaaatttggtttcatcaaggtggtaaaggtccaaattggatgggtggtaggattcctgatggtggtaaccaaattggtattcaggcttccaatttgcatcctaacgttaatggagttagatcaaaccagcaccagttgtctcagcagcaccaacaccaacaaccaatctttcctaagcaaacaggggtggggtatggagctcagatacctttacaaagtggcggtcagttggggagtcctggaattcggagtggaatgcatgggattggggatcagggaataagtaatggtctgattcaagcaggtgcactgcaaggtggaagcatggggatggttggtttatgaaccggatcacctgctaaccaactt

SEQ ID NO: 29908 - DNA, 125 bp, Gossypium hirsutum
  Clone ID: LIB3083-059-Q1-L1-A3
tgcctaaatctttaaaatccctcatatatcaataaaatataccgagattgtttttaattgtctttccattttgtaacaagattccacttataaataacttttacttcaacctcaaattcctaaaa

SEQ ID NO: 29909 - DNA, 355 bp, Gossypium hirsutum
  unsure (1)..(355): unsure at all n locations
  Clone ID: LIB3083-059-Q1-L1-B11
ggatggtggtaaccggaggaggcttacgcttttggagcagatttcggcggtcgagaacggccgggatgctctggccggtttaactctcgacgccgttttgggaaacgctaagcggcctgagcaaccgcctgctcagaaccgtacccttctggagattatacgagacgatgattccaacaaggagaagaagagttggaaagcgttacgggacaagctccggctcaaacgactggcggtgtctgctcggacctcctcggttcgtatcccggcttctgatgttattgttaatgataataatagatcccagttctcgcggcacggntcgtttcgtttcactcggctgactcgactggtg

SEQ ID NO: 29910 - DNA, 421 bp, Gossypium hirsutum
  Clone ID: LIB3083-059-Q1-L1-B8
cctgaactcaagaagaggaaaatccctaagccaccgcctggccggactgttgcttcacctgcttcaaagactctcaaagatgcaaaaccaacaagtagtttgaggattccaggtgtacaaacaagtgatattaatagtttcagaatccaacaagacaaaaattttgctgtagcacaacaagacggctgcaccggaaattttatgaaatttgattcatggtatgggaattttctggtaccggttgttccatcacgggcagaacttaacagataagtatttcttgtatcatattaattttgatatgattttgtttgcaaacaatgtgacagttgtttaagtccttgcttttgctatatggatcataagattcttctccggctgctggttctcatttgtttgacaacaagagatccaatagtac

SEQ ID NO: 29911 - DNA, 180 bp, Gossypium hirsutum
  unsure (1)..(180): unsure at all n locations
  Clone ID: LIB3083-059-Q1-L1-D9
taaaaaaaaancttnnttnntcctnatatgcaaatacccatatatctntttaatgccaaaaattcttcccggttctctttttttctttccactagagcttatatcttattttataaatctttcaactacttatacctctatcatatattatactgattttaatccccattcttatttaca

SEQ ID NO: 29912 - DNA, 276 bp, Gossypium hirsutum
  Clone ID: LIB3083-060-Q1-L1-A10
gcagactaacgttttgttgactcccagcaattaaaaagcaaatatagtaaaattaaataaatatattcccattaaaatacacattcccagtaaagcaaagctcttctctttcccttcccacttcaccaaaagaaattttcgccttttttttatccttgctttttgcgttatctccggtgcagaaaccctaaaaccttcgatcttcactgacccatttcatatctcaacccgacccgatctgggtccgatcccatttctcctccttcaaatgaaaaa

SEQ ID NO: 29913 - DNA, 184 bp, Gossypium hirsutum
  Clone ID: LIB3083-060-Q1-L1-A2
aaatttcttatctctttatttggttaaccatggctcagaacttttagcatcctttctttcttttccaacttttactcattactgtctcactaatgatcggtagtcacaccttctattcatcggctagacctatattccagtctcaaacctgctaattatagcttctcccatatcattcataata

SEQ ID NO: 29914 - DNA, 241 bp, Gossypium hirsutum
  unsure (1)..(241): unsure at all n locations
  Clone ID: LIB3083-060-Q1-L1-A3
gcacgagatttatgtgaacttatttcactgnattcaccagtcgagtacactgggatggtgctcgagtcttcagcgactatttctaggattggatttgcctcacagagctgcgatccactcacgctccatgtggattttaatctctgagagcaatgtctagacctccatatactgtaccactgacgcacactctacgagatcatctataccatatgatcgaattagacaattccgtaattat

SEQ ID NO: 29915 - DNA, 206 bp, Gossypium hirsutum
  Clone ID: LIB3083-060-Q1-L1-B10
taaatttcaacattttccaagtacaatcgaaccattagggcaaccagaaccattatcctagagaccctctcaaatgctcacaatcactatccctacgaagcaacattcatattcagaagagatctgcaccgtcaacatctctgccaatcaaacatacgcactcctactctactatcttcaacacatccactacctccacctcaatc

SEQ ID NO: 29916 - DNA, 380 bp, Gossypium hirsutum
  Clone ID: LIB3083-060-Q1-L1-B11
ggaattttcattttttctatatacctcctctccaatgtgtcctcagtttccctatacaatgagagaaatccttcacatccaaggcggtcaatgcggcaatcacatacgatccaagttctagaaagcactatgttccaaacatgccatcaattcaacggctctatatggtgctgactccgagctatagcttgaccgaatcaatgtttactacaacgaacccagtttttgccccttcgttccccgcacagcttcaatctatcttgaacccttaaccatctatagagtaacatccggtccttacggacaaattttcctacccgataacttcgttttcagacagtccgttgcgcaaaacaattgtgctaatgcacattacactt

SEQ ID NO: 29917 - DNA, 319 bp, Gossypium hirsutum
  Clone ID: LIB3083-060-Q1-L1-C10
gtttttggttcttttcctagtgatattcaaatcctgcaaaagccagagggtttgcttaatgggaatttgtttgaaaaatcgaatcttgatttatcgaaaccggcgaattcgagtgcatacgcctttcaacatcaaagtgaaagagggaaacaacagcagcaccatgttgggaattacagagaaaccctaagaccaccgccggggttttcaggaaagtctagaggaggaaggaaccgtgatttcggagccaggaggaatcatttagagcacaatgtagataaattaagagcagaatacagtcagttgagtaatgataatg

SEQ ID NO: 29918 - DNA, 396 bp, Gossypium hirsutum
  Clone ID: LIB3083-060-Q1-L1-C2
attaacattaaatgaaattactttataatcgaatgattaagtaaatttgttctcaaggtggatatactgacaaacataactaattctaaaaaaatcaagaatgccatttaaagccacaaggaatgaaatctgataatgatgccataactacactgtatatatattaaaatgatcgtatgtgctcgagcctttggttctaaaaagaaaaagctcaactatatctcttcaaaacaaatgtaaatgactttgaaaaattattacctctaaattcaattaaggaaccttccttacaatccaataatttcaaaggtatttattaaaccatatttataaactctcctaaagccctctcttaaaccatcttcatattccaaggaaccattttataccaatttg

SEQ ID NO: 29919 - DNA, 356 bp, Gossypium hirsutum
  Clone ID: LIB3083-060-Q1-L1-C4
cagaaactgacaagtctgctatgaaatcacaagtgtcgcacatctggcatgatgccggaatcaaggatttgacgttgcaagtggagtgtgtggaactatagtaactgatcttaggttacactgtcgagaatagagagtagctcattcatctttaggactgagtcttatcatgatcaaaagcatcagatagctccaatctatatgctgtgttgtaaggagtacatctttgtcggtttatcctggagcatgtatatactcgtaaaagttgagttaaccatcgatgtttcctgtaaaccattagaaaagggtgaaaatggggaaatgttaatttttgttacccatgaaataattgttaa

SEQ ID NO: 29920 - DNA, 282 bp, Gossypium hirsutum
  Clone ID: LIB3083-060-Q1-L1-C6
acattaaagaaatttctttataatggaagattagaaaatttgtctaaggtgggtctaaagacaaaaataactaattataaaaaaatgaagaatggcattaaagccacaaggaatgaaaattgtaatgcttctaaaacacacttagagatataaaatgatcgtatggctcggcctatggtctaaaagaaaagccgagcttatctctcaaaaaatggaaagtgtcgaaaattggggcttggaattaataaggaacctccttgaatccaatatgtccaaggtttt

SEQ ID NO: 29921 - DNA, 177 bp, Gossypium hirsutum
  Clone ID: LIB3083-060-Q1-L1-C8
acttcttgagaattttaaaaccaagtctttaaggggaacagtgatttataaagggtttgggatcttgagtctgataatggcgttctgttctatgacttgttgtgagaaaggtatggctcgcctgattccgaaaggtccgaaacctccgacatttcaaatgccaaatttggtggaata

SEQ ID NO: 29922 - DNA, 377 bp, Gossypium hirsutum
  Clone ID: LIB3083-060-Q1-L1-D1
tcaacaactactctatacggattctgcacgagaccaaaatcagctttttccatacctttatcaaattgaacatcctctagtgataccatgaccaagctctctaaccccaacccaatctcttctctttcatcatcttccaaacccagatcttcttcatcccttaaatgcttctttgtattccctaccacacctactttctcctctaatctagttccatcttatacctcgtcctccataaacacccaccctttcaaaacctccttgtttatcagctgttctctttctcatcgaaaccctacttaaccgaagaggactacttttcatgatctctattaaacagaaagtcaaaatccatggtatcacaaccttttcatgcc

SEQ ID NO: 29923 - DNA, 211 bp, Gossypium hirsutum
  Clone ID: LIB3083-060-Q1-L1-D3
gtttatgccatactatgtcatatatctctgcctcggggccctttatgtctaattcacatacaaagaatgcactatcacccacactaggaatatcacacagaacgccagccgcttaaagcccatgccactgctgtccctgctcacttgaccacaccctataaggattacgatcatgcacataatcatccagagcctgacgagtaacctaatc

SEQ ID NO: 29924 - DNA, 302 bp, Gossypium hirsutum
  Clone ID: LIB3083-060-Q1-L1-D5
gcacgagtgccggacaagatgctttgctgcagcctgtaccggaagaggaactagaggcttatgaggcggatgacgagcacagagatacttgatatgaatcacaatgcgaagtgcttactgatccatggttgattggtgtgctcacatagcagccaagggtcatgaacgctaaaacaaaatgtgacatgtggtatcaaagaagcgttgataatctattgtgtgtgtgcagctgcgattcgaatgcattctatacctggataggaatacgcctaaggcacttactttgctgtctctcttttcac

SEQ ID NO: 29925 - DNA, 255 bp, Gossypium hirsutum
  Clone ID: LIB3083-060-Q1-L1-E1
ggcacaaatcgaagaattttctacacatttaacaaaaaacgtacaagctgattcaaattgcgacattaatgcgcaaagcgagcaccatctaaacaacaagaaacaaaatcccaaggcacgacaaggcaagctcctgcaaatgtttccaaaacccaaatgtcaagaaccctaaaggcgtctggcaatgcaaaaaataataaggtcacaaaccatcaacctaaactgacaaaagcaaatcccaattcctcgaaccac

SEQ ID NO: 29926 - DNA, 183 bp, Gossypium hirsutum
  Clone ID: LIB3083-060-Q1-L1-E10
ttcatatatagatttttaagaccctaaaatattccctatgccataagtatactttaatcaaccattcataacatccttgcaataacataactacaaacactgaaccaccaatataagaatctagaaaacttacacaaatcacttttattaccaaaccaataatcaattccgcacaatcaacaa

SEQ ID NO: 29927 - DNA, 261 bp, Gossypium hirsutum
  Clone ID: LIB3083-060-Q1-L1-E11
aacatttatagctttttgaggcccgaaagtaagccggaggccattagtagaacttttaatgtggataagtacctccttgttgttcttcaacgacaaataatgaaagagcaagatgaggatctttataagttatatgagacaatattaagtacgaatcatatttcattatcagtcaatgaataacttgatctgcaaacccaactaattcattaccttgaccaacacgttgatgtttcttattctttgactgcttaatactcc

SEQ ID NO: 29928 - DNA, 237 bp, Gossypium hirsutum
  Clone ID: LIB3083-060-Q1-L1-E5
gacaaatctaacatttctttcaacattatacacaatccttataacggcaaccaatacgaccatataatcacacaattcaaaccaacactattacctccactaataacattaataagttcactactttctaaactcctacataccaccataaacaccacatataatctaccaaaatacccatttacactttaaaccaatataacatcacattacataaacatgaatataccacaaatc

SEQ ID NO: 29929 - DNA, 319 bp, Gossypium hirsutum
  Clone ID: LIB3083-060-Q1-L1-E6
caataattgcgagcaaacaaggctaaaaacattttaaatagctgatttctcagcgtttgccaccatcacccagatgaagtatcgagtgcgggcaatataacatagtagatgtaaatcccataatttacttggttcagggtattcgcctatcaaaacactttgtttcaggctgaaatgtcaaataacttggatcccttctttagtttaaggttccataaatgtagcaaggagttgagttggggaaaaatcaatgaaaaaaaaaggccagcagaatggtttggtcttaaatccttgcatgtaaggtgaccactaaatcatg

SEQ ID NO: 29930 - DNA, 453 bp, Gossypium hirsutum
  Clone ID: LIB3083-060-Q1-L1-F1
tagaacttgcgcaacaactagtgcgtagtacgagattctgcacgcgggattatgcaaacagttttacagcttattatgctaatattcatgccggggaaaacaacgcttctatttgttatacgtgctaaaacaaataccccccttgaatatttggagcctatactaagggaagatattcaaaagatatggaatgtagttagtaaacctgcggcccataaagatacacccctcagtgaattctttaatgtggaggtcactgctttatcaagctatgaagaaaaagaggagttattcaaagagcaggttgctcaactaatgcagcgttttttcaattctatttctccaggaggacttgctggtgacagacggggtgttgtccctgcctattgattttcttttagcgcacaacagatattgcgagttataaaaaaaaacaaggatctggatctttct

SEQ ID NO: 29931 - DNA, 437 bp, Gossypium hirsutum
  Clone ID: LIB3083-060-Q1-L1-F2
aagagatataaaagtcaaaaaaaatagaaaaaaaagagaggacagaggcattaggagaatagaggggagggctaagaataatggcaaagaaaaagctggaagaagggggcagtcatccttagcgaccgcaagacatttcgtcacctgtgttgagagttgtcatcctgaaattcttcctttatttcttatcttgtttcttcttgagcttaattaatgaaaaaaaatttgggtggtggggtaaaacttaaatttaattggcaaaccattaaccaaaaatggtaagggttaaaataatttgaataaacccttaattttaataaagggttaaaattaaaatttgattaaactaatggttcctttaatgggattttaagaatggatgcattcggtgcattgaccaatggaccacaaggattttaaaaattacctaagtttga

SEQ ID NO: 29932 - DNA, 242 bp, Gossypium hirsutum
  Clone ID: LIB3083-060-Q1-L1-F5
atagagggaaaatgttaaggatatttgtggttgagcttgatggaaggtcttatagaggcaagttttgtagaactcacttggctctccctgatgatcttgtttccaggtctttccattgtcgccggtggaaagcctacctcttcaataatgcgtgcaacataccaagatgacgcctagaaatataagtaatgtctaacaatattgctaactgcgactttgatattttgctactcatgtcagct

SEQ ID NO: 29933 - DNA, 330 bp, Gossypium hirsutum
  Clone ID: LIB3083-060-Q1-L1-F8
ctctagacctgcgcttcacgggttctgcacgagcaatatccaacattttaagccaatttcaaaaaacccatctaaaaatggcctaatagcaaaactcaaaatgctccacccttcatccttaacaaacatacacactgtgaaacgtacacatgcaataagaccctacaactaagtcctaaaaacctatagcagattctccaaaaattcaattagactgcacctttaataaaatctatgcgacattgaaacagcttcttccctcaaagtgacatattgatggaaactacatcacaaccttccatacagctcgtgttgacacctgaacatact

SEQ ID NO: 29934 - DNA, 305 bp, Gossypium hirsutum
  Clone ID: LIB3083-060-Q1-L1-G1
ttccgaattctgcacgagtttcttctaccaatttttcaacttttcaacagagtcaccaaccggggggtatatgagctgtttctagacactaaaggcaacaaacattttcattaaatcagcttctccacatacatcactggcaaccctattgatctcctgcttgatcttgcaaaccgaatcagtcctgatttcatgaactcattggagcaaagtgagaatacataagaacataaatacgtaaaagatgctcttttctcttcttacgaaaaaaacattttcacaaagcttaaaacctaacttttcaa

SEQ ID NO: 29935 - DNA, 281 bp, Gossypium hirsutum
  Clone ID: LIB3083-060-Q1-L1-G10
caagactttctcgacatcatttcaatgtttattaaaaaggcaagttgcaaatctatctgcatggtagtatccgtttaatgctgctggtgtaaatatcacattcatgatcattcaaattcttgaccttgatgccttcaaacctatgacatttatccgatcagttttcttacatatatcatcagacaatgtatccacattctacttgctatactgcgtttcattcgcatttatgcacactcaatggctttataaaaatgccacgtacatggagtccaattaat

SEQ ID NO: 29936 - DNA, 212 bp, Gossypium hirsutum
  Clone ID: LIB3083-060-Q1-L1-G8
ggaaactcgcgcgcatagagggaggctttgaacggcgggatccttaaaagctcgtttgggagcgaaaaagtcatcggctcagcctcgctattagcagctcttgatcagtaggcaattgtggtaacgagcggcgaaaacgaccaaggactattgctgctatcaactattatcattatcatactttgttttctgatcgaatagtattcaatttg

SEQ ID NO: 29937 - DNA, 314 bp, Gossypium hirsutum
  unsure (1)..(314): unsure at all n locations
  Clone ID: LIB3083-060-Q1-L1-H1
ctttgtatcaaaaattaaccttctggtttcaacaatcggatggcaccgggtgcatgcatcgagaccatttatgtgctggtcttcatcttctacgcaccaaaaacggagaaagctagaatccttgggctcttcgcttgtgtactcaccgttttctctgctgttgccctcatctccctctttgccctccatggtaatggcagaaaactctnttgtggccttgctgctaccattttctccattatcatgtatgcttcacctctttcaatcatgaggctggtgatcaaaactaagagtgtggagttcatgccattttt

SEQ ID NO: 29938 - DNA, 216 bp, Gossypium hirsutum
  unsure (1)..(216): unsure at all n locations
  Clone ID: LIB3083-060-Q1-L1-H11
ttcacgagccangttttgcctttccttaactctttcacacaaaaagagagacttagaggttttttatagattcccctgtcacttcgcaagataaaggagaagacaacacctaaaaaggaaaaaaagcaccaaaatggacgctatgaggaaacagctcgatgtgctgatgggtgccaatctaaatggctatgtacgtgaagtgaatctcaaatacta

SEQ ID NO: 29939 - DNA, 242 bp, Gossypium hirsutum
  unsure (1)..(242): unsure at all n locations
  Clone ID: LIB3083-060-Q1-L1-H3
gatgctttggnntattaggtaaacagcatttgcattggaaccatctggtgcaattgacaagacatttcttgacttacataaaaagcttaataattcatcactattcacaccttcataatctgcaactggacaattactccatactaccccctttttattccaactactgctactctcattgtaattccacgcacttcactgatctctatcccggtcttcgtgacttctctgattcgattctt

SEQ ID NO: 29940 - DNA, 280 bp, Gossypium hirsutum
  unsure (1)..(280): unsure at all n locations
  Clone ID: LIB3083-060-Q1-L1-H8
ctcgtgccgttttgatcctggtattgttgttctagttgaaacccgagttagtggctttaaggtagatcgagtaattgggagtattggcatgtcaaattctcatagagtcgaagccagtggtttttcggggggaatttgggttttgtagaaggataatgttagtataacgatggaagtaaaccaatttcagtttttgcatttgaaagtgtggctttcgaagcttaatgattgagtttattttcactgggatntatgggagtcctcggtggacggtcgggaa

SEQ ID NO: 29941 - DNA, 275 bp, Gossypium hirsutum
  Clone ID: LIB3083-061-Q1-L1-A11
ccgattcccaagtacctaactggttgcctttgtgggccaattagcaagctgtgaacgtaagcttgaggagatgggctgttggtacccggtgatgtacgatccggatactgaggtgttcatatacgatttcgtgactcatgaatggatacaaggtaaggatatgccttcaaaaagatccttctttgtaatcatggcatgtggatgtcagatttttgttgcagtcgggcatgaccagaacaagatcgtgtcaataaccgcttgggtttaccatctga

SEQ ID NO: 29942 - DNA, 414 bp, Gossypium hirsutum
  Clone ID: LIB3083-061-Q1-L1-A12
tgaagatatagcacgacagtcactttccaataactggctgaagtatggagctaaaggacatcttctaaatgctggcatttgtcaactgtgcaaaggtgatgttgcaatcaccaatgcattacagcggtatcaggaactggatccaactttttctggaacacgagaatataaatttttagctgacattgcttcttccattgatgaggaagatgtcacgaaatttacagatgttgtcaagggaattgacagcatgtctccattggattcttggaagactacccttctactccgtgtgaaggaaaagctgaaagctaaagaaatggaagaagatgatcttacctaaaagaggttcatgtaataacagctttgttttttctttttctttttatctttttcaaaattgatgattgcttt

SEQ ID NO: 29943 - DNA, 223 bp, Gossypium hirsutum
  Clone ID: LIB3083-061-Q1-L1-A9
gaacttctggtgttgtttaaaaacaatgtggagtcaaatagcctgttggattcagtttctttttttatgaagggtatgggataagggttttcgagtgataaaccccagatttgggaaggaaattataatcaattagaggcttttaagacaagggaagtttgaatgagcagtcgccctctggctccgaatgaagcttagtgttcggattggaatcaatgaagtt

SEQ ID NO: 29944 - DNA, 161 bp, Gossypium hirsutum
  Clone ID: LIB3083-061-Q1-L1-B11
ggaaactcggtaccaatgtgcccccaccagctaggaggagagagacttcaacacttcacctctctgatgaatatttgagcttctggtacacttgcaagaaacaactagagaaagatgaagaagtttacatgcacagaagtgaaaaggcattttgcaatttc

SEQ ID NO: 29945 - DNA, 304 bp, Gossypium hirsutum
  Clone ID: LIB3083-061-Q1-L1-B12
catctctgtgaaagaaggttttgtgtatatagtgtgttgtttggaaggaacgatggaccgctatggacaataattaaacatggtgtactacatcaacaaacgactagacaatgatgaagaaatttacatgcacatacgtgaaaatgcattttgcagtaccgattgctacactgagcacattctcccctacgacgatatgcacaaaacttgcaataattcctcatccgaccgttcttcagaactgatcaatgatcaacatgtctcactaatgcctatgtccattaacatgtcacgtactattgcc

SEQ ID NO: 29946 - DNA, 267 bp, Gossypium hirsutum
  Clone ID: LIB3083-061-Q1-L1-C11
aaaaataccagccactcggaatccttgaattgcgtgtctttcttagcaaaacaactctttgtcttgtcttgtcttgtcttgtcttggcttgtctcgtcttggactttaaataacctaatctaaccgcctacaaaaataaaattcctcaaccaagtccctttaatatctcaaaaatgaagctgctttttttctgcttcttgattctcctatcctctgctttctacacgcccattgcaattcatgtgcccgacgcccatagcacctgaa

SEQ ID NO: 29947 - DNA, 118 bp, Gossypium hirsutum
  Clone ID: LIB3083-061-Q1-L1-C12
ttactatcctcacattttgtctgctattattgcgcgcctttcttaactagccttcagacatcccacatcctatcttcctttaccaccttactcttatactattctatatcattcccaa

SEQ ID NO: 29948 - DNA, 146 bp, Gossypium hirsutum
  Clone ID: LIB3083-061-Q1-L1-D10
tcaaattccaattaatgacatcatcattcaaacactgaaattttttaaatatacatgctccaattatttctgttcactaatcatattatgaccttttccacatcatttatatcaccattttataccactttaaactcacttcatat

SEQ ID NO: 29949 - DNA, 314 bp, Gossypium hirsutum
  Clone ID: LIB3083-061-Q1-L1-E11
tagaagattttccttatttcatacacaaaaccaacatcgataatcttcatcttctcattactccaaacacttatacccacacttatgtcattccacacctaaacatcttcttacatcacccataatctactcctattcataacataccttacttaaactctccatacctggatcctacccctcacatataccaccttcttctctaactctctttacatcatatctcattatcccatccacactttaaccacttccctatcccatccataccttttaaactatatcaaccccaatcaatatccaccacttaatct

SEQ ID NO: 29950 - DNA, 422 bp, Gossypium hirsutum
  Clone ID: LIB3083-061-Q1-L1-G11
ttttaaatcaaatactataatagtattatactagcggaaaaatacagatgcttcacggtgtctatacctctgaaaatttcttgcatgacaagattcagaagcatttgctatattctttgggttttttaaaggctcaaacattactgaccaaggaactacggttgatgacttcagtggaaatcaagttgataaggtcaaaagaactgaccattaagtaaaacatcaacattttaccttcaccagtcatgatgcatccgtaactttgctcacaatagctactgcaagctttacaatgcttgattccggggattgccgaaaccgttctatcaccgggaacaactccgatgaacgaaggaactgtcggcaatttggatatgcgcacatctttcccagtgagaaaagagctatctttaatggtgact

SEQ ID NO: 29951 - DNA, 252 bp, Gossypium hirsutum
  Clone ID: LIB3083-061-Q1-L1-G9
agcgaaatcaaaacacgcccaaaccttaattccatggaataattaaaggaaatagcctacaacataaccaaaattatccgttcgttctcctagttctccatctgatcactaccctactctctcaaccccaaaccataactcccctatccaaactactatacccaacacacaccgaccttatcaactatcgtttacgaaactattcttccctcctccctcactaaatacactcttaaccacacatcctctaac

SEQ ID NO: 29952 - DNA, 416 bp, Gossypium hirsutum
  Clone ID: LIB3083-061-Q1-L1-H11
cagccggtgatgaagatgatttcattgaggtcagaggaaagaggcaagtgctgaatgacaggcgtgagcagagagaaaaagaaatcaaagctaagtctcgggttgcaaagccaccaagaaaacctcgttcaatcccacaaagctcaaatagaaattctgcttcagcaagtggagtaatgaacaatgttcgctctgatcttgattgcactgaaggacgaaatctggcaaatagtgaactatcaactgcattcagtgcaactatagtatcccagcccttggctccaatcggtactactgcgactaaaactgatgcacaggctgatataagaacgcaagcagtgaagtcactccatacaagctcccttcaagccacctcaagtggtggacaaagcctggtatcaggattgatgtttgag

SEQ ID NO: 29953 - DNA, 275 bp, Gossypium hirsutum
  Clone ID: LIB3083-062-Q1-L1-A11
ctcaggtttaatcgttatcatcaaccttttggcattacggtactttcctgttctttgtctctcacaagatttttatttcttctactttgttctacagtggcctggatcatactgctacacgaaacatatatgttggtacccgaatacggtaaagccttccgcggattttaggatccatggactttggcctaatttcaacaatggttgctaccctttcaacttggaccctaatcaatcgttcgacaaatctcagatatcaagccttattgggaatc

SEQ ID NO: 29954 - DNA, 336 bp, Gossypium hirsutum
  Clone ID: LIB3083-062-Q1-L1-A9
cataagatgaaacatcacaacatccaatgaactcgaatggaaataccttgccaacttttatggagcaagtaaatcacctgaaaaaccccatgagtttctaaagctttttagcataacccaacatgttgctgatacaaattccaacaatggatcatgaactcattgtatgagactcagtgtatagttctttgtcttggcttaaaattatggacttgaagacacatcctgattatgtggagatccaactcactccaactagaaccagctatctttttctctttttcgtgtgaatagaggttctctcattgtgtcatttcatctgattcggtttatcat

SEQ ID NO: 29955 - DNA, 349 bp, Gossypium hirsutum
  Clone ID: LIB3083-062-Q1-L1-B11
cttagtaagggatttgatggcatgatcacgttgttgagggaaaaagaaatcggcaaagcaaaactgttgatcaaagatagtggaagacctaggtttcttgaaatagccttatgaacattgtccgtacagccccctggtaaagtttcttcttagttatgttacttggacttggatgtgccaggattcaggaatgtgtcttatgtgggtatgcttaattttttaaaatcttttcaatgtatttggagaatatgcgattagacacagtgtgagagacagatactttaagaaaaaacgaagtgctggagtaacatagcttcttaggttcctactttcctatatttttttgagc

SEQ ID NO: 29956 - DNA, 191 bp, Gossypium hirsutum
  Clone ID: LIB3083-062-Q1-L1-B9
cttatgtccattcccccaagaccccaaccataccatcagcatcactgtccaccaacatatagcatcactacattttatccatgcctctcaactgcgtagctcctaaacccgaacatgcctgcaatggactagtgcagtcagagacgtctaaatctcagaaaaaggcttcccttgcattcccaatacaacac

SEQ ID NO: 29957 - DNA, 375 bp, Gossypium hirsutum
  Clone ID: LIB3083-062-Q1-L1-D10
taggtaagatctgttgatacctatctctacgttgaacgaatgagcacattattttattccctgttttatacgattcttttataactatttaaggtacaaattatatctgcaacaaccttaatgactactgaaaaagctactaaacctacttcacttccttcatacccacaactcattatgaacgccattgaatcattttaccacaagaattattctaactagacattattatccaaattcattcaatccaagtatgcatatttgaatgctgctcacacttctctgctttctcaccagcttattggtattaaacataccagggaactagtcttattgtataacaattacattagaactcaccctaattcgccacct

SEQ ID NO: 29958 - DNA, 228 bp, Gossypium hirsutum
  Clone ID: LIB3083-062-Q1-L1-D12
ctaatacttatcgaacgttttgcaagcgcaggaatggggtgctgaacaaagcatactatctggaattcctttgtcatgcacaaattgctcttatcaacttctacacccgtgaccgcctctacgagtactacaacaacaacataatatcaacaatacttaggtacaatatggcatgttacgagtcctgaaacacaaataccgtaacagaaatcaatgctcagtattatc

SEQ ID NO: 29959 - DNA, 379 bp, Gossypium hirsutum
  Clone ID: LIB3083-062-Q1-L1-F12
gaagggttgaaattgaatcacgaggtcactgattcagggtctactgtgaaactgaaagatgacatggatgaagaaaatggttggcaattggattctggagaccttctgtctaatgctgaagggttgtcacaatctgtaagcaagaaccatttgccttcaaatatgccggaattgggaaatactgatggggtacctgatgtgaacataggaatgcctgatgctcatgatcagttgacaactactgtaagtgagaaatccaagtccaccggttcatgcagaagtttagtctccaatgatgtgaaaaggacccctcagctaacaagtgatggaagctctgattcagattctgattctgaatcttactctggctctgaaagtg

SEQ ID NO: 29960 - DNA, 244 bp, Gossypium hirsutum
  Clone ID: LIB3083-062-Q1-L1-H12
aattcccgagacacaggtgacgagctgattaggggcgcaatgggactcctaagcttattgaaatcctacaatcagatcaggctcctttatgtagaagaaatctcctctgaaaataaatagaaattttcagcaagtcgtctcaagactgacacttgcggtatgctaaagcacagtgacatctttctcagttgagcgtcaaccggaattaaactgccttactgactagctgaactagattgacttt

SEQ ID NO: 29961 - DNA, 342 bp, Gossypium hirsutum
  Clone ID: LIB3083-063-Q1-L1-B7
gaaaaaaaaaatactacattgaaaaaggcatgtgccaaaattaacattaaagttaaactcggatattgagaaaaaagaaccctattaaaaccaaacttacttaagtaccaaatagtatattaaccctattacttttgtctatcttgttttcccttgtttgtaggaaacttagtaaaatcatatctaaaatccaagcagctgaacaacctaggttgtgtttagcagtgaagtgggtaaggctggaatgtggttcaagatccaagcaactggtctgatttgcaagtgaatgaatggacacgataaaaccccatgaacaaaacataaataacagtttttctaaat

SEQ ID NO: 29962 - DNA, 425 bp, Gossypium hirsutum
  unsure (1)..(425): unsure at all n locations
  Clone ID: LIB3083-063-Q1-L1-C1
cgaaagtctattcatatatcagnnnattggttttgggtcttttaccttaatggcaaaagagaaattcanngttgctatttaatgatatgacnccaatatatcanntatcttgaccctgattctnnttggatcccagaataatnnccgaagcganntgagttggttatttagtgccctatagtnntattagcttatactnnngtggtccgcctcattttttttnnttgaatcnnctaagcnctannaaaaacnnccaacganggtcgcaccacctannagcatnaagcaattatttatcaannaatgatcanatnncaaatttttaatttanacncnnttataagaatttaagaaaccctgctcnaatttttttaaatttttaatnggttcaatcannaaaaaatcaaagaaatttgtccattttt

SEQ ID NO: 29963 - DNA, 298 bp, Gossypium hirsutum
  Clone ID: LIB3083-063-Q1-L1-C10
aaaataaaaatgtcttattatttccccccttttcacggagctgactttttataaatatatcaaaatctgttcaaatcagctagatttcaactgattttgaaaccctagcatttggatccatttcgagttgtagatgtgaagcgaacttttctctttgaatagatatttctttttttggttgcattttgtgctgtaaagtggtgcgactaagtgtttggatcggagatggaagaggttgccggcgaagcggcggaggtaagaaccaatgtgaggagtgagtcgccgatgaggatgacat

SEQ ID NO: 29964 - DNA, 311 bp, Gossypium hirsutum
  Clone ID: LIB3083-063-Q1-L1-C12
gatactcacaagatgatttgctcggaagcaaacaaaggagaactcggttgttctgattcatgggcatcagccttgattgcagaacttgatcaattcaaaaacgaaaagaccgtcaaccgaagcctcccaggttcttccattgagattgatatcatggacgattttcttgagatggaacagcttgctgctttgcctgcaaccaagagtaaaaaccaatgtcttgaatcgaaagctactgccaaagtatctaataacgatggtgataactcgttgttgaaagctgagcttgaagccatgattcatcgaacaac

SEQ ID NO: 29965 - DNA, 304 bp, Gossypium hirsutum
  unsure (1)..(304): unsure at all n locations
  Clone ID: LIB3083-063-Q1-L1-C2
atggccgccatggcatcagactctgaagattcatacaggagcagtggccatggaaagctcaacaacaaagtgcanagctttcgtccttcaacgccccctccaacttcggttaattaccgaactgccaaacgaagaaaggggattccccatagagccccaatgggaggactaatcatacaatattaagccataaccatacccatagagctcatcctttttgtcctcgagttgaagtataattatcctaatagtatttgccccacagatgcacaaaatcatggtgccacaatgccccctaatgttt

SEQ ID NO: 29966 - DNA, 245 bp, Gossypium hirsutum
  unsure (1)..(245): unsure at all n locations
  Clone ID: LIB3083-063-Q1-L1-D11
atattataacactaaaaccaccttgccannctccnaattgatctcaccttttactaaaagctcccctctgtttctcacacaccgacacttacaatccaccatttttttctactaactagaaatcatttcctatatattcttcaaaagaaaatcccctattaataacacaacttcttcttcttcttcttcttcttcttcttcttggatgtgatatgtgatttgacccacattgcctttgncaactt

SEQ ID NO: 29967 - DNA, 186 bp, Gossypium hirsutum
  Clone ID: LIB3083-063-Q1-L1-D2
cgacactgtcttccgtgtaaagctatatacataccattagacggggcggagactgattgcataactactctgagtacataaaccataatttgctctaaaaacagaaaatcagcatataaatctctctaaaattacgcttgcctggaatgttatcacgcaacaacagggccttactttatctgatat

SEQ ID NO: 29968 - DNA, 224 bp, Gossypium hirsutum
  unsure (1)..(224): unsure at all n locations
  Clone ID: LIB3083-063-Q1-L1-D9
accccaaccccttggaaattttcacagcagcggcataactcaaatggtcaagcaggtaacanaagctcaaataatataggaagaaaccattcctcctcttatagtgctgccggatttactagtcatgattcatatagtcaaagcaacttccagtggggtcccttttctaagacaggtggtacttcaactgcaactcaagctgctagtgtggttcagcaggcata

SEQ ID NO: 29969 - DNA, 324 bp, Gossypium hirsutum
  unsure (1)..(324): unsure at all n locations
  Clone ID: LIB3083-063-Q1-L1-E12
ttttttttttttttttctnttttttnnttttcnnnnncnncnnnnnnngnggggntcggtttattttttttttttaaaaaaataaatatcactccggtgataccataaaaaggctttatacaatttttaccccatgaaaaacagaacacttttttgtaaggctattcatgtttttatggaactttataagtaaaaaacaagctttttttacaccaaaaaaatgaccagccaccctgacttaatttattccctaggcctaattttaaaaacctccccccaataaaaaagaacaggattcccttacagggtgaaccctttattttc

SEQ ID NO: 29970 - DNA, 303 bp, Gossypium hirsutum
  unsure (1)..(303): unsure at all n locations
  Clone ID: LIB3083-063-Q1-L1-E4
ggacaaacagagcatggggtcgatgtatttcaatttcgaacattanggaatgaaaaaagaaaaagaaaagaaaacaatgaataagcaaattgtcaccttgatatatccacattgaccgcaagacaaaatgcagatttcaaactcaaaaactgaaattgtatataaatctgaacaggcaaatgcaattttaaatcacgcttgggaatcggaattaagtggatctgccttgccatggtggaatcttactacaatgcatgttatattgtcggcactccctcgagtaaacgcagtttctgtcaactt

SEQ ID NO: 29971 - DNA, 359 bp, Gossypium hirsutum
  unsure (1)..(359): unsure at all n locations
  Clone ID: LIB3083-063-Q1-L1-H12
aaattcggcacgaaggtctcgagttttttttttttttttttttnnttttgggattcagactttgctacaatnnagaataaacattgaagagaagaatggtgaagcttccaatctatatatatggatacatacatatacaatataaatatgtatattagaaattttgggaatgaaaaattgacctttgattgtatctctgcagaattgactacttaaaactatctgccttcctttgtcatcaattgtgaaaatatttggcctgtcgttaagtctaaactaccgatcggatcatctttctctgtttcgttattaccggatgtaagaataatactaggtgttggatgatccattccattcat

SEQ ID NO: 29972 - DNA, 254 bp, Gossypium hirsutum
  unsure (1)..(254): unsure at all n locations
  Clone ID: LIB3083-063-Q1-L1-H3
ttnccccctcanngtttgacaattttcacatgaaaattgaattacaatttcaattattacaaaaaatacacaacataacctttataaacaaaaaccagtaaaataacttgccttttttgcaatcaaccatttttaccactatcttgccacctttccgttccatcttgtttctcaccatcatgaacaatacggtaagaatccctgagatgatacattcacactatactatgagggtccccgatccaattacaaac

SEQ ID NO: 29973 - DNA, 325 bp, Gossypium hirsutum
  Clone ID: LIB3083-064-Q1-L1-A5
gctttttcaatctagctaactacacattctcgagtggcttctaagcggctttcgattgctctctctgttcttgctctcattgcttttggttcacctgctgcagattcacatacactatacactgtcaatattctccaagacactgcacttaattataactattgtgtatatgactcacacatatcaacagactatactgtcaccacatcaatgttccttatggctagccaaccccttgaaacggctgcaagcaaatgcttctgctcacgaaaggttttaatccccactgaatcaagggcctggacacacatccttttcatagtct

SEQ ID NO: 29974 - DNA, 372 bp, Gossypium hirsutum
  Clone ID: LIB3083-064-Q1-L1-B1
cggcacgagaatatattggtccccaagcaacaagtgtggtttccattttccaaacggaacccagagtggaccttcaatgtcgagtggaaggaagaaaaacaaggaattggcttccgataactctccggaagaaaaacggcgccggcatcagggaacctctgataccgatgtagcatcgacttccaagaaacatccaaaaccgaaaataaaatataagctgaaagagcttatcgatgagaaacctgtggagacaatcgtgaaagttctgaaggatcgaattgacagaaagatgaagaacgacaagatggcagacatggaatctgttatattggtagttcgaacgatgatggccaataatgcttctcatctatt

SEQ ID NO: 29975 - DNA, 354 bp, Gossypium hirsutum
  Clone ID: LIB3083-064-Q1-L1-B7
aaattccgaaactttcatggctgaacgcgaaaagtccattccctacgaatcttccatggcaaagatcacgatagaagatccatggctcatgattcatcatcatccgcacatgataccgattaccacaatcaatcggaatcttacttcaaggaccaggtgtatcgaatctatggaaaataaaagcccgtccaccatgttctctgtgtagccaaaccggtcgacatttatactgaacccaacaccatgatttcagcaagatcccttgcttacgcacctgtgatatgaccctagaacgaattgcttgaatattacctgctcactctaatgtgtcacttggtgctactcactgttgca

SEQ ID NO: 29976 - DNA, 394 bp, Gossypium hirsutum
  Clone ID: LIB3083-064-Q1-L1-C11
tacagttgcactagaactaacggatccgtagtgctgataaaatcttgtacgagatgaatttctacatatacaaatatggtgctagataaaaagggtaaatagatgaacatcaacgaggaagagaacaagaaccctaaccctaacactaaatatgaataatatggtgaacttgaagaatgttagatcgcagtttaagaagatgatacgacattctcttctttaaagaaaggtgtcgtctaacagtctgaccagttacagcattcatggaccttttagtatgataacgcttctgctataatcaaaacaagctactttatgtatttctatgcgcgctatttacactttcttcatcttctaacaattctggagtttattcaattacatacatcatcca

SEQ ID NO: 29977 - DNA, 392 bp, Gossypium hirsutum
  Clone ID: LIB3083-064-Q1-L1-C12
cttcttaattacatttctaatcattcattgcttacagggacaacatggagcttatggtccaagtgatttcagaagagattgtaaagccatcatctccgactgccgatagactgcgtcgataccaactatcgttcctagatcaactaaatgcctcgttctataatgctttggtctatttctacccaaaaatatgcgacactgaagccaacaaaatcacagtttccaatcggttgaaacactccatttccaatgccctcacctatttttacccactggctggtcggataacggatgaccagttgtttgttgattgcaacgatgaggggataccctttttggaagttggagtggagtgccaactttcagatgttttaaacaatccaattcccaaa

SEQ ID NO: 29978 - DNA, 342 bp, Gossypium hirsutum
  Clone ID: LIB3083-064-Q1-L1-C5
gtacagcggatgtattttttcatggagaaggtggatatgatcattgcacgtctttgggcatttcttttaaggctgacacgattggaaaaacttttgaacagaagattaagagaacgacatatgaaagagccaaagaaggatgatgaaattaaccctgaagcagacagtgaagatttgtatgttgaacggatccgtcttgaaaatatggacctaagcatcaagaaattggtgagcaagactacaatccaagagcctacttttgataggattattgttgtctacaggagagcaagccccaaaccaaatacggatcgaggaatatacgtaaaacatttcaaaaat

SEQ ID NO: 29979 - DNA, 369 bp, Gossypium hirsutum
  Clone ID: LIB3083-064-Q1-L1-C6
ccattgtcaacttccaattgtaattgtgtagcttgcccctcacagctctccccttcctttccccctctctttactttttatttatttattttatattttatggtgttattatgatttttctgtgtttaaaaaagacagagccttgggagcgaaggaatcgaagattgggaagttgatggaacttacagtagtagcagttgtagaagtagcggatgagtgtgtattaagttaatgatgggagttgtggggagctttattctgctgctctgttgcgagactccagtacaagtggaagcgtattcatttagaacttagaaacaatgtacagcttgctggtcatcttacagaacctttggaaactcctctttt

SEQ ID NO: 29980 - DNA, 277 bp, Gossypium hirsutum
  Clone ID: LIB3083-064-Q1-L1-D10
gttcttaattacatttttaaccggagattgcaatcaggggcatcatggtgttgctggaacatgtatagtggcatgatattgggatggcataggatcaaagggctgataaacttggtggatacgaactattactgcctggagtacactagattatgtgtaagaatggaccttattgaaaatcttacacactgatttgcgaatctttagcgtacgatcaaacatttttcaatggggtcgatcgctgcaatttcaaagaccataccgattaggacccaat

SEQ ID NO: 29981 - DNA, 264 bp, Gossypium hirsutum
  Clone ID: LIB3083-064-Q1-L1-D4
gttaatttgatggtgatgtaaagcttgttgttgtgttatgatgatgatttatattgtggggaggggggggggtgtctaagggtcatgttacgtttgtgttgatctcctcatcccctttggcactgatgtcttacaactccattccatttatttagctgactctcttggttcaatatttcatccatttagtgttcatcacatatagatgtttcaatggggggatccgctttcagtataaaccatgtatgccattcaagttatatg

SEQ ID NO: 29982 - DNA, 300 bp, Gossypium hirsutum
  Clone ID: LIB3083-064-Q1-L1-D6
caaaaagccaccggaagatgaagagggggacggatccatgccccgtgttcttcaagagagagttcattcgcacttgacctgtcctaggtgcattcgacttcaccgggaccatcatcacagagtgctcacttgaactaaccgaggaagatgctaagaactctccctttgctcagacacacacgatgcgacccagcctagttcaatggcctatatcgtagcagtcactagcaatgagaggctcaggagataacctcagaacttttaccaagtgaacaagtgtggctgacaccattacatcat

SEQ ID NO: 29983 - DNA, 308 bp, Gossypium hirsutum
  Clone ID: LIB3083-064-Q1-L1-D9
cttaatttcagaggtttcgcacgataaagctattcaccggtgtttcagcatgaatgtttgctgtgaaatgtcgcttctaatcagcattgctttgcattgctgttgcatgatttttgggtcaagctcctactaaatctcctacgtctacgccctcgcctcccacaccaccttcttctactactgctacgactactcaagctacttctacaccaaccgtcactccgtcatctggttctatctctactgccactttattaccgttcccagtgacatcttctccacccccaattacaacttcttcacccatt

SEQ ID NO: 29984 - DNA, 278 bp, Gossypium hirsutum
  Clone ID: LIB3083-064-Q1-L1-E1
cttctatagattacctgcttagcaataggtttggtcgtaagctgatggattcaacccaaaagaccaaacctatccgcatcaagtgcgatccatcaaaaccaaactctgcttggagctggttggagaggtggatgtctgtgtcattgtctaaaaggccatcgacaacagagttatccatagaacaaccagaaagagagaaaagtgacaattgtgactttcaagttactactacagttcctgaatcgtttcctgagtcaaatgagccaaagttatatgta

SEQ ID NO: 29985 - DNA, 327 bp, Gossypium hirsutum
  unsure (1)..(327): unsure at all n locations
  Clone ID: LIB3083-064-Q1-L1-E10
tggacatctagagatagcacagtacgtattgtgtaaaggtcctgggggtgcatcatggaccgataagcagggccagacatgctctacatactcctgctaaaggacataatgacctaagtcctggatgcctaactataaggcatatcattatttgataaacatgggtgatgctaatggcaactctgattactatataccatctcatacggctcgactacacatatcggaatagctatttaatgacagtggacttatcctacttctcatctaaaagtctcgccaaacagctcatgactattcanagaaggataaattatctgacattgc

SEQ ID NO: 29986 - DNA, 310 bp, Gossypium hirsutum
  unsure (1)..(310): unsure at all n locations
  Clone ID: LIB3083-064-Q1-L1-E9
gaagaatgangaggtttaagatgaatatgaacaattagaagatgtagggatagaagagaagagggaccaagaggcgtaagagaagaagtagaacgatgaggtagaagaatatgaagaagaattacaagaacggaagaacgataagatgaaagacattgaggcgaaggagaagaagaaaggacagacgaagaaggatgaagtacaagaagatgaagatgaagaattataagagggaaagaaagaaaagacgaaataccaataggcgaacgagaataagaaagaatagaagaagaatgatgaggtacaagaa

SEQ ID NO: 29987 - DNA, 364 bp, Gossypium hirsutum
  Clone ID: LIB3083-064-Q1-L1-F7
catcatcccagtattgacatttttgaagcattcgactagctgctgcttgtgaaacgaggaggtcgggttatatacggagggaaacttggagtgcgctcgcagattttgatagactatttccagagcattgatggcattccctttattcctgatggatacaacccggccacctggatgcttgaggttacaaaccctgcaatagagcatagaactgatagagactttgcagatatataccaaaattctgaacaatatagggaagtggaaggttccattacacgtttgagtgttccaacacctgattcacaacctttaaaggtttcttccatctattcacaagaccaactgtctcagtttctgattt

SEQ ID NO: 29988 - DNA, 214 bp, Gossypium hirsutum
  Clone ID: LIB3083-064-Q1-L1-F9
ctgaatgctaactcaggctggacagcgggttctggcaatagcgagacctcgtcatctgaaccataaccctgtcagcgtactgattcttgacgtaagaaacaacatcacagggactatctgcttcagcatgccttcttgcctgcctgttacaagaaccagacggcctgactcctatcacagctgtacttcttgacgagatcctcctacccaaccc

SEQ ID NO: 29989 - DNA, 351 bp, Gossypium hirsutum
  Clone ID: LIB3083-064-Q1-L1-G11
agtttataaagaacgtgaaaaagggtccgtttgcagagcattcgccactgttaggatgatatcagtgcagttcctaattggaagaaggtgaatagtgcgatgcttaatatgtatcaagctgacgtgctcgaaaaggtccctagtatgcgatacttcctttttgcctgcctcattaattgggaatgatcttggctgcatcttaatggacacaggctggggcaccaaaagaatactattttccacctgatttcatcaacaggtgtggaattagaaaattatcctatgatgattctatcttaccatgaatttatttagatgcatctgcccattctaatcatctatacaagtgtt

SEQ ID NO: 29990 - DNA, 377 bp, Gossypium hirsutum
  Clone ID: LIB3083-064-Q1-L1-G4
cagttatggaggtcaaggaagttatggtggtggtaataactatggcaccggtggtgttagctatggtagtgattttggtcaatctggtgtagatggcgggaatttcaatgtaggaggcagtgatagctttgcaactggtggttcgaccgggtatggaggtgactcaatgggatttggtggtggtgaacatgggtacaaaggagcttatgatggaaatgatgccctgaatgacaactcaagagatgaatatgaaagtggcgactttgtcaaaagggcatgaaataaaggtggttgagctttgaggtataatttaatggcggattttttttggattttggtttaactatccttttctacgaactaatcttctttatcat

SEQ ID NO: 29991 - DNA, 342 bp, Gossypium hirsutum
  Clone ID: LIB3083-064-Q1-L1-G8
ccgtaaagcaactacgatggccggtccgtgccagtctcgggctatagacaccatacgaatgcttctaatacatatggtccttcttatgatcatcggcatagcgctagacgtgaactggacacaatacttgaatcataacacaacaccagatcgggctgggcgatgctgtatttcagtgatcgacgtgtaatctctacataaaagaatagtacgactgcgaggatttcctcgacagaatatgtctcaagactattgcgcctacacgacgaccatccgcttgattggcttgagacctataagatggcaattggcccacatttcgcttgagtgtaactggcttta

SEQ ID NO: 29992 - DNA, 451 bp, Gossypium hirsutum
  Clone ID: LIB3083-064-Q1-L1-G9
cgtgtatttagaaggtgaatatgggtccgtttgcagagcattcgccactgttggaggatatcggtgcagtgcctaattggaagaaggtgaatagtgggatgcttaaaatgtataaagctgaggtgctcgaaaaggtgcctattatgcagcactttctctttggctggctcattaagtgggaatgatcttggtttcatctttatggacacaggctgtggaaccaagagaatactattttccacctgatttcatcaacagttgtagaattagaaaattatcctattatcattctatagtaccatgaatgtatttagatgtttctgcccattctaattagctatacaggtgttgtcactgaacccccacctcttttccttttttttctcttttttggatgaaaagtcacaggttttatttaaatgcttaatgcatggaacttatgttttgccat

SEQ ID NO: 29993 - DNA, 131 bp, Gossypium hirsutum
  Clone ID: LIB3083-064-Q1-L1-H7
ttatctattcatacaattaaactcctctaaggacaatataaaattctcacacacttttaattcatacttcataccacatcacatcaatccacaaatcactgtctcacaccgaactatatcactacccacat

SEQ ID NO: 29994 - DNA, 289 bp, Gossypium hirsutum
  Clone ID: LIB3083-065-Q1-L1-A11
aatatatgcacattgtgcaatgtacgtgagagagactaggggttctttcttgtttttggaggtattaactaaatccagaagcatattatccaaggactcttaccggatcgccaacatgcaacctaaagacaatcagtttgcactattgtacgactaggaatccgaccgatatgtaacttacatgtcatgcgaaaaggtttacatcataggattagatgaaccggactatgattgcttgtagggtcccccaccttattataggacaaagctattgcttttaaccgacccg

SEQ ID NO: 29995 - DNA, 166 bp, Gossypium hirsutum
  Clone ID: LIB3083-065-Q1-L1-A12
atgaaacagattagaacgaatcaccatgcttagggtttgagcagactagtgctaaagctacagatgagacttgtgctgatggtactaactgatatgcccgaactcttaacagatgtgtaaatctctgaaacggtgcaagacgatactaaagactggacagctggtg

SEQ ID NO: 29996 - DNA, 249 bp, Gossypium hirsutum
  Clone ID: LIB3083-065-Q1-L1-A5
ctaatttttttttttttacttcaacctctatagatttttggggtatattatatattgtctatcttttacaactttctttggacttattatattatctatctacacaaagaaaagaaaatcacaaataaatatacaccaattgccctcgtactgccctctctttttctctgtgcccctttttcgctacgttcttgcctgctacattttgaatttgctcgtctttggcacttactttgtgcataggtttca

SEQ ID NO: 29997 - DNA, 350 bp, Gossypium hirsutum
  Clone ID: LIB3083-065-Q1-L1-B10
gtgaaatcatggataaagactagaatagacagactgaaggggtgggttgacaggaatctacaacaagaggtatgggatccgcaagcgaataaagaacgatttgctccctcttctgttgaagttttgcgaattgtagatgaagctttagaagcattctttttgttaccaatatctatacatgcagcattgcttcctgatttaaccaatggtatcgatagatgtcttcagcattatatatcaaaggcaaagtctgactgtgggacccggagtacttttgttccctcaatgcctgctttgactcgatgttcatcacggtcaaaaaggttcgggttgaatttaaaaaaaaggag

SEQ ID NO: 29998 - DNA, 407 bp, Gossypium hirsutum
  Clone ID: LIB3083-065-Q1-L1-B8
gaactttgacaaggttgatcccctgtgttcaggttacagggcacatatcttctctagtgcatcacttgaagatagttttagatgggaaaaatgatgagctccgaaaagatgctgttgatgcactttgctgtctggcccatgcccttggagaagacttcactatttttatcccatctatacacaaacttttgttgagacaccgcttgcagcataaagaatttgaggaaattgaacgtcgtttaatgcgacgtgaaccattaattgtggggagcacagcagcacaaagattaagtcgacgacctccagtggaggttgttagtgacccactaaatgatatggaaaatgatccttatgaagatgggaacgatgtgcaaaaacatcctagaggtcaccaagtcaatgatggg

SEQ ID NO: 29999 - DNA, 396 bp, Gossypium hirsutum
  Clone ID: LIB3083-065-Q1-L1-C2
gaacagaataagcccaatgggtcgacgggctgctgaacagttcactcgcagattgtcgtgctgtttccttctaatatggacagaaataggaaggatgtttttacttatccgaatggcttgtaaagctagcggagctgcactggacttgatgaagttattcaaaggtggatcaagcgttgtacgctacgctccatatccggattcagaggtcgtgacgtttgcataagaggactgtgaaatactcgaaacttgccaaagaacagctatcctatacatcagcctccttcggtattctatgcctctgttgagctctgatcgatccttcgaccactctatctgatcgctacaggatccatgatacactctatgactacaattctcgagatactgggatat

SEQ ID NO: 30000 - DNA, 364 bp, Gossypium hirsutum
  Clone ID: LIB3083-065-Q1-L1-C5
gatttttcatggagtaccatccttctacatagggttcacgtatggttgttcatagatcacgcaaacttcaaagtctcattaaggatgcaaaaaaattatataaaaggactactcacttacaatcagaacccaatcagccgcagtataagcatgttggggtatttctgcacagggtcgatctggaggatcattatggaaagaaatcataacacataaaggagaatatgatattagagcgatctgaaacttcattggcgacacaagaagctcaagcagcttttggcgctttcaagtctcgtgattgcgcagtacatgcttttcacatgaaacaatgaatttacccaacatagtgggccacagaact

SEQ ID NO: 30001 - DNA, 424 bp, Gossypium hirsutum
  Clone ID: LIB3083-065-Q1-L1-D4
ggattcccgacccgaccctacttcatggaccggcgtcacgggcgacgcgaattctgattctatcgtttccctcaacttagatcgtctcggccttgtcggagacctcaagttccacactctcactcccctcaagaacctccaaaacctctccttgtcaggtaacgctttcacgggtcgggtcgcacccgcattggggtcgataacctctctgcaacatttggatctgtccaataatcagttcatcggcacgatccctggccggatcatggacctttacgagttaaattacttgaatttgtcgggtaacaagttcgacggtgggttaccggctgggttccgaaatttacagcaattaagagtgttagatttacacaacaatgcgcttcgaggcgatataggccagttattcactgagttaaggaat

SEQ ID NO: 30002 - DNA, 395 bp, Gossypium hirsutum
  Clone ID: LIB3083-065-Q1-L1-D9
ctgaaaccaataccctgtttgggattaaatattctttccaaaatacctcaaaaatcaatctgccagagaaatctcacgataaagtgaatacaacctatctagaatgttaaaattgacctttgccctgaccatgtctaatatatggtgaaaacttaagttacagctgctcagtgcaaacttcagtcatctatctaggtgatataagcaatgcatctaatggataataacctcatttcccaatatcttaaaaagaaaattgataaatagctctaagctgtttacctacaggttttactctctttctcaatctcttatttcttcaattcaaatggcaaatatatgatagttatgacctactaataatcatcagagccattgtcaacatataagccatt

SEQ ID NO: 30003 - DNA, 417 bp, Gossypium hirsutum
  unsure (1)..(417): unsure at all n locations
  Clone ID: LIB3083-065-Q1-L1-E5
cttgcagagagaagaagagctactatctagtgggtggaaggaatatgctgaatgctgtgaaggtccaagaggacgaagtagttctggcaagaagttggacttgggagaagattcatcttcttccaagggtttgcaatcagcccaactatatgggtttgaagaagagagggttggtgtccctgtaaagggagggctctatgaggtagatttagttaagagacactgcttccctgtttactggaatggagaaaataggcgtgttttaagaggtcactggttcgctcgtaaagggggagtggattggcttccacttcgtgaagatgtagctgaacaattggagattgcatatagtaacaaggtttggcatacgagaacattttaaccgtcaggactttntgcagctagagttgatttgca

SEQ ID NO: 30004 - DNA, 414 bp, Gossypium hirsutum
  Clone ID: LIB3083-065-Q1-L1-E9
ctgaaacagaaagaaatgagggggaaaagaaagagaccaggatagtatagccagcacccacattcactatagcacagatgtgagtgagatatttccttgggggttcatacaccgtaaaatagtgatgtgtcagctctgcattttaaacaaattggaaacagttgaaacctctggatttttgctttgctggaactaaaatttgagaaacactctactactagattttcaagctattattctatttctgagaaaataaatgaaattcccatgaatccagaaacctggtcttcactttcacacttagttgagctagtatatggatggttcttgtacttctaacataagcattcctactcgttaataaaacactgttggaaactttaacgcatggatttgcttgacaattatttatga

SEQ ID NO: 30005 - DNA, 384 bp, Gossypium hirsutum
  Clone ID: LIB3083-065-Q1-L1-F12
aggtcatcagggtcatcttctccagagtcaacaggatcaggtgaaacttccatatcgtctcactttggtggaatgaactatccttcactcttcagttcacgaccaactacttatggggcttcacaaccttcagagagatcaggtggaagtagatttaaccatccttcatcaatgcacgagggttatggttctccaattagagaagaacctccaccctatacatcacctgaacggtatgagtcttttgaaaatcccttagctggccgcgggtcccatagttttgaatccaaggatgatgatcgcatgtcttctggaaatccccaatttgggactgccctgcatgattttactggcagtggagatgatgagttgagcttaacaact

SEQ ID NO: 30006 - DNA, 339 bp, Gossypium hirsutum
  Clone ID: LIB3083-065-Q1-L1-F5
cttataccaatctatattatcacactgtaccgggcaatgggagatacacacttacaaactctacactccttatacaccttactcttgaatctcatactaatacttcaatgtaaaccctatctgacatatctacactttaatcaccacttcttctattttatatctatttgacaaaaactacaatctaacgcactctacatccttctataaccacgtctcttctgactcataacaacatcaatcatacctaaaccatttacatataactctcaccttctacttataaactaccgtccttcatatattaccatatttcaacaaatctatcattcccaacat

SEQ ID NO: 30007 - DNA, 391 bp, Gossypium hirsutum
  Clone ID: LIB3083-065-Q1-L1-G10
tatctatccatgcatcatagagtgtttctagaggcatctgcgtggtgacgagttcaaccactgtttagctttgttcctcaatgaaaagggaaacaaccgaaggcgaatttcatctttgaaacgccattgatcttaaatgtgtcgcaaaactccagaaaattcgtcaaatgagtatttggatcctcatcctgcaaaccatcaaactgaacaaactgttgtatcatttgaatcgtgttaagtttcagttcaaaattatttgcaataatagcaggtctaactatactcgattcggctcctgttaaagtaagtttagcataatcatacatagtacggggagcaagattatgattaattggatctgcagcaaccatattaggaagttgattattct

SEQ ID NO: 30008 - DNA, 310 bp, Gossypium hirsutum
  Clone ID: LIB3083-065-Q1-L1-G12
gttggcccttgcgaacagcttgatgctcttgcggagtgagcccagatgggggaacctaggggagccgccgactccaactaccgtccatgtacgatccatactagatctgaccaaccgcccatcctacctcttctacgttcttgacagcccatctttgtctcagtagagtctttcagtggcatgtttcggtcctcttccccattacttagaaaaagtgagccaccggttcaggtacatgatactatcattaccggctggacaattatacacccaaaccgtattttcaacgacccaattgcaagagcggagc

SEQ ID NO: 30009 - DNA, 421 bp, Gossypium hirsutum
  Clone ID: LIB3083-065-Q1-L1-G3
gctaagcaagcagcctttagtttgttgccaatgacatccagccaactgagtaatcacaagaatctctacctgttcttccgcctttacataaaaaaatcccagtaacagtttttcttggtctttaaagtttgacctcaaagtcctaacactaaagctgtataaaggagaagtttcaaatctcttaatggctcaagatacctcttctgttgctgaatcacctcgacggcgctctggtcttctgcgagaccaggtgcagttgattaaaagaaaagactgtgatcgctatgagatcgttccaatcgaagataaactgtccttcgagaaaggatttttcatcgtaattcgtgcatgccaattattggctcaaaagaatgatggattgattttagttggagtaagcggaccatctggagctggaaag

SEQ ID NO: 30010 - DNA, 418 bp, Gossypium hirsutum
  Clone ID: LIB3083-065-Q1-L1-G6
tttgagtttgagtaacattctcctcgatcttggaagtacgctcaaccgaggaatggtgatatttccatcattccactttgtttgcggattcaaggtcaatcctttcgattgattggccttattccctttcttaatagaatagagggaatggaagtctttccttgtccttccgagataggagttgagagcttcaggcagcaccacagccctaggcgcactagaataggtagcacaggtcacagcaagactgaaatcagaacggtgggacccgcctagcttgcgtaatagatggattttcccgactactagcatgattcatcctactttcttaaacacggcaaaggctttctggtcagatcagataaaggctcaaggatcgcttaatgaaaaaggcattctgccgggggaaagagatcaa

SEQ ID NO: 30011 - DNA, 428 bp, Gossypium hirsutum
  Clone ID: LIB3083-065-Q1-L1-G8
ctagtgctcgaggttttattttttttgactaaaggggtttctctgaaactggtttttgcctaaaacttaattgcatttagggacattgtcaaagacttaacaagctatgcaaaaagaagaagttgaatcaaacaattagaaacatggcaagtgctaagtgctaacatatgaagttggcattaaacaacatataatggatagataaatatttaagaaatggttcaaacaaccgttaccattaattatgagcctcaatctcttatatgttcaacatcatttgttgagccatttgcttccccatgtatagcatcttcagttggtggatgaacctgctactattctggcaatggttcctccacataatcgctctcgaaagcatcagctggaacctcatagatcctaactggaggcttagattgatccttcac

SEQ ID NO: 30012 - DNA, 360 bp, Gossypium hirsutum
  Clone ID: LIB3083-065-Q1-L1-G9
tgaagattgattgatctgatattgcaacttgagggagattgagtttgtttcattacaaggatgttcagattacacataacagaggaaatcggcgaattaccatttggggttcagttttgaatctttgatcatagaaattgttaattatcttagccacctccatacaggttctatggtggttgttggctatgtatacttgttaattggttccattactattttgtttaagacccttgagagattgttgagaaatctcttctagaattgaaggatccatgtattcacacgcataatagtccttgcaattctgtgaagaatggaattcaaatttgtgtcctttatggattataaaagaaatta

SEQ ID NO: 30013 - DNA, 299 bp, Gossypium hirsutum
  Clone ID: LIB3083-065-Q1-L1-H10
cccacttggaaggcgaacaacaactacaacaacgaaagagggggtctctacttgtgaactacttctttccctttgcaacagcagaattaaccctttttcaagccatttgggggggtttttgttttgttttggtttgcattgccttgacttatcttttttgctcattccgatgctaaaggttaagggttttggtttttctttgcttctttgaatgctcatggaataagatcgaagtatgaatatcttaagattctgatattggatactaaaggctgaatattattttttgactcttcaaa

SEQ ID NO: 30014 - DNA, 166 bp, Gossypium hirsutum
  Clone ID: LIB3083-065-Q1-L1-H11
gtataacgatatgtataatgagataaagatgtagggttgcgtgaatgatgatgatgatgaggaagaggagaatgtgacatatacagatatgaagaatgacatggaggcaaaggagaatatgatttaatagatggattaagtataataagatgaatatgaagaaata

SEQ ID NO: 30015 - DNA, 276 bp, Gossypium hirsutum
  Clone ID: LIB3083-065-Q1-L1-H3
gattcgtgcggtatgttgttggagatggaacagtctgcagggattacgttgaagccatgacaaacaggagtgtatgaacaagaggaatgatctaaacgtataacaaagccgttgctgcattaagaggacatcttatagggcactattactcccagtagattatgcacaattagtacagccgaaatgtattatggcttcctgagaccgggaacacttgctgaaatgggtctatgccaagacccttcaggctaagtactggatcgacatgcccttata

SEQ ID NO: 30016 - DNA, 413 bp, Gossypium hirsutum
  Clone ID: LIB3083-065-Q1-L1-H4
tttctttcttccctcctttctttccccaaaatcggttccggccccccgtcccatagaaatcctaaaatttcacttgaaatttcttctcttttctttcccattttattgttcccaaaccatttctcccctaccccgattccctttattttttcccccaatttccccaaattggtaactccatgatgttctctctctgatatgtttgcttattggatgtattgctcggactttatattgttgtttgaaatatcttcactgaaattggtcaattgaaccccttatccatgcccgtcgatcccaacccctcctacgccttcagctccctccgtgatcgtagtatggacattctcagcgtcgtcgtcgctctcctcttcggcgtctgctgtggctctatcactgccgtcgccatttac

SEQ ID NO: 30017 - DNA, 418 bp, Gossypium hirsutum
  unsure (1)..(418): unsure at all n locations
  Clone ID: LIB3083-066-Q1-L1-A6
cggaggagcaattaccggcttcaactacagcgccaaatagtggaggaggatggggtggttggggtttctctgctttctccgttctctcagatcttcaaaaggctgccactgttgcagctgaggagatctctcgcaatgcttctgtggttgcagagaaggctgcaaagagcattgcagatatgcaaattgctgaagagtcagaatcttctaaggcagatgaagcagaagaatctccaagtgaaaaggaaagtgaggatgaggatgacaagctacgaaagtctgctctggataagttagagaaagcaagtggcgattctttccttggtcagggtttgaaggtttttgacaactctgtggaaaattttgcttctggtgcatggcaagcactanggagtgcatggaaagggggtaccaattt

SEQ ID NO: 30018 - DNA, 436 bp, Gossypium hirsutum
  Clone ID: LIB3083-066-Q1-L1-B12
atttgactgccatttcgtattagaaagaataaacaaaggggttctattttgggtgtgaaccaaaatgcaaagaagatcgattttcttcgcctcttgaaacaaaaagaaaatcatagttacatggcagaaaatttccagcaaaataagtttatatcctcccatgtagctaaattgctgaacagctaaacatcagaaagatccagtactgcaactcatgaagttactcaaaattcaaaccaagtaatccatacaaaagccaaatctcatcagtcagcttaggatatcagagagaaaacaacatttttattcaaaggggaaaccatacaggctaataaaacccagatttctagctatatgactgcactctagaccctccaaacaaagtcaatctgaacccgcatctaattcaaatttgatggctcatattaaccatagt

SEQ ID NO: 30019 - DNA, 399 bp, Gossypium hirsutum
  Clone ID: LIB3083-066-Q1-L1-B2
gccaagtgctttgctgtcttctagtagtgccgaaaatatgcgacagtgcatctcttacagggttatcacaaaagtcttctggttttagaaatccaagtgctgatcatgttaaccactcagcacatgattctgttgaccacaaggtagatacagtcaaagagaataaggctgaaatgccctactctggtggtcacctgcagaaaggtgaagatattacccaaaatgacatttcaactgttcctggtcctcatacagtgttcaaacatccaacccatctggtaacaccatcagagatactgtctaccatggcttcatcgacagagaatgctcagattagtcaagttattaatgacagggaggcaaccgttgaagatgttgtcgagaatgatgcttaaagcg

SEQ ID NO: 30020 - DNA, 302 bp, Gossypium hirsutum
  Clone ID: LIB3083-066-Q1-L1-C10
gggggcgtctagatggatcccccgcgaggaattcggcgagtttttttttttttaaacctctacatgggaaggattcgcctgaattccaatacatgataaacttatccggaattaaaaaaaaaaaattgtttatcggctcccatgaccaacaaatgctcagttaccttataactgataaaaaatgcttgaagaaacaaagattaaaaaaggtaattaactgaggtgaattgatcgggagtttaacttaacaaagaccaactaactaaatttaatgtacccaaaggatgtaaattacatactac

SEQ ID NO: 30021 - DNA, 194 bp, Gossypium hirsutum
  Clone ID: LIB3083-066-Q1-L1-C12
gggaaaggaagatatatcgagcccgagcgcaccagagcgtgagccagcgcccttgttttactctcgttaagtataatctgatcattattgatatatgcgacatggagagatacatttttatgctacatgtgatccagaagaataactatttgctgtccccagagcgtcaacctttctcagcgactatgcatcac

SEQ ID NO: 30022 - DNA, 413 bp, Gossypium hirsutum
  Clone ID: LIB3083-066-Q1-L1-C2
cagctactcaataggaccgaaagcacccaaaatcaaacgcgtggaccatcatcattttggcccaagtatgagttcacacgacaaacagattattgcaaagtctggactctaattcttcacctatccttcttctctgttgcctctcctttcgctgtccactagtccttccatcgcctacgggacctcttctatccagtattcgaggttttcatgtcgacgtccttccatcgccatcccatgagctgccttattagcttcccttggcatatacctaaaactcacacttctgaagataagggctcttcctttaatttctttaaccaaactacttatttcagatttatcttcttctacagtgtttaacttgtgtataactgttaacgaatctccttcgatacaaatatcttggaagc

SEQ ID NO: 30023 - DNA, 261 bp, Gossypium hirsutum
  Clone ID: LIB3083-066-Q1-L1-C3
cggcacgagtggtgacaacgataatgatcataacatgggcgtgtgaagttactcttagcatttttttgttaggtattaacttgtattttgtaggatctgcctgaatccaaatttggctgacacctcatcaaagaaaaaattgtggaaggaaccacactataaattgttcatatgttggtttcaaaaatgattttggttgtatgtagtgtttcaccacaagctctgaaggatttgatgaaataggatgtttagcattttttt

SEQ ID NO: 30024 - DNA, 252 bp, Gossypium hirsutum
  Clone ID: LIB3083-066-Q1-L1-C8
ccaaaatcttcttttttttttaactcttaatcaaaccgggactatattaatactcccccctttacatatacaacccatccctttatcacattacaataaaaaaattaaattaaacaccccaactatatttgtccaatttattaccaaactccatattcaattctcaaattaccgatcacttccattattaactaccatcatacttaaccctctaaaaccctcaactgcctttactatcaacactacaacatc

SEQ ID NO: 30025 - DNA, 316 bp, Gossypium hirsutum
  Clone ID: LIB3083-066-Q1-L1-D9
gagtaaaaatttctagggtgtttattattcatttgatcaatatcaagatacaacaagtaggaaagctagtaggtcctaaagctttctccttgggcaaaaaacccatctgtttttcttgtacttgaaataaaaataccaattgtacttactatatgcaaattcttgtacaaacatccttaccaccctccaatcccaaatcaataccccaatcagaaagcaagaaggaccaataatccagagaccaaagccagtaaccccacctcaaatttgcggcttgcagcaccgaaatttttgtcaatagggtacaggttccccg

SEQ ID NO: 30026 - DNA, 410 bp, Gossypium hirsutum
  Clone ID: LIB3083-066-Q1-L1-E4
cagcagctgaaatcaataaaatatagccatgcagctatgcgcaagagctctgacaagaatcgaggtggagagaagactgattttgccaattgattgcttacctgctttaccacggttcgaagggagctatgaaaatggaatcacgttccaggttatggatgatgtcgagatcttatggaacttccgttgcaagaaacgaaatggggctgcggatagactagctattgaaacagattggattcaatttgtgaatagtaaaaaactccgttcaggtgatattgtcgctttttacaaggacgacgacagagtttcagggacattgtgtaaaattgaagtgaagaggagaacttctatatataacaaagaattgtagcttagtttttttgtgagtgtgtgaaaaagaaagaaaa

SEQ ID NO: 30027 - DNA, 429 bp, Gossypium hirsutum
  unsure (1)..(429): unsure at all n locations
  Clone ID: LIB3083-066-Q1-L1-E6
agaaagcagcattatttttatattaaaaagaaaaaaacctaaaggcggtgttttctcaaattagatgtgacattttctctctctcttataactcatcaaggatatgcaggacctataaatgaaccaatatttagaacagaattgcaagcaccccttttcccctttgtaactccattcattcctttttatcaatgttcagtaatatgcctaaaattggtttgttttacaaaattggacccatgagttgtaagagatgtgaactaaaatttaaaaaatagaagaaaaaaagaatacctttacagcttcctacaaccttgacaatgtcttggtaaaccagtctgatagacgcctcatctttgaagataggtgagcacttctagcgaaataactctccgcatttgaaagcattanttntatgtcatgcttcac

SEQ ID NO: 30028 - DNA, 308 bp, Gossypium hirsutum
  unsure (1)..(308): unsure at all n locations
  Clone ID: LIB3083-066-Q1-L1-F1
ggtantattattaatatgaagcttcagctttgcttacgggagaactttaattaacttattcactgcaattgaaaactactgtaacctttcataaataaaaatcccgcttctaccttatggtgatgatgcaaaccaaatcatctttatttgtttgcaagatcatacctttgtttattaaaatacagcagcatgatagatttactgatggatcaataggcttcagcaatggactattctccatttaataaacaaactgtagtgcataactgtatgtataggattattgaatcaaaggccactttttgcca

SEQ ID NO: 30029 - DNA, 350 bp, Gossypium hirsutum
  Clone ID: LIB3083-066-Q1-L1-F2
gtcttcacaaaagacctgtccgtggctgatggaccataggggttaacaatgtagatcaaacatacatagtgtggaatgaatttagaacaaacagaatccggcaaacatttaacttggaactgattgatgatatagtagaattattgaatccaatcactgagaactatttacctaatgaactaaatctttttagcaagtaatcctttatcatatacaatgtgcaagaactaaaagagattcacgttagaagaacctgactgacactgttatttaacacttaccaaatgaccagtcttatattatgctttaacacgctgatcttcttcttgttcaatatgatcatgaatatc

SEQ ID NO: 30030 - DNA, 347 bp, Gossypium hirsutum
  Clone ID: LIB3083-066-Q1-L1-G10
ccggagtggtgaatgcgactgtggagaatagagtggttggtgaccggaggatcgccgcttatcatgtggataaggtgcttttgccgatggagagttttgggacagcgcctgagccggctcctgcgcctgttgtcccagagaatggtgggttggtttcgagtcctattgcaacggttaagggtactgatgtagctgttgcggggagctagaaatttcatgctttggcgatgggtttttcggcatttgctgtaatatgagctgtagatgggggattctgattatggatgttatatccgcacgcaatgcgtgaggtactgggatgaatacgtggttgtgattaaaaaata

SEQ ID NO: 30031 - DNA, 376 bp, Gossypium hirsutum
  unsure (1)..(376): unsure at all n locations
  Clone ID: LIB3083-066-Q1-L1-G4
gagaaatccaatgcagatattaatgcggagttgggtgtgtgagatgctgaggaagatggttgtgatggtttaaactataaggaattcgacaagggattcaataataaacgtgtgacagtgccaccaccatcacatttttggcgtattgatagtaacaaatttttgcaccgtggctgtaaaactcaaaccattgatgagataatgatttgccattgcaaacgacctcctgatggtaaccttggttgcggggatgaatgtctaaatcgaatgctgaacattgaatgtgttcaggacacctgtccctgcggggagctttgctcaaatcaacagttccagaagcgaaaatatgcanagatgatgtgggacagatttggta

SEQ ID NO: 30032 - DNA, 422 bp, Gossypium hirsutum
  unsure (1)..(422): unsure at all n locations
  Clone ID: LIB3083-066-Q1-L1-G6
aaccagctgagatcatcaagatctaaacaataccatcgggcgttcaaggcagtgaagaaaagaagaagatgtctaacaatatcaaaaaaatatcgtctcgtaagcagacgatgcagaggatgtgttgggtgtttgtgtgggaaaaagatgtgaggatcagatataggcaacctcaaccaggggcctgtccctactgtggagggatgctccaagctatgaatataaagactcattggaagctttgctttttgcccgtctttttctggaagaagaggaagatccattgcagcacgtgcgcaaaatagtttgctgatcctgtcaccaacttttgtttgcaactgacccggcatgctgcanagcttctatggcttctctatccttgaagttgccaggcgtttagcgtaaatctttgtttttaaagc

SEQ ID NO: 30033 - DNA, 389 bp, Gossypium hirsutum
  Clone ID: LIB3083-066-Q1-L1-G8
gaaaaaatgggtggttttgctgctgttaatgatgatggggttcaaaatatactcttcaggttgccagcttcatcgttcgcttcagctgcctgcgttagcaaatcctggaacaaagtttgcgacagagttttgacttgtcccaagcttgcctctgcactgtctctcaacccttctctccctgatgctgtgaaagaggctcttgacaaggttctctccaagccaattcgtcctcagtttgccattgcctccatcgggttacagttcaactttggaagctgctcatcaaattatcaccgaaagactgggctcctaagtaccagtagttaccaatgctgcatgtggaatcattggtagagatgctatcaccaacacaatgagagaggttcgat

SEQ ID NO: 30034 - DNA, 317 bp, Gossypium hirsutum
  Clone ID: LIB3083-066-Q1-L1-H6
agaaaaggcaaaggcattagaagtaattcaatttctaaaggagggagtccacgagggaacgtgcaatgttgcaataattgatgatgggaaattggacacggagtccgactcaggtgagttctgggtcctctttggtggttttgctccaataggcaagaaagtcaccagtgaagatgatgttattcctgagacaactcctgctaaactttatagcataactgatggtgaagtgaagattgtagaaggtgaactatcggaaggtctcttggaaaacaacaaatgctatctactagactgtggtgtggagatttttgttt

SEQ ID NO: 30035 - DNA, 382 bp, Gossypium hirsutum
  Clone ID: LIB3083-066-Q1-L1-H7
tttttatccaattttttattttctaagggtaaacccgtgagctgaattgaatgtgggtctggagtccggattaagataaaaaaagaaatcatagaatacaaagcttcaacaaacaacactttaaagaaccaaaaaaacaaaaaagggactgtttttagttgaatagtttttacttttgatccatttccaaaaacccagatgttatttcaataaggttttctgggttttttttttgttctagatcttgcctttggatttgctgcatgtttcagatctttagtgggttttgaagcttaaaagctatggcggtttgatcagattcaggctttgagattataagctgcaaactcgtaatcgtacttttatctgaaattttcagaaa

SEQ ID NO: 30036 - DNA, 424 bp, Gossypium hirsutum
  unsure (1)..(424): unsure at all n locations
  Clone ID: LIB3083-066-Q1-L1-H9
ggagtacggtaccttctaaatctaatttatccccttgtatggaaatccacgcgagataaaaatgatcacgtagaatacaccagtgatgctcctctgccatggttagctttttaccaaggtctacccttttattacatcacttcatttaatcaaacccatacagaccccagagtcaaagagacaccgaaagagaaggaaaccctgaatgaaagatcttgcaccggttcaaatacgggctcagttagtcaaatagaaaatagggaaaggaattcggattctgtcgattctcaatgccaaaacccttgtcctcggngaaaaatgacatcccanaagtttagtaaaggatttgtgccatacaaaagatgttaaacagaaagggatatgtcatcattcatgggtgtatccgagggtcgagagagggcac

SEQ ID NO: 30037 - DNA, 137 bp, Gossypium hirsutum
  Clone ID: LIB3083-067-Q1-L1-C10
ctacgaccggtgcctacacatttcgatgggctcggggtgtctgcataacctgacgacgcagcgacggcggacgtgtctttcgactagtacacagggttcagtgctccatgctaggaatctgcggaaaccgactatcg

SEQ ID NO: 30038 - DNA, 308 bp, Gossypium hirsutum
  Clone ID: LIB3083-067-Q1-L1-E10
ctttagttgaccagatgcagaaaccagggggtctgggaactggtcccgggaaggaggtcggattgttggataactgtggcattcttccaagcaattgtctaccttgtcttgcatctactgtttcatctgttgaaaagagaagatcgctcagctctagcccaccaagtgcaaggaaaaagaatgccttaaaacttccatttaaatggaaagaagggcatcccaatgctgccctattttcgtcgaagaggcttcttcagagaccaaaagcagggtctcaagtaccattttgccctacagaaaagagaatg

SEQ ID NO: 30039 - DNA, 294 bp, Gossypium hirsutum
  Clone ID: LIB3083-067-Q1-L1-F11
taccggtccggagttctagagctgacgcatcgcgtcgcgctgcacgtacgtacggctacaagagacgacagaagggttcggtttgtaaacacgggtgagactacggatgcgataggactacacatggacgcggtttcgagaagactacgaagagctccagctgcgatatgaccatcgaaggtgcatgtcaataggcggagcaccagaggtcgttgtcgctgccgaatagtccagggcgatgtacaggatccagtgttacctacgactgcatccgaccgtatagctatcgtatgg

SEQ ID NO: 30040 - DNA, 342 bp, Gossypium hirsutum
  Clone ID: LIB3083-067-Q1-L1-H10
aggccagtgaagctctcaagtctggcatttaatcagattttggcgattaaccatctccatatgtttacggacgaggaactagagcgtttactctgtggagaatgtgatatctgggctttcaatgaacttctggaacatatcaagtttgatcatggatatacggctagcagtccaccaatcgttaatctgctggaaattatacaagagtctgaatattcacaaaggcgagcatttctgcagtttgtgactggtgctccccggctacctccaggaggtttggcgtctttaattccaaaattgacaattgttcgcaagcatagtagcaattgtgctgatacggag

SEQ ID NO: 30041 - DNA, 392 bp, Gossypium hirsutum
  Clone ID: LIB3083-067-Q1-L1-H11
accggtccggcgttctagaactagacgccacgcgtccgtccggatgctagaagcctccttatggttccgtttctaaagaatcaccaacaggtatgggcacagctccatcacctgcgttacatccaataccgaatctaacaccttctttcccatgctcacaaccccaaacatggttaccattagggtagtacaccatacggttacacctacgaagatgaaacttgtctattcacatgttctacgactaccaagatatcgtacataaatctccaaggagcttacttgcctgtcatggccgacctacttaaatcatctccgcttactattgaccggatctgttatttatctcaaaccctattggctaatagatggccttcttttcacccccattt

SEQ ID NO: 30042 - DNA, 177 bp, Gossypium hirsutum
  unsure (1)..(177): unsure at all n locations
  Clone ID: LIB3083-068-Q1-L1-A12
cccaaatgctttttttagttttcgcagcacaaataccangatgggtatatgcactttcataaaggccaacgtggcattcaaagccaatgcctggtacaatgcctttgcaaggtacaattaatcatatgcctactacaatgccacaaggttattagatgggcaatgaacccatttcat

SEQ ID NO: 30043 - DNA, 271 bp, Gossypium hirsutum
  Clone ID: LIB3083-068-Q1-L1-B9
gctgggagaattgactcgtttgcctcccgctcttcattacatgcgtccaaggccaaccctggaggccgatggaggctacacttacagcccaatcaccgtcatcgattgaacagacgaccaacatactattgcagaaagctacttccgttccttcgtgcacggaactaagaacactatcctcttgaaagctgtcatagctagtatcagccaacaactctatgacgcgttggctgccaaattgaagaatgcttttaacagcaagagggggctg

SEQ ID NO: 30044 - DNA, 237 bp, Gossypium hirsutum
  Clone ID: LIB3083-068-Q1-L1-C12
gaatggggcagtcaacccactttctatctcaaattattattcgtggcatatacaaccctataaggggcttcagttactacttttaaccccaacatgattgttgtgttcgttacctatcagaatatattctttaagtctctcttttcaacttctctttccttttccttaattcaatactaaattactttacttttaatttttacctaattgttttactattttatttctaattttatt

SEQ ID NO: 30045 - DNA, 295 bp, Gossypium hirsutum
  Clone ID: LIB3083-068-Q1-L1-D11
cacattctgagtttcgagattatattgaccagggttttaggaggcctaggcgctattttccccagaaagaagaggtaaaaatcgaagggaaaaagatggtggctgatggtattgatgcatctcagggacacttggatgataatgctgatgattggctgcctgcagtaagtcgaagtactcataggagatatcttatgaggaaagctaggcgggaattctacgaggcattagtggagaaagattgtcaagaagatatgtaaaaaggcttatagaagagcaacagtgaagatgcaag

SEQ ID NO: 30046 - DNA, 295 bp, Gossypium hirsutum
  Clone ID: LIB3083-068-Q1-L1-D9
ttagtaaaatagttgaagctttctgatttcgcaggggagttgagagagctgttcaagtgtgcttatgaagcaacgaatacatttttcagattaaagaatttggatcaccaatgtaaattatccataacccaactgctaatatgcgatttgaggagatggtatgtataaatatacctattgtgtgagggtagaatccttttgatacactgtttaataataatgttgttgttaagctcattcctgtttccttcttttatgattttttatctacttttttttataaaattttaactgt

SEQ ID NO: 30047 - DNA, 292 bp, Gossypium hirsutum
  Clone ID: LIB3083-068-Q1-L1-E11
tcaaaaatcaatttgctcatttgctacagtcagaacaagagcagaaactggagatgcaacaatatgattcaacgattcaaacattgcatgcaaaagtaaaaagtcttgaattgcaactcaatgaagccatgtgttctggtgaagctaagtctgttagctcagaaaaggtgtcttgagtttcaacaatattaaaaacagcagcggatggtattgattctttagttgagactaataaacttgatgatgaactcaagaaacttgatgctcttattgagaggttgcttgaagaaaa

SEQ ID NO: 30048 - DNA, 252 bp, Gossypium hirsutum
  Clone ID: LIB3083-068-Q1-L1-F10
tctacaaacatttcgtaagcatacattgagatgcataattatgcactacttttcagagagtgtaatcatacaatgcaaaatggtgcaccgtatcatagatctgttaataataaactgcataatatttctatatgcaactgcaatgctctaattatgaatgtcttacttcatatatggtgggaaccgaatcagttttcgagctggatccagaccgtatttgcaccatcatcttgctccccatcgctcgggctt

SEQ ID NO: 30049 - DNA, 116 bp, Gossypium hirsutum
  Clone ID: LIB3083-068-Q1-L1-F12
cgataaacgttttaaagagtttatcatagctagatacatcatggtgattaggctctgtcggatgcgactggaggaaaccatttgggaggttatgcctttacgcgtgagtgctatgg

SEQ ID NO: 30050 - DNA, 395 bp, Gossypium hirsutum
  Clone ID: LIB3083-068-Q1-L1-F9
gctcaaatgaggccaacggttgacatttcagtgcaccctgatgctgattttgtgcgaccagagttgcgtcaatctggcaattgagtaggtggaatcttggaacttgagtgggcagctatagtgtgtttaagccaaaactttcacctcgtttataaatgagtgatgtagttttagctatgtctttagggtgtttgaacactaatggcactagattcccttttttttttcttccttatcagcctcttctttgatatgactcctttggatttactcgagaatgcttttggtgaatcttttagactgctttttgaaagttttgttgaagttatatattgagtaagcaaaacagtttattgttggagataaaaaaaaaaaaaaaaaaccttgaggggggg

SEQ ID NO: 30051 - DNA, 159 bp, Gossypium hirsutum
  unsure (1)..(159): unsure at all n locations
  Clone ID: LIB3083-068-Q1-L1-H12
ttaccaacttcactaaaaggcttttgcngaaaaggcttagaagagggcgtctgcaaatcttacaaaggctcccgtcatccccaatattgattgtgaccactatgttaacaatagcacgtcctttaggaaggcaatgtgcttcctgatggacccacaaat

SEQ ID NO: 30052 - DNA, 250 bp, Gossypium hirsutum
  Clone ID: LIB3083-070-Q1-L1-B11
gattaaagtttttattttagagactacagaagacggggtcgtgatgaatttttaaaggactggcgccaataaaatatatttgctaatggtaggaaacctgtatatcatatagtatatgacggaaaaccatagttgttaggaaggtcacctgaactaccaatagagctacagtcattcaatccaccagtggattattattttatagaaattttggttgaaaatgtattctatgtatctattatcgtgcctt

SEQ ID NO: 30053 - DNA, 222 bp, Gossypium hirsutum
  Clone ID: LIB3083-070-Q1-L1-B9
gttttacggtatattcttacaaccctatacttgaggcccaaggagacttaataacggtctaaagggctttaataatttttctcacacaaaaacctttaaataaacttgccattttaaaattaaaaaatatctttttttttaccgcactgtttattgcacttcattaatgatcatcttttaaacactaacctttaataactaacctccattatatgggtgaaa

SEQ ID NO: 30054 - DNA, 326 bp, Gossypium hirsutum
  Clone ID: LIB3083-070-Q1-L1-F12
cctattcccattcaacaacatatccttcaaatacgcgcaactgttgaatcaaaccaagaatcctttggtttaaatcataactttgacgcaattcttacataacccaaaattttctctatctttgttggcttttggtgctcaaaaaggaagacagtattttttttgatcgcctgtcactgcagattacttgcatctcaagctgattcttagtatttgtgctattactttaacttatttttaagtggccttgggagactgtggttgtgattctgaatgataactggtgaagacaagaaggtgaaattaatcatcattatcaaggaatg

SEQ ID NO: 30055 - DNA, 358 bp, Gossypium hirsutum
  Clone ID: LIB3083-071-Q1-L1-A12
gagagagagagagagagagagagagagagagagatcccatctgagatatttgtggcaatgaataagaaaattgcaggatcgtcctcgagaccaagaaagcccacaggtacggttttaccataccaaacacagagaataagggaccactatttcttgggcaagaagcttgggcaaggccaatttggcaccacctacctatgtaccgacaaggttactggtatccgttacgcttgcaaatctatcccaaagcgcaagctcgtctgccgtgaagattacgatgacgtctggagggagatccagatcatgcatcatttgtctgagaacccattcgtggttcagatcaagggaacttacgaag

SEQ ID NO: 30056 - DNA, 255 bp, Gossypium hirsutum
  unsure (1)..(255): unsure at all n locations
  Clone ID: LIB3083-071-Q1-L1-A7
tactacagggtctatttatcgggtattactccgtcttatacggcgaccaagtgaagctatcactgaagccatnttccagctattgactcatcggctctcctcttgccatctccctctcctccaatccagttctttccttcgaccgggctccttgtctcggcgtgttcttcaccggtgaaccccacaccatttacggtctaagtggcttccccctccgccttgccctttttcttctactcgtcttggtcctgcttt

SEQ ID NO: 30057 - DNA, 343 bp, Gossypium hirsutum
  Clone ID: LIB3083-071-Q1-L1-B12
attaaaagaaattttgacttgatttaaattttacaaacaacaaataccattattaatggtattattctaaattttcatttttttttcagataaaaaatttatgtatataattatcaaaattaaagtgaagtttatatatgaaagtttgaaacaaaaaacataaaacaagtgattgaagtgtagtttccggtgaacttctcattcttcacataataattatttttttcatgctttgccaatgaattccacgtcaaacaggagaactgaatctgggggtataatgcatgaacctcctttacagcctgcacctttcattccatatccgagctctggtggaagcctt

SEQ ID NO: 30058 - DNA, 355 bp, Gossypium hirsutum
  Clone ID: LIB3083-071-Q1-L1-B7
gtgtttgtttgattcattccgaatccccaaaacatgactgcaatcgattcatcaaaagaacccatggcaaaccatgactaatattatatttcaaaatggccaactgaagtttagaaaaaataaatgctctagttgccactagcgactgcagggcacattttaaaagttcccatcacaacgatcaaattattaacttaatcaattaaacatgccaccaataattataacccttcttactagttttttgcctttttcttcctattgccttaaaaatacattggacaagattaagtaaattatacgaaaacctgccaataactgataacaaaactaaactaagcatgaatatgattta

SEQ ID NO: 30059 - DNA, 215 bp, Gossypium hirsutum
  unsure (1)..(215): unsure at all n locations
  Clone ID: LIB3083-071-Q1-L1-D11
aaaagaagaaaaaggcgggggggtattctaggaggaagggcgccggactttttgccaaaacaaaaacatngatgtctgggttcatcaaaggaaccctacaaaacataaatagaaccaaacagaccacgactctccactactttgtttaaacacatcaagaattactcgcctatgcacaaaccgcagtccctcaaaagaatacatgagcaaaacac

SEQ ID NO: 30060 - DNA, 333 bp, Gossypium hirsutum
  Clone ID: LIB3083-071-Q1-L1-D5
aaatcgggtccatgtcagttttatggttcattttcaggttcgaggttatcattctcaacagtcatggtgtttatcgtttattatcttgatacaaactaaaccattgcatcctcatcaaaatctaaacacccataaagcttcttcaataagtaattgtttagttgcctagtattgattctttttacatcaagtctatgttcgttttatagttcatgttcagggtttagagttatccttttcaacaatcatggcatttatcctttattatcttgatacaaacactaaaccacccataaaaacttcttcaacaagcaatcatccatatctatttta

SEQ ID NO: 30061 - DNA, 360 bp, Gossypium hirsutum
  Clone ID: LIB3083-071-Q1-L1-E1
gaaagatcttttatcaatggaagaagaaaaagaaggaaacttaaatgtgttaatggatggccctgagttgactcaagtcgcttatagcaaagaggagtctcctgaaattcaacctaagcatctggagttctacatcgaaggggatggttgccatttgattccaattgaattgatggcttctgttggcgtggaaagccaaagaatatacaattttagagaggaagatgaaggtattgctggtaatggagatgttattttggactttgatatgcattgtggaacaccattggaactggtagtggagaatagttgcggttcatgagaaaaagtggcattgatttcaccccatgagagtgggga

SEQ ID NO: 30062 - DNA, 360 bp, Gossypium hirsutum
  Clone ID: LIB3083-071-Q1-L1-E8
taaattacccagatttcaaaattgaaaactttgttgttattgggaaaagaaaggatctttaattgactgtaattaagtttttttcttctgacatagaaattcaataagaaagaaggtagaagaattttctcccccaattagcaaccctggcgttcatagatatatttgttgaagaaaataaacaagaagaagatcaacaaggggaaactgtttggctctttcaagaagaagggaaaagtgagccaaatatggtagctgataatggtgatgaaccagatgatgataataataagttaactcttcatgtccctgaaacttcccatcaaattagtactgattcatggttccaagctggttttg

SEQ ID NO: 30063 - DNA, 236 bp, Gossypium hirsutum
  Clone ID: LIB3083-071-Q1-L1-F5
gatatcttttctgcttttttttttcactatagaaatcacagcaatttctgatctcagccttggtctattctcttcctgattaatttcacttgatctatccaagtactaacatcttagaggaaacatagaccttgtcctagaatctaaattgccaatagcctgcggtgacatggaaaaacagacaaacaaatccttggttcaaaaccttatagaaagatgccttcaactctacatga

SEQ ID NO: 30064 - DNA, 114 bp, Gossypium hirsutum
  Clone ID: LIB3083-071-Q1-L1-G11
gcattttaatgcatctaagatcaaggaccttcaggctcaagatgatggggttaaagccatgaacgaatcagcatacaaggaccttctcaatgtgagccatgatctctatgttta

SEQ ID NO: 30065 - DNA, 260 bp, Gossypium hirsutum
  Clone ID: LIB3083-071-Q1-L1-G5
tttttctcacctctgtctcagcgcctatttgtagcatctccttcaaccattatgatgaaaggttacagaggaaagctacccctttcaatcatcactgttacactctgcggttttgctttccttgctctcttatatactgaaagactcagttttctctcttcaagttcttttctcaaatctaaatcctgtgctagaagaacaagtgctgttgttaaagctaaggatgaaacagcagagaagaacctataaaaccccgaact

SEQ ID NO: 30066 - DNA, 356 bp, Gossypium hirsutum
  Clone ID: LIB3083-071-Q1-L1-H10
ataacatttttgtttgagcctttgataattttcaggtggcgaatttaacggagattatgttgaaaaatacatccccatcccggaaggagacagattttgctcttgcggctttaagggagattccttcacagtacaaagcaaccattgagcttaatattctgggtcaaaagggaaatgttctcgagagaattccactacctcctcctacatacggtgcagcatcttttaacagctccaaaccatcctattctactagtgtccaatatggttcagcatctttcagcagctcaaaaccttctcatcctaccggtttctcaccaagtgtccctccttatctggaagagagtaatcccatc

SEQ ID NO: 30067 - DNA, 364 bp, Gossypium hirsutum
  unsure (1)..(364): unsure at all n locations
  Clone ID: LIB3083-072-Q1-L1-A3
tttcaagctcccatggccttctntcttatagaaaataggtggagaatgaaagagagaatgaaaaagataaaagcttctccttattttatgatatttctagtcaaattagtcaccaaatttcacctaactgtgaccttacaaattctntatatctgtgttcagccactaacaaatgtgtggtctagtactcaataagaccttattaatgtccatactttacacttactataaacaatttgacttatgcactatctttaaatacatgcatagaatatacaaattaacctttattcttacataaattaaatttcactaatggtgacacttctgcaataggccacataattgttactaactcatacta

SEQ ID NO: 30068 - DNA, 196 bp, Gossypium hirsutum
  Clone ID: LIB3083-072-Q1-L1-A8
accgtgcctgagacatctcgggctctattttctttgaacctaacgaccttctctcacggtcgcaccgctcaccggacggaatgacgtgccacgaccaaccctcagtttagtcttcgggccagaggcatctacggacgcgtttttcgcgcgtgcgcttacgagtcctactgctgacctttgacgctgtatatgctgt

SEQ ID NO: 30069 - DNA, 177 bp, Gossypium hirsutum
  unsure (1)..(177): unsure at all n locations
  Clone ID: LIB3083-072-Q1-L1-B11
ttctctcttcccanatctctcatgaaccagaagacagacccacttatattcggctgcagcaatgccgcacctactcctncactatctcgctgcaatcacaaccgtacatctcaaatcatgttctttccactcccctaaaccaacggcccatattcacctacgctccaacccaacacc

SEQ ID NO: 30070 - DNA, 300 bp, Gossypium hirsutum
  unsure (1)..(300): unsure at all n locations
  Clone ID: LIB3083-072-Q1-L1-B2
ctcgagtttatatatcaatatttctctttcgcttccgcatcatatttctntgtcatttgctttcaatttcactaaaagccaataactcgctgatgtttcttttatgttttattnggaaggaaagacaatggtgttcgagaaaacaccgatcttttttatggaggttttggttatggtgagtttggatctgtgtttcgggagtgagctcggtatgtcgccggcgcatggtgaccatgggcatcatcatcattgtgatcatagacatgggcatgaccaccatcatcaccaccgacatgtgga

SEQ ID NO: 30071 - DNA, 190 bp, Gossypium hirsutum
  Clone ID: LIB3083-072-Q1-L1-B3
cacaatcttctaacctcgactccgatctcggtttcctcttttcttttacggaggttgtttgcggtgggtggacgacgatcatgatcgcggatcctaaatcttgtgacgtgctgttcgttttcgttttatttgcgattatatcctcttccaacgcctggttcactccctatctaagccatttattaaaaga

SEQ ID NO: 30072 - DNA, 181 bp, Gossypium hirsutum
  Clone ID: LIB3083-072-Q1-L1-C12
ctccaagcaagtattttccttacacgtttgtttttcttgtgattaaatcgatatggcttagctcaagtgtgcccttaaaacttgcatgtggtggtggtgttgtgcatggtagtgggtgcacccctggctcaaggggccgtaacctgtggcaagtcaaaactcctccacctgataatactga

SEQ ID NO: 30073 - DNA, 387 bp, Gossypium hirsutum
  unsure (1)..(387): unsure at all n locations
  Clone ID: LIB3083-072-Q1-L1-C2
ccacagctactattccgccgaagcccactgaagaggctntaacagtctggattgagcacacttctgcaaatggacgaaggtattattgcggtgggaagacacggcaatctagttgggagaagccattggaattgatgacaccgattgagagggcggatgcatcgactaactggaaagaatatactagtcctgatggaagaaagtattactacaacaaggttacaaatctatcaacatggtcactccctgaagagctgaagttggctcgtgaacaagtagaaatggcgtctgccaaaggaccacagtcagaagtttcttctcattttccagctcctgtacctactgcaagtaaagcacaatctggtgctgatacatcgtctacaataa

SEQ ID NO: 30074 - DNA, 217 bp, Gossypium hirsutum
  unsure (1)..(217): unsure at all n locations
  Clone ID: LIB3083-072-Q1-L1-C4
gtgattgatagcctcccattaatggcgctttgtattacgttttatactgacaggcattgtccgttgatggacgaacaacctttntcgagaaatgtagtaaattattttaatcggccttggtggggtttattgcatgtttagctctttttaaaacaaagaaataaccgaaagaatactacgaaacaccatctcgggggggcccggaccaattccccta

SEQ ID NO: 30075 - DNA, 178 bp, Gossypium hirsutum
  Clone ID: LIB3083-072-Q1-L1-D3
aacaaacttatatcattaactagtgttttaaaataagatcaatttgtcaaattaaaattacattaatctcattactaaaccatatcataggcaaacctattatttacccataacgacttattccctgaaatagtacccaaatcatgacatgactcatctttaaccacacaaatccctc

SEQ ID NO: 30076 - DNA, 183 bp, Gossypium hirsutum
  Clone ID: LIB3083-072-Q1-L1-D6
ccggctgcagaatcggccggcaaaccgatcagacttgcatctatcggctcaaaagaaaaggtctaaatatgggtcgattctcgttggatctctcacacatgaggatcttttgcatcggaaatcgacgcccataaagtacatgcgatgcaacctggtgacacgcgcataaggtcccagttacgt

SEQ ID NO: 30077 - DNA, 142 bp, Gossypium hirsutum
  Clone ID: LIB3083-072-Q1-L1-E3
tttttgcaatttcttattctctttcttcttctttccactacagtgcattcttcaagtaatattatttcaggcgaaaacctttctgtactcataaactgtaaggttcaaggcactattatcaattttctcagtctaccaccta

SEQ ID NO: 30078 - DNA, 334 bp, Gossypium hirsutum
  unsure (1)..(334): unsure at all n locations
  Clone ID: LIB3083-072-Q1-L1-E5
gccatccacattnttttctctcttcacattagtacagaaaagtctatatctntatacagttgtggtgctcattgttaatgggaaacgataagggtggtacgatggttatggagcaaagcaataacctccatagccgaccaaaactaggaactctcttcaaatctgaaccttctntgtttcctaccggtgccgaagacgacgaagtccccaatcgcaaaacagcgcataatggaagcccaggtgttcacagtcgacgacgagcgggagggtcgcgatatatgtacctgatcaactctctattaatacatggtataacattatctcaactatatgc

SEQ ID NO: 30079 - DNA, 301 bp, Gossypium hirsutum
  Clone ID: LIB3083-072-Q1-L1-E6
acgaaagactatagttccgcccacgcaaggtacagcttccattactgagctagtaaaccaagacatggcaacaacaacaacaagggcggtgccaatccctacacaagaaaccctattttcatctcaagccccattatttatgtttgaaagtacaatgacaccaattgataaggggtctacttaagatgtaatgtaagagggaggtttcatgaacaactaataaacactgaatatataatatattaacagagtcaattaagtcattccctcttaatttttaaagacaaatatattgcaccat

SEQ ID NO: 30080 - DNA, 131 bp, Gossypium hirsutum
  Clone ID: LIB3083-072-Q1-L1-F6
cgcgcaaaaaggaccccgctgcagaatcgcacgagaacctactgccttttttcttgaaacatcattttaatgatcttatgattccctaacttttgggtaaaaaatggttctattattgacgatggtggtgt

SEQ ID NO: 30081 - DNA, 143 bp, Gossypium hirsutum
  Clone ID: LIB3083-072-Q1-L1-G4
ggatccccggctgcagatcgccggtgtatttgaatttcttttcgattttcttagccaaaatttcagatcttgcaagacttaccggcagacatcactgcgggtcttgctcgcacgacgcactgagacaatcagatggaagcatc

SEQ ID NO: 30082 - DNA, 318 bp, Gossypium hirsutum
  unsure (1)..(318): unsure at all n locations
  Clone ID: LIB3083-072-Q1-L1-G6
atgtatgtttcattcctcgcacgatgctatcactcagggcggattggcttagangaagctcatggaaacagtcaagcattacaatataactgcgttattggaaatgaagccgttgttttccataccaatgagacatcttctgtcaactctgacaaggtcgaggaagcacttgaaagtgtgagtaggactatacttaccatacacactaatggtgacaaacaaggtgctagtttgcttctgcatanatactgcaccatgacaaatccattgaatggtgcattgcataagttggaatacattcatgttcccgttgatata

SEQ ID NO: 30083 - DNA, 234 bp, Gossypium hirsutum
  unsure (1)..(234): unsure at all n locations
  Clone ID: LIB3083-072-Q1-L1-G9
caacagcgctgataaatatgatttactaaaccagaacgcatctagcacgaattccaagtagagcgtgatcaagacaaccgttcccagggctangtgacgatatcttctgtatgttcgacctattttatgattttctttttcgatcagatgcggttctaaagtagatatagatttgacatgttatgctggttggtcatgctggttttgctatggaacatatggaaaatgcggtta

SEQ ID NO: 30084 - DNA, 241 bp, Gossypium hirsutum
  unsure (1)..(241): unsure at all n locations
  Clone ID: LIB3083-072-Q1-L1-H1
gggaccccggctgcagaatcggcacagccatattaatctccaacgcctgtattaagctgggccgttgttgccatgcttcactcatcttacactcacgcctgggttcgtcactatggccaactcagtcaatctgtcttgtactnatgtcaccctttggtttttagccacccttactcatgaccgcccggaagttattggtgattcctgtataaccgacctaacgctgaccagaatttatgaa

SEQ ID NO: 30085 - DNA, 258 bp, Gossypium hirsutum
  Clone ID: LIB3083-073-Q1-L1-A5
gagaaattgagagagatgacgtgggttttagttatcatgagtgtttactgttcagaatagagagaatctagtgagaatagagggaaatggaaggatgggatcctcaaaatctaattctaccggaggtgggtaagctatgtcgatcccagtcagagtacctggaccaacatttcaagacccagaaggatgtttcctcatcttctgtttcttcttcttcttgtcttttgtctgaatggaccaaacgttgtcctgattaca

SEQ ID NO: 30086 - DNA, 251 bp, Gossypium hirsutum
  Clone ID: LIB3083-073-Q1-L1-A7
ggaaacagcagctgtcgggtgagggttcactttggtggaaaaagcaacgccctggcgctgaacggtggccttagatcggctccaacgttcctgacttcatcctatcaatcactcctccacaagtctggcaatagagggtctcattcaactggcgtgaatagaatggggggagggcattgacatgacgaaccgcattaccttcatgctcaacatatgtacaacttggataggatgaaaaatcagaagctgac

SEQ ID NO: 30087 - DNA, 213 bp, Gossypium hirsutum
  Clone ID: LIB3083-073-Q1-L1-A8
catgcctaatggtctgcggggggactgttaggacggaaatgcatactacaccatctcccaaaaagctaccattgccatctcattcggtacttatctgacctccaattttggcctcggatacgccattgctataatcctgcatttacatctactactgtccaatattcttcttgattactacatttgatcacaatcttcctaacccgttacacg

SEQ ID NO: 30088 - DNA, 258 bp, Gossypium hirsutum
  Clone ID: LIB3083-073-Q1-L1-B10
cttaagcagctacctaaggaggccatctggaatgtttcaatagctgcaaccatttgggcttttccttctaaagttatagctggtaacacccccttgacatcagtgtcacccaaaattccatcaagaaggttttccatcatagagtagagcttcggataaccatttgtgaatatctctttgacaaaacttgatgcagtaaaagcagactttatttgagtagcaaaggccttaacaagagctttccaaactcgatcagtt

SEQ ID NO: 30089 - DNA, 266 bp, Gossypium hirsutum
  Clone ID: LIB3083-073-Q1-L1-B12
tggggtgggcttacatgcaaaaatcaaggtacttgacagcagaggtggtgtatcgaaaagcccagatgatcgacccagatgccaacaaggcctgcagcttgggaatttgcttgatcaaacaaggcagatacgatgatgcacggttggtgcttgaagaaatatcgcaacggaaaatcccaggttcggaagaaattagagccaggaatagagctgcggaattgttaatggaaatcaataccttcgagccgccaccatcggacgtatca

SEQ ID NO: 30090 - DNA, 256 bp, Gossypium hirsutum
  Clone ID: LIB3083-073-Q1-L1-B9
cgccctaaatgagaggagtggcatatcccacagcattctcactgttcatgttcgtggcacggacataaaaactaatgctgttttgcgcggtagtctacatttggtggatcttgctggcagtgaacgggtagatcgttctgaagcaactggagataggcttagggaggcacaacatataaacaaatccctgtcagctctaggagatgtaatctttgctctggcacaaaagaattctcatgtcccttatagaaacagc

SEQ ID NO: 30091 - DNA, 274 bp, Gossypium hirsutum
  Clone ID: LIB3083-073-Q1-L1-C9
cggggtggggggctctatagatcttgtgtaccccccgctctgcaagtattccgcgcgcggaaatattgagtgaacagggggtgcgaatccaatgtatgtgctctgagtgattcgcgacaacctcaagatcaaacaatcatcaaacgacatgccatgttgacaggatgatgtatttaaggactgatatcacaaatgtgtggtgaatgcagtggctgtgcttaacatccgtcaccgagttagatggactgatctcttaagtcgagagcaagatagc

SEQ ID NO: 30092 - DNA, 254 bp, Gossypium hirsutum
  Clone ID: LIB3083-073-Q1-L1-D7
gttgtggttgcaccaactggtgccgctgtgggtttagcattctttagttatggctttccacaagctggtagttgtatagaagtcagtgttcccttgttgttgctggttcttatatgtaccctgtaccttcgaggaatatccatttttgggcaccgattgtttcgaatatatgcagttcctcttagtgttacaatcacttggatatatgcattctttctgacagccggaggagcttatgattataaaggatgcag

SEQ ID NO: 30093 - DNA, 237 bp, Gossypium hirsutum
  Clone ID: LIB3083-073-Q1-L1-D8
ggtttgccttgtgctgttggggttgctcaccactggaccaaaaggtgtcagatgtgaaaatattggtaaccctttaatccctgggagcaccgcaatggattcttttctggcttacaaatatttaaaaagaggtgccagacattttacttcttcaatcgactacaaggttttgtcacattggtaccgtcgatcaaatacctcaaggcgtgagaaagtgaatccttatgagagaccaca

SEQ ID NO: 30094 - DNA, 257 bp, Gossypium hirsutum
  Clone ID: LIB3083-073-Q1-L1-F4
gcgagaaaagctcataggagggtgattcagaacgtaattttgtcaatcattactaaggcggctattcttgcactggcatttgctggtcatccacttgtatgggcagctgttcttgccgatgttggcacatgcttgttggtgatcttcaatagcatgctccttttacacggaacacacaagcatgctggaaaatgttgcaaatcttcagctgcatcacataaagacaagcaaggatgtaaaaccagtcattgccatac

SEQ ID NO: 30095 - DNA, 265 bp, Gossypium hirsutum
  Clone ID: LIB3083-073-Q1-L1-G12
gagaaacccctagtagataagatacgaaagggatgggctgaggaatttcgggctaagattgatgatgacctagagagagtagagttttggttaaaaaataccattagggtatttgatgagttatcatgcatgcttgaggagtgcgtgaagtgcacagtgtcactcctacgagactcaacttatcaatggtggaacacccttgtgtcggttggaccaagggaaaggatcgcatgggagttcttccaggaggagttctgaaagaagt

SEQ ID NO: 30096 - DNA, 306 bp, Gossypium hirsutum
  unsure (1)..(306): unsure at all n locations
  Clone ID: LIB3083-073-Q1-L1-G5
ccctggcctgcatgtaattcgttcttcgagcgagttntttttttttttttatgttntaattcaatggcggtcgtccacctcatcggatatatatcacccttctcatcacaattcaactttcagaatttcatatgaccaaaagggtctaccaagtgaaatataacactgtcttatgtgaaggtttaaacatgagaaaaacaagacaaagactgccaaatttagaagaattttaatgactaagcatataaaacttgttccacataagaaactcacaaagcagactctgctaagagggcatggatttca

SEQ ID NO: 30097 - DNA, 257 bp, Gossypium hirsutum
  Clone ID: LIB3083-073-Q1-L1-G6
cgggcatacatgcaagccgagttaccaacattccgagtacgggactgcaatcacatgggatgatgcattacggtcgagcgcacgtaactttgagcacaagagctacaacctcttcacgtgcaactctcacttgttcgtagccaattgtctcaaccgactttgctacgacggatcgatggattggaacatgataaccgtggtggctttagtaattatcaaggggcattgggtcaataacatgtcgataataagatcat

SEQ ID NO: 30098 - DNA, 256 bp, Gossypium hirsutum
  Clone ID: LIB3083-073-Q1-L1-G8
agccaacaaagatttcggggatggtagacatgctgaatgaagggtcagtggagacaaagatcaattgtacgcgatttatagagaagttaatggatgagaaggaatttcgggctgagagcatctccagccatcggctattggttggtctaatgcgcttagtgaaggataagaggcacacgaatggaatcatgcctggtcttagcttgctcagatctatatgcttacataaacaagtcatgggtttgattgtgagtat

SEQ ID NO: 30099 - DNA, 137 bp, Gossypium hirsutum
  Clone ID: LIB3083-073-Q1-L1-H5
ttttctaggaaagaacaaagcaatgaaagaaatttaagaagccttgtttcgcgttcttgaacttagctttccatatattcatccatggcttttattcttcctctgattgctttctttttacttatcctggtaagttt

SEQ ID NO: 30100 - DNA, 363 bp, Gossypium hirsutum
  Clone ID: LIB3083-074-Q1-L1-A2
gagatatggaacttcagggaacctccaaatatatggaaaacttagaaaaattgtacatacttgtgttgggcacatctttgtttctgacattcgcatcttagtataggtttttgtagttattttatgttttgttttcttttttcctcttaatctgctatttttatttatttatttttgaatatttctcatttggcaggatgttcattattatgcttcattctttgagatgttggaagccgagagtcttgcaaaggtccttcctggagttaaaaccataaatgaaagtgttcaagtttacaggaagttttacacagaagagaaggaaaagacaaatggtgtagctgcaatttgcgttgcaaaaat

SEQ ID NO: 30101 - DNA, 392 bp, Gossypium hirsutum
  Clone ID: LIB3083-074-Q1-L1-A4
caggttttggagcaattaggcctccctgctgctgggcggcggtcaacggctggatatccgaaaggacttcaaaatggatttacgaatacagttgttaaccggtttttattgcccccttctgattgtgaattcacgctcaattcactcttggatgagttgcaaacggatcaatggcccgtacaagcgggacacagggcgtctaggtgcactggagtggccttaagtgttgcagcacgattgcttggggcctgcttgcctggtactggtgctaggattattgctttggttggtgggccatgtactgaaggaccaagcacgattgtatccaaagacttgtcagaacctgtacgttcacataaagatctttttaaagatgctgcaccatattttaa

SEQ ID NO: 30102 - DNA, 379 bp, Gossypium hirsutum
  unsure (1)..(379): unsure at all n locations
  Clone ID: LIB3083-074-Q1-L1-B2
aaaagatggagcaatatggtttatgtttaaaagaggaaagaaaaacaataaagcatcttaaaatctaatttgaatttagcctttcacagagagacgattgatgaggtctggttgcaaaggttcaactcaaactgcatttaggtttagtttctgagctaatgtcaaagcagttgcaacaaaagttttttggcatgttgattaataagacgcatctttttcccttccttttgcttgtctacctcaaatttgttcatgaaacttacttcttttcccccattaatctcaaaacctcatctctaatatcttcccccacccctccattgtctgtttgatgcccataagaaacctgtaacttgttcattntttattttcttactac

SEQ ID NO: 30103 - DNA, 276 bp, Gossypium hirsutum
  Clone ID: LIB3083-074-Q1-L1-B3
aaaaaatatacatacttgattacttatgttgaaaggccgggggaagaaccataaaaaaaacattaattttaactttaaaaattaaaagaaaaaaattccagaattcttcttttttttttttaaaaattcttaggtttaaaacctccgctttattaaatattattattcaaaaccgcgatttcctctgtttatttggtaaatgacaattaacgatcaatcggaggaattggcttttattggttccccaccgatcacccagcccaccgagatatacct

SEQ ID NO: 30104 - DNA, 381 bp, Gossypium hirsutum
  unsure (1)..(381): unsure at all n locations
  Clone ID: LIB3083-074-Q1-L1-B4
catcgaagaaaatctcanatgtggagttcgggtgcggatttgaaagagaatttgcataagatcgcgcttgatgtatacgacgatgaggacgaagaacgcgagatctacggttcagggaatggagatcattcgccattctttgatagaaggaactctcataggtttgcccattcaaagcccgtttcagtctctccgatcgctaatggaaccgattcgccgattaattctgagattgaaagatacagagcagaaattaagaagcttcaggaatccgaggcagaaattaaggctttatcattcaattatgctgctttattaaaagaaaaagaggagcaaatttcgaggctgaaccaagagaatggctcattgaaacaaaatttg

SEQ ID NO: 30105 - DNA, 386 bp, Gossypium hirsutum
  Clone ID: LIB3083-074-Q1-L1-B7
cactaattctggaggagacaccaccgctaggaagggaaatatccatgggatactgaatactgtgacttgtggaattttgattacacttgcaactattattgctaggtacataacaagctgtgaataccagaaccagcttggttttatctacatgtcctcggccaaatatcagcttatgccatatgaattgcttgctggggaactgatctttagcttggaagcgaattctgtgatattacatattcaacccatagatacatggggattgacctttgcctactatgatactgacaaagtttatgtttatttttatggccataaaaggatcacatgcttcgtttctactggaacatttaccactcacaattttggatacaccatacttg

SEQ ID NO: 30106 - DNA, 333 bp, Gossypium hirsutum
  Clone ID: LIB3083-074-Q1-L1-C4
aagtctctactttttcttgtcttcaatcaaatcggtgcgggtacattatatctctatatatctctacctctaaacaagcaactaatattactcggaagccaaccaattacaacaaaagcgaacgctttatctccatactgacagaccatgaacactcactcactgaatctccatagacgctcgatctgaagtctaacttgcttcatttgctaactgactaccaccgtttctatgatttggacaattctaaacctaaactaacatgatcctatcttaaacattcatgaccaagccaactcttgtactgttagagacctttatttgacaatatct

SEQ ID NO: 30107 - DNA, 270 bp, Gossypium hirsutum
  Clone ID: LIB3083-074-Q1-L1-C5
ttttattttaagcgatgcgcaccactctggggcgtggatgacacactcacaggggtgttactattaccaatctggatgataagaagataacttttcagttttactatgaaatggatcttgatacgttaattgatgaaagcccttggacgtacaataatcatttactactttttcatccaataaaggaaagaaatgatccgatcagcattaccattggttagggtggactcatttgttcagattcatcatctcccaatggtgtttgtgttt

SEQ ID NO: 30108 - DNA, 182 bp, Gossypium hirsutum
  Clone ID: LIB3083-074-Q1-L1-C7
ttcacaaccaaagcttcggtgtcccacatgctctggcctataatattagttattttgatttttttttcctttctggtttctggttgctgagttttcggataagttggcgtctatactacagtgagaaatttgtatataatgattacagaattatagggtctaatatacgagtttcttttatc

SEQ ID NO: 30109 - DNA, 285 bp, Gossypium hirsutum
  unsure (1)..(285): unsure at all n locations
  Clone ID: LIB3083-074-Q1-L1-C8
aaaaactacaactattcgatcccctcgactaaangaattcaacacaattttacttttaaaacttcagaatcacacatgctctcgtttattatattaactatcttccttttcctctcatatccaacacattaattctgacttccctcatacccatccatatatactacttttataaatttctatcataacaattacacactcctactgtataatatacaattctctcttatcaaaaaaaataaaataaactctaaactttccaccaccacccaatatcaacctata

SEQ ID NO: 30110 - DNA, 381 bp, Gossypium hirsutum
  Clone ID: LIB3083-074-Q1-L1-D3
gcctcctgtcactgccccgaattacgacattcttggggaggcttcggctactcattccatgccaatttggcagcctcctcctcctcctgatgcttcaacaagagatgagagtgtgattggtagggtcgaagaaccaccagctagtaaggaaggcgttcaatcgaagaaaaggcaggttgggggtgaccctaagactcccaaggccaaaaagcctaggaagcccaaggataataccaattctagtgtgaagccagcaaagaagagtatggatattacaataaacgggtatgacatggatatttccagcatttcgattccagtttgctcgtgcactggaaccgctcagcaatgttatcgatgggggtgtgggggttggcaatc

SEQ ID NO: 30111 - DNA, 378 bp, Gossypium hirsutum
  Clone ID: LIB3083-074-Q1-L1-E5
caaggaccttttcaagttatatgatcctggcgggggtgagcacttcaatatctttgcagcaggactaaagactgcagacagagtggtcacagttagccatggatatgcttgggagattagaactttggaaggtggttggggtttgcatgggatcataaatgaatgtgactggaaattgcaaggtatagtgaacggaatcgatatggaggactggaatccacaacatgatgttcacctcaaatcagatggttatactaactactccatcgaaacactgcagcctggcaaggctcaatgcaaggcagccttgcagaaggagctcgggctacctgttcgtgaagatgtcccactgattggttttattgggagactggatca

SEQ ID NO: 30112 - DNA, 349 bp, Gossypium hirsutum
  Clone ID: LIB3083-074-Q1-L1-E7
aacaccatctaattttttttatctttttttcattccttgatcgttttttttcaaacaaatattcccttccatttccacttaattacctaaaaaacaaaatttcttaaaaaccatttaacttcacatcctctatcccctttttaaacatccaaattcttcctgctaacttaacttcttctaacatcgcatctatcctccttcccaaattctccgtaatataacttttcaatcaaaaaacaattctttcaacatctttttaaactaaactttaacctttaataacttacctcattctttattttatcatcccgaactctcttaattccttataaataaaactaatacaccc

SEQ ID NO: 30113 - DNA, 363 bp, Gossypium hirsutum
  Clone ID: LIB3083-074-Q1-L1-G2
agttaaaagcagtggatcatatggaagggttacaaattcacaattctgaaagggtaacatgggttgtgtttgaatcctaacaagttttctgtggcctgattatctgtaaaagcactcaggtcttggtgattttttttttttttgcaacaaatacagctttcacaccttttggttcatctacaatacaaagaacatttgttttttcccccacatcaatgggggtttataacaaatgccattctcaagattgcagtttacaagaaaatcattcgcggttgtatttctttcagacgaatcatcaacacaattttctttgtgctcatagtcagaagatacctgctgcatactgatggttctggaaaa

SEQ ID NO: 30114 - DNA, 218 bp, Gossypium hirsutum
  Clone ID: LIB3083-074-Q1-L1-G5
caccaaactccttttttattctacttatacctttcgtggctgttttgaatttttcctaccctaaaataaaacaatgcctttatatacacatcttgcaagcccatatcctacttctaaacacatccttgtagctttactgcctatagcattgaatacaaccctttactccaatgccaattgacataactgcatgtggaagataagaagctacttacacc

SEQ ID NO: 30115 - DNA, 294 bp, Gossypium hirsutum
  Clone ID: LIB3083-074-Q1-L1-G6
ctgaaataaaacccaatggcccaaccaatgccatgctttatagaaaatgagattagggtgcttagaacccaaagaaggagattacaagttagagttagacattaattttgggtttccttttgttagtacttgcttttaaagtaaatttccttttgaggtaaaacctggaggatatgggtgggggaaaaaggttgtacaggatctcctctagttagcagctagcaaatgtagcacgaaatatgatgctactatatacagccttttctttttatttatttcttgattgttggcttc

SEQ ID NO: 30116 - DNA, 376 bp, Gossypium hirsutum
  Clone ID: LIB3083-074-Q1-L1-G8
acggtttagtcgattctaggactaacatagcacgcgtgagtctatctatacatgccatgttatatatgacgatagtgtgataacttctgacatttgaaaatgtgttttcatatagcgaaagcatcttgatagagctatagctgatgatatcgagagtgtagcgcctactcccgcgcaagggacaatgccggttgattcttaccaacttcgagtaatcaagagagtgaggctaaataagccttttaccaaatgatgaatgactggttgactcaatatatgcagactaatccggctgctgaacaacctctacccctaattaatccatcttcgattcctgttatgcctcaaataagtgatccgttgagattgtgtaagc

SEQ ID NO: 30117 - DNA, 383 bp, Gossypium hirsutum
  Clone ID: LIB3083-074-Q1-L1-H3
cagacacggaaaacagatctgagagtcatatggccgcctcttctgtgttaaatcctgttcatgaaaatttgcctgtgaaagaactacaaacaaaaactgtggaagaaactgcttcccatgaggcctgcagtttagcagattcaaagcaagaaaatattgaagcttcagatgctatgacagtttcaaactctagtactgtggaacatgctctagtttcgtctaatgctggtgttggaacttctctggaggttacaacaggacacagtttccatactgatactgaatccgataggtttcatgtcctgaattctgttgatcttactaatgagaggatgcatgcatctgagccaaaagaggcaatgtctgatgtggctgttatgaat

SEQ ID NO: 30118 - DNA, 321 bp, Gossypium hirsutum
  Clone ID: LIB3083-074-Q1-L1-H4
caaatttttaatttatatcttatagtcatatggcgtgctgttgtgtgttaaataccctcatcaaaacacaaatgtgaaagaactacaaacattacctgagtatgaaactgtttgctatttttcctgcgcaaaagcagattcaaagcaatgagaatatttgaccttcttgtgctattacagtttaaaactctaatactgtaaaacatgctctataattttctaatgcatttgtttgaacttatctgaatgtttcaacagtacacatttggcatactaatactgaatcctataggtttaatgtactaaaaacaaaaaatctta

SEQ ID NO: 30119 - DNA, 256 bp, Gossypium hirsutum
  Clone ID: LIB3083-074-Q1-L1-H5
acaatttccgatttgctgctgcagaaagcggggccgtttgccttatagcccgactcgaaatctacgaaactcaataaccaatcttcaaaacagattctaagaaccgagcttaaatcagacacattgctgacaaatttgatgacagaaaagctatattctacagaacttgaagtcgaacaaatgccacccgatgtggaacacactgtaagatgtaatgatatccttcgatgccaattacagaatgcaacggacaaca

SEQ ID NO: 30120 - DNA, 274 bp, Gossypium hirsutum
  Clone ID: LIB3083-076-Q1-L1-A3
ttcactagcggcaatgcagatggaaggctggcagtatcagaggatgatggaagaacaatctgagtatgaccaggaagctttgcagcttcttaatgagcttatggtcaagagggagaaagagaaggtggagctcgagaaagagcttgagatatatcgcaggagggtgcaggactatgagaccagagagaaaatgataatgctgagaagaaggaaagatgatggcactaggagtgctacttccggtacttgcagcaatgctgaggacagtgacagt

SEQ ID NO: 30121 - DNA, 248 bp, Gossypium hirsutum
  Clone ID: LIB3083-076-Q1-L1-A5
gcgggaacacaacatgcagggtggtgatttaaggggaggacgggctaccaaccatacatagaccacacagaaatgcagactctaaatgaactcatggatgagcgggagaatgaggatggggcattcaacatacagacagagaactttagaagggcgggacttgacatggataaccgagacaaccagacattgctgaaagaacggaaacacgatggttctaggagagcgggttcagcaactggcgccac

SEQ ID NO: 30122 - DNA, 251 bp, Gossypium hirsutum
  Clone ID: LIB3083-076-Q1-L1-A6
gattccaatataaaggatccatagagttaaattgaatgttattgaaacaaatggatgtttcgggtaaaagcttacattccactaatgtgtaaagtaatagatgttcctccaaataacaaatatatatacacacaatttcaaaacaaaaagctgattctcagatgttacctacatgctaactagttggtttcctcccaaaaattaaacccacaactcaaacaagcattaggttttgtgtgtgtgtgcgtgtg

SEQ ID NO: 30123 - DNA, 282 bp, Gossypium hirsutum
  Clone ID: LIB3083-076-Q1-L1-B10
ttctactagcaaattctatacttcaaagtcggcgatcttagggagaaaacgtaacacaaattgctatcaattgaggatcaaaatgagagagatgcttcatgtgtcaagggggacaatgagggaaccaaatcagtttcaagattagggagattgttcctatgagcgcttaatatatccaacctatacgaaccaaagctccttatatctagatgttggaggcggttaaagtttactttaacgaggcttcatgtggtcgctttgttcctcgtgctgtgctcatgg

SEQ ID NO: 30124 - DNA, 268 bp, Gossypium hirsutum
  Clone ID: LIB3083-076-Q1-L1-B5
acgagcgagcaccaaaaaacatcgcaggaagcgagacatcctatacgtctaagccaacatgggaggaaactacatttgttgcaaattgtgctatgtatttatctgccaacatggaataaggctctaaactaactacctatgcactaatcaagtttagcttgttaaggttgatgtttagtaccatggagcttggcttatccgtccctgccactactaaaccctatcgatcatttaccatgatcaagcctgcgccaattttccatccttt

SEQ ID NO: 30125 - DNA, 261 bp, Gossypium hirsutum
  Clone ID: LIB3083-076-Q1-L1-B8
tgtacgagctgaaggaaggagagggatgtgcagcttctgctcatgcatgtactgagtcttgtatgcttgagtttgacctaagatgtgcatatgctgctatcaaacaggctaattgggatgcttctaaagttagggaaaaactgcaacgcgatattgatgctcacttattatctgttcgtgatgcgaaattgtcagaattggttgccagatatgaggaaaaacttagacagttattatgtgaaccagtggagtctctttttg

SEQ ID NO: 30126 - DNA, 274 bp, Gossypium hirsutum
  Clone ID: LIB3083-076-Q1-L1-C12
ataaaatccaaacatttcgaaaatgcaaaagcaaaaatggggttatcagtccaaacagtggcaccatctttagccttaatcagtcatcaaacaagcatcaaattcctcatatctcgggaatcaacaatcttcattttcttattccaaaaagatggacccaatatacaagtagttgttttgttctcagattcccctttcgctcttagaatttctccccagacttcttttccgctttgccctcgtttttctcggtctcaccctcctcttccttctt

SEQ ID NO: 30127 - DNA, 262 bp, Gossypium hirsutum
  Clone ID: LIB3083-076-Q1-L1-C3
ggagattcttggttgaaagaacatgaacagaacaaggagtattattctgctgtcttctttagagagagctgggctaagctccctgttcattaaagccgagaagggttaattatgttatcaggcggccgggccaatgctcgcgatcttgcaagaaaaggctaacgacttttaatgaacctgctgaagaaactgcaaaaaagcaccctgggtccgttatcccaagaagagatttgagggagaagacatgccaactaatagtgca

SEQ ID NO: 30128 - DNA, 247 bp, Gossypium hirsutum
  Clone ID: LIB3083-076-Q1-L1-C5
ctagcgagattttttttttggggacggaacagagaaataacattatccaatcatgggtgctacatacagttgctctagagtgttgctacacaatctatataacatgacagtacgacaaaaacactaaactcatgttgcagcttaaatgcacctaaacacagaactgagccaaaacattgtatactgggctggcttaacagactacacaataatacctgtggaccttgagaaaaatgagaacgagatg

SEQ ID NO: 30129 - DNA, 229 bp, Gossypium hirsutum
  Clone ID: LIB3083-076-Q1-L1-C6
gttgcctggaataggcaacagataactgaagcttctacaagggaagtcattcttggtacagagaatggtcaactgtatgaaattgctgtagatgagaaggacaagagggaaaagcatataaagcctttatttgaattagcagagcttccagaagctatcatgggtttgcagatggagacagctatcgtgagcaacggatctagatattatgtgatggctgttactccca

SEQ ID NO: 30130 - DNA, 313 bp, Gossypium hirsutum
  Clone ID: LIB3083-076-Q1-L1-C7
gggcggtctagaaatagcgaatccatccccctgcctgaatgcattactagcgggcctgtctcttggtcgccgagcatgtgtgtaagaactagtaatccgtactttctctcttacggcatttctggttaaaagagattaccgtaaactttacgattttttgtaccactcgattggttatgatcaagatgaacctgagaaactcggtatctgtcaagaagaagtgcgacataatctgtgatacggcacgtactataataccgcttgacagacgaagatatatttatggaacgtgctcaatagcattatcagggct

SEQ ID NO: 30131 - DNA, 263 bp, Gossypium hirsutum
  Clone ID: LIB3083-076-Q1-L1-D1
cgggtctgtctcttggtcggccaacatatgtggaagaacttgtaatccgtacttttcctcttccgccatttctggttaaaaaagattaccggagactttacgattttttctaccactcgtctggtttcgttcaagatgaagctgagaaactcggtatctcgcgagaagaagtttgccataatctgttattcgccacgtgctttaataccttcggtggcatgaagattttcttccccaacatgctaaagtggattagcagggct

SEQ ID NO: 30132 - DNA, 263 bp, Gossypium hirsutum
  Clone ID: LIB3083-076-Q1-L1-D3
ctagctttgaaaaccctaggccgcccaacgaagaagcacagccgcattttctttgacaaatatccgaaacacgaatggttggcacatacaacgatctgagttatgctgctggcttgaagaagctggatgagcatcaacatacacgcagttacatttgtggataccaagcttaagaggatgattttaccgactacgcatatctatctggtgcctcatcatctaactacggcaatgattatcaatggtacaaacacattgatgcc

SEQ ID NO: 30133 - DNA, 266 bp, Gossypium hirsutum
  Clone ID: LIB3083-076-Q1-L1-D4
gaaatggagagatcaacagcatcgcggcttcgcactttgggtattcagctatcgctttgctttgctctctacattggtctcaacttgggtcagcctcaaacgttggtttacaacgataatgggggcccctttgacctgtactttatcagcgatagaggtggctctagatcactttaagaacagacccatcttctcaaactgatggggaatgtggccaaagcttatgatttgaactttgaggtgaatattagctagcttggtgagga

SEQ ID NO: 30134 - DNA, 271 bp, Gossypium hirsutum
  Clone ID: LIB3083-076-Q1-L1-D7
ctgtcgcgagcgaagaaaggagagggtggtggtgctaaaacacgaatgccgccctattgagcacaagagcaccatccgatgctgtgcacaaatctcggcggctcagaagtagatccatcaataaatgcaaacagatcatagtcattagcaataaacctaacctattgcttacattgaaggaatgttccttcatcaagcttcacaacttcatgccgaggaaaggaattcaccacccgatcagtagcaaagaccgagccatttaattcaacag

SEQ ID NO: 30135 - DNA, 269 bp, Gossypium hirsutum
  Clone ID: LIB3083-076-Q1-L1-E3
ttcgaggacaaatctcccaaacaaaagcggtctctgccaatgatgtcaagcagggtggaagtccaatttctagaatggaatcaacttcaagctgtgagggaagtgttaccggaattcagatttctagaagggaatcaactcccacttctggtgggctcattactggcgatcaacttcctagagcggaattaacatacactcctgctaaggtcattattggaaaccaaacttctagaagggaatcaactcccacttccggtgggatcgtt

SEQ ID NO: 30136 - DNA, 224 bp, Gossypium hirsutum
  Clone ID: LIB3083-076-Q1-L1-E6
tgcaaccgatgggcaaaagcggtgacgaatgtggcgcggcgtttgaagaaacacggatgcgatttgaaatcgttgtcaaaaacaaagtcttatggcgttccgggtcggaaagatgggacgaggtctacagtcccatacgttactcatgttcaaggggttcttgtaaaccaagattggttgctgctttggactgagacagactaaaattgttggaatttggaaag

SEQ ID NO: 30137 - DNA, 268 bp, Gossypium hirsutum
  Clone ID: LIB3083-076-Q1-L1-F11
tactagggaaagcacgcgtggaggggggatcttatgagaggtggaacactccaccccgcgcaataaacacacacttctgctcgagaaagactgggacctcaaagaggctatgtgagttcaagaagatgaaaacagtgttgccctacaagaaagaggaagcccttaccacgctctctctcattcgagagacctttggggccgaaaaagccgttgaaatcacaaaaatgcgagaggcaaggggaccaagaaacaagctgaaatctcggaa

SEQ ID NO: 30138 - DNA, 202 bp, Gossypium hirsutum
  Clone ID: LIB3083-076-Q1-L1-F12
tctttagcgaaatccctccttgatagtggtttttataaaacgtgtcacccccttcccttcaaaatacactttcaagtctttcacaaccatcattgaatagaaaattgcttaactcagtatcatcatgtaaataaagacatcactcactcacttaaacacagcatcttcttaaaactaattatctatacccttatcaccctta

SEQ ID NO: 30139 - DNA, 153 bp, Gossypium hirsutum
  unsure (1)..(153): unsure at all n locations
  Clone ID: LIB3083-076-Q1-L1-F2
gacacacnnggagacggcggggacacgacacaaagcncananaaggaagnnagaanngannacgagacaangggacaangangaanngagnccagagcaaggcaaagacgngaaagacnncnnggangannangnggaacgnaancaggagga

SEQ ID NO: 30140 - DNA, 201 bp, Gossypium hirsutum
  Clone ID: LIB3083-076-Q1-L1-G1
cttccaattgttggaaaagcgatagtagacatccagaatctgaaggatgccgtcggttcagcggttgatgtgatgcacgcaatggcatcctcaatatgctcattatcatcaaaggtgaaggaaatgaattctttggtgaacgaactcgtgagtgtggccgcaaacgaaaggattttgctcgaacaatgtaaagaacatttg

SEQ ID NO: 30141 - DNA, 155 bp, Gossypium hirsutum
  Clone ID: LIB3083-076-Q1-L1-G3
tttacgtggctcgagattgttcgcgcggagcgcaaatgatgggctgctgttgctgtacgatctgatcaccctcaggggggttatccctgcccaccactcaagatcattattcttgatgaagcctattcgatgacagaagatgctcagaatgcctt

SEQ ID NO: 30142 - DNA, 215 bp, Gossypium hirsutum
  Clone ID: LIB3083-076-Q1-L1-G4
aaactacagattcttggggctggttttaaagaaacacagatatcacaccaccattgtcctcctcttcctctgatgttcttagaaaagctcgactgttttcctacgtctgtacggtgttagcttaccttgctttcgggactatgccttatggacaagatctcatgtgcattctaggacaactggaaccaattacaggccgagccatgtactaaacc

SEQ ID NO: 30143 - DNA, 188 bp, Gossypium hirsutum
  unsure (1)..(188): unsure at all n locations
  Clone ID: LIB3083-076-Q1-L1-G7
aattctttctttaagcagtagcctntgcgagggttaatattcgctggtgtaaaacataactcaaatagctccggcgccgtctatataggcacacaacatcactttcattcttgaaaaaggtggccaattcaccaatgatatcaagctattgaatgccacacaccgtgctaaccaactaaacaaccagc

SEQ ID NO: 30144 - DNA, 233 bp, Gossypium hirsutum
  Clone ID: LIB3083-076-Q1-L1-H4
ttcactaggtcattgccaggttcgaggctgtgccgtgcttactaatgcacccttcatattgaatctggattgtgatcactatattaacaacagcaaggctataagggaagcaatgtgctttttaatggatccccaatttggaaagaagctttgctatgttcaattccctcagaggttcgacggcattgatcgtcatgatagatatgctaatcggaacgttgtcttcttcgata

SEQ ID NO: 30145 - DNA, 246 bp, Gossypium hirsutum
  Clone ID: LIB3083-076-Q1-L1-H5
ggttttccttttcgtttgggcttaaacgtcccagtactcaatttgttattcccatactcgatagaaaaattgtcaagtgaagaatccagactccaaatcaattgttatgtcatgttctcccaaaaaaaaaaaaaatcgaatgcgcaattgaaaattacatgcaaaaccacaaaaagatgagattcaaatctcacatcaatccacatatgatagtaagcatcgggctgcattacccaaagctaaaaa

SEQ ID NO: 30146 - DNA, 159 bp, Gossypium hirsutum
  unsure (1)..(159): unsure at all n locations
  Clone ID: LIB3083-076-Q1-L1-H7
gagccccccccctgcacgaaancattactttccgagattaaatctttgtggtggggttcaatcgcgggaggcctcaagctattcttcatatattccacggacggaaacaccaaaaacgacacccacaccgagatcaacaggtacaaaatgggggccccg

SEQ ID NO: 30147 - DNA, 151 bp, Gossypium hirsutum
  unsure (1)..(151): unsure at all n locations
  Clone ID: LIB3083-076-Q1-L1-H9
ataatactaantttggacacaaataatttatgactacacaaagtttcctgtcatatcttacatcccatctcaaatatttattgttatttatctactcttgcggattgacccacttccacaagcttcttctaatttaatatcatccaaccta

SEQ ID NO: 30148 - DNA, 250 bp, Gossypium hirsutum
  Clone ID: LIB3083-077-Q1-L1-A11
aatagcagaatttaaccataaaacaattacaatactatgtcaaaattcataaaagtttaattatagtcaatttaaaggattaaattccaccattcaacaagcatataacacaacatgagtaaatggaagtatccagcaacacataaatgcataaccataataacaaactaaagaggcattgcaagtgtctttttgttagattcagtcatgcaaaatcgaactaaactaccaccattatacggaaaatgac

SEQ ID NO: 30149 - DNA, 383 bp, Gossypium hirsutum
  Clone ID: LIB3083-077-Q1-L1-A6
aagaatcagcaaagcttcttccggatcggatctgaccaaagctccaatccctactgatgttcaaggcatgaagaaatcagatagcgaaaatcgactctctgaggtggatattagtggtttagtatctcaactaaaggacttgcagaagaaaaatgcagaattagaagaaaataaccagatgttatctgtggagcttcaagctaaggaagctgagcatgaaacactgcaaacacggtttaatgatctggaacagaatactgtaccatctctaagaaaggctctgaaagatgttgctatggagaaagatgctgctgttgttgcgcgggaggacctctcagcccaacttcgcatgctcaagaaacgcctgaaagaggcagaagatg

SEQ ID NO: 30150 - DNA, 267 bp, Gossypium hirsutum
  Clone ID: LIB3083-077-Q1-L1-B10
atgcaatctactcaggcatgaaaatatcatcttctgtttatatatcaaaatgagtattgaccatcatctatgaccttatacaaaatgagtatcatattcatcatatgagccaacacattatggctaactaacaaaacaataaataaatactcgagtccctatacatgccagaaaacaaaacaatgaaactagctataccaaggtcttgagtgatagtgtaaatcgaagcctttgatgtcactagatccccgatgctagcttggcagc

SEQ ID NO: 30151 - DNA, 198 bp, Gossypium hirsutum
  unsure (1)..(198): unsure at all n locations
  Clone ID: LIB3083-077-Q1-L1-B11
tttacgagcaacagctctctccgcaagcattctaatattatnnnatctatctatactaaaactccaatagacacacagggatgaccataaacatactgagcttcctccccactatacgaacccacacatcctggctaatctacaaaaccttaaacaagctctcgggcccatattcacgccagaaaacaaaccaatgaa

SEQ ID NO: 30152 - DNA, 390 bp, Gossypium hirsutum
  Clone ID: LIB3083-077-Q1-L1-B2
cccaatcgtgaagcgtatgcaaccgtactacatgcttcggaatcctacgtttgtggtgcaataaccctagcccaaagcctcctaaaatccggcaccaaccgcgacttaatcctcctcctcgacgactccatctccgaaccgaaacgtcacgctctcgaattggccggttggcgtctccgtttcatcaaaagaatccgaaaccctcgagcccaaaaacacacctacaacgaatacaactatagcaagttccgactatggcaactaaccgattacgaaaaggttatcttcatcgatgctgacatcatagtgttaaaaaacctcgaccatcttttccatttccctcaattgacggccaccggtaacgacgtttggttattcaattcaggcata

SEQ ID NO: 30153 - DNA, 348 bp, Gossypium hirsutum
  Clone ID: LIB3083-077-Q1-L1-B4
cccaatcttttttcgtatgcaaccgaactacatggttcggtttcctacatatctggcccaaccaccctatcccaaaacctactaaaatcccacaccaaccgaaacttaatcctcctcctatactactccatatccgaaccgaaacgacactctctccaataagccgcttaccataaccttttcatcaaaataatactaaaccctctaacccaaaaacacacctactaataatacaactatagcaagttcctactcttacaactaacccattacaaaaaagttatcttcatctattctcacatcatactgttaaaaaacctcaaccatctattccattatcctcaaatt

SEQ ID NO: 30154 - DNA, 318 bp, Gossypium hirsutum
  Clone ID: LIB3083-077-Q1-L1-B6
ctattttttaagccactctagtgccaacggggggggtgcaaaaaattgatctttatgaaatacaaaaaaccacataactcaaatccagagagaaccaacttcacttgggatatatacacatggagggcggattctcttacattccaatggtaataaccgccgtggtgtaaaactaaaacattttttctcataagggcaacgggctccaatgaaaaaaccatgctcgaaaacctataaccatgtatacatatctatgtctatatataaacctatcccatatattactaaaagcatactaccaacacatcatttccaaaa

SEQ ID NO: 30155 - DNA, 383 bp, Gossypium hirsutum
  Clone ID: LIB3083-077-Q1-L1-B7
ctcctttttaccattgctgtaagggaagatccattagattatgttcgtaatgctaaggccatcatcgaccgaaagaaacgctcccttgaagctttttgcactttctatattgctgactgggcactcaaccttttcggcatcaaggcggcaagtgcactgtcccacaaagttatatctcgcacaacaatgtgcttctcgaatatggttggacctgtggaggaaattggtttttgtggtcatcccatggctttccttgctccaagttcttatggtcaaccttatgcactaatgataaacttccagagttacatcgacaaaatgaccattgttctgtcagtggatgaaggaaccatacccaaccctcaccagctatgtgatgatat

SEQ ID NO: 30156 - DNA, 165 bp, Gossypium hirsutum
  Clone ID: LIB3083-077-Q1-L1-C12
tttttacaaaaaccaaacatttcagaagatttttaaaaaaaatagccctttcaaaccaacccttatcaccatctttatcctcaatcaatcttcaaacaaacatcaaactcctcatatctcctgaatcaacaacattcattttcttattccaaaatgatggaccca

SEQ ID NO: 30157 - DNA, 372 bp, Gossypium hirsutum
  Clone ID: LIB3083-077-Q1-L1-C7
tttgttttagggagtgtaaacagacacatgcgaggtgctttaactaggaataggccattcttgcatgtggcatgccatggtgaggaactagggactgatccgtggaacaacataaacagaacggacatgcacgactattacgagttggatgaactaaaacaattgctgcaggaaggagagtgggaaagtcattataaaaagatggaggaggctgaaaatgattcagatgcggagggggaaagaattctgctcgtatttttacttaagatatgttggttgtaagtgtaacttgctactgctgaatgtgctggtaacttaatagtgggagtcacaatggatagcgaatattcaacttgattgttgttgcggatt

SEQ ID NO: 30158 - DNA, 390 bp, Gossypium hirsutum
  Clone ID: LIB3083-077-Q1-L1-D2
gagaactcgaagatgcctaaattcagaagtcctcttgaatgagttattatatctaacgattacaaacctccgaaacaaaagtgggtgcaggcaacggcaccgattgccagggtcataaggtggcatagcaagacatgggtctctgattctcatttgctgcaaaagtcagactctcatgataccatgtgctcatcgccacatcagaatagtaaaatggaattgcgatctggatagagcataatgactttgaggttccccatgcagtgagtcttcgcaactggatgggtctttgattctcatttctcttgggaacacaatatgtgaagggaatccaagatgtctgccacatttccatgaattctcctaatatgctgagccaattatagcctt

SEQ ID NO: 30159 - DNA, 156 bp, Gossypium hirsutum
  Clone ID: LIB3083-077-Q1-L1-D4
gcttgtatgatcatattgtgagggaagttgaaaggcctggattaatgcttcacaagaaggaaacttgcgaagcatttaccatttttgagacccctcctatggttgttgttggagttatcacttatgtcaaaactccccttttttttcctactttaa

SEQ ID NO: 30160 - DNA, 386 bp, Gossypium hirsutum
  Clone ID: LIB3083-077-Q1-L1-E1
gctgttttggttcttaaagcaatatacaaccccgtttcgtttctacgactgcaggcgctattctccctgctggaactggaaatgatatggccagggagctgtcctggggaggtggtttgggcgcaatggacagacacggaggcctttgcatggtgttccaacagatagagcatgctgcagcgaccattcttgatcgctggaaagcatctattctaaatcaacaggggaagcagctttaatctccaaaatttatgaacaactatcttgtgataggttgtgatgcaaacgaagctttggatattcacaacttaagagaggataatcctccgaagctctataatcagtttatcaataaagcgctatattccagagaaggagcaaggagt

SEQ ID NO: 30161 - DNA, 222 bp, Gossypium hirsutum
  Clone ID: LIB3083-077-Q1-L1-E11
ttttaccagcccctacctctctaagtagttatatttaaccctttacccccctctccccacacatatacaaacaaacaatcatactcccttaatcaaaatcctatatccctcaccacacacttatcacacaattaacaatctcatctcctatttactcttccaaaattccaacaattacatccattacctcttatacaacctcaactcattatccaacatttt

SEQ ID NO: 30162 - DNA, 260 bp, Gossypium hirsutum
  Clone ID: LIB3083-077-Q1-L1-E12
gttgcaccaacaacaaaggtttaccaacatccatatacaaatattccaaatgtctatttgccacataatttcttcaaaagtaacaccataacatcaacaaacccaaaaaaaacaaaaaaacagtaaccatagcatctatattctaaatgggactctagtagttctcaccatcttctttcatcatgagtatgtttgaaaaccaaataattggtgccccatttcatttaatatgttcatcaagcctttattcggataacaaa

SEQ ID NO: 30163 - DNA, 384 bp, Gossypium hirsutum
  Clone ID: LIB3083-077-Q1-L1-E3
taacattttgctacatgtcagcttgtgcttttctgagttgcgtctctattgtgtgcatgaaacttgtccctcttcaacctatcaaatccaggcctcagttcctaaagattgcaactttaagtgttgtcttttgtggttctgttgttggaggtaacatttccttaagatacctccctgtctcttttaaccaggctgttggtgctaccacaccctttttcactgccttatttgcttacttcatgacattcaagagagaagcttgggttacttatggtgctcttgttcctgttgttgctggggttgtcattgctagtgggggtgaaccaagttttcactggtttggattcattatgtgcttaagtgcaactgccgcaagggccttca

SEQ ID NO: 30164 - DNA, 378 bp, Gossypium hirsutum
  Clone ID: LIB3083-077-Q1-L1-E5
gaaatgaatctcttacagaaacttcaatttcggggtatacaagcaaacctcatttctttttctttttttatcttcaacaactcaatgaaaactataacatctattttctttttataaattatttcttcttgacacaaacaaacaattcataaccaagtgctggtgtttaggctgttccttttcttcaagtgttgacaaatcggcaattcttccttacttcaccattgataaagcgatccgaattcataatattccccagtttcaccattgaatccgagaactgattgaagaaagcaacagggtcagctgcatatttttggacaaggcttttggtttcgattccaaataggctggagtacaattcttggtctgaattaa

SEQ ID NO: 30165 - DNA, 327 bp, Gossypium hirsutum
  Clone ID: LIB3083-077-Q1-L1-E7
caatttaaatcttaccacactccatcaaaaaacggctggcttctatataccaccatcaccaaccaaacacaaaatccaaacaacgaaactcttcatatcatccaatctacatcgcaatctaacacttacttttatcccattttctaactcaaactcttcaaaccccaacaatatcttacataacctaaaacctcagaatataacaaaaaccatctctcaaaaattccattctctattgccataccattcatgcctttttcaaatataacaaaacgataattttaaaaaaaaaaattattacatataacatatcactataacaaacct

SEQ ID NO: 30166 - DNA, 270 bp, Gossypium hirsutum
  Clone ID: LIB3083-077-Q1-L1-E9
ctcttacttgttgaaggagtaaggacctctgctgtctatctctaagccctctgtaattctagctgtcttaagtgctctaatcgctgaagcctaagtaagccctaaaggcctttacagaccagtaacagcctaaacgccactattcctttattaacttcatagtctttttttgcacgagcacgaaagtaactagcttacatgttgatacttccttccccgcctatcactctggattagtggatttagatacctcgtccaatccagattttg

SEQ ID NO: 30167 - DNA, 381 bp, Gossypium hirsutum
  Clone ID: LIB3083-077-Q1-L1-F2
gtttatcattatctccttacaggtgataagctccgctgggactctatcccatacaacgaaatctataatggaatgttctggaaagtcgagggaaagaggattaaccaaggagctgtcaatgaacatattgaggctaacccttctgcgaaacgtggtgataataatgaaggcgttgacgatcaaaccatcaacgttgttgacatcaactacactttcatacttcacgagcaacctgcttttgacaagaaccagtttgtgaccttcatcacagaggtacatcacgaacttgacacccaaattacagcctgataagcaagagtctttcacgaataacatatagggggctactaaatttttgatttcgaagcttaaagatctcca

SEQ ID NO: 30168 - DNA, 389 bp, Gossypium hirsutum
  Clone ID: LIB3083-077-Q1-L1-F4
cttagattcattcttcaaaaaaatttcatcatcggctgcgtcacacagatccatcaagctttcattttaatttttccatttttttttcaaattttttggcgcgaaaaaagggcatgagagtcgaacgattccagggaaaggtttacgaggcggctgaactctcgccgccacggcctaattctccaattaccaccgaagatgataacgataacaacggcgaggagttgttcgtgcctcccttgaatttcgctatggtagataatggagttttcaggtctggtttccccgattacgccaattttagcttcttgcaatcactagggctccgatctattatatatctttgcccggaatcctatccagaagccaacaatgagtttttaaaggct

SEQ ID NO: 30169 - DNA, 222 bp, Gossypium hirsutum
  Clone ID: LIB3083-077-Q1-L1-G10
tttcacgagtttttttttttttgatgtctttaaatcagccgtcgcctgcaatctcctttcatcatctccgatggagaaatcaccctccttcctaattaaaagatctatctacactttccttcaatactatcactactttactgcatctgctcaaatcctaggttttccatactccctttcggttcttgtttctcaaaaaattgaaccactttctcctttttt

SEQ ID NO: 30170 - DNA, 270 bp, Gossypium hirsutum
  Clone ID: LIB3083-077-Q1-L1-G11
gttattgggtctagcgaagaacaatacgccaagacggtcaatgtgagcctggtcatcaggcggcgtatggacacggtggatggaagacttgaggaagttgcctgtcagagcttgcagcgcatcgcagatgttgattgtgatggtctcgtcttgcggcttgacccacttccactgctgctccgaattcaagatctgcaaagcggcgacaggctggcggaatagaagtgtgatacttccgagatcagtgtgacctggtgagtaaagctcgcc

SEQ ID NO: 30171 - DNA, 375 bp, Gossypium hirsutum
  Clone ID: LIB3083-077-Q1-L1-G5
catcttttcaaatcgagggaaactcattggataggtgaatatgcatgagcatctgaccgctaaaactatgaatacatgacccagaggaagcctagaaaagcacctttttcgcaaggctggatgcaatcacacttggtcaacagggatcatgaatgatctaaaagcaccataaaggctagcacttctacatggggtcgacactcctattatttcatatgccataacacacatgaaacattttattgcatgcggactctaatgcatagctcgctgactgaccactcgcagacacactaccaacggtaaatccttcccacgtactaacacaagggaccggcacatacgcgcatgctactactgaatatataatgactg

SEQ ID NO: 30172 - DNA, 131 bp, Gossypium hirsutum
  unsure (1)..(131): unsure at all n locations
  Clone ID: LIB3083-077-Q1-L1-H10
tgaacaatcanattgtcaggttgttcaaaaggactatctaacaggtgttttatctaaaaccagtggcgaggattcataaccaaaccataacagagagcacgatcatcatggccatggatgctctcaaagtg

SEQ ID NO: 30173 - DNA, 390 bp, Gossypium hirsutum
  Clone ID: LIB3083-077-Q1-L1-H2
ttgaattattttaccaaatgaaagggatgccttctgggggtgatgtggagactggagatattccttcattgacggatctgggacttaacactgctgccacaatggctcaggatggcaggccatctgttagtgcttctatggctggtggcgagaatgaagcattgcaaaggcttaaaaagtttgcagctgagtgtaaagcacagccatacaaggggagcaaggatggtaaccaagaaaccatatatggtgctaacttttcttgcaaaatatcaccatggctagctatgggatgcttatctccccggttcatgtttgatgaactaaagaaaactgcaaataggaccgtttctgctacctcaaagaaaaatgatgggggcagtgactcacctg

SEQ ID NO: 30174 - DNA, 379 bp, Gossypium hirsutum
  Clone ID: LIB3083-077-Q1-L1-H4
gatcattatattctatcacttcccaagtttcgtccgaacgtaagttttctggactttctgaccatcaactgtacgatgactccaacataaatgaagttgattcgaaccttgaaaactatgaaaaactctctggggtcactctcaatcattcgaaagaacttttagagaacggttgaattgatagcttatttgggacaaaacacatgtctactgctgatttcacctgtcagggtgcaatggctgctgagggctcatccattgaactggtcaatgcaatccaaccagcatgcaacaatagcccatcagctgattctgtgatgagcaataaaacggattcaattctgtgttttacgacaaagcatgcacattcaagcctctc

SEQ ID NO: 30175 - DNA, 375 bp, Gossypium hirsutum
  unsure (1)..(375): unsure at all n locations
  Clone ID: LIB3083-078-Q1-L1-A11
taaaaggtttgtttttgagtaagtacatcatantgggctggtgctgtgcagacatcaagccgtgtggctttttcgtgtgatgagttcttgtggtattgctttgtattccttgaccaagttgttctagcccaaatggttttacctatacttaattctgctatcccactattaccggctgcatcttgtcacggaatttattacagattttttttgcattttttagtcagctttactgctttccagagaccatttgtgaataatagctattaagccatattttatatgcatagatttcaaaaaaaggagaatagcggcattcactatgccaacccatgagcatgaatcatcatctggtttggatgctttggccaatgc

SEQ ID NO: 30176 - DNA, 334 bp, Gossypium hirsutum
  Clone ID: LIB3083-078-Q1-L1-A12
ttctctttctattttttttaaccatggctcataactgggggcggtctttcttgcttgtcccacttttactcattactgtctcactagtaaatcgtttgtctcaccaactattcagcctcttgaccttctactctatacacaaacatacctcatcagatctctcacagctggcttcattaatactaaatgcaccaaagtgtttgaaactttcagaccctatatcgcgaaaggtacccgggacatgaaaggtctatgattccctgagacgattctcatttgcccttctaacttctatcagagtcctcaaagtccgcttcatcgttgttcacgaaat

SEQ ID NO: 30177 - DNA, 383 bp, Gossypium hirsutum
  Clone ID: LIB3083-078-Q1-L1-A2
cccacttcaccattggaacacttcatccaccgctctgcctttccccaattgcccttacccatatgacaaaagcctaggacaataatttcccttctttcttatcttctttctctctcaaaagccaaataaactaacataatactttatccatttcacgatctttccttttcactcctgtcccctcattattacccctttgcccccacttcttcataatgcagttcaaaacctctctctttattttttaaaaataatatcagattgatttatttactttttaaaaatatagtattatataatttacctagaagacaacaccctcctcagcgtcacatccaaacttattgccacgccatcctcattctatcttctgagttgtatca

SEQ ID NO: 30178 - DNA, 371 bp, Gossypium hirsutum
  Clone ID: LIB3083-078-Q1-L1-A6
gggaaatctttcgcaaaagcagcgaatttatctcttttgattatatctaggaacgagttcaatggttcactgcctgaagaaattggtttagttgataatttagttcaactttctgctagcggcaataagttcggtgggtcattgcctaaaagcatagtgaagcttgatgggctagggattcttgatcttcatgggaatgagttggaaggggagttgcctagtgggattgagtccttgaaaaagctaaacgagttgaatttagctgataataagttttcagggaagattcctgatggaatagggagtttgtcagtgttgaactatcttgatctgtctaataatcagataactgggagagttcctttgggttt

SEQ ID NO: 30179 - DNA, 327 bp, Gossypium hirsutum
  Clone ID: LIB3083-078-Q1-L1-B2
ctacccccttttcgggaaaaatctcaaaaaaattattttttctttttttagtcgaataaaattaaatctaagggcttcgatcttataattttaccggcccctttattcatagaaaataccaaaaactcgtacatcatccgaggtattcaaccctgaaaacacctatcccaaatcaacatgtaaattcttcaccgttgccaacggataacggttcattccttaatactcctcctcatccccttcgtctctctcaccagactcagcgcccacttctttataatttttttccagcgcagctagaactttacgtgcctcaaaaaacttttc

SEQ ID NO: 30180 - DNA, 389 bp, Gossypium hirsutum
  Clone ID: LIB3083-078-Q1-L1-B9
gagtccttttttttttttccttcattttcttagcggatgtcgggcatctaaaaataaactaccacttttgttcacttctttataccaaagttttgcttccttgattttcaacaccgttttggatatgcgcttttcttttagcttcaaattgagttggatttgtagctaaaaaagaaaagaaaatggcatatgatagtaagcaaaaaaggaacgttgagcccgtaaaggttcaaacttctccatcatcagaagaaagatcatacatcaatctcccaaacttttttctttcagtaatgctaaaatatgtgaagcttggctaccattacattatctctaacgctatgtatttgaagttggagcctctcctaagcattgctttagttcatttt

SEQ ID NO: 30181 - DNA, 328 bp, Gossypium hirsutum
  Clone ID: LIB3083-078-Q1-L1-D10
tatttctttttcttatagagatagagctttattgtgggtgggaattatcccggcagctgaaaacccaaattttttgctcgataaatcatccttagaaaacctttccagattggcaagcacccttgctttgcttgcccaagctgttttcgaggataaaataaatggtgcttttggcctgggaaatttgaaggataatgtttttgattcctgaaccataataaaaattgggacctcctttcctgtggccaatgttaaatgcctgcctaaacttaagcaaattcgtctgaatcctctgcgttgccctctacacaaaggtcaaaaactattt

SEQ ID NO: 30182 - DNA, 378 bp, Gossypium hirsutum
  Clone ID: LIB3083-078-Q1-L1-D12
ttttacttttcttccccaaatggcaaaatgcgatggtgcactagaaacacggaatccaatatccaaaaatacctgcaaacattgacaaacaagacgcgtataaggaacataaaaatgaagagtatcactaatcaccctaatctaaagagcacgaagaatacgagaaagaaaaacccacattccccaaacggaaaaagcctaatgagcacaaaaaacacccattcaaatatccataaatacttgtctacacagaaaagcacgataagagtaaagaacataaacattaagagttccacaagtcacactaatcgaaagatcacgaagagtacgagaaagaaaaacccaatttatacaaatggaaaaagcctaaaagagcat

SEQ ID NO: 30183 - DNA, 381 bp, Gossypium hirsutum
  Clone ID: LIB3083-078-Q1-L1-D2
gctagatattactttttcggaaagtgatctggattcgatggattacattaccatgcctacaaccacacagttggcttcttatatgtcttcatatcacagaagacaagcttttgtgatgtatttgcaagccaaccctgggggcattactatatttggatggacggttgatcgcggacttatcaacacaatatttttccttgaacttacactggtgaccttcgtacttggacaaaccgtagtcttcaattctgcatgataaaatctccgatcatcaaatcagttttttccagagatcacaccttcaaaatgaggttttttttttttcagatttacagaccgattgattgttcttagatcatagcattgttgaaatgactcgac

SEQ ID NO: 30184 - DNA, 371 bp, Gossypium hirsutum
  Clone ID: LIB3083-078-Q1-L1-D3
aaaaaccaatcaaaagcaaacttggaattgcttatctattttaatttacatcccttaaatttacacttaaacagcaaacccttttacaaaatgcaatcactcaaatcaatccactaattttaacttaaaaaatgaaaaagaaaaatcaagaaaaaaatgtactgcaaacttagattaccaagagaaatatgaaaatgtaaaaaaatctcaccaactccaattttgatggtatgcaaaacatgtcagctagcaatttacacacagacatgacatgaacatgtcacacaacctctgcaataatgttttaaaatcatgtcctatattattatgttctaaggagaaaacaatctctggaatactttacaattcat

SEQ ID NO: 30185 - DNA, 279 bp, Gossypium hirsutum
  Clone ID: LIB3083-078-Q1-L1-E9
ccataaatgatggtgaagaaatcattctttctccaaaaacaatttatccatacaaacaacattctctcaaacaggggtcccctaatacaaattccactagaaaccatattccaagttaataaaaatcttcttattttatctagtatcaagataatattttctgtttataaaaaaatttctctattcccaaataccacaagaattatcattctttaattcattcattttattccgctaaaaaaaatcacatttttcactattattaacccgattaattaa

SEQ ID NO: 30186 - DNA, 389 bp, Gossypium hirsutum
  Clone ID: LIB3083-078-Q1-L1-F10
cccgacttttacttaacgtctgatacctgcgaacggggctggtatgatctactgggagagcgctcccagtttgattgctgatttatccaaacctaacacgatcgccgccacagaaatcaactgtcaactgttaaaacagcttccgctgtagaaacaacatcgacccacatcaacacaggcatcaactcttacattctctgcacccctcaattccttaccaacggaaccatgattcacgaccttttcaatccagaccgagttcttataggaagcaatgcaacacccgaaggtcacactgcaatcacaaacttgagagatgtgtatgctcattagcctcctgtggaccgtttaatatgctctaacactatgttctgccgagctattaatac

SEQ ID NO: 30187 - DNA, 185 bp, Gossypium hirsutum
  Clone ID: LIB3083-078-Q1-L1-F3
gttgagatgaagaaacctgagatcaaatccgttgaaatctctggttaattgtgaaaaacgtgtttttgaaatctgtggtttcgtttgttatttttactttttgattgatgtctctgtcccttttgtttggaacaaggtttgattatgtaaatcattaattttaatgtctgagactcttggttttt

SEQ ID NO: 30188 - DNA, 356 bp, Gossypium hirsutum
  Clone ID: LIB3083-078-Q1-L1-F7
atacattcttcttacgagcgctgcacgatctgcacgagggaagaaatcacactgtggtcaaaatttacattcgctcaaacatttggtcgaaacatcactgttgaacgcagccatatacctaaaagacattctggaatggcttgtgatgctattgaagatgatcctcaatggcagttaaaagtacatttatacgatcttcctaccaaaaccaacaataaaatctttcaaaaagaccttaaaagtttatcacatatgtgatctaaatacatctacatgcacaggtgattattatataattctgtcaccacccaaagttcacaggaaactctatggttttatacatgtctatatgacac

SEQ ID NO: 30189 - DNA, 331 bp, Gossypium hirsutum
  Clone ID: LIB3083-078-Q1-L1-G12
aatcgagcggcaccttgtgtttttgcctttgcactttgccgaagacgcgtacaattctctgctttacgcgaggatgaatttaaaaagctagctatatgaccagtcaccaagactgacggtgaataggttgtgtcaaaaagatacacttgtttgacatgggttgttcgaaattgattgagtgaattcaaacatagtatagcaagctaaggaactctatttattcccttttagcaattcccaccaaataagatgaggacggactgcttctataataccacaccagctatgcaaactccaatggccttctagaatgttgattctcgtgagaact

SEQ ID NO: 30190 - DNA, 388 bp, Gossypium hirsutum
  Clone ID: LIB3083-078-Q1-L1-G2
gtaacatcgatcctggaatccctgtgctcctttactgtggtgctatgtcgactcagtctttaacagaaatgagaaccaaatgcatttctggtggtagaaagcggctgcctcatgggactgacaacctcagagaccatgtgtgccggttatctagaaggatgagagccgtaacaacttatcacaccataggccttcgagacctgttatgctgataccggtacttttgtatttctataatatgttcagtttatgaattaaattcgacatatttataaactgatgatatggtagatagtaatattttatggcttactacaaatagatgatcttaaaaagtaaaaataaagagtatttgtcttcaattaactggtgacatttaaattcatat

SEQ ID NO: 30191 - DNA, 295 bp, Gossypium hirsutum
  unsure (1)..(295): unsure at all n locations
  Clone ID: LIB3083-078-Q1-L1-H10
ggcaaacttttttttctgcaaaaacacccgnncggggaagggtttaaaaacccacatttacgggcattggccaataagttcaatggcgatgacaccaccaacgtaattcttactttcaaagacgtcaccgtagaagggcaccgtacgaggtgtgggactcacgaatcaacccgggtaggaacgcgtcctatcttcacaacatatgtttgtgcataaaactagaacaactaatggaccaatcaaagtgcttggccttttcatcaacctatttacggttcacaaaccctccctttgg

SEQ ID NO: 30192 - DNA, 341 bp, Gossypium hirsutum
  Clone ID: LIB3083-078-Q1-L1-H2
aagacgatcactctctagtcgccagctcctatacgatcgcatcgtgacggccaaagaccacataaggcagcatccattccaccagcagcgtatgatcttaacatcaaaacactttgaagacggtctaaccttgttcgagtacaacatgcaaaaagagtgaactctacacctagaacttcgtctgagcggtgtgaagcaaatatatctgaaaaccttgactaggaagacagtcactatcaaggtagagagctccgacactaccgacaacattgatgcgaaaatataagacaaggaacgcatggctctataccacctacgtaatatgtttgaccgaaaacaac

SEQ ID NO: 30193 - DNA, 362 bp, Gossypium hirsutum
  Clone ID: LIB3083-078-Q1-L1-H6
aagatatcttgtccccttttgctggaaagaagcaatgatatacgtacgaaactatggatttctgggaacagatcaagactccagggatgtctttaaaatgttctggtctttatcttgctcaattccggtatacctcccctgatctattagctggtggagatggaactaaaagtgcttcgattcttggtgatgtctatgtgcatccctcggccaaagtacacccgaccgcaaagatcggtcccaatgtctctatttcggcaaatgttcgtataggagctggggtgagacttataggttgcatcatcttggatgatgttgaagttcaggaaaacgcggctgttattaattttattggtggatgg

SEQ ID NO: 30194 - DNA, 321 bp, Gossypium hirsutum
  Clone ID: LIB3083-079-Q1-L1-F12
atacgaatccagctcgagtttatcttttggtccgaactctgaaaaagggcgggagctgacttacagggagagtgcttcccctatgataactagatgtatccaaatctaacaagatcgtggtcgacaaatcaactgttcctcttataacatccgtgacccaaggaaaaatgttagcccacaacaacgaactcttaatccttcagattatgttccaacatctattgattgtcaagggaactgaaattcaggaccttttcaatacggaccctgttcttattggaagtccggtaactccacaaagtctaaaggcaataccaatat

SEQ ID NO: 30195 - DNA, 371 bp, Gossypium hirsutum
  Clone ID: LIB3083-079-Q1-L1-G10
gagaaattttatctaaagctaatgattgaagagcgggaacctatggatgtaccaatggtgttcatatgtccaatttctttagaaccaatgcatgatcctgttaccctttgtactggtcaaacttatgagagatccaatattcttaaatggttctctttaggtcattgtacttgtcctaccactatgcaagagctttgggatgattcaatgacaccaaacaagacacttcaacagttgattcatagttggttttctcaaaagtatttggctatgaagaaaaggtcagaggatgtacaaggaagggttaaagagattttggagaatctgaagaaaatcaagggtcaagctagagttcaagctttaaaagagct

SEQ ID NO: 30196 - DNA, 373 bp, Gossypium hirsutum
  Clone ID: LIB3083-079-Q1-L1-G9
gtatcttattttttctctctcccactttcttctatgggttcttgttcctaatgttgctgttgtttgttcaactctcgactgtcagcaaactcatcagtgattcaaaggaaacaagcattctttagtgagggtgttgtggaaattcacgagaattgaatcttttagaaccaaaaggagataagtctatacgctgtaaattataatcagatgctgaatgaaggttcaaatgagactagcaccagagctagttaccactccagtaatttacctgaacctgaccttgagaagcaaggaaacaaccaagtgttgcctcaggatgaaagactgccaggctcagttaggggttcagcctgtgagtccagtcccacattgt

SEQ ID NO: 30197 - DNA, 106 bp, Gossypium hirsutum
  Clone ID: LIB3083-080-Q1-L1-A11
acaagtttttaccaactccttataaacaagcatctgttgtgttgattgcactagctgtggggatgattactattgagatggcctataaacctttattagacaaggc

SEQ ID NO: 30198 - DNA, 140 bp, Gossypium hirsutum
  Clone ID: LIB3083-080-Q1-L1-A8
catcacattttcttgtcctgtatcatgtcctataaagagcgcatcaggtcggctcagcggtcctacaggccaattgtcattgcctgcgatcagcatcggatcggtgtgaatggacacatattgtctcaccatatagctta

SEQ ID NO: 30199 - DNA, 219 bp, Gossypium hirsutum
  Clone ID: LIB3083-080-Q1-L1-B7
ttgtatctcgtgatttaaaattccattgcttacataatttcttttataagaggctagactcaataagctttaatttcatattttattcattctctaattccatttctacaagttttggtgatttttcaaagttagacttctgctgctgtccaaaacagttttagtgcaaaatgatgatttccattttgccccaaatttcacaattcatacaattcagtc

SEQ ID NO: 30200 - DNA, 307 bp, Gossypium hirsutum
  Clone ID: LIB3083-080-Q1-L1-C4
ctttgatatgaagaatgaacaaggaagaagatccgagcaagaattatggctaaggctaaagaataaaccaaggattcttatcatccttgatgatatttgggaatctatcaacttaatggaggagataggaattccaattggggatgatcataaaggctgcaaagttcttttaacaacacgtcattaacaagtatgtcgagctatggattgtcaaaacgtggtacaacttggctgtttgaatgatgatgaagcttggactctatttgaaaataaagcaggtctagatgacttttctgatgattctatt

SEQ ID NO: 30201 - DNA, 308 bp, Gossypium hirsutum
  Clone ID: LIB3083-080-Q1-L1-D5
agtacgcattcatgcagtatgcagatcagatcatgggacgtttccttagggtttttgcttgtaggagtgctaccgtacatgaggaggccatgcttgctattggagctcttgcttatgcaataggagcagattttgcaaaatacatgccggagttttataggtacttggagatgggtcttcagaattttgaggagtaccaggtctgtgctgtgacagttggtgttgtgggtgatatttccagggcattggaagaaaaaattgtgccttactgtgatgggattatgacacaacttctcaagatttgtcta

SEQ ID NO: 30202 - DNA, 208 bp, Gossypium hirsutum
  Clone ID: LIB3083-080-Q1-L1-E1
gaaatcccttctctccccattgaagcaactctgtttccgggtgcatccaatccatatgaagagatcacgtttataccttttgcctgacgatgtgcaatcatgcccttgcgtaaatccgcatgtgatatggcccatgttgttggaatcaaacgcatcatccatgctgcctgcctggcagtgaaacatgtcaaaggctatatatccactc

SEQ ID NO: 30203 - DNA, 325 bp, Gossypium hirsutum
  Clone ID: LIB3083-080-Q1-L1-E11
cttgtccctcttgttgttgatatcatatctttatcaatcaaggagttgatcgagttaggggcagtgacatttttggtccccggaaactttcctattggatgctccccatctttgctgacaagttttcatggttcagaaaaggatcaatatgatcccttaactggttgtctaacatggttgaaccaattctctcaacaccacaatgaattacttcgaaaagaactcgaaaatatccgaaaccttcatccccaaatcaacattatatatgttgattattacaaagcttcaacaccgttttaccagtctccgaaaaactatggattta

SEQ ID NO: 30204 - DNA, 381 bp, Gossypium hirsutum
  Clone ID: LIB3083-081-Q1-L1-A2
cattgagcaaacaaaaagaaaataaggacagaaattttacacacaaaatggttaagcatttggaagacacttgtaatttgttctctcaaggaaaccaacgaagtgagggaacagtgaagctcctgaaaattgtgtattgtacacaaactccacaaggaaaaagaaacacaactgtcatcttagaaatctgaacctatcactccatcgtccatgcaaatcttcttcagaagccaaccaaataagatttacatgaaacccagaaatataatcacataatggagcatcggctcctttcttctgctggttggggggccaccggctgatacctgtttgacttcgaggggttgtaggtgaactccgatgtatccagcccatactttt

SEQ ID NO: 30205 - DNA, 361 bp, Gossypium hirsutum
  Clone ID: LIB3083-081-Q1-L1-A6
gttttctccgcagcggcagctgctatatctacatctgctcgtgttgcgtgtagaacgatagatcacagttcatttcaattttaaggaaccatggcggactcttcagggacgacgcttatggatctgataacggctgatcctgcgcctgttccagcggcagcatccacagtgtcttcttcatctgcatcatcgacgacagcggcagcgtctcctgctgccacgcagcaacagtatgtgtcgaccaagaccgcgctgggggagaaaaagtccaagagagcggctctgatgcagatccaaaatgataccatttctgtggctaaggcagctctcaaccccgtccgtactaacattatttctcatc

SEQ ID NO: 30206 - DNA, 257 bp, Gossypium hirsutum
  Clone ID: LIB3083-081-Q1-L1-A7
tgggaagttgaacaaaacattgacatgttctggctcaagtggagtcgacgatatgcttgttggatgtcgttggcataacgaccatcttgtcactgtatctctaaggggcacaatgagtatattttctgctagcaatctttgaaaatccccaattccattatctggacacatgaaaaatttccatttaatagctggcccaaaaaggggcccaaaatgtggactggctaatagttattatgcgcctaatagttaaatgg

SEQ ID NO: 30207 - DNA, 385 bp, Gossypium hirsutum
  Clone ID: LIB3083-081-Q1-L1-B12
cccaatcgtttttctgaacgatgggccgaatggggggatttgtctaggatatttccagagtacgtgtgtccatcatatccctcaatcccacctttggattttgcaatggatgtatcaaggatgaggaatgttgcttgttatattagccatagttccagtccgaatgtgctggtgcagtgtgtgttgtatgatcacaacaacttgatgttccctcaccttatgctttttgcaatggagaatatccctcctatgagagagcttagcatagattatggtgtagccgacgaatggactgggaagctttctatctgtaactaaatatcttaagaggaatattttggattttgatgtggtgcagccgggcagtgagacatgataaactgag

SEQ ID NO: 30208 - DNA, 309 bp, Gossypium hirsutum
  unsure (1)..(309): unsure at all n locations
  Clone ID: LIB3083-081-Q1-L1-B4
ttgaggcaaaagagaacttgcaaaaggatctgggtagagatcctacagaagatgaattagctgaggcaacaaattcgagtgcagctcaagtgagaagacagttagaggttggtcgagctgctagaaataagctcattaagcacaacctccggctcgttttgtttgtgataaaaaaatattttcaagattttgcaaatggtccaagatttcaagacctttgtcaggctggagttaaaggacttattacagccatcgaccgctttgaaccaagaaggagattccgtctttctacatacggncttttttgga

SEQ ID NO: 30209 - DNA, 390 bp, Gossypium hirsutum
  Clone ID: LIB3083-081-Q1-L1-B9
catgatcttaaccttttaacctacttgaattttcttttgtcctaacaaatttaaaagcattccataagtgtttccccttccttattttttgtgcatcgaggagcacataaagaattaactcctccatgtctatttctcatacatgagagatcaacaaaatacaatcagacaacacatacaacactattcatcatgaatcaagaaacgcaaaggagaggataaaaataaataatcctaccaaacaaagaattaaccatttcatccattttacaaaattaagggtgatcacaaatcacccatctttgctaacatccattccagcattgtagtatagaacatacaatctaataaaaagtagttcaaaatcaaatatacataaaatcaaacaga

SEQ ID NO: 30210 - DNA, 387 bp, Gossypium hirsutum
  Clone ID: LIB3083-081-Q1-L1-C12
gaaaagagtttaaagagcttctactttttctagattccacagtacattgcgcagttcactttgcgatcattcgtctggtttttttcttctttatggaggatatagaggcttttactctaaaaataccttgatattaacacccaaaggtgggaatgatatccacaaacgtgggggcacctttcttctcacttcacgagggggtcatgatactcaaaagattggtgataacatccagaatcaccattctatttggaaggcaaaggtggactctttgagtttattgaagagagattaaaagagaatggacatatagttattgttgttgctgaaagagctggtcaagaatatcttgctcaaagtatgcaaggaattgatgagaaagatgca

SEQ ID NO: 30211 - DNA, 390 bp, Gossypium hirsutum
  Clone ID: LIB3083-081-Q1-L1-C9
atttatttcactccaatttcaaggaaaccctcagtaaataagacctccaattcggccggagagagttgcggtagcggccatgtgagaaagccgacggagcacattcgtaagtccaacgaaaactaagagaagaaaatgttgcagcagcagacgaacaacaattccagtagtagcaatattccggtgagcgagaggtattggactttagttgataaagctgataagaaattttcgaagatcagagacttgccttactatgagcacaacaggtacgaaacatacttttacaaggtattcatacgctcagttgtgggagtttctgccggaaaatcggcagaagctagttgaagcagggcttatgagatgggagatgggtgagattgcatcgcg

SEQ ID NO: 30212 - DNA, 371 bp, Gossypium hirsutum
  Clone ID: LIB3083-081-Q1-L1-D12
gatggacttgaagaatgtatgaattacttagtagcacattttcgtggttgctttaatggccataaaatcgaatctacacgatccatataatgttctcgaaaattgggattcgaattcggttgatccatgtagttggaggatggttacttgcactgcagatggatatgtttctgccttgggacttcctagtcagagcttatccgggtccttatcaacatcgatagggaaccttagctacttgcaatcagtgttgcttcagaataatgctatttcaggttccattccagctaccatcgggaagttagagaagctcgtaactctcgatctctccaacaatactttcagtggtgaaatacctgccttcttggggg

SEQ ID NO: 30213 - DNA, 400 bp, Gossypium hirsutum
  Clone ID: LIB3083-081-Q1-L1-D9
ttacattccaccattcttttgcttttaatctctatatccaaaaaaacaaagcagaaaacaaaacccaaatgtcaagttcaaagcttgtcgtcgttaaagatgatgatgaagctgaaaggaccagctcattggagtttcaaaacgacaagaagaagaagaagaagaagatgatgatgatatcatcgggagaattgaaggcaaatgatgatgaagatgaagacgaagacgaagacgaagacgaaaggaactcattggagtttcaagacaggaagaagaagattatatcattgggagaattgaaagcaaatgatgatggtgatgatgatgggtttaagactccaacatcattggatcataaaatcccagtgatgaaacaatgtccaccagcaccaaggaaacc

SEQ ID NO: 30214 - DNA, 252 bp, Gossypium hirsutum
  Clone ID: LIB3083-081-Q1-L1-E2
gcatgatgcaccacatggagcacaccacatctaaaatgcccttcttgcattacctcaaacatgcgtagagatatgccgcaatgcagatagtggggtctgtctgctctagaaatggctcttggtacgggcgttcccattgcctagctattgtacaacagcaggctgcctggcgacaaaatatgtatgaccatgaccacaggcttgccactcgcactggctggacgatctcgtgacccagcacaccaaggaata

SEQ ID NO: 30215 - DNA, 302 bp, Gossypium hirsutum
  Clone ID: LIB3083-081-Q1-L1-E5
cttgcgccgcgcgtttacatttctactctgcgatcagtcataagcggtcaccgtcttcggcttgttctttgggttctacgtttcgtctcatactctcgccggatcaagattctgcccttggttgttgtaccaaataattaaagttgagctaaaccttaaaggttagtggctgcaacaatagtataaaggtgaattacgcacgtcttggatcagttaatgctagacatacatggatccggtggactgggacgaaatttggtagtgctattgacaatgcctgcttggtcatcgtctcatattta

SEQ ID NO: 30216 - DNA, 387 bp, Gossypium hirsutum
  Clone ID: LIB3083-081-Q1-L1-G3
ctcgtgccgtttttttttttttttttttttaacaaaacaaaaattaacatgcttttatcagcatagatatagtaatagtatcaatgttgtataaatattacatttaacaatacaaacaatattacaggaaaaacaatgatatgaaactttgcaaccttctttcagtgaaaatcaattttgggttcaatgccatgtcgacattcgtctgcaagagcaatatttaacatttcagtgcaaaacggatcatccggtttcagccataaagccttatgatagtatgtaattgcagaagtaaaattatcctgcaaatggtacgtgtatgcaagaccagcataagtgctcaagctttttgttgataacggtagtgccttctcatagaatgagatt

SEQ ID NO: 30217 - DNA, 399 bp, Gossypium hirsutum
  Clone ID: LIB3083-081-Q1-L1-G6
taatttcggctctcatttttatgttcatcccttttaatgatataaaccctttgctcacttcatgaccttcaaccaagttttggctttctctcaatcacttcaaaccattttcttctgaaaaatggcttccaagattaaagcatcaagtgctctatttttctccttcaaccttctcttctttactttagtcaactcttataatatcgatgatgattcaaaagattctaaaaaccctgtttttattcgtcctggagctgtgtactcaaacaatcaagaccagttagcctcgtttcgtgtctggggggttgggtgctggcggatgttaatctcgaaaacgcacctacaacaccatgttgcagcttgcttgcaagaatggggaatcttgaagctgaagtttgg

SEQ ID NO: 30218 - DNA, 368 bp, Gossypium hirsutum
  unsure (1)..(368): unsure at all n locations
  Clone ID: LIB3083-081-Q1-L1-H10
gctgagggagtccgaagaaaggcttgggttcgtaagtgaagaaagggatcaattgatcaagcagagagactctgccatgcaggaggcacatatgtggcgtaatgagcttgcaaaggctcgagagcgtgttgtaatattagaagcagcagttctgagagcagaggagaaggtcagagttgcagaaacagatgctgaagcaagaataaaagaagcagagcagaaagaggcagccgctgtgaaggaaaagcaagaccttcttgcatatgtgaatgcgttacaagcacatctccaaagacaacagagtgacacgaagcanattttcgaggaaaagatggagtcgtcaaatactagcaacagtccacctgata

SEQ ID NO: 30219 - DNA, 359 bp, Gossypium hirsutum
  Clone ID: LIB3083-081-Q1-L1-H12
gtcattttcccaaactgggaaattcacaagccacccccaggatcgattcagaaaacccaccacaacataagcccataagtacaacaatggcaatacagatctgtgcttattatgagacaggccgggacacctgaacaaaaactttgaaatgctaaaacccaacgcgcgatcattgtcttacacagagaacactaataaccgccttagatccacaaaatcgcacttgtcttatgctgatctggatcgagattgtgaggggaaaagaaattgcaaaacaaaatggggagattgggagcgctgacgaaccatccagatgatgagaagacatggatgaaatcgctaatggcgcgcagaaatgc

SEQ ID NO: 30220 - DNA, 339 bp, Gossypium hirsutum
  unsure (1)..(339): unsure at all n locations
  Clone ID: LIB3083-081-Q1-L1-H2
ccataatgtactatgcaagaaagtatctaccaggtctgggccgatggcagagcacgcagggtggcaaagccagaacatttgcaagttttagcctgactcctgccactgttgatcagaaagttttattggaaagcattgaaacacttcttccaaaaaagaagggcaagtccttctgccggttnttacttggacttcttcgtgttgcatcgatattaggtgtcaatcaaacatgccaggattctttggagaggagaattggaatgcagctggaactggctagcctcgatggtcttttgattccttcatactcagattctgataccctatataaatactgat

SEQ ID NO: 30221 - DNA, 352 bp, Gossypium hirsutum
  Clone ID: LIB3083-081-Q1-L1-H4
ctgctttggaatcggcggctaccatatcaaattgaaaaaaaaaaaaagtgacaggttcatttaaagtttttttttttggcaatataataattgcttatccctttttgtgttgttgaagtcattgatgagatttagtttagtgtaataatggtttggtgtttatgaatgtgatgaacatttagttagtgttaaaactttttttacttttgaatcatgtggaaatgtttcaaagctgcccggaattaacttttctttggggacattatggtatttttactcaattgagtagagaggcctaattatgaacttcatcatctactttacggaaattgagaaaaaaaaaaaaaaaata

SEQ ID NO: 30222 - DNA, 318 bp, Gossypium hirsutum
  unsure (1)..(318): unsure at all n locations
  Clone ID: LIB3083-082-Q1-L1-A1
gacattattattgtagtttcatattcatgacttacaactttaatgtcttttcttgatcatcgngatgatatggaagaaaagacagatctaagaaacgattgcaaaggacgacaggcagtgacagagaaacatgaaatggacaacaaacccaaaagcatttacatggtgaaagaagaaaagacacatttctaaattaaaaattttacaacataaggagaccactgttaattgtctctctgaatatttttttttctgttgcanaaaagatgctgttgctgttttggttggtagcaaggcagattggttcttcaactttta

SEQ ID NO: 30223 - DNA, 401 bp, Gossypium hirsutum
  Clone ID: LIB3083-082-Q1-L1-A11
atttcatccgattcccttcttgagccacaattcacttcggagctttgcgcccctgcttgctgccacaactgccccaacattgtcgaccttttcttcaatttggccgcgggtgaaggagtatttttaccagatttgtgtgaggctcaacgcatcaacccaagacgttcaatggtggagttgatgtctagctctggggcagcccttggccctatttctagtgaagcttcagctttagctccaagcccaactcctcctattactagtgaagttcctgattcaaatgaaggtttagcttcaatcctaagcccatcttctatttctagtgaagcttcaactccaggcccaggcctagcacctatttctagtgaagcttcatcttcaacttcgtctccaggcccaac

SEQ ID NO: 30224 - DNA, 403 bp, Gossypium hirsutum
  Clone ID: LIB3083-082-Q1-L1-A5
atgacatgaaatatgctataagcaagcttgatgactctgagtttcggaatgcttttagccgggcttacatacgggtgaagaaatatgattcaagatatgattctaggcgcagctactctagaagtcgtagcccgtatagtcgaagccccagtcgtagccgcagttatagtagtaggagcaggagcaggagcaggagcaggagcaagtctcctcgggcccgatacaccagtcagtctccatctgtatctagatcggtttcaccatgttcccattcagtgtcaccagcccgctcctattcaagatctggcaatttgcggcaatctggggattggatgttaggaacttgatgggatgtggtgcttgaatgcctgcaattcttttcttgttgagatctcgctccata

SEQ ID NO: 30225 - DNA, 357 bp, Gossypium hirsutum
  Clone ID: LIB3083-082-Q1-L1-B12
ggcaagaaaaaagaggtttggtgggcaattatggtgatgcaggacatgatcaagctgaacaagaagaagaagaagattacctcatggcagaagctcgacaacccctctggcgaaaagttccgatttcctcgagcctgataaacccttaccggatagtcattgtcctacggctctttgtcctcatctttttcctccggttccgtattataacaccggcctacgatgcttttcccttatggcttatctctgttatatgtgaagtatggtttgctttctcctggatactcgaccagttccccaaatggttccccattactcgtgaaacttacctggatcgcctctccttgagggttgagc

SEQ ID NO: 30226 - DNA, 388 bp, Gossypium hirsutum
  Clone ID: LIB3083-082-Q1-L1-B8
tgcgaaggcaaggcaaagtagctgcccaagaacaagcggatcaggggacaacaatctagcacccctagacgtggcaaccccaaattcttttgacttaaaatacttcaataacctcttaaacaaaaagggtttgctccactcggaccaaatactcttcaatggcggatccaccgattcattggttaaaacatacagcagcaacaccaagaagttctattcagacttcgttactgcaatgataaagatgggagatattaccccactcaccggatcaaatggtgaaatcaggaagaattgcaggaagcctaattaatggctcttcctccattgctttgccccaatatctgaggacctgtctagtctacacagtttgctttcttatttatat

SEQ ID NO: 30227 - DNA, 360 bp, Gossypium hirsutum
  Clone ID: LIB3083-082-Q1-L1-B9
ggtatgaagcctaacaaataaatagcagcaacatattattgtaaaactgtcaaaagtactacaaaactctgattgagagaaatgattcaattcttctcatctacaacaccaaattgccctttttttaagttcccttctctgtgatcatcattcggggaaaaaaaaacaaactgaaaatcttccattctgcaaaactgaaagttctgatgcagggttaccccagatttggtctactctctctctcaaccatggtttcaatgaagttagagcttcaaagaccgagtttttaagcagtaaccggttgcttttgcacgaaagcaattcccttttcgatgctggcccttaattcaggcttaagcg

SEQ ID NO: 30228 - DNA, 375 bp, Gossypium hirsutum
  Clone ID: LIB3083-082-Q1-L1-C10
cggaattcaagtgtgacggctgatgttccattctttttggttagtattggttctgattcacatgctgccgtcaggcatcttaaggatttggaagcttgtcaacgtgatggtcaaaagttgctatttgcattttatgacccatgccatcttccaaacaatcctggctggcctctccgcaacttcttagcacttatttctgccagatggaatctgaaaactgttcgctttttgtgctatagagagaatcgaggttttgctgatttgaatttgtcacttgttggtgaagccttgattacagttcaacaaggatggagagaacagcagtgtgtgcccaatgctgtaggatgggaacttaacaaggggagaaaagtaccg

SEQ ID NO: 30229 - DNA, 387 bp, Gossypium hirsutum
  Clone ID: LIB3083-082-Q1-L1-C5
gcacaccgtcggttgcggagatagttttgttgcagctatggcattcggttttatacacaatattcctttggttacaacattggcatttgcaaatgctgtgggggctgctactgccatgggttgtggtgccggtaggaatgtagcagcactgaagcaagtagtagaactaatggaagcacccaacctcaacgaggatgatggattttggaatgagctactgggtgaacatttggactcccaagaggttacttttctgtcgaaaatgattttaaatggaagcaatggcaggatgaatcgtgttacatttcaaaaggcagtttctgaattgctgcctaagcttaaatcaagtcaactagagggcacactgtcatgttgatggattggagc

SEQ ID NO: 30230 - DNA, 193 bp, Gossypium hirsutum
  unsure (1)..(193): unsure at all n locations
  Clone ID: LIB3083-082-Q1-L1-D10
cccagaccaacagaggctgatttttgctggtaagcaacgtggaggatggncgtaccctggctgactataccatcaaaaaggagtccaccttcaattggtggcttctttttcgggggggattgcaaattttggggaaaacattaacgggaaaaacaataaccttgaaggtgaaaagctttacaccattcatata

SEQ ID NO: 30231 - DNA, 376 bp, Gossypium hirsutum
  unsure (1)..(376): unsure at all n locations
  Clone ID: LIB3083-082-Q1-L1-D12
ggtgtacccaagtctgatattcccatcattctaggtaagaggcctcaactgtgtggaattagtctctccgaaaatcttatacccaccatgactttcttagaagatttgggtgttgataagaaacaatgggcaaaagttatatacaggtttcctgcacttctcacttacagcaagcaaaagtttaagactactggggatttcctttatgaaatgggcctttcatcaaaaaatgttggtaaggttttaacgcggtgtccgaccataattagttatagtgttgaagacaagctacgccctacagctaagtatttcaggtcattgggtgctgatgtttctcttcttctattanccgtgccacagacttttggtcttagca

SEQ ID NO: 30232 - DNA, 374 bp, Gossypium hirsutum
  Clone ID: LIB3083-082-Q1-L1-D9
gcgttgatgaggttgaaaggaaaagtccattttacttcttgatcagggtcccaagatatgatgatgaaaatttaaaagaaaaaatcaggcttgctcaaattagagttgatgaaaaaactcaaagtcgggatgccattccgattgaaatacaaaagatgagggctggttgcaagaaatatggcgatcacattgatgctgccatatcccaagaaaggagccgtccagatttgcataagtccaaacgtcaagaaatagactctattcaatctatgatgaacattgaggatattgatgctcagatacgaaacatggagcacatgatacaacatgaaaccatgcctcttaaggatgaaaaacagtttattcatcaaatc

SEQ ID NO: 30233 - DNA, 373 bp, Gossypium hirsutum
  Clone ID: LIB3083-082-Q1-L1-F4
ccttatttttttttttttaccaaaaaagcatcaattcatttaactgggagaacttaatgatccataataataatcactggacgtaaattaaataaacgggaaactagcgaacacccttcacaaaggacccctaaggttaccgcacctgaccactatgtatctgtatctaattagatccatgtatccgacatggacaagacaaaaccaggctcaagacactgcatatatgaacggccactgaattcctgtgcactgctacagaaacagctgcaggaacaactgcaccgaactgggactgagcctggagaacgataccatctatgggtgatcttggctcaggcatagtcagagttctgaaatagggggggctggt

SEQ ID NO: 30234 - DNA, 388 bp, Gossypium hirsutum
  Clone ID: LIB3083-082-Q1-L1-F9
tttaaaagtaaagttggggaaaatggggacatcaacgagcgtatctctttctaactctttgagttctaacagtgcctcttagatagcccttcgaaacctcatgaaaacacacttattcttatgctgcacactgtattaataaataccgcccatcaccctaccattactagactcccccacactacttctactgtttatatatgctacaccgacactaaacatgagatgctacttagtccaatatacttgctcaccaacttatgtttacaagtattagtctgcatcaccttcaacagcataaccatccatgcatacttacaagtacatagctacttcaactgcaccatcatcacaattcaagcatacgtacacgttctaattttcaaca

SEQ ID NO: 30235 - DNA, 388 bp, Gossypium hirsutum
  Clone ID: LIB3083-082-Q1-L1-H12
ctctctctctttctctctccctgcatattcttcgcatgatctgatcgcatcttctaagcagtaagcactgctgctttgcggaaggattttctgattgaatttaatttctcttccgcatccgatatataaatctggacgagacttagagaaggggtagaattacggatctggtagcgccatttaaagctcttctggttctggaggacaggccttattagaggaaccttggccaacaataacgctcacacattaattagttattaaagatttggggcaaaccaatgaaaaacgggacgatagaatgcagtgtctgccattcgaagttggtttccccaactacccgaggtgtgtctagggcttaccaccgccataaaagcagggtatcatc

SEQ ID NO: 30236 - DNA, 276 bp, Gossypium hirsutum
  Clone ID: LIB3083-082-Q1-L1-H4
gctgctcaaagatctagaaggcttgatgccattgaagctcagctcaaggctgaacagcaaatgggagaaagtttactcgcgggaagaggagtagtgttttataaaatcttagaagctgtaccttttcagggtagtggagataagatcaaattgccaccatcctgtttcacagaattgtctgatcaaggtgcatttgacaagggaccgatgtactttcagttgtcgctggttcatcaagaaggttcttctgctactaaagatgatgaaaagggaaat

SEQ ID NO: 30237 - DNA, 201 bp, Gossypium hirsutum
  Clone ID: LIB3083-082-Q1-L1-H7
ctcgaaccgcgttattcatagggatcagacaagctcagagatattcgttacaaaggacgcagacatgcggctaggcgactttggacgagacaaattacttaacacggatgacctaacttactctgatgctggcacacccaactatatgtggacccagctgctggcggatctaccttatggatataaatctgatgtatgggc

SEQ ID NO: 30238 - DNA, 354 bp, Gossypium hirsutum
  Clone ID: LIB3083-083-Q1-L1-A12
aaaatcattaaaagtgaattgttataattataattataattactatgttttacaatgagttgtgcgaatttgaaaaaaaatcacgatcgcgatacccgcagtgaccgcaatagcgtccgttatgtccgcgaccgcaatttaaatccctgtttgtgattacatatttctattttcattaacttcaccaggtttttcaaataagtattcgtatatcttgtctcattcttcacatgaagaatccattctataaatagcatatctgtaaaaagataaaatgggtcgagctttgatcgataccccttacttaccagcgccactttccagctcacagaaaggcatccttctcgagggggg

SEQ ID NO: 30239 - DNA, 347 bp, Gossypium hirsutum
  Clone ID: LIB3083-083-Q1-L1-A3
cgagttactgcctgtcgtctataccccaactgttggagaggcgggccatacatattggagcatactcaggcccccttactatctttttatcacattaaaacatactgggaacagctattaatttctgagaaagtgtccttatacgtatatttcagtcattgtttacactgatggtgaaagtatatttggtgtacattacctctgctgctaagggatggcaatttttatatgaaacctctctctatatcctgaacttcaaggagttcatgcttctccacacttgcctgcaaccatctatgttactacctacaatgagccatcgtatggatgaaaattctatatctggc

SEQ ID NO: 30240 - DNA, 391 bp, Gossypium hirsutum
  Clone ID: LIB3083-083-Q1-L1-A4
tacaacagaggatccacaatattactagacaaagagaggagctattgcagatggaggttgaactccgagcacaggcaattgcaagatcaagggtcctggaaattcagagcagctgtgatgcaaaaataacagcccatgtcaatgctgttgccaagcttgaggagcaactcgatgaaagagaacagaccatacatgaattcgaaaggaaaatggaagagaaagacagagagttgcattccatcaaagttgataaagaagaggtctgggcaaaggaagatcttctcagagagcaaaacaaggaactggctactttcagaagagaacgtgatcattcagaggctgagagagctcaacacataaaacagatacatgatcttcaagagcatgttca

SEQ ID NO: 30241 - DNA, 297 bp, Gossypium hirsutum
  Clone ID: LIB3083-083-Q1-L1-A7
gcccgagcttaagtgtttctatagggttttaattcgctcgtcacgtcccctctcttaaaccctctcttttttgcgcgcgctctttgtttttcgagaactgcgcggcgtcttcttttcaattagcttcttggaagctttattttcttaaaaacacgaaaccgctgtagagatggcgccacccattgagactcctaccacgtgctctgggtctcaccacgcttcacatcctcctttgaaggaaaggaggcttttttcgatgagcagcaggtgtgttgctgctcacccacggcgggatct

SEQ ID NO: 30242 - DNA, 371 bp, Gossypium hirsutum
  unsure (1)..(371): unsure at all n locations
  Clone ID: LIB3083-083-Q1-L1-B1
tcgagnnnttttttttttttttttttttatactcttaccatatttataaaaagttttaggggcgcggataaagtatagactaaagaaagaagaccccctctatacaaaaatccaacggccagggataaagtggccaaacacttcattttagaagtattgagaagacattatttatcaacaaatgaagactctgcaagatcgatggcacgggcaagagcggcggctttattctcacactctctctgctcatcagcagggacactgtctgcaactatgccagccccggcttgcaggtgagcaacccattctcgacgcttgttcgcgtctttgtatgaatacatagtgtcataacgagtcgatgtcggaaaaac

SEQ ID NO: 30243 - DNA, 386 bp, Gossypium hirsutum
  Clone ID: LIB3083-083-Q1-L1-C3
tggaagaatcccattggtcgccaatgttgtaatcatgactccgcatggatactttgcccaagacaatgttttgggataccctgacacaggtggtcaggttgtttatatcttagatcaagttcgtgccttggaggaagagttgcttcatcgtttcaagctgcaaggactcgacattaccccacgtatcctagtcattactcggctcctccctgatgctgtaggaacaacttgcggtcagcgtcttgagaaagtgtatggaaccaagtattctgatattcttcgggtacccttcagaactgagaagggaattgtacgtccatggatctcacgattcaaagtctggccttacctggagacttacactaaagatgttgcagctgagatca

SEQ ID NO: 30244 - DNA, 388 bp, Gossypium hirsutum
  Clone ID: LIB3083-083-Q1-L1-C6
cttggatttttcctccatagcccatttccatcatctgagagatataggacacttcctgtaagagaggaacttttaagagcactactcaactctgacctcattggctttcatacttttgattatgccaggcacttcctcacgtgttgcagcagaatgctcggtctttcttatcagtcaaagcgtggctacatagggcttgaatattatggtcggacggtgagtattaagattcttccagttgggattcatataggacagcttcagtctgtgctgaatcttcctgagactgaatctaaggtggctgagttacgcaataaatttaggggtcaaactgctatgcttggggttgatgacatggacatatttaaggggatcagcctgaagcttt

SEQ ID NO: 30245 - DNA, 384 bp, Gossypium hirsutum
  Clone ID: LIB3083-083-Q1-L1-D9
ctcgtgccgaaagaaatgcatttagtagattgtgtaaaaaaatcggatgaagaaaaaacatatctggaaaaggaaattaataggctggtaaatttgctgaaacaatccgaggaagaagcttctgtatctgaggaagaagctcagttgaaggagaacctaaaggaagttgaatcgaacgtgatttatctgcaagaagcagtaaaggaagtcaagattgagagcatgaaaatgaaggagagtatgttggttaaagaaaccgagttgcagagtgtcattcaagaaaatgaggaacttcgtgctagggaagttgcgtcgcttaagaaagttgaggagttgtctaagttgttagaagaagctatgataaaaaagcaaagcgaggaaaat

SEQ ID NO: 30246 - DNA, 385 bp, Gossypium hirsutum
  Clone ID: LIB3083-083-Q1-L1-E11
catgctaatagacctaaatcttctgatggaaaatcttcaagtaaagatcagtcatcaatctctaaagttccatccatctcagaattggagaatagaggggcgactatacttctgaaggaggatcaagtgagtaaagtgtttcaagagtatccatacatgtttgctcatgccggtgatttgacagtaaaagacgttgaagagctgctaaataactatacacaactggtgttcaagtatgtttgccttttgaaaggatcagatggtgcttctgcatcttttcctttgtctaagtcacaagctcaagcccagcaacatgttgaaacatttaaggaatctcaagatcatagggcaatagcacaaaatattgggctgcaaaacgacactg

SEQ ID NO: 30247 - DNA, 380 bp, Gossypium hirsutum
  Clone ID: LIB3083-083-Q1-L1-E2
aatatttttggcggcaaacttgcatgggggcctgaagctattgtttgtgatgatccaaatttccagggccatgggaatccttcaagtggtgatatcttccatgcggcaccaaatattgatcattcgcagcactttgtgcgaaaagatgtaaaggaatggttatactggctccgtaatgatattggttatgatgggtggcggcttgactttgtgagaggcttctctggaacatttgtgaaagaatatatagaagcttcaaatcctgcatttgctataggagaatattgggacagtatggcttatgaacatggtaacttatgttacaatcaagatgctcaccggcaacggatagtaaactggatcaatgccactggtggtac

SEQ ID NO: 30248 - DNA, 369 bp, Gossypium hirsutum
  unsure (1)..(369): unsure at all n locations
  Clone ID: LIB3083-083-Q1-L1-F2
cctcggactctgctgctcttaatgtaaaaaatgcatcgttgagaattaaagcaatgggagctggtgtccttcaagataatggtagtcacaatctttcggttaattctggtccctcttcttctgcagcattttgcttagataatgataatcatacttcaccagtaaacattccacctgaattaccacctaccaaaaacccacattcacccgcattatcaaccgctgatacggagctttccctctcattgcccaccaaaagcaattcaactatagtgcctactgtttctcattccgaggctagtagttcaagctatcctggggtgctgtatgggcattgggcccctcangataagaaggatgagatgattc

SEQ ID NO: 30249 - DNA, 386 bp, Gossypium hirsutum
  Clone ID: LIB3083-083-Q1-L1-F3
ttgtcttcaagccaaagtttatcttcaacgtgagctattcgggcgctatgaatatcatgctgaagggcgaccacgatttggagtaagcttgggcctctttgtcgactgtttgaactcattttctgcacctggacgttcaagtatgatcgagattcaatacccaggacctgatatgcagcttcttataaagtctgttgattcacttgatgcttgtatttatgcggaaatcaggacaagaatttcagatacaatttcatgggactacaactttgaacctgccggaagcacaccacttacttttactgtcaagtccgcagcattaaaggaagcaattgatgatctagaatggccagggtcgagcatccatatcaatctacagccagacc

SEQ ID NO: 30250 - DNA, 200 bp, Gossypium hirsutum
  Clone ID: LIB3083-083-Q1-L1-F5
taagctctatcaccactcatcgaatacacggatctccaacacaccaaatgactcatagtatcgaaaatatcccaaaaacgtagcatatagctagcactctccaacacaccaaacatgtcccgtggaatagagcttagcttacattcccttatctccaaaaattatctcgggccttaacgccccaaaaatacaacaaatgg

SEQ ID NO: 30251 - DNA, 229 bp, Gossypium hirsutum
  Clone ID: LIB3083-083-Q1-L1-F6
ctctcattgaatcaattatgggaggattggaaggtctaattaacatccttgattctgaaagtggatttggggctttggagatgcagcttcttccagagcaagcagcattttatttgaataatgcatctagagtctcaattccttcagcaaaatcaccaaaaggagcagttgcttatcctttgccaggccatgagagttatccagagaataacaattcaatcaaaatgtt

SEQ ID NO: 30252 - DNA, 236 bp, Gossypium hirsutum
  Clone ID: LIB3083-083-Q1-L1-G6
gtgctgcagcttgtgtacgacattcagcaagacgtagaccgcggatgagccagatagtccgtgctttagaaggagatgcatcattgtcatcttaacgaaggaatgagacccggccagagcggtgtctacagctcttatggaagctcagactacgacaccagccaatacaatgaagatatgaaaaagttcaggaagatggcattgggtacgcaagaattcggcgctagtagcgagta

SEQ ID NO: 30253 - DNA, 390 bp, Gossypium hirsutum
  Clone ID: LIB3083-083-Q1-L1-H10
ctcaaaccaaaaagttccaccctttagtccaagcgttctagcgaaagcatccagctttttagcagtttcaagtctcccagctgtagtcatcacaggtatacagaaaggatgggatcgttccaagcgcctcctggaatgagaagctctgcattgttagaaacttcatgtggatatttacttcaagagttgcagatgatatggaatgaagttggagaagatcagtcagaaagagagaaggttctactagaattagaacaggaatgtctggaggtctaccggagaaaagttgaccgagcaaatatgtcaagagctcgcctgcatcaggaactcgccgaatctgaagctgaattcactcaccttcttttgtcccttggtgaacgttcccttccc

SEQ ID NO: 30254 - DNA, 380 bp, Gossypium hirsutum
  Clone ID: LIB3083-083-Q1-L1-H7
ccacaattagttgcaaaatacgaaaagcaggacgaggctgagtatgaaacgccggagtacaaacatccaaagtgtgaccaagagtacccaaaacatgagaagcctgaaattcacacggaggaaaaacaaaaaccgtgctagcaacatgaacagtaccaccagtcacacaaatcgaaagatcacgaagagtaccagaaagaaaaacccgagctccccaaattggaaatgcctacagagcccgagaaacacacagtcgaatatgcgaatatacccgcgtgcaaggcaaaccaagatgagggtaaggaacatatacatgaaggagaccacgaatcacgcgaatctgaagagcacgaaaagtacgagtaagaacaacccgagtt

SEQ ID NO: 30255 - DNA, 242 bp, Gossypium hirsutum
  Clone ID: LIB3083-086-Q1-L1-B9
gaagaattgaaatggcatataggagaaggcatggaataagcagatcggcgacgttcaaggaagagattgaccactcatcacctgcagcagcagctgtagctggtgacaacgacttcaaaaccaaaacattaacttcctcctattctttctctaaaacgtctaagggcttcaatacctttgaagattcaagaaatgattccaaagggttctggggtgttcttgctcgaaaagccaaagcaatt

SEQ ID NO: 30256 - DNA, 300 bp, Gossypium hirsutum
  Clone ID: LIB3083-086-Q1-L1-C11
ggctgagaattcgacgagctcgtgccgttttttttttttttttgaacaaaagatgtttattgctataggccataacaccaaattatcacaaatagcaatgcatgcccacaataatgaaagcttataatatacgaggccattttatcacgaataataaagtgaaaaaccaatattaaatgaaaaacactacttcttttatgccactaaataaataagagcatgtgtaatggaaccaagaagggagtacatgtggcctgaatataaaattgattctcatgaatgctaaccctattcatggac

SEQ ID NO: 30257 - DNA, 164 bp, Gossypium hirsutum
  Clone ID: LIB3083-086-Q1-L1-E12
gttagcggccgaaaaatgtaatataacgtcactgcgactctgatcctgatcatccttgcaaagattacaacgtccccgacgccgaccacttcacaggcgacttggatttcgctgtccaggattttaaattatcccctcctaccagtgctatcattaccgacgac

SEQ ID NO: 30258 - DNA, 156 bp, Gossypium hirsutum
  Clone ID: LIB3083-086-Q1-L1-F11
ctccgaaaggtttctgattttttaacagcaaatattatttgaggcttggtgaattattatttgggtcaacatttacatgtgactgccaataatggtgtaatacaagattatgtacatggaaaagcttctgttgtagcatcttaatttttctctcta

SEQ ID NO: 30259 - DNA, 309 bp, Gossypium hirsutum
  Clone ID: LIB3083-086-Q1-L1-F12
cgtttctttattttttcagtggatatgaagcagtgacgaaatcaagatcgtgtgatgcttataaccttacatatcctattacaaatggtcaagtttataactgggatgctatggaacggtatttggcagcaatgtatattcaattattttacggtgtgatcctgaggatcattactttttgttgactgagagtcctcttactgctcctgagaatcgagaatatacaggtgaaattatgtttgagacgactaatgttccggggctttatattgctgtgaattccgtgcttgctttagcagctgtgtacac

SEQ ID NO: 30260 - DNA, 346 bp, Gossypium hirsutum
  Clone ID: LIB3083-087-Q1-L1-A5
gagacattttaagcactgagaagcctagattggttaattctacttattaatgtccctggctgattttagcaaatccccacctaaacaattatattggttgcctgcgattcgttctattccaacgacatatgttatgtaatagacacccaaaataaagcctgttattcatctgtattgaacgctaccatagaaaatgtaagattattaactccagccacaccaaaacccttggtcatcgtaacaccattgcacacttctgatattaaagcaacatttcgttgttcaagatcaaatggactgaatctttcaataccgagtggtgataatgattttgaaggcccttcac

SEQ ID NO: 30261 - DNA, 358 bp, Gossypium hirsutum
  Clone ID: LIB3083-087-Q1-L1-A9
ccttaaccatagctatccgctaacgaaccaaaaggagagagatcgataatcactgttccttgttagccagtttatacaggcagattcatgctggctagtgctacactacacccgcaccagtgatcatcatggatgaagagacaacatccacttagtacaagcccctgatctttgtttcccataccacccaaatgctacaagaacaagagccatggttcttttattgaacccaaaaaagatctggactcttctgacactattcatgttttagctcttgcttatgctcatgcgtaaactgatctatttttatcaccaatgaaacctatgaaccctatgttagcccttttagatttcaccc

SEQ ID NO: 30262 - DNA, 341 bp, Gossypium hirsutum
  unsure (1)..(341): unsure at all n locations
  Clone ID: LIB3083-087-Q1-L1-B11
ggcaccaacttttcggggccnganggaccgngggagggggaggnnnnnnaaacagcaagggacnangngaaanngangaagncaannnnngacnncgagcccanccgcaagcngcnnnaaacnccgaagnnaacaancngcnangangcacnncanggnggngcnggagcnnangcaaancgcancnnngnggaagagcnnggggcacaacaaagcncacnnnngaacngcacacccaaggaggacnnnggcggaggacaaccggancccaancngacnaaagccaaggagnnggnngagcgcangggaaagggaaaaacgaacncnggnngggaaccacc

SEQ ID NO: 30263 - DNA, 371 bp, Gossypium hirsutum
  Clone ID: LIB3083-087-Q1-L1-B12
aactagtctttagttttttttttttttttttaaggccagaaatatctaaggcaaagtttagaacaaacaaactgaattaatcaatttatcacaacgattattttttttcgtgcatgttttaaagttcaaaatctattgatttacactcaaatttactcacaaacacttagaaacaatgaattttttaatgcacttaacccgctcacacattctatttaacccgtttcttattttcaaagcaagttctatttatttactccactaaacatattaatctttaacctaatagtgcccacaaacttccttcaatcttaataataatccccttcttcccctctacctagtaatcgccctttgcattttattttctc

SEQ ID NO: 30264 - DNA, 393 bp, Gossypium hirsutum
  Clone ID: LIB3083-087-Q1-L1-B5
aagaccatcaacagggagaatgtctcgacatgaatgaggtatccaacttcataacatcccctccaacgccaaattcagccttggatgatcctccttacaagatcaacaaccagggaattcaacgacccattaataacaaaacagttcctgcaactgctctgcattttggtaacctgacagaatacgatgttcataacctgtatggtttactggaatgcaaagcaactcatgcggcattgaccaatctgaccggcaaacgcccatttatacttagcagatcaacgtttgtaagctctgggaaatatacagcacactggactggtgacaatgcagccacctgggaggatttggcttatacaattccatccattttgaacttcggactctttggaa

SEQ ID NO: 30265 - DNA, 391 bp, Gossypium hirsutum
  Clone ID: LIB3083-087-Q1-L1-B6
gtgttatctgggcttacgttaactctgccaccaaagattttgttccttttctcatcactctccgccggcttcccttcactttcctcccttcaactccttgtatctttttctttcgctatatcttcatttcattgttctaaagaaactatatttactgcggcggccagaacaagcggaagcaacattaattgtttctttgatatggcaactaagcttcttctaacattcgctatttgcagattgattgttactgtgggattgaccttggaccccacggagcttctcctcctgggagttgacgctcaactcagtgtcgaccccaccgacgttaaagccgcttctctcgatttcggcttgctcacaggagctcagccgccgcttgctgtcatgc

SEQ ID NO: 30266 - DNA, 387 bp, Gossypium hirsutum
  Clone ID: LIB3083-087-Q1-L1-C4
cacacacttttttgtgacatctaccctgcttcgatcaaaggacagtcaaccataattcattggggatgaaagctgagttgataggaatcaactacccacgcacaaaggctgcactgtaaggctgcatctacgaagtggagagcatgtacacatgctttataaaacgcttggggtcctacgaggaagacatcacagtatcgatcgacaccgctcattctgacgatcacgaccagatggcagaacatcggaccggtgactaatgatcttgcgagatcaaacgagcctcgggaaattcagtttgcgcactacagaagccataggactaggatttctatttacactcgagacaatgtgatactggcttctataaacgcatagtaccctgtg

SEQ ID NO: 30267 - DNA, 384 bp, Gossypium hirsutum
  Clone ID: LIB3083-087-Q1-L1-D10
gaaagctttttcggaattgtgtaatcagaaatgtatacagtctatgcagaaatgggtgctttttgctgctgctcatgtggtgatgactgtgaagaatatgcttatcctagcaattcaatatataggcactgcatctgcctaaggttcttcttctatcagctattcactgggtatggtgctctgtttcacagattggatgggcgacctgcatcccatatccaaggagcttctttgtcatcaaccacaactgttactgcaatatcagataattcagccattgaaactcatgttacaatgtccagaccggtcccttactatgctgagcaaaggtactctcgtttgcagcgtgatggcttggtctctatgcgtgataagtttgtgact

SEQ ID NO: 30268 - DNA, 250 bp, Gossypium hirsutum
  unsure (1)..(250): unsure at all n locations
  Clone ID: LIB3083-087-Q1-L1-D4
caacgaaattataaacaaaaacangggaaagcaccccaaaagggggaccaaangggcaaagacaccggcggggaaagcagccaagagagcccaccccgaagcggaagggaacaggggggaggacacggacgccagggaaacagacanggaagaaaaggcacccaaagaaagggacaaaaaccacaacaagggcggacaggggaggcccaaaacgaacaaagagaagaaaaancggaccagacnaaaagcg

SEQ ID NO: 30269 - DNA, 390 bp, Gossypium hirsutum
  Clone ID: LIB3083-087-Q1-L1-E10
agacctgatacgcttttttacaactgcttgatccatgcgctggggcgagcaggccaagttgaagatgctattaaggtttttgaggtagagatgccgaagacaggtgtttcccccaatacatcgacgtataattgcatgattgccatgctttgtcatcatgctcaacaacagaaggccctatctcttcttcaggacatggggaatttgaaaatttgcaagcctgaagttcagacatattaccccttgctgaagtcatgctttaaaactgggaagatagataacctgttgagcaaactattgaatgatatggttaataagcatcatctaagtcttgatagttctgcctactcactattgattcatggactttgtagagcaagtagaagtgag

SEQ ID NO: 30270 - DNA, 396 bp, Gossypium hirsutum
  Clone ID: LIB3083-087-Q1-L1-E4
caaagatcaacttagccaaaggccggtagctcatttatcaactgagcgaatacttatttgtaagggctcaactaattcaaagcacatacgaaacatacctcaatgttgggatgtttcaagcgtattaactgaaatttttacagcaagatcattcccaaatcacgtaccttcggaatttaactggatatagctactcgttcaaatgccttcgggacatatcccggttatagtgactctcacaaatgccttctggacttaacccggttatatgtaactcgcacaaatgccttctggacttaacccggatttagtaactcgcaccaatgccttcgggcttagcccggaattagtaactcacacaaatgccttcggatattagtccggatatggtcactt

SEQ ID NO: 30271 - DNA, 198 bp, Gossypium hirsutum
  Clone ID: LIB3083-087-Q1-L1-E7
gttttcatttctctgggctagcacaaaagttctgatttgctcaaaatccatcctcttggtcgaagcccggcctttcatgacgaaagcacctccctgtttgagtcacgggcgatttgtacggttgtatgttaaaagtctgtatagatggggaacatgggattgtttgggttcaaccattcggcgaaagcttctatttat

SEQ ID NO: 30272 - DNA, 197 bp, Gossypium hirsutum
  unsure (1)..(197): unsure at all n locations
  Clone ID: LIB3083-087-Q1-L1-G12
cagcannncgnccggcagacaancggacaaagggcnaggaggggaacagcaagcagcaacngcggccgcnnanccaaaaaangcccccgnncncagcnagacacggaggaaggggcganaggaccaaaagggaggcanaagnngcngcgaacaagaaaancncacaaagggnnancgagggganaaacccagaagac

SEQ ID NO: 30273 - DNA, 235 bp, Gossypium hirsutum
  Clone ID: LIB3083-087-Q1-L1-G3
gaagatcttttttcttttttcttaagaaaacagttaacatcgtgggataatatctatcagacaaaatggctttcaaatccaatccttgaaaccaatatcattaaaacaatatcaaaagaaaacaaagacttaaaatccattaaagctttcaacaaggcttcttgccttctttacctacatagatcttttacttctcagaagaatcaggtcccctttttttgtcaaaactaacctc

SEQ ID NO: 30274 - DNA, 119 bp, Gossypium hirsutum
  Clone ID: LIB3083-087-Q1-L1-H11
aaaagcagaagatattgttgggttattgaagctagctgctccacattttgttggcttaaagcttcttttgatgctgctttgtcttgattcattgctttgggttaactgtggggctgagc

SEQ ID NO: 30275 - DNA, 296 bp, Gossypium hirsutum
  Clone ID: LIB3083-088-Q1-L1-A12
atttgacccataacttacgcgaaatcttgaagcacaactgtgggaaacagttaatcagattggggatttgcagaagcagatggaaaatgcaaaggcttctgatttggagtctgtacgaattgttactttggaactggatggagctaaagaatcactacaaaaagttgctgaagaagagaactcgttgagaagtatggtggagtctctgcagttggaactcgagaatgtgaagaaagagcattcaaaactgaaggagaagaacgtagaaacggagtccattgcttggaatctgcacg

SEQ ID NO: 30276 - DNA, 352 bp, Gossypium hirsutum
  Clone ID: LIB3083-088-Q1-L1-A8
ggctattgctttaatcattaaagagaacatgctgggacagtcttgctaatgaatggtgggttgaaactttaactaatgaaactggtaaacattttaacgtacaagacgctgtttcaacatcttatggtcattcttcccaaagtgacagataaaattcggatggctatccaacctgacagatcgatgggcaataatctgcctctatattttaactatggctgggagaggatcaagtaactgcataatcccactgccaagactctggctgttagtataatgagtccatggatggttatgaagaagcctctgagaggcactctgatgatggaggcttgagcaggactgcacatga

SEQ ID NO: 30277 - DNA, 208 bp, Gossypium hirsutum
  Clone ID: LIB3083-088-Q1-L1-B8
cttacaaaatcacaaacaccttggcggagggggatattaaaacgggggaaagagattaattcccaacgatttcaccttattgatcgaattcacgccacttgtacactctaacaatctttttcattgaactgtctattaaattatctccatgaacaacacaatggcactctgccacagtaaataagacaggattccatttaattatgat

SEQ ID NO: 30278 - DNA, 271 bp, Gossypium hirsutum
  Clone ID: LIB3083-088-Q1-L1-D8
ccaggccgcggttaaaaccacctgtacattctccaagaagctcaagcgagggaactcacaacacctagcattgcatcaaactataacagagggattcacaactcaaactccgagcagtaatgaaaaatttcaacgagcctgattctgaaacaaaatctatgctctagaaattgaaaacataccgatatcatatcacagtgtatcaagaacaaattgctcaaacatctacacagtctgcgtattcaacataagaaatgtgatcacagcttac

SEQ ID NO: 30279 - DNA, 303 bp, Gossypium hirsutum
  Clone ID: LIB3083-088-Q1-L1-F2
caaatgccccgtctccttttcctaaaaatcttgtggcaaccgggcagccaatccagctaatcctcctcaatggaaaaattttgaagggccaactgcctttaaagttccttttcattcctttctttaacctcatcaagccttaaaaatatttcccagccaccagcccggccgcagcaaaaccaccccgggattttttttaccagttattcttacttaacaccaagtccacaggcttcttataacaccccattcccctcttcttcgatggtgggtggcttttccaccaccttcattttcaaaaat

SEQ ID NO: 30280 - DNA, 366 bp, Gossypium hirsutum
  Clone ID: LIB3083-088-Q1-L1-G2
aaatgtcacatattacaaatatttcaacaccattataaaacgtcgagtcgccattgtagtctgcaacaatctttcctaaagcattctaacccaaattaaactttgcacagagtagttctgcatcatcgatatacatatatatactatgcaatgcacctaaaacccgaaaacaaaaaaagaacttgcaaaagttcacaaacgttcctaaatgcagcaacaaaaccggcataccacacatttgctatccaccgataatatatttattttacagaccagctcagtgcaaccaactcaactcttcttatttcttgcatctgctttccaatctcttcggccgagcttaggtttcctagtttcgtagttctg

SEQ ID NO: 30281 - DNA, 235 bp, Gossypium hirsutum
  Clone ID: LIB3083-088-Q1-L1-G8
actttatcttttatacattggcgatcactccacaggtatgttttctattaatggtcagaaaccaactttccacactgcagcacactacttccttctaaaccaaaaccatatcatcactccctattttaattcacacttaaccctctcattttattttaatcaacaccacaactaaccattccatttctcttactgtaacttttctcgaacctatcccatgcacgttttccatcaa

SEQ ID NO: 30282 - DNA, 375 bp, Gossypium hirsutum
  Clone ID: LIB3083-088-Q1-L1-H4
aaacaagagtccacatcacatgttacgatcaaatgatggaatagtggaggacaaagaaatgagtccttcaactcagacagtgcatatagatgcccccgcaaaatgtaaaacattgaatatgcacaacactccatgaaggccagagctaaaacaagcacatcatgattatcaccagcactatgattagaccaccacaaacgccaaaattgaatgctgtgcatatattgtgtcgagctaaaatcgcaatcagaggttgcagatgtgaccctaaataattgtttaccttcttactacactttctggaggctactactatttaaaacgttgtatatgcagagcggacacgcagcattgatgtgtaaccacttatctaca

SEQ ID NO: 30283 - DNA, 165 bp, Gossypium hirsutum
  Clone ID: LIB3083-088-Q1-L1-H8
tagctaatacattttttcattattcctttcacattacttgttttgttgctattactagtatggtgtactcctaactcatctcttcttcaactcaaaaccttccattatattccccaccactgttttatacttttaatttatccacgacactaattttggcaaacc

SEQ ID NO: 30284 - DNA, 306 bp, Gossypium hirsutum
  Clone ID: LIB3083-089-Q1-L1-A10
aaacggagccaaaacaaaccgttgggggtgttttttatttatttaatttccactacaagggggaaagtgtttcaggccccccccttaactccaaaattttaaccgccggttaaaacaaaccttctaaccccacaaaatccccggtttttttactatggaaactgtttttggtttctgagtcaaccccgattccaaattcaaaccgttcgtaaatcggaatttgaaactttttccccattatttccccaaattcaacgccacctgacccttcacctttatccacataaaaggcggtcttaaattttt

SEQ ID NO: 30285 - DNA, 290 bp, Gossypium hirsutum
  Clone ID: LIB3083-089-Q1-L1-B12
gcaattaaattttgactttatatttatcaattatgaattatttagtaatggagtgaatatactaaatgtatcattgtaagtacccaaatttgcccgagcctaatttgcccaattctgacaaaaacaaaattaaacaaaaaccaaactaaaattaaaatgtccatttaaaacccaaagcccaatttcaaacccaacagacttacccaacttgcccaaaacttttaaaaaacctacgggcccgataggcccactacctaaactagtttcagcaaagttgaaaccctaaccct

SEQ ID NO: 30286 - DNA, 299 bp, Gossypium hirsutum
  unsure (1)..(299): unsure at all n locations
  Clone ID: LIB3083-089-Q1-L1-C12
atcctccagttgtnatttttcaaatcaatgaagacccccactctcttatcaaagaacttaatccttatttatctataacttaaacatacactaatacccttattaacaaaaaaattaaactctttgatatgggatctctattcttttaacctacagcctatataaatgtttaccccacatcctctatatctaaccaatatcttttctatcactttataaaaacaataatataatactgatctttccaatcttcactctattactttgttaaacaaacaattgaagtattaactcaaact

SEQ ID NO: 30287 - DNA, 396 bp, Gossypium hirsutum
  Clone ID: LIB3083-089-Q1-L1-C6
gcaatcggtaccatggagttccggctgttgttttttcgcttggcggatatgcggggaacaatttccatgactacaccgatatcattattcctctttatctaacatctcgacggtttaacggagaagtgaagtttcttatcaccaacaagaacccatggtggatcaacaagttcaagaccatactacgaaatctttcccattacgacccaatcgacattgataatgaacaacaagtccattgtttcccaaccgtgatcatcggcctaaaacgcgaccctaaagaactaaccatcgatccatcgagatcacctcattccatgaaagaatttcgacaattccttagaacaacgtactcattgaaaaaaaccaccgctgtaaaactaaccaacaacaatc

SEQ ID NO: 30288 - DNA, 257 bp, Gossypium hirsutum
  Clone ID: LIB3083-089-Q1-L1-D2
cttggttatttaaaaagaaaggtttcctttacttgggtggggcaatgagcttaccagggctctccaccatctgtatgctccaatccataatcgctattacttgtggaactccaatgatgctatacactacagaagtcacaatttcttggccacggtcatgaaatatcaagcaaactgcatggttcaacgcctcatgaacaactcttgatccaaacctcaaaatcctttgctaggtagctttggtatcactattgatc

SEQ ID NO: 30289 - DNA, 357 bp, Gossypium hirsutum
  Clone ID: LIB3083-089-Q1-L1-D4
ttttctttagccaaaaataactcacattgtaaagagcattctatccgtgaacacgttctccctaaacttctatatctcctaatccctattcaacttttaaactaaaattcaaaatccagaacatttttccccatacagccaacttattcactataaataaaacattttgattacaaccaaaacttatcactcatcatcatccaaatattaaaaactaaacaccttatatctcacctaatcacagtaaaaaaaattttatataaaacctctactatcaatacaatcactctcaagaacgtaatttcaaacgctatcatcattctattttcctcaaacattctacaaaaaaataaattt

SEQ ID NO: 30290 - DNA, 373 bp, Gossypium hirsutum
  Clone ID: LIB3083-089-Q1-L1-E8
tgttgatccacacacactggtgaaggcaaagctcaacaaccatggcaatcttggtgctcttgtacagcatgagcttagaccgaagtccttccttactatatctggggcctttgacacaaaggcgttggagaagactcccaagtttggtttggcactctctctaaagccctgaacaggtatattgacttaatgataggaacaaacaatgtggctgatgagattgataaatcgtgtcattttctttttcacgtaggcttctagtgattgaaaatggaatcttagtaactttcagaaggtgtttgctttttggattgttaaaaaacctttgattattactcattttaataaattattacacctattgattaggcct

SEQ ID NO: 30291 - DNA, 374 bp, Gossypium hirsutum
  Clone ID: LIB3083-089-Q1-L1-F10
gagagagtgagagagaactagtctcgagttttttgttggtttttttaacaccaacaaaaacattagagaaatctttcatatatgcaaatcaaaaccctctttttatctacataattgtgaactagtaaggccaaaaccttctttttcaattgaatccaacaagccatgagagaaaagggtacctgtttttttcttgtctcctaagctttgtcacacttcaaagatatgcatcaacacatatgccataacttttccattctttgttcatcgtaatattgaacagtttggaaaaaaaaatccaacatcatgtaaggaaattcatttcttgctcttcttgactttcccatttcgtaaaaaggatcctaaaccgaaca

SEQ ID NO: 30292 - DNA, 302 bp, Gossypium hirsutum
  Clone ID: LIB3083-089-Q1-L1-F12
ccccccactctcatatatatattttgaaaagaaaaaagaaactaataatccagtcaacatttcagttcaacatcaattcttataaaatacctaaaaaacaaaatattaaagttctaaccatatactactgtaaaataccttactcatagtataggacattttattgttcatccaaagacactcacaaccttaaaatctgtatatttgaataatctatattttagaattcatgatctttttttatttcatacattacttacttcaatctaattgttattcaatcttctatttcctttcccaca

SEQ ID NO: 30293 - DNA, 389 bp, Gossypium hirsutum
  Clone ID: LIB3083-089-Q1-L1-F4
attttgtcccttcaacggaccggctaaccttaagatcgggttaatgaatatacaaatgaacaaaatcgggcaacatgtaggtgactgggaacacttcactcttcggataagcaacttcacgggtgaactatggcaagtatacttctcacagcatagtggtggtgagtgggttgatgctttcaacttggaatttattgaaggtaataagccgatcgtttactcatccaaacacgggcatgctagttttccacatcccgggatttaccttcaggggtcagataaactcggaattggaattagaaacgatactgctcgaagcaattattttgtagattcaagcactaggtatcagattgttgcagctgagtatcttggaggagtagttacag

SEQ ID NO: 30294 - DNA, 387 bp, Gossypium hirsutum
  Clone ID: LIB3083-089-Q1-L1-G8
tttaagtcaacagttatcagaaagagacattatagtggcatgcatagactacagaaattttccacagggtacaataagtgacatggtggaggatgcttctcaaggcatctcatttatttgcaataatatttctgaatatggaggtgatcccaacaggatttatcttatggggcaatcagctggtgcacatattgctgcttgcacacttgtaaaccaggcaatcaagagactggcgaaggcgacagtgtttcttggagtgtgtcccagataaaagcttaccttggtttgtctggagggtacaatctttttaacctcatagagcactttcatactcgaggtttataccgttcgatctttttaagtcaaaattttgctgatacgcttcga

SEQ ID NO: 30295 - DNA, 396 bp, Gossypium hirsutum
  Clone ID: LIB3083-089-Q1-L1-H12
aacaaattttcccctctaacttggtagtttatcctaaagatttcccatttattaaccatccccaaacaagacgaacagtgtctgcaactgtttgtaatcttgaagaagacagaaagattagctaaactaaaatggagggaatgattcaggacccatcgcagccggcgtcgcagccacagcagcagaatcaggcagtggtaggggcggagaggctgaaccaggcgcttcaacaacagctcaatttggaatctgtaaagaccagagcaatttcccttttcaaggccataactcgcatcctcgaagacttcgacgcctattctcgcacaaataccacccccaaatggcaagatattttgggtcaatactcaatggtgaatctcgaacttttcaacattg

SEQ ID NO: 30296 - DNA, 268 bp, Gossypium hirsutum
  Clone ID: LIB3083-089-Q1-L1-H6
ttcaacttgaggcttctacaacgagagccttcttgcaggaattatcttcaacaaaatcgagccttcaacaaaatataacatctttaaagcaaaaggtctatttcataaacaaaatggttccagaacttgaaacaaaaaaaaaagttgctgctgcttcgaaaaatttcaaggaagctgcacgattagctgctgaaacaaaatctttaagcactgaaaaagaaagtgtacagatcgaaatggacaaagctgtgttggatcttgggaaact

SEQ ID NO: 30297 - DNA, 306 bp, Gossypium hirsutum
  Clone ID: LIB3083-090-Q1-L1-A1
ttcatgaattctgtacgtggttatgatcttaagaaatttgggaagctccaacgaactcatttaatttacttgctcgaaaaaacaaaatcttcacgaactgcagataaaaaaaaaactgttagttcaccaatcgattctttcacccgagtgtaacctttaactatgcttaaactgcaagcggtgacacataaaatattctccgcagttgtcaaaaaggctatttatatctgtcgtccttaatgtaagtgggagatccagcatccctctcttaaggctctaaacatggggaattgattgaaactcgtg

SEQ ID NO: 30298 - DNA, 278 bp, Gossypium hirsutum
  unsure (1)..(278): unsure at all n locations
  Clone ID: LIB3083-090-Q1-L1-A11
tatgcaaccatagccagggctttttcaccaaagcggttggttatgnntatactcttcctttttgcccccttctccatgcaaatccatgctatagagtacttcagcaaattcccaagagttaacatcattgaggaagagacaccttccagagagcagaagctcgagaccttttttccccacaccaccccaaagccacaaaaacatgagccactggttatatttgaaacccaaaaaggttatggcctctacagccacaaatcatgctcaagcttaggctc

SEQ ID NO: 30299 - DNA, 392 bp, Gossypium hirsutum
  Clone ID: LIB3083-090-Q1-L1-B10
ctcttggtctctctctcagcccaccccttggtcggccatggtcgccgccgtggctggtggctggcgttgcgcaaaaagtcatttttagccctcgtttcgcagctgccttgaaagcccagccctctcgacccaaaaaaatgaaagagaggactcccgaccccctctaagatccaatggcgacaatagagaaaagccctcctacggcgcggtcacggggcatcttccacacgtggatggtcggtgataggcgaaccttgagcggcggcggcatgcggcacaagtggtcatgcggcgttgaaagcttatggggctaggggtttttttgttgtgtttaagtgttgagctaattgggctacggttagttttgggttattgagttttaatttgtattt

SEQ ID NO: 30300 - DNA, 384 bp, Gossypium hirsutum
  Clone ID: LIB3083-090-Q1-L1-B12
gccatcgcccctccctcccatggcggaatccaaccctagggcctgcatatggggtcatcaagctcttggaggtggcacatttaaccatgtgctgctgtggagagaacggtgtaacggtgttttgatgctgaccttgtcaaccacggtgtggaaccttattgaaagagctggttataatctcatgtctttcatggccaacgtaatgccgctcactgtcgctattctcttcttctggggcaaaaatgattttgttctcaacaggtcattaccatgccttcctaatttagagattattgagaacacagttgtgattcttactgatgagctacaccaatggatcaaccacacattattcattgcacataacattgcaaatgcaagaga

SEQ ID NO: 30301 - DNA, 252 bp, Gossypium hirsutum
  Clone ID: LIB3083-090-Q1-L1-C3
ctcaatacctccaacaatgagtccatgtcggttttgccgggtgggtgttttgaccctcgagatgaccgtaaatcctcttttgggttcgacaaaaccggtccttacagagccacatttttgattgaattcggatctgatctccggatgaatctgcaagcacgagggtctgatcttgtggttcggattgtgaagccggtgtgtgttatggttgagtatagcaaaagctttctgggccgactctttctttgctta

SEQ ID NO: 30302 - DNA, 379 bp, Gossypium hirsutum
  unsure (1)..(379): unsure at all n locations
  Clone ID: LIB3083-090-Q1-L1-C7
accaagaatccacttcatgctttcctcgtatgccccagtgcatctctgctgagaaggcttaccacgagcaactgagagctgtttntggttagtcaatgttgctgagaaggctttttaagggctgttgcagagaggaatgtttttttgcttccgcgcagaggtaatgtcgtcttttgtcttgcacatattaacttggcttagatggggcttggatttaatccctttgctgatttgtatacagggtttaagaaatttgtaagattgtttctcaacttctattctggttgtaaaaagggcttcttgattgattaattgttttatttttgtgggaggtatccttctgactaattaatttctaattattgtttttgtacatttt

SEQ ID NO: 30303 - DNA, 273 bp, Gossypium hirsutum
  Clone ID: LIB3083-090-Q1-L1-C8
gtatattcattctaatgggtcttcaacactgtggggtcacatttattgggaattggcttccatcaggaattagtggtggggagaagatgtgacttatctattgctctcgtgatccacacgatgcccaaaatgttattcctggatgaacctactagcggccttgacagtgcctctgctttctttgtggatcaaacttatccggaacatatttcgcgatgggaggacctttgtctattctattcaccagcccagttattgaagtatttagcactt

SEQ ID NO: 30304 - DNA, 388 bp, Gossypium hirsutum
  Clone ID: LIB3083-090-Q1-L1-D1
agaagagtactgggagtggagggaagaagaagggtcctgctcaatttagggtatacaatttggggaatacttcacctgtcctggtttcggatcttgtgagtatcttggagaggcttttaaaggttgatgcaaagaggaatgttatgaagctgccgcagaacggagatgtccggttcactcatgcaaatattagcttggctcagagggagctcggatataagccctcgactgatttgcagacagggttgaagaaatttgtaagatggtatctcagctactattctggtgggaaaaaggctgctggatagattcattgttttatattgtggtaggatcctcttgttcattatcattcttatcattgttttgaacatttctccgttcgatt

SEQ ID NO: 30305 - DNA, 365 bp, Gossypium hirsutum
  Clone ID: LIB3083-090-Q1-L1-D12
ccaaagtattcaaactatgattcacaatagaaatgggaattttagccgaaagttctacactcaaaaaattcctattaactatcccttcgtccattataaccagaccaattccaccaaatgatccagttctgatgcaattttgttttctgctatacaacttcattacacactgttaacaattccatgtatttacatgcaaaagaccagaatagagattttttcaaaagcaatatccccctgttgccaaaaattcaacaaaagagtcccttgttattccaccatcgcaatggagagctcaagccattaaatgctttctaattttcaacataaattataatatgcaagattggaggaaattttcccca

SEQ ID NO: 30306 - DNA, 275 bp, Gossypium hirsutum
  unsure (1)..(275): unsure at all n locations
  Clone ID: LIB3083-090-Q1-L1-E1
ccgggacacaggaaaagagggcgcaaaacnnggaccaaacggcgganacaggaggggaggcgcggcaaaacagcacncnaacaaacgcncngacagaagaagagccaaanaccaaagggggcacaccaggcgcacacacaagggcgcggaggaaaagggcacagcncggggaacacaggaagaagacncngcaggaaagancggcgcnacaacggcaaaggaacacaaggcagccgccggggacgcgcgaaagaccaacancaccacagnggggc

SEQ ID NO: 30307 - DNA, 130 bp, Gossypium hirsutum
  Clone ID: LIB3083-090-Q1-L1-E11
gtcctgttaataagtctttgctttaatttttacactaggtttgcttgttaataatgttgctatggcatatgctctagtgtatgaccattctaacactaccgaaacggaacctcaagatgtgaaaccgtat

SEQ ID NO: 30308 - DNA, 391 bp, Gossypium hirsutum
  Clone ID: LIB3083-090-Q1-L1-E2
agccagtaactcaattaatagacaaaataattcggttaggcatgggagcaaacacatggcacaccctcacaaagttcaacaatgcagaatttaaaagagaaaaaaaaacccacgaatccagtcccaattcagaacttatatcacaaaatcaattcaaaacagaagaaatagaaatgaaaatgaaaatcaaacctatcatttaacttctctaacaattccctcattagactctggtgaggtgtcaagtatgactgaatcaggagtaacaccttcttgatgctgttgttgagcgctcattactttctccatgtctgtcagtctagtccttattacatttgtaaccaaaaaggctacggtgccgatggttcagacccagatgatctttaaaggg

SEQ ID NO: 30309 - DNA, 390 bp, Gossypium hirsutum
  Clone ID: LIB3083-090-Q1-L1-E8
ggtttgagaagatacaaaagacagttaagaacgttctagatgctgttaatatattcaaaactccagtaaatatatcagatgcggctcatgtacgtaaggaatatgatgaatccagtgccaagttatctaaaatacagtcaaggatatcaagtttgacacaaaagctaaaacatgattttggactggagaaggagttctatgcattctatgatcgttgttttgagatcaagcagaacaagtatgtttacaaagtttgcccatacaaacaagcttcttaggaggagggccacatgacaacccctttatggcgttgggataaatttgaggacgcataccagatgatggtattttcaaatggtgataagtgctggaatggtccacaacgaaata

SEQ ID NO: 30310 - DNA, 395 bp, Gossypium hirsutum
  Clone ID: LIB3083-090-Q1-L1-F10
aaatcgtttaaaaggtgaaatgagtcaggtgcgaaatgttatgatagagaatattgacaaagttttagagagaggtgatcgcttagaattgttggttgataaaactgctaatatgcaaggaaatacctttcgcttcagaaagcaagcgcgccgttttaaaaacacagtgtggtggagaaatgtcaggcttacggttgcgctcataataatcctcctaattgttgcttatatcgtgactgcgtttgtttgcaaggggcccacgttaccatcctgtgtctaaaacgaggtcaacagcttgagattcgaacacgttccgcatcccggtgcttcttttttccatttgtctccgtttttgtttgcttgtttctaatctgcttgggggatatatgtgggat

SEQ ID NO: 30311 - DNA, 353 bp, Gossypium hirsutum
  unsure (1)..(353): unsure at all n locations
  Clone ID: LIB3083-090-Q1-L1-G1
ggcacanggagaccccagacccagncaagaggaaaagcacgggggggagagccaagagaaaagacaaaaggggcangcccaaccaagcgaacncgacaagggcaacaccccgaccgagacggaaaagcgagaaganacgaagcccgagcacagaaaaangacggccaagggacagcgagaaagaccggggccccagggacaggacgaagggcacaacccncgaagcacgaaaacgagagagagaaaggcaacgaagaaagacgagacagaacggaggaaaagggacccagggacaaagggccagaacaaccaagcgagaagaagaaaacacccggggccacgcaagaccgaaa

SEQ ID NO: 30312 - DNA, 399 bp, Gossypium hirsutum
  Clone ID: LIB3083-090-Q1-L1-G12
cgatagtgtaattttacggttcaagttgaagaaaaaaggaaaaagagtaaattcgcggttcaccgagttacggtaagtggggttggaaaaagaggcattgaaggcattagcgtttcacaggtgtccaccctgtagaagttggttacccagtcagagatattcttgtcttcatttccactgttcctttgcccctctctgtatacccatttacataaaccaaattccctagtcgcttgagccatacttcaaacccaacccaacccaaccaaataccaaaaaaccagagatctaatctaccataacaaaaacaattaacctttgtctggttcccatagagacaaattaagaatgagggaaccaacgatggttgttggcgcagacagcaatgctgcttgtgct

SEQ ID NO: 30313 - DNA, 258 bp, Gossypium hirsutum
  unsure (1)..(258): unsure at all n locations
  Clone ID: LIB3083-090-Q1-L1-G3
ccccgggccgcgaggaaacggaacgagaaaacgaancacacaccagcccncnaacaaaanccacngggcgcggaagaagacaagacggggaagcaaaccnggggaaaaaaccaaaagaaacagcnagggggggggaggcaaaaccagaaacaaagcccnccccaggcaacagcacagagaggggagcagccaccaaagagacagaaggccgnagcccaacacaancaaccangcanaccgaggaagcaagggaaaaca

SEQ ID NO: 30314 - DNA, 380 bp, Gossypium hirsutum
  Clone ID: LIB3083-090-Q1-L1-G8
gtggagagacttgaaaacagcagacaaaaacttctaatggagattgataaccaatcttcggagatagaaaggcttttagaggaaaattctaatctctcatcttcttatcaagaggcaacgaacacagccaaacagtgggagaatcaggctaaagactgtcttaagcaaaatgaatagcttcgtagaattctagataacttgagaacagagcatgctactttgctatccaaaaacggctctggggctatccaaactggttcacagggaaatacagctgacattctctccctctatggacaacttgtgcacgatcacaacatagcccattcactatcagctgaacaaatgcatctttcagcgcgtctacaacaagcgacgct

SEQ ID NO: 30315 - DNA, 388 bp, Gossypium hirsutum
  Clone ID: LIB3083-090-Q1-L1-H3
gctaaacttcaaccagatggaattggcttttctgacttaccaaatcacaaggccattctcgagacaagccttcgtcagcatgctaccctttctcaagatgatgttcttacagttaaatatggggagttgacatataagttacgtgttcttgagctaaaaccctcttcaagcatttctgtcttggaaacagatattgaggtggatattgtcaaccctggtgttgaatcagagaggactgatcaatatgtcctaaaaccactagcgtttggtgcatcagaatctggattggttgaggagggaaattacatgtactataagttctcaattgatgatgatacatgggaaaaacttgtttctgatgatgtcaaaatagaagtgaagatagatg

SEQ ID NO: 30316 - DNA, 388 bp, Gossypium hirsutum
  Clone ID: LIB3083-091-Q1-L1-A10
ggataccccggacttaatttttttaaatcatattatatatattctatacatatcttctaacttcgtcgggatatttgatatgtatatatatatacattttcaatcaactaattaatgccacctttctcaaatcttaatatactattgtgaattaaatataaatctttttattcatgtccccgagccataaaaagtgataacatctttgtatccacccgtaccatttccggatgaattttaatttaaccatcacctcctcctccacaattgtaatccaaacaattccacccgatgtttaaacacttctttacacacttttttacttctttttctccgctttttctgccaacaatttctgccttcattaaaaaccacaccattctaactc

SEQ ID NO: 30317 - DNA, 300 bp, Gossypium hirsutum
  unsure (1)..(300): unsure at all n locations
  Clone ID: LIB3083-091-Q1-L1-A5
ctctagtctttctttngttgttacacatgaagagtgggtagtgtatatattgcgaaggggatttataaatatacccatggaagtactggccccaaattaatatttaaagtttttatggcaaaagtaaaccttattaatgtaaaacttaaccatggaaaaattagaacatgcatacctttatatttatatgtatattaactaccggaaggatttatacatattaacttgaataaaactggtaacctaataaaagtgttatgaagcccgggttaaagtaatcttaagggggtgaaaaagccc

SEQ ID NO: 30318 - DNA, 248 bp, Gossypium hirsutum
  Clone ID: LIB3083-091-Q1-L1-A7
tcccaacaggtgagaagacttaactaatttggtatataaaacaagctatgtacaggcgctattttaggattgtttcttggctaaaactaacaataacattaacgctgtgaaaataagcaacatactacgaatcacatatcccctgttattactaagagaatgaacatattaactgctctattgaacggaggcctaaaaacacagcataccaaaacccatatgcagccaaatggggcaaaagaaaaccg

SEQ ID NO: 30319 - DNA, 187 bp, Gossypium hirsutum
  Clone ID: LIB3083-091-Q1-L1-B7
cgcgcctgttccgaattctgattccctaatactgcgtggcgcattgaaaggcaaggggttcctctactcaacaagccctcaagaacatagttacctgaggcaagcatcgcctcatggtctatttaaatgcttccaaacatgatcaggaatttacaatcaacaagaacttggaaggtctttcaataaa

SEQ ID NO: 30320 - DNA, 151 bp, Gossypium hirsutum
  Clone ID: LIB3083-091-Q1-L1-C3
actgggcccgctgcagaattccacgagcctgtactttaatcacaccgatttggcgtattgattcgatttgccccaaatggccttgcacactacgcttattaactgtgcttaaccaaccagattagggcctttctataattaccctgtaata

SEQ ID NO: 30321 - DNA, 399 bp, Gossypium hirsutum
  unsure (1)..(399): unsure at all n locations
  Clone ID: LIB3083-091-Q1-L1-D1
ggattttcgagagaaatgagtgccacaagacaccgggcccgtagggggtggggttaaccatgtattggactatttgagacgaatgcaagcggagaatccttcgttcttttatgcaattcaaggtgataatgaccacaccggtggaagcatattttgggcggatgcaacatcaaggatgaattatgcttactttggggatactgtcatatttgacacaacatataggaccaatcgttatagggttccgtttgcctcgtttactggactcaaccaccatgggcagccggtgttgtttggttgtgctttaattctcaatgactctgangcctcatttgcatggctnattcaaacttggcttcatgcaatgtctgatcgtcgtcccatctctataacaactga

SEQ ID NO: 30322 - DNA, 251 bp, Gossypium hirsutum
  Clone ID: LIB3083-091-Q1-L1-E3
gcaagcttgtttactttcgaatgacttattccaaaacaatggatgagatttgttttaaggatggggtacaaaatgatcatcttaatgttaagtaatccaaacctcccaaggttcaatgcaagaccaataatgagaagccctctagtcccacaaatgcttatatcatatttaatgaacaaaagtccagatggaataactgcatacgtgatgttgacagcatcaaatacatgatctgaggttacatattcaca

SEQ ID NO: 30323 - DNA, 341 bp, Gossypium hirsutum
  Clone ID: LIB3083-091-Q1-L1-F1
tagacctgccacacgtgctcttaaacgtgcccttttggtggcacttaggtgtgttgatcctgatgcaaataagcgacccaaaatgactcaggttgtgcgaatgcttgaagctgatgaatatccatttcgtgaggaccggaggaacagaaagagccgaacagccagcatggaaatcgaatcattgaaggaaccaacggacgcggagagcaaggccggggaatcacagagcagcgtaaccaagacgacgcatgagtaataggactactgacaaaaaagcaatgacatggtgaataattggtgtagtatttaaagcttttcggctacccattgatacatgtaca

SEQ ID NO: 30324 - DNA, 362 bp, Gossypium hirsutum
  Clone ID: LIB3083-091-Q1-L1-G3
ggcaagtacatctgcacttcagaaggctttctggggtcctggctgtttcaatcccaagaccagagatgattgttgggaagaagggattaagcgcaggaagtaaggcaaggccagtgtttgtgcagtttgtccttgaaccactttggcaggtttaccaggctgctttggagccggatggggacaaagggacacttgagaaagtgattaagtcttttaattagtctattcctcctcgtgaattgcagaataaggacctcaagattgtgcttcaagctgtcatgagtagatggcttcctttgtcagatgcagttttgtcaatggtggtgaagtgtatgccacatccaatttctgctcagtctcac

SEQ ID NO: 30325 - DNA, 327 bp, Gossypium hirsutum
  Clone ID: LIB3083-092-Q1-L1-A10
aagggcctatcgtgattctccgggaggaatacccgcagcttggcggtgttttcacattgaacttggttaacaagaagattactctcttggttgggcctggggtttcatcacacttttttaaggcttcagaatcagacctcacccaacaggatgtctatcagttcaatgggccaaccttcggtcctggtgtggtttttgatgtggattacactattaggcaagagcacgtcctgttctttacagaggcccttagagttaattaacttaagggttatgttgatcagatagttacagaagcttaggactacttctcaaaacggggggata

SEQ ID NO: 30326 - DNA, 382 bp, Gossypium hirsutum
  unsure (1)..(382): unsure at all n locations
  Clone ID: LIB3083-092-Q1-L1-B9
tgaaaagttgtgatttttgttgaagtgggggttggnnttctcttttaatagttttagaaatgggtttgatggagatttcaataatgcttcatgttggattagttttgttcctgctttggacgctttctcaattcaatctttgccatccagttgcttatttcgtgtctctcatctacctctatttggttcatgaaaggtatgtggcgagattgaggaagaaattggagttcgaggaaaaacgccaacaatttaggagaagggtactttcggattccgaatctgttcggtggctaaaccatgctgttgaaaaaatatggcctatttgtatggaacagattgcatcacagaagattctgcttcccatcataccttggttcttggc

SEQ ID NO: 30327 - DNA, 146 bp, Gossypium hirsutum
  Clone ID: LIB3083-092-Q1-L1-C2
gatccccccggcctccagaattccgccccaggattaattgaggataccccggcctttattcttaaaataccttcctttaaaaccccaaggtggcaaatattttcctaaaccgggggggaccattctttgcacattaacaggggggc

SEQ ID NO: 30328 - DNA, 137 bp, Gossypium hirsutum
  unsure (1)..(137): unsure at all n locations
  Clone ID: LIB3083-092-Q1-L1-D1
cgcctgagctcaactccgcttatttcacaatgcctgaggaantggnacaaaggtgcccttcttgctgaaaaaatttctcccgatctggcatgggatgtgggtggtatccctcaaatgattggcaagggcggggattt

SEQ ID NO: 30329 - DNA, 180 bp, Gossypium hirsutum
  Clone ID: LIB3083-092-Q1-L1-D10
ccgtctaaactcgaaatacatctttagatctggtagaacaataataagggggggaaaagaacgaaagaaagaaagcaaaacgatgcgcttgttttgaagatcgaatttccctcatttccatccgctaaaaaaagtgtcagtttctctgatcgttcgagaaaaggagcaagaaatggaaaa

SEQ ID NO: 30330 - DNA, 294 bp, Gossypium hirsutum
  Clone ID: LIB3083-092-Q1-L1-D11
tgtttataggactcatgtcaggcccctgcaagagcagcttcagaaactgccaaagccttttccgattttgaagatcaatcccgagaaaaacaatatagattcctttgtggcttctgatttcaaactcatagggtatgatccttacaagaaaatagagatgaaaatgggtggatagagctttattttagggtctggaaaaccaaagtcttcaggggaattttggacaggatcttcttaagtttaaagggcaggtactggaaggttatggtgatgtaatgacttataccgataggc

SEQ ID NO: 30331 - DNA, 160 bp, Gossypium hirsutum
  Clone ID: LIB3083-092-Q1-L1-D12
gctatcaaactatggcaatggcggatcccgcacttcaccatcaaatccaacccatcaaagaaatagccctagactacaccccggaggcccgcacccactggcctggcttcaactccatcacactcacccttgatcctccgggaggcccccgggggccttc

SEQ ID NO: 30332 - DNA, 281 bp, Gossypium hirsutum
  Clone ID: LIB3083-092-Q1-L1-D9
attaaacagctttcacgaaccccaattactgaataatatctcgttagaacacgtatttatgtcggtgtatattgctgaacgtgcacgtgtatacaacataaaaatgatcaatgaatgaacaaaattttcttcatgactgccaaaaccaatcatagttttcatacccatcctttgccaatgggggatttcaagcaccgacttacagtgagttgcaaaaatttatctttgcttacctaaaggagatcttcatgtgtgaaaatggtcgatcagatgttggatta

SEQ ID NO: 30333 - DNA, 348 bp, Gossypium hirsutum
  unsure (1)..(348): unsure at all n locations
  Clone ID: LIB3083-092-Q1-L1-E7
gagagaactagtctcgagttttaagtgccaanancnccgattcaagttataataatgtataccctgggaacgaagatgaagcacgtgacccaccagttgtccctcctcacctgcatcataccttgcttaggtaccctgctagcatgaacacatccgggaatcttcccttgcctgaaaacgtgattctaaatcatctttacattgaaaaccgagaaccaccgagatctgtggtggcacttgggttcactcaacgctttcgtgcaaaatatgttactggtgtgctatacaaaccagttccaagaaggggaagtagcaatacttaatgcatgaatcaagagtagaccttga

SEQ ID NO: 30334 - DNA, 334 bp, Gossypium hirsutum
  unsure (1)..(334): unsure at all n locations
  Clone ID: LIB3083-092-Q1-L1-F8
caggaaacaccanccancnaccancccnanccaagcnnnnttattgctgcgagagtgcacatacagagggctatattcatacagatcgtttcacatcacatgggccaggctgatattaacgtccgaaacgcctggggtggactagactggccctgacaaggaacaacccctgatggccagattccatatgacaagactgatatgggaggtcaatatgcttagaacacgtctatgagtgaaacccgagctggaaagcacatcccatccgcagccttccaagatctcgaacctactgttctcgacgaaggcaggactgcatcttaccgactgcttt

SEQ ID NO: 30335 - DNA, 259 bp, Gossypium hirsutum
  Clone ID: LIB3083-092-Q1-L1-G10
aggaaggagtacataaaatatattatattacaaatgagggttaaaatcatgatttggaaaacaatatatgctatgttttatttatttacacatgtattagtgtattaccaatacagtgacacatcatagaactataaagtacaaatcgtagaacttccataagaaaaatatagagagtagaacatctattttaagtaagaataccttaactttaaaattttaaagaagaaatatagaatgggaattttgtcgttatttt

SEQ ID NO: 30336 - DNA, 343 bp, Gossypium hirsutum
  Clone ID: LIB3083-092-Q1-L1-H7
ctaagcatcctttttaagtgcattacagttcaaagaaaataacccaaagtcactacaattggaagcaacatctgtaatcgttatcgcatcatcttttttttatcatcatcctcgtcaaccatctaaggcctagcaaaaaaacaaactggaaaaagaaaacagcccccaactttacaaaatcaacccacaaaaacagaagaagatagactattgaagtgaatcatggtcatggtttttggccgagtttgtttgaaaaccattgaagtaaataacaataaattattcaaaccctaaaacaacccacatgatgatggtgatgatgatgatgatgaaaatacttttc

SEQ ID NO: 30337 - DNA, 369 bp, Gossypium hirsutum
  Clone ID: LIB3083-094-Q1-L1-A8
caaggattcaaataaggaggaaagggagagaatgggtcgaaggtcgaagtttgaagagccacgaattgaacagatccaagatcttgagaatgatatgatgaagtatttcagagaggatctacataggcgcttattgagcaccgatttcaagaagcaagttgatggtcttgagatgttacagaaggcactcccttccattgggaaggaaataattgaagttctggacatactattgaggtggtttgttttgcagctatgtaaatctaacacgacatgccttttgaaggtgctggagtttcttccagaactttttgactcgttgaagggtgaagcatatagtttgacggaggcagaagctgccatttttct

SEQ ID NO: 30338 - DNA, 334 bp, Gossypium hirsutum
  Clone ID: LIB3083-094-Q1-L1-D1
ccaccattattttctaaacacccctacaagtacaagtccggagccttaccatcaccacccaagcacccttacaagtacaagtttccaccctcaccacctccagtttacaagaataagtctccaccacctgaacctgcatcatcacccatgctcccatacaagtacaagtctccacccccaccaccttcagttaacaagaatatgttgtaaaaactttcaccttcataaacacccaagcactcttataagtacaagtaccaaccacctcctcctgcatcttcaccaaagcatccttacatatacaggtttacaccaccaccaccatccccaccta

SEQ ID NO: 30339 - DNA, 369 bp, Gossypium hirsutum
  Clone ID: LIB3083-094-Q1-L1-E1
ccacactctaataacctcgactccgagcttggtttgctgttgtctttcacggcgggtgttcgccgtgggtggaccactatcatgatcgccggtcctaaatgatgtgacgagctggactgatgcaaccaatttgcaaatatgtaccttccaacgccttggtgtccactgcctatactaaggccatgtgtgatataaaagaagcagtagcgaacggatggggattccactcctgctattggaagagatcaaggatacatctcaaacatgcccatgaaggccatactggggcatatgaatccgacatcgagatcgataacaaaatgaatcctctgaagctcttggacgatgcaaatcgatgggaatatgatc

SEQ ID NO: 30340 - DNA, 150 bp, Gossypium hirsutum
  Clone ID: LIB3083-094-Q1-L1-E11
gcgaaagattgtctcttgttattgtggcgaagcttggcgtaccaacgtaaagctgcacggattttactacatgtgttccctctgatgaatgccgatatgcagagaacgactttgattttataacagaggtgaacgtccctgagagcatat

SEQ ID NO: 30341 - DNA, 367 bp, Gossypium hirsutum
  Clone ID: LIB3083-094-Q1-L1-F5
gtgggtgccgcttcaaaattcactggcagtggaggagctgtagttgcattctgccccgagggaccaccgcaagtgaaacgacttgaagatgaatgtagaaaagctggatttagtattcaagcaatacaagtagttccttcatgtctaaatgatgtggatcttaagacattgtctaagtagaacattttagggattgtttttgtttggattgattgaggtttttatagaattaatgaaaatgatgagtagctgtcctgtctctattaatgtctaccctactgaatttgctctgcacattcctggcaaccagaagtaaacaggaagacaagggatccactgtctaattccgtgtgtcccctttacaata

SEQ ID NO: 30342 - DNA, 374 bp, Gossypium hirsutum
  Clone ID: LIB3083-094-Q1-L1-F6
tactttcgccctttttcttgtctctgtttttctttttttttattcagctccaaatcagagaaggaaacttatttattttgaattttttaaggaaaggaaaaagaaccaggccagtaatggagaaaaagcaaggttttctctcagctctcaaagaagatatagttcgcgggctttcaccttcccgctcgcggtccaacagccctgcaagacccctttcactcatgtccactacgttacgtggaaacaaagacaaccaccatggcggtgctcacgtggtgaaaccggaaccgttgatggcgagatccgggactgtaaggccagtcggtgaagcgttatctcctctcatggaaggtccggagccggaccgagggaaa

SEQ ID NO: 30343 - DNA, 350 bp, Gossypium hirsutum
  Clone ID: LIB3083-094-Q1-L1-F8
cccctgttagcagagattcacgaatgggagctgctccagcagcaattgttgagtcgacaacaattagggtcatggaaataagggggggaattgaaagactcacaatttacagatctatccttgctctttgaaatttctatcctaaaaatggtggggctttagagtgatgaagccccccaccaatcaaacgacaaagagtaacaactaagaccactcagcaagggagcaccggacggaggagcagaaaacagaattcacagaaatagtaaagccctcttgagagaattacagctagaccttttcaagctaaacacccagcaagagcctaaacacatcactcaatgaaatga

SEQ ID NO: 30344 - DNA, 307 bp, Gossypium hirsutum
  Clone ID: LIB3083-094-Q1-L1-G3
gggacttatacgaatacttaagaaaggttaaatgttgtatggatggaaaacgaataaaatggaaccttgacccactatcaaagatgataggaacctcggtataacttgaacgccacacttttgggattaaagtgataagttcggatagaaagacggttgactccacaagggttacttgataagtcagacgagtctttggagaacaatgagagttgaaaacaaactcacaaagtgatcataaatcatataagattcaaaagtgtattgtctaaccccaaaatgattacaaaacaactctttattatat

SEQ ID NO: 30345 - DNA, 320 bp, Gossypium hirsutum
  Clone ID: LIB3083-094-Q1-L1-G7
gcactggactttatacatgaaatgggatggcttcttcatagaaatcacttgaacaggaagctgggtgacatgaaccccaatctaaatctctttcctttcaggcggttcaagtggcttatggaattctccatggaccatgactggtgtgccgtagttaagaaacttctgggcattctctttgacagaacagttgatttaggggaccatagttctatggagtttgctttgttggatatgtgtctgctccacagagctgtccgaagaaactgcaggcccatggtagaattactattaagatatgttcctaataaaggattgga

SEQ ID NO: 30346 - DNA, 370 bp, Gossypium hirsutum
  Clone ID: LIB3083-094-Q1-L1-H4
gagagtttcgatgaggccttacaacgagatgatgtgaaggccattgttgttgcaggtgcaaatggaaaattttctggtggtttcgatatttctgcttttggtggaattcaacagggagcagtgcagcagccaaagtctggctatgtatctgttgaggttctcaccgacaccatcgaagccgcaagaaaaccatcagttgctgccatcgatggcctggccttaggtgggggtctagaggttgcaatggtatgtcatgcccggatatcgacccctactgcacaactgggcctgcctgaacttcaacttggactaattcctgggtttggaggaacgcagcgacttccacggcttgttggtctcgcgaagtccc

SEQ ID NO: 30347 - DNA, 367 bp, Gossypium hirsutum
  Clone ID: LIB3083-094-Q1-L1-H8
attaccttgtccaaggctatgacgatgcagggcctagtgcctctcttttgtcaccatatctcactgacataattagttgtctgatttcaactgctgatcggacagatgggggtgactccaagcttaggtcttctgcttatgaaaccttgaatgaagttgtgagatgttctaacattgctgaaacatcttccgttatagcacagctactaccagtcatcatgaataagttgggccagactatggatattcagattgtgtcatcagatgacagggaaaagcaaggggacttgcaagcctctctttgtggtgttttgcaggttatcatccaaaaacttagcagcacagatgaaaccaaaacaatcatact

SEQ ID NO: 30348 - DNA, 320 bp, Gossypium hirsutum
  Clone ID: LIB3083-095-Q1-L1-A10
gggaagaagttgttattgttcttagcatctttataataggattcttttcaacttatgcaaaactgtacccagcaatgaagccttacgagtacggtttccgcgtgttcacgttgacgtattgtttcataacggtatccgggtataggacaggggaattcgtccatacagcagtgacgcgatttttgctaatagcacttggtgccagtgttagtttagttgttaatataggcatttaccccatctgggccggtgaggatctgcacaactcggtggctaaaaatttcatgagtgtggcgaattctttagaaggatgtgttaaa

SEQ ID NO: 30349 - DNA, 326 bp, Gossypium hirsutum
  Clone ID: LIB3083-095-Q1-L1-A11
caagcgccggaatctgaaaatgaggagcttcaagaagaaaacgatgatgaagaagaagaggaaagcaagggagaaggaagtcaaaatacaaggagaagtaaatctgataagaaagcgaagaaaagaggaggtggttttcagacagtgtgtagcctttctcctcagcttcaaagagtagtaggagagtctaaattggctagaactgaggttgtaaagaaactttgggcatatatcaaggagaaggatttgcaagacccaaagaacaagcggaatattatctgtgatgaattacttcgtgacatttttcgagtaaattctattaatat

SEQ ID NO: 30350 - DNA, 328 bp, Gossypium hirsutum
  Clone ID: LIB3083-095-Q1-L1-B10
aaagtaatgggaaaccctaatttcaacatccaatctgaaactgctgaattgaagaaaattgatgagaaagttcttcaagaatctggcaatgatttaccaaaaacatgcaccccacgtcggcttaatctccccaacgctttcaatttccctgaaagaagtccaacagattcagtggtgtcgcctgttacaagaggtcttcttgcaagagacaggaaagctggcggttctctcttgccacctagtattaatcaagccaagattcatgaattgcgagttgaagaaataggtcttttttcagagttgaagaagtgatctgtggtatggattg

SEQ ID NO: 30351 - DNA, 327 bp, Gossypium hirsutum
  Clone ID: LIB3083-095-Q1-L1-B9
tggttttttttttttttttttttttttttttttttttttttttttttatttaactaatttgcttcaatcctggaaaaacttccaagttctaaaaaccttttactggcaatatacccgggaaaggggcccagaaaaacattaccaaatccctaaaaagagacccctaattattgggggcaaaaaccccatttcaagtataaaagatgaacacgaaactatttcaaggtcctttaccaaaaggaaatatctgcttaaatgtatacagaaagctcaatagtacaatcttctccccattcaataatttagtgcttacaagaatacaatata

SEQ ID NO: 30352 - DNA, 329 bp, Gossypium hirsutum
  Clone ID: LIB3083-095-Q1-L1-C1
cctgtttccatggagatctagggtttccagtggttccgcaactcaaaatcgtagctcttcattcgcatttttcaattgcttattaaaagaagagaaaatggaggcaggtgttgttggagatattgcgtgtttggatccggagctattgcagctccaggagatgtctccgttagctctcaaatccaaatcctgaattcacgcaaacgcttttcgaacagtggctttcgcttcccgatacttacaagctggtgacgcaattggttagtgatgcaaaggcacgcaatcccttgaatgttcctggaaatgcttcctctggaagtacagcagca

SEQ ID NO: 30353 - DNA, 327 bp, Gossypium hirsutum
  Clone ID: LIB3083-095-Q1-L1-C10
aattcccacttgcttaccaccaagcttattgccaagaggatagtttccttgggaagaccatagcccttgcttgacatagcggttagcagccgaaaccttcctcaaaacgtcgagcagcaatcccaccgcggaatccgcacaatcagtggagaaaatggttccagcgccagccactgcgatgccacggcgtcggcactcggagcaatcgatgtggttaatgccctggctagtggtaacgaccaaacccaggtggggcaaaaggcggatagtatcagcggtgacagaaccgctagctgatgtgagaatggcttgtacggactgtgcatg

SEQ ID NO: 30354 - DNA, 285 bp, Gossypium hirsutum
  Clone ID: LIB3083-095-Q1-L1-C11
gattaaagatttttctttgatgaaaacacccaagttctacattggcgcatgatgaaagtcacatttcaatgctaaaaagtctcaaaaccttagagctatgcaattattcccttctcaaaccaaacttgagtgaaagctcatgaccaactcaaatacagaaaagacttcaatcgaacaccgattcaaccaaatcacatcatgtttcgactaatgttaaatcgagtgatgctcgcccctaagaaacactatgagaaaagctaacggatggtcaacatgaacattatc

SEQ ID NO: 30355 - DNA, 252 bp, Gossypium hirsutum
  Clone ID: LIB3083-095-Q1-L1-C7
caccggggcgcgtctagaactgggatccccgctgagaatcgccgtgagtggtcctcacaccaggtgctagttccctgtaaacctacagtcgctcctacatacgcaaaagggaagaggacatattgctggtgagactatgcttggcagaccacactaatcagtgcctagggtgacggatgtcaccctgttgagtacattacaggtctatcaaccccatctaacaagtgcacacagtgctatgcggcgttatac

SEQ ID NO: 30356 - DNA, 306 bp, Gossypium hirsutum
  unsure (1)..(306): unsure at all n locations
  Clone ID: LIB3083-095-Q1-L1-D6
cncccctcttttcaaaanccacgnncaacgcaggggggaanngaaatnggtgtgatatttcttctcttttcttattactcgatcctaatcaagtctttccatttttgccctagactcgcttctcctaccccaattgttaacttcgattaggtcaatccatgattttcacttttcaataatttcgtatttcttcgcttttctttttctttataatcaagattttctgtgctccttcattgagcttagaaggatttggcgtctcgttacaagggggttgttgggtctgttttcggcaatgagaactct

SEQ ID NO: 30357 - DNA, 327 bp, Gossypium hirsutum
  Clone ID: LIB3083-095-Q1-L1-E8
tgggacctcggcctgctgtgtctgaaactaacgctggaactggtctgaacaaatcttctagcataaatggtgcacttcatctaaacacatgaaaacagaatcagcagccccaattggtcttgaggaagcctctgcaacctaataataagaagcattctgatgatgatgaatcttattctgttacttctatcactttggtgtcttcccagactgccaagccgaagtcaactgttgcatcagcgcctacatttcgatgttctgaacgcgcagagaaaaggaaggagttctattcaaagctggaggagaaacaccaagctctggaagctg

SEQ ID NO: 30358 - DNA, 326 bp, Gossypium hirsutum
  Clone ID: LIB3083-095-Q1-L1-F1
acaggttcataactgaatactgattcatgtgttctataaattccatattacagagtgaaagtatttacagaagaatcaactaattgaaatccccatccaaatttacagaaataacagcaaaagcttgtttcttttttaaatgcagctttttggcaggtagatagttgatagttgatacatgtcataattacattcttcacaaggttaatttatctgatctatttacctgatgcagaatcaccagaaatcaactccctttcaagttcatcgaactcccaatcacttatctcctccgaagtgtagtcttggttaaccttcccaaactc

SEQ ID NO: 30359 - DNA, 329 bp, Gossypium hirsutum
  Clone ID: LIB3083-095-Q1-L1-F3
ttgtcatcctttacaagattgcatcaaacattggcctcaaaagccagttcgatacagggaagttgtggctacatatacgattgaagcaaagaaattgggattaaggatcctggagttagtgtcagaagggttggggctagaatctagatactttggggataaattaagtgaatctgagatactatcaatcaaccattacccaccctgtccagatccgagtttgactctaggagtagctaaacattgcgaccctaatctcttaacccttctccaccagggagatgtaagtgggcttcaagtcttcaacaatggggaatggattggcgtgg

SEQ ID NO: 30360 - DNA, 323 bp, Gossypium hirsutum
  Clone ID: LIB3083-095-Q1-L1-F5
tgatccacaatcacttgacttttacagtcaaatatcacaaggatccattgtcaggctctgcaaggattgttggatttgaggtcaaaccattcagtgttaaacatgaatacgaaggtgagtggaatgagaagacccgtctgacaacctgtgatccccatgcaaaacgtgctgttactagttctgaatctcctcaagaggttgaagaaaaaaaggagatcatatttacatatgatgtctagttccaggaaagtgatataaagtgggcatcccgatgggatacctatcttctaatggctgatgatcagatccattggttctcaatt

SEQ ID NO: 30361 - DNA, 330 bp, Gossypium hirsutum
  Clone ID: LIB3083-095-Q1-L1-G2
attccttgtgcctttaagagccgtggattgtggaagctatacttagtacgtcaaccttgtcttcttgcccttatttgacctgagtgcaagccaaataacaggtggaatgcaggaggcatttaagagctaataggctctctggatttttgttgatcaactggttaagtgaaagaatcaaacatggaattccttccaaacttggtcaattggcctttctcaaggttcttcatcttttccataattctcttagtcaaaccacaacttgctttcatccgaccgtcctggacctttctttaattgaactttctggtctgatacctaatctctaac

SEQ ID NO: 30362 - DNA, 302 bp, Gossypium hirsutum
  Clone ID: LIB3083-095-Q1-L1-G4
atctcgggtcagatgctcaaagcgttgctatagacgaaatgaaaaaaaaagggggggcttaatacaacgtcttcctaggccttacatgaatctctcaagcgaaagcaaggcgaacaaaaccgatctagtcgtttgccgttactacgatcatgtctttgttatggctacccagattggaactatgggaacaatactacatgcaagaatggtggaaggctacacggtccagccaactttcaatgtgaccgtatacttggcatacgagacgagccactgctaccgtctattacccgcgatcttat

SEQ ID NO: 30363 - DNA, 292 bp, Gossypium hirsutum
  Clone ID: LIB3083-095-Q1-L1-G8
tagttttttttttttttttttgtttttttttttttttttttttttttgtttggaaatgaaaatttatcaatcagattaatagagggcagagcaaacaattaaatttcaataaagtactctattgtcactgaccaaacaaatgagtgattgatataataaataaaactacagcgcaatacaaagtgatttgggtgcccattttacttgatgaagattgaactagatgagaggtttgtttgtgtgccgacagccaaccaaaaagttaccccctacataaaaatgaatgaaaggg

SEQ ID NO: 30364 - DNA, 327 bp, Gossypium hirsutum
  Clone ID: LIB3083-095-Q1-L1-H11
cgccaaccacctccactggtttaatcaactttatggctagttcgctccaagggatatttaagcttgaagacttcacttcagatcactctgaaaagtcggtgaaaggattcaaattcattgatacaagaagcttgtggctaaatttgaaagccattaaaaggcttgtagataccagtgcactgaatttggataacctttctactttaaagttatttgaaaattcaattggcatgtccattccccaatctcgttttcttcctttgaattccacatcagacttattccttctccagtcggacctttactcatttactgaaagcatgtttg

SEQ ID NO: 30365 - DNA, 328 bp, Gossypium hirsutum
  Clone ID: LIB3083-095-Q1-L1-H2
gttgctactcacagtcaactagtgaaatctctaccacgtgagctttccaagtctgaccagcttcaagaaattttagatagggttgctgtatactctaatccatcaggctttaatcagggaatgtattcattgcgttgggcctattggaaggagctggatttataccaccctcgttggaactcaagggatttgcaagttgcagaagaaagatacttgcgtttctgtggtgtttctgcaatgactactcagctgcctaagtggacaaagatatatcctcctcttgagggagtcgctaggattgctacatgcagagagacacttaagatta

SEQ ID NO: 30366 - DNA, 336 bp, Gossypium hirsutum
  Clone ID: LIB3083-095-Q1-L1-H3
cgatagagaggttaatattagtagaggacatttttgctggctttaattgtactttgcgaggaggaaatgtctcacatcatgaatacatccaggttgggaagggaagggatgttgggttgaatcaaatttcgatgtttgaagccaaggttgctagtgggaatggtgagcaagttctcagtagagatgtttatcgactgggtcacagattggacttcttccggatgttatccttcttttataccactgtaggattttttgtcaatacactgatggttattcttactgtatatgtttttttgtggggcagactttatcttgctctcagtggtgttgaga

SEQ ID NO: 30367 - DNA, 285 bp, Gossypium hirsutum
  Clone ID: LIB3083-095-Q1-L1-H8
gcgacgtgcgattgaatcggctgggttgcttatgaaagggtggggctgacgcccggtcaaaagcacctactgattatagtacattgacggggaccgggtcctgttctatattagccagccctgacctttgacatgtcaggcgcgcttgcttgcctggtcaccccacttaatgatggctgcacttctcttgtggagttatttgaaggcagaccgcacgggagtgtgcccaatatcttcctcatgctgaagaagtctaatagcgtgtgagagtcttcgaccctcttc

SEQ ID NO: 30368 - DNA, 322 bp, Gossypium hirsutum
  Clone ID: LIB3083-095-Q1-L1-H9
taaaagtaaaccaaagttgtggagccgaacccaagttcccagttgtttcatgttcatcttctcggatctgactgcgtttccttgctgttctacctttgattcctatatatatttttttccgttttccttgtctttttttttaatttcaaagagggagacgcaagtccaagtctgatggttagtatctgggagaaaggagaattcagatctgtgattaccatgaagtaaaaggctgaaaaggttgaaggcggtggttgctttcacttctttttaatttttttatttgcttttacgagatgatgaagcgttaagctgggatttg

SEQ ID NO: 30369 - DNA, 391 bp, Gossypium hirsutum
  Clone ID: LIB3083-097-Q1-L1-A1
gtttgatcttagtttataatggggagatacccatattctatttagtcttaaattttatgggttcacttcctatagaaaaattaatgcatgtttttgtctttcaatataggaagcaggaacaggctgctttgctaactttgttatttgattcaccattctaaagtaaggtattgttcagtaaggcctaaagttaaatatacgtaagtatgggcagtcctgcagagccaaagagaagagtggcatttgtgctgattgatggattaggagatgtatcaataccaaggtttgggaataggactcctctgcaggctgctgatgttccaaacttggatgccatagcatcagctggagttaatggccttatggaccctgtggaagtaggtttgggttg

SEQ ID NO: 30370 - DNA, 245 bp, Gossypium hirsutum
  Clone ID: LIB3083-097-Q1-L1-A2
ggttattaaacaagggccctgggatttattattattacttggaaaagacaacatgcaaactgccttttttaataaaaacattcaagcagaaacccttcctaaagcgttctggcgagaagaaaaaaaacttttttcttttttttttaccagtgctttttggtggtgttgtgctcaatatgcatctgcattggaagaaacatgaaactgtttttgttatttgcaagccttgtcagccagggcaggtt

SEQ ID NO: 30371 - DNA, 383 bp, Gossypium hirsutum
  Clone ID: LIB3083-097-Q1-L1-A4
gaggaaatgtcggttatttgggcattagggttgatgaaaccgcctgatactatccggccatattattggccccaaaatcacgggggtccaatgatggttgcatatggacatttgaggcttaatgtttcagagaatgtggatgattgtttcgggccattggatgctgatgataagcaggaccaagatttgattattgccagtgcaaaagttccgcttgttgttacgactggggaggcgttgcattatccaaatccaccaaatccatcaaaggttttgtatattaataagaaggaagctccagttttgagagtggaaagaagggttcctgtgaaagtttcggtgcagacaggtcatgatgttgctttgtatattacttctgatta

SEQ ID NO: 30372 - DNA, 392 bp, Gossypium hirsutum
  Clone ID: LIB3083-097-Q1-L1-C2
agaatttcttttcatgcttgcttccagtgtagctagactgctagatctgattgttggaaatgtcaatgatcgagggctactttcaactcttcctgtcattgacattctaatacagtgctttcccacggaagtgcctccgttaatcagcagtactttacaaaaattggttgttatttgcctatgcggaggagacgacaaggatcccttaaagacagcagttaaagcatcttcagctgctatcctagctaggatttgggtgatgaataccaactatcttgcacaactaacatcagaaccttctctttcttcactactgcagcagactggtgtagctattgaagataatattcttctttgcctgggtgacatatggcttgacaaggtagacaatg

SEQ ID NO: 30373 - DNA, 389 bp, Gossypium hirsutum
  Clone ID: LIB3083-097-Q1-L1-E3
aaaagagccaatctgacctggaaaataatgggatttttaagtactttattgggaatttttggttttgggattggaacttctattggactcttgattggattctttctcttcatatactctaaacccaaaactgtaaaggaaccagttcctaggccgctttatgagctagataacgatcaattgctggatattcttcctgatattccgttatgggttaaatgtcccgattatgagagagtagattggctgaacaagtttgttgctgatatgtggccgtacctcgataaggcaatttgtgctcaaataagaagcgctaccgaaccgatgtttgccgagtatgtggggaagtatcaaatagaagccattgagtttgataatctaagtctcgg

SEQ ID NO: 30374 - DNA, 352 bp, Gossypium hirsutum
  Clone ID: LIB3083-097-Q1-L1-F2
gttctataggaagacgccctgttaactacacgaagttggctcgccgggattcttctccggtggaaggggtagtggtttacggagatgaagacgacgaggccgacctctcccgggtgatatgtaacgggtacgagacggattcggatttggttagtttgaagatcagtttgttaggtgactgtcaaattggaaaaacaagctttctgatcaaatatgttggggatgaagaagagaaaagcttacaaatgtcaggattaaatttagtaaacaaaacattatcggttcaaggtgccaggattgctttcagcatatgggatgtaggaggtgacagtaactcacttgatcatcttcc

SEQ ID NO: 30375 - DNA, 339 bp, Gossypium hirsutum
  Clone ID: LIB3083-097-Q1-L1-F5
cgcacctcttgagtctctttttgcgcagttctgtttacactcattatggtttggcaattgtagcatacgtgccattgcagtgttgtgggtagagtttgttcgagaaattcgttggtattgggaagagtcacagccattgcctaaaatgccagcccatggttcaattgacctaacatcttgtttaatcaaccataaactacaaatgcttgcaatatgcattgagaagaagcgtgaactcaatgaagaatttcaagactgtcttggaagtaatgatgatgtgtttgcacatatggaggttgaagatattcaagttggagaggagtctactagttttcttac

SEQ ID NO: 30376 - DNA, 289 bp, Gossypium hirsutum
  Clone ID: LIB3083-097-Q1-L1-H1
ccactgcggggaagtggtataaaaatataaaaaaatctgtcctaaaacaatatatttatgtttatatataattaggggaaacatgaatgaaatgcttttcaatgaaaataacatttgcttttacaaaggccttcaaaacgaaataatacccatcaacatgcatcctgggggtaaccataaaaagcttccgtttctgcacaacaaatttgaaagaaaaacgaatccgaacaaacatcactttttgtcttcctcctttggggcctgtgcctaattttgcttctgctggggc

SEQ ID NO: 30377 - DNA, 349 bp, Gossypium hirsutum
  Clone ID: LIB3083-097-Q1-L1-H2
aaacaggttcaatcaatatcattatttggacaagaatcaacatctccaaattacacctctaaaaacacagggtgctgctgctattttcttttttctttcttctctcttcactttacattacaaacaaatcctaaatttgggtttttgaggcaaactttgattttaaacaacttcaaaagatgccaaccatacaaacaaacaaaaaaaagagaatctaattgaagcttgatgatctgctccatctttcttttaaatattcatcagtagaaaagttactgctttgctccatgctactaaatgatgtacaatcatcatcaacatcaagcattgccacacttaaatgtaactc

SEQ ID NO: 30378 - DNA, 282 bp, Gossypium hirsutum
  Clone ID: LIB3083-099-Q1-L1-A10
ttttctagcatggatgtatgaggataaggggcttaaagatctatggggggttcatatactccttatctgcacactgagagggttcattcatcaactatggagctcttacaacaacatgtttttcttaactcgcaaccgttggatcaagcaacaaggtgttgatttcaagcaaatcgacgatgaatgggactgggataatttcataatccttcaagctatgttagcttcaatggcctgtttgatattcccatctttaaatacacttcctttatggaacctaaa

SEQ ID NO: 30379 - DNA, 276 bp, Gossypium hirsutum
  Clone ID: LIB3083-099-Q1-L1-A9
aattcaagctcaatccattgtgcaatgtgtgagaaagaagttcatggagatcaatctctctgctgtgggcgatgtcgagcagtggtctactgcacttctctctgccaaaagcagcactggaaggagtcacataaaagcatgtgcggtctgtacaaagctatgatggaaagggaagaagagcttgtaatgaaaatcttcatgttcccttgctctgctgcccaaccttgtaaatggcttgaatcattgggaatccatcagaaagggatgtggagaagg

SEQ ID NO: 30380 - DNA, 275 bp, Gossypium hirsutum
  Clone ID: LIB3083-099-Q1-L1-C1
cttcctttcacaactggttgttcttctcaggcaagtgttgcagttggcaaaagtcctccaaggaaacaaaaaccagaaccgaactgtcaaaatctaataagtaaacaagttgtaggagaagagtgttcatcaaaggaaaaaaaaaaaaattcatttggtcggttggctctttcaaagcccaacatatcgaatgggatacatagattgattcgaattactgtaagaagcttctctcagttatttgtttacaaagacatagaggaagtgacaaccga

SEQ ID NO: 30381 - DNA, 278 bp, Gossypium hirsutum
  Clone ID: LIB3083-099-Q1-L1-C10
cccactgcaaaataaatctgatgttccatcttatgtgatgttgggaattcccaaacatgaggaagggcctcctactcctcagcaccctctgtctccaatgggtgatgcctgttcgaggatggatctgactgctattcatcaaattttgataatgacacattataaagatgatgaaggaacaaatgagctatccttccaagagtggacccaacaaatgagagatatgttggaggcaagaaagcgtggagatgtagcatttcgtgacaaagattttaaaa

SEQ ID NO: 30382 - DNA, 323 bp, Gossypium hirsutum
  Clone ID: LIB3083-099-Q1-L1-C3
ggcgtcgttatcaactagatcccccccctgctgaattcttctcgttataaaaccccttattctgacatcactatggctggcatatggctgctattttttacaatggccgcactaacggcagaggcaaacggccacaaatcagggaatccaccggtgaatatcgtgacagggcctacacttggtgatttacgatgggtgagtcatggaaggccactcatttggagatacccaaccaaatatgggctcttacttggtcatttatgtgccaacatgcgggcttaaactcaactaagcagagaactttcggttaaactgaaataaac

SEQ ID NO: 30383 - DNA, 234 bp, Gossypium hirsutum
  Clone ID: LIB3083-099-Q1-L1-C4
atccatcttcaaaaaactactaatggctttgccgaaccatttttctctaaatctcaataactaccgattttgttttgccaaacatctcctgccatttcccccgctatatcgttcgccgatatgaattacaaagatctcaagactttaaaccctatgcttccatatcctaacttcgaaaaatgcccattgcatccgaaccacttataggtaaaaaatatgatatgggtgtcgaga

SEQ ID NO: 30384 - DNA, 279 bp, Gossypium hirsutum
  Clone ID: LIB3083-099-Q1-L1-C5
atgaagtagattgcccattctacctgaaaactggcagttgcaagtatggttctacttgccggtacaatcatcctgataggaatgcattcattcctcctgtagcactaggccattcccttatagcatctgccaataatctgaacattggagttgttaatccagcttcttctctatatcaaacaattgaccccagattaagtcagacagctctacttgctcagcaaacaatgccaacgttggtagggactcaaactgtgtatcctcagagacctggacaga

SEQ ID NO: 30385 - DNA, 276 bp, Gossypium hirsutum
  Clone ID: LIB3083-099-Q1-L1-D10
aagatttgatgaagttaaaattagtagctagaaggcagaaacagaaactagtcctccaccacttctcatcatcttcttgaattcatcaaaattaaccattccatctccatcaatgtctactttccttatcattgctttgcaatcttgcaatttgttcccttctttcaaacccaaagaaaacagcacagatcccagttcctcaaacgaaatcaacccatctttgtctttgtcaaacacatcgaaagcctctttcagttcctcttctccattcatccc

SEQ ID NO: 30386 - DNA, 278 bp, Gossypium hirsutum
  Clone ID: LIB3083-099-Q1-L1-D5
gtctgatagagacagtgaagatgaagttgatgatgacatcgctgaccttgaagatcgcaggatgctcgacgattttgtggatgttagcaaagacgagaagcaacttatgcatctttggaactcctttgttagaaagcaaagggttctggctgatggtcacgtttcctgggcatgtgaggctttctctaaactccatgggccggatttggtcaagtcacctgctctcttttggtgttggaggttattcatgataaaactttggaatcatggtcttcttg

SEQ ID NO: 30387 - DNA, 276 bp, Gossypium hirsutum
  Clone ID: LIB3083-099-Q1-L1-D7
catcaatgctcttatattttcagatggaaagaacttgaaattggcaagttaggcacaggatatggtctattgcagctcccttctatgcctgaggtaaagcaccattcgctttccactgagggtttcactccagttgagaacatcaatatggacgatatcaagtttaaggataaatctcgtgagaaacagaggaagaaaaatttacaaacaaagaaagaacgagagcaacaagaatcaaaacctgagaaacccgaaagggccacatacgctgccgcc

SEQ ID NO: 30388 - DNA, 256 bp, Gossypium hirsutum
  Clone ID: LIB3083-099-Q1-L1-E4
aaacataaataacatactcatattcataaccatttacagagtattgtaactgagcaaaattcaatctatacagaatttcccatgctgcttatctcccaagaacaaatatcaatcaataccctaccaatagtaacccacatcttacatatatattacaaaaagagcataattcaaacctttcttcacaacacaaagtttgttctgcctctccaccttatcttctcttcaatcaaactacttacaatggctactagca

SEQ ID NO: 30389 - DNA, 277 bp, Gossypium hirsutum
  Clone ID: LIB3083-099-Q1-L1-E7
ctcgggttcagcagagagtaaggtcacaagaggaggagccatctttttgcaaagatttctaacaacatcagtgctagtgataagttccatttgttgaagaatcatcttaacagctgaaagtacaacagcgcaattagcatgttgaagccgtggcgtaactctttccacaatgttttctgcttcacgtgcatcagatgccttgtatctggagagagcgtcaagtataaaaacttgaccccactctgtgcattcattaagagcagtaagaagctttgta

SEQ ID NO: 30390 - DNA, 233 bp, Gossypium hirsutum
  Clone ID: LIB3083-099-Q1-L1-E9
gggaaccatatgatgtgccaatgcgaagatttcttagaggtcgagctttagatgtggataaagcttctagcgtgtgcctaaaggtcccagaatggagacgaagctttggtcctaaaggactcatccatccatgagaactcacacattaaatgcaacaaaacatgatgtcctagcatggatgatacaagaaaggacgacctatatgagtgacttgttagctgcaagacattgtc

SEQ ID NO: 30391 - DNA, 280 bp, Gossypium hirsutum
  Clone ID: LIB3083-099-Q1-L1-F1
ctagtgagctggaaaggatgaaaaatgagaatctggttctttcaaaagatgctcatcatttcgacaccaagtttccaggtttacagcaagaattaatgcagttagataaggtgaatgaagaactgggaagcatatttcctatgtttaatgaatattcagaaactggaaatgcattagaacgagtacttgcattggaacttgagcttgcggaggcactgcaaacaaagaagtcaagcatcctttttcagagctctttcctgaaacaacacaatgatgagga

SEQ ID NO: 30392 - DNA, 277 bp, Gossypium hirsutum
  Clone ID: LIB3083-099-Q1-L1-F7
gatggtcttttgttctcttcaaggaggttttttaaaggaaaacaataagtcgaggtttacttggattctcattaaaagcataagaacaacaacactttgtatttgtcatattttcaaaaaccatgcatcctccatagaagctgtggctcacgcaaagcttatgacttggcttcttatttttcggttctttaatattatcattagattggtgaataatgcttttcatatttatacactaattattttctcaccaaacaaaccaaatcaaaccacaatt

SEQ ID NO: 30393 - DNA, 273 bp, Gossypium hirsutum
  Clone ID: LIB3083-099-Q1-L1-F9
ccaccccacatatcttcgccaactgcaatttttgcccccattcttcctcgtctgcttgcttacataatctatttatttatatttccatgctgctaacactaattttcagtccttaataaattgcgtgaaatgacacctgcttggtctatttgcttcaattgatacactcatttggagctctgcaaatataggcttattataagcatctaggtgatcatccatgggttcaggatactggcttacatcattcatctgattaaagaaatataaacc

SEQ ID NO: 30394 - DNA, 256 bp, Gossypium hirsutum
  Clone ID: LIB3083-099-Q1-L1-G3
agggttattatctttgaatttgctgatttgatttactggaaacgattttcctgattttgggtaattagaattggatttgatccatggtatttgtggattgtgaaggtattgattcaagaacaaagcaatcaacctagcttcttttctttttttctttttgttcaaaatagtgtaaattaattgtttaagattgtaagcctatgagtaattgaaaccaaataatccttgttctagccaaatattcgtaaaattctcc

SEQ ID NO: 30395 - DNA, 291 bp, Gossypium hirsutum
  Clone ID: LIB3083-099-Q1-L1-G5
aagcccgagcgccaatcctctactttcccgcattttctttttccctctttagattaaaattctgaaaccctccaatttggatacatcgtcatggcttctacgggtcggaaaatcatactaaagagctcagacggcgagaacttcgaggtggacgaggcggtggctctcgaatcacaaacgattaagcacatgatcgaggacgattgcgccgataacggcatccctctacccaacgtcaccagcaagatcctctctaaggtaatcgagtattgcaagaaacacgtcgaagca

SEQ ID NO: 30396 - DNA, 282 bp, Gossypium hirsutum
  Clone ID: LIB3083-099-Q1-L1-H12
attttcccaataaataatgaaggaattttatatttttatcaataatttattatctcaaacccagacaaaaaccatggactagatccactctctggttccatttttacaatctaatctcccaccttcaatttcgtgcaaaatcaaaatccctaatttcatccttttttttttgcccctttcgatttcttcgatttcatgggcaccatatcagatcccatggctaccaaatttgatttctttcgtcccatgctataaatttgtttcatttatattaggattttg

SEQ ID NO: 30397 - DNA, 285 bp, Gossypium hirsutum
  Clone ID: LIB3083-099-Q1-L1-H3
tcgtggttagtacaagccaaaaatgtctactgctacattgctctctttgattagtctttcttactaatcaaaggatgagttacatgttattccctaaatcactgaagccttggtttgacacgccgaccattaacatcagaaccatccaacgatccttctttccgatatccacaagaaataacagaatgctccccgattttcgcaacatattgcagcagttcagtaagaacacccgggcagctttccttcaaatactcaaatccatctgtttgcatcacagctttt

SEQ ID NO: 30398 - DNA, 284 bp, Gossypium hirsutum
  Clone ID: LIB3083-099-Q1-L1-H6
gtataatggagaaagaaaatgagcatgcagatggcaagatgcaggcactggtggaagaattaagtattaccaaagaaatgctccaggcttctgagaaagaaattgctagtttgaagtttgagaagaagcaatcttctgaaaaaattcaaaagttgcagggtcagcttgatacggctcaaagagagataatcacatggaaatccaaactgaatacagagagaagagaggtctccaagctgcaggaaagaattgcaatgttgaagaatagtttatcagacagggat

SEQ ID NO: 30399 - DNA, 389 bp, Gossypium hirsutum
  Clone ID: LIB3083-100-Q1-L1-B2
cccgatttatatcccaaccactcccaccctcctccttcgttaaagccaaaacataactatgacaacccaatatcacatgttctaagtgactgagttttctcatggcaaacaaggatttagaatttgtgaaagcagctgcttgggcatggtaccagcgtggtagttccggttcccctatggccataccagaatttgatgtcatacggactcgacgagctcctggtcctggcccttcacgttacaagttagaagccatgagaaacaacaacaagaacagcatgggatcttccaccaccaccacccataattctctactggatccttgggaagtccaaagcatttcaaagagacttgatcatcttattcagctgagtgggatccaattttta

SEQ ID NO: 30400 - DNA, 328 bp, Gossypium hirsutum
  Clone ID: LIB3083-100-Q1-L1-C11
agaatggctgtttctctctaaataactgtcatgattgtggcatcctggccactcaaggtgggaagcataagctatgctcaacattgcactgatctctacctttaaccatggccaaagcagaaagtatcagtaagaaaaaaatggaaataactaatatcacagaataagcgccattgcgcaaagacaagttccccaggacggcatagaacgactatgcatcaggtgcagaggaccaatacactcataaagcaaatctaaatgcacggtctagaaaactgctgctaccactcattattactggagagggcaagatggacatgaccaccac

SEQ ID NO: 30401 - DNA, 406 bp, Gossypium hirsutum
  Clone ID: LIB3083-100-Q1-L1-C12
aattttcatttaagtcacttaactatttgggagtttttatttaagtcactaggttgttaagtttttcttttttttttaaagtttgatgatcgatatgatggatcagtccctgttaatgagtagaagaacataatttagatccaggtcgatttgatggccaatgttagagaccagaaaagaaaattgtttggaatttagttcacaaatttttaaatttgtgatgttcaaagttgtttcatgaaaaaatttgtaacaactcgcctgacgaagtctctgtatctgattattgtttggtgtgttattggtaaaataaggatagatatgagtaagtaaagtgtttgttttgactaaatataggattctgtgtgatgcatcatttgacgaactctttgttttagcgtgtttt

SEQ ID NO: 30402 - DNA, 390 bp, Gossypium hirsutum
  Clone ID: LIB3083-100-Q1-L1-D12
gtgagttgttgattttgcttgaggacaagtaaatgcttaaatgtggggatatttgataaaccataatgtatacatattttttaccccatgtttaacatatttatggatgatttttccttagtttcattgaattcgatgctcctaatcctttaaattcatgttttatacttaggtaaacataagaaggcaaaaagagtaataaatgggccaaaaacagacaaaatgggcctaattcaatattttacacgactcaagcacttccacacgggtaaaccacacgcctgtgtgtcctggccgtgtcgactaaaaaccaagttagaattgcacacggcctgaggaccttcacacgggcgtggcatatggtcgtgtccctgtcgagcccaagtcaaa

SEQ ID NO: 30403 - DNA, 371 bp, Gossypium hirsutum
  Clone ID: LIB3083-100-Q1-L1-E11
cagggcactggaggaaaaaattgtgccttactgtgatggtattatgacacaacttctcaagaatttgtcgagcaaccagttgcatcgctctgtgaagcctcccatattttcatgctttggtgacattgcattggcagtgggagagtattttgaaaagtatctaatgtgggccatgtctgcacttcagagcgctgcagagttgtctacccatatagcaagtgatgatgaattggtagagtacacaaactcccttagaaacggaatcctggaggcatattccgggatttttcaagggtttaagaactcttccaaaacccagctgctgattacttatgcacctgacatccttcagtttttggatgcatatacat

SEQ ID NO: 30404 - DNA, 294 bp, Gossypium hirsutum
  Clone ID: LIB3083-100-Q1-L1-E7
aaaagggccaattaaaaacatgaatcctttttttaggaaaagcctcaaaaattttttttcagggctccaactaaaacaagtttaacctttaaatggggttgggggggccaaaccccacaagatacaattttggacaaaatcccttcggttttccaatagccaaaaaccttaccaaaatatggattttttttaaaaaaaaaaaggggggttctaaaacattttccagccttgaaaaaaacccctataacatcctgccgggagagggcctttttattccccccggcaaaatttttt

SEQ ID NO: 30405 - DNA, 320 bp, Gossypium hirsutum
  Clone ID: LIB3083-100-Q1-L1-F3
aaatcaactgcattatatattgataggttcagaaaatagtacattcactctcacattcaattacaaagcaatccagctaaaactgggcttaaagacctatatgctatacacatcaaacgactgtgatgctatcctatttgatcagtttgagacccgacaattttctacacaatatgattacacataagccaaaaaaaacaagtcatgaacacaacacagacataaacatgtcaaaatctatatactactttagaacacaaatctgatgcgaaaaagaaaataataaaataggtcgaacatacagaagatatcgtcacctg

SEQ ID NO: 30406 - DNA, 353 bp, Gossypium hirsutum
  unsure (1)..(353): unsure at all n locations
  Clone ID: LIB3083-100-Q1-L1-F4
caagaagtttntttgcacaacgtgaggatggtggcttgcacgacactagacaaaattggtttgaagggtcttacaatctacaagctgccaccattggaagaacagacacattttatcttcctgatgatgacaacgtacacaatactgaactgagggaactcttaagcaggagaagtgtgtctacccttcttcgtagtggttttcgtgagagccttgaccaattgatacaatcatatgtggaaaggcaaaatcatgcatctattgactgggatctgaatgaagcagttcctactcctgaatcccttgaacaagatatagaacagcaaagcatggatcagaatgagggtcagagt

SEQ ID NO: 30407 - DNA, 326 bp, Gossypium hirsutum
  Clone ID: LIB3083-100-Q1-L1-G2
gcttatgcaacgattcttcattcggctcatgtatacgtatgtggagctatagctgttgctcaaagcattcgcttgtctggctcaacccgagaccttgtgatacttgtggatgagatgatcactgcgtaccacaagagtggacttgaggcagcaggatggaaagttaggacaattcaaagaatcaggaatccgaaagccgaaaaagatgcatacaacgaatggaactacagcaagttccggttatggcaactgaccgattatgacaagatcatattcatcgatgcagatctacttatactgcgcaacattgatttcttattcgcaat

SEQ ID NO: 30408 - DNA, 373 bp, Gossypium hirsutum
  Clone ID: LIB3083-100-Q1-L1-G4
gttaaatcattttcaatcatcacttccagttcacaaacattttaatcttacaaaacctccacacctaaaagtaaatgaattgaacatgtcacttggtactcgctgatttagctaagtttatgacatcttcaatagatcatatgtaaaaaaaaaaacatatggttctcacacctaacagactaaatgcatgcttttagtgtcaatgtaatagtaaaaggaactatatatatgatcgcatacgaggcctaactattgactgtgccccatcaacgaatatggttgttcctgtcatatagcgtgaaccatcactgattagatagatgacagttgaagccaaatcttttttaacatccaaccatctttgcaatggagc

SEQ ID NO: 30409 - DNA, 367 bp, Gossypium hirsutum
  Clone ID: LIB3083-100-Q1-L1-G8
ttttacttcaaaccctttttttctctctctctctctctttctaggatatatctcccaattaacacctctctttaaattcatagatatataaaggaaagacctaatacttattgttgaaccacaaacagtgggaaagagtaggaggagtgattaggagagtggaagtgattgtttgggtgttaagaaagaaaagatggagctattcccagatttatccttgcagatcagccctccaaaccccaaacctacatccacatgtaggacaagggaggaagacatagatttgggtttctggaagagacctctggactcaaggaactccatatcttcaatggctaaacctgataactgcatcgacctatctttg

SEQ ID NO: 30410 - DNA, 399 bp, Gossypium hirsutum
  Clone ID: LIB3083-100-Q1-L1-H9
gttgtcttatgaaattgggaggagaaggcaagaatggaagcattgaccatgcatttagaagactttgaaaactccgaaacagcctcgattatgaaggagatttctcatttgatctcttcttcgtcttatttctctctctttctttttcattattgactttgatatgatcaaaacagtatatcaaagcagcggcagcgactcttttcttcattttcttgaaattttcaaatcgaccaagatcggttttggactcaactaggagtttttcagcaaaaagtaaccgacacagtccggtttgggctcaaaatttccagttgagaaatagagaaaaccaagtacttgaagaggactcttggtatctattacagcaatccatattgagcttttttgtatacaatt

SEQ ID NO: 30411 - DNA, 379 bp, Gossypium hirsutum
  Clone ID: LIB3083-101-Q1-L1-A10
aacatgaattccacaatttattctagtcccatttgccactcaatatagctgataaatacatttattcaaagataaaacaacacagacaaatattattaaaaacaaaaaccagacaagacaaaacaaaacaaaacaaaacataattccagttcaacatccttatccttctggtccctcacctttaaagctttaaagccactgcaattctctttttcctgaaacagattgaattgaaagctatagagcactcaaatgatatggagcaggcctaaccccaacactttgatcatcctcattccagctgcatgatttcagaattgacctaggggacacacacatgtcacccccaccaaagctgtagtacatgactgaaccccca

SEQ ID NO: 30412 - DNA, 309 bp, Gossypium hirsutum
  Clone ID: LIB3083-101-Q1-L1-A2
gtttactgtttttttttttttttgggggcccgccaacgagggggggcatccatctttcactgatgggtaaatcaccttctcatcacaatcaacttcagaatgcatagaccaaaaggtctaccaagtaaatctaccctgtgttttggaaggtttaaacggcgaaaaacaagacgaagcctgccaaatttagaagaatgttactgactaggcatataaaacttgttgcccataaaaaactcacaaagcaaacgctgctaagacggcatggattacaatgtcttccttcgtatgactagaggatacacattc

SEQ ID NO: 30413 - DNA, 267 bp, Gossypium hirsutum
  Clone ID: LIB3083-101-Q1-L1-A3
tagcggtcatcttttttttcatcttctggggctcaaacgctggcatagggggccataattcattggtggctgttccatatgagacaatgtttgctttggtcgacatgtggtttggaattatagttccacttgttattgctggtggttacattggtttcaagaagccagctattgaagatcctgtgaagacaaataaaattcccaagcaaatccctgagcacgtcttgcttatcaacccaattttcttcattctgattgtatgaatac

SEQ ID NO: 30414 - DNA, 373 bp, Gossypium hirsutum
  Clone ID: LIB3083-101-Q1-L1-A7
ggcttcaatttttcctcacaacaatggtctaagggctacgagggaccctaaactgggtaagaaaatccgcgctgcaacaacacttgaatctagagcaaccggcattccatatgtgttcgcaccttgtataacggtttgccgaaatccaacatggggcctgacgttaacgaaagctacaatctaatatccccatcttgtccacgcaaagacagatattgtaccaggattacaaggagacatacctgctagatcctctacaggcattccatttgttgctggaaataaaaatgatgcagcttgtgctaagcactacgtacgagatgggggaacaaccacaggcataaacgagaacaacacattgaccacctgggat

SEQ ID NO: 30415 - DNA, 298 bp, Gossypium hirsutum
  unsure (1)..(298): unsure at all n locations
  Clone ID: LIB3083-101-Q1-L1-A8
ancctcattttttcccgtaacttcttcccctgacggctctgactcaaaaaacaagaagcttggaagtggatctactaacctcggaggcatcaagtcgaaaccatctgcttcttctggaagtttgcaagtcaaggcaaatgctcaagcccctccaaagataaatggtaccactgttgtaacttctccggctgaaggtttcaagaacgaagatggtgcaggttcccctcatcctcggacctttatcaatcaattacctgattggagcatgcttcttgccgctatcacaaccaattttctg

SEQ ID NO: 30416 - DNA, 234 bp, Gossypium hirsutum
  unsure (1)..(234): unsure at all n locations
  Clone ID: LIB3083-101-Q1-L1-C8
ggcacnaccancgaaccacatagagggggggctctcatctgcgcaacgcacattgccataactaaaggaccgtcccggcagatctaagccgtgctctcgcgatggcgtttaccgggactcaacagacacgcaaggcttggcagaagaccgatgatcccgtctaaccctcgtcggccgctgggaacccccaccaaacgcctggcttgaaatgccagcatcgcaaaaggacactaa

SEQ ID NO: 30417 - DNA, 390 bp, Gossypium hirsutum
  Clone ID: LIB3083-101-Q1-L1-D11
aaaaagggtgtgtggatcaaattgcctattcagcatgtcaatcttgttgaagctgctgtcaaggaaggattttggtttcaccatgctgagccaaattacttgatgctttgttattggattcctgaaggtacacatattcttcctgcaaatgcttcacaccggataggcatcggtgcatttgtcatgaacgaaaagagagaggttttagtggttcaagagagcactggacggtttcgaggtacgggtgtgtggaagttccctacaggagttgtgaatgagggagaagatatctgcgcagctgcggttcgagaagtcaaagaagagacagcagttgataccaaatttatcgaaatactgtcattcagacaaagtcacatagcattcttcgat

SEQ ID NO: 30418 - DNA, 163 bp, Gossypium hirsutum
  Clone ID: LIB3083-101-Q1-L1-D8
agcatattgttttaaacgcgatggtgatgagggcttcgaggccgatttctggctaaaaaagaaatccccggatgcaaatcccgcggggtcccagcttactaagcagccccccctttgtttgatgaatcaaagcccaaaaacagcggatgaatttgctgccagc

SEQ ID NO: 30419 - DNA, 340 bp, Gossypium hirsutum
  Clone ID: LIB3083-101-Q1-L1-D9
gggaaagaaattattttagagtattgagaaggggagtttggcggtttctttaaagcctgcagttttcaatttcctagtccatcaaaatcacaaattgaacaaatgtagctttaatttacaaagaaattcgatttctcaagtttcacacataggtaacacacctactgctgatgttcagggtcagtctcaatttcatgagccaattctcgggtcagcttgtctgcacgatcatcatgtccgcctgcaaatgtgtaaacccggaaagcgaattggaatgccctccacagcattttactgcacactttctttggcgcttcacctttggtcttcgacttttcat

SEQ ID NO: 30420 - DNA, 325 bp, Gossypium hirsutum
  Clone ID: LIB3083-101-Q1-L1-E10
gtcctaactcataatacctttgcgtagagtatcttaggagggaacttacttaccttaacaagctaaaagctcgaaaggttgctcttggcgaggataaacgaaccttagttcgtgataaaaaggatgccgctgaaaagcatggaaggaagaaaacacaaaattggttaatgcccttggagaagaaaaaaaataaaaccattgatcatttttaaaataaaaagtttcagagaaattggatttgttttcacagcattcatccgggcttattaaaacaatatattgtggggcaattcaagcacttccttttagttttaaccttaagaaa

SEQ ID NO: 30421 - DNA, 391 bp, Gossypium hirsutum
  Clone ID: LIB3083-101-Q1-L1-E12
gggtgttcgtttaccgtggatgatctccggcgccaggcaaattctcaagcttcaatcttttattacacgagaaaaggccgatgttgtcccgaaaggccacgtcgcggtttatgtcggggagacactaaggaaaaggttcgtagttccaatcatcgtattgaaccatccttcattcaaggacttgttgaagcgagccgggaaagagttcgggtttgatcaaccgatgggtggtttgccgagaagatgcctttgtgaatctcactttagggttgcattaaaatggagtttgttagttaagagtaacaatcataaattttgaaaaaaattataaaacggatatagagattacttttgtaaaaaaaaaaagtctatccttcacaattttggtttt

SEQ ID NO: 30422 - DNA, 283 bp, Gossypium hirsutum
  unsure (1)..(283): unsure at all n locations
  Clone ID: LIB3083-101-Q1-L1-E5
ggggggaaaaaaacacggaggaaaggccaancnagggagaagcaaaaagccnnggnccaagaagaacccangacngaaaaacgcaagggggcccagangctacaggaattacagcaggctaaagctcttgaagaacagtttgaggctagattcaaacaagaagaaaaggcgaaggaagaaatacttactcgagctagtttaatacgaaaggaaagagaagaaattgaaacctcaacaaaattaaaggaggacatgatgaagtcaaaagccgaaaccagtttac

SEQ ID NO: 30423 - DNA, 300 bp, Gossypium hirsutum
  Clone ID: LIB3083-101-Q1-L1-F12
gcttatattttttttttttttttttttttctttttttgcgtgcgggttttttgtttatgaactgccggccttccaattttttattaatatcctccaaattaaaatttcaggccatctgataatatttactttcatgaggaaacagaaaaacccccccagaaagaaccattctgtacttaaacaactgccgttctttggaagagcggctaccaaaaaaaactgcttcaagtatcacatggcaatgattctgaggcaggatcacgcccacccccgggaaaataaaaaaaaagcggggggaat

SEQ ID NO: 30424 - DNA, 390 bp, Gossypium hirsutum
  Clone ID: LIB3083-101-Q1-L1-F2
gctgaagcttatggaaggagaatgatggtaggacctaactgatggctgaatagatggaacactggcaagagaatgagcgtgagaagccggtggagatgtccatgccgctgtgtcaatttgtatggatgatgatgatgctatccgagatctaacacatgatagcacagaggacactgagcttgggctggttgaaagcaatggtgtactttctgaagctggtaaatcacctacggtggttcttgcatctcgcttgcaaacagggcaaaatgttctccatgttgtaagccaagaatcaatgcagaaggcatgaaacttgtgatgacatggaagaatcctgagcttctctccaatggtataatcttcaagacatactgcacacgttcttgaagt

SEQ ID NO: 30425 - DNA, 350 bp, Gossypium hirsutum
  Clone ID: LIB3083-101-Q1-L1-F3
aatggactctttattttaataccaaagaacttttcaaaaggcttggtgtcacagtttaattgtcaaaccaaaaaaaaaaaaaaaacaaattaagcataattgcctggttttgatgtttctgtttgtatcactaaaaaaaaaatttcgatagctatttctttccctgtaaagtacctaaatctgtgattcttatttgcatatttccagtttccaattgttttgcatataaataatgattacatcaaaacaaaaaaaaaaaaataatatatgataataatttgggaaaaaaaaaattaaattttaattgcattaaccactctattaaaataaaaaaaaccccttcggggggg

SEQ ID NO: 30426 - DNA, 236 bp, Gossypium hirsutum
  unsure (1)..(236): unsure at all n locations
  Clone ID: LIB3083-101-Q1-L1-F4
gntgtttttttctttcatgggttacatatgtnnctcccgggaaggctnnntattatgcagttcaggtggagaaattttttcttaatgtttctgagctgttttttttgaaaaaaaaaaaaaaataaaaaaagaaaaaaaaaaaaaaaataaaaaaaaaaaaaaaaacagaggggagtccgcttggctttttacaaatcgaaatgttaacttaaaaaatcaattccctgggggggggc

SEQ ID NO: 30427 - DNA, 215 bp, Gossypium hirsutum
  unsure (1)..(215): unsure at all n locations
  Clone ID: LIB3083-101-Q1-L1-G11
taggttnnnntttttttttttgaacaccaatggggagctatgggggcattgcttccgaatttgatctgccaaataccccatagcaacctaacacccagttttatgttttgggttttgctttcaatcctcagccttttaaccttgaactcagttctggcttctcctttagcttgtgctaaagcacctcaagaaaaagaatgggctcttgtgaaatc

SEQ ID NO: 30428 - DNA, 370 bp, Gossypium hirsutum
  Clone ID: LIB3083-101-Q1-L1-H10
tagcttcctctttttttttttttatggtacttcgcggggttgggtggggtttgtttatagtgatggcgacaaacaagggcgaaggggctaaagatgtatcgaaaacagagacaaaacctatagaggaaatggttttggggtgtatcattgggaacctcaccgacaagaaggacctgtttacaaaagctgataagatacatattaagagctcggatttgcaactggttaaacacttaaacaaggctcggtctagggacaaatatggttcgcttgttactaagaaagaagagtgtgaaaacgatttggttaaccttgatataatacatgttgtagctcatggaacttatggcatagtctaccgaggtgttta

SEQ ID NO: 30429 - DNA, 194 bp, Gossypium hirsutum
  Clone ID: LIB3083-101-Q1-L1-H2
caggccggtttccatgtcgaacgcctgctgggagcttactgcctcagcatggaatccacctgatggtcagatgccaagtgcaaaactgtcggaggaggtgatgatgcttttaacacctttttagtgaaactggggctgggaagcacgtccttcgtgccgtttttgtggttctggaacccattgtttttgataaa

SEQ ID NO: 30430 - DNA, 385 bp, Gossypium hirsutum
  Clone ID: LIB3083-101-Q1-L1-H3
catttatccttacaatggcattgaatctgatgaaaaagaagagttcaactgatttaacatgtagcattcctgagcagcatattgaaccaacgtacaaggaggaaactcgtccaccttctcctgctccaaggtttactgaggcagacgtcctgtcatctgttgtaagaaggctgggtgatctagaagagaagattgagatgctgcaatcaaaacgatttgagatgcctcatgagaaagaggagttgttgaatgctgctatgtatcgtgtggaaatgctagaagcagaactaattgctacaaagaaggctctccatgaagctataattcggcaggacgaactccttgcacgcatacaaagtgaagtagtagtcaaacctgggagaag

SEQ ID NO: 30431 - DNA, 215 bp, Gossypium hirsutum
  Clone ID: LIB3083-101-Q1-L1-H6
ggacccccggctgagattcgccggagatcttcagggtcaccaaagaatcttgttttactatatggcttttgtcttcaacttgacaatatgtgaagctggtcacacaggtcttgttcgaggaatggcttcgagacatctttgacatgaatatttttgtccacagtatatgcaccacacaggctatacaaagagatttgatggaactgtattattat

SEQ ID NO: 30432 - DNA, 384 bp, Gossypium hirsutum
  unsure (1)..(384): unsure at all n locations
  Clone ID: LIB3083-102-Q1-L1-A1
gtaacaggacccgcgagaatcgacaggatcttctcttgaaacacctggtgaaacataagacgggatgtacattggtggaaacaaaacaaaagaacacttatgaatgaaatgactaacatgatcgagcaactgaaagatcagaaggaaaaagaatctacgttacgggaacaagttgagaagctacagattaaggcaaacaaggaagaaaacgagaaggagaatctgatgaaatcggtgaagcaactggagaataaagttgagttgttggagagggcaataaaagagaaggatgaaggtatattaggcttaggagaggagaagagggaggccattaggcaactntgcacgtggatagattaccaccgaagtcgctgcgatgatctg

SEQ ID NO: 30433 - DNA, 380 bp, Gossypium hirsutum
  unsure (1)..(380): unsure at all n locations
  Clone ID: LIB3083-102-Q1-L1-A2
aaccaataatanannanacctancctatctacatccatcccttatctccaaccataatatatatactacttcatacacaacttcaacatctcctaccnnnnttaggcctttttttttcaagaccccctttcggaaaacgcattggctttcactcaagttcgagatccattaaataaagcaaaaaatgcacgttacagacgaaaggtagatgttcattggcgaataaagagaatgcaagctatgcaaaaacggatttcactcattttcttagccggaatgtgccctcaatctctttctgacacagggctgagcgctctagaagcgaaataattaccctcgcggggttgatgaacctgcctttttggttggcgtggggtgaa

SEQ ID NO: 30434 - DNA, 332 bp, Gossypium hirsutum
  unsure (1)..(332): unsure at all n locations
  Clone ID: LIB3083-102-Q1-L1-A4
ctaatcctatcccccttcttcttccttgtctttttttcataccctctatttcctccacctccttcttattttttacaccacccnnnnttttgaggtccggtattttgtagggatgtgggtcaacatagatggaaccggggttgtgcgaacaaactcctctaaagaaggcaaaagccgtgtggctcttagggcgggcgcgtgtttgttaggtgttgactgcttaggcttgtgtaactccctcgggttgttggggtgccgctgagggtgtaggcttcacaccaggtggctgtgcaaggggttagtgtcttttgggcaactatttctccctgctg

SEQ ID NO: 30435 - DNA, 394 bp, Gossypium hirsutum
  Clone ID: LIB3083-102-Q1-L1-B5
gaaggttgtttggaggatggaaaggtcgctgcggaagaaatgtctgagaaacacttgggatctcatgcagtaaatcattcgatatggacgttatcatccgattcgagtgcttctcctggccattctcctgaagggaagcagaaagtgtctctatctcaagagagtggagaggcaagtgatccagttctgactggcagggccaacaggtctccactaaagaagacttctaaaggaaaatctccaaagaagggggtaaaagcaagggttcagactcccaaaaaggagaagaatgtgaaagatgatgcgaagataaaagaaaatgatgttaatgtggaaactgccgaggaggaggcttctgaaaagcacatagaacctcatgtttctacctcaaggt

SEQ ID NO: 30436 - DNA, 269 bp, Gossypium hirsutum
  Clone ID: LIB3083-102-Q1-L1-C4
catacaagaataaaacagaacatcagccggcaggtcctgttattataaatactaagcgttgtagtagctcaattgttgggaatggctagtcgatgggagcattctaccgtggcttacccaaaggtggatgacctgaatagtgaccgcatggtggctcatgtgccggaggctcataaactggtggtttaggttctggctcttcttcctctggtggcgcataaactggtggcttacgtggttttggctcatatattggtgggttgttggga

SEQ ID NO: 30437 - DNA, 379 bp, Gossypium hirsutum
  unsure (1)..(379): unsure at all n locations
  Clone ID: LIB3083-102-Q1-L1-C5
cttattaaaacagaaaatcattggtggaatttcaaatacaaaaaatggcaccacctttgctacctccctctctaaaacaatgaaaancnnnaatgaatagctataacataaatggggtgcgtggatgccgccgaccctctggttgccagcatcagctttggggtagaaattacctgttaggagactggagttaatccgggctccgagcactctgaggctacgcccaacccatacaagctcgccatacagaggaaggtatttagaagagtggatatgaatgcttgtgctataagaagatgatgtattggaggagaagagcatataagctctgttatggtgggaaagatcgccaacagtgggtactatcctttagagagaa

SEQ ID NO: 30438 - DNA, 386 bp, Gossypium hirsutum
  Clone ID: LIB3083-102-Q1-L1-C7
aaccagtgcttccttctgaaggacttactcgtcaaggaagtggaatcattggcacattcgggcagtctgaggagctacgatgtgttatagttgttattcgccatggtgatagaactcccaagcagaaggtgaaattgaaggttactgaggaaaaattgctaaacctgatgctaaagtacaatgggggaagacccagatctgagacaaaacttaagagtgctgttcaattgcaagatttgttggatgcaacaagaatgcttgtaccccgttacagaccaggtcgtggcagtgacagtgaagcagaagatattgagcatgctgaaaagcttcgtcaagttaaggcagtacttgaggagggagggcatttttctggtatttatagaaag

SEQ ID NO: 30439 - DNA, 368 bp, Gossypium hirsutum
  Clone ID: LIB3083-102-Q1-L1-D7
tacaatatatgtttccatggtgcttcacagctacattctttccgttctcttttctgtgttacaggttcttgcacttgcttactacgctatctcttacttccctgtggatctgccgggctgaaatttctcacatcggctcttacctcttcaataactacctgttttggcaggtgacctggccaccttccacctttgtttttgacttgtatacttgttttgagtcattaaagggtcttagttacatgttttgttgcttccatgctgtcattttcttgtattttctgaagaaaaactgcaaaaagtgtaccttttatctgcatcaaaatttggatccattaatagatgaattcacttagttttggttcgtt

SEQ ID NO: 30440 - DNA, 341 bp, Gossypium hirsutum
  unsure (1)..(341): unsure at all n locations
  Clone ID: LIB3083-102-Q1-L1-E5
cttcttggtgtcccatttgtattgggaggaactccttctagccagttggttcttactatctagaaatgcctcccaacctgagtcttgctnnnttagtttgttggcagtgtcaaactatttgccggcctagatacggaattcatttttgtgatgtcagatgtatctacagtcagacacagggagaccgacagaacttcctgtgtggtatttttgagccatacaagatggttgaatgtcgtgatcacccgacccaaatgatcgcttatgagtgacggacaatcactcatagctaggatggatccttactgaaaaaatctgttttgtcattggcatgtaaatta

SEQ ID NO: 30441 - DNA, 336 bp, Gossypium hirsutum
  unsure (1)..(336): unsure at all n locations
  Clone ID: LIB3083-102-Q1-L1-F1
ggttacagtaatatttggcaacattttagctaccaattgctgctttataccttctctggctgnnncttccttgtgttgagaacaagttcttcagctctctgggttttttttttttaattatcaaacatgtctgctaaatccaaatttgaaactccaagcaaggtttcaccagcaacacctagaggggcaagtaaactaagcaagtgattggctaaatcagagcctgattcgccttctcctttgcaaagtactcgccatttgggggatcgatccctgcgatcatcgcttaattcgaagccgctaaattcgaagccttcgattgatcggaaatcgccg

SEQ ID NO: 30442 - DNA, 292 bp, Gossypium hirsutum
  unsure (1)..(292): unsure at all n locations
  Clone ID: LIB3083-102-Q1-L1-G5
caaatttctttcaatggtcattcccacacttctaatgattacgctctctacgaacggtggcttcctcactcactctacaattaccatttctatttacttcaactnttttgcttcctcagtgaggcagaagacgatcaacattaaatgcacgagcagtcatgaaacacaaaggggctctcgtgcgtacatacaaaaagaacgatgccggcgcaatcatattaagagagaggagccataaaccttggccttcttagtgcatgagccggcatactattaaggactacaaaaagat

SEQ ID NO: 30443 - DNA, 285 bp, Gossypium hirsutum
  unsure (1)..(285): unsure at all n locations
  Clone ID: LIB3083-102-Q1-L1-H1
agctacccttttttttcttttcttgagacccttacttcaggggagctagcataacaaagaaacccctttaacgtctcactacctctggtttggcctaacccnnnccggcaatggaaaatataattaacgcccatcggcaaaaaatggggaggacatgaaagcggggaaggggggatttgcagctaaacaaaaaaatgtgagcaaagggggaagaattgggggcccaaatgaatccaaagaaacgcctgccaaaaaaaaagaaaaagggctattgggcaggtaaaa

SEQ ID NO: 30444 - DNA, 397 bp, Gossypium hirsutum
  unsure (1)..(397): unsure at all n locations
  Clone ID: LIB3083-102-Q1-L1-H7
cctgtggtggttatttttaaaaaatggagatgcctctagtttttgaatcaacggctatcgtcgccattgccaatagcttccccttcgcgagtcctgaaactgnnnnnnnccaggttcaacgcctctcattgctaaagaaatcttcaatgcagccaccactcaacccgattttcgtcactcttactcttccttcctcatcctcattctcaaacttgaccgttccatgcacttctctcttatcgatgaccttctcgttcgtctcaaattcgatcaatatcaggtaaccccgactctctttttttacctcatcaaaatctacgccgaagctgatttacccgagaaagctctcaatgtgttctacaaaatgcttgacttcaacgttaagcctttacccaga

SEQ ID NO: 30445 - DNA, 162 bp, Gossypium hirsutum
  Clone ID: LIB3083-103-Q1-L1-D10
gatgggggcagctttcaacaatggaaccctgcaacctacactttgtcacatgttcacattaacagccatggagcaaacctaaggccaatttcaaggttggtccggaatcaacctgactacaatggttgcggctttgaacaagtcataggttgcaaataggac

SEQ ID NO: 30446 - DNA, 390 bp, Gossypium hirsutum
  Clone ID: LIB3083-103-Q1-L1-D9
tagcatctgattctaaaatcgttgggaagatttcacgacgagtttcccttgtacattatatgagtcccgacgaatacgaaaagctcagttccgacaagaagctgttgcatcagagatcctccggaactttaatgactgattcttccaatcctttttcaagtccaatgcaaagtaaagggcggaaaggttcacattctatggggcgcactgtcagcacacatggtagtcaacataaaagtactgtctctggaatcaatgaacaatctaagccttcaaaaagaaagcatgatcatgaatctacgggatccatgaaccagcccacacacagtcatgagacaaatccaatttcagggtcctcagagcattctcacaaaagtaaatcgaagaaga

SEQ ID NO: 30447 - DNA, 265 bp, Gossypium hirsutum
  Clone ID: LIB3083-103-Q1-L1-E12
agtgacaattggtgtgctttacataaaaaagtgagggaccctgtgggataccgaatatcattcggaaggccaataattacataagccaattacatttgaggagcattatcataggaatcttaccccccgggggagggcttactttacgcgaaccattgcaccaaagacaacgaaagtgtacatatgaaaattacacaaccgttattcataaaagaatctgtaactgaaagattctgacaaacactaatgttctctaaaaacactg

SEQ ID NO: 30448 - DNA, 363 bp, Gossypium hirsutum
  Clone ID: LIB3083-103-Q1-L1-G9
tgcaattcattaatggcaacagtcagaaacaacagtgatgaaccaatgcacacaacttctttcatcatccaccgaaccaaattatgtcatgacctatcttaatcgcagtttccctcaacaccgccaatatctgtgtgctggtgcatggatattgatgcaagggcatcctgaaaacattaacagtggaaacttggcacgggtattgagagaattttcacctgaagaggtgacatccaatatctatacaatggtggatgtattacttcatcacattcacatagagctgcagcatgggcattccttgcaggaccttttactgaaaacttgcgcaaacttgcctttttttgtttggacccatgagct

SEQ ID NO: 30449 - DNA, 187 bp, Gossypium hirsutum
  Clone ID: LIB3083-103-Q1-L1-H11
gtctttaaatacggtcttaaccatgttacctaccttattggcagaaaaggctcaatggttgtattgctcatgatgtggatcccatgaattggagtgtggctcctgcattatgcaaaagatggagtccttatgattgtaaaaggaatctcgttggatcgattgtcacaaaaaactgctgcgtttgtgc

SEQ ID NO: 30450 - DNA, 418 bp, Gossypium hirsutum
  unsure (1)..(418): unsure at all n locations
  Clone ID: LIB3083-104-Q1-L1-A1
tttttattcagagacgcttgtcttttttgttgtcaacgacnnatgtttttgtcattgaggtttgatattagtggtagatgcgatgtttacaaaatctattggaagcttgttttagtgaaacanaaaaaaccacggggatgatgnaattggagggctcttctttattttttatcttttattgttagggagtgattttggatgcttttgcaagtttcaacgctatattataagtatgttgaatcttgcaaggttgaatttttttagcaatggctggtttgtggtgcagcaatgaggaattccttataattgaatggttttaccatgtagcacactggtttttactttttggtgatactattttttaggttgaattgcgtgtatgctgcatgtttagcattcttgaaagatttattaataa

SEQ ID NO: 30451 - DNA, 303 bp, Gossypium hirsutum
  Clone ID: LIB3083-104-Q1-L1-B6
ccgagtgatgccttctaagatttattggagggatgagttgaaaatgctcggtgggctttggctctcttggtgggaaaggtccctttgaaagacccatgcgggtgagcagctttggctctcatatttttgcattattcctgatggagcttcttcctgcctagctgtgaagcttctcaacttgaagactggagcgctggaccatgtgctagctgtagcctggcttgaaaatgcgtttgctcaagtggtcttaattccagatatgttgctgaagctttcacatctgatgctgtattgaggagaagc

SEQ ID NO: 30452 - DNA, 387 bp, Gossypium hirsutum
  Clone ID: LIB3083-104-Q1-L1-B8
attttgttttccaaagcaagtcaagtattccctgactggtctgcgatggtcagaaaacttcgtgccatggcttacaatgctgaagaccagattagggcacggaagaatgaagagtcatatcttgttcaacttgctggaaggactacccctaagggccttcactgcctctctatgcagctgacagcagaatatttttcccttcaacccgaggaaagggagttccctaaccaaaaaaatttgaatgatccggacctttatcactatgcagtattttctgacaatattctggcttgtgcagtggttattaattccacaatttcatctgcaaaggagccagagaaaattgtttttcatgtggtgaccaattacctcaacctcccagcaatg

SEQ ID NO: 30453 - DNA, 304 bp, Gossypium hirsutum
  Clone ID: LIB3083-104-Q1-L1-C2
atattaatatatagcgactgatttgattattaaaactacgaaataagataggtgaccaaacatgagtaaaatgacgaataccccaatcattttcctaacccattgggttttctcctcatcccatccccaagttttttaccaacaaaatttgaaacatcctttcctgggtagtccaaagttcatcaaagacattttgctttttttacacgtttaatctttttctcaagaaaaaattaaaaagaacccaaggaggcttttttggattatgctatcaattcatctttctttcggcttcctttttttg

SEQ ID NO: 30454 - DNA, 385 bp, Gossypium hirsutum
  Clone ID: LIB3083-104-Q1-L1-C5
atgcacaacgttctagacatttctcctgaactatatacatataaataacctaaaaacaaaccccagctcatgggagcgctgtaataaagaattctctatgatctaattctaaaatcaacaagatatttaaaatcaaagcttagaaaaaaaatcaaaccaataaaagattttttttttttttttagatatggaagggaaaaatagtctaggatgatgtgggagcctgcctcgccaaataacttgcctaagccattctctttccacatcaacgaatcagtggaagcattctataatctttgtgtattttgcaccttattccgacatatgcattaagccaataactttgcaggaagagtaacatcagaatccttttccggctccaaaa

SEQ ID NO: 30455 - DNA, 373 bp, Gossypium hirsutum
  Clone ID: LIB3083-104-Q1-L1-D4
gtaaattttaggaccgactaatgaatcctgttctgatggacaagattgagaagcttaagcatgagctgaaccagagtctatcagcggctccaaattacacaatccttaaatataaacttgacatgttgaaggaggtttcgacagccaagagtctctccaaggctgctacaatgaagcaggaagttagtaagaaattaagtgaaatcatgggtcggcctgagataaaggagaagcttgaagcattagaagctgaggttcaaagttctggttcatcaagctttattgatttagatgaaggggtgaaggacaaaatactgaagttgaagagcgagatagaattggaaatgattagtgctctggagtctttgagttt

SEQ ID NO: 30456 - DNA, 382 bp, Gossypium hirsutum
  Clone ID: LIB3083-104-Q1-L1-D8
aatatgattattgctatacttcccatgtcagctgagtggaattggaacccagcaactgttggtttaatacagtcatcctttttctggggttatctcctcactcagattgctggtggcatatgggcagacactgtaggtgggaagacggttttaggctttggtgtagtttggtggtccattgctactgctcttactcctgttgcagctaaattggggttgccatttctacttgtcgttcgtgctttcatgggaattggcgagggtgttgccatgcctgccatgaataatattttatccaaatgggttcctgttgctgaaaggagtagatcattagcattggtgtatagtggaatgtatcttggctcagttactggtttggcat

SEQ ID NO: 30457 - DNA, 391 bp, Gossypium hirsutum
  Clone ID: LIB3083-104-Q1-L1-F7
cggtatcctattacgaggaacaaggcttttcttctgcagccattcaaagttatcattctggtaacgcaggtgaatctgatgatagctgccacaggtccgagccgtctttgcagaggaactttacggttagaccatcagaagaaagtgaaggtttcggaaacagaagaccacatcctgaggagttcgaagggaatgaggatacagttgcaggtgaagatcaaaactggttgggtttggaaggtgttacacgagtgaactcactcatccaacttcctagattttccgaggaaaggccgaacccttaaagattttgtgttgtctggaaagaaactggactgttttttagtgcagcctacattagatccaagggaacggaacttgtttgtgaatc

SEQ ID NO: 30458 - DNA, 310 bp, Gossypium hirsutum
  Clone ID: LIB3083-104-Q1-L1-G1
caaaaaatttattttttttatacaaaacgcaatatgggggggggggaacgatgtattggggaaggggaaaaaaaaagaacaagaataagaataaaagagagagatagagagctagagagagcgatagagagagagcgacagagagcgagtaacatacatttccttgagaagatgattggaggggagtataaggatgtattgatcttcaaacagggtgaggaaaacgatgcataatataaaatagattagggggaagtcatatggaatgagacatttatacatggcaataaagaatgaattatatgatgta

SEQ ID NO: 30459 - DNA, 395 bp, Gossypium hirsutum
  Clone ID: LIB3083-104-Q1-L1-G6
cttctgtttctaaagatgatccgtatggtggccagcaggatcgggtgcaacaaaatcctccaccgcctgtgaatcaatccagtgcagtgcctacaaagccctcacctccaccagttacagcatggcgtcctcaggcaatgccaccgcctccacttttcatgagcagcagtggaggttctggctctaattattcaggttccgagaacccacttccaccaccttcacctggtattgtgttaggtttctccaagaacagatttacctatgaagaattagcaagggcaacagatggcttctcagatactaaccttcttggacaaggtggtttcgggtatgtgcaccgtggagtactccccaacgggaagcaagtagcagtcaagcaactgaaggctgga

SEQ ID NO: 30460 - DNA, 367 bp, Gossypium hirsutum
  Clone ID: LIB3083-104-Q1-L1-G8
gcaagtaaagtgcaaaaacaatttaatggcaggctataagaacaaacatcaaaagcaacaggtagatataatgcatgtctgtggtagtatatatacactagagatcaaacatctcccgaatatcacatattcagcttcgacgaagtagcataaatatgaacttaaataaatggagctccgcaatccaccaaggaacatagtagtactatgctctgtcaactaattcaataggctgctgcatataaatgtaggagttgttgccaaggtttcttcacatgtggatacatgtatagttctataaaccatgattgtatcaaaaatattttaataccgttttgaaagaactgactataactttttacaaaca

SEQ ID NO: 30461 - DNA, 301 bp, Gossypium hirsutum
  Clone ID: LIB3083-105-Q1-L1-A1
aaatactctgcaacttgcagattatttaagtaccaagaactggtttcggctacatcgaatttcttggctgaaaacttgattgggaaaggaggcagcagtcaggtttacaagggttgccttcgagacggcaaggaactcgcggtgaaaatcctaaagccttcagaagaagtgttgaaggagtttgttatggaaatcgagatcattactacattacatcataagaacattatatccctcttgggattctgctatgaggataataaccttctcttggtttatgatttcttatcaagaggaagcc

SEQ ID NO: 30462 - DNA, 300 bp, Gossypium hirsutum
  unsure (1)..(300): unsure at all n locations
  Clone ID: LIB3083-105-Q1-L1-A12
ttcgagccacaatcccaggctaaccacttttaagntttgggcaagctggggggcaaaccatggttttgaatggttgccaataaaatgggcaaagttttttactatgtagaaagccttgctactctctgaacacatattatttttcttcatagcttgtaaatggtagacctgttttttgaagatataaaagcgtttttactttgtggtacaacagaaatgcatgatctgaaaatgggaatttccagctctatgaaatgcaatctattgacaaggctatctagaaggatggatttgtaaatg

SEQ ID NO: 30463 - DNA, 293 bp, Gossypium hirsutum
  Clone ID: LIB3083-105-Q1-L1-A3
gttcaaccaccttttgacagagcttgtgtatgaggacctaaaagcagctctggaggaagttaaaacgcttggagaagagcttggagatatttatgattacgtagctccgtgttttcctccaagatatgaaatattccagctcatggtaaatctgtatacagagagatttattcaaatgcttagattgcttagtgacagagccaatgaactgacaaacattgagatattaaaggtaactgggtgggtagttgaataccaagaaagtttaatcgggcttggtgttgatgagactc

SEQ ID NO: 30464 - DNA, 300 bp, Gossypium hirsutum
  Clone ID: LIB3083-105-Q1-L1-A4
ctgagaagcttccattgttcattgcttggcagttgctttgtgatactcaatggaaacggttggctggaggaatgtgccatgccagaagcagcaaagctttggattgagccatcccactaaagcgatgtgctgttaaactccatggaaatggcattgcaatctcatggtcgaggtggttcacattctcttctaaggttactttgcttagaaaagcctatttgcatttcggaaataacagttataatcaatgtatttatgtggccgttgaaaataaaggagttttattaacttcagtactgt

SEQ ID NO: 30465 - DNA, 275 bp, Gossypium hirsutum
  Clone ID: LIB3083-105-Q1-L1-A5
gtacatttacgcgggtaacgggtgaccaaccaaaaatgacacgaaggaaaaacggggtcctacttttggttacaccatgaacgttctatacggagattacacttgctggctaggcgatatcgatcccgtgaacatcatgatattccattacctgcattacctagacttactaagcgttgtggcgagaggaagcaaggccacacgaggagctaagctgagcctaacataaagcattcaacccgacccgagctacacctgctgccaatgctacatga

SEQ ID NO: 30466 - DNA, 304 bp, Gossypium hirsutum
  Clone ID: LIB3083-105-Q1-L1-A6
ttttagtagagtttgatggagggaatgggaaagcggaaaagaagaaaaaaaagaaggttttgcttgggaagggaactagtgttattgtggagatgataaaggataggttgatgagtaagggagagggtttagagaaaatagttgaggaatttttatcatttttagatccaaaaagtgcagattttgatgggttgttgaagaaggtgaaggagattttggagagcaatgaaagtagaagaatccccaagacccctaagggtactcgggattttgcgaaagagcaaatgacaataagaaagaaagc

SEQ ID NO: 30467 - DNA, 295 bp, Gossypium hirsutum
  Clone ID: LIB3083-105-Q1-L1-B10
gtaatccatgcttatctgcatgtccttcttcttctactaattgctctctacttccacctaccgttttttttttcccatccaccttcctactacaaaatgatgtcgttattgtcgtcaattctccgtcgaaagcccgccgtgcttctccaagtacggctactatcttcgtatggtcctcctcccggaacgacgtcgcagcagaaacgcattgagaaaatcctggtgggcaaccgaggcgagatagcatgcaggatcgtgaggacagctaagcgtctagggattcggacggtagccg

SEQ ID NO: 30468 - DNA, 292 bp, Gossypium hirsutum
  Clone ID: LIB3083-105-Q1-L1-B12
gcttgtgcttcattagtgtttgaagcaaagaactacagttcttaaataacttattacccatgccaaacccatgtgtggattggccttcaacttggttttttccggtttatttcaactttttggttcttttaagtgggaggaacctattttttggcaggcaaaacctcagaattatgataaaactgatttgccttaggcgtccttttctccttctccaaattttcatttgcaccctgactattttccaaggcagaaatattcaactgattcaaaggccttgatttcttaacag

SEQ ID NO: 30469 - DNA, 302 bp, Gossypium hirsutum
  Clone ID: LIB3083-105-Q1-L1-B6
tgaagttggatgaagtggggggaaaggatgaagaactcgatctcaatcataagaaattgcaagaacagatcattgaagctgagcagagatacagtttacagctaagcaatttgcaagaggctttgcaagctcaagagacgaaacagaaggaactcactgaagtaaaagaagcatttgatggtctcaatattgagatcgaaaactcgagaaagaggatgcaagagttggagcaagatctgcagagttccgttgaagaggctcggaagtttgaagaactgcacaaacaaagtggttcacatgct

SEQ ID NO: 30470 - DNA, 248 bp, Gossypium hirsutum
  Clone ID: LIB3083-105-Q1-L1-C5
gtttcatacaccgccaaagagggagaggcctgaacccaagccaccgatgtatgaacctccaaagaaacctgcgagggatgaacctaagccaccgaagccaccggctattacacctccaaagaatgaaaaaccataacccaagccaccaatggattatcctcccaggctcataaagaaattagagggaatcagggttaaacaccagtctatgcaccaccaacggacgaaaagccttgacctaaaccacc

SEQ ID NO: 30471 - DNA, 302 bp, Gossypium hirsutum
  Clone ID: LIB3083-105-Q1-L1-C6
atatggcatctggttggggaatcaacggcaccaagggcaggtgctacgatttctgggttgacttcagcgagtgtatgtcccgttgcagagagcccaaggattgtgctctccttcgcgaagactatctcgagtgtctccaccattccaaggagtttcaacgaagaaaccgaatttataaggaggagcaacgtaaactaagagccgcagcacgaaaggacaaggaaggtgaagccggtgttcatcatcatagatagtgagaatttgttgatccttttaaattcccaagaataatagaatgtcat

SEQ ID NO: 30472 - DNA, 150 bp, Gossypium hirsutum
  Clone ID: LIB3083-105-Q1-L1-D2
tttgagtcagatgggctcattatagctgcaaggggtggattcctcctaacatggcttatagctatgatgttgacaatcaattgaagcgcaagttataccagcgctatttggaaactgatcttgtggcccaagctatttgattaagagcac

SEQ ID NO: 30473 - DNA, 309 bp, Gossypium hirsutum
  Clone ID: LIB3083-105-Q1-L1-D6
ataatgaagttgctggcaaggcaacaggttcatcattctcattaaaggggatagattagatatcggcaaacaagacaacaatgacactcagtccaagtttcaactttaaaaccatgaaccagtagaccaagatcagacttgcaaagtcttataaatttttcacaataaactgaaagaaagaagtgttataaagttccaacaattcaaaaccaaaaaagaaagactattcctcgtttcggaataaaataaatcatattccaaaaccaaatactgctcgtatcttattgaaaataaggtctttccaacccc

SEQ ID NO: 30474 - DNA, 310 bp, Gossypium hirsutum
  Clone ID: LIB3083-105-Q1-L1-E3
ggaaaaagtgtggataattgggagcagaaaagaagcaaagtttgtgtaaaaagttgagtaaggaggggtttattggtagggaataggaaaggaaggggcccaattactccattcttttttggagactttaccacccttttgctcaacttcatcataacaccaccaccccttccccttctgccgctgtttctgcaagaaagctagctgcttcactctgggagttttaccaattccttcagcctcctcaacctaaaatgcatagaggtgctaacaacactaatggccgctaccatcaacgccatcacaacaa

SEQ ID NO: 30475 - DNA, 243 bp, Gossypium hirsutum
  Clone ID: LIB3083-105-Q1-L1-E4
gaaggagaggagcccccgggccgcatgtttttatttattttttttgtaaaagctatttaggggttagtttattgttaggagttaaaccattttgtttttatttttgctttttaaaccgattgaaataaacttatataggttttgctccttttttatgaaacttaataagtagcacctaaaattgttatgttatgtaaatacagggcccttttgaatttattaaaaatgtcaagacttttgttt

SEQ ID NO: 30476 - DNA, 263 bp, Gossypium hirsutum
  Clone ID: LIB3083-105-Q1-L1-E7
gaagactttttccagaacacagtaccatccctccaggttgcagctgctttgcctcctcctggatcttatctttcaaagttggatcaaactcctcaaaaggttgaagttggtggaaaggtaccacctgaccatgtaaatgcacctgcggctgatattggtctccccggtggtggggttcctcctcagtccgctgaacaacctattcctcctgagtctcttgcactttctggtggcggtattcctccacaatactcagctccagc

SEQ ID NO: 30477 - DNA, 296 bp, Gossypium hirsutum
  Clone ID: LIB3083-105-Q1-L1-F3
atggaatgtggagcttgaacagcagtggaatttggtagagttaaaaggctttgaatccgagaaagaactgaaggaatcttcagagaaaatatctgaacttaccaacaagttgggggaggtcatggaagaaaagaatcagctgaacaatcaaatgcaggaatatcaggagaagataaatcagctcgaatcagctctaaatcagtcaacaacacagaacttggagctcgcggaagagttgaaggttgctttagagagaagtgctcaccatgaggacagagctaatatgagtcatcaac

SEQ ID NO: 30478 - DNA, 299 bp, Gossypium hirsutum
  Clone ID: LIB3083-105-Q1-L1-G11
tgggagtgccgtttctaatgtgcagtctggaacttttcaagaccaagttggccccattgctgcaatggagaataagctctgttctaacccttttgaagcagacaagaaaatggctgatccttcctctgggattgagatgcataaaccaatccatgcatcggggtttccggtaaatctgatgcatttacctccccagcaaacacaagtaattcatgaggatacccgttacgtgcagccgaacatgcctgggatgcagcccgttacatcatattacccagtctattatccggtgccacagc

SEQ ID NO: 30479 - DNA, 295 bp, Gossypium hirsutum
  Clone ID: LIB3083-105-Q1-L1-G8
gttcttttccatatctggcaggggaggccacctttggagttctttggaatgattcaggctagacccctaccacgtgatttgtttatatcttatgcaaggtgctataagcatgaatttttgaaagatttctttctttcgactggacaacttcaagaagttgcatttcttttgtggaaggagtcattggaacttggaaaaaatccaatggcaagcaaaggatccccgcttcatggtccacgcataaaactaattgacaaggcccagcatctttttgcagaaaccaaggaacatacct

SEQ ID NO: 30480 - DNA, 302 bp, Gossypium hirsutum
  Clone ID: LIB3083-105-Q1-L1-H12
cagcaaacaaaaacctgggagtgatctccggttttatttagatttcattttggatcagatcttggcttatcttcacatttcggcatcgtcttcggctgccgttcgagttgatgattgggaatccaactggggaaacgacaagttcccggagatggcaagggcgtccgtggcattgtctctggtagcattcattgccttggctttaagctcacttgtctctggttataatctttgtacttccaaatctatctagccaataatataccttctggggtatatatatacatataaatatagctttg

SEQ ID NO: 30481 - DNA, 297 bp, Gossypium hirsutum
  Clone ID: LIB3083-105-Q1-L1-H2
ttcgagttcgaaggaagtatgctgctgggtcagatagatgctcagcatttgcttctcaattacttgatgagcagttgacggcagtcatatatttacaatctgtaatccgtgggtggttggcccggagacatttcaacaacatgcataatttgaaacagtcaaaccgtggaagtgtaaaatctagacgaaagatgggtaggaagatttttgaagcaaaggacatgctccatgaacaacagattcaagttctaccttctgtaatggcagaactccaaagaagggttctcaaggcaaaaa

SEQ ID NO: 30482 - DNA, 118 bp, Gossypium hirsutum
  Clone ID: LIB3083-105-Q1-L1-H3
aattcgagtttaactctaaagctaactacgacaaggtggggggatctaaaccacaatatttcttatactatgacgcgttacaacatgctggctaaggttttacaaccagctgaactgt

SEQ ID NO: 30483 - DNA, 198 bp, Gossypium hirsutum
  Clone ID: LIB3083-106-Q1-L1-B12
ctaacatttgaaattcggtgaggaaggaaacgggcatttccggcacgcaacagggcaactatatgccatctctacagatttagcctcctatatatcaattaaccagcatgtgctgcataagtatgccaatgaacatgttaccttgggatcgtggttcataggcgtggatgtccatcatatagatgatcgaggcctctg

SEQ ID NO: 30484 - DNA, 275 bp, Gossypium hirsutum
  unsure (1)..(275): unsure at all n locations
  Clone ID: LIB3083-106-Q1-L1-D10
tagctacaccttttcgatgaatgacccatcatgggggggggggttgttctagaagctctccagccctcaaacccacaacatctatgcaaggtcaccaaatcatattataacagacccctaccactcctatagtcataacccaacagncacggccgcaatcaacaacaactgaaacttctcattcatcccaaacaaaaaaacacatagnnagctgactacgactggccaaatcttgctatgaaattatgctcactgtaatgaagatagctactagc

SEQ ID NO: 30485 - DNA, 366 bp, Gossypium hirsutum
  Clone ID: LIB3083-106-Q1-L1-E10
ctacagcattgccaggaatgggggatcatggggcggtgggctgttttggcagctcttgagccttggaatggataacatgggggatggttaccaagttatattggaacagagcccttccactgcttctgtcattgctcaacagtctcgattgctatcatctctcacttgaacttcacaatcattccttaataaaaaatacattgttactttaatacgacaggagaaatctttggatgagattaggtacattggaatgaagatagctactagctctactactgttttgtcagagatggaggctgttcatgcaaatgaggactttgaaaccagcaattttttataattacatgggatttacattaagag

SEQ ID NO: 30486 - DNA, 164 bp, Gossypium hirsutum
  unsure (1)..(164): unsure at all n locations
  Clone ID: LIB3083-106-Q1-L1-F11
cgcngancctaaaaggnggcagggnnccaaagggagaggccngaaggngcgaggggangaaacgacnacaanaccncgnccagagagaggggcnccncggaaaanngaacangccccgcccccnccngcccaaaanccccnaccaangccccggccaaaaaggc

SEQ ID NO: 30487 - DNA, 227 bp, Gossypium hirsutum
  unsure (1)..(227): unsure at all n locations
  Clone ID: LIB3083-106-Q1-L1-F9
gaaaaccctaacgctaccgnacggcgccaggggaaacaggaaancgcagagagggacccggcaaagaaancacccgagagcccnnncacaacgaaaaagaaaagagggcccacncannaaccagggncggagcggggcggcacggccccagaaaagaaggagggcgaagaccaccccagcaaggaagaggcggacgagagaccgcaagagcggacagcaggacccac

SEQ ID NO: 30488 - DNA, 280 bp, Gossypium hirsutum
  Clone ID: LIB3083-106-Q1-L1-G10
ctgggggcaaacgctttttaataaaaaaactaacctcttctctcatttgctgaatttatgataaaaaccaaccaggtttatcatatatgcccttttctttctcactcaagtttgctctccccagatcccaagggcctcaaaggatccccagatatgattaatatacacattcagattttcagactatactagggggatcccccacccaattacataccgcacgaggccagcgtgttcttatgcactccaccaacggtgcatgttgaaaaggttcgggttt

SEQ ID NO: 30489 - DNA, 290 bp, Gossypium hirsutum
  Clone ID: LIB3083-107-Q1-L1-B1
ctgatattggtgctccatttactggtgatgagaagagagtgagagatgctattgcaatggaggaatgtaattctgtctgtgtagtgaatgagtatgatgatttggggttcatagatttaagaatcaatggaggaagtgtgagatggagttccagaagtaggttgctcaaggggaaaatgcctgatgagccttgctaccccaaattggcattgcataatgggcagttgttttcatcaatgaatgactccatctcagtgttctgtggtcctgattgggttctaacatcaagg

SEQ ID NO: 30490 - DNA, 239 bp, Gossypium hirsutum
  Clone ID: LIB3083-107-Q1-L1-B11
aaacggttacttcccagaggagcgggaccgaaagaaaaacttcacaaacttaaacgacgagccactcatcaactcaggacacttagaaacatcggaagccagcccttagaagttccaccatagaacgccgagcaaccgctcggaatacttgaaaggtctgatcggttgaattgaaatcgacaccatgcgaataagaccgcatagaacgaaaacaggtattcaacagcccaaaaagctgc

SEQ ID NO: 30491 - DNA, 234 bp, Gossypium hirsutum
  Clone ID: LIB3083-107-Q1-L1-B12
gaacgggacctgtgcaaatcacagggagcaggcaaaattggctgcatccatgtatgacatgaccctcaccatccgacatgatatggctccttctcctgcaacgcctaccggagcaagctatgctatggcagcctccgctgattactaatgctatggcatgacggaatctttaatcgctctcttggtgcatagaatgcaaagctcttcaagactttatgacattgcctaccctta

SEQ ID NO: 30492 - DNA, 198 bp, Gossypium hirsutum
  Clone ID: LIB3083-107-Q1-L1-B7
atgctgcttctattgaggggcggtatctaaaagcctgatgataccctcaccgtgaaaaccatcaccttttaggggggaagttctgataccttcaacaatgtgaacgcccaaatccaagacaaagaacgggtcctaccataccaataagagctcatctttgctggcaaatcattataggacggccgaactcttgctgac

SEQ ID NO: 30493 - DNA, 191 bp, Gossypium hirsutum
  Clone ID: LIB3083-107-Q1-L1-C6
cttcctttctattttttaggggggctaatggaaggcgggcgttcctttatttaaatatcattgaccttttaggaatactacacggaaatgcaaaaaaaatatcatctcttttacgaacaaataacatagctttcatagacgaaaactttcattcatctttctacagatgaccaaatggacctaatgccttt

SEQ ID NO: 30494 - DNA, 284 bp, Gossypium hirsutum
  Clone ID: LIB3083-107-Q1-L1-D10
gaaaaacaaccgactccacccgggggaaaaatgtatagctggcgctcacaattcgtctgcaacattgacgatggaatcttccatgattattacaaaggctcacccaagcttgaatgaaccgtgtgggatttcaaaaaacatatgagacggtttttcggccaaactcaacactacattggagtcactgcacgaagaagaactcatgcggcttgagaagcttcacacaactggtgaagaattgacaaatttatggcgcctaatgcatacatactatggagatcgct

SEQ ID NO: 30495 - DNA, 304 bp, Gossypium hirsutum
  unsure (1)..(304): unsure at all n locations
  Clone ID: LIB3083-107-Q1-L1-D11
aaaaagttggaaggcagaaggcttggcacgtttgcctggaagtccggacancgagctagatagctttgagggcggagaccactccgcnntgctctggagctaatgggtgaaccgcgatgannggagttagaggaacctccgagctgatatnntgtagacctgaaggangatgtaccagagagcanagttaancttgcttgtgaataagatccaaagaatgaattcttcagcggttaacaactcgtaagcatttttcttattatttttggtggtattccaagacgcaatgtgcatggtacagctg

SEQ ID NO: 30496 - DNA, 225 bp, Gossypium hirsutum
  Clone ID: LIB3083-107-Q1-L1-D2
gggatattgaaactcatggggggatcccatacagaggaagcccgaacctaacatgcacagctcgctatgcaagtgtgaacactcaccttggaaacgagcaaagccggaaagatgaagcggaatccattggctatgtgctcttgtatttactgagaggaagccttccttggcaagggttaaaaacgggtactaaaaagcaaaaatatgataggagcactgaaaaga

SEQ ID NO: 30497 - DNA, 237 bp, Gossypium hirsutum
  Clone ID: LIB3083-107-Q1-L1-D5
ctttatcttttcacttccaggggggtccaggtgtgggatccctacactctcttcctctacctacttttaaaatcaaatacggttttgcatccttaaatcctcactgagataaaccgccaacctacggctctgtgtttgcctcgtgccttataccaccgtaaccgaacaatgagaccggtgccttcgactcctcgccatacatacaccatcggcgaagcaggggggtatctaatcagc

SEQ ID NO: 30498 - DNA, 287 bp, Gossypium hirsutum
  Clone ID: LIB3083-107-Q1-L1-D9
ttttatgctgaaatctaccgaggggtttattaaaatattcgaaaaaaaaaaaaacaaaagtatgtaataatttagttttacattgatgcaggtatccaatgtatatattacattatgcatttatagtttagaattatggtcaacttgagccaactgctgcctcaaaacccttctcataaccttattagtagctgttcttggaagagatgggagggccacaacatgagaaaccttgaacaatggattcagattcctctgaaccgctaaattaaaagatattctcaatt

SEQ ID NO: 30499 - DNA, 200 bp, Gossypium hirsutum
  Clone ID: LIB3083-107-Q1-L1-E1
aacttacgaatgccctaggggggagtcgaggcgatgggtatctacatggtctgcctcaactgaatttcattcatcctgatccttatccatcaaaaattcttgacggtgatgatatgcgtgccaacgatgaagattatgcctcggtccaactagctcctgtgcatggcaaacactctatcgaaactcggctagtgagcacc

SEQ ID NO: 30500 - DNA, 225 bp, Gossypium hirsutum
  Clone ID: LIB3083-107-Q1-L1-E11
gttatgcgctctcattgaatcgggggtcaaccgtgagctagccactactactgcacaaacatcactttccttacattacactatgcccaccaaaaccaccactcctccaccttcaacttcaccaccacctacaacttccgcaccaatgaccttaccaacccctccacctacaactacagcaccatctgcttcatcaagaaacaattcacattgcaccacgcccac

SEQ ID NO: 30501 - DNA, 136 bp, Gossypium hirsutum
  Clone ID: LIB3083-107-Q1-L1-E12
tctttttcaaccacaacttcccattggagggctttttgagggacagcctctctttctatatctgcctaactatttatacatcaatttatcttccgaaaacttatttgtcattcaatttacatatcgcgctcaaaca

SEQ ID NO: 30502 - DNA, 282 bp, Gossypium hirsutum
  Clone ID: LIB3083-107-Q1-L1-E2
gtcaaacagaaatgaccactgggtttcctattctgtgataacctctctttctctatctgtctttctatctatctatcaattcatcttccgaaaacttatttttgattcaatttagatatcgtgaacaaacaaaaatttgtggaaatgagcagccagacgttgcctccggcgtcaacaacccgccgtgattctcaaaaaagaagatcaaatagcactaagaagtctcattccttcaaccatgccaagcccatgtctccttcttccatccctggtgagaggacg

SEQ ID NO: 30503 - DNA, 115 bp, Gossypium hirsutum
  Clone ID: LIB3083-107-Q1-L1-E6
ttctcgaggccacctcttttctctaagggggcggaaaggcgcttgcctcaaaatcccaattcccggaatattggtaaacctgctattcatccaaatactgtaaatattaattgca

SEQ ID NO: 30504 - DNA, 284 bp, Gossypium hirsutum
  Clone ID: LIB3083-107-Q1-L1-E7
tcgtgcgagttttttttttttttttggggttttttttttgttttgttgtttttttttaaaaaaacaaattattttttgcttcacaattgagttctatgcaaagaatcagttttttttctacatctaatttcaatggggttttacaattttaccgtttaaagacccaaaaagaaaaaaagaattgaatggttcatgaggttgagcttgcctcaatatccggagaccacaactcattggtaactaagctattctcggtttcattccatttaagaatgggcctgcag

SEQ ID NO: 30505 - DNA, 201 bp, Gossypium hirsutum
  Clone ID: LIB3083-107-Q1-L1-F1
gacttacaattgccctaggtgtgactcgaggcgatgggtatctacatggtctgccacaacagaattttattcatcctgatcttaatccatcaaaaattcttgttggagatgatatgcctgccaacgttgcagattacggctcgcgccgactagctcctgtggattgcaaacacactatcgacactgggctagcgtgcacct

SEQ ID NO: 30506 - DNA, 290 bp, Gossypium hirsutum
  Clone ID: LIB3083-107-Q1-L1-F11
ttgtggtttttattttttttttttaggtggggagtcactaacaatgcgggaaaaactggacaaataggaaataagagaaacatcagtgttatcgacctcatgatccaaagtatcagagctaacttcaaaggctacttactcatatggagacagcaaccataagtagaaccaatagtccgatactatagaaaataaacatcatagcatattgtggttgctcttacctgataataatttttccaaacttgaatcatgggtaagtaggggatgcttcgttgttgaatttatat

SEQ ID NO: 30507 - DNA, 236 bp, Gossypium hirsutum
  Clone ID: LIB3083-107-Q1-L1-F5
ttcgaggtttcatgcccctcctgaaggggggaattgtgggttgatagaaacttcatatgtatatatacttcaagagtggcacatgatcttgactcaacttgaatactatccgtcacaaagagagaaggaactactaaaattagaacacgagtgtctgggcgactaccaaaaaaaagcagacctagcaaatctgtaaagagctctactatatcacgaactggccatatgtggagctg

SEQ ID NO: 30508 - DNA, 298 bp, Gossypium hirsutum
  Clone ID: LIB3083-107-Q1-L1-F9
ttcgttccttttactccgatcaccttcttggaccgcggcgcggttatctacccagactctgtctcccttgtccacggtgatgtcaagtatacctggaaacagactcgtcagaggtgcgttcgtctcgcttctgcgcttgcccagctgggaattgcccctcgtcatgtggttgctgtattagccccaaatgttccagcgatgtatgaacttcattttggtgttccgatggctggggctgttctatgtacactcaatatacgtcatgattcctcaatggtggcagtgttattgaagcatt

SEQ ID NO: 30509 - DNA, 291 bp, Gossypium hirsutum
  Clone ID: LIB3083-107-Q1-L1-G1
tcttgagaattgtcaaacagcttcaagggattgcaagtgatgaaatggacaataagcttcttcaactatatgcatatgagaaatcaaggagatctagaagatttgatgttgtttatcatgaaaatgctcgtgttctccttcacgatgagaatatatatcgaattgaatgttcatcaactccaacgtgtctatccatccaacttatggactatggacatgataagcctgaagtgacagctgtttccatggaccctaaatttgctgcatatttgcacaatgacttcctctcag

SEQ ID NO: 30510 - DNA, 177 bp, Gossypium hirsutum
  Clone ID: LIB3083-107-Q1-L1-G12
gtaattttcaccctgccatccggggggcatacagacgatggacgcatttcctgcacatgcatgaaatccagtcaatatgaatgtagcccatagaccaatgcgtctaattgcttaattattcggataagaccatagtcactcagaatgaacttggaaaccacatgctttgctgtgata

SEQ ID NO: 30511 - DNA, 243 bp, Gossypium hirsutum
  Clone ID: LIB3083-107-Q1-L1-G8
aacaccccaatgattaaaccacaaaaccaacctcagaattctcattcaaaccaagtttggcatcctactcacggagacaaaaaccccgggaactaacccccgaatccataacatttgtttgaagtaaacctgtgcatctccacagcaccatgatttttatggacatcacacaaaccccccaacaacaaaatccctttcccttcaaccacagcttttctgccaaccaatttcaccatcttagct

SEQ ID NO: 30512 - DNA, 225 bp, Gossypium hirsutum
  Clone ID: LIB3083-107-Q1-L1-H1
ttttctaggttttttttcttttttaaggggggaactacatgggtgcggggtacctaatgtccatttacaagattccttaacaatttactcccaatacagacaacaaaaatatcatgtttcaacccaaacacaaataaaacattaaaaagcttaacatacagtaaaccatttcaagtctttaacatgcttaaaacaataaacacttgcataacacgcaagcaacaa

SEQ ID NO: 30513 - DNA, 408 bp, Gossypium hirsutum
  Clone ID: LIB3083-108-Q1-L1-A6
tttcttttttcttatttgtattttgatttgcgagtaaagaaaagaaaatggataagaaaaagattgctgtcccacttgtatgccatggccattcacgtcccgttgtggatctcttttacagtcccgttacccctgatggttttttcctcatcagtgccagcaaagattccagtcctatgctgaggaatggtgaaactggagattggataggaacctttgaaggacacaaaggtgcagtttggagtgtttgcttggatacaaatgccttacgagctgcttccgcttctgctgacttttctgcgaaagtgtgggatgcactaacaagtgatgtcttgcactcatttgaacacaagcatatagttcgagcttgtgctttttcagaggatacacaccttctattgactgggg

SEQ ID NO: 30514 - DNA, 236 bp, Gossypium hirsutum
  Clone ID: LIB3083-108-Q1-L1-A8
aaccgaatgcagctcaatttgtgtttgttcattaaacgaacataaaaattttgttcatactcgtttatttaacttaataaacgaacataaacgaacgttatacaaacgattcataaacaacgttctttccatctacacctgtgatacgattttaccgtaccatccgattaaaaaacctcttaaaatccatttgaatacgtctttttcattattataataagagtgtgaattaaact

SEQ ID NO: 30515 - DNA, 342 bp, Gossypium hirsutum
  Clone ID: LIB3083-108-Q1-L1-A9
gttgccggtcgtcggtggaagacacgtggtcattccgacgacgaatgcggaggtatcggaggccgaaatgtccgaaatagaattgatgaaggaaaggtttgctaaacttttgcttggagaagatatgtcaggtggagggaaaggagtttgtactgctctggccatctccaatgccattacaaatctttctgcttctgtgtttggggaactatggaaattagagccattatcaccacaaaggaaaatgatgtggcgtaaagagatggactggcttctgtgtgtaagtgattccatagtggagcttaaaccgtcattgcaagagtttccaggaaggggaacctt

SEQ ID NO: 30516 - DNA, 363 bp, Gossypium hirsutum
  Clone ID: LIB3083-108-Q1-L1-C6
ctacctgtttactgaaggctaagaatagcctggagaggggcgagcccatgcagatatcgagctctctcatggtgagtcatgtcaaattcatggacaacagaagcagaataggaaacctgaagctgttgatattgatcgttggctacagaggaatgaagcccttggagctgcattcatacatgctgaagaggttggagcatactgacaacggcaatggtattcaaagcttgtcaaagctgatataaatggaaacgatcaggaaggctattcaattaaactacctggagatcctaagctaggagaagggaaacctggaaaccagaaccatgctattatcttgacacgacgggaagctattcaaac

SEQ ID NO: 30517 - DNA, 392 bp, Gossypium hirsutum
  Clone ID: LIB3083-108-Q1-L1-D1
tggaagtataataaaagccattggaagtaaagcaaaataccatatggggtgaatcaaagaagatgtgggcgattgcaggccctgcgattttggtatcggtctctcagttctcaatcggtttcgtcaccgtcgccttcgccggtcatttgggcgagctcgaactcgctgcggtcaccataacaacgaacgtgatcgaaggcttcgttttcggtatcatgttaggaatgggaagtgcactcgagacactatgcggtcaagccgtcggcgccggccaacacaacatgctcggaatctacctccaacgatcatggatcattaccggaataaccgctttatgtctaacaccatgttacctcctcgccacaccgatactaaacctactccgacaagac

SEQ ID NO: 30518 - DNA, 406 bp, Gossypium hirsutum
  unsure (1)..(406): unsure at all n locations
  Clone ID: LIB3083-108-Q1-L1-D12
cttggatccgttgaaaaaaaaaaaagcttcttcacatgcctaagtcttatacaactttgtttattgtgtctgctttattcaaaaacaccatgtcgaagaaaacaatcctgtcagtggagctgctgtgtccaaagtgcaggcagaaggtaatgcatgtaatttcagagctagtggggataacgtccatcaccctcgatccatcgaaaaatacggtaatggttaccggcgaagctgatccgtttaagatcattaagaaagtcaggaagttccgtaaacacgcatcgatcgtaagtataggggccgcanaagaggagaagaagaaggatgagaataaggatgagaagaaggatagccggaaagatgtagtgatatactcttcaaagacatgccagagatgtgaagtttg

SEQ ID NO: 30519 - DNA, 388 bp, Gossypium hirsutum
  unsure (1)..(388): unsure at all n locations
  Clone ID: LIB3083-108-Q1-L1-D6
gtcgcgttttccggggaacatgttcacttaaagagaggtgttgtcttttggaaggacaggctgtacataagttggttgctctcttggatcacaccaacgcaaaggtggttgaagcagcacttgctgcactttccaccttgttggatgatggtgttgatattgagcaaggtgtgtccgttttgtgcgaggcagagggaattaagcccatacttgacgtgttactcaagaaacaaacagagaatttgaggagaagagccgtttgggttgtagagagacttttaaggaatgatgatatagcctatgaagtttctggagatcaaaatgtgagcactgcacttgttgatgccttccaccatgcggactacaganacccgcagattgcggagcg

SEQ ID NO: 30520 - DNA, 409 bp, Gossypium hirsutum
  Clone ID: LIB3083-108-Q1-L1-E1
tcggcccaaaaaaaaaaggattagagtctcttggaatagtttgatcactgggtatgagcaaaatggtccagctagtgcagctcttcaggttttcttgaggatgatggattgtggaattgaaccagatgaactcacatatgccagtgtggttagtgcttgcgctagcttgtcggcaatcaagtcaggcaagcagattcatgctcgtgttgtgaaatgcaataagttgagggatgatcttgtcctgggaaatgcattggttgatatgtatgcaaaatgcaataaaatcaatgaagctagatgtatttttgataggatgccagttaggaatgtagtgtctgaaacctcaatggtaagtgggtatgcgaaggtagccagtgtgagaactgcgagatcaatgtttgcaaagatg

SEQ ID NO: 30521 - DNA, 388 bp, Gossypium hirsutum
  unsure (1)..(388): unsure at all n locations
  Clone ID: LIB3083-108-Q1-L1-E3
gaacagatttgtaaagccccaatgtttctatatgtgtggtggtttgttaaattatatcaaaattaagtgatttactctagtaggtggctacttcagtatggggttgaggtcactggttcgaatctctgcgtgggtgtggggtagttttattttattaaatgactttgtgtactattcagttgggggagcttgtgttgtaattaaactctactattccattgctcccattttgcatacattcctttgttttttttggcacttctagtgaaaaaaaacacacaaaagataaatatcttaaatttgtttcattatcttttttccctttctctaatctttgntattttcactcggcttttggttttggtcttattcattctattttttttgg

SEQ ID NO: 30522 - DNA, 318 bp, Gossypium hirsutum
  Clone ID: LIB3083-108-Q1-L1-E9
cgtcaaactagccataaccattcacgccttcattctcgactcccttgattttctcaagctacctaatattacattaatcaacttatccctgtcattaccaactgggtctgcaacaaaagaatacttcttttgcatcctttgcttctttccatagtcctccaaatatttttcggtcttcatgctttctccagcagcaccagacggcttgacatcatattcagaacaatcaaccaaaccctcagagttcgctgaattatctgttttatccttaactttcttactactgtaccatgaatcaaagatttgcagcaaagagct

SEQ ID NO: 30523 - DNA, 342 bp, Gossypium hirsutum
  Clone ID: LIB3083-108-Q1-L1-F1
gtctggtcttaagtcgtatggttctctgccgaagcctcggcctatctaaactgatcgagagaaaaacactacacgtgtaacgctcttaacgcctactgaccgatttttactcatatattcgatttttattgagatttattttttgcatgaattttcattgaaaatggaaacatcacctttaatatttagaatttgtgatatattcggtatttactttccttttggacaaagatccctgcttattggatagcttgctttaagataaaccttggggctcatatttattaaatagggcctgtgattggtgatcatcatcattagaaaaagtagacaaaaagaaat

SEQ ID NO: 30524 - DNA, 399 bp, Gossypium hirsutum
  Clone ID: LIB3083-108-Q1-L1-F7
cttccagtgcttatttttttgggttcgctgtcgaagcctcgtcctatctaaactgatcatacgtataaaaccttcccttgaaaccctttgatacctcacgatcccattctaattcgatctttgctttagcttgagattcttcaggtgctgcaaggagaatgtggctgatgctgcataaatggaagcaggaatacctttgcaactataaatctatcacatatcttttggggattaatgatacgttcttgatggtgaacccaagaatccaacatcgtcctaccatctgctataggcctataaagccatctgatttagagaccttagaacgaatccacagtgacgtattttctatcaagtatgagtctgagtttttccaaaaggtcgtgaatggatgtgatg

SEQ ID NO: 30525 - DNA, 146 bp, Gossypium hirsutum
  Clone ID: LIB3083-108-Q1-L1-F8
gttgcatcagactaaatatgcggtggtgggggtaatggactagagcatgcggattaattctccaagcgcttctgatgaatgcaactatatcgcaacatccccattactccatacttggatttcgacgcttctcgaatcactgacat

SEQ ID NO: 30526 - DNA, 315 bp, Gossypium hirsutum
  Clone ID: LIB3083-108-Q1-L1-G7
cgaggtttcaacattactcatctctttcgacgacggaggaggctaattttgctgcggcaatggcagggacccgacaatgcgggatattatatttggccaatcctcttgacgcctgttcggatttgagtaataaagcagacaaagggtccaatattacttccctctttgcgctggttattcgaggagggtgcatttctgatgactaagcagggagagtgcacaaagcaagataccaacccgctatcgactatgacaatgatgatggtttctcggttgcaatggcaaggaatgctggtggcataaatatacatgctg

SEQ ID NO: 30527 - DNA, 387 bp, Gossypium hirsutum
  unsure (1)..(387): unsure at all n locations
  Clone ID: LIB3083-109-Q1-L1-A2
aagggataaactggaggagaatataaanntgccacggcccatattggnnggatcaagaaacaaaaagnnttaagcttgtctcntttaaaagaaaatnncagttagcccgcttaaaacaaacgatgtataacccgccatggcactttaatcannccgtacctctcgnnactgaagaaagtnncgttgatccctttaagcccnnctttgccatttcttagtacgaaccacnccaagggtagactcggacacacaaaaacactcagtttcaaggggttggagaaanntattttattggaaggcttatcacttagttttgagaagagccaaggtggttcccgatagaagcttcgattggctttatacatnagaggagaaatatgctgcacc

SEQ ID NO: 30528 - DNA, 320 bp, Gossypium hirsutum
  unsure (1)..(320): unsure at all n locations
  Clone ID: LIB3083-109-Q1-L1-A7
tggcataacntgaatcctttgccgggaaaaatgatatctccggcggccacacggaagcattaggaccttgaactcctctgacaatcccaaagcttggatttttgatgattatcgtttgacagaagacattcctgtccctggcaggtgatcttccctcactagacccttcagccccaatctggtcatcttctttccttacttgctctactcctcttagaggcgaactcactgtatcgctagcgaattcagacaatgcttaatgcaacacgctcccgaaaacggatgacgactggatcatccagtgcatctgggtccaaagc

SEQ ID NO: 30529 - DNA, 359 bp, Gossypium hirsutum
  Clone ID: LIB3083-109-Q1-L1-B11
tcgtgtttttttttttttttttttttttttttgttttttttttttttttttttttttttttttttttttttgggaaacaatcaaatctggcttaaattatgaacataaaacttcctaaccactgctttactatacacatacaacattttcatctccttgtttaagatagatacatacaaaagccccccccctacctttaacggtccacattaatcgaaacgaaaattgttgcggaaaccaatgctaaaacttgcctctcctcctgtatgagtttcaatgtaatcccagagcatggattcttctaacaagtgacaaaaaacaagcatttttttctttccattcttcactaccctccttcc

SEQ ID NO: 30530 - DNA, 276 bp, Gossypium hirsutum
  Clone ID: LIB3083-109-Q1-L1-C1
ctaatttgttgatactcacaccaatcgcctgagcacgacgcgtactagaatgaaaatacctccttttctccataagggaaaagcctagagggcacgagttacatttagccgaatattcgtcctttcctgtgtggaacgggcaactcactgaggataacgcccatctacttgagatccgctagcatgattattaacaggataagatacctgagaagggctttatctactgagccgattaaaatgcctcaatgggctatgtgcatgtctactcagagt

SEQ ID NO: 30531 - DNA, 303 bp, Gossypium hirsutum
  Clone ID: LIB3083-109-Q1-L1-C5
ccgcctctcctcatcgctatcttccctctcttcagcttcatctacctcttcatcctccacatcatcaactatgaatccatcattctcatattcatcttgcccctcgtcgtcttcttcgtcgtcgtcgtcgtcagggtcgcggccattgagtgtgtctccctcaatgggctctccatcttcatcgagttccaactcctcttcttcgtcagataccacgttcttgcccatagttcagaaaagagaaccaatgcagagaaaatcagagaaagaaagacttcaatctgcgagtgggattgaaaccac

SEQ ID NO: 30532 - DNA, 358 bp, Gossypium hirsutum
  Clone ID: LIB3083-109-Q1-L1-C7
tttatgtctggacaatatcttgaatattgtgatacgcaagagtgatgaagacgagcatatggagaccagtgatgattttatcaggcacatgcaagaacaatttaaagaaaaagctcgcaaatctgagtcagtttattatgcagccacagatgtggtgattctgagattcatggttgaggcaagctgggctcctatgttggctgcgttcagtgtgcctcttgaccaaagtgatgatgaagcagtaacagcattgtgtattgaaggcttccgctgtgcaatacatgtcactgctgtgatgtccatgaagactcatagagatgcatttctgacttcattagctaagtttacttcactccac

SEQ ID NO: 30533 - DNA, 363 bp, Gossypium hirsutum
  Clone ID: LIB3083-109-Q1-L1-C8
cgaggatgaccagtgggaggtcgaacgcagataccgtgatttctgtactctctatcgtcgcttgaaatcaatattctctgaacaaggttggaatcttcctcctccctggtcatccgtagaaacagaatctagaaagttatttgggaatgcgtctcccaatgttattgctgaaagaagtgttcttattcaagaatgcctacgttccatcatatgttctaggttctcttctaaccctcccggtgcattgatttggtttttgtcacctcaagatgcatttcctggcatccctccatcaaatatccatttgtctcagagtacatatttttcaagagggcaaggcacagaaaatatttctcctttagg

SEQ ID NO: 30534 - DNA, 262 bp, Gossypium hirsutum
  Clone ID: LIB3083-109-Q1-L1-D10
cattggcctccgaatgtagaggattcaagccttgcttttggttgggaaccggatgatcgtagaagtcataaatcatcttctaggagaaagaaaaaatcttcacaaagtaagggagatgaatccactgagtctaatgattctagctctgagagggaacccgaagagggagttccttagaaaaagccccaaaaggagtcattacccttaagaaagggtggcattcgcaatattaattacctttcttctaagaagaatggggatt

SEQ ID NO: 30535 - DNA, 291 bp, Gossypium hirsutum
  Clone ID: LIB3083-109-Q1-L1-E3
ccatctttcatgacatacagataccatcagaggtgataatatgcaggctcgagaaagcttatattggctcctctacactacgaagagccgcattgggggctcttgcatagacgttgactatcccacaggttgcttatcttcgggaacaattgttaatggtagggcctaaccaaagggggattactctgacgcagaagtttaagacggcgatgacggagaactctactgatgctatgaaggattcgcgggtccttgattatgtcaacatgattagttgtattcaatatagaa

SEQ ID NO: 30536 - DNA, 382 bp, Gossypium hirsutum
  Clone ID: LIB3083-109-Q1-L1-E5
ttcaatgtctctactttgactcctccattcaatatttacgccaacaccgccagctttgtggccgcagcgaaaggtttttctgcatttatacaacaatattacgccggaattataccttcgattgtgggcaacgatcaacagcagctggtgactcaaatcgggctcagccagtcagcaggattaggagttctccgaacactacttaacgatgtgatcaattcaacagtgcagccatacacattcacagcggcggagctcagcaaccgtacttcagaagtggttaaccggcttgggggatgtggtgtgaaagctgaaggtttgattgtgccattgcaacttggagcagagaatcgaactaccagtaacgtcgtgccgggagatg

SEQ ID NO: 30537 - DNA, 281 bp, Gossypium hirsutum
  Clone ID: LIB3083-109-Q1-L1-E6
cccccggctcggctgaaataattcacgacttttgctttaagctcgccaccttgaatgtgcagagggcccattactgtgagggaggatatgcccttcccggatagtcatcgaccaccgatctttgatcctcgcatttttcctccgatctggtgatagaacccgcgatctcatgcacttaccgcgacatggatcatgaatctgataacacactcctggaccgacttctaacgcattctctatcaatatcccacatgggttcctactactcgcgaaacttacct

SEQ ID NO: 30538 - DNA, 357 bp, Gossypium hirsutum
  Clone ID: LIB3083-109-Q1-L1-E9
ccaacacaacaccacataccaacgccagctgaagatggagacggaggagaactagaacccttttcaactagaagatgtagatgggccccttgttaagctgcctcctccaactacaaagcttccaagggagaagcatcttccaaagcctaaacctcctacaaattgggaggagtttgctaaaaggaaagaaacgtaaaaaggacaaagttgcatgggatgaacagactggtacatggaaacgtcgctttggttatgatagtgtcaatgatgataaagacatagccatcattgaagccaagatgactgatgagccaggagaggatccttttgctaaaagacaagatgataaaaagaaac

SEQ ID NO: 30539 - DNA, 349 bp, Gossypium hirsutum
  Clone ID: LIB3083-109-Q1-L1-F10
tcggtgcttgattagatatcttggatgttattctgatgttttgcctaggtttagggtttttgttacaatttcttccaaatacttagcttttatatttggttaatagggaaggaggagatggtgaagaaaagaagcaagaatctggttctttaccaagtggggttgtaggattaggaatgggattacctgacttgaagagcaagaaaaagggaaagcaaaaggtgtcaagtgaatcccatgtcacagaggctcttgataagatgagagaacaaaccagagagactataaaaggattggaatcaatgtcgaaacctggaggagatgattttggagaggatggattgatcga

SEQ ID NO: 30540 - DNA, 281 bp, Gossypium hirsutum
  Clone ID: LIB3083-109-Q1-L1-F3
gagtattgtaaaggcaccgctccaattgctcctatatcaaactactggtacggacacaaccgttgatatggacacacaatatgcaagatccatacatgaacaactgctcttgcatggctgcccactgaaataattaaacctttaagctactctgtgattttgaatgatgtatttgaaattactacttacaacaagctcaaactcatacgattttaaagggatgagtttatctatataatatgaaaacagtggctcagagctgaaggttaacttcgatggca

SEQ ID NO: 30541 - DNA, 268 bp, Gossypium hirsutum
  Clone ID: LIB3083-109-Q1-L1-F8
agggggacgaggacgttcttttagacaatattatatatatattataatctaaactacagaatctcaaacagtccaatataaaactcgaaggcatttccaaataccttataattactacaaactttgacataaacacaacgaaaatctcccaagattgatgccaatgaaccccctcgtacagatgccaaatatatgtactttcaaatactgttgtatatggtgacccgtaccggaacctttgatctttgatgctatgtcctgtaatgac

SEQ ID NO: 30542 - DNA, 366 bp, Gossypium hirsutum
  Clone ID: LIB3083-109-Q1-L1-G5
cagcatgcttttgtttatcaaagtttttgtttgttgaaaaggttggtgaaatgacatttaaataatggtttgctacgcaaataagagctattggttttcattgttatttccctaccatggaatttgttgcttatataatatcagagtaggctttgtggaaggcatatggctagtaggagttattgatgagttgcgaatgcctgaaaatggaagtgatagaaacccgatattagtagacacaaagactcgtgtacgagacactcttcctgctgaaccacaaagcagaaatggaaggttggatattttactggctttctgtataatgcaattattatcaagatttgatatatatacaatgcatcagaa

SEQ ID NO: 30543 - DNA, 368 bp, Gossypium hirsutum
  Clone ID: LIB3083-109-Q1-L1-H11
tgtcttttcattttgttatatagaatacaataatgtcatcaccaccaccaggggggactccggcgccgtcatcaccaccaccatcaacaaacactacgtctccgccgccatcttcagccggagctccgccgccgagtagtcctccttcccaatcgccgccatccaccgcaaatccgccgccaactaccactccttccacaccatcaccaaccgcagcaactccgccgccaactaacactcctacaccaccaccaaccgcagcagctccgccgccaactagtcctccctccccgccatctggtaccccatctccacctccagccaccccatcagcttcttcttcttcaagcaccacttctttccccttc

SEQ ID NO: 30544 - DNA, 338 bp, Gossypium hirsutum
  unsure (1)..(338): unsure at all n locations
  Clone ID: LIB3083-109-Q1-L1-H12
gcactaggttttgccgattttttttttnnnanggttttggtttttttttttttgggggggttnnnnaggatcattttgcatttggacgtgatatacaaataaggattaatttgttcggttgccaatctgactcctattacagcctgcgacaattacatattattttcatgtcagcttttggaatttggaacataattacatgaatacaaagactgatccttttgtctcggtttgcagaaaggagcataagcttagacataacttgaaaacaactcaaaaaggacatcttcaacccaaaccaattgtatggtaattgcagagccattgcaataagactt

SEQ ID NO: 30545 - DNA, 261 bp, Gossypium hirsutum
  unsure (1)..(261): unsure at all n locations
  Clone ID: LIB3083-110-Q1-L1-A10
ctcgagnttttttttttttttttttttttttttgttttgttttttttttttaagaatttcaatgcttcagcaaataaagtataaacccacaggaatgggaagctaaacaaacctgataataaaaaaataccttttttatttgtgatttgataaaaacaccggtatatattgcctttttttttactaagttgcttcccaatcaaagggctaaaggatccccaattattatatacactttgattttaatatctgggggatccc

SEQ ID NO: 30546 - DNA, 232 bp, Gossypium hirsutum
  Clone ID: LIB3083-110-Q1-L1-A11
acggacgagactgattgagaactatgccattaaaccgcaggagtagagacatagcattcttggtacatacaatggcgtaaggacttgcaggtcagagcgagatttgtctgccgtaacacgacacttgttcgcaacgaagaccttgttttgcgcaccgacatgatgagaaaaaagaatcattaagccaacttctgggcaacctcatagggatctagttattggcgttcatacc

SEQ ID NO: 30547 - DNA, 354 bp, Gossypium hirsutum
  Clone ID: LIB3083-110-Q1-L1-D11
aacggacgggtaattaaattttttttaatcacaaccacttttttcatcttttttcccaaaacacaaatcaaaatttttttaaaaaaaccaaatctttcaaaacagtctcaaaaacatctaatgacaaaaaaaaaattgaaaaaaaaataactctcaaactccccgaaacaactacattaaaccaaaaaccctttgcataggaataatatatcaaaccacccttccccgtaacaaacgacccctaaccctttttttgggatttaaaaacaaacccccatttttttagaacaccatccccctgatacaactaagatccttctctcaaaatactcacatttaaaacacacctttttc

SEQ ID NO: 30548 - DNA, 395 bp, Gossypium hirsutum
  Clone ID: LIB3083-110-Q1-L1-E11
gaggaatgagaagcatgttgagatgggtgagaaaaaatatggatcgcaagaagactagggtttttttcactagcatgtcccctactcatgcaaagggtatagattggggaggtgaacctggtgagaactgttataatcaaacaacaatgattgaagatccgaactattggggttcagatagtagaaaaagtataatgaaggtgattggagaagtgtttagtaaatcaaagtaccccattacattccttaacatcactcaactctcaaattatcgtaaagatgcacacacatcgatttataaaaagcaatggaatccattgacgcccgagcaattggctaacccgattagttatgcggattgtactcattggtgtttgcctggccttcaagatact

SEQ ID NO: 30549 - DNA, 378 bp, Gossypium hirsutum
  unsure (1)..(378): unsure at all n locations
  Clone ID: LIB3083-110-Q1-L1-F9
tagccataatcttttctgaccctaccaatttctaaaggcctgttctttttaaggtctggtctagattttttaaaaaagagtgtaatagtcttccaacttttcctataagcttttttagtaaacacatataacccctctatgagtttgtcatttaatataaacatttaactcctctgttcttcatttaaaaaattaggttcttttccttctctttttttcatccctttattcattattttcttatccgattcttttatntaatctcttcttttttcattatcccctattttctctcttttgtaatatcacaaaataatcccatacatttttccctttattataccctttttatatttttttctttcttctttattattt

SEQ ID NO: 30550 - DNA, 328 bp, Gossypium hirsutum
  Clone ID: LIB3083-110-Q1-L1-G10
atatcatacctttatgggtgggagacttaaagtgatgcgagaatgaatgttaccctcattaatgtcctgcaaattacccttccttaagtgagaaaaaaccctccgtaatcgtactatattaacatttcatggacactctccactttcatggctccgcgtaaaattactagagaaagtgccccgatcttatataaaacaatatcccttctagagataattattatgcagctacaagacattggtgacaacataccgagttaacttttatgcaaatatcgaccagatgcaacgattttgattggtgtgttgcataaaccaacataatttt

SEQ ID NO: 30551 - DNA, 270 bp, Gossypium hirsutum
  Clone ID: LIB3083-110-Q1-L1-G9
gtcatagcttgtggtgttgtcaatccaaaaaactggagagtctcactcttggattgaacggaccaaaaaccctgaaacaaattgtctacaacagccggtgcgcaatccacacaaagtacaagacaaaaaaatcgccttgcatcactccaaacatagctctcaaaaaaaaagatgctatccgcaccagacaaagctacacaagatatacaatgtgttagacaacacatggggcaccgtgcattatataatgcagcaactttctcatatttg

SEQ ID NO: 30552 - DNA, 396 bp, Gossypium hirsutum
  Clone ID: LIB3083-110-Q1-L1-H11
aaatcataaaatataaattctatacatatcttgtaacttattcttcatatttgatatatatatatatatacattttcaatcaactagttaatgccacctttctcaaatcttaatatactatggtgaattaaatataaatctttttatgcatgtcccggagccataaaaggtgataacatcggtgtagccaccggtaccatagccggaggaatcgcaatcgaaccatcaccgccgccgccacaatggtaatccaaacattccaccggatgttcaagcgctgcttcacacactttctcacttctttgcctcggcttttccggcaaacaattccggcgatcatcaaaagccacaccattcgaactcaaattcccacaaatcccttcttcttcacaaaaa

SEQ ID NO: 30553 - DNA, 329 bp, Gossypium hirsutum
  Clone ID: LIB3083-111-Q1-L1-A6
caagctcaagctgaatatgagaaagcaaagaagcaggagcaatcatcctccagtacaaaacctagtgagatgcctggtgggtttccaggtggaatgcctggaggaatgccaggtggtttccctggtagtatgccgggtgggatgcctggaaatgttgatttcagtaaaatattgaatgatcctgaattaatggcagcatttagtgatccagaagtcatggctgctcttcaagacgtgatgaagaatcctgctaatcttgcaaagcatcaagcaaatcccaaagtggcacctgtaattgcaaagatgatgagtaaaagtaaatagttcat

SEQ ID NO: 30554 - DNA, 401 bp, Gossypium hirsutum
  Clone ID: LIB3083-111-Q1-L1-B3
gcatggtcaatatctcgggaagttgaatggtcttcacccgtcaaccacagtaaagcctgagcagctgcatccttttctgcaagtttcttgctgctacaaggctgcccaacaaaatccagcccattaaagatgactgtagatcggaactggttgttctttagttgctttgtcttgtaagtgggtggaaggtaatacccctttagaggccaaaacttaagtgaaagatcccatggaggcagaagctggagaaaatggccgatttggaaagggtgttacctttgtcggctctcgttcaaggtgagtgctattacttcatattttgttgctactggtttagccataagttataaatcaaaattttttttatcgaaactaggagttgacaatagttatagatttat

SEQ ID NO: 30555 - DNA, 265 bp, Gossypium hirsutum
  Clone ID: LIB3083-111-Q1-L1-B8
ccctctcatcccaattcttaaccataaaccaacgtggcatgggggttatactcgaatttttgtgatactctttctctatgctatgttctttcatacattattgctaatctactttcattgtctattgacatggatcaactatattatgctgtttcaacatgtatggaagtcttaaataaatatgcactatgcgttctatattttgaaatgggactactgtttgtgtcaaaaataaacaacattattcctgtaagtgaatctgtct

SEQ ID NO: 30556 - DNA, 261 bp, Gossypium hirsutum
  Clone ID: LIB3083-111-Q1-L1-C6
cagcttgaattcatttcctggtgaaccgtatcatgtggggagtgggatccccccagcacctgttcctgcaccttcagctgatacaacatcaggtatgaattggtaaatctaagtgaacgaagtaaagccatgttacttggaccgaagtgtgagtgttgaatataagtatgtatgagtttgacatgggcatgctaaattatcccatgttattatgtgtctttagcgggtcatatgctcacatgcatgttcgatgggtacaac

SEQ ID NO: 30557 - DNA, 228 bp, Gossypium hirsutum
  Clone ID: LIB3083-111-Q1-L1-C8
gctgagctctttcccccggcatgtgcatgtcatatagggtataccccaaacaagcgacaaacgggaccaagggcgcatccaacccccaattccccccattaaagcacaactatacagatcctcccgccctgtctaccaaccacaaccctgacaaaaccgttaccgtccctaatttaattcttgctgactaaataccactttagctatcctggttattatccaaatagc

SEQ ID NO: 30558 - DNA, 403 bp, Gossypium hirsutum
  unsure (1)..(403): unsure at all n locations
  Clone ID: LIB3083-111-Q1-L1-D2
ggcatttcatgggacaatgaggctaacctttgtgggaatgatatgtgctggtttaaccattggcatgtatgcatcgcctctatctgtcataaggacagtgataaagacgaagagtgtggagtacatgccatttttactctcatttttcttgttcctcaatgctggtgtttggtctgcttatgcattgcttgtgaaagatatctacattggagtgccaaatgcaattggttttatcttgggttcagctcagttgatcctctatctcatgtacaataacaaaaaatcagctgaggccgtagaagaagaaaaaagangaggaggaagaggttcaactcatntggtgaaggaggcattgagatgcattcagttgaggacaatctaaacaatcgaagcctaaacaaat

SEQ ID NO: 30559 - DNA, 251 bp, Gossypium hirsutum
  Clone ID: LIB3083-111-Q1-L1-D7
ctattgcttgataaaaaacactggtagggaaaaccgaaaccaaaatctcttttctcttcaatgggtgatgcttatgagttaattatgagccgcatcaggagtaaccccttacactgttcctttgtgtattaaggtgaaattaaaaggtaattacacattgtcgccatcaaacatttgtaaatataacatttatgatgttataattcaccgccattgatcaagttcctctctttgttaaattaccatgaatt

SEQ ID NO: 30560 - DNA, 325 bp, Gossypium hirsutum
  Clone ID: LIB3083-111-Q1-L1-E7
cccatactttctgatgatactaatgggaccattgcggcaggcgaatatcttcataaaggggtttatcgtcccaacgtgtacattatatatccctgcaacaacgccatgcattccttcaatacaggaatttatggcgcatcgcataaatgttaatactactcacttattttacggtactggatacaacgctccttttcttatttacaatagactgaacatgatgctgcatatttacttggacctattcagaccatctagtaattctatcttctttgatacattggtaaagaccctctttaacataaaactggaacacatctttact

SEQ ID NO: 30561 - DNA, 355 bp, Gossypium hirsutum
  unsure (1)..(355): unsure at all n locations
  Clone ID: LIB3083-111-Q1-L1-E8
cggcacgagttgaagatgtgattgacaattatattggtgtgtttgcatccaagaaaggtgggacaatcanaaactcgattatccacagaaaggaacttcataatcttgcatcagagattgaaaaactcaaatctagaatcaccgacctgaccagaagtttgcagacctatggaataacagcaagaaaagaaggcgaagggtctagaattttatcagagaggcaaaggcagctgagatggtcttattcacatattgtggaagagcatattgttgggtttgaagaaaacataaaggaactgatggtgaagttaattcatgaagaaaaacgttgccgcgttgtgtctatctgtgggat

SEQ ID NO: 30562 - DNA, 288 bp, Gossypium hirsutum
  Clone ID: LIB3083-111-Q1-L1-F1
cttaaaggtcttaaattggcaaacaggtgaaaaacctttcggtggaatgaaagaaaatgggttggattttaaccgaatcaccccaagtcttattatggccggtaaggggcttgaattaaaagggaccgaccttatggaagccaccacttaagcttaaaactttttactgattttagggaaatggatgtagcatgccctaccttattgacaatagatgaaaaggtgaagcctttttacttggaccaattgaaaccatttggttattttatttttaaggattcctttttg

SEQ ID NO: 30563 - DNA, 387 bp, Gossypium hirsutum
  Clone ID: LIB3083-111-Q1-L1-F5
gctactaaaatgtgtttattgtgatgttggcaaatttacaagtatgtctctgagctctacacaatgaaaacgatgcaccaaatataattttttttttaataaaaaccataactaaaaagaaacctagtattattactacaactacgtactaaatttcatcatatggaaatgctgttggtaattccacgaccagttacaccagggcctgatgaaggcagcagcagttcgtatggaggaatgcctgcaccggttcggtttttaagtctcatatccttgtttctttcgtttatgatttcctcgatttccccaagttttgcggcgaattggtcaaacatttgtaacactttatgatcattgatccagctgctatgaaattcgttcatttta

SEQ ID NO: 30564 - DNA, 402 bp, Gossypium hirsutum
  unsure (1)..(402): unsure at all n locations
  Clone ID: LIB3083-111-Q1-L1-G4
gtcgattccgatatccatggctggaaacttccatcaaatggatactcaatcggcggcggaaaaggccgtttcggttatcgggtatgggtacgatttatgtaatgatttaaggttatcggcttgtaaacctggtccttccgggtctagattgattgaacttgactcagtggtgagtcgggaactggtttttccgggtggggttgctgttaaaaacgtgcccaattcgattaaatgcgataagggcgagcgtactangtttcgttccgatgttctttcgttcaatcagatgtcggaaaagttcaaccaagatctctcattatccggcaagataccttcgggtttattcaatgccatgtttgagttcaagggttgctggcaaaaagatgccagttctacaaaatg

SEQ ID NO: 30565 - DNA, 396 bp, Gossypium hirsutum
  unsure (1)..(396): unsure at all n locations
  Clone ID: LIB3083-111-Q1-L1-G6
gaatctctgtaagataaaaagggtcattggtgggtgttttgtcttgaattttgattganaggaaataattgtttataaaaaaattgtgtacaaagttacaaaatagcaaaggaaatggaagatgctttgtgaataaataatttcgccatcatttgacttggcaaaagagcatgtttagttggtttccaagtgattaaatttcaagattgaaacagagtaggccccaaggaaaagcttaatttcagtagtttaatgactttgtgcggcctaccgacaagaaacaaagcatatttacgaggaagtatatgattctcaaagagttggggggtgacaacattattggggagggggggttctagaaaacttttgatcaaaaactgacgtatgggtattgat

SEQ ID NO: 30566 - DNA, 410 bp, Gossypium hirsutum
  Clone ID: LIB3083-111-Q1-L1-H4
gaagattcagttgtgaaatctgaacaaagtcaaattgagaatgcgaaggaagagcagagcatgttaaactccaatctatacgctggcctgcctgaggatgaggtcaaacatgaaactgccagaacaaagaataataaaacgagagtatccaaacatgtatcaaaacctgctgcagcaaatgttcgaacgaagcacactgttccgcagccatttgcccttgcaactgaaaagcgtgcttcatctggacctcgtcctgctgtgtctgaagctaatgctggaactggtttgaacaaatcttctagcataaattgtgcacttcatctaaacacaagaaaacagaatcagcagccccaattggtcttgaggaagcctctgcaacctaataacaagaagcattctgatgatgatga

SEQ ID NO: 30567 - DNA, 246 bp, Gossypium hirsutum
  Clone ID: LIB3083-111-Q1-L1-H7
gggattatctttttgaagccttcttccaaattcctcggtcgcgatttttatatgagtggcgagcctcactggcaagaccataaccctcgaggtggaaagctctgataccatccacaatgtacagaccaagatccaagacacggaacggatcccactataccaacagaggcttatctttgttgctccacagctggaggattgccgtaccctcaatgcctacaacatccacaaggaatgcacactcca

SEQ ID NO: 30568 - DNA, 140 bp, Gossypium hirsutum
  Clone ID: LIB3083-112-Q1-L1-A5
ggaaacttagaaggggcgattaattgactgggaaaaaaaaatatccattttaataacactgaaaaagttttgggcttttagatcacaaccccaaacagcagggaatttgagattataaaaacaacctcatgccttatctt

SEQ ID NO: 30569 - DNA, 398 bp, Gossypium hirsutum
  Clone ID: LIB3083-112-Q1-L1-B4
cagaaaactagagccgcaatattggatgcagaggagctggttaatgtacaaactcggaaagagaaacagaatgtttccttttcacagaaggagaagcggaaaagagaacttggtcaggctagtagggggaagaattatgttgaagaagagaagaggttgctccgggaaagtggcatctattctggttttgatacttgatttgtgtaactaggaacgagctttctcatcatgtatgggatgtagttgttctcttgcgctagatacttggttgtaacatctatttttgtggttttcagaaaaacaggttccgtattgttgtattataaagataattatctttcaagacagttacaaaaaactgtgaatctagtggcatttgtttggtatgtgggattaat

SEQ ID NO: 30570 - DNA, 394 bp, Gossypium hirsutum
  Clone ID: LIB3083-112-Q1-L1-C3
atttttagttagcaggtttattttttatttcaaatgctaaaatttatttttattatcgaatttatttatttttaatcatgtaatattaaaaagttatatataagttttttttttcatctaagcaatctggaatgcaatccaaaatttcgaataatattttcagtttgttaagagccccccgcggtcttgatcttagcagagaaacgagttcgttaccatttcattattgctagccaaatcgtaccggcgccttctcataatcttatttgccggtgcatggacgctccgtggatccatctctagtgcacgatttcattcataactaatggcttcgtggttcaaagtcgccgaagatttatttgaagttgtagatcgaagagcaaagctggttgct

SEQ ID NO: 30571 - DNA, 396 bp, Gossypium hirsutum
  Clone ID: LIB3083-112-Q1-L1-F2
gccagttggggtgtggattatattgttttgactagcgtggatcgtgatgacttacctgatggtgggagtggacattttgctaagactgtccaagctatgaagaacctcaagccagacatcatggttgaatgtttaacttctgattttcgaggcgatttgaaagctgtagacactctggtacattcaggattagatgtctttgcacataacattgaaacagtgaaacggctgcaaagaattgtcagggatccacgggccgggtatgagcagagtttgtcagttctaagacatgcaaaggtgagcaaagaaggaatgataacaaagtcttcaataatgcttggccttggtgaaactgatgatgagttaaaagaagccctggctgatctgagggctata

SEQ ID NO: 30572 - DNA, 397 bp, Gossypium hirsutum
  Clone ID: LIB3083-112-Q1-L1-F3
gctctcatatctgtctgatggtacaaatgacaaaatccaagctcggatatatgcaggcgtttgagggcgtctggaggagctattgacgcacccatgtgcttaagagctaataccaactcttcgcacagacggaaatattgccacaggtgatgatggtcaaacccagtgtattatcaatcatcaagcgtggccatgccttataaacctgttgacaaatgatatcaaaaagagcatacaaactgaagctgggatgacaatctcaaatattacaacctgaaataaagagccaatacaggctgtaatagacgctgatattatatctgcactggcacatctgcttgaaagtgctgaatctgatatcaagaaagaagctgcatgagccatctcaaatgccaca

SEQ ID NO: 30573 - DNA, 184 bp, Gossypium hirsutum
  Clone ID: LIB3083-112-Q1-L1-G1
ccgccagcagtggttggaggattaacacgagcttgatctggcggaccatctcccttctggaaaaacattctcaaattacaacaagacttcaacagatcgttctcacatttttaatcaaccgtgtctggcaccatacaacactattcgcaagagaactcactggctcatgcacatgattcaccac

SEQ ID NO: 30574 - DNA, 312 bp, Gossypium hirsutum
  Clone ID: LIB3083-113-Q1-L1-A5
aaaagttattgttttgcatgggttaacctcagcccatgcaaaaatcaaagtaaacacgtaagcttaaagacatgtttcaagtggaaacctctttttcatatcacccactcgaaataaactttttttttttttaaactttgctgaaagcattcccttcagttcttccgccgttgttgccgccgttgttagagttggttgagttaggaatgacggcgtttacatccgagccaagcttggcaacatcaacgacgacgactgggtggtccgataattgaagcttggggtctgattcttccacttgtttcttgggat

SEQ ID NO: 30575 - DNA, 199 bp, Gossypium hirsutum
  Clone ID: LIB3083-113-Q1-L1-A8
gcgggatgtggcaagcttacgtgactgcaaccaataaagctctgacatggaatgttgaagattggatccctcccgctgaaaaatacatattgaatttgagttcaaaagaggagctcaaaaaacggcatatacattctgatgctgaatgcgtatggtcgtgggccgctacataggagatcatagactatgctaataaatc

SEQ ID NO: 30576 - DNA, 367 bp, Gossypium hirsutum
  Clone ID: LIB3083-113-Q1-L1-A9
caaaaaccaaatcagggctatttcatgcatattgaagggcgttacccaattctcatatacctaacaaatatttttctctcctagcttttacctttctcatatatgccccttaattacagaactcattcagaactcaacacagattcatgccagcaaaacaacatgccaggaatggagaatacaaactcattcaatgtttttttgcctcctcagcttagctttaacaaacatcgcacctttaattctcctgacagcagttcccttactaatctatcttgtagactcaatcttaacgaatatcactccatgcaaagctctattatatccttcttcttattcttcaaagcaacaaatgtattttccccac

SEQ ID NO: 30577 - DNA, 207 bp, Gossypium hirsutum
  Clone ID: LIB3083-113-Q1-L1-B1
tagaactagagcatccggatgcctgcggctgttcggatccagaacttgtctaaattctatctaatgcaacacccgggtcgttttcgaggaaggggctcgtctatgattctggcgcgttagcttgaaaaacttaactggccgatttatatatcaatgcagtgcccctgcttcattgcttagacaccaaatgcgctttgtcccaaatgt

SEQ ID NO: 30578 - DNA, 141 bp, Gossypium hirsutum
  Clone ID: LIB3083-113-Q1-L1-B10
aaaatgttggtcaaagagtcgggtggttacacctgcgatctttccgaggaattattgctagtattaccctccgacccttttgatcaacttgatgtggaccgcaagatcaccatcattgatttttccacccgcgcgttttta

SEQ ID NO: 30579 - DNA, 206 bp, Gossypium hirsutum
  Clone ID: LIB3083-113-Q1-L1-B3
ttttctcacaacaaaactgaaaatgtcttgctgttcaggaaaatgtggttgcggccctattggcaggggtgccagggctggtaccggtgccgtatgttccctgaccttattggagaggcctccacctgaacttttggtcttggtgtggccactcaaaaaaatgcactttgagggatctgaaatggaagttggggttgaggttgatt

SEQ ID NO: 30580 - DNA, 286 bp, Gossypium hirsutum
  Clone ID: LIB3083-113-Q1-L1-B4
cacaaatggggtcttgcgattgtcactgcgagctttaagggacggatgctgacctacctaaagcacgggtggccaatgctggtataagagcctcttgatccctgacgatacagcgacacatcccatttacacttttgggtttgactgggcggcttaggttataacacatgcatgattttgaacactcatgcaagctgtgatggactcattcgaacctacactaatgataggctaccaatgcgcgtgtaagaacctatccgcccctaaagatacagcggccaacaca

SEQ ID NO: 30581 - DNA, 352 bp, Gossypium hirsutum
  unsure (1)..(352): unsure at all n locations
  Clone ID: LIB3083-113-Q1-L1-B9
gatttgggatttatttattaacaggtcatttgggcgtcaaattatcaggctcatgactcgctttattgatnntncctctttcatgttttttaaattatataaaacccctgctttgatggttaatatttttttttgaaggagggggatcaaaaaaaaagaggaactctgtggggggctctataaaaaaaatgaaaaaaaagaagccgacgctaaaacataccgacccatagacatgtgtgtagacccaaaaattctgtgtataatacaaatatgatcctctgaaacataacgcatgacaaaactagcgccattggacctaaactgtgtgataaaaagctggactataaaatca

SEQ ID NO: 30582 - DNA, 257 bp, Gossypium hirsutum
  Clone ID: LIB3083-113-Q1-L1-C11
ttcggtcgcgaaaaaccgggactcagattaccggttagatgaatatgattgctggaaggactgttattttggttttagatgtggtgttatttgacaaacgctttatgaaagagcaagtgtcattcctttaacgtggtgttaaccaaggatgcatccacatgtggggttgagggaagcagactatacttattctttgatcgagtgaggcagatagaacatagaatcggggttgcacatccggcttatgataaagaaaa

SEQ ID NO: 30583 - DNA, 307 bp, Gossypium hirsutum
  Clone ID: LIB3083-113-Q1-L1-C9
tcgcaccagagtttttaaacttgacaacagccaaggtatttcgtgttggcttgatggcaacaatggctcataattatatatttgatgaattgaagctttgtaaattcacatgttaacgacagggtcactgtatctttctactttgcggaaaattccaaagggtcactggcaaaaaattggtggcttgaatgtacaaagttccaagctgtaatctgtgatggggttcaattgcactgctctccattgtattatcatgaaatcaaattcactttaaaaactaacatttgagaaacatgagaatttcacg

SEQ ID NO: 30584 - DNA, 379 bp, Gossypium hirsutum
  Clone ID: LIB3083-113-Q1-L1-D1
cgagttgagtcgagcccagacagtgaccatcttctctcacatagagtgggcgataattgcggcacacatgtttgtggtgcacgggtcctcagcgctcgatattggtcctgggtctgcgatgtctgccggatcaggaactctgttgcatgcatggcgttgttgtctatactgccaacatgttaccaaatttacaagatggatagctgcataggtttccaggcgattccgtacttgattacatttgtttactgcaaagctaaggatttactgtgcgctggttagtaaagattcaacttccctcatttctattaacgcttgctgcgatttcattcaaacttttcacattggaactaactattactactgcccaaaaaaagaa

SEQ ID NO: 30585 - DNA, 259 bp, Gossypium hirsutum
  Clone ID: LIB3083-113-Q1-L1-D11
cttttcctttttgcatggataacttaactatgcatttttataaagaagtagggcaacatttaacacaaaattcaacttgttttgtatatagtttatgcgcccaaaaaacttacttcatataatttatccaatagagttgagctcttatacaatcattctttttggaagcttttttatttcctttaaccttcaccaatgactttcttacttacatcatactctgtgtcaattgtatcttcattttattctcatcaaatta

SEQ ID NO: 30586 - DNA, 147 bp, Gossypium hirsutum
  Clone ID: LIB3083-113-Q1-L1-D4
gggagaccggttacatctcaatgggacactacgctgattggggaagcaacaaatacaaagggggcccgtatgggtatgcagaggctaacaccgaaagtgaatgtaatgaccaaatccgctagctcacccatacgatgtttaaacccc

SEQ ID NO: 30587 - DNA, 131 bp, Gossypium hirsutum
  Clone ID: LIB3083-113-Q1-L1-D8
gaaatgctttttttcacgcctaaatttgctaatttactgaggcaggaaattaattttgcatggctcataccgctcaatagcttgagccatatggtaagtgggtatgggaacactggtgacttctataaaat

SEQ ID NO: 30588 - DNA, 317 bp, Gossypium hirsutum
  Clone ID: LIB3083-113-Q1-L1-E2
ctgctgctcaccatattgtcaaggcattaggaactacaaaaaatcttagtgatgatttgaggaaaatccttatcgatctcgatgcgcacttgtcattgataacttcaaatatcgatagcaagggaggaaagggattcgttgaagttgaggagcgactgaaacgagtagagaggaagattgtgatttgggagtcggatcgaataatgatatgggattctggacccaaggaagctttcgattatctagaagccgtagatgaagttcagacactgatagacagtttacgcggcttatccatgaatgaaaatcagaagcag

SEQ ID NO: 30589 - DNA, 374 bp, Gossypium hirsutum
  Clone ID: LIB3083-113-Q1-L1-E9
acgaaccatactgtagtaccattaatcaggtaacaaattcaaagagagtctacaaccacaagggttcagaaatggctattgttgactatgttgcggttgataccaaaaataaacagcatcttgagaaggttaatattcgttttcgacatccaagaaaccctatcattggtgataaatttagcagcagacatgggcagaaaggtgtctgctctcagttgtggccagatattgatatgccattctcaggagttacaggaatgcgccctgatctcataatcaatcctcatgcatttccttcaagaatgacgatagccatgcttttggaatctgttgctgctaaaggaggaagcttacatgggaaatttgtggatgca

SEQ ID NO: 30590 - DNA, 401 bp, Gossypium hirsutum
  Clone ID: LIB3083-113-Q1-L1-F11
tcaaaacagagtaggaaaaaaaaagaaaaaaaaggaaaagctaagggtttaaggtttaaagcttttattggtaagtcaattaagcctttcttatttaattttaatgttttagaagctttaaaaaaaatttgttgaaataaagttgaggttttggaagttcataagtttttaagcatggttcatgttgaacaaattgttgaattagggatttaattgaatgaatttcaagttagaattgattaagggattaaattgtaaaagaagctataagttttatgttagagggattaaattgaaagaaacttgagattagggttttactacgaatatttgatggttagggtgaatatgataggaaattgaataaaaataaagtatgaatcgagttataaaagtaaatg

SEQ ID NO: 30591 - DNA, 339 bp, Gossypium hirsutum
  Clone ID: LIB3083-113-Q1-L1-F4
gtttattttttttttttttactgaacaggctaggccaaccataccgtgtgcagataagcaactcatgaatcttaagaaggtcaccttacataattctttttaaccaaacataaactaacagggcatagaaacttatcctgctcttaaaccaaacacaaactaagacaggcataaaaacttatcctcctcttcacatgtagcaaaactaaattaagatttactgcaaaacaacctcgtccatgagaaaatattctcttccagtctagctagattggcgcaattcatgccgaacaaaatctgcttctgggggcactgatttataaacagtaggtcttagct

SEQ ID NO: 30592 - DNA, 148 bp, Gossypium hirsutum
  Clone ID: LIB3083-113-Q1-L1-F7
ctagtgatccccggcctgatgattcggacaggtggaacttaaaactacagagtctatttggcccaggcggaagcaccctaaaaggatgttttaagggaaataacttaaccagctctagtgtttgataaagtttaaacataagcttatc

SEQ ID NO: 30593 - DNA, 284 bp, Gossypium hirsutum
  Clone ID: LIB3083-113-Q1-L1-G5
ttcagattgaatctccccacttctcttgtattcaattgttttccatcagaattttcaaactcatttgggtgtttatagaaagcttgattctcggttgttatgcatggaagaagtgggagtttgtttgtttgatgtaatagtctcagatatggcattcatggagagcttgtcactgaaattggatagaacaaactggtcagtcttttcaggacttcaattctatggttgttcataaatatcgctctgggttttctataatggatattttttgggtttggtgatat

SEQ ID NO: 30594 - DNA, 121 bp, Gossypium hirsutum
  Clone ID: LIB3083-113-Q1-L1-H4
agacatacataacctaagaaaaagaccttgttgaaagcaagctattttttgggggatatttccggcaaagtacttcccaacctcagctaaaacttgggaaaccattgcactcagttaaata

SEQ ID NO: 30595 - DNA, 370 bp, Gossypium hirsutum
  Clone ID: LIB3083-114-Q1-L1-A11
tgaaaggaagatctgggctagtttgacgtggtagagttgatggcagtaacagaggcagaaaatcctcttgtaggagaaatcacttgcggttcttcactgcagaaattgcaggaaatttgggatgaagttggtgaaagtgacgaagagagagacaagatgcttcttcagatagaacaagaatgcttggatgtatacaagaggaaggttgaacaggctgcaaaatcaagagcgcaacttcttcaggccttgtcagatgctaagcttgagctttctactcttgtatcagctctcggggacaaaagtttcattagcattcctgagacgacattgggaacaatcaatgaacaacttgctgctattgcaccagcac

SEQ ID NO: 30596 - DNA, 407 bp, Gossypium hirsutum
  Clone ID: LIB3083-114-Q1-L1-A6
atcttgaatggatctacttcttttgtacaacttttacagatggttggatctgccaggctgcatgaagttcagagtcatcagaatatgtctcctaatgagaactcaaatgtcagaacaagccaattccagaatcaccaaagagaaaactgtgacaactcaaatggtcctaaaagcttcacaagggaagaccttatgccatcagctaattaccatccatatcttactctaaactcagaagtaagagaaactggacagtttgagacgttaaaagaagaaacaagagtgtctgaggcttccaagacgatagatgaaaacatgataaaaagactaagtccattaacacaagaatctgcatctcaatcaatggatcaaaatgacaaaaccaggtctgtacaggtgacccaaca

SEQ ID NO: 30597 - DNA, 397 bp, Gossypium hirsutum
  Clone ID: LIB3083-114-Q1-L1-B1
gggaactggaaaagatcttctctgctattgcattgaagtgctgccctagtactgttagctcatctcggactagatcgcagagtctattattgacttcatccaatgatgaagtggttgttcacggttcacctggtatggagctcaccagtgaacaaactaaggcgaattgtcactgggaaactcttgagcactatcttgagaagtacaaaaactttcattctagattgccagtaatagttgctgaaacgcttcttcgtactgatcctcatattgaattgcctttatggctggttaaaatgttcaaggaaaatcagagggaaaggccttggggaatgactggtccaaagccaagttcagcatccttgtttcgactatatgttgattatggtcgatatac

SEQ ID NO: 30598 - DNA, 375 bp, Gossypium hirsutum
  Clone ID: LIB3083-114-Q1-L1-B12
ggcaacccatttttactatgccctattagtaaagcatttactttttgcatggcttgctgagcttcttgcccagacaagcataaaaaataccatcgggcaaacaatctttgatggagggcatacaccaagaatacaaggcatataccccgcctatgtacagagaacaacatgtgccctgtcgtgtaaaataccacccccaactaacaaggatttaattacccttctttggaacccccaaaaaatacctcttagttaccttgggaactcacaagatggcctacctaaccaggattggatttcaaaaagaataaaataaaagagctttcactatcctttggggataggaaaatattttacgcggaacccacaatctgg

SEQ ID NO: 30599 - DNA, 385 bp, Gossypium hirsutum
  Clone ID: LIB3083-114-Q1-L1-B4
catcttttctttcttttgtaatacagctgctaagggagaaagcaagcaaagcaaacacttgaaactaaattctgcattcaactcttgaggtgcaactaacttactttgccaaatacaaagcaacaaaaaaaggaagtgaagttcttgaggaagagtaatttggagtttttgagagtttgagctttgtaaacagttattcgaccgtgtatataaacaatggatgattatcttgatcagtatttctcatcatcatcatcgtcagatgtgaatgtcaaggaaagatcatattgggtccataatgaacctgatcaaccaaatgaagtgtttcctagttcgcgcttcaatagcatcgagtgtttagctgcacaaaatacgccacctgtag

SEQ ID NO: 30600 - DNA, 374 bp, Gossypium hirsutum
  Clone ID: LIB3083-114-Q1-L1-C12
gagagggctatacgccatgcaatacaggaacgcatacctattgtagttgttataaacaaggttgaccggctgataacagaacttaagttgccccccaaggatgcttatcataaactaaggcataccctggaagtaattaataaccatatatctgcagcctctacaaccgctggtaatgtttcagttattgatcctgctgctggaaatgtttgttttgctagtgcaagtgcaggatggtccttcactttgcagtcatttgcaaaattatgtgtcaaactacatggaattccatttgatgctgagaagtttgcatctcgtctttggggtgatatttattatcatcctgataccaaggcttttaaaaggaaaccccc

SEQ ID NO: 30601 - DNA, 145 bp, Gossypium hirsutum
  unsure (1)..(145): unsure at all n locations
  Clone ID: LIB3083-114-Q1-L1-C5
gagccgggnncgaggggacgcaccacgnggaccgggggagagcgagaggagacagcgngaacggggacgaaaaaaacnncaccggaaggaaggagaacgacangcaccaaggcgggaaccccaacaacgagcgcaaccgccacga

SEQ ID NO: 30602 - DNA, 405 bp, Gossypium hirsutum
  Clone ID: LIB3083-114-Q1-L1-D6
cttacacttgtcacttaactttcccacaccggaaacaagctgaacaaaatgttttgctaaaattgctcttcaagccatcaagcaagctagtgcaatcaaggataaagattataaacaactcacgatttctactatttaccaggatctaaaatgttgcaaatcaattcataacgagtatgctcttagaatgaatcacgtaagtcctacatacacaactacccaacaggataaattccgccctgtttatgtatcttcattggtttttgatggtaaaacttatcgtggcgaagttgccggaagcaagaaagaagcagaacagttagttgcacggattgccatcgagtctcttcttggtactttttcaagagctagttttcacatgtagctttgagctttgtccttgta

SEQ ID NO: 30603 - DNA, 355 bp, Gossypium hirsutum
  Clone ID: LIB3083-114-Q1-L1-E12
ctcctttcttccaaatgccgtccacattttaccctgactggcagcctcaaagacgacttgttagggctcattccagcgaccacgaaaatcaccaatagtactactactccaagcaagtattttccttacacgttcgattttcttgagattcatccatacggctagctcaatgtcctttaaacttgcatgagtggaggggacgcccatgctaatgagtgctcccctggcccatgccaccgaaagctgtggagaagtctaacacttttcctacaccctgcactaattccttgagcggtactcatgatccacctgatcttccaatttgttgtaacgacataacatatctttaattcta

SEQ ID NO: 30604 - DNA, 218 bp, Gossypium hirsutum
  Clone ID: LIB3083-114-Q1-L1-E7
cttactgttgaatctgctggcgggcatagtttcaattgcatttctggaaagagtttaggaagactcctacaagagattttgtggaggaaaggctgcaactgtttcggccaaaagaattaatagagaatttgggtcccaattgaaggagcatattccgaactttgtggaccatactcaaaaaatcaacaaacttgcttaagagaaggctcacgtttttt

SEQ ID NO: 30605 - DNA, 386 bp, Gossypium hirsutum
  Clone ID: LIB3083-114-Q1-L1-E9
aaaaaatagatcttatggtggtggtaatcaatcaccaagacccaaattatgaaatttagtcaaaaggaaggttttgagaaagagaaagacaaaggaggggagggttctttatgaatttgattacctgaaatcacttgctttgaggtgttttgggatgggttctgtgttttccttttatgttgtgtgattaaaaatgttggggttgttgaaagcatgtttcttttttgaggaaatatagatcagttatagaaaggatgggttttggtcatcaatctagggaagtagtggaggaaaattcatcaaggaagaagaaagatggagaggaagaagaaacaggatgttgggttaaattaaggtttatcggaagttgcatgtcttcaagatca

SEQ ID NO: 30606 - DNA, 324 bp, Gossypium hirsutum
  Clone ID: LIB3083-114-Q1-L1-F12
actgaacaatgataattttattaatcacttggagatattgcatttccaagcaatgaaactttattttttgcaaacaaggggtgggatttttttttttttttgacaacaaaaagatgactgcaagagaagccaaacaaggggggggaaatatatatatatattcttattcttattcttatcattgggggcattttcatcttttgcaatgaaactttatcaagcccttccagagatgatatatcttcatattatcttttcattaaaaagcaatcatcctcatcccattcaaataatgccttttaagtttcctttttcgaacgttac

SEQ ID NO: 30607 - DNA, 200 bp, Gossypium hirsutum
  Clone ID: LIB3083-114-Q1-L1-F4
cggcttaggtcttttttttaacaaatgatttccattactaggatgatttaccagtaacttgtttgggaaatttaggcaggattaggaaaacttttatcatactcagtttgttgcttgttaacttttttttaacttgatatcaacagaggattttcttcagttgtgtgcgggaagatcctttaatttgctattgcttactt

SEQ ID NO: 30608 - DNA, 392 bp, Gossypium hirsutum
  Clone ID: LIB3083-114-Q1-L1-F7
gcaacaaccattctcttctctccagatgcagatctacttgggcggggtgaaattatgatttccaattatatttctcaacaagatgactcgctattgtcagacgtctcaagctgttgaagccttttcaacagccgaagagctgaggaacgcctgccctttaacattagctaaaagctattgcatatgatccatggcaacatgttggtaatccaaatccctttttgtttctgcacaaaccatggcattatgtttttcgatttcaaaatccatccattcattactacaacaattaccgagtagtgagaattttatgaccacccacgctcaaacttttttttttacggcttgcctgttttacttactgataacaatacctacaatctttcttttac

SEQ ID NO: 30609 - DNA, 411 bp, Gossypium hirsutum
  Clone ID: LIB3083-114-Q1-L1-G1
gcaacatggaggcactacccttctgatgcagatctacttgtcaggttcgaaattatgatttccaataatatttctcaacaagaggactgctcattgtcagaggtatcaagcagtagaagccgatacaacagccgtggagctgaggaacgcctgagcttcaacatttgcgaaaagctagtgcagatgatgcatgggaacatgtgggtaatccaaaaccctttaggttctgcacaaagcatggcagttgttattcggtttcaaatccgaccatccatcactacaacaatcaccgagtcgggagaatcttcggaccagccacgctcaaactctatttttcacggcttgcatgttctacttgctgatgacgatactgtcaatcgtgctgtgactggaaagcttcttgagaagttg

SEQ ID NO: 30610 - DNA, 420 bp, Gossypium hirsutum
  Clone ID: LIB3083-114-Q1-L1-G4
caaaattatccctagtcttacagtgagcgtaacacaaagacccaaaattcttaggtgaccaaaatctggttgtcgaccatagagagcctcatatggcgtctttccatttaaacccgaacaaggagttcgattaattaggtaaccgacagtcaaaatgcactcaccccagaacttgataggaagcgatccttgaaatctaagagcacgcgcaacatttaagatgtgcctatgctttctttcgactctcccattttgttgtggagtgccggtacattaagattagaaaataataccatgttccataaaataattctccatgcaagtaaattcttttccgttgtcacttcgtaccatttttacttgtttatcaaattgtcgattgatcatagtgaagaaatttttgaacactgaaggcacttc

SEQ ID NO: 30611 - DNA, 244 bp, Gossypium hirsutum
  Clone ID: LIB3083-114-Q1-L1-G5
atttaccttccatttccatttacttctatattgctacgtttttggaggaggggtgagcgaaaatgagagagtacctttcagtccacatcttgcaagctggttttcacgtcggaaatgcctgctgcgaactttactgtcttgaacaccggatccatcccgttggccaaaagccaagtcacatgactgatgggggcagggatgttgttcaaaacactttatgtactgaacctagcgctggaaagga

SEQ ID NO: 30612 - DNA, 385 bp, Gossypium hirsutum
  Clone ID: LIB3083-114-Q1-L1-H9
gaaggccagaattaaacccaaaatggatagctttgttgattttggagaaagcttgtttgtcaaaaatttctcttgaagatgcaactggcatggtaaggaaaactgggtgcaatttgaaggaaaaactaagagagcatggaggacttgatgttgtctttgaagtggctttggaatgccattctgttttggagggttggttggagcagagttcatcttctcctcttatagaagataaaaaagatgtgcagagcttggtgctgcttttaaaatgtttgaagatcatggaaaatgctgcattcctcagtagcgacaatcagagtcatctgttagaaatgaaagggcaattgaactctcatggatctagaatatcttttacaaagcttgt

SEQ ID NO: 30613 - DNA, 309 bp, Gossypium hirsutum
  Clone ID: LIB3083-116-Q1-L1-A11
cccgcttctttattttctggcatttctgctaaatgcgcctgttcttgcgagaagaatgttgacatttggagaagcaaagctcagaaactgaagatggttcaaccgtatgacgtattcctttcaaatccccatgtttcagcatcaggaaccattggtgctgttttgagtgcaaattttggggagagttcggtcagattagttgaagatgctaaagatattaagcagttatcatatcataatccaactctaaaatcgtaccctctaggggatatatttgcatccatgtcatttacggcccagcacgggaac

SEQ ID NO: 30614 - DNA, 313 bp, Gossypium hirsutum
  Clone ID: LIB3083-116-Q1-L1-A2
gaataccaaacattcatgattcatctatgaatgaagaaatattaagaaactacagtaaaagaaaattaaaaaaaaaaaaacaatgcataaaaacattgaatatagagcatcagatcgacgtgaatagccccatcattcagtttaagcatcagaaaccacactaaactcatcatcttccaatggagctggcaagtttagatctatcaaattgttgtaaaatttgcctgaatttggagtagcagcaagcaaatgggatctcttgtgaccaccgagtgcttgtcccgaaccgaacactctgtaacacaatggacac

SEQ ID NO: 30615 - DNA, 256 bp, Gossypium hirsutum
  Clone ID: LIB3083-116-Q1-L1-A3
tacgttcaaaaccaaacattgataagggagctattaatgaagaagggttaataaactacagtaaaagaaaattaaaaaaaaaaaaacaatgcataaaaacattgaatatatagcatcagatcgacgtgaatagccccataattcaatttaagcataaaaaaccacactaaactcatcatcttccaatggagcttgcaagtttagatctatcaaattgttgtaaaattagcctgaatttgtagtatcatcaagcata

SEQ ID NO: 30616 - DNA, 329 bp, Gossypium hirsutum
  unsure (1)..(329): unsure at all n locations
  Clone ID: LIB3083-116-Q1-L1-B1
ttgcactgtgttttttcagaagggtgttaaaacgcggagatatcaggccgaggggggcctagtacaccatctccctcttccttacctttgaaaaacagaacaatagcttgtaaggctattcatgttcttatggagcatcataagacttccgcaccgccttcttcaacaaccccttcacctacaacttcagcaccatctcttattccataggcataatttgagaaaccttacacgaatttgatagaacaggattccctcacagggtgaacccatcattttcaaaataaatgattttgcgatagtagcatcaatattctncacctttcttt

SEQ ID NO: 30617 - DNA, 352 bp, Gossypium hirsutum
  Clone ID: LIB3083-116-Q1-L1-B12
ggaatcttttttggaaaagatagcggagaagatccatggtggtgatttatcgtcatcgttgggggattcctattactactagttatccaatttctctcttatatacatggtttttcttattctttatattagatctttatctttaatttttattttttctcttcttttatttcattttctttttttttaattactgtttttctcttctatatattatttattttttttttatttattttaatttatttatttatttctttctcttttttctttttttcttttatattttttttttttttatttctatttatattttttttatttatattttttctttattttttatattttt

SEQ ID NO: 30618 - DNA, 320 bp, Gossypium hirsutum
  Clone ID: LIB3083-116-Q1-L1-C4
gtgaagcgcctacaagccaggaaacatatatgtggaatgactggtgatggggtcaatgatgctcctgctcttaagaaagcagacattggcatagctgtggctgatgcaaccgacgcagctcgtagtgcttccgacattgtcttgaccgaacctggtcttagtgtcatcatcagtgctgtactaaccagtcgagccatattccagaggatgaaaaactacacaatatatgcagtctccattacaatccgtattgtgctcggtttcatgttattggcattgatatggaagtttgatttccctccattcatggtccttattat

SEQ ID NO: 30619 - DNA, 394 bp, Gossypium hirsutum
  Clone ID: LIB3083-116-Q1-L1-D11
agattctgagcaactagctattctggggatagcatttacaattatggatgaactgttaccaagtatggtggttaaaatttggagtccaaagaatgaaaaccaggaaccaggaaatgaaaacattgttcctaatgcaagtactactaccgaattaaaagactggaggcgtcagctccagtactcttttgacaagctcagagatcacttctgcaggcaatatgttttgagtttcatctattcaagagaaggtaaaacacgattaaatgcacaaatatatttgggtggagatggagaagattcacaatgggacactctgccttctttgccatttcaggcattatttgctaagctacagcagttagcaaccgttgctggagatgttctacttggaaaa

SEQ ID NO: 30620 - DNA, 322 bp, Gossypium hirsutum
  Clone ID: LIB3083-116-Q1-L1-D2
gttctgtgcttcagacttcaaagctaatgggaaatatatattgtttaaagaaaaggaacttaatgtcacattcaactgtgaagaatgcacatctcttccagctggtactttcaatacagataccaataatgataataaggggaatgaattgcgtgttgctataattgtactgattgttctagtggcttcaactgtaacaatatttggactgatgatggcttataaatactggcaaaagaggaagaggcaacaagatcaggctcggttcttaaaactgttcgaagaaggggatgacctcgaggatgaactagagcttggtaat

SEQ ID NO: 30621 - DNA, 321 bp, Gossypium hirsutum
  Clone ID: LIB3083-116-Q1-L1-D5
ttcatgatttgccacctccggggaaaaagggtcgcacttatatttgtagttgcatgatttttctgcgtcccaaagatggagctaaacttgtaatgaagaaatggatcgaagaacttcaagctcagccatggtccaaagcaaagaaagcaaatgatcagcctgcttttaactgggctctaaacaaaactgctggtttggtggatctctacctgcttcctcaggcagcattcccaacaggaggattatacttcaagaaccagacatgggtgcagcaaaccaagggaatgcacgtcataattcataataattacatcaccggct

SEQ ID NO: 30622 - DNA, 244 bp, Gossypium hirsutum
  Clone ID: LIB3083-116-Q1-L1-E12
tacctccttttttttcacataccgaactctacttgggctggtttaacaacaaatgtggttgcaaaaaacattatattttcttcttacccaattcactgacctatcctcacatcatcattccatttcctagtcaataataacactatagaattgtatgaacaaattatctttttccaaaacattaacttttcctactttttttattgaatccctaacaactttaaattcattttttttctacatt

SEQ ID NO: 30623 - DNA, 266 bp, Gossypium hirsutum
  Clone ID: LIB3083-116-Q1-L1-F10
gtcaatgcttttaatttaccacccgagagagctttagtggccattctaataaaaaggggctgtgaacaatttaaaactgtcttattatcatatgtaggactatttacggcctctcacttatttggttttccaaaaatttaatatttttgtgtaatttactagtttatttttttggtattttgatctattctcttttttattattttcttttttatattattttttgaactagttttattttttttacttttttttcctcttcttat

SEQ ID NO: 30624 - DNA, 322 bp, Gossypium hirsutum
  Clone ID: LIB3083-116-Q1-L1-F2
tggacttgatataattggtgttcagactgttattaattatgcttgtcctcgagatattacaagttacgttcaccgagtcggtcggacagcaagagctggtagagaaggatatgccgttacatttgttactgacaatgaccgatctctattaaaagctattgcaaagagagtaggttcaaagttgaagagccggattgttgtggagcagtctatcactaagtggtctcaaaaaattgaggagatggaggagaaagtcactgaagttattgaagaggagagggcggagagagccctaagaaaggctgaaatggaagcaacgaat

SEQ ID NO: 30625 - DNA, 319 bp, Gossypium hirsutum
  Clone ID: LIB3083-116-Q1-L1-F5
tggtgcaaccttgcaggaccaactgcctgtccgaggagagtgccatcactttggtcgacgggaaggttgtgcaagacatttgcctccgattgagaaacgtggagtgcggtgaagtggaaatccaacttcaatggattgaacttcccgggtctaaaggtttattatgaagtgtgtgttcataaaaatgctgtttcgttccatatcgttatgttttttgttgcaggtttggggagcttctaataccgggcaccgtttgagttttctgccgaggttggttttgttctttttgaaacagtttgaatatgtagttaaaatatat

SEQ ID NO: 30626 - DNA, 316 bp, Gossypium hirsutum
  Clone ID: LIB3083-116-Q1-L1-G5
tgtttttttttttttttttttaacaaacaaaaaaatcaaatatttggaatcacaatcacaaattacaaacagtaacacaagcatcgcatgcaaaaataaaatccatattcaaattcccctattaatagcccagaaaacagtctttgtctaaaaacccattgccaaagcatgaattttcaagctcactttaccagctgcattagttcccttaaccgcttgtttaggtctcgttacctaacctttatttttcgtatactcctgtatttttttttttatctgtattttttttttttttttattatttcttttttttttt

SEQ ID NO: 30627 - DNA, 306 bp, Gossypium hirsutum
  Clone ID: LIB3083-116-Q1-L1-G7
ccccattcaaaaagagtctggcaagtctaaaccctagtttcaagcgaaaggagaaaagaaagaagaaatgccgagagaaatcataacactgcatgtgggacaatgcgggaaccatatcggaatggagttttggaaacagctctgcctcgaacacggcatcattaaagaaggctttcttgaagatttctcttctcatgtaggtgacaggaaagatttatttttttactaatctttctattttgtattattttaccatttgtctttactttttttttttgtatcctttatttaataattgtttttttt

SEQ ID NO: 30628 - DNA, 300 bp, Gossypium hirsutum
  Clone ID: LIB3083-116-Q1-L1-G9
tggaggtggataagaagccatcattattttctcgtacaattcaaatggaaatggcaaaagctcttgtagactttcggaatggattatacacatttattaaactattatatgggctaggcctcgttcacaatttttgacatttatagtctgatatttgttgtttactggattttgttggttcattttttttttttattatatttatgttttttatcttttatttagtcttattatattttttttatatttattgtcttgatatatatttttttatttttttatttattttttatttttttt

SEQ ID NO: 30629 - DNA, 317 bp, Gossypium hirsutum
  Clone ID: LIB3083-116-Q1-L1-H3
ctcgtgccgttttccccttttgtctccgacggttggggttccccattgcccgccgaaccgccatcgtacccggtggccgatgaagcgcgaagaccggctttttagccccgtttcaaaaggaaatcgaaggtctagccttcttgagccaaaaaaaacgaaagaagagatcctcgctccttttcgatcctgacgacggaggaaagacctctgacgtcgtaaccgcgggcgatcccagtaaggtcaacgaggctgtagatggccattttggtgcaacggggccgaatctcgggcgtgtgcgtgccgagggcgcacatgga

SEQ ID NO: 30630 - DNA, 327 bp, Gossypium hirsutum
  Clone ID: LIB3083-116-Q1-L1-H4
gagagagagagaactagtctcaagttttttttttttttttaagtaacaaatgattcacatttttctgtttttgcttctgtatatatccaatgataaggtctttttttttaatttattgatgcagttagattgattttcctgtgtttgatattatctccctcttagagatcagaattctggcattgtcctccttttgaggaattttctttagctgttcttcatcatgaagggagagacttcatggatcagccattgctttgatgacatgtcaaaagaagttggtggcttagattcgttttcggaacttattgatgaaggtaacaaaga

SEQ ID NO: 30631 - DNA, 326 bp, Gossypium hirsutum
  Clone ID: LIB3083-116-Q1-L1-H6
cgaatcctcatcgggtctccatatctacgacctctccagcggtcactataccggttcagttcactggaccgaccaggacgatccacggatatacaaagcccgagtctgcgccatcgctaactcacccgactcggtcttcgtatcattcgattgtccccatagagaaaacagcgtcctcgttatcgacaaatcaacgcttcaggtctcatcagagctgactcgccaatcaggaagcgccgccaagaacacattccccggaaaactgacgtggctaccggaaactggtttggttatcggaagtgctgtcacatgtggggcatttggtt

SEQ ID NO: 30632 - DNA, 294 bp, Gossypium hirsutum
  Clone ID: LIB3083-119-Q1-L1-A10
ccttccaatatttccttatactgaattcaactcctccaatggagtccttccaaatcaccatatactctgttctttcttggattcccttaaattacccatctttcaaaacctacactagcaccctagataccattagattccattaagccaccaacacaacagcgttaccagaaagtagtatatagggaaaaggaaaacagcgatggaggagaggcatgttttatttgggaaatacgagatggggaggctgttagggaaagggactttcgccaaagtctacaacgggaaagaatt

SEQ ID NO: 30633 - DNA, 296 bp, Gossypium hirsutum
  Clone ID: LIB3083-119-Q1-L1-A6
gacaaaaaaaacacaaaaaagagtgggcaaaatattatttttataaaaaaaaaaactctttcagctactgataactgagagaaacaaagctaaagccaacggtttttttttttcagttccacaaacaataaaacaatcaacttcttttcttctctgtttcaatttttttttggcgttttgaaggttgatttttttcttgagttgaagttcttggactcggtaactcagtaatggcaattacgagtccgagtcattgcgtacgtgttttgattcttgtgatgttattatctccaccg

SEQ ID NO: 30634 - DNA, 293 bp, Gossypium hirsutum
  Clone ID: LIB3083-119-Q1-L1-A8
caactacgaatcgatccaaatacggtctgaagatccgattcatcaaatccataaatgctgcaggggcattagtgagcccaaacggcatcactaagaattcgtagtgaccatatctcgttctgaaggcagttttaggaatatctgaatctcgaattcgcaactgataatagcccgatctcaaatctatttttgagaacactgaggctcccttcagttggtcgaacaaatcatcgatgcgcggcaacggatatttgttctttatcgtcactttattcagctgacgatagtcaatg

SEQ ID NO: 30635 - DNA, 296 bp, Gossypium hirsutum
  Clone ID: LIB3083-119-Q1-L1-B12
agagaaagagaagaaattgaaggaagctcgtgaactagaagagaaagagaagaaattgaaggaagcttgtgaacgagaagagaatgagaggagattgaaggaaattcgtgaacgagaagagattgagaagagattgaaggaagctcgtgaacgagaagagaaagagaagaagttgaaagaagctcgtgaacaagaagagaatgagaagagattgaaggaagctcgtgaacgagaagagaatgacaagagattgaaggaagctcgtgagcgagaagagaaattgaaggaagctcgtg

SEQ ID NO: 30636 - DNA, 294 bp, Gossypium hirsutum
  Clone ID: LIB3083-119-Q1-L1-B3
cttctttttcgcttctctcaaacgaacgtaacaggaacagtaacagaatcatgataagtggcggattccaacataaaaagttaatagattttaaggactgtgtttgaggtccgtgttttccgttttttaacctttgctgcaatttccaatacccaatccacacaccaaaatattagactgtcgtgtccctcacacactcggtagagttaaaaagacttcagagagtgaaggatagaagaagaaagcaaagggaaagtcaattgaatttttttttaaaaaatgggaaaatccact

SEQ ID NO: 30637 - DNA, 203 bp, Gossypium hirsutum
  Clone ID: LIB3083-119-Q1-L1-B7
gctcataaccattaacctgccggcaggtttgctttcaacccattgcattctataagaaggtgagggacaatgtactaaacgatgcactacaaagcatgtacatgtgcaaaacaactaggggcacacaacttaatatgattacgccttattcgaatgtgatcatcatggttcttatggatataggcaagcaccgatccatctta

SEQ ID NO: 30638 - DNA, 192 bp, Gossypium hirsutum
  Clone ID: LIB3083-119-Q1-L1-B9
aaaagcgaaaacccgtattccaaacagttccgttcaactgaaaaaatagattttaaaaatctaatcattaaaagcaaaatcttaggattcccaaagtccgggctttacaaaaagggtacatataacggcacgggcttacaactttgatctaaaatgactatggggccccgtgatatgcttatgcttggggcc

SEQ ID NO: 30639 - DNA, 295 bp, Gossypium hirsutum
  Clone ID: LIB3083-119-Q1-L1-C10
ggacagacaactcgtgacaatattttcagctcccaattattgtggcgaatttgataatgccggggccatgatgagtgttgatgaaagcctgatgtgctctttccaaattcttaagcctgcagataaaaggtccaggttcatttgagagatactactctgtctctgttcctacattgaactgctgaatgattcgagaagaaatgtccaaagattaaggatgctgatgctgatgctgattttgcagctccatgtgataatgaaatatgaccatatccttccctatatcaaagggtac

SEQ ID NO: 30640 - DNA, 273 bp, Gossypium hirsutum
  Clone ID: LIB3083-119-Q1-L1-D3
ctggaaaaacaaaactttatttcaggctttgatctaaacttgatttcacaagccattcatgcagggaaaacagacgtgtaagaattttatgataggaaatcatctcgtggaaatcttcattgcgcaccgctgactagaattcattgatttccactaagtttcaaataaatgcgtgcttgtgtgggactgtatgattgttttatagattatctaccgtcgacgctgttaacaagtgagaccaattcaacgttactggattcttcagctaccgtc

SEQ ID NO: 30641 - DNA, 290 bp, Gossypium hirsutum
  Clone ID: LIB3083-119-Q1-L1-D7
acggaaaggagtggaagctaccaaaatcatcagactggtgcacgatgccttttccaaggagctcggtcctgtctctttaactgcccaaggtaaagttcctgtaccagatgggttaacgcttaatgagaaccttggtgatttggaaacgatatgcggtgatattgaactaccttcatcgaacacattttcttttggatatccttctgaggagaaggatgtgtcgtctttctccaaccttcagattaaagaagactcgggacaatcgaatgagtccacttctttgttagcgg

SEQ ID NO: 30642 - DNA, 296 bp, Gossypium hirsutum
  Clone ID: LIB3083-119-Q1-L1-E10
ctcctgaggaacagcttctgaagacttatgcatgttacttgtccacctcggctggtcctgttatgggagttttatatttgtcaagtcaaaagcttgctttttgtagcgacaatcctctgtcttaccaagttggtgctcagactcaatggagctactataaggtggctattccattacatcaactaagggcagtgaatccatcaacaagcaaggcaaacccagctgagaaatacatccagataatatcagttgacaaccatgaattttggttcatgggctttgtacactatgacagt

SEQ ID NO: 30643 - DNA, 288 bp, Gossypium hirsutum
  Clone ID: LIB3083-119-Q1-L1-E11
atttgaactgccccggtggaagtacatattctgtcttggcaatttacgattgcatgtcttggataaagccaaaggttggcacagtttgtttcggagtagctgcaagccagggagcacttcttcttgctggtggagagaagggaatgcgttatgcgatgccaaatgcacgtattatgatacaccaaccgcaaagtggatgtgggggtcatgttgaagatgtcagacgtcaagtaaatgaagccgttcaatctcgttataaaattgacaaaatgtacgcggctttcaccg

SEQ ID NO: 30644 - DNA, 297 bp, Gossypium hirsutum
  Clone ID: LIB3083-119-Q1-L1-E4
ccgtgccagaaatagtgaaaatttacaatgatccaaccaaaagagggataaataatgtaaaagttactgcatccgatgatctaactcgtgaaggactacaatctaaattccgtgatttagtgaaccaactttatgacaatggcaatgacaaagtgaaatgcaaagatttcccaggcttggaacaggcattgaagaatgctaggggggaaatcccagagtacctcgaatctattgccatccaaatcgaaaaagatcgtggagaaactactgaatttgttctgatcaacattcaaattc

SEQ ID NO: 30645 - DNA, 298 bp, Gossypium hirsutum
  Clone ID: LIB3083-119-Q1-L1-E5
gtttcaagctcaaattctttcgtgttataccatcttttcaattttgtcgatcaaaaaaaccttcccatttaccggagactccaggtccggtgacccaccggctatctccggtgaatcctaaagcattagatatcttttatccgaacctccctgcaccgccgccgtcgacaccggactactcttttttcaaatgccatttgtcaccaaagatagcgacagttggctgcggttgccgagcaagatcatcacacactcaatacttaccctcagtggacgttagttttgagtcacctgatta

SEQ ID NO: 30646 - DNA, 292 bp, Gossypium hirsutum
  Clone ID: LIB3083-119-Q1-L1-E7
aaagactgggtggttccagatgaggtggtggagatagagaaggagaaaccgattaatgttgctaagaaaattgaggataaggacttcgagtcgaccacaatggataagtaagcaacgtggtacgtcaggcattaaagattggggtggtgtgaggatcggattaaagtccagtgttcttttggatgtggaggtggatgatgaatgtgcgcatctggcgcaatttgtgtagggattgggagatgatagaccggtggggatatcaccgtaaagcatgggcagcaaaagtgtaact

SEQ ID NO: 30647 - DNA, 295 bp, Gossypium hirsutum
  Clone ID: LIB3083-119-Q1-L1-E9
tctctctctccctttctttggtttccaagatataggaggatatagcacacagcagctatgtcctctcaatcataagcagaaaattagaaaaagagaaatagaaaaaaagcgtgtaagaattaaattcctttgccaaacatcaagaaaaataaagtagggggaactggaaacgtgctctaaaggagacaagttttgctttacttgttttttttttgtatgtgtaaatctcgctagaatttcgtgtggtgggggagtttgacaagtggggaagacggtggaaccataacccagcttt

SEQ ID NO: 30648 - DNA, 184 bp, Gossypium hirsutum
  Clone ID: LIB3083-119-Q1-L1-F6
acccaggcgaaatcgggggtttttttcgttaatttatgaatggcgggggtaaccccataaatgttgggggattcaaacgacaacccaaaccacgcctacttaccgggttcggacacacaaagtacaaatttcggatgggttcacttttggaattgcgttcgcatcgagacaatcattattcttc

SEQ ID NO: 30649 - DNA, 295 bp, Gossypium hirsutum
  Clone ID: LIB3083-119-Q1-L1-F8
gttctcagtcatggagattgggtgccactcttagcacaggtgaatgaacactcaatgttgtcaatgctgagaaatgcaacctgcacattatcaaatttttgcaggggcacgccccagcctacatttgatcaggtaaggcctgcccttcctgcgcttgaacgtctcattcattcaaatgatgaggaagttctcactgatgcctgttgggctctatcgtacctttctgatggtacaaatgacaaaattcaagctgtgattgaggcaggagtttgtccacgacttgttgagctcctac

SEQ ID NO: 30650 - DNA, 273 bp, Gossypium hirsutum
  Clone ID: LIB3083-119-Q1-L1-G11
gagactgatgttctttttggggggaattaaatctagcaggctcttcaaccattgcaaatatttgcacctaggcctccagctgccagcaccgacaccggcaaagcctaagaataagacggctaccactgctgctgatagccccgatgtcaccccaacagataactccgacgctggcaccttgcaaaacgtggacatgaaagaagcaacccctctagttaaagcgctcccttcgccaccatgacaatggataaacgaagaatacacaggttttga

SEQ ID NO: 30651 - DNA, 295 bp, Gossypium hirsutum
  Clone ID: LIB3083-119-Q1-L1-G2
cttccacgttgactgcatcgacatgtggttttatagtcactctaactgtccaatgtgtagagctccgatccaggctgttattccggtcaacccaccgaaaacattagagcagaccgccgctacagtatctgaaacagccctaccattgcctcctggtgacgatattgaagcgaacagctttttccctccttcttgctcgtcgtcttcgtcgtcgtcattggagatggaaagttgccccatgaaacgactagagctagtgggactgggaactgttgtggaggtcaccatcggaact

SEQ ID NO: 30652 - DNA, 301 bp, Gossypium hirsutum
  Clone ID: LIB3083-119-Q1-L1-G4
aattagttcccgttttatgttaaatgcatcaaaagaaatccgggaaacatcaagagatcggaaaagcaagcagcgactgcatctcttccgatttcgaccattccacttctttactaatcccttccttggatgatcatcgattcaatcgaaacaacctacaaaagaatccaaatgttcccactcaaaacaggtctcatctcatcatccaaatcccatcctcaacgaacccatcaccaccaccaccaccaccatcgacaacgacaacccatcatcaggaaagacctaatgacttttctccaac

SEQ ID NO: 30653 - DNA, 301 bp, Gossypium hirsutum
  Clone ID: LIB3083-119-Q1-L1-G5
aaaacagatgtcactgaaggtatgaacagaggttcacatactcctgagaagtcaccagctattgttggacattctaccaaaggaacagataaaaaagcatcgcctactggttctaatgatatgatggaaacttttaatgtagtaaaggccgagaaggatgttgaggctgatgttcgtagtcaagccagtgacaaagagaagcgaaaacctgattgggaaatggtccctgcccagaaagttgagcatatggaggagaatttagaaggtagtgagtgtcctgaaccatactgtggactatctc

SEQ ID NO: 30654 - DNA, 298 bp, Gossypium hirsutum
  Clone ID: LIB3083-119-Q1-L1-H3
gcaaagttgaggatgttgatgaggagaaggagaaggaagagaagaaaaagaagaagattaaggaggtgtcacatgagtggtcattggttaacaagcagaagcccatttggatgaggaagccagaggaaattaccaaggaggaatatgctgctttctacaagagtcttacgaatgactgggaagagcatttggctgtcaagcacttttcagttgaggggcagcttgagttcaaggctatcctctttgttcctaagagggctccttttgacctctttgacacaaggaaaaagccaaacaa

SEQ ID NO: 30655 - DNA, 292 bp, Gossypium hirsutum
  Clone ID: LIB3083-119-Q1-L1-H7
gaaaaatcttatcttgtgatcatccacttggttgagggtgtatatgatattcctttcctctttctatctttctgcctgctgctaccgattttaaactaatctaaccacaaattcttcaccatcgtttttgtttggaaccctgcacctgcagcttatattgctcaggtgcgtttccaaacatactggactggttttgttttcgacttttcttgatccccacctacatgaattctatttgatcaataaccttcattatcggtgatagatttgtggtcataataaaagacaatgc

SEQ ID NO: 30656 - DNA, 104 bp, Gossypium hirsutum
  Clone ID: LIB3083-120-Q1-L1-A12
cggagtcatattttgcaacattgtttatgagacttctaatgtgctttaaataactgttgttgttcttaaagacactcatattgagatcacggggtatatttctc

SEQ ID NO: 30657 - DNA, 261 bp, Gossypium hirsutum
  Clone ID: LIB3083-120-Q1-L1-A4
gagacaagatggatacatccaacattcataaaaatggtaataatttttaatattatacatctatagtagaacaaggcaggtagtgatatagatcgtcaacattgtaccaaagatacttttagagtatatcgaatcagtataactatccttcttctgacacagcaatgcaatttcaaacagtatatcaatgtgaagtgctagataatttcttttttcttcttgggtggcgatgtataaccaagtatcatgcaatagaaaatt

SEQ ID NO: 30658 - DNA, 237 bp, Gossypium hirsutum
  Clone ID: LIB3083-120-Q1-L1-A5
gattaaacttcccattcttcccggctcgcaaactttcaaaggaagggttttgatgtcttatacaaaggtgcttacattcctttcttaagccaataccagccttaaattcttgatcttattgagcatgcttagacacaacccaaccttaccattggtgtcttggtctctattggggggaatattctcacgaatttcttcaaactcattttttgtggggagaaaccacccatatttgag

SEQ ID NO: 30659 - DNA, 292 bp, Gossypium hirsutum
  Clone ID: LIB3083-120-Q1-L1-B1
cagaacctttttaagaaaccaaaaatcaaacattttcaaaggagggagtgaaaaaaggattagcccaaaggaccattttgattcttcaccggcaccgctcattgaactggcttagatcaaaccttggtctttttaccgaactctcatcgcccaatataatgctactctcctttttctataccataccataaccaccggcattgggcacaagaaacaacacgaagcatgccatgggggtggtcctttgggtattgcttgggccttttgtggcctgaatttcattcctggttac

SEQ ID NO: 30660 - DNA, 283 bp, Gossypium hirsutum
  Clone ID: LIB3083-120-Q1-L1-B12
ggtttggtgccacacctgtgatgtgccagaagaacctaatatgggttgtcacaccgatgccaggtgtggttgatcgctattctactttgggggaggttgttcaaggccacactttggtcaatgcatctgggaagaatggccttccaagagattggcttgtcaccaataatgaaaccggtggaatttttacaccagccaccagggtgttggtggtggtgaattaaccggcttgaaaggtattttaaattcccaaagagggttgggggggaataaaacccttttt

SEQ ID NO: 30661 - DNA, 264 bp, Gossypium hirsutum
  Clone ID: LIB3083-120-Q1-L1-B4
acattaaatctcaacaaccagatacccccaaccgggaaaggtcctggttctttcaaaggaaccaaattccccaaaattttccttcccccaacccaattttgaaagaggaaagggagatccccaaaccggggggttcatggatttggatgaaaaccctttggaccagggtctgaaacacgttgattccaggaccctaacaatggcctcccgcgttaggaagctggggctcaaaactggtagagaccagcgtttttgggaggtgat

SEQ ID NO: 30662 - DNA, 143 bp, Gossypium hirsutum
  Clone ID: LIB3083-120-Q1-L1-B5
cagcctgtttttaacttttaaaacccccgaaccatctggcccaattgtatttccaatgccccaaagagggttgttcttacaaccaatttgggccccaaacttttcaccccccttaacttttttaagacccccagccccaaaaa

SEQ ID NO: 30663 - DNA, 325 bp, Gossypium hirsutum
  Clone ID: LIB3083-120-Q1-L1-B7
aaaaaaaaccaaacaaacaaacaaaagaaggtttgattttgatttttcactatcaatcatatatttcatttcgtggattccccaacttattgctacttctacccttaatttcacctcccgatatgtctctgttttgttttacatcttcagctctaaattggaagtgatagagtaaatacacagatattatctcttgtttatttcttgggttttccttcattttcgatactgcgttgtgcagatacttggtctgcttcaaacatgcatgctagacatagaaccgctgggaatgactatagatctaattctaatgcgatggggggtt

SEQ ID NO: 30664 - DNA, 301 bp, Gossypium hirsutum
  Clone ID: LIB3083-120-Q1-L1-B8
gttctctatttggaggagtcgccggctatctttcaggaagagaggctatcgattctagagcagctcaaaatattggaagagaaaatggtttcattgaatgatgaggagttacattttgaggatgtaaaatcaattgaattattgtatgaagagaatggcaatggcttctatggaagttctgatttcacctatgaaacaaatggggttaccaatggtcatttcgagggagcaaatgggaaacatcatcaggagaaaaagctgatggcttgcaatgcaaagagacttctcccactttttgatg

SEQ ID NO: 30665 - DNA, 160 bp, Gossypium hirsutum
  Clone ID: LIB3083-120-Q1-L1-C1
cagcccctatcttaaaacaaaaatgggtgaaggttttaaccggtggatgccccgtaaaaatgggtcatttgcgacaaccacactatttggagggcatcaactggctttggaatatctcgtgccgaatcttttggagctatatggtggcattgaattcact

SEQ ID NO: 30666 - DNA, 373 bp, Gossypium hirsutum
  Clone ID: LIB3083-120-Q1-L1-C11
agctaagcctagtggttctgaacaaagcgttctggaaaagcatgttgcattctttgacagaaaccatgatggcatcgtttatccatgggagacttttgaaggttttcgagcaatcggggcaggttatctcttgtccatgaccggtgctttcctcattcactttgctctcagtagcaaaactcgccctgggaaatatccttctccattctttccaattgaggttaaaaacatccacctggctaaacatggcagtgactctggtgtatatgacagtgatggaagatttgtatcattgaagtttgaagaaatcttcagaaagttcgcccgtacccatggcaatgccttaacatctggtgaactcatggcaatgctc

SEQ ID NO: 30667 - DNA, 214 bp, Gossypium hirsutum
  Clone ID: LIB3083-120-Q1-L1-C6
aattaaattagtacccctatacattaatgtgataaaaatcccaagaagatcatgtccaaacacgccgtggtaagtactgctaccaacacgtaagaaaatcttagaatgcccccgctatttggttctacaaacaaactttcccctgattttcagagagattacaacaatcaaacattgcgggtgacgaaaaatttctatttaaacatccatttta

SEQ ID NO: 30668 - DNA, 226 bp, Gossypium hirsutum
  Clone ID: LIB3083-120-Q1-L1-D11
atatttgtgtttttttttttaaaattttatgtaccgaaaacagggggaaaatagagctttgcttcattcatacctcaattatataacatggcgaatacacaacaaagcttgtgaaaataatttgattacactatatacaaaaacgcgttctctgcccaatgagccttgaatgcagtaagcaaaactcgtcatgaaccatatcttgtctatttaatgggttaaaccc

SEQ ID NO: 30669 - DNA, 167 bp, Gossypium hirsutum
  Clone ID: LIB3083-120-Q1-L1-D2
aaggttcctggtttaacctttgatttttggggggaaccacttggtgtcccaaatcaaaatgggtcaagaaacctgcccccccaaccttgaaaccaattcttgggtcaaggttaaaccaactgggtgagccgatttattaaattgggggaaaaaaatcttaaacccca

SEQ ID NO: 30670 - DNA, 272 bp, Gossypium hirsutum
  Clone ID: LIB3083-120-Q1-L1-D3
aaaaaccgaaagtcgaacgaaaaggagggaaaacaaatggtaagttctcaacttcaatgcacgaggatggtaccacgggtgaagagaaaccgaagaagaagaagaaactagagaaacgggctgaactagacattatcgacgatgcaggtgcctcgttcacagagctgtttgcaactgatgttgctgatccgatacatgatggtaaaaggaagatagtcgatagagcaaatcaagatacaaaatcgtctgatagcttagttacctaccctgtg

SEQ ID NO: 30671 - DNA, 204 bp, Gossypium hirsutum
  Clone ID: LIB3083-120-Q1-L1-E1
atagaccaaaaacaccaaccgggaacctggaattattaaagtattccgcacggaaataccccccaaaggtttttattggcaacctcaaaaggaacctggcccatcaaatcttcccacctttcccaatggaaccaggggccatcgccttataaaaggtttaaatcccaagccatgcctcaataagtccggttaagctaaggtttt

SEQ ID NO: 30672 - DNA, 129 bp, Gossypium hirsutum
  Clone ID: LIB3083-120-Q1-L1-E3
cgggacgagcgggacttccggaaatgccagcccaaatccagaaaggaatgggtgctggtcaagatcccccttgtgccacaacttatctggccagccaagagggagccgattccccatccggttttggtg

SEQ ID NO: 30673 - DNA, 379 bp, Gossypium hirsutum
  Clone ID: LIB3083-120-Q1-L1-E4
acttcctccacctgttccgatctacaaacctccaccagttgaaaaaccacatcctccacctgttccgatctacaaacctccaccagttgaaaaaccacatcctccacctgttccaatctacaaacctccaccagttgaaaaaccacatcctccacctgttccaatctacaaacctccaccagttgaaaaaccatatcctccacctgttccagtttataaacctccaccagttgaaaaaccacatcctccacctgttccagtctataaacctccaccagttccagtatataagaaaccatgtcctccaccagttccagtctataaatctcctccggttccagtatacaagaaaccgcatcctcctccagttccagtctat

SEQ ID NO: 30674 - DNA, 362 bp, Gossypium hirsutum
  Clone ID: LIB3083-120-Q1-L1-E7
gagaaagtgacgggaaaataagaaaaatgcctagatcgaaatcaccggtgtcaatagctttatcgtttctcttcacattcttcagcatctcaaacgcttttttcggaccgtcgtcgccagtgcttcagcttactccttctaatttcaagtccaaggttttaaattcgaatggagttgttttggttgagttctttgcgccttggtgtggccattgtcaagctctaacacctacatgggagaaggctgccaatgttttgaatggagttgctactgtggctgctcttgatgctgatgctcaccagtcccttgcagagaaatatgggattagagggtttccgacaataaaggtgtttgcacctgga

SEQ ID NO: 30675 - DNA, 395 bp, Gossypium hirsutum
  Clone ID: LIB3083-120-Q1-L1-F11
acgagcttaaacaatcaatcaagtgataaaatagcccttatcttttgtaagagggagaaattcataggaataattggtgtagctgagaccgtagccgaattcgaataccttcagcccttggtagaatctgtaagtacgtccaggataacctgaagatggttcaggccgcattctcatgtctgtcatcggtattttagtcaaattttgtggataccatgtaattggtaatctccctcctggattatgatcaccaaatataatttcggctaatgcacgtcctccagcttcaccgggatagccagcccatataatgcttccaatgttctgatcattcttggcaaatgttatgtctactggacctccacaaagaagcacaagaatgacaggcttatttg

SEQ ID NO: 30676 - DNA, 284 bp, Gossypium hirsutum
  Clone ID: LIB3083-120-Q1-L1-F4
gtttttcctcactaccgtcctcacatcctttttctcttctcttctttgcgccacccgcagaagagagagagtaaaaaagaaactcactttcatcacgtctctctctctctcttagatataaaaaatcttccttcctttttaggtttttctttttcaacattcagattcagcgttttagatatcgctgagttgttggtttttatatatcggacggctgagattggatcttacctgagaaaagaaatcgaggtatgcagcaaggtgatcagacagtgttgagctta

SEQ ID NO: 30677 - DNA, 390 bp, Gossypium hirsutum
  unsure (1)..(390): unsure at all n locations
  Clone ID: LIB3083-120-Q1-L1-F6
caggctatgtcaattttgatctcaactttccaccatggcaaaaacccttctgctattgatcaaatgacttttgcaaggtacacggagcgaactgcttttgaaaggcccctcacaagtggtgtggcatatgctgtaagggtgctccactctgaaagggaacaatttgaaaagcatcaaggatggactattaagaggatggatacactcgaaaaaaatcctgttcataaggatgactataatcccgacctctttgaaccatcgccaattcaggaagaatatgcacctgttatctttgcgcaggatatcatatcacatgtgatttctattgatctgctgncgggaaaggaagatcgcgagaatgtattgcgtgcaagaaaatcaggaaagggg

SEQ ID NO: 30678 - DNA, 241 bp, Gossypium hirsutum
  Clone ID: LIB3083-120-Q1-L1-F8
gatagcaaaaattacataccactcttccattcagaataaattgaatattacaaacgaaattatattaatacagattaaatactcatgttggtcacttgccgtcattcagttgtagactgatattgcccatagtaattggacgcaacgtgtattaaacaatactgattgcggtggcgatctcataggcctccctatcactcaattgccactagtattccagtgctctaatcccatataacat

SEQ ID NO: 30679 - DNA, 372 bp, Gossypium hirsutum
  Clone ID: LIB3083-120-Q1-L1-G12
cttcctataaccatgaatgtcgttgatgctatgccttcaatagcagcggagcaccctatagaagttgaaaggaatagtgacattttgcctatgaaaaagaaaaaaataaccccaaaagaaagtattctcaagtcagagcccgttagacagatgatgaccgatcaggaaaagcagcagttgagcacagaattagagtctttgttgggcgagttgcctgaaaacattattgattttcttaaagaacatagttctactgaaggtcaaatgggcgaggaggagattgaaattgacatcgatgctctgagtgatgaaaccttgtttcaattgcgaaaacttttggatggttatttgctcgggaagcaaaaaaaccag

SEQ ID NO: 30680 - DNA, 275 bp, Gossypium hirsutum
  Clone ID: LIB3083-120-Q1-L1-G5
cagtagaattatatttcggtctggggtacgaagctctccaagggcttccttgggcttcgccgcttcatccttgtcttttggcaggttctttcctttaccttcttccactgcccttaacccttctccttcttttgaactaaaattcatttcctctttcacttttttcctcactcgccgtctatttcacaacacagccttcgttcacaacaaaaacgagtaccaccaaccgggagaagaagaactgccgttctggtattccctttttcctttcttct

SEQ ID NO: 30681 - DNA, 384 bp, Gossypium hirsutum
  unsure (1)..(384): unsure at all n locations
  Clone ID: LIB3083-120-Q1-L1-H1
aattcaaagatattaactttttttttataattttgaaaaaaaaattatttcaagtcaatttttacaattcaaacatgtttatagcataaaaaaaatttcaaatcatttatatttctatgaaatttacatattcttgtacaagcccaaatatgcccgggcccaaaccaataaacaagcccaattaacagcccanaacccaaattgacctagcccaaacattaaaatttcagaaaccctaacagcatttgctcgtagccgccgcacatcctaacagcagcccccgcacatgtcgcgcacgtccgcctccacgttgactggccgtacattgccttgtcgcgttctgctccttcctccgtctcgatcggagactaggatggcgattga

SEQ ID NO: 30682 - DNA, 302 bp, Gossypium hirsutum
  Clone ID: LIB3146-001-P1-K2-A1
attgttcacaaactgactgttcgaagctgttttaaaccacccattgactcaaggcgtgttcgacatacatatgagatcagctgggattgggctttcacgttatcgcgtactcagcttggaagaaatggaatatgcatccaacaactttaacccatcatagtttatgggggaaggatctaacggtcagctctataaaggttggcttgtagattggtcagtgatggtaggaaaacgttagcaactacatcagaagcatgcacctcaaaatctgatgcaacacgatgtagttttgtccaagctaa

SEQ ID NO: 30683 - DNA, 390 bp, Gossypium hirsutum
  Clone ID: LIB3146-001-P1-K2-A11
caatgctcttgaagctaacggatggccgttaatgctgccagcctacagcatgtcaaaggtggtcctaaatgcttacacaagaattctagccagaaaatatccaaatatgtgcataaattgtgttcatcctggttatgttaacactgacttgaattggcacacgcgggtgatcacgacagaagagggggctagaggccccgttaaatgtgctctcatccccgacgtaggccctactggttgctattttgatcagaccgaagttgcagagttttgagatgcaccctcttttttgtttgattggaactattgctgaggttagagattatacattcgaatgcaatttgtgctttgctacattctatttatgttacctacactttacattttctg

SEQ ID NO: 30684 - DNA, 185 bp, Gossypium hirsutum
  Clone ID: LIB3146-001-P1-K2-A2
gaatagtaaaggaactaaaaatgatcaaattatagtaaaaggattaaatccaccaaaagcacgatggcacaaggactttcttgcaatagatgccttgtgcttaatgcctgctcggtatacatatatgatatgtacatatcatcagcatctttgtgttttttgttcccgattgttttggtccaatt

SEQ ID NO: 30685 - DNA, 222 bp, Gossypium hirsutum
  Clone ID: LIB3146-001-P1-K2-A5
cccacgcgtccgatcatgcctaaggatatccatcttgctaggaggattagaggtgagagagcctaggtttgcttttaggtgattgatgtctgaggcctaagctttttttcattttgatgtattagatttctctgcaagtgtttgatgtaaatcgatgcgattctaaaggatgccatataatttcatgatttttgattaatgagaaaaaaataaaaaagataa

SEQ ID NO: 30686 - DNA, 304 bp, Gossypium hirsutum
  Clone ID: LIB3146-001-P1-K2-A8
gtataaatggactgtggaacaatttgaaggtttcaataacatgggcaatggtggcttgattgtcatgcaaaaaggttatggcggaagatacagcttatctatgcatcataatgaagaagagctaagagagtttgggttgacagatgaaatgttgattgaccaataatggcaaaagattgcgagaataggagaactgaattatgattgccctatggtgaattccttctttcctcactttgaagatgagggctgcataacatgaaacaaggtgctgaaaagtttaattaataaatcatgattctac

SEQ ID NO: 30687 - DNA, 444 bp, Gossypium hirsutum
  Clone ID: LIB3146-001-P1-K2-B11
aattttgcaacctctttcttttatttcctggtctttatttatttattggtgggtgcatgccagtcagttggttaaccattactgtatttttaagagggtagaaaggttcttgtttcctatttcaggtgttgctttctatctgctccctcttgacggacccaaacccagatgaccctctggttccggaaatcgctcacatgtacaagacagacagagctaagtatgagtcaactgctaggatctggacccagaaatatgcaatgggctagtctaataaattggtaagaaaaagtttaggatattgtttcctcattactcactgtgtataaagcaactgtgcatttgtggcgattgctcctgtagtatactaaatagacaaagtgaagactagatggaaagctggctgatgttgtatatggaactgctgtatgatcattagataat

SEQ ID NO: 30688 - DNA, 203 bp, Gossypium hirsutum
  Clone ID: LIB3146-001-P1-K2-B5
cccacgcgtacgaccactctttcggtgcagtttgaagcccgcagcagaaacggggccctatggtcaagtgcaaccgagacttgcgcgagtggtccctattacggtagtgaatactagacagacgagcagaacttcagatccataatctgatacttgacactgaaattatgagagctccgcattgtaaatttgtaacagccgca

SEQ ID NO: 30689 - DNA, 294 bp, Gossypium hirsutum
  Clone ID: LIB3146-001-P1-K2-B6
cccacgcgtccgcttggcggtaaatgcgagatcggtaaatttgtgcttcttgtgcatgttggggcctggttcaagtttgtaagtccggtttgtaggacgattaaaattatattttcgattaattgattcaaaactttacatggaaccgtgagatcatattagaaaaaaacttattttacatttgtgaaaaaaaaaataaaaaaatatttaagaatataatatagaacttttaattattaaaaataaatttaatttggttaaatttatttagaaaaattttttctttatgttttt

SEQ ID NO: 30690 - DNA, 407 bp, Gossypium hirsutum
  Clone ID: LIB3146-001-P1-K2-C12
cccacgcgttcttccactctttcgctcgttttttcttacacttaaagaatttcaacatatgggtatgttatttgcgaaagatgccctcaaactcagctttatctgaagagcaaaccagtgcgtaacattttccatcgttcatcccaagtcaaaggaaaagcttcaaaagaatcaattgagctgactattgtagaatttaaatctgctctttccgaagttgatactcagttgaagaatctgtccgcgactgcacaagtttcaaatcaacaaggtgcttatttcgctaagttcttcaatcgaatggaagagtgtgaaattaatcctgaaggtcccactaggatcaatggaacacgtcgccattgttttcttccctttaagtacaagcacttggtacaattttgctcctt

SEQ ID NO: 30691 - DNA, 285 bp, Gossypium hirsutum
  Clone ID: LIB3146-001-P1-K2-C4
caacattccacacccaaagtcaaaaagtcggcttctaatcatacttggatggaatctaaaagggatttccagtccctattgaaacaaacatacccctgttaaagggtctctgttcatttaacatcactctaagacggcaaaactcaccccgtgtttcacatctatatgccttaggttactactgaaaggatcgctaaggtccttggtgaacagactactgatatgcatccatagtgatgtgacagatagatactcgatatgaatcatgtttacgttgactatgac

SEQ ID NO: 30692 - DNA, 429 bp, Gossypium hirsutum
  Clone ID: LIB3146-001-P1-K2-C6
gaacgaagttacaaaagttttggatgttcttgtattgcagccaccttggtcttataacgaggttttgctgcaattaaaggagaaagcattgacgagagccgggttggtggaggatgatgtgattcgtctaattaacgagcgagctgaagtgaggagaaacaaagacttcttgaaaagtgatcagatgagagctcatttgcaagcaaagggcattgcactcatggatgtaggcacggaaacaatttggagaccttgtgttcctgttcaacaagactcggaaatagtgccatcagagggccagaaggtccctcccaagcctgaaagtgcataagaatgcagatcttgattcaagttcaccaaaagaaaaaacatattgaatttgcttcgtatggcggtttctattgttaaaacaacttagtgggatcaaga

SEQ ID NO: 30693 - DNA, 448 bp, Gossypium hirsutum
  Clone ID: LIB3146-001-P1-K2-C9
cccacgcgtccgcaaatgtgcaagccttgatgcacaaggtaaagctggctgaagatatgctggctggaggctccttcacatgtggtttgaatcaacttgttcagagtcacttgacttcacagcaaccgattgctactaataatcacaatcttgggcgggtggtaaatgtctcccccactattaccgttcaaggagattcttcttcctatgctggattcacagacatggggaactcaccaaatcttggcctgccaactcttgatttcaccaattccaatcagaataatattggaattggtggtgatgctatgagctggccctaaagattaatttatttttatatgtatcaactgcgtccctgctttgctttgtcgattagatttagatccagttaatgtactagtgatatttagatccagctttgctgactgctgaaattgccttagtc

SEQ ID NO: 30694 - DNA, 267 bp, Gossypium hirsutum
  Clone ID: LIB3146-001-P1-K2-D1
aaggaatcgaaaggccatcgatgggcgatgttttgtggggacttgagttcgcactacaactgcaagaaagtggtgaggccaagcttaaatctgttaatggtggggctgccactgaagcagacattgatgaggaagcgccctttaaaagccaaagccttgaattggaagatgacagtggggacgttttcagtagccctcgcgatcatgttcttaacttcaagagcactagcactttcagtttgacgacaagtgatgatcaaagttttg

SEQ ID NO: 30695 - DNA, 460 bp, Gossypium hirsutum
  unsure (1)..(460): unsure at all n locations
  Clone ID: LIB3146-001-P1-K2-D2
cccacgcgtccggaagcacggaggattttgaggatttatttatctccaaataaagctttgtgactttgtttggctttccctttttgtgttctttttcccctttaaacctttaagatttatgtttagcataaataatctaccatttccaaatgcaatagaaatgttcattgcatcattagattggaccccccaagtcatagacattgccatcgtaagttattaagtggaagccacctcttgttgccccacttccccaacttaaaaaaaaaaaaacaagtgngggggggggggttcagagtctatccttctttaggagattcactgtgataggtatatgcttatttccctgtttcttcccttatgtcaaggactttggtggtccatctgttcccttgaatagaccattggttacttttggggcaatattgctctaatgaattacaggaccctttatttcctt

SEQ ID NO: 30696 - DNA, 412 bp, Gossypium hirsutum
  Clone ID: LIB3146-001-P1-K2-D8
cccacgcgtccgaaggaaaatcaaaacaacgttgagtctaattgaatttcacagaccctcaagatggctaacctcatgatcatggcggttctcctggttgcggtgtcgacggcggcaaccgttacggacgcgcaaggcacttgtggcggaaaagctagtggcctggtcttcgtaccatcctaaccacaaccatcaaacctcaggatgactgttgtaacccgttcaaggaagaggtacccaacgatctttcctgccttggtaacctatacaaagaccttaaagttttggcttctttgaacatttacaccgcgcaggctttaaatgtcactcgtgaatgcggcgtcacttactgatctaaccgtttgcaacagcaacagctcttatacaagctgtgctacatccccaccaggag

SEQ ID NO: 30697 - DNA, 433 bp, Gossypium hirsutum
  Clone ID: LIB3146-001-P1-K2-E12
caaggaccaatttcgaggactatttttatattcctcgaaggaaatatcatattgttaatgagcaagagtaaatctaaagttttgtttaaggtttttccattttctttagcaaaaaatttatcaatcaaaggcttataaaatattatatttagaagaaaactgatgaaaacaaaacgaaaaggaaataaagtttcaagataaactcattggtattaggaattgactcggaaaacagctcattagttgagagaagttttttttttttgggttttacaaatttataaatgtggaaagcctctgtcttaaaatttgaaagttttgattaagaagtttaaggatcaaattgatagaatttttaaataaaaaagagttaaacttattgaattatttagatttatgaacacatttatagaatatgtaaatattgatgact

SEQ ID NO: 30698 - DNA, 299 bp, Gossypium hirsutum
  Clone ID: LIB3146-001-P1-K2-E7
cccacgcgttcgcccacgcgtcctcccacgcgtccgcttagatttaagaatccggattttagaattttttaaaagaagattaatggtttaaagtcaaaaaaaaaaaaaaaaaaaaaaaaaaaaaaaaaacaaaaacaaaaaaaactgaacccacaattgaaactatccaaaatgacgttcgcaaataagccaaaggatgtcactgaggttccagaacttaatatcaaagaacaagagactcctgaagaaacagtagcctagccagatgcggaagagtccaaggtgactactttaccaac

SEQ ID NO: 30699 - DNA, 362 bp, Gossypium hirsutum
  unsure (1)..(362): unsure at all n locations
  Clone ID: LIB3146-001-P1-K2-E8
cccaaatcttacgatcttatttatttatttatttacaaaaaggggagggatattcaattatggttgttcaaggaaaaatcataccccgtaagttaggggcacaatttattgaatcttcaaaataaagaagatcacattagntttaatttcttctaatgagttgtgtaaaatagaatgcatcacatgatatgatatacaattgagcataatgcgggaatgaataaatatatctaaccataatggttagaataataacataggacccaaacattattaaattaaaataactccttaaaaaaataattaaaccatggataaaattggaattgactatcgtaaattattaatttaggacaaattat

SEQ ID NO: 30700 - DNA, 445 bp, Gossypium hirsutum
  Clone ID: LIB3146-001-P1-K2-F2
cccacgcgtccgcgcctttctctttagtttacgaaatggaagcagttttgccaatcgaagtggagatccgatcccttcaagtgttgtcagagttaaagttggacgaagaagaatagatcaagtctcgatacgaccaatttaacttgattgaggaaaagaggctaagagctatccgtcatggtcagatgtaccaaaaacgaatgatgcggtcttatgacaaaaatgttcgccctagagaattccacgagggagacctggttttgaaaaagattcttcccatacagaaagattttcgaggaaaatggatgcctaattgagaggggccttacgtggtgaagaaagctttttccggaggagcattaattctagccgaaatagatggtaaaaacctgccctatcccgtaaattcggataccgtcaggaagtattttacctaaaaaaggaa

SEQ ID NO: 30701 - DNA, 323 bp, Gossypium hirsutum
  Clone ID: LIB3146-001-P1-K2-F3
gcttttcatctccagcattcgttttaaagatcttgggtagcaacccaaagcgataataagggaaccactgataaaagatacccagagagacttgtcatatttttacttatatcaacccttcttcttctttaatctctctattttttttctgggttttttaattcaagggtcgaaatttggaagaaaaaaaaagggatatcagcatggggaggggtagggttcagttgaagagaattgaaaacaagatcaacaggcaagtcactttctcaaagagaaggtctggcttattgaagaaagcccatgaaatctctgtgctttgtgat

SEQ ID NO: 30702 - DNA, 436 bp, Gossypium hirsutum
  Clone ID: LIB3146-001-P1-K2-F7
gactctaaaaatgaggtatcggtataatttctctactacaatatctatcactgggaacttggaacacttgcctattttttgttgttttagctctctgtagcctttccttggtttgttcagaagaatctgctactaatgagcctattacccctgatcaagatcaaggagatttgcccctaacaattgaagaatgaaaaggctaattttgataatttgcctaaacaactttatggaagggacaacgccaaagtgggtgtttcagctttcaaatgcattgaaaaacactcaacggggggaatctccagagtacatggaacttattgctgtcagaataagaaaaggttgtggtaaagctattgatttttcacacaacagtatccaagttctggtccatcctagagatggaaagtgtgccaatctggactgcattcgacag

SEQ ID NO: 30703 - DNA, 194 bp, Gossypium hirsutum
  Clone ID: LIB3146-001-P1-K2-G1
cccacgcgtacgcagtaattgctaacgatgatcttggttacataataactaccaaattttccgttattgccgatatcactatcggaatcaatgaatacatgactgatcaaacgtatgcttacgatagtcactctccacagagacgatattgagctacttactcttaactatcctcacatgcacactgaatatca

SEQ ID NO: 30704 - DNA, 386 bp, Gossypium hirsutum
  Clone ID: LIB3146-001-P1-K2-G2
gactctttggaagaaataaatctatgaaaaaatttcaatttttatatgatattttgattttgtaaaattgatatttatacttggatatttttttgaaaatttttcaaattttatgaatattatcatttctttaatttatatttatatgttttagaattgttctaaattatttataaaaatgatcttccttacattcttaaacaatatattatatataatcttaaaacatgaagaagcgtgacatggcacattctaatagcgtcatgtgaaaagtcaactgtagtcagcaccaatcaatggcgagtcaatatttctaatttaaataaccctaattgccagtgacacattgtgattgacactgtgcagcacttagttttattatcact

SEQ ID NO: 30705 - DNA, 474 bp, Gossypium hirsutum
  Clone ID: LIB3146-001-P1-K2-G3
cagcaaaatccaaagtgcacttggttacatggctcctgaattcgcttgtaagacggtaaaaagaactgagaaatccgacgtgtatggctttggggttttggtcttagaagtgattacagggaagaagccagtggaatacatggaggatgatgtggtggtgctgtgtgaaatggtaagggaagcactcgaggatggtaaggtggaagaatgtgtcgacgggaggcttcgtagtaactttccgacataagaggtaattccagttataaagcttggtctaatatgtgcatctcaagtgccgtcaaatagaccagacatggaagaagtagtgaacatattagagctaatccaatgcccttcggaaggccaggaagaggtggagtaaagtattcgggtccgagaaaagaacgaaacagagcggtgtttcacggtgaagatgaattcagtttggtcaacagaggaagaaaagaaaagagt

SEQ ID NO: 30706 - DNA, 383 bp, Gossypium hirsutum
  Clone ID: LIB3146-001-P1-K2-G5
cccacgcgtccgcaacagaccatgtcaatgattcaggaaagggctagtctacggatcatctgtatacaacccgtttttgccggggctgctagaaaaacttctcatgccgttggccaagccacaaagacgatcatgaatatcatatatcgaggagaatccgagtcagagaatggcgatgatagtgtcattgatcgagttgaaatctaaggactacattgcttctcaacactgatggtctgtgtacataaagaactaagacttgggaccgagcttgtttaattttccaacagcatataatatgtcggaaaaatatacactaatataagttcaatatgttgcatataattaatgaatatattgtggtttgaaattaaaaaataaag

SEQ ID NO: 30707 - DNA, 406 bp, Gossypium hirsutum
  unsure (1)..(406): unsure at all n locations
  Clone ID: LIB3146-001-P1-K2-G6
cccacgcgtccgccacgcgtccgcccacgcgttcgcccacgcgtccgaagagttttcctatattgtacttgaatgatgtgtatgcaacttgcccaataggccctggcattacattgtccggtgacttagttgatttgaaattgctaatattgttgtaaatagatttgtttttttatcttctttttgcaggaaaaggctttttcggatgataaacgaacttccgaccatttttgaagtcgtgacaggcaatgtcaaacaaccaacagagcaatatgctaatcacaacagcagtggcaaaagcaaatcaagtgctaaagtggtacaaagttccaaaattgaaacttggatgctnttctcagttgtgttttcatcccctttatatgtgcttctcttaattgatgtcacc

SEQ ID NO: 30708 - DNA, 166 bp, Gossypium hirsutum
  Clone ID: LIB3146-001-P1-K2-H1
caaagatcttccaattgtatactacaggagtatttatcgtattaatcaggaatttacaaatcggcatactaggcctattcatatggactttatagggtactaaggacactacactatatataatatcctggccttgcttttaaaaaattcctctccactcttacac

SEQ ID NO: 30709 - DNA, 453 bp, Gossypium hirsutum
  Clone ID: LIB3146-001-P1-K2-H11
taaaaattaaaaaaaactaattaatctattccttaacccgacccttaaatccctaaatcctgacccctaaatccctaactcgtaacccttaacccctaactactaacccctaaacctttaaatcccaacccttaaaccataatccctaaatctatatataattatttgatcacggcgggtgcaaggcaaaacacgaaaaaaactgaattggataaaaaaattaaaccgagcactaaaaatactgaaccgggatgggataagttagggatatccttggatatagcttatattgattttgaagaaccaaattaatattatcttttttacaattatataataaattaattaatatataaattagaaaacactagttaatctaaaccctaaaaccataaacccttaacatgcacataacctctaaaccttaaaccccagcctttaaatcataaacat

SEQ ID NO: 30710 - DNA, 478 bp, Gossypium hirsutum
  Clone ID: LIB3146-001-P1-K2-H8
tcccaggcttgcggagacgtccgtccacgcgttcgataactaagaaacaaaattttaaggaatatcagaagagaagctggtctgtttctgtgcacaggtactcagggacacatttgatttccaatctacaataggggaaacaagttccgtggatattcatcgagttctggagttgcggtctccagttatcgttaaggtacttaaaggcatgtgcttcatgaacaataagattttcaggaatcacctcggggtgttctatccattgcttacaaaacttatttgctgtgaccagatggatattcgtggagcactaggtgatctttttagggtgcagttgaaagctctcctaccgtaagagttttaataacgaattattttgttgagaaactttttaggaatggttttcagcgtcgctgcacattcctaaggaccataggcaagatttaatgtttatcaaggaaaatggatgggtgaaaat

SEQ ID NO: 30711 - DNA, 188 bp, Gossypium hirsutum
  Clone ID: LIB3146-002-P1-K1-E10
atataaattttatacatccttattaccctacgactccatatataagcaagtaaaaataaatatggctcgctctgcttcttcctttaagttccttggtgcttacgatactgatgctcattatgtctacatatcaaggagaggttactcaggtgcaccgtcggcagcagtgacggctagctttgagaggc

SEQ ID NO: 30712 - DNA, 234 bp, Gossypium hirsutum
  unsure (1)..(234): unsure at all n locations
  Clone ID: LIB3146-002-P1-K1-E12
cccacgcggccgccgcggcagacaagccttggaccgaaaccttcaacncacagccgaaggattccaccaccgggccgccgcaacaaccatggagcccccacggcgcgccgccgccggtaaggcgaccgaggaatgcgcgcgacggccacggaccgacaaacacggcgagcgggcgccgtagcagcgcgcacgtgcgaactgcagcgcccaagcatctagctggggtgatggggc

SEQ ID NO: 30713 - DNA, 234 bp, Gossypium hirsutum
  Clone ID: LIB3146-002-P1-K1-G10
cccacgcgtccgataaagacgtgagagacagatccaaatgccttgaaaagctgaactaggggaaccggacgaggtttagttaaagccgcgtggggtgtgccgatctaaacatagccttatttctgatctcgagtaaacacactgaaaataggatgaatgcaggagcgacaaccctgaaacacggacgaccactcactctccgggacgcactaagctaattggaaagctaaaacg

SEQ ID NO: 30714 - DNA, 300 bp, Gossypium hirsutum
  Clone ID: LIB3146-002-P1-K1-H12
cacgcgtacgctcacgcgctcgtgttaacagagaaaaaccttcaagcaaacaaaggaaaaaccagagacaagtattaatttcaaagaatgtaagagaaccccatattaccgtagcctttgaaagaataaggataataagaataacaccccgcatattgatgccgacggaaagaacatcagggcaaaagctcgtacatgcaaacctaagaaacaacaaaaacagatgtaaaaatgaggttaagaagcaaaagactgaaatgaaaagaaaaagaacattgaagagacaaagattataacaac

SEQ ID NO: 30715 - DNA, 307 bp, Gossypium hirsutum
  unsure (1)..(307): unsure at all n locations
  Clone ID: LIB3146-002-P1-K2-A2
gcagtttctttttagacagaagcaataggaaattaatacaaatgggaagaagtcatttctctttgtacatatgaccttagtaactcaaaatcttgacctaatcttaaacaattggaaggttgcttggacttggttcattcaggaaataagccatctggtctgagttaagactttcaaaaccctanggaaaaaaaaggcaatgactgaattctgcttgtatatcatcttgtgcatgtgctattatattccttcattgctaatttgattcattatactatgtaatttcaggttgggatatcttctggag

SEQ ID NO: 30716 - DNA, 438 bp, Gossypium hirsutum
  Clone ID: LIB3146-002-P1-K2-A4
cggacgcgtgggcggacgcgtggggttagggtattataaatcttgtacataattgctagcactgggtctatgatatagttccatataattaggacatataatcgcttgagtggagatgaaaaaagttctacccccctgccctcgctttgattttatggttgataagtattggtatcaattctcagttcaagaatgttacagatgtccctgtgcttttcctcttatgggagctttatttgcatcttcatctatttccttattttatctttttattccacgaaagaattatatcctgtcataactgaatatctcttaatttcaaagctagaaagggctcgtgtcttctaatggtacttttctgtatgcaaacttatcggttccaatgtattgtcccgatctgaataatgcatagttaatcctataatttggggctgcact

SEQ ID NO: 30717 - DNA, 469 bp, Gossypium hirsutum
  unsure (1)..(469): unsure at all n locations
  Clone ID: LIB3146-002-P1-K2-A6
cgcagatggttcagttcaaaatatttctgaaatacctcatgaactgaaagcaatttaccggactgtttgggaaattaagcaaaaaacattagttgatatggctgttgatcgaggatgctacatagaccagagccaaagcttaaatatacatatggaccaaccaaatttcggaaaacttacatccttacacttctatgcctggtccaagggtctgaagacaggaatgtattatttaagatctcgtgcagcagctgatgcaattaaattcaccgttgatacatcgatgttgaaggaaaagcctaaagtagaagatgatgaaacaagaatggcacaaatggtttgttcccttacaaatcgtgaagagtgcatgtcttgtgggagctaaagatcggttcctttttgaagctttgagagcatgcaatcagggaatttggtgtcnacgaatggcgactctatatgtgggttttaa

SEQ ID NO: 30718 - DNA, 350 bp, Gossypium hirsutum
  Clone ID: LIB3146-002-P1-K2-A8
cccacgcgtacgccttccaagatgcttgccggtttgcctgctatacactggaatcagggccgaggttatagtctacgtggtcatcacagaccacaacacatagcaaaatccatgataatagtcattcagaccgtcattcagaccgtaaaaaagcaagtagagaagcaggtcatcagtcctagaaccacccccaatcccacccacggtcataccgacactgactactgtactaactacgttttaaatgataatttgtctgacaaattctgtacctcacagcatccatggcatctaccaatcggcaaccacactggcatggactgtggtataaaaggatgaggatgaaattc

SEQ ID NO: 30719 - DNA, 403 bp, Gossypium hirsutum
  Clone ID: LIB3146-002-P1-K2-B7
aaaaaattacataaaaaaaaagagttaaaataattaaggtgaattaatcctctcttgggcttgtgtcttttttgtttttgaagaatacatttaatgctaataaccttacaaaaatgtttaatatttgataatattattagggttttgctatataatccaagctgtaatatactgtaataatcatatatctatcttagttacttactttaatttcagtttatattatgttattctgaccctttttgtcagatgttttcagctgcaaaaaaaactcattaatttccattttgtgtttatataatttatatgtcatttttcaatttctactgatgatgctctgcagggaatatatagcaaatctcttatgtaatcatttaggttttctgtcagcaatctataatca

SEQ ID NO: 30720 - DNA, 463 bp, Gossypium hirsutum
  Clone ID: LIB3146-002-P1-K2-C2
cccacgcgtgcgcagagtgcagatgactatctttttcaaaagtgcagccaaagcttcataaagagcataacggatttccagaacggaggataaaggagtttcaagggtaacaaatgccaaatgcatcaagtcattgacgtcatcactcttgacatgaaggctgcactgaatgctagacgagtgctgcataaaccttagtctatttacacaaactaacactgccagacacgacattattctgctactgcaatactaatattgatgatggcatggacatcctcaattaaatcattcatcttaaaccatgctttaaatactagattactttaaccataatttcacatctggagttggaactattcgatgctctataacaaactagaaatcaagctagagtgcattacggttcaataatacccagtgcataaattcatgtgaaatactaccgactgacaaccaaaca

SEQ ID NO: 30721 - DNA, 400 bp, Gossypium hirsutum
  Clone ID: LIB3146-002-P1-K2-C5
gggaaaaccaatcagctgatgtgttacacgggttgttttccaaaaggaaccttatcggtaggctgatacttcggtcactgtatgtgatattctgcgggtttatggcagcaatgctccctttctttggtgacattagtggggtcgctggtgccatcggcttcatcccgttagatttcatcctgcctatgcttctatataacatgacttataagccttcaaggtcaaccctcacctactggatcaatttgtccatcattatcgtcttcacaggtgtgggaatcatgggttcattttcatctattaggaaattggttcttgatgccaacaagttcaagccttttagcagtgatgtggttgactaaccagtgatcatatcgcttaaaagctcaggaaattctgc

SEQ ID NO: 30722 - DNA, 266 bp, Gossypium hirsutum
  Clone ID: LIB3146-002-P1-K2-C6
tttgaatttcaaataatgttgaactttctggattaaagcatgaagatagcctttaagggcatgaggctgggctaatcggacataaacagtggttcagcatgttacacacaatcgggatcatgttcaaaatgaaaagccagatggtgaggtattttgatcaagttcttaaatggaaatgtcatgtgtgcaaatatttaatattgacttttcaaggattagtgggaattttatggttttagaagcaatggattatattttctggaaaa

SEQ ID NO: 30723 - DNA, 404 bp, Gossypium hirsutum
  Clone ID: LIB3146-002-P1-K2-C8
gtacacagagacacctgctggcgctttccagactgacaggaatatgacatctgacgggtcaaatgtcacaacgacaaatgtgtgtggtggtcctacaaccatgcaaggaactgatactagtaagagcccaaaccttaaagattgattggaaacggatgcactagttaagcagatgggtattactccatcgagtcagagtccaaacttgtttaaagatctactaccttgaagaatattgggaaggaaggattgacaagacttacaccaatagggtttcattataggtttacttgcatacagctagcaactgagcagttgataggcgaaccatacgagcaatgatgtatcaagagcacagatttgcatagaatgaggtattaatttgattcaaccgactcgaatgg

SEQ ID NO: 30724 - DNA, 427 bp, Gossypium hirsutum
  Clone ID: LIB3146-002-P1-K2-D12
cgaccacgcgtccgaacacattttatcctgccatgattggtgtcattcttattctcttatctcctgatgtggactggtgaaatttgatgaaccaaacagatgttataaatacttctaacaacccacatgaaattccctgtgacctatcactgcggctgggccctctctcaacaccttgcctgagtgctggaaacagtttgcacaaggaaattaaaaacaccgattccacctttctagagtggaacaagttcagttatctgacacccccaattgtgtaaaagtttatcttccttacccctgaacaacatagatgcccaccttaacccgtattcaaacgcaccgaaaatcctacgctgacatatggatgtagatgcaacattgagcaagcgaaagacaatttatggctcaccaatcaatcaccattttt

SEQ ID NO: 30725 - DNA, 317 bp, Gossypium hirsutum
  Clone ID: LIB3146-002-P1-K2-D3
ggaacttatggttcgcatgctggctttctcattttaagacaagcagccgatagacagcagctcagcgataatactgtcgagggtactgaccggcgcaagaatgagctacctaaaactctgagacgacgactactacaacagcagctcggcatttaaacccaaaaacctataaccctatagaccaatcagacagagacttatagacagactccttacactaggcaaacttgtaccaatcattacaaacatgaacaaactaacgattaccaatgatacaatcacttacattcaacaattacaacagacatcacaacatc

SEQ ID NO: 30726 - DNA, 399 bp, Gossypium hirsutum
  Clone ID: LIB3146-002-P1-K2-D7
accttgcaaaatatccaaaaacacttcatggacatggaattcctaaccgagctaaacgaactagggataaccgatcaccaaagacttaccggcggaagaatgggccgaagaaaactcgaagacgacgacgacaacaacaacagcaaggaattcaaatccaaaaaccttcaagccgagagacgtaggagacagaaacttagtgacaggctccttacactgcgctcacttgtcccaatcattacaaatatgaacaaagcaacgataatcgatgatgcaatcacttacattcaagaattacaaaagacatcacaagttctcagtgaacaactgctcgaaatggaaaggtcggctgaagaaagtgtaatgccgatgaaacttggaatcgatgttggacaacat

SEQ ID NO: 30727 - DNA, 419 bp, Gossypium hirsutum
  Clone ID: LIB3146-002-P1-K2-E12
ggtcgaccgcgcgtccgaactgcagccaccataaggactgctttctccttttctctgccgtttcaactccacctccaatgttgcacaacaacgatggcgcctcgacggctcgctgccgccggtttggtgaccgtggagtgcgcgcgacgggcacggagcgacaaacactgtgtgcgggcgctgttgcggcgtgcgtgtgggagctgctgcgcctaggcttcttgctggtgttttggggccattttctgttggactagggttgaaattggctattgggttttaattttattgggcctgctattgtattttattattgattgggcagggcaaataattggtattacagtgttgacaccatttttttggacggaaaacgggatcgacttggttttgaaaaatggaaacgaaaacgagagtcg

SEQ ID NO: 30728 - DNA, 415 bp, Gossypium hirsutum
  Clone ID: LIB3146-002-P1-K2-E2
aaattcagcatatttttcccattttatttagcattttaagataacatgagcaggccaggagatgggaactgcaggtcatgccaacacctcaacttccaaaggagggacaactgccaacgttgcggtgaatctcgatacggtgttagagtcggctcgacattcgggtttaccgcaggctcggacgttcgacctggtgactggtattgcacggctggaaactgcggcacccacaatttcgccagccggtctacttgtttcaattgcggcgcgttcaaggacgagtcggctggaggtttcgacttggacatgtctcgatcaaaaaggttcggaagtaaccgatccggctggaaatcaagggaatggatatgtaccaggttagggtgcaatgaacataattttgctagcagaatggaat

SEQ ID NO: 30729 - DNA, 390 bp, Gossypium hirsutum
  Clone ID: LIB3146-002-P1-K2-E4
agaagctagaactgaattagtcgctcaaaacttttgccctttggttcagtaagacgaacttgccgtataatgggattaggccatcgtattttaggcgtcttcttgaggtcattgattcagtgttttaaatgcgaaagggtgggagagaaggaaatttacatgactgaaccatcgaggatgaatccaacgagtatatcgatttttatatttaaagattttaatatgtgtataaccatatttaatatgtccatgtatttgttgggctcgagtgtattatttaaagaacaaaaaatctagaataacgaaattaaactatgctatccggggtatatagaatctaaaagtaaagtttaagcaaaaaaggaaataactttagggtctaaaaaagaa

SEQ ID NO: 30730 - DNA, 412 bp, Gossypium hirsutum
  Clone ID: LIB3146-002-P1-K2-E8
gttatgcgtttgatgtaagcatgatttggtggttcgaaccttagtattatgcttgtgtgattagctaaaatgctcagtagtgctgggttgataacgtcaatatatggatgctttgtgctttctttcgaacaaaaaaatgcaaaaacaaaaaaaaaaagaaaaaaattgacaaagaaaacaaaataaattacaactacatacaataaaagcaaatatcccataaactaaaaaaaaaagggatgacagttctaaggtttcaaagctacctaactgggaaatccaaggccaacacgcatcaaaatggccacgtaattcaaaccccttgtcacggttttaaaaactaactaacctgggaaaaactgagcgtacccaacttaaattgcatagcctgaaatgccaattcgacaagtcg

SEQ ID NO: 30731 - DNA, 306 bp, Gossypium hirsutum
  unsure (1)..(306): unsure at all n locations
  Clone ID: LIB3146-002-P1-K2-F12
gcgtccgcaaagtatccttaaactactttaagaaatgtcaatanatttggcaatacatanacatttcttatgcaattattataaaactatcggcaccaccccctatccttcgcccattttatttttctataaaacacacttataactctaaacaatctctctcaatatctcttttactcaatctacctctttctataataatccacacttatacatcatccactgtcatctattttttttttacaacaacttctatttctagcatttcccattctttatatacattacaatacattccctcttttt

SEQ ID NO: 30732 - DNA, 477 bp, Gossypium hirsutum
  unsure (1)..(477): unsure at all n locations
  Clone ID: LIB3146-002-P1-K2-F4
gccttatagaactggctaccactttcagcctcttaaaaattggatgaatgatcctaatggtccagtgtactacaagggagtttaccatctattctatcaatataatccgtatgctgcagtgtggggcaacataacatgggctcactcaatatcatatgatcttgtcaactggattaatcttgatattgcactttctcccggtgatcctttcgatatcaatggttgctggtcaggctcaactacgttcctttccggngagaaacctgtcattttatacactggaagtgataccatgaatcgtcaagttcagaacttggctgagccaaagaacctatctgatcctctgctaagggaatgggtaaaatcatctcataatcctctaatgtcccctggtgatggtattgacccaaagaactttaaggatccaacaactgcttggcaaggccctgatggattatggagagtcttagttggaaa

SEQ ID NO: 30733 - DNA, 423 bp, Gossypium hirsutum
  Clone ID: LIB3146-002-P1-K2-F5
ctgaactctgagactaccctgcggaagaaaatacagaaagcgtgttcaatcttagagttctcggatcctcctttggttcacttcgaaaatgaggcttatcaaaattacctcaatttcctccaagatttaatcaaaaacaatccatccgttgtcgagaagatgaacctagaatcacaactcgtggcagtgtgtgaaaaaatattgcagatatacctcaactgtaccattaaccagaatatggtacagatatcagttaacaagccaacgtcccgttgggtactaccgttgggttcagccaaaagggaagaattggcagcaagaacatctttacttgtgtcagcattgaagactttgagtggtttggagaaggatcgctttagaaaatacattgcaagtttctttcatctgtttgtcgctctgata

SEQ ID NO: 30734 - DNA, 418 bp, Gossypium hirsutum
  unsure (1)..(418): unsure at all n locations
  Clone ID: LIB3146-002-P1-K2-F9
cccacgcgtccgcccacgcgtccgagttatttggcttgtttcttgctctgtgtatggcctttggtgtgattagcatatatacaatccggcattttggaacttatagtgtaatagcaacagttaagtctaatattgtgccttgtgatgaagatgaaacgactagtttggatcattggaggaaacctccttcaaatttgcttcattcaatgagtgatgaagagttactatggagggcatcttttatgcctcgtataaaaaagtatccatttaatagggttcccaagattgcttttatgttcttgaccaatggaccattgccactttctcctctttgngagaggttttttgatgggcaccaaggcctttattcggtctatgttcattcattgccttcattcgaagctgagtttcctccgtc

SEQ ID NO: 30735 - DNA, 446 bp, Gossypium hirsutum
  Clone ID: LIB3146-002-P1-K2-G9
gatttctttggtcaatctgtaaaaaatgtggtattcaagccatttgattttgatgcacttgcagaagaactatgggacgacattaaccagagtttctgcaagtctacaggtgcagggtgtttgctagagatagagtcgaaagctatggaacaactagtagcagttgcatatgtatctgatgagaaaagggtggtgagggattgggtggaacaagttcttagcaagggattcgcagaagttaagaaaaagtacaagttcaatgctcacaccgtcgtgaaacttgttccctacgatgctcttacttctgaggagcaaacactaggactaggagtttgtgttccccccaaagttgttctcaattaataactttctttttcaaaagcctaatctggtagtttaaggaaagtgttgtatgaggatttagcatcctgtgaagtatgttcagc

SEQ ID NO: 30736 - DNA, 138 bp, Gossypium hirsutum
  Clone ID: LIB3146-002-P1-K2-H12
cccactcgtccgttttcaaattcaaaaccctttattcatacaaaggaaaaacctgatcttgatagcaatttctaacaatctcaacgccccccataatcttgtagtctttgcaataccacggctaccactcaatatacc

SEQ ID NO: 30737 - DNA, 292 bp, Gossypium hirsutum
  Clone ID: LIB3146-002-P1-K2-H7
cgcacgcgtgctacacactcatgttgctgctgttggctagatctacttccgtaccagctacatcagcttagatcatggagcctacgctaccctatctctcactgagaggcagacttaatatgaacctacttagctagtcttgccaactcggtccgaacacgtatacctcgaatactatgatcgataccagcgccattcaggactttcctggctatgacaaaacgagccacgtgaagcccgtacaatgccactggatacgaattcatacactgctgaaaacacatatatatga

SEQ ID NO: 30738 - DNA, 237 bp, Gossypium hirsutum
  Clone ID: LIB3146-003-P1-K1-A1
aaaaaaaaaggggatagagagagacaaaaagatatgatggatgggaggagggagggaggtgttagagtgtggtgtgtttggaggcaaccctgttgatgctcatccatgatactcttcatctttgtagctcttgaaagtcacggttatagctggctatttcttcgccattaagatctttaagtataatttgctcacgtcatgtcaaatgtgctgaatttctgattttgatagttatct

SEQ ID NO: 30739 - DNA, 420 bp, Gossypium hirsutum
  Clone ID: LIB3146-003-P1-K1-A10
gctcacaattagagcttagcatcaatgagcacgatgtcttgggaaaggtttctcccgatgagggcggggatcaacctgccgctctaatcacactttcgtcttcaaggtaagttgctaggcctgacatactaatatattctgtacctgcaggcaatctggactaggaagaatgtgttacagtctatggattttctactgctgatacaaatttagttgtgcgagagtttgaaaagtgtggagcgatattgaatcatgttcctggtccaagggattctaactggatgcacattatatatctgaacctatctgatgcttatacagctcttagcaagaatgtaatgctaattaatggagcactaataatcggtgtgaacccagtacatccaatgcatcgcgtggctctaaatgaaagaatgaata

SEQ ID NO: 30740 - DNA, 147 bp, Gossypium hirsutum
  Clone ID: LIB3146-003-P1-K1-A12
atgggagatgctaatgcaagcattccgacacctgatccggtgctgtcaaggccaatgtttggaggcattcggcagggctgcaagtgctaactccattgcattcgtcagcagggctgctttaaatcgcggagtcaaagagtcatatgg

SEQ ID NO: 30741 - DNA, 344 bp, Gossypium hirsutum
  Clone ID: LIB3146-003-P1-K1-B10
actagtacagcggccggcatcctgctgcaattcggccttagcgtcctcccgccctttgttcgcttcgacgcaacagacagcacgagaaggacactcacacatatacattacaggagggacgtgacatctctcttactagccttggtcctactacttgcttttcaccgatgcgtcacaggcatatcatgcaacaccgcagttgcagatctttaccctacgctatcatacatgacttaaagctgacactttccatcgaactggtgacactgcatcaaaacgcttaaccgttattgccaaaccccttttgaccgtcaaggcctttgtccgttcattaaaaatgcttt

SEQ ID NO: 30742 - DNA, 333 bp, Gossypium hirsutum
  Clone ID: LIB3146-003-P1-K1-B2
ggcgttggacactattcttctatgtctgagatttcccaaagtggtaatataattccaggaggtgcaccagattgtaattgtaactttaggtggtagttgcagattccataattttctaaaaaagtccttagattcagtctgtaataaataatcactaggatccagattagcaatttgtaatagtttgtaagcactgtgaactgagtatgtaccagtcggtttacccctttagacttgaaaatcttcgtggttagattctgataatgagatttgtaagattgatcaagtcacccttggctgaaaaaaaaataaaatgatataattttaaaaaga

SEQ ID NO: 30743 - DNA, 408 bp, Gossypium hirsutum
  Clone ID: LIB3146-003-P1-K1-B4
ctcgagggacgcgcttggttgccagcagatgtagctctggagctcagtggagcactctacgatcaggagatctgtcatggagctcgcttgcaaacttaatggaacgcgagccatggttcagaaagctcgaggtgaacgatatcattacagatgtggtagattacatgcttgatgaggatgactaagggcatgaaagtcaggataatgctgattcaggtactggatctgatccagatcgtggtgcagatgatgctacgtaaatgttactagtggagatgatatgaccggcatgtctgatgtggatgtagggaggtgtgatagagttgtgaatgctgttacaaaagtgggggcattttagaagtgcaataggtatgattgtgacatatgatgacttgacgctattgtatg

SEQ ID NO: 30744 - DNA, 113 bp, Gossypium hirsutum
  Clone ID: LIB3146-003-P1-K1-B9
aacctatcattccttcatttgcttagtccgaatgctttacccgagggttctacaacaacttggcgggcctattctggatttcctccaatcatctaatggctgctttggatcca

SEQ ID NO: 30745 - DNA, 448 bp, Gossypium hirsutum
  Clone ID: LIB3146-003-P1-K1-C5
cccacgcgtccgtaaaactgccatacaggcatagcccgattctgtatattttgttggtagcggaggtgcagaagttgatgttaaacgactaccaaaacgaccggcaccacctcgcttcggaaggaaacttactgaggctcaaaaggcaagagctactcatatttgccttgactgcggatacatatacactgcacagaaaccttttgatgagcagcctgatacgtatggatgccctcaatgtcaagcaccaaagaagagattcgcaccatatgatataaatactggcaaagctatcggcggagggctacctccaattggggtcattattgggctgctggctggtgttggagctgttggagcattgcttgtttatggccttcaatgaaactgtttataatgtgtattctttcatagaatcagtggtactagtacgacttcttaactcata

SEQ ID NO: 30746 - DNA, 261 bp, Gossypium hirsutum
  Clone ID: LIB3146-003-P1-K1-C9
atccactagtcgcgccacggcattcggtcgaaactggacctataatgggatgatccttgctcttccgcttcgttgcaagcttactcaggttgagcatcgcttacatctccgcattcaacttgatcaggctgtattaccccaccaaggtcatgcatctgaaactctaatcataaattacggactatggggccttaaacatggtcaacactactaatggcttgatatattgccatatacgacaaaagctctaaaaataaaatg

SEQ ID NO: 30747 - DNA, 382 bp, Gossypium hirsutum
  Clone ID: LIB3146-003-P1-K1-D10
agcttctgctgcgaacggggacgaaatattttcattatagaatcgtctttgaggcttgcaacagacgcagtctgtcccgaaccaccaaactcgaagccgatcgaaaatttctgttgtcaaggctgcatcaaactgtatcgttgtacattctgtcgcccctgaatggtcataagatctttcgataagaggggacattgtctaaaaacgtgatggctatcttcttcaccggagctacaccgaggacatttgacgtccgtgggtactttcttggaccttagaattaattagggaaggatttaatttccggaaaatcggcattttggtaatggaatttttggtgggcaccgttaattccattggtttctattgaagcctttaattt

SEQ ID NO: 30748 - DNA, 452 bp, Gossypium hirsutum
  Clone ID: LIB3146-003-P1-K1-D2
cggacgcgtgggtccggacgcgtggggtttatttataccgattttgtgtcggaagatgacgggatccatccaatcctctattaacatcttcctgtttgaaatccaaaggttttcatactgtaacattttggaggttacatgttaactgttctcaatttcgttattcattttactgaaatgtctgtttatgcaaaacttatttgttcattaacgtcatctacaaagcaggttggtgtttcactaccaattttttgtgtcggaaggtgacaaaagtaattagatattatatttcctctgctttattagcctgctgaaatgcatttcatcttcatgcagtaatattagtagagggaacaatggtgaaatttttcttatttttaactccccgttgtgatattgatttgattttggtttgatgtttaatggactgatacagcgtatatgtttttgat

SEQ ID NO: 30749 - DNA, 385 bp, Gossypium hirsutum
  Clone ID: LIB3146-003-P1-K1-E8
ggttttcctgactaccacatggaaacctccaaccccatcgacacagtgaaatctggctcgggtttggggctctataatggtggtacgtgacaatcttaacacagtgaaggcaattgctttggagtacgtgggatactaccgttagatgtggacactttgaagcctaatctcattgaagggaaagttttgagttcgctatctgattcgcaaagagaaaaaagttgttgaccaaatatttgtatgctttgcttctccattcattttctgaactttttttcagtttaaaaacaataacagaatatttaaattaattatgttattatgcatggacgatatgctgattattgcccaatgcctcaatgaataacttttgcttgtgcaagca

SEQ ID NO: 30750 - DNA, 428 bp, Gossypium hirsutum
  Clone ID: LIB3146-003-P1-K1-F10
tcggatccactagtacggccgtcagtctgctggaattagcgcttaacgcactaccaactggcttgctccattggctaacttcatccacgggatgtgttacatcgaagatgatcttatcaccactgatcattcgattactgctacccaaatcaccgtaagacgtccataaatgaaggcttggagaggttgcagatactgcctcattcaatatcattctcagcatcactggagcttccaagaccattatccatgttgtgtcagcatcaaatggcaagctaaatggaatggctttccgagttcccactgtcgctgtctctgtaggatactaaacacttacacttgatatgacttataatgatgaacatattaatgctgtcatcccgatagaatctgtaaccaacttgtatgatattctaaattacgcctat

SEQ ID NO: 30751 - DNA, 402 bp, Gossypium hirsutum
  Clone ID: LIB3146-003-P1-K1-F2
ggtttggagagctgatccaagctttacacctcatgaacgtcaaaggggttgttttagtcctgtgtgggttgcattttcaatcctaattggtggtttattgttggatgtgttaatatccgttactcttggtgtctcggcactacctgttaacatcataattggtgttattgttgtcctaggacttggaacagcccttcgacttgccctcgaattctgccatgagtggagtattaggagagccatgcaaagggtagaagtaaatgcgactctccagtatcatcctgctttgtaggtaaatctgtatatagtaaaattcaagcgttatttgtgtatatgacattcagcatgctattcacgaaggaacccattgtttgttactgcttacatctgtacaccatgata

SEQ ID NO: 30752 - DNA, 377 bp, Gossypium hirsutum
  Clone ID: LIB3146-003-P1-K1-F4
cataaatattccatttctctaatgtaaactttaacctcatcttttacatgaatttcctccggtaaaggcatggatatttcaaaataaaaaaaaaaaaaaaaaaaaaaaaaaaaaaaaaaaaaagaacaaaaaaaaaaagaaaaaaaaataaaactaaaaaaagcatacaacaataaaacacatagaaagaaaaaaaattaattaagatgacaatcagctaacaataaaaactaactagatacacaaaattaaggagctagttactggggaagaatcattaccatttatttttggagctattcatgtttatcctaacagagctttaaatactaaaatgggatatgataccacatagtaacgactacaataatttcctt

SEQ ID NO: 30753 - DNA, 271 bp, Gossypium hirsutum
  Clone ID: LIB3146-003-P1-K1-F8
attatttctctcgtattctaacttttttctttatcaccataacagacatacaactgaacagagaaacatactctaaccactataacttctctataatacacattatattctctacagacattgttacttacttctaccacctagcatcatccaaaacttctatcataatttttaacccttcagtatctattattattctaactttttaattctttttatttaatcatttttacttctctagttattttatatatttcttattattttttat

SEQ ID NO: 30754 - DNA, 414 bp, Gossypium hirsutum
  Clone ID: LIB3146-003-P1-K1-G10
tgtgctggaattcgcccttagcgtggtcgcggcctatgtactttattatttttttttttttttttgagatttttttttttattttattatgaattaattttttaattttattatttattaattttaattttaatcttttaatataaaaaatatataataattatagaattagtatcacagattaagaaactaaaactaattgctttttctgaacaacatcacttcaaattaaacacaaactattataagtatatgaactactttatatgatacaccatttaactacacaattatctattgccaacttaacctttaaattaaattattcttattattactcaaacagcactttcaacattcattaaacttaacatatatctacttctttcaaaagttttaattgattttttaatt

SEQ ID NO: 30755 - DNA, 440 bp, Gossypium hirsutum
  Clone ID: LIB3146-003-P1-K1-G12
gtgtgctggaattcgcccttagcgtggtcgcggccgatgtacttttttttttttttttttttttttggggggataagacaatctgatttcattatgatagcaaaccccatatcagttatacaatgaagttctcaacttttactcaaagtatcaaatcttttgcatcacataaacttaccattttacaaattacatgcaacatagtcttaaattttaaccaacacacacatttattctaaagcttaaccggatattgaaccgattttttcacataattgggtaagaagcattcatggcaagaccacattgaccgcgtttaggcttgatatcttctttgatcctcatgtatccacgatctccccattttggaccccatgaattcttgaggatccagtaccttggccgctaccacgctaagggcgatttctgctaatattcat

SEQ ID NO: 30756 - DNA, 539 bp, Gossypium hirsutum
  unsure (1)..(539): unsure at all n locations
  Clone ID: LIB3146-003-P1-K1-G6
tactcggtctcgtgaattcccgggtacgactccacgtcgtcgcgtggatggaagggagcaatgggcacattaggcactttgcagcttgtagctcgacggtacgagaaaggattgggggaaaagagcagagctattataccctacagtaaaaagaaagagcgttttacatctttcggtatcccatatccggtcatatgggtagctgacattacccactagtagtatcttggacccaagggcagttaacagtctgctctcttgttctgtattttggcatctttcgcattatttaaacgccatnnntcgtttcaagaaagtacctagtagactcaatagaacagatgatagaattgtctttggttctttttttcaactcatcaaaagaaaataaaaaaataaaaaatagggccggcccgcttctaagaagcgatccatagcttactgtaccgccgtagcatgtcgatctgtcatagcnnttcttctataagtgggtcactctttaaattcaaaattcaacttgggcccgtacgttttttaca

SEQ ID NO: 30757 - DNA, 427 bp, Gossypium hirsutum
  Clone ID: LIB3146-003-P1-K1-H3
cccacgcgtccgcccacgcgtccgctaaaattaaaaatatataaaagttcttccattcttctgtctacctggccgactcaagggcctcatcagcgtcctatgcgcctctacccgtcgtggctcatggctcgggaacaacgaaaacaagaggagccctcccttggtccaatatctacaccgaagaaaggttctccgatgatcgaaaccgcgggtaagttcccttgctactctcctttatttgttttttgaaaaagaacttaaaagcataatagagaaatcaacataatatgaatcgtaaatcaccttcaatctttgagtgaattctttgttttctttgtattcgaaaaaaaaaatcagccccgtctcttacaactgtttgtttttaggcttttatagccgagagaaaaaaaagaatacacatatattt

SEQ ID NO: 30758 - DNA, 175 bp, Gossypium hirsutum
  Clone ID: LIB3146-003-P1-K1-H5
attcttcacttaatttcaagcatctttccattatataaaaaaaacccaaacccagggaataggcgagcatctcatatgcattttcattctactataagcatatttcacccttaaaactcatatatatttcacatatatatcactaaactatctcatactcacatatttttaccaa

SEQ ID NO: 30759 - DNA, 321 bp, Gossypium hirsutum
  Clone ID: LIB3146-003-P1-K1-H6
aaaaaaaaaaaaaaaaaaaaaaaatttaaatttaaaaaaaaaaaaaaaaaaacacaagagaaaggatatatataactaccattttaaaacttccaatatttcaatacacttacattcaacttcttaccctcttcttttatgtcacctaatttcaattaccttaccgttattttacatcttcgcttctcaaaaaatcctgcctttacccactttaatctctttcaactaaatccctttttactcaattttcttaatttctaaaactcctttacctatcgcccttcccaacttttcctcatcttgatttcttaatacttttct

SEQ ID NO: 30760 - DNA, 414 bp, Gossypium hirsutum
  Clone ID: LIB3146-003-P1-K1-H7
caagatcagtgcaagatcatcaccgtcatcatcatcatcatcaacaatacaatactacttacaatcaaatacataatatatgtataggtaaaggacagaggaactgatttatgcaagtggggtctttggcctttccttaccgtgacacaccctagttgctggaccacacaacagatagtgtagaaacaaacaaaggctggtagtaactagtaactagtaactcttttttttttttatctcatattgtaattttttttcatttcctaatcttttcttttaccctccttttttcaaagtgaggtgaaaaaagagaactaagaaaaaaaatctgtatgaactatgtcactttgtgtaaaaaaaaaaaaaaaatattataattaaaataacttaaaaataaaaaatataaagaaaaat

SEQ ID NO: 30761 - DNA, 420 bp, Gossypium hirsutum
  Clone ID: LIB3146-003-P1-K1-H8
tgaagcccaaaacttggtaatttctgcattgtaacactgggaagaagttgtttcattcgaggatgaagcctcactgacaagctcagtcaagagggagatttctaatggtaccaagtatttggcttctcaagagatacgtggatttgattatgcacaaccaagtgcttcttctgcagatatcatttcaaccatctattcacttggaggtttgagcggcttagacgattatgcgctgcatggatatgagcaagcattgacttatcctggccaagtcactaattccctgatctgtgacacagatattactcagactttctgtgatgaacatcaccttcggtatttcgatagtgatcttcaaccccaaatccttggtttggaatcacaagcggatctactaactgttgttgacagattcttttg

SEQ ID NO: 30762 - DNA, 196 bp, Gossypium hirsutum
  Clone ID: LIB3146-003-P1-K1-H9
cacgcttccgccttcatcacatacccacggtctttaccttcctaccagctgatcttgagagagggaactggtaacaacattcgaatcatccagctcgtgatggccgtggcgctaccgcttataagcttccttatggttctacaccaacggcgataccagcttctcaaccacatgcagaggcatgcgcatgatccat

SEQ ID NO: 30763 - DNA, 240 bp, Gossypium hirsutum
  Clone ID: LIB3146-004-P1-K1-A3
gacaaaaaaacctccaaaaaaaggggttattttttcaatggtggtattttggcgtttgtggcggcagcctcttgggtgtaatccttatgtcctacatccaagataccttaggttgggtactcggttttgccatccccatgtttgccatggttatatcggtcgtgtttttcacatgcggtaatcggacctacgctcataaaccggaccgaaccatgtacaataaacacttttccaacatgc

SEQ ID NO: 30764 - DNA, 179 bp, Gossypium hirsutum
  unsure (1)..(179): unsure at all n locations
  Clone ID: LIB3146-004-P1-K1-A9
cgcgtncgtatgaaccctattttatcctcacatatgattacttcaaaaacactcaaacggcagcgcctggcttgctttcttcgactgcggcattcctccccttcatccaaggtcagataaacatttttccttctgctgttcctttcattttcctgaaatgcttttttttgtcttaccca

SEQ ID NO: 30765 - DNA, 415 bp, Gossypium hirsutum
  Clone ID: LIB3146-004-P1-K1-B10
cccacgcgtccgcccacgcgtccgcttttttttcttctttatttttcattctcttctgcttctccatttgttttcctctcttcttcatctccgttttcaacataattaattcaaagaaatgagatttcaaacatgaggcatctgcaaagttgttttgcttcaatgatctaataattaattcaaagaattgagatttcaaacttgaggcatctataaatcatgtcaaacagtcaactaaaggttacttgttaatgtgtagcatttaaccatatgatggatttaagggcttgattgcatgtaaatcatttgaggcagctcttgaaaccgccattagaatatggagaaggaagaagggaacataaaagaaaaaaaaaggaaagttaaaagaacataaaagaaaaagattagattgctc

SEQ ID NO: 30766 - DNA, 222 bp, Gossypium hirsutum
  Clone ID: LIB3146-004-P1-K1-B8
acgacgcgttcatgcacgcgttcgattactcctgcgagcacgcgtgcggacaatatgtgaagatgcgacaggggcatctaagaaacagacaactgagaaatccattgtttcaaatcatatcatgggcaaatctaaatcaaactctaagcgacgttcttgatctcaaacccagcattctaaggcaacagcataaaatgatgatgtttgagattgcatggaaga

SEQ ID NO: 30767 - DNA, 391 bp, Gossypium hirsutum
  unsure (1)..(391): unsure at all n locations
  Clone ID: LIB3146-004-P1-K1-C1
cccacgcgttcgcccacgcgtncgtaacatttggatatgcctcctttgattatgaagattgagaataccaacaatctgatttggtaaaacttgatatcctcttaaatgggaagccagttgatgccatggcaacaattgttcactctttgaaggcacaacgagttggtcgtgaactggtggacaagcttaagaaattcatcgacaggcaaatgtttgagataatcatacaagctgcaattggatcaaaggttattgcaagggagacaatctcagcaatgagaaagaatgtcctcgcaaagtgttatggtggggatgttactcgaaagaagaagcttttggagaaacaaaaagaaagaaagaagcgaatgaagcgagttggttctggtgacat

SEQ ID NO: 30768 - DNA, 377 bp, Gossypium hirsutum
  Clone ID: LIB3146-004-P1-K1-C2
gtcggatgaagaggatggagtagaagatgatatatagaggagaaaaagaagaaaaagaaagagaagaaggataaggagaaaaagaaagaacagacgtccaataaagaggatgatgtaaaagatgacgaagagaagaagaaagataagaaggataaggagaaaaagaaagaaaagaagtcggacgaagaggatgatgtagaagatgccaaagaggcaaaggagaagaagaagaaagataacaaggataaggagaaaaagaaagataagaagtgcgataaagaggatgatgtagaagatgccaaagaggagaagaagaaagataagaaggattaggagaagaagaaagataagaagtcggttggagaatatgaaaggac

SEQ ID NO: 30769 - DNA, 376 bp, Gossypium hirsutum
  Clone ID: LIB3146-004-P1-K1-D4
catgctgatcgaactaaaaaaggggcgtattgagcttgattggtatctgagtaaggaagcacgatgagctgttggcaagcacccttcaacctggtacctacaggaagaccttatctttggtcattgttgatggttttgcagtcgaaatcacagaggctcaggccaatgtgctgagatctgctaatggggtaagagttgtggagaagaatcaagagcttgcttagtgctgctaaagcttgaaagtttgcagaaacgaagagaaaataggtttcaagaacttcttgtagatgtggggtttcagactggttctcttctttaataatcattcaagacttgaaatatagcatattgcagctttaaatagaagcaatttatt

SEQ ID NO: 30770 - DNA, 183 bp, Gossypium hirsutum
  unsure (1)..(183): unsure at all n locations
  Clone ID: LIB3146-004-P1-K1-D5
ggggnatngggaaaccaaaaggaaacttgttggatccggtaccttaaatagaagttagtcaggaaataatgttggatagggggtaattgatttacaaatgttaatacagtggagttggtttacaaatttacattttatttggttaggatcttattttttaattaaagtttattttggttaaaa

SEQ ID NO: 30771 - DNA, 383 bp, Gossypium hirsutum
  Clone ID: LIB3146-004-P1-K1-D9
caacttacaataattatcattaccaccaatgctcttcctttaaccattctagggagtcatccacttcgaggttctcggtttccggtaacatcccgaggactctttcgggttggaagcacgaacagattggtcatggtgatgatgataatgacgaggaggacgatgatggccgcagcaatagtaataatgtgaggcttccttatgttttttgcctcgttttagtgttgcttgtggtgtttgctgtggtggttttgattaggtgggatgctaggaagagatatgagcctgaaatcttcgttaagcgcatagtgtttgagaacttgtattatcaggcaggaaatgatgaattaagggtgccaacagatatgctttcacttaattcg

SEQ ID NO: 30772 - DNA, 234 bp, Gossypium hirsutum
  unsure (1)..(234): unsure at all n locations
  Clone ID: LIB3146-004-P1-K1-E12
natatttttttattattactttcttttttttttttttttttttatgcatttttatgggcagccttttttacttattaatcacaaacacttactttcttcatatatcaaaactataaattctatatttactacaaacttctcaaacataaaacaattttatccattctaaaaaatctataccatcacacaaattctttttttntccctttcttttaaagcactaccaatttttac

SEQ ID NO: 30773 - DNA, 307 bp, Gossypium hirsutum
  Clone ID: LIB3146-004-P1-K1-E2
cgggcgccacgcgtccgcaaattccttagatcgaccaacaatttgtcttttcttaaaggccctaaccctaattgcaggttttgttgttagtcttcacaatgtcaaccacagtccccagaaaaattaccctgcggaccgcggacaatcactaattctaagtcgatgagagcagtatccatggaactcggcaccgtcaagaccttcttcgacgaaaacccttacgccaccgacgaacccatccctctacccaacgtttcctccaagggtttgtctacaatgatagagtactgcaaattacacctgtttc

SEQ ID NO: 30774 - DNA, 355 bp, Gossypium hirsutum
  Clone ID: LIB3146-004-P1-K1-E5
catgtattacgtcataagccagctttcatttggttaaacagtgtcacctcacgatttgaatgatggcaagcgaataataccttaccttgggaggagccatgacaagatgaatggtcgggcattcattaatgaccgcgatttagatgcaaatgttactatagagcactacctttaagttgtcaaaacagaggtcgatacaacaaaatcttctgatgaccatagaattatcgaggaatatgagtacacagcgcacagcagtctgtcacatagcgtgtacatacctgatgcgaactttcattctgaggtatctccgatgcacgttgtggtaacagacgactcagaatcgttttcacat

SEQ ID NO: 30775 - DNA, 416 bp, Gossypium hirsutum
  Clone ID: LIB3146-004-P1-K1-E8
cctcgggcgacgtgcgcgccaaggtcttacatggaggctgcggcgcctagggtttccttcggctgaaagtgtctaggctctgggctatgttttggggggtttttagttttgggcctgcaaaatttgggctttttatttgggttatttgtttgggctgatgacttattgtaaatggacttgatatttggacttaattatttttggtctattattatttggaacgggttggtccatctttggcttttattgccccgggctaaattggcctattccaattatttttaagtcatttcattcaaaggttctttattcaatatgttaattggttattttcaaattaaatttaattttctctcttttatattttttaattttttctcctatttattgctgcttatatattatttttatttttt

SEQ ID NO: 30776 - DNA, 350 bp, Gossypium hirsutum
  Clone ID: LIB3146-004-P1-K1-F3
ataaactgccagggggggttatataaaaaaaatatatatatataataaaataaaataatttataaaaaaatataaaaaaaaaaaataaaaaaaaaaaaaaaaaggcccccccttttaaaaaacccaaatttacttcccctttcttccaactttatattttttttttttggccccctaaattaaattatctgcccccccttttacaaccccttacctggaaaaaccctgccttaccccaactaataccctttgaaaaaaatcccctttttcccacttggtataaaaacaaaaagcccccacccaatcccctttccaaaaatatttccacccttaattccaaatggaccccc

SEQ ID NO: 30777 - DNA, 107 bp, Gossypium hirsutum
  Clone ID: LIB3146-004-P1-K1-G3
gccatgtacacatgctctttattattgtagtggcataaagaggaagagagtgttttttctatcctaattattgggttttcactttaatttattcgcgtatagaaatg

SEQ ID NO: 30778 - DNA, 419 bp, Gossypium hirsutum
  Clone ID: LIB3146-004-P1-K1-G5
gagaaagtttttggatcagcttctaaattctctgaacaagaaggagatctgggtataggggatgatgttcaaatggaactatatggactccacaaggttgcaacagaagggccttgtcatgaatcacagccataggctttcatggttgcttctcgttccaaatggaatgcttggcaaaagctggggaacatgatttcagacgcggctatagagcagtatgttgcccttgtttcagataaagtttcagagtggacgaaatatacttccgatggtgagcgcaaattagaatctgcagaccaaggcgtagatggttctgtggctcctgatatagattcatttctagataaacatgccatttttattcctgaaaagaatgcagactcgaatactgtttcagctagtggtgtcataactgagag

SEQ ID NO: 30779 - DNA, 407 bp, Gossypium hirsutum
  unsure (1)..(407): unsure at all n locations
  Clone ID: LIB3146-004-P1-K1-G6
cccacgcgttcnctacgcgttcgcccacgcgttcgggaagggatcatagactcggatggtgaagtcatcgcaaggggaaacgtaacgtacaagggtaatcaaaagccacttatggcctatgataaggtgcaaataactgtggatcaaggtttggctactctctttgcacctaaatagagacattgttttgatcttcaaagtttcatatgatgatggtcgcgggtccttttacgacttaagaatccaaaccgatctgattgaatcgatcgaatgcctctcgtttcataatcagtttcaatttaaacaatggaaatttcagtgtagccttcaatattttaactaataatcgcaccccatatatcaaccttactccggctgtcaatttgtattaatattaatggtgattc

SEQ ID NO: 30780 - DNA, 151 bp, Gossypium hirsutum
  Clone ID: LIB3146-004-P1-K1-G7
tattattaagaaatgaactccttgttggtatcaattcccaatagagtaaatggagtctcaagtaagtttcttttatgatttagggtttgttcgttctagttttgtgggtgatttaactgacatttctactggtcttttcttcttaatttta

SEQ ID NO: 30781 - DNA, 372 bp, Gossypium hirsutum
  Clone ID: LIB3146-004-P1-K1-H3
atgatatcaacgaagcaaactcagagctacagtgagtccattcctcaccccacccaagacccctctcctaaaatcaagtggagaaaagatcacacacttgtctacaccgaactatagcttcacaattctgccagtttagatgagccaaaccaaagaagctcatgccgagccacaaatgaaccatttcacttaagatctgatattctctgcaccaatgatgaataaaacagttcattacaggttaacaccaacctatatgctacaggatcaaatggatggaaaatgttgaacatttgacgacaagctggcatctctttagatatgttctcctcgtcccaataatcttgccctttgcctgcaacacagagaaaa

SEQ ID NO: 30782 - DNA, 370 bp, Gossypium hirsutum
  Clone ID: LIB3146-005-Q1-K1-A9
aatggatcttgcaaggaaagaagcatacactcaccctattaaagcatgcattgagggattggtttggaggagagataactaatctataagcaaaatagcaagcattcattaccatgaagcactcaatcgttgtttgaaagattagaagaaattaccataaaacaattaaatcatctttaacccttcttataaaaaagttatgtacttgcaagattagaagaattaacaaaaaaataaaaaacagttttcttatttcaagaaaaaaaaaaaaaaaaaaaaaaaaaaaaaggaaaaaaatatattaaatataaataaaaaattaaataaattaaataatttatataaaaatataaatttggggcggccgttt

SEQ ID NO: 30783 - DNA, 427 bp, Gossypium hirsutum
  unsure (1)..(427): unsure at all n locations
  Clone ID: LIB3146-005-Q1-K1-B1
cccacgcgtncgaaaggattctgcagcagctacactgcacacttgaggaaaaattagagtgtgttgtatccttacttaagaaggaagcctaccaatggtgggatactgtatcccatatagttcaaccctcatagttgacttggaagtactttctagcggaattttaaaagaaatacatcaatgagatctatctggagcaacgaaagagagaatttttgtatcttgagcagaataacatgactgttgcagagtacaagagggaatttgtaagatgttaaggagtttgtgtctacagaagctgatatatgtgctcagtttgagcctggtcttaattatgggattagggtatacctaatagctctaaagattcaagagttctctactttagtcaagcgagctttgaaagtagaacaggtcatgaatgaat

SEQ ID NO: 30784 - DNA, 419 bp, Gossypium hirsutum
  unsure (1)..(419): unsure at all n locations
  Clone ID: LIB3146-005-Q1-K1-B2
gctacttacatacggccggagaatcccgtatgctgaattatttgctaggatcgatgctgttgatccagccgccattaaacgagttgcaaaccgatttttctatgatagggatatggtgattgctgcgattggcccagtccaagatttgccagactacaactggttcagacgccgcacctactggaaccgatagtagattatcttgctttagtttgataatggtacagcatctttcgtgggcaatcgaaaccaaaggttggcattttttttattcaatttttaggatcctttagctntattgttatttaataaaaacatgtttcagcgtttttgttgaaaattacaagaaatttttgatgttgataatgtttgggttgcatttgtatatttggatcttacctctaaatggcatttttttc

SEQ ID NO: 30785 - DNA, 425 bp, Gossypium hirsutum
  Clone ID: LIB3146-005-Q1-K1-B5
ccctcccatttatatgcaacttccaagctttggcatatggtttacaactctttagtttatgcaggcaagaattacatgtttctgctttgcaatggactgcttgttttaattgccaccagctctggtttgatcggtagttgtagtgtagagactgatattaaagctgaaaaggctgtgaagatgagcaagggaggtagtcaaacagaaccagaggcagagccaaaagggtccatttcaaaagagacagttgttgcagaatatgatcaaagagaagaagaggtggccttggttgtagaactagaagatgaaggtgaagaagatagaccaaatgagggtgtttcagtggaggaggatgaagatgaagatgaagaagtttgagtcaatgtgtaatgtgaagattttattagaaagatgaaagaagggat

SEQ ID NO: 30786 - DNA, 102 bp, Gossypium hirsutum
  Clone ID: LIB3146-005-Q1-K1-B7
ataatttctgctcctacaataagacatctatctctctatcgagaatgactagctggtactatcatcgtaggtcgccacaatgagagctctacaaagtctatg

SEQ ID NO: 30787 - DNA, 290 bp, Gossypium hirsutum
  Clone ID: LIB3146-005-Q1-K1-C1
caccatctttgcctttattggttactgcttccttaacctcttccacataccatgactcggaatgatatggtggtgaagtccttttcctcccaataacacttccaagccctatctctttgggtcatgggataccgacttgagattactttttgcaaatcaagtcacagcaattgggttttaccttgaacctgaagttgagggcatttacaacattgggagggtaagcccgggaacgtgctagctgaagaagataaccttcttcgaggctcttattaaatgctccagtggag

SEQ ID NO: 30788 - DNA, 421 bp, Gossypium hirsutum
  Clone ID: LIB3146-005-Q1-K1-C10
cccacgcgtccgcccacgcgtccgcagcaatcacaatggaaagaatcttcggcacccaccgagaggatttatatacccataacgtctcataggaataataatgcagctccaactgttcagaggtcagacactgcaataggtttaactcaagagcgagcatatatgccaacatctcataaaaatgacggcctggttcctgtttcaaacaggaacagaagcatttctccagcttccgaccagatatacatgatggcaactactcacctgaatgacaccatgggtcaaaggattcagagaactgatgcacctatgttcccaacttctgagcgcatatatttacctgcaacccctcacaggcccgaccacatgggttcgacctctcaaaggaatgatgttgcattacgaccaggctctgagagtt

SEQ ID NO: 30789 - DNA, 414 bp, Gossypium hirsutum
  Clone ID: LIB3146-005-Q1-K1-C11
caaaaatatcttcactgttcgtttgttccttgtttgaaaatcgcagtaagccattcccaaaaattttggtgcatgatatttgtgatccaagacagatttaataactgccagacttcggtgcttataggacattgcctgaagatgtgataacaatcttcttccctgtagctacaacaagggcaactggcatttttcactattcttctacatctgagattacccaaagtaggaatgtaattccaagagatgcaccagattatgattgtaatcttagatggtagctgtaggatccatagctttccaaaaaatttcttaatttcgggttgtaataaataattactaggatccagattagcattgtgtaatagtttataggcactacgaactgagtattcaccagtcggttcgcccttt

SEQ ID NO: 30790 - DNA, 411 bp, Gossypium hirsutum
  Clone ID: LIB3146-005-Q1-K1-C5
atttagcagcaataggaattctcaatatgaaatgtcatggactgatgcctcctgcacgataacaatggactgaagctctttaccgctgtgaaagcattgtaaaacagggaatgctacattcacgtggtgaattacttctaatgctagatgccgatggggcttccaaggttactgacctagaaaaacttgaaaaccaggtttgtaaaagactctgaccacagtcactgaagacatactgtgtgataaaaattatctaattttttgtacttcagatccatgcaattgtgagaaaagattatcaccctggtgattcagtagccggagaggcaacttttagaatttctgatatcccaatagttgcatttggatctcgtgcccatcatgaggagaaagctctagctacgaggaagt

SEQ ID NO: 30791 - DNA, 360 bp, Gossypium hirsutum
  unsure (1)..(360): unsure at all n locations
  Clone ID: LIB3146-005-Q1-K1-D11
cggactcgtgggcggacgcgtgggtatgaactagtccggacgcgtgggtgagtattagaatattggttgtaacccatttctgttcacttatagattcttatctcaaagcttgagattttatgggaggtgtctacctaacaatgcccttaaatttatggccatctgtgataaggcttcacatattttttacagttgaacaaggtttcctcttaccagttgattttggtttaaagtaatacttgataagcttcctcctgatgcttgtttcatgcgtnaattaataaaccttgctctttctgattattttattttatttttttattttattttttttttttagttatatatattttttatttt

SEQ ID NO: 30792 - DNA, 256 bp, Gossypium hirsutum
  Clone ID: LIB3146-005-Q1-K1-D6
cccacgcgtccgcccacgcgtgcgtggacgcgtggtactcgcaattctactagcaatttctctatcaagtgcgctatcaagagagagagttatgtgacatattttgtgacgaggaaaaggactagggttgggtctttggttggatgggcgcatggaatcgcacgttaaagcatgagtatgaccatcattatgaccaccattgtgggcacagatgatgataagtatttcacgaataacttcttagagacagagttgc

SEQ ID NO: 30793 - DNA, 320 bp, Gossypium hirsutum
  unsure (1)..(320): unsure at all n locations
  Clone ID: LIB3146-005-Q1-K1-F1
atgtggtatcgtgtgacagctcaaaaagatacaaaaaaaacccgcctgtcaacattggtgcaaaaaaatgggtggatattggactttggaaactctcccaaagagtgtttcaaaatcttaaaatcacgtggttatcggattgctacaacacacgtaggaatggatgccgtatccatatacgacatggattggtcaaagccaactgcaattgtagttgggaatgaaaataggggaataagtgatgaggcgctggaactgtcaaatttgcattgtagtattccgatgaaaggcatggntgactcttttaatgtttcaatggc

SEQ ID NO: 30794 - DNA, 213 bp, Gossypium hirsutum
  Clone ID: LIB3146-005-Q1-K1-F10
cccacgcgtccggagaaatctgagtaaatttctctcatattattttagtttatgctctgatcgtcgagttgcaggtttggttagggaagtcttgaattatgagttctcgtaagacataattttggatggttttagtcaaaattttcatacttagtatttcttttcatgtaataatgtaccttgtatatatctgtgatatatatcacttacatt

SEQ ID NO: 30795 - DNA, 393 bp, Gossypium hirsutum
  Clone ID: LIB3146-005-Q1-K1-F12
gaaggtatactcaagcctgtgggatgcagatgaatgggcgacaagaggcgggctggtgaaaaccgattggtcgaaagctcctttcaaggcgtattataggaattttaatgcctattcatggaactccgtcggaaccgatgtttggcgaactcgggcactggatgctactggaagaagatggctccgatgggcacagaaataccacatggtttacaattattgtgctgatttgaagcgatttcctcatggtcgtccctttagtgtaggcgctctaggttcctttaaccgcccaaaaagaatgttgcttcaatctaggatttaattttgtctattgctactgtaaatttgttctatttatgggttaaatttggaaattcacccattttatttttt

SEQ ID NO: 30796 - DNA, 221 bp, Gossypium hirsutum
  unsure (1)..(221): unsure at all n locations
  Clone ID: LIB3146-005-Q1-K1-G2
ctttatcctttttttttttccctcaattttaataattatttgcttccctttgcttatcttaattaatcgttatattagttgtaattttctctctcctttttctaaacttaacagctgaagttagtatttggttgactggtcgtcaacgttggcgggtttcgggatcaggagtgagaaactaagagattaattaattacaagtatttgtcattttnnaaaaa

SEQ ID NO: 30797 - DNA, 421 bp, Gossypium hirsutum
  Clone ID: LIB3146-005-Q1-K1-G8
gttgattaatgggttgtgtggtgaagggagaattgaagaggcggctaagttgaaggatgagatggataattcaaaagtgttaccagatgttgttacttataatacattgattgatggatattttaaacatgggagtagtgaggagggctttaggttggttgaggaaatgagggagaaagggatggagctgaatgcagttactaacaatattttggttaaatggtactgcaaagaatggaagatggatgaaacgagtgaaagagttaggatgatggaggaaagtgggtttccaccggataaggttacctacaattctctgattaatggatattgcaaggctgggaaattgggtgaagcttttgagatgatggatttgatgggaaggaaaggttttaagatggatactatcacacttaatacc

SEQ ID NO: 30798 - DNA, 360 bp, Gossypium hirsutum
  Clone ID: LIB3146-005-Q1-K1-H2
ctcaattgggataagcaatccacgaaggccaaccaaaagccaagccgaacttcgagcctcctatccccttctactcctaagtcagcatccataccagcccgaaagctgaagtcagcaagcccgaggagtggtgtggctggtttagatgatgaaacaagaagcatagtcagtatgaagtctgacagaaaccggagacacagcatcgcaggctcctcagtgcgtgataatgagagccttgccaactctccatcacttccaagttacatggtaccaactaagtctgcaagagttaagaccagtttgcagagccccttgtgaccagaagcaaatggaacacctgagaaggatccaattggatct

SEQ ID NO: 30799 - DNA, 418 bp, Gossypium hirsutum
  Clone ID: LIB3146-005-Q1-K1-H7
attgaagccttgcagtttatgaagggttcatgttctgttctgagctttggattgctgatcaaggctatggcctcctagctctggaaaccgttccaatgttgatgtggctttcttatttcaccttaaaaattgggaaaactcaatacaaaggtaataccgtccacataagttcacttgaaaatagtaggcattgtcagtaaaattcgctctgaccaaccttctcataaatttgaggaggagacggattggcttcattgtttttcacattacatggtgcatgtactctttcgtgccattgtagatatccctgtctgtggcatggctttgactatgttgatgtatttcatgcctgtgtgctgatttccctttccattttatttccatcttttgtacttcaatgctgcatatttgaggaaag

SEQ ID NO: 30800 - DNA, 260 bp, Gossypium hirsutum
  Clone ID: LIB3146-006-Q1-K1-A1
ttcccaattcgacccacgacgtacgcgtgtcttgactccatactgactgagaccctttcattaacatcaaaaacactgcctgtgtatcggttaccacataatgccatgctagaaattgtaacatgaggatgcggaactgactgcttgtgtggcagctgctaatagagatgcacgaccttgcatacctggacgccgccgaaactaccacaactgatactctggttcttgctcttgcacccgagaatgcacactttgaagga

SEQ ID NO: 30801 - DNA, 264 bp, Gossypium hirsutum
  Clone ID: LIB3146-006-Q1-K1-A2
gaaatgccgaagagctttcctgctagccggtttccacccagcccgataggataaattcttgacaaggaaaagaaggagagagctccagcagcggctgataatagacctgtacgggcgtcggctatcaaggatcacatcctacgctcgcggacgtgcgacgttaaatctgctcaatgagcgggcgtgaactaacttgacttgggagtcttctacaacgaatgaactggtaaaaccctgcgagttccatacttaatgcggttggag

SEQ ID NO: 30802 - DNA, 408 bp, Gossypium hirsutum
  Clone ID: LIB3146-006-Q1-K1-B1
gcagatggtacacgggaataaatcatgcagagcacatgcaattacttttcttattgaagcatataaaagggcattaccagtataccttccagtttatttgattcctgctttgatagttcatcatcaaggtctcttcaaaaggccttgcacaatattaggaaaaggtattgttgatattgccagatcaagcttatttttagccacctattgcacatcagcttggatgtggacttgcatcctgtttgggttcttgagaagatgtagcataccattgatagcaattggatcgtttccagccggtctgagtgttgctattgagaagaaaagcaagcggatggagatatcactctactgccttgcacgagccatagagagcttctttacatggatggctgacatcgggtattt

SEQ ID NO: 30803 - DNA, 444 bp, Gossypium hirsutum
  Clone ID: LIB3146-006-Q1-K1-B6
tgttatctgtttacttctcatttttatccaaaacgagactggtagattctcgccattcataactttgtaggtctcaattagtaggacttaggctttcacaagcctcttggtggtcttctggtaactatggcatgctaggacatggagctttttcaaggaaaggcaatggtaccacaagatgatcttagtagtgccccgaccacccagaaagacttgagagttcacaatttcatttgctcccccatgttgcctaggaggccaagagttctgaggtgggaagccttgcttggtgagcagtcaagatcaatgttgatgcagcctagattttcaaaggagccttgtgtgcacaacgtctcgatggagcttgataatgctcattcagctaaggccttattgttggaggtcttatgatgggtaaggagcatggattccaccacattacta

SEQ ID NO: 30804 - DNA, 217 bp, Gossypium hirsutum
  unsure (1)..(217): unsure at all n locations
  Clone ID: LIB3146-006-Q1-K1-B8
gcttctctttctgtaggaagatcacttcaatcaacaaactgaacttgtaatttttattaactggtgtgctcggttggttctctagtgctccacctatggaaaattttatgtaacatattatccgtttcaatccgaaaatctcaaggctttgtcccaaantaaatattaaaaattaaaaataattaatatacaaataaaaaatataaaataaataaaa

SEQ ID NO: 30805 - DNA, 378 bp, Gossypium hirsutum
  Clone ID: LIB3146-006-Q1-K1-C1
cccacgcgtccgcccacgcgtccgcaattattatcagttctaaccccatttttcgagcagctttgttaagtttaagataacacaggcacggcagcaacatagatgcagtgacactcaagaacgatcctataaaggccatcacgtagccaaaaaatgggatggttaaggcaacaatcactgtgctgctcactagtgcagttctaatgaggatgcttagtgacctgctgttgcaaaagagggatgtttcttcgatcgcagtcgtaattggagcggttatgatagcatatttcgtcaggggattgattagagtagtataaattgctatttttgtggtcatcttttttatgggaagatttaatgtcacttgagacttcagat

SEQ ID NO: 30806 - DNA, 387 bp, Gossypium hirsutum
  Clone ID: LIB3146-006-Q1-K1-C10
gttgtaatgtcatggtaagttgagtaaatttctaatggagttactaagcattcaatatggttacccgttgtttccttttttttttgtagattgttgacttgtagaatgtgtcgatcgaatcgtcccgaagctcacactatcctacgatagactctgtagtttatgatcgtttttagacttgattatgtgtcttgtacataggtgttgttatggtaacctaaaatgatagttttggtttgaactttggttaatgcttgatcttgtcaaggttaatgtcaattggtatatgtaagtttggtaatatgtaatgttgtgtgtatggtacttataatttttaagtttggatatgtaacttttggtggatgttttgataattttgcaatttgg

SEQ ID NO: 30807 - DNA, 246 bp, Gossypium hirsutum
  Clone ID: LIB3146-006-Q1-K1-C2
ggaccactctactggagccatgcttacaaattcaaacacacgaacgcgaacaaatatctggttctggagcttaaaaatcagcgtcctgtatttaacgtaatacatccaacaatatagccatagatcatttactacactgatgactgaccgaccttatctcgtgcgctcccaccgtgatataggggatttggagtgcctatctgcttgtgactacggagtgcatgagccttgacggctaccaacctt

SEQ ID NO: 30808 - DNA, 449 bp, Gossypium hirsutum
  Clone ID: LIB3146-006-Q1-K1-D3
agaaattgctgttcctaaggtcttgaaggcgaacggtgatagcagacatcttagtagctcttattcggctgcttgtgaaatactgaagcctactgtgggatctgatgagcctgctccttcagcttcggcctcaaaaatctttgaaatcccagaatctgaattctacaattttgatgccgacaaaaccaaggaaaagtttcttgttggtcaggtctgggcattgtatggtgatgatgatggcttaccaaagtactatggtgagattaagaacatcgagtcccacccggttttcaaaatacacgtgacgtggcttcttccttgccaatcagaaagaagaaccaagtggtacgatacaagcatgcctacttgttgcggaagatttagtagaaagggttcccaagtctacacctccactgactccttttctcataagttaaaggcagagtcta

SEQ ID NO: 30809 - DNA, 370 bp, Gossypium hirsutum
  unsure (1)..(370): unsure at all n locations
  Clone ID: LIB3146-006-Q1-K1-D9
cggatagcatggttcggagagggaaaccgagttctaaaaataaattcgaatgaaacatacagtttttgtttattttggtgccaattggagtccatggaagcggccgtgttgccatagaatctgttggcactcttagtgtgtcctttgcttatgattttattgacaggtaattagggattgatagattttgtttgctatttataactaatgcattgtggaatcatattaaatgttttatggtgttttgtggagtttaatctaagtttgtgactcaatttggtgcagaaatatgaatattggatggttttattnaaaaaaaaaaaaaaaaaaaaaaaaaaaaaaaataaattaatataaaataaaaaataat

SEQ ID NO: 30810 - DNA, 367 bp, Gossypium hirsutum
  Clone ID: LIB3146-006-Q1-K1-E1
tgattatcaagctttaaaattacaataaatgaggttggcatttagttctcctgttaaaaaagttgatgcaggggaaaccaagaaactcttttcttttttttttccttaaaatgataatagtaaatttaaatctaaagtttagaaaaacaaaaaattatgaaaaaaaagcaacagatatatgcatagtaagacaatacataaataaagtaaaaaacaaaaaaaaaaaactaaaaatgaaaacgtaatatgtaataaataaaaaatgggggggccctcttaaagaatacaaattttatttccccggcttggcaaaagtattttttttttaataggggcccaaaaataatttctcgggcgcgcttttaaa

SEQ ID NO: 30811 - DNA, 396 bp, Gossypium hirsutum
  Clone ID: LIB3146-006-Q1-K1-E4
cccacgcgtccgcagtcatatctctgcaaatggtcaaagagtgctaccaagtggaggcatcagtgcagatggacctccaaccactctcagtggtactggcgttgatcgcatggcatttctgcaggccaatatcacccgtgataataccaagtttataaatggtgctatagttggtgagaggaatgtgttccaggtggaccaaggacttgggattggcagcaagtttccattctttaaccgccatcaactaactctcacacgatttctccaacttagacaagtggaagaaggtgttggtaagcctccgccacctgttctagtccttcatggacattacggaggttgtgttggtgaccttccaagttatgatgcttttacccttggaggcccatattc

SEQ ID NO: 30812 - DNA, 400 bp, Gossypium hirsutum
  Clone ID: LIB3146-006-Q1-K1-F1
cggacctgaaaagtccggtagagacaataagctgcctcggcatataaaatttcctttcacatatcctgttagatgccgcattgttcaaataacactaagccttccccttcagcggcctggttcaagctccgtgaattttgataaagacattaatctcttgtctctagatgatactccctttcctcaagaaactcgatctttcgaagcagcaatgccacgggatccatgccttcatgccaaacgaatcgtgatagctggaagccctgcaaacgaagagataggacttagatcatcacaaagtactgatcaaataaattatataaaccggttgaaccaaactccgcagttaagattcaaagttccgattgaggctgagaagctaatgtaccatgatctcgtc

SEQ ID NO: 30813 - DNA, 421 bp, Gossypium hirsutum
  Clone ID: LIB3146-006-Q1-K1-F11
aagcgattgaaagatggtgaagaagtgcatacccctttgcacattgatacttctcttgcggcacagggtcagcatattgggctgagttctgcacctggggacaatagtgggtttctggtaaaggtcatgcacctacgaaggaggcttggggcatgtgattccagatttgctaggttttcatatctttttaaacttaatcggcgatctgttcaaatgatactgacagttgtgtttgccttcatgcttttaggtatattggtctcccatgtcacttgaaaacggttgtttgcaattcgagaagatcatcattgcatgcctgaacaacaattcttgggagtatttcgtcgattcgattgttctcgaaggtttcatgtcaaactgctaggaagtggctagtcgctgccgtttgctgaagcaagtc

SEQ ID NO: 30814 - DNA, 388 bp, Gossypium hirsutum
  Clone ID: LIB3146-006-Q1-K1-F7
cttatttgtattttccgtggcaggcaagacttatgacgacgcatggcgagaccgctgcaacgagcacgctcgatgcgcacatgcatcgggcgtgctcgttgcaggaagggatagcggagttctacgaccagtcgtctgggctttgggaagacatttggggtgaccatatgcatcatggtttttacgatccagattccaatgtttcaggctccgatcatccagctgcccagatccgaatgattgaagaatcgctccgtttcgctggaataaccgatgatccagcaaagcagcccaagacaatagttgatgtcggatgtgggataggaggcagctctagatatttagcaaggaaatttggagcagaatgtcgaggcattactttgagccc

SEQ ID NO: 30815 - DNA, 417 bp, Gossypium hirsutum
  Clone ID: LIB3146-006-Q1-K1-G12
cccacgcgtccgtttacatgtaaaatgttttaattttaactggctgatccatgaggcatagctcaataatacatttaagctgccttttacatatctacattctatatgggagttaataacttctcaatttctttcagaagtcgtatttgtcaaagctttccttaatatttccacatcaccacaagaacagatgccatccttgaaatggtggaattcttcagtatccctaacagaaatctcccgtcgtacaatcttagagatgaatttaatggtactgtgacagctttggcacatatagagattcttggttacccaaataggcgttccatgaacagtattaatgagaccaaatgcaacagctagtctctcactgtgcccacagaagatctcagcttttgaaatttcaacttcatccat

SEQ ID NO: 30816 - DNA, 322 bp, Gossypium hirsutum
  Clone ID: LIB3146-006-Q1-K1-G5
ggccgcccttttttgttttcattcacaggctaatcaaaacaattataatgcatcatcatttggtggatctatgcatccccagttgcgaacagaccctccacgggagggaaaagagtatgcgggtaatgaaggttttgagtcatggagtcctgataatagtccaaacaggtcatcagagtatgttgcaggaaggaactacatggaacccagaatgaattctgggtggaactatagagctgataggccatcatggcaaggaaattcatctgggtatagagacccgaacagacagggaaatagacggcgtgacagaagatgacga

SEQ ID NO: 30817 - DNA, 359 bp, Gossypium hirsutum
  Clone ID: LIB3146-006-Q1-K1-G8
ttgggggctgcgggtggacatacgcatgcaaatagtttgtgtgatactttagtggcaatgtagctttactatgattatttattatttgaatttcatcccaaggatccgattagcttttgtattttgacctataaagatgtagaatatagaatttagctgcttggtaaataccatttatcataaaactttagtagcaatgtagctgttctatgaataattatacttaaacctggcggcaatatattattaaccgcgtggggaaataccatttaccttgcaagagattaaaaatgggattttaattttagttaccccttttttgggtgattggttttgaccttcaaaaaaatcatttatta

SEQ ID NO: 30818 - DNA, 478 bp, Gossypium hirsutum
  unsure (1)..(478): unsure at all n locations
  Clone ID: LIB3146-006-Q1-K1-H5
ttccgcggtgtcgacgccacgacgctcacggcgctatttcaaccaatgggtgtgggagaaaatggggaatnncatttaaatnntcgttggagccccatattggtgttaccagatgctcnntctactnnncagataagtttaaatatatcttnnntccggtgtatgacangnntgctaactcttttttgttatacctggtggagagtagagcccatcttaattnnttgttgataccccttaaaggcgatttcggggaaccaaatcttgataacaaaccctcttganntcgttggatccgggtttttaattataatgccttgatanttaaaatgccttnntatatcaaaagctnnntctggcattttatnattnnattgattctgaatacaagnngaagtttgttttggaagttgtcaaatcaaattctaaaatgggggggctcttttgcatctgtgggcttttggaatctacaacttgc

SEQ ID NO: 30819 - DNA, 313 bp, Gossypium hirsutum
  unsure (1)..(313): unsure at all n locations
  Clone ID: LIB3146-006-Q1-K1-H6
ccacgcgtncgggagaaaggagtgaagagacaaattaaaaagaagagctcatcctcattcccctctacttcattaggttttatatataatattatagtgggtggaatagaagacatgaaaaagagttagaattgagaagtttaacaaatggcttctcaatagattaaaaaggagtggtttttatttgtgcttcagagcagagcaaatgtctggttttttcccttctagtggtgtgctgtgatcaaagctttgcagcattttataatttccatattaaaaaacaaaaaggctcgganttgtatgtgtcttttgg

SEQ ID NO: 30820 - DNA, 401 bp, Gossypium hirsutum
  Clone ID: LIB3146-006-Q1-K1-H7
gggagttattcatcccgctattgccgggttagctgtgacgtatggactcaatctgaatatattgcaagcttcgatggtttggaatatttgcaaaacggagaataagattatatctgctgagagaatacttcagtattgtagtattcctagtgagcctgcccttgtggtggaaacgaatcgctcagaccattgttggccgtaccacggagaagttcagattcttgatctgcatgtacgatatgccccacacatgccacttgtgttgcgaggtctgacctgcacattttctggagggttgaaaaccggaattgttgggagaacaggcagtggtaaatcaactctcatacaaacacttttcctgatcggtgaaccttcaacagggtcttatcataatcgattgg

SEQ ID NO: 30821 - DNA, 303 bp, Gossypium hirsutum
  Clone ID: LIB3146-007-Q1-K1-A8
aacagaagttccattttttccacttgacattaagctatgttgggtgaagatgtaatggtgggccactcttctggtttgcctcttcccatgaatgactttggttttttgcttgagagtttgctccacggtgaaagctatttccttgtttcaagaacaagttgaagaggaaataaagttggaaactagtgggagaaatttatgataatatggcatgctatgcaacaaagagttacaagaccccccctaattgccctatctattttgttcttatttatatctcttcccctaaatattattattttt

SEQ ID NO: 30822 - DNA, 227 bp, Gossypium hirsutum
  Clone ID: LIB3146-007-Q1-K1-B12
tccacacttccgaaaatagaagtattttttactctaccgcagaggcatcgcttctggggtggttatcaattacgagcggtcatctgtctttcatcccatctaccataataaccctttctgcagctctttcccttgaatactaacaaatcttggactatactatctcatgatccaacaaagataattgctactttttcatgcctcacgtgttaacattccaaaacccc

SEQ ID NO: 30823 - DNA, 303 bp, Gossypium hirsutum
  Clone ID: LIB3146-007-Q1-K1-B2
cggacgcgttggcggtcttttttctgacgcttggaacaaaaggggcctcatatgtatgagctgaagtctctacttacatatcatagctaatcctcgcttcttgttatgggatataggtgttgtgtgtactgtctgcctgttggatgagttttaaattatagtgcattgctgaatggggggacaattatgagtcatggaatatgattgaaaatactaaacagtgcccatccttttcaggcgaatttttttcaatttaatggtgtcgttaaaatatgtctcaatctacgttaaacattttctcag

SEQ ID NO: 30824 - DNA, 286 bp, Gossypium hirsutum
  Clone ID: LIB3146-007-Q1-K1-B8
cggacgctggccattcttatgtgaatgctgagagctaacgggagtcttcgagcatacgttgctttaaaggttatacaaggtgcttattataaatactattgtacccttatcaacaattcatgcagggactgaacagcttcgttagtcttctgattctttcttttgacccattttaaagaaaatcatgatggacccacatgtggcagccgttgggttcacctatgaggcaatgagagatactgttatggctggatggtgggcacgatacctttccttgtacgaatat

SEQ ID NO: 30825 - DNA, 247 bp, Gossypium hirsutum
  Clone ID: LIB3146-007-Q1-K1-B9
cccacgcgttcggggggaaatagctgtacagatatatcagctaaccatctcttgtaagctataggtccagactttctttatatcattcaacttaaagctgatgttgaagctttaatgacagatatttgacataaagatgcattgatcaccttaactacataacggctgttgtattgatgttgaagcttatactttatagagaggaactcgtctcatcatctatggaaaaaaaaaaaaaaaacaaaaa

SEQ ID NO: 30826 - DNA, 234 bp, Gossypium hirsutum
  Clone ID: LIB3146-007-Q1-K1-C11
ctgaatacaaaaagaaagtaaggtgtttccttttcattaatcctcaagcttttatttttgcggataagtttaaccccagttgggcttaatcctccatgggcaaaggcgtaggctgtgtcccaagcaaaaagagacaaccttcctctgccgaaggctctgccgctgccactgtcactgccactaccgtcaccaacaacgcacccaattgaagccgatgaagaaacccacaaaact

SEQ ID NO: 30827 - DNA, 298 bp, Gossypium hirsutum
  Clone ID: LIB3146-007-Q1-K1-C5
ccggcgggaccccccccgcggacgacgcaacaaatgtttttttcgggacctaaaatgtagcttgcgtcggtcgaatcgacgggggctaaatctatgttgagtggtgttaggatgcatagatcatgttcacaagctcatgatgctattagcttcaataatgtagtgatgggaaaacttgatagatatcccttagaatttggtagagaatagtgaactggacctgtttgctcagaaaacggtgatgttgtgtaatataaaatgactgcccttgccttggcagtgaacatagattggtgat

SEQ ID NO: 30828 - DNA, 278 bp, Gossypium hirsutum
  Clone ID: LIB3146-007-Q1-K1-C6
gggaggaatcggcgggtccgaccccgcctcccacacgttgatctattctttcgagcatgctgagatctacgggccctcgttgactacacgcgtgctaaaggagtgcaccatgcacttggtgcaaatactattgggcggtattcaactattcatgcagactctgaacagatagaccagtcctttggaggttgatagtgcacaatccattaacaatgtatggggtaccacccaggacaaggcgggtgttccacctaaccaacaaaggatgaacttagacg

SEQ ID NO: 30829 - DNA, 143 bp, Gossypium hirsutum
  Clone ID: LIB3146-007-Q1-K1-C9
tctctttccggctagtttcccaccactttattactctcctgtacctaataagaccggcagagggtgttccaaacattcaaaggcctaacatgatttaaaacttttcttgtgtgctaaccatttcccatccctcacagaattcc

SEQ ID NO: 30830 - DNA, 405 bp, Gossypium hirsutum
  Clone ID: LIB3146-061-Q1-K1-H8
gggaggaccatctcaaaaaaatcactggattcagctattaggcaaatggacataataaatggcacaacaaacattcggtccctttcaagcacgactctgtttcctcagagcattcgatctgccactgctaagacccaatctcttcgttccttaagtgcttcagactctgataatagcaacggaagccctggtaggttgaaaaacagagacttgcccgagaacggaaatagtattagcagagctgcagagtgtggaagtgatttccatgatggaagatattatgccaaattaagtgaggtggacatctacgagagttcccggtatgatgttatattgctaaaagaagacttgaagaataccaactggttgcatagtattgatgataaatccgatttagtatccatc

SEQ ID NO: 30831 - DNA, 327 bp, Gossypium hirsutum
  Clone ID: LIB3149-001-P1-K1-A6
cacgagctcccattatcagaggacccgatttgacgctcgcgatcttatgctgtccaagaatctatcgaaggctgcgcaaagctaagacctagtgcggatatatcaatccccacagctgcagattctgtgcctcctgaattgcgccactataggtaacagaggcagagtgaacctgctctcatggtcgcggctggtcaggagtcgaacgttaattcagacatgctcccagtctaaatggcgatctgaacgcacgcttgtccgacgcagtctgcgcggtaagagaagtggtagcacccagctctgtcgttgcacttgatggaacgcttg

SEQ ID NO: 30832 - DNA, 332 bp, Gossypium hirsutum
  Clone ID: LIB3149-001-P1-K1-B12
acccacgcgtacgctgaggtcatccaactagtttaccactcgggtgtcatatagtcattggctcattgctatcaggcatcattataatctgccaccggactctcaacaaccatataactgacatatcaataaggtacatctgaaacatcatccctagtaaaacgacacagctcactcatacagaccatatatatatacaagtcaaagacaatacaacatgccatccttactcttaaccaacctacaactacatttaatatttctgacactccaagatattcacaaggcacgacaccagctaataacactgctattgacattcctacatcatc

SEQ ID NO: 30833 - DNA, 408 bp, Gossypium hirsutum
  Clone ID: LIB3149-001-P1-K1-B5
cccacgcgtccgagaggccaaactatttattgcacctttctctttctccgatggctaagccctcactcttgttctgcaggctcctactattatccgccaccgtagccgccggcgaacggatcgacgatgaagacgaccttctgatccgtcaagtggtgccagatgcggaggaccaccacctgctcaacgcggagcaccacctctccgccttcaagaaaaaagttcggcaagacctacgccacgcatgaggagcacgaccaccgcttccgtatcttcaagaacaacttgctccgcgccaagtcacaccataaattgcatccctccgccgtccacggcgtcaccagtgtctccgatctcactccggcggagtttcgccgtcagttcctcggcctgaagccgctccgactt

SEQ ID NO: 30834 - DNA, 421 bp, Gossypium hirsutum
  Clone ID: LIB3149-001-P1-K1-B7
tactttccactgtagagtccagaatgaggcaaaaacaagaagcacagcagtctcatggaaggaatatgcctcaagaatattattcatccattcaaccagcttctccacatcaggcccaaggacttccagcacaggccagttctcaaggattgagccatctgtatagccattctaggttctcttctgtggcatcacaaccattattgcattcttctggactcacgcttcccatgtatgcaacagcagcaccatatatgacttctgcaaacccactttatgccaattttcagccatctggtctatatgcttcacaatacaatatcggtggatatccattgaatcctgcatttcttcccccatttatgggtggatacccttctcatgctgctatttctttgccatttgactctactgcttctgg

SEQ ID NO: 30835 - DNA, 442 bp, Gossypium hirsutum
  Clone ID: LIB3149-001-P1-K1-B9
ctctggtattgaagataaactgcaacaaggagtgccagaagccattgaatctcttagaacagcggggataaaagtatgggtgttgactggggacaagcaggaaactgccatatcaattgggtattcctcaaagctcttgactagtaaaatgacacaaatcataattaacagcaaatctatggagtcatgtagaaagagtttagaagatgccatcattatgtctaagaaacccacaactacatcggctatatcaggcactacaaataacacaggaggaacgtcaggagctggttcaactcctatagccttgattatggatggcactagtcttgtatatattcttgacagtgaactggaagaaaggctcttccagttatcctgtaactgttctgtggtattgtgttgtcgggttgccccactacagaaagccggaattggttcc

SEQ ID NO: 30836 - DNA, 289 bp, Gossypium hirsutum
  Clone ID: LIB3149-001-P1-K1-C3
aaaaaaccctaaactctttcttctccccactgtcctctttcttccagccacaaacaaggccaacaccaagccttcattcgcctccgtgacgaccaacagagggccgaagaacccctcttgcgaagcgaatcgagaggtactcaccttttccccttttatttcgtattttcggatttgaatggaaataaaaatcaagcaaaagaacgggaaaagaaaatgataaaataaccaccttagaaatattttcttggctgctctttactctcttttttggtatcttttgtatttc

SEQ ID NO: 30837 - DNA, 411 bp, Gossypium hirsutum
  Clone ID: LIB3149-001-P1-K1-C5
cccacgcgtccgggacactaacttgtgtgccattcacgccaagcgtgtgactattatggccaaggatattcagctggcaagaaggattcgtggtgagcgtgcttgagttggtgcgttctgtgtttgtgaagatggattgttggtggctgcggatggtgttttgttactaagttttctttttgttgaagcctataggttattagggaaaaataggtgtttacttggtagtcatattaattgtcattggcaaatactgcctaagacactgtgaaggtctggttgttagaaatttggcatgtatttgatctttttggatcctttatttctcgttgtatttctggttgtgcagccactttgggaattgtattggacaactttctgttgccatctaatctagttgaagctagctta

SEQ ID NO: 30838 - DNA, 404 bp, Gossypium hirsutum
  Clone ID: LIB3149-001-P1-K1-D1
cctacacgtacgatcatgctttctatctttgttctcttcaacgcactccacatgacagggtggagccttcaaggactatgcatgaccaatcaacttataagaacgttcaagagcacttctctcacctcaaacgatcccacaactatgagactcaccatatgggactgatatcgtgaacactgctagactcaacgactcgactaactatgatcctaactggtactatgctagatcttgttccattgcaagaaagatctactcgagacgacgacttggcagtacccccttagacatgactaatcgtgcagcaaaagtagtagcatgcctacttctcatacttgcaacaacagtcgtactattgctggaaacatacttcagccgatgccgaatatgcacttcattta

SEQ ID NO: 30839 - DNA, 330 bp, Gossypium hirsutum
  Clone ID: LIB3149-001-P1-K1-D12
cccacgcgtccgaaaaaattgatctcacagtttttaatttaataaatacctacaatgaatagtgatatatataaaattaaaaaaagtataaattaaataactgtctaacggttttacagctttcgatactctaccatacaactgtccttattttcctaaatttacttcttaaatcatatacactttcgcctgctttcactcatccttaatctgccaaaatcttgtccttaaaaaacctgttattcaccctgtacataccctttaaaacaatcctctttataccatcaagccattcttccagaatccttactaacattttaacccccacaa

SEQ ID NO: 30840 - DNA, 434 bp, Gossypium hirsutum
  unsure (1)..(434): unsure at all n locations
  Clone ID: LIB3149-001-P1-K1-E12
tgcagttttgggttctgttggcgctccattcactctagcatcatatgtggttgaaggtggtgcatcgaagaacttcacaaaaataaaaaaattggccttctctcaacccaaggtacttcattctttgcttcagaaatttgcgacctccatgacaaagtatattcggtatcaagctgacaatggagcccaatctgttcaaatatttgactcttgggcaacggagctaagtccggtggattttgaggagttcagcctgccgtatttgaagcaaattgtagatgctgtaaaacaaacccatccggatcttcctctaatcctttatgcaagtggatctgggggcttgcttgaaaggctagctntaacaggtgtagatgtagttagcttagattgngactgtgacatggctgaaggtagaaaacgacttggacacgata

SEQ ID NO: 30841 - DNA, 417 bp, Gossypium hirsutum
  Clone ID: LIB3149-001-P1-K1-E5
gcagagttgcaacttttgacgttttgattttgttgtatagaacaacatggtgttgctcggtcactgagttgagttcactggttacacaatgtctaatagagaagaatttgctccgtggcacttctttcttcttcttcttcttctatgggggtttgtcggcggcgatgcgccggcgagggaggtgtggtgcgtggcgaagaacaactcggaggacacggctctgcaatcatcggtggagtgagcttgcggcgcatgctgagccgattgtagagcgattcaaggaagaggaccctgcttcgacccttccagtgtgcagaatacggcttcgcatgctttcaatgattatttccgcatacacgctatctctgaagagaattgcaacttctgacacaacgccgtcattaccttcttcaaccc

SEQ ID NO: 30842 - DNA, 281 bp, Gossypium hirsutum
  Clone ID: LIB3149-001-P1-K1-E8
gtttttacagagaagaaagcataactggtttcaatttctattcatattctctgtttctggctactttggttttctcggaagcatgggaacaaacgttatctctgatgaagaagatgagttggaggtcgacgaggaaggagagccgatggaaggggacaatatcaacgaccgcgaccctgatgacgaggatgaagaagacgaggatgggcaggatgagtatgagaatgatggattcatagttgatgatgtggaggatgaagatgtagatgaagatgaagaga

SEQ ID NO: 30843 - DNA, 210 bp, Gossypium hirsutum
  Clone ID: LIB3149-001-P1-K1-F1
ctcaaaaggacgtaatgctccactcaatttacttaacagtcaccatcataaactaccgggccggggtcactataggtccgccgagttcaccagtatgtaatgcacagtcaaagtaacacgctatactgctaaacaacctatcggcaccattcgtataagctcctaagaacaacatgatcctcatttacaacagaaatttacttgcttaac

SEQ ID NO: 30844 - DNA, 368 bp, Gossypium hirsutum
  Clone ID: LIB3149-001-P1-K1-H5
attgccaccgtcacttctgcagctcgtttttattccctcattcactggcctcaaggcaggcgcatgcaaagtgagtgccggacttaaagactcagctccccaagccacaaggttgggcatcaaggcttcgctgaaagacgttggagtcgctcgctgtgccactgccgctagtgcagtgctggctagcaacgccatggccattgaagtgttgctgggtggtgatgacggctctctggctatcgttcccaacaatttctccgtggcctttggggagaacatcgtgttcaagaacaactcatgtttcccccacaacgtcgtgttcgacgaggaccatattcctagcatccatgatgcaaggaaaatctcca

SEQ ID NO: 30845 - DNA, 336 bp, Gossypium hirsutum
  Clone ID: LIB3149-002-P1-K2-C9
gcgaaagagtttcttgagcgttctaaagagtatcagaggcgaatgcaaggacaaaggcagcgaggtcgtttctggtggagatgaggagaggatcatgtatagtcgatgattgtggatttcagaaatcataggatggagttatgtatagttgatggttctggattttcagaaatcattctgcaggatgaatccgaagaatgtgaaagacaatctagtttccacccctccaattttgccagtaaagaagccattttctgatgaagatcataaattaaattgattaactgcatcatttaaatgtctgacccaaaggactattttttctctcttcttttt

SEQ ID NO: 30846 - DNA, 378 bp, Gossypium hirsutum
  Clone ID: LIB3149-002-P1-K2-D11
gccacgcgtccgaaattttctcgggaaaggaaagagtaaattagaaaaaagagttagggaaatggagaaagtggtctcggaggcggaagagctgccgaaggccatcgtgcgacgggtggtgaaggagaagctctctgagtgttcaccggattacgactttaacgttcacaaagacgcccacctcgctttcaccgaaagcgctcgcatcttcatccattacctttccgctacggcaaatgacatatgcaaggaatcgaagaggcaaacaatgaatgcggaggatgtgtttaaagcacttgaagaaattgaattctcggaatttgttaaacctctgagggcttcgcttgctgagttcaggaaagaagaatgctgtgaaaa

SEQ ID NO: 30847 - DNA, 347 bp, Gossypium hirsutum
  Clone ID: LIB3149-002-P1-K2-E12
cactaggattgtgcatgatggaaatagggctctgtcttgctcgaatatgtgatatggccattggaggcaatgagcttgagcaaagcttattggaatcatgtgctgcaaaaggacgacttatacattatcattcaatggttgatagccttgttcttagagaagctggtccaaagaagggatcgagtaaaagaaatgctaataatcatgcaagaagcaaggagaatttattgaaaggtgctaatttggacacaaatggtaatgaagttaggttatgtgaaattcatcccaacctatggcaacagtggcattatgactatggtatcttcactcttttgactgatcccatg

SEQ ID NO: 30848 - DNA, 366 bp, Gossypium hirsutum
  Clone ID: LIB3149-002-P1-K2-F8
atagatttcaaagtcagagaaaaaccaaaacagatagggttttccaggatctaatcgtttacggaccggaaaaccagttttgatggcaacaaatgattatgaaagtgggttgaagatgatggaggaactaacaacagatgctcgacaaattcaagaccagttattgggtgaattactgagtaaaaatgctgaaactgagtatttacagggattcctccatggccaaaccgacaagcaactctttaaaaaaaaggtacccatcgttacttacgaacatctcaagccttatattgatcggattgccaatggggagcatcatctgatatcttttaagttgaacccttaattgggtcttttttaactttt

SEQ ID NO: 30849 - DNA, 417 bp, Gossypium hirsutum
  Clone ID: LIB3149-002-P1-K2-G5
ctaagaatagttgtccaagtcctgttcttcgagcagcttcagcttaggacctcaagggctggatgctttttggtttctgataatcttgatggatcacgacagttacgtagtgggatcacagggtctaccgaaggagggtgggcctcagctgtgagagaaaatcaggttttgaaggtaggcatggatactatgagaatgcgggtttccgagcttgagaaagaatgctcaaacatgaggcaagaaatcgagaagctaggccgggtaaagggttctagcacttggggaaacgtatcgaagaaatttggattcaagttgaagtctcaaatgtgcaatgcgcaggaggattctgtaagcaaccagaagaatggaagtggaaagatcgagaaaccgaaaggtaaagcacaagaaaaacacaag

SEQ ID NO: 30850 - DNA, 226 bp, Gossypium hirsutum
  Clone ID: LIB3149-002-P1-K2-G7
ctccggtcctccacccaattccagaatcaactcatcaaagttcaaacaacagtgttagaatcagagagacaagtgacattgaaatcgatttggcttaccttagcttcatttcccataagctttcatttacattttctttttagaatttaatttaatataatttgattttcttttattttactttgtacaacattttgcaattaaatgcaggattagcagattttct

SEQ ID NO: 30851 - DNA, 279 bp, Gossypium hirsutum
  Clone ID: LIB3149-002-P1-K2-H2
ccgggcccacccacccgtgcgatcataaacaaataaaaagtcgatttatttactccttaattagtactaaaaatttctgtccgaataaaaaaacaaaaaaagaaataaaatatataaaaatttaataaaaaaaaaaaaaaaaataaaacaaaagataatttaaaaaaatatatctattaattatttacaaaggaagcaaaacacctattaaaatatatcattcaacaataaaaaaaaaaggccggcctattctttacctcattcttattaaacccaatg

SEQ ID NO: 30852 - DNA, 203 bp, Gossypium hirsutum
  Clone ID: LIB3149-002-P1-K2-H7
gtgccctcaaaaacccaaaaaaaagccttatgttgtatctgttagacatgctatatatgccatgttccagttgttcccatgtaatggaatggtatgggtgagattgtgaagagattgtgaaacaatcaaccttgtgtgatattgttgtatctttcagtagactatgaaatataattgaaaaggccatcaaggatattttttat

SEQ ID NO: 30853 - DNA, 417 bp, Gossypium hirsutum
  unsure (1)..(417): unsure at all n locations
  Clone ID: LIB3149-003-P1-K1-B10
aaaaaaagcaccttgaagattacaatgaagaagagctccatgcctcatccttaccacagctccaaagttgcagaccctaatgttaatggtgatcatttgaaagataacagaggcgtcaggtccaacgtgacagagaaaaagtcagctgctggtgctgccactaataagctggagaaaaatccatccgtcgacataaacgaaagtgcggaggccttcatccagaaattcaggcaccagcttttgctccagaggcttgagtccattgaaaattatgagaaaatgttggctagaggactctgatcatcgatgcactggtattctctgctggccaaacatatttcatttgcttcttttaactngtatactctctattatgatttacgaatatggatatgaagtgcttgaatgatgatcatg

SEQ ID NO: 30854 - DNA, 150 bp, Gossypium hirsutum
  unsure (1)..(150): unsure at all n locations
  Clone ID: LIB3149-003-P1-K1-B8
acgggagccaatagagaagagnnagagggttgctaagatggaaaagagcagagtacatgggggggggcttaaagaagggggggcggacaaacctaaagtgcaccaaatggagcaagactccagcaacgggaaggagctcggcaagagcat

SEQ ID NO: 30855 - DNA, 411 bp, Gossypium hirsutum
  unsure (1)..(411): unsure at all n locations
  Clone ID: LIB3149-003-P1-K1-D8
naaaaaaaaaaaaataaaaaaaaaaaaaatttattaaaaaaaaaaaaaaaataataaagagggggtcgtgtctttatagcgggggcgcgagcaaactatatacatacattataacgtctcccttttatatatcgctacccttcttcattcaacttcccgactttttatatccttttttcttataaaaaactcttttttctcaacatacttttttttcttcttattcatatatctttagttttcctaaatataaataagtccaacccctttcttctattctaatgttatgcatcttttcattataatttacacatcttctcttcttttattttttctcatcaccactaaatctttttttttcccctctccttataatcttatattctttatttttctatctctttctatttc

SEQ ID NO: 30856 - DNA, 452 bp, Gossypium hirsutum
  Clone ID: LIB3149-003-P1-K1-D9
acaatgactgtaatttgggtcacaggtaccaaagagaggaagcaaaaatccaagcttgggtgaaccttcaaaatgcaaaagcagaagctcaatcaagaaagcttgaggtgaaaatacaaaaaatgagatcaaagttagaagagaaattaatgaaacgaatggcggttgttcatagaaaagccgaagaatggagagcttcagcccaacagcaacatgctgagcaaatgcaaaagccaaacaacattctgattagtaaccgaagtaacttgcaattttcaggcaacatttcatgtggttgtttcccttgcaataacagccgctaatccaatgttccattgagtgtaattccaaaaccccattcttgcaaagcttttttatgggagaaaaaatcacaccatcaattttgttggcaactgttggcatgaaaattgtatcatatcggaaaaatttta

SEQ ID NO: 30857 - DNA, 158 bp, Gossypium hirsutum
  Clone ID: LIB3149-003-P1-K1-E5
gtcgctgaggtccggtcggattccggtcgccccgcgtcgcttttctaggttgctgtggaaggcaactggttcatacaagaaaagagctgcaagatactggccttgatagtaagggccaaggccaaaacccaagattgccttggtgcgaattgggaaaa

SEQ ID NO: 30858 - DNA, 296 bp, Gossypium hirsutum
  unsure (1)..(296): unsure at all n locations
  Clone ID: LIB3149-003-P1-K1-E7
caaaatttgagcaggatgaggatgtaaatcttgatgacatagatgctgtctttaatgactcaactgaacaccttgtaacagaaaggaaagagaaacctgtgtcaatgaatgcttttgagcttatctctaggtcacagagctntagtcttgacaaattgtttgaaaggcagtgtggttctgggaacccgaaaccagtttcgcttccaacgccctctaatgaaattctgccaaaatgaggaactgaaaaccttgggcttaatgtacagcaactacagatgagtgaagggacaagtgga

SEQ ID NO: 30859 - DNA, 272 bp, Gossypium hirsutum
  Clone ID: LIB3149-003-P1-K1-F12
agaatcttgcattctgagatgtggaattcacactatcttacacctacgacacctttattttaacactcacatcatggaaagaatgcccctgtattccgacttctttctattagatgccttccatcacccgaggctgatcctactaaagtattacttgcaaaaaattcaaagacttttaattaacaatgacatacttttgggaacaaagaaaaaaaaaattgattggtggttttaccatgacaaaatcaactacaataatgcagacaacatac

SEQ ID NO: 30860 - DNA, 343 bp, Gossypium hirsutum
  Clone ID: LIB3149-003-P1-K1-G8
gcctgcctggctcgaccgacgcgtgcgcgcggttaacatttcgcttcttcaccctatcccaaactcatttacttggcctcttctttctttttctcggatcttgctttctacgtctcagcaaagatctttgattctttctgtctccttttcgttcgctctctgattaaagtgcttttaatggctgctaaaggattttaatccagattgcggggactctgtctacgctggtaggattgtggacttgttacttgaatgtgtggaattgtcctatagaccacgacatttttctcaaggtagaaagcagggatattgtcatgtttgatcactgaagatgctatggtca

SEQ ID NO: 30861 - DNA, 422 bp, Gossypium hirsutum
  unsure (1)..(422): unsure at all n locations
  Clone ID: LIB3149-003-P1-K1-H7
ctaaacaatggttgggctgccggacgtttgaactcgacggttgccggtgaagaaaacttcgtgttcagctcaaacagagttttaaggcaataaataaactcaaacttgtttcatgtttttttatttgttgttgtattcttcatagttaagcccacaataacgtgaatgtttaagggctaagcatagctggcattatatgatttatccattgtttgaagaacataatatcagatgaaagttatgtttatttctttgaagaactaaatgataatttgttaaaatnaaaaacacacaaaaacatttctctttcttttattcttttctctttctttttttttctctttctattttttatttactttttcctctttttttattttcttttttttaatattcttttttatatttaagggggggccctt

SEQ ID NO: 30862 - DNA, 414 bp, Gossypium hirsutum
  Clone ID: LIB3149-003-P1-K1-H9
atttatggctaggaaagctctcagagcttcctaacaaatatcagaaggatgctctcccaacactgttttatggatttaggttttggatccccgtcaccttgttgaatttttggatggtccctcttcaagcccgtgtagctttcatgtccgtaggatccattttttggaacttttacttgtcgtcaactatgagtaagtagattcaaccgcaccgcaccggaccggacaattgattgattaattcatgtcacatgagctaatgatgtatttttttgttcttgctcccaattttacttcctttgggcttgctttatttaagaggtaccggcttttttggctgggccggtacggtttaccgtcggttttcatatatgataaattggcggtgccttaaaaaaaaaaaaatggaatttt

SEQ ID NO: 30863 - DNA, 349 bp, Gossypium hirsutum
  Clone ID: LIB3149-004-P1-K1-C4
cgtccttcaaaggatcaaatataaccggtgctgatttcacagatgtaccattgcgagatgatcaacgagaatatctttgcaaagttgcagacggggtgaatccaactaccggaaacgcaacgcgggacacattgctttgcaactaggtgaaaattcgagaattgacactgcggctgttattattcgaggtttgtaactattttgctgtaaacggttgtcatattcttttgttgaagatgcatacacttcgatttgtacgacaaagaaagttatataaactctctttatagcctgtaaaaaaaaaagcatgaatagcttggattatacaacattgagttgttattgagaa

SEQ ID NO: 30864 - DNA, 344 bp, Gossypium hirsutum
  Clone ID: LIB3149-004-P1-K1-C8
aaaggttcatggagtgatccaatcgctaggggaagcttgcgacctgattatctgcaacaaccgatgcagcaatatctgggggacattggtgatcgagttctcatattttggatggcacatttacggattcatactttctgactatgaagatgttcgatgcaaacaggcatgaattcacatgcattcgttttgattttgattttgggttggcatcatctgtggctgatagtggaaaaattacaatgctttttttttatccatgtaaagtagtttatatgctatatgttactatcaactctgtccatatcattgcatgtatagcttggattatcccccattgagtt

SEQ ID NO: 30865 - DNA, 382 bp, Gossypium hirsutum
  Clone ID: LIB3149-004-P1-K1-D2
tggcaacgatccaatcgcttttagaagctttagacctgagtatcttcaagagcccctgggggagtatctgggggacattggacatcgagttctcatatcgtgcatggcacatttactgattcatactttatgcctatgaacatgtgcgatgcaaacaggcatgtattcacatgcgttcgcctagactacgattttggcttaccatcatctgtggctgatcttggaaaaattaccgtgctttattctcattcactgtaagtggattatatgctatttgtcaccattaaccatgtgcatatgaatgaatgtgtaggcttggattttccccattttgttgtattttgaaaaaaatgcttttctttttaactaaaggccttttttt

SEQ ID NO: 30866 - DNA, 415 bp, Gossypium hirsutum
  Clone ID: LIB3149-004-P1-K1-D6
gacccacgccgttcgcacatgatcctatggctgtcgaacgctgttttttgaagttttaccagcacggtactcttctgggacttctgcgcgcgatgataagctacaacaggtgatcgtacattcactggctgcctgtaaaaaggacatcatctatgcgcgctccgatgcctatacccctactcgcacctcgtagcatgttcctggatttattgagaaagcatgtcagcttagatccaatatcgatgatgaaagcccatgtactggcactgcttatattagaggtcggatgcttttcaatacttgccatagtgcaaacatggtaaggaccattatagttcgaaggaactaccttgactacattaagatataccaaagatacgaaataaaggcactgcaattattccaggttatatat

SEQ ID NO: 30867 - DNA, 393 bp, Gossypium hirsutum
  Clone ID: LIB3149-004-P1-K1-E11
gttgactcagtaaaggttgaaaagtatcactttatatgcaccatgtcgacaagtactcgggctgctcacagagcttacattgtgcaatctagaccgttgtctttggtggttgcaccaagcctgcaaagacatctccaaaatgtcatgaattatatatctgacatatagcctcccctaacagtgccatctgagttgaccaatctatctattctctcatatggatctgcaattcctcttgttcataggcctcgtcttatgctacgtggtgatgatggacctgacctgaaacataagggaccaccagtgacgaacgagctcgagaattgagcagaacatcacatcaggcaactcaaatgcgcgttcggatcctagtaccttgacatgagcagaagc

SEQ ID NO: 30868 - DNA, 250 bp, Gossypium hirsutum
  Clone ID: LIB3149-004-P1-K1-G1
aaaagagagccgggaaaggatgctagatttatcatagcgaaaatgaatactggactttgcggcgagtcaatggacatacccgatggctgttaggagttatgttaaggctaaaggattcacattatataggttcttttgtttgtctagctattgatgcttataatgcattaatttatgcttgtttgtattttacattttatactctatagttgatcgttttaagtttttgttgtaacactatttatggtaa

SEQ ID NO: 30869 - DNA, 273 bp, Gossypium hirsutum
  Clone ID: LIB3149-004-P1-K1-G4
gcagctcgtcctgttaaccgtcacgcctaacatgccttcacacatgactgtacgtatgacgatgaagctggccaagaagatgaggcagaacatgccgatccactagcggatccgtatgcgcaccgatatcaccattaggtacaccgcgaagcgcaaggactggcgccggacctagctagggacctaagctggatgcgccgctttaggagccttgtacgcacgcaaagacttgcgcataggtctatttcatggaatattgaaggggccttggac

SEQ ID NO: 30870 - DNA, 243 bp, Gossypium hirsutum
  Clone ID: LIB3149-004-P1-K1-G6
gttatgatgccataacttcattgtttttatgtgttttcatttgcaattttaatttctgcgagggggatagatatagaataagtttaatacttttcttcaagtgttgttagaagtttttttataactccaaagaacatggaaagacttgtattatttagctcgttaatttattcccttgcttatttatcaatttattaatatgagccccatttcatatttgtaccgtaattaaatcatgttttt

SEQ ID NO: 30871 - DNA, 206 bp, Gossypium hirsutum
  Clone ID: LIB3149-004-P1-K1-H3
caaatatacaacgcctaaccctgtttaatatgagcgtacagaatccggtcatccagttttgtagcttccctatcatattggatcagcaagcatctataccatactgaaagtctttgttttggcattaattttatcttattaaattcctaataatccctgtgacattgattttatacatcaaatgatatcatagtttctatggcctc

SEQ ID NO: 30872 - DNA, 132 bp, Gossypium hirsutum
  Clone ID: LIB3149-005-Q1-K2-A4
tatctatgtcgcgagtgtactctacaatttattcaacctggcctacgccttccttcaagggcacttttacagcttggacaggggctacatccattctactcttcaaacgtttcaaaacctaatcgtaccttc

SEQ ID NO: 30873 - DNA, 295 bp, Gossypium hirsutum
  Clone ID: LIB3149-005-Q1-K2-B3
gacacaaactaaaatgctatggaagaactgttcctcgatcaaatgagatacagattcagaggggtgaacaccaactagcattgtcattaaaaatgcattatgctgaaagtacgatagatatttcaatatcgttaatgtacccactttgataggaaagaaagcaaaagagtaatattctaacggctgaaattcgtgcatataatcagatcaatgtatgctatatgtgctttgtcgagaaattatattagagtagttcctttcaattttgcttaacttttcttattaccaaacttag

SEQ ID NO: 30874 - DNA, 147 bp, Gossypium hirsutum
  Clone ID: LIB3149-005-Q1-K2-B7
taaaataccaaaaggatcgtccctcctttacccggcaccaacacctttacacaggcgtcgtcaatcaccatagaggggcattctcacctcaaattctacccaccataacacatattttaaccgttttcatactccacctaagaactg

SEQ ID NO: 30875 - DNA, 362 bp, Gossypium hirsutum
  Clone ID: LIB3149-005-Q1-K2-B8
agaacccacgggtttaatatgaggctttcagaagggaaacaaattctattgctggttatccgaagactgctgcacggccaccgcctaaggtgccatcaggtacaaccaactcttatgcttttactcaaaactactgaaccggtaggtatgcatgcctgtttgttacaccatttagctgatgccggattttttcttaaccctcctgttttgtacagctaaaccagggagaatcgttggatctgtcgtaccatacgagaatgggaaaaacactaaagatggtttcgattctaaaatcttttacagacacgcaatacttttcttcgcagaacatatccccccattgttttttccgaaccaccacc

SEQ ID NO: 30876 - DNA, 293 bp, Gossypium hirsutum
  Clone ID: LIB3149-005-Q1-K2-C2
gtcgatcccgagaactatataaatcaatcttttcatgaacctgccaatcggctgccacgggcatcacctctatgatcaggggattgccatacccaatcaactactaggtattttaaatgttatgcagtcgggatttcaagtttgcgaatatcttatcaatacgtaactgctattacgactgttctaccctttcttagtctgacattatcatcacttaaatctgcccacacttgaatgattggttgtatctgtgaaagattatacttgaaaaatatgctatgggtctctttttt

SEQ ID NO: 30877 - DNA, 247 bp, Gossypium hirsutum
  Clone ID: LIB3149-005-Q1-K2-D1
atccgtctcaaatcacatattgtcgcctttttggtctcttcaatcttactctctctaaggatcatcttcatctcaaagagggctaactatccaaaccatcccatttacttttgtgtctcatggctcaaaatttatgctttcacacacacgttttcatttaacatcaatgcaaattctgaatacacttcttaatcattatacccaagcctatttccttaaacgaaattaaaacgtttcattttaccac

SEQ ID NO: 30878 - DNA, 320 bp, Gossypium hirsutum
  Clone ID: LIB3149-005-Q1-K2-D2
gtgcagctcaaatcacatactagcgtcattttgatcctgtcactatcacaactgcaaaggagcctctgcatataaaaacggttatgctccacaactgaaagcgctttagttatgtctctctttgacgacaacaataatttgatgacacacaccactgaatttttttgcagtacacattatgaaccctttctgtatcatatacacaaactataacctaaatcaatctaaatagtgctatatcgcatctatcaattgaatgagatatccagtcctacacataccgatacaactaaacatttgtcttatattcccaaaaacac

SEQ ID NO: 30879 - DNA, 410 bp, Gossypium hirsutum
  Clone ID: LIB3149-005-Q1-K2-E1
agcatataaagatcttgggaaaatgttgctaaaatatccatggatactttcaacaagtagtcaagaaaattatgagcagatccttttgttttttgaggaagaaaagataccaaaaacaagtgttgaccgggcaattagaagctggcctcatttattgggttgttctacaagcaagctaaagttaatggtggatcaatttggtgaattacgtattagaaacaagaaatttggccgggttattgccaaaagtccccagctgctattaaagaaacctcaagaatttctccaggtggttctattttttgaagaacttggtcttgctcaggaaactgtggggaagttagtttctcgctgtccagaagtctttgctgccaacatcgatacaactttgaagaaaaaggttgagcttc

SEQ ID NO: 30880 - DNA, 169 bp, Gossypium hirsutum
  Clone ID: LIB3149-005-Q1-K2-E3
aacatatacataacttttggatctgatcttcttattcccaatccctcttccaaccatgaggctccataccatataactggaccatatatcttatctaacacaatcacatattcaataccgtaaaggatctctgctctccgtcctaaacttatttatcgtttgctcttct

SEQ ID NO: 30881 - DNA, 271 bp, Gossypium hirsutum
  Clone ID: LIB3149-005-Q1-K2-E8
cccacgcgtccgcccacgcgtccgcccacgcgtccgcccacgcgtccgattttggtgcaataatttcacaaatcgggcaaatcaagtctacttctaatatgggggttcctctcggccccggcaagttctacggcagcagtcttcctcggccccgtatctacaacgaaaccagggtcaactccgaacgcgtaaatcctccggttccagttcttgatccgctgctctcttgggccaatgaagcccactggtccatgggtggtcttaatttcaa

SEQ ID NO: 30882 - DNA, 286 bp, Gossypium hirsutum
  Clone ID: LIB3149-005-Q1-K2-F2
gccacatgcagcgtgccccgtcactaggttcttggggcgttactctactacgttttcagttacaggcccttcacctgccggcccaacctaccctaccgaggactcagaggattcacctaccaagacaccagtgcctgttgcagaatctcctaccacccccaaagcaaagccgtccgcatgcctaccattggcccctgcttattcacaccttctctcctcctgccaggagaccattaccgccggcacacactgtactaggggcgggcagtcattgataactaccaca

SEQ ID NO: 30883 - DNA, 104 bp, Gossypium hirsutum
  Clone ID: LIB3149-005-Q1-K2-F5
gcacatgcagctggccccgtatatcagttcttgggccgctactcttccctcgggtcatttacagacacaagagaggccggccaatcctaccctaccgacgactt

SEQ ID NO: 30884 - DNA, 402 bp, Gossypium hirsutum
  Clone ID: LIB3149-005-Q1-K2-G1
gaaaaaaaggttctaaataaagcagggatttctgatgacaagaacccttttttgtttctagttaggcagtgtagactcggtgattgaatacaggaagccagctgaggattaaagttaaattagatatcatgggaaagctactatagttaaaatcgtgagcataaggtgagtatataaaggggaaaaataggcatgtatcttgatggctcctctataagacttctgggactgtcatcttcctaaagaggtatgctaactgcatggttccattgggcacagcatatagcacagacacaccatttagctttatgtgggtaatgattatgggtagctcaacttacatgaaatactattagttaactgtattcacttacgaattgaagtctgcatttctttcatact

SEQ ID NO: 30885 - DNA, 317 bp, Gossypium hirsutum
  Clone ID: LIB3149-005-Q1-K2-G3
gcataaaaggttctaaattatagctggatttctgatgacgagaacctctcataatctcagggaaggcagtgagaacttgagcaaagaacactggatgccatctgtggagcaaagtttaattaaaatgcttgggaatgctgctattgttaatatcgagtgcgtaatgtatgtctttaaatgggaaagctagtcatttttgttgatgtcgcctcaatatgacttgtgggacagtcatgttcttaaagatgattgcgaacaggttagttacgtttgccacatcaaaattgcacaatctcacatttcaactttatgagctt

SEQ ID NO: 30886 - DNA, 376 bp, Gossypium hirsutum
  Clone ID: LIB3149-005-Q1-K2-G5
gcataaaaggttctaaataaagcatggaatactgatgacaagaaccctttttagggccagtagaggcagtgttgactcgttcaaagaatacaggaggcctgctgtggagtaaatctaaattttaaatcatgggaatgctactatagttaaaatcgtgagcataatgtatgtatataaaggggaaaattaggcatgtatgttgatggcacctctattggactgtgtgggactgtcatcttcctaatgaagtatgcgaactgcatagttcccttatgcacatcaataattcacaaactcaccatttagcgttatttatttttatgtattatagatagctcaacttacattaaattctatttggtactgtttttctctt

SEQ ID NO: 30887 - DNA, 402 bp, Gossypium hirsutum
  Clone ID: LIB3149-005-Q1-K2-G6
gcaaaaaaggttctaaataaagctttgaaatctgattacaggaacccttcttggggctgtttactctgtggtgacgcgttcatatgtgactggaagccttctgaggagttaagttaaattataaatcatgggaaagctactatagttaaaatcgtgagcataatgtatgtatataaaggagaatattaggcatttttcttattgagctcctctatatgactttttttacagtcatattccttaagaagtatgctaactgcatattttcatgagtcacatcataatagtacagtcataccttttagctatattttgttttgtaaattttaattagctcttctgtatttttaatccttatatatgttatctgttttttaataattaattttatattcttatttt

SEQ ID NO: 30888 - DNA, 326 bp, Gossypium hirsutum
  Clone ID: LIB3149-005-Q1-K2-G9
aatccatcaaaaatgttgtattgatcaaccaacctttctcaagttgcatcagtttatatatcccttctgatgccatcttctttcttccctatatatcaaatttatttttctccacttaatgtgtctcatccccgctattattcaccttcaatattacttaacaaaacttttcctgattctcaaataaccaactctaatattctactttttatttccactttattccttactacatacacttgcatataaattatcaaacgcataaatcatcatttcatcccttatctcttcaacttttctcaactttttccctgaacttttttttt

SEQ ID NO: 30889 - DNA, 388 bp, Gossypium hirsutum
  Clone ID: LIB3149-005-Q1-K2-H1
gtcatttcactgttgatattatttgtgcttgatctgttgacggtgcctaggacttctggcgcttgcagtgcatcgaaaccgagatatgaataagatatctgcttaaccatggctaccaaggctaggactgtgccgacaaggaaagtcatgacgtacaggcctctttgcaggaaacaattgactattgaagttttgccttctgtgaagcccaatgtttctaacgcggaattgaaagacaagctctgtagaatgtatgaggagaaggacccatgttcgatattcgggtgcaagtccaggactcattttggaaagaggaaagctactggatttaggtagatatatgattctgactagaacgcgaagatgtctgagccgaaatacagactga

SEQ ID NO: 30890 - DNA, 324 bp, Gossypium hirsutum
  unsure (1)..(324): unsure at all n locations
  Clone ID: LIB3149-005-Q1-K2-H12
gtcgagccacgcgtacgtccaattggctacagcattaaggggctgcttcttttaagtagngnngctaagggctgtcctggggcgttttgactttgtggggagccatgttctccctatctctgctgtagatgaagcccacgtccacaaagtgaaagagctggaagacctgtagcacctgaagctggacttctggcggggccctgtccgcccgggctcccccatctatattatatntatctcttatccttttttccttatttattaatattttttcaggtaatttcctctttctattcttattttaccttacctataattcatata

SEQ ID NO: 30891 - DNA, 179 bp, Gossypium hirsutum
  Clone ID: LIB3149-005-Q1-K2-H2
gccagatcattgaaaacatcatttgcaccttctatattaacggagccaaggacttctggcgattttaatatattcaaacggagatcatcaaatgacatctgctgacaataccttaccaaggctactattgtgcagacaataaaaaacctgtaatatacgacacttttgaaagaaaacaa

SEQ ID NO: 30892 - DNA, 253 bp, Gossypium hirsutum
  unsure (1)..(253): unsure at all n locations
  Clone ID: LIB3149-006-Q1-K1-B2
gaaatccaaataanctgtgcctttgccttagctttagcctttttttggaacttgaagacctgaaggtgctttgtgatgaatctgaaaaaatgctgttgtcattaatctttttcagtacaaatgcttagaccccttttcccccctcgatggttgaatatggatgcttgtttagaaaaccctgtattcatccacctattgatgaaaatgacgtggaacatgcttatcgtgattcatgatgctgttcacctttttt

SEQ ID NO: 30893 - DNA, 338 bp, Gossypium hirsutum
  unsure (1)..(338): unsure at all n locations
  Clone ID: LIB3149-006-Q1-K1-B8
ccggatcggaaaaacggggcgacccacgcgtacgaaaggcacgcgaggacagcanacagtacatttccagaactcaaccaggacaaaaccggggaggacatgagcgtgggggaggcagcgccaggcgatgttaacgaaggatcttttgctgtctctgcagcgaatggaaaagaaacacagaggtttgttattgaattggaccatttaacaaaccctgaattcctaagcctactcgatgaagctcgggaaggatatggatcctattaaacggggggactttctcttcctagacaggctcatgaattataggagattcttgaacacaagaaataaaacaa

SEQ ID NO: 30894 - DNA, 129 bp, Gossypium hirsutum
  Clone ID: LIB3149-006-Q1-K1-E12
aaacatataagctatgcagagcagaatgaattgcttaatttcgtgtttgcttttcttacctgagggtgatttatgaagttgactaaagaacttgtctcattccttccctcgcttgtttgtcataacatg

SEQ ID NO: 30895 - DNA, 308 bp, Gossypium hirsutum
  Clone ID: LIB3149-006-Q1-K1-F6
aaaacttcttttcttgcattaagttttacctgatcatcgtgtggaaggaagtatggctgggtagtaaactagtgcgtgatcccatctacttatatatttactatactttctagcagtcctcatacatctgttatcaatacgatcatcaacctagagtcagaacctatacgatccggtacgctgggagaagcctaaccacgttaacatcactgattagaagccgagctagttgatccactatgctgggaaaagactagacacgttgagataatctgcataagctcccttcttggatttgctaccccaag

SEQ ID NO: 30896 - DNA, 345 bp, Gossypium hirsutum
  Clone ID: LIB3149-006-Q1-K1-F8
tcttcgtattgggaattcttggtacaatcttcaaatgtcgattccactggaccaaactaatcttactcttggagcagtaacggagacaagtgctacagcaaattggactatcaatgcgtcaaatataagaacagttaaggtcagtaatatttctctagctgcttctgagagggatatcaaagaattcttttctttctctggtgatattcaatatgttgaaatgcgaagggagactgaaaatgctcaagttgcttatgttaccttcaaggatacacaaggagcagatacagcaatactattgactggagccaaaatagttgatctttctgtcaatatcacacctgg

SEQ ID NO: 30897 - DNA, 298 bp, Gossypium hirsutum
  Clone ID: LIB3149-006-Q1-K1-G12
atgtgtggattatttggtggaggtaatataatcttaggaagggtgtctgtgtttgtaacgaggctgttggtgctaccacaccctttttactgccgtatttgcttacttcatgactttcaagagagaagcttgggtgacttatgctgctcttgtgactgaagttgccggggttgtcattgctagtgggggtgaaccagagtattactggggtggattcaatatgtgcttaagtgcaactgatggaagggcctttaaatatgttctttaggggatttctggtttgtgttgaaggagaaaa

SEQ ID NO: 30898 - DNA, 363 bp, Gossypium hirsutum
  unsure (1)..(363): unsure at all n locations
  Clone ID: LIB3149-006-Q1-K1-G8
ccgggccgacggagacctgggcganctgctgaatgcgcgccatcggctggctgtcgctgctcgcgaccagcgcaccctcgggcacgagggcctggtcgatgcggcccgtgatcggcgcttcgacggtcgcgaacttcaggtcgagcttgcgtcgtgcgagcgtcgcgcgggcctgcgcgacatcggcggcagcctggtcgcgttgcgacaccgagtcgtcgtagacctgccggctgatcgcgtcggcttcgaccagcggcttgagccgcgtggtctgcaccctggcccgttcgagcgcggcttgcgcgcgttgcaacgccggcgcggccgtgtccatgtcggccttgaacggcgccgggttga

SEQ ID NO: 30899 - DNA, 195 bp, Gossypium hirsutum
  unsure (1)..(195): unsure at all n locations
  Clone ID: LIB3149-006-Q1-K1-H1
cgcgacggnngggacggcggcggacgagagcgggnnagcgaacgagggcagcaaagaaaaccagagcgcgangacnngccnaagcnccgcgcaaggaaaagcagacgcgccggcgaaggagnngcgcgaaacagnggcggggaggaaagagacaaaacccaaaagggggggggagatnncgcaacaaacacaaac

SEQ ID NO: 30900 - DNA, 287 bp, Gossypium hirsutum
  Clone ID: LIB3149-007-Q1-K1-A1
ccttcccctctaaaaggaagtccactcttccgaggcacctctactacaaacaaaacaaaacctcaaaatttgtcttaaagcttttccaataccttgttcccctcctaatcttggaattggccttcggggtcccttcctataccaaaccaccacttttattttaaccattaaaattccccaaaaaaaaatttgaccatttttaccaatatgataatcctaattaaaatttgtttggaattttcacatactgcaggggggtaaatggttggatatttttatttaaaaca

SEQ ID NO: 30901 - DNA, 222 bp, Gossypium hirsutum
  unsure (1)..(222): unsure at all n locations
  Clone ID: LIB3149-007-Q1-K1-B2
gaaagaaattgatgacagcgtggacgncggaagggaaaaaagggcgacgagcgccggaaagacgcgggaggacgggaagaggaccaagctacgacgcgagcagcgagggggggtcaacaaggggagcgaagcaaacacagggcgcggtacaacgcgggactggaaaaccctgcggacccaaataagcgcgtggagcacaaccacttaagcagcaggggaaaa

SEQ ID NO: 30902 - DNA, 432 bp, Gossypium hirsutum
  Clone ID: LIB3149-007-Q1-K1-B3
ggtttagatgatagttcgtttgagacatgttttattgatgaggctggaaccgtacaaaatgcgggattctaagtatgggtacatgctctatacatattgaactgtgattcatccaacccttttttcttcacacagatatgttttctgtatcttcaagattgatttcttgtggcaggatgagaaactcataatcttaatcggactagtcttttgaagggttcttaacagaatttgggttgtgtgccattaaccattcataacacagtttagactatttgaataatatgagttgtgaaccaggaacagatgctgatttgcggatcaaaacatattcacttccttctatttttggtttggggtttggaaaccctttctaataaaatcttgctgcacgactaaataaattaataattcagaaaagaagcaaaagtt

SEQ ID NO: 30903 - DNA, 198 bp, Gossypium hirsutum
  Clone ID: LIB3149-007-Q1-K1-B6
gcgaaaacagaccagcaaagggaacgacggttaggtttatctaggatcactggacaaattccaaaataatgggggggattgattgtaggggcgtggccacaacaaaggacatggttggactatttactagattcctacaagatatatttacccgagtaggcaaatagttccaagaaattattcagcatgtaattataa

SEQ ID NO: 30904 - DNA, 233 bp, Gossypium hirsutum
  Clone ID: LIB3149-007-Q1-K1-C3
tcggttcttagactagtacggaagcaaagttagtttaggagaaacaatgagtaggagttaggggatagatgtgaagttgatgaatgaggctgtttttaaaattagtaactgtggaggataagagtggagagctttacagaggaagcatggttaagtgcgaggataactggaattgatagctcgagataattaacttcactggtaaagatgggaaggtttcatagattgagcat

SEQ ID NO: 30905 - DNA, 406 bp, Gossypium hirsutum
  Clone ID: LIB3149-007-Q1-K1-E1
tcgtatgccaaagataatgttcctgagaatgtatagaatgttggctctgtgaagcagtctggggaggaagatgccatggttgctggcaaggagaatgcttgcaatgaagctgaggagaaagagccagaatacaaggagatgactttggaagaatatgataagattgttgaggagaagaggaaagctttgcttgcccttaagactgaagaaagaaaagttgataccaaagagtttgagtccatgcaacaacttttaagtaagaagaacaactgatgacatttttaatcaaactgggtttctgaaaagggacatagcgcatggatgcctgattaaagaataaaggagtcaaaaaagttctgttagccatcaattgagttttcttgaacccatcttgaaggggaaaagg

SEQ ID NO: 30906 - DNA, 428 bp, Gossypium hirsutum
  Clone ID: LIB3149-007-Q1-K1-E11
ccgggccgacccacgcgaccggaaagagatgaggttgctaactcacatcatgtatgaccgccaatacactcataggcggcgtaacgcaggtggctttctcctactcaagcatttgaaggtggacgaaagtgagtggagtaagcaatgtcgaaatcaaccacgatttcctcaagaatatatctcccaagatcgattggaaagcgtaatccgatgctgccagaactatgggctacgacgagctttctgagcaggcacctgatccgtcggtgctagagtccgacctggacttcttgacgatatttcaccatgccctcttggagcttcatcttgaggaaggagctcttgtttgtcccgagactggcaggaagtatcccgttaataagggaatcccccaatatgcttcttgcatgaagaatgaggttaaggga

SEQ ID NO: 30907 - DNA, 349 bp, Gossypium hirsutum
  Clone ID: LIB3149-007-Q1-K1-E2
acgcgtacgcagaaaggtagccaactctatcatctagaaatataatttcactaataggtgttcgacttactcaaggaagcatggaacaagttcaattcagaggaacctttctgaatttgaatttgtgtagaagttcatcatttggcaagctatgccttgggagttgaatgcataactgttccagcaactgtatcagtatctgttgctgttgttgatacattataccagctggtataacggaacatatgataccagcttcaaaagttttgtgaggaaagtgaacggtgaagataactcttcttttgttcagaattgctggacaattaatcttcaatccaactggatgcac

SEQ ID NO: 30908 - DNA, 352 bp, Gossypium hirsutum
  unsure (1)..(352): unsure at all n locations
  Clone ID: LIB3149-007-Q1-K1-G10
ccggnccggaanacccgggacgggccacgcgaccgggcagacnaagaacaancgggcgcccagggcagcggacaaaagaaaggcgcggaaaaggggggagctcgacgagaagaaggggacagcaacgcagatcaaaaccacccaagagggcaggacgcaaaacacaagggcccagaacagagccggggggggcaactcgacaactaaaggaagggtcatagatacgggcgacgcccactgacaaggaggaaagcaaagacaaagggcaagcgataggacgccgggggcgagcaacatgaaaattgccaaggcagggggagacagggaaaaagagcggagccccaacaaaaag

SEQ ID NO: 30909 - DNA, 237 bp, Gossypium hirsutum
  Clone ID: LIB3149-007-Q1-K1-G3
atggggtagaataatgtcaggctaagtgacgagtgaaggtcaaggggaagctacccgcaacttaagcacctaaacttgagttccatttataaggacgaaagaccggaagcgtaagctcaggatcgaggcttggttggcttcaggaagaccagcgcgccatcgtacagtttagcgcacgtgagaactatcaccgggtcactaaagataccgtacaagagaggtcgttacgctcacttt

SEQ ID NO: 30910 - DNA, 426 bp, Gossypium hirsutum
  Clone ID: LIB3149-007-Q1-K1-G6
gtccaggctaacaatctgcttgaggatcaaagccagattgaatctggctccttgagcactctcgagtctggtccattagttaccttcgtaggaatatatgacggtcatggtggccctgagacgtcgcgttatatcaatgatcacctcttccagcatctaaagaggtttgccacggagcagcaatccatgtctgttgatgtcataaagaaagcatttcaagcaacagaagagggatttttctctgttgttgcaaaacagtggcctatgaagccccagattgctgctgtgggatcatgctgcctggtgggtgttgtttgtaatgggaccctctacattgctaaccttggtgactctcgtgctgtgctgggaaggcgtgtcaaggcaactggggaggttctagccatccagctgtcttcagaacataat

SEQ ID NO: 30911 - DNA, 173 bp, Gossypium hirsutum
  Clone ID: LIB3149-008-Q1-K1-A1
ttttggcttagatggtgatcttgtgtaagcgcacaattttgcatttaaagcccaaaagatcatgttattgttggccttctagctcggctctgctaaaggaaatttcagatgtgtttgtggcatacacaatgtaataggggtatcatattcaaaaggcatacattttggtttta

SEQ ID NO: 30912 - DNA, 342 bp, Gossypium hirsutum
  Clone ID: LIB3149-008-Q1-K1-A3
tattttagcaagttaacaagggtcgatgatttcttatctttgggactaggcgccagtttatgcattcagccgctgctggtttataatttaaacgccgttgtctgcaacattatttgtttcccattttgctctatagtagacgcagaaggcatccttgtcctttttcctggccaacgtcttttgagtttgacttaagccaaatcattaaaaaaaacttacattattacagcacttgttgagatttgtcgaaaacccaaaataagcatattctaaatgcaccttgactttgccaatgcgttggccatccatttgatttgcttaatacaaaacaaaagctcacat

SEQ ID NO: 30913 - DNA, 422 bp, Gossypium hirsutum
  Clone ID: LIB3149-008-Q1-K1-B1
ggcttttgttcagtcattttgggttatttgttcagtttggcttgtttcgggtttgttgactagtgttgttaaattggatttaagttcgaagatctaattaaatctatggaactgagctctttctgtgcgcaagggctctattgatattacttaaagggaaaatggcagttttaggtccattttttttatgcatatgacggaggcaagtaactaagttcagatatttgataagctttctggattttagggcaaactgaagatgcgacaaggtttcatagttcgaaagaactgtggtttgccttttttttccccaatgattttggtcctgaaatgactattgagttaccgcagcttgtaatatataatatagatgcatacacgtgtgtgtgtgtgtctgtgtgtgaatgccatattcttttcct

SEQ ID NO: 30914 - DNA, 349 bp, Gossypium hirsutum
  Clone ID: LIB3149-008-Q1-K1-B11
agaatggctcccctaagtagaaaaaacggaattttagaagtacaatcggcaaccgcattgggaagccgagacacagcagagagaactttatcttcagctctcaagagcaaagaggaaatggagaaaaaatttgctgacgcgatgaaggagatggaactgctaaaagagaaactagcaggtatagaacttgcacatgaagaagccaacaacttatttaacatagtccactcggacaatgtaagacttgaacacgatgtggctatccttaaggctggtcttgacgaatctcaaaaggagcttcactcaacgagaagaggcctttgatggagagagggccaagagcatttcc

SEQ ID NO: 30915 - DNA, 190 bp, Gossypium hirsutum
  Clone ID: LIB3149-008-Q1-K1-C1
gacccacgcgaccgggaaaacgcgcaaaaagaacgccgcccactcaaaacaaaacagaagagaaactaccaaggggcccaaagccgagaagaagcctgctgagaagaaaccggccgaggagaaaaagactaccgccgctgagaaatcccctgccgagaagaagccgaaggccggtaagaagcttccaaag

SEQ ID NO: 30916 - DNA, 352 bp, Gossypium hirsutum
  unsure (1)..(352): unsure at all n locations
  Clone ID: LIB3149-008-Q1-K1-C11
cccggggcgacccacgcgnccgggggggaggagacgaccgcagcggagaatgtaccgggagcatccaggccaggatttcgggaggggaatgaggccacgagggagggggagttgcagagctagtgggggtacccaacaaagacgaggcattcaaaactcaaacagggaatctactgaatgaaaggacactcaagggtacaaacgtaggcaactacaaaccacgaaccgatatacccgctggcggtgagagatacatgaacaaggaacatgaaccggacaagggcatcacgcactcaaggcccttctcagagaataacaaggcataaggagacaagcttgggggggagggcca

SEQ ID NO: 30917 - DNA, 217 bp, Gossypium hirsutum
  Clone ID: LIB3149-008-Q1-K1-C2
cagcgtcgggattgcctgtataaactcccattaagcagccttacacaccggtctgttgatgagtgcgaccataaggtctcggatattgaaaggagcgacagtttcctgcatctactctgcctgaggaaccagagatagggggaatgtcatggtgggcaaaagtcatatgacagataaattttggagaccttccatgtgaacctatcaaaatctaaac

SEQ ID NO: 30918 - DNA, 213 bp, Gossypium hirsutum
  Clone ID: LIB3149-008-Q1-K1-D1
caaaagagagagaagttgaagtgcaggagtacaactaaggggggatggaagaggattagatttgtatatcaccagggatacttacgtctgcgccggaagcgttggcggctgtagaaacgggaactgtccttgcgccggtgtcagaagcacgaatgatgacgggtccaaatgattggagaccgatgatatgagggagcgggtaaatggcaagtc

SEQ ID NO: 30919 - DNA, 293 bp, Gossypium hirsutum
  Clone ID: LIB3149-008-Q1-K1-D12
ggacatatataggattcagacaggttggatggtcccagatcctcaacttcgtgaagagcgggggaatttccatatcagagaaagtaattccagcgtatcgctccttcatggggaggctcgggagacagctagagagtggaaggcatgctggaaaatacattaaggatacaccagaggatttacaagactatctattggatgtgtttgaaggctcacctcttgggctgtaccatatgagaagaaagagtccataggacgcaaagtcgctcaatgcagggatggccccttcgctc

SEQ ID NO: 30920 - DNA, 376 bp, Gossypium hirsutum
  Clone ID: LIB3149-008-Q1-K1-D2
gatttgattgcaatgacatgccctatgacagatcttccacccagtaaggaaccgttggagtggaacacgagaatgaagatagcatccggttgcatctaaaggttaggagtaccttcatgataaagcaaaccctcctgttatttacagggactttaagttcttcaacatattactggaagaaggatttcacccgaagttatccgattttgggctcgcgaaacttggaccctgtggagataaaacgcatgtttacaccagggttatgggcacatatggttattgtgctcctgagtatgccatgactgggcaattgacggtgaaatctgatgtttatagttttgggttgtctttttagagctaaatactggtaggaaag

SEQ ID NO: 30921 - DNA, 322 bp, Gossypium hirsutum
  Clone ID: LIB3149-008-Q1-K1-D3
cacgggatacaacactaatccttatgccgaattcaatatcctcggagaccctatcgcaggggaggaggtgtttcattcagggataccggttactcttgcatctttagatgcaacaaacaccatccctataaccgaggagtttttcaaggcatttgaacagagccattggacttacgaagcacaatattgctataaatccttgaaaatggctcgggatacttggttagaagaccgattttatacgagctatttcatgtgggattcgttcacatcaaggggtgcagtggcgatcaagcgtaattatgggaaaaacaatggggaa

SEQ ID NO: 30922 - DNA, 197 bp, Gossypium hirsutum
  Clone ID: LIB3149-008-Q1-K1-D7
gtattcaaatgttgtaagtgacatggtttattttatcaatcgagcatgcattaattctggggggggaatctatgttttctatgtactcacgaatgatgcgaattttttaaatgaatccttctctattctgcactgatcatatatgctttgaaggaagaaaattgtctaaatttggaagaatctgggaaacgagaatt

SEQ ID NO: 30923 - DNA, 317 bp, Gossypium hirsutum
  Clone ID: LIB3149-008-Q1-K1-E10
gaaagaagcaggagaggaccggggagctgtaacgaaagagcagcctacgccagaggcgcgggagagctagagcggaaggaggctgccgatgacagccccgatgagaaaaccaagtgccatacatcaggaaatactgagcttaagggagagaagattattgataaagaggagtgcgaaccaagggcaaacgtctcagcgtatggcgacgacgccaatctaaaaggagacaaatcatcaacttgcgcagaagatttagaaccgagacctaacggaagggcttacgggggcgaagaagctggtcctaaaggacagaaaga

SEQ ID NO: 30924 - DNA, 352 bp, Gossypium hirsutum
  Clone ID: LIB3149-008-Q1-K1-E4
gacaggggcggaatttaagaatacgggatcggtggaaactacgtcggcagtgaacacgaatcattacgccgatctatcagacgagaacgagaagctgaagaaggataatgagatgttgagctcggagctggcgcaagccaagaagcaatgcgacgaactggtcgcgtttttaaccgagtgcgtgaaggtggggcccgatcaaatagatcgcatcatgcggcaaggaaacggtggttccacccttgaaggcgacgatcttggccgtttctacggcgtcgatgacaactaccatgatgaaaaagggggcggcgaaaatggaaaccgaaggttgaaactgtttggggggtgggtg

SEQ ID NO: 30925 - DNA, 351 bp, Gossypium hirsutum
  Clone ID: LIB3149-008-Q1-K1-E9
ggtgcttagagttgtgcactataccgaatacctatccaaaaaaaagggtttcctttctcttgtttggggatatacaactttacttgttgattatggttgtaggagatatattaggattaaaaaacaatgaacataggaggagaaaggagtgaagatacaaaattaagagaagagctgatcctcattcccctctacttcattagttactatatataatatcatagtgggtagaatagaagacatgagaaagagcgagaattgagaaaataaactaatgggtttttaatagaatggaaaaggagagtattttatttgtgctttatagcaccaaatgattagtttttgcctttt

SEQ ID NO: 30926 - DNA, 125 bp, Gossypium hirsutum
  Clone ID: LIB3149-008-Q1-K1-F1
cccgccaaagtccatgccagtaggtgaaaactctctgcaaatgtaataactccattcttgtgtacactacacatagtaaaagaagcaaattgccattagtgatcaaaattaacggggggggtgtt

SEQ ID NO: 30927 - DNA, 324 bp, Gossypium hirsutum
  unsure (1)..(324): unsure at all n locations
  Clone ID: LIB3149-008-Q1-K1-F12
ccgggcggaaacccgggacgcccacgcgacgaaaaaagacaggganancaaaaagggggcagaagccgaggagaagacagcaggaggggggatgcagacagaggcaagcaaagaaaaaccttccatcggcacggggatagcagacggaccaggaacataggatgaggaaggaaaaaggaagccacaaactgccgcaccagggaagacagagacataaaccaaggatgcagggaatgacaacaaagggaaggagggaacaagtgaaaatgctcatagagcaacggacggaaaggaagggcaaccctagaagaccgagaaaacaaa

SEQ ID NO: 30928 - DNA, 275 bp, Gossypium hirsutum
  Clone ID: LIB3149-008-Q1-K1-F8
gcaaagacatgggtccacagagacgaaatgttatgtttgactaggactggcaccaacaggttatcactgacgaaaggactcagtgacccgcaatcactaactaatactaatctaatacaactaatactaatgtggtcctaagaaaaaaattgtcgaaaactgtaatactaacttagaatgaaggacacatgaatataggctgatataataaaaagaacagtacatgctgtatacttgccccggaagcactgctacagaatgctgtacgcaattga

SEQ ID NO: 30929 - DNA, 412 bp, Gossypium hirsutum
  unsure (1)..(412): unsure at all n locations
  Clone ID: LIB3149-008-Q1-K1-H5
gaccgacgcgnccgctagcgcagaggatgaggtaatcgccgcatgctttcatcctttccctggaggaggtcttgtgggtggaaccaaggaagggagactgagagtgcttcattacgatggtgcttgagacaccaatcacaacacatcaaattacttctctgtagaaaacacggccagagttgaatagcaagagtaaggtttaagttattcttccttcttgtggaatgccaaatccgatgaccatttttcagaagaaaacatggctgtcatagaatagcaaggtcgtccttattgtggtattcaggatctgattaaccattttggaattaaaatgccactatgcactgatattggtggattggaacaacagagtacccattttattcagatgctggggggggttttaactatt

SEQ ID NO: 30930 - DNA, 200 bp, Gossypium hirsutum
  Clone ID: LIB3149-008-Q1-K1-H7
aaaaggcagctaatcggagctctaacattgttggggggaactggaaacaccgagcaactaagctggaaacaggctgttattgcagcctcttctggaatggtcagccaacaaaatattttgcgtgtgctctttgatgtcaggtgaagcaatcagggtttggatcgctcataattcgatacggcattttcatttgattaaat

SEQ ID NO: 30931 - DNA, 278 bp, Gossypium hirsutum
  Clone ID: LIB3149-013-Q1-K1-A11
accgtactctataacacagaatatattcatttgtttatgaaaatatctatggcgccttggaaaggattcaacactagacagtaacaaatgcactatctgttttacgtgaagcaatacatgaagtaactgcggatctaacgataaaagcaagacatggtgagcaatctgctgcatttgtagcagatgcctatgattaatatctcatctaaggctgtaattgcatgcttataatttcatacatattatgcgactgattgatgatcattggactttttgtt

SEQ ID NO: 30932 - DNA, 261 bp, Gossypium hirsutum
  Clone ID: LIB3149-013-Q1-K1-C12
gatttagataacgaggactcgatcctgaatgtaaaaactgacgctcgcatgcgtccggagtcttatgtttactacatgataatccatattaactataatgacaagcttgctgacacgcttgtattcgacgagaaggtgaatgtcgaaacgtacatgaattaagacctatcgttgctatatgacgcatcagtatgcccaaatggagcattttgcggacgatctcatggactttgttgctgactgcatccctattatcacagc

SEQ ID NO: 30933 - DNA, 249 bp, Gossypium hirsutum
  Clone ID: LIB3149-013-Q1-K1-D4
gttgcactggaactgggcatttgatgtgctgtcgctacatttagtgaagatgtaccactgcttgcacccttaacatcatatgatgcatattgtgaacgccaaggagacctcattgcgatggctattgtcattggacacaccaatcataacagagagtgtattgatcgtacattcaagcgaccatgatgcattatcattattggtacacatgaacacatcgctgccaagatgggtacaatggctgaacat

SEQ ID NO: 30934 - DNA, 262 bp, Gossypium hirsutum
  Clone ID: LIB3493-042-P1-M1-H11
cggacgcgtgggctggggtacaataaatgaaccattgcatattgctgtgggagggtatgatacaggaagatctgcccctgggagaaatcacaattcatcaattgaaacatatttggctgcacaccatatgattttggcacatgctgctgctgtttccatatatcatagcaagtacaaggataagcaagggggacagatagggttagtggtggactgtgaatgggccgaagctaattcagataaaatttaatattcaactttc

SEQ ID NO: 30935 - DNA, 330 bp, Gossypium hirsutum
  unsure (1)..(330): unsure at all n locations
  Clone ID: LIB3493-042-P1-M1-H2
tctcaatccccagaaaagatcatgaataaaacatcacaaganatcccctctactattttgaggacatcaactcggagaaaacctaccaaggaagagcatcaaactgcacaatcgactgtcccaacccgaaaaacgacaagaagaacagctgaattggatgaagaaaacaagaacctgaatgtgactgagactgagactcctgctgtgactactaacaccagcaagagggctaagaaaactgaacctgaagttaaggatcaataggaagagtgatttggttgagacaccagctttgcagagtggcaggagaaagtctggagtgggatctac

SEQ ID NO: 30936 - DNA, 235 bp, Gossypium hirsutum
  Clone ID: LIB3493-042-P1-M1-H3
tcgacccatgcctaccgcggttcattcgtgccatttactgatactaatgatgttcagagcgggccaatcactgggaggcatacttatgtagatgagtgattgaccaactgttactcaactgtgatcgaggaataccagatctcatttgaaaaggctaaaaggaagctcagaggtttcattggttagaagaactgattttcacttatgcttctgattagtgtggcacttaatctta

SEQ ID NO: 30937 - DNA, 355 bp, Gossypium hirsutum
  Clone ID: LIB3493-042-P1-M1-H7
tcgctaaagaatcctcttcaccatccccttatccatcgccaagtgtttcttcaccggcaccttctttaaattcaccaccaacaccaacttcaatttctttaacaaaggaatgggggggacttttcttttggttcaagggtgggaccatgcggtggccttttggaattttttgataatggcctaaaatccggcggtggggaaaatgaaaaggctgttggctgtcccggaactgaatactgtggccctagggattaccccattggggaggcccaagaaggactttgccttaagaacgctggagactatttgggaggagcagctaggaagcgaaaggtggttaaacacaaattaccat

SEQ ID NO: 30938 - DNA, 300 bp, Gossypium hirsutum
  Clone ID: LIB3493-042-P1-M1-H8
ctctcattctttacccggaacacaaataaacactaagaacaagacaatggcagcaaaagctgagaagaagccagctgagaagaagccagctgtggagaagaagacggtagctgagaaagcccccgccgagaagaagccaaaggcaggcaaaaaggtttccaaggaagggggagctggggccggagacaagaagaagaagaggggccagaaagaggctgggaacctcaagaactacattttcaagggcttggagcaaggtcaccctggtatcgggattttaaggcaaggtttggggattat

SEQ ID NO: 30939 - DNA, 132 bp, Gossypium hirsutum
  Clone ID: LIB3493-042-P1-M1-G9
atgaaatctctctgagagaggagttgcttaactgaattggttttggggggggggagcatggttttgatggaagattcacattttaatttcaaccgatttcctttgggtctaacttttcactctaattttgct

SEQ ID NO: 30940 - DNA, 254 bp, Gossypium hirsutum
  Clone ID: LIB3493-042-P1-M1-H1
ataaccagcacctcaaagggctgtagaaatctgttgatatgtctgtaaatagtctcttatcttacatgatagtgtattcctattgccagttcagatgaatattcatggaaaagatctagagaattgcttctggatgttgctaggcgaggagaggaaagtggttatggagtgccttgcctactcattgcagcaaaggatgacttggacccctttccgatgtctctgcaaaactctgctagagttactcagcagtt

SEQ ID NO: 30941 - DNA, 232 bp, Gossypium hirsutum
  Clone ID: LIB3493-042-P1-M1-G2
cttttcaaaaaaataaaaaacctcttgtaccgctcagctatcttagtttcttatcatggatttttctaaaaataaaaaaaaacaatcaaatgacatgaaccctaaaccagcagtatatgggtccgtaaaggatcacctgctagaaaaaccccaagaaaaaaaggtggaatatttgattttatggcgccttttaactcgtgaacatacggctgattctgattactcatgcatc

SEQ ID NO: 30942 - DNA, 152 bp, Gossypium hirsutum
  Clone ID: LIB3493-042-P1-M1-F9
tcgcccacgcgttcggcataatcagttaatcttcttttcgggccctcctaaagatgtgaaaaattgacaattacaatggttcatggcaccggcttaagcgtgctttcacaccaaggaaaggaacggggcttggcattggcaagggcttttca

SEQ ID NO: 30943 - DNA, 246 bp, Gossypium hirsutum
  Clone ID: LIB3493-042-P1-M1-F1
ccatttgattatgtgaaaacacaaatccagaaaatgcaacccgatgccgaggggaaatatccatacaacggttctctagactgcgctatgaaaaccctcaagtgcggcggaccgttgaaattttacaccggattccctgtatattgtgttagaattgctcctcacgtcatgatgactttgatttttctcaaccagattcagaaagcacagaaaaatatgggggtgtggatatctcaacaatggggg

SEQ ID NO: 30944 - DNA, 228 bp, Gossypium hirsutum
  unsure (1)..(228): unsure at all n locations
  Clone ID: LIB3493-042-P1-M1-F5
acgccacccatgaaggacacttangctgtcacgaatagtggaatccctattggcgagaggcacttcatccagacgagtctagacacctacttcaatgccccattgagatctccaagcatggatctgccactctattgcctggcgccgagtacttacataacacaaaggctgctattcttgcatccaaatctgattatctggcacctatcctcactacttaggggatct

SEQ ID NO: 30945 - DNA, 217 bp, Gossypium hirsutum
  Clone ID: LIB3493-042-P1-M1-E8
aaaatagagagatggcgtctgtaataaaatctgcaatcttaattctggcggtggttttatctgtacccttcaattccggtgttaagtttcttcaagaacaacccaatgatgaccccaaaaacattgaccctatttcttccaatgatgcactcaaaccttaccaggttgattgaccccggggttgcatttaacaaaaataattttttccaaaaaggtg

SEQ ID NO: 30946 - DNA, 274 bp, Gossypium hirsutum
  Clone ID: LIB3493-042-P1-M1-E1
acgaaactcaaaatcaagcttcggcgataaccgtaacttaaaaccctaaatggatcttctcaaagaagagcttctcaagaagcggcaaagcttagctcaggaaaccggcggcaggcgcgtatttaaacgctccgagattgagcagaagcaaatccagaagcttcgcgagcaagaaaaacgcgaactcgaagctaaatctcgccgtcaatcgaacgcctcttcctccgctgcgaacgacgcttccgctaaatccaatccttccgcttccagtact

SEQ ID NO: 30947 - DNA, 221 bp, Gossypium hirsutum
  Clone ID: LIB3493-042-P1-M1-D12
gttttcttccttttttcttttttttttattgtctggaaaatcttcataaccattctatgggtatttataagattttgatattggtaagtaaatgacgcctattttataaggacttggtcttatcctgatctaattgattaaagggaagaatctcatgtgccattttggggttctggtttcaaaatgaaggaaaattggttttcagtacctctggctggtag

SEQ ID NO: 30948 - DNA, 410 bp, Gossypium hirsutum
  Clone ID: LIB3493-042-P1-M1-D11
gttactgttatcgatttcttgaacaacatgggacattgcaacttcgagttcgttcccaaatggttctacaccatcttccctcctctcaaatatatcatttacaccccttcgtttcactctctgcatcacacccagtttcggacaaattacactcttttctgtccactctatgattatgtctacggcacggtggacaaatcaacagatagtgtgtatgaaaacgcactaaaaagagaggcagagtcaccggacgtggttcatctctctcatttaaccacacccgactccatttaccatctaccccttgggttcccttcgtttgcctccaagccccaagttttcaaatgggtccttctttttatgtggcccgtcacgtgttggtctatgctcttaacttgttttgtagccat

SEQ ID NO: 30949 - DNA, 286 bp, Gossypium hirsutum
  Clone ID: LIB3493-042-P1-M1-B9
gtgcgacccaatattcactctttaagacatacatgctgtcatacgcgttggcgcggctacacgcatcctatctggtcacgtacttgttaggtagaccactgtccaaggacctaatttgacattcaatccaaatttaggggttgacatgtggactgcaaaccacgctggtgtagtaagttgagatctaccctatctacttctcaaacaagggtcagcaaatccacttggtctctaaacccattgctattattagtcacccaatttccaacaccaacgattctcattc

SEQ ID NO: 30950 - DNA, 322 bp, Gossypium hirsutum
  Clone ID: LIB3493-042-P1-M1-B2
tgcaatagcatttggaactcttgcggccgatgctgcttctacaagtaatggcgtttccgattgataatgatgattctgatttggatcgtccaactgaaggttttgcttccatccttgaggcaatcgaggacattcgccagggcaagatggtattggttgtagatgatgaagacagagagaatgaaggagatcttataatggcagctgagttggcgacaccggaagcaatggcctttattgtgaagcatggaactgggatcgtttgtgtgagcattctagaggaagatctggagaggttgcattttcctttgatggccaacca

SEQ ID NO: 30951 - DNA, 330 bp, Gossypium hirsutum
  Clone ID: LIB3493-042-P1-M1-A9
agagtgtagcaattggtatagctgcagccaaagcttctgttgagggggacaggaatgtacctttttaatttaatttgccaacaattacaagggatgcccggattggttatttaaatggccaacttttggaacattaatctaaactgtaatgttccaaaaaaggggattgggtttttgttaacaccccaaggtagagctatatttgccttggctcttttattggtatacaaaaaaaaaccttggaaatgggaattgaggttttattcaccatattttgcgaaaaaattagaatgcagccctatttttttgtgggatgaatatattttggtt

SEQ ID NO: 30952 - DNA, 446 bp, Gossypium hirsutum
  unsure (1)..(446): unsure at all n locations
  Clone ID: LIB3493-042-P1-M1-B1
cccacgcgtccgctttgaatccacacccacgtctctgccatggacaccaaaaacaaggatgttattcgattagagcgtgaatccgtcatccccatcctaaagcccaagctcatcatgactttagccaacctaattgaacatagttctgatcgggccgagtttttaaagttctgcaagagagttgagtacacgatacgagcttggtatcttctccaatttgaggatttaatgcaattatactccctcttcgaccctgtacatggggctcagaaattgcagcagcaaaatttatcttctgaagaagtagatgtacttgaacagaatttcttgacatatttatttcaggtgatggagaagagntaatttaagattgctacagatgaggagaatgatgtcgcacttgcagggcaatatcttcttaaccttcccataatagttgatgaatc

SEQ ID NO: 30953 - DNA, 313 bp, Gossypium hirsutum
  Clone ID: LIB3493-042-P1-M1-A10
tcgcacgtttcattgactaatttggctgataaaatcattcatctgagtggtttaaaattttgatttgggcttaatcaatctctggtttttctcgggttcagctggcatggctaccgaccctttaccccaaattccaatgagggcccggtcaaagagcttaaaccattcgatacaccccagggatgtgggaaccccacctgtttgggcttccacacccatccttttccggggaattaagccttttcaggaatggataccctgggtgggttccggctttggtggtggttacaccggtatggttattattaccctg

SEQ ID NO: 30954 - DNA, 300 bp, Gossypium hirsutum
  Clone ID: LIB3493-042-P1-M1-A11
gcggtagcagaggttgaaaaccatctccattttcatcgcctgtaactagtttccttaatatgcctagaaattacaagaattagaatagcttcttgctattggaattggcatttgctgctataggattattaatcgcttgagatagcaagcctattcatttgatgtgaaggattaaaaggaaactgtgagttacgagtattaatgcggattttacttctttcctattattctcactctcaatattggtgatgcctgctggccgatgtatacgaacaaaaacggaaatacaattggattctt

SEQ ID NO: 30955 - DNA, 416 bp, Gossypium hirsutum
  Clone ID: LIB3493-026-P1-M1-H9
gacggagagcatgtttttggtgttgcccacatttttgcatcttttaatgacactttcattgtaagttacatggtctttgaattcttttacttggtaacacatatttcttgctatttcgatatgatttttttaagctgtgaattttaatcggttttatttttttcttttggtattttgacaatgatagcatgtgactgatttgtctggaagagagactatggttcgtattacaggtacaatattgggattgcattaacatatcatttagctgccaatttttatattctagtggaaagggattgtttgaaatgtctataaataataacaaaaattgaacgttggacttgtgttactctaacttgggtttgaatttgaatagagcatgttttgacacaagtatatttgtatataaaagt

SEQ ID NO: 30956 - DNA, 396 bp, Gossypium hirsutum
  Clone ID: LIB3493-026-P1-M1-H3
caaatggtggaaaaaaaatacataagcaaactaaaaggtgttcaacttctctgcagggtcaggtattgtaattttgcattgttttggggttggggggcgggttgagaatgtcaaaataatattgaaaacttgttgcgattaagcggatgcgactggatcaaagtttcttacatgatgaaactagatttatttgttcgccggcaatcgtaaatctgtctctgcaaattggacattatagctattcttttgcaaataaacacttgtgaaagactatccatgtgttgaaatatgcttcatattaagaggtcaagaataaaactaaggatttaggcgtaagggttaatgttattattctatttgtcatcattattatgcacaattaggattggttgcttt

SEQ ID NO: 30957 - DNA, 437 bp, Gossypium hirsutum
  unsure (1)..(437): unsure at all n locations
  Clone ID: LIB3493-026-P1-M1-H5
actcgtccacacatgcacttgagcgaaaatgaaggcatcgaaggcaacaccttcgtggtcaccggtggtctgactattctcagctctcccctttgcttggagctaattcgcagaggtgctcgccaagatcgctcctttgaccttcgtcattattacccttggtccctccaactgaccaaccacggcgtccgctgcctccaaggcgatcttacctcgaagcaaccatttggcatatcctattgtggcgccatttgcgtgattgacctggctttctacggcatgttagggaaagaaatgcttcagttctctcgtgttgaccaggtgaatatcaatggaacctgccatgtcttggaggcttgccttgaatttgggatcactaggcttggttatgnaagcacatataatgttgtgtttggtggaaaggagattgtaatggc

SEQ ID NO: 30958 - DNA, 317 bp, Gossypium hirsutum
  Clone ID: LIB3493-026-P1-M1-H6
tggacgcttggaccaggaactaccactaatcatacacatttcacagccacatatatgaccagactcgtgtacgcggcttgacattttaggaaaggaccattgaagaactcgagtggcaaatgcattacttctctataacaatagttattaccagagcaactggtttcgcaacaggatcatacagtggttggtataagattctaacatttaccatgacagatgcctgggatgttgattgcgcgaatctcaagtctgctttctttctagatcgaaaacttatacaagcttcaacttatgtaaccgagttagaccttata

SEQ ID NO: 30959 - DNA, 268 bp, Gossypium hirsutum
  Clone ID: LIB3493-026-P1-M1-E5
caccttcgaaaagattaatctatacctaatttgaagatggaagtcggagcttcttgaagtaatttcaagctctacgatcaattctaattgctgaaatatgaagataggttagtgttcaaatccctcgaatctcccgatcaaggcttttcgatttaccgtcgtcaaggaaacatcgaacccctatctgatgaatcttcttttggaaaaccatccaaaacctttaccatttatggcgttgctggaacaattagattgcttgcaggaacat
